United States Patent Application Publication US 2015/0315605 A1 - sequence listing, part 6

SEQ ID NO: 7934 - DNA, 3964 bp, Zea Mays
cccacaacccccaagcaaccctagctctccctccccctccgcgtcctacagccatcgtcgctctgccttccgcccccgccgtcgccgcagacgcagccggccacccaccactcgcgcctcccccaccgcgtcgcgtgtgggccacagctacagctgcctcctcgagcaacccacactcctttcttcccctgcctgtcgtctctcttccaccttccaccacaagcgccgtcgcagccggtgcctgctccttcccgatccccgaggcaaagctgcgactccgcaactgccgccatggcgttcgagaagatcaaggtctccaacccaatcatcgagatggacggcgatgagatgaccagggtattctggcagtctatcaaggacaagcttatcttcccatttctggacctggacatcaagtactatgatttggggatactgcacggtgaagcaactgatgacaaggtcacagtggaggctgcagaggctactctcaagtacaatgtggctattaagtgtgcgaccattactccaggtgaaactagaagaacgtatgaagctagacttgttgcaatttatagacatgtaagagaggatggagttgagggacaacctatttctgtttcaacagaacaatttgcaccttgttgataacaataattgatctgggcctcttccaccagaattagtagatacacgtagtcttcttgctatcttgacttcaggctgataataacaacttcagtggaagctccatcctgctgaatacaacaacatacaaacacttctaaagctgtgagtgtaacaaccttttcgctcatgttctctcttttcagaatttgaggtagatgagggcaaaagaatttaacagctattacaacttctgttattgagaacaatcattaaaagcatgcttattaaaacgacgttaaaacgacgtttaaacgtcgtttaaactataaaacgctgacaggaagtgaaacgacaaaacgttttacgattcgtcgtaaaacgttgtttaacgtcgtttaaacgtcgcgttttgacgtttaaacgcggtatagagtgaaacgccgcgtttaatgcgtctgctgctagtaattggcccagcccaattagaaactcccgcccagcccacccagaccgccgctacaagccgcactttcaccagcccaattagtaactcgcgttctcaccagccgtcgcactccagggcgcgctccagcctccaggccgccgctgctccaaccctcctgcgccgcccgtccggcgccgccaggcccgcctctgcgtgccgctgctccaggccgccgccgctccagtcagctgctctccaggccgtcctccctccaggccgctgctctccaggccgctccaggccgctgctctcaaggccgtcctccagccccgcctcagagcctctgcgtgccaccgctccaggccgccgcgctccaggccgtcctccctcctgcgccgcctgtccggctgccagcccctccagccccgcctctgctgtcccactgcggcaggactacagagtacagagactgactgtcccactgtttggtatttgacttgatataattgcctgaaattatgatatattgaaatttccctatgttgtttaaaactacatttaaactttgtttaaaccgtttaaaagttaaaacttacccatgagcgtttcaacgtttcgtcgttttaataaccttgattaaaagtgtaggcattggtgagtacaaacctaaggttaaaagaagaatattttgaataaaagtgtttgtatttgccaaatggcttatgcttttagttgagataggtagtatatcaaagttcagggcatcacatagataagaacgaatttgctccgtgtgcaacaaaaagctcgtttttacactgactcctcttctattgcagcctatagctgccaaatagttggatgcaactggtccatttatctggaaatatttatatttaaaaaaatatcgaaaaacattacatttaaaattttataggtagtcttctttcattctgtggagatcattttcactgataactgaaacaacaattacttcattatattcattcaaggacaagcaccacacaatcaacatcatgtttaaactcaaatcaagacgtgttgagtaaaccatccttttacatgttaccaggagtctaagaaactatagtttgggttgttccagatttgagtgtcatacctaaatttgggtacttgtaagtccagattaaatgcaatgtttcctttctcggtttttggacatcttacaatcataaattatccttttacattaacttgcagcctttcaaaaacatatgttttcccaatattatttattaaatgcttttagtattgtatcttcattttagagtgagaaatccgctactcaattcacatcaggatattagttgtcaaatattttagtactaatattgagggggatggcggagggcattgcgctgcggggttacatcgccgtcaccttcgacatgcgcgacataggtgggtccacagggcgggtgtcgctcacgtgctccatcaagaacatcgagtgaggtggtgtgctgctgctctaaagaagggaggagaggaagtagcgacaatgtcgccaagaccacctggcgcgatgtctcctaccagatcaccaagatcaacatgtacaaggatggtcggcatgtacaagatatgcttaagcatcagaggctccataaagcagctctgctagaattaactgattcactgtcaaggtcaaacatcactatgatattgctgagatggtccaatcagtgacaatgctggtggtattgttgagatggcaggaatgagccacaaaatctgagagaacttatgctcttggtgctgctgacaacacaactgttgctattagaaagggatttgccattggttcaggtgctcttgtgtccctggtgctgtttggtgccttcgttagcagagctggagtgaaggttgtcgatgttctctcctgaaggttttcattggtttgattgttggagacatgtttttgtactggttctctgtcatgaccatgaagagtgttggaagtgtcgccctaaagatggtggaggaggttcgcaggcagttcaacaccattcttgggttgatggagtgaacaagcaagcctgactatgcaacctatgtgaagatttgcactgatgcttcttccatcaaggagatgattccttggggtgctctggtcatgctgactccctcattgatggaacctctttggcatcgagactctctctggcgtttttgctggtgccctggtttttggagtgcaggtgcgcactttgccttctactctctctgtgcacttcaatgtgtttgcttgttctagggtttatggagatttctgctttggacaaattgccatctctacttccaacactgtgctgcataggataacgcaagaagtatattaagaacaaggccatctcagataaaagtagatgtagctttcataggacttaattccagcaaagcaaaggttggcagtgcaccaaacaatagcgtttatacttcattcttatggattggagaagcctatgcaacatgtcaagccagatgacatgcagatgagaaggttctgcatcaatagaaaccagagaaaaatctgtatgtgtctgtatgacatctcagataaagcctgatgatcagcatgatgaaaggtggggagttctatagctggtttaagctggagctagcttctgaagtccggtcaggtgtctgtatgtgttgcccctttttatttcatttcatgagaaaagattgttatttgttccttgaactgtacttggtcgtacttgtgaataaatattttagcatggttgttcgacttctcataatgtttattcgacatcagttcatgatattagtgttacgtgatattttatcatatgaattttgaatatcatagtgatgtttatc

SEQ ID NO: 7935 - DNA, 1068 bp, Zea Mays
atcggacggctgcggcctcaattgctgatcggatcgcggccgctggaaatctgcgtgactgcgtctatactgcgcaggcacgagcgtttgtgttgcggcgaggttttcgtgcggccgctgcggtgacaagcaggtcctccctcaagctcgcggcggatcagcgaccgatcgacccgtcttcctcggttcctcatccatcccgggcatccggattccggtgagcggaggaaggcgccatgaaagctgcggaggacgccacgcgctgccctcagatcccccggcgttgccaccactgtgccgggccactctccaaggacatggaaacgagcagctggacagtacctccgttggttcgagatagcttctccatgattggttcggctcttgggggtatagcaggagcgttttatggtttcaaccatggcaccaccagttattgtgttctcttctgcatgtgctggattagcaggtggtacaataccagccaccgcacagctggtttcatcatcctgtcatgccgtgtcatcgcactcctttgcccgctcttcgcgtgtaccaacacatgcaccctccttcgcccccgctgcatctcatgacgacatgcgcaagacaagaagctcctcaccgttgtaagttatcgggtacaacagttcctctacataactccgcctgccttgagaaactaccctattatttaactatgcaagactcatcccatcctactctatcaaacacgaatgttttatcgctccttgccctgtttaatcagggatgccactgtacatggtaaatttctctctctcgtggacagatgctacacgtgccctgtttataaattttggatatatcttgatgtatagctagcattgggcaatgtttcgtggttcaataaaacttcgtgacgtgaccagtgttacactgagctgatgttcttttgagacattccagccctcgaagatattgttttgctcgatggcattgtgactgcattcagtatttacatgaaaaatgccagctatttgttattggttgataactgtgatctcatcgccttcgttagatttccag

SEQ ID NO: 7936 - DNA, 958 bp, Zea Mays
ttatccaccccgtcgcagtggttcctttccaaacggccaaaccactcccctcttccccagttccccttgtcctttgcgcaggggaaaaggagcgccgcagaccgagggacggcgacgaggtatccaatggccgaccctgacgtgatcgaagtgaccttcggcaacgacgtgattaacaccaccgtcacatcctccggccaggctgtggagcgctggatcgcggagatcctcgcgttgcaccgccccggcagcaacggctacagcatcatcgtcgggcttgacgttgagtggcgcccaagcttcggcccgcaccagaacccggtggccacactgcagctctgcgtcggacacagctgcctcatcttccagctcctctacgccgactacgtccccggcgcgctggcggagttcctcggcgaccgcgggatccgcttcgtcggcgtcggcgtggaggcggacgcggagcggctcagcgacgaccatgagccgctgggacgcgtcctgcctcagctacgagcagatcaagtacgcctgcatcgacgccttcgtctctttcgaggtcgcccgcaggctgcttggcggcgcgtactgatcgacgcggtgagacaatttgtgctagtgtgctcagacttcagatttggttgttgctgcatttcgggctacaaggttgtaggggtttctgtgatcgaggagaattattcagacagtcatgtactgcgttcctggtttgtcgctgcttttggcgtacagagtcgcattgagcatttgagatcatgcttgtgatttggggcttttgtgtcgatcgaggctggacagccttaaaccttttgctgattactgagttgccttaaaccttgctgaccagttgtttttcattttaccatcgctactagctactgtatcagtttatctctcttcgttttcgtttccgattatttccaactcggtcggaaactag

SEQ ID NO: 7937 - DNA, 2411 bp, Zea Mays
tctccctcctgctcccccgaacgaaagcgcccagcaccagcagctcaactgttctgcactgcacacagcgttgccattgccataccagaccagagacagagacccttaaaaagagagagacagagagagagagaggagccagctccgtctctctcgcgctcgctcctggtctcgtggccttgttgttccgtgcccaattccagttccaggggtataggagcaggatctcctctcgcgaacaacccagtaaacaactccgcacagcatgaggccaccgccacctccattgccgtccctgcgctcttccgtcttggtcctcgtcctgctgccgctgctggccgcgtgctcgtccccggccagtgggagggccgtgccgttgtctcctgggaccgcctccgttgctcccgcgccgcctcccgtcgacaccgcgagggggatcatgctggcgccgatcctcagcaagttcaactcgctcaagacgagcaggaagggggttgtggcgatggcgatgatcgagtacccgtcgctggaggcggcgacagggaagttcagcgcgagcaacgtgctcggtgtcggcggcttcggttgcgtctacaaggcagttttcgatggcggtgtcgccgcggcggtcaagaggctggaagcaggcggccctgaatgcgagaaggaattcgagaatgagctggatttgctcggcaggattcggcaccccaacattgtgaccctgctgggcttttgtgttcacgaggggaatcactacattgtttatgagctcatgcacaagggatccctggacacacagctgcatggggcttcacgtggatcagccctgagctggcatgtccggatgaagatcgcactcgacatggccaggttcttatgatcttatccctgcactttccttcaaatgagtgaatgggcgacgaattttaaattgaagtgctgatgattggcccggccggctagtagtttatattttataacatgcattggtaacttaaactggacagggggttagagtatctccatgagcactgcagtccaccagtgatccatagggatctgaagtcatctaacatacttttagattctgacttcaatgctaaggtacaattcccttttttccccccctttaaggacagattgctattcatattgtcttcttttgacggtgttggagatcagctgaattcgtgaagttcgtatctttttgctcacatgtgcagatttcagattttggtcttgcagtgaccagtgggaatattgacaagggaagcatgaagctttctgggactttaggttacgtggctccagagtacctattagatggtatttgtgtcagcttaactgtcaacttcgactcacatgcataaacaacttaattattgacagtgcagggataataaggtcataagaacatgggtaacttttagccattgcgtcgatttcagggaagctgactgaaaaaagcgatgtatacgcatttggagtggtgcttcttgagctactaatgggaaggaagcctgtcgagaagatgagtcaaactcagtgccaatcaattgtgacatgggtacggtacaaaaaaaatacactaaacctagaatatctctaattgccacaatttggaactttagtgatgaacaattgtcaactcccattcacaatttggaattttattttatcatatactggaatacatcggcttcatcatcagtgctaacaattaaggagtcaatgcaatttctttgtgtgctgaaaaaatcataaacaggccatgccgcagctgactgaaagaacgaaactccccaacatagttgacccagtgatcagggacacgatggacccaaagcatctgtaccaagtggcagcagtggcggttctctgtgtgcaaccagaaccaagttacaggccgctgattactgatgttctccactcccttgtccctttagtgcccgtggagctcggagggacgttgagggttgcagagccaccttccccaaacctaaaacattctgcttgttgagatgtcatggtcggtcgaagatgacagttacgtgctgatgagcttggacgatgcttatcagtaacttatcactctagctgtgtgccagaggatgacggttccaacctgccggtcgctgagaattctggtttgcaaagagttgtctcctatgtctttgcttgtacaaagaagtgaaagaagcaacaccctttcccttagaatttagggtccttctgtacagatcaaagtttctccaacactataacataaagaatttgagaacgacgtgcataaagaatttgagaatgacgtgctttgggttccacaggggtacccgagcacctttgctttgctgcaatattttgcttcctatcgtactctgataaaactgaaaatgttctcatgtttg

SEQ ID NO: 7938 - DNA, 955 bp, Zea Mays
atattcggtatttgcccacgtaactcttcgttaggtttctcaacagtcgcacccttccccagctagccatggcgaccgcgccgcggaggctgctccccgcgctcctcaaggccctagctccagccggcgcgcgcggcctctccaccgagaaggctgtcggcgccgccgccgtcgccgtcgtcggcagccataccgctaagtggatgcaggtattatgacgacttcacatcaagcactatcttgaatcctgaatgttcctgaaatgctttgttgaggggagtacagaccaatgtttcttgttagtagaaacaaaatgactaccggagatgatctattatttctgtagtttccaataaatatccttgaaatctggaatcacttcaggatttgtatctatatctgctggatatcatcagttggtccttttgtattggaaagtaaaaccaggttttgaaccctgggataggccataggcacacataagacaagagcattgccaccttgaccacctgagtcctcattcagtttatcattgacacgagcaagaagtcaccaatggaactgatcaacgaggtacctccgatcaaggttgatggccgcattgccgtttgtgaaggggctgctgaaggtgttgggcttggccagggccggtcctgacattttgggggccctaagcgaaagtctatatagaggccctatacgaaagtttgattctgctattttttcaactttaaatgatatctggaaaataaaataagttgatgatttacattgtttccaaaatgatactccctccgtttctttttagttgtcgctggatagttcaattttgcactatccagcgacaactaaaacgaaacggaggaagtatgactgaagactgttacaatatttcatattttgtaatataactctgcatttgctttgagagcaaatattttatttttaatttgtc

SEQ ID NO: 7939 - DNA, 2156 bp, Zea Mays
ctattccagttcttgccattagcttgcctcagccactcttccatgaaactgtagttctttctagattgcaggttccaaatgagacaccagggaatactgcgattgacctggctgaacagggtgctctgttctacgactggcccgttcctttggcgtgtgtgcttagccttagccagagttgtcatatcaaaacaggatacttttcttttttctcctctggcgatttggattttgtgttcctagtttaacgcgtaacgatttgttcaacctccttccacagtcagcctcttgtctcttctttacaaaaagcaataaactaccagtcaaggttagcttcttgtacaaatggccgccttcattctccttacaagagtagatttcaaggaggcaaccacatgttctcaccactgccccccctaagcaacagactcgctggatatcaccaaagagtaggttaagaagcagctcgagccgcccttccttcgagtcccatggccgcgcccgcttcttcggttacctccagaggcttggcactctgtagtgcctccgtgggttttcatcgcccccgcgggaataatccggtgatcagccccgcgtcttctcgtcgccgacgaagccttactggtggatcaacgatgaactcctcgggcatgaacggtgccttccctcctatcaaaggaagtacacgaatccccgcagttggtcctggccctgccaacagtccgtcaggaggaaacctgccgatacccaacatgcctccatgggccaagtggctggtcggcgccgccatagtcgtcgcgataccaatctacaggaggttcagaacactagaagataagatagagaagacggcggaggtggcgatcgaggtggtggacacggtggcggaggcggcggagaaggtggccggcgaggtcgccggcgcgttccccggcaacgagagcctcagggaggcggcgtcgaggatcaaggcggtcacggatgagatcgaggaggacgccgagagagccgaggccctgatcgagaagagagaggtctcacggcacggcacggcatcggcatcggctacatagaagaagacagcaacacaagcttagtcgtcctcgtccccccaatcttcagcccttgttcatcaacaaaccacatggccgcgctcggtcctgcttctgttacctccacgggcttggcgctgcacacccctgcgattcctcatcgtcggcgtcgccacgggaatgcagtggcctgtgcgtcgtcgtctcaacaccagcgaagccttaatggcttggcgatgagttcttcaggcacgaacaatgccttgcccatcaaaggaattaccactacacgggttcctgcagtcggtcgttcggtccctgcagcgaatccgtcgccgtcaggagggaacaacctcccggtgcccaagattcctccgtgggtcaagtgggtggctggcgccgtcatatttgcagtgcccatgtacaggaggttcagagctttagaagacaagatagagaagacggcggaggtggcgatcgaggtgatcgacaaggtggcggaggcgacggagaaggtcgccggcgaggtcgccgacgagttccccggcaacgagagcatcaaggaagcagcctccaggatcaagaaggtcatgcacgtggtcgaggaagacgccgacaaggctgaggccctgatcgagaaggtcgacgagataaagaaagatgtggattcgattgtcgatcctataatcggcaaggttgccaaggataaatcgcggagaatgaaccaaaaaggatgacagcagtcggtgaattgaaaggagcgcaaacattgctcggacggaaagggaagcaacaggacgcgtctcgtttcgtctcatgtttatctcgtgccatggcttcctacgtacaaacaggagatgaggcatatgatggtgtaaaacactcttttatattgtagattgtactaagagagaagttcgaaataagagatgagataagatgagagatgtcatgaataagttgttgcactaccggaataaacgaactaaatctaccagctatagaaaacactgttataattgtccccaaaacggtacatgtaggtctatatagtgtagaaacatagcataaaaaatttagttggcaaaataaaaaaaataaaaa

SEQ ID NO: 7940 - DNA, 1465 bp, Zea Mays
caagcaggcgcctttttgctccccttccctccctcccaacgcagcgcagcgactgctgctgcttccccacaccgccccccggtaggctcaccgccggcgacgcgcacgcgtcccaccgcacccaaaccgaccgccggaagggaaaggcaaggggaagggcgggggcgcgtcgcctgagaagggcagctctggggcgccctccggtgaggacgactccaggagtgacagcggcagcgatgagtcgtcagagacgagagatgatgacactgaccataagggttcatctgcgcccaagaaaaggaaatctggtaacacgtcggctgaaggtgaaccgtctcaagctgctgttgtgcgctatgctacggttgagtcgccatatcccgcaaagggaaggtctgcctcaaagcttccagtgtctgcacctggcagggcagcgcttcctagtgccaccccgaatctgaacattgggatggacatttggaatacttctcctgccttggctgttcctgcagtgcagggggaagcgaatcctgggttggcgcttgcccgacgtgatagcgttactcaactggatgaacgtgaattgaagagggagaggcggaaacaatctaacagggagtctgcaaggagatctaggttacgcaagcagcaagagtgtgaggaattagccaggaaggtagctgacctaacaactgagaatagtgctctcagagcggaacttgacaacctgaggaaggcttgccaagacatggaagcagaaaattcacgtctattggtgagcacggtaccaagtgtcacaaccacactgggaatgagcatcgagccgccaaaggcgcagcagcatcatgacgacgagggccagctccacaagaaatctagtaataacagcaacgggaaaggaagccacaaaccggaggctaacactaggtgagagacaggtgaatgagaaagtgacagagatgagatgaggtgtttcctatctaaccacaacacccatcatcaaccagtgcgttttcacagcccgctggggggccatgtagagtcgccccccactgcagccatgtattatttatggctcgccgcggtgtgcgttgtgtgtttttttgtgtgtgtgtcgtgtaaacctattgatgtagctattgtaacaaaaacctagagagcctagaatttttatgtctgctaactcctgatgaggggggatgtaaccggccaatttggtgcctggtcgatcgtttagatgaaatgcgagcaaatatcatttgatagcctgcctcgccttgttgttgttttggattttttttgcgactttgcgggagtcttttatacaggctattgaattttcgatggtgcttttggatgttgtggtggattaatgtagtggcacgaccagatttagaccaacactgctggaagcttcaaagttgttaattttccatggactgatgttaattttcttgaaatgtaa

SEQ ID NO: 7941 - DNA, 2174 bp, Zea Mays
tgtgttttttttttctttccgattttcgtttctctctcttttcctttccccccgtccctctctttctttctctcttggaattgtaattggactcaaaagtttcggcggccttctccatgaacacggtggcttcgctgcctttggcgccgcgcctgctcattaagccctccctcgcctgcttctccagaaaggacgtcggccgctatggcgggatcaaggtgtacgccgtgctcagggaagacggggccgagttcgcccggaacaacaacctggaggccctgttccaggtggacgaccccgggccgcgggcccccgtcaagaagttcctggacgtgaacgaggctctggaggtggtccgcttcgacatccagtactgcgactggagggcgcgccaggatctcctcaccatcatgcttctccacagcaaggtggtggaggtcctcaaccctctggcgagggagttcaagtccatcgggaccttgaggaaagagctcgccgagctacagcaggagctggaaaaagctcacaatcagcaggtccatctctcggaagccagagtctcatcggcgctcgacaagctagcgcatatggagaccctggtgagcgcaccatccacagccgagccgcccacttcttcctccctgtctgcaactgcaagcagcaccgcccgtgtccgagccaagaacaaacagccacgtcggaggcttgacgtgtccggcccagtgaagccttacaaccccagcctcaagaacttctggtacccagtcgccttctccagcgatctcaaggctcctgacaccatggtgccaatcgactgcttcgaggagcagtgggtgatcttccgaggcaaagacggaaggcccgggtgtgttcagaacacatgcgcccacagggcatgcccgctgcatcttggttcagtgaacgagggcaggatccagtgcccttaccatggttgggagtactcgaccgatggcaagtgcgaaaagatgccatccacaaagatgctcgacgtgcgcatccagtcgctgccatgctttgagcaggaagggatggtctggatctggcccggggacgacccacccaaggctaccatcccttctctgctgcctccttcaggatttacggtccacgcagagtgttctctctatcttgcagatagtgatggagctaccagttgaacatggactcctcctggacaatctcctggaccttgctcacgctcctttcacacacacgtccacctttgccaagggctggagtgtgccaagtttggtcaagttcctgacacccgcgtctgggctccaagggtactgggacccgtacccgatcgacatggagttccggccaccgtgcatggtcctatcgaccatcggcatctccaagcccgggaagctacaagggaagagcacgaggcagtgctccacgcacctccaccagctccacgtctgcctgccctcctcccggaacaagaccaggctgctgtaccggatgtcgctggacttcgcgccgtggctcaagcacgtgccgctcatgcacctgctgtggtcgcatttcgcagagaaggtgttgaacgaggacctacggctcgttcttggccagcaagaggggatgatcgacggcgccaacgtctggaactggccggtgtcgtacgacaaactcgggatccggtaccggctgtggagggacgccgtcgagaggggcgccgacgaccggttgccgttcagcagcacccaagctgagagtttgtcgtagcgaccggaacgggacgggacctcttcctcgtcgcatttctccgcaagacgacggacggacagccagagttaatgtgacctaggcgtacgtgcgtctctctctctctctctgcgcggttcatcgttcacctcgggctgctgcgcactgaaggattctggaagggtgaaggttgacggccggagacgatgatgggcagcatcatggtctatggtgtccacatgcatgtacactactagcgacgacggcatcatgggatgcaattgtaatctgagattgatctcttttttttttcaccctttctgtgtaaagattcagcaaattgttgcgttactcttccaaagcatgtataatcaactacggagaagtgttcatatatataaatatgagaaattgcagctattgctacagttcatctgccccgt

SEQ ID NO: 7942 - DNA, 1606 bp, Zea Mays
atttggcccaaggttcaccgctttgcctcgttcccgttctcctcctcgcaactctctcgtccatacgtcgtagccgccgcctgtctctcaccgccgacatcccgacagctctcagcccagatcgagcttcccccttcccaaatcgggttctgcttgggctcccgccaccgccgccctacaccaggtgccaaggccttcgccgacctcttcgccggcgaagagcgcccagcagagatgaatgtagcggtgccaccacaatctccacatcttcgtctatatgactttgccaagagtgccatcatcaaaatttttgcctttccttatgctacggtctgtgacctgtattgcgacggtggaatggatacagacaagtggtgtgatgcccaggttggccactacataggcatcgatgcctctgcatcgggtgtcaactatgcccgtgagctatgggagaacaggaggaaacctttcactgctgaattcatcgagttggatccttctgatgatggttttgaagctcaagtgcaggaaaagggcatccaagcagatatggtttgctgtatgcagcacttgcagttatgctttgagaatgaagaacaggcaaagaagcttctgaacaatgtatcatcacttctcaaacctggaggctacttctttggcataactccagattcatctacaatatggacaaaatatcaaaagaatgttgaggcttcacataataagggtttgaagactgttccaaatagcattcgctcagagaactataccattacctttgaagtcgaggaagagaagtttcccttttttggaaagaagtatcaactcaaattcgcgagtgacgcggtgtttgagaatcagtgcctggtccactttcccacccttatgaggttgtgttgaaacagattatcaagggaagctggacttgaatatgtggagatccagaatttaaccgagttttatgatgataacagaacacaattcgctccaatgcttggtggttacggtgcaagttttttggatgctcgagggaagcttgttgctcgttcctacgacattttaggcttgtattcagcatttgtgttccagaagcctgatccagaggcaataccaccgattgtaactcccgacttgcctgatcctgataaaggtcacgaagaggagtggctccagccacagcaggcgtcagtggaagatgggagacgctcgcatgcggatgtgcttcccatagaccctgagaaaggcatcctgggtcctggacctgcagacatgaggctttagttgctggacattcaaatgcagctgagcctgggtagtgatttttttttccaccgtgggcattctcccatagtcccatgtggccatgtctcctttatgagtccacgaaaatagcgaacaacactacaaggctcatgaatcctgcacggacgcatgggctttcttgtaaaacaaatgctcgatacgtatgaccttgtacggtctttgatgtgtatatttgactgctcatactcagtaccattttttaattgcctaaattgtctagctgcaagacaacgaaaccagttcagtgtgtcacgaacgcgagagaagtgctgaaagtttgaac

SEQ ID NO: 7943 - DNA, 1795 bp, Zea Mays
atttggcccaaggttcaccgctttgcctcgttcccgttctcctcctcgcaactctctcgtccatacgtcgtagccgccgcctgtctctcaccgccgacatcccgacagctctcagcccagatcgagcttcccccttcccaaatcgggttctgcttgggctcccgccaccgccgccctacaccaggtgccaaggccttcgccgacctcttcgccggcgaagagcgcccagcaggtattcccaatctcaccccccttctcttccctgttagctgtgcgaaaccgagttcgcaaactacctcaagctatctggctattcgattcctagtaactttttgcaaaagccattggtgtgcatgtacacccgtccctctactaatccgcccgtgttctgtctcgacctcgccgctggttatctgcttacatgtaattgcagagatgaatgtagcggtgccaccacaatctccacatcttcgtctatatgactttgccaagagtgccatcatcaaaatttttgcctttccttatgctacggtctgtgacctgtattgcgacggtggaatggatacagacaagtggtgtgatgcccaggttggccactacataggcatcgatgcctctgcatcgggtgtcaactatgcccgtgagctatgggagaacaggaggaaacctttcactgctgaattcatcgagttggatccttctgatgatggttttgaagctcaagtgcaggaaaagggcatccaagcagatatggtttgctgtatgcagcacttgcagttatgctttgagaatgaagaacaggcaaagaagcttctgaacaatgtatcatcacttctcaaacctggaggctacttctttggcataactccagattcatctacaatatggacaaaatatcaaaagaatgttgaggcttcacataataagggtttgaagactgttccaaatagcattcgctcagagaactataccattacctttgaagtcgaggaagagaagtttcccttttttggaaagaagtatcaactcaaattcgcgagtgacgcggtgtttgagaatcagtgcctggtccactttcccacccttatgagattatcaagggaagctggacttgaatatgtggagatccagaatttaaccgagttttatgatgataacagaacacaattcgctccaatgcttggtggttacggtgcaagttttttggatgctcgagggaagcttgttgctcgttcctacgacattttaggcttgtattcagcatttgtgttccagaagcctgatccagaggcaataccaccgattgtaactcccgacttgcctgatcctgataaaggtcacgaagagcaggagtggctccagccacagcaggcgtcagtggaagatgggagacgctcgcatgcggatgtgcttcccatagaccctgagaaaggcatcctgggtcctggacctgcagacatgaggctttagttgctggacattcaaatgcagctgagcctgggtagtgatttttttttccaccgtgggcattctcccatagtcccatgtggccatgtctcctttatgagtccacgaaaatagcgaacaacactacaaggctcatgaatcctgcacggacgcatgggctttcttgtaaaacaaatgctcgatacgtatgaccttgtacggtctttgatgtgtatatttgactgctcatactcagtaccattttttaattgcctaaattgtctagctgcaagacaacgaaaccagttcagtgtgtcacgaacgcgagagaagtgctgaaagtttgaac

SEQ ID NO: 7944 - DNA, 445 bp, Zea Mays
tttccttgccgccagccagcccattaaccctcgttcctgtcgcgcagccacgacctccacttccacatctcccccggcgtcggcgcggtcagttgaaccatggcggactccaaggccacctcggcggtcaccctccgcacccgcaagttcatgaccaaccgcctcctggcccgcaagcaattcgtgcttgaggtgatccaccccggccgcgccaacgtctccaaggcggagttgaaggagaggcttgccaaggcgtacgaggtgaaggaccccaacaccatctttgtcttcaagttccgcacccacttcggaggaggaaagtccactggtttcggcctcatctacgacaacctcgaggctgccaagaagttcgagccgaaataccgcctcatcagggttacccattattcttcttctgaaggaaagagcatcaaaatttgaggac

SEQ ID NO: 7945 - DNA, 1348 bp, Zea Mays
gagggttccactctgttggacccgccctgggagatctacatccgaggtggaaaggggagttttgagatgtcccatcaacaagccttagcacaagtaacagcacaagcagttcattctcagtacaatatgataaatcacacagattacagtattcctttttcgtcgacaacagcaccagctttgatcacagcacagcatgccaattcttctgccaatgtggcatcagcacaggagaaaccagctctgccgtcacatgcaggtaatagcaacattgaatcaaatgaggtttcacaaggactcaaaacttctgcacccacttttgataaacctgctgacgatggatacaactggcggaagtatggccagaaggcagttaagggtggcgagtatccaaggagttactacaaatgtacccacacgagttgtccagttaagaaaaaagtggagcgctcagcagaaggacacatcactcaaataatttatagaggtcagcacaaccaccagcgtccaccaaaaaggaggtccaaagatggtggtggtccactaaatgaagcagatgttcttcatgagaatgaagacatttcaactagatcagaacctggctctcaagaacactctggaaaacatgaagggtcaaatgatggcatattagggccttctgtgtcaagaaggggaggaggagatgagcaattgtcaggctcaagtgatagtgatgaggaacaagatgatgaacaaagggctggcgacgaagaccctggctatgcaaatgcaaacaaaagacatgtgccaactccagctcaaaggataattgtgcaaacaaacagcgaagttgatcttctggatgatggctatcggtggcgcaagtatggacagaaagtggtaaaagggaatccctacccgagaacccacaagttatggaactataacagccttccatgaatccacccacagttttagcaacaaatcaaatcattcgatacccatgtaaatcccaaacatggacatcagacacatcactgctctatggtgcagctcttagggtctggcacaatgtcacatcaatcctttatatcttttgaaagttactccataacccattaaagtcctggcgatgttgcagttgctgagaaaaactgacactttctctgatattcactacattcaccttcagttcatttctttggtgttcagttagaacctttcagattcctttttctttgggaccagaaaggatctttcagaaattgataagctttagtatctctgatccaagatatgtaattttagtacctgtgttatcaaacaattttaactttggccatcagtaaaaactacttttcacgatata

SEQ ID NO: 7946 - DNA, 1483 bp, Zea Mays
atacgtgtcgtcccgctcgccgctcctcgctcgggcagccgaggctccccactacccagaaaaggagggaggaggaagcgcttcacaaagccacagcgcctcgttgcctccccactttccttttcttcccctactccccatggcggcccgcgaggcctccgccccggctccggcttcgccccacgcaggcgacgggccgggccgcccgccgcggcccacgctcgccctgcccccgcgctccgccgtcgagtccctcttcgccaccggcgcctcctcctcggccggcgccgccgagaccagccccggcccgctcaccctcgccgccgcgctcttccccgacgcgtcctccccggccttccacggctccttcacccagctcctcgtcggcgccataggctccccggccgtaccctcgccgccctctccgttcgccgtcccgccggggctcagcccggccacgctcttcggctcaccgggcctattctctcccacggggagttttgagatgtcccatcaacaagccttagcacaagtaacagcacaagcagttcattctcagtacaatatgataaatcacacagattacagtattcctttttcgtcgacaacagcaccagctttgatcacagcacagcatgccaattcttctgccaatgtggcatcagcacaggagaaaccagctctgccgtcacatgcaggtaatagcaacattgaatcaaatgaggtttcacaaggactcaaaacttctgcacccacttttgataaacctgctgacgatggatacaactggcggaagtatggccagaaggcagttaagggtggcgagtatccaaggagttactacaaatgtacccacacgagttgtccagttaagaaaaaagtggagcgctcagcagaaggacacatcactcaaataatttatagaggtcagcacaaccaccagcgtccaccaaaaaggaggtccaaagatggtggtggtccactaaatgaagcagatgttcttcatgagaatgaagacatttcaactagatcagaacctggctctcaagaacactctggaaaacatgaagggtcaaatgatggcatattagggccttctgtgtcaagaaggggaggaggagatgagcaattgtcaggctcaagtgatagtgatgaggaacaagatgatgaacaaagggctggcgacgaagaccctggctatgcaaatgcaaacaaaaggtggtttctaccatgaacagtttttaacaagcttttcaaggttcaatctataatcgctagttttattgagcagacatgtgccaactccagctcaaaggataattgtgcaaacaaacagcgaagttgatcttctggatgatggctatcggtggcgcaagtatggacagaaagtggtaaaagggaatccctacccgagaacgccgagcaacctgctcagttggcgcggagggatgatgcgacgtcgacgtagccctctagctcgtca

SEQ ID NO: 7947 - DNA, 1197 bp, Zea Mays
gcaaaggcgtactgaggggttttgtggatatagtccagtccgtcatctgttcttcattcccaaccgaagtcaactgttggaacacctgcttatattgcacctgaagttctgttgaaaaaagaatatgatggcaagattgctgatgtttggtcatgtggtgtaaccctctatgtaatggctgttggtgcatatccttttgaagacccagaagagcctaagaacttccgcaagacaattcagcgcatcttgaacgttcagtacgccattccagactacgtgaacatatctccagagtgcaggcatctaatttcgaggatttttgttggtgatcctgctatggcaagtccttgtagttataatcgtgctttgatcctgatacagtaggttcagaagatacgttgtttcaggtttggtcatatttatccgattttgttgtatttatgtgttatataaaatatgcagcgaataacaatcactgaaatccggaatcatagttggttcctgaagaaccttcctgctgatcttatggatgatgatagcatgagcaaccaatatgaggagcctgatcagccaatgcagaccatggatcagatcatgcagattttaacagaggccaccataccacctgcctgttctcgcagtataaatgttctagctgatggactggacatggacgacgacatggatgatcttgactccgattcggatcttgatgttgacagcagcggtgagattgtatacgcaatgtgagtaacatctcagtaaccatctcagtatctcaccagtcaaccaaagaaccaatcaggcatgggacaccctgatgttgtacactctgccaaagacctagcatccttttgtaaaatatctccctgtagttttctcaaagaagcgcaagcccaacctgttctggggaacacggatgctgtagtcaaactggggttattcagattgtaaaactggcctcttgcttcctgcttactctcaggcttcgacttgtgtgttgctgttgaatatgtacttacaagaaacttctacggagtactcatgttgatctgttcgaagctaacatcggaaagagcatttaaaaattctgttggtggctttcattggaacttgtgcctgctaatgggttgggttgcaaggctgtctagaacaggtcacataaaatagggatttgtactgtagataatactattt

SEQ ID NO: 7948 - DNA, 1893 bp, Zea Mays
ctcctcttcctcctttgcccagccctttctccccctcctcccactttcccgctatctctaggatcccaggcctcgcctatggccgcctatccccttcctcctccttcctgttccatcgcacagtgctgcagctgctgctaatccttaacctttcgactactagtcggagtcctcggctcgacgctgctcgtagtcgtagctccagctgctgctgcgtggacggaggagggtggttcctgttgcaggctcgcaagttgcaacttgcagtgttgcactgcttcagcagcagctgcctcattgcgtgctgcagttattgctaccgctactgtatacgtagagaccgagacgtcttgccatttgctaagctctgatggagaggatgcaactgcaagggcccatcgcctcttcgctgtggacggacaaacagcaggtggtggccagcaccagcgccgcaatggcggcgcagatgcccttcctggcgttgctccagggcgcaggcgtcgtggtggagggggcggagacggagcagcagcagtacgagcacgagcacgacgggcgcaagcggcaggccttggcgcgcgccgtctccaaactcgacctgctcgagagctgtctcacgcaggcggcggctcccgcggcggcggcgtgtgcgccagtggccagcaggacgaccgagaggcggatgaagcggccgaggacccgcgcgcgagccgcgccaccgccggagaagcgcaggaagcccgaggaggccgagagccagcggatgacgcacatcgccgtggagcgcaaccggcggcgcctcatgaacgaccacctggcctcgctccgctcactcatcccctccagctatatcccccgcggcgaccaggctacggtggtgggcggtgcgatcgactacgtgaagcagctggagcagcagctagtggcgctgcaggcggccgcgggcgcgcggcgcggcagcagtgtcgtgtcggacgacggcgtgttcctcgtgtccccgcagtacgcgagctactcggggtcgcgcggcggcggcgggctcggcgtggacgtggaggcgacgggcgcggtgggcgggcacgtgcgcgtgcgcgtcgcggggaggcggtggtggcccggccggctcgtgcgcgccgtcgccgcgctggagggcctccgcctcgcggtcttgcacctcgccgtcacctccgtcgggcgtgacgccgtcgtgtgctgcttcaacctcaagatggaggaagggtgcgaggtggcgacggcggacgaggtggcgacggtggtgcaccagatcttcgcctactccgccgccggcgcatgctgctgacgacgacgactgactgcgccccgcgcgccgacgccagcggccgtggagcacgggacggggacggtaagtcaaagccgcagaggcgggcggacatgacggcatgtacacgaaacacgacgacgaacgcgcgcgcagaggcggagaggacgacgtacggccggccggcccgggccaccaagagagaagggcatgcgtacgcagaggcgtggatcagcggcagcgctaggccggggaccaagcaagcaaccatggcaagtgatgtgcttgcggtgccatgccatggcaacggctgcactgcgtgccgtggtccagcgcagcgcagcgccgggtggagaggagcaggagaccatctactgtaacttgactagtgtttacttacttggctgggtggctggcaggaccagtactccggtggtgaagggtactgacgactgtagctggactggactgaaggctgaagagagcgtggtacagtacagtacagtagcagtgtttgaatagcatggctatatatctatgtagttttttctcccttgcctttggagagccacgcccacgcacgcatcactgtg

SEQ ID NO: 7949 - DNA, 1766 bp, Zea Mays
ggcagttgtcgccgcgcataatcatactagtgacacaatcacagctagccacctccccgtccccagcatcgccaaaggtcacatcggtcggccacgggcgcggggcaagaaggaccaggtgacggacgagcaggagggaggaataatggcgggcgcgggcgcgggcgggtggaagaagcgggtgggccgctacgaggtgggccggaccatcggccggggcaccttcgccaaggttaagttcgccgtcgacgccgacaccggcgcggctttcgccattaaggtgctcgacaaggagaccatcttcacccaccgcatgctccaccaggtgttggccggcaggacaaagatatacatagtcttggaacttgtcactggaggtgaactgtttgatagaatagtccgccatgggaagctacgtgagaatgaagctaggaagtatttccagcagctttattgatgccattgattattgccacagcaaaaggagtttatcatagagatttgaagcctcaaaacttgcttcttgactctcgtggaaacttgaaactttctgattttggacttagcacattgtctcaaaatggagtaggccttgtacacacgacatgtggaacaccaaattatgttgcacctgaggtgctaagtagcaatggatatgacggatctgcagcagacatttggtcgtgtggtgtcattctctatgttttaatggctggttaccttccctttgaggagaacgaccttccacatttgtatgaaaagataactgcagctcagtactcatgcccatattggttctctccaggagccaagtcattgatccagagaatacttgatccaaatccaagaactcgtatcactattgaagaaataagagaagacccatggtttaagaagaactacgtaactattagatgtggtgaagatgaaaatgtcagcctagacgatgttcaagctatttttgacaatattgaggacaagtatgtatcagacgaagtaacgcacaaggatggtggtcctcttatgatgaatgcctttgagatgattgcactatctcaaggtttggatctctcagcattgtttgataggcaacaggagtttgtcaagcgccaaacacgtttcgtctcaagaaagccagccaagactgtagtagctacaattgaggttgttgctgagtcaatgggtctcaaggtccactcccggaactacaaggtgaggcttgaaggtccagcgtcaaacagagcgagccaatttgctgttgttctagaggtctttgaagttgctccttctctgttcatggtcgatgttcgaaaggttgccggtgacactccggaataccacaggttttacgagaacctatgcagcaaactttgcagcataatctggaggccaaccgaagtttctgccaaatctacgccgctgaggacgaccacctgctagccgcctagcccagcactgagctactgtagtggcatcaccaagagacgtgattcgtagccgtcagaaagggagagcttctgttgaatctagcattgctcgtggagctgggattcatgttgaccaccaggtgtttgtatattgtagtaacgctattgtagatagtctgtatagctccatttgtgcagttgtacgtagcaggaatatgttaaaaaacaacttttaatgtcaggtataatcggtttgcatccaggaagcatctccaacagtgtcttaaatcagtactctatttttaaatatagggttcaacttataaaaacagttttaac

SEQ ID NO: 7950 - DNA, 988 bp, Zea Mays
ggagacagaatgggttgtggcagtacattatcctaaaaaagtatctccaggtggtgctgctttgttggttgaagctgcaaatatgggtgatccagatgcacagtatgaacttggatgtcgactaagaattgagaatgactatgttcagtcggatcaacaggctttccattacattgagcaagctgttgatcagctgcaccctggtgctttatatcttctcggtgctgtatatctaactggggactgtgttaagagagatatggcttccgcgttgtggtgttttcatagagcttcagaaaagggacatgctggtgcagctatcgcatatggatccttgcttcttaaaggtgctgaaatacctgaagttattacaaggttcaactcaggcaagagtccatcaactgggaaaatgcggaaaaggacccaacagcaggatccagtaaagctagcgaaagaacagtttcaaattgcagctgaggcaggctgtgatctcggtctgcggtggttgaagaggcttgaagcttatgaaaaccaagaagaaaagctaaagcaggttcagcaatgatatccactgaaagaatcccattgcatttgtcgcatacaagtatggtatatggcagcatggttgctgcacataggtataccaataatttcctttcctgccttcattatgttggaggctattcgatcctcggatgttcgggtcaactttgcaggaagatatactgaaatttggatatttagactaacttcttggattataggcgattggatgttcactttgtacgatgtattagcgttgacattactggaagccctaattgtgagaagtagaaacatatcatgtgtgttgctacgggcattatggatgatttagaataaaattagactatataactacttatacgaaggaataaattgtggcatatgatgatgtggataacaaaatgttctgtggcttcctgacatcataattgcatgcgttagg

SEQ ID NO: 7951 - DNA, 4082 bp, Zea Mays
cactttccccgctttcctccgccctgctctcacgtgttcatcgttggttctcactccccttctcgcccccttcaacactccgcgcttctgcgcgtcattgccagcggaggcgcgtcgctatcgcctgggaacaataagagtttgcgcgtctcgcgactgatcggtggcgactgccactcggcggcgacttggactcgacttccgggcaacagggcgaggagtcggccggccagtccactgggttcaaatcggcctcggcaccgcggcgcccccccgcgagttcttgctggattcgctcggagcacggcgcgggcttgtcggcacggcgccatgcagcagcagcagcaaggcttagacataggcaagctacaagaggtagtgaagacccgctggctaaagcctcaagaagttctcaagatactgcagaatcatgagctgttcacgatttcgcataagccccctcagaagccacagagtggttcttggtttcttttcaaccgtagagtactccggtacttccgaaatgatggatttgaatggcaaaagaagagaaatgggaagaccattaatgaagcccatgagcgccttaaggttgataatgtggatgcactgaattgctactatgctcgtggagacaaaaatccaacatttcagaggcggatatattggatgcttgatccggcttatgaacacattgtccttgtccactatagggatgttctagagcatttcagtatctgcacgaaatgattcttcaacattgaatcagaatggcagtgctagcagagctgaagtacatagttcacctggttggacaagcgagttaattgcacattgtactaattcgtgcagtccgggatctgctgaagaagtcagttcccaaattagtgcaagtgaatctgatttgattcaacataaggcagccttgcggaagcttaaaatgcagctgagtctggaagacaaagaagattgtgatgttaatgccgaggatgttccagcagataatgagcctattattttacctgtgattcagaatgaggagccaggcacttctagaaatcatgatgatatctttgatgtgctggactttagtgaagatcatatcaacggaactggaacccatccatgtcacagtgctattgacgtgctaaaaaattcagacacatggttagaggatgatcaacttgaggcaattctgcatccagcgtgtatgacattgactgaaaatcaatggttcaggatacatgaggtttctccagaatcagcgttttcttatgaaagtacaaaggtatgatatgagtatgagttactaggcttgattaaactactgcaacatgcattcttcttcttttctattggcataatattggacaaaacatatcttcgtgtggtacttacatactctgatgccaaatgtaagttgttttaggcttgtgcataggaattaatgaagtgttgaaatgattcaaatgacctttaactgtgattagtagattgtttagcatgggcataagaagaaaaaaatgggggacgagtttctagatcctataatgacctgcatatatatacgagtggcaaaatctaaaatcaaagttacttttagaaatcagaattgaggagtaatacttaagtattttgatctgaaagcttgaagcctgagtccagagaacccaacgaaacaaaaaagaacttatcagtttggacaaacctgtgccgagaactacaatggttggggacttatgaaaatgtaatgcaggttatcattgtaggagacttcctttgcaatccccctcacagttcatggcaagtgctgtttggtgatgttaaggtatgtgtggaaattatccagcaaggtgtcatccgttgccatactccatgccttgatgctggaaaagtgagaatgtgcttgcttgatgggaatgggaagtcctgcagtgaagcacgagaatttgaattccttgaaaagcctaccaaatgcatgattgatggaaacacgaacccctgcaatgaagcacaagatgtcaaactgcatcagatacctaccaaaagtagtgaggagctgtcactgttactacattatgtgcatacactttttgatggtcatgctagtgggctattttcaaattttagcttgccactccaaaatcttggctgtggaatccaaagcaatcaaatggatgttatgaagaaggcgtataagcagctggaccctgagaatgtggtaagtagtgtcatggaagtattgcttaatgacaagtttaagcaatggttgtcatccaaatgtgaacagaatattgatggagaccatttgcttcctaagcaataccgcaatattatacatacggttgcagccttgggatatgatttggctttgaagccactgcttagttcaggagtgcctataaactaccgtgatgcaaatggatggactgctctacattgggctgcaaggtttggcagagaagatatggtggtggctcttcttactgctggtgctgcagctggtgcactttcacatccgacatcagaggatcctgctgccaaaacacctgcttcaatagctttagcatatggtttcaagggcctatccgcgttcctttcagaagcacaattaacaactcatcttgattctatcgagtcaaaagaaaatggaaaacttgattctagggaagaggggatatgtcgtgctgtggacagaatatcagacaaaagcagccacgtgcatggtggaactgatgatcagcttgcgcttaaggattccctgggagctgtccggaatgcagttcaggctgcagggcgcatacaagctgcattccgaattttttcctttaagaagaagaaagagatggctcttgggaacagaaatagctgctgcttgtccattagtgaggcaggagcagtttcacatgatatgctggagaaagctgtattatctatccagaagaacttcaggtgctggaaaaaacgtaaagaattcctgaagatgcgaaataatgttgtcaggatacaggcccgggtgcgagctcatcaagaaagaaacaagtacaaggaattgatttcaagtgtcggaatccttgagaaggtgatgatacggtggtaccataaaggtgttggtctgcgtggattcaattctggggcaatgacaatcgatgaagaggtggacgaagacgttgccaaggtcttccggaagctcagagtggaaacagccatcgatgaagctgtttcaagggtatcatgtatcattggtagccctaaagcaatgcatcagtaccgaaggatgctcaataggtaccaacaaacaaaggatgatcaggagaagtaatgcttgtgttaaaccaacagtgatggagcaaacagcaaagcacaagccacccactatttatttatctcccttactgaagcacaagccttggtgactgaatggacagtggatcccgagtaaaactgaaaatttcttgggtgaactagaaccagctccaattcatgctggacgctgtttgagtgtacacagcaacgtcatgtgcaatagctgacttctggctgaaagttggtaaaggcgatgacttagtggtatatgcagaagcttccaaaagcctgatgagcaaggtagatgaggtctgagaaacactgcattcgatatatatatgccttatgtactaccttcatgcagtaggtttgtagtaaatttgtgcgtaactcttcttctgcgtattccagaaaaaaagtttgtagtaaatttgtactatatggtagtaaataggggtcaactattgtaatttgtagcacaatgaatcttgtaagaaatctcagtttagaaatactccatcttttacacatgggatgatgacgaccgatgatcaattttgccagttaatacgttcgccgcagtcctctattggcagtgacattccaacagttgaacgccagctgtttcatgcctttggcatcagctttcaaatggagcagcgatcaaagaaagcctcgtagcattaaacttctctctcggtagtctcgtgatcagaattcagatggctcaagcaactgccaacagaataaacaatcaggcagggtgcgagccactg

SEQ ID NO: 7952 - DNA, 1450 bp, Zea Mays
tttctttttggagtgcggaacttgaattttcttagagtgagagaaagccttaaaaatgcaaagagggattttaccaagactgaagacgacttgaaatctctgcagagcgtggggcaaataattggagaggttctccgacctcttgataatgaacgctttattgtgaaggccagcagtggtccccgatatgtggtcggttgccgaagtaaagtagacaaggagaagttgacatctggaactcgtgttgtacttgacatgacgaccttgacaataatgcgcactcttccacgggaggtggatccagtggtatataacatgcttcatgaagatccaggaaatgtcagttactctgctgtaggcggtttgtctgatcagattagggagctcagggagtccattgagttaccacttatgaaccctgaactctttcttcgggtgggaattaagcctcctaagggtgttctactctacggtcctccgggaactgggaagaccctattggcaagggctatcgccagtaacatcgatgccaactttttgaagattgtttcaagcgctattattgacaaatacattggagaaagtgctcgtttgattagagaaatgtttggctatgcacgtgatcaccaagtaaagatgatcatggccacgaatcgacctgatgttctggaccctgcgctcctgcgtcctggacgtttagacaggaagattgaaattccgctacccaacgagcaatcaagaatggaagttctaaaaatccatgcagctggtattgccaagcatggggaaattgattatgaagcagtcgtgaaactagctgaaggtttcaatggtgctgatcttcggaacgtgtgcactgaagctggtatggctgcaattcgtgcagagagagattatgtagtccacgaagacttcatgaaggctgtgcggaagctaaatgatgcgaaaaagctggaatcaagtgcgcattacagcgcagattttggcaaagagtaatgtatgatgctggacagatgcataaggcgtgtatcatcagggagctctgtcagatgcgatgcaaaagcgaaagaaaccagctatttatgttcaggctccaggcagctccactttttcctgatattcacaattttagtgaggaggattgtcaagctgaccagtgggggaaatcagtcgagaatttagtagttctgcgccagatggcctttgcttctgtaaatcgtacgtaatctgcttccgtgcgtcttagtctggtaataactctggttggacctgttctgtttccatgtacttttggacagtgtgcctgactccgcggtaacagaggaaaaaagaacattttgtattcatcctgaactacaattccccctcatttgtactattcacactcccattactgcgtcagggagtcgatcagacatgtgattaatttcggttatacgtttcgtcaacc

SEQ ID NO: 7953 - DNA, 3193 bp, Zea Mays
gctagcgtcagcctcgtctcgctcgttttgctccgtctctcttcctcctcacttcccacccaccctcgttttgctccgtctctcttcctcctcacttcccacccaccctcgctcgttttgttctgtctctctttctcctcactccctccgtcgatcctctgcagcttgcatcggtcgaccagtagtcttccactgatttgaggctgtcatagtatgctctctgaccgtgctggcgggaggaaggagatgatttaagttctctgcgtttataaccagaaagaggaggataatccaatcatggtaactaaatagtaggtagtaatgtttcacggtaaatcacagtgctcgaatgcgatatgatctttgactcggagtattgaagactaatttagtttgagtttgagattagttgtttttgtcattaataaactcacattggcatctggttacgagctcactactagattttagatctccagttttggtgtacttttgctgcatgtgtctcccagagttgcagatttgcaggatggcttgatctggcaagtgctcgccattctatgggcccatcatgcttttcgagtacactgtttgatcacaaggagcggtctgctgccactaaacttcaagttgttgatcatgatggcctgaaaaattatcggggatatgctcatatgccttggccttaatttaaactacttgtatgagatggagaaatgtcacaaaacacaggatgaagacgactccaggaatccacccatgcctctcagtgactcagtggcacaaacgacagcctagtcaggactaggagacgtcttcacatcacggagtagaccactcagcaacaacagtgcaacggtgttcggacttttgttcacatatgggagtgtttaagctcctgcacctagatttagaaacaccaccatgtaaaatagacaagacagtgcttttgcaaacatgatgctaccacgagacccgaactcatgtatggccaaacatgttaacatattttgtatgtcaccaaaacgcttatttacatcaatgagcgattatctgaactgttgaatgctcaccaaaatgcttatttctatttcctactgctacttgctcctttgaagccttcagcgatggaggcctccacagaagctactaggatggcctccagcttatgacctctcactgccgaccgcaccttcctcagaatatgttgcttcatcaccgccctctcagcagactggagtttcttgcacatgttcaatccctggatgtacctcgacaccgcgccgccgaaaggatcaccggctttctcaagggccacgagcttctcgacgatctgagaagcgagcattctctcgatacagggtttggttccaacctccgtgatgtccaccagaaattgcatggctagatccttggtcttcaaagacttgcggtccagcaagttcaccagtttctctatggttcttagttgcagaaatctttgcaagacaagggatccacccttcgcaaagacgatctgatggagagcgtagtacgctgaatcctggagctcatcgatgttgcactgcagcatgtcaatgagctcgtgaacaatattaagctccaggaacctatgcacgtatggctctcctccagtgcaggccaatttcatcaccaaaaaggcggtctgggacctcacctggttcttttcaacctctctgcgttgtagcagccaagccaacctatcaaacagatggcttcccagaaggaggatattatgaagaatcacctcaaatgattgttgaggctttggtgattgcggcacatttctgtcagataaaacaaatctttccaaactgatccgagcatgccagggcaaatgaagcagcactgcaggccctatgcacccttgaagtggagcaccaagttcacagaatgtttttagcgtgataatcgcgtggtgctgtgagatctcagaaccattgcccagaagcacaagaagtttattgtcaattcctgattcaatcattgtctcaacagccttcagctttccaacctttgtcagagatgcaagtgttgtaaacacaatttcatgccactgctcattttctgcagtcaagagatctgcaattcgaaccatgggaattcttgacaaaatttcatccgcaattgtggcatcaacatgctcagatatcttggtcagaacagaagagaggttggctagagttgaagtatcttcacaggcaccaagaagatcaattaatttatctatggaacctgctatttcaagagagtgagcaagatttatgtagtctgatggggaaaatataactgtaattgcggcagtgactgcaaaaataagatctagtgaccctatagaaattatctctgctattcgagggccaagtattttgctgaacccaattctatttgtctcaagttcagacagggatctgcatgccatgagagcttgagttgtgtttaccaataaaatctcgatgtccatgaattctagcagagaaaagaatgatcccatcttctgttcggctggccgtttcatacactctttgccaaaaacaaaaagccaaggagctactaatgccacattatatgaaatggaatcagataaaagagcacgagtggcatcatttgttttgttctccaggtaaagtgagaccatgtcatgcatatgatacaacggctggtcctccagtttgataataagtgatccttcgactagttttgaaaccacgagagagaacagtccgcactgctcaagcgctgaccaaatggattccagacaagcctcaggaacaggttcttcccaagagatagctgcaagagccatgaaaaaaattcttgaattttctggcattgcttctaagctgaactcaaaagatccaaatatggtcaacgtagtctccacatctttctcattgacgtatgaaactggaccaggtgcacatgtggcatatgttgagaggttggatatagctttctcccatttttccactctagtttccttcctcagagccttgcccatgacagcaactgtaaggggatggtgaccacatcgatccaacaagacttctgcgacaggctgtgaagtatagagaagttaaacattcaaaaaccatggtgtttggaatttttagttattctattttttcatgatgtatcttcttctaaaatatcttactttgcaagtttggca

SEQ ID NO: 7954 - DNA, 785 bp, Zea Mays
gcagagcgacgagcgacgagctaaaccccgaccgagtcgctgcttgggtgcccaagatagccctaccgcctcgcctctctcgttccccctcatcgccacgccagtcgcctccactcccagtcatctcccatcaccgacgacgtgtcgaggcgagagaagagggcgagtccaagtctagggttcccgccgcatcgacacgggcatcgcaccgcaccgcgaggggcgggcacggaggaagatggcaccgcgcgggcgcgtggagctgcggcggatcgaggacaaggcgagccggcaggtgcgcttctccaagcgccgcgcggggctgttcaagaaggccttcgagctggccctgctctgcgacgccgaggtcgcgctcctcgtcttttcccccggcggcaagctctatgagtactcctcctccagcatagaagatacatatgaccgctatcatcaatttgcgggagcaggaagaaaagtgaacggacataacaacgataaccgggatgtagctgcttcagatttacagtcgagacttaaggagatcgcaacatggtctaaacaaaacaacgctgaggagtcggatgccaatgaacttgagaaacttgaggaactcctgacaaatgctttgaggaatacgaaagccaaaaagacaagagaattatcatctgacaaagtaaaaatattcaaaacattgcgtgttggtcagcattgaacaatgatattagctgctaggtgtcaaccagtcaaccagagagtatatggtgtcatattttcaaagacgtcgt

SEQ ID NO: 7955 - DNA, 1884 bp, Zea Mays
actataataggttctctcgagccttcgccgccaagagcccgatacccgccgtcctccctgctcctgctgccgcgtgcccctctccggccacccgccgccggcgcagtgtccatgaactagcacctctttcttcgcccggtacccattcagttcgtccgcctccttctcttcgagtttgggtgcccatggagaccagcagtgcgcccgccgccgccaccgaggccggctggtacgtgcttggaccgaaccaggagggcgtcggaccctacgcgcttgctgagcttcgagaacatttcgcaaacggttatttcaatgagagcacaatgctctgggcagaagggaggaaggaatggatgccactctcgtccatctctgagctacactccgcagtcgcagcgaaggatcaatctgaacaagatgctccagatgttgatgatgattttgagaaatttcagaaggaggttatcgaagccgagacagaggtgaaggccttgaaaggcaatgatgtggaccagcaagatgatgagcggccagcaaccccccctgatggagaggaagaatttactgatgatgatggcaccatttacaaatgggaccgtactttgagggcatgggttcctcaaaatgatgcatctggtagcaaggaagattacgctgttgaagagatgacttttgcagttgaggaggaaatatttcaggcacccgatatcctgggtcctgcattagaagaaatcaacaatctacctgaaagcaaaaataaaggatcagataaagcagaaatgagaggagacaaaaagcggaaatcttatgagaatccagctgagaaaaaggaagctaacaaacctccggacagttggtttgatctcaaagtaaacacacatgtctatgtaactggtttgcctgatgatgtcacagtggaggaggacccagagactaaaaagccacgagtgaagatttatactgatagagaaaccggcaggaagaagggtgatgccttggtgacatatttcaaggagccttctgtagctttagcggttcaattgttggatgggacaccattccgtcctggtggtaagactcatatgtctgtaagtccagccaaatttgagcagaaaggtgatgttttcgtttcaaagaaaactgacaagcaaaagaagaggaagataaagaaggttgaggacaaaatgcttggatggggtgggcatgacgataagaagctgatgattcctgctacagtaattttaaggcacatgttcactcctgctgagctgagagctgatgaagagcttcttcctgagcttgaggctgatgttagagaggaatgcatcaagtttggtccggtggataatgtcaaggtttgtgaaaatcatccacaaggtgtcatattggtgagattcaaagacaggaaagatggtgccaaatgcatagagaagatgaacggcagatggtttgctggacggcaaatccatgcgagcgaagacgatggctctgttaaccatgctcttatccgtgattacgacgcggaggtgtcaaggctggatcgatttggacaagagctagaagagtccacatagagtgtatatatacacacacacaccagggattagagtaggtgtgttacctcattcataggtaggttcgcctgattgaacatgagaaagaagttattggatacacctgctaataagagtagtgaccggcttgcagagctggtgatatcatcactagcgaagtagcagcacactgctttctcaaatgtgttgtttaatgaatgagaagctcatatcgatactattaacctcggctccctatgaaagtacagtgggcatttctatctgaaatgtgggaatttttatatgcattactggcttgttcgtactggtt

SEQ ID NO: 7956 - DNA, 3812 bp, Zea Mays
gcacgagcatcgcggcggcggaggcgagggcacgcgcgggtatcgcgggagcggggcatggggaggcggagggagcgcgacggcagaaccgtgcactatagtcgaatatgaacgcctacgatacaaacataaggagtagtaaagataaagatgtagagagttttttccgatgacccatgccgcactcaccaaaaatatctgcgggccagcgcgcgtgcacattggacaagtggacaaccgaggtcaccgactagtgggccccacacgtcagcccctcgatccgcttcccatctgatgctcgtgctccgccgcgtctccttcctcctctcgtcgccctcccctcgcgcaccgctcgcaaaacctctcctgctcctacgcccgccccaaaccctagccccgacagcgcggcagctcgtggctatggccgcgtcagtcccgtcggcgggtggggcggggacgatgagccgcgacgcgttccgcgcggccgtgaccaacacgctggagcgccggctcttcttcgtgccctctttcaagatctacggcggcgtcgcggggctctacgactacggacccccaggttgcgctgtcaaagctaacgtcctcgcattctggcgccagcattttgtattggaggaagggatgcttgaggttgactgtccatgtgtgacgccagaagttgtcttgaaagcctctggacatgttgataaatttacagacttaatggttaaagatgaaaagacaggcaactgctaccgtgcggatcatttgctgaaggacttctgtaaggataagcttgagaaagatcacacattgtcaccagagatggcagaagaatacaatagagttcttgctatcctggatgatctcactgcagaacaattgggtgctaagattagggagtataagattgttgctccagacaccaagaactcattatcagatccatacccttttaatctcatgtttcaaacttccattggaccatcaggtttgagcccagggtatatgaggccagagacagctcagggtatatttgtgaacttcaaagacttgtattactacaatggcaataagctgccattcgctgcagcccaaattggtcaggccttcaggaatgagatatctccccgtcaaggccttttgagagtccgtgagtttactttagcggaaattgagcactttgtggacccagaggacaaatcccatccaaagtttggtgatgtttctgatctagagttctggatgtttccgagagaggatcaaatggcaggaaggtcagccacaagacttaaactcggaaattctatatctgagggaactgtgaacaatgagacccttggctacttcattggaagggtctaccttttcttgacacaacttgggattgacaaggatcgtctccgtttccgtcaacacctgccaaatgaaatggctcattatgctgctgattgttgggatgcagagattgaatgctcctatggttggattgagtgtgttggaattgctgataggtctgcctatgacttacgtgcccactcggataaaagcggcgagaaacttgaagcacatgagaagtttgctgaacccagagaagtggagaaattagttataacgccatcaaagaaggaacttggtcttgcattcaaagggaaccagaagttggttgttgagtcattggaagccatgaccgagaccgaggcactggacatgaaagccgcgttggaatccagaggggaagtcgagttcaaggtgtgtacccttgggaagaatgtcaccataaagaaaaacatggtttcaatcaacatcgagaagaaaaaggagcaccagaggaaatttactccttccgtcatagagccatcctttgggatcgggcgcatcatatactgcctttttgagcactgcttctaccaaaggcctggcaagaccgaggatgagcagctaaacgtgttcaggtttccccctctcgttgctccaataaagtgcaccgtctttccattggtcaagctcgagaaatttgaggctgttgccaagaagatctccaaggccctgacagcagctgggatttcacatatcatcgacatgacaggtaatacaataggaaaacggtacgcaaggacggatgagattggtgtccccctggcgatcacggttgatcacaccacgagcgtgacggtgcgcgatcgtgacagcaaggaccagatccgcgtggatgtggacgaggtggcctcggtggtgaaggaagtgacggacgggcagagcacctgggctgacatcatgtggaggtacccggctcacacggcctcggccgccgacgaggatggggcacagccctgaagaggcacagccacaacaccacccaacgatcgttggtctctgatagttccttcctgcgttccttaacagaaacagactgcattgttgtgaactagaaaaaccacctttcccacggtccgggttcacgggagagcaccagcagaattacagttattaagtggaggcccatttggaagcaggctagccaagctcaccacgtgcaaatcagtgtgtgtgtttcttgggctgcagaaattggggcagcgtagcccaccgcccccaatatttttctccgtccctcgttttcaccagtctctcttctctgtctgtcttcctccgtgcttcccggcgcgaaccctagccgagattagattggaggcgagcgccatcaccggaggaagagggcgacacgatgctgcgggttgcgggaagaaggctctcgtcttccgtctcctggcgccccgccgtggcggcggccaggggcccccttgccggtgctggcgcccccgaccgggacgacggctcggctcgcggccggagccagacgcggttctccatcgactcccccttctttgtcactgccaggggaaaccaagatgctggcctagctgacctcccagcaactgtggctgctgtgaagaatcctaaccctaaggtggtttatgatgagtacaatcatgaaagatatcctcctggagatcccagcaagcgtgcatttgcttactttgtcctgagtggtgggaggttcatatatgcatcactgttgcgtctcctcgtattgaagtttgtcctgagcatgtcagcaagtaaggacgtgcttgcccttgcttcactcgaggtggacctctccagcattgagccagggaccacggtgactgtgaagtggcgtggaaagccagtcttcatcagacgccggacggacgacgacatcaagcttgccaacagtgtggatgtggcatccctgcgccacccagagcaggatgcagagcgtgtgaagaatcccgagtggctggtggtcattggcgtgtgcactcacctcggctgcatcccactaccgaacgccggagactttggcggctggttctgcccatgccatggttcccactacgacatatccgggaggatccgcaagggccctgcgccgttcaacctcgaggtcccgacctacagtttcttggaggagaacaaactgctcataggttaagagctcaaaagctacctgtctatttatctacttcactcaggtgaatccctgctgtgctgttatattgtttcttctttttaccgtttggctattttttttgctccaagaagatcattgtcatgccaaagtgcgttttttaaagtacaaaataatgtggtactttgctgatgctaaaatgtaagtgtggagctcatttggaacatcggttttctggggtaccgcaggaagaacattgattatacatctttctggcacattctcatgtcaagaataagcacccgctattatttttcgc

SEQ ID NO: 7957 - DNA, 2583 bp, Zea Mays
cttgctggctgccttcgctcgcttcgcttccaggcttccacagtccacaccaccaccccactccgcccagctccctcgagcgcgcagcgcggcggtggcgatgccgagctcccggcggactacaggccgcggcggtgcaggcgcaggcgcaggcggcgcgggggcgggtgatgcaggaggcggcgacggcgaccgagtgccgcggttcatgggcaacaaccgcgaccacaacccgcgggagctgcgctcctgggcgcgccgcacggggttccacccctcggctttcttctcgggggagtccaactcctccttcgcctcctccgccgcgccgcagccaccgccgccgcctcccccggcctcctcgcgtcgcccgccgcgcccgccgccggagcgggaccccgatccggacgcggaggatgacctcgatcccgcgcccggccgcggacgcggcagacgcccgcgtcgacgcatcgacctccgcggcgagctccagatcccgccgggcttcggccgcgaggaggcggtgccggggtcggcggagccggacgcgcggaggggaggcgcgcgcggggacgccacccggaggaacggcggcgtcgagagaggccaggcgccggccaatgccggccggaacggcaacggagcgctcgcggacgcggacgcgaggaagaaggccgaggacgcagaggcgaagcggaaggcggaggaggccgaggcgaggaggaagaaggaggacgaggagagggatgccgagctggctgcgtactaccaggagcagtgggcgaatgaggatgaaggagctgcgggcgctgccgccgccgctgctgagacggccccgctgtatgaggcgtcgggactccggtgtggtgtaaccgagaaccccggatgggatagtatcacggatgcattgccatatattggcactcactgcgctaatactacttgaattgttgaaatggctgtagcacccctcatattttatggcatacaacattacctgtcaatagctggttcgcttgtctttgttcctttgatactggtacctacaatgggtggctctgatgaggatactgcaacagtcatctccaccatgttattaatctctggtcttactacaatactacatacttttttgggttctcggcttccactgattcaaggaagctcctttgtatatttggctccagcgttggtaattgcgaactcagaggagttcagaaatcttagtgacaattacttgagaaaaatatccctgtttggcaaccatatcttccttgtctatgcggtgcccctcagtgttgcaattgtatgggcatattcattcttcctaactgcgggtggagcatataacttcaaaggttgcagctcaaatatacccagttcaaacatattactggattcatgcagaaggcatttagaaaccatgagacgctgccgtactgatgtttctagtgcatggagaactgctgcctgggtgaggattccctatccgttccaatggggcccaccaacatttcattctaagacgggtatcatcatgataatagtgtcgctggttgcttcagttgattcgctttcatcgtaccatgctgcatcgctgctggtaaatttaagtccaccaacacgcggagttgtcagcagagcgattgggcttgaagggatttcaagttttattgctggagtgtggggtacaggtacaggatcgataacattaacagagaacatacacacccttgaaacgaccaaaatggccagcagaagggcattgcagcttggggcagccgttttagtcgtctgctccttctttggtaaaatcggagctctcctagcctctatacctcttgcattggccgcctctgttctgtgcttcacctgggcgctaatcgttgcacttggcttgtctacgttgcgatacacccaagcagcaagctccagaaacttgataatagttggatttaccctattcatctccctgtcaatccctgcatactttcagcagtacgaacccagctccaatcttatcttgccaagctatcttctcccttatgctgcagcgtcaagtggaccagttcgcacagccagcagtgggttgaattatgcagtgaatgcgctcctatccatcaacgttgtggtggctctccttgtcgcgttgatccttgacaacactgtgccaggcagccgacaagagcgcggtgtgtacgtttggacagatcccaaatctctcgaggtggatcctgctaccttggaaccctaccgattgccggaaaagatttcgtgctggttcaggtgggcaaagtgtgtcggcatgtaaaggttctcaaagtcaggggccgcgatgaaaatattctatttattccattggtaccttgttactgtaggatttactatatgagaatatataatatatatagatacagatgctacatagttaggggcctctcttgctgctgttaggttaggataagcacatgtaaagttttggtcatgttagaggggacacgttctatgagctatgctatgtaagtttgtagaaatgctacgttcaaatgaccagtcaccgagtttaaccgttacacacgtccg

SEQ ID NO: 7958 - DNA, 1131 bp, Zea Mays
ccttctccgcggagggccacgggcacggcgacgcatccggcttccggccctcctgtccccggaggtcaccgccgccgtcttcgtgggcggccataccggccacgatgaatagcatcaagtcggctatcttctccggccatcggtcgcacccccacgtgggggcggcggcggtcccgcagcagcagctggggagcaccgcttcgttccactcgacacccattctgcagcggaagcacaagacccagtggcacaacagattcaactattatacgagacgtaggaggaacagagaaactaaaaggtcaatgctacggaacatgtcagaatatgcagagtctctctttcagagttggcgtgatgaagatgagaaaaatgctgcatctgctgggccttcatggtttagaggacatcgttgggtcagaaattcaagcaacaatggtttccgtacacacgatttttattacgggaatttcaaaagcaaagaggaactccaaacgtgctcgctcacaaaaatccagaaactggagttttgaaacagacgaggaggatgaagtatcagctccatcagaggtatctttggcacgacaagctcttgggttgagcacttctggtccgcttaaacttgaagatgttaaaagcgcataccgagcatgtgcacttagatggcatccagatcgccacaatggatcatctaagtctacagcggaggagaaattcaagcattgcagtgcagcatacaagaccttatgtgatagtttggccgctgcatagataattttgaatgaagatggactctggatgagccccttccaaactttctagctgcaaattctgaagagctgccacatgcttgtggtagctccgaccatcccaatcccaagaggcgggagtcgcatttcttggttattgaggcgattgagtcaattcaaaattgaccggataatatatgtactgtaccgtgtaaaattttttctcacagctcattgttgtattatttttatagatacgaagatattgttcacaccactcaataaattttcttggctgagttgtatcacaatttaggtttggatgttttccgtgggttgcatttgtcagtgttcaatgaaggtcatacatttagatattgcc

SEQ ID NO: 7959 - DNA, 1139 bp, Zea Mays
ccttctccgcggagggccacgggcacggcgacgcatccggcttccggccctcctgtccccggaggtcaccgccgccgtcttcgtgggcggccataccggccacgatgaatagcatcaagtcggctatcttctccggccatcggtcgcacccccacgtgggggcggcggcggtcccgcagcagcagctggggagcaccgcttcgttccactcgacacccattctgcagcggaagcacaagacccagtggcacaacgtaaatacagattcaactattatacgagacgtaggaggaacagagaaactaaaaggtcaatgctacggaacatgtcagaatatgcagagtctctctttcagagttggcgtgatgaagatgagaaaaatgctgcatctgctgggccttcatggtttagaggacatcgttgggtcagaaattcaagcaacaatggtttccgtacacacgatttttattacgggaatttcaaaagcaaagaggaactccaaacgtgctcgctcacaaaaatccagaaactggagttttgaaacagacgaggaggatgaagtatcagctccatcagaggtatctttggcacgacaagctcttgggttgagcacttctggtccgcttaaacttgaagatgttaaaagcgcataccgagcatgtgcacttagatggcatccagatcgccacaatggatcatctaagtctacagcggaggagaaattcaagcattgcagtgcagcatacaagaccttatgtgatagtttggccgctgcatagataattttgaatgaagatggactctggatgagccccttccaaactttctagctgcaaattctgaagagctgccacatgcttgtggtagctccgaccatcccaatcccaagaggcgggagtcgcatttcttggttattgaggcgattgagtcaattcaaaattgaccggataatatatgtactgtaccgtgtaaaattttttctcacagctcattgttgtattatttttatagatacgaagatattgttcacaccactcaataaattttcttggctgagttgtatcacaatttaggtttggatgttttccgtgggttgcatttgtcagtgttcaatgaaggtcatacatttagatattgcc

SEQ ID NO: 7960 - DNA, 1122 bp, Zea Mays
cttccgtcctcctgtttcccgtcccgcacagcgctacgcacacagactatatttctctctctctctcgtcctctatcgctcgtccgatctgcatctgcttttcttcccccccctccgcgtgtcccctgtcccttccggcgtgcgcgaagatttgattttttttttgtcggggagaaggcggagtaagacagaccaggccgcgggaggaaggagatcctgatctgttcttggagtggggaggcgaggagaggagaggaggaagatggcggcgcaggagcaggagcacgagaagcagcaggcgaagacgagcaccacgagctcgctcccctccagcagcgagcgctcctccagctccgcccccaacaaccttagggaaggagccccttagctgaagctgccggcgcaggcgtggagagcgacgaggagatacggcgggtgccggagctgggcggcgcgtcggcgtcggcgtcggcctcgtcgggcgcgggcaaggaggacggcgcgcgggcggtggccgcgggggcgcaggggcaccctccggcggccgggaagaagcgcggccgcgccccgggggacaaggagcagaaccggctgaagcggctgctgcggaaccgcgtgtcggcgcagcaggcgcgggagcggaagaaggcgtacctgacggagctggaggcgcgggccaaggacctggagctccgcaatgcggagctcgagcagcgggtgtccacgctccagaacgagaacaacacgctccgccagattctgaagaacacgacggcgcacgcgagcaagaggagcggcggcggcggcaagggtggagacggcggcaagaagcaccacttcgccaagagctaatgagaattgagggactgagggagggagctggttcgtgctctgctcgcgctcgcctcacctgaccattgttggtggtggttgatgttgctgttgctgatgaccaaatcccgtctccccggccgctgctgtgctgggactgactactcaccactgctgtagggatgtggttgtttttgggggcgttttgtactggtcttgaaaggagaagcctttatggaatagatagatctttcggcagggtttgaagcgatttttctccatcatttacaa

SEQ ID NO: 7961 - DNA, 1626 bp, Zea Mays
ccccctcccctgttttccttcccatctcatcacaagcagaagaaaatcgagataacgagagctagggttttgattccagtactcacgccgcatcctgtctccttctgcccctccctctcggcaccgcctccgccccctcattctctctcgcgtcatccggcggaggctcgaggaaactgaggccgggagcgccccgaagaatattctccacccagtcgccgacacccctgcgcgcgcgagagtaagtcgcctcccccgccgccagtgctcttcgtgatgatatatttccagatccggtttgtccgacgcagatggtagggctggagaggctgccgatgtggtattgaagagggatttagatgcatgaattttgtgttcgtaacgtggattggtgtggggtgggagaggctcctttgccggattggccaggttaccattgtactgttgtagcttggcagttggttgactgtgtgacaactttgagctatgtcatattacgaaagaaggggtggagacaggggtagtggccgtattcaaggaagtggtgggcgaggtggacatgtcctgcgtggaagatcaggattggctccccgaggacctcttggggttaactcccgtccatctgcacgcactattgctaagtcatttagcagaaccaaagacatgacatggcgacctgatctatttagtgatagcatggcggctagtggaatagaaactggtacaaaattgtacatttcaaacttggactatggggtctctaatgaggatataaaggagctgttttcggaagttggtcatttgaaacgctttgctgttcactacgatggttatggccgcccaaataggtggtgtttacacggaggagcgatgcaattgctgcactgaagcgttataataatgttctacttgatggaaaagctatgaagatagaagtcatcggaaatgacttaggattgcctatgacacctcgtataaatgttgttggggcttctaatggcagagctacaagaacagttgttatgacgcctgagtttagtcaacgtggcagaggttcaagcagtagacctctaagtaatcccagcaacaggtttaataaccgtggtggtttccaagctggtcgaggccgtggccagttccagagctgggggagaggccgtggtcagttccagagccgggggagaggccgtgcccagttccagggacgagggagaggcaggaagcctgagaagactgcagatgagctggataaagacctggaaagctatcacgcggaggcaatgaaaaccgattgattgcaaggccggtagtgccacaaggttgtggttttatccatcattttctgggagcaacgaacatgctttgtgctttggtttcaggagactagactcttgtagtaaattcgaacaaaagattgccagtttgtagtgtttgcatgaagtttgcaacctgatgtgtttatttttgtatcggttgctttggagattgtgttaatttttaggttcatgcttagaataaccgtaattggccaaaacatgcacccggccctgttccgctctgcgatgtgccttcgcagcattgtgttatttttagcatattgcagtttgtcggaggttagtccggtgc

SEQ ID NO: 7962 - DNA, 1586 bp, Zea Mays
catggagcacccacgcatggatcaaaatcctcccccaaaacgcgacgaaattctccgcgagcaaaatataaagtttataaacccactcctccccttcccctgttccctctaccaccaccaccggcaccgcgggacagtctgctctcgtcccgctgcagcccgtccccgacccggaaccctagcgactgccattgcccacgcgccgctcgcccgatgaacggcgggggctctgggctggcgcccaacgccgcgcacaccgcggacgaggtcttccgcgactacaaaggccgccgcgccggcatgatcaaggccctcaccactgatgtggagaggttcttcaaactctgtgaccctggtgagtgcgctcgatctctttggttcctcgccccaggatgtggagtgatagccgaggaggcttccgtggtttttctgcttgggcttcgttgcttcgaaaaggagaacttgtgcctttatggctatcccgatgagacgtgggaggtgaccttgccagctgaggaagttccccctgagatccctgaaccagcattaggaatcaactttgctagggatggcatgaatgagaaagactggctggcgctagttgcagtccacagtgattcctggttactgtctgttgcattctactttggtgcacgctttggatttgacagagaaactaggaggcgactctttagcctgataaacaacatgcccacgatatttgaggtagtgacaggagcagccaagaagcaggcgaaggagaagacacctaatagtagcagcaagagcaacaggcctagttcaaaagtgtcaagagcagagtctcgttcaaaggctaaggtcccccaagacgaagaagagagcggtgatgacgatgaggatgaggaggcagacgagcacaacaataccttgtgtggaacttgcggaactaacgacagcaaggaccagttctggatctgttgtgataactgcgagaagtggtaccatgggaagtgtgtcaagatcacgccagctcgagctgagcatatcaagcagtacaagtgcccagactgcaccaacaagcgggccagggcatgagcggcaaacatcggcatcgggcgacctttgataggaaggaagaaaccacctcctggcttcaagatccctagatatggcgtaggtccctagtttacgaagtctgcattttcatgtgttcattaatatatctgctgattagctgttcgacctagcagtgtctaaaacgtgccgtgtgtcttctgtgctgagtgttgacatggggcctcctccctccagcctgtaaacgctgtcactgaaggtacctctcaactgaccatccttcattgttggtgtcgtgcagtgagtagtggccgtactctttgttcccagttcctagcatttgaattgctcaaatgcgtaccttgctgagtaaggccgttggaaaatgacgaatagctgcatttccgtgggtctcaatgttccccaaagggcaccaccactgaaccattttttttccttgaggaatctccctgttaaccactaaggcccctttggaacataggaatttaataggaaccatttgagaattt

SEQ ID NO: 7963 - DNA, 3948 bp, Zea Mays
cgcactccacccaccgccacctactcgctacactctccatggctgccagataacggctggtgcttaaactactccggccgagctggccgtgctaatgccgctgcggctgcgtgcggtggcacagcgcggcctgcccctgtcgcgatgacacgccgcccggcctcctccgcgccttcggcggcccggctcctcctcctcctcctgcttcttctgctgctgcactgccagtgccaccgcgccggcgcggcgacggacgcggagcggcgggcgctgctggacttcaaggcggcggtgacggcggacccggggggcgtgctggcgtcgtggacgcccacgggggacccctgcggcttcgtcggggtcacctgcgacgcgtccacgggcgccgtgaagcggctgcgcgtccacggcgccgggctggccggcgcgctctcgccctccctcgcgcgcctccccgcgctcgagtccgtctcgctcttcggcaacgccctcacgggcggcgtcccgccgagcctccgcttgctggcgcccacgctccgcaagctcaacctcagccggaacgcgctggccggcgagatcccgccgttcctcggcgccttcccgtggctccgcctgctcgacctctcccacaaccgcttcgccggcgggatccccgccgcgctcttcgacccctgcccccgcctccgctacgtctcgctcgcgcacaaccacctcaccggccccgtcccgcccgccatcgccaactgctcgcgcctcgccggcttcgacttctcctacaaccgcctctccggcgagttcccggaccgggcctgcgcgccgccggagatgagctacatctccgtccgcggcaacgcgctctccggggacatagccgccaagctcgcctcctgcggcagcattgacctcttcgacgtcgggagcaacagcttcaccggagctgcgccctttgcgctccttgcatcggtaaacatcacctacttcaatgtctcctccaacgcctttgacggtgaaatccccagcattgcgacttgcggcaccagattctcgtacctggacgcgtccggcaaccgcctcacggggccggtgccggagagcgtggtgaactgccgtggcctcagggttctggatttgggggcgaatgctcttgctggagctgtaccgcctgtgattgggacactgcggtcgctctccgttctccggctcgcgggcaaccctcgcatttccggttccattccggctgagcttggagggattgagatgctcgtcacgctcgacctcgcgggccttgctctcacaggagagattccagggtcactcagccagtgccagttcctgcttgaactgaatctgtccggcaacaagctgcaaggagtcatcccaggcacactcaacaacataacctacctcaagatgcttgatctccacgggaaccagctccaagggggcattcccgtcacgcttgggcagctcacaaaccttgttctcctagacctctcggagaaccagctgactgggccaatccctcaagagcttgggaacctctctaacctgacacacttcaacgtgtccttcaacaacctatctggcatgatcccttccgagccagcattgcagaaatttgatttcaccgcatacatggataacccgttactatgtggctctccactgcccaataactgtgggcctgggactgggatgaagcaccggaaacgattgcgtgtgcctgtcataatcgccattgttgctgcagccctgatacttgttggaatatgcattgtttgcgcgttaaacatcaaggcttacacacgtaagggcacagacggggacgggaaggaagaggaagaggttcttgtgtccgagagcacccctccagctgcctctccaggctcgaatgcaatcatcgggaaactggtgcttttcagcaagagcttgccttcaaggtatgaagactgggaaactgggaccaaggcgctacttgataaagactgtctcatcggtggtgggtcgattggtacggtgtacaaggccacttttgagaacggcctgtccattgctgtgaagaaactggagacagcagggagggtgagaggccaggatgagttcgagcatcagatgagccagcttggtaacctcagccaccccaacctggtcgcttttcagggctactactggtcatcctcgatgcagttgcttctgtcagaattcatggccaacgggagcttgtacgaccacctccacggctaccgtcctcctcctcgcgctctctctgagagcagcagcagcagcagaggtggtggaggtgaactgttctgggaacggaggttcaacattgcgctcggagcagcccgtgcactcgcttaccttcaccatgattgctggccacagatcctgcacctcaacatcaagtcctccaacatcatgttagatgggagatacgaagctagactgtctgactacgggttggggaagctgctgccgatactaggaagcattgagctgagcagaattcacaccgcgatcgggtacattgcgccggagctggcatctccgacactgagatatagcgacaagagtgacgtgtttagctttggggtggttttgcttgagatcgtgacggggaggaaacctgtagacagccctgggataggagctacagctgtggttctccgtgactacgtgagagggatattggaggacggaactgcgtcggactgcttcgatcgaagcctgagggggtttgtcgaagctgagctggttcaagtgctcaaactgggcctggtgtgcacttccaacacaccgtcaagccgacctagcatggcagaagtggtacagttcttggagtccgttagggttagctcttgaccttctgctgtcggatcggaacatagcagcagaattaggatgttaacatggaaaggattttctgattttttcaacagatgaaggcatagcaaaggaccaggagtttcagtttccccgggcgccatcagagaagagcttggaggtggccagcgacgaggaccagctgaacaaggacagtcagtccatggaagcccattgagaccgaggtgtgcgtacaagctctgtccgttgaggaaaagtatcacatcgctgcagcatattcagacaaaaattcataccacatcgctacgggaacgggggtccattgcatctgcagtccgctgagacaacaggcaagccacggatgcttcttctcattggcaggcgcaggttgttttttagtattgtattattgccattgtatgatgctgacaccacaaccgctcccgctaaacgctaatgacagtgggttttcccagctcttgctctgtctgatgtttcaggggctcatgaaggagctcttcaccatcgcgtgttctttagctgcacggctccggcctccggggctgctgcacatggacgtgccaaacggtgcagaatgcacgtgaggccataatggagagaggaagcatggcaaggtagaaagcctagccgtcgggcgtcgggtgactggtgttgtaccgtcgtctcgtgaaaatattggtccttttttttttaaatggaacggtatgcaggagaggagacgcactgcaactttctttgtacagcagattcgaaagaaatgtcctgctgctggtccatattatcattcattcatgtggtatggaagcacttggtattgaacgtgtgaacttttgttgcaccgtctgaaagaccatcagactatctccagcggctcacccattcttatacttgtatttaaactttactttacaaacaatacaatttatagtgcaaaacaatgttttgggtgaccatatagatgaaccgttggacacggtctcactagagttcatgtgaaactagtgaacttttgttacaccgtctcaaagaccatgtactagagttcatgtgaaactagtgaaatcctgttacaccatctcaaag

SEQ ID NO: 7964 - DNA, 3075 bp, Zea Mays
gcgcgaactccgcaggactagacaggagacaggatgcgacgtgcccgtgcgtgagcgtggcgccgtccaccagactgtctagttccggtcctcaccccgcccgtccatttccgacttggccgttcctcctccacgccccggcgcgcgttccggcaaaacgggaggcgaggccatccgcgcgcgcgcgatggcgccggacccgtgcggcgacctcgtggtgacgccgaagacggcggccaaggacgaggcgtcctgctccgtgcccacgccgcccaaggtcactcccgacgaggtgcgcgcggtggcgcgcaagttcgcggaccagcctatccaggagacggagcccgacgtttgggccgtcctcaccgccatctccaagaaggcccgcctccggccccaggggatgaacatacttttgagtgctgacgagcactgcctaggacgatctgttgaggagcggtttcggatttttgcccagcagatcagcgggatgcattgcaaaatatacagggacactgtcttaggggagctgaaccgccacgagcctgtgcctgttttcctcaaggacacaagctcaaatggcacattcatcaactggaaaaggctcaagaaaaattcatccccggtcaagcttaatcatggcgacattatatcattatcatcacctcctcatgacgacaattcctttgtatttgtctaccgcgaagttaatgcaatcagtcgtgtagagaatggggctcccattcttaaaaggaagtcagtggagggtggttctggaagcaagaggctaaagggtcttggtattggttctcctgatggtcctgtttcactagatgatgtccgaagactagaaaaatctaatgctgatctcagggaacaacttgaggcacatgttgtgacaattgagactttgagggctgaaataaaaacagcccaagtgcagcatggaaaggaacttgaggagctaagagaaactatatcgagttcttatctggatcaaactaaatctcttcggtcagcacttgaggagaaacagaagcaaatagattcactcagtacatcaaatacagagttacagaactctataaaagatctggatgaaaggcttaatgcatctaaacaatcacgtgcagatgctgacgagataatttcaagccagaaaggaatgatatgtgagcttgagggacagctaaatgaggagagaaatttaagaagagaagagcgtgataaggctgcacatgacatgaaatctgcattgcataaagtgcaagccgaggctcaagaagaaattaagaaacaggcggagtcttaccttaggcaacaaagggagcagaaagaagttattagcaagcttcaggaatcagaaaaagaaacccgtttgtttgtggaaactttgaggtccaagctggaagatgctcgagataatcttgtaacatccgagaaaagagtaagagagctggaagctcagcttcaggacgagcagatggtatcagccaataatcgaaagaagacagaaaatctggaagctgaattgagaaaactgaagaaggaactcgacaatgagaagcaggctgctcgagaagaagcatgggcaaaggtttcagctcttgagcttgaaatagctgcaacgattagagatctatcaattgagaaacagaggtatcagggagctagagaacggattattctacgggagactcagctgcgtgctttctattcaaccacagaagaaatctcttctctgtttgcgaaacagcaggaacagctgaaagctatgcagagaactttggaggatgaagagaactatgagagcaccttaatgggtgtggatcttaataaagtacctctaaccactgataatgctggtatgaagccagtagactgctcaaaaaatacagtgggagcttcaagtgcttcaccagaaaatactcaggtaagtgaacatgattccagtgacgaagatgccaacatgactgagcagcaggatgatgatggtactgccattggtggcagcactcaaggtctagaatgcaccagtccagaaaggtcagaggggagattgaagtcaggttttcatggcaatccggtttctacagctcctgagagagaggttacagataccgagcaagttcccgagacagatagccaagctggtaatgctggttgcgatgaccaaagatgtgacaacacgggaggagagactatgccactagaagatgatatgctgctcccagataacgaggaacctactgcattgctgaaagatgtagggcagccacaagcaaatgtggttcctattccaatccccggtgatggcgttgggcactgtttcgaagaaaaacatgagggtgcctgctctgagagcaaacgggaggacacacatgctggagccatcagaacggctgatctgttggcctcagaagtcgctgggagctgggcagtggaaacagctccgtctgtcaatggggagaacgaatctccaaggagcttgggcgatgctacagagcacgatgaagctggaggcagcgtggcaggcgatgctttggtaactctggtgaactcagagggccaggcggctgggagccagaacaatgttgagcgtggcagctccaaaataacccatcatcatcatcatcatcgtcatcaccatcgtgttcttagtgccatgattggaattgttgatcctgagttcaggaagcaaatgtccggcagaagcggagttggaaacgaggaacccatgtctgacgccgagacgggtgagggcatcgaggaaggcgattcagattcaggttcagacggcagtgacagcgaggaggctatggttgaggattctgtcgtttagcttaaacagaagtgactgctcactgtaaatatacctcaattcgttttgtgtacctttcgttgtatcatcatgcgtagcgtaagcccctcgtgtgcgtttgattattttattcgttaagtgtcctcagcagctcgtggtgcatgttgtacgaaatcgaggccttttggtcttcaacacaaataaatatatgtactcacttggtttacaattataaaccgttttggtttttttat

SEQ ID NO: 7965 - DNA, 1227 bp, Zea Mays
gcgcgaggcgatgctgcagtctccgcctccattccggcctggtgtccaccctttgtcgcttcttctctgcgaccatcgtcaccaccagccaccatcaccatccctcccctcggcctcgcggtcgcagcggtcagagcctccgagatggagctccgcctctgcctccgtctccacgcgcgcctccctcctgccacgacgccaccgcctttccaggcgaccgcggtgctcccggcctcccgccgccttcggacgggtggtagctacggggttgctcttaggcggcacacgaggcgttcgagtccggcaatctgcgcttcaataaccgacggcgagcagggcgtggctgtgaaggagaggagcgtctcggtgatcctcttgtccggagggcagggaaagagaatgggggcgaatatgccaaagcagtatctacctctactaggactaccaattgcattgtacagtttaaaaacattctgtcaactgaaggaagtcaaagaagttgtggtagtgtgtgatccagactacagtgatgtatttgaaggttctattgacaacttgcaaataccccttaaatttgcacgcccgggaaaagagagacaagactctgtttttaatggacttcaggaaattgatggggattcagaactagtttgtgtccatgattctgcaaggcccttagtttcttctgaagatgtaaaaaaggtcttagaagatgctgcagtacatggagcagctgttcttggtgtgcctgtgaaagctacaataaaggagtgaaaactcttgaccggaaaactctctgggaaatgcaaactccacaggctatgaagcccaatttactcagagatggttttgagctcgttaaacgggatggccttgaagtcactgatgatgtatccattgtagaatatctaaaacaccctgtgtatatcacggaaggctcttatacaaacattaaggtgactacgcctgatgacttgctactagctgagcgcctgatgaatgaggaatagaggtgataggcaaaattagctctttgcctgattttacagacaagtacgattttgtaggacggcatttatctacacttctacagttttcaaaaaccaaaataattatggagctcatgctcgagatatctgagctctctgtagacattatgtcattctttctatattatatatcaatgaaaaaatggccacgctttctgccgagttcatgctttggcgg

SEQ ID NO: 7966 - DNA, 1364 bp, Zea Mays
tagtgcggtgttggtgtaccatatatatgtcgaccgataactgaaagaaggtgcaggcgcagggtgatcatatggaatcatgcgtgcccccggggttcaggttccaccccaccgacgaggagctcgtcggctactacctccggaagaaggtggcctcccagaagatcgacctcgacgtcatacgcgacatcgacctctaccgcatcgagccgtgggatctccaagaacactgcgggatcggccggtacgaggagcagagcgagtggtacttcttcagctacaaggaccgcaagtacccgacggggacgcggaccaacagggccaccatggcagggttctggaaggccacgggcagggacaaggcggtgcacgacaggagccgcctcatcggcatgaggaagacgctcgtcttctacaaggggagggcgcccaacggccagaagaccgactggatcatgcacgagtaccggctcgagaccgacgagaacgcgcagccacaggaagaaggctgggtggtgtgccgggcgttcaagaagagaacagcctacccagcaaggagcatggcgatggcatgggaccccagctacgcctaccgcgaggccagcgccacgggcgcggccgcgttcgtggaccccaacgcggcgtcgtacacgcagatcaggcgccagcccaacaagagcgagcgcttcaagcaggagctggccgagctggacggcgccgccgcgctgctgcagtactccgccagccacctactcgagctgccgcagctcgaaagcccgtcggcgccgctcgcgccggccaacccgagccaggcgtcagcggctgatgaggcggcggtggacgccgccgacagcggtcggcggccgggaaagaaggcgcgggctgataaggcggccacggactggagggcgctcgacaggttcgtcgcgtcgcagctcagccccgcggcggcgtcgacgaccgccgccgccagcagtgtggcatgctcgcaggtggaccacgttgaggatgacgacatggcggcattgctgttcctcaacagcgacgacgggagggacgaagcggagaggtggacggggctgctcggccccgccgccggcggggacggcgactttggtctttgtgtgttcgagaaatgagtagcggacgctcgcgtgcgcgtgtccaggcctgcagtcctgcacggtgcgtcgcggatgcatgcatacatgggatggtgcatgcgatggttatatagctgaaagctggtcctctctctttttttccttctctactttcctttgtatgtttcccaagagatgtgattgtaattttcatctctctgtgcagactgcagagttataatatgcatgtcattccggcag

SEQ ID NO: 7967 - DNA, 1877 bp, Zea Mays
atcaacatcctcctccacccgaaccaatcttgtagcatttccttccgctgcgaacacccaaacggcagctttctactaggggaagagaaacgttttcttgtctcaacgatcgatgcgtcgaccgcacgagcagctgcctagattggcgtcaggtctcgctctactggcctgcctcgccgtgctcgctcgttctcgcgttgccggcgctggtggcatgccggcgaccttcatcttcggcgactcgctcgtggacgccggcaacaacaactacatcgtctccctgtcgaaggccaacttccccccgaacggcatcgacttcttgggccaccagcccaccggccggtacacgaacggccggaccatcgtcgacattctagggcaagagatgggactgggagggttcgtgccgccgtacatggccccggagaccacgggcgacgccgtgatgagaggcgtcaactacgcgtccggcggcggagggatcctcaacgaaaccggcagtatcttcgtcagtacatggccttccactggaactgttgtgtgaaatcctcgtgctagtctagcagcagtactacgtaccacaaacatgtgttttaccccccaacgcttagctagcttgttcccgcgtaacttcggatcatcgcgtctgcgtgagttagttcttctcttttgcgtgaaacacagagctatcaattaagtaacgaatctacaaaaaggaatcgattttaaatttaaaaagaaaagaaatcattttgaatgggagacacaggcagacagtacggttgccttgccttaacaaaagctgttgcttgacagggtgggcgcctgaatctggacgcccagatcgacaactacgcgaacagccgccacgacctgatggcgcggcacggggaggtggaagcggtgagcctgctgcggggcgcgctcttctcggtcaccataggctccaacgacttcatcaacaactacctcacgcccatcttctccgtgccggagcgcgccacgacgccgccggtcgccttcatcagcgccatgatcgccaagtaccgccaacagctcaccaggctgtacctcctggatgcccgcaagatcgtggtggcgaacgtggggccgatcggctgcatcccgtaccagcgcgagacgaacccgtcggccggcacggcctgcgccgagttcccgaaccggctggcgcgggcattcaaccggcggctcagggccctggtggacgagctgagcgccgccctccccggctcgcgcttcgtctacgccgacgtctaccgcatcttctccgacatcatcgccaactacggatcccacgggttcgaggtggcggactcggcgtgctgctacgtcggcgggcggttcggcgggctgctgccgtgcgggccgacgtcgctgtactgcgcggacaggtcaaagtatgtgttctgggacccctaccaccccagcgaggcggccaacgcgctcatcgcccgccggatcctcgacggcggacccatggacatctcgccggtcaacgtacgccagctcatcgtcacttgagttcaaccgttggatcaccagccggtgctacggctcagcgctacatattgatttgcattcactttttccgaaaagagattagtttgccttttttcaacaaaaaaaagagatcagtttggggtgattcaaactccggtgtaacatcatttttcgtgtttagatagctagtagtaggcagtagcacagtatcttatctcgtgcgcgttgttctatttttatctctgtgccgtgcgttctagttcaccatttgaactcttgagacgtgaacttatgaaatgttttaggggttgtttggatacatcaactaattttaggggtgtttgttttctagggac

SEQ ID NO: 7968 - DNA, 1115 bp, Zea Mays
atgaattctaaaagaagtgtaattggtagttaatgctaaatcaaggcagttgcaggttcagggtcaaaagtacgatccggacggtgaatatgtaagaacttggattcctgaacttgctagaatgccaacagaatggatccatagtccatgggctgcgccaaactctatattacaagttgctggagttgagctgggctttaactacccaaagcccatagtagaacttcatatggcgcgggaatgtttagatgacgccatctccacaatgtggcaattggacacagctgcaaaacttgctgaactagatggtgaagttgttgacgacaatctgaataatatcaggaattttgatatcccaaaggtggttttgaacaagaaattatcaccaagcacttcatccatggagcacagggtgttgtctactaatggcaaggacgaaaagtcgcagcctactgaagtgaaggccctgtacaaacagattattcgagatgatatgatgaatgactcaaacatggatgacacatgctctactgctaacttgaaagtgacaaggaaaagatctagcagtgatagtgcgttcaatgttccctcatgttcatcctcattagtcatggaatcacggattcatcataatgaacctagttctgttctgtattcaggctacttccagaagacagcagacagagatggcactagttgaagataatgacagtgaagatagtggtacgagcatctctaggccatccaagaaagctgcttagcattagcgcattgaagatgttgcaaatcttcaatgagaaatatttaccgtcacatgtaatttagctggtgcgtttgtagtgatcatgcaaaagctgttctgtgaattataattagttttacacggcctatccttattccgatagaaggcaatttttgtttggtgaaaaaacatcgctcacggacaggccatagtttgctgtcgctgctgaacagcctaatgcctggtgtaaatgactcatcaacgttacgacactattagcgctggttggttttgctatcaatccgtattcatggattgggtaagattgagtagatttaaatatcaaataaatcaaaatgttttataatttttt

SEQ ID NO: 7969 - DNA, 2671 bp, Zea Mays
aaacttgggacgggcaatcgtctttccatccccaaacttaccacaatcaaactgatcaactgacaactagggatgggcaaccaggctctctttcccagttgatgcgcgtcggatttgcttgtccgctatgggacgctggttcaagcccctttctcacccgccacactccatcacttgtcgctactcaccagattgccccgcgcccatgctgctgtggccgcctagctcgtgatcctgttctcctacccacaagttgcgattcgatctctggcgcagccatcgaatccatcctttgtccttgactcatacttctgttgcaatttgcgtgctggttcctccggtggtgcatgtgcacgggccatgttcgacgaggtgggtttgagaagttctgttacatggtaatccccgtccttgggcttgtcatggtcgattgggaacagtaggattggttgctgagcatggctggaccggagaagactgttgtttggttcaggagagacctcaggatccaggacaacccggccttggcagcggcggcgaaagggggctctgtcctccctatcttcatatggtgcccctcagactacgggcagtactaccctggaaggtgctcccggtggtggctcaagcagtctcttgtccaccttgggaagtcattagagctgctcgggtgcccactcgtgctgatccgtgcggaggacagcactcttgcagctcttttggagtgcgttcgttccatcagtgccactagagtggtttacaatcgtctctacgaccctatttcacttgtgcttgacaacaaaatcaagaatgagcttccagcccatggaatttctatccaaagtttcaatggtgatttactttacgagccgtgggatgtttatgatgagaatgggcaggcatttacaacctttaacaagtactgggagaaatgtatgagcctacctattgagatatcacaatatcttgcacctacaaggctggtggcagcgccaggtctagcaaatgttcgctgttgttcgattgatgatctaggtcttgaatctagtaaggatgtggaatcaagcaatgctttgctaagcagggcctggtctcctggctggcgcaatgcagagaacatgcttgaggaatttgtgtcttatggtcttctagaatattcagaacatggtatgaaggttgggggaagtactacgtcattattgtcaccgtatctccatttcggggagttgagtgtaaggatgatttatcaacttgttaaaatgcgtcaagtcaagtggcaaaatgaaggaaaatctgaagctgaggagagtgttcgattgttcctacgatcaattggttttcgagaatattcacgggaatgactggatacccattagtagatgctggcatgagggaactctgggctactggttggacacataatcggataagagtgattgtctcaagtttcgctgtaaaatttctacagataccctggatttggggaatgaagtacttttgggatgtgcttctggatgcagacctagaaagtgatattcttggttggcagtacatatctgggagtttgcctgatggacatgagctcagtcgtcttgataatccagaggttcagggtcaaaagtacgatccggacggtgaatatgtaagaacttggattcctgaacttgctagaatgccaacagaatggatccatagtccatgggctgcgccaaactctatattacaagttgctggagttgagctgggctttaactacccaaagcccatagtagaacttcatatggcgcgggaatgtttagatgacgccatctccacaatgtggcaattggacacagctgcaaaacttgctgaactagatggtgaagttgttgacgacaatctgaataatatcaggaattttgatatcccaaaggtggttttgaacaagaaattatcaccaagcacttcatccatggagcacagggtgttgtctactaatggcaaggacgaaaagtcgcagcctactgaagtgaaggccctgtacaaacagattattcgagatgatatgatgaatgactcaaacatggatgacacatgctctactgctaacttgaaagtgacaaggaaaagatctagcagtgatagtgcgttcaatgttccctcatgttcatcctcattagtcatggaatcacggattcatcataatgaacctagttctgttctgtattcaggctacttccagaagacagcagacagagatggcactagtaaggttgaagataatgacagtgaagatagtggtacgagcatctctaggccatccaagaaagctgcttagcattagcgcattgaagatgttgcaaatcttcaatgagaaatatttaccgtcacatgtaatttagctggtgcgtttgtagtgatcatgcaaaagctgttctgtgaattataattagttttacacggcctatccttattccgatagaaggcaatttttgtttggtgaaaaaacatcgctcacggacaggccatagtttgctgtcgctgctgaacagcctaatgcctggtgtaaatgactcatcaacgttacgacactattagcgctggttggttttgctatcaatccgtattcatggattgggtaagattgagtagatttaaatatcaaataaatcaaaatgttttataatttttt

SEQ ID NO: 7970 - DNA, 2737 bp, Zea Mays
aaacttgggacgggcaatcgtctttccatccccaaacttaccacaatcaaactgatcaactgacaactagggatgggcaaccaggctctctttcccagttgatgcgcgtcggatttgcttgtccgctatgggacgctggttcaagcccctttctcacccgccacactccatcacttgtcgctactcaccagattgccccgcgcccatgctgctgtggccgcctagctcgtgatcctgttctcctacccacaagttgcgattcgatctctggcgcagccatcgaatccatcctttgtccttgactcatacttctgttgcaatttgcgtgctggttcctccggtggtgcatgtgcacgggccatgttcgacgaggtgggtttgagaagttctgttacatggtaatccccgtccttgggcttgtcatggtcgattgggaacagtaggattggttgctgagcatggctggaccggagaagactgttgtttggttcaggagagacctcaggatccaggacaacccggccttggcagcggcggcgaaagggggctctgtcctccctatcttcatatggtgcccctcagactacgggcagtactaccctggaaggtgctcccggtggtggctcaagcagtctcttgtccaccttgggaagtcattagagctgctcgggtgcccactcgtgctgatccgtgcggaggacagcactcttgcagctcttttggagtgcgttcgttccatcagtgccactagagtggtttacaatcgtctctacgaatgagcttccagcccatggaatttctatccaaagtttcaatggtgatttactttacgagccgtgggatgtttatgatgagaatgggcaggcatttacaacctttaacaagtactgggagaaatgtatgagcctacctattgagatatcacaatatcttgcacctacaaggctggtggcagcgccaggtctagcaaatgttcgctgttgttcgattgatgatctaggtcttgaatctagtaaggatgtggaatcaagcaatgctttgctaagcagggcctggtctcctggctggcgcaatgcagagaacatgcttgaggaatttgtgtcttatggtcttctagaatattcagaacatggtatgaaggttgggggaagtactacgtcattattgtcaccgtatctccatttcggggagttgagtgtaaggatgatttatcaacttgttaaaatgcgtcaagtcaagtggcaaaatgaaggaaaatctgaagctgaggagagtgttcgattgttcctacgatcaattggttttcgagaatattcacggtacttatgctttaactacccattcacacatgagagatcatttttaggtaacttgaagcattatccttggctattggatgagggccgtttcaaatcttggagacagggaatgactggatacccattagtagatgctggcatgagggaactctgggctactggttggacacataatcggataagagtgattgtctcaagtttcgctgtaaaatttctacagataccctggatttggggaatgaagtacttttgggatgtgcttctggatgcagacctagaaagtgatattcttggttggcagtacatatctgggagtttgcctgatggacatgagctcagtcgtcttgataatccagaggttcagggtcaaaagtacgatccggacggtgaatatgtaagaacttggattcctgaacttgctagaatgccaacagaatggatccatagtccatgggctgcgccaaactctatattacaagttgctggagttgagctgggctttaactacccaaagcccatagtagaacttcatatggcgcgggaatgtttagatgacgccatctccacaatgtggcaattggacacagctgcaaaacttgctgaactagatggtgaagttgttgacgacaatctgaataatatcaggaattttgatatcccaaaggtggttttgaacaagaaattatcaccaagcacttcatccatggagcacagggtgttgtctactaatggcaaggacgaaaagtcgcagcctactgaagtgaaggccctgtacaaacagattattcgagatgatatgatgaatgactcaaacatggatgacacatgctctactgctaacttgaaagtgacaaggaaaagatctagcagtgatagtgcgttcaatgttccctcatgttcatcctcattagtcatggaatcacggattcatcataatgaacctagttctgttctgtattcaggctacttccagaagacagcagacagagatggcactagttgaagataatgacagtgaagatagtggtacgagcatctctaggccatccaagaaagctgcttagcattagcgcattgaagatgttgcaaatcttcaatgagaaatatttaccgtcacatgtaatttagctggtgcgtttgtagtgatcatgcaaaagctgttctgtgaattataattagttttacacggcctatccttattccgatagaaggcaatttttgtttggtgaaaaaacatcgctcacggacaggccatagtttgctgtcgctgctgaacagcctaatgcctggtgtaaatgactcatcaacgttacgacactattagcgctggttggttttgctatcaatccgtattcatggattgggtaagattgagtagatttaaatatcaaataaatcaaaatgttttataatttttt

SEQ ID NO: 7971 - DNA, 3823 bp, Zea Mays
ctctccatcaattgcaattggttggaaggttggagagatttgatttgctggttgtactactgtcgaaccccagcccgtccgtaccctacgcatcttcctctcccatccatccactctttgcttcatcgatccccactgctgtgctgtgctgtgctgcgtagcttatccgaggggacaggtgagggagtcgagggggacggcgcatgaaagaaagagaccgagggggaggcggcgagagcgagaaggcaccgccgacggcgagacctaggatgcagacaaggccaaatccacatcgatggagccaagcccgatggccgttggtgttggcggcccaaagaggaggtggacgcgcagtcggaggcggaggtgcgtatgcccatcgtcgccatctagctgcgcctccttatatgcccctccggctccgattagcttacctccatcgatctccccaccatggacgccaacgccaatgccctcggcatggacgctatcaccaacgaaaccgtcgacctggagcatgtccctgtggaggaggtcttcgagcatctcaaatgcacccgcgacggcctaacctccgccgctgcccaggataggatcgacgcctttggctacaacaagctggaagagaagcaggaaagcaaagtgctcaagttcctgggcttcatgtggaaccccctttcctgggtcatggaggcagcagccataatggctatcgcccttgctcatggcggcagagatgttaggggaaagccaatggggatagactaccatgactttgtcggaattatgttactgctcattatcaattccaccattagcttcatagaggaaaacaatgccgggaatgctgctgctgcgcttatggcccgcctcgcaccaaaatccaaggttttacgtgatggaacctggagtgaaatggacgcatctttgttggtgcccggtgacataatcagcattaaacttggagacatcattccggcagatgcgcgtcttctcgagggagatccgctgaaaattgaccagtctgcacttacgggagaatcgctacctgtaaccaaacaacctggtgacgggatctactctggttcaacctgtaagcaaggtgaaatagaagcagttgttattgccactggaatccatactttcttcggaaaagcagctcatctggttgagtcaaccactcatgttggccactttcagaaggttctcacatcaattggaaacttctgcatttgctcaattgctgctggaatgactattgagttaatcgtgatgtacgctattcatgcaagagaataccgtcagattgttgataacctcctagtgcttcttatcggaggaattccaattgccatgcccacggttctctctgtcactatggctattggatcacacaaactagcacagcagggtgccattaccaagaggatgactgccatagaagaaatggctggaatggatgtcctttgcagtgacaaaacaggaactctgacactcaacaaactaagcgttgacaagaatttaattgaggtttttgctcgaggcatggagaaggatgacgttgtcttaatggccgcaagagcttctagactagagaatcaagatgctattgattttgctattgtttcaatgttgccagatccgaaagaggcgcgtgccggcattcaagaagttcatttcctcccattcaatccaactgacaagagaacagcacttacatacttagacgctaggggtaaaatgcacagggttagcaaaggcgctcctgaacagatcctgaacctagcatcgaacaagtctgagattgaaaggaaggtccatcattctattggcaattatgcagagagagggctacgatcgcttgctgttgcctatcaggtggtaaccaactagtatactatggcatgcttgtctatatacaagcaaaaccttactaaatttattcatcgtaaaggaagtacctgaagggactaaggaaagttctggtgggccttggcaatttattggtcttctcccactctttgatcctcctcgccatgacagtgctgaaactatacgcagagctcttgaccttggagtcagtgtaaaaatgattacaggtgatcagttggctatagctaaggagactggccggagactaggaatgggcacaaacatgtatccttcttcatcattgctgggtgacaaaaaaggtgacatcgcagttctaccagtggacgaattgattgagcaagcggatggatttgctggagttttcccaggtgaccattaactatctgtttgtatcgtggtgtttcttgctctaatttgtttcgtttcacagagcacaaatacgagattgtgcagaggttgcaagccagaaagcacatatgtgggatgactggagatggagttaatgatgcacctgctttgaagatagcagatattggtattgctgtggctgatgctactgatgctgctcgaggtgcttctgacatagttctgacggaacctggattgagtgtcatcatcagtgctgtactaaccagtcgggcaattttccaaagaatgaagaattatactatatatgctgtatctataaccatacgtattgtgctattcttaatgatggaactattatgactatatccaaagacaaggtgaggccatctccccatccggacagttggaagctagcagagatatttgcaactggagtgatcattggggcgtatttggctgtaaccacggtgctgttcttttgggtaatttacaagacggagttttttgtgagggttttccacgttagaacaatgaatagaaaaaagatcgaagaaacaggagaccagaatctacttgccgacaacatggagatgctggcctctgcagtgtaccttcaagtgagcaccattagccaggcgttgatatttgtgacgaggtcgaggggttggtccttcatggagaggcctggcctgctgctgatggccgcattcgtgatagctcagctgatcgcgtctgtgcttgctgccatggtgagctgggagcttgctggcatcaaaggcatcgggtggcgttggaccggcgtgatctggctgtacaacttggttgtgtacctgctgctggacccgatcaagttcgcggtgcggtacgggctgagcggcaaggcctggaacctggtgatcgaccacaaggtggccttcacgaaccgcaaggactttgggaaggaggcccgggaggcggcatgggcgcacgagcagcgcacactgcatgggctggagagcgccgggacccctggggagaaagcggcgtcggtggagctggggcagatggcggaggacgcccggcggcgcgcggagatcgccaggctgcgggagctgcacaccctcaagggcaaggtggaatcggtggtgaagctcaaagggctggacctggaggacatcaacaaccagcactacacggtgtaagtgtaaccgccgtgattgattcgtcatagcctccttatcttagagagagggatataaagtaataattggatgcaataaccatctgattggttgcccccactatcttgtcctaaactatcacatgcgttgattttatcttaaacttctgtttggttctttgtacgtgaaagacgtaagttgcatatcatttttgttgcacccgtagataggaaacaaatcattttctgtttgatataaagtagtaattggatcgttagtaaccggtctgatttgctgaactatcacatgtgttaactttatctaagctcttgtttagttcttttcacgtggaagacgtaagttgcataaagtaaatgcaaaacaaattatttttgttgcac

SEQ ID NO: 7972 - DNA, 1216 bp, Zea Mays
cattgactgacctcgtccccaacccaaccctggtgaagctgtgcgtaggatcaatcaatctcaatctcaccttgggtagagaccgcgcgcagccccagccccagcctcatggccgacggggtgttctataaatagagttgcttgtcccctaccttcggacgcacaacacaagagctactactacagctcctcatctcaagtgtgtagacgagacagagagacactgagagagcgccatggccagcctccaagtcactcctacttcggcgttcactgagtggaacgagctgaagttcgaaggcctgtacctgttccacacgcccctgggctcaggcgccaaccaagctcgggtcatagacaacaaggcgccgattggcatcggtgccaccgtagttaacaactggacagtgtatgacgggccagggccgaacgcaaagctggttgcccgtgcacagggcttgcatatccaagccggcaactgggtcaactccttcagcctagtgttcgtggatcaaaggttcagtgggtccacgcttgaagtgaccgggatagtagttgaatccggggagtgggctattgttgggggcaccgagccccagcgtctgaagagcatcaccgttgctactggcatcgccgtgacctcgattgccttctcctacgtcgactccgccggccaaacccaatctgctggtcgctggggcggttccggtggagaaactgagccggtgatccagctcggcgactccgaggtgctcacggagctgtccgggacgatcggcaacgtcgacggccacaccgtcataacctccatcaagttcgtcacaagcctcaagacctacggccctttcggagcatggggggacgggagtgacactccgttcgcgatccccgtgcagcaagggagtgccatcgttggcttcttcgcacgagctggggtctacctcgacgcccttggcgtttacgtgcgatccctgtgatgagactctcacgagaggggcagctagctgctctgctagctccaccggctttcatcgcgtcaccctccgttttatttcctactgctacttgttgtgtcttgaataatttcgataaataaaggactccgccagagattggcacttgaatcgatccataaatgcttgtgtgaattagtgcttcaagtttccaactccattaattgtccattagatttacaacactgtgtccaaccgagcta

SEQ ID NO: 7973 - DNA, 1372 bp, Zea Mays
ctctcaaatcattactattctcattgggctataagcgtttcttcaaacgagttgccctggaaacatcagactatcttaaagatgattgccttttagtgaactgcaccgttggtgttgttcaatcacatactgaaggaccaaagatatacacaattccagtaccacggtccaacatggctctacatattggtcagctattgacaagtgggaagaggacagacattgcatttgaagttgatggagagatgtttcctgcccacaaggtgattctttcagcccggtctcctgtttttagggcgcaactttttggtccaatgaaggataaggacatgaagtgtataaagattgaagacatggaggctccagtattcaaggacatttcagcggcccaatgtgctgctagcaagcattttcgagtttcacttagaccatctccaacagatatgctatccaatctcctatacctaaaaagtatcatttttggagatataggctttgctccatttcatgtactgggatgagttgccggatcttgaagagcttactggtgtaaatacaacttgggtatccaccttgatggctcaacatttacttgctgctgcagaccgttatgcattggagagattaaagttgctctgtgaacttaagctgtgtgaagatgttgcaataaacacagtggcaaatactttggcactggctgaacagcaccactgctatcagctaaaaactgtttgcttaaaatttgtggctctgcctgagaatttgaaagctgtcatgcaaaccgatgggtttgattatttgcagcaaagctgtccatccctcctgaccgagcttcttgaatatgtggccaagataggagagcactccgtgagcccctgcctgtattcaactgaagtccttgatggtggagatgccaatggacgacgcgtgaaaccaaggatctaacggctgcccagatgagcctagaagagggagttccttgtcttttttttttgttgttgttgtaaagtgattccaatgacgggcgccttctgtggtgccataatcatgcatgttgtagcgttggtttgtgtgtgttgtgatttccccagccccattgctgctactgtagagggactgatatacatcctactgactagactgcgttgctgctgcaaagcagcttttcatcatatgccaaggatggtctggtgcaaaggtttgatcaatatgttctgcagaagttttacctttcgctaggccagatttgtcgattcatggtcatctgtattgactgtattcaattgaaatgaaatgtatccgttgaacattcactttcatactgatccgttcatctgtcctacccttaaatctcaaataccttttacctgtg

SEQ ID NO: 7974 - DNA, 805 bp, Zea Mays
gcagcctaaccttctttgatatttacagagaagatgaaaaggagaactggagagcagtagtggcagtcacttcactggtcaagcattcctatccacctcggcccacctccacctccctgacagtcattttgttatataaaacccatcaagctcccctgcaaggagatacagaaccctgcaactgcaagctaaggagagtgtgatcaccaacagctagtgctagtcccccttccttccatccatccatggcatgcgtcagcaccttccagagctgccccattgccagaagagcaaagatcaacaccaggtccaggggcagcagcagtagcgtggcgaaggggtcaccaccaccagccttccagttccagtgcagggcgtcgactttcgcggcggacaccagcctccggctcgagctggacgagaaccccgaggcgatcatctcgggggcgtggcccgggaactgctccctcctcagctacgacgacctccgcgcctacctcgagtcgcaggagacggcggcccaggcagacgatcagcgcggcgtggcgctcctgagcgagaccatgtccacacccgtgctggtggccacagcagaccagaccctggaggacgtcgagtgccacttcgaggccgtgtcggggcttccggtcgtcgacagcggcctcagatgcgtcggggtgatcgtcaagaacgaccgggcaagagcctctcatggtccaagacgaagatatcggaagtgatgacatctccagctatcacactatcgtctgacaaaaccgtgatggtgcatgcctaacgtctacag

SEQ ID NO: 7975 - DNA, 817 bp, Zea Mays
gtttttgctaacagcaagcaggcaagtcagcagcctaaccttctttgatatttacagagaagatgaaaaggagaactggagagcagtagtggcagtcacttcactggtcaagcattcctatccacctcggcccacctccacctccctgacagtcattttgttatataaaacccatcaagctcccctgcaaggagatacagaaccctgcaactgcaagctaaggagagtgtgatcaccaacagctagtgctagtcccccttccttccatccatccatggcatgcgtcagcaccttccagagctgccccattgccagaagagcaaagatcaacaccaggtccaggggcagcagcagtagcgtggcgaaggggtcaccaccaccagccttccagttccagtgcagggcgtcgactttcgcggcggacaccagcctccggctcgagctggacgagaaccccgaggcgatcatctcgggggcgtggcccgggaactgctccctcctcagctacgacgacctccgcgcctacctcgagtcgcaggagacggcggcccaggcagacgatcagcgcggcgtggcgctcctgagcgagaccatgtccacacccgtgctggtggccacagcagaccagaccctggaggacgtcgagtgccacttcgaggccgtgtcggggcttccggtcgtcgacagcggcctcagatgcgtcggggtgatcgtcaagaacgaccggtccaagacgaagatatcggaagtgatgacatctccagctatcacactatcgtctgacaaaaccgtgatggtgcatgcctaacgtctacag

SEQ ID NO: 7976 - DNA, 3214 bp, Zea Mays
cgccctcatcctgttttgcttgcccgcatccccgtcagtcattttggtgaaaaccgaaaagcgcctcccctcctgctctgctcctgcctctctcgtcactcgtcattgcggccgggcactgggccactggcatcgtaacaactgccgatacgcccgagacagcgcgggcggagccagcgagagggaaggccatgaggtcgcagctcaacgcgtccttctcgccgccgccctcgctccggcgagctctcccctctgccacgccccgcgccctcaggttccacgcgttcccgtggcggttccgcgctcctcagcaccacggccgcggcgctggagctcgctgcgctaccaatctgcccgcgcccggcagccatggagtcggagtgctcgcctccgagaggagggccgacgatggcgacactaccgtgaaaaatgcagatgcgcctagcacttcaacggcgacgcagggaaacctcaacatggctgccattgttagcatagcattctgctttctacacagaattgtttctggacggatgcagtcgatgatgaatttgttcccttggatgtcaaacggcattgcaagcttgccatttgcttgcatatctgatcctaccagaaaacccatgcctcttaagctagatttgactcttccaccactgcctgatttcggatggaatttttcgcgactgtactatcggttcaattctcagcttgatcggaacattgccttgtctatcattaccttgctcatcacttgcttttcatttgtcattgttggaggattactgtttcataagttcaggaagcaacaacaatccctggaggactgcttttgggaagcttgggcatgtctatgttcatcatctacccatctaaggcaaaagacacgtgttgagcgtgtcattgggttctttcttgctatctggggtatattattctattctcgattattaagtgcaatgacagaacaatttagaaaccagatgcataaagtaagggaaggggcacaggtgcaggttattgaggatgatcatatcattatttgtggagtcaatagtcatctgatgtctatattgaaccaattgaataagtaccatgaatcatcaattcgcttaggtttagctacagcaaggaagcagaaaatccttcttctctccgatcttccaaggaagcagattgataaacttgcagatagcttggccaaagatttaaaccatattgatgtattcaccaagagttgtagtcttagcatgtcaacgtcatttgagagagcagcagcacacaaagcaaaatctataattatcttgccagcacagcatgaacgatatgaagtggatacagatgcatttgtctctctattggctctacaaccctgtaaacaaattgcacctgttcctatcattgtcgaggcttccaatgcaaccacttgtgaacttctgaaatcaatcactggcttaaatgtgcaacctgtggagatggttgcttctaagttatttgtgcagtgctctaggcaaaaggaccttctgaaaatctacaagcacttgcttaatcagcacaaaaatgttttcaaccttttcaggcggcctgaattagagggcatgaagtatatggatgcagtcgtttgtggtatcttccggtctggaaaaattcattttcacccaagcgaggaagaactactgaaagaaacagacaaattgcttcttattgctcctgttcgtgggatgaaaagaccacaatatagagcattaagtgtacggaaagaaacacaaacattgagtcgtaactcagagccaagagagggtcaaggatcatttaatatggctactaccatggataatgaaacacggctaaataacattgtaaagcgccccttgaaatctctttctaagagcagtgattatatgcttggacccaaggaatgtgtacttattgttggttggcggccaaaagttaccgaaatgatacgggagtacgataattaccttggacctggtagtacagtggaaatcttgtcggaaacccctattaaagagaggagcagtatcatcaacccccttttgcagagccagcttaaaaatgttaaagttactcaccgggtggggtgtcctttgaactacgatactctgaaggaaacaataattaacgtacgagaatctgccaagtcagataaagaggttccactgtcaatagttgtgatatctgacagagactggtttgttggagatgctgcacaggctgataaacagttggcatacacccttcttcttgctgaaaacatttgccagaaacatggcgttatggttgagaatcttgtatcagaaatcgttgacatgggactaggaaaacaaatatctaaaataagaccatccctttcatttattggagcagaggaaataatgagtcgtgtgacagcacaagttgcggaaagtagtgagctgaatgaagtatggaaggatatcctgaacgctgaaggcgatgagatctatattaaggaaattgggctgtacatgaaggaaggagagaaaatatcattcttggagctctctgaaagagcagttttacgccgtgaagttgcgattggttacatcaaggacggcaagcagcatattaatcctatcaacaaatcggagccgctgtcccttgaaatgaatgattcgctcattgtgatatcggagtttgaaggtgaacaaccaattatgatgggcggagaaacttcaggatgaaattttcagctttatatctcttcacagaaactctaacaactcttgctaccatgaagagatgacatataacctgtttataatccttttctttttgtacaaagggaaagcaaaatatagtttaaaggccacaaatcaagttttgttcctcccatagccgtagaacttctttgatgcaaatattttactgcacagtttaaccgcagaatcttttctatttatctgtaaacatagtgaataacacaggcaacttgtatggtacagatgtctgaataaaggaaggatgaaggaaaattgattgactatgttccttgttgtttccttctgactaatgaatacaatgtttccatttttttagtcctgagctagacaaaatcagctaggtatggccttgctgttctctttgggagataaattcgtcgcctctagcatttggcacaagaaaagtttgttttacactttgcttcattaaccaagccactgcttcagccttt

SEQ ID NO: 7977 - DNA, 2945 bp, Zea Mays
ctgccgctgttgttttctgtccccgacttggaattcatttctgcgtcgaggaagctttttctcaaatctgcatcgcgtattttccgcaatgtccttttttcgcagaacaaaaaagccgttttttcctttcctgttagttattggagtcagttaggaatgtttttctgatgatgttggtttggtcctttcctcgtcctgaaaagctgcctcttcttctgccctttgtccagttccctctctgaaaaaatcgcagatttctgttagtatcatcaccagttcgccatcatctccgctctgtgggggcagaagctccgcttcgttccaagaaaggcccccgcgtcttcctccgcaaaacctcccgggtcatctcatatccttggcgctggccgagaggctcctctcgttgcctgccggcgcactggcgcagatgcaggtgctgccgaggaagaggaggcgctccgggtcctggcttctagacgttgtgaaccagatcttggtgcggttgcccgagtagtttactcgtctagaggaggggtttggttctcgacccgattcggtgggggcttcgccactgggatagggggacagtttggcctgctggatctttatcgccagttgttggttctgtcctttccattgggctggtactttcttgacggattggttaagcgctgtctgtggggttgttgtgctgctcctcccttcatctcgttttgtggtgattggtggggggaggaggaagagctaggaggattctctctcttgttcttgggtcagttcttggcacggcaggatgaagtatatgaagcttggatcaaagccggatgtccttcagacggaggggagcaatatcaggtttgtcgcgacagatttggcaacagacgttgttatattgattggggatgtcaagttttaccttcacaagttccctcttctatcaaagagttcacgcctgcaaagattagttgcttcaatcaatgaggagaaaaatgacgaagtggatatctctgacatccctggtgggccttcagcatttgaaatatgtgctaagttctgctatggcatgattgtgacactcaatgcgtataatgtcctcgccgcccggtgcgcagccgagtacctagagatgttcgagaccattgacaaaggaaacctcatatacaagatcgatgtgtttctgacatcaagtgtgttccgcacctggaaggactcgatcatagttctacagagcacaaggtcactggtaccttggtgtgaggatttgaaagtgatcagccactgcatcgactctatcgcgtcgaaggcgtcgattgatccatcagaggttgagtggtcatacacttacaacagaaagaaactcccgtctgagaacggtatcgattcgcattggaatggtgtcaggatgcaacctatggtccctactgactggtgggtagaggacctctgtgagcttgaagtggactcgtacaagcgggtgatcatgagcatcaaggcaaagggaagcacgccagctgttgtcgtcggagaagcattgagggcctacgcgtaccgacggctgcttggctccctggaagacgctgtgagcaatggagttgattgcgcaaagcctcgtgcagttcttgacgctattgtatctctcttgcccgctgaggaaggctcggtgtcatgtggttttcttcttaagctgctgggagctgcatgtttgctggaatctgatctggtcatggcaatagtggaggaatttcatgtcgttacagaatagcgacagtggcaaggagaaatttcaagatgatgaagagatcgtggagactgagaaacgtggcatcggtttccagcacgtcaaagctgggcagttgcaaagctgatcgatggatatcttgctgaggttgccaaaggatcccaaccttcctcttccgaagctgaccgcgcttgctgaaatgggtgtcttccctaccccggccaacgcatgacggcctctaccgtgccattgacatgtatctgaaggagcaccccagcctgtcgaagagcgagaagaagaaactatgcgggctgatggactgcaagcagctgtcgcacgatgcgtgcatgcacgccgtgcagaacgagcgtctccccttgcgtgtggtcgtgcaggttctcttcttcgagcagctccaggtcagctgccacgacgacaacggaggaggacggatgtggggtcccgacgtcgagtgacgtcaactcgttgaggtcaacaaggctcgccaacaacagcggcggaagcgagaggagcagtggcagcagcgacatcaacaggagcgccgcggggaggggggcaagggggattctgatgccgaagaagatgctgagcaagctctggtctgggaaaacgaacgccggtgagaacagcagctcagacacgtcgcagagccctgggtccgtcaacaacccggaggaggtgaagtccacgcagtcaaggatcacaaggcgctcggtatcctagtcgcggaggggtaaccgcggtcacagcctagttttgttcttgctcttgatttttgccttcactggagagtagtggcaatctaaaaaatgtggagttactggagtaggtttggtcattgatgatgttttcagccatgttccatgggaactttttacatacaaagaaagtataggttgttataattgatgtatttttgctggcaaaatcatagtgttttagtttgctttttacggccaccggccaagcccggcacgattaatttcaagggctgaagacagagtgaagtaaatgctttatgatgtgattggatttgttagagcaactataaagagactctctctagcctttctaattgttaagaataaaaatattggtaaaagaatatactttagtaactttttaaatggttatctaaatatagtcatctttagttctgaatttgtcgctagtcaaaaataaaaaa

SEQ ID NO: 7978 - DNA, 863 bp, Zea Mays
gctcccgtggattcactcaaatttccataccaaaccagcccgtaggctctagggcgcagtcaggtggagggatttttccccttttgcggcttcctgaactccatcttgccactgccacgagcccacgacgcccgcagccgcagcgaaccagagaggagagcgggagatgaagggcgtcgggggcggcgcggcctccccgggggactatgtctacttcaaatctgtcgtcccgctccacaagatctccattgggtcaaaactgtggaggtactatgactttggacccaaggttgtgccacctcttgtttgtatcccaggaattgcaggaacggctgatgtatactataaacagattatgtccctttgtatgaagggttatcgagtaatatctattgacgttcctcaagtttggaatcaccatgaatggattcattcatttgaaaaatttttggactccatgaatatccatcatgttcacatttatggtacatctcttggtggattcctggcacaaatatttgctgaacaccgtccaaggagagtaaagtcattggtcctatcaaatacttttcttgagacgcacaagtttgctgctgccatgccttggtctccagtgaatccgagatggtccccatgaaccattcatcgcagactcagtagattttgttgtgggtcaggtggagacattgtcaagagatgatctttcatcaaggttgatgttaaatgttaatgttgcatccgttgggtcgttaatgttgcctgattcactcatcactataatggatacaaatgactgagttgtcttgtttattgcagagatctcctttatatacatgtgtacaaagggcatctgacccttggat

SEQ ID NO: 7979 - DNA, 1913 bp, Zea Mays
catgctactccaatccaaattcgatgattggttgaagatgccatgccgcataccctaaccctaccacgtagtccccctcctctcctctgtcttcttgcagttccatagacgtatttgtgatgatgcaacatcagacaaatcatttccaaatgttcatgtactaaaaaaagagatttgttaattccttttatgtagaatggaacataaaaggagctaggaaactagtagtgagagtgcaaaggccaaacaaacactagctagtcacaaacaatcgaagaattcaggtatgcctctcgccacccttctgctcccctcagtctctacgcccaccgccggcgaccaccgcacccacagccggcggcatgaccaccaccacggcagcaagcgcaagaagaagccgccgccgccgccatcaccacagccgtcgctcccgttggcaccgagaaccccgccaccgccaggcgcaccaagccccaaggtccgtgcggcgggcaagaacaaccacgcccagtaccagtaccagcagcgccgaggccagccgacgaagaacagggccgcggcggcgtcctcgtcctgggagcaggtgaagagcctgctgagctgccggaccgcgacggcggcggcgcgcgtgcacgacccgtcggcgctggcgcggctccgcggcgcgtcgctctgcgccatgcgcgacgtcgtgctctcctccgcgtcgggcgaccgcgacacggcaccgctgaaccgccgccgcgccccgtcctcctccgctgcctctggcgccggcagcagcagccaccactcctccctgcggggcctctccggctgctacgagtgccgcgccatcgacgtggagcccatgtcgaggcggcggtacccgaggccgagggagctgtgcgcgtgcccgcagtgcggcgaggtgttcaccatggccgacagcttggagcaccaccaggccattcgccacgcagtgtctgagctgggtccggaggactccgggcgcaacatcgtggatatcatcttcaactcgagctggcagaagcggggccgccccatctgccacatcgaccgcatcctcaaggtccacaacgccccgcgcaccgtcgcccgcttcgaggcctaccgcgacgccgtccgctcccgctcccgctgccgcgccgccgcccgggtagcggccgacggcaacgagctgctcaggttccactccgcgccgctcgcgtgcgcgctcggcctcggcggcgcgaccgccctctgctgcgccggcggtgcttcgtcgccctgcggcgtgtgcacggccatccggcacggcttcgcgccgtgggcgggcgcgcacccgctcggggtgcgcaccacggccagcagcgctcgcgcgcacgactgcggctgctcggcttctccatcgtcggtgcagcagacccagcagccggcgaacgacgctgctgcctgccgcgccatgctggtgtgccgcgtcatcgccggccgggtccgtcgcggcggcggcggcggtgccacgtcgaacgctgccgatgaggatcaggaaggcccgttcgactcggtggccgtcgaggacgccgtcagcagcagcatgtacgggaacctcgaggagctcttcgtggccaaccccagggccatcctgccctgcttcgtcgtcatctaccgcgtccttgatgcttgagggaaacacgtcgtctacattatgtttgtaacatttttggttcagacaaaccatgagccactgaaatggtagatctagttgagaaggcccttgcttgtttgcttgtaatatttatcatggaagcccttgcttgtaatttatttctatacaagggcaaacccttgcttgtttgcttgtaatttctatatattaaagcaggaaggaaatctgccctcaggttcggccacgtcagcagttggcattatag

SEQ ID NO: 7980 - DNA, 5556 bp, Zea Mays
ctctgcggcaactgtgtcaccactgaggtaaagaagagctcgttatcgtcacaggtgaagtgatgggcgaaggggctgctggaccctgtgcgtctccatcacgtcagtgacacctgatagtaagccgtatctccttctgttggttgatgactggagcaagtacatgtgggtgacgttgctcgatgtcaagagcgacacattcgctgttgtcaaaaagtttcaggcaaaggtagaggtggagataggctgggtctgggtgtgatgcgcaccgacaatgatggtgagtttacctgtgttgagttcgaggagtactacgccaaacatggcgtcgagcgacaacacacgaggagtactgcgccaaacacgacatcgagaggtagcaaacaacgtcgtacacgccacgacagcaacagaaccaggggcgaagccagacaacaaagccatcagggttggcatatgaacagtttgtgttttgtgatatatttcaccaaaaggaatcaggatggagagactgctcattttgtgggaagcgcctccattgtgggtgtgttgcttcaaagaactcttatgatctacttgacagtggaggagttcattgtgtcacttgcatgaaaaattcattagcccagtccgcttctggtcaagtggttccaaagctttttccatctccaatcaatctacgttttttcggtaaaagtgacgagttattgtcaagtagaaattttgaacagccaccctctcttacattggattccagaaatgatgatattgcttttgtaaataagagcaatcacctgttcatggtaaaaggtatagaggctggacaaagcagtaacatcttgagacaaaaagagatagagaatggttcaaggcagattaaatgggaacaaccaacccttagttttggggacatgggaaggcctttcctaactaggtctcaaagtgcattagagtcacctcaatgtactcgaagagatgacaataaggatccaactacagatagcacaagtgagtcattttcagaagcatgtctgagcatgagcctaggtattgcaaacaatgtaaacaggatggaggctacttcaacagcggaaaggcctgtgctattgtcaacaacagccattgctgaaggaagagaacttgccactacactatctccctttcaacacgcacaaagggcacggcatttcctgaccagacctccaaggattggtgaaggtgctgcttttgatccaacaagagacatgtttccacatcttcgtgttgctagaccacctgctgatggaaggggacgcaatcaattacttcctcgttattggccaagaataacagaccaagagctgcaacagatatctggagattcaaattccacgattgttccattgtttgagaaggtcctgagtgcgagtgatgcaggccgcatagggcgccttgttcttccaaaagcttgtgctgaggcatatttccccccaatttcccaaccggaaggtcgccccttgacaattcaagatgcaagaggaaaagaatggcattttcagtttaggttttggccaaataataacagcagaatgtatgtcttggagggtgttacaccatgcatacagtctttgcaattacaagctggcgatacagtgacctttagtcgtatagatcctggagggaaacttgttatgggctttcggaaggccacaaatactgtcagtctgccagactcacagatctcagctattgcaaatggttcccttctcagtgagacactcttttctactgcaaatgagaacataggtgtcgtaagtggttatcctggatttcttcactcaataaagggagccgcagatctccatccaaactctctatatgatcatcatatgaacttagttgatggggatgtcagttggaataaggcagataaatttggcagcaggccagatgagggatccttgcaatttttacaaaaacgtagtcacaatattggttccaaaagcaggaggttcttaatcgatgctgaagatgccatggaactaaagcttacctgggaagaggctcaagagttgttgcgccctgctcccactgcaaaaccaactgttgtgatgattgaggactatgaatttgaagaatatgatgaaccccctgtctttgcaaagagatcaattttcaccatccgtgcaacaggggaacaagatcagtggattcaatgtgacgactgctcaaaatggcgccggttgcctcttaatgttattgttgcgcccaaatggacatgcaccgacaactcatgggactcaaaatgctgctcctgctctgcgcctgaagagttgaccccaagagagttgcaaagtgttctgcagcagtatgaagaaatgaggaggcgaaagggcagttatggtctgaagctgaacgtcgctgaaatggatgcatccagccttgatgctttcgccaccgccgcagtatttggcgaagtcgggaaccaaggcagcgcctcagtggcgacaaccacaaagcacccccgacatcgccctggctgcacatgcatcgtgtgcatccagccgcccagcggcaagggcccgaagcacagccccgcgtgcacctgcaacgtgtgcatgacggtcaggcgccggttcaagacgctgatgatgaggaagaagcagcggcagtcggagcgcgaggaggcggaggccggcaagaagatcgcatgggtgaacagagacgagcctgaggggagcagcctgtcgagatccccgcagacgcttgacagcacccgagacaacagtgatgtgacggcgaccatgttggacaaggtgtccgacgtgaacaagcaggggcacatcgacgtcgacctcaacctccaccctgctgcccctgccgtccaggctgcgcagcagcagccccggccggtgagcatgatgggtctcttggaagtggcgggccggccgcttgacaactacatgaagcagaatggcctgacgagcctggtgggggagcaaggtggtggcagctccagcacggccacggtccctcctccggctctggtggagagtgaggagcggacgtccaacgagggcctcgtcccatcagcatcggcagagcgggaaccgaacgccatggccgtcgacgaggctggcgagaaccagcaggacaaggctgccgacgacgacgacgacgccgtcgctgccgccgctacttgacgtgattttttttcatggagctgcttctcctggaggctgggagtaacttacgtgtacgtatgaggcttgtgttggttggtgttgtaatctgacgcttaaacattggcttcaataactcatacagagtgagaacctgaaagtatcagtctagagcaagttctttttactggtgctgaaagtatcagtcttgcgcaacccaaaaggaggaaacaaaaattttagaccctccaaaattgtactcccctttggtatgtacaatctgaagtggtaacaaaaatgcactacttttttctaatagaactccgatccaagacatgcttgttttttgtttaggaaaaaaggctaggttcacctgattgtttctgatcttcttccatgtaatattttaacacatttttctttcgaacaaaatataactcagctgtttcaaaaccgtcaaaaaaaaacaacttatgattagctgctcctttttttactgctccaaggctggcctgtgagcaacattgcacccccaccacaggtcaggttcatccagcccatttattattctaaaaaaaaactctactccaaaagatgtgtccagcccagtgaagcccgaaaggaaagaagccagccgctcccgtgggcgacgacatggtcctgtgtccgtgtgaggtacacatgactacgggggccccacctccttcgttcccaatcccagatcccgcactctctttcagaacccaacacgccactgcctagctagtagctagcagagcagctagccaagcaacccagccgagtagccgaccagagagagcgagagaggcagagaggagcggacctgcccgtcgcaatggcgatgccgccgaagcccggcgacccgccgcagcgctcgcctgcgcggagccccaacctcaacctgccctgcccgctgccgccggtcccgggcgggccgcctgcgccgtcggccgccgggttgcccccgccgcgcgcgagtcaccaccgccgcgccagatctgaggtggcctttcgcttctcggacgacctggccggcggcgtgggcggcggcttcgacgagatcggctccgaggacgacctcttctccaccttcatggacatggacaagatcgccggcgccgaccgcgaccgtgccgccgagacctcctcgccgccgcgcccagccaagcaccgccacagcgcctcctttgacggcttcgggatgggggctgccgccggtggcctggccgggcagcaggacggcggcggaggcatgtttggagaggtgatggaggccaagaaggccatgtcttccgagcagcttgccgagctcgctgccatcgaccccaagcgcgccaaaagaataattgcaaacagacaatctgcagcacggtcaaaggaaagaaaatctagatatataacagaactggagcggaaggttcaaactcttcagacagaggctactactctttcagcgcagctcacactattccagagagacacaactggactttcggcagaaaatgctgagctgaagataaggttgcaggccatggagcagcaggctcaactgcgggatgctctaaacgatgcgctgaagcaagaagtggagaggctcaagatagcgacgggcgagatgccgaagtccaacgaacaattcaacatggggatgcagcacgtctcgtacagcggcccttctttcttccatctcccggagcagcacgtagacattcagctgccgcaccatttccagcagcctccgcggaacgtccagatgctgtcccaccccaactccctctcggatatggcgcagcaagactcgcttgggcggctccgggggctggacattggaaaagggtccatggctatgaagccagaggcagaggtcgtggtgaagtcagagggcagctctgtatctgcaggtgaaagcaacaccaccttctagctatacaatacatctgccttccaagaagcctccgtttggtttagagttcttttgttcatagtctgacatcctccttccttgagctgcttcgtccttctcagtaggcctattttttttattccattggttatatctactagttaacattggtcggttgccaatcgttgttgtcgtggtggctgatttctatagggacattgatgtgttggtttcgagtttgttgttgttgttgtgtgtgtggttggttgtttcgagctaggggctgaaagggcaccgagtgtttttttctccacctgttttagttttgttatagatttgacaacaatcgttatgatttctccttctggaaaggtgtacattgtgttgctatgctaatttgtagtgatatttttgatgattccaactgtaccctgctgtgcctgtgcgcgaagctgttgtttcagctgtgta

SEQ ID NO: 7981 - DNA, 1970 bp, Zea Mays
gaaggaaacactcgagcgggatttcgtgtttacccgaaaaacacacaaaatacaaatataaatagacctaaacacccgccttccggtcgcgtccctcttcctcttcccaccttccctcctcccttctccaatcatccctttctggctttctcctcccccctgagaccccgagtcctgccggattccgagatcccggaggcagcttcccacgggctcctctcactacggtagctggatcaaaccatcgtgctctcgtctcgacagaaaccccggccgaaaacccagccggacccagccctgttcgccgcgcgcgcggtgcccaggccgtgccagatctgcgagatccgcgccgacaccgctacgactatcaccaggtggatgctctcgtgatctctcggaggccgcggggactgagcagcgtctcggcggcggcgtggcctgcatagccgtcggcgtgccgagatgcaacggaacggggtggtggaatgcagcgtgtgccgctcccgggtggtggtgccgagcccccggagcgtgtccagggcgtacgacaagcaccgcaacaagatgtcgtccaagttccgggcgctcaacgtcttcctcgtcgtcggcgactgcatccttgttggtctccagcccatcctagtgttcatgtcaaaggttgatgggaagtttcagttcagtcccatcagtgttaactttctgacggaggttatgaaagtcatctttgctgtcgtcatgctcataattcagtctagaaagcaaaaggttggagaaaagccacttttggcacgttcaaccttcatacaggcagcccgtaataatgtacttctagctgttcctgctcttctatatgcaatcaacaattacctaaaattcatcatgcagttgtacttcaatcctgcaactgtgaaaatgctaagtaacctaaagcatcaatcaactccgaactgtacctgtgggcaacacagcatttggtcttcctgtcactgctattgcgtacatatatacattgatttttgtaactgttccttcagtggcttctgtctacaatgaatatgccttgaaaagtcaatatgacactagcatctatctccagaacttgtttctgtacggatatggagcaatattcaacttgcttggcattcttgggactgtcctattccaagggccagagagttttaatattcttcgaggccattcaagggccacaatatttctcatatgtaacaatgctgcacaaggcattctatcttcattcttctttaagtatgcagacacaattttgaagaaatattcgtcaactgttgccacaatatttactggcctagcttctgctgcatttttggggcattccttgaccattaattttctcctgggcatatcagtggtgtttatttcaatgcaccagttcttctctccgcttgcaaaagtcaaagatgacaaaccagctgactcaatagagttggaagatacacaaaatgaccgcccatctgaatcttcttttgtaaatatgactgctggtgccgctgatgatgcaagccatcggattggaactgatgagaggcagccgctattgcctatatgaacttgtttgttgaggtaggacagaagagaggggatagaagaagaggctcctttttgccgtgtgagcaacagatttgatgtagcattgttaggcgaataaacagctattgtacactgtagaggcaaaagaaacaaataaacgtggtttccattttctttaaattttttggggataccttgggagcggcagaaatcatacattttgatagacataattcaatagggatttctagatacgatacttgtcaaaaaaaaaagaattcatggagaaacaacggctgtgataatggtttttttaggaaccttttctttatacaattatactattgattaattgttatactattactacattgttacctgattctccaactgtgtccagtgtt

SEQ ID NO: 7982 - DNA, 1319 bp, Zea Mays
  misc_feature (1318)..(1319): n is a, c, g, or t
gtcaatctggttccgctgctccttcctcggcaccgccgcctcgcaatccgctcccgcttcgcccgtaaaaccctagctaaaccctagccgaaagaaacaatgtctctcctcccctgagcgcgctcgtggccgccccttgttggccatggctctccagctccgccgcctcctcccgcacggatacgcccagcgacaccgcgccgtcatccacgcgctatcgctgctgccgccgccgcccgcaatgagcagaaaatttaattcttgcatctgatcctgaccgtgaaggtgaagcgattgcttggcacatcaaagaaatgcttgaacaacaaggtgtactgggttttgatgtgactgttgcaagagttgttttccatgaaatatctgaggatgcaataaagaaggctttaatgtccccgaggtatattgacatggacttagtcaatgcttatcttgcacgccgttcccttgattatctaattgggtttggcatatcaccacttctgtggaggaagttgcctggttgccaatcagctggacgggtccaatctgctgctttggcccttgtgtgcgatcgagaagctgaaatagaacagtttaaggcacatgagtactggacagtacagacagacttcaaaatacaatcagcagatccttcaaatgccacatgtattccattctgtataaagcatttgaattcaaaaaagctggatcaactttccataccctctcaagaagaagcgcaagctatagaaaagatgattcattcttctacatttgaagttttaggtgttaaaagaagtaaaattcacaagaatcctccattgccatatattacatccagccttcagcaggatgcagcaaacaaactccattttactgcaggatataccatgaagattgcccaaaacctttatgagggtatcaacctttcctcagaagaaacaactgggttaataacgtacataagaactgatgggttccatatttctgatggagctgtggaggacattcgttcactagttaaagaaagatatggtcagaagtacgtttcggaggacattaggaagtatttaaagaaggtgaaaaatgctcaagaagcccatgaagccattaggcccaccagtataaggaggccgccatcatcattggttggaatacttgatgatgattctctaaaactgtacactctaatatggaaaaggacaatggcttgccaaatggaagcttccagaactgagatgattcaagtggatgttggcattcctgaaggagagatgaattttcattccactgcatcaaaactggacttcaagggatnn

SEQ ID NO: 7983 - DNA, 1125 bp, Zea Mays
ttctcaaaccaaacacctccttagtcactcgctcaccccgagctcgacgacgacgacggcgacagctttggccggagctatacatacttacggtcgatctgttctcgattcgtgcctcgtaacaagcatcctaaggcggcaaagcagctaacgaactactggtccccttctcgttcccaggtgtcgctgttgggctgttgctaaaggaacaagaatggaggcagggcctccctgcgagcctgcgccgacggtggcaaacggcagggactggtcggagctgtccctggacgcgctggtgctggtcttcggcaggcttggccctgtggagatcctcatgggctcgggcctcgtgtgccgctcgtggctccaggcggccaaggagccggagctgtgggcgtccctggacatggcgagccacagggcggtggaggagatgggcggcgacgtcctgcgcggaatggccagggtggccgtgggccgctccaggggccggctggaggtcttctcggggaagcacttcgtcaccgacgatcttctcaactacatatcgggtccgcgtgtctgaggagcctcagccttgtgtcgtgccccgaggtcaccaacaaagggttcaccgacctggtcacgaacgcgcccaagctggaggacctctcgctggagctctgcccgaacgtcggcggccgccacgtgctggagtgcgccggccgagcctgcccgcggctggcgcgcttccgcctgcgcagggagtgcttcaggttctcgctcaactactcccggcgcaccgcggaggcgctcgggatcgcggccatgaccgggctgcggagcctcaccctcgtcagcagcaacatcagcaacgacgagctggtggccgtcctcgacggctgcccgcgcctggagtccctctgcctgcgggactgctacaaggtcatcgctgatggctccctgcgggctaggtgcgccggcatccgggccctcacgcttcccgtccccgatcgagtttggtgagtccggccggccggccgtctcaggaatttccacaaccacatggcctgggcccccagtgctgtaggtatcaggaagttacacgtgcaacctgatgactcagccactcaggctcagttgtct

SEQ ID NO: 7984 - DNA, 5183 bp, Zea Mays
ccgttttgttccgcgatggcttccctttcccccggcaactccttcatcgaggcggtgtcgacggcggtggttgcggcggatttggcggtgctgggctgacgggaggtctcgatttggcggtgctggtggcggcgactccatcaagttgcctgtgtgctccctcaactttcttcctcagatccccttcggcaggcggcgtgcccacgacgccactgtttgggatatctggtgacgagtgctctcagtcacggcactggtgacgggttccctttctctgagactccaaccactggcggcaacacgggatttggtgcgtgtgtgcggcagctacgggagattgtggagctcgagtggctctgcatcccgctcgtagcgctcagatcgtgattggctgctttcatcctctacaatcactagttgagcagattttgggtgagcgcggtgttaatttgttgatgctaaggcaagccagtaacctggcacacaacatgttcgatgatatgtcatttacagaggtggtctgggatgatgaaggggcactattcgatgaaatgcattgcacggatgtcatctgggatgaggagacacatcatggctttgactcacatggcctattgcagcaccatgctgaagcaatggataaccagatgcagggcaaggagaaattggctcaaagtggagattactatgatgagaggaaagtcaatattgaaccagacatcaacaacttgctcattcatgtcaatgaccatttctctatgttggtgattggtgcggattctaggcgaagtgatgttgtgtgggacgaggacatgttatctgacctcgatactcatggtggcttattacagttactggcatgttgtaaagatgatgagctcaaccaggacagagacactccttttctcttgggccttggtatggatcaggtggatgagatgctggccagcccgtccagccttggcatgaatgaggacttgccatctgtacctgagacacatggctcgttattgcagcaagtggcatgggacaggaagcactttgcttatgaaatgtgcacgcttattgctgagatggtcctggaagatgttctcaccgatgttggcaacctcgctttcagcattgattcaagcatgcagatcagtgatcaaccttccaaatatgcgctagtcatcgatgcttatctgctgaagacgcagtacaaaaaaccatacatttctataagccaatgggatccaggaatttggtgcaaaggtactatggcccatgagcagcaacagcttgagatatataggatgtttgagaaacaatgggattcagttatccttaaatggttcaggaatccttttgtgctgctgcaatcatgcaatggggaggatctgaatgaacaaggcacagtgcctgtaaatgacattttcgatgtattggctgctggccaggagttgaattttggcaacgtcaccttgatcatttatgggggatgccaaggagcaatgggtctgcaggttctttttgcagaattacacccttggcaccacaatgtctttacctccatagaattagcaatacagtcatggagaatcaatggtttcagtccaggaagctgcaagctcaacagacaatctatacttgttgctactaacttgcagttcaattataaagcttccaagtttgtatcctttactgatacttatcagatatacaagaacacatgcatttgtatcggagaattggaacctgctagttggagagatacttgttggctacctgagatctcacatgccaatgtgtccacacttgctagtgaggaaatagataacatgcttttccaggttggtgattttcatccaggagagagtgagcagcttgagctttacatgataacattgatacagtgggatctaggtccagtagaattttacaaatcaaactgtaggtgccctgctgcagaactgatagggtggtgctgattctagtttgttcatacaatctgtttatgttatgctgaaagctagtttcttctttatcatgaggtactacttggcccaacagtcatggaatttctgggatctttagtcaccaagatacaattcatggtcatgcggttgtttggggacaagcaaccatttgtgggggtggaaaggatatatggcaacacaggttaaagtcgtgttttaaaatggaaatgcatgctacagtcctgggtgtcaatgatgtattgcagcatatcagtgcttgttctctattcctgcagcttggtcgcagaaaactatatagggtggtgatgacttctgttctaaggcccagagatttgctgctgaagagctatacaacattcttgaccaagtcgatgaactattgttgcttcctgaccaaaagctcgggagaccatggtgtgacactgatctaatatgtgaaccgattctgtcttggagactcaatggtggcagcccaagcaaatgtttgttgcaactcaagacatacatagtcagacagtgggatccaggaatttctgggatctttagtcatcgagatacaattcaaggtcatgcggttgcttggggacaagcaacattttgtgagggtggaaatgtaacatccatgaatagcaacatgtccagggctttagctgacaagcgggccacccacccatgggacccaggtggaagaccagatgctgggtataagttccaagagtctctattggcgattggatcacctactggaagcgtagctcgttcgggcaaaagctgttgcagtgcgcgcgcccagaaccagtatcagaagctcagggaccttggagagaagctgcagaagtgcgctcaggatctggatctgaagttttgggaccttgtagctaagctacagcagtgcgcccagaacctgaatcacatgttctgggactttcaagctaagttcttgcagtgcacccaaagcctgccactgtatatccatcagggagcagctgggcaaccaccaatgcggcaatgcctgattcacccgccgcaagatccactgcagaattcagggatgacattgaacaaggaccatcgacgcctgatgatgcaccctcgaatccaccgtcgcctaatgccctcccgaatgctgctggctccaccactggcaatcaacacggatcagctgaggaggcaccgacgcctgatgcaccctcgaattccctggtgcagatgatctgcgactgattggtctatgggtttacagcactccgttctttttatttggctgcgcgtcatcttcgggactggtcatatgaaccgattggcatcaaagaatgatggtggtactgcaacagattgggaccttcctactaatgagataatcagcttgaggaaaaggataaagaacatagaatatattgtcagtgagacaaataaatcacctctgtcgaaacatagtagcagcagcacaaagaatgaaattgatgacaaggaaagcagcagcaccaagaacagcggcaatgtaaggagcaccaaacagaaggaaattgactacgtatacagaagcattgaaaagaaagttaaagttttcggtcgagacaaggtccatgaagatataaggtgcttcataatggaccggctaccgatgcaccaagctccgactccagtaaaccttattctgtgattggcatatatggaattacaggttctgggaagactactctggcacaatatgtttgtgagtatgagaagggtgaggtttcaatcctatcatgttcatccatgtgggaactacattcagtgccggtgaaatattttgtgatatgctggaccagatcacgcaacagcggccctctgatgccaacggtcctaaaagcctaaaaacagagttaaaagatctaacactacagcaaacgccaaaatatacagctactcttgttgactgtccaaattcaaaatacacagcttataagcaaggctgtatatgtttgctactaactcatacctataggcagctaagaccggtgttatgccaagtgacattgaagtgtacatagctgaccataagggaccagacccttccaaacctgaggagttgtgcagtcaggcttgcacagatcggctggcagaatatggtcaagaaatggtgaggcgccatgaaaaggactacgaccggagaaaagcaccaatcgatcccatggtggtgtatgctactggaggcagaaagagtcatgggcggtactccatgtttaatggagtgattgactccagagaggttagatctcagaggtcggggtcttcctccgaacgatcaggggctagaactcatcgccaatcagagcatgagttggaggttgcaagggtgcaagaggagataaggcaacgtgatgcattccaaaggcacaacatgagtactttgcctcattcttggcgcagcagcagaccgtgcttcaagcaactttccaacagcaggggataaacgtagtccttccacaatttcaacctccaccactgccaccaatatggggatcgggtacccaataccttctgcaagtcaaggatcggcggcacaagggccccagatttaccatactccacctgcatagatactagcacctggagaccaacggccgatgctggaactacatttgtaaatgcaatcttcggtccaccctctggaggcagcggccaaaactccaatcatctgagaggtggcttgtcacactcggatttaagggcaaactcgggcgcatctcaaatgtgtgctaggatcaagtctcacacatatgatggctcatggtacagaaatcaatgtcatatctttattaaataatcggagtttttttacaaaataactaaatacaatacaccatatggcgacgagatcctccaccaacaaagttgactgggagacgacggcatagatctctccgaactcatcgtaacatccttcatgctctttatcttgcagtacctgtctttgacctggtgtgattatagcaagggtgagctcccatacggtcatcgctcagcaagtgtgggaaataatgtgtatgagctcacttacggtgggagctcatgtgtagtgtaaggctgatcaacaaataatggttaaggctgagcattgcttttaataagttggtcaaaattttattagcaattactaagtataagtaaataccatcccaattaaataattgatcataaatagaataaatttccacg

SEQ ID NO: 7985 - DNA, 5913 bp, Zea Mays
ttattccataagttccaagagtctgtatggggaaggcaagaaagaaaatacaaaaggaaaaaaaaaaatagtcgtcttcttcctcgtgaaggacggtctaggtgagattgtcctcttgtcgagatcctcacgtcccggtcctcaccaccggtggcgacggggtgtgacagttggtaccagagacggtgtatcctcggcgtggggggcgacggacggccaccagctcttctctgcgctagctatcggggtggcgacgacgattgttggcgcgtcgacggcggatccagcggtccggcgtggtgacctcattgatccggcgcgacctacctccttcagctaacggtggcgctccagcggcccttggctcgagttccgttttgttccgcgatggcttccctttcccccggcaactccttcatcgaggcggtgtcgacggcggtggttgcggcggatttggcggtgctgggctgacgggaggtctcgatttggcggtgctggtggcggcgactccatcaagttgcctgtgtgctccctcaactttcttcctcagatccccttcggcaggcggcgtgcccacgacgccactgtttgggatatctggtgacgagtgctctcagtcacggcactggtgacgggttccctttctctgagactccaaccactggcggcaacacgggatttggtgcgtgtgtgcggcagctacgggagattgtggagctcgagtggctctgcatcccgctcgtagcgctcagatcgtgattggctgctttcatcctctacaatcactagttgagcagattttgggtgagcgcggtgttaatttgttgatgctaaggcaagccagtaacctggcacacaacatgttcgatgatatgtcatttacagaggtggtctgggatgatgaaggggcactattcgatgaaatgcattgcacggatgtcatctgggatgaggagacacatcatggctttgactcacatggcctattgcagcaccatgctgaagcaatggataaccagatgcagggcaaggagaaattggctcaaagtggagattactatgatgagaggaaagtcaatattgaaccagacatcaacaacttgctcattcatgtcaatgaccatttctctatgttggtgattggtgcggattctaggcgaagtgatgttgtgtgggacgaggacatgttatctgacctcgatactcatggtggcttattacagttactggcatgttgtaaagatgatgagctcaaccaggacagagacactccttttctcttgggccttggtatggatcaggtggatgagatgctggccagcccgtccagccttggcatgaatgaggacttgccatctgtacctgagacacatggctcgttattgcagcaagtggcatgggacaggaagcactttgcttatgaaatgtgcacgcttattgctgagatggtcctggaagatgttctcaccgatgttggcaacctcgctttcagcattgattcaagcatgcagatcagtgatcaaccttccaaatatgcgctagtcatcgatgcttatctgctgaagacgcagtacaaaaaaccatacatttctataagccaatgggatccaggaatttggtgcaaaggtactatggcccatgagcagcaacagcttgagatatataggatgtttgagaaacaatgggattcagttatccttaaatggttcaggaatccttttgtgctgctgcaatcatgcaatggggaggatctgaatgaacaaggcacagtgcctgtaaatgacattttcgatgtattggctgctggccaggagttgaattttggcaacgtcaccttgatcatttatgggggatgccaaggagcaatgggtctgcaggttctttttgcagaattacacccttggcaccacaatgtctttacctccatagaattagcaatacagtcatggagaatcaatggtttcagtccaggaagctgcaagctcaacagacaatctatacttgttgctactaacttgcagttcaattataaagcttccaagtttgtatcctttactgatacttatcagatatacaagaacacatgcatttgtatcggagaattggaacctgctagttggagagatacttgttggctacctgagatctcacatgccaatgtgtccacacttgctagtgaggaaatagataacatgcttttccaggttggtgattttcatccaggagagagtgagcagcttgagctttacatgataacattgatacagtgggatctaggtccagtagaattttacaaatcaaactgtaggtgccctgctgcagaactgatagggtggtgctgattctagtttgttcatacaatctgtttatgttatgctgaaagctagtttcttctttatcatgaggtactacttggcccaacagtcatggaatttctgggatctttagtcaccaagatacaattcatggtcatgcggttgtttggggacaagcaaccatttgtgggggtggaaaggatatatggcaacacaggttaaagtcgtgttttaaaatggaaatgcatgctacagtcctgggtgtcaatgatgtattgcagcatatcagtgcttgttctctattcctgcagcttggtcgcagaaaactatatagggtggtgatgacttctgttctaaggcccagagatttgctgctgaagagctatacaacattcttgaccaagtcgatgaactattgttgcttcctgaccaaaagctcgggagaccatggtgtgacactgatctaatatgtgaaccgattctgtcttggagactcaatggtggcagcccaagcaaatgtttgttgcaactcaagacatacatagtcagacagtgggatccaggaatttctgggatctttagtcatcgagatacaattcaaggtcatgcggttgcttggggacaagcaacattttgtgagggtggaaatgtaacatccatgaatagcaacatgtccagggctttagctgacaagcgggccacccacccatgggacccaggtggaagaccagatgctgggtataagttccaagagtctgtatgggggaaggcaagaaagaaaatacaaaaaaatagtcgtcttcttcctcgtgaaggacggtctaggtgagattgtcctcttgtcgagatcctcacgtcccggtcctcaccacgggtggccacggggtgtgacatgatactaggagatgtaacggagcaaagaattctgagaggagccaaagatgaggataagggatactgaagatcctcgtcgagctggacaaggatctcaagtctgctctgtgcgatttggaagacgtcctggatgttattgaatatcgctgaatcgagaagaaagtcatcggtggtgacaaaaagttgatcagcactactatttgcatctgggcgctgcaagctattggcgattggatcacctactggaagcgtagctcgttcgggcaaaagctgttgcagtgcgcgcgcccagaaccagtatcagaagctcagggaccttggagagaagctgcagaagtgcgctcaggatctggatctgaagttttgggaccttgtagctaagctacagcagtgcgcccagaacctgaatcacatgttctgggactttcaagctaagttcttgcagtgcacccaaagcctgccactgtatatccatcagggagcagctgggcaaccaccaatgcggcaatgcctgattcacccgccgcaagatccactgcagaattcagggatgacattgaacaaggaccatcgacgcctgatgatgcaccctcgaatccaccgtcgcctaatgccctcccgaatgctgctggctccaccactggcaatcaacacggatcagctgaggaggcaccgacgcctgatgcaccctcgaattccctggtgcagatgatctgcgactgattggtctatgggtttacagcactccgttctttttatttggctgcgcgtcatcttcgggactggtcatatgaaccgattggcatcaaagaatgatggtggtactgcaacagattgggaccttcctactaatgagataatcagcttgaggaaaaggataaagaacatagaatatattgtcagtgagacaaataaatcacctctgtcgaaacatagtagcagcagcacaaagaatgaaattgatgacaaggaaagcagcagcaccaagaacagcggcaatgtaaggagcaccaaacagaaggaaattgactacgtatacagaagcattgaaaagaaagttaaagttttcggtcgagacaaggtccatgaagatataaggtgcttcataatggaccggctaccgatgcaccaagctccgactccagtaaaccttattctgtgattggcatatatggaattacaggttctgggaagactactctggcacaatatgtttgtgagtatgagaagggtgaggtttcaatcctatcatgttcatccatgtgggaactacattcagtgccggtgaaatattttgtgatatgctggaccagatcacgcaacagcggccctctgatgccaacggtcctaaaagcctaaaaacagagttaaaagatctaacactacagcaaacgccaaaatatacagctactcttgttgactgtccaaattcaaaatacacagcttataagcaaggctgtatatgtttgctactaactcatacctataggcagctaagaccggtgttatgccaagtgacattgaagtgtacatagctgaccataagggaccagacccttccaaacctgaggagttgtgcagtcaggcttgcacagatcggctgaatatggtcaagaaatggtgaggcgccatgaaaaggactacgaccggagaaaagcaccaatcgatcccatggtggtgtatgctactggaggcagaaagagtcatgggcggtactccatgtttaatggagtgattgactccagagaggttagatctcagaggtcggggtcttcctccgaacgatcaggggctagaactcatcgccaatcagagcatgagttggaggttgcaagggtgcaagaggagataaggcaacgtgatgcattccaaaggcacaacatgagtactttgcctcattcttggcgcagcagcagaccgtgcttcaagcaactttccaacagcaggggataaacgtagtccttccacaatttcaacctccaccactgccaccaatatggggatcgggtacccaataccttctgcaagtcaaggatcggcggcacaagggccccagatttaccatactccacctgcatagatactagcacctggagaccagttctacggccgatgctggaactacatttgtaaatgcaatcttcggtccaccctctggaggcagcggccaaaactccaatcatctgagaggtggcttgtcacactcggatttaagggcaaactcgggcgcatctcaaatgtgtgctaggatcaagtctcacacatatgatggctcatggtacagaaatcaatgtcatatctttattaaataatcggagtttttttacaaaataactaaatacaatacaccatatggcgacgagatcctccaccaacaaagttgactgggagacgacggcatagatctctccgaactcatcgtaacatccttcatgctctttatcttgcagtacctgtctttgacctggtgtgattatagcaagggtgagctcccatacggtcatcgctcagcaagtgtgggaaataatgtgtatgagctcacttacggtgggagctcatgtgtagtgtaaggctgatcaacaaataatggttaaggctgagcattgcttttaataagttggtcaaaattttattagcaattactaagtataagtaaataccatcccaattaaataattgatcataaatagaataaatttccacg

SEQ ID NO: 7986 - DNA, 2088 bp, Zea Mays
tcccacccacgtgtctttctccgccgccgaactcgaacgcggcacgcctcttgcctcaccacaggccagacgaagaagcggaccacacgccaccagctccacctccacggaatcagacggtctcctcctccttttctttctcccgtggactgcagcgccgccgggtagagatcccaaatctgcgcctcgaccaattcctccttcctccgagaatggtgatcctctatccagggtgtgttgctccaacagttcaccgtgattttctgcccagatgggtgctgctgaacaacagctcgagaatgtactgccatgtctttccagatagaacgaaaccgaaaaggcaatacaggcatcagtgggtgccttgcttctccaagggatcttcgttccaaggtactctacagtagatccactgccctctgtaaagccttcacgccttcttccagcagaggaactaaagacatatcccaacactgttcctgaggagatatttaacacgatcatactagatgactccgatgcattctatgtgctagaactgagcacgagtagagaatttagttcctctttggataaaaattctgcaatcttaatctgcctatttgatgtcgatggtgactccctattacaaagagtaccggcaatctatttgggtcaacctacacatggatttaagacagagcagcagatacccttccaaagtggttcagttgatatcgttactttcaaggggtcaaaactgaaaacgattaaagaagtctggatcggtcttgaatcaggtcaggttcatggagattagatggtttgagcttgaaagtaatacatggaccagttggtcagcctaaagaaataaatggaactccagaacagaagttcagcggtttgcagtacacttttgagaacgtaaatgtgttccttggagatgatggagcttcagtagctgaagcaaggccgacggctatcactgacctctcaggagtcggcctttctgatcttcaacaagggatgttatcctcaagaagcaaagcttcaagcattcaggaagtaagagaggatgggttgagagagtacgccgaccttaaacaatctctgctgctctatgacgcatctatagtgataaccggcttctctaccttcatcttggcttcaaatgacagcgctgcctattcgttcctgataggtggcattggagggttcctgtacctgttgctgctccaaagatcggttgatggtttgcctgtgatcggttcaccttcagaagctggcggtgcacagccttcggtaaaaagtttcagcggtgtaaggaggccatggttgatactatcactagtactggttgcaggtgcagttgcactgaagtatggtgctggaggcgacagctttgcgctcacacccaccgacctctttgttggcactgcagggttcctagcaaacaaggttgctgttcttcttgcagcgttcatgcctatgctaagtgactcaaagagtgaagatggatctggtgacagcagttaattggacttctttaaaaatatgttagtaatagtttcctatagaagatctgtattcaagactggaacggaattagctgaagtgcaaaggacaagtcctagtttctgaactggaaaaaagaaccctctcatcttggtgactgtgtcatccttgcaagggttcaattcacagcaagagttcaagtgttgtggcagtttgaagtcagaaacttaagttgtatttttcagacatgcaggacagctgtgtatcattatatcaagaagaagaagaacaaaagtctaggatactttgaagcacccttagaaaggcatgaccagtacagcagaagaaaaacagagacacaaaaactaaggacatggccataaactacggagcgttttggcttttgccatacagcacaacttgatttcatcttagaaacttgagttgtagtatagtatactcacctatcggacactgaactgttaagatgatataccgactacagctttgttgtatgtaaaaatatgacatttgtgaggttaaatacacagtaactatcgaaacaaaatgcttggcgttgctccaaatcactat

SEQ ID NO: 7987 - DNA, 1184 bp, Zea Mays
ggtggtcattaccattagaaccagcctcagtgtctcctggtttggaagcagagttctctcacctgaatattagacaaccttctcccccacctgtcctagctcaagtgcaccctgagcatggtcaaattcctccatcaagagttgctgatccaagaccaggacttgctacatctgcaaccggacgctatcagaatttgcatgtgccagtggcattaatggagtgtttcctgaggctcgctgagttaaataccgcaaagaatttggaaacctgtggaattcttgctggtactctgaaaaagagaaccttttatgtgacaacattgataattcctaagcagaaatcaacatctgattcatgtcaagctacgaatgaagaagaaatatttgaagttcaggacaaaggctcccttttatctcttggttggattcatacacatccaacacagacctgcttcctatcttccattgatcttcataatcattacgcatatcagattatgcttccggaagcgattgcaatagttatggctcctacggatacaacaaggtattattttcactgatgttgcaccctcagttttttggtcattgtaatatggcggcatgctagccaagaagagaagtcaataatgctaatcagcactgatcattatggactttttgtcgtatttattaagggtgccaatgaaaacatggcatatttcatctaacggagccatgtggcatgggcgtgatccatgattgtgatgcaactggattccaccctcatgaggagcccctagatggaacaccaatctatgagcattgctcccatgtgtacatgaacccaaatgtcaggtttgagatgacagacctacgtgaagcatgaaaagcgatattgacgactgttgcagattccaaaacccacaatgacttgcacatatctcatctgttccactcctgtgtacacaagttttgttttgaaacggcagtttgttttaatcttgagggaagcgatcattaatttgtagtaatcaatttatcaaaacatgcaacatggtgcttatttgttctcggaccctttaatggttgcttatcttttgttttctttattataatacatgtttgtgtgttgcagttgaagaaaaaaatctactaatcatccatgaaaaacagaggatgtgggtgttatttctctatttaag

SEQ ID NO: 7988 - DNA, 2155 bp, Zea Mays
tttttctttttttctttttcttcctcctccatggggctgttttgctgattctcaggttgataaggcgtcgccttgctcgccttaggcgtcgcctaggtgtctaagcggtggtccagcgccttatctcgccttaccgccttaagaaccatggctgcgacagagggtgtctatattaataggtagaatagtatatgggctatgcctaagcccattacagctgtgacacacactaactgtctaacaatgtttgtacggaatttagactgaggtatggtttaagtttgttcttgtttaccaattgcagtttgcttctttatggcacctgatttataggactatttgaagaagcaatttacacgtactgtttctttcataggccagactattcatcgataggcactaggcagtagtctgtttgcggattattagtagagtagtctgcaacagttgatccttgtcaaattgatatgaggttggcaaagtgtgatttatttatatcttctcataactagcgagtacacagatttcctatgtactctagttcactttggctctatcctaaatttctctaatttataccatgtttatatgaaaaatgcactgacaaatacaacctcaaattagtttcattaaattctacatgaactatgttttgaattgataatgcatttatttgagcttgtagaacctaacatattttttttctaaaaatttggtcaaagttagaaaagttgacttaggacaaaaccaaagtgaactttaatgtgaatgaagtacatagcagcttccattttctactgagttcagctattgtttgtcacgcatgtagcgagagctgtctcattaagttactatgtcgcagatttgaagcaccctctccgcatttgcgggggaaggtttaactcgattatccctttcccagaccccattcatgttggagcatctggctttgagtctgccattttttaattggttgtcagttatcacacatgatattattcttgttgtatctaattactttaatgtgtctttacagtttatgacagaaatgaaagaaactgctttcatcatgcaaaatgtttcttcaaggagtttggttgttgtggatgaacttggaagagcaacatcttcctcagatgggttggcaatcgcatggagttgctgtgaataccttctttctgtgaaagcatacactgtttttgccacgcacatggaacgcttgtcagaactttcaacaatgtatccaaatgtgaagatcctccattttgaggttgacttgagaaatgaccgcttggatttcaagttctgcctaaaggatggcatccgacgggtaccacactatgggcttctgctggccagagtagctggtatccctacttcggtgatcgacacttcaacaagtatcacttcacagatcacagagcaggaaatgacaaggatgaatgccaattgcgaggagtactggtcgcttcagatgacgtaccaggttgtgcagcggcttatctgcctgaagtactcgaaccatggcgacgactacatccgtgaagcactgcagaatctcaaggagagctattctgcgggccggctaacataagaggtctcatcagtgtatgccgctggaggatccataagccaatgtatatattcctccgtcaatgtgatactatcttaggtcctcaaacgcacatctatcgttatcgcacatgccatgtaacatcttatcccctattcatatagatgatcacgaagcaagacagcatgtgaatgtttagaacaagtgattattatgacctcagccacatagcttttacgaaaagatttactggaatatatggaacaccaaagtaggagattagagtggtcgatacatacaaactgtaggtttgaacagcaaatgttggcattgttttctgccaatacattaatcgatacagtagcatgagaggaggaggagcacagaaggcggcctagaccacacaagagagcgggaggtagtgtggagccgagcaggacaagaattcatgagggacaaaaaaaaaatgtatggcaaaatcattcattgtcataaaaaacttgtgttttatataatttcagtttcatgtcaatgtatcaataaaataagcaaatataccgttaagtttttgttgaccgagac

SEQ ID NO: 7989 - DNA, 1607 bp, Zea Mays
attccattccgtcacatattcccgagaaaaaccgtcattcgcgcgcacacgcggtcgcagctgcggtgcccggctcaacgccgcggagatggagggcgacgccaccggagctgacggaggaggcggaggaggaagtggtgagcgttctagcttcgtgatcggcctcatcgagaaccgtgccaaggaggttggtgttgcagcctttgatttaagatcagcctcattgcacctatctcagtatatcgagacaagttgctcatatcacaatacaaatacactacttcatttctatgatcccatggttgtcattgtgcccccaaacaaaacagcagcagatggtatggttggagtttcagaactgatcgataaacattacccagcaaacaaaaaggtcactatggcacgtggttgctttgatgacacaaagggtgctgtcattgtaagaagtctttcagctagggacccatctgctcttggtttagatacttactgcaagcagtattatctttgtcttgcggctgccactgcaacaattaaatggatagaatcagaaaagggtgtgttcattaccaatcactcattatcagttacattcaacgggtcatttgaccatatgagtatcgactcaactagtgttcaaacattggaaattattgaccctctccatactgaactttggggcactagcaacaaaaagaaaagcctctttcagatgctaaagactacaaagactacaggagggtctagattgttgaaagctaacttattacaaccattaaaagatattcagaccatcaatgctcgtctagattgcttggatgagctaatgagcaatgaggagctgttttttggtttgactcaaggtctacggaaatttccaaaagaatcaggttttgaagggggcaaagagttttcttcttcacaacatctatcagactgtatgtgaaaaccctaagtatgctaatatgagaaagagaattggagatgtcattgacgaggatgtggttcattcaagggctccatttgtagcctgcactcaacaatgttttgctgttaaggcaggaattgatggtctgcttgatgttgctcgtcgatctttctgtgataccagtgaagccatacataacctcgccaaaaagtacagggatgattataatatgccaaatttgaagataacctataatattaggcaaggattttactttattattccccaaaaggacatcaccgataggcttcctaataaatttatccaggttgttagacatgggaagaatctccattgctcaagcttggaacttgcttcactgaatgttaggaacaagtcgtctgctgctgagtgcttctcgcgcacggaactttgtttggaaggtgtgtatcagtgcattattaaaagagagttacaacaaacacaacctagtgaaaaaacaactacattagcacccatccaggcagttggtccccatactccccaacctgatgtgcgatctttgtctgcctggtggtgttgtgcagccagcagtttgccaaaggagaagaggaaagggtttacttccctagtcatccttgtggcctggactctttggaagcataggaaagagtcttaa

SEQ ID NO: 7990 - DNA, 3064 bp, Zea Mays
attccattccgtcacatattcccgagaaaaaccgtcattcgcgcgcacacgcggtcgcagctgcggtgcccggctcaacgccgcggagatggagggcgacgccaccggagctgacggaggaggcggaggaggaagtggtgagcgttctagcttcgtgatcggcctcatcgagaaccgtgccaaggaggttggtgttgcagcctttgatttaagatcagcctcattgcacctatctcagtatatcgagacaagttgctcatatcacaatacaaatacactacttcatttctatgatcccatggttgtcattgtgcccccaaacaaaacagcagcagatggtatggttggagtttcagaactgatcgataaacattacccagcaaacaaaaaggtcactatggcacgtggttgctttgatgacacaaagggtgctgtcattgtaagaagtctttcagctagggacccatctgctcttggtttagatacttactgcaagcagtattatctttgtcttgcggctgccactgcaacaattaaatggatagaatcagaaaagggtgtgttcattaccaatcactcattatcagttacattcaacgggtcatttgaccatatgagtatcgactcaactagtgttcaaacattggaaattattgaccctctccatactgaactttggggcactagcaacaaaaagaaaagcctctttcagatgctaaagactacaaagactacaggagggtctagattgttgaaagctaacttattacaaccattaaaagatattcagaccatcaatgctcgtctagattgcttggatgagctaatgagcaatgaggagctgttttttggtttgactcaaggtctacggaaatttccaaaagaatcagataaggttctctgtcatttctgcttcaagcccaaaaaggtcacagataaggtattgaagcctgccaatggtagaaagagccagatgttgatttctgatattattgtccttaaaactgctctggacgccataccattcttatcgaaggttttgaagggggcaaagagttttcttcttcacaacatctatcagactgtatgtgaaaaccctaagtatgctaatatgagaaagagaattggagatgtcattgacgaggatgtggttcattcaagggctccatttgtagcctgcactcaacaatgttttgctgttaaggcaggaattgatggtctgcttgatgttgctcgtcgatctttctgtgataccagtgaagccatacataacctcgccaaaaagtacagggatgattataatatgccaaatttgaagataacctataatattaggcaaggattttactttattattccccaaaaggacatcaccgataggcttcctaataaatttatccaggttgttagacatgggaagaatctccattgctcaagcttggaacttgcttcactgaatgttaggaacaagtcgtctgctgctgagtgcttctcgcgcacggaactttgtttggaagggcttattgacaaaatcagaggagacattgctatccttacattgctcgccgaagtattatgtcttttggacatgattgtaaattcttttgcgcatacaatatctacaaagcctgttgatcgctacacaagaccagagttcacagatgatggtccaatggcaatcaatgctggacgacaccctattcttgagaccttgcatactaattttgttcctaacaatatatttctctctgaagcatctaatatggttcttgtcatggggccaaatatgagcgggaaaagcacatatctccaacagatatgtttaattgtcattcttgcacaaattggctgttatgttccagctcagtttgcatccttaagagttcttgatcgtatatttacacggattggtaacggggacaatgttgagaacaactcgagtacgtttatgacagaaatgaaagaaactgctttcatcatgcaaaatgtttcttcaaggagtttggttgttgtggatgaacttggaagagcaacatcttcctcagatgggttggcaatcgcatggagttgctgtgaataccttctttctgtgaaagcatacactgtttttgccacgcacatggaacgcttgtcagaactttcaacaatgtatccaaatgtgaagatcctccattttgaggttgacttgagaaatgaccgcttggatttcaagttctgcctaaaggatggcatccgacgggtaccacactatgggcttctgctggccagagtagctggtatccctacttcggtgatcgacacttcaacaagtatcacttcacagatcacagagcaggaaatgacaaggatgaatgccaattgcgaggagtactggtcgcttcagatgacgtaccaggttgtgcagcggcttatctgcctgaagtactcgaaccatggcgacgactacatccgtgaagcactgcagaatctcaaggagagctattctgcgggccggctaacataagaggtctcatcagtgtatgccgctggaggatccataagccaatgtatatattcctccgtcaatgtgatactatcttaggtcctcaaacgcacatctatcgttatcgcacatgccatgtaacatcttatcccctattcatatagatgatcacgaagcaagacagcatgtgaatgtttagaacaagtgattattatgacctcagccacatagcttttacgaaaagatttactggaatatatggaacaccaaagtaggagattagagtggtcgatacatacaaactgtaggtttgaacagcaaatgttggcattgttttctgccaatacattaatcgatacagtagcatgagaggaggaggagcacagaaggcggcctagaccacacaagagagcgggaggtagtgtggagccgagcaggacaagaattcatgagggacaaaaaaaaaatgtatggcaaaatcattcattgtcataaaaaacttgtgttttatataatttcagtttcatgtcaatgtatcaataaaataagcaaatataccgttaagtttttgttgaccgagac

SEQ ID NO: 7991 - DNA, 1425 bp, Zea Mays
cgcctttgaaaactacccacaccacaaagaaatcgaagaggggaacagaggagagagaagggagatggcggaggcgacggcgtacgaggagcagcgccggaggcaggtggaggcgaacaagcggaagctggaggagcttcagctccactacctctccgccgccgtcagagaggccgcagccgccgccaagccctcgccggtcaagaagcggaaggcgcgggtgccgcttgacgccgccgactccgtgatggagccactacggcggtccggccggctcgccaacctccccgataagtccgtgcaccgcgaggaggttccaactttttggagaaagattaggaggacgtatggatcagtgagaaaagatctggaaaaccgggtgtacgcgaccgacgaggcgaggagctacgccatctgtaaggcggaggaagtggagcaagagctggactccagcttccccgtcttcatcaaacccatgacccagtcccatgtcaccggaggcttctggctgggcctcccaaatcatttctgccggaagtacctgcccaagcgtgacgagacgatcaccctgctggatgaggatgacaacgagtcctacacgctatacctcgcattgaagcgaggcctcagcgctggatggagagggttcgctatccagcacaagctggttgatggagattgcttggtcttccagctgactgagagaacaaagttcaaggtaatcataattagagcaagttcttactatgaaagtgaggactgatgaaactaatagcttgtaatgtggtgtttggagcacaggtaaaattcgaccttcattgtttgaaatggttgaatgagtgttttttgctttctattttctttttggcacattcttccatttcaacgttgggttctttcagcttttgatcaacaaacttcaacgcttaccacttgcattaaaactatctgtacttccattattcgtgagtgacctagtttttactgaacattgcacaactttcagaatgatgaatgcctgtcatgatgttaagatgttccttttttttactttactcagtttatggaggtgggctgcattggacaagcttgcatctggaaattgctgggtgtcttgaaccttttgggttacagagttatctcatgtacaaaatgtttacacagcccagtagctaccaattgctgatttgtgtacttcttgggcttaccacttgcacggttcagaaacctgcactatgtaagaggatgttgatggcaattgacctcattttgtaaatgatcctcgtttatcttggattcatttttagtgttcagtttggcagttgaccaccattgttggctttgtgtggtgttaatctacaaaaatgcgatcttgtgaattgcaccgggctagttatttgtgaggtgagagggccagggcatggc

SEQ ID NO: 7992 - DNA, 1197 bp, Zea Mays
cgtaattcaacaactagctgcatcgtcttctccaccgaccttgccgccgtcgccccgccgctccatccggtaagacatggaggagtacctggagagcatgaaatctctccgctcctacatgaacgatctggaggacgacgccgcgaagcggtctgtcgaggagcagcagcagcgtacagccatcgacgctcacgacagcgatgtcgcgctagtgatggcgcaagcaaagcaggcgagcgaggaggccgagcggctggccacagcgagggctaaggtaggcatgcagatggccgagaagcagggaaggattgccacgctggacatcgagtgcgccacactgaagcagaccttggagctcctccgtcaggaaactgcaagtacatttgtgaaactctgtgagaaaagattgttctacacaaagagaacagaaaccttgactgtcaaactacaggagcaacaggaatggtttagtatgaagaataagattactagacaggagccacatgttgccaaatctcagagcaagcaaaacttcattgaagtttttaatcaaacaggaaagtgatgctcagaacaagcccgggaaactctacacacaactggtgtcagctcagctcaagatccaagacatcaaatcacaaagatcagcgcttcttttagaaatcagcagaatcaagcagattctggagcaagagaaaaacataattcctggttttcccgctgcactacagcagatggatatgaagtcattggaggaggaatacaaagctctgcaaggtgataaatcgggggaagttgagtacttccagtctcttgatgaaacaattaatgggatgaaggggattttggatcctgtcaaatgccaatgtggactggagtacaacttaaaacttgatggtgaagccatggatataagctaagcaagaacgaccacatacgcagatgcccatctccaccagatttcgtgcattttagatctgtacagtgtgagagatggattattctttggaaggtacagaatcttctcgcatgtatacgggtggatgctttgggcagagcttgacagcgtcatcgcgaataatatagaattctgatgttagaactatctggagcttgaacggactatacggccatagttttgttcaataattgtttttccttacgctcaaccgcttgtccagattgcagacataaaag

SEQ ID NO: 7993 - DNA, 1944 bp, Zea Mays
cacgggcagaaagggacgcgactcgtcagggcgattccgattacgagtagacgggcaggacaggacaagggaggaacggcggcggcggcgcagggcagggtaaaccatggcggcatcggccaagggacggctcgtgcccgtgctcgcggtggcggcggcgctcgcggccgtgctcctctaccgcgcgcccttctccaagagcttgggcggcgaagggtgcagcctcctcccgcacgaccacttctggatcgccagcgaccgcgtcgtcacgctcggacgcgtcggccccgccgcagtagaggtcaaaggagggctcatcaacgccatcgccgtcggggactaccggagcttcgtgctccgccgaccgctccttgactacggggacgccgtcatcatgcccggcctcatcgacgtgcatgcccatctggatgagcctggacgtgccgagtgggaaggcttctccaatggcacaagagcagctgcggcaggtgggataacgacgctggtggatatgccactcaacagcttcccgtcaacagtctctgaagaaactctcaaactgaagctggaagcagctcgggataagctatatgttgatgtggggttttggggaggccttgtgccagagaatgccttcaacccaagtgctttggagggcctcctaaaggcaggcgttttaggactcaagtcttttatgtgcccctcaggcatcaacgactttcccatgacaaattcaactcatatcgaagaaggattggttacactggcaaaatacaagagatctttacttatccatgcagaacgtatacctgaggctgaggatcatgatttgcaagaagatgaattagatcctcggtcctatatgacgtatctgaagtctagaccaccatcatgggaggaagcggctatcagagatctgcaacgtgcaatgaaggatacggagttggggggtcggtccgaaggagctcatattcacattgttcatctatcagatgcaaaaactagcttggaacttatgaaggatgctaaacgcagtggtgcaagtctgtctatagaaacatgccctcattacctggcattttcgtctgaagaagttccagatggagatactcgctttaaatgttctcctcccatacgtgatgacacaaacagagaaaatctttggaaagctctgcttgatggacacatagacatgctaagttcagaccactcaccatccactcctgacctcaaactaatggaggaaggcgactttttaagggcatggggaggcatatcatcattgcagtttgtcctcccggtgacatggtcatatgggcgaaagtatggcgttactctgaatcagctagcctcatggtggagcgaaaggccagccaagcttgcaggccaaaagaataagggagctattctaccaggataccatgctgacattgtagtatggaaacccgaaacagagtttcaacttgacaacaaccatgctatatatcataaacatcagcgtatttaggaaagcaactttctggtaaggtcctgtcgacttttgtgagaggaaatcttgtgtttgctgaagacaagcatgcaaatgctgcttgtggtgttcctatcctcgctaagtaacatacaggtggatccagaactgccattgttgatccgtagtgtatacaatcgtatgcacgtgtcaatttgtaggttgctctcctgtatataattgaactcattcatgtcattgttatatagtagcaatctatttatattggcacacattttgccttgatccctaattagactatcattagtttttttttctattgatattgtcagcattcgggagaaggcatactctccagaatgctaacaaaatatccgctgagacttcatcagtagaagataaactcatagtctgatgaaatagataagatggtggtatgacacagtcccttcaac

SEQ ID NO: 7994 - DNA, 1427 bp, Zea Mays
  misc_feature (1426)..(1427): n is a, c, g, or t
agtcgcgcgcatcttttccagtcgcgcccatctaactacgggtagactcggcaggacggcagcacaggtccacgcgggcgcggaggcaacgctatggtggctcgccgcttcgtggtccggcatggccccgcagccggaggatcagccgaggcggcggaggagcaacagcacgaggtggagtacgacacggagcacggcctcgacgtcctccgcctccagatcttttccctcaccgccgtcccgcccgacctccagaagatcgtggtggaggcggatgggtcggtggtggacgacggcaccgacctggaagccgtctctgagcgcctgcgcctccttgctatcggcgaggagggggaggacgacggggcagcggccagggcgcaggagaagtccgacgaggaattcgcacggatgcttcaggcggaagaagaggcacttctcctacaacagtacaatatacaaaatgatggtggagatgtgtttagacaaagagttgagccttacatgcaccagtatgaagattcagtgggacaagaggcagcacaaaagacagttccgatatgcgaactggaggagaaggcattagtttcactggccaaggaagggaatttcaatccttcgaaagatgaagagaagcatgcctttctgctgcaattgcttttttggtttaagcaatcattcagatgggttaatgcagcaccttgtgacagctgtgggccgtgagacatccaatgttggaatgggcaccccacttacctcagaaatcaaatttggcgcttcacgtgttgagatgtataggtagctataagttgaaatgttattttcttacatctcatatgcttaatttagatgtgtcatatcctttcaaaacttgcaactcaatatcaggtgaatcatattgctactgtttgaagttctctaacacgtagaagagctgcatatcattatattaaaaagaaaaaaagggttaagaatccttgcaacatgcacccgcacccactaaaaaaagcattacaatctcaccatttccttgacagacaacgacttcgaccacacaatacacccaagcctagttatatgttcggtgttttattatttgtggtggtgttttattattttttgacctgtaaggccgtatgcaggacactgcaaaaggctggaacattttgtttccgttatctaaaaaaaagttatatgttcggtgttgtttgtcgtaatattgtatgattcacagtataaattggaaccctaataacctcatgtttcgtgaatataattgctgaactaaagcaattgatgacacggttgtttatttgtttctgccacatagttcttatacctgtgccagtgatgaatctgatgaaatcatttccttttgtccctatgttttttgtgccatttatcaactgggaaactgaacttgaann

SEQ ID NO: 7995 - DNA, 1945 bp, Zea Mays
cgcagccgcagagcacactccactgcggccgaagcaaagcaagacggcggtattagtatttagtaggcaccagcggcttgctccgcgtcgtcatcggtagcgcgcggtcgcgactggcttctcgtagcagcttatctacagtaataatcacaagagcctactaggtggtgggagcagagcagcacttgcaattgcaaccagcaagcgcaagagaggagggggctcaagagtcttgacgcgtctagccttcgcagaaaagggttcaagcgagaagagggggggagagggcacgggttcagagctggaggagatggagagcccgcgcagccccgaggcggagatcggccaccgggtggaggacctctgggaggtggcggagccgcagctctcgccgtcggagaagctcaactcctgcttcgaggacatccccgtcgcgtccttcccgcgcacgcacccgtcccaagtcattgagattccttcagatgcaagtcttgctgaaactgtagaaatattatccaaaaacaaaatcttgagtgcacccataagaaatgttgaggctccagaagatgctagttggatggacaaatacatcggcattgtggaatttgctggtattgccatgtggttgctcagtcagtctgatgctgcagttaatgggacggttggttcgggaccaggatcgcctgtctccagtctagtttcgaggttgggttctttcacattcagaaggacatcatctggaagattagaaactgctactgattctgaatcagacgaagcagcatcggttggtgggagcttttttgaaaccctgacttcctctgaattctacaagaatacaaaggttggcgatatctcagggagcttccgctgggcaccatttcttgcactgcagacatctgacacattccttaccatgttgctgcttctatccaagtacagaatgaagagccttccagttgtagaagtgggaggagataagattgagaacattatcacacaatcctctgtcgtacacatgcttgcagagtgtgttgggctctcctggtttgagaactggggaactaagaaactctctgaactggggcttcctgtcatgaaaccatcgaaacttgtcaaggtaagcgaagatcagccagttctgaaagctttccaactgatgagggaaaagggagttggtggcttgccagtcatggacacaagtggagcaaatgccattggtaatattagcatcagagatgtccagtatcttttaactgctcccaagatatacaaagagcacaggtcaatcacgacaaaggatttccttagtgctgttcgacaccacctccaggagcagcgtgaggcctcaccgttgctgcatgatgtcatcacttgcaaaaaggatgatacaatcaaggacatcatactgaagctggactctgagaagatccacaggatctacgttgtggatgacaaagggaacaccgagggagtcatcaccttgagggacataatctccaagctggtgcatgagccacgccattactttggggatttctttgatggtgttgttcccctgcctgcaaacagcaccgtatgacacatcttcgcggtccaatcacactgatgtatctgtgcaaatatgctgttcactagattcagctttgtcatgctgcaaagcaaaattctgcgggagaagatgtattttatcttgtttttaaccttggagtcagactctttcgctgtcatatacctgggtaacttcatcattcacctggtggagtctactacatgtcgtagggtcaaccaaaatatcctcgtgctgcagtgcatccatatattttttccgtcgtggcagcataacgaggtactacctttgaagaagtgtatagtgtataagtggattgattatatttttcatcagtttaaacttttaagttgaactgattagtgcattcaccct

SEQ ID NO: 7996 - DNA, 1639 bp, Zea Mays
ggtcaaaatcactgtacctccgtcgatgtttccgtcacagcgaagagaaatagagggggttaaaccagactgaacatcaagccagtgctagaaatacgaaacaataataataaaagaaacactggaaaattgcacgaaccctgcgtgtgcgcgtacgatagttaccactcgcggcagctctccagtccagctgtactgtccatgacaggtggggacatatgaatctccacctatcacgaataccctattccgctaagctcacccgcccgcaaaaacaccacgggcgcgggcgcggagaccgaccaccacggcaccacctccacctcctccggttgccttcggcctcgcctcccctccgtcctccccgtctccagcctccgggaccggaagctccacgtggcgcggcagctcgtacccggcgtctatggcggcggcagaagtgtactcgccgaccgcggcggcggcggcgcagcagcagcgggagaaggcggcgtcgcaggcgtggcggacggtggtagggtggatcggcttccttgttcaggttctgctccagatccttcgaggcacgccgtcctgcgcccagctcttatccttcgtcggcgtccgctacccgctcctctccgggcccacagcctcgaacccgtcgccggaggtggccttcatgccgctccgctccgagatcccagctgacgcggcacctgccccgacacctgcgcctgagcccctgggccgcctcaagctgttgaagcaggattacattgctttgatatggaatgcatatcatctgataaggatgctgaaggaaaacagaaggtgaatcatgtgactgttttcgagcgtcctggtttgcatgagttcttgcagaaaactagtgaatttgcagaccttatcctttttacagcaggtttagaaggttatgctagacctttagttgatcgaatagatgttcacaatagattcagacttcgtctctatcgcccatcaactgttaccacggaatacagagaacatgtgaaagatctttcttgcgtgtcaaaagatttcggcaggattgtcattgtcgacaacaatccgttcagtttcattcttcagcctttgaatggaataccttgtgttccattttcagctggacaacattctgatgaccagctcatgatggttatatttccactcctgaagcatctttctctccagaaagatgtcagacctgtattgcatgaaaggtttcatatgccagaatggttccaaaagcatgggatcccccaaactaatcagtctgttttaactggcaggatcatcgacgagcggaggaggaggttgaagtctgatgtggttgagatgttgacatgcattaaaaattgggaggatgctgaagcaaggatgcaacacatggtggatgacaaagagcttgaagaaacatttgaaaatgtttatcttgattagtctctttgtgaccatttgtgcaatgggactgtaatattatgcacctgaactttgtttattgtaaggacagtgaactttttaatgagttgggttgtactcttttttcctgtctaaggtttctcacaagggtgagttttacctagacaggtttttaacgaggcagccattgcactacagctcataataaaaatgtttt

SEQ ID NO: 7997 - DNA, 2838 bp, Zea Mays
tccttttcgcagtccgggcgtcgtctccatcgatcgcatctttactaactattaagagcctattgtagaccgcccccgcctcctacgcccgcccgcaagcccgcaaatcacgccgcgaaccgccgcagactgaccccgactccctacgcccgcccccaatccagccgcaatccaccctgcgaatgcggcgaccgtcgcgttccggccggccgcccgtccgcccgccgctatggcactatccactaaccagacacagcgtccagccaagcttttgccgccgcccacttctctcccacctcccctccactcttttgcttgtcgcggggttagaatcccatggcgctatcggccgagatccgcttcggccaccagatcccctatcccactacgacactgactcctacgaggaggaggaagaagaggaagaggaagacgaggaggagttcgagggggtggagggcggaggagatggatgaggtgacggtttcgtctccgctgatgctgccggcaacggaggccaggggaggggtgtccgtggtcgagatggtgatgggggcgcttcggaggtcgctcatgttgtgcagcagcagcgccggcgccggcgccggcgtgcgcgagccggagcaggaggaggacggggtgactcccccgggtggtatgcaaataggggggccaacggatgtgcggcacgtctcacacgtcaccttcgaccgcttcattggcttcctcgacctccccgctgacctcgagcccgacgtgcctcgccccgtgccgagcgcaaggatacgcgggaagaaagccaaggtcaatttccgggatgaagcggcggcagcaggtgctcagaagccagccgcaaccgcaactactccaactgcttgtgccagcgcagcgaggctaggtcctccaccgccgaagttccgtgctgacgaggttttcgggaacatgaacggtggcagcaacgatctgttcgcgattatgttcgcgttcagtgacagtagtagtcaggtcgttcgtgtggagccaggtgagggcgccgccggtttcctccccgcagtggaagtgttggacgacgagcctctgttgcccggcagtaagaggtctgcggctaacatgctgctgctctccggccagagcagcgactcgtatggctcttgtgacttggggtgggactgggacgatgacaccatgacctcagactacgcctcagtctttgctcctgctgctcccagtaacgttgtgccagcatggtacacgcaaggtggaccggcgtcgaagagaacgaggagcagctatggctacggtgtggcgatgctccagcagggagatggcgcgcaggccatgccgggcggctttgaccctgagacgaactaccagtaccagctgttgccttacgtcgtcgagagcagcccgtcggacggcgcgtcgacgcacgacatggactgccttcaaatgatgcgagctggtgatgttccacaggatggggcgagcagtggtggtggtggtggtggcggcggcgatatctggagccttgacgagctgctcatggccgctggcgcttactgagaaaagctatgtgcatcgcatgtactagacggttacttgttgtgccgtgaatggagtgtttctcagtttcgttttgcttttaaatttttttattattccaggtctcctgcttgtggtgatgatgcaggagagccatggtgggtaggtgaaagcatacctcgatcgcaagtcactggcaaattctctgaacgacataaagaccgtagttatgcaacttcacgacctcatcagtgttatagacttatagtcatcattgttacactactatttatgggcattgcgacaaccaagattcttgttgtcatctcgtcccagcttctggttgcgggattcatatttgggaatgcatgcaagactgtatttgaggcccttatatttgtattcatcatgcatccatttgaggttgctaaccgctgtgttatcgacgaaacacagatgatcgtcgaggaaattaatatattaaccactgttctcttcaagaatgacaaccagtttaggcagctttgaggtccaaaattaaagggtacctggagagcaaaccaacgcattggcaccctacccacactgtaaatctcaaggacatcttggatgtgaacaagattaacatgtctctctcagtccagcacaccatgaactttcaaaacatccgggagaagaacatcaggaggtctgagctcgttatggagttgaagaaaatattcgaggagatgtccattcggtaccaccttctaccccagaaagttgaactcacctacgtcgactcgaacccactgcccatgggtccttctcatacaagatagaagatgggtgaagacttttaagtctcatactgacaacttgatccgtttcatgggatctgacaactgatggctagctgtgcagtctgttctgaagttactaaaactctgcatagtagatattagctcgtagaataatttgtcagataatgcatttgtaagcggtgatggtactggtgatcaatgctttgggattggccattacaccatttgattatctacaccgtttggtgcatcacaatcgaaaatgttgcgaaatagccactactaaagaaattcagctgggagattgaagtgggcctgtcgaaatgttattcttcacaatagtaccatgtaattcagctgtgagactggtagtcactcttgtgcatattttttgttggcaaaaatctacttcatgtccggtgttcaagaggttcctgagcttcaagaagaagcatagggggagggaggtcactgtaatcgactgcatgtcgcc

SEQ ID NO: 7998 - DNA, 1747 bp, Zea Mays
acgaaacgctaaagccactttcttctcctgccaacacaagccgttttttcctccccaagtgatctagccagccacggagccaccactcgccaggtgcttcaaatagtcgccccggacaggcaggcgcacgcaacgcaactagtctccttcaccgtccgtccattcctccgatccgcaggaggattaggaacttaggatcggggaccggcggagcccgacgaccttctcggtccacccgcccggcgatcgaaccatggcgctcggcgagggcggggatcacggcgccgccctgcccctcatcgcggaccaggcgaaacatgccgccgccggtggcatcgtccgaagcggtagcaacagctcgtgggtgtgcatgcttctgcagcacacggccctgttcggctatggcatcgcctacaccatcacggcctccatcagctgcagggcgatcctgaaggcgaactgctaccacgagcatgggcatgacgcgcactgcgactacgatggcaactactacatgctcatcttcggcggcgtccagctcctcctctccttcatacctgacttccacgacatggcgtggctctccgtcgtcgccgcggccatgtcgttctcgtacgccttcatcggcctcggcctcggcctcgcaagaaccattgctaacgggacgatcaaaggaagcataacaggtgttcggatgaggacgcctatgcagaaggtttggcgcgtctcgcaggccatcggcgacattgccttcgcgtacccctactccttgatcctcctggaaatacaggacaccctgaagtcaccgccggccgagaacaagacgatgaagagggcgtcgatgatctcgatcctcgtcacgacattcttctacctctgctgcggctgcttgggctacgccgccttcggcagcgacgcgccgggcaacctccttaccggcttcggcttgtacggtccgtactggctcatcgacttcgccaacgcgtgcatcatcctccacctgctgggcgggtaccaggtgtacagccagccgatattccagttcgcggagcggctcttggcggagcggttcccggacagcgggttcgtgaacggcggctcctacaccgtccggttcgcgtgcctgcgggcgtgccgggtgaacccgctgcgcgtgtgcctccggacgctgtacgtggcctccacgacggcggtggccgtggcgttaccctacttcaacgaggtgctggcgctgctgggcgcgctcagcttctggccgctggccatctacttccccgtggagatgtacttcatccagcggaacgtgcgccggtggtccgcccgctgggtcgtcctgcagaccttcagcgtcgtctgcctgctcgtcagcgccttcgcgctcgtcggctccatcgaggggctaatcagcaagaagctaggctaggctaggctagtccgatccagtggaacaccctatctgcaggtctgtcagagagtggcagcgggctcggttattttcacagtgttgccttcctcctgcatcgggttgtaagttgtaacatatatgtcgtattgatactggcgagttcagatgttcagaagaagtagaacgcgtgtgacgattctgtgttgctgaatgccgcctatgtagtttcagttccagaatttgagggtttccatatctgcagcagtttcctcaaaatatttctcctatattttactatacaggcacattatttagattctactcctattttttcccttccca

SEQ ID NO: 7999 - DNA, 2354 bp, Zea Mays
aacagcgcctgcatacatttcgcatacagaggagccactcacaagctctcaaacagactctacagatacctacaccgtccttatcaaggaggcaggaggaggggaaaaacattacgaaacgctaaagccactttcttctcctgccaacacaagccgttttttcctccccaagtgatctagccagccacggagccaccactcgccaggtgcttcaaatagtcgccccggacaggcaggcgcacgcaacgcaactagtctccttcaccgtccgtccattcctccgatccgcaggaggattaggaacttaggatcggggaccggcggagcccgacgaccttctcggtccacccgcccggcgatcgaaccatggcgctcggcgagggcggggatcacggcgccgccctgcccctcatcgcggaccaggcgaaacatgccgccgccggtggcatcgtccgaagcgggagcatgtggacggcagcggcacacgtgatcacggcggtgatcgggtccggcgtgctgtcgctggcgtggagcatcgcgcagctggggtgggtggccgggccggccgccatgctcgtcttcgcggccgtgacggcgctccagtccacgctcttcgccgactgctaccggtcgccggaccccgagcacggccctcaccgcaaccgcacctacgccaaagccgtggaccgcaacctaggtagcaacagctcgtgggtgtgcatgcttctgcagcacacggccctgttcggctatggcatcgcctacaccatcacggcctccatcagctgcaggcaagaagcatacctgggcttgcggctcgctgcagtacgtgagcctgtacggctgcggcgtcgcctaccatcaccaccgccactagcataagtcgtgtgcttccttccctctctttttagcgagcagggcgctgacgatggttgcttctgttgtccttctgccggttaaatttctctgaatatttttgttcttaactgcgcgtgctttgcttgtgtgttccatacgtgtcgggctgctctgctgttggatgtcgcagggcgatcctgaaggcgaactgctaccacgagcatgggcatgacgcgcactgcgactacgatggcaactactacatgctcatcttcggcggcgtccagctcctcctctccttcatacctgacttccacgacatggcgtggctctccgtcgtcgccgcggccatgtcgttctcgtacgccttcatcggcctcggcctcggcctcgcaagaaccattgctaacgggacgatcaaaggaagcataacaggtgttcggatgaggacgcctatgcagaaggtttggcgcgtctcgcaggccatcggcgacattgccttcgcgtacccctactccttgatcctcctggaaatacaggacaccctgaagtcaccgccggccgagaacaagacgatgaagagggcgtcgatgatctcgatcctcgtcacgacattcttctacctctgctgcggctgcttgggctacgccgccttcggcagcgacgcgccgggcaacctccttaccggcttcggcttgtacggtccgtactggctcatcgacttcgccaacgcgtgcatcatcctccacctgctgggcgggtaccaggtgtacagccagccgatattccagttcgcggagcggctcttggcggagcggttcccggacagcgggttcgtgaacggcggctcctacaccgtccggttcgcgtgcctgcgggcgtgccgggtgaacccgctgcgcgtgtgcctccggacgctgtacgtggcctccacgacggcggtggccgtggcgttaccctacttcaacgaggtgctggcgctgctgggcgcgctcagcttctggccgctggccatctacttccccgtggagatgtacttcatccagcggaacgtgcgccggtggtccgcccgctgggtcgtcctgcagaccttcagcgtcgtctgcctgctcgtcagcgccttcgcgctcgtcggctccatcgaggggctaatcagcaagaagctaggctaggctaggctagtccgatccagtggaacaccctatctgcaggtctgtcagagagtggcagcgggctcggttattttcacagtgttgccttcctcctgcatcgggttgtaagttgtaacatatatgtcgtattgatactggcgagttcagatgttcagaagaagtagaacgcgtgtgacgattctgtgttgctgaatgccgcctatgtagtttcagttccagaatttgagggtttccatatctgcagcagtttcctcaaaatatttctcctatattttactatacaggcacattatttagattctactcctattttttcccttccca

SEQ ID NO: 8000 - DNA, 2925 bp, Zea Mays
ctcgcgttcggatcagcctctctgtcatgtcgccaatacagcgcagcgctccgcatccacccaaatcggagtagggtcgtcagtacagcgcgacgccctgccagtagccgccgcaaccggccgccggtcccgcgcgaggggaggaggagatcactgcggcggcgtcttctgccggtttgaggattcggggcatcactgcagcagctggcgccaggctccagcatggacacggcgtttctgagtcctccgcttgcccgtaatctggtttatgacgagtttgccgttcttcaccccactagctacccttttcatactcttcggtatttgagatgcaatccaatgtattcgagaccgctgctaacaatagcaccagcctcaccatcaaggggcttgattcagagagtggccgcactacctgatgttgatgatttcttctgggagaaggatcctactccaatacttgacacaattgatgcacccattcatttgaaaaatctatctagagctcaagcagttagccgatgaagttcgttcagaaatagctttcataatgtccagaaaatgccaaccgtgtggtgctgatcgctcagttgtggagctgacaattgctatacattatgtgttcaatgccccaatggataagatactatgggatgctggtcaacatgcatatgcgcacaagattctcacaggaaggcgctctctcttccatactattacacagaaaaatggcctttctgggttcacgtcgcgttttgagagcgagtatgatccctttggtgctggacatggatgcaatagtctatccgctggccttgtttttgagttacttcttatcagggatggcggttgcaagggatataaatgggagaaaaaatcgaatagtgacagttataagtaattggacaaccatggctggccaggtgtacgaggcaatgggtcatgctggcttcctcgattccaacatggtggttattctaaatgatagctgtcataccttgcttcctaaagcagatggcggggcaaagatgtcagtcaatgccttttctagtgctctaagcaagattcaatccagcaaaggatttaggaggtttagagaggctgctaagggacttgccaaatggtttggcaaaggaatgcacgaatttgctgccaaagttgatgagtatgctcgtggtatgataggtcctcatggtgcaactctttttgaagaacttggattatattatattggtcctattgatggacgtaacattgatgatctcatctgtgtacttaaggaagttgcgagcttagattcaactggcccagtacttgtacatgtaattactgggactgaaaatgacactggtggaattattggaagtgaaataaatgcagttgaggaagggccttcaaactcaagccctgatcttctaaagtttttaggaactggactttctaggacatataatgactgctttgtagaagcactaacagcagaagcagagaatgacaagcgcattgtggtagttcatggcggcatgggaatcgatcgatcactccgcttattccagtccaggttcccagacagattttttgacttgggcatcgctgagcaacatgctgttaccttttctgctggtttggcatgcggaggtctaaagcctttctgcataattccatccacatttcttcagcgagcatatgatcagataattgaagatgtggacatgcaaaagataccagttcgatttgctatcacaaatgctggtctggtaggatctgagggtccaactaattcaggaccatttgatattacattcatgtcatgcttgccaaacatgattgtcatgtcaccatctaatgaggatgaacttattgacatggtggcaacagctgcaatgattgaggacagacctatttgcttccgctatcctaggggtgccattgttgggactagtggaagtgtaacatatgggaatccatttgagattggtaaaggagagattcttgtcgagggaaaagagatagcttttcttggctatggcgaggtggtccagagatgcttgattgctcgatctcttttatccaactttggcattcaggcgacagttgcaaatgcgaggttttgcaagccgcttgacatcgacctaatcagaacgctgtgccagcagcatagttttcttatcacagtggaagaaggaacggttggtggctttggatcacatgtctcacagtttatttctctcgatggtctacttgacggtcgaacaaagtggcgacccattgtgctgccagacaggtacattgagcatgcatcgctcgcagagcaacttgacctggctggcctaactgctcatcacatagctgcaactgcattgaccctcctagggcgtcatcgtgatgcccttctgttgatgaagtaggggaaggaaccaccaagaagaatggaattggatagataaaaggcaatatgtgcaaaagttgattcggaggacgctcatcatgctgttttacgattgtgttgtctggatagaactgaagcgtgccgtgggaggtggccaaatgcacaaatcccaaagagggacgacaaagcctatagcaccatagattaatagtcacggtgtatatactaaaaagaatttacagagcaccgatgtaacgttgttactgtgcatgttaatactgaaattgtggtacgacgccaactaggagaatgagctggagctgacatgtttcagttaatgtaataaagctacttagttttgtatgtaccaattcattccttaatattggaattcataaccctagcgttcacctcattcggtcgtctctcagtagtttcagagttcagttcagttttcggtgtcgaaacttttagtttctgtcacacttttttatttcagttaggagcaaagggatgtgcagcgctttgaccacgag

SEQ ID NO: 8001 - DNA, 2196 bp, Zea Mays
actcccaagttcaccttcctctgcctgtagatcttctagagtcccgtatacggtttcgtctttcgtgtcccacttccatggcggcggcggcgcagctgcacggatcggctgcggccacggtggcatatcgcgggactcgagcctactcagttccatcctcatgccggtggccgcagtctggttccccgaagctttcgatttctacaagtggagtcagtatgaagccatttggctttgctgctaaactttcaacaaaatgtgcaaatgagaatgctcgagttgaagaattagatttgaggtcagaccagatgaaggaattacaggtggaggagcaggttattccccagaagaggagtgctaaaatccatgacttctgccttgggatcccttttggtggtcttttattctctatggggcttctaggatacatcttctccagaagcaccataagtcttgtcttgggcattgcaccagggctagccactctgctacttggcactctcagtctgaagttctggaggagcggcagatccagcttcctgcttatcttggctcagcaatttctgctttcctggcatggaaatactctcatgcttacttcttgacaaatagactccttccttggggcttctacgcgtcactgagtaggttttcattaaagttcagtacaactgggccgacaaaggcccaactaagccgctcgaaccgcttcggcgcctcccacccctcggacagaccagccttcaaactagggtttactcctcccgctccgagaaagcaaacaagcgtcagctccgccggcggcctcgcgctctctcccccgccgcaccttctctacgccaggactgccaagatgaagctcgtcagattccttatgaagctaaacaatgagacggtcaccatcgagctcaagaacggcacggttgtccacggcaccatcaccggtgttgacataagcatgaacactcatctgaagacagtgaagcttacactgaaagggaagaaccctgtaacgctggaccacctcagcgtgcgaggaaacaacatccgctattacattcttcctgacagcttaaacttggagactttgctggtagaggaaacccctagggttaagcctaagaagccgactacaggaaagcctttggggcgtgggcgcggccgtggtcgtggacgtggtcggggacgggggccgccacgctgacaggtttcccctgctgtgggctctcttgcctgacaagttccctgtacgatgtaacctctttcccccgcacgctgtgtgaaagaaccgttgcattgttacccttctgatgaacgtggactgaaatatctcaatctcaagtggttcttgtgaaatcaaccatgtctatttggtctaccattcgtgtgtgtcttagggtttacactgtagttaactcgtgatgtctttcccctggcatacataaatggtgccgcagaacttcggatgttctaggttgtatgcttgtttcacatggggattgttgatctggagatatgccttgcagtcgtgtctgcctctatttgatcttttagctctgcttgaagctgaattcccgtcgaccggagatactgattttgctgaagatctacagcttgctctcatacgacgccctgttggcatgcattgtgttttctgatgtgctgacaaacatgctcggtaaaggatgttttgtttgccggagatactgatcatctggagctgccgattctttttgtctcaggatgttttgtttgcaacgtttatagagttggtcaaaatagacaagatcagcttacgaacagagatgaagatattagtggcgtgatattgatgtgattgtacatagtaaacagtcacctgtagctccctgtgctgtgtatactctgggcccatcttccaccttgatttctcccactttggtcggcgtcacctagcgatatagatggccaaacgggccggcacggcccgacccgacacggcccgacaggcccggctagcgaagcgtgccgtgcccagatgggccggcgtgccgcggcccaggcacggcccgtgagcctgttagtcgtgccgggccggcccggtggcactatggcctatctgagtatattgtagaatttagcaaaaaatgtgtagttgtaggcttaaacgcatccatctaaccaatgcagctgcagttttattgtgttatatgttga

SEQ ID NO: 8002 - DNA, 1184 bp, Zea Mays
ggaaacaagcatgctcatagacacagcagtttctcaaacactggccgagcgcaaaatttgaaaaccaaccctcaacctcaatcggggtgccggcgtccgacgaagtcgacgggccatccccattccccacccggcagtcggcagtccccacaccccaagacctctgaagagtcggaagaagaagcgggcgatggaagacggcgacgagagcgcggccgcggcggcggcgctggggctgagcccgcagcttttcgtcaacgaggtccacggcatcatagccgacatcagcgccgaggccttcgagtactgtctccaggcagcagccgcgccaggtgtcgtcggcgccgccacggctgcagagaaggccacggatctccagcggggattaaatgctattcaccatgttgtaaaggatcgactggataagagaatgaccaactgggagaaattctgctatcgacattgcttcgatgtacctgaaggttttgtggccgctgatgatgatagttcttgtgcaaatgaatcacaaaaagatgggatttcggattcagatttggatttggaacttgactctttgaggagaaagtttggaagtgctaacaaggaatctgaaaaccttgaaagagagttgtcctcactggaaaggcaagctacgttcaaaagaagacttgattcttctgtctctgagatagaaaagttgtttgaagaagaaatggtgcagggaaatttgaaagatcttgtgaaggcaataccggttttgcaccagaaaataatagatgcaaatcagagaaggactgagattaggagcttggtagatcaacaggcttggaacacgaagagatcgagagacagcaagccataagcgctggagaagagttctactgcatgtgttgaagacattcaagaggttgtcaacatcttacagagcaagtagcttgttgctcttttcctgattcatgttggttccacatagcgcctgcagcttgcttgcttggataaagcagtggtttgcccagttagtcttgttattgatcaaccgctattatttgatactggctccgtcccaaaatattagtcgttttagtattttaccagattcatatcatactcagtgtatgtcttttacatatgtctagattcattgttatttatttaaatatagacataaaattggtgagctagcc

SEQ ID NO: 8003 - DNA, 924 bp, Zea Mays
gatgcacccgtacgtctccatccctccctccctccctcccccctcttcttttcttcggctcttccgccgcctccacgcggcctacgccacctccccctcacctcccgccgtgcgccccgatccctcgccgcgacctcatctcgccgaggactggatcgccggagggtacatcccattactaaaggagacgtttaagttcccacaaagcttgggcattttaggtggaaaacctgggacgtcaacatacattgctggggtacaagaagatagggctctctacctagatccccatgacgttcagatggcggttgatattgcaccggataacttggaggcggacacttcctcgtaccactgcagtgttgtccgagatttggctctagaacaaatagacccatccctagccattggtttttactgtcgcgacaaagacgatttcgatgatttctgttctcgggcatctgagttggcagagaaagccaatggagcgccactctttactgtcatgcagtcagtccagccatcgaagcaaatgtataaacaggatgatgggctgtgctgttgttctggcagtagcatggccaacgaggactacgaccttgacgcctctggcgaggcaggagaagagtggcagatcctctaaaccaggggaacaccgatgacatgttgggttgaaaaactcatggaacatgttgcctgaatgccctcgtttgcgtgtgaatacaggggatgatttgttgtctctgagtgtcgttgggtgccaacgtctcttaggaggaaaatgttcaaaacgtgacaggtggaaatgttcaaaacatacacttgtgaatgatcatagataaatgtatttaacattccatttgctaacaccatttcaccacggcgtgttcgcttttcaattgcttgctagaaatgcacctgcca

SEQ ID NO: 8004 - DNA, 763 bp, Zea Mays
cctcaatcctttctttggatacttggatgagcaattttgtcagattgaggacttgcaggatgaagcaagccctaattttacagaagaagttgtttccctgttcttcaagaactcaaccaggctaatgacaaatattgagcaagctatggacaggaatcccagagatttctgtagatgggatgtaaacatgcagcaattaaaaggaacctgttctagcatcggtgcttgcaggatgaagaacgagtgcacctcattcagaaatagatgtggagacgagaacgttgaaggttgtatgaggtccttccagaacctgaagagggagcatggagtcctcaggcagaagctggaatcctacttccagctgctgcgacaagccggtcctgccgtgactgcaaccaggcctagaggcatgtaaggaacggctgttggcgtgcagggagcagtgcaagggacagacagcgtcatagcgatgctccactacgccattgttgaggctagctgtaacgatgggccacgaataagaagtttgcctatggcctgtgggggagttccctgcgggttttaaagtgtaacacccttcataatcgatgccttaagctggtgctgccgagtgccgactagctaggccggcatgtaagagcagcctagactgatgttgatgtggtctggcagacgtcctgtgctgtgcctgcctctgtatttcggtcaaataaataaactagatggagtttgcatgtttgcatcatgggatctctgttttttc

SEQ ID NO: 8005 - DNA, 1712 bp, Zea Mays
tcccgattcaccacattcagctcgccgtgttgcgctcactcaaccaaatccaatcccggcggagggaagcgtcgtctaaattccaaccctaggccatggcgaatgcggcttcatccgcatcgtcgccgggggcaggtccctcctcctcgccgcaggccggtggagacgggggaggggacgcgcacacgccgcggcagcggcagggccggcccccgcgcgccggctccgacccgctcctcatcgtctgcggctgcttcagcgtcgtcacggtcgccaccgcgcttctctgcgtcgccgtcaacgtcgtctccgccgtccagtccttccgcgccggctccgatatattcgggggcatattccggtgctacgcggtcgtcttctcgctattcgtcgccgtcctcgagaccgagtgggggttcatcatccgtttctggaagatatttgaatactggcctgcacggggaatgctccagatctttgttgctgtcatgacgaaggcatacccaagtattgaaaggaatgatctcaaattgctccaggagattgccagctacatgcttcttgcatgtggagctgtctatgttgtctcggggatattgtgcattggtgtgctaaaacgttctaggcagcagaaagcaatatcacgggagcaagcagccaaagacctgcaagagttggagaaacggagagaggaacttgaggcattgttacttgctgaacggtcggagttggtttgaaggctgaccaccgtgatctaacaatttatcttctgttgtagataaatgctttcttttttctttttctaatgatagcatactgcttggtcatggccctgagtcattcatccagaagtcacttgattgaagtgtatcttcttctttagtttctggattgcagcttccctcttggtttcagctgaattgtgggcttcttggtttcagagcattgtattgattcatcgtctggggctgtaagattgcagcatgaatttgatgtagcaccctgacttgtgtcgtccaatcctgtcgtggtgagtgacagacacacagagacagagacaagttcaaagtaggcgcacgctgaaggagacagaagaatgcctggagaatatcctcctccggctccgctgtggataagagcacgcaggcaggacccagttgccactacacaaagattactctgaccgccagccagcgatagggacgccggagttgttaatgccgccacccccggcagcgtgcactgcatgcaggcttgccgcttgcagcacgggggagtcgcagaggaaggaggcctgcatctgcatgccaagaacgcccgccgtcggcaacggtgaggttcttggcgtgcgactgtgcggacggttgggggcagcagatgaacagaaaggctgctgccgtgcccgtgtcttctttagcattctgctgtcagttcagttcagcagatgaaggaggcctgcatgctgctactggtacagactacagagtacagtacagaaacgtgctgttgatgatggggaacaggataatgaacgacatgttggttggttaatcgttatcaggatttcagcctggaccacccggccccaagttccgaggacagcatccaaagtttctattcaatgctagaactctgcaacatttcagcagctggactgttcattcggtgaccaacagcaaaaacattttttttattactactgctgcacatgc

SEQ ID NO: 8006 - DNA, 3023 bp, Zea Mays
ttaccctgacatattttgtagagctagtgaacctagcagaaatcgattaaaataatacgcagcagccgattgcactcgaccaagagaagcaacgactgcatctctggtctcccacgcctataatcccattcccctccttcaaagccctgcggcgatttcgattcttcccttctatctccaggtatacccatcggagcagcactgacaaaaattctccagtgcgatctgacatgcttcagttcggctagctgcttaattgtgaggtttacttgggtgcaggaactccaagaattcatctggttagtgcctgagaacaatagtcaatgtttgattcgtctaggattggggttgactttgaggaaaaggaggaaggaactgatgattaaaagcctttcgctgaaacttatctgtttcttttctacctttacagaatcttgaaattctgagagcggtccggttttgaatatccacaaagattcaatgtttattatccggaaatttcaaataaaaagattaggaaatttagctctgcactaactaattaggagtcttagtttatgattgcacaggacctaggtccaattattgtgaaatctacattcaaaaaaatttgattagtagtttccatactcctacctgaattttatctaacaacttttcatctcactctacattgagctttgctatactgaccattttgctgaaagaactcaaatcttttatgctaacatcttaaggggggaatgcaaacagcttgacttttgggggaaaattgaagatcagacctctcttttctatttgccgtattgattgagttgtttttgcttggttttgaatagctaagcttggatatacatcggcaatcaaaatatgcttagttcaaagtatgtgcaaacgggttaacagtatgcctagttatttgtattcatgatatttttgctaaaaacatctttctttgaacttcctttgataatgtcaaatattgaatgcaatggtatcatactggacatgtgtaaatctagctagatgtcaaagtgctaagtgataacagctacttacgagaatatgattcagtctatcttcaatatctagttagtacttcctctcttccaaatcataagttacttaggctttgtcgttagtcaaacttctctaacttggaccaagttttctgaaaaaagatgttcacatctacaagttcaaataaatgcaactatcaaaaactcggccaaggagggtaagaccatccttgtggtatttcattaatagaacgttgcggcaacggtcccgactgagaaacccccgaaccctgtcctcctatcactaatgggccgattcaagctactcactctgcaaaggcccacctaggcccgagggtggcgcacagccgagttgtagcctgagagcggatgaggaatagcaaggagaattttttgtgtagagccagggtttgaacccgtgacctggtgaaagggaccctgctgccttcaccagtgggatatggcaagcaaaaggattcagaaggaactcatggatctccaaaaggacccaccgacatcatgcagtgcagggcctgctggagaggatctattccactggcaggccacaatcatgggtcctagtgacagcccctatgcaggcggggttttctttattaatatccattttcctcctgactacccctttaagcctccaaaagtgaacttccaaacaaaagtttatcacccaaacatcaactctaatgggagcatttgccttgatatcctcaaggagcaatggagccctgcactgaccatatcaaaggtcctcctctccatcagctcgctcctcaccgaccccaacccggacgacccccttgtccctgagatcgcccacatgtacaaaaaccagaggcagcgctacgaggaaactgcacgggcctggacccagaagtacgcaatgggctgattctgtcccactggacagtacttcccctgcaaagatcgtcacggtgttgtaagaatcaagttgcaccgttttcctgtcgtgtgatggtattaagagcccagatggctgtgtcaattgtactcgcttctcagaacaaagtctctctgtgtgtacagtgcttttgaagctggatgatctgagttctgtgctaaaaccttggtttgcacttcactttgttccctgaaatgggtttgcgaccactgaatttgcatgtgtaacctttccaagaaaccagtagcagtttgtatgttgtcaagatgttaataattcagatgggtggcctgcatccatctgaaatggagcgctatttgttaaaaccgtgcagataacagttcagtgctcttgcatatggaacatgtcgtctgcaccacgtgattgaaatggagctttccttgttgcagccactgctttttgattttgaatggcagaagttattacagaagtggcttgcagatctgctgccttgcttcaacatttgctagtctcgtggaaactgtcaggtccatcgctgttggttgaatgtggccatactttctgcaacgctgctgtttaccctctcccagctttcatctgcacaagcagtagaaagtcatagcctgccctttcttcttcgagatggacaaaagaggttgcatctgatggccaaccggccagtttggtctttctgtaccaggtcacttgtgtccttgtgcctttacttccatgtctccatgataatattcatagctgttctttttttagtgtattaccgggcgaaaattttgaagtacaggtgctttctccccctttgctataaagtcatgtgcaggtcttcatttggtatacctgtagccacacgctgggaaaaagcctgacacttgtgtacatacttgtgtaaggttgtacatgcacatgtggcagttgttatctacacactacaggagatagctgctttgccgcgtggcaaagcccaaaaaaccgctaggcaagaaaacactcggcaaactctttatttagatgagggctggcaggatgcaggacaacatagcagaacctgc

SEQ ID NO: 8007 - DNA, 773 bp, Zea Mays
aaaaagaaaaaaaaagtcctcataaactatagaggtccagttaagaaaatgaaccttttttcaacactaaggcccattcgataaggaggccgatgcgagtcaggccacatgacaaaacaaccgctcctactcttcagtggcaagcacatgttcactcgagcctgttcgcggtggagagtgatagctggggagtggagagtggcgaacccaagtggcggctacgtaaaagagaccaggaactatggggctccagctattggggcaggacgtggtagatgtagcttctgtggaggcaggatgggaccaaggcgtgaatttggtgagggcaatggcaatggtgttgagggaggttatggtggtggtggatttggagatagtggtttcccgcggagggaggaaggtgatggaaaggctatgggaagaggccatggaccacgtcagccttaccgtggtggtggtcgccgtggtggctatactgatagtgaggctggtgatgagtctggtcgcccccctcgccgggcctatgagcgccacagtggcacaggtagaggttatggaatgaagtgtgaggtgcgctggccgtggcatctggggaattgtgactgatgaagcccttgcacaagaaacagtagaaactgagggggctcctgctgtggctgaggctgaaaacaagctggaagaagcaccacaatctgaggttgagaagggcaaagagggcgaatcaactgaagtggaggagcctgaagataagttccgaagcaccacagagacct

SEQ ID NO: 8008 - DNA, 1461 bp, Zea Mays
aaaaagaaaaaaaaagtcctcataaactatagaggtccagttaagaaaatgaaccttttttcaacactaaggcccattcgataaggaggccgatgcgagtcaggccacatgacaaaacaaccgctcctactcttcagtggcaagcacatgttcactcgagcctgttcgcggtggagagtgatagctggggagtggagagtggcgaacccaagtggcggctacgtaaaagagaccaggaactatggggctccagctattggggcaggacgtggtagatgtagcttctgtggaggcaggatgggaccaaggcgtgaatttggtgagggcaatggcaatggtgttgagggaggttatggtggtggtggatttggagatagtggtttcccgcggagggaggaaggtgatggaaaggctatgggaagaggccatggaccacgtcagccttaccgtggtggtggtcgccgtggtggctatactgatagtgaggctggtgatgagtctggtcgcccccctcgccgggcctatgagcgccacagtggcacagaaacagtagaaactgagggggctcctgctgtggctgaggctgaaaacaagctggaagaagcaccacaatctgaggttgagaagggcaaagagggcgaatcaactgaagtggaggagcctgaagataaggtagttgatatttttaaatggtaagtgctgaaactgcagcttagatatgatttcatgtctccgatttcctaaagctatcatgcaattcttgtggtcgttgatgttgtgtgatagtttttttggaggccagccaaagctgttctcccaagtcttaactaatctcaatattctctgctaaactttcaatatgtttgtacctacaccctgatccatggagcagcataagatgagtgattcataaatactgttgctgaaatcgtagaagaccatggatttaaaaaattgacttattctccattcccactataatacttgctatcttattaaggaaagcaataatagagcctctttctaatcactaatcagttatagaactcatactgtattactatttggtttccaattaatgtggtttttattcttctcatgcacacttactggtgaaaagatgtaacaatacaatctacagatttgtcattatgcttaaattaaccagtaacatacgagtattggagtctttaccattataatcaatctggtattttctgagctgggaagatgccatctgccacatctgtgtcctgtgcaccacctaaagtatttggaactgttgcataactatgtaactgaatgaactgagtgattctgtttatttgtgcagttaataccagttttttgtgttactgacgatggaaaaatatctaggctctgcacagccgcatcgcagtgtttgacattattttcagaaattgtttgccatgctcttgttttttggtgatgatctgttac

SEQ ID NO: 8009 - DNA, 2849 bp, Zea Mays
aaaaagaaaaaaaaagtcctcataaactatagaggtccagttaagaaaatgaaccttttttcaacactaaggcccattcgataaggaggccgatgcgagtcaggccacatgacaaaacaaccgctcctactcttcagtggcaagcacatgttcactcgagcctgttcgcggtggagagtgatagctggggagtggagagtggcgaacccaagtggcggctacgtaaaagagaccaggaactatggggctccagctattggggcaggacgtggtagatgtagcttctgtggaggcaggatgggaccaaggcgtgaatttggtgagggcaatggcaatggtgttgagggaggttatggtggtggtggatttggagatagtggtttcccgcggagggaggaaggtgatggaaaggctatgggaagaggccatggaccacgtcagccttaccgtggtggtggtcgccgtggtggctatactgatagtgaggctggtgatgagtctggtcgcccccctcgccgggcctatgagcgccacagtggcacagaaacagtagaaactgagggggctcctgctgtggctgaggctgaaaacaagctggaagaagcaccacaatctgaggttgagaagggcaaagagggcgaatcaactgaagtggaggagcctgaagataaggtacaagccatactatttatctcatgaaatcaatttgcatgtattgtactgttgtgggcttgtcgaaatatcatttctccctccataaatgatattgatgcgttacaatgtgaagaaactaatttctttaagcttgaagtttatcttgttttctagtagcccaagctttaatgacacattcttaaaaatagtttcagtgctagaaacgtccaaaaatagtttcaggataccggatacccttcttgcatgtaatagatagtacaagtaaaggttttatgtcttgtttcttatctactactgtcatgtttaaaaagtgtaaaactttagcatttggtgcctgctagtggtgtgccacatcttatcattcttgtataccggcaaacaacttaggttgtttctgcaatttagggagaaatattttagatgccaaatatctgcactaaaagctgttgtggattcctgtttagacattggaaaatattagacagctagctgagctccctgaagcttttcaggatagaaggctacagattataaagttgccacatggaaaatgatgtttgtactcttggttcacgtgatggaagcacatgtgatagtaattagaagttgcatgaaaggttattgaggcaactgagtaaatcctttactagggacaaatgtggtaatccgaattgttaggacaaatttaatattttaaaatagacatgtataaaatttgatgctgatttttcttatattatcaaacatattattacaaataagaatacatttttgcataaattgttttatgcattacttgctctctacaacaaaaaggtaaaaagataaccgaatttgtatccgaatccatatcgaattttatttctatcatttgaaaaaatatatgataaatttgaggtttacactttatgaatctttacaagctcaatgctaaaaataagaatatgaatttgcatagtggattctatatcctatttattcgcattcatagaaaaagacaagctatccgaataattactattttcatcctgttctcatccctgccgtttcctataacttcatgtttgctttgtgaatcaattgactcttgagtttttagcagcatataattgttgatcctctcaggtagttgatatttttaaatggtaagtgctgaaactgcagcttagatatgatttcatgtctccgatttcctaaagctatcatgcaattcttgtggtcgttgatgttgtgtgatagtttttttggaggccagccaaagctgttctcccaagtcttaactaatctcaatattctctgctaaactttcaatatgtttgtacctacaccctgatccatggagcagcataagatgagtgattcataaatactgttgctgaaatcgtagaagaccatggatttaaaaaattgacttattctccattcccactataatacttgctatcttattaaggaaagcaataatagagcctctttctaatcactaatcagttatagaactcatactgtattactatttggtttccaattaatgtggtttttattcttctcatgcacacttactggtgaaaagatgtaacaatacaatctacagatttgtcattatgcttaaattaaccagtaacatacgagtattggagtctttaccattataatcaatctggtattttctgagctgggaagatgccatctgccacatctgtgtcctgtgcaccacctaaagtatttggaactgttgcataactatgtaactgaatgaactgagtgattctgtttatttgtgcagttaataccagttttttgtgttactgacgatggaaaaatatctaggctctgcacagccgcatcgcagtgtttgacattattttcagaaattgtttgccatgctcttgttttttggtgatgatctgttactgattatgggctgattgatccagtgagtcttgcacattcaacaaattgttggctctgcaagtgctcaatttcacccagcctatagatagcttaggtagcagcgtcaaggaagctgctgcacatttatggctctctattaaaaatacgaacacacttgatctaccgtaggcatgtcacatggacatacaacatacctcagcatttttttgagagcatgtgttgtgtggtttctgtttactaattgagtttaatgagatgct

SEQ ID NO: 8010 - DNA, 704 bp, Zea Mays
cacttttgatgtaccgcgtcctgacccatctggacatcacaccattcacatcgaactcctgctcttcagggatttgatatcaagcaagctgaattagcttccatcctgccatcgtctgggtttcatagagaagttgtcacattatgatatgaaggttggtaaggcttatttagttattaaacagactcttcagcagattgttgagaaacaatacaatctatctgatgtttttagcgagttaatagatgaggtcctccgtgccgagtcgggagacaatgaagatgtttatgatgtgcagaaaacaactacaaaatcagatgatattcttccccagtcggcagaaagttgccccgatgaagctgacattgatccactgggtaaacatggtgacgttggcaagaacatgccgaccaacacaaacgtcactcctcaagcaacaccacatacggaatcttgctcgccgatatttgatgcgacgccgcaaataaaggtttctgttgaaaccgatccagctacaaacactcctcaggttgaccagatttcacttgattcggagatgcaaactgtgttagctctacgcgaatatttgtgtgatacgcaatctgacactagcaggaccataatagattatggtgaatattgttcgactgcttctgatatatatgaatcttttgccgatggaaagtgtctcgacaatgtgttca

SEQ ID NO: 8011 - DNA, 2331 bp, Zea Mays
cgaaattaatgcccatacccctctcattgtcccatcaaactcgctactggcctcgggcccgcccgtcgtgaggtccgagctcgatgcagccgatccggcggcggcaccgaggctttgcactcctctgtctctccgccgccctcctcgctgccgccactctgctccccggcgccgccgtcgccgaaggtgtcacgccctccgaggcgcgccggctccgcgacgaggtgaaagatatgttctatcatgcgtttgatggatacatgaagtatgctttcccactcgatgagctgcggcccttaagttgccaagatcgattctttggataccttggctttactgggtgataaggagaaatttggtgctgctgtggagtgggttggtaagaatgtccactttgatattaataaaaccgtctctgtttttgaaaccaacatacgtatccttgggggtctgctatcagctcacctgattgccagtgattatgccactggtatgagaatccaatcttatgatgaccagttacttcatttagctgctgacttagctcagaggttgttgcccgcatttgacactcctacagataacatcaacggctggtggtggtactttgacactggaatttggcatattgagtcgcttgactaataatactgtttttgagcgagttacaaaaaaatcagtgcgtggaatatggtcacgcagatcaaaactcaatcttgttggtgcccatataaatgtctttactggtgaatggacacagaaggatgcaggaattggcacaagcattgattcattctatgaatatcttctaaaggcatatttattgtttggagatgaagaatacctgtacatttttcaggaggcttacaaagctgccatgcactatctccatcatgatccttggtacgtggaggttaatatgaactctggtgctactgtttggccactcttcaatagtctgcaggcattctggccagggcttcaggttttagctggagatgttgatcctgctattcgcacacatgctgccttcttcagcgtctggaaaaagtatggttttacccctgaaggttttaatcttgctacatccactgtacagaatggacaaaggagctacccgctacgaccagagttgattgaaagcacatattggttgttcaaggctaccagagattacagataccttgatgttggaagggacatattagcaagccttcaatatggtgccagatgcccttgtggttactgccacatatcagatgtggaaacccacaagcaggatgatcacatggagagttttttccttgcagaaacggtcaagtatctctggcttctttttgatttagctgctggccctgacaatattgttgaaaatggaccatataagtacatatttagtacagagggccatttgttacctgttactcctgagatagccttggaagatgaacattgttcatattttggagcattctgtaatggcggtgccgaccatggatatggtgctagtgctagttctactaagcatcgaaatggaaactatacccaattagatgatattcaaaccccttccagtcactattcaatgtccaatgtgttgtttacgccaggttacatcaagggagtttgtccaggattgactcatgcgcagaaatttgggatatcatactctgatgaagaggataactttatagagcagacttctgagagtcttgatcatcatggtgaatctgccatagaatctagcgtccaagaccaatcaagttctattatattgatctctcacccagtcgcaagccaacaggatgaggcttttgagagcgagtctggaagtcaagatcatgcaaatattgttgtaacttctgattctgattctgattccacaagccgtgataatactgttggctctcccggaatgaactcggaagaacttatggacgacatatagggcacctctagacaggacaaaagatgaagaggttgctcacagtgttgagtccaagatatcagctgaccctttgctcatgtagcaacccatttctgtggaatcttcagggtcaatggcttgccgaatgcagaacaagttagcaagcaagcaaaatgtctggtagacgattccagtatcttgccagcttcaacatcggaaattgatatttactttcagatagaatatattacagggcgtacattcactaatttgttcttttttttctgtatcgatcactaatagatattattttgattaatagagaatgcacgagttttgtacaccagatgcatatgaagaggcgcggcacacatcacaggatctatttagtgtagaacagaaca

SEQ ID NO: 8012 - DNA, 745 bp, Zea Mays
cagcggcggcggcagctgccgagccccatcccccgatccaaagcacctcaaaccaccgctctgcccagatccacccagctactgcggtgagcccgtggggacggtggcggtggcgacggagcggttccctcgggaggtgagctcggaggcgttattccactgcgtccgcctaggcccggtccacgagactggcaccgaggtggcgtaccagaccagcgtcaaaatcgccggccacgtcttcaagggcatcctgcacgacgtcggcccggacccatcatcgtcggtcgctgcgagcgacgactacttccgccacgccaccgacgggtcctccccgggcacggtgggcgaaggcagcgtcgcgggggcgggcccgtctcgtcattggctgtggtcatggacccgtacccgacgccaacgcccgaaccgtacgacggctcacatttcttccacggccatccgaggtacgttgaaaataaatattggatctcaaaaatggcattctagatctatctaccatttcgcttacacattatggctatctcacattcatgggttgcaagaacaatgcaccctagtacctagtacactctagagcagtatacaacatatacgcccagtaccccagtaagtatatgctcttttgtttttgtgatccaccgaccatgtatccagaaggcaaactagattctgatgtacgcatataaaattgccgatatgaaataaatcgtccatgagttgtcctaga

SEQ ID NO: 8013 - DNA, 2483 bp, Zea Mays
aacggacgccacctcctccccctctctcgcccgcttcctgctctctctttctctttctcccctgcttccccttccattcccgacggacgacgcaacaacccgcctgccctgccctgcctcacgctcgcacccgcggcggcgcggagggccggaacctaaaccctaaccctagcggcccgcccgcgatggggcagtgctacgggaaggcaggcggcgcgtcgtcgcggcgggcggaccacgacgaccacgcccacgcggtcgcgccgccgtccccgctgccggccaacggcgcgccgccgccgcagcccgccacgcccgggcgccgcaagtccggatcggccacgccggtgcaccaccaggcggcgacgaccgcctggcccagcccgtaccccgccggcggggccagcccgctccccgcgggcgtgtcgccgtcgcctgccaggtccacgccccgcaggttcttcaagcggcccttcccgccgccctcgcccgccaagcacatcaaggccactctcgccaagcgcctcggcgggggcaagcccaaggagggcaccataccggaggagggcggcgccggcgtcgccgccgactccgccgaggccgagcgcccgttggacaagacgttcggcttcgccaacaacttcggggccaagtacgacctcgggaaggaggtcgggaggggacactttggccacacctgctccgccctggtcaagaagggcgagtacaagggccatgccgtcgccgtcaagatcatctccaaagctaagatgacgacagccatttccattgaagatgttcgtagggaagtcaagattttgaaagctctatcagggcacaataatctcgtcaaattctatgatgcatattatgtgaaggtggagagttgctagatagaattttggctagaggcgggagatatacagaagaagatgccaaagctatcgttgtacagattttgagtgtagtgtccttctgtcatcttcagggagtagttcatcgtgatttgaagccagagaattttcttttcgcaacaagagatgaaagtgctcctatgaagttaattgactttggtctgtctgattttattagaccagatgaaaggctcaatgatattgttggaagcgcatattatgtcgctccagaggttctacacagatcgtacagtatggaagcagacatttggagtataggtgtcataacatacattctgctctgtggcagtcggccattttgggcaaggacagaatctgggatctttcggtctgtattaagggctgatcccaactttgacgattcaccatggccttcagtatcggctgaagctaaggattttgtgaagagatttctgaacaaggattaccgtaaaagaatgactgctgtccaagcactgactcacccttggttacgagatgaacaaaggcaaattccattggacatactcgttttcagattagttaagcaatatcttcgtgctactcctcttaaacgtttggcattaaaggcactatctaaggctttaagggaggatgaactgttgtatcttagattgcagtttaagctgctcgagcccagagacgggctcgtatcgctcgacaactttcggacggctctgacgagatacgtaactgatgctatgagagaatcaagggttcttgagtttttgcacgcggtaagggttcgtcgctgtgaccctaagcaaaggattacacagtgatgctcatcatatctgtctgcagggacatcgtttccgtatattgtcttcaattgtaatgttgaacaattaatgccctacgcccagttttgagccgatgtcgtgattatacagcgatagcagttaattgtatttgatggttggagttgctgacccccttcacatgcttgtgtctcagttggacccgcttgcgtacagaaagatggacttggaagaattctgtgcggcagcaatcagcccgtaccagctggaggctttggaaagctgggaagaaatcgctggaacggcttttcagcacttcgaacaggagggcaaccgagttatatctgtggaggagttggcgcaggaactaagcctcgccccgactcactactccatcgtgcaagactggatcagaaagtccgacggcaagcttaactttcttgggttcaccaaatttttgcacggtgtcacgatacggggctcaaacacgagacgacactaaaatggacgcgaactgtgtattcgcttctaatttaaagcctctctctcgtcgattatatatagatggccctgattggtgttttgtgatgtcgcgcggctagctgttgttgtcatagctttttgtagagtacgtgtgaagatcatcgtgatggcgaaatcatatggtttgctcaaaaaattcaagtgtcatttgttcctcgccgattttgaatccatcatccgtgggacaaagaccttttgtcaacgtggcgctaaagttgacatcgtcgctactccccagtttctg

SEQ ID NO: 8014 - DNA, 2158 bp, Zea Mays
caaacctcaccggcggcggtcattgaccgcaactggttgccgtgtttacttcccccacgcgccacgtttccgcgcatcccgagactccgagagagtggctggcggaacggaacacaaatccaatctcgctacgtgaagttcgcctcgcggcctcgcctaccaccacccgtgcccgtgtcccgccgccggcggcgctggggatggcggggcccaaggcggctgaggacggctcggcggctccgctgctgcctgcgcaggcgggggaacggagctcaggaggcgtgggcggaggggccacgtccgcgcagacgctggggaacgtggttgtctccatcgtgggcaccggtgtgctcggcctcccctacgccttccgcgcggccggctgggtcgcgggctccatcggcgtcgccgccgccggctccgccacgctctactgcatgttgctactctgcaaatacccccgtttatattatttgaagacaccataagatggacaatcaaaggcggagattgcttgattgcacgattgcaccaatacatataattgcacaagatatgtcttcatactggactactgattattgagttgtggtttcccatgtccaaattttcaagaaacgaactgcaaaggacaaagtgtttctgcttgcattactctctcattcatcttccaataaaaaaactggataaactcaaagaggaagaaactgaagagtgctgtcatggtcactatacatatggggatttgggtgacaggtgcttcgggactataggccgatgcttgacagagaccctcgtccttgtttcgcaggctggtggttctgtagcatacctgatattcattggccaaaatctccattccacattcagccagctgatgtcaccagctggcttcatctttgccatcctcctgcctctgcagatagcgctctccttcatccgctcactgtcgtccctttctccgttcagtatatttgcagacgtgtgcaatgtccttgccatggcaatcgttatcaaagaggatcttcagctctttgaccaccccttttcaaacagaagcgcttttaatggactgtgggcagtaccattcaccttcggtgttgcagtcttctgtttcgaaggattcagcatgacccttgcactagaagcgtcgatggcagaccggagaaagttccgctcggtgctttcccaagcagttgccgccattatagccgtgtatgtctgttttggagtttgtgggtacttggcctatggcgaggccaccaaagacatcataacacttaatcttccgaacaattggtcgtctgctgcagttaaggttggcctatgcatcgcactggcattcaccttcccagtcatgatgcacccgatccatgagatcgtcgagacaaggttcagatccaacagatgctttcggaagctcagccacaacgatggcggcgcggagtggataggcttgcacgcaagccgcgtcctcgtggtggcggtcctcactgtggtggcgtccttcatccccttctttgggtccttcatctcgttcgtcgggagcaccatgtgcgcgcttctctcctttgtgctgccggctctcttccatctcagcattgtaggctcgtcaatacccttgtggaggcgggtgctggactacggcatccttctctttggtctggctttcgctggatatggtcttgtcactgctctctcctcgcattgaacaatggcccaaacagtcaaaaaagtgcagagatcaggatatcttgtgatgacaggagtcaaatggatgctaggagcaccatatatcagatagcacggctcggattagtgcgtgattgaactgatccgcttcaacccatatagccgcagtcatccatggaagatataccttagcggattggaatggtgatttcgagaaaccaagttgacattgttctatgcatgttacaaaaatctacagatgtcatgaactttaagagccatatcttaatcgcgtatgcatgttacacatctacatgtgtcacgtttcaaaaaaaaagtttatgttgactattcgatccgatccatcatgtatgtcacatttgaataacaaaaatccattaatgtgtatgtttgcagtgctcgcttaaagggtaactggaacgtgcctgtgtaatgccacggaaca

SEQ ID NO: 8015 - DNA, 629 bp, Zea Mays
gcggtgggtggggtgggttcggcgccgagtcggagcacatcggtttgggtgcacgatcgacgcgcattgtgcggtcggccgccttcgcgttgccggccgctgctgccccaacctccactccccatctcgcagtccgccactgcttcgtcttctcgtccgatccccttcgagccccgcctccacacgaacaccccttcggccgttgttgaccaacctcacgcgtcctcctccggtacgtggccaccagttacaatatgctcaactgttgcgagtggaagcaacccgactgttgctgatcaaactgagggcgtcagccattatgttgcttcaaagggtttcatggtttgcgtacgcacaggttcgttgaggctgagaagacaaaccaatacctgcaacagccattcttggcaagtttctgcctcgaagagcctgagttgctcctaatgcctcatccgcaacatgccatatgctgttatcaccatctgcttcattattttcttcaacccattcattttctcatgtaaactcttcaagcaccggtgggttgcttctttttcccttggatcctagctttcttaatgtttgaaacctattttccatctttctgttgtaactgacatagaccaatt

SEQ ID NO: 8016 - DNA, 2131 bp, Zea Mays
cttcaccaccgtaacctcctatcaaaagtaaaggaaggcagggcgtcacatttacagagagaggaaacgcaaccacatcaagaactccgccatcaccagacgacatcagctcccccaccatccatcgttctccagggattacgctttcattcgaagccaggtccaaagacagtacgaagttcatccgtaaaaaaggttccgacagctcaatatcgaccatcaacaaagataagtatccatgtacagaagatgctctctgcgccctatagtactcctggttcccttaatgcaggatgcctaataaaccactttcagcattgactctacaagatcgaaatgcagaggttcaaatacaggtccacaggaaatgggagtttcgaggtgccgttgacaatggccctatattacacatcgacatgatcctgacagactgcacaggcaatgctatccattgtcagattccttcgttcctagcagctacaagaggcgatgaatttcaagttggcaaaatatacaagatgacccgcttttcagtagcccgtgcaaaatccacctacaagcctgttgatggtgatctcatgttgtatgtcaaaccatacacaacccttgaactttgccacacttcaccatcaggttttcccctttatgtttatcatctaacaagctatgacaagattgatccagatggatcaaatgcaagaaacttccatgacgtccttggtattattacggaaatctctgcgattaagcctgtcggaaatgcacacataccctcatcttacaatcgacatgttctgataaaaaacctcagcgacgacattctgaaaattactctatggggaaaacgtgcacaagaattttcgttgaccaacacttatgacccacagaaacaaactcctatcgtggtcttatttgttggttgtttaccaaaagaatatcaaggggaagtactgttaagtggtggcgcagcctgtcattggtacttcaacccatcaattgaagaagctgaagctttttatagcaggattgaatctgaaaagataaacatagaattgcccagtcttgacaaacaagaaattacacctccaagttttccacaacgagaacatcacaaccttaaatacatactgtctttaaacccacatgatgtaccggatcaaggatatgaatgcacggtaaccattacatgtattcctgaaggcaagacttggtattatattgcttgcaacacttgcccaaacaaaccaagcattgatcccgtcatccgtcaatgctccacatgtagatcaacaaattactgcttcagatacaagctcactttcaaggcatcagatggaactgaagaagctgaaatgtttgcattcgacaatgttgctaggacaattattgggaaaccatgtccaacagttgttgcatcctttcctgatgcatcagctatcccacctgaaattgcagcaatagtttcacggaaatacacattcattatagaattcaacagccagtcattcagatttctagaaaaaacattgctcatcaaaggaattgtagcatcatatggaagaatgacatcactaccaatagtacaagaaaaagatgatgtgcaacttcctctcactccaacaaaaaacaaactgataacaacagctgccgaatctccttctacacccatgtctagactttccacagcagactcaccaagcatgccccaaaagctgacatattctccagcaaagaataagccttagacaaacctccccgatgctaacagaagcagagctcctacaactacaattgagtcgccaacaaaaagaatcaaacaaaatcccaagaatcaacaagagtagacgttgtctacaacacaacacagcgaggaatattttggatcgtcggagccaaaattcagatgaaaaaaacatgttcgtcgctattttgtctctatatataattagagtcacagcttccatgaagcagatcttattttggacatgctacatgatatctatgtactactatgtcatgtacctttctgtatacttatctggtgctataacgaaccgtcatgtttcatatatagaatcgtttgctttggcttgctgaaaacgtataacatcaaaaacaagatgaacgcgcg

SEQ ID NO: 8017 - DNA, 1890 bp, Zea Mays
ctcccacttcgtctctccccgtcccttcacgtcttcacgagtccccacgactttggcggcgaaactccaccgccgtcgcctccgatggcgatgctctgcagagccacgcgcgtcctccgcaaggtgtgcggactgggacccgcggcggcggcgcgacggctctccgccgctgaagccttcgccgcgtgtgagggctcactcctgcgccctctacccgggctggacctcccgccgtgcctccctgacaacctgagccgcagccccacccggatcaccacgctccctaacggcctcagagtcgccaccgaggacgtcccgggtccttctgcgtgcatcggtttcttcgtcgactccggctccatctacgagtccggggagaccaccggcgtatcgcacctgctggagaggatggccttcaaggacaccaagcaccggagccacctcaacatagtgagcgagctcgagcttgccgggggcaacgtcggcgcttcagcctccagggagcagatggtctacagctatgacacgctcaagggatacatgccagaggctctcgagatcctcatcgactgcatgcgcaacccgctcttcctccaggaagaagtcgaacggcagctggttcttgctcgagaagaagtaaatgagctacaaaagaaccctgagaagtttcttcatgaacagcttaaccttgttggatattcgggtgctcttgcaaatccgctaatagctcctgaggatgcccttgctagaatcaatgacaaaattattcaaaagttctatcatatttgttgttgaaagattggcacaaggggaccccaatggaaaagccaaagtctacatatgttggtggagattccagacacagagcagattcagatatgacacatgttgcattagcttttgaagtgccagggggctggcttcaagagagagacgctacaattatgactgtcatacagactttaatgggtggtggtggttcattctcatctggcggtcctggaaaaggaatgcattcacggctttatcgacgtgtcctaaataaatatcacttggttgattctttttctgcatttaacaatgtatatgacagcagtggcctctttggtatctacttgaccacaccatcagattttgtggcaaaggctgtcgacatcgcagtaagtgaattaattgctgtcgcaactcctggagaagaggttgaactgcaacgagcaaaaaattcaacgatttcatctgtattaatgaatcttgaatctagggtagttgttgccgaagatattggaaggcagctgttatcttatggttgcaggaagcctattgactacttccttcaatgtatggaagaaattactctagatgatgttgcaacatttgccaggaagatgctagctacgcaacccacaatggctagctggggaaatgttgacaaagttcccccatatgaatttatttgcaagcggctacaatagtacccctacacaatgacctctggactctggtggtcttgaaggatcctttcgtggaaaactaaacaatcacttgtatgaagtgccctagcttagaaactgcttttctttcagacatgcagtttagtgagtttaggatttcaacagctatgttcaattgtaactgttcaagcaacacatagtaaatgagaggctgatgaatggcaaatatcaacagtttctccatggcccattagcattttattgtcatgttcagtgtttttatgtacattttctgcgattatggatagcaggagtattctgttgcccttaatttcatgtataattggcttctggagcattgaatcattgatgcattaataccatgtttggttttgtttggggaacggagtgatccgttcctcattttgatttgtttttg

SEQ ID NO: 8018 - DNA, 2052 bp, Zea Mays
caaacgaaggcgcggagacgtgctgcagagcctgcagaggcttttcttccccccaccccacccatcgcgtgtgagtccacggtgtgatgtcacggagcggtggcggctttcccgattcactgtgcgggagaaatccccgtgcagccttcttccacctcctcctactctccgctattcgtcttcgctgatttctgccgctccaattccatcgcttccctgctttagaaccttctctgctagcttctccccgtcacagcttttggtgcctcgtcatcggcgaccaaaccgccggcgaccggataaactaagccagctccttcgctccgaaagtcgtctctcgtagagagcacttgctcacctgctccccgcccccctctgctggcgctggacttgctcggagtggagatccatccggacctggttcgatttcttcatttcgggttcgattcggtttttctatcccagagcgaaagatcaatatcacctgacacaacataacgatttcgtggaagccgaggttgcttctctgctcagtgggtggataactggattgtggattttgctaactacatgctgggttatcagcctatcataaggaaagcaaagaagagacaacaaagcaatttgttgtctctttcttaggagctggcgagtactcggcatggcagatgctagttcgaggactgacacctcgactgttttagacatggatgataagaatcaaaggttagaaaatggacagagtggagctatggccctggcttcgaattcatctgatcggtctgacagatctgacaaacctatggaccaaaaggttttacgacggcttgcccaaaatcgtgaggcagcaaggaaaagtcggctgaggaaaaaggcatatgtgcaacaactagagagcagcaagctaaaacttgcaagcctggagcaagaactccagaaagctcgacaacagggaatcttcatatccagttctggagatcaaactcatgctatgagtggaaatggagctatgaccttcgatttagaatattctcgatggcaagaggaagaaaataagcagataaatgagctgaggactgcagtaaatgctcatgcatgtggaaaacacctgctgaaaggtgcttcttgtggcttgggggtttccgttcgtctgagcttctaaagctccttgtgaatcagcttgagcctctaactgagcagcaattgatggggctatccaatctccagcaatcctcccagcaggctgaggatgcattgtcacaaggcatggaagcattgcagcaatccttggcagaaacgctggctgggtcccttggtccatcaggatcttccggaaacgtcgcaaactatatgggtcaaatggctatggccatgggaaaacttggcacactcgagaatttccttcgtcaggctgacaatctacgacagcagaccttgcatcagatgcaacgcatcctgacaattcgacaagccgctcgcgcgcttcttgcaatacacgactacttttcacgtctacgcgccctgagttctctttggctcgctaggccgcgagagtagcatcacccacgttggagtcactccatgggccgatctgtgaatgtggggctgctggctgcaaactcgcaacgcatttgcagatggctggagggtcagttctctttgtacaagttgtattaacatcttctggtctcatattgcgcttcagtgttgtacaagttagggtaaagcttgcatttaacttgtaagttatcatggattcatgattgacatattgtacaattgtattagcaataagaatagaagtacataaatgctggaaggactatccagcgtctatattggttggaaacgagcagcagaagcttgtcatgtcgattttgaatagtcggttgaagtgttctttttggggtctatagagaacaaagaaagcttcaggagaaatgtataggtattcaccagtctaccatagtgtgtgcttcggggagctccttgtgatggtaaaatttgataacgaggatgagttcagtgacattaaaaatttcgtactccctg

SEQ ID NO: 8019 - DNA, 2118 bp, Zea Mays
caaacgaaggcgcggagacgtgctgcagagcctgcagaggcttttcttccccccaccccacccatcgcgtgtgagtccacggtgtgatgtcacggagcggtggcggctttcccgattcactgtgcgggagaaatccccgtgcagccttcttccacctcctcctactctccgctattcgtcttcgctgatttctgccgctccaattccatcgcttccctgctttagaaccttctctgctagcttctccccgtcacagcttttggtgcctcgtcatcggcgaccaaaccgccggcgaccggataaactaagccagctccttcgctccgaaagtcgtctctcgtagagagcacttgctcacctgctccccgcccccctctgctggcgctggacttgctcggagtggagatccatccggacctggttcgatttcttcatttcgggttcgattcggtttttctatcccagagcgaaagatcaatatcacctgacacaacataacgatttcgtggaagccgaggttgcttctctgctcagtgggtggataactggattgtggattttgctaactacatgctgggttatcagcctatcataaggaaagcaaagaagagacaacaaagcaatttgttgtctctttcttaggagctggcgagtactcggcatggcagatgctagttcgaggactgacacctcgactgttttagacatggatgataagaatcaaaggttagaaaatggacagagtggagctatggccctggcttcgaattcatctgatcggtctgacagatctgacaaacctatggaccaaaaggttttacgacggcttgcccaaaatcgtgaggcagcaaggaaaagtcggctgaggaaaaaggcatatgtgcaacaactagagagcagcaagctaaaacttgcaagcctggagcaagaactccagaaagctcgacaacagggaatcttcatatccagttctggagatcaaactcatgctatgagtggaaatggagctatgaccttcgatttagaatattctcgatggcaagaggaagaaaataagcagataaatgagctgaggactgcagtaaatgctcatgcaagtgaaagtgacctccgtcttatcgtcgatgggataatggcacattatgatgagatattcaggctgaagggtattgctgcaaaggctgatgtgttccatatactttcaggcatgtggaaaacacctgctgaaagctccttgtgaatcagcttgagcctctaactgagcagcaattgatggggctatccaatctccagcaatcctcccagcaggctgaggatgcattgtcacaaggcatggaagcattgcagcaatccttggcagaaacgctggctgggtcccttggtccatcaggatcttccggaaacgtcgcaaactatatgggtcaaatggctatggccatgggaaaacttggcacactcgagaatttccttcgtcaggctgacaatctacgacagcagaccttgcatcagatgcaacgcatcctgacaattcgacaagccgctcgcgcgcttcttgcaatacacgactacttttcacgtctacgcgccctgagttctctttggctcgctaggccgcgagagtagcatcacccacgttggagtcactccatgggccgatctgtgaatgtggggctgctggctgcaaactcgcaacgcatttgcagatggctggagggtcagttctctttgtacaagttgtattaacatcttctggtctcatattgcgcttcagtgttgtacaagttagggtaaagcttgcatttaacttgtaagttatcatggattcatgattgacatattgtacaattgtattagcaataagaatagaagtacataaatgctggaaggactatccagcgtctatattggttggaaacgagcagcagaagcttgtcatgtcgattttgaatagtcggttgaagtgttctttttggggtctatagagaacaaagaaagcttcaggagaaatgtataggtattcaccagtctaccatagtgtgtgcttcggggagctccttgtgatggtaaaatttgataacgaggatgagttcagtgacattaaaaatttcgtactccctg

SEQ ID NO: 8020 - DNA, 1662 bp, Zea Mays
gagtgaacacgtcacccttggtattcttccagcttccaggctctacgccgcttctagcgccccgatacgcggcgccggcgcaggcgtgcagccatggcgatgagctggatccgatcggttgttaggagggccctcatcgctccgaagccgcggggctcccgccagtttactgtcaccgccgccggcggcggcgcgacgcagaccgaaagggtggcggcggagatggtccgctacgccctcggcggcgccgtgcaccggagctcgccagaggaggcgatgcggatactggagcaaggcgcctcgaacctgcagggaggaggcgagggcagtgccgaagctgttgggttgctcatgctcgctatgtccacgctgctttaccggagtggaagacgtcaagacgcagtggaaaagctcaaagcaacccaacaagttgccccttctgcagtttttagagttgcagcgtgggaagcactaatgggattacacatggaggcagggcaggagatgtcatacttgatttccccaaatgattcagttgatctgtcaatcaaatatgatagcaaatggtctgatcaggaccatcttaaatttcgggttaatgctgtcagaggacttgttacacttctgaatggagaaacagaatcagctgcccagctgttcgatggttggtgcagagacttttctagaggcgaaaaccaaacagaaaatgctgccgtttcatacggtgaatatttgcattgtgttggggattttcaaatggcagcacaagtgtatgagaaaattctcgaggcattttgcatggatgatatgtctggaaaccttttagcagctggaaacatggttcccgaggaggcttctcttggggccacttgctcatatggccagcttttatctcactctggtttgctgaggcagaggattatctcacaagagctctacagaaggctgaagaacaatttggtgcaaaccacccaaaggtcggcattatattgacctgtgtagctagaatgtacaaactaaaggcaaaatctgaaggttctacttcaattatggtccaggaggggctgtacaggaaggccctagaagtattgaaagcccctgctattaattctgagggtaccagcaaacaggttgactggagagatatcatctccctcgctagaggtgagtacgcggagctgttattaattcagtctaataggaaggcggaaggtgaacggatgaagcagtgggcagaagatgcttggaggaaccgtaggctaacgctagcacaagctctagagttttcagaaccttcaaagccgactgtcgttgttgacacccgaatcggcagggtcgtgtagcttcagtcaacaatctcgtgagatgcacaaatgaagcaatccgtggatgcacctcgtgtcgtgtatattttcgaaagtgttgctccttgcgggctgcatccggtttgatccgttcaagtcccagcacactcgcctgcttgtttttcatatcacctttttgaatagggggacattcgaggatcacaaagcttgtgcatgtgatcactttaaacatttaatagcatatgtatatgttattgtacacagaataacaccacttaaagcatctttacattttgattgctatatacatgaagctcttatattttttttatttcca

SEQ ID NO: 8021 - DNA, 1832 bp, Zea Mays
caccaatcatttctttgcaatctgcagcctctgcaaactgatcgcgttgctggttgctggtaatcatcggaccagtccacagatatcggaagctctcttgctactgatggcgaagcccagcgtggcggtgccggaggttggcgtaccagcggcgcaggcgtcgtgcacctgcccggggacgctgctcgcgtacccgccgccgcgtggcgccggggtcgcggccgccgtgcggcgcaagtgcctgcaggtggagctcggcgcgggggcgggcctgctgggcggcgccggcgcctggggcgtggagtccatgcgggcgtcgtcgcccacgcacgccagggccgcggccgcgctcgccgccggcggcggcgtcgatgtcgacgtcgacgaggagcgcgccgccagctggatggcgcggcacccgtcggcgctgggcaggttcgagcggatcgtggcggcggccgagggcaagcggatcgtcatgttcctggactacgacggcacgctgtcgcccatcgtggacgaccccgacgccgccttcatgagcgagacgatgcggatggccgtgcgtagcgtcgccaagcatttcccgacggcgatcgtgagcggccggtgccgcgacaaggtgttcgagttcgtgaagctggcagagctctactacgccggcagccacggcatggacatcaagggtccggcggccgccaaggcctcctcttcttctcggcacgccgcaaaggcaaaaggagtagtgttccagccggccagcgagttcctgcccatgatagaggaggtgcacgagcgcctggtacagacgacgcgctgcataccgggggccaaggtggagaacaacaggttctgcgtctccgtccacttcagacgcgtcgacgaaaaggtgatggagttcttgctgcggcttgtcgagtggaagcgcctctccagggccaggctcaggctgcaatgagatgagacggcgcaactgccgtacgtggacacgtacgacgatgcaacggattaagctaactgccaagtgccagttaattaagttaagatcctgcctgctacgtggaatcgtgaacggcactgtctctctactgtccccccgtagtgatcagcatgcatgtacatcgttgtctcatacagtactagctagttagtactaagcatgcctgttacatatatatagcttcatgtgaatgtgttgtactgatgtgtgatcttaaaagtatgctgatgaacggtgtgatatttttttaatccacactacttgctgatttggttcaaagccggacctgtcgtcgtcgaagtgatccagctttgcaacgccattggccaccaccacatcgatcgaaagccacaccaataatgagcaaggcgacgatggaatcttggataacgcatgccacacgggagcgcgcacacgatctttaccatttgatgaagataatgatctacctgtggacgtacgccgcgtgatgacgaagcgcggttggactccactcggaagatcgatggagacgcgcgctctctggccattatattcccccgtgcttgtgcttgtgcttgtgcttccaatcatgtcgtacgtccaatgcaatgtccgggaagatggattgcatggcacggttctggccatcttcaagaagacaacaatccccctccttttccactttcgatggcctcatcgattgatcactgctacagcgtacgtacgtacaatcgtttatcagcttattacctgtcggcctcgctgtcaatttgttgttgggaaagaagcgcatctaaaatcagctcgtcgatccatcttttcagcaaaatgaaatattttatccatcccg

SEQ ID NO: 8022 - DNA, 5266 bp, Zea Mays
gggcccagttatcaaggtgattgtgtgaagtgtagagcgcccacctccgtcagctgggcacacgtagatatagcagtagcagcagcggagctgttcgacgaaatgccgccatggccgccgtgtctccagcctaccctcaccaccgctcgccgcgccaccgtattctccaggacgagatgtctctcttctacccccgcctctcctacctacgagcaggggcagcacgaggaggagccatcgttggtcgttgtggggggcggcgcggcgggcgtgtacgcctccataagggccaagacccttgctccgcacctcaacgtcgcggttgtggagaaaggcaggttcttgtccaaggtcaagatctccggcggtggccgctgcaacgtaaccaatggccatcaccttgagcccatgggactggcgagaaattatccaagggggaacaaggagctccgaggatccttctttaccgctcacggtccgcaggataccatgcgctggttcacagatcacggtgtaaagcttaagacggaggacgatggcagagtcttccctgtcactgacaattcagcttcagttgtagactgtctactgaacgaagcaagaaggcttggggtttctctgcaggccggcaaaactgtgtctagtgcatctgttgctcaagacgggaagtttgttctcaaggtggagaagcgtactgccgatcttgttgattatatcaacgctaattacatcttggttgctacaggtagcagccaacatgtacgtaaattcttttttgcccctctcgttgcaaattcatatcttttcaccatatcatagggcaaaatggtacgcagttaacgtcttgcttacctgtagggctattcaatcgctgcacaactcggtcattccattattgcaccagttcccagcttgttcacatttaaaatcgcagacaagcggctggctgatctcgccggggttacatttccaatagtcaaagcaaaactgaagctagatggtgttcaaaaaagtgttcccgagttaactcaggtgaacatgccatttcttttcagcaattggcgggctcttagagaggtagtcaactggttatacacatcgcttgcaacaagtgacttgtctttacagactgggcctatgttagtaacacactgggggcttagtgggcctgttgtgctgcgattgtcggcatggggagcacgtgagctacatcagtgcaactaccaaggaaatcttatggttgactttgtacctgatattcatatcgaggacgtgaagcgcgtcctattccactacaaagatcagcatgcggtccatttctttctttgtagcttttcctttacccactaaagtttgtgccataaatcttcaaaagaatctaaatctgtcgccggtttaactactcttgatttgccttttctttaatgagctgaaaaaagtgttctcgagtctgcaatagttatgtgtcttactactaattatttggcttgctgagatgatctttgactttgccagcaggaataataattgcagcttcctggtctatcacattcgaatacttttaccaaagttttaaacgcccttcaaaatcatgagagaaatattctaacagttaaatgaataaataatgatgaatttgaactgcagaagcacaaagtgagtaacacgttccccacggagtttggcctggtgaagagattttggagattcctgctagaacaggagagtttaaatggtgatacacactgggcctccatgccaaataatcatctaaacgcagtggccttccggttgaaacaatggacgtttgaggttgttggaaagggccaatttaaagatgaatttgtgactgcaggaggtgttccaattacagagatatcgcttggcactatggaaagcaagaaacagccaaacctgttctttgcaggagaggttcttaatgttgatggggtcacaggcggattcaattttcagaatgcatggaccggtgggtatatagctgggacaagcataggcacattggcatcgactagcaatctcccagagcagcagtcatgtttccagttgtaactgggagtttcagagaaggaaatggattgagttatgaaagagactcctcagatcatctgggaatgattcagggataccaacaagtttgcaatcaagataaggatattccaagatgaccaggatcagggagctacaattgctactgaattgtaacactaacctaagatggggtacatatgacaagaccgcacgattttggttacaatctaggtgtacaaagtgcaatctggaacgataatagttacaatcgagttaaacaagttgtgatttgtacttgaccgatcagagtgtgcatccagctatgattcttctgtctcaattaataatcatcaatttttttcaacaacattacctgtcagcactcagcagcgactgtcactggctaattgagagaaaatttatcttgagagaaaatttatctcaagctaaacgaaaaaatccatctctaaatgttatcacaatcacaataaatagtttccaagcatagactatccggctaccaaactacacctggcctgactaaatcagagcgaactatatatggtgcgcatcttatattcattccaagctgattcttccacaaaactgtgcaagcttacaataaatgcatgcgctcaacataaggattgtgcaaccacttgttgagtggctccccgcagccgacaaagcagccagtatttccacgggtggtgaagaatggggattcaaagaggtttagaagcttttgaatcgattgcctaaccagcgaagatccagttaccctgctcctcctgccccagccagtgacaatgtcaattctttcaggaccagtgcccaatgtcagaacctgcctatggaaccaggcaagcgtcctggacagtgcagtcactgctgtgccctcagacatcagatgaaggttgatgagccaatacgacgagctcttctcccttacagaatctgggtacacgttcttctgtgcagcaacctcccatataaagcctgcttcctccttgagaccggacttgtgcaagaagtctatgacagcatccattagaccccttttactctctctgtcctcactgtgcatcatgtccaagaaataaccagtgtgatccctgacgttctggccaccagcttctgcatcaggcaagtacagcaggaacatgtgagctggatgtccagtgatggccatgagctggcagcacaaacccatctgtgcctgacccacggtgcagcagctgagtagcagggtgtaagtctgcacagatggaacaagcccccgagcaagcatgttctggagcacgatgtaggcatcttgaaatctgttcatcttcaggaaagcactcaagagcgaattgcaggtcggcacgttaggctgcaaaccatcctgaagcatcgcttggtaccatcctagcgctttgtcaacattgccagctttgccccagagatcgaccaaaagtccatataccggctcatcaggagcccaatcacgcctcatctcaataaaaaccgcctcagcctcatccagatggccgcaatgaccaagaacttccataacgatgctgtaagttattttgtcaggacgaaacccagcaacctgcatgtctttgtacagcttaacaacattctcataatttcttgctttggcctggagcgcaatcataatattgtaagtaacaaggttaggtgtgcagccattttcaatcatctcacagaaaagcttataagcagccgctaattgaccacctttaccaaggcaattaaccatgacactgtaggtgaacgtatcaggtgacaagcctacttcttgcatcctgccatataaatccattgcaatgtctaggtatccagctttagcatggatatcaatcaatgtacaatatgtaacccgatcaggctcataaccagcttcctgcatttcctcaaatactttgacagcctccttaagataatttgcacggccatatgcatgtattattctgttgtaggtcaccacagttggtttgcagtgagctcggctcatctcatccagaagttccttcaaaacaccaaattgcctggcttgtccaaggatgcctatcatggttgtgtaagtatgaccatcgtgcttgaatccaggttgcctctttaaccattgaaagaagccaagagcgacagtgtggtcatgaagcagcttgagtacttgatttgcctggaatgcatctatcttgcaatgaagattgtctagaacatgctcggtcattggaccccatttcatttgctgcagtgtgtggtagtactgctcaactgatcgcaataacttcaatgatcttaagttagattggggtcctccactatgagcttttacccttcctgtagaaccctgaattttgttgccagaaccactaaacacattgggacctgatgggttccgagtttgtacatcatcttgcctggcatctgaattgaaatgattagaatgatattttgcaggaggtagaccaggatgcccttgactccttatttgtgatggtgaactggaaaccatcacagaaggtcctgagaaactctgctttggctttgcatagccagctcttgggtaacccttcccaaattcattgttcacggaagggttataagccatctttccctcaggaaagttaagttgattctgtgccctattattagaagaatggttatcagataaaatctgataagaatagttagtacccatctgtggagcctgatcagtgcttccattattagatgaggacctgatattaaccagctctgaatatacaccagctccagcaattccagattgagaaatgcttctggctgtctgcttagatggctgtacataatcacttcttatgatctgatgatgactgtgaggatgattgcttctgttactagatgcagcctcctttcctgaagttgaggtagtggcatgaacagctggaactgggtggccagtagctctagtagcatcttgcaaaggaggctgaatcttcacaaatgttctgtgggttgaatgagaattctgctcgatagcacttgcagtctgcctttttggagcataagtctcatcctcagggcatgtgcatgaagctccatctgtgctaccgcaccttgatccattaagatagaaggaccgtgcacactgagttagggtgctgagttgctttgccctcaacatggactgcaaaattagttcacaacatgtaaggactcctaa

SEQ ID NO: 8023 - DNA, 860 bp, Zea Mays
acacgatgactcatgaccgcctatcaaggctgtagttgtcagtattgatcctcgacgggtatatgtcaaaagtcaagaagatgtgccatttaaaactgtaaaggtgtccactaaaggtccatcgggagaagaatatgcatggtaccagtgcacagtgaatggtggacgtgatagccgagctataggagcatatgaactagcgaaagctgtggaagaattgggcgcaggagaaatacttcttaactgcattgattgtgatggccaaggttgtggatttgacatagatttggttaaaatggtttctgatgctgtgacaatccctgtcattgcgagcagtggtgctggagctgttcaacatttttctgaaatttttgagaaaacaaatgcttctgctgcccttgctgctggcattttccaccggaaagaggttcctatactagcagtgaaagagcatctggtcaatgctggtgtggaggtcagggtgtaacagggagatccttcggtttattgaaatattcttgtttgatgtcacaactgctatcagttctgtttctctgatgtcgcaactgctatcagatctgttggtggcagctggcagtgcataggcccctgtcgagaactgcagtttggtaataaattaataatgtgatgcttaacagattaagcatccgcttcttttgcttgtgtttctatttcccggtgtggattgaccgcctccgacctgtcttgcgtcatattcgtcagctttgtagcatgttaatgttggaggccacgttgctcattcagatagaacaaactaactagcgatgaaaacgagcggaacaagatcccgccattttcattttcacaaatctgttgaa

SEQ ID NO: 8024 - DNA, 1873 bp, Zea Mays
cgcacgcctgccagcccccgcaaaactcgccacaaccgaacgcccccacgcccgccgccgccgcgaatctcgcccgcacgcccgccatcgcgaaaccctccgataccgcaccgctcacacgccagcgcccgcgaatccctccggttccgaaccgcccgcacgccacgcaatccgctcctccctccgcctgagcttgccgtcatcagtctgcaccgcgccggatccgtctgctcccccctcgagatggcagccccagctatgcccgcgtcgagccctcacccacggatccgaggatctcctacctctctacaccggatcagctcctccctccgcccgagattgtcatcatcaatccgctctgcgccggatccgtccgctcccccactcgcgatggcgcccgcgtggaaaatgatctgcgtgtttgattagaaaatgatctgcgtgtttgcaatcaaattattcagttcttgcaagaatgacatgattttgttactaaatagtgttccttttattcagaaatgaccaagacaatgcaagtgcttaatgaagcaagctggcaggaaacatttaaagctctttggatttccacccttcgtcttgtacaacggagaacctcttgaaggaccgattcctcatctagatgcaaggttatgcatgttgttagctcttataccattatcaattgctgcgaatcttcaagaggaaagtgatatgtttggagttgaagggaacaaaattcttccacaaagacaagggcttatatcatctctccagaatctgatccaatattcaggacttcttgtaccaccttcatcagtggtgaatgcagctaatgttgcagcctcaaaagcagcaatatttaaggccaactataaggctggggttggcaacactagcatgatggaccagactgactcttcaatgaaagctggaaaacggagtcaaaaatgaattttgccttgacctgcgcaaacaagatgcaggaaatgtatctaatctcttgagactccatcttaaacagttggcaaatattccatatgatgacttacttaaagttggtacaggcatttgctcttcaacacctaaaattgttgaaccccagcaacataattgtacctctgtaacagaagatcatctgataatccctaaagaagctgacaatgtttgtgggcagcattatcctatcactgagaaaatctaccgttcacacatgtggcaaagagagcaatcaaaagaagaatggtgcaggatgcattggacagtaatgcttgagtatggtacatcagggggctgtcagctacaaccttgatggaatacctccatcgatctaagggatattatagcagaaattgatcttcacccgggaatacacgacctactggcacatttgatcaccatccattataggagaattctcaaccaaatctgcttattgtagtttctttgtcgggggctcggggctgttgattttgacccatggaaagaaatctagaagttttggactgcacctccaatgcaagtttttcatttggttagctgctctaaatcagtgttggactgcagtcaggttagctcactggggacttgagcatcatgagagttgtccattgtatgatcaagaagaggagaacatacaacatttgctcacctcctatgtatttggcgggggcagtctacagtatcgtcttgcaaaatggctcaatttttagctgtggtccaaacatgccctaattgttctccacttcttgcagctaatagctaacatgttcttttcattattttcccccttctactgtcatctaacttgccatgtgtttccttttctaagtacatactaaagatacttatgatccatgctgtgcgaacattgatt

SEQ ID NO: 8025 - DNA, 1365 bp, Zea Mays
gagaaaagatcgtaaccctaatcggacaaaatcgggctatcttcttcctatatatcccgtcgccgctgcctcggccgtttcatgtccaggttaagtttaagattgataaagattgccgtcctctccctgagagtagtctcaagcaagccatcaaggaaaattacaatgcaaagagcaaatttgatccagagctcaccacaaaacaagtccaaaggttacttttgctgtttaagcctgttagtgcacctcaatctgtttcaaataatcaccttggagaaaggcgccactatgaaaaacgaaggaagccacgccattttgaagaaaggcggcctattgaagcagcgcgtcggccacgatttgatgaggaaaggcgccctgcggttagacatgttccttttgaggatccatacagggcaccacgctatgctccagttcctgttgactctcagcatggccattctttggctagtgatcaccacagatattatcaaccagcacttacacctgagcctcggcagcttcctcttgttctagagcctcgatatgttccgccggccctagatcatcatcatgtgccagagcttcgacatgccccacctgcatattatcgcactttggctccatctggtgattcatactatcggtctgttgagaatctggtgcctgagcgatatgcagacagaaccatggctgacttgaccactagagatccaattattagggatcacacagcactaccaggggaggcacttgctcgagcagaccgcttggatgatctctaccgttctgatcgtgtggaggaactctaccgttctgatcgacttgttaaccgtgctgtggaccgccctcatccagcctattttacagctgcttatgagaccaaccctgcttatgctgaaacgagcattaggcctgtctctgcaagggtcaatggacccagtgcggcagtttcgtcactctattccttcagtggtggcccagtatatcggtaatgaatgatcatggctctgttgaaagccttagccagactaagaagacagggtattcgtctctttaactgcaactgttgtttgccttagcttctattcggtattttcttaaatatccttccctggatgaatgacattcgttatcaagacttgatggtctaaactgtcgaaattatgtactgtacttggcgtgctttgaagctcacttcgttctgtgaatggatcgatgcacgtattggtagcatttgcttgttctgcccttcagattggttgctacttgctaaactgagtagggctacctcatgcagtggtcatttcttaggatctgtgtatatgcttatcctaatatacaggacgttagggttgatatctgacg

SEQ ID NO: 8026 - DNA, 1835 bp, Zea Mays
atcacacagaccgcagccaaaggatgagttctcaaagttgagaagatggtggaaaggtgtcaatatattaaataaagcatacataatcttgccgatccatgggatggcgcactggagcttggtaatcatttgcattcctgcaaaagagagtatttcaggaccaatcatacttcatctggactccctagcgatgcatcccagtactaagatcttgaacacagttgagagataccttgaaaaagaatggtgccaattatcatcatgggaggattttaaaaataatatacataagcaaagcgttgaggttccacgacagaataatgagtatgactgtggcatcttcatgctttattatattgaacggtttataaaagaggctccagaaagattcacaattgataaacttgatatgtttaatcggagttggttcaaacctgaagaagcatctggtctaaggcggagaataagagagcttctgctggaagaatttgaaagtgccaagctggatgatgctttaccaggagcggatgcatctgagcgtgatgacagcataaatgatggagaattgaaaccagatgcatcttctgacagttcagaaatggtcgtagaggtggtaggagggttgggaggcactgacaagagcaatgaaggcatcaaggttgtagcatcagaagaggcaagtggagagtcaggagatgctggtaagagtaccgaaggtactgttgcagcatcagaagaaaagagtattgaaggcatcaatgttgcagaaccagaagatgcttgtgagagtataggaggcatctatgttgcagaatcagatgaagcaagtggggagtttggagagattggtaagaccaacaaaggcaccaaagttgcagtgtcagaaggagcaagtgtgtctggatacactgataagaatatggaagacatctctgactctgaggttgcagtattagacaaagctcccactagcagctacagacgtggagagaagaccacagcctgtgttctatcagaagcagcttcactttccgatagcgtcaaagatgaacaaggtatggtgaaaccagattctggcagctcaaaagctgagagagaaggagatttgattgtaattgcatcgccggaaagatcggaagggaatgatgagatcattggtagcatgccaattacagatgtagtttgtgacagctgcgacagcgacaccgagaccaagattttggtaatgatattttgaggttcctgtggccgtataccaagcacatagatgaccaggccaggcggtgatctcagtaaaccgaataggtagcgggtcgatgcatggcctgcttccccctgatctcgggcactaggctcctggaaagcagttttgggtaggcagttcattggcttgggcccgggacttgtaaagtgtacaggcgattggacgttattacgtatgttatggtgtttacattagaagatctgtgactgtgaacacctgccacaatttgagataatatgcgcgtaaggtcttgcgttttcctttttgttctgccccagagctgccaaacatgcatccttgttcttctccagccttgatatgatggcatttcttttgaccttggagtagagttatcgtgtgaatgaaggaagctattacagtacagtgcaaatttgcaacggcatgatacatgtctagctctctagccttggtgttcgtggaagtgacatggatgacactggcatggcagcagcattcattcgtgtgagttcgcatgaacaacacattcttgttaggccccgtttggttaggggtaactaaagtttagtgactaaattttagtcacttttag

SEQ ID NO: 8027 - DNA, 1727 bp, Zea Mays
aagggcgagcaaaactggaagcctacgaaaatggtggagctcacctccttatccccagggccaccacgtccttctcggctgactcctcgccgccggccgccgccgccgacacctcatgttcatacctcctcgcgtcgtcgcgggaggatcctcggcgccgcgaccgccacgcctggcgccgacgactaccactccaccatccgctccctcaactcccgcggccgccacgtcccccgaaaatccctcgggcagaactacacgctcaactccaaggtgaacgaggagctggtggcggcggcgggggtggaggagggtgacgtcgtgctcgagatcggcccaggcaccggctcgctcacttccgcgctgctccaggccggcgctaccgtctttgccgtcgagaaggacaagcatatggctactctcgttaaagataggtttggatctacagaacagttgaaggtcattgaagaagacatcacaaaatttcacatccgttcccattttcttcctttcatgaaggagaaatacggtgccaccaaaaaacttgcaaaggttgcatcaaacttaccattcaatgtcagcaccgaagttgtcaaactactactcccaatgggggatgttttctctgtcgtggtgcttatgcttcaggatgaaacagcagtacgccttgcagatgcttcaatacaaagtccagagtaccgatctatcaatgtgtttgtggatttttactcggaacctgaatacaagttcagagtagacagagagaattttttccctcggcctaaggttgatggtgctgttatcagcttcaaactaaagaatgcggaggagtatccgccagttagttccccaaaaagcttcttttcaatggtgaattccgctttcatggggaagcgcaagatgcttaggaaatctcttcagcacatatgctcttcttctgagattgaggctgctcttgacaacattggccttccagttacagctagaccttctgatttgattttggatgatttcgtgagattgcacaatcatttagcgaaagtatgactaagaagtgcctttcaaaatgcctaaggaattgcttgttggcatggtgttcaacagttggagtaacttacgcctgaccgctgagagttgctatgcaggtgcattcagctcagctccggggcgaagccaggaattacatgtagggaggccggccgaaagagccatcttgtaaaaaaatgatcgcgggttcaactggtttggttactcgcacttagcgtctgtctgagttaatacttgacaaaaaaaaaaaaacaagcacagctcaactggttaggtttctcgtagtggtggtggtcgtttgggttaattcatcgacttgacacggttgctcctatttttttttctatatgtattctagatagtgagggtttattgtattttgatcgtagacgctaatcagaaactctactgaatggatgccttcgttctctctgagtacaaaggccccattgaaatatgtatgagaaataaagcaaatttagaggaccggtagcatttccttctgcttatttgcctcctttttcaccacgtgagcatctaaccaatacaagactgtttagcagatctgtaaggccttgttcgtttacgtcggattgcatccgaaatcgttccagttaatcaaagtttatataaattagagaagcaatccggttatgaatcgttccgatccaccaatccgg

SEQ ID NO: 8028 - DNA, 858 bp, Zea Mays
acccacgcggaaaaaaaggaaaaaggctcgattcgctgttgcctcattgcctgccacagctcgccgcggacgccgtcgccgctcaagtgaagtccggagtgggggcttgcgatctccgctgcgggcgcggaagatggctgacccagagttggaagctatcaggcagagacggatgcgagaactacaacacggtgcggcaaatcagcaaaatgcgggccaacaaaaggctcaggaagacgcgaaacaggaagctgaggaacgccggcagatgatgcttgctcagatattatcttctgaagcaagagaaaggctttcccgcatagctttggtcaaacctgacaaagcaagaggggtggaggatgttttgctgagagctgctcaaactggtggaatatctgagaagattcagaggcgtcggaatgtccttgacgacgatgattagatgcaacctgcaaggctctgcttcgagtgtattattggcttgtgataaattaaaagtggtaccgaactgtttagacaatgatctcatgcgactatcagcagcaatgaaaacttggtacttggtagactatttcattggatattcggcggtatatgatccgatgtcttattttggtgtgtgtgcccccatcgaggacagtcgatattggctgtgtttatccccgaaacactgttcttccttgagtcatggcattattaatgggtgcgttttgcactcattttatttctgcctgttgagttgtttgcgccaaaatggcatgtcatgtacagtgcgctatgcatccgtcatcccattcatgcagcggaggctgcagatgtaaacagagggcgttgcagtccgcttctagatagatgcca

SEQ ID NO: 8029 - DNA, 943 bp, Zea Mays
tcgcggactcgcgttccattccacccacgcggaaaaaaaggaaaaaggctcgattcgctgttgcctcattgcctgccacagctcgccgcggacgccgtcgccgctcaagtgaagtccggagtgggggcttgcgatctccgctgcgggcgcggaagatggctgacccagagttggaagctatcaggcagagacggatgcgagaactacaacacggtgcgcaaaatgcgggccaacaaaaggctcaggaagacgcgaaacaggaagctgaggaacgccggcagatgatgcttgctcagatattatcttctgaagcaagagaaaggctttcccgcatagctttggtcaaacctgacaaagcaagaggggtggaggatgttttgctgagagctgctcaaactggtggaatatctgagaaggtgtctgaagaaagacttatctcccttctagaacaaattaacagccacacaagcaagcaaaccaaagttacgattcagaggcgtcggaatgtccttgacgacgatgattagatgcaacctgcaaggctctgcttcgagtgtattattggcttgtgataaattaaaagtggtaccgaactgtttagacaatgatctcatgcgactatcagcagcaatgaaaacttggtacttggtagactatttcattggatattcggcggtatatgatccgatgtcttattttggtgtgtgtgcccccatcgaggacagtcgatattggctgtgtttatccccgaaacactgttcttccttgagtcatggcattattaatgggtgcgttttgcactcattttatttctgcctgttgagttgtttgcgccaaaatggcatgtcatgtacagtgcgctatgcatccgtcatcccattcatgcagcggaggctgcagatgtaaacagagggcgttgcagtccgcttctagatagatgcca

SEQ ID NO: 8030 - DNA, 3296 bp, Zea Mays
ggtttgtgctagcacacttgtttcaattttcaaagtgtgaccaccggcaccaggtcaccacatgtgacacggctgcagggagacgacacgacggtcaagtaaaagtaaaaaaaaaaaacctgaggctggctggctacgctgagcaaaccctgtgccgcccccaaatggagaaggcgccggcaccagcaccagcaccgggcacccaacgggcgttcgtgtccgcctatcggatctggtcgctttgacgaaggaaccagcgaatgatcactgctactagctagctaggttgttgcgcggccgcgataagagtaacatgacacttgttttgcttttgtttttactaggcttgctgagtgaggtgctgctgatggatcatggatgtggtgcggtgctgccttttataaccgcgcgcgcgcaccacacaacacaacagacaccaccacggccccgcgcgcgcgcgcctccctctccctcctagtcctaggcacacacaacacaacgcaatcctccaccggctccgctacccgcgggcgggcgggcgcttttcgcctcctctgctccgagctctcctaggttggaagagtctttgccaaggggataacaaaagagaaaagtacttgcataccccaacaaggcagcagcggctgcttttggcctcctttttctcgcacctcgctcctctattctcttctcttgttcgttcatcacccgagttggagtgcgaggcaagaaggagatcgagcctgaggagggagggagccagggagggaactggacgtccggaccaccaccaccaccaccacacacacaccagcctcgtacgaagtaaggaaggaaggaagcccagcgcctagcagccatgtgggaccttaacgactcgccggccgccgaggccgccccgccttccccgtccgccgacgactccggcgcgtcctcctcgtcggcggccgcgctggtcgagatacccgacgacgcggacgacgactcggccgccgccgccgcggaagccgtcgtcacgcgccagttcttcccggccccggccgccgtcggcgcggcgcccgggcccggctcgtcgagcgcgcgcgcgggctggcttcgcctggccgccgcggctccaccgcccgcggcgggcggcagtaacggcgtcgcgcaaaccggtggccccgcggcggcggcggcggcggctggcaagaagagccggcgcgggccgcggtcgcgcagctcgcagtaccgcggcgtcacgttctaccgccggacggggcggtgggagtcgcacatatgggattgcggcaagcaggtctatttgggcgggtttgacaccgctcatgcggcggctcgggcgtacgatcgggcggcgatcaagttccgcggcgtggaggccgacatcaatttcagtctggaggattaccaggacgacatgaagcaggtgatttatactcctatacggagcatgtagcgagaaagatacatgtaattttttctttccttcgtctaccagcagatgggccacctgagcaaggaggagttcgttcacgtgctccggcggcagagcacggggttcccccggggcagctccaagtacagaggcgtgacgctccacaagtgcgggaggtgggaggcgcgcatgggccagttcctcggcaagaagtatgccgtcgtcctcgtacgtctacttgggcctgttcgacaccgaggaggaagccgccagggcgtacgaccgcgcggccatcaagtgcaacggcaaggacgcggtgacaaacttcgatcccagcatttacgccgaggagctcgagccggcggcgtcgacgggcggcggtggcgatgaccacaatcacaacctggacctgtcgctggggagctcggcggggaacaaaaggggcagccttgacgacggcggcggcggaggaggcggcggcgacgacgagacctcggaccagcgcgtccccatggcgttcgacgtcgactggcagacggccgcgccccggagcacgaaagcaaagctggacgcgagctccaagcaaccccagacccagatgctgcctcctccgcctcctgctgtcttgcgagtcgcccaccagctgccgttgccgttcggtcccaggcatccgcaagtgggtatccgcatcggatttccttcatgtgttccctcccttgctaggcgccgcgcgagctgggtggcttgctgacgccttgttttgtttggtgtgcaaatcgcggcagtcgcagttcctgagcaacggcggcgatccggggacctcgggaggcctgtccctcgcgatcggcggcgcgggcggcgggcactggcctccccagctgcagcacctgcagcagcagaggctgcacggcgcctgggccaacggcggcggcacgagctggccgcctccgccgcacccgcacccgcacccgcacccgccgccaccgagcaccgccgcgaccgcagctgcagcatcatcacgattccctccctacgttgttactacgacgcaaggcccggcaggctgggctcagaagaatgggttccattcgctggccaggccaacctagtatgccaagaaccacgactggccggagcgttcattcgtcgtcgatcgtcgacccagggcaaacgacacctccaaccactgcacgacgacgttttaatttaccggatgccattctctctctcccctccccccttcccttctcccttctcccttctcccttctctgtgttcttgattgggtgagacatggatccgaggatggatggacggcctgtacctgaggagttcccgggaagaagacgagtgagtgagtgagtgattggtagggtaggcgactaggcgtcgcgtcaggcagtacgtccttttggcgccttttttcttctttcactcaccattggcgaccaccaatgaatgatgacactgactggggtgtcaacatcgcagctggttttgtttggtctcatgttgcatcactcgctgctccacgatgccttgctatggttggggggagatttgctccatccaccccacgccggtcaggcgacagagcctccgctgcgtcgtctcatccgtctggtgagttgccactgtcttagaatctgagtggtacggtacgtgtggatctcgcgcgcgtgtaaacctagtattatgtactacaaactgtcatcatcggagatcactcgaataagatatcgatcttgagattacgggcggcggctcctgtcatgtgcttactacagcaaagctgataaactgtccgagtctgaacagctcatgtaatggaacgccgcatagatatttccttcttgttagg

SEQ ID NO: 8031 - DNA, 1325 bp, Zea Mays
actaacacccctgaagtagaagaaaaatgccgtgagcgcagcagatgtcgtgcggtgcagtgcagtgcaggtgcgggatctctgaatcgctgacgcccagcctcctctgtcatctccctcctcggacctcgccacctcacgcggaaggaggggaagaggaagcgcggagactggaaatcgggccccaaatccgcttcggtctctcgatcggcgaggcatgattcatacaaccggctaggatggcctcaaaagctataaaaagaaggcctatcagcgctgagactgatacaacaggggaaaaacaaatggatacagcactgtcagatcctgtaacagaacctcttctaggaaacactcctcaggaagagaaatccaagacatatgagcctattacacggtcaggtttctgggatgggacggcacaggagtgtcttcgttggacacatcttttagcagcttttgttgctcaatctgcaagaaacatagtaaatgttctttctgaatttggatatttgctagcaagactctttggttgctcttctgcttccaaaagttcacaaaatggacagacacttccagttaacctcagtccattacaggaagaaaggttaagattgttgagacaaaggatagatgtgccatatgactgctcctctgtcaagcatcaggatgccctgaaagaactttggaagttggcttaccctaacagacaacttcctcctctgaagtcagatctctggaaggagatgggctggcagaactccgatccatccacagattttagagcagctgggttcatgtccttggagaatctaatatattttgccagaaattacccagattcctttcacaggctactgcataaagcagatggaaaaatgagaacaaaagctggtgttcactttgttcaactactcgatgatgacggtgtggctttcgataaccttttctgtgtagcatttcaggtgcttgattctcaatggcttgcaaggcgagcgagttatatggaattcaatgaggttctgaagtctacacggggtcagttagagcaagagcttactatcggaggtatttctcgcattcaagacatgccatcattcagaatgctgagaaggtagcgctgtttgtacttcacaggaaaagagatacattttagattccaatatattgtttaaatttgttgtccgttctttcactggattttgaagacgtgacattgtgtatgttattgagtatattgtttgtaatgtcgcagcttaaagctacagatcataatatatgatatgatatcttgaaaagaaaaactacgacttccagacattttt

SEQ ID NO: 8032 - DNA, 1407 bp, Zea Mays
actaacacccctgaagtagaagaaaaatgccgtgagcgcagcagatgtcgtgcggtgcagtgcagtgcaggtgcgggatctctgaatcgctgacgcccagcctcctctgtcatctccctcctcggacctcgccacctcacgcggaaggaggggaagaggaagcgcggagactggaaatcgggccccaaatccgcttcggtctctcgatcggcgaggcatgattcatacaaccggctaggatggcctcaaaagctataaaaagaaggcctatcagcgctgagactgatacaacaggggaaaaacaaatggatacagcactgtcagatcctgtaacagaacctcttctaggaaacactcctcaggaagagaaatccaagacatatgagcctattacacggtcaggtttctgggatgggacggcacaggagtgtcttcgttggacacatcttttagcagcttttgttgctcaatctgcaagaaacatagtaaatgttctttctgaatttggatatttgctagcaagactctttggttgctcttctgcttccaaaagttcacaaaatggacagacacttccagttaacctcagtccattacaggaagaaaggttaagattgttgagacaaaggatagatgtgccatatgactgctcctctgtcaagcatcaggatgccctgaaagaactttggaagttggcttaccctaacagacaacttcctcctctgaagtcagatctctggaaggagatgggctggcagaactccgatccatccacagattttagctgggttcatgtccttggagaatctaatatattttgccagaaattacccagattcctttcacaggctactgcataaagcagatggtaagagagctgaatgggagtatccttttgcagtaggcggcgtaaacatatcctatatgttagttcaaatgctggatttacagtcaggaaaaatgagaacaaaagctggtgttcactttgttcaactactcgatgatgacggtgtggctttcgataaccttttctgtgtagcatttcaggtgcttgattctcaatggcttgcaaggcgagcgagttatatggaattcaatgaggttctgaagtctacacggggtcagttagagcaagagcttactatcggaggtatttctcgcattcaagacatgccatcattcagaatgctgagaaggtagcgctgtttgtacttcacaggaaaagagatacattttagattccaatatattgtttaaatttgttgtccgttctttcactggattttgaagacgtgacattgtgtatgttattgagtatattgtttgtaatgtcgcagcttaaagctacagatcataatatatgatatgatatcttgaaaagaaaaactacgacttccagacattttt

SEQ ID NO: 8033 - DNA, 1415 bp, Zea Mays
actaacacccctgaagtagaagaaaaatgccgtgagcgcagcagatgtcgtgcggtgcagtgcagtgcaggtgcgggatctctgaatcgctgacgcccagcctcctctgtcatctccctcctcggacctcgccacctcacgcggaaggaggggaagaggaagcgcggagactggaaatcgggccccaaatccgcttcggtctctcgatcggcgagcaggcatgattcatacaaccggctaggatggcctcaaaagctataaaaagaaggcctatcagcgctgagactgatacaacaggggaaaaacaaatggatacagcactgtcagatcctgtaacagaacctcttctaggaaacactcctcaggaagagaaatccaagacatatgagcctattacacggtcaggtttctgggatgggacggcacaggagtgtcttcgttggacacatcttttagcagcttttgttgctcaatctgcaagaaacatagtaaatgttctttctgaatttggatatttgctagcaagactctttggttgctcttctgcttccaaaagttcacaaaatggacagacacttccagttaacctcagtccattacaggaagaaaggttaagattgttgagacaaaggatagatgtgccatatgactgctcctctgtcaagcatcaggatgccctgaaagaactttggaagttggcttaccctaacagacaacttcctcctctgaagtcagatctctggaaggagatgggctggcagaactccgatccatccacagattttagagcagctgggttcatgtccttggagaatctaatatattttgccagaaattacccagattcctttcacaggctactgcataaagcagatggtaagagagctgaatgggagtatccttttgcagtaggcggcgtaaacatatcctatatgttagttcaaatgctggatttacagtcaggaaaaatgagaacaaaagctggtgttcactttgttcaactactcgatgatgacggtgtggctttcgataaccttttctgtgtagcatttcaggtgcttgattctcaatggcttgcaaggcgagcgagttatatggaattcaatgaggttctgaagtctacacggggtcagttagagcaagagcttactatcggaggtatttctcgcattcaagacatgccatcattcagaatgctgagaaggtagcgctgtttgtacttcacaggaaaagagatacattttagattccaatatattgtttaaatttgttgtccgttctttcactggattttgaagacgtgacattgtgtatgttattgagtatattgtttgtaatgtcgcagcttaaagctacagatcataatatatgatatgatatcttgaaaagaaaaactacgacttccagacattttt

SEQ ID NO: 8034 - DNA, 1428 bp, Zea Mays
actaacacccctgaagtagaagaaaaatgccgtgagcgcagcagatgtcgtgcggtgcagtgcagtgcaggtgcgggatctctgaatcgctgacgcccagcctcctctgtcatctccctcctcggacctcgccacctcacgcggaaggaggggaagaggaagcgcggagactggaaatcgggccccaaatccgcttcggtctctcgatcggcgaggcatgattcatacaaccggctaggatggcctcaaaagctataaaaagaaggcctatcagcgctgagactgatacaacaggggaaaaacaaatggatacagcactgtcagatcctgtaacagaacctcttctaggaaacactcctcaggaagagaaatccaagacatatgagcctattacacggtcaggtttctgggatgggacggcacaggagtgtcttcgttggacacatcttttagcagcttttgttgctcaatctgcaagaaacatagtaaatgttctttctgaatttggatatttgctagcaagactctttggttgctcttctgcttccaaaagttcacaaaatggacagacacttccagttaacctcagtccattacaggaagaaaggttaagattgttgagacaaaggatagatgtgccatatgactgctcctctgtcaagcatcaggatgccctgaaagaactttggaagttggcttaccctaacagacaacttcctcctctgaagtcagatctctggaaggagatgggctggcagaactccgatccatccacagattttagagcagctgggttcatgtccttggagaatctaatatattttgccagaaattacccattgattttacatgcaggattcctttcacaggctactgcataaagcagatggtaagagagctgaatgggagtatccttttgcagtaggcggcgtaaacatatcctatatgttagttcaaatgctggatttacagtcaggaaaaatgagaacaaaagctggtgttcactttgttcaactactcgatgatgacggtgtggctttcgataaccttttctgtgtagcatttcaggtgcttgattctcaatggcttgcaaggcgagcgagttatatggaattcaatgaggttctgaagtctacacggggtcagttagagcaagagcttactatcggaggtatttctcgcattcaagacatgccatcattcagaatgctgagaaggtagcgctgtttgtacttcacaggaaaagagatacattttagattccaatatattgtttaaatttgttgtccgttctttcactggattttgaagacgtgacattgtgtatgttattgagtatattgtttgtaatgtcgcagcttaaagctacagatcataatatatgatatgatatcttgaaaagaaaaactacgacttccagacattttt

SEQ ID NO: 8035 - DNA, 3100 bp, Zea Mays
aaaaaaaacagaaacccgttacccgactcgactcgtctcttcccctccagtctccaccgagccaagccagcctgctccagcggcagacccgctaccgatctcctctgccgcggcccgcggcggcggcgatttcccctccgcgaatgccccttcaccgctgcagttgatacgccacccaagtggttcgttccacccttccttccctcgccggtctctccatcgccgcagcccgcagggcgccaccttgtcggaaggcgcgatccatggaccgctcgatcaacttccgcggcatcgccgggagcgccggaaacatcatgcagggaatggggaaattcgttttcggcaacgaggggatcgagtcaaaggaagatagctacgtcgagagatatctttatcggataagcaatggcacgatacctgatgaccggaggtctgcaatgactgagctgcagtctctagtggcagaaagccgctcggcacagatgtcgtttggagcgatgggttttcctatcctcctcaatattttgaaagaagaccgtgaggatgtagagcttgtgagaggtgccctggagacctttgtgagtgcattgactcctattgagacgtcacaagggccaaatactgaggttcaaccagcgttacaagaagcaattctattgattcctcgtggtataacagttctcatggacatgcttatggaccgtgaggtcataaggaatgaagcactgttacttcttacttatttgactcgggatgcagaggaaattcaaaaaattgttgtatttgagggtgtgtttgagaagatatttagcattattagagaggagggctattccgatggaggtgtagttgttcaggattgccttgaactgttaaataatttaattcgacacaatgcgtcaaatcagatgcttttgaaagagacaatgggctttgacccattgatatcaatactaaagattaggagaggcagtgcatttaattttacccaacagaagacagtaaatcttcttggtgctttaaatactgtggaattgcttttgatggggggcccatctggtgaagcaggtaaagacgctaacaagaatgcaaatcaaactgcattggctcagaaaaacattctggaccatcttcttttgttgggcgttgagagtcaatgggcccctgtcgttctccgctgtatggcactgcgatgtattggcaatttggtattaagaaatcctcagaatcttgattctcttgcaagaaaacaagttggagaagagcctcatgttcaacctgcactgaatgccatcttctctataatcttgcggacctctgtagcgcaggaatttgttgctgctgattatgtattcaagtgtttctgcgagagaaatcctaatggccaggcattattagcatcaactattgttccacatccgaaccaaggaaatatgcatgaacctgctatcgacatgccttttggaagtgtacttctgcaagcactggtttcaagtgatgtcaatggagatatggaggcatgttgcagagcatctagcgttctttctcacattgtcaaggacaacatgcaaagcaaggatcgtgtattgcaaattcagcttgagacacttacaccgtccttggggcgcactgagccagtattgcatcgtattgtcacatgtttgtccatcgcagcctcaacagagggagaaaacaaccaaaacaaccaaccagaagaaccgtacattcaacctgttattcttcggctactcatcatatggcttgttgattgttcaaatgctgttaactgcctgttggaatcagcagtgcatctgaactacataatagagcttgcttcaagcaaacgttacactgcttgtgttcgtggactggctgctgttgttctaggtgcttgcatcctgtacaatgctagccatgagaagggccgtgatgcttttgctgttgcagatgctataagtcaaaagattggcctcacaacgtacttcttgaggtttgacgaattgaggagaagcttggcacatcctttgccagagcagcatcatcgcaaggagctttcccgatcaagtgcgaatagcatgtcagatttccaagaaattgaagaggatgaaacaaataaagatgatcaacaccctgtcctctcagaaatatttgattcacagtttgttaattttcttagtaagctcgaggctgatattagagaaaacataatggatatatttagtcggacaaaaactgcaactgcactccttcctactgaattggagcagaagaacggggaggttgatggagagtatatcaaacgactaaagtcgtttgtagagaaacagtgcaatgagatgcaggacttgctggctcgaaacgcaatgttagcagaagagttagtgagaactggtggtggtaccaccacagatacttcacagagaccgaacaacgggcgagaaagggtccagatcgaagccctgagacaagaactggagggagcgagacgacagatagaggcactcgaaactgacaagtcccagatcgaagccgaagctaacaaccaacgaaaccttgcagtaaaactggagtccgatctcaagagcttgtcagaagcttacaacagcatagagcaggccaactaccgcctggatgccgaggtaaaaaccttgcggcagggaggcagtgtgccgtatcctgacgtggaggcaataaaggcgcaagccaaggaagaggctgagaaggacagtgaggcggagctgaacgatctgcttgtctgcctcggtcaggaacaaactaaggttgagaagctgagcacaaggctggcagagctcggcgaagatgtggatgcccttctgcaaggtattggtgacgacactgccattccggacgatgatgacgacgacgatgaagatagtgaagagtgatatgtttatgtaaccctgtaggtctgttggtgcacacaacctcacgttgggtcatgatattgtaatggcaattggcattgtacagtggataatgtgtagacaaaggcaccgttccaatttaagttatttgtggagaaactagttgaaaactaagtggcggaccgtccggtcccggacggtccacacctcgcgat

SEQ ID NO: 8036 - DNA, 3191 bp, Zea Mays
aaaaaaaacagaaacccgttacccgactcgactcgtctcttcccctccagtctccaccgagccaagccagcctgctccagcggcagacccgctaccgatctcctctgccgcggcccgcggcggcggcgatttcccctccgcgaatgccccttcaccgctgcagttgatacgccacccaagtggttcgttccacccttccttccctcgccggtctctccatcgccgcagcccgcagggcgccaccttgtcggaaggcgcgatccatggaccgctcgatcaacttccgcggcatcgccgggagcgccggaaacatcatgcagggaatggggaaattcgttttcggcaacgaggggatcgagtcaaaggaagatagctacgtcgagagatatctttatcggataagcaatggcacgatacctgatgaccggaggtctgcaatgactgagctgcagtctctagtggcagaaagccgctcggcacagatgtcgtttggagcgatgggttttcctatcctcctcaatattttgaaagaagaccgtgaggatgtagagcttgtgagaggtgccctggagacctttgtgagtgcattgactcctattgagacgtcacaagggccaaatactgaggttcaaccagcgtcagtgaactctgatctgctatctcaagaaaccgagaatatttctcttcttttgagcttattggtgattactcatcttttgccttaacaacatgtaacctgcatcgcctgcttcatgtgtactgagtcctggcttattgctcctgtctggtttgaagtcagaggaagacttttatgtgagatactacacaatccaacttctaacagctctacttacaaactcgctgaaaaggttacaagaagcaattctattgattcctcgtggtataacagttctcatggacatgcttatggaccgtcataaggaatgaagcactgttacttcttacttatttgactcgggatgcagaggaaattcaaaaaattgttgtatttgagggtgtgtttgagaagatatttagcattattagagaggagggctattccgatggaggtgtagttgttcaggattgccttgaactgttaaataatttaattcgacacaatgcgtcaaatcagatgcttttgaaagagacaatgggctttgacccattgatatcaatactaaagattaggagaggcagtgcatttaattttacccaacagaagacagtaaatcttcttggtgctttaaatactgtggaattgcttttgatggggggcccatctggtgaagcaggtaaagacgctaacaagaatgcaaatcaaactgcattggctcaggcactgcgatgtattggcaatttggtattaagaaatcctcagaatcttgattctcttgcaagaaaacaagttggagaagagcctcatgttcaacctgcactgaatgccatcttctctataatcttgcggacctctgtagcgcaggaatttgttgctgctgattatgtattcaagtgtttctgcgagagaaatcctaatggccaggcattattagcatcaactattgttccacatccgaaccaaggaaatatgcatgaacctgctatcgacatgccttttggaagtgtacttctgcaagcactggtttcaagtgatgtcaatggagatatggaggcatgttgcagagcatctagcgttctttctcacattgtcaaggacaacatgcaaagcaaggatcgtgtattgcaaattcagcttgagacacttacaccgtccttggggcgcactgagccagtattgcatcgtattgtcacatgtttgtccatcgcagcctcaacagagggagaaaacaaccaaaacaaccaaccagaagaaccgtacattcaacctgttattcttcggctactcatcatatggcttgttgattgttcaaatgctgttaactgcctgttggaatcagcagtgcatctgaactacataatagagcttgcttcaagcaaacgttacactgcttgtgttcgtggactggctgctgttgttctaggtgcttgcatcctgtacaatgctagccatgagaagggccgtgatgcttttgctgttgcagatgctataagtcaaaagattggcctcacaacgtacttcttgaggtttgacgaattgaggagaagcttggcacatcctttgccagagcagcatcatcgcaaggagctttcccgatcaagtgcgaatagcatgtcagatttccaagaaattgaagaggatgaaacaaataaagatgatcaacaccctgtcctctcagaaatatttgattcacagtttgttaattttcttagtaagctcgaggctgatattagagaaaacataatggatatatttagtcggacaaaaactgcaactgcactccttcctactgaattggagcagaagaacggggaggttgatggagagtatatcaaacgactaaagtcgtttgtagagaaacagtgcaatgagatgcaggacttgctggctcgaaacgcaatgttagcagaagagttagtgagaactggtggtggtaccaccacagatacttcacagagaccgaacaacgggcgagaaagggtccagatcgaagccctgagacaagaactggagggagcgagacgacagatagaggcactcgaaactgacaagtcccagatcgaagccgaagctaacaaccaacgaaaccttgcagtaaaactggagtccgatctcaagagcttgtcagaagcttacaacagcatagagcaggccaactaccgcctggatgccgaggtaaaaaccttgcggcagggaggcagtgtgccgtatcctgacgtggaggcaataaaggcgcaagccaaggaagaggctgagaaggacagtgaggcggagctgaacgatctgcttgtctgcctcggtcaggaacaaactaaggttgagaagctgagcacaaggctggcagagctcggcgaagatgtggatgcccttctgcaaggtattggtgacgacactgccattccggacgatgatgacgacgacgatgaagatagtgaagagtgatatgtttatgtaaccctgtaggtctgttggtgcacacaacctcacgttgggtcatgatattgtaatggcaattggcattgtacagtggataatgtgtagacaaaggcaccgttccaatttaaaaaaaaaa

SEQ ID NO: 8037 - DNA, 2302 bp, Zea Mays
agtaaacagcaggagagagaagctacggttgacaagcttgctgaatcatcctcatccccgggccgaagccgaagaggacgaaaaggcagcctgctgccgccgccgccgctgttgcagttgcagatcacacacactaccctttccgcgacccttctttctgcatccatccaccctccccctttgtcctgtctctctccctcccacgcacacagacacatcacacagctggagagcaggtgcttctctcacacacacctcggcccacgccgccgttgccagccaagagcagtcgcggggcagcgctgaatcctgattaggtgaaaaagagggtggcgaccatcgttttcgctgctgattctggctgcggctcatctgccccagtgctgtgctcctgcaccgtaccgcaaacccagcccaagactgcaagaggtggcataggctcatgtcctgcccagcggttcgcttcaaatttctgagctgaacgcagctggagagaccgcgcagtcctgaatatgtttggtttctcgcggcgccgggtgaaacttggaaggtcgaagggtgacccaagtgatcctttgaacagctccaggagttctgttggtcccagtaaacacctcagtctgcccaatgggaatgacgcgactatgacgtcagtaagtggccacgcagatgatctttcctaccgttgctcgtccgatacgtttgatccccaaggacgcactttcgatatttcagaaaattggactgtgctgtccacagagggagacaaacctattcctcgtttctatcatgcagcagccattgtaagtagcaagatggtagtgtttggtggtgattctggtaatcgcttattagatgacacaaagatattgaatctagagaagcttacttgggattctgcgcctcctaaagtttgcccatcaccaaacggatgttcgatgaagttgccagcctgcaaaggtcattgcctgttagattgctgcttgtcctttggatgttttggtatgaatttcacatactcgatcaatgttttcttacttgaagccggttatgttatgctattgtggaaaattgtatgctggacactatgtttaacctatttgcactttgacatcatccaaaactcaaagtattataagtcaatgatctatcattcaaagaaggcaatgattgttcatgatgatggcctttttgtatgcactgctttactcctggaaaaatatttatacatgtgtgatgtacaggttccttggggaaatagtgtcatccttgtcggaggtaaaactgagcctgcttctgatcatttatcagtatggactttcaatacagaaacagagctttggtcacttattgaagccaagggtgatatccctctcgaagcggacacacggtgattagagctggtgctacattgatactttttggcggtgaggacacaaaaggaaagaaacggcatgaccttcacatgtttgatctgaagtcatcaacatggcttccattgaactataaaggcactggaccttctccaagatccaatcatattgctacactgtatgatgatagggtccttttaatttttggaggccactcaaaatctaagacacttaatgacttgtattctttggatttcgatacaatggtttggtcaagagtgaagacccatggtcctcacccatcacctcgagctggttgcagcggaactctctgtggaactaagtggtacatagctggcggcgcaagcaagaaaaaacgacatgctgaaacttgggtttttgatgttctacaatgtaaatggtctgtttgtgtagtgccccctagttcatcgattactacaaaaaaaggttttagcatggttcctttctaccacaaggacaagattgctcttattgcatttggaggaaacaaaaaagagccatgcaacaaggttgaagtgttccatctcaagcagaggctgcagatactggagggaagatcaggaacacccaacaaacaaccgctataggctatagtggtcacatttctacatttctgcacatcgatcgttgcaagtttgcaaccccccaccccccaatgtaaatgattgtgtggcgagctttatggtaccatgttagtacatgcgctgatgttgatctgtaatttgcagggtatggtaaaactataaatagctgacggattgaaccatgctaatatgtgtagatattgatctgtaatttgcagggacatggtaaaaaaataaaaatgtgcaagctctacctgaatgtgtcaaacgtatactgcatggttatacttcctttgtttcaat

SEQ ID NO: 8038 - DNA, 2714 bp, Zea Mays
cccgggccgaagccgaagaggacgaaaaggcagcctgctgccgccgccgccgctgttgcagttgcagatcacacacactaccctttccgcgacccttctttctgcatccatccaccctccccctttgtcctgtctctctccctcccacgcacacagacacatcacacagctggagagcaggtgcttctctcacacacacctcggcccacgccgccgttgccagccaagagcagtcgcggggcagcgctgaatcctgattaggtgaaaaagagggtggcgaccatcgttttcgctgctgattctggctgcggctcatctgccccagtgctgtgctcctgcaccgtaccgcaaacccagcccaagactgcaagaggtggcataggctcatgtcctgcccagcggttcgcttcaaatttctgagctgaacgcagctggagagaccgcgcagtcctgaatatgtttggtttctcgcggcgccgggtgaaacttggaaggtcgaagggtgacccaagtgatcctttgaacagctccaggagttctgttggtcccagtaaacacctcagtctgcccaatgggaatgacgcgactatgacgtcagtaagtggccacgcagatgatctttcctaccgttgctcgtccgatacgtttgatccccaaggacgcactttcgatatttcagaaaattggactgtgctgtccacagagggagacaaacctattcctcgtttctatcatgcagcagccattgtaagtagcaagatggtagtgtttggtggtgattctggtaatcgcttattagatgacacaaagatattgaatctagagaagcttacttgggattctgcgcctcctaaagtttgcccatcaccaaacggatgttcgatgaagttgccagcctgcaaaggttccttggggaaatagtgtcatccttgtcggaggtaaaactgagcctgcttctgatcatttatcagtatggactttcaatacagaaacagagctttggtcacttattgaagccaagggtgatatccctctcgaagcggacacacggtgattagagctggtgctacattgatactttttggcggtgaggacacaaaaggaaagaaacggcatgaccttcacatgtttgatctgaagtcatcaacatggcttccattgaactataaaggcactggaccttctccaagatccaatcatattgctacactgtatgatgatagggtccttttaatttttggaggccactcaaaatctaagacacttaatgacttgtattctttggatttcgatacaatggtttggtcaagagtgaagacccatggtcctcacccatcacctcgagctggttgcagcggaactctctgtggaactaagtggtacatagctggcggcgcaagcaagaaaaaacgacatgctgaaacttgggtttttgatgttctacaatgtaaatggtctgtttgtgtagtgccccctagttcatcgattactacaaaaaaaggttttagcatggttcctttctaccacaaggacaagattgctcttattgcatttggaggaaacaaaaaagagccatgcaacaaggttgaagtattagtggtactgcaaaatgagcattcttttagttggcgctcagccccagaagtggacaccatggtgtatgagtattctccaagcaataaggagcttgctgatcatctccacaaatgtgcccccttgtactctaatagttccatcgcaagttggatcacgcagaagagtgcagcctaggtcagaaactgcagaaaccaatcgatgatgacagatatgatgacgtagatgactcttcttcatgccaagatagcactccaaaagggccctacagcaaaaggacagggcctggttttcagaatggcgcggaaaacatggtgactggaggatcaaaagtgagaaggatagctagatgctcttcagatgttggccagagccacttgtacaacacaaaaatagcagacttgatcagaagaaacaccacgctcgaagaccagcttgcgaccgcactggcaagcaaagatcagctagacaagagcttagcatcggtcattcacagcagaggacagctggagaagatgcttgccaacaaagataaggaggctgagatgctgaaagagaagatagcatgcttagagctggcgcaagaagagtcgaacagcctctcgaacacagtgcacgctgataatgtgcgcctggagcgtgaagtggcgttcctgaaggccgtcacaggcgaaacccagaaggagctgcattccactcgtagagttttagcaggggaacagtcgcgcgcgttccagctccaggttgaagtgttccatctcaagcagaggctgcagatactggagggaagatcaggaacacccaacaaacaaccgctataggctatagtggtcacatttctacatttctgcacatcgatcgttgcaagtttgcaaccccccaccccccaatgtaaatgattgtgtggcgagctttatggtaccatgttagtacatgcgctgatgttgatctgtaatttgcagggtatggtaaaactataaatagctgacggattgaaccatgctaatatgtgtagatattgatctgtaatttgcagggacatggtaaaaaaataaaaatgtgcaagctctacctgaatgtgtcaaacgtatactgcatggttatacttcctttgtttcaat

SEQ ID NO: 8039 - DNA, 2818 bp, Zea Mays
cccgggccgaagccgaagaggacgaaaaggcagcctgctgccgccgccgccgctgttgcagttgcagatcacacacactaccctttccgcgacccttctttctgcatccatccaccctccccctttgtcctgtctctctccctcccacgcacacagacacatcacacagctggagagcaggtgcttctctcacacacacctcggcccacgccgccgttgccagccaagagcagtcgcggggcagcgctgaatcctgattaggtgaaaaagagggtggcgaccatcgttttcgctgctgattctggctgcggctcatctgccccagtgctgtgctcctgcaccgtaccgcaaacccagcccaagactgcaagaggtggcataggctcatgtcctgcccagcggttcgcttcaaatttctgagctgaacgcagctggagagaccgcgcagtcctgaatatgtttggtttctcgcggcgccgggtgaaacttggaaggtcgaagggtgacccaagtgatcctttgaacagctccaggagttctgttggtcccagtaaacacctcagtctgcccaatgggaatgacgcgactatgacgtcagtaagtggccacgcagatgatctttcctaccgttgctcgtccgatacgtttgatccccaaggacgcactttcgatatttcagaaaattggactgtgctgtccacagagggagacaaacctattcctcgtttctatcatgcagcagccattgtaagtagcaagatggtagtgtttggtggtgattctggtaatcgcttattagatgacacaaagatattgaatctagagaagcttacttgggattctgcgcctcctaaagtttgcccatcaccaaacggatgttcgatgaagttgccagcctgcaaaggttccttggggaaatagtgtcatccttgtcggaggtaaaactgagcctgcttctgatcatttatcagtatggactttcaatacagaaacagagctttggtcacttattgaagccaagggtgatatccctgcagctcgaagcggacacacggtgattagagctggtgctacattgatactttttggcggtgaggacacaaaaggaaagaaacggcatgaccttcacatgtttgatctgaagtcatcaacatggcttccattgaactataaaggcactggaccttctccaagatccaatcatattgctacactgtatgatgatagggtccttttaatttttggaggccactcaaaatctaagacacttaatgacttgtattctttggatttcgatacaatggtttggtcaagagtgaagacccatggtcctcacccatcacctcgagctggttgcagcggaactctctgtggaactaagtggtacatagctggcggcgcaagcaagaaaaaacgacatgctgaaacttgggtttttgatgttctacaatgtaaatggtctgtttgtgtagtgccccctagttcatcgattactacaaaaaaaggttttagcatggttcctttctaccacaaggacaagattgctcttattgcatttggaggaaacaaaaaagagccatgcaacaaggttgaagtattagtggtactgcaaaatgagcattcttttagttggcgctcagccccagaagtggacaccatggtgtatgagtattctccaagcaataaggagcttgctgatcatctccacaaatgtgcccccttgtactctaatagttccatcgcaaggcatagtctcacttctgtgatagaacaccctcctagaagggaacccctctctgagtcattgttgaagcagtccagtttgggcacttcactccatacgcagttggatcacgcagaagagtgcagcctaggtcagaaactgcagaaaccaatcgatgatgacagatatgatgacgtagatgactcttcttcatgccaagatagcactccaaaagggccctacagcaaaaggacagggcctggttttcagaatggcgcggaaaacatggtgactggaggatcaaaagtgagaaggatagctagatgctcttcagatgttggccagagccacttgtacaacacaaaaatagcagacttgatcagaagaaacaccacgctcgaagaccagcttgcgaccgcactggcaagcaaagatcagctagacaagagcttagcatcggtcattcacagcagaggacagctggagaagatgcttgccaacaaagataaggaggctgagatgctgaaagagaagatagcatgcttagagctggcgcaagaagagtcgaacagcctctcgaacacagtgcacgctgataatgtgcgcctggagcgtgaagtggcgttcctgaaggccgtcacaggcgaaacccagaaggagctgcattccactcgtagagttttagcaggggaacagtcgcgcgcgttccagctccaggttgaagtgttccatctcaagcagaggctgcagatactggagggaagatcaggaacacccaacaaacaaccgctataggctatagtggtcacatttctacatttctgcacatcgatcgttgcaagtttgcaaccccccaccccccaatgtaaatgattgtgtggcgagctttatggtaccatgttagtacatgcgctgatgttgatctgtaatttgcagggtatggtaaaactataaatagctgacggattgaaccatgctaatatgtgtagatattgatctgtaatttgcagggacatggtaaaaaaataaaaatgtgcaagctctacctgaatgtgtcaaacgtatactgcatggttatacttcctttgtttcaat

SEQ ID NO: 8040 - DNA, 1614 bp, Zea Mays
gcaacagcaatgcagttggcagagcgcggggagcaaaaaccccaccgccagccactataaaaccccctcctccctcccctgcaccgccagtccactccaccaccgttcatgcatgaccatggagagatctcaaccgcagcaccagcagtctcctccgtcgccgtcgtcctcctcgtcctgcgtctccgcggacaccgtcctcgtccctccgggaaagaggcggcggagggcggcgacagccaaggccaataagagggcccgcaaggacccctctgatcctcctcccgccgccgggaagaggagctccgtatacagaggagtcaccaggcacaggtggacgggcaggttcgaggcgcatctctgggacaagcactgcctcgccgcgctccacaacaagaagaaaggcaggcaagtctatctgggggcgtacgacggcgaggaggcagcggctcgtgcctatgaccttgcagctctcaagtactggggtcctgaggctctgctcaacttccctgtggaggattactccagcgagatgccggagatggaggcagcgtcccgggaggagtacctggcctccctccgccgcaggagcagcggcttctccaggggggtctccaagtacagaggcgtcgccagacactcaagaagaggcagccaaggcctatgatcttgcggccatcgaataccgaggtgccaatgctgtaaccaacttcgacatcagctgctacctggaccacccactgttcctggcgcagctccagcaggagcagccacaggtggtgccagcgctcgaccaagaacctcaggctgatcagagagaacctgaaaccacagcccaagagcctgtgtcaagccaagccaagacaccggcggatgacaatgcagagcctgatgacatcgcggagcccctcatcacggtcgacaacagcgtcgaggagagcttatggagtccttgcatggattatgagctagacaccatgtcgagatctaactttggcagctcgatcaacctgagcgagtggttcactgacgcagacttcgacagcgacttgggatgcctgttcgacgggcgctctgcagttgatggaggaagcaagggtggcgtaggtgtggcggatttcagtttgtttgaagcaggtgatggtcagctgaaggatgttctttcggatatggaagaggggatacaacctccaacgataatcagtgtgtgcaattgattctgagacctatgcgtggcgtgcgacaagtgtcctgtctttgggtatacttggtttgtccaatgccacggtgccactgctgcgagtcagctgaacttcttgtagaaagcacatggcagcttggcattagacaagtgtgttggtgttccttaattctttggatatgctttaggcattgactaaccttaagggttcgtcactgtctcgcttagcttagattagactaatcacatccttgaatctgaagtagttgtgcagtatcacagtttcacatggcaattctgccaatgcagcatagatttgttcgtttgaacagctgtaactgtaaccctatagctccagattaaggaacagtttgtttttcatccatacatataacacgctttcagaagcagac

SEQ ID NO: 8041 - DNA, 1723 bp, Zea Mays
gtctctccccccgtcgagcacacaacacaccctcctcgtcctccaatccaatcaacctggtagactcgcttcgcttctcccccagccgtcggacggagctcctcgcagtcgcagcagccgccgatcagcctgcgctcgggctcagcgctggaagattaagcgtgaaatttgtatcatgaaattagtaaggcaccctaatgttgttcgactgtttgaggtgatgggaagtaaagcaagaattttcatcgttctggaatatgttaccggcggagagcttttcgaaatcattgctactaatggaaggttgaaggaagacgaagcacgtaaatacttccagcaactgattaatgctgttgattactgccacagtaggggagtgtatcacagagacttgaagctcgagaatttgctgcttgatgctgcaggaaatctcaaagtttctgactttggtttaagtgctttaaccgagcaagtgaaggctgatggtctgcttcatacaacatgtggaacccccaattatgttgcccctgaggtgatcgaggatggaggctatgatggtgcaactgcagatatttggtcttgcggagtaatcctctttgttcttcttgctggatatttacctttcgaggatgacaacatcatcgccctatacaagaagatttcagaagctcagtttagctgcccctcttggttttcagctggggccaagaacatgattaccagaattcttgatcccaatcctacaactatactggagcatccttggttcaaaaaggggtacaagcctcctgtttttgacgagaaatatcaaactagcttggatgacgtggatgctgcttttggagattcagaagaccggcatgtgaaagaggaaactgaagatcagccaacctcaatgaatgcattcgaactgatttctctaaaccaggcactgaatctggagaatttgtttgaagcaaaggaggagtataaaagagagacaagattcacctcacagtgccccccgaaagagataatcacaaagatcgaagaagctgcaaagccgcttggctttgatgttcagaagaaaaaatacaagatgcggatggagaacccgaaagcaggtagaaagggcaatctgaatgttgcaactgaggttttccaaatagccccatccctgcatgtagtcgagctcaagaaggcgaagggggacactctggagttccaaaagttctacagaagcctgtcgacccagctgaaggatgttgtgtggaagtgcgacggcgaggtggacggcaacagcgcggcagcatgaaagtgccctttgaactttccactggacggcgccggttttcctttgtacatagcttctctttcggatgatcccgtgtccattgcagagtcggttttgcaagcaagttctttggtttatttgtagtaagcccggtgaaacaaccgccctggaggctgttgtggatgagcttactggcgtgtttagttcgtttcatggtcgggaggttggatggaatggaaaccacaatcaaggctgtagtagtgtgtgtagtaacgaagtagatacatgcatcagatggtgtaagggagtaccagctgttagttcatggtttcaagcttagccccccttcaatttgttcgatgatgtattacttcacaataaacattattacttagatgtatgaggtgagcacacttggtcttttgtcctctttgtgctattttgcgtgat

SEQ ID NO: 8042 - DNA, 1335 bp, Zea Mays
acggcctccaggtacgggctcaggtagctctactacccgctccccgagggccgcgtcttcttccgccgatccaccggccgcctctgcgacggacgcctcgtcatcgactacctctgtgagagcctgaacatgagctacctgagcccgtacctggaggccgtgggctccgacttcacgggcggcgccaacttcgccatctccggctcctccacgctgccccgcaacgtccccttcgcgctccacgtccaggtccagcagttcctgcacctgaagcagcgctcgctcgacctcgccgcccacggcgggacggctcccgtcgacgccgacggcttccggaacgcgctctacctcatcgacatcggccagaacgacctgtccgccgcattcgggagcggagcgccctacgacgacgtcgtccaccacaggatcccggctatcgtgtcagagataaaggacgctatcatgactctctactacaacggcgccaagaacttctgggtccacggcaccggccctctgggctgcttgccccagaagctcgccgcgccgaggcccgacgacagcgacctcgactacaacggctgcctcaagaccctcaacgacggcgcctacgagttcaacggtcagctgtgcgccgcctgcgacggcctcaggtcgcagctgcgcggcgccaccatcgtctacaccgacgtcttgctcgtcaagtacgacctcatcgccaaccacaccgcctacgggttcgaggagccgctcatggcgtgctgcggctacggcgggccgccctacaactacaacgccaacgtgagctgcctcggcccgggcttccgggtgtgcgaggacggcaccaagttcgtcagctgggacggcgtgcactacaccgacgccgcaaacgcccttgttgccgcgaagatcttctccggccaattctccacgccccaaatgcccttcgactacttctgccaggcatgaccatcgtacgagtacgacccagcatagctagctgagcgattcagctgttgcgagagagaatccattcgtgtaactaagaaatgtaacaagcaccgcagatcatatcatgctgaataattcgcgattgacctatttgtcacgcacgctacctgtgagactcaagcgctaacgctagctgggctttagatgaagtgctatggcctgttaagggtttgtttgcttggtggcctgttaagggtttgtcatagctttctatataagcagttgtttggttcgcggcaagggccccgattaccctgaatttggtccagaaacataatactcctcgacgtttcgacccaaagaaataaatctatgcaacttgaa

SEQ ID NO: 8043 - DNA, 1937 bp, Zea Mays
cttataatatattaatctgggaccaacgtaaagtttttgggactcgtattggaagtatgaaaaatagcattcttggtgacaaccctcctatattggataacaatgtgaatagtttaaatcctagctctaatcccacttcaaattccaaagctgcacggaaggattctggtacagtagtaaaaaaactcactgttggcgggatgcctgaaaagattgtgtctgcataccaatcagtgtttgatcaacattttgatgaagacacagctctaaacaaatgtaagagtactgtgggccttttggagagaataaataaagatattaacgatgctagcatcaacggtaatcagccagcatcatcattgatctctgaccttcaagagcaggaaatgaccttaaaacagtgcatcgaacaacttgaaagtgcaggtagggtgaggatatccctgatcaatcaattgaaagaagctctcagcgaacaggagtcgaagtcaataattctccgtgatcaattgcaagtcgctcgagcagaggctgaacatgccattcaacttagacaacaactgggtcgtgttcttgtcacgaacgatacacaatctacttctagtccgctcatgattactccaccagatcaaacagcagctatgatgcacggttcgggagtaagatcgacacctccccattcacaaccactgaaccctgcagtgtcacttccccctacagtcagtgcagtgggtgatgagtccaagagaacggcagcagctatggcagataagcttgcatctttgtcagctcctgtgcaggtgctgacctccattctctcatcttttgccgctgagcaagctgcttccataaacggcggatcaccttctggagaactctctggagtaccaccaggtttccatattgataagaggcctaggctggagaaaacagggcaggccgaggcgggcgctcctcccttttttgggcaagcgtcacaggtgcaacaacaggttggagcagtgcctacttcttttggaggcacacatccaccaactccaggcccattcccaccccctccaccgccattgccacctctattgccaccgctcatgcaacagtttggtcaaaatactggaggaatgatgggaatgcgaggacctttcgggatgatggctggctctatgccacctccgcctccattgtccaacattctgccggcaggttttccgggactaagtggaccacctcctccacctccacttccaccagctcagagccagccccagcagcagcagacctctcaggcgccacagcaatcaccaacatcagctggattctttcaatcatcaggcatggggttctttcctcctgtgcaggtgcagcaatctcagcctgcccaacgacagtgattcaactgtgtctatttgcactcatgggcttaaaggcagcaccttgcattaactttgtgcattaaacaatatctcaccgagtattgagcctaaacgttggctggtcctgcaagcgaggcacggccaatgacgacggattagaaagattgtagaataggcatgcacgttgtagaactatccccttttttgtccgagtagttttaactcttcctggttatgtgaagttgctagacttcgtttgtttttgatccagtctgcattgatcacccgaagcaaaagaaaacgactttggaaaactggggctgaaattgggacttcgccaactgacaggacagttttatggctgaaacagttgtagaacttactggtcttagtctcatagatatgatgtgaactgcatatttggcatgctgtttaaatctgtggattattattatcatcataccaccttttctgggtttgaaactgcagaattctttcacctggttcttacacaagggctagtttggacaaggaatcgtgatctggaaaagttgaaatgcatca

SEQ ID NO: 8044 - DNA, 2141 bp, Zea Mays
ccaaaaccagcagcacgccgacacgccgccgcgccgcgccgccattctcccatccgcccccgtgcccccgccgcccttccctaacctcgccgcggaagacgtcgcgccgtgcgtagctagcagttccccgtcgcacgcgcgtcggataagaattggttttggctcttcgtctccccccatccttgggtccttcccctcccactccctcttcgcctcgtccgcggcagtaggctcaagcttaggaactcgctaccgagaattagttggaggcttcgtgatggcgggcgcgaaggcggatgtagacgcagaaacaggagatggcagcggggtcggcagtggcggcggcggcctctttagcgagcagatgctgattgataagctcaacaggctcaacaactcagccactagcattgagaattgtgtctgcataccaatcagtgtttgatcaacattttgatgaagacacagctctaaacaaatgtaagagtactgtgggccttttggagagaataaataaagatattaacgatgctagcatcaacggtaatcagccagcatcatcattgatctctgaccttcaagagcaggaaatgaccttaaaacagtgcatcgaacaacttgaaagtgcaggtagggtgaggatatccctgatcaatcaattgaaagaagctctcagcgaacaggagtcgaagtcaataattctccgtgatcaattgcaagtcgctcgagcagaggctgaacatgccattcaacttagacaacaactgggtcgtgttcttgtcacgaacgatacacaatctacttctagtccgctcatgattactccaccagatcaaacagcagctatgatgcacggttcgggagtaagatcgacacctccccattcacaaccactgaaccctgcagtgtcacttccccctacagtcagtgcagtgggtgatgagtccaagagaacggcagcagctatggcagataagcttgcatctttgtcagctcctgtgcaggtgctgacctccattctctcatcttttgccgctgagcaagctgcttccataaacggcggatcaccttctggagaactctctggagtaccaccaggtttccatattgataagaggcctaggctggagaaaacagggcaggccgaggcgggcgctcctcccttttttgggcaagcgtcacaggtgcaacaacaggttggagcagtgcctacttcttttggaggcacacatccaccaactccaggcccattcccaccccctccaccgccattgccacctctattgccaccgctcatgcaacagtttggtcaaaatactggaggaatgatgggaatgcgaggacctttcgggatgatggctggctctatgccacctccgcctccattgtccaacattctgccggcaggttttccgggactaagtggaccacctcctccacctccacttccaccagctcagagccagccccagcagcagcagacctctcaggcgccacagcaatcaccaacatcagctggattctttcaatcatcaggcatggggttctttcctcctgtgcaggtgcagcaatctcagcctgcccaacgacagtgattcaactgtgtctatttgcactcatgggcttaaaggcagcaccttgcattaactttgtgcattaaacaatatctcaccgagtattgagcctaaacgttggctggtcctgcaagcgaggcacggccaatgacgacggattagaaagattgtagaataggcatgcacgttgtagaactatccccttttttgtccgagtagttttaactcttcctggttatgtgaagttgctagacttcgtttgtttttgatccagtctgcattgatcacccgaagcaaaagaaaacgactttggaaaactggggctgaaattgggacttcgccaactgacaggacagttttatggctgaaacagttgtagaacttactggtcttagtctcatagatatgatgtgaactgcatatttggcatgctgtttaaatctgtggattattattatcatcataccaccttttctgggtttgaaactgcagaattctttcacctggttcttacacaagggctagtttggacaaggaatcgtgatctggaaaagttgaaatgcatca

SEQ ID NO: 8045 - DNA, 4055 bp, Zea Mays
gtgcacggttctgccatcgtctcctctccgcgacgcacgcctccctctcctccgccccaccctcctccccacgccatcggcaccgccatcatcagatccggcccaagacgcctctgccccacgcgcccgagtcgtcgaggcacactcctgcccgcctccggcgtccacgcacatctccgcctcacctcggcgcccgagtcgtcgcacgcgttcgaggtggcgtccatcccggcaccggcctcacgcaccatctacagctcccaactctgctcctctcagttctccctctgcattccaccttctctcccttcctctccaagcaccgtcctcctcgcctagatccgtacaagctgcaaataacctctccggtggcaagacagatggagtcgatctccggcgaggatgctccgaagcacaacctgatcctgtccgcgctcgtctccaacctacagtgcatgctcgccgcccgccgcccgttcacggcagaggtcagcaccgccgccacagctagcgaggctgaggccttggctcaggaagcagaggcgtccgatgcccccacgggagatgggacgctggcgaggcccatcgtgctgctgacctgtgccggaggggaaccggtcggcgggtctcgcggcgctcgtcgacgccctcgttgccgccggccgctgcgatgtccacgtgtgtgcccccgaatcgtacatgctgtgacttagaaaaccaaaccacagcgggaccggtgctcggatagggtccaacggcgatgcaagcaaggagtggcatgcggccggaggggcgcagatcggctcctgcacgtgcagcgcagccgcgtgacagtgaagcagggaggccgcgataggcggcacagggagggtgcgacggaggcaaagtgcaagcacctggggacttcaggtaagtagaaaaccaacactgaatttgtcggttctctgttttgtgattgaccgattggtttgttgatctcagaaacaaaaaattgtttcaccgtcaagcaccaatttttaggtaggtcagtgttttgggatgattctccgatgcatcaatagcaaccttgtgcttggcaaagttatttgccctgataatgttgtaggtttagtgaaaagaaatatactgacatatccatcgatccatcgatgcccaatggagattgacctctatcaagatttagttacgtgtctcaatagggcaatatttctgtgagttgtatactgtggattcctcatctgcatcatgaattgatcgcactatttatgccctatttttcaaaccatggtttctgtaattctttgcaccatggtatttttctcaaatgattttatctttcacaacccggactgaagtcactgaagcagaaagaaagagtacaagtctactactgcagaaagcaaggaggatgccaacagaagcagatttcatgtttggatcggggatatttatacagttggctatgtatacggtctgcccaagcgcccaacaatgaatgatgtggtgaaggaacttgagatcatcagatagaatgaaggggcacaattgctaaactcaacgtctttatcagttgaacaatttggaaaaaaagagaagagatccttatgcatttgcctatggatgatggaagcaacaacaacacttttgactacaacagtgggagttcaattaagttgttcacccaagtagatagttgtctccactctttcaacaagttattggagtgattatatatgtctgctccatatgaatgccttttcgttttagtatcacatctgaaattaccaaccttttagatcggtctgcctaggcgcccaacaatgaatgaagtggtgaaggaacttgagatcatcagatagaatgaaggggcacaattgttaaactcagcgtctttattagttgaacaatttggaaacaaaaagagaagagatccttatgcatttgcctatggatgatggaagcaacaacaacacttttgactacaacagtgggagttcaattaagttgttcacccaagtagataattgtctccactctttcaacaagttattggagtgattatatatgtctgctccatatgaatgccttttcattttagtatcacatctgaaattaccaaccttttagatcggataaaatcttaagcaaaatgggagaaggtttgggttttctgcaatctgtcgtctcctcttctgctgggtatctccgttattattctaatgaagagggctatgagttggattttcgtaggtacatttgagcgtgttttggaatgctgggaccgtgaaacacatgaatatgttgccataaaagttgttcgcagtatccacaagtactctgatgctacaatgattgagatagatgtgctcaatcgccttgtagaaaatgaaaaatatagatctctgtgagtatctcagagacctaattgcttaaagtataaccctattctatttttgacttgacagttcctcttcaatttgtcagctgtgctcaaatttagagatggcttgactatcgtaatcatatatgcatggatgcgttactttatgtttgcttgtatttaatatagaaggctcccttgccttcgttcgatcatgtggtatttgaaagtgatgtctctataaatgaagtaaggtagggcaatgcttatgttactgttgtcagttattagctttttaaaccatgcatctgtcaatgtgtcctgtttcaatagggtcttattataggacgtgatggcactgaattaggatgtttgttcttttgctacctttgttaaacaacatcagatcattcgtattgtatccttcctcggattgcttcttttgttctactacaaatatgcccaacatggcagggagaggtctcgaggtcaagcctggacccactgtcaagtgtgtgcttggacatgactttatcctgcactttccactgctgcacttggggaatcaaagaaaagtgaaagtaccatgtcaaagttgatgaccagaagcttgctattggaaccctctctattgaaaaatacccctagatagaaattgatttggttttcaataaagagtgtgagttgtcacacacatagaaaactacctgtgtatttttctttggttacaaggttgagcaaccaatcgaggaagatgaatatcctttttaacattgatttttttagttttatttcatgtaagactgatctaaacaatttctttgtggagtattttgtttccttgatctcatttttgcttcttgcctcttacataatggatcttgattctgaagatgaagagaaggagctaaacattccagtaatcaaggaaaatggtatatatatcttctcttttgttctttgtgggttttttctagcattgttggggttgaattatggattgtttggatcatgaacatatctaattaggcaaaggtgatgggaaggcagttgctgcagcttcaaaatcaagtcttgggcttgaaaaaaagcaaggatgagtatgagtctgatgattctgatgagggagaaggtgaaaccggagaatgaggagatgtggttgttcatggacgacagcatcaagaaacctgcaacatgcaacctgattttaagaaatctgccacctgcaacatgactgggcagtggtatctctgagatataatgtggacaacggcaaagaatactatgcatacacaacaaaagagtcctacaacctgattttaagtccatttgtagcaaaccatcttggaagccattaactcgttgaatttgaagctgatgtgcagttttatttttatgtcagttttactgatgcagttagttcctaagaagatccatggcaacttgtttcacgctgatgcttgagaagttgagagggatggaaatgacactcacaataaaaatttgattttctttcttgtgatcgtcgatcacaataaacacagtggcacaatataccgtgtaattgtcctttcctggtagaacatgaaatgttgaacttcctcttgtgatatataaagcctatgtatcctacataatatttaacatcttacggaaatttatttgtgctgtccca

SEQ ID NO: 8046 - DNA, 4550 bp, Zea Mays
cgtatggtgcacggttctgccatcgtctcctctccgcgacgcacgcctccctctcctccgccccaccctcctccccacgccatcggcaccgccatcatcagatccggcccaagacgcctctgccccacgcgcccgagtcgtcgaggcacactcctgcccgcctccggcgtccacgcacatctccgcctcacctcggcgcccgagtcgtcgcacgcgttcgaggtggcgtccatcccggcaccggcctcacgcaccatctacagctcccaactctgctcctctcagttctccctctgcattccaccttctctcccttcctctccaagcaccgtcctcctcgcctagatccgtacaagctgcaaataacctctccggtggcaagacagatggagtcgatctccggcgaggatgctccgaagcacaacctgatcctgtccgcgctcgtctccaacctacagtgcatgctcgccgcccgccgcccgttcacggcagaggtcagcaccgccgccacagctagcgaggctgaggccttggctcaggaagcagaggcgtccgatgcccccacgggagatgggacgctggcgaggcccatcgtgctgctgacctgtgccggaggggaaccggtcggcgggtctcgcggcgctcgtcgacgccctcgttgccgccggccgctgcgatgtccacgtgtgtgcccccgaatcgtacatgctgtgacttagaaaaccaaaccacagcgggaccggtgctcggatagggtccaacggcgatgcaagcaaggagtggcatgcggccggaggggcgcagatcggctcctgcacgtgcagcgcagccgcgtgacagtgaagcagggaggccgcgataggcggcacagggagggtgcgacggaggcaaagtgcaagcacctggggacttcagaaagaaagagtacaagtctactactgcagaaagcaaggaggatgccaacagaagcagatttcatgtttggatcggggatatttatacagttggctatgtatacggtctgcccaagcgcccaacaatgaatgatgtggtgaaggaacttgagatcatcagatagaatgaaggggcacaattgctaaactcaacgtctttatcagttgaacaatttggaaaaaaagagaagagatccttatgcatttgcctatggatgatggaagcaacaacaacacttttgactacaacagtgggagttcaattaagttgttcacccaagtagatagttgtctccactctttcaacaagttattggagtgattatatatgtctgctccatatgaatgccttttcgttttagtatcacatctgaaattaccaaccttttagatcgggtattgacatctttgtgttctcctcaactcattatttagctacatatcttattaaatcttaatctttggtcattagctaccagcttgcactattattgtgaaaatccattaactttagtaagtgaaatggttagactatcaccacgtaggtgatattagtggcgttaagtgattaatcagtggcaaatcctattatcaactattttcttggctaatcattacaatatataatgaagaataccatggcttgcagtgatatttatacagttggctatgtatacagtctgcctaggcgcccaacaatgaatgaagtggtgaaggaacttgagatcatcagatagaatgaaggggcacaattgttaaactcagcgtctttattagttgaacaatttggaaacaaaaagagaagagatccttatgcatttgcctatggatgatggaagcaacaacaacacttttgactacaacagtgggagttcaattaagttgttcacccaagtagataattgtctccactctttcaacaagttattggagtgattatatatgtctgctccatatgaatgccttttcattttagtatcacatctgaaattaccaaccttttagatcgggtattgacattttttgtgttctcctcaactcactatttagctacatatcttattaaatcttaatcttttgtcattagctaccatattgcactattattgtgaaaatccattaactttagtcagtgaaatggttagactatcaccacgtaggtgatattagtggaattaagtgattaatcagtggcaaatcctattatcaactattttcttggctaatcattacaatatataatgaagaatactatggcttgaagggatatttatacagttggctatgctgcttacatgatccatttagctgtctttggatttttggggtaactctccaatatctcacatgaggttctttgtgatagctgttacttaatctgtggtgatctatgtaaatgtggcaacacttgcagttcctcgagcccttgtgcatggatatatcgtttagttgtgtctaataatttgtaattagtggcaacatctttttgttattttggttttatctgctttttattgttataagatctcgattgcaaactggcagttagtacaccattaggttttcctttgtcgtatcaagctaataatgtgtgaagcagggttcccattctgatctttagttttttgtgattttaatagcaataaccttttttcgcaaaaaagtaacaaactttatgcagaatgcggtccgtatagttcccagtatccttttgtacttagatttagtttgatatatggttatgtttattgacagaatgctttttagctttgcagataaaatcttaagcaaaatgggagaaggtttgggttttctgcaatctgtcgtctcctcttctgctgggtatctccgttattattctaatgaagagggctatgagttggattttcgtaggtacatttgagcgtgttttggaatgctgggaccgtgaaacacatgaatatgttgccataaaagttgttcgcagtatccacaagtactctgatgctacaatgattgagatagatgtgctcaatcgccttgtagaaaatgaaaaatatagatctctgtgagtatctcagagacctaattgcttaaagtataaccctattctatttttgacttgacagttcctcttcaatttgtcagctgtgctcaaatttagagatggcttgactatcgtaatcatatatgcatggatgcgttactttatgtttgcttgtatttaatatagaaggctcccttgccttcgttcgatcatgtggtatttgaaagtgatgtctctataaatgaagtaaggtagggcaatgcttatgttactgttgtcagttattagctttttaaaccatgcatctgtcaatgtgtcctgtttcaatagggtcttattataggacgtgatggcactgaattaggatgtttgttcttttgctacctttgttaaacaacatcagatcattcgtattgtatccttcctcggattgcttcttttgttctactacaaatatgcccaacatggcagggagaggtatgctcctaaatttcttattttgtgcattgtgaaatgattgttctaacaacatcaagtttgtgttcttcatataatctatctcagattgctctgtgttttgcaggtctcgaggtcaagcctggacccactgtcaagtgtgtgcttggacatgactttatcctgcactttccactgctgcacttggggaatcaaagaaaagtgaaagtaccatgtcaaagttgatgaccagaagcttgctattggaaccctctctattgaaaaatacccctagatagaaattgatttggttttcaataaagagtgtgagttgtcacacacatagaaaactacctgtgtatttttctttggttacaaggttgagcaaccaatcgaggaagatgaataatggatcttgattctgaagatgaagagaaggagctaaacattccagtaatcaaggaaaatggcaaaggtgatgggaaggcagttgctgcagcttcaaaatcaagtcttgggcttgaaaaaaagcaaggatgagtatgagtctgatgattctgatgagggagaaggtgaaaccggagaatgaggagatgtggttgttcatggacgacagcatcaagaaacctgcaacatgcaacctgattttaagaaatctgccacctgcaacatgactgggcagtggtatctctgagatataatgtggacaacggcaaagaatactatgcatacacaacaaaagagtcctacaacctgattttaagtccatttgtagcaaaccatcttggaagccattaactcgttgaatttgaagctgatgtgcagttttatttttatgtcagttttactgatgcagttagttcctaagaagatccatggcaacttgtttcacgctgatgcttgagaagttgagagggatggaaatgacactcacaataaaaatttgattttctttcttgtgatcgtcgatcacaataaacacagtggcacaatataccgtgtaattgtcctttcctggtagaacatgaaatgttgaacttcctcttgtgatatataaagcctatgtatcctacataatatttaacatcttacggaaatttatttgtgctgtccca

SEQ ID NO: 8047 - DNA, 4661 bp, Zea Mays
ccgtatggtgcacggttctgccatcgtctcctctccgcgacgcacgcctccctctcctccgccccaccctcctccccacgccatcggcaccgccatcatcagatccggcccaagacgcctctgccccacgcgcccgagtcgtcgaggcacactcctgcccgcctccggcgtccacgcacatctccgcctcacctcggcgcccgagtcgtcgcacgcgttcgaggtggcgtccatcccggcaccggcctcacgcaccatctacagctcccaactctgctcctctcagttctccctctgcattccaccttctctcccttcctctccaagcaccgtcctcctcgcctagatccgtacaagctgcaaataacctctccggtggcaagacagatggagtcgatctccggcgaggatgctccgaagcacaacctgatcctgtccgcgctcgtctccaacctacagtgcatgctcgccgcccgccgcccgttcacggcagaggtcagcaccgccgccacagctagcgaggctgaggccttggctcaggaagcagaggcgtccgatgcccccacgggagatgggacgctggcgaggcccatcgtgctgctgacctgtgccggaggggaaccggtcggcgggtctcgcggcgctcgtcgacgccctcgttgccgccggccgctgcgatgtccacgtgtgtgcccccgaatcgtacatgctgtgacttagaaaaccaaaccacagcgggaccggtgctcggatagggtccaacggcgatgcaagcaaggagtggcatgcggccggaggggcgcagatcggctcctgcacgtgcagcgcagccgcgtgacagtgaagcagggaggccgcgataggcggcacagggagggtgcgacggaggcaaagtgcaagcacctggggacttcaggtaagtagaaaaccaacactgaatttgtcggttctctgttttgtgattgaccgattggtttgttgatctcagaaacaaaaaattgtttcaccgtcaagcaccaatttttaggtaggtcagtgttttgggatgattctccgatgcatcaatagcaaccttgtgcttggcaaagttatttgccctgataatgttgtaggtttagtgaaaagaaatatactgacatatccatcgatccatcgatgcccaatggagattgacctctatcaagatttagttacgtgtctcaatagggcaatatttctgtgagttgtatactgtggattcctcatctgcatcatgaattgatcgcactatttatgccctatttttcaaaccatggtttctgtaattctttgcaccatggtatttttctcaaatgattttatctttcacaacccggactgaagtcactgaagcagaaagaaagagtacaagtctactactgcagaaagcaaggaggatgccaacagaagcagatttcatgtttggatcggggatatttatacagttggctatgtatacggtctgcccaagcgcccaacaatgaatgatgtggtgaaggaacttgagatcatcagatagaatgaaggggcacaattgctaaactcaacgtctttatcagttgaacaatttggaaaaaaagagaagagatccttatgcatttgcctatggatgatggaagcaacaacaacacttttgactacaacagtgggagttcaattaagttgttcacccaagtagatagttgtctccactctttcaacaagttattggagtgattatatatgtctgctccatatgaatgccttttcgttttagtatcacatctgaaattaccaaccttttagatcggtctgcctaggcgcccaacaatgaatgaagtggtgaaggaacttgagatcatcagatagaatgaaggggcacaattgttaaactcagcgtctttattagttgaacaatttggaaacaaaaagagaagagatccttatgcatttgcctatggatgatggaagcaacaacaacacttttgactacaacagtgggagttcaattaagttgttcacccaagtagataattgtctccactctttcaacaagttattggagtgattatatatgtctgctccatatgaatgccttttcattttagtatcacatctgaaattaccaaccttttagatcggataaaatcttaagcaaaatgggagaaggtttgggttttctgcaatctgtcgtctcctcttctgctgggtatctccgttattattctaatgaagagggctatgagttggattttcgtaggtacatttgagcgtgttttggaatgctgggaccgtgaaacacatgaatatgttgccataaaagttgttcgcagtatccacaagtactctgatgctacaatgattgagatagatgtgctcaatcgccttgtagaaaatgaaaaatatagatctctgtgagtatctcagagacctaattgcttaaagtataaccctattctatttttgacttgacagttcctcttcaatttgtcagctgtgctcaaatttagagatggcttgactatcgtaatcatatatgcatggatgcgttactttatgtttgcttgtatttaatatagaaggctcccttgccttcgttcgatcatgtggtatttgaaagtgatgtctctataaatgaagtaaggtagggcaatgcttatgttactgttgtcagttattagctttttaaaccatgcatctgtcaatgtgtcctgtttcaatagggtcttattataggacgtgatggcactgaattaggatgtttgttcttttgctacctttgttaaacaacatcagatcattcgtattgtatccttcctcggattgcttcttttgttctactacaaatatgcccaacatggcagggagaggtctcgaggtcaagcctggacccactgtcaagtgtgtgcttggacatgactttatcctgcactttccactgctgcacttggggaatcaaagaaaagtgaaagtaccatgtcaaagttgatgaccagaagcttgctattggaaccctctctattgaaaaatacccctagatagaaattgatttggttttcaataaagagtgtgagttgtcacacacatagaaaactacctgtgtatttttctttggttacaaggttgagcaaccaatcgaggaagatgaatatcctttttaacattgatttttttagttttatttcatgtaagactgatctaaacaatttctttgtggagtattttgtttccttgatctcatttttgcttcttgcctcttacataatggatcttgattctgaagatgaagagaaggagctaaacattccagtaatcaaggaaaatggtatatatatcttctcttttgttctttgtgggttttttctagcattgttggggttgaattatggattgtttggatcatgaacatatctaattaggcaaaggtgatgggaaggcagttgctgcagcttcaaaatcaagtcttgggcttgaaaaaaagcaaggatgagtatgagtctgatgattctgatgagggtgagtgattatctcctgaagaaggaaatgttgtgatttgaagggtatggtgcagaaaagttttgtctgcatgtcatgacagtttcatacaacgcacgggcgaacgcactgggagcctaccacctcccgtgctcaccattgccgtgtttgatacctgactgctactgatgttacttcgaatctctggggtgctcatggagtcatggtgcatatgctcatgtttgcagggtgtcagtttttttcatcgtctacttctagagataacaactttagcatgttggttaaagattcttggtgtgctaagcttttcttttttgcttcatttgaaactcaactatatagatggtgccctactttacattttgcaaacacaaactgctccaaaataaatggaagcttatgtcttcatctctcgtgtgcttcatccgtgtgcttggaattttagccccttcttttgcttctaacatagatgcttttgtgttacatgtatttggttaccgaattaggaccatgttttctctttggatatttcagaactaatatccccaaaagattcccttatctaaacacttgagtaggggaagcaaccatgttgtgctgcgataagagcgtagctgatatgtgatttgtaatttgcatctttttaatgtcatgtaacagtaagaccccatatgtatgactcatagttttttgctttccctaagctaggttccaagtgaagacataccccacagacttatcaatatcgataaaaaggattagattagtataaatatatttacctatcactaaaaattgtatattgactttttagaaataatttgtgcgtattgataatgtttgctcggcatcagttcaaactatttggttcgacgtatttataatattattacatatttatatcgtcaatataatattagtactacgatgatattttctcacatggattttacatatcatattaatatttgttgtttcatatctattgttaattcatattatttttagacatgaatttggtacaatatagaagaaattggttggtgctttactgtatggagtatggttttctacaatatacttatgcatgtgactacaacatcgattgttgtcaactgtgcaaatatagaattgttcagacattcttg

SEQ ID NO: 8048 - DNA, 4820 bp, Zea Mays
gtgcacggttctgccatcgtctcctctccgcgacgcacgcctccctctcctccgccccaccctcctccccacgccatcggcaccgccatcatcagatccggcccaagacgcctctgccccacgcgcccgagtcgtcgaggcacactcctgcccgcctccggcgtccacgcacatctccgcctcacctcggcgcccgagtcgtcgcacgcgttcgaggtggcgtccatcccggcaccggcctcacgcaccatctacagctcccaactctgctcctctcagttctccctctgcattccaccttctctcccttcctctccaagcaccgtcctcctcgcctagatccgtacaagctgcaaataacctctccggtggcaagacagatggagtcgatctccggcgaggatgctccgaagcacaacctgatcctgtccgcgctcgtctccaacctacagtgcatgctcgccgcccgccgcccgttcacggcagaggtcagcaccgccgccacagctagcgaggctgaggccttggctcaggaagcagaggcgtccgatgcccccacgggagatgggacgctggcgaggcccatcgtgctgctgacctgtgccggaggggaaccggtcggcgggtctcgcggcgctcgtcgacgccctcgttgccgccggccgctgcgatgtccacgtgtgtgcccccgaatcgtacatgctgtgacttagaaaaccaaaccacagcgggaccggtgctcggatagggtccaacggcgatgcaagcaaggagtggcatgcggccggaggggcgcagatcggctcctgcacgtgcagcgcagccgcgtgacagtgaagcagggaggccgcgataggcggcacagggagggtgcgacggaggcaaagtgcaagcacctggggacttcaggtaagtagaaaaccaacactgaatttgtcggttctctgttttgtgattgaccgattggtttgttgatctcagaaacaaaaaattgtttcaccgtcaagcaccaatttttaggtaggtcagtgttttgggatgattctccgatgcatcaatagcaaccttgtgcttggcaaagttatttgccctgataatgttgtaggtttagtgaaaagaaatatactgacatatccatcgatccatcgatgcccaatggagattgacctctatcaagatttagttacgtgtctcaatagggcaatatttctgtgagttgtatactgtggattcctcatctgcatcatgaattgatcgcactatttatgccctatttttcaaaccatggtttctgtaattctttgcaccatggtatttttctcaaatgattttatctttcacaacccggactgaagtcactgaagcagaaagaaagagtacaagtctactactgcagaaagcaaggaggatgccaacagaagcagatttcatgtttggatcgggtattgacctttttgtgttctcctcaactcattatttagctacatatcttattaaatcttaatatttggtcattagctaccaacttgcactattattgtgaaaatccattaactttagccaatgaaatggttagactatcaccacgtaggtgatattagtggcattaagttattaatctgtggcaaattctattatcaactattttcttggctaatcattacaatatataatgaagaatactatggcttgaagggatatttatacagttggctatgtatacggtctgcccaagcgcccaacaatgaatgatgtggtgaaggaacttgagatcatcagatagaatgaaggggcacaattgctaaactcaacgtctttatcagttgaacaatttggaaaaaaagagaagagatccttatgcatttgcctatggatgatggaagcaacaacaacacttttgactacaacagtgggagttcaattaagttgttcacccaagtagatagttgtctccactctttcaacaagttattggagtgattatatatgtctgctccatatgaatgccttttcgttttagtatcacatctgaaattaccaaccttttagatcgggtattgacatctttgtgttctcctcaactcattatttagctacatatcttattaaatcttaatctttggtcattagctaccagcttgcactattattgtgaaaatccattaactttagtaagtgaaatggttagactatcaccacgtaggtgatattagtggcgttaagtgattaatcagtggcaaatcctattatcaactattttcttggctaatcattacaatatataatgaagaataccatggcttgcagtgatatttatacagttggctatgtatacagtctgcctaggcgcccaacaatgaatgaagtggtgaaggaacttgagatcatcagatagaatgaaggggcacaattgttaaactcagcgtctttattagttgaacaatttggaaacaaaaagagaagagatccttatgcatttgcctatggatgatggaagcaacaacaacacttttgactacaacagtgggagttcaattaagttgttcacccaagtagataattgtctccactctttcaacaagttattggagtgattatatatgtctgctccatatgaatgccttttcattttagtatcacatctgaaattaccaaccttttagatcggataaaatcttaagcaaaatgggagaaggtttgggttttctgcaatctgtcgtctcctcttctgctgggtatctccgttattattctaatgaagagggctatgagttggattttcgtaggtacatttgagcgtgttttggaatgctgggaccgtgaaacacatgaatatgttgccataaaagttgttcgcagtatccacaagtactctgatgctacaatgattgagatagatgtgctcaatcgccttgtagaaaatgaaaaatatagatctctatcattcgtattgtatccttcctcggattgcttcttttgttctactacaaatatgcccaacatggcagggagaggtatgctcctaaatttcttattttgtgcattgtgaaatgattgttctaacaacatcaagtttgtgttcttcatataatctatctcagattgctctgtgttttgcaggtctcgaggtcaagcctggacccactgtcaagtgtgtgcttggacatgactttatcctgcactttccactgctgcacttggggaatcaaagaaaagtgaaagtaccatgtcaaagttgatgaccagaagcttgctattggaaccctctctattgaaaaatacccctagatagaaattgatttggttttcaataaagagtgtgagttgtcacacacatagaaaactacctgtgtatttttctttggttacaaggttgagcaaccaatcgaggaagatgaatatcctttttaacattgatttttttagttttatttcatgtaagactgatctaaacaatttctttgtggagtattttgtttccttgatctcatttttgcttcttgcctcttacataatggatcttgattctgaagatgaagagaaggagctaaacattccagtaatcaaggaaaatggcaaaggtgatgggaaggcagttgctgcagcttcaaaatcaagtcttgggcttgaaaaaaagcaaggatgagtatgagtctgatgattctgatgagggtgagtgattatctcctgaagaaggaaatgttgtgatttgaagggtatggtgcagaaaagttttgtctgcatgtcatgacagtttcatacaacgcacgggcgaacgcactgggagcctaccacctcccgtgctcaccattgccgtgtttgatacctgactgctactgatgttacttcgaatctctggggtgctcatggagtcatggtgcatatgctcatgtttgcagggtgtcagtttttttcatcgtctacttctagagataacaactttagcatgttggttaaagattcttggtgtgctaagcttttcttttttgcttcatttgaaactcaactatatagatggtgccctactttacattttgcaaacacaaactgctccaaaataaatggaagcttatgtcttcatctctcgtgtgcttcatccgtgtgcttggaattttagccccttcttttgcttctaacatagatgcttttgtgttacatgtatttggttaccgaattaggaccatgttttctctttggatatttcagaactaatatccccaaaagattcccttatctaaacacttgagtaggggaagcaaccatgttgtgctgcgataagagcgtagctgatatgtgatttgtaatttgcatctttttaatgtcatgtaacagtaagaccccatatgtatgactcatagttttttgctttccctaagctaggttccaagtgaagacataccccacagacttatcaatatcgataaaaaggattagattagtataaatatatttacctatcactaaaaattgtatattgactttttagaaataatttgtgcgtattgataatgtttgctcggcatcagttcaaactatttggttcgacgtatttataatattattacatatttatatcgtcaatataatattagtactacgatgatattttctcacatggattttacatatcatattaatatttgttgtttcatatctattgttaattcatattatttttagacatgaatttggtacaatatagaagaaattggttggtgctttactgtatggagtatggttttctacaatatacttatgcatgtgactacaacatcgattgttgtcaactgtgcaaatatagaattgttcagacattcttg

SEQ ID NO: 8049 - DNA, 4922 bp, Zea Mays
gtgcacggttctgccatcgtctcctctccgcgacgcacgcctccctctcctccgccccaccctcctccccacgccatcggcaccgccatcatcagatccggcccaagacgcctctgccccacgcgcccgagtcgtcgaggcacactcctgcccgcctccggcgtccacgcacatctccgcctcacctcggcgcccgagtcgtcgcacgcgttcgaggtggcgtccatcccggcaccggcctcacgcaccatctacagctcccaactctgctcctctcagttctccctctgcattccaccttctctcccttcctctccaagcaccgtcctcctcgcctagatccgtacaagctgcaaataacctctccggtggcaagacagatggagtcgatctccggcgaggatgctccgaagcacaacctgatcctgtccgcgctcgtctccaacctacagtgcatgctcgccgcccgccgcccgttcacggcagaggtcagcaccgccgccacagctagcgaggctgaggccttggctcaggaagcagaggcgtccgatgcccccacgggagatgggacgctggcgaggcccatcgtgctgctgacctgtgccggaggggaaccggtcggcgggtctcgcggcgctcgtcgacgccctcgttgccgccggccgctgcgatgtccacgtgtgtgcccccgaatcgtacatgctgtgacttagaaaaccaaaccacagcgggaccggtgctcggatagggtccaacggcgatgcaagcaaggagtggcatgcggccggaggggcgcagatcggctcctgcacgtgcagcgcagccgcgtgacagtgaagcagggaggccgcgataggcggcacagggagggtgcgacggaggcaaagtgcaagcacctggggacttcagtcactgaagcagaaagaaagagtacaagtctactactgcagaaagcaaggaggatgccaacagaagcagatttcatgtttggatcgggtattgacctttttgtgttctcctcaactcattatttagctacatatcttattaaatcttaatatttggtcattagctaccaacttgcactattattgtgaaaatccattaactttagccaatgaaatggttagactatcaccacgtaggtgatattagtggcattaagttattaatctgtggcaaattctattatcaactattttcttggctaatcattacaatatataatgaagaatactatggcttgaagggatatttatacagttggctatgtatacggtctgcccaagcgcccaacaatgaatgatgtggtgaaggaacttgagatcatcagatagaatgaaggggcacaattgctaaactcaacgtctttatcagttgaacaatttggaaaaaaagagaagagatccttatgcatttgcctatggatgatggaagcaacaacaacacttttgactacaacagtgggagttcaattaagttgttcacccaagtagatagttgtctccactctttcaacaagttattggagtgattatatatgtctgctccatatgaatgccttttcgttttagtatcacatctgaaattaccaaccttttagatcgggtattgacatctttgtgttctcctcaactcattatttagctacatatcttattaaatcttaatctttggtcattagctaccagcttgcactattattgtgaaaatccattaactttagtaagtgaaatggttagactatcaccacgtaggtgatattagtggcgttaagtgattaatcagtggcaaatcctattatcaactattttcttggctaatcattacaatatataatgaagaataccatggcttgcagtgatatttatacagttggctatgtatacagtctgcctaggcgcccaacaatgaatgaagtggtgaaggaacttgagatcatcagatagaatgaaggggcacaattgttaaactcagcgtctttattagttgaacaatttggaaacaaaaagagaagagatccttatgcatttgcctatggatgatggaagcaacaacaacacttttgactacaacagtgggagttcaattaagttgttcacccaagtagataattgtctccactctttcaacaagttattggagtgattatatatgtctgctccatatgaatgccttttcattttagtatcacatctgaaattaccaaccttttagatcgggtattgacattttttgtgttctcctcaactcactatttagctacatatcttattaaatcttaatcttttgtcattagctaccatattgcactattattgtgaaaatccattaactttagtcagtgaaatggttagactatcaccacgtaggtgatattagtggaattaagtgattaatcagtggcaaatcctattatcaactattttcttggctaatcattacaatatataatgaagaatactatggcttgaagggatatttatacagttggctatgctgcttacatgatccatttagctgtctttggatttttggggtaactctccaatatctcacatgaggttctttgtgatagctgttacttaatctgtggtgatctatgtaaatgtggcaacacttgcagttcctcgagcccttgtgcatggatatatcgtttagttgtgtctaataatttgtaattagtggcaacatctttttgttattttggttttatctgctttttattgttataagatctcgattgcaaactggcagttagtacaccattaggttttcctttgtcgtatcaagctaataatgtgtgaagcagggttcccattctgatctttagttttttgtgattttaatagcaataaccttttttcgcaaaaaagtaacaaactttatgcagaatgcggtccgtatagttcccagtatccttttgtacttagatttagtttgatatatggttatgtttattgacagaatgctttttagctttgcagataaaatcttaagcaaaatgggagaaggtttgggttttctgcaatctgtcgtctcctcttctgctgggtatctccgttattattctaatgaagagggctatgagttggattttcgtaggtacatttgagcgtgttttggaatgctgggaccgtgaaacacatgaatatgttgccataaaagttgttcgcagtatccacaagtactctgatgctacaatgattgagatagatgtgctcaatcgccttgtagaaaatgaaaaatatagatctctgtgagtatctcagagacctaattgcttaaagtataaccctattctatttttgacttgacagttcctcttcaatttgtcagctgtgctcaaatttagagatggcttgactatcgtaatcatatatgcatggatgcgttactttatgtttgcttgtatttaatatagaaggctcccttgccttcgttcgatcatgtggtatttgaaagtgatgtctctataaatgaagtaaggtagggcaatgcttatgttactgttgtcagttattagctttttaaaccatgcatctgtcaatgtgtcctgtttcaatagggtcttattataggacgtgatggcactgaattaggatgtttgttcttttgctacctttgttaaacaacatcagatcattcgtattgtatccttcctcggattgcttcttttgttctactacaaatatgcccaacatggcagggagaggtatgctcctaaatttcttattttgtgcattgtgaaatgattgttctaacaacatcaagtttgtgttcttcatataatctatctcagattgctctgtgttttgcaggtctcgaggtcaagcctggacccactgtcaagtgtgtgcttggacatgactttatcctgcactttccactgctgcacttggggaatcaaagaaaagtgaaagtaccatgtcaaagttgatgaccagaagcttgctattggaaccctctctattgaaaaatacccctagatagaaattgatttggttttcaataaagagtgtgagttgtcacacacatagaaaactacctgtgtatttttctttggttacaaggttgagcaaccaatcgaggaagatgaatatcctttttaacattgatttttttagttttatttcatgtaagactgatctaaacaatttctttgtggagtattttgtttccttgatctcatttttgcttcttgcctcttacataatggatcttgattctgaagatgaagagaaggagctaaacattccagtaatcaaggaaaatggcaaaggtgatgggaaggcagttgctgcagcttcaaaatcaagtcttgggcttgaaaaaaagcaaggatgagtatgagtctgatgattctgatgagggagaaggtgaaaccggagaatgaggagatgtggttgttcatggacgacagcatcaagaaacctgcaacatgcaacctgattttaagaaatctgccacctgcaacatgactgggcagtggtatctctgagatataatgtggacaacggcaaagaatactatgcatacacaacaaaagagtcctacaacctgattttaagtccatttgtagcaaaccatcttggaagccattaactcgttgaatttgaagctgatgtgcagttttatttttatgtcagttttactgatgcagttagttcctaagaagatccatggcaacttgtttcacgctgatgcttgagaagttgagagggatggaaatgacactcacaataaaaatttgattttctttcttgtgatcgtcgatcacaataaacacagtggcacaatataccgtgtaattgtcctttcctggtagaacatgaaatgttgaacttcctcttgtgatatataaagcctatgtatcctacataatatttaacatcttacggaaatttatttgtgctgtccca

SEQ ID NO: 8050 - DNA, 3381 bp, Zea Mays
cgctaatggcacgggttcgcgatttggcggcagagtgccccgacggcgggaggtattgtgccgccagcacggtgaactgcccactcgttgagtcgttgttgctgcggacctgcggtactctattgatccctagatttcccaacaaatatggcggaggcgggggccgactcctccaacgcggccgtcgacggcggtggcggtagcgtccaaaacgactatcccaccattgacccgacctcgttcgacgtggtgctctgcggcacgggcctcccggagtctgtcctcgccgccgcctgcgccgccgctgggaagacggtcctccacgtcgatcccagcccgttctacggctccctctactcttccatccagctctcctccctcgcctccttcttatcccgtgaggccaccccgcccacctcgaccgtggcagcggccgcctccgattggcataccgtcgtcgatctccaccgacggatcgtgtactccgaggtcgagacctcgggggcggcgccagagccggcgaggcggttcaccattgacctggtggggccccgggtgctgtactgcgccgatgaggcagtggacctcctcctgcggtcggggggcagccaccatgtggagttcaagagcgtggaggggggcagcctcctctactgggaaggctgcctctacccggtgccagactcgaggcaggccatcttcaaggacaccacactgaagctcaaggagaagaacatcctcttcaggttcttcaagcttgtgcaggcgcacattgctgccgcctcagcttctgctgatgagacgggacagggggatgcacctgccaggatacttgaggaggacctggatcttccctttgttgagttcctcaagaaacaggggcttcctcccaagatgagagcggttgtgctgtatgccattgccatggcggattacaatcaagatgtcttagcaacacgttttattatccaggtgttgcggatgccagtggttgcacttcttatggatgaggaaaagaaacattttgtaggcgctagattggtatctggtcaggatattttatgccaacaattgataattgatccgtcttataagactatcttggatgtcccatttgatggttcagattctcattttccaagaaaagttgtgagaggggtatgcataattagcaagtccgtgaaacagggatcatcaaatgttctggttattttccctccaaaatcactagaagagcagcaagttacagctgttcgacttcttcagttgagcagcaatctcgcagtatgccctcctgggatgtttatgtcatatctgtctactccctgtaccgatgtctcagtcggaaagcaatgcataaaaaaagcaatagatgctctttacagtcctcaggcttcagatggttcagaagaccatcttgagacagccagtgaaagcaccgaggatgtgaagccaacactaatctggagttgtgtgtatgttcaagagatcacacagggaacagctggtcctttattgtcatgccctatgcccgatgaatacctggactacagaaacatactgggatcaacaaaaaagttattcgcaagtatctatgctgatgaagagttcttgcctaaaaagtcagctcctgtatatgccaatgatgactctgattctgcagagtaaaaccatctttctagagggaatattatcagtggaagagactggtgaatcaaaggcagtcaacgctagatggaggcaaagtgcctgctgcattgggccaccatgtttttggtgcgggctgttcctcacggaaccaacatatctacagatatttttcatcttctcatcaagggagtatatgggccgggagcaaggttctacatgacctgccagggtatgtaaaaattgtggaagtagggccacgagatggtctacagaacgagaaggacatcgtgccaacacctgtaaaggttgagcttatacgaagattggccacatctggattacctgttgtggaggcaacgagttttgtatctccaaaatgggtacctcagttagctgatgcgaaggatgttatggaagcagttcggactatggggggtgtacgttttcctgtattgactccaaaccttaagggatttgaggcagctattgcagcaggggcaaaagaaatcgcaatatttgcatcagcttctgaaggattttccaagtcaaacataaactgcaccattaaagagagcattgcccgttataatgacgttgctcttgctgcgaaagagaaagaaattcctgtccgagggtacgtttcttgtgtggttggatgcccagtagatggaccagtgccaccttcaaacgtagcttatgtagcgaaagaactttatgacatgggctgctatgaggtttcacttggtgataccattggagtcggtactccaggcaccgtggttccgatgcttgaggcagctatctccgtcgttcccgtggagaagctcgctgtccacttccacgacacctacggccagtccctctcgaacattctcatctctcttcagatgggagtaagcgtggtggactcctccgtcgccggcctcggtggctgcccgtacgcgaagggtgcgtcggggaatgtggcgacggaggacgtagtgtacatgctcaacgggctgggcgtcaagacgggcgtcgacctgggcaaggtgatggccgccggcgagttcatctgcaggcacctgggacgccagtctgggtccaaggcagcgaccgctctgagcaaagttaccgcgaacgcctccaaactctgacaatttaccatgatcccctactgcagataattgcagtaaaattagcgcatggtaataaatagactgaggctattcaaataaatacggcctcggagctagtagtgagtagatttttatttatgtccatctagctagcaaaataagcgcgacactgccaacactgccggtctagcaagcaaaatgagcaaatatgtgaccacctctacgggaaagattcccccaacactctcagcaaacggaagtggtgcatcagttcgttccagcttccagtcatcacatgttcactcagcaaacagaaatggagcatcagttcgttccagcttccagtcattacatgtttacaacatccagatctcacctacgctatggacacaatgggaaatgtctagtgctgtaatgcattccacgaaagttgatgggttagctatgatctcaaacttacagcagattcaaagcatttttgggagggctcccaaactggccctggctctgctttctctaggtgcaaaaaaaaaacagcttcaacatagagcatttaggagctggaaccactttttttttataagctagagtaaaaaaaaagctcctagcggct

SEQ ID NO: 8051 - DNA, 1415 bp, Zea Mays
ctgctctatatttgggtcttctgtttcggtctgctgttggaggcctgcaactggtgtgttacagcccattttcggttcagagcaccgtatagatcgcttgttgaagacagccttacacacgaggtcctgctactatgatcgctgccaatcacttaatacagccagggaaatatgaagaaatcgagcatcagtatggtatgtcttgcccataaaaacatcacacagagctgaggattgcagcagttccattccatccatctctgaagattcaaaaactgaaacaatggcaaacaacacatttccattttctgaatcttaatcattacacattttgcaaaatccccttgaacctactcgtattccttcacataataaacacagttaataagtcactactatttcgtttctttgtactagtaatctatgcacacttttgcaacgggacaggtcgcccctttcttccctgccttttctacatttttgtcaggaagtggttactgtctgaccctaatcgtgtattacttgcagccatcgcatggtaaattggccagcagcggtggcggcttcctacctgcgctggaaattgaggtgcttgatggcgaggaagaagaggaaggcgaagaggccaatgattgcgagatggaggcaggtcaccagctcaaagtagcgatcctgcaggcctaggtacccctccaggaactcacgcaccgtctgcaccccgagccctggcaccaggatctgctccgtccggtctgcgagctgtgagaacatcagcccgtaaactgtccatgccgctggatcggcccagtacacccaccgccaccacacgggcatcagctgcagcaaattactcaactcatcagatgggtgtgtgtgataagtacctctctcgcgatgatgaagccagagaagacgttccagaagatgaagatgaggaacgacagccccatggcgatctcgatgttgggggtcagggccaccgtcatcatcccgtacagagtgtagtacatgaagctcatcaccaggtataggaagaaccagaagaacttggccgcagacagctggaacccaatcatcgggtacacaatcgatgagaagatcagcacttgcaccaacatgtaagcacattccaatgaccttcaaaatggaaagctcactatatgcaagagtatgtcttaccgaattcgttattggttccgaacatcttagaagagaagttgattgtctccctcactgtcatctcagcatgatggagatcatactggctaacataagcacgcaggatgctgggatccaagtctgtgcgcatgaggagacatgtaccttgacggccggatgaccccgcttacttcgtttatgattctcataggtcttttcctggtaacacacatatggacagacgtcgctaattcctg

SEQ ID NO: 8052 - DNA, 1504 bp, Zea Mays
ctgctctatatttgggtcttctgtttcggtctgctgttggaggcctgcaactggtgtgttacagcccattttcggttcagagcaccgtatagatcgcttgttgaagacagccttacacacgaggtcctgctactatgatcgctgccaatcacttaatacagccagggaaatatgaagaaatcgagcatcagtatggtatgtcttgcccataaaaacatcacacagagctgaggattgcagcagttccattccatccatctctgaagattcaaaaactgaaacaatggcaaacaacacatttccattttctgaatcttaatcattacacattttgcaaaatccccttgaacctactcgtattccttcacataataaacacagttaataagtcactactatttcgtttctttgtactagtaatctatgcacacttttgcaacgggacaggtcgcccctttcttccctgccttttctacatttttgtcaggaagtggttactgtctgaccctaatcgtgtattacttgcagccatcgcatggtaaattggccagcagcggtggcggcttcctacctgcgctggaaattgaggtgcttgatggcgaggaagaagaggaaggcgaagaggccaatgattgcgagatggaggcaggtcaccagctcaaagtagcgatcctgcaggcctaggtacccctccaggaactcacgcaccgtctgcaccccgagccctggcaccaggatctgctccgtccggtctgcgagctgtgagaacatcagcccgtaaactgtccatgccgctggatcggcccagtacacccaccgccaccacacgggcatcagctgcagcaaattactcaactcatcagatgggtgtgtgtgataagtacctctctcgcgatgatgaagccagagaagacgttccagaagatgaagatgaggaacgacagccccatggcgatctcgatgttgggggtcagggccaccgtcatcatcccgtacagagtgtagtacatgaagctcatcaccaggtataggaagaaccagaagaacttggccgcagacagctggaacccaatcatcgggtacacaatcgatgagaagatcagcacttgcaccaacatgtaaggttgatcattgatgtgtgttgttacctgagcgatagcgtatgccatggtggagtacatgcctgccgccttttcacggtagagcacaactctctccattgccaccactggctgtaggatgctgcagttcatgaaacccaggaacaatgctgacccatatacgattccaagtgaatggggacgtccaatatccccagcgcaaccatggttggagatcatctgtttcagtgtgcagaatttgttagcaacttgttgcacagaatttttattagagtgtatgtcgtgtactcatgtttcatggtgtatgctaagctacattcacctaaccttttgatatgacgaatcctccaagtatgtatattgcaataagagctgcagtccct

SEQ ID NO: 8053 - DNA, 1574 bp, Zea Mays
gaccacagccataaaaagtgctcccatgtacttgttggcatcaagtacagaatcgtgactcatttttgttctcaggaaaagtgtggagatcaccaaagccataacagttatctgaatggtcttgaatatatggactggagagtttcttttcagcagcagtacttcccttgaaaagcatgctttgaaaatattccatctggatattcggcgacttgcattcacttttaccacctttttctttccagtattgtttgaactgcactgtttgtcttctactagaagagggagataggacgtcctgaaggattgtgcaaaattttcaattgtatggtactgatacttgttttgatcaccagcccagtattgcttttggtccatcttagaggttacctggtcagtggccaattgagaaaacttgttacattgtttttgcaaaaggacatggaaaacttgttacattattttgcaaaagcacatgtattgcagaatagcgacattttacgctcctgcacataattcacattccaatgaccttcaaaatggaaagctcactatatgcaagagtatgtcttaccgaattcgttattggttccgaacatcttagaagagaagttgattgtctccctcactgtcatctcagcatgatggagatcatactggctaacataagcacgcaggatgctgggatccaagtctgtgcgcatgaggagacatgtaccttgacggccggatgaccccgcttacttcgtttatgattctcataggtcttttcctggtaacacacatatggacagacgtcgctaattcctgaaagcaaaataaactcatcatcagaaatctctctctctctctctctctttttccccgaatatgacctaccaactttgcattgtaaaacaaacacatgcatgccatacacttgtattttagctctcgctaaagcacgcagcagcgtaaccgtaacgaggcgcggtatcctttcgattctggactgaactccatgtgttcaattcgaactggcctaaggttgtctgcagatttacaaacccgcttacagtcgtgattttgtaatttttatttatgtttttcttacagcatagaacctgctgatgcatcaatgtcccactatctatttgggcacaagatgagcctcattaatcatgaggaatctagcagacgtgttgggttctcttggttcactcccagcgcgcagggggacgccaagaagcactactgatgatgcggcaggctgggggatcggacaggcccacattaaaggcggtctcgtcaacgtcatggtctgcgctgcttcctaccacgagtaaatgaggaactcgaagcttggcaagactgaggagagagagaagaaaagcaggctatactgctatagccagtttagtcacaagttgatcataaattaataatagaaagctaactacaaagatccgccagcaatccactatacattactctaattgcttctttcaacgtcctaaatctcaggaaatactataagatccatgcatagtgccataactctgaatgatgcaagtgttgttttaatatggtccaac

SEQ ID NO: 8054 - DNA, 1969 bp, Zea Mays
gtcgccggtctccctagtccctaccaaaccgcaccccgggacgccgctaatcaggcaccccccaaccactcctcccccctggaggattaagcgtaatcaacccaccccacacagccaccgtatatgtatatataccccgatgcgtccagccaaagccgctggtgggaggccggccgggtaaaggtagtaaaccgtcgcagcgcgcggagtccctccatctccatccggcgaccgaccaaccgacctagactagacgcggccggccgggcatggcgaggccggggtggggctcgctgttcggctgcttcagcagcagcagcagctcccgcggggacggtaagaagaagcagggcaagggcaagggaaagggcgccgggaataagatgaagaagaagcagaagagcaagcagcagcagaaggtagcggcggggagcggcggcggtagccggccgcggtcgctgcagagccggatgtcgttcacggagctgagcctcagcgggatggtgtcgcccgaggacctgtcgctctcgctcgtcggctccaacctccacgtcttcaccatcgccgagctgcgcgccgtcacccgcgacttctccatgacccacttcatcggcgagggcggcttcggccccgtctacaggggctacgtcgacgacaagaccaagcgggggctcgccgcgcagcccgtcgccgtcaagctgctcgacctcgagggcggccaaggacacaccgaatggctgacggaggtcttcttcctgggacaactgaggcaccctcacctcgtgaagctgatcggctactgctacgaggacgagcacaggctgctcgtctacgagttcatgaccaggggcagcctggagaagcatctcttcaaaagattacaaggcgaagctgtcggatttcggtctagccaaagacgggccggaagacgacgagacgcacgtgtcgacccgggtgatggggacccaaggatacgccgcgccggagtacatcatgacgggccacttgacggcgaagagcgacgtgtacggcttcggcgtggtgctgctggagctgctgtcggggcggaaggcggtggacaagagccgccccccgcgggagcagaacctggtggagtgggcgcggccgtacctgacggacgcgcgccgcctggaccgcgtcatggaccccagcctggtgggccagtactccagccgggccgcgcacaaggccgccgccgtggcgcaccagtgcgtcgccctcaaccccaagtcccgcccacacatgtccgccgtcgtcgaagcgctcgagccgctcctcgcgctcgacgactgcctcgtcgggcccttcgtctacatcgcaccgccggagacgacgaccgccaacggggacgaagcggcgccggtgagtagtaataaggaaggatccggcagacgaggaggccggaggaggtcgtcaggcgaaggcgcggccgtcgtgcggccagaggagtgatgttccctcttccgtccgtgctatgacgacgatgataatatgggtggatttactagcttccacgtcttgtacgtgaccggactgttgttgcctgtcgcgtgcatgcagcttggctgagatatatctatcgatcgagcagctatacgatcggtggaagttaacgtcttcgtttgtgtgattgaaagcatccagctggttgcgtgttttagagagaactctatagattgaatttgttgcatatacagtaatctaaccaaacttctctatttttatagatctaaaacgacttgtagataaaccccgtgtgatgattgtaactgatatggatttgtattacaatcctctaatataaatataagccacaactttttgatagagataacacgctgatataaatttgcaacaacagactgacacgtctagtagtgcacccaaccactattgtaggaggtccggtgcacccacaataaatacagaattttcactcaattccaac

SEQ ID NO: 8055 - DNA, 2599 bp, Zea Mays
agagcttcacactggaaagagggtagtgagggcagccgaaaccgaaactaactagtagtccagtccagtccagtccagtagtgacgctgatcgtgtcgagagggacaaccacacacacacactgacacaattccctctgccgcacgctccggcgggaaggcgccttctccctccctcctctactcttctgtctttctccaatggcggcgattaccgcgccgccggcccctcccccggcctccacctcatgccgcctcctccgccgccgcgcgccactcacccgcttcgccgcctcctcgtccccgtcctcccgcttccgcccgtcctcctcctccttccctgccgcagccggcagcagcagcggcggcgggggcgagatcctccacgtgtcgccgcctcccccgcccgccgcgcccccgggggttcccgtctacgtcacgctccccgccgacgccgtcgacccggggggccgcgtcgcgcgccgccgagccatgggggcctcgctcgccgccctggccgccgccggtgtcgcgggcgtcgccgtagagctctggtggggcgtcgtagagcgccgcagccccggggagtatgactgggccggctacctcgagctcgccgccatggcccgacgccacggcctccgcgtgcgcgccatcctcgccttccaccagtgcggcgccggcccgcatgacctgccctggattcctttgccgcaatgggtgcttgaggagatggataagattccggacttgtcatataccaatagataccagaagagaaacaaagaatacatatcactgggatgtgatattcttcctgttctgaaaggaagatcacctatgcaagcttactccgacttcatgagaagcttccacaatacttttgaagattaccttggggacacaataacagaagtacaagttggaatgggtccaggaggtgagcttaggtatccgtcatacccaactgagaagctaaatcagccaggcagttcatctgaacttggggaatttcaatgttatgataaggtatgacgggaaataaaattctttctctaaaattacaacaaaatggaatgactttggtagagtggtaggcatattggatgatcagtctcaacgatgtttactcatgcaatgtctatttgtaccttcgacttgtaagtagtaccagtacgggttagctccctaccatttgggcttatactaaatcttctatatgtgagtttgcatttgtagaaatgacttgtatgttctgttctactttgaggtttgagccatgcaataaaaaaggacaacatctgcatttctgaaatgattgaaacacatatctgattcatgcatctaatgctatgttaccattacaagatttaactgctgatagatgtggtctgctaacagtttatgcaagcttcgttgagtgctcgtgcacagatttttgtgttacaacagtggggcaatggcggttcaactggcacagatggttcacagcagaaccttgaagaaacgagtttttttcgcaccgatggaggctattggaatacaccttatggtcacttttttcttaagtggtattcaggaatgcttctcctccatggagagaggttatgcatgatagctgatgcaatcttctctggtactggtgtgaccatctcagggaaggttgctggaatacattggcactattatacttgttcacatccatctgaactgacatctggctactacaatactctattaagagatggctatcttcctatagctcaaatgtttgccaaatacaaagctacattgtgctgcagttgtttcgacctgagggacgcagaaagaacaaattctgagagcagtcccgaaggtactctccggcagcttgcaggtgctgctaaaatgtgcaaccttcctcttaatggtgagaattctgcgacaaggctggatgatgcatcactgaatcaagtgataagaagctcaaggctctactcaggccgtacttcaggaacatctttttcctttaactatgttaggatgaacaaaagcttgtttgagtttcacaattggaatcgatttacaaagtttgttaggcagatgtcagatgccaggacctttctagcaagactgtatgtcaggagagggcagcaatacttgtcttcaatgtcagttgtttgggtggttagtcgggcttgtgcatatacatgaaagttgtcaaaagctattgcggataatctcagccataaatggttccaccactgtggatggaaaaggtttgctcagtatatggctcatttttagttgccagaagggcaggcaggcttatatgctgaaggctgtactgatttcatgcatatgcatgtattagtttcatgcatatgtcatcgctgaacaaaagtttatagttatttgttgtaaagtggcagactggcagtgttttgctgccaacaatattgaatcgcacgagggtcctgtttagccattttagaaataattagatggagcttcatgttttcccgttacaatatgaatgctttcaaactatatctgcctatgaaaatatgtatacttcctcttgtcacaaatgtcaaatataagtccatcttagtttatcc

SEQ ID NO: 8056 - DNA, 2067 bp, Zea Mays
atggcttacctttatctgcctgttttgatcttccagttcatggtttgtttttgccaatccgttgacaggctaacacctgcaaagccgctcttgcatggtgatgttctcatatcaaatggtggtgtctttgctcttggcttcttctccctgaaaaactcaacttcgagctcatatgttggcatatggtacaacaacatccctgagcgcacatatgtgtggattgccaaccgtgacaacccaattaccaccaatgcgcccgggaagctagtttttaccaacagttctgaccttgtcttgttagactccacaggccacactatctggatgacaaaaaacaacatcactgcaggagaaggtggaactgctgccatcctgctcgactcggggaactttgttgtccaatcacaaaatggcactgacatatgggagagcttccattatccgactgacaccatggtccctgatgtaagtttttcattgagctcgtctgatgttgctaagcgccttgttgcctggaaggggcctgatgatccatccagcagcaacttctccatgggtggcgactcaagctcagatctccagattgttacttggaatgggacacggccatattggcggagagccgcatggggtggtgaagtgacattcggcacatttgagggcaacaccagcttcatggtgtacgaaacaatagttgacacaggggatggatactacatgaaactcactgtctctgaagggtcaccaagtatacgcttaactctggattacacgggcatgttaactttccgaagatggaacgtcaacacatcctcatgggcagttttcggacaattcccaagatgtcggagaaaggaggagctgaaatgtggtggcggagataaattcttaaccttgccatctatgaagactcctgacaagttcttgtacatcaagaacagaagttttgaccaatgcactgcagagtgcagtaacaactgctcatgcacagcgtatgcttatgctaacctgcaaaatgttgacacaacgcatgacacgacaaggtgcttggtctggatgggggagcttatcgatgcagagaaacttagtaacacatttggtgagaacctatatttccgggtccccacctcaccagtaagcaagaagaagagcactgtactaaagattgtacccgtggctacgggaacttgggactgaaaaatctagatcttccatcagttagctttgaagacatcatcactgcaacaaataatttctctgagcacaagttgctcggggaaggtggttttggaaaagtttacaagggagtgctggaaggtggcaaggaagttgctatcaaaaggcttagcaagggttctgttcaagggatccaggagtttataaacgaagttattctgattgccaaactgcagcacagaaacttagtcagacttcttggtttctgcattcatgaagatgagaagttacttatctatgagtacttacctaacagaagcttagatgctttcctttttgatatgtgtcccaagatatcagattttggtacagccaggatttttagtggaagcgaacaacaagtaaatacaacacgagttgctggaacatacggttacatgtctcctgagtatgccatggaaggctcattctctgttaagtctgacacctatgcttttggtgttctgctacttgagattgcatggagcttgtggaaagatggaaatgcattggaattggtcgactcatcaatttctgtgagttattcacttcaggaacttgtacggtgtgttcagttagggcttttgtgcgtccaagaccctccaaatgcaaggccactcatgtcatccatcgtgttcatgctagagaatgagacagctccacttcctacaccagaagaacctctatattttacagttaggaattacggaactgatcgatcaaatgaatacatgcagaggtctctgaataacatgagtatcacaactctagaggcgcgttagacatttcgcttcatcgttccttaaatttgtagacatttttaatctgtgttattgtacatttacactagcc

SEQ ID NO: 8057 - DNA, 2195 bp, Zea Mays
tcttagcgtgctatttccttgctgtctcctccacagcattataccaacttaccaacaaggtctaatcgccatggcttacctttatctgcctgttttgatcttccagttcatggtttgtttttgccaatccgttgacaggctaacacctgcaaagccgctcttgcatggtgatgttctcatatcaaatggtggtgtctttgctcttggcttcttctccctgaaaaactcaacttcgagctcatatgttggcatatggtacaacaacatccctgagcgcacatatgtgtggattgccaaccgtgacaacccaattaccaccaatgcgcccgggaagctagtttttaccaacagttctgaccttgtcttgttagactccacaggccacactatctggatgacaaaaaacaacatcactgcaggagaaggtggaactgctgccatcctgctcgactcggggaactttgttgtccaatcacaaaatggcactgacatatgggagagcttccattatccgactgacaccatggtccctgatgtaagtttttcattgagctcgtctgatgttgctaagcgccttgttgcctggaaggggcctgatgatccatccagcagcaacttctccatgggtggcgactcaagctcagatctccagattgttacttggaatgggacacggccatattggcggagagccgcatggggtggtgaagtgacattcggcacatttgagggcaacaccagcttcatggtgtacgaaacaatagttgacacaggggatggatactacatgaaactcactgtctctgaagggtcaccaagtatacgcttaactctggattacacgggcatgttaactttccgaagatggaacgtcaacacatcctcatgggcagttttcggacaattcccaagatgtcggagaaaggaggagctgaaatgtggtggcggagataaattcttaaccttgccatctatgaagactcctgacaagttcttgtacatcaagaacagaagttttgaccaatgcactgcagagtgcagtaacaactgctcatgcacagcgtatgcttatgctaacctgcaaaatgttgacacaacgcatgacacgacaaggtgcttggtctggatgggggagcttatcgatgcagagaaacttagtaacacatttggtgagaacctatatttccgggtccccacctcaccagtaagcaagaagaagagcactgtactaaagattgtacccgtggctacggcgaacttgggactgaaaaatctagatcttccatcagttagctttgaagacatcatcactgcaacaaataatttctctgagcacaagttgctcggggaaggtggttttggaaaagtttacaagggagtgctggaaggtggcaaggaagttgctatcaaaaggcttagcaagggttctgttcaagggatccaggagtttataaacgaagttattctgattgccaaactgcagcacagaaacttagtcagacttcttggtttctgcattcatgaagatgagaagttacttatctatgagtacttacctaacagaagcttagatgctttcctttttgatatgtgtcccaagatatcagattttggtacagccaggatttttagtggaagcgaacaacaagtaaatacaacacgagttgctggaacatacggttacatgtctcctgagtatgccatggaaggctcattctctgttaagtctgacacctatgcttttggtgttctgctacttgagattgtaagcggcttaaagatcagctcatccctaatgaactttccaagcctcatcgcttatgcatggagcttgtggaaagatggaaatgcattggaattggtcgactcatcaatttctgtgagttattcacttcaggaacttgtacggtgtgttcagttagggcttttgtgcgtccaagaccctccaaatgcaaggccactcatgtcatccatcgtgttcatgctagagaatgagacagctccacttcctacaccagaagaacctctatattttacagttaggaattacggaactgatcgatcaaatgaatacatgcagaggtctctgaataacatgagtatcacaactctagaggcgcgttagacatttcgcttcatcgttccttaaatttgtagacatttttaatctgtgttattgtacatttacactagcc

SEQ ID NO: 8058 - DNA, 1595 bp, Zea Mays
actggctacttccttctccccttcaaatttgcgtagcgttgaatccacgccctcccggaacccccgaatctaccgacgctccctctcagtctctcacaacgctcaatccaaacgcgagccgcgagcctaaccctagcaaccgtgagtgatggcgcgcccaagggctaagaagcgtacgacgccccaggcggccgccactgattcggtcgagccggatgccaccgtcggtgcttcgagcaagctggaggaggcggcggcggagccggcaactcgggagcgggggaagcgcgtcaaggcgccgcccaagcccaagcccgagacggaatacttcgacgagaaaggaaatttcgaggatctatggttatctgctttccccgttggtaccgagtgggaaaacatcgataagataaaggagttcaactggagctttgaaaatgtagaggaagccttagaagaaggaggagagcttcatgggaagaccctttatatgtttggaagcaccgagccccagctattgtatgttaatggtgaatcaaagatagtgcttatcccaattgtcgtcgctgtagactgtcctttcccaccttcagacaaaattggcataaattccgtccaaagggaaaatgaggaaatagtgccaatgaaggcgatgaagatggcatgggtgccttatgttccccttgaggaccggctgagcaggattgacattttcaaaacaaaaatattcacgctcggatgcacacagcgaagatagtagatgagttcgactgggaaatggatgattacgaggattttgcagatcagaaagtccaagaaggtagcctgcccgagggcgagaaagaaaaattcaaggagttcctgaaggagaaggttagagaaaggaagagagagctgagacaggctaaagaagccaggaagaaagctattgatgatatggatcctgcgatgaaagaggcattcgagaatatcaaattttacaaattttatcctgtgaaaaccccagacacgcctgatgtaaacaatgtaaaggctaggtacatcaacagatactacaggaatgcccattatctgaagtaaaggctctcctgatctcacgtgcttgaggacgagcttgtcatttgagttggtgtaaaaaaattttgaaacccgggggagaaaagtttggtgacatctttggatggtcttactgttgtactgtactgtactagaattgccctcagactttcgctgtccggtgcatacagtcagaaaggttcaaggtagttttgagactaaccaaatcatgatggaacaatttgttcctttgtcatcatggttactgcacaccctgatggttatgctgtgactttttttaacatctgctatgagcaagctatgaattatgctgtaatctgtctggtgaagcgaccaggtacagtagggttcagactggttaacaatgggataacctggcttctaggcctgtttgtttttttccaattaataatcggtcttttgatctaatttaaattggtttctactccctttgccctacaatgaatgttgtttgacttttttggcataagttcgactgactcgtcttattcaaaatattt

SEQ ID NO: 8059 - DNA, 1815 bp, Zea Mays
agcctgccgagctctgtgtctccctaatccggcaccctgtcgacaaaccacaccaactgtcatctgtcatcggacggcccaaaagtggacctcgtgttcgattcagcggctatttcagctcgccgtgcctgcggcgcctcccccctactggctacttccttctccccttcaaatttgcgtagcgttgaatccacgccctcccggaacccccgaatctaccgacgctccctctcagtctctcacaacgctcaatccaaacgcgagccgcgagcctaaccctagcaaccgtgagtgatggcgcgcccaagggctaagaagcgtacgacgccccaggcggccgccactgattcggtcgagccggatgccaccgtcggtgcttcgagcaagctggaggaggcggcggcggagccggcaactcgggagcgggggaagcgcgtcaaggcgccgcccaagcccaagcccgagacggaatacttcgacgagaaaggaaatttcgaggatctatggttatctgctttccccgttggtaccgagtgggaaaacatcgataagataaaggagttcaactggagctttgaaaatgtagaggaagccttagaagaaggaggagagcttcatgggaagaccctttatatgtttggaagcaccgagcgtagactgtcctttcccaccttcagacaaaattggcataaattccgtccaaagggaaaatgaggaaatagtgccaatgaaggcgatgaagatggcatgggtgccttatgttccccttgaggaccggctgagcaggattgacattttcaaaacaaaaatattcacgctcggatgcacacagcgaaggtctgcactgaagcatctcaaaattgagagagtcaagaagtttgactactgcatgccttattatatgccactgcaacctcttgaagatgaagaaaacacaactatcaatttcttatatcctctggaacccccgatagtagatgagttcgactgggaaatggatgattacgaggattttgcagatcagaaagtccaagaaggtagcctgcccgagggcgagaaagaaaaattcaaggagttcctgaaggagaaggttagagaaaggaagagagagctgagacaggctaaagaagccaggaagaaagctattgatgatatggatcctgcgatgaaagaggcattcgagaatatcaaattttacaaattttatcctgtgaaaaccccagacacgcctgatgtaaacaatgtaaaggctaggtacatcaacagatactacaggaatgcccattatctgaagtaaaggctctcctgatctcacgtgcttgaggacgagcttgtcatttgagttggtgtaaaaaaattttgaaacccgggggagaaaagtttggtgacatctttggatggtcttactgttgtactgtactgtactagaattgccctcagactttcgctgtccggtgcatacagtcagaaaggttcaaggtagttttgagactaaccaaatcatgatggaacaatttgttcctttgtcatcatggttactgcacaccctgatggttatgctgtgactttttttaacatctgctatgagcaagctatgaattatgctgtaatctgtctggtgaagcgaccaggtacagtagggttcagactggttaacaatgggataacctggcttctaggcctgtttgtttttttccaattaataatcggtcttttgatctaatttaaattggtttctactccctttgccctacaatgaatgttgtttgacttttttggcataagttcgactgactcgtcttattcaaaatattt

SEQ ID NO: 8060 - DNA, 2386 bp, Zea Mays
cttcacacagccattttttctctctctctctcatgcatcgtctatctatattattttatctccccccgtctccacctccccctatattctctctctcccctcctctcctctccccagctacgccagtcctcctccctgtctgcttcggtgcttcgctcccgcactgcgcttggccgctttccctctccccgcaccttctccacctcccccattccgccaccgcacgagcagagctccctcaccaagaggaccaaaaaaaaaaaaaacgagggaggcaagccaggcgggacagcaacgcgacgcgcttgtcattcactcgaggattcctaccatccctgatattctcttatgtatatgctaattctggaagtttatctgtcttcaattggtatattcaacgcatattttcaggagctcatgcaaggcgtaaatcttattgcaagaagggcagctgtgcatgttaagtctcaaatatagactcacttgataacactgcatgagaggttgaaaacttgaggtacagttgatattctggttcagagtatgggttcaaggtttgcatcacatcagctgagcaatggcctgtatgtttctggtcgacctgagcaacctaaggagaaggccccaaccatttgttccactgcgatgccatatactgggggtgacatcaagaagtctggagagcttgggaagatgtttgatctccatgttgagaaatcaagaaaatctggtcctctaggaaacgctccttcaaggaatacttcatttggaggcactgcttccaattctgggcctgtctccaatgctggtggtcggtccaactactctggttccctttcatcttcagttcctggtgctggtggatcagccagagcgaaatcaaactccggaccactcaataagcatggagagccaacaaagaggtcatctggtccccagtctggaggagtaaccccaatggcacgccagaattctggcccccttcctcctgtgcttccgacaactgggcttatcacatctgggcctatctcttcagggccacttaattcgtctggtgctccaaggaaagtatctgggccacttgattctgctgcatcgatgaaaatgcgggctacttcctttgctcacaatcaagctgttactaatctgaacactgaagatggttactcaattcagggaagctttccgaagccaatactctgggctgtgattttgctctttgtgatgggttttatagcaggtggcttcattttgggggctgttcacaatgcaattttgctgatagttgttgtggtcatatttggttttgttgctgcacttcttatctggaatgcttgctggggtagcagaggtggaattgggtttgttagtcgctaccctgatgctgatctcagaacggccaaagatggacaatatgtaaaggttacaggggttgttacttgtggaaatttccccctcgaatcctcgttccaaagggttccaagatgcgtatacacttctactggcttgtatgagtacaggggttgggattccaaagctgccaataccgaacatcggcgttttacatggggtttacgttcaatggagcgacatgcggttgatttctacatttcagattttcagtccgggcttcgagcattggtgaaaacaggatatggtgcacgtgtgaccccatacgttgatgaatctgttataattgacatcgatccagacaacaaggatatgtcccctgaatttttgagatggctaagagagagaaacctttcaagcgatgatcggacaatgcgcctaaaagaaggatacatcaaggaaggtagcactgtaagtgtgatgggggttgtccaaaggaacgacaacgttctgatgattgttcctccatcagagcccatctcaactggttgtcagtgggccaagtgcgttctcccgaccaaccttgacgggcttgttttaagatgcgaagatacttcgaacattgatgtggtgccagtttaattagcggtgaagagtcgttgccaaagaaagtgtctgttaaatatgagtctgaattgtttcatgcaatgttagttgacaaaaatgtgcaaatgttgggtgtgattatggcaggtggagggtggttcgttaagctggcttttggatgtatagtttctttttcttttagttgtgttttgtcatttctttttaattttcagctccgagatctgaaacttgtgtaaccagatgcctcttaatctaaatcagcgtggcatttagatcgatttgaaagcttacaggtgacaggacttcggatgtacattcttccccttttattgtgttgtcatttattttcttttttaatttcaactcagatctaaaacttgtattcagatacatgaagcagatggtttgc

SEQ ID NO: 8061 - DNA, 941 bp, Zea Mays
tttgcaatcagctaaatgtgactaatgccttggcttctgcacagacaaactagggttttctggtgggaagtcgaagtccttgtatggaaaggaaggacatatgggtttgacacttatcaagtttgcaaacaactcatctggcttgaaggaggctgagcgtcttgctgagtatcttgagaggcaagatcgtggacgtataggttggtcacgcgctcatgccagtcgttctgtagattcagatcagaaccctttgttggtcgagacggataccaggacagctgagaaaaagaggatactttatgggtacctagcaattgcatccgatctggacgaactagactcagattctagaaaaagggcttccctccagagcagaagagaattcgacccaaacgaatgatctcttgtcataaagcccacccccatcagttcattaaatttgcactgaggcgtgcatacctatctctgatcccaatttataaattcatactgctgctgtggagaaaaggtgttaccttgaatataatatctgccgctagttgagttataaccactagttctggaagctgtatttgcactatgtgtattttcttgcacgcgtctatggctcacgatttgactggctatttggaagagatctgtcttcctatttaagtatcgcccgttgcatgattcattgctcttcatttggaagtgatgttgcatagacctcctgattggtatcttttatgtattatagcattccctttctttcttgacttcccatgaatatttaaatttctgctaagacggtagtggctacatattccttggcacttctgaacatgtctggttctttgaatatcagagtatattgttgcaataggttgttgccactcttttgggcattcatgctgtttgtgttgttttatgtaagagggtgtaatattcagaaatccttg

SEQ ID NO: 8062 - DNA, 1232 bp, Zea Mays
ttccctgctgcagttgggataagaaggaaagtcttctaaggactttgctgatgtccatggacttgtcatgcatgcttacaacccaccaaatgcagattcacttgttgatcatcttggtttgcacaaggcattgtgtgttcttatgggatgggattatacaaaagtccctgagaactttaagggctaccaatcattaccttctgaccttgtccaagcaagtagggaggacctcattgtctggccgcctactgttatcattcacaatacttcgactgggaggaagaaagatggtcgcttggagggtttagggaacaaagaaatggataaaaaaatgacagaactagggttttctggtgggaagtcgaagtccttgtatggaaaggaaggacatatgggtttgacacttatcaagtttgcaaacaactcatctggcttgaaggaggctgagcgtcttgctgagtatcttgagaggcaagatcgtggacgtataggttggtcacgcgctcatgccagtcgttctgtagattcagatcagaaccctttgttggtcgagacggataccaggacagctgagaaaaagaggatactttatgggtacctagcaattgcatccgatctggacgaactagactcagattctagaaaaagggcttccctccagagcagaagagaattcgacccaaacgaatgatctcttgtcataaagcccacccccatcagttcattaaatttgcactgaggcgtgcatacctatctctgatcccaatttataaattcatactgctgctgtggagaaaaggtgttaccttgaatataatatctgccgctagttgagttataaccactagttctggaagctgtatttgcactatgtgtattttcttgcacgcgtctatggctcacgatttgactggctatttggaagagatctgtcttcctatttaagtatcgcccgttgcatgattcattgctcttcatttggaagtgatgttgcatagacctcctgattggtatcttttatgtattatagcattccctttctttcttgacttcccatgaatatttaaatttctgctaagacggtagtggctacatattccttggcacttctgaacatgtctggttctttgaatatcagagtatattgttgcaataggttgttgccactcttttgggcattcatgctgtttgtgttgttttatgtaagagggtgtaatattcagaaatccttg

SEQ ID NO: 8063 - DNA, 1132 bp, Zea Mays
atgggctcatggcacgatgcaaatgagcaaacctgtcaggcggtgaagagaaccgagggcgaagcgccaacgaacccaactgaccaacacagtcagggacctggatctgaattcccatcacactccccgtcgatggacatccccaccgctgtcatacaccgcctacagtcctcgctccgcgaggccatcttcgccccttctgtagaagatgcacccgcccctcccttcccctctgtctccgacgccgtcgcagccttcgactcgggcgccgcctctgtctcggcggagttccgatgtgtgggctgcgggtccgcgggagggctcctgcgcggtgcgcagtctgcactctgcgcctactgcgggtgtcccaggcgcggggaggaagctgaaggcggtggaagcggtggcatcgccttccgtaacagcgcggcctaccggtgcttgctcggctcgcttggactggacggatcccacaaacggaatgcagcagatggatgatgttgattcgctatcttcattatggccaactaataaaccagaccctgcaaatacaaatgtggaacagttgcttgctcagatgcatgacttgtcctttatgctcaaagatgaactttcggcccctgataaactcatcgatcgttccaaatcctgaagtgacaacagcaaaaaaatgtgttctattactttcagacaaagaagatcgtggatggaaatccaacctcttgggtgctagacgaattgcacccaatattcctgagcggaaaatgcaaatcaagacacagaaagcctttttgttccaacagtgtgccttttatcagagcattggtcaacagatgattgtatttgttttatctgttgcttcgttgctttgatcatcagtcaggttggttccttgactgtccctgagtgaggctgagaatcatgtttttgcctccacatgtatgtaaggcctgcgtgatgttcggtgtcgaaccaagctcaccattcaatgaattccgtttaatgttataaaattaaatataaaataatgataaaaaagttcataatatatttgctaacataagttatgatgtcctcaatcaactcagaaaaataacttaaaattcaatttctacatagataagcaaaaaag

SEQ ID NO: 8064 - DNA, 2002 bp, Zea Mays
attagacatcacaatataactgatatttcttctagagtgtcagatgtctggtgctcaaattgctgcagtgtttaagattgggaatagcaaggaacttccaccaataccggattatctttcggagcactgcagggacttcattaggaagtgtctgcaacgtgacccgtctcaacgtccaacggcagttgagcttttgcaacacccgttcatacaaaatggaatttcacttgagaaatctgttactcctaatcatttggagcatttggctgccatatcatgcagaacaaaacccaaggtggccgtgcagacaagaaatgcctccttaggttttgagggtcagacgatttaccaaagaaggggtgtaaaactatcttcaaaacacagtgatattcacatacgaagcaatacatcctgtccagtttctccatgtcggagccccctgctaaaggcgaggtccccccaacacacaagtggcaaaatgtcaccctctcctatttcgagccccagaactacatcaggcacttccacacccctatctggtggtaatggtgcaattccttttaaccacctaaggtatgcaacttacagcagcgagggatttgggaccacatcaagaggcctagatgatcacttctccaactgtcataaagatctgaaccttgggcattttgctgaggcgcatcaagtctcacagggacctagggaaagggtagtatctgaagctgatattctgagccctcaatttagaaagaaacttggaaatgtatttgacttgcgggaaaggttgtccccttctgaacattttactcgtcgtgccttggtggatcatgtggagctaaatccttcaaaccctggactaaagcgtggtaaataactagagtataaaaggcagggttgcatttttttttgaagtttgttgaagtaactggtggtttttggctactatgaccattcaatggctgcaagtgtatcatagtatcagaaagattgataatttctttagaagctaatggttgccaatggatgggatctctgttgtcatcaacgcaattcaagtcaacaaagattctgcctattcctacatggctgagcaagtttccttagcttactaaactggcgtgctaacaagtgacacgtgtcaattgatgggactgactgaatcacggaatgacccaaagcagtaactctccatctgtatacccctcaccccaatatgtacagaaggaatctcaactaggaacctagaatttgcacaggaaaaaaaaacaggtgtgctagccatttggcaatcagtgccagtttatctgttgctccacagttacatatcccacccatggttgaggtggagctgcaaagtccgttggaattatcttgtagcagtttctcggcaagatgagtcgcttcattcactgtacgtcggtgccggctactctgaaacttacatactataagaatctggtcccttactaactgcatgtcgtccgaaccactgcatgaacttgtttgcactgctgctgggattacgaatgttgtaacaaagcacgggttttgctgcttgatggcggaagcaaaatgtagtacagattaggtgatatgcagtcaagtgtttacctgtctgggtgatggcattcgtcaggaaatttctgccctgggctgttaccttgcatcgggggcagttactggcatgccctcggctgctcacaagtttcaggccatggtccagccccccgctgggctggtccttgcggtttatggcgatctgttgtcgtgtgtccgaggtcgcgatcgctgccagggtcgtggtggtgtctgcctgtctggtcatggctggtgtggccttgccctcccgaggatgcacctcgccgagttgcgctcctcactcctaccttggatgctccggggctgggggaccagaccaatctcatatggtccttggtggtggtagctggaactgaaaggggcctctggctgcgcggtccgccacaagaaacaacaatctcag

SEQ ID NO: 8065 - DNA, 4476 bp, Zea Mays
gcacagctagacagcttgtttggagccgcttcgtgccggctttacggtggaaaaaagcggacgaactctcccaaacggcggccaattgtcccgggcatgccttttgtcccgcctgcgattcttctccccgcggtgttcaacgtgcaaggctgcaaacggaatcggcaaggcgaggcgcagtggggaaaatcccatcgattcgctcggccctcgcccctccgctcgctccagaggcaccggcgccgccgactccggactactactccccgcgacgcaggcgctgtctccctcctcgcgcggcggccgccaccgcctcccagacgcctttgaggcagagaaggtgtcaactttgtttccatttgattggatattgtctttacgatcattgctagtgtattatgattttatgaaagatgatggtactatgtgaggtcaaatgaaagttatgatatgccttccttctgatggccagaatatgttaattgatcagtttggataccattgcgataagtagctgtctagatacaccagtacccacaaattctctcacacccaatatgccgacatggtggggtaaatcatcgtcaaaagatgttaagaaaaccaccaaggaaaacctgatcgatacatttcatcgcttgataagtccaaatgagcaaaagggaagcacaaaatcaaaacggaattgcaggcgtggcaataatacagctgctgagaaagtttgcaaatcaacaacagtgtcacgtccaacttctccatcgaaagaagtttctcgctgccaaagtttttcggctgataggctgcatgcccagccacttcctattcctggagtacgccctcgagtaactcgtgcagttgctgatgtcaatgtttcaaagcccatattggaaaaacgtggcaaacctccactgcttttgccacttcctaaacccaatccacttcaccggggacctggaagcagtgatattccttcagaaatagtggttgcttctgtctctagcaattgttctgctgatagtgaggatcgtgcagattctcagcttcagagccctgttgggaatgatactaacaatgtaaaaaaggtttcttcaaagaacaagtcaagtaatgtttgcaaggatcactctggtgctattactaccaagaccacgaaagaaatattgaagccagctgctaatgcattcctcagtaaccatacacagtccgcgccaccaagaggtatctcagctgacaataatcaactaaatttacaaaatccccagccagtagtttttgagagtgctcccaatagtttgatgtcaagtccttcgagaagtccaagaccaatatgtcctgatcatattctgacttcagcattttgggcagtgaagcctcatgctgatgtaactttccttggatctggtcagtgctccagtccaggttcaggacaaacatctggacataattcagtgggtggtgatatgctatcccagctttttttgcagcccaccagaggtagtccagagtgttcaccagttcctagcccaagaatgacaagtcctggtcctagttctcgtgtgcacagtggaagtgtttccccattgcatccaaggtctggaggactggcacctgaatctcctacaagtcggcatgatggtggaaagaagaagcaaacccataaattgccccttccaccattgagcatcgctcacagtccattttttccgaataactcgacaccaagtagtcctatttcagtaccccgtagccctggcagaacagagaatccatcaagtcctgcatcgcgatggaagaagggcaagctgattggtcgtgggacatctggtcatgtatatgttggcttcaacagtgatagtggtgaaatgtgcgcaatgaaagaggttaccctattcttggatgatcctaaatcaaaggagagtgcaaagcaattggggcaggaaatatcactcttgagtcgcttacgacatccaaatattgtacaatactatggatcagaaatggttgaagataaactttacatatatttggaatatgtttctggtggatccatacataaacttctacaagaatatggacagcttggtgaaccagcaatacgcagctacacccttcagatactttcaggcttagcttatttgcatgccaagaatacggtccacagggacatcaaaggtgccaacatactagtaaatccaagtggccgtgttaagcttgcagactttggaatggcaaaacatatcaatgggcagcactgtcctttttcatttaagggtagtccatactggatggctccagaggttataaaaaattctaatggatgcaaccttgtggttgacatatggagtttaggttgcactgtcctggaaatggctacctcaaagccaccatggagccagtatgaagggagcacagagccacagataagatgtgccattacattgacacccagagagcagaatcccacactgggtgaatgagtgaaaagttactttttcctgaattttaccaagactttcgtgctatctgaaagtgattgctgcagtgtttaagattgggaatagcaaggaacttccaccaataccggattatctttcggagcactgcagggacttcattaggaagtgtctgcaacgtgacccgtctcaacgtccaacggcagttgagcttttgcaacacccgttcatacaaaatggaatttcacttgagaaatctgttactcctaatcatttggagcatttggctgccatatcatgcagaacaaaacccaaggtggccgtgcagacaagaaatgcctccttaggttttgagggtcagacgatttaccaaagaaggggtgtaaaactatcttcaaaacacagtgatattcacatacgaagcaatacatcctgtccagtttctccatgtcggagccccctgctaaaggcgaggtccccccaacacacaagtggcaaaatgtcaccctctcctatttcgagccccagaactacatcaggcacttccacacccctatctggtggtaatggtgcaattccttttaaccacctaaggtatgcaacttacagcagcgagggatttgggaccacatcaagaggcctagatgatcacttctccaactgtcataaagatctgaaccttgggcattttgctgaggcgcatcaagtctcacagggacctagggaaagggtagtatctgaagctgatattctgagccctcaatttagaaagaaacttggaaatgtatttgacttgcgggaaaggttgtccccttctgaacattttactcgtcgtgccttggtggatcatgtggagctaaatccttcaaaccctggactaaagcgtggtaaataactagagtataaaaggcagggttgcatttttttttgaagtttgttgaagtaactggtggtttttggctactatgaccattcaatggctgcaagtgtatcatagtatcagaaagattgataatttctttagaagctaatggttgccaatggatgggatctctgttgtcatcaacgcaattcaagtcaacaaagattctgcctattcctacatggctgagcaagtttccttagcttactaaactggcgtgctaacaagtgacacgtgtcaattgatgggactgactgaatcacggaatgacccaaagcagtaactctccatctgtatacccctcaccccaatatgtacagaaggaatctcaactaggaacctagaatttgcacaggaaaaaaaaacaggtgtgctagccatttggcaatcagtgccagtttatctgttgctccacagttacatatcccacccatggttgaggtggagctgcaaagtccgttggaattatcttgtagcagtttctcggcaagatgagtcgcttcattcactgtacgtcggtgccggctactctgaaacttacatactataagaatctggtcccttactaactgcatgtcgtccgaaccactgcatgaacttgtttgcactgctgctgggattacgaatgttgtaacaaagcacgggttttgctgcttgatggcggaagcaaaatgtagtacagattaggtgatatgcagtcaagtgtttacctgtctgggtgatggcattcgtcaggaaatttctgccctgggctgttaccttgcatcgggggcagttactggcatgccctcggctgctcacaagtttcaggccatggtccagccccccgctgggctggtccttgcggtttatggcgatctgttgtcgtgtgtccgaggtcgcgatcgctgccagggtcgtggtggtgtctgcctgtctggtcatggctggtgtggccttgccctcccgaggatgcacctcgccgagttgcgctcctcactcctaccttggatgctccggggctgggggaccagaccaatctcatatggtccttggtggtggtagctggaactgaaaggggcctctggctgcgcggtccgccacaagaaacaacaatctcag

SEQ ID NO: 8066 - DNA, 1355 bp, Zea Mays
gttgcccgcaaaggggactgctccgaattccccaccaggccacaagtcctagttccaaaaccctctctcctccccgtcctactcgtaccccatagccaatttccctccttcgctgccaatggacctctccgccgtccaggccgccctctccgacaagtcctacaccgccgtcgcctccctctgcgacgagctcctcctacaggccgcgtccaagggaaccaataccgacgaatggccctactctgtccacctcctggcccacctctacatcaatgacctcgcgcggttcttctggaaatcgctgccgcaggaggtgaaggacacgcggccggagctcgccgcggtctggaggattggtcagtgcctctggaacagagactatgctggtgtcaacacggccgcacaggggttcgagtggggccctgacctcactgaattcatcactgccttcctagagatttggtagtggcatgggtgggtagaggctgttgaacatattgtcaccatggatttgtagtgggagaatctatctatagagttggtctgcactgagaatcatatatcctctgtgaaaatgctgatggagaagttcgcaggggagcttcatggctgttctatgatactctgattcattctgtcaaatttgttctccaagagagctacagacaaaggatattcaaactgttgacttctgcatattcgacaattagcgttgctgatgtggctcatttcatggggatgagtgaggaggatgctacaaactatgctgtgcaaatcggttggagtttgggcgcagcgaccaagatgcttactgtcaaaaagccaaaggctcagatcaaccagaagcttgatgcgagcaaactgcagcgcctgactgagtgtgttttccaccttgagcactgatgctcagtgtcaatcgtgttgcatccccgtcacttctctactctgcacattttaagaaccatgtttaccatggctgaaaaggggtgatctctcagtactgaatttgcttctgtaagtggtttctgatagcgtgctagctgttactgcgcctatgggttgttcgtatggtggcccttcgtgccagaggcgcattgaaatgcgtcacactttgtcattactctggaccttaaccagggaagtcttgattgcataaaaatgctaacaagttggtcatgctcatgcccacggttgtccatcatatgaaaagtgaagtcttttggagttcgtagaagctgtttggtaacttgtattgttttcacgctgaaagacgggttaagcaaatgacttgtatggaactgaaataggaaggaatatttgtcattaagggggtgtttgaatgcactagaactaat

SEQ ID NO: 8067 - DNA, 3395 bp, Zea Mays
ccagtccccacctcctccccgcttccaccccctcgcccgtcgcttcctcgtcacgagtcgtcgtctccccttcgccgaccgggacgcggaaacgctcgacgcaagcaaaccctagccaccgagctagcggggagcctggagggatgaagagcctgttcaagagtaagatcaggtggcagcaccggtccaacgaccccgcgtccccggcggcgccgccgccgcagacgtcggggccgccgcccgcgagctccccgtcggggacggcgccggcgccggcgctctccgtctctacgccggtctcgccctcgccctcctccgcggcggcgacgcccacgggcgctgctgctgctgcggcggcggctggagcgggaggggaggactacatatcgtcggaagaggagttccagatgcagcttgccatggcgctgtcggcgtcttccaacagcgactgcgcggggggcctggacggggagcagatcaggaaggccaagctcatgagcctcgatcgcttcgccgcccaccgggacgagacccacaccgcggagttcctctcccgccgatattgggattataactttcttgattaccatgagaaagttattgatggcttctatgacatctttggctcctctattgaatcctctaggcaggggaagatgccatcattagcagatctccaaacaggcataggggacctaggctttgaagtcattgtagtaaaccgagccattgatagtaccttgcaggagatggagcaagtggcacagtgcatcctgttggacttccctgttgccaatattgcactcttagtgcaaagaatagctgagcttgttacagataatatgggtggacctgtcaaagatgctaacgacatgctcacaaggtggctggagaagagtactgagctgagaacatcgctacaaacaagtttgttgcctattggttgcatcaagatagggttatcacgtcaccgtgccctacttttcaagatccttgccgatagtgttgggattccatgcaaacttgtcaaagggagcaattatactggtggtgatgatgacgatgctataaacataattaagatggacaatgaaagcagatatcttaagttggaaaggcaattcgttaaattctaatcgaaaactcggcctgaatcgaacagctggatcatcaagtactgttgatgctaatgtggatcctactgtattgccacttgaacctaaaggtggccaactgcctttgttcagcagtggtgattggatgtcagacattgattctggatatgaggcagcagaaattgcagcttctactcaaacctcttcgggtgtcacaccatctgtttctgctggaagtgtttttggcagttcatggatgctggttaatcatgaccaatcagatggaccatcaacttctgctggtacatcatcgcagcagaaagttgtacctcaaagcgagcatcagcggaatttaaaccgccttccagatctgcaggaaattccagagtcaaaatacctttttgctgatcttgttccttctggggataataagtctaagaaaacttcagtaccattcaaaggaccagatcataggaacaatgagttgcaaaagcgcagagagaacattgtccctaatgctggaagaccacagcagcggttagttatgaagaattggtctccttacaatgatgtttccaacaacaaacagtacaattatgtcgaggattcgtttgctcgtagaaatgttggtaataatgctgcatcatcatcatcccagatgccacgaccagccgtaagatctaaccttaattctggattgcataatgatgcatcatatcataattatgatagcattatggctggtacctctgccatgaagattacatctacagctgagaccgggaaggttcctgaaagggttctgcgtggtgatttggacaagggtcaaacaaattatagattggaggatcaacatgtcatagttcaaccaccacagggaagacttccatggggtaatcctgcagaaggaagagttccaatgaatagagttcagagtcaagcaaaacaacacttggaaaacatggatgcaaagcaagaccataagaaattgctccctgatccaaaaaaatctccccttgacagattcatggacacatcattgccttcaagaaacatggacatgaggtcacagaggcttgacttcgatgatgtctctgagtgcgaaattccttgggaagatcttgtgattggtgaaaggattggcttaggaagtagctgtaaaaaaattcttggatcaagatttttatggcgatgctctggatgagtttaggagtgaagttcgaattatgcgtcggctgcgccatccaaatattgttctctttatgggtgctgttacacgccctccgaacttatctattgtatctgaatatcttccaaggggaagcttgtataagatccttcaccgccctaattgcctaattgatgaaaagcggaggatcaagatggcccttgatgtggccaaaggtatgaattgcctgcacactagcatgcctacaattgttcatcgagatctgaaatctccaaacttgctggttgacaataattggaatgttaaggtttgtgactttggactttcgcggttgaagcacagtacatttttgtcatccaaatctacagctggaacacctgagtggatggcacctgaggttctgcggaatgaacaatcgaatgaaaagtgagtgattttcagatgcattctagctcccatcttattcgggaatcaggatattcgggttattgagcatttccgtggagcgtggatataggattccatgttcctgtcgaatttttgttcttgtggttttgtgctcagaccaaagatttttttgttttctcgtagttggatctgactgcttagtaatttcatgttgtgggatcatgcatctatctagtcaatcttttacaaatattttgtactccatatgcaagactttgttactaagaccgtgtcaagcaggttacctatatggtcacccaaaacactattttgcattatagactgcattgttcgcagagtggaatttgaaataggagatgagatgagagataggatgagtaagctggagatagtgtaaatgtgtaataacccggtaaaacacagttctcttctctctcccttctactctgccatctctctgtctctcctccgtcaccccatcctaacaacacgaacccaagtagcatatatggcgcacagcttgacacatacatgcttgtcacatgtgactatgtgagccttgttcctgttacacttgccagcgatccaacactcgccttcggcaatgaattcttacaagccgccttctccaggagatacacttaccttccttgccaacttcc

SEQ ID NO: 8068 - DNA, 3478 bp, Zea Mays
cttcgcagttcgcactcctcccgtgcccccccatccccagtcgggccagtccccacctcctccccgcttccaccccctcgcccgtcgcttcctcgtcacgagtcgtcgtctccccttcgccgaccgggacgcggaaacgctcgacgcaagcaaaccctagccaccgagctagcggggagcctggagggatgaagagcctgttcaagagtaagatcaggtggcagcaccggtccaacgaccccgcgtccccggcggcgccgccgccgcagacgtcggggccgccgcccgcgagctccccgtcggggacggcgccggcgccggcgctctccgtctctacgccggtctcgccctcgccctcctccgcggcggcgacgcccacgggcgctgctgctgctgcggcggcggctggagcgggaggggaggactacatatcgtcggaagaggagttccagatgcagcttgccatggcgctgtcggcgtcttccaacagcgactgcgcggggggcctggacggggagcagatcaggaaggccaagctcatgagcctcgatcgcttcgccgcccaccgggacgagacccacaccgcggagttcctctcccgccgatattgggattataactttcttgattaccatgagaaagttattgatggcttctatgacatctttggctcctctattgaatcctctaggcaggggaagatgccatcattagcagatctccaaacaggcataggggacctaggctttgaagtcattgtagtaaaccgagccattgatagtaccttgcaggagatggagcaagtggcacagtgcatcctgttggacttccctgttgccaatattgcactcttagtgcaaagaatagctgagcttgttacagataatatgggtggacctgtcaaagatgctaacgacatgctcacaaggtggctggagaagagtactgagctgagaacatcgctacaaacaagtttgttgcctattggttgcatcaagatagggttatcacgtcaccgtgccctacttttcaagatccttgccgatagtgttgggattccatgcaaacttgtcaaagggagcaattatactggtggtgatgatgacgatgctataaacataattaagatggacaatgaaagatatcttaagttggaaaggcaattcgttaaattctaatcgaaaactcggcctgaatcgaacagctggatcatcaagtactgttgatgctaatgtggatcctactgtattgccacttgaacctaaaggtggccaactgcctttgttcagcagtggtgattggatgtcagacattgattctggatatgaggcagcagaaattgcagcttctactcaaacctcttcgggtgtcacaccatctgtttctgctggaagtgtttttggcagttcatggatgctggttaatcatgaccaatcagatggaccatcaacttctgctggtacatcatcgcagcagaaagttgtacctcaaagcgagcatcagcggaatttaaaccgccttccagatctgcaggaaattccagagtcaaaatacctttttgctgatcttgttccttctggggataataagtctaagaaaacttcagtaccattcaaaggaccagatcataggaacaatgagttgcaaaagcgcagagagaacattgtccctaatgctggaagaccacagcagcggttagttatgaagaattggtctccttacaatgatgtttccaacaacaaacagtacaattatgtcgaggattcgtttgctcgtagaaatgttggtaataatgctgcatcatcatcatcccagatgccacgaccagccgtaagatctaaccttaattctggattgcataatgatgcatcatatcataattatgatagcattatggctggtacctctgccatgaagattacatctacagctgagaccgggaaggttcctgaaagggttctgcgtggtgatttggacaagggtcaaacaaattatagattggaggatcaacatgtcatagttcaaccaccacagggaagacttccatggggtaatcctgcagaaggaagagttccaatgaatagagttcagagtcaagcaaaacaacacttggaaaacatggatgcaaagcaagaccataagaaattgctccctgatccaaaaaaatctccccttgacagattcatggacacatcattgccttcaagaaacatggacatgaggtcacagaggcttgacttcgatgatgtctctgagtgcgaaattccttgggaagatcttgtgattggtgaaaggattggcttaggttcatatggagaggtttaccgtgctgactggaatggaaccgaagtagctgtaaaaaaattcttggatcaagatttttatggcgatgctctggatgagtttaggagtgaagttcgaattatgcgtcggctgcgccatccaaatattgttctctttatgggtgctgttacacgccctccgaacttatctattgtatctgaatatcttccaaggggaagcttgtataagatccttcaccgccctaattgcctaattgatgaaaagcggaggatcaagatggcccttgatgtggccaaaggtatgaattgcctgcacactagcatgcctacaattgttcatcgagatctgaaatctccaaacttgctggttgacaataattggaatgttaaggtttgtgactttggactttcgcggttgaagcacagtacatttttgtcatccaaatctacagctggaacacctgagtggatggcacctgaggttctgcggaatgaacaatcgaatgaaaagtgagtgattttcagatgcattctagctcccatcttattcgggaatcaggatattcgggttattgagcatttccgtggagcgtggatataggattccatgttcctgtcgaatttttgttcttgtggttttgtgctcagaccaaagatttttttgttttctcgtagttggatctgactgcttagtaatttcatgttgtgggatcatgcatctatctagtcaatcttttacaaatattttgtactccatatgcaagactttgttactaagaccgtgtcaagcaggttacctatatggtcacccaaaacactattttgcattatagactgcattgttcgcagagtggaatttgaaataggagatgagatgagagataggatgagtaagctggagatagtgtaaatgtgtaataacccggtaaaacacagttctcttctctctcccttctactctgccatctctctgtctctcctccgtcaccccatcctaacaacacgaacccaagtagcatatatggcgcacagcttgacacatacatgcttgtcacatgtgactatgtgagccttgttcctgttacacttgccagcgatccaacactcgccttcggcaatgaattcttacaagccgccttctccaggagatacacttaccttccttgccaacttcc

SEQ ID NO: 8069 - DNA, 1225 bp, Zea Mays
gagcggagcacagctcgcagcccgtagcccgcagcgggtatcgtcgtcggctcgtcgccggcggtgccaaattcccctttccccctcggcgtcgacgggccgaacccccgcgggtgctgtctgctgtctgagcaggagcagaagcaggctgcgggcggggcactgccccgtcgtcctcgtcccgccgcgacgtgtatgcgacgcccgagatctgtcccacgatttcgaggaaatcgacaagatcatggagcacaacatcagtgtcatcgttcctcatcagaacctcagcaacctctgcgggcgtaaccgtcacctccttgatcagtttctcaatctctggatacgtgtcatggtactcgatggagtggtagttgttggcaaggatttggaaagactctggggtgcaataccccatgtggatgtgcatgtccatccttccaggccgcagcagtgccgggtcaagccgctccttgtaattggttgtgaagacgatgatcctttcttccccacttgttgaccacagcccatcaacaaagttgagcagtccagacagcgttacctgttcagaaaatccaaattatttgtcaagataactgaggaagtggtggaatcgagaagatagtactcaccttgccttcccccttgttttgttctgtagaatctgactcatcatgtccctcggcctcctgccgttgtttgagttcgatggtgcagtcaatatcttcaatgactagaatggatcggttgtccatgttaacaagaagcctcctgaggtctgagttggatgtgaccgcagttagctcgagatcatatatgtcaaacctgagatggttggccatggctgcgattaggcttgacttcccagtcccaggtggaccatacagaaggtcatcgatgatggactgcttcagcttcttgtccatggcaagcgtgtcgaatgtagatgggtggtggagttcaatcggggaccaattgccgtactcagtcatgtgtatcatgagggttctctcctgggctttaatggccttggctgtggccaaaatgaacgggagacaaggcaccacttgaactccgtgccttgataaacatcgagcatctcgtcgccctcatccatgctgaccatcatcttgtcgtcctcgtccatgctgctgacgcgcaggcgctgctggatgtcggtgttcatgcgcgtggcgaggtaaccgaagccggagaggaccagatcgcg

SEQ ID NO: 8070 - DNA, 1800 bp, Zea Mays
agaatcagaagttcagaaccaaaactggtagtatcaatagcagtatcaatagcaatctagcacttgtcaacctaaccgattcccatccaaccaaccccgcacaccgccgcgggaagcagaagagactggaagagcctacaaaagcttgggggcgcggcagcacaacgcaggatggtgggcttcctccgggccttcgccgccgcttccgctgtgcccgcagcagctgccgcagcctatgctctcttttcatcctccgccccttcctcctccaagctccgcttccctcttcctgactccttcctctccgccgccgcctcctcgacctccgggcgcgctcccaacgccgtgcccccgatggccaccgccgctgccacggctgatctctcggctgccgatgataagcgggactcggcgcttccggagctcacgacggaattcatggtggacatgaaatgtgagggatgtgtaacagctgtgaaaaacaagctgcaaactcttgaaggaataaaaaacattgaggtggacttgtctaaccaagtcgttagagttttggggtctcttccagtgaagacaatgttagatgcccttcatcaaacaggtcgagatgcacgactgattggccaagggaacccaaatgatttcttagtttctgctgctgtagctgagtttaaagggcctgttgtatttggtgttgttcgtctggcccaagtaaacatggagttggctagagttgaagccacgtttagtggtctatcacctggtaaacatggatggtcaataaatcagtttggggatttgacaagaggtgcagaaagcactggcaatgtctataatccgccagatcatttatctgataagccacttggtgacctgggaacactagaagctggagagaacggggaagcccatttctcaggaccgaaggagaaattgagagtggttgacttgatcggccgctctattgctttgtatgcaaccgaggacagatcagaccctggcattgccgcagccgtgattgcaagaagcgccggggtaggagagaactacaagaaactctgcacttgtgatggtgtcaccatttgggaatcaagctaaacctgctaccagcgaattttccatactatttacttccgtatgttgtacacacacattaacgtagaaacaatcaaagtggcaactgaacatttggaataagcttgaatacattgaggaataaaggctgttctcatgtggagcttggacagtattttttttgcgtcggttagtggacctgttctgcttctgccgctgcgacacaacagatctctggtttgattacccaaaggttcctgctccattgcttgcttggctaaacgcacagtacacaaacgaagttcacattggtggcagccatgtgaggacgagggggctccggacgacgtggacgccagccaggacgccgtggctccacctttgaactctgtaacctaaccttgacacggtaatggtagtatggtacgtcgaggacgacggacccgacgttcgtcacggtgcgacgcaccgtcagcgcagcagatggccggataattcaagtcaccaggcgagctgaaggtgtgcttgcatgtcttgctcgagttcttggtgaaggacctgagctgcaacggcgtcaggttctccacgcagaggaactgcaggtagtcgtcctggaccatatcgtagaccaggccagacttgagaacacgcagctagcgggcgtatgtggccagctccgtgatcgaacggcgtggacgccttgcagttgcaggtggccgcgtcgttcag

SEQ ID NO: 8071 - DNA, 2851 bp, Zea Mays
gccaggtcgctctcgcccgcctcccgccccgctctcgcctgggcgctatcgccgtcactatagctggcaccagccttaccacaccccagcggcccctgccccgcacgccgtcctccctcccgcctgcgtcgccaggtctcggcgacgcaattattgccgcagcgaagcgacaggtgtggcgtcaatggggtgggtctgaccctgactgcccccatccatccgtcgcctacttgtcgcgtactagctagctccgggtggagtggagctagctagtcatggcagccatcatcatagccgtagagccatagccacacttgtcgctcgtcatcaagagctgccgagatagttgcggcagcaggcagcacagtgccgctccgtccgtccacgggctgtggctgtggtgtgcacacatatgcgccgccgccgctgccgctgccgccgccttgtcgtttgccctgtcgcggctctgctcggctgcgtgggctagtttacagccggagttgtacttcgcgttcgcggcggggggaaggagggggggagtaaagaatcggaggcgcgcgcggattggatgctgtgcgtgcgcgcggaggacgcgctggccgccgctgcagccgcggccgcagcgtccgacaagatgcgctccgtgaccctgggcgggacgatccagagggcggtgcggaggatggctggcggcgccggccggaggagaccccacgccttggcggactcggggaccgccgactcgtcggcgtcagcatcggccagctgctccggggatgatatcagcagcactggtagtgccaagagggaagcggtacaaaggtgcaccatgcatcggtacagatcgcagctagagcaggaagttaacaaattgcaaaggcaactccaagaagagattgatttgcacatggcgttgacagatgccattacatataatgcggcgctgatacttaaggcatctatgaagcttcctgacaaggcacacgagctattgattagcatatcctctctggaaaccgctatcacaaagcttgaagaggatctacatcacctgcactaccagttatgtgatgcgaggaatgaaaggctacttgcagaaaataagccagaatgcttgctacctacagcgtcagattgccaaccttctacagcttgcgattgtacaagggaagagcctgaacaaacattaagatattcgagattcaaagattatcaccaagtggaggacggtttgtcaactgaacctgaagatcaacaagatgacgaaaaagacgccgaagatggagaacatgtatctctaaatatgctggtagaaaagcaccaagacgtttctttaactggactgttggaacacattttacacacaatgcaagaggcatgctctatggaaaatgaaggcaaagaagatcagaagatagatgcattaacatttagtcagcccaatttcaagaaaagcgacatgagtggaaatttgtggaataatccaaaccagctctctgaagagatgaacgtctatctggttcaacattgactactttgtcagattcatctataatcgcctcagtgctgcggagtccttcgattgactggaacaacggcgatggtattattgatgatgttagaaactttgacccgtacaacgttaaaggcaaggaagcacggagagacgttgggagctattgttcagtagctgaagtgtcttggatgtatattggcaatgaacaacttgaatatgcatccggagctcttaaaaagttcaggtttcttgtggagcaactatcaaaggttgacccttcttgtatgaactgtgatgaacagatagcattttgggttaacttgtacaatgcattaataatgcatgcttatttggcatacggtgtccctgaaaatgacattaagctgttcgcgctaatgcaaaaggcctgttacacgatcggcgggcagcctgtcagtgcagccgaaatagagtttgtgattctgaagatgaagacaccggtgcaccggccacagctctccttgatgctggcccttcacaagtttaaaacgtcagagaacctcaggagatattcaatcgatggcactgagcctcgcgtcctcttcgcgctctgctgtgggatgttctcttctcctgcggtaaggatcttctctgctgaaaacgttcgagctgagcttcaggagtccatgagagactacatccgagcgtcagttggcataaacgacaagggagagctcgtagtccccaagctactgcagagctacgccaagggcatcgtggaggactccctgctcgccgactggatctgccgccatctgacactagaccaagtcgccgcgatccaggacacgtcgtcgtcgtcgtcgcataagcagcggcttcttggagtgcgcagcttcagcgtcatcccgttcgactcgaggttccggtacctgttcttgtccaacaacaccaggtgccagaattgaaacaagagtacaagactgcattgctatgcgcagacagccacaggagtgggtgcttgacaagttgacacttttttcgagagctgaaaatattagcttttgctgtacattctgtaaatttttccgttgactaggattcttctttgtacgtaacattcagctaactttttgtacatcaagcgaacccagaatacaagtgtagattcggtgatggttcagtctcaggttagtggcttgattaccgccaaggaacccaaaattacactgcaaattcacagccagtaaaaaaaatctgcatgttgcacatccaacaaactgagctatcgctgctactgaactttacaaggcgatttttccgtgactaggattcttctttgtacgtaacatccgc

SEQ ID NO: 8072 - DNA, 2381 bp, Zea Mays
atttcaagtcgcaaagcgcgacgtccgacgagagagagcggcctcagaacaggagcgaagggatccgccagagtccccctgagtccaaccaagctcggtccggcccagtcccaggcccaggcccaggcccgagcggtagcctgtaggtcgccggcgatgccgttcctgtcgacgccgtcgttcgacctatccgccggcgcagagccaaccctgggcccgcgctcagcggccccgccgcctccacccacggcggccgcgcatcatcagccgccggtgtccgaggcggcggcccggcggcttcgggaggcggaggagcggctgcgggaagccatcgaggagctacaccggcaccagggcggtggcgttaagggagatggggacgagcagcgggagggagagcgggggtgcggtcacgacggggagtcatgcgcggcgcacgccgcggggaacctgtgccagagcttcctgctttcgtacggtgtccgcgtcggcatcggcatcctcctccgcgccttcaagctcgtgcgccgcaggtcctatggctcgctcctcgaccttaagcaggttcggtggcaggattggccatactagcactggatgattcaagtaggaggcgtactctatctttatatcttctagcaaggctcgctcagtgtgcatataattctgcaaaatctaagaacaaatttcatttttggggaagccattggagacatggagatgcattgcttttttcattagcatgtgcccaggttatgtatgcttttgttatgaggcctgaaagcttacctaagtcgtaccaagaatttatccttaagacaggaccagtagcagaacctgtctacaaggttgtcaaagaatgctgcagaggtggtcctgtggatctaactgccctctcagcccatttatcaaacaagaggaatccggatttgataaatttaacaacaaatccatccattatcccatgttctgtgatccaccctgacagagcatcatgcttggctcaaaatgttaatgttgtttcatcaacattcaagaagacattccctctatatttctcattgacatttgtgccctttgttgtcctacgtcttcaaaagttcttggaatcgccaacgacaacttgttggcgtgctcttgtgggtgcagttcgctccaccacctttttgtctgccttcgtcactgtattccaggctgctatatgtttgcaccgaaaagttgcgaacaaagaccacaaacttgtgtattggtttgctggtttgatgtcgggtctttcaattcttttggaaaagaaagctagaagggctgagctagccctctatgtgcttccacgtgctggagattccctatggtatatattgatcaaccgccacctgctcccaaatattaaaaatgctgaggtggctcttttctgcatgtgcatgggaggaatcatgtattttctggagtacgagccagacacaatggctccattcctcagagggctcatcaggcgcttcctggcaagcaagatcagcaatccaagccccccgcctcccaatcggaatgcctcctactcgtaccttcagacgctgaatgctctggatcaatcaagaacccaaccaggggtggataacggactgacgacatcggagaaatacaacctcgaatcaattcctggactttagagacctcatctgtggtattagtaaattgggtcttgtagcttgggaagatcacgaaaactcgaacacccattacatgtgccatcctgtgatgggtttatactctgttatacgtgtttgtcttgagtgcaaaataaatggataagcagagatggtttgtgcgggagtatggactgatacgaagcaatttgctcgttcttgtacatgcccaagtccacaaggtcaggatttgaatcggtcaccaggggcacgaaggtatttttttcgttgcatcacaacgtcgaagacatgatcctgaattcctgacaaaccgaaaggtcgccccgagcagcctcgcaagggtgtgccgaagctcttgcaatttcgtttttatccctttttaattttgttgtgattttacctctgttctacaaacgaagctcagtcgtattcttgtgttgttacagttgacaatgttaaatctgatatgaaaaaacaaaaatttgcacacaatttattactattttactcgtcattgtattacgtatttgcgattttactcccgtaggatgcaccgtacagaataggagggtcgtttggatctttcgcatattatattttcatatttttatttttctaatcactaattatgatttttcacttttaaaatggatgcataaaatcataaagtagcttcgcttttaaaatggatgcataaaatcataaagttaaaaacag

SEQ ID NO: 8073 - DNA, 2389 bp, Zea Mays
atttcaagtcgcaaagcgcgacgtccgacgagagagagcggcctcagaacaggagcgaagggatccgccagagtccccctgagtccaaccaagctcggtccggcccagtcccaggcccaggcccaggcccgagcggtagcctgtaggtcgccggcgatgccgttcctgtcgacgccgtcgttcgacctatccgccggcgcagagccaaccctgggcccgcgctcagcggccccgccgcctccacccacggcggccgcgcatcatcagccgccggtgtccgaggcggcggcccggcggcttcgggaggcggaggagcggctgcgggaagccatcgaggagctacaccggcaccagggcggtggcgttaagggagatggggacgagcagcgggagggagagcgggggtgcggtcacgacggggagtcatgcgcggcgcacgccgcggggaacctgtgccagagcttcctgctttcgtacggtgtccgcgtcggcatcggcatcctcctccgcgccttcaagctcgtgcgccgcaggtcctatggctcgctcctcgaccttaagaatattagcaggttcggtggcaggattggccatactagcactggatgattcaagtaggaggcgtactctatctttatatcttctagcaaggctcgctcagtgtgcatataattctgcaaaatctaagaacaaatttcatttttggggaagccattggagacatggagatgcattgcttttttcattagcatgtgcccaggttatgtatgcttttgttatgaggcctgaaagcttacctaagtcgtaccaagaatttatccttaagacaggaccagtagcagaacctgtctacaaggttgtcaaagaatgctgcagaggtggtcctgtggatctaactgccctctcagcccatttatcaaacaagaggaatccggatttgataaatttaacaacaaatccatccattatcccatgttctgtgatccaccctgacagagcatcatgcttggctcaaaatgttaatgttgtttcatcaacattcaagaagacattccctctatatttctcattgacatttgtgccctttgttgtcctacgtcttcaaaagttcttggaatcgccaacgacaacttgttggcgtgctcttgtgggtgcagttcgctccaccacctttttgtctgccttcgtcactgtattccaggctgctatatgtttgcaccgaaaagttgcgaacaaagaccacaaacttgtgtattggtttgctggtttgatgtcgggtctttcaattcttttggaaaagaaagctagaagggctgagctagccctctatgtgcttccacgtgctggagattccctatggtatatattgatcaaccgccacctgctcccaaatattaaaaatgctgaggtggctcttttctgcatgtgcatgggaggaatcatgtattttctggagtacgagccagacacaatggctccattcctcagagggctcatcaggcgcttcctggcaagcaagatcagcaatccaagccccccgcctcccaatcggaatgcctcctactcgtaccttcagacgctgaatgctctggatcaatcaagaacccaaccaggggtggataacggactgacgacatcggagaaatacaacctcgaatcaattcctggactttagagacctcatctgtggtattagtaaattgggtcttgtagcttgggaagatcacgaaaactcgaacacccattacatgtgccatcctgtgatgggtttatactctgttatacgtgtttgtcttgagtgcaaaataaatggataagcagagatggtttgtgcgggagtatggactgatacgaagcaatttgctcgttcttgtacatgcccaagtccacaaggtcaggatttgaatcggtcaccaggggcacgaaggtatttttttcgttgcatcacaacgtcgaagacatgatcctgaattcctgacaaaccgaaaggtcgccccgagcagcctcgcaagggtgtgccgaagctcttgcaatttcgtttttatccctttttaattttgttgtgattttacctctgttctacaaacgaagctcagtcgtattcttgtgttgttacagttgacaatgttaaatctgatatgaaaaaacaaaaatttgcacacaatttattactattttactcgtcattgtattacgtatttgcgattttactcccgtaggatgcaccgtacagaataggagggtcgtttggatctttcgcatattatattttcatatttttatttttctaatcactaattatgatttttcacttttaaaatggatgcataaaatcataaagtagcttcgcttttaaaatggatgcataaaatcataaagttaaaaacag

SEQ ID NO: 8074 - DNA, 2558 bp, Zea Mays
atcatcatcaaagaatttcaagtcgcaaagcgcgacgtccgacgagagagagcggcctcagaacaggagcgaagggatccgccagagtccccctgagtccaaccaagctcggtccggcccagtcccaggcccaggcccaggcccgagcggtagcctgtaggtcgccggcgatgccgttcctgtcgacgccgtcgttcgacctatccgccggcgcagagccaaccctgggcccgcgctcagcggccccgccgcctccacccacggcggccgcgcatcatcagccgccggtgtccgaggcggcggcccggcggcttcgggaggcggaggagcggctgcgggaagccatcgaggagctacaccggcaccagggcggtggcgttaagggagatggggacgagcagcgggagggagagcgggggtgcggtcacgacggggagtcatgcgcggcgcacgccgcggggaacctgtgccagagcttcctgctttcgtacggtgtccgcgtcggcatcggcatcctcctccgcgccttcaagctcgtgcgccgcaggtcctatggctcgctcctcgaccttaagcaactggtttcggagaaagatcttatagtaagagaggaagcttgccgggtagggttgctttttggcggattcactggatcatatcatgcacttcgatgtttccttaggagatttaggaaaaaggagacaccattcaatgcggcgtgatggagcagaatattagcaggttcggtggcaggattggccatactagcactggatgattcaagtaggaggcgtactctatctttatatcttctagcaaggctcgctcagtgtgcatataattctgcaaaatctaagaacaaatttcatttttggggaagccattggagacatggagatgcattgcttttttcattagcatgtgcccaggttatgtatgcttttgttatgaggcctgaaagcttacctaagtcgtaccaagaatttatccttaagacaggaccagtagcagaacctgtctacaaggttgtcaaagaatgctgcagaggtggtcctgtggatctaactgccctctcagcccatttatcaaacaagaggaatccggatttgataaatttaacaacaaatccatccattatcccatgttctgtgatccaccctgacagagcatcatgcttggctcaaaatgttaatgttgtttcatcaacattcaagaagacattccctctatatttctcattgacatttgtgccctttgttgtcctacgtcttcaaaagttcttggaatcgccaacgacaacttgttggcgtgctcttgtgggtgcagttcgctccaccacctttttgtctgccttcgtcactgtattccaggctgctatatgtttgcaccgaaaagttgcgaacaaagaccacaaacttgtgtattggtttgctggtttgatgtcgggtctttcaattcttttggaaaagaaagctagaagggctgagctagccctctatgtgcttccacgtgctggagattccctatggtatatattgatcaaccgccacctgctcccaaatattaaaaatgctgaggtggctcttttctgcatgtgcatgggaggaatcatgtattttctggagtacgagccagacacaatggctccattcctcagagggctcatcaggcgcttcctggcaagcaagatcagcaatccaagccccccgcctcccaatcggaatgcctcctactcgtaccttcagacgctgaatgctctggatcaatcaagaacccaaccaggggtggataacggactgacgacatcggagaaatacaacctcgaatcaattcctggactttagagacctcatctgtggtattagtaaattgggtcttgtagcttgggaagatcacgaaaactcgaacacccattacatgtgccatcctgtgatgggtttatactctgttatacgtgtttgtcttgagtgcaaaataaatggataagcagagatggtttgtgcgggagtatggactgatacgaagcaatttgctcgttcttgtacatgcccaagtccacaaggtcaggatttgaatcggtcaccaggggcacgaaggtatttttttcgttgcatcacaacgtcgaagacatgatcctgaattcctgacaaaccgaaaggtcgccccgagcagcctcgcaagggtgtgccgaagctcttgcaatttcgtttttatccctttttaattttgttgtgattttacctctgttctacaaacgaagctcagtcgtattcttgtgttgttacagttgacaatgttaaatctgatatgaaaaaacaaaaatttgcacacaatttattactattttactcgtcattgtattacgtatttgcgattttactcccgtaggatgcaccgtacagaataggagggtcgtttggatctttcgcatattatattttcatatttttatttttctaatcactaattatgatttttcacttttaaaatggatgcataaaatcataaagtagcttcgcttttaaaatggatgcataaaatcataaagttaaaaacag

SEQ ID NO: 8075 - DNA, 1688 bp, Zea Mays
tcagctattcgcgggaccgtatccgagcaggacagcaggttgttcagcgatcactcgagcggtcgagccctcgcgccgcggagagtgtctccagtctcaagtacagcggaggatggagagcggcttgcttgacaccgccgcggctgccggtctctgcccggtggcggccgggcgccgccgcgtcgggagcacgggcacggcgaggtgcttcctcagctgctcctgcgcttccagagactgcagggtgagcgcgtcctactcccactccatcagccggatgctgagcggggtgcggtcggcggcgcgcaagaggctcttcaggagcgacccggccgagctgctgggcgtcgccaactggtcggagacgggcggcggcggcgccgggggccaccagcactggtggacggcgctggagaacaacttcgtgctggaggccaccgacgacgagtacggcggggtcgtcgtcgacgccgatcggctgccggccgacagggccgccttcgcgcgctccctcgcggcgtcgctctcctactggaagtccgtggggaagaaaggggtgtggttgaaattaccggtggatctagccgagttcgtccctttagcagtgaaggaaggcttcaagtaccaccacgcggaggaagcgtatttgatgatgacgtactggatccccgatgaaccgaatatgctcccagcaaatgcttctcatcaggttggggttgggggttttgtgatcaacgaccaaatggaggttctagtggtgcaagagaagtaccgcggatcgtcgctggatggcgtatggaaactccccacaggcttcattcttgcgtctgaggaaatctacacgggggccagcagagaggtgaaggaggaaaccggggtcgacaccgagttcgttgacgtcgttgctttcaggcatgcccacaacgtggcgtttcacaagtccgacctcttcttcatctgcatgctgaggcctgtgtcgagtgagatcaagattgacgagacagagattcaggcagcgaagataatgaatgaagttcgggacagtgatcgatcgataagcttgcgctaacccaccgagagagacgtttattttcagtggatggcgctggaggagttcgtgaagcagcccttcatccaggaagaccacatgttccagaagatcatggacatctgcatccagcgcctccgcaagtgctactgtgggctgacgccgcaccacgtcgtctccaagttcgacgacagaacgtccacgctctactacaatgtcgccgagcccgaggacgtgaactgcagcgccgcctgatgtaatatgatgtgagggggagggggagccaccccagcatctactagtctaatttttgctgcgcagaagtttcatgatgcagcagtgttagtcgtgcgattactgagagtgaaatactagtggcagactgcgcgaggcaatagagttgccgagcctgtacatatacgtgtagggcatatgcataaccagagagctgtatatcccggggcggatccccgggcaggaggaaaattttcattgccgccgtaaattacaatttaactttagctcgccctaaatcttatttatctctcttttttctttgtcctgagatccgcctgtagctatattagcttatagctcagtgctcgtgcgttgcaacgagatcatataatagctcgataac

SEQ ID NO: 8076 - DNA, 2098 bp, Zea Mays
cccatgcatatcccccattctgtgtatttatactcgtctgatcagtctttttctcataatatctcttgccttttaataccgtaacctaaccaagagtccaagattagctagttgacaacacaagaaaccaactgcattcgatctcggcttccttaatacctcatctccgtggacatctcaagagcaatagtgacgggccaagagaagggagaggaagcaatggctgtagctagctagctactgcgatagcaagtcacagaaaaatcatcaccacacacaaacacacacataagcacaagcaaaaaagcatcatccccagcaggtcccaataagaactccaaccatcactgccttcatcatccgatctcatatatccttacgccaacgacagctgctagctgcagcggagggagggcggcggcgcacgcgcggcacctatggaggcgcgggcagtgtcggcgctggacctttcgctgcacatcagcctgccgagcagcgccgccgggtcggcatcgcccgccccggagctgggcggcgggggagggattgggcgaggtgcgcagccgccggccggagcggacccatggcgtcgactgaacggatccacggcgtcgaccgagctgtcgctctcgccgccgctgtggcagcaggacgtggctgccggggatgtccttccgtgccgtcggctccggccggcagcgccgaatcactactcctccaccgcggatgcaacgacgttcgtgccagtgaccgtaccccggcttatttcgttcgacgccgcggcgggagcggaggacgaggcggcgcgggcgaggccaatcgaaggcgtgcccgtctacagcagctcgcgggctgcccgtcgtccatttctaggcgccggtgccggtgagtaccaccgccagggccaccacccaaaggcggccgggctatacaatcgtccctgtcactcctcgtcgcggccctcgtccctgcgctcgacgacgacgacgacgtctcccgccgtggctccccccgcggagtcctcgtacctctcgccgtccgcgtaccaccggatgctgtcgagcaccagcaggctccgcctccagggcgtgctcgccgacacgctccggggctacggcggacaccaccaccagcagcagcacttggacagcctcgccgcggcccgctatatgccgaggttcctggcctccaggcgcggcatgcgcgcaccgcggatgcggtggaccagcagcctgcacgcgcgtttcgtccacgccgtcgagctcctcggcggccacgagcgggcgacgcccaagtcggtgctcgagctgatggacgtcaaggatctgacgctagcgcatgtgaagagccacttgcagatgtacaggaccgtgaagagcactgacaagcctgcaacgacctcatcgggcgggccgcctgtggacggtggcggcgacgacgatgatctcccgagtgcccggcgggctcagtcgtcgtcgtcgtcgccagctggacgacgggacggcagcagcccgcaggcgttcaccagacaccggtcggctgcctcctcggagggcgcggcgagcctcgcgggcggcgacgacgtcgaatgctcctcctcggccgacgattccgactgcggcagggcgcgcagtgcttcgtcgtcaaggtacgtgtcacgtgtctttttttagctctagctagcactactagtagttttcagcaagcaaaaaagataatccagcagtaataataatctgatgagaagattagctagctagctagctagctagctagagctaaaacgatgttaggccctacacaacaagggatcctgagctgctggtatactgtactgtataacatcttgggatttggcctatcttgtcctcttgtctcgcttcctccctaggagaggctgctgcttttgcttctttttttttctccttatcactctgcgtcgctgcggcctgcggctgctatattatgcaggggaggactttgacctctcatcacaactttgcgtgaatcaaccttgctagctagaaatgtgatgtcaacttgtcaagaaccctgttctgcgtcttgttgctatagctactgcagtatgtgtgctctc

SEQ ID NO: 8077 - DNA, 2267 bp, Zea Mays
cccatgcatatcccccattctgtgtatttatactcgtctgatcagtctttttctcataatatctcttgccttttaataccgtaacctaaccaagagtccaagattagctagttgacaacacaagaaaccaactgcattcgatctcggcttccttaatacctcatctccgtggacatctcaagagcaatagtgacgggccaagagaagggagaggaagcaatggctgtagctagctagctactgcgatagcaagtcacagaaaaatcatcaccacacacaaacacacacataagcacaagcaaaaaagcatcatccccagcaggtcccaataagaactccaaccatcactgccttcatcatccgatctcatatatccttacgccaacgacagctgctagctgcagcggagggagggcggcggcgcacgcgcggcacctatggaggcgcgggcagtgtcggcgctggacctttcgctgcacatcagcctgccgagcagcgccgccgggtcggcatcgcccgccccggagctgggcggcgggggagggattgggcgaggtgcgcagccgccggccggagcggacccatggcgtcgactgaacggatccacggcgtcgaccgagctgtcgctctcgccgccgctgtggcagcaggacgtggctgccggggatgtccttccgtgccgtcggctccggccggcagcgccgaatcactactcctccaccgcggatgcaacgacgttcgtgccagtgaccgtaccccggcttatttcgttcgacgccgcggcgggagcggaggacgaggcggcgcgggcgaggccaatcgaaggcgtgcccgtctacagcagctcgcgggctgcccgtcgtccatttctaggcgccggtgccggtgagtaccaccgccagggccaccacccaaaggcggccgggctatacaatcgtccctgtcactcctcgtcgcggccctcgtccctgcgctcgacgacgacgacgacgtctcccgccgtggctccccccgcggagtcctcgtacctctcgccgtccgcgtaccaccggatgctgtcgagcaccagcaggctccgcctccagggcgtgctcgccgacacgctccggggctacggcggacaccaccaccagcagcagcacttggacagcctcgccgcggcccgctatatgccgaggttcctggcctccaggcgcggcatgcgcgcaccgcggatgcggtggaccagcagcctgcacgcgcgtttcgtccacgccgtcgagctcctcggcggccacgagcatctgccagaatcatttcatgcgggatatgattaatctccccttctctctctccccggccggcctctctcggcacacaaacaggggcgacgcccaagtcggtgctcgagctgatggacgtcaaggatctgacgctagcgcatgtgaagagccacttgcagatgtacaggaccgtgaagagcactgacaagcctgcaacgacctcatcgggcgggccgcctgtggacggtggcggcgacgacgatgatctcccgagtgcccggcgggctcagtcgtcgtcgtcgtcgccagctggacgacgggacggcagcagcccgcaggcgttcaccagacaccggtcggctgcctcctcggagggcgcggcgagcctcgcgggcggcgacgacgtcgaatgctcctcctcggccgacgattccgactgcggcagggcgcgcagtgcttcgtcgtcaagagatcagttgctaccaccaagtgcaggcagtgcaggcacccttccttcagttggcgtatcatcatccactactgaggatatggagccagcttatcgatcagtaggcttgcaacaggcacccaaccatgaaatgagctgccctcctagcctggagttcaggctagggcgaccgatctggaacggagcagaacattagtagctaacactatctgcaacagcttattcaaactccactatgtaaacggtacagtctacaatgtagaacagtgcaaaacaatgttttaggtaaccatatgggtaaatgttggacacggtctaagcaacactagttacacacatgaatggcacattattagttcaacacttccactatacagtttactatatataccttgattggtccttgcatcatctagaatttaggaatgtggtgaaacgaaatgtggaattaatgatattagttttgtgttggccccaagatcgtcacaacatgaacttgctttgggttttgtttccttttttacattttggctttt

SEQ ID NO: 8078 - DNA, 1483 bp, Zea Mays
cacaccacaccgtcaaaatatatatatatgcgctgctgggccagcaggggaacatgtcggcggcgcccgcagtcgcagcgcgcgacggcgaaaggagtagccccgccgacaaggaccgcgccgactccgcggcggtgtcagccaggcccagggcggcgcggagcggaaaggccggcggcgcgccctgcacgccggagcgggaggagccggccttcaagacggtggtgtacagcgccagcagcagcgtcggcggtggccggggccggcgcgcgctcgccgagttctccagctacgtggtgcgcaaggcgccgccgctggagcggagggtggagtgcaccctcgaggagctctgcagcgggtgccacaaggaggtcaggtacacccgcgacgtcgtcaccaagaacgggtaagctgtcgctcacccaaaagaagggggaaaaaagaagcttgtattttgaaagactcaggcaaagtggctatgcaagcggagctgttactgtgtaatactgtaatgcttatcagaagtggtccttttgggcattataggtggtgtgtaatgcttgctgcctctgcttgcatgtgaggacgccggtcgccggccaatcgagcaggggacagtgaccctgcacttcccttgtgcagttcttctgccttgtgctgctgattggactgaccacttaccgcgccgtcacattttcacgctatagctacctgctaccggtggatcaacctcgagcgtttcatgtcctgatgatggcagactggtcaccaaggaggaggcgacgcggacggtccgggtgaagcccgggatgaggaaaggcgcgacggtgacgctggagggcgccggcgacgagcggccgggctgcctgacgggcgacgccacgttcgtcgtatccgagaggaggcaccggcggttcaagcggctcggcgacgacctggtgctcagggcccgggtgccgctggtcggcgcgctcacggggtggcagctctcgttcaggctgctcggcggcgacaggttccggtgcgcgttccgggacgaggtcatctgccccgggtacgtcaaggtcgtcaggggcggcggcatgcccgtcgccggcggggccaagggcgcgcgcggggacctcgtggtcaagttcgacgtcgtgttccccgaggacctcacggacgagcagcggaaggggctcgccgagattctgaggggctgcggatgaagcttgcaggtcaactcaaactgcggcctcgtcctgtgacggcttcgtgccgtgtaaaaatttttgttaggcgcttctgttgatagacagctcgggacaggaggactctacagcgcacgctgacagcgtgtacatagattacagaggttctgtttttgaaccgataatatacgtggttgtaacctgcaagaactgtatacggcgattttttgtagtttctcttttatttattacgtggatctaaatatttatcggttaccacaccagctagc

SEQ ID NO: 8079 - DNA, 2228 bp, Zea Mays
cttatccgcgccgcgtcctcccgtccccttccactcatcagaaacccccgcaccctctaactaaaccctcaccggccgccacccatggcgatggccggcgccgccgccgccgccgccggtcgctgcctcctcctctcccgcccgtcccccctccggctccgcctcctccacgctgccctctccaccgccgcccccaccctcggccccacctccactccggctccccctccgcggcacgagctcctcctcgagcgcctccgcctccgccacctaaaggacgcctcctcccccggcgccccgaggcctacctcgaggagctcggagcggagctcgcagcaggggaaggggaagagggtcgaggccgcggagagcttcgaggagctcggtctcggggaggaggtgatgtccgcgctgggggagatgggcatctccaagcccacggagatccagtgcgttggcgtgccggcggtgctggccggaaccagcgtcgtgctcggctcccacaccggatccgggaagacgctcgcctacttactccctcttgttcagctacttcggcgtgatgaggcaatgcttgggatgtcaatgaagccaaggcgtccaagagcagtagtactctgccccaccagggagctaactgagcaggtttatcgagtagcaaagtctatcagccatcatgcacgttttcggtcaacgatggttagtggaggcacccgtctaagaccccaggaagattctttgaacatgcccgttgacatggtcgttggcactcctggaaggattcttgatcatatcaaggatggtaacatggtttatggtgatattaagtatctggttctggatgaggcagatacaatgtttgatcaaggctttggaccagacatacggaagtttcttgctccgttgaagaatcgtgctgcaaagcctgatgatcaaggtttccaaacagctgtgcaaaagttgattgatgaggaatttgaaggtattgtccatttgcggacatcatcatttcaaaagagagtttcaacagcacggcatgactttatcaaactttctggagcagaaaacaaacttgaggctcttctgcaggttcttgagccaagcttgggcaaagggaaacaaagttatggtgttctgtaatactttaaattcaagtcgtgcagtggatcattttttaactgaaaatcatatatccactgttaaactatcatggagaggttccagctgaagagagagttgagaacctgaacaagttccgcaatgaagagggggattgtccaacattagtatgcactgatctggcagctagaggcctggacctggatgttgaccatgtcatcatgtttgacttcccatcgaattctattgattaccttcacagaaccgggagaactgcacgcatgggagccaaagggaaagttacaagcattgtggctaagaaggacgtagctttagctacacggattgaagaggccatgaagaaaaatgagagcttggaagctctcacgactaacaatgtcagaaggccaaccagctcgcagagtgtgaacacgaaagggaggccctcaaggttggttaagacttcaaatgctcttaaagttgtcagtcagaagggtagaaggggagtatcgctatctagcaggtcatcccgggctccccaaggatacaacttcaacccgaaggcgctcgccaccgaagagccaggcaaaggcaacaaaatcgtcagcccctcggaaagccaagccggtgaaacccactcagagcagcgcaaaggtctcgaagagcaaagcaaaacctgaggggcgaagatcaaagagtgacactctgaacaagctgggaactaagctcagtgtggttggatttagagggcgcagctcaggcaaatcagcacaatcttcataaggctttggtatttttttttattattgttatgctaaaaaggttcttggaggatttgcagcctgtaaatatctgagactaagtttcatcatttctttttctccttgcgggtttataagtgaagaccacaatctgagatatgaacgcagcactgctatgtaatattgtactgcactcagcagaatgttggaagaatacttttcattaccgcctcgtttggatcattggaattgaattccattctaataatagtaatttaggcatatatcaattaagttaattcggttttatgtaaaatatatttgtatactattattagcaagatgtcg

SEQ ID NO: 8080 - DNA, 2315 bp, Zea Mays
gttggaccgaacccagtagttgtggcgttgcatttcagccattcgtagccccggatcgcgtacccagcaacacccgccgtcacttatccgcgccgcgtcctcccgtccccttccactcatcagaaacccccgcaccctctaactaaaccctcaccggccgccacccatggcgatggccggcgccgccgccgccgccgccggtcgctgcctcctcctctcccgcccgtcccccctccggctccgcctcctccacgctgccctctccaccgccgcccccaccctcggccccacctccactccggctccccctccgcggcacgagctcctcctcgagcgcctccgcctccgccacctaaaggacgcctcctcccccggcgccccgaggcctacctcgaggagctcggagcggagctcgcagcaggggaaggggaagagggtcgaggccgcggagagcttcgaggagctcggtctcggggaggaggtgatgtccgcgctgggggagatgggcatctccaagcccacggagatccagtgcgttggcgtgccggcggtgctggccggaaccagcgtcgtgctcggctcccacaccggatccgggaagacgctcgcctacttactccctcttgttcagctacttcggcgtgatgaggcaatgcttgggatgtcaatgaagccaaggcgtccaagagcagtagtactctgccccaccagggagctaactgagcaggtttatcgagtagcaaagtctatcagccatcatgcacgttttcggtcaacgatggttagtggaggcacccgtctaagaccccaggaagattctttgaacatgcccgttgacatggtcgttggcactcctggaaggattcttgatcatatcaaggatggtaacatggtttatggtgatattaagtatctggttctggatgaggcagatacaatgtttgatcaaggctttggaccagacatacggaagtttcttgctccgttgaagaatcgtgctgcaaagcctgatgatcaaggtttccaaacagtattagtcactgctactatgacaaaggctgtgcaaaagttgattgatgaggaatttgaaggtattgtccatttgcggacatcatcatttcaaaagagagtttcaacagcacggcatgactttatcaaactttctggagcagaaaacaaacttgaggctcttctgcaggttcttgagccaagcttgggcaaagggaaacaaagttatggtgttctgtaatactttaaattcaagtcgtgcagtggatcattttttaactgaaaatcatatatccactgttaaactatcatggagaggttccagctgaagagagagttgagaacctgaacaagttccgcaatgaagagggggattgtccaacattagtatgcactgatctggcagctagaggcctggacctggatgttgaccatgtcatcatattgattaccttcacagaaccgggagaactgcacgcatgggagccaaagggaaagttacaagcattgtggctaagaaggacgtagctttagctacacggattgaagaggccatgaagaaaaatgagagcttggaagctctcacgactaacaatgtcagaaggccaaccagctcgcagagtgtgaacacgaaagggaggccctcaaggttggttaagacttcaaatgctcttaaagttgtcagtcagaagggtagaaggggagtatcgctatctagcaggtcatcccgggctccccaaggatacaacttcaacccgaaggcgctcgccaccgaagagccaggcaaaggcaacaaaatcgtcagcccctcggaaagccaagccggtgaaacccactcagagcagcgcaaaggtctcgaagagcaaagcaaaacctgaggggcgaagatcaaagagtgacactctgaacaagctgggaactaagctcagtgtggttggatttagagggcgcagctcaggcaaatcagcacaatcttcataaggctttggtatttttttttattattgttatgctaaaaaggttcttggaggatttgcagcctgtaaatatctgagactaagtttcatcatttctttttctccttgcgggtttataagtgaagaccacaatctgagatatgaacgcagcactgctatgtaatattgtactgcactcagcagaatgttggaagaatacttttcattaccgcctcgtttggatcattggaattgaattccattctaataatagtaatttaggcatatatcaattaagttaattcggttttatgtaaaatatatttgtatactattattagcaagatgtcg

SEQ ID NO: 8081 - DNA, 526 bp, Zea Mays
acttacaattttgtttaaaaggaactaaatcactgctaatactggagtagcatatctttggtgaatacttgccagtgaattggtttccgctatagtatatatatatatatatatatatatatatatatatatatatataagtatacactcttctaggattatagtatatagataagtatacactcttctaggatcaatcgtgaggagttctttagattttcttgcgtcatggaaaacaaaaagagggtggatgcactagtgtttttctcgttacttctcctcggatactttgctgctcatgcgcatgggaagggtcatgtcacaaatgatatcggtgtttctactctagctaaagaaggaattatgcgaggaaaaggagcacaatgcgctcaagggtttcttccatgcaaagataacaagtgctactgctgcattggtggccgaactcatgggcagccagacaagtctaggtgcgaggtcggagcgatggcacactgatgctcaaggcggttccagaggtccactc

SEQ ID NO: 8082 - DNA, 782 bp, Zea Mays
cctgcctgccctctctccctccctccctcttgtgaaatgtgaagtgactaccattttttccttctggagcgagcgagagcgaggtctcgatcgatttcatggcgctggaggcagtggtgttctctgagggactctttggctgctggaccatggcggctccggcagaaaatattgccgccgcggcggagataccgtcgccgctcccgctgccagcagccgccaggcggaagcggcggcggacgaggaacgccaagaacaggcaggaggtggagagccagcggatgacccacatcgccgtcgagcgcaaccgccgcaagcagatgaacgagtacctcgccgtgctccgctccctcatgccgccgtcctacgcgcaaaggggcgaccaggcgtccataattggcggcgccatcaactacgccaaggagctggagcagctgctgcagtccctcgaggcgcggaaacgacacgacggcttacacgccgcggcggcgcccttggctgccttccactacagtaaactgataaacatccgacggcctccttatctccgacggcggcctacgaggccatcgaagattagtttatgtccgacggccacaaaaggccctcggaaatagttcttatctccgacggcctcgtaggcggccgtcggagataaggttatgtccgacggctggcagcgtagccgtcggaggtaagattttttaatcccccaggaaaccggcgcgcggttcatttccacgcgcgcgcttcttttctcctctgtctctccccacgcgccg

SEQ ID NO: 8083 - DNA, 2977 bp, Zea Mays
ctacctgaaaccttatcttgtgccctgctcggattacgatgagctctgctagctctttggaataaggtactctttatggaagccgcccagcgcatgtacgccatggattcttacgctggcaacgtttcttttcttttatcggcgaggttctcgttgccatctttgaggcttccgatgatggaattttagccagccttcagccttggggggggggggggggggagggacgcgtgcgtgatggtttttttcttgttagcacctctatttgctctcctcccgacgagtgtgattaacggaaagcactgtttgactagtccttgctagccctcctctctctctctctctcttacttatctactcgtttcctcttcctttccgtaaagattgcacacaaaaactattggatcttttcccctttcgatgtgctcatctcatgtgtggttctgtgactgttgagagagaggtgggcgaggcagccatacgaagttggtggtcggagccagatctgcttggatgcatagtgaaagggccggagatcggcacggcacctacctccggcggcgggcgacggctgcttcttctagatctggaaactaatgtttcttctccgatccagcagttttagcaaacaccatatatagcaatatgtggacatgctcattgtacctttccccctactaatcatgcaaaggtatcatctgaagaaagagaaagacaggttcttggaagccaaatcaagagttgatgatgccttcagaagaaaggaataccttgcattagtggattcttacatgaaggtaactaagatggaatgattttcccacaaagaaagagcacaaaataaattgaattctagaagttaattttgtacaatttaatttttctgcatgtaataatgattaacatgcatattttcctttggggggaggcaaaggacctgtttgttgaagttgatgtgttcttttagttgggtttgtttcttcaatgctgtgttcgtgaagatcaacaaggcttactattaacatgcttcgcagggttgagccatatgttgcacactggtaagttttcttagctaatttagttcatgtcttcctgcttattctggtagatcatcccctgcaagtacccagctgaaaacagattatgctgttgtacttgtgtcttgtatgtgaatttacaatagaatttgtctccttttgtttgtttaaatgcatgagtagtattgatccagggtttcagagaacctgaactaataaataaataaataaataatcctagtgaaagtaggccttttggaatttctttcaaaggatagaaatgcctgcaggctgcagctatatatccaagccagtgggtaaggtgagtccatatacttttaattgattttgacgttgttctgatgagcgcactatgctctttcttagcttgcatgcagaatgagctgttatgtgctgaacttgaatatgtgcaaatagggaacatattaggtgcaaaccaattatttggtgcaaatcgtgtaaacaattatgataatttttttaaaacaactctcccaccatcatcagttttcaaaatgacccttccatctttcacctccaccaacgtgtttgtttttgtacagtttgcaccaagtggttgatttgcacataatatatatgttctctaaacatgttagtctttacttattttccctgctagctagtttgctcttgttggccgtgtcataaattttgttctcaggagatagatctacacagtgacaacatgtacctcaggagcacaagatatatatgcagatgtaatagcttgttcctgaccaattcctcgctgtattatgctgattgtgggagcacagtgttctgtagtggtcaggcgctaaagaacattgcgccaaccttattcatgaaagcatgccaagcccttacaaataatcgctggatgcacttttgttctccttacacacatgaggaagagataaaagaattcatttccctccggcaagacaacctacaaaagcgaggatggccttgcaatccaatttgttgtctttgcaacttatcacaagaaactatgcctcatttaggcaaagactgcccgtttttgtagagttgtatgattggtggaagagattaaggaatcgttgctgcaaggagtcaaagaagattttcgatggactcctcatctctttctggtggaatatatggttagaaagaaataacagaatctttcatagacttcaaagatctgctatccaggttatgcaattggtgaaagatcaaattgtgagttttagtgtatgcaattggtgaaagatcaaattgtgagttttagtgtatgttagattgagttagtgtatgtttttctctttttttgttttttcttttgctcagtcttcagtatctatttctcttctaatatattgatgaggcaagtcttttgccgcttcctttaaaaaaagagtaattctaatcttcatacactagttttcagtgtagcctttttcctatgtggttaactgtccatagattatgccatacctctcctaaactggacttcaacgatgtgaggtccaatcttattcatctcgagcggctagattttcatatcatagaagtgatgatttatctcaagtttgctcttactcatcttttgtttatttatattttttatttttggattcagagaaacgtcatattcacaactgcaactagtgcgtggtgatctggatgaaaacagtcaggggaaggcagaggtttttgtctaacatggagtttttttcagtgattttagatattcttacaagctgtaacacaatcaagcagataagatcctgctgatatatatgaattaagcttcttatctttttagttccagtagcaaagtacgtttacttgcagtttgttggagggacttgtgatggcttttgatattacttcatgagtcaattgctaattagcaattggctactatatataat

SEQ ID NO: 8084 - DNA, 3041 bp, Zea Mays
cagtaggatagcctcccagatctagctggacggctgcctcctcctccttccccaattcgggaaagatgacatgaagatcagtttgtgtaaacgtgttgccccctctctctctctctctcttcgtgtccagttcttgttgcgtctgctttgtactgttgcagcggtggtcgacggcgggatgggcggatgaggggcctggctgctagatggtgtggctgacagaagagagtgagcacgcatcggccagactgcatctatatacggctgccccaaagcgacggatcgatggatgcctagcctaggcctaggcgcagctgctgttgcgtgctcacttctctttctgtcagctctctctctcatccttgggacttgttccgccgtatacatccatcaccgccgtcccacttccgtccatcgctgcgcgccgatgatgcgtcgccgtcgtcgtgcagtgcaggctgtgcagcctcacatcggtcgccgtggtggcactgtttgctctgaggcgcctgccggcctggtcgtgtccctacctgaaaccttatcttgtgccctgctcggattacgatgagctctgctagctctttggaataagagaggtgggcgaggcagccatacgaagttggtggtcggagccagatctgcttggatgcatagtgaaagggccggagatcggcacggcacctacctccggcggcgggcgacggctgcttcttctagatctggaaactaatgtttcttctccgatccagcaggtatcatctgaagaaagagaaagacaggttcttggaagccaaatcaagagttgatgatgccttcagaagaaaggaataccttgcattagtggattcttacatgaaggtaactaagatggaatgattttcccacaaagaaagagcacaaaataaattgaattctagaagttaattttgtacaatttaatttttctgcatgtaataatgattaacatgcatattttcctttggggggaggcaaaggacctgtttgttgaagttgatgtgttcttttagttgggtttgtttcttcaatgctgtgttcgtgaagatcaacaaggcttactattaacatgcttcgcagggttgagccatatgttgcacactggtaagttttcttagctaatttagttcatgtcttcctgcttattctggtagatcatcccctgcaagtacccagctgaaaacagattatgctgttgtacttgtgtcttgtatgtgaatttacaatagaatttgtctccttttgtttgtttaaatgcatgagtagtattgatccagggtttcagagaacctgaactaataaataaataaataaataatcctagtgaaagtaggccttttggaatttctttcaaaggatagaaatgcctgcaggctgcagctatatatccaagccagtgggtaaggtgagtccatatacttttaattgattttgacgttgttctgatgagcgcactatgctctttcttagcttgcatgcagaatgagctgttatgtgctgaacttgaatatgtgcaaatagggaacatattaggtgcaaaccaattatttggtgcaaatcgtgtaaacaattatgataatttttttaaaacaactctcccaccatcatcagttttcaaaatgacccttccatctttcacctccaccaacgtgtttgtttttgtacagtttgcaccaagtggttgatttgcacataatatatatgttctctaaacatgttagtctttacttattttccctgctagctagtttgctcttgttggccgtgtcataaattttgttctcaggagatagatctacacagtgacaacatgtacctcaggagcacaagatatatatgcagatgtaatagcttgttcctgaccaattcctcgctgtattatgctgattgtgggagcacagtgttctgtagtggtcaggcgctaaagaacattgcgccaaccttattcatgaaagcatgccaagcccttacaaataatcgctggatgcacttttgttctccttacacacatgaggaagagataaaagaattcatttccctccggcaagacaacctacaaaagcgaggatggccttgcaatccaatttgttgtctttgcaacttatcacaagaaactatgcctcatttaggcaaagactgcccgtttttgtagagttgtatgattggtggaagagattaaggaatcgttgctgcaaggagtcaaagaagattttcgatggactcctcatctctttctggtggaatatatggttagaaagaaataacagaatctttcatagacttcaaagatctgctatccaggttatgcaattggtgaaagatcaaattgtgagttttagtgtatgcaattggtgaaagatcaaattgtgagttttagtgtatgttagattgagttagtgtatgtttttctctttttttgttttttcttttgctcagtcttcagtatctatttctcttctaatatattgatgaggcaagtcttttgccgcttcctttaaaaaaagagtaattctaatcttcatacactagttttcagtgtagcctttttcctatgtggttaactgtccatagattatgccatacctctcctaaactggacttcaacgatgtgaggtccaatcttattcatctcgagcggctagattttcatatcatagaagtgatgatttatctcaagtttgctcttactcatcttttgtttatttatattttttatttttggattcagagaaacgtcatattcacaactgcaactagtgcgtggtgatctggatgaaaacagtcaggggaaggcagaggtttttgtctaacatggagtttttttcagtgattttagatattcttacaagctgtaacacaatcaagcagataagatcctgctgatatatatgaattaagcttcttatctttttagttccagtagcaaagtacgtttacttgcagtttgttggagggacttgtgatggcttttgatattacttcatgagtcaattgctaattagcaattggctactatatataat

SEQ ID NO: 8085 - DNA, 588 bp, Zea Mays
gtggtggcacatttcccttattgggcaagggttgggttgtgtagtgagctaccacttatctggtctcaaggttcttcatggccttgactctcaaagatcagagtattcttgtcaatggggatatcaatgaaggcttgcttcgcctttgtcacaagcttcatcgtttaaggaaagaatatgcatacacatttgaaagcacaagcttatcttatcagtgttctgaggttagcaggatcttgcaaggctagggacccaggggctacacatcttataactgaaaaacacatgagcagtatgttgttaacacttttttttcttgttcgtgtttcatagatagaggtatataatatggagacgaataatatttaaaccattagagacccatgtaacaataaaacagattgtttagctattatgctcactcaatatggagatcctcaagtatcttagaatcagttgggcaaacacaaatttacagtcatagttttctttgatggtttttacaaatacttggtttgcactattgatgaaaacatggtattgtttcaagccaaccttgagcattcatctgagaagtttgaaaatgtt

SEQ ID NO: 8086 - DNA, 1337 bp, Zea Mays
tgactcctatatcgatcaattatttctgttactcatttgattctttagtttcgtagagggaggaacatcgtgccatcgtgggatgcaggccccaaggaacaccagatattttgaggaaatatttatgggtcatttgattttacttatgaggtttagatcaaatgatagatgatgtcccgcatgattttggaattgcatttgtattgtataaacctgaatataaatgtcattcttaaatttgtgaagtagtctgaatgtctgatagcatcaaaaattggtgaagtagtctgatagcaacataaactataattaattgagatcttattactcacactagatcttgctattattaatcatggtacaacactgtcctcgatgtggttatgatcttctattgtaatggcactaacttcttatcaggaaaacatcaaaaacaatttggaaacaatttatttggacagggagaacctgggtgggttttcggattgtgcaaactgattatatgttgctaagtgcaggacatttgggaatttttctgagggtgaaatggtgccttttggaccctaaactatggagagattagtaggatgtatggactctttgtttcaattatgtggttgcacatatgttccaagcgctaggactgaaaggatgccacttgctattttgctgaattataacctatgcttaatatagatgattcttcattaagtgaacaggagaaggtgaagctagagaaggagcccatggggcagttcgtggatgacgacatcagggacctgccaagatctccatggaggagatcgacgccgccaagcccaccaaggacaacgtcgacgtccgcctcaagtggctcggcctcttccaccgctacaagcaccagtgtacacccactgattctacaccccctgcaatggttgttgttgctgttggtaggagcgaccccgcgagcgtgacacagacaaagcagccttcggtgccaggttcgatttggtttctgcaaagtttatcactcctacattttcacaattagtttctacaaattatatcactccatttcactcctatgaaattactgtgacttaatttcaatcgaggtcattcttcttgctccttcgctttgcttagcagtaaagacaataacttcctttaccttgctcaatagtttgccttttaatttgaacaaaaatctaatcacttgacattgcatgggaggtaagctcctgtttttcacaaactttatcggtggacagttcatagtcctaacagacccattagtccgatagaacagttagcattaggtaattattttggcattggcaattttgatctactcc

SEQ ID NO: 8087 - DNA, 1589 bp, Zea Mays
tgactcctatatcgatcaattatttctgttactcatttgattctttagtttcgtagagggaggaacatcgtgccatcgtgggatgcaggccccaaggaacaccagatattttgaggaaatatttatgggtcatttgattttacttatgaggtttagatcaaatgatagatgatgtcccgcatgattttggaattgcatttgtattgtataaacctgaatataaatgtcattcttaaatttgtgaagtagtctgaatgtctgatagcatcaaaaattggtgaagtagtctgatagcaacataaactataattaattgagatcttattactcacactagatcttgctattattaatcatggtacaacactgtcctcgatgtggttatgatcttctattgtaatggcactaacttcttatcaggaaaacatcaaaaacaatttggaaacaatttatttggacagggagaacctgggtgggttttcggattgtgcaaactgattatatgttgctaagtgcaggacatttgggaatttttctgagggtgaaatggtgccttttggaccctaaactatggagagattagtaggataatggaggataatctaccagttaatgtccgggaatatcaagaacttgctaagaaattaattctaaaaaaagtcattacacgctaagaaaaataatgtgcaagctactgaatttacaatcaagcaagggtcgaggagtgggagggagggtactgggccctaaaggagaagtaccgaaccgggctaaacccgcaggagaaggtgaagctagagaaggagcccatggggcagttcgtggatgacgacatcagggacctgccaagatctccatggaggagatcgacgccgccaagcccaccaaggacaacgtcgacgtccgcctcaagtggctcggcctcttccaccgctacaagcaccagtgtacacccactgattctacaccccctgcaatggttgttgttgctgttggtaggagcgaccccgcgagcgtgacacagacaaagcagccttcggtgccagttcagaccacttatctggtctcaaggttcttcatggccttgactctcaaagatcagagtattcttgtcaatggggatatcaatgaaggcttgcttcgcctttgtcacaagcttcatcgtttaaggaaagaatatgcatacacatttgaaagcacaagcttatcttatcagtgttctgaggttagcaggatcttgcaaggctagggacccaggggctacacatcttataactgaaaaacacatgagcagtatgttgttaacacttttttttcttgttcgtgtttcatagatagaggtatataatatggagacgaataatatttaaaccattagagacccatgtaacaataaaacagattgtttagctattatgctcactcaatatggagatcctcaagtatcttagaatcagttgggcaaacacaaatttacagtcatagttttctttgatggtttttacaaatacttggtttgcactattgatgaaaacatggtattgtttcaagccaaccttgagcattcatctgagaagtttgaaaatgtt

SEQ ID NO: 8088 - DNA, 2495 bp, Zea Mays
tgactcctatatcgatcaattatttctgttactcatttgattctttagtttcgtagagggaggaacatcgtgccatcgtgggatgcaggccccaaggaacaccagatattttgaggaaatatttatgggtcatttgattttacttatgaggtttagatcaaatgatagatgatgtcccgcatgattttggaattgcatttgtattgtataaacctgaatataaatgtcattcttaaatttgtgaagtagtctgaatgtctgatagcatcaaaaattggtgaagtagtctgatagcaacataaactataattaattgagatcttattactcacactagatcttgctattattaatcatggtacaacactgtcctcgatgtggttatgatcttctattgtaatggcactaacttcttatcaggaaaacatcaaaaacaatttggaaacaatttatttggacagggagaacctgggtgggttttcggattgtgcaaactgattatatgttgctaagtgcaggacatttgggaatttttctgagggtgaaatggtgccttttggaccctaaactatggagagattagtaggatgtatggactctttgtttcaattatgtggtaaatcagtttagctgaaaatagagtacttttaaaggcataaatactcctatttctgtacttgagatcacatttatcctgatataggttgccattcatgatatttctaggttgcacatatgttccaagcgctaggactgaaaggatgccacttgctattttgctgaattataacctatgcttaatatagatgattcttcattaagtgaacaggtagctgacccacattcttgctgaattataacctatgcttaatcttggatccaatcaacaaacaaataagtgccacaagcaaacccaccctgagaaaaatacagtgcttttctttggttccacattcttggtttccaatgcatgtttctcttcttttgatatactgttttcttttaccgacacatctctatctttatatgtgtccaaagctccaaaatgaaatgatttagtgcttgcactgaaaaaggaacattctgtatgctaattctctaaaatgtgtatggctgaaatcgatatatttgcaacatacgaatgaccttttttaacaatttgatggagcagaatggaggataatctaccagttaatgtccgggaatatcaagaacttgctaagaaattaattctaaaaaaagtcattacacgctaagaaaaataatgtgcaagctactgaatttacaatcaagcaagggtcgaggagtgggagggagggtactgggccctaaaggagaagtaccgaaccgggctaaacccgcaggagaaggtgaagctagagaaggagcccatggggcagttcgtggatgacgacatcagggacctgccaagatctccatggaggagatcgacgccgccaagcccaccaaggacaacgtcgacgtccgcctcaagtggctcggcctcttccaccgctacaagcaccagtgtacacccactgattctacaccccctgcaatggttgttgttgctgttggtaggagcgaccccgcgagcgtgacacagacaaagcagccttcggtgccagttcagaccacttatctggtctcaaggttcttcatggccttgactctcaaagatcagagtattcttgtcaatggggatatcaatgaaggcttgcttcgcctttgtcacaagcttcatcgtttaaggaaagaatatgcatacacatttgaaagcacaagcttatcttatcagtgttctgaggttagcaggatcttgcaagacctttggctcttactgcttcaaggattaatgtgtgactgtttagccttcaatccaagcggtatgccactaatctcaaaaattgcttctacgcaatatttacttgacaatttatagatttgttgtttcttagagatattttttcatgtaataggttataaggttgttcatgacataaagaggtttgttggtcataacttatactatatgaagattatgggagtcagccctaaattcacattttctgcaatctacagattcatgtaaaaaagttcaatctacaacagcatttcctcaaaatgtctaacagacttgttttcttcaggctagggacccaggggctacacatcttataactgaaaaacacatgagcagtatgttgttaacacttttttttcttgttcgtgtttcatagatagaggtatataatatggagacgaataatatttaaaccattagagacccatgtaacaataaaacagattgtttagctattatgctcactcaatatggagatcctcaagtatcttagaatcagttgggcaaacacaaatttacagtcatagttttctttgatggtttttacaaatacttggtttgcactattgatgaaaacatggtattgtttcaagccaaccttgagcattcatctgagaagtttgaaaatgtt

SEQ ID NO: 8089 - DNA, 1106 bp, Zea Mays
gggagagcgtccattccctttttgaagcagatgaggaattggactaaggaggagtttgttcacatactccgacgtcaaagcactgggtttgccagggggagctcaaagtaccgcggtgtgacactacacaagtgtggtcggtgggaagctcggatgggtcagcttctcggaaagaagtacatctaccttggtctatttgacagtgaaatcgaagcagcaagagcgtatgatagggcagccattcgcttcaatggaccggatgctgttaggaactttgattctgtttcctatgatggagatgtcccacttccacctgcaattgagaaagatgcagtggttgatggagacatccttgatctgaatttgaggatttcacaacctaacgtgcatgatctcagaagtgatggtaccctgactggttttggattaagttgtaattctcctgaagcttcaagctccattgtttctcaggaggcgcctatgcaggaagaggagaaccggtccgagccggcgtgtccccagccgttcccctcctgggcatggcaaacgcagggctcccgtgccccagttctccctgccaccactgcagcatcatcaggattctctaccgccgctgccaccggcgtggacgcggccacagccggccacagcgtgccgccgccgtctggtagcctccggcagttctcgggctaccaccagctccgcttccccccaaccgcctgacggagacagaccacctcctgttgagttggcggcggcggcggcgtctcatagctggccggtggttggctggctgcccatgcaacgccacgccggtgggtgcgggtcggtattcggtaacagtcgccactgttgggtatggttttgtgggactacagaggatgcagtgatctctcgctgctgctgtgtgctgtctctctcgctccctctacccacccacacctgtttgtaatatgaatttatcgccctctcgcgctcgtgattcgtccatcttcgtttcgttttgatggccaccggatgggatcatgagcgtgttgcgagaaattgtgtaataaaccatgcgtatttttatttatatttatttattgtgacgatggtacatgata

SEQ ID NO: 8090 - DNA, 2213 bp, Zea Mays
atttgaactggtcctggttgcaaaacgcagaaacaaatggcaaaaatgagattgcatgattctggcaaaaatgtgctgcaagtatttctaagtccaccaagtaaaaaagaacatagacttgcagcatacgttctgccctacatattctcaatcgcttcagtcagtcagtcttactagtagccagccattggcttcattttttagccaaagacaaacaggaggagggaggagggatggttctccttcgtccctggcacatcctcttcttcctcacatgcttctccccatcctttgttcatcctatggaaccaggcacctaccgttgctccaatgtttccatcccatatccttttggcgttgctgttgacacaaaacctcaataccgacatgttgtgctcgagtggtctgtgaacggcagcagctgtgaagaggcgaaactgtccggatcatacgcctgcgcagagaatgcctactgctacaactcatcaaacggaatcggttaccgctgcaattgctccagtggattcgaggggaacccatacctgcaagggccaaatggatgcacagatattaatgaatgcatcaccagaaatccgtgcaccaataggtgctcaaacacaataggtggtttccagtgcacgtgcccagcagggatgagcggcgacggcctcaaggaaggaagtggttgcaatggagtaagcacactagtgattgcaatagttgcaggattagctctgctagtgcttctcctcatccttggcttctggactcactggcttgttaagaagaggaaacttgcaaagacaaggcaaaggtacttcatgcaaaatggtggcctgatgctgaagcagcagatgttttctgaggaggcgccgctgcacatattcacctccagtgagcttgacaaggctaccagcaacttcagtgatgacaatattgtcggcagaggagggtttgggactgtgtacagaggcattctgtccaatcaagtggttgtggcgatcaagaaggcgcagcgagttgatcaaacccagacggaacaattcatcaacgagatgatcattctttcacaggcgaaccacaaaaacgtggtccagctattaggctgctgtctcgagactgaggttcccttattggtctatgagttcatcaccaacggggcccttttccaccatcttcacaatacgtcggtccccatgtcatgggagagccgtctaagcatcgcggttgagactgcgtcggcacttgcatacttgcacttagctgcaaagatgccaattattcacagagatgtcaagtcgtccaacatactcctagatgacaacttcactgccaaggtgtccgatttcggtgcctcaaggccaataccgcacaaccagacccatgtgacaacattggtgcaagggacactagggtacatggaccctgagtacttccagacaagccaactgactgagaagagtgatgtgtacagctttggcgtcgtactcatcgagctactgacaagaaagaagcctatcatggatgatatcgcggaagacattagaagcctagcgctgcaatttagtatgctattccatggaaataagctgttggaaatcgttgatcctgtagtagctgaagaagctggagtcagacatgttgaaacggtttcgaagttggcgttacgatgcttaaggttgaaaggggaagaacgcccaaggatgatagatgttgcgattgaacttgaagcactgagaaggctgatgaaacaacacttcatcttgaagaacgagtctttgcttcaggagtcatgttgcaatgaagaaatgagcatcgacgcaccatcaagtttgttccttggcgttgatggcatttctgacgatgaaggcatggagatcattccacttacatgtccatccaaaattctcacatcctatccctaactcgcaactatcacaaataaaaaggattttagctgacttctaccttctcaattgccaattccgtcttagtaatctcttcgtcttatgattagcttccaacgtaactacccggttaatggaatatgactgagttatttggcttatcgtcattcagctatgttctctttttgttcctcttgcagttcaaaaggcgatggtagtttcgctatgttggtatctctactgtatcgactgtcaacaaagaaatcaagacacatatgcaattgaaggattgaatatacgaccaga

SEQ ID NO: 8091 - DNA, 3094 bp, Zea Mays
tataaatcctcacccgggcctcatccctcttggacaaactcacagcacaaacgttcctctcctcttccatcgtcgtcctcgccgctcccggccccgcctgtctagtcccctcttctcgcgtgcaacccctgtactgtacgtgctaggcacacagctagctgcagctacagctgcagggcagcaaatggtttccggtgcgggtcatggtgggtacggcggcggcgacgacgggcaggccgtggacttccggggcaacccggcggacaagtcgaggaccggaggctggctgggcgccgggctgatcctgggcacggagctggcggagcgcgtgtgcgtgatgggcatctcgatgaacctggtgacgtacctcgtcggcgagctgcacctctccaactccaagtccgccaccgtggtgaccaacttcatgggcacgctcaacctgctcgccctcgtcggcggcttcctcgccgacgccaagctcggccgctacctcaccatcgccatctccgccacaatcgccgccacgggcgtgagcttgctgacggtggacacgacggtgccgagcatgcgtccgccggcgtgcctggacgcccgcgggccgcgcgcgcacgagtgcgtgccggcgcgcggcgggcagctggcgctgctgtacgcggcgctgtacacggtggcggcgggggccggcgggctcaaggcgaacgtgtccgggttcgggtcggaccagttcgacgggcgcgacccgcgggaggagcgcgccatggtgttcttcttcaaccgcttctacttctgcgtcagcctggggtcgctgttcgcggtcaccgtgctggtgtacgtgcaggacaacgtggggcggggctggggctacggcgtctccgcagtcgccatggcgctcgccgtcgccgtgctcgtggccggcacgccccggtacaggtaccgccgcccgcagggcagcccgctgacggcggtcggccgggtgctcgccgcggcgtggaggaagcgccggctgccgctgcccgccgacgccgccgagctccacgggttcgccgcggccaaggtcgcacacactgacaggctcaggtaacgcgacgcgtgctctccttttgatttttgcctgccgtcgcgttgcgttcctttgatcacgtctctgtcttagcagctagcagcagccagcgaccaattaatctacggtgctcatctcatctagtagtatagtattagcttagctcgaggcaaataaacagacaccataataaattaaagggttagggttgggatgcatatagtactggggcacacgaagttttatgtcctgcaggggacacgatgacgtcctagcagtacgaccgatcgagctagtaaccgctgctgcagagatcacgcgcgagttgggcaggtctattgtaagtacgatcacatgccacttgtccgagcctcgtgtcagtgtcacggctgaaatgcagagaagccgagaggggtaccccttgacgccggtcgctaacacaacacgcaaaagagggaattattgaacccagtcgctaacacaacggaacttgaaagaaaaaaaaggatctagacaggtagacgtgccgcgaaagctcgttacactgttccgatccggccggaaaactggccgatgtgccggcctttcagctgtcgctctcgctgctgagtcacccagtggtgacactgacagcacgggcgcgtgatgcgtcacgcgatcaacgagactgagcagtagtgcggtactgtagtctgtagctgtagtagagtacgtgtacgtgtgtgcctctcgcgcgcgctacagttgacgaatgcatcatcatcatgcaggtggcttgacaaggcggcgatcgtggaggccgagccggcggggaagcagcgggcgagcgcggcggcggcgtcgacggtgacggaggtggaggaggtgaagatggtggcgaagctgctgcccatctggtccacgtgcatcctcttctggacggtctactcccagatgaccaccttctcggtggagcaggccacgcgcatggaccgccacctgcgcccgggctccggcgccggcggcttcgccgtcccggcgggctccttctccgtcttcctattcctctccatcctgctcttcacctcgctcaacgagcgcctcctcgtgccgctggccgcccgcctcacgggccgcccgcaggggctcacctcgctgcagcgcgtcggggccgggctcgcgctctccgtcgccgccatggccgtctccgcgctcgtcgagaggaagcggcgcgacgcggccaacgggccgggccacgtcgccgtcagcgccttctggctcgtcccgcagtacttcctcgtcggcgccggcgaggccttcgcctacgtgggccagctggagttcttcatccgcgaggcgcccgagcggatgaagtccatgagcaccggcctcttcctcgtcacgctctccatgggcttcttcctcagcagcttgctcgtcttcgccgtcgacgccgccaccgcgggcacgtggatccggaacaacctcgaccgcggcaggctcgacctcttctactggatgctggccctgctcggcgtcgccaacttcgccgtcttcgtcgtcttcgccaggcggcaccagtacaaggccaccagcttgccggcgtcggtggcgcccgacggcaccgggcacaaggagatggacgacttcgtcgcagtcacggaggccgtggaaggagtggacgtgtagggcgcgcatgtcaggctcacacttcatcggtgggtggcctctgctgtttaattttgcctttgggtagttagatcaacaagaaaaagtctactatttgatttattgcttcctgcaacttgcgccactccgcgtaactttgagaggtacatctgcactcatgcgatcttgatctctgtccgttgagatcaagttgtatgtaggcaaacacaataataaaagggctaaaaaaaggctttcgttttttttctcaacacttgtccatctgcaacgggaacctgtcttgaatgaaacgtttgatttacttgaacaaatggatccaatgagatcaagcagtcaactagcagttgctgaaagatagcgaacaaa

SEQ ID NO: 8092 - DNA, 1241 bp, Zea Mays
tggttaaaaagaccaacataggggacctgagcgcgagcagagacaaacgctacattccgccacctcctctcccaaaggctcgccctccccggctccccctcgtatcttcgccgtcggcgatcaaaatggcggtgcccatgtccgccatcgagtccgcgtggcagatctctgtctctctctgctcttcctcgccgggcgaaacgtaacggaaatgaatgcagctcctgatcgccaacttcaccgagttccagctcgccaccgtcatcaccttcctgctccacgagaccgtcttctttctctctggccttccctccctcctcttcgagcgcttcggactcttcgccaaatacaagatccagaagaggagcaacacctctgcttaccaaaacagatgtgtcttgcgtcttattctgtaccatgtctctgtgaacctgcctgtcatgattttgtcgtaccctgccttcaaattcatgggtcttaggagctctcttcctctaccacattggacggttgttgtatctcaagttcttttctactttgtccttgaggattttatattctactgggggcacagggcactgcatacgaaatggctatacaaacatgttcacagcgtccaccacgagtacgccacaccctttggtttaacttccgaatatgcccacccagctgaaattttgttcctgggattcgccacagttgttggtcctgctcttactggccctcatctgttcaccctgtggctgtggatggtgttgagggtattggagactgttgaagctcacagcggctatcacttcccatggagcccatcaaatttcctgccactgtacggtggctcggacttccatgactaccatcaccgagtgctgtacacaaagtcagggaactatgcctcgacatttgtttacatggactggttgttccggacggacaatggttatcgcaaggcaaagagaccattgaggagcaagaagtgaagaagaagaagaatctgtaaagtgttgaagctgctcatcaacaggactggcgatagagttgcgcctcagcatggaaggagagaaaatggacgcagtcagttattgcctcattgcctgacgaccgatactataggctcctgagatgttgatttctctgtgttttctatgatcaagaacgaggtcctggcgaccttggtctgtcatgaactgaatttgataaaaaaaattgtcatattttctcgggggttttgatctgcgttt

SEQ ID NO: 8093 - DNA, 1885 bp, Zea Mays
acaccatcaatatcgtcgtctctttatagcattgatcctaaatacctaaaggtatccttcctagacactacttgaccttctaaactaacatctttttcatgtgtagtgccaaaatcacctcattctattttagttctactgagtcttggattccaatctcccgtcgtcattctagtttcctatttactcttgctcgactttcatcaactagcactacatcgtctggaaaaagcatacatcaaggaatattctttgtatgtcctttgtaattgggaagtcatcaaggcaaaaaggttaatattgattttgagaaagaacctattggcatctcgaaagatggaaaagaggtttacttccgggatgtttggccatccacagaagagatagccgaggttgtcaagtcaagtgtgctccctgacatgttcaagagcacatatgagtcaatcaccaaaggaaatcctatgtggaatgagctgccagtctcaacaagcactctctacccctgggatccatcatctacatacatccatgagccaccttacttcaaggatatgaaaatgagtcctcctggcccgcggcctgtgaaggatgcatattgccttttgaattttggtgacagcatcacaaccgatcacatctcacctgccggaaacattcacccagacagcccagctgcaaaatatctgaaggagcgtggcgttgaaaggaaggacttcaactcatatggtagccgaagaggaaatgatgagatcatggctaggggaacctttgccaacattcgtcttgtgaataagttcttgaagggtgaggttggacccaagacaatccatgttccatctggggagaagcttgcagtttttgatgctgctatgaaatacaagaatgaagggcatgacactattatcctggctggtgccgagtacgggagtggaagctctcgggattgggctgcaaagggcccaatgctgcagggagtgaaggctgtgatagcaaagagcttcgagaggattcaccgcagcaatcttgctggcatgggaatcatccctctatgctacaaagcaggggaggatgcagacaccctgggcctaaccggccatgagcgctacacggtccaccttccaaccaatgtgagtgagatcaagcctggccaagatgttaccgtgacaactgataatggaaagtcgttcacttgcacactcagattcgacactgaggtatgattgttcttttcaatgcataaatcgctgatgctgtctattgatgttttcgttactgatcaccttcacctccaggtggagcttgcttactacgatcatggtggcattctaccatatgtcgctagaaagatagcggaacaatagattgtaccgtcgagatggttgcgatgcttgcggtgaatcgtaattggtgtaaacggtttgtttagtagtacaacccatttttgcggactacttataataacctctgagtatctcagagtgagctgtctgaaatttgatgaactgctacaattctggtgcgccatgaggatgggatccttttgccttctatgttaataatatgctaacttctgcaataccagatatacatttggcagaagattttgcacgctgtaaatgacactagtattaacactgatgcggttcaaagctgtccttgttttgttatctgccaacaattgatgagcagattttgtttcagatttgtattacgaaccttttaccacgttgccatgtgcgactggtaatgactctgaagcaaccgatgggtgtaaaactgtcatgtaagccagaatctgaagctgctctttgcaaaaaaaataataaaagggaaatactgggggcaataaagctcgtgctgaagctagagcaacttgaaagagaac

SEQ ID NO: 8094 - DNA, 1711 bp, Zea Mays
gaagaacaacccccaaacacacacccgaagaaagaggctcgctcctcccttcgctctctccaccttgcggcgctccacctccgtcccctcgccgccgcttctcacttcgcctcccctctcaaacaccccaagccgcagcgcaggcacgcgcgccgacgtctatccacccagcggcactcctcatgccctgcatcctccaccgcctgcagacgagtcccccacgccaccgcggccacgcctcgccgtccatgtccatggccgccgccccggcttcctgattcgtcccgtacccgcgcgtcgctcctcccgattccatccccgtccgcgccatgccgccgctgcgcggagccaagcgccgccggaaggcggcgttggagaagaaggcggcagcggtcgcaatggcgtctgccgccgcgggcgaccctcctggcgactggtgggaagccttctgcatccgtatgtcagatttgagtctatattcaaaatgccaagaagagccttcgactatgtctgcaatttggtgagagatgaaatgatggtgaggtcctgcagctataccttccttgatggcacagtgctgtgtttggaagaccgagtggccattgctctgcgaaggctgaactctggtgggtcactggtgaccgtaggatcctctgttggagtgaaccactcaaccgtgtcgctgataacctggaggttcatcgaggctatggaggagcgagcgagccaccacctgcgctggccagactctattgaaatggagaagatcaagtccaagttcgagaagatccatggtctgccaaactgctgcggcgttgtggatacaacacacatcacaatgtgcctttcatcagccgagccgaactgcaaggtctggcttgatcaggagaagaactacagcatggtgttgcaagccgttgttgatctggacaccaagttcacagacatcgtgactggctggcctggtagcatgaaagagtcgagcattttgcacagctctggccttttcaagctctgcgagaaaggcgagcggctgaatggcagcaagctgaaggtatcagatgggtcagagatcggggaatacttgatcggcgactccggctacccccttctcccctggctgctcacaccttaccaagagaaggacctcacagagtccagtgctgagttcaacattaggcactcttctgcgagaacagtcgctccgagaacactggccaagttcaaggacacatggaagttcctgcaaggggagatgtggcgtccggacaagcacaagctgccccggataatccatgtctgctgcttgctgcacaacataatcatagaccttcaggaaacagcagtggacgaggcacaggcgtggccgagcgatcatgacgctaagtacaggcagcaagtgtgccagctagctgatgagaatggagtcagggtgagggacaaactgtcccagcacctgattagcaagtgaccaccaccaagcgtaaagcttattggacgagagagtagtgccattttcatctgtttcaggcagctctaaatcccttttgatgtccagttttgcagagttgtaaatgaggcaggtgagggcatcggttcaaactcactgtaaccctcttaaaattaaaattaaggctgttgcaaacttgtcaaaaatcaatgtggcattgtggctcctttggtttataatgtttgtgctttggtgggcttg

SEQ ID NO: 8095 - DNA, 1637 bp, Zea Mays
agcattagagtgcatttacagtacgttcacccccgcggcccgccccttcagccatcgcaaaactgagactcaaaaaggctatggccaaggctttggtgcccttctaccccctcgccggccgcctcggcaacaacagcgacgatggtaggacggagatcagctgcaacggcgaaggtgcactctttgttgtcgctcacgcggatgatgaactcactatcgacgacgtcaagaaattgaagccatcgccagagttgaggaggctgttcgttccacgcatcgagccatcgtccatcatgttggccatacaggtgactttcttgaagtctggaggggtggtgttaggaacagctctccaccacgccgccatagacgcttcaagtgcgttccactttttccagacatggtcggcattctgcaagcatggtgaccgtgctgccgtggagctcccgtgccacgaccgcaccctactccgcgcacggtcgccgcccacagtccaccccggcacactcttgacattgcagcctcggctaaccctctctgacctcgagggacctcttgccatcgaagtcttcaccatttccaaggatcaggtcgcctccctgaagcacctctgcggtggcacgagcaccttttgcgccgtcagcgctctcatctggcagtgtacgtgcgttgcgcgccgccttccaccggattctcaagtgcgcatggtatttcccgccgagctccgccgccggatgaggccgcccctcccgaaccactacttcggcaacgcagtgttcaggctatacgtcactggcgcggctggggatattggcacggcggcgttgggatccgtcgctacccgcatcaagggcgccatcaagcggttggatgacgagctggtgcggtccgccattgactacttcgagaacgagaaggccgccgagatgaacaagagacgggctctgagaggcaccctgccaaagacgttcctgaatattacaagctggttgggtaggccacagtacgacgcagattttgggtggggaaagccgcaattcatgtcgctggcggagtccttctgcggcggctttgtgcacttgatgaacgatgagaggacaacgtactacggtggtgccaccggcgacgtccgcatgatcgtgtgcatggaggctgtagatatgaaggagctagggcggttgctttatgtgaagctcaagcaagctgcttgtgctatgcactaaaaataagggccgtaaaaataaagctctagcaagctgctcgtgctatgcattaagaataagggcagtaaaaataaagctatagcaagctgctaatgctatgcactaaaaataaagctcttccaaactgctagtgttatgcactaaaaataataatatggtttgttactatatatgctaaaaataataataaatgagctaaggcagctgtattacaccttgttcggttgcatatggattggataaaactgaagggattaaattcctctctattcatttttaactcaacaagaaatttaatctcatccaattcccttcaatccactcctaacacaacaagctcctaagaataatcgtagtgccctcgcgtttgattattattatgtagttccaatactcaaaaccatatgtaattcc

SEQ ID NO: 8096 - DNA, 1452 bp, Zea Mays
atggagatatgggggaaatccagacaccctaatgttgagttgagagcattttgctcaaagcattctgcagttggttacaccagttctgtagagaacagtaaccttgcttccgaactgaatcctagaaaatctggcccagacaataccaccctcaattctggaaaaattccaatactaaggttcacgcgcaaaaacaaggataaattcaccaattgtggaaccagtacctctagttctggtaacctgatcagagtcaagactatagagcaaggtgctttagctaacacagttagaaatgcaaatactcaacctattcaaatctgggaaagaggtactggtcatccctctgttggtggggatcatatgggaagttctggtgatattgctgtagtgcttagaaagctaattgacagcggaaaaattagtgttagtgatatagcatctgaagtcggcatttcttcggaatccttggaagctgctctcgtgggtgaaactaccactttttcccatggtttgacgctgaaaattatgaagtggctccaaaattatgtgcaaatgcatagtgctcaaggagatgtttgtaaagggagctcagaggtggtgcaagagagcaaatcagacagattggtcaccacagatactgtcgatgtgaaaaatccattggtcctagatgatgacaagggtgtaggtgtacttgttgatttgctggattcctctgtaactgaacctgcacaaacaagatctgaaagcaatagtaagattttgaatgaaaatagtgcaacatgtgcaactggtgtgactattttgcaaaatggcaaaaagaacatggttaaagaaggttataatcctgagtgttctgctaaagaatttgcaaacgaatctactcaggacttctccccaatcagcaacaagtatgttttaaaggatgaacatggaatattgatactgaacgccacctctggaaacaaagaatttggtacttccacagagataccaaatgaaaaccaaggaagggagttactggcattggagaatgagcatacaactgatccaagacctgataccctcacagtcatgggtgctccgctggttgcgacaagaaaagaagagttcctcaacaaaatttgtagaagacctgacgcttgtttgctgttaccaaataaaaacagcaagaaagcaactcctccctctccaacaacatctgctgctgcgccaagacgaagccggcgtgtcgctggagctggagtggaattcagcatgcaagactggggtggcagggccaccaaaaaagccatgaaagccctgcagattattactgaagatgaaggcatcagtcaggaatccctcaaggcttatgcagagcttttcaagcacccactttcccagctccaggtggaggccttgtccgcccttttcgggtggcccacgccaccagcagggcctgtctgaagc

SEQ ID NO: 8097 - DNA, 1967 bp, Zea Mays
ggcacctcgagattcgagcgctgctcccgtactacttactactcgagagtcgagactgctttgttttttttgttgatggaaaagaaccagaagggtagtactcgagagcacgaatcgccacgtccgccagaggatgagcttgagcagctccaactccaacgcgtgacaaaacaaacagaaccgtcacaaaaataaataaaccaaacggggcctaaataaaaagtcgtcgacaaaaatttggcagccataggccatagcccccgctgccccccgggcgcagatcttttctgggcttctggctcccctctcccgccgatcacgccgcctcacctcgccgggcggcgtgatggcgacttccggggccggcgaccacgggcagggccagggccaggggcacggccgcttcgcgtcgtccctgacggcgcgctactcggactgggtgctggagacgctggacgagctcccagggagcttcctgctcacggaccccgccctgccgggccaccccatcgtgtacgcttcccggggcctcgccgcgctcaccggctacgcgccgcgcgacgtgctgggccgcaacgcgcgcctcttccagggcgccgccaccgaccgcgccaccgtcgccggcgtccgcgaggccgtccgcgcgcaccgcccgcaccaggccgccatcctcaactaccgccgcgacggcgccccgcactgggtcctcctccacctcgcccccctattccacgcccgcgacggcaccctgctccacttcctcgccgtccaggtgcccatcgcccccgccgccgtcgcgcgcggggcgacgtgccacacgacggggcatctgctagccgcgtgccgtgacgaggccagcagggtcgcggaggatttcccctgcgccacccacgcgggcaaggtgtttgtcgatatggacaagagagggctggagaccgaggaaccacgtgtacctagcgatagtgagaaagatatggcaataagaagagatgtgactcgattggcatcccagcactcagttcgtcgttaaaactctctctcggtagaatcaaacagagctttgtattgtgagttatttgcatattttgtccattattttgttgtctacttgtctcgtcttatttttgtgttgaaaacattgtatgtccaattcatgcgtgcttcattattaaactgatcattttgaactgatcacaggactgactcccgcttgcctaacatgccaattatttatgctagtgatgcttttacatcattaacaggttactcaagagaagaaatattgggctgtaactgcaaagtcttaaatgggccaggcactagcttggaggttttagaggaggcatgcacggtggatctactgagttacagatggaagttcattctgtgatcatctacatgtatctcctatccgagatgcttcgggcaaggttcgcttacatctttctcaggtggcctttcatatctgggttcaccttgacatgggtgcaaagcacgattttagtgggctgacccccgagaaatggctgcttggcgctgttggtgcggtgagggttgctgtgagaggcttgtcggcgtcaggtagcctgttgagaccatcccaatagcagttttagtctcctcgccatttcatgaccacggcgaccggccttccacgatgtacattgctgcttgctattctgtgtaaagcaactgcttagcatgacaaagtaaatgagttcgttttgaaggaaaatccatggtaaatacaagatgttgctgtgactatataaccaggtggggtgaagtaaagaaaaaggaaatagaagctgctgttaggatttatgggcttggcccaattaagaatttctaataattccaggaaaatctcaaaagcccatataagtggatggcaaagggataggtggaaccaatagcatcatattgctagctcttgtggagtagagctagcttaaatatggaagcca

SEQ ID NO: 8098 - DNA, 1603 bp, Zea Mays
gccggcctcgtgcgcccccgcctcgtcgcctccgctagccacctgcccgcttccgccctctctgcctcgcagcagcagcggcatggccgccggcgtgctgtctaccgtccggtggtccaccgcttgcgcggtgctgctcaacgccatcgccgcctccacgggcgccgccgtcgcggccgtcgcgttcggccgctgcggcgggggcgccataggcccggccgccgccgccgcgtccgccgcgttggcagctaggctccttgcttccgcggtggcgggattcgcgcagggcgctgccgcctccgctatcgccgccggtgctatcggggcccacgtcgacagcgagcgcgaccttcgccaactctctcggctacgatacaagagatggctttggtggacaagatttggaatgatcattacagtgctacaatttgtgttggcaatttatttgatgtgtatcatcttaagggatgtcttggctggagggtctccaacacagtgcttttcaggtcaaaatcaaaagagtgatgggaggcgcatcttgttaatagcttttcttgtcactatgtgggtgtcaactatagttcagtgtgctactggttctgatgtactaaggtggagatcattttatgcatcccatgattttgcgtggagggctcactaccgggaggtgtttgatcatggaatccgtgaggtcttatgctgcctagggcgtgttaaatattcgagtgtgttggaagatgatgatatatgtattgtggcaaagttattgggtgatcttatggcttatcgcgcatctggaactggccatcttgaactcgtagcaggactttcactactgcagaaatccaagtcatccacaattatttcaaaagaactagtggaggctcctcaaaatctcatccaagaggctcttctctttcatccatttgctgaagctgcctatacaggcccactgcttgattttggaaggaatcctcttatgtttccctgtgtgtggctcaataggcaaggtgttttgaccccatggactcgtgctagacgaccagttcttgaaggcgataactggtggagagggcatgcagctgctttcctaaaatatgccaatgtggccccagaagtccttcgaaaaggtcgtgttaaccagacaaaacgcgagaccgcctattttgttgttgtcttacactatttgagtacagtagtcattgctgtccgtggaactgagacaccagaagatgttataacagatggcttgtgtaaggaatgttcccttaatatagatgatctggatgggttgatcaattctgatcatctgtctcctcaagtgaagaatgctgttctctcatctccacactatggacatgcaggaattgttgaatcagctcgagagctgtacacagaacttgagggtcatcccatacatgaagataagtcaggtacaatgaaaactggattcttatcttctcttcttggggatggttgtgagtgccatggatacaatattcaaattgttggacattctttaggaggttctgtagctgcacttcttggtattaagacacatgcccgttgggaatattcactgttgagttcaccttggaaattt

SEQ ID NO: 8099 - DNA, 2754 bp, Zea Mays
cggaggggcgcgcgcgtgtagggtcgcaagccgagccaaaagcagctgcactgcagaccgaccaccacgcgacgctcctgctggctgctgccgcggaacccgggacaagcgacctcctccacctccccagctagctatagcttcctgcttgcagctgcaggtgccagccgagccgcctaccgggtacagccgcacaggcaggcggcggcatgcgctccagcctccagcagtgagggagggagctgtcccgctcccgccccttctacttctacccctccccccccgcgggccgagagggagtccgcccgccggcgccgcgcgactcaccgatgcccagccatgaggcctgctgcggcaccatgttctgggtgtacctcatgtcctgcgtcggcctcgtcgtcttcgccggcctcatgtcgggcctcaccctcggcctcatgtccctcagcctcgtcgacctcgaggtgctcgccaaggccggcacgcccaaggacaagctcaacgccgccaggatcctccccgtcatgaagaaccagcacctgctcctctgcacgctcctcatcggaaactcgctcgccatggaggcgctgcccatattcctcgacacgctcgtgccgccctacgtcgccatcctcatctccgtcacgctcatcctcgcgttcggggagatcatgccgcaagccatctgcacgcgctacgggcttagcgtgggggccaaggcggcgcccgtcgtccgcctactgctcatcctcttcttccccgtcgcctacccgatcagtaagttgttggaccgcctactgggaaagggacattttgcactaatgagaagagctgagctgaagacgttagttgatatgcacggcaatgaggctggaaaaggtggagagctcactcgtgatgaaacaactatcattacaggagctttggagctgactcaaaagattgcaaaagatgccatgactcctatatctgaaaccttctcacttgacataaatgctaagctggacttacacacaatgggtatgataatgactagagggcatagtcgtgttcctatatactctgggattccaagcaatattattggccttatattggtaaaaaacttgattacttgccgagctgaggatgaagtgcccattcgtaatgttactatcagaaaaattccaagggtggctgatgatcttcctctctatgacattctaaatgagttccagaaaggtcacagccacatggctgtggtagttaaacgaacaaaggaagcaggagtatccactgaaaaccaaaagagcacaactgcagattataaaataaaccccaaagatgctcatgctgatggctcatccccttcttatgctaacaacactgctggaagtcgtagatttaacatagagaagcatggagacgggcgctcatgtaataagaaatcagaaaagaagcgggaaaatattcttgattttaacacagatccacttccaagctattcaatggatgaggcggcagtcggaataatcacgatggaagatgtaatggaagaacttctacaggttgcacatatttgtaatcaagttcccatggtttggaacaagtatttacattgctcacagcataaaatgtctaccatgctttcaaaatatgcactaagatcaccagctaatgatgctgtatgagtgttctccatatcccattaaaacatcagttgtttgcaacattttagccatcataaggagtgcttgtacctgggtcattatggccctttattttccctctactttaatatatgggtgcgcagtcctcctgcgctctttcgaaaaaaaaaacattttagccatcataagtactagtattcaattaggagagaaactaggggggaaaatcagttgcacttgaattgtggtaatttgtttgtcttctcaagtttggcttctctcagatattgtaaactgacacggctctgttcgcaggaagaaatctatgatgaaacagatgagtatgttgatgtacataacaagatcaggataaacatgttacctccaggcaaagcactgtcacctaccatatctcctggtggtggacccttacctcaggggctccgaaagactcctatgacatctccgttctcaccatactaccattgtaattcagtgttacgttccccagcttccaaccattgtcagtcacctgggactctaccgacaatactttcccctggaagatcacctactgcacaaacacctgggcaaagttcaccaaatggaagtcaggtttcaataaattccaacggtcaacataaaaaggacggtgagaactaacataccagaagattgttttccagacggtctcgtctcaagacgggatgcatgattaaaaatcatgaaattgctagcgtaggattaagctgcgaatataagtagcacagctctcttgaatggttagtggcccatgtatttattgattgtttgcttgtacatatatgcttcggcatccggaccttagtatggcctaatcctcactatgtatcatacataggaagtgaatggaagccaatataattttgctctagacaattttagcttgctttctggacccttatgtaagccttcaagatagtgaaaatgttaagtgagtagctcacgagctaaataatggctagatattctcggtaatgaccaaaatcgatcaagtacaacaccaaaagcaaataaaataaaaaacaacgctctcaattccaatcaagatgaaataagagcgaaa

SEQ ID NO: 8100 - DNA, 2657 bp, Zea Mays
gcctgctcgtctctcgtgcggcgccgagtctagcctcattctcaacaatccatctccacagccaccgccgcgcctgccctggcaaatggagttcgacttcgactcccatggcggcgacgcttggctgctcgacgccatgtccacgtcgctccacttttcggccgtttcgcccccggtgccgtcgccgtggccgtgcggcgacccgcatcatccttccatgtggctggacacggttgccctgcaagacgacggcccgagcgtccccgccggccgtgaatcttaaaagcactgaagttatcgaacatccatatgtccagatatttaatgaaggacatcaaaatgttcttgtagagatgttggaaatcataacagtaatttgtgaagagctcaaactacccatagctcagacttgggtgccatgcaaataccaaaatttattgatacattgtggtggtgaaaataagagttgcttcgatattcatgaaagttgtgcccaagaactatgcatgtcaacaagtgctgttatgtttcatattatcgatgctcatatgtggggcttccgagatgcctgtgtagagcaccacctgaagaagggacaaggggtttctggaaaggcttttatcctacgtaggccttgctttacgaaagatgttactagattctctaaaatggagtacccccttgttcactatgctcgtatgtttggattagctggctgtttttcgatatgcttgcaaagtgcttataatagaaatgaggactatgtattggagttcttcttgccacctgattgtagagaagatggtgagcaaaaggttcttttggactccatcttagctctgctgagacagtatcttaatagattgcaggtagccactgacgaaggctcaaatgaagtttaccttcaagtcgatgctattactataattgaaaatggagatataaagaatgcacatgtacaacatatgaactgtgaaggtggcattcatgcatcagatgagagaaatatgcatgtaatccatgagtctgacagccagaaaagaatatccccaacagaatctgaaacatgtccatcgcctgataacaccaaatgcaatgacaaattatttgctagacaaaatggtggatgtatctcagattctttattgcttgaaaacaatagcaagcatagtggaaggagacaaggaaaagaagaaaaaacattcagtttagaggttattcaacagtattttactggaagcttgaagaatgcagcaaaaagtcttggagtatgtcctacaacaatgaagcgcatttgtaggcaacatggtatttctcgctggccatctcgacaaatcagcaaggttaaccgtactgtttcaaaattaaagaaggtaattgaatctgttgaagggcatgagggtgcatttactctcacatctgtcacaggtcctcttcctgttgcttttggtccatccaatcctatcagtataaagaaccaaagccaaattaatgtttctggacttcccattccttctgttcaagaaaacagagactcatcctcacagagtaagttactagaaaatgatattcaccgaagcactcttgttccccagaaaagctttctagctaatatcaacagacagattgaagcagagaaagcttccaactcgagaaattcatcgaaagattgtagaacacattctgggagatcagaagaatcctaccctgttagccctgcaaacatgacatttgtttcaacactcctagaaccgcaacaaaacatgtacatacaagatggcttcacaaaagagtcttttcagaaagaggacctgcggtttcatgggatgtttgttaacggatcaggaagcttgaaagattgcatgaaccacatcacttctgcagttaacggaacgattatagggcatccaggaagtctcacgactgcacaaaattcagggataataacatgtccaggcagtctcatcagtgcgcagaattcaaggatagtaacagtaaaggcacgctacaaggaagacttgttaaggtttcggttcccatgttctggaagctttatcactttgaaagatgaggtggccaaaagaatacaaatggatggtgttctttttgacatcaagtatcttgatgatgatcatgaatgggtgaagttgacatgcgacaccgacttagaagagtgcatggagatctctcgggcatctggtagcaacgttttgaggctgctggtcactgacattgctccagtccttgggagttcttgtggtagcactggatgattttgaatgtttatgaatcggcatagtagtataatgcagtggccaaatctagctagctgatatttaggctagccgcttcggttcttaggtacatcaccatcttttacaggtatttctcattttgtgtagggaaatctcaggtataaatcatttcctttgaaacaatggaggtatttggtttgaggaatcacttcattcaaaatgagatggtgtatcataaatcaattcttcgaatttggtgtaatgacatcattcctaatattagtactaactaactataagaaattaggtgatgatggatcaactcatttgttcataaaacaaacgaaaaaattgaggagtgagaagatgttggactagcttattcatcaaaccaaacaccat

SEQ ID NO: 8101 - DNA, 1056 bp, Zea Mays
tagaatcatgttttcacgacaggttcaattgttgccagattttactctcttgatctttgaggacttggaagttcctagccacaagacgaaaaacattgtgcaatacattagacagatggatgactcaaagaaggttctgttggtggatggaggcgacattgataagaagctaaagctggccactcaaaaccttcactacgttaacgtacttccttccattggcctcaacgtctacagtatcctccagcatgacacccttgtaatgactcgggccgctatcaacagaatcgtcgagcggatgcatacccccatcaaccgctagcaaggagggtttctgagtcgcaccactgcttcttacagccagcaacctgtgctttttcgttccctgttaaagctcgaaggtttcctgttatcttggtgctaacatggagctgcaacgtgagctgtttattttctgtcagactggaggtaccgaccgaggtaggagggaaatgttgtggccttttgtaagcaggtcattggatgtttattttagattattttttggcgttttacccacactacccttgaaacttagtgagttcttatccagcaaataagattatgtaatcctggattatataggtccaaagcttgggacagcaatttgtttagagtcctgtataatctagctgtcacgtcgcaggactcacgtggagaaagatgaagggatttgcatcgtttagggtttagtaagtggcagcggattctgtatttacttggatttggtccattttcatagaagttggctgaaaacgaaaggtttggttggcagaagccaattctaagagacataagctaaaacaaataggcccatcatccatattaaataagctagattgtatatttttagaagcaaacaaataggccctattttaatctaaaattttactgtctacgctgtaaatctcgccgcaccttgatttcggtccgtccgtcgcagccgaagtatgaatttgatgttttttaaggtccaaacaagcacaacaactctattttgtcacgccaacaaaaaaa

SEQ ID NO: 8102 - DNA, 935 bp, Zea Mays
ctttgggcttcttcaagagccctgtctcgctcgatttgtaaccgactgacatgctctcgcagggaagccggtccaggctgcgctcctgctcaactacgacccctccgggccatctcgcctccttcccgtcgtgattaaccaggggcagattctattctgaggaggtagtgaatcagggcacatggaacaccagggttgcagttagctaaattcatcaaagctcatgaatccttatacaacccccacgttattgcaacaaaaaggtgaaaagagcagagcaagagggaacacaactttcagctcttgatatgcaaccactcctggactttgtcaagaggggtaatctgcagactgaattgttctctgttgggctgaaccaacatttggtcacctcaatccatgaaaactggttttgcgcccgctgcattaacagcacaaaaccagaaggtgaaggagtaatagttatgcagattggagcttgcttattagtcactatcttcgcaagcaatggtggctgctgatcagtttgcaatacagtttaaccggaggagtcactaatttccagtatagtttcatgagtgatgttgatcgcaatttgttagtgtttgggatgatagtgctggaatgccgtagatgaccttatgtaacttgtaatgttacgatattctcggccgtagttatgctaatataatagcgaatattgactaatactgatgttcctagtgtgaggttgaagaagctcatgttgaatttgtggaaagtttccaaagcatccaaaagcttaaaagggacattagtttttcatcatttctcaatgtgagctcatgcaaaacattgaaggtttgaaatactttgaatcacgattcacagcaaaatgtatatagaaaaatactgcatatgtatcaagctaaaatctgattgtaatgagatttgag

SEQ ID NO: 8103 - DNA, 326 bp, Zea Mays
gagtaagaagaaagagggcggcggcacggcagagccaaagccgaggcgagccgagcagtacatgcatcccgcttcccgcattcctcatcgaggtccggtccagcagccttttgcgccttcgtgtccctcccctccactccctcaccgggggctgggctggtggggagtggggactgggggcagtcgccacgccgcagtccattctttcgtcacccatcgcagctccaacacctctcgctagtcgtcatggcggcttccgcggcagcgttccccctcccaccgccgacgcctcctcttctgattgctgacttgctgtggttaccaga

SEQ ID NO: 8104 - DNA, 2110 bp, Zea Mays
gagtaagaagaaagagggcggcggcacggcagagccaaagccgaggcgagccgagcagtacatgcatcccgcttcccgcattcctcatcgaggtccggtccagcagccttttgcgccttcgtgtccctcccctccactccctcaccgggggctgggctggtggggagtggggactgggggcagtcgccacgccgcagtccattctttcgtcacccatcgcagctccaacacctctcgctagtcgtcatggcggcttccgcggcagcgttccccctcccaccgccgacgcctcctcttcgactttcacatgtcttttgatatcacagaaaaggattgcccctgccttcactgctgtgaatgccagggacgtttctgtcgccctacaatatatggacattggacttgatagttggcaaactttcttctatatactggacgttccagctttcgccaacctgctgctttaaccacatcttttccttctttcccgattttgcctctcactatcatcaattaccgctaaaagtgaaacaagtgttctccctatggccaagacatcacttcctcctggattccggtttcatccaactgatgtagaactcacagtctactatttaaagaggaaactactgggaaaacacttacgctgcaatgctatcactgagattgatctatacaagttcgccccttgggatcttccagagagagcttccttggagagtaacgatctagtgtggtatttcttttgcccgcgcgataggaaatattctagtgggttaaggactaatcgctcaactggagttggatattggaaagctaccgggaaggacaggccggtggtatataattctaggactgttgggatgaagagaactttagtgtttcatcttggcaagccaccacgaggtgatagaactgactgggtaatgtatgaatataggctggaggacgaggaaatagctgcttctggtgttaaactggatgcctgcgttctatgcaaaatctttcagaaaagtggcccagggcccaagattggcgcacagtatggtgccccattcaatgaagaagactggaacgatgccagtaatgtagagtgttctccatgtgtgccttctgtggccccttgcgcacctgaatcaagtcgtggtgggttgaattctgctggtcaacgcctggctgtgagttatgatgtcaaggtttccttgggctcctcggcagaaggctgattcaactgctgactacagtagtgataatagaatatctttggatgctattgaaactatattctgtgaagtggatgagcttgggccccaggctatggtgaacaatactaaccattgtgactcatgcggtgagtatttgattcaccctacgatggtggcacgaggagctgaacagtacttagagctaaatgacctgtccttttcgctcaccgatggtcctgattcctgtggcgtgcttttctctaatggtgtatctgttgagcaactaccggatcttgagctcaggtttgagcagttctctcctgaccacatctccaataccgctattgcttccacatcaacaacggttggttcatctgcttcagtgcccttattggaggatcacaggacctgattcagaattggagtcatctggcgcacatgttaattgaatctaggaggatctgcaggacaaaggcataatgctccctttttttcaattttcatgaagttagaatttttttttggatgaaggcacggattagtgaccacttggcacagaaatatgtttgtgttgcggcttgtgaatccaggaccatttctctgcctgtagttttgcatggtagaactagatgggcaacaacaaaatgtgttcagtattgaataacgcactcactgcattaactactttgcctagcttagtatagtattctggatcttgaggcagggtagaagtgggggtgtgggacaatgtactcacagcttgttgtcatttagcagcaatatcttgtttcggtaacctgtggcaatatcttgtttggttacctggatttgctagtgcccaggcaagatgatgttttcgttgacgccataataataaatagcaatcgattttatttgcaaggacg

SEQ ID NO: 8105 - DNA, 1184 bp, Zea Mays
tcgcagcgcagcccatcatgtacggcccattgggctggttctgctgcttgccgacggtccatccctacagccagccagccagggcaaaccggcaaaaccccaacgcaggagcaacacagcgtcgccggcggcgatggatcccctctccgtgctccgcgactacgctggccgcaacgagctggacaagatcatcttctccggcgacgagatccacttcggctctgactacaccttcccggcttccacccccaccgccttcgcctccaagcagtcaggtcgcccctacccgctctccgctgccgtcttcctcgcgcagcaccacgacctcaagcacaccgacttcatccaggccgcgcgcctccgccgcatcccgcccgtatcgctccccgaccgcaagaccttcctcgacttcctccgcttcggccacaactccctcccctccgccgacccgctcctcccctccgccttccagccgcaggagccccacctccatccgccctcgcctccgccggaggaccccgcagctaccgaagaggccaccacgggaaagcaaatccgcgcgctcgagcggcccttcaaggaccgcaactcaatcctcgacgcccgcggccgcgactttctcgccgtcttccatgccgccgtgcgccgccaggacgagcagctcaagggcggcggcaaggatgcggcgccctcttcccgccccaactctggctccgtcgctgcagccctggccaagcccaaggtgctggacaggtccctgggcgacggcgtcgtgcccatcatccttgtgcccagcgcctcgcagacgctgattacgatctataacgtcaaggagttcctcgaggacggggtgttcgtgcccagcgaggagaggatgcgggcgaccaagggagggaagccggagagcgtcacggtgcagaagaagctgattcgtacggagagagctggcggcgctgggggtgccgtctccttcgaggttagggacaagccggcttcgctcaagtcagacgattgggggcgggtggtggccgtgtttgtgctcggcaaggagtggcagttcaaagactggcccttcaaggaccatgtagagatcttcaacagagaagaatagtaccatgcattggacacgctttttggtcggagtcggagtgaatcgtctctctctgcctacgaagctacggtct

SEQ ID NO: 8106 - DNA, 1437 bp, Zea Mays
tgataagcaactgcaagaaaattgtgcagtgagatcttcatgtgagaaactttgttgaaagtatggctggatattcaattctgtgctacctacttcaggtgaaagatcgccacaatgggaatcttctaattgatgaggaaggacatattattcatattgattttggtttcatactgtcgaactctcctggaggtgtaaacttcgagagtgcaccatttaagctaacgagggaactccttgaagtgatggattctgatgcagagggaactcccagtgagttctttgattactttaaggtgctatgcattcaaggtttccttacttgccggaagcatgcagaacgtattatacttcttgtggaaatgttgcaggattctggctttccatgtttcaaaggtggccctcgcacaatacaaaacttgaggaagaggttccacttgagtctaactgaagagcaatgtgtatccctggtgctctcactgatcagtagcagcatggatgcttggcgcactcggcaatatgattactaccagagagtattgaatggaattttatgattttccccacaggagcaacggattcattcagaaaccaattttcttgtatccttggagcaaaccatgggattgcataggtcagttttgggctgatctatgctggcaccccatatcagatttccaggagaggactaggttattgatcactgtgttttcatgtggcattgcacatttgtggtcaactagggaaacagattggtgccgcattgtactttcatgggaccccccctctgaaagagttgagaagtgtacagtcatcggcagtcatctagttagcgctttgtgctaggaggttgtgaccagtggagctctatttggcatattggaatttggaatccggctacattgttgtacagacctttgattgacgtagcttggagaggatgtaggagtgaacagggccatgctttgaagcgaacaagttataggcatatgggagctggggatcatccgagacagatgccgctcgaagtgtcactgtacttgttgtgtggtatccctatagcaccaaagtagatggagatgtgctttgctaaaaaaagataaagacccagtgttggccgctctcatatgtcactaggtctgaaaggaaattggccgctaatttgcgcgaggcctgtccttcagagaggtgctttgctgcatttgtaaattatcattactgtacagggaccatactgtcttagcattctgtttttaagttgttaagattttaattccttctttgtgggtgtcttggtcttcgaagatctaggtgatagcttgtttgactagcactatgatcagtgttcgaaagtacagttccatgtgtcatgaagaaaaacactgcaagatttttaatacatttttgatgtactatgagagcaaatttctatttcga

SEQ ID NO: 8107 - DNA, 4628 bp, Zea Mays
aagaaacggtggaaaaataattgggaaaacaaaatttcaaatcgaagtcttcctacacccagcgacgaaaaggctgcgacaattcgaatcaaaaatccatccgagtcgaatcgagccagcggaaactccgcggccgatctcctgtgctctcaccgcccgcctcccccgattctgcagcccctcgctgcgaatctggacgcgatttcgaggctagggtttgggaggctccggatcgcgagcccgtgcggaggcaagggtttggattcgggggttgctgctgcatgtcgggggtgctggattgagctactccgcgccggcttgtgatggtggtgaccggcggtggaagacgagtagacggcggcggtgagtagggtttgttgactgagttggggtcgagggtgcgccggccatggtgcggcttctcgggctgcggagcctgagcttcggcccggaggactcgccgcgggagatcccctccactgccgacgtggccccgcccgttggcagcagcggctggctcgtgcgcttcttcgactccgccttcttctgcgagtggattgccgtcagctatctctacaagcacgaccatgctggagtgcgcgactacctctgcaaccgcatgtacacgctcccgctgccggggctcgaggcctacctcttccaggtctgctacatgctcgtccacaagcccagcccttccctcgaccgcttcgtcatcgacacctgcgccaagtcgctccgcatcgcgctcaaggtgcactggctcctcgctgcagagcttgagctggaggatgctgacgatctcgacgggatcgataaggtgcaggagcagtgccaggttgcagcgaccgtgcagggcgagtggccaccgcttgtccggccttcacctccatcccctgctgccagtccgcgaggtaaccccatgctcagcagaatacgatcgtccaagcagcggctactgtcccttgcatcgtcaccttcgcttggactgagccccccagcaggtggtggggtcaatgtcgctgaggatgctatgggtactggagggaagcagccagccacaccgtcatcagaggataacaagttactcaagaggctgagcattggtccaaaaatgcgcgatgcactgctcttcagacgatcaggagagaaggatgaagaacaagaccgggatggtttttttaaaaggcttcttagggacagcagagacaaggaggaggaggatggtgacagagaaggatttttcaaaagattacttagcagggagaaggataatgaggaggaagaaagtgatagagatggtttcttccgcagattactcagggatagcaaagaggaggacatggaactgacaccaagctcagatggtttgttgaagcgactttttcgtgataaggaggacaggcaaggtgaggatgatgagaaggaaggattttttcgcaggatgttcaaggataagaacgaggagaggagagatagtagtcatgcaagacatgggaatgaggaaagactgggcaagagtgtggaagatgatgacagagaaggtttcttccgcaaaattttcaaagataagaatgaggagaggaaagatgaagggcatcaaaagccagatgagagggaaaaggttggtgcgaacatagaagatgataagagagatggttttttcaggcaactctttaaggagaaaaacgatgagaaaaaggaaggcagcacaccaagcaagaaagaggaagatgataaaggccataaaaatgcagatgatgataatttctttcgcaggcttttcaaggataagaatgaagaaaagaaagggattgttcatgacaggaatgaagatgacaagtgtgaggaaggttgtttagagtgcacccagaagattctaagagtgggcacatagaaagcagtcaatctaacaatctttctgaggggagcccaggatcagaaagcttttttaagaggctattccgtgatagagaccgctcacttgaagattctgagatttttgggtcaaaaatggcaaaagagaaacaccctggtactacaggaatcaatgagaagcaaagtggaaaaccaccattaccaattaatgcagtagcagagcttcgaaaaggttcttactatgcttcgttggaacttgttcaggctttatgtgatacatcgtatggcctggtagacatatttcctattgaggatcgtaagattgccctccgggagtctcttacagagatcaatagccagattgcttctgctgaaaaaaacggaggagtatgctttccgatgggaaagggcatatatcgagtggttcatatacctgaagacgagtctgttcttctgaattctagggagaaagctccttaccttatatgtgttgaagttttaaaagcagaagctcctagccactctaaaggatcatcagatgggcacaaattatcaaaaggtgggataccattggctaatggagatgtgcaactaccaaaaccacctccatgggcctatcctttgtggagcagacacgaaacacaaaactatgaaacagacagaatgctgaagtctacttctcaggctgcgacatgatgctacggattctcatgatccacctggagattcgcaaacagttgctgatcagcctattgaatgggtgaaggttacgttgtctgcagttccaggagttaacatggaagatgtagatgataatgaaccaacacgaaagaaggaccatcgccgtgttcctagtacaattgccattgaggaagtaaaggctgcagcattaaaaggagaagctccacctggtcttcctctgaaaggagttgcgcagagcacccaaaatttagatcctaaggctactgatggtggggatccaaaaccaaccgatgctttggctggtgagctttgggctgtcaaacgcgaaagaattcgacggtcttcggttcatggaaaatcacctggttgggacttgcgttctattattgtcaagagtggtgatgattgccgacaggaacacttggccgtacagcttgttgcacacttctatgatatatatcaagaagctggtttaccactatggctgcggccttatgaagtaattgttacttcagcttatacagcactaattgagaccatccctgatacggcatcaatccattccgtcaaaagtaggtttcccaatatttcaagtctccgagactactatgtagccaagtatgaagagaattctccaaattttaaactcgcacagagaaactttgttgaaagtatggctggatattcaattctgtgctacctacttcaggtgaaagatcgccacaatgggaatcttctaattgatgaggaaggacatattattcatattgattttggtttcatactgtcgaactctcctggaggtgtaaacttcgagagtgcaccatttaagctaacgagggaactccttgaagtgatggattctgatgcagagggaactcccagtgagttctttgattactttaaggtgctatgcattcaaggtttccttacttgccggaagcatgcagaacgtattatacttcttgtggaaatgttgcaggattctggctttccatgtttcaaaggtggccctcgcacaatacaaaacttgaggaagaggttccacttgagtctaactgaagagcaatgtgtatccctggtgctctcactgatcagtagcagcatggatgcttggcgcactcggcaatatgattactaccagagagtattgaatggaattttatgattttccccacaggagcaacggattcattcagaaaccaattttcttgtatccttggagcaaaccatgggattgcataggtcagttttgggctgatctatgctggcaccccatatcagatttccaggagaggactaggttattgatcactgtgttttcatgtggcattgcacatttgtggtcaactagggaaacagattggtgccgcattgtactttcatgggaccccccctctgaaagagttgagaagtgtacagtcatcggcagtcatctagttagcgctttgtgctaggaggttgtgaccagtggagctctatttggcatattggaatttggaatccggctacattgttgtacagacctttgattgacgtagcttggagaggatgtaggagtgaacagggccatgctttgaagcgaacaagttataggcatatgggagctggggatcatccgagacagatgccgctcgaagtgtcactgtacttgttgtgtggtatccctatagcaccaaagtagatggagatgtgctttgctaaaaaaagataaagacccagtgttggccgctctcatatgtcactaggtctgaaaggaaattggccgctaatttgcgcgaggcctgtccttcagagaggtgctttgctgcatttgtaaattatcattactgtacagggaccatactgtcttagcattctgtttttaagttgttaagattttaattccttctttgtgggtgtcttggtcttcgaagatctaggtgatagcttgtttgactagcactatgatcagtgttcgaaagtacagttccatgtgtcatgaagaaaaacactgcaagatttttaatacatttttgatgtactatgagagcaaatttctatttcga

SEQ ID NO: 8108 - DNA, 2322 bp, Zea Mays
ctccattctccaatctccactctgtccggcgcccctttcttctgacgcgcccgatgcagcgatgctactgcgatggatcgcagctgaggggcgtcggcgagcgcggccgtctaggcccctcgcgcgctctctctcgtacggtagggttgtggacgctgccgctcgcgatggggagctcagggtgttcgtggtcgcgggcgaggtatccggcgactcgctcgcttcgcgactcatggcggctctcagggcgctgtcccctgtgccggtccgtttcgctggcgttggcggtgaactaatgtgcaaggaaggtttgcaatcactttttcccatggaagaaattgccattatgggcatgtgggagctgctgccgcacatatacagtatcaagaggaaaattgaggatagtgcaaatgcggctatgctatttcaacctcatgctgtggttacaattgattcaaagggtttttcttttcgactgttgaagcaactgaaatgcagaagcaatcagaaggttcaaagtcctctgcatatccattatgtttcgccgtcattctgggcctggaaaggtggtgaaagcaggctctctaagttgcataattttgtggaccacatgttgtgcattcttccatttgaggaagaaatatgcagattaaacgggttgcctgctacttatgtgggccaccccttactggatgatgcgattggcctaaacatggggacagaattgtgttctgacaagtctaagtatcaaagaagttgtgaagctttccgactggaacatgggctgtccccaggtgccacaatcataaccatgttacctggaagtaggatgcaggaggtagttcgaatgcttccgatctttttgcatactgtgcagaacttaaggcatacatttgatgaactatcattagtcatcccagttgctccacatcgagatgtgaggacctatattgaaaatgttgttcagtcagaaccttttccagtggtgttgatacccggggggtcgcttaaggaaagatacaatgcattcagtgctagtagagcagcattatgtacttcaggtacagctgttatggaactaatgttagcaagactgccctgtgtggtagcgtaccaagctcatttcattacagaatgctttatccacttgaggaaaaagataaactttatttctctgcccaacattctcttgaattctctcgttgtgcctgagatcctttttggggcttgtacagctaagaatttagctgcaaaattaagtgaggttatttcaaatgatcaaatccgccagatgcaaattgaatcagctggccaagtattcagggttctctatgaacccatcaagaaacgggatactttattaagggaagagatcgactactcaggcttgtcatcaaatttcctatctcctagcatgatcgcagctttaacagtgctttatatggataagcatcaaaacactgcatgccggaatttggtggtagaatcagaagctaagaaatctcttgttctaccaacgtggtcagggttccatgcatgttgttcatgcacaactggagtaacaaggcaacaagcaactggttatgtttaagcttccacttctgaagtggtatcagggtcggtcagcatcatggtatcgcaaacagatttggtcatcctgttggtgcagactcttctacggttagaatttcctagatggaacaggactcggggagtgtgactagatggtacagtggggcttcgaaagtaataatgaactacaagatttttttcttctgtgtttctgatttctttcagattctgcagtggctaggcagactgtacgctagcagtcgtctgctcctgctttttagcaaggggggatatgagagatgtcgttataatgaagcgcatatcgagatttctgttgtcctgacggatggagagtataattttgtggtcgacctgacattgggcaatggtaaggtggaaactggtaggactgcagtttcctgtcaaaggatttttcaaaaagaaaatcaagtggatgaaacatggattcccacgtcgccagtggtacgatgacgtcactcctgaggtcacgcaggtggtgggccatgtggcgtcgaatgtattttgaattcttattttggtttaaaagttggaagagctacaggggcagtgggctcgggtaacatctctgttgttccccaccccaattggaatcccattcttggaatcttcgtaaggaaggcaaccgtttcgcatttgtttgatggattctcattctgtactcggcatttgtttaatgtctatactgagaaatctttactaaaaaaaaag

SEQ ID NO: 8109 - DNA, 1565 bp, Zea Mays
ggagtccaaactccaaaccaaaccggcgcttctcccacgtcttctcgagttcccacgcgcccgcctgctataaatcgcatccctcaatccccactctttatcccctcctcagccatcgcctccctctcccctcaacccagcgcccccctcccgccgccgctagggtttctcctccctccccgcccacccctaaatcatttccgaagcttccagtgcgccgcagccatgagcgacggcaaggactccctcgacctctccgccctcggcgctgccatccccaactcggccgagctcagcgcggaggacaaggctaaccttgtggcgtcgatcaagaacacgctcgagggattggcgtcgcggcataccgacgtgctcgagagcctcgagcccaaggtcaggaagcgcgtcgagaagctcagggagatccagggcgaacacgacgaacttgaggcaaaatttttcgaggagagagctgctctagaagctaagtatcagaagttgtatgaaccactttactcaaagcgttacgaaattgtcaatggtgtggtcgaggttgagggtatcacagtagaaagtgcagctgaaacccctgcggagcaaaagactggagatgagacctctgctgatcaaaaagaagaaaaaggtgtaccagctttctggcttaatgcaatgaagaatcatgaaattctagctgaggagatccaggagagggacgaggaagctctcaagtacctcaagaacatcacgtggtataggatcagcgagccgaagggctttaagcttgaatttcaatttggtacaaatccgttcttcaagaattcagtgcttacaaaaacatatcacatgattgatgaggatgaaccaattttggagaaagccattggtactgaaattgaatggtaccctgggaagtgcttgacacaaaaggtgctaaaaaagaagccacggaagggttcaaagaacactaaacctatcacaaaaactgaagattgtgagagcttcttcaacttcttcagtccacctcaagtccctgatgatgatgaggaaattgatgaggatatagctgaacagttgcagaacgaaatggaacaagattatgatattggatctaccatcagagacaagattatcccacatgctgtctcgtggttcactggagaggctgctcaagatgaggagtttgaagttatggatggtgaggatgacgatgatgaagacaatgatgatgaagacgaagatgacgaggatgatgatgatgatgatgattacgattcaaagaagaccaagggaactgccggaggggaagggcagcagggcgaacgacctgcagagtgcaagcagcagtgagttactactgctcccagccgacgttccaggggccactcaggaaggaacagacggctcctggtctacagggttgtctccacttctctattgaggcgtctgggtcctacagggttgtctccacttctctattgaggcgtctgggtcctgtaccggcatctactcctttttcctgtacatgtataaatatcagaagcaataaagaataaggtgcctctgga

SEQ ID NO: 8110 - DNA, 3211 bp, Zea Mays
cgaattcccaaaccgggtatacgctcatcggttcctcggcgctcgcctcgacctccgactcgaagcggccctcctccctcgccggacgacggcgacggccgtggccgtctaacacatccgtggggaaccgctcccttagttgggcctcctccggccatggtgcacagcgcgtacgatgctgtcgagctggtggctgacgtgccgggccacatcgaggccgtcgcctcccacgctgggaagctcctcgtcgcggtttccgacaccgaaggcttcctctggggctccgactgctccttgcgcatctactccgctccttccccctccgacggcggcggcgagatccggtgggacgggccctacgcgctcgagcggcaggagccgcggttctggcggcgcccgcccttagccatggaggtcagcgccagccgcgacctcctgatctcgctctccgagtggatcgcgctccaccgcctccccgggctcgagaccgtcgctgtcgtctctagcaagacaaagggggccaacgtctttgcttgggacgagcggcggggcttccttgccgtcggtcgacagaagcgactcaccgtcttccgcctcgacagtgggcgagaatttgttgaagtgaaggaatttggagtgccagatattctgaaatcaatggcctggtgtggtgataacatatgtcttggaatcaggcgggaatatatgataataaatagcatgaccggggcactaacagaagtgttttcttctgggaggatcgctcctcctttagttgtgcctctccttactggggaactgatccttggcaaggataacattggggtattcgttgatcaaaatggtaaacttattcaagacggcagaattatttggtcagacacaccagcttctgttgttatacataaaccatatgccgtggcccgcctgccacgacatgtcgagatacgctctcttaggccccccaatgcattggttcagacagttgtgctccgtgatgttcaaaagcttgtccaaactgaccactgtatacttgctgctctatctaactctgttcatggtttgttgcctgttcctattggagctcagatagtgcaattgaccgcttctggagaatttgaggaggcgctagcattgtgtaagctacttccaccagaggattcaaatttacgggcagcaaaggaaagctcaatacacataagatatggacactttttgttcgataacgggagttatgaggaggcaatggaacagttttcagattcacatgtggacattacttacgtgttatctctgtacccatctattgttctgcctcaaacaaatattataggtgatcatgacaagctgctggacatgccagaattagcaagggaatcctccgatgtgacagatgagatggaatcatactctttacagcttcaagaaccagatgataaatctccattggaggtaaagaaaatgagtcacaatgctctagctgcccttgtgaagtatttgcagaagaaaagaagtggcataattgagagagcgacggctgaagtaacagaggaggtggtctctggagctgttcaccacagcttaaaattatctgagccatataagtcaaagaagctgagcaagaaacgagctcagacacatacaagctctattgctagagaaatggcaactgtactggatacttgtctgcttcaagctcttattcttactgggcagtcatcaggggcaatagagttgttgaaaggactcaattattgtgacctgaagatatgcgaagagtttttgaaggaaaggagagaatatatggttttacttgaactctataaaagcaatgaaatgcaccgtgatgctctccaactactcaatcaattagttgaagaatcaaaatctgaaatggagaatacatattttaataaaaaatttaactctcaaatgatacttgaatatctcaggcccctttgtagatctgacccaatgctggttttagagtcttccttgtacgtccttgagcgcaacccatcagaaactattgagctctttttgtctgaaaatgttccagcagatttggtaaattcatatctgaagcagcatgccccaaatttgcagtcaacttacttagagctaatgctctcaatgaatgatactgggatcaaccctaatctgcaaaacgagctggtacaactgtacctttctgaagttctagactggtacaagattctgaaggaagagggaaactggacagagaagacatattccccaacacggaagaagttaatatctacgttggagagcaattcaggttacaatacagacgcacttcttaagcgccttccccaggacgctctttttgaggagcgagctatattgtatgggaaaataaatcaacacctcagagctctctctctctatgttcacaagcttcagatgccagagcgagcagttgcatattgtgaccgtgtttatgaagaaagagaacaacaaccgtccaaatcaaatatctattttaatcttctacagattcatctgaacccaagaaaagctgaaaaggaatttgagcagaaaattattccagttgcatcacaatactctggaatccaaaaggctagtgctactaagcccaaagggggtcgcgtaggtaaaaaggttgtagagattgagggggctgatgacatacgctttagccccagcggaacagatagtggccgaagtgatggtgatggagatgatgtaaatgaccgaggccctataatgttaaatgaagcactggaactgttgagccaacggtgggacaggataaatggtgctcaggctcttaggctgttaccaagagatactaaactccaggatcttgtatcatttcttgagccactattgcgtaactctagtgaacatcggcgcaattatttggttatcaaaaacttgattttgcgggcaaacttgcaggtcaaggaggatctgtataatcggtgtcaagctgttgtgaagattgatggagatagtacgtgttctctttgccataagcgtgttgcaaatagtgcttttgcaatatatccaaatggacaggctttggtgcattttgtctgctttaaagaatcacagcaaattaaggccgtcagaggagcaaactctgtgaaacgtagataatatggccgtgatccagtgtagcatgatgtatcgatcgaatctgatatcctcatctttgtcaaaccag

SEQ ID NO: 8111 - DNA, 3397 bp, Zea Mays
ttcccaaaccgggtatacgctcatcggttcctcggcgctcgcctcgacctccgactcgaagcggccctcctccctcgccggacgacggcgacggccgtggccgtctaacacatccgtggggaaccgctcccttagttgggcctcctccggccatggtgcacagcgcgtacgatgctgtcgagctggtggctgacgtgccgggccacatcgaggccgtcgcctcccacgctgggaagctcctcgtcgcggtttccgacaccgaaggcttcctctggggctccgactgctccttgcgcatctactccgctccttccccctccgacggcggcggcgagatccggtgggacgggccctacgcgctcgagcggcaggagccgcggttctggcggcgcccgcccttagccatggaggtcagcgccagccgcgacctcctgatctcgctctccgagtggatcgcgctccaccgcctccccgggctcgagaccgtcgctgtcgtctctagcaagacaaagggggccaacgtctttgcttgggacgagcggcggggcttccttgccgtcggtcgacagaagcgactcaccgtcttccgcctcgacagtgggcgagaatttgttgaagtgaaggaatttggagtgccagatattctgaaatcaatggcctggtgtggtgataacatatgtcttggaatcaggcgggaatatatgataataaatagcatgaccggggcactaacagaagtgttttcttctgggaggatcgctcctcctttagttgtgcctctccttactggggaactgatccttggcaaggataacattggggtattcgttgatcaaaatggtaaacttattcaagacggcagaattatttggtcagacacaccagcttctgttgttatacataaaccatatgccgtggcccgcctgccacgacatgtcgagatacgctctcttaggccccccaatgcattggttcagacagttgtgctccgtgatgttcaaaagcttgtccaaactgaccactgtatacttgctgctctatctaactctgttcatggtttgttgcctgttcctattggagctcagatagtgcaattgaccgcttctggagaatttgaggaggcgctagcattgtgtaagctacttccaccagaggattcaaatttacgggcagcaaaggaaagctcaatacacataaggtgatcatgacaagctgctggacatgccagaattagcaagggaatcctccgatgtgacagatgagatggaatcatactctttacagcttcaagaaccagatgataaatctccattggaggtaaagaaaatgagtcacaatgctctagctgcccttgtgaagtatttgcagaagaaaagaagtggcataattgagagagcgacggctgaagtaacagaggaggtggtctctggagctgttcaccacagcttaaaattatctgagccatataagtcaaagaagctgagcaagaaacgagctcagacacatacaagctctattgctagagaaatggcaactgtactggatacttgtctgcttcaagctcttattcttactgggcagtcatcaggggcaatagagttgttgaaaggactcaattattgtgacctgaagatatgcgaagagtttttgaaggaaaggagagaatatatggttttacttgaactctataaaagcaatgaaatgcaccgtgatgctctccaactactcaatcaattagttgaagaatcaaaatctgaaatggagaatacatattttaataaaaaatttaactctcaaatgatacttgaatatctcaggcccctttgtagatctgacccaatgctggttttagagtcttccttgtacgtccttgagcgcaacccatcagaaactattgagctctttttgtctgaaaatgttccagcagatttggtaaattcatatctgaagcagcatgccccaaatttgcagtcaacttacttagagctaatgctctcaatgaatgatactgggatcaaccctaatctgcaaaacgagctggtacaactgtacctttctgaagttctagactggtacaagattctgaaggaagagggaaactggacagagaagacatattccccaacacggaagaagttaatatctacgttggagagcaattcaggttacaatacagacgcacttcttaagcgccttccccaggacgctctttttgaggagcgagctatattgtatgggaaaataaatcaacacctcagagctctctctctctatgttcacaagcttcagatgccagagcgagcagttgcatattgtgaccgtgtttatgaagaaagagaacaacaaccgtccaaatcaaatatctattttaatcttctacagattcatctgaacccaagaaaagctgaaaaggaatttgagcagaaaattattccagttgcatcacaatactctggaatccaaaaggctagtgctactaagcccaaagggggtcgcgtaggtaaaaaggttgtagagattgagggggctgatgacatacgctttagccccagcggaacagatagtggccgaagtgatggtgatggagatgatgtaaatgaccgaggccctataatgttaaatgaagcactggaactgttgagccaacggtgggacaggataaatggtgctcaggctcttaggctgttaccaagagatactaaactccaggatcttgtatcatttcttgagccactattgcgtaactctagtgaacatcggcgcaattatttggttatcaaaaacttgattttgcgggcaaacttgcaggtcaaggaggatctgtataatcggtgtcaagctgttgtgaagattgatggagatagtacgtgttctctttgccataagcgtgttgcaaatagtgcttttgcaatatatccaaatggacaggctttggtgcattttgtctgctttaaagaatcacagcaaattaaggccgtcagaggagcaaactctgtgaaacgtagataatatggccgtgatccaggtttggttgatgccagcttatggaattccctctctttggcttcacactggattttagtggactgcttcagaagtttttactggagtaatcttcactctcttcagagatcgagtttatagccgtgcgtgtgtgctcgctctctgttttctggccatcgtactggaaaactggaacccctttcttttggttttcatgtacagaatgtaaatgatactgtaaagtttcggttaacagattgatgatggtcttgattatagtgccgcaatgtgtgctccaaataggtttggacattattattattggatccatgtcattataattctctaagttttgaatggcgctattataattcgtatattcggaggtctacca

SEQ ID NO: 8112 - DNA, 3568 bp, Zea Mays
aggcactgacaggaggggcctggtgttgaggttagcttccttccgaattcccaaaccgggtatacgctcatcggttcctcggcgctcgcctcgacctccgactcgaagcggccctcctccctcgccggacgacggcgacggccgtggccgtctaacacatccgtggggaaccgctcccttagttgggcctcctccggccatggtgcacagcgcgtacgatgctgtcgagctggtggctgacgtgccgggccacatcgaggccgtcgcctcccacgctgggaagctcctcgtcgcggtttccgacaccgaaggcttcctctggggctccgactgctccttgcgcatctactccgctccttccccctccgacggcggcggcgagatccggtgggacgggccctacgcgctcgagcggcaggagccgcggttctggcggcgcccgcccttagccatggaggtcagcgccagccgcgacctcctgatctcgctctccgagtggatcgcgctccaccgcctccccgggctcgagaccgtcgctgtcgtctctagcaagacaaagggggccaacgtctttgcttgggacgagcggcggggcttccttgccgtcggtcgacagaagcgactcaccgtcttccgcctcgacagtgggcgagaatttgttgaagtgaaggaatttggagtgccagatattctgaaatcaatggcctggtgtggtgataacatatgtcttggaatcaggcgggaatatatgataataaatagcatgaccggggcactaacagaagtgttttcttctgggaggatcgctcctcctttagttgtgcctctccttactggggaactgatccttggcaagacggcagaattatttggtcagacacaccagcttctgttgttatacataaaccatatgccgtggcccgcctgccacgacatgtcgagatacgctctcttaggccccccaatgcattggttcagacagttgtgctccgtgatgttcaaaagcttgtccaaactgaccactgtatacttgctgctctatctaactctgttcatggtttgttgcctgttcctattggagctcagatagtgcaattgaccgcttctggagaatttgaggaggcgctagcattgtgtaagctacttccaccagaggattcaaatttacgggcagcaaaggaaagctcaatacacataagatatggacactttttgttcgataacgggagttatgaggaggcaatggaacagttttcagattcacatgtggacattacttacgtgttatctctgtacccatctattgttctgcctcaaacaaatattataggtgatcatgacaagctgctggacatgccagaattagcaagggaatcctccgatgtgacagatgagatggaatcatactctttacagcttcaagaaccagatgataaatctccattggaggtaaagaaaatgagtcacaatgctctagctgcccttgtgaagtatttgcagaagaaaagaagtggcataattgagagagcgacggctgaagtaacagaggaggtggtctctggagctgttcaccacagcttaaaattatctgagccatataagtcaaagaagctgagcaagaaacgagctcagacacatacaagctctattgctagagaaatggcaactgtactggatacttgtctgcttcaagctcttattcttactgggcagtcatcaggggcaatagagttgttgaaaggactcaattattgtgacctgaagatatgcgaagagtttttgaaggaaaggagagaatatatggttttacttgaactctataaaagcaatgaaatgcaccgtgatgctctccaactactcaatcaattagttgaagaatcaaaatctgaaatggagaatacatattttaataaaaaatttaactctcaaatgatacttgaatatctcaggcccctttgtagatctgacccaatgctggttttagagtcttccttgtacgtccttgagcgcaacccatcagaaactattgagctctttttgtctgaaaatgttccagcagatttggtaaattcatatctgaagcagcatgccccaaatttgcagtcaacttacttagagctaatgctctcaatgaatgatactgggatcaaccctaatctgcaaaacgagctggtacaactgtacctttctgaagttctagactggtacaagattctgaaggaagagggaaactggacagagaagacatattccccaacacggaagaagttaatatctacgttggagagcaattcaggttacaatacagacgcacttcttaagcgccttccccaggacgctctttttgaggagcgagctatattgtatgggaaaataaatcaacacctcagagctctctctctctatgttcacaagcttcagatgccagagcgagcagttgcatattgtgaccgtgtttatgaagaaagagaacaacaaccgtccaaatcaaatatctattttaatcttctacagattcatctgaacccaagaaaagctgaaaaggaatttgagcagaaaattattccagttgcatcacaatactctggaatccaaaaggctagtgctactaagcccaaagggggtcgcgtaggtaaaaaggttgtagagattgagggggctgatgacatacgctttagccccagcggaacagatagtggccgaagtgatggtgatggagatgatgtaaatgaccgaggccctataatgttaaatgaagcactggaactgttgagccaacggtgggacaggataaatggtgctcaggctcttaggctgttaccaagagatactaaactccaggatcttgtatcatttcttgagccactattgcgtaactctagtgaacatcggcgcaattatttggttatcaaaaacttgattttgcgggcaaacttgcaggtcaaggaggatctgtataatcggtgtcaagctgttgtgaagattgatggagatagtacgtgttctctttgccataagcgtgttgcaaatagtgcttttgcaatatatccaaatggacaggctttggtgcattttgtctgctttaaagaatcacagcaaattaaggccgtcagaggagcaaactctgtgaaacgtagataatatggccgtgatccaggtacacccttgaacgggacactgacaaatcaatatcgaggtttggttgatgccagcttatggaattccctctctttggcttcacactggattttagtggactgcttcagaagtttttactggagtaatcttcactctcttcagagatcgagtttatagccgtgcgtgtgtgctcgctctctgttttctggccatcgtactggaaaactggaacccctttcttttggttttcatgtacagaatgtaaatgatactgtaaagtttcggttaacagattgatgatggtcttgattatagtgccgcaatgtgtgctccaaataggtttggacattattattattggatccatgtcattataattctctaagttttgaatggcgctattataattcgtatattcggaggtctacca

SEQ ID NO: 8113 - DNA, 4127 bp, Zea Mays
ggcctggtgttgaggttagcttccttccgaattcccaaaccgggtatacgctcatcggttcctcggcgctcgcctcgacctccgactcgaagcggccctcctccctcgccggacgacggcgacggccgtggccgtctaacacatccgtggggaaccgctcccttagttgggcctcctccggccatggtgcacagcgcgtacgatgctgtcgagctggtggctgacgtgccgggccacatcgaggccgtcgcctcccacgctgggaagctcctcgtcgcggtttccgacaccgaaggcttcctctggggctccgactgctccttgcgcatctactccgctccttccccctccgacggcggcggcgagatccggtgggacgggccctacgcgctcgagcggcaggagccgcggttctggcggcgcccgcccttagccatggaggtcagcgccagccgcgacctcctgatctcgctctccgagtggatcgcgctccaccgcctccccgggctcgagaccgtcgctgtcgtctctagcaagacaaagggggccaacgtctttgcttgggacgagcggcggggcttccttgccgtcggtcgacagaagcgactcaccgtcttccgcctcgacagtgggcgagaatttgttgaagtgaaggaatttggagtgccagatattctgaaatcaatggcctggtgtggtgataacatatgtcttggaatcaggcgggaatatatgataataaatagcatgaccggggcactaacagaagtgttttcttctgggaggatcgctcctcctttagttgtgcctctccttactggggaactgatccttggcaaggataacattggggtattcgttgatcaaaatggtaaacttattcaagacggcagaattatttggtcagacacaccagcttctgttgttatacataaaccatatgccgtggcccgcctgccacgacatgtcgagatacgctctcttaggccccccaatgcattggttcagacagttgtgctccgtgatgttcaaaagcttgtccaaactgaccactgtatacttgctgctctatctaactctgttcatggtttgttgcctgttcctattggagctcagatagtgcaattgaccgcttctggagaatttgaggaggcgctagcattgtgtaagctacttccaccagaggattcaaatttacgggcagcaaaggaaagctcaatacacataagatatggacactttttgttcgataacgggagttatgaggaggcaatggaacagttttcagattcacatgtggacattacttacgtgttatctctgtacccatctattgttctgcctcaaacaaatattataggtgatcatgacaagctgctggacatgccagaattagcaagggaatcctccgatgtgacagatgagatggaatcatactctttacagcttcaagaaccagatgataaatctccattggaggtaaagaaaatgagtcacaatgctctagctgcccttgtgaagtatttgcagaagaaaagaagtggcataattgagagagcgacggctgaagtaacagaggaggtggtctctggagctgttcaccacagcttaaaattatctgagccatataagtcaaagaagctgagcaagaaacgagctcagacacatacaagctctattgctagagaaatggcaactgtactggatacttgtctgcttcaagctcttattcttactgggcagtcatcaggggcaatagagttgttgaaaggactcaattattgtgacctgaagatatgcgaagagtttttgaaggaaaggagagaatatatggttttacttgaactctataaaagcaatgaaatgcaccgtgatgctctccaactactcaatcaattagttgaagaatcaaaatctgaaatggagaatacatattttaataaaaaatttaactctcaaatgatacttgaatatctcaggcccctttgtagatctgacccaatgctggttttagagtcttccttgtacgtccttgagcgcaacccatcagaaactattgagctctttttgtctgaaaatgttccagcagatttggtaaattcatatctgaagcagcatgccccaaatttgcagtcaacttacttagagctaatgctctcaatgaatgatactgggatcaaccctaatctgcaaaacgagctggtacaactgtacctttctgaagttctagactggtacaagattctgaaggaagagggaaactggacagagaagacatattccccaacacggaagaagttaatatctacgttggagagcaattcaggttacaatacagacgcacttcttaagcgccttccccaggacgctctttttgaggagcgagctatattgtatgggaaaataaatcaacacctcagagctctctctctctatgttcacaagcttcagatgccagagcgagcagttgcatattgtgaccgtgtttatgaagaaagagaacaacaaccgtccaaatcaaatatctattttaatcttctacagattcatctgaacccaagaaaagctgaaaaggaatttgagcagaaaattattccagttgcatcacaatactctggaatccaaaaggctagtgctactaagcccaaagggggtcgcgtaggtaaaaaggttgtagagattgagggggctgatgacatacgctttagccccagcggaacagatagtggccgaagtgatggtgatggagatgatgtaaatgaccgaggccctataatgttaaatgaagcactggaactgttgagccaacggtgggacaggataaatggtgctcaggctcttaggctgttaccaagagatactaaactccaggatcttgtatcatttcttgagccactattgcgtaactctagtgaacatcggcgcaattatttggttatcaaaaacttgattttgcgggcaaacttgcaggtcaaggaggatctgtataatcggtgtcaagctgttgtgaagattgatggagatagtacgtgttctctttgccataagcgtgttgcaaatagtgcttttgcaatatatccaaatggacaggctttggtgcattttgtctgctttaaagaatcacagcaaattaaggccgtcagaggagcaaactctgtgaaacgtagataatatggccgtgatccaggtcgggcgaccagctggtcattccagaggaccgaccaggcgcctaatcacgattagggcgacaattaggacgcttaatcggtcctggtcgacctctggtcgtcccctaatcgtcctatatatttctgggcatatgtatatataatatgatatatgtatatataagcaatactgcaataggcattatataagtctgaaagtatgaaattgaaactgagtaacagactgaaaggcaatatagacatatagcactatagcagaactgaaactgaaatatggaatacaaggctacaagcagtaatgcagtacctactacctagagcatatcatcatccaagcaaaaagcagcagcagcttctccaacagattcagattcatcagaatttagacaataggaaagataggaaagggggagaagggggaaccttgagatgaggagctcatctcgtcgctagtgttttggagacgccgccggtgttcttgagctgctgctggtgttctagagccgcagcctatgttctggactcggcagaggagaggaaaagtttcaaggggcggtggcgcattgcctttatactactgtagatgggccgaaaaaatagaagcccagtagcccactagaaaaccctagccgcctggacaaatcctggtcgatttaccatctagtcggacgacctgatactctagtcgagtcatccggctgatcggccactaccaggcgacctgcccgactaatcgcgattagtcggatgacttgaaaacagtgtttgtgtgcaccatatctttcatgattatcatgcactatgtaatttattttacatatgaccctgttaatatagttgtatttataacatacaaatgttgaactaaattaaactattctcgttgacatttttttatgttagtatgtactttatagtgctgcactgctggaagtggct

SEQ ID NO: 8114 - DNA, 2529 bp, Zea Mays
cgtcggtcgatcatgttgcgtctgcgtgtctatttatttggatttggacatatgggcagagcatggagcagcacgcggcctagctaggtgagagtgagacagagcagacgcggcgccgggagctggaagtgatctagagctagagcggcggcggcgggcatggcagagcatctcatctctacggctgaccacgacaggctgccggacagctacgtccggccggagacgcagcggccgcgcctgcgcgaggtcgtccccgacgcggagatccccgtggtggacctcgccgaccccgaccgcgaagccgtcgtcgccagggtcgccgaggcgtgccgcacccacggcttcttccagttgctcaaccacggggtgccggagcagctgacggcggcgatgatgtcggtggcgtacgaattcttccggctccccgcggaggagaaggccaagctgtactccgacgacccggccaagaagatgcggctgtccaccagcttcaacgtgcgcaaggagacggtgcacaactggcgggactacctccgcctgcactgccacccgctggagcagtacgtccccgactggccggacaacccaccatccttcaggaggaccgtgagcgcgtactgcagtgcggtccgggagctggggttcaggctgtacgtcgccatctccgagggcctgggcctggacggagcgtacatcaaggaggcgctgggcgagcaggagcagcacatggcggtgaacttctacccgaggtggccggcctgcaggtgctcaaggacggccgctggatcgccgtgaacccgcggcccggcgcgctcgtcgtcaacatcggggaccagctgcaggcgctgagcaacggcaggtacaggagcgtgtggcaccgcgccgtcgtcaacgccgacaggccgaggatgtcggtggcgtcgttcctctgcccctgcaacgacgcgcgcatcggccccgccgccaggctcctcaccgacggcacgcccgccgtctacagggactacacctacgccgagtactacgccaagttctggagcaggaacctggaccaggagcactgcctcgagctcttcaggaccccgacctcctaggagtattttggatgcttctctttcattttagcttttcggtactagtttgtttgttactagaatggaacttgccgactgcatcagaaactgtctgtctgtacccctcatcagctccccctccaaataatctctctgcccatgtgggcttgtttcaatactttttgtcagtacagcccatatattactttttttttgtcacatacggtgtggaaacacaaaacaggccgattccttccataaatgggcctgctcctgtccagcccgccccccgtgatgggccaaattcgcggtggctgctgagaacaggaacaggccccgcgccggcgccgcccgtccagtttccaaactcgcgcatccggtcggctggcgcgtcgtgtggaccagaaagggagcgaaatcctactcgtcgcacggggtccgcaagcttttcgtcgcctcgattcgcttccgccccatcctccttcccgacgcctcacatggcaacggccgtgcccgccgcctgcctccgcgcgccgtgctcctctccagcggccgtcgcacgccgacttggggccggtggcccgtcgctgcgcaagcggcattgcgccgtcgcgcccgtcgctgccgcctgcggccccgcgccgccgcggctgcttgacaacgaggaggcggtctgctccgtacggcggcgtgtgctggttgccggtgccgccgcgttcctctcccggcctaatccggcggcatcagaggctaagaaagggttcctgcccgtcgtcgacaagaaggctggctactctttcctctacccgttcggatgggaggaagtggctgtgcaagggcaagacaaggtgtacaaagatgtgatagagcctctcgagagtgtgagcgtcaactctattccaactagcaaggaggatatccgtgatcttggtcctccggataaggttgccgaggctctgattaaaaaggttttggcaccatcaacacagaagacaaagttaattgaggcgaaagagaatgatgttgatgggagggcttactacacttttgagttcacagctcaggctccaaactacaccagacatgcacttggtgctattgtaattgcaaatggcaaattttacacattgaccactggagcaaacgagaggaggtgggaaaagatgaaggataggctgcatactgttgtggattccttcaaaatcgaaaatagaatatgagtgcctgaattgctgtgttgtttttccttcgttgattcgctttttcttacataactgcagtgctgagatttttcagtagtaaataccgggattgtggattatgctgatcagtttcatttcgaaatgtttgttaccagacttgagcaacatttgtttgtactttatgtgtataataataatatcttgtttggatgtagatattggagcataaaattgggaattagaatcaatgt

SEQ ID NO: 8115 - DNA, 1114 bp, Zea Mays
ggccctcagcgatctgcactttgcctagggaaagcccattggttcttggatagtgggccccgatcacgcctttacaaggcctgccaaagtgagcccaaaattgtcggggccgatcaaatcaaacccatcgcattaccacacaaggcctttctaagttcgacttaataataataatcacatacagtaaatcattcgatctccaccggcctcctccaatgaccgtagccggagccatccgccgccggcgagcaccgcggccccatctccctctcttcgtcctcgtcctacttttctctactctaaccccacgcacttcggcgctccgcgtcccgctccgccaggcagcaaccctcgtctccctctcccattcgctcctctcccgcgtcgccatcacacgtgctgctcgtggggacgccgcggcggccgcacgcgtacggcgaatcgcttccctgctgtcgtcccgtggtgcgtggggactcggctgggactacctccgccactacgccttctcctcagccaccggatgcggcctctcctgcgcagccgccgcttctcgtctcatcgccgctgccgcggaggcctcgcgcctacgttccgccactgacgctgcgcagtggatgcgcctacactacggcgacatccgcgacgccgccgcgcagctcctgaacgggcttctcctcgccttctccgaagaggggccattgagagaggtgttcatggatattaagtgggaggtggaggaaggggaattgctgaaggattgcctggaagtgggagctaaggacttaaagggtttgcttgtcattgccaaagacctcttcgctggtgtttcaaggacttctacgcagcatagcgagctctgagatgagtaatcacaattcacagaatgctaaccaaagcatggagaatagaaaaagaaaattcagaactttggctgtgtgctgcagtgttcatgaatgtatcagatcctactgtctcattggacccactccctaaacatcgaaactcctatgcttggtgatactgcctgatgcacagctgtctgtaagttaatatatcttaagatattcaacaagttttctttttaaagataggagaagagctacagaacatt

SEQ ID NO: 8116 - DNA, 2253 bp, Zea Mays
taaggacaaaagaaaacaaaaggaaaaaggaaaggacaagtgctcgaggttcttgctccgctcttctttctgcttgctcatcccagccccagcccactgaaactctcgaatccgcggccgccccctccgcgatcccgacgtccgtccgccttgctcgaactcgacgctctcttctcctcaacgcgctgcacctcccccccccctcccggggggcggcgcggccaccggggccctctagcgcggctgggctgattaggtggagtagaatggaggcccggccggagtgggatctacgcaagatgagggagctgcgcttcgttgtgttgcttctggtgatatccttgccgtgcttctctgcatccgatcgccaaggagatgctttatatgatatgaaacaaaaactgaatgttactggcggtcagctttcagattggaaccaaaatcaagttaacccttgcacatggaattctgttatttgtgacaataacaacaatgttattcaagtcactttggctgcgcgaggattcactggtgttttgtcaccaagaattggcgaactccaaaatttgagtgtcctgtgagtcattggctggtaacaggattactggtaccatacctgaggagtttggcaatctatctagcttgacaagcttagatttagaggacaatcttttagttggagaagtaccagcttcccttggcaacctttctaagcttcagctgttgatactgagtcaaaataatttcaatgggtcaattcctggtagcatagcgaacatttcaagcttgacagacatacgcctggcatataataatttgtccggtcagatacctgggttgctgtttcaagtagcacgttacaacttttctggcaatcacttaaactgtggacctaacttcccgcactattgtgcatcgaacacatcctatccgagtggatcccataactcaaaaattggcttaatacttggaacagttgggggaattttagggcttattatcgtgggagctctgtttctaatctgtaatgcaaggaggaaaagccatctgcgggaagtttttgtggatgtagcaggcgaggatgatcgacgaattgcgtttggccagctcaaaagatttgcatggcgagaactgcagattgcgactgataatttcaatgaaagaaatgttcttggacagggaggttttggtaaagtgtacaagggagttcttccagatggcactaagattgctgtaaaacgactgactgactatgagagtcctggtggggaggctgccttcttgcgtgagagcgcttgttggtctatccatttatgcagaatttgagtgttgcctaccgcttaagagattttaagcctggagaagccatcctggattggccttcaaggaaacgggtggctataggtacagctcgtggactggagtatctgcatgaacactgcaaccccaagatcatacaccgtgatgttaaagctgcaaatgtattgcttgacgaggatttcgagcctgttgtcggcgattttggcctagcaaagctagtagatgtgcagaagacgtctgtgacaacacaagtccgcggaaccatgggtcacatagcacccgagtacctgtccacagggaagtcttccgagaggacagatgtttttggatatgggatcatgcttcttgaacttgtgactggtcaacgggctattgacttctcacggctggaagacgaagatgatgtgctattgcttgatcatgtaaagaagctacagagagaaggggagctggactccatcgtggacagcaaccttaaccagaattatgacggcgaggatatcgagatgataatacagatagcgctgctctgcactcaggcatcacctgaggaccgtccatcgatgtctgaagtggttaggatgctggaaggcgagggtttggcggaacggtgggaagagtggcagcatgtggaggtgacaaggaggcaagaatatgagcggatgcagcggaggtttgactggggagaggattcgttctacaaccaggaagcgatagagctgtctgcaggtagatgataatctgtggaaacggatggttgtaaatgcgcaacgaagtggtgcctgctgtgccgtatataactattatttgtagagtagctattagatagatatgttcataagattattcaaacaaacttgctcggcgatagcatgaatgtggatgaaattagatgcataaataaataaatggaagtagagatgaaagtggtaa

SEQ ID NO: 8117 - DNA, 1630 bp, Zea Mays
cataatatgaagattgaactcttgtttgtcttcttcttcctccctcctcttgcattgctattgttaccccttccccttcgcttgccacatctgttctcctgagtggtaatccgagcacacggcgccgtgcgaggactgcttcctgcttcttccggtcgcgcccgacccggccgcagatatggttgggaacagtgtgatgtggcaacacctggaagtggaggatctccttctctaccacaaggagaaaatccttctttactacaaggagaaaatccatgagtcggggagggcctttgttctaagggaggtccatcacgaagagtgtgctcggaggcttaatgagaagtatggtgctaacttcacgtggaaacaaacctacaacaagtaccacaagctgaaaggagaatggaaggtgatcatggaggcgaagtctgctaggggtgctggttttgatgatgttcagaagaagataacctacgacgagatcgaggttgtcaagatgaaagctaaaggcgacaagaaggctaagtactacaatgttccgatccccttgtatgatgagatggagtttgtcttcacggggaaacacgctactggagagttcagtgttattgaagcaccgtttgatcgctcaggaaggcaagaggatgatgccgttgggaatgtcaacctagatcaagagccagcagatctgaatggtgactcttctcaacacgatttcgacaccctcgcagagtctgatagtccgaacccagtaggctcgaagcgcaggcacgaggagaaggagaaggagaaggagaaggaatggaaatgggctaggcaaggcgtccccatcttcatgcaggccctgtcggaagctgtgagctttacccacggtggcacggacccatacgagggtatttacaaagccattgaagacatggatgagtatcctttgccggcacgccttgatctgctgacctatcttgctcagaatcgtcacattgccagcatgttgaagggacggcaggaggaaactttcaagcaatgggtggcacgatgggttgctggtcactaccctttgtgattcgtgtttgaagctcaagtcgtcttatgattcgtttgcgctcggagtagggtctaacttgatagggcaagatgcatattttggccgtatgtaaactatgcatggcagaatgtatagttttttttcctgatagtatgaaactagatagtgagtgttactaggcatgcatggcgtgttgaggtgagggtcatgagataatcacttcatctattattatactactaggagaagagagcttaacaaaagacctactttatcttgttcctataagattttgatggggatgagaatccaatagaatttggcttcgtgcagacgatcgatcactgccactgcaataataaacgtcacatggaatgacaaccatttgtcaacagaggaacaagcgaagcaagccggtatatttatacaaagtctcacatactgaatattccatctagcaacagaacgacacctcgatttatttctgtgtctttgtttttagatatttgacgacccataaaaacatgagacaactagcatccagggaaggcgatctttgtgtagcacataacagattccaac

SEQ ID NO: 8118 - DNA, 2755 bp, Zea Mays
atggcgtccgataacctcagcagatccacgtccgtacgtgcctgtcttgtctccctcgccaaccgcgaatacgactccgcgcccgctgaagccttcttcttcctatattgtgctactgtaagagctgctgcattcgccaagggaaacgcggccagtttgccagcacagcaccaacacggccctgccggcatcgtctttctgcttctgcaaaagacgaacaaatcaaaagggtgatcatctcggtgcccaccaaacctcaacaaccaagtttcatgtctaatctcgacgttcagcttccatctgctttgatctgtttgttgaggcaaatgctgaggctctggtgttggtcctggaacgaaggattacgtgcatgtgcgcatctaagagcgcaatgatagaaagactttgactacagtccagggtctgaataaagaatccagttataacaagatcctcaaggatctgaagaaggaattctgctgcaatggtactgtagttcaggacccagagctaggccaggtcattcagctccaaggtgatcaacacaagaacgccctcacgtaaaactactatatcttagacgtagtgtttttgttgttgttttatgtggtaccattgattgttcagtttggatcttctttttttattaatataattgggtatttggcaactctgctgcttggtttgcttaaaaaagatctcggtatcgatgtaaagtaacacactggtaaagaaatgggcgtcaacccaccatgtcttcattctgagcaagaattataaaagaagcatgatccactaacaatatgcaaattatcagacacacaaccattgactggtttcaaattcccatacatgactgctgcattctcataatcttcagccatactgaacaaacaagctaactataattcaacaccagaatatcttgtagtgtgtaacatgatcatgcacttgtacgaatcttgtagtgtgcaaattatattggctggtttcaaattcccatggatttatattgagtttggcctgttgtgtttaggatggctttggtctattctgcctccaacgattcagtagcagtgagcatttgctatcggttttcacttgacaactttgttggcttctttcatttgccataggtccaccatagtgcagcaattgcccgtgtgtatttcctgtctcagaggcggcggcgccaagatccagcccaaggagcagcagaagcaagtaaggaaagtgatcagaaaagtggctagcaatcgggctgcagcaagcaactggacgatgatggcttccaggcagtcagagaacaatgcacaagaagaaacatcaccattgacgactcctaacgccaacatagccaggatcatcccttcgctgcccctcgagaccaggtggccaccgttccctctccgacggtacgccaatttttggctgcctgaggtagcattgaaggaaggcgtccccggcgttcattcctgcttcgagccgagacccaccgacgtgttcctcgcaagcttccccaagtctggcaccacctggctcaaggccctcgccttcgcgacgctgaagcgttccacgcatccgccgttcgacgacgaccatccgctgcgccattgcaaccctcatgactgtgtcaggttcctcgaacttgatttcaaccagcagaaggatgagctcgaggcgctcccgtccccgcgtgtgctggccacgcacctcccctactccctgctgcccggcagcatcaccggcgacggagagcgctcggggtgccggatcgtctacgtttgccgggaacccaaggacgtgctggtctcctcctggctgttcacgagaaaggcagcgccggcttgtggggttgacgcccggtcgttcacgatccaggaggccttggagctgttctgtgatggccgctgtctcggcggcccacagtggaaccacgtcctccactactggaaggagagcgtgaggaggcctgacagggtgttgttccttcgttacgaggaggtgctgattgagcccgaggcgcacgtcagaaagctggccaatttcatgggctgtggattctcagaggaggaggaggagcgcggggtggtgagcgccatcgtggagctgtgtagcttggggaagctgagagacatggaggtaaatagaaatggaagcactttgttggggatcaagaacgaaagcttcttcaggaagggagttgttggggactggagcaagcatatgacgcaggagatggcgcagaggctagacaaggtcgtagaggatgcattgcaagggactggattcacctttgcgagcacagcatgatgaggcagtgcgctcatagtagttgcgaactacagaataatgccaaggtcaactcgttttattggtgttgctggttggagatcataccagtcatggtgagcattcttctttggtgatgaagggggaaatatggacatcatcttatcatttaacgaaaattgatttgtgtacaattcatttgtataactttgttacaaaccatatgttgtggcaccttggcacgccaaaaccatatgcattactgtgtaagatttgtcataaagccatgtatcatcattgatatattatcgattaatgtttggagaagctacaattgattgcaagcagacctgggcagattcctaagactatatacagtagcttacccatctacatactcatattcaaacttcactctatcaagagtgcagtctacagtgcggagctgtgcaatacattgttt

SEQ ID NO: 8119 - DNA, 1162 bp, Zea Mays
ggcgagctctttttttgagacaaattctgttctaatatagcagtttgatagttgatgaagtaggtcttgagcagaaggagatggatactgctgtgaaccggaaagaccttggtgttccagttggagatacattatttggcaaaacaatccttatccttggatttggggccattggcatcgaggttgccaagaggctaagaccctttggggtaaaaattcttgctaccaaaagaaattggtcatcggacacattgccatcttatgttgatgagctagttgacaagaaaggtgggccggaagatatgtatgagtttgctggtgaagctaacattgttatagcatgcatgaccttaaccagcgagacaattggaattgtggatcataagtttgtttcatcaatgaaaaaggggtcatatctggtcaacattgctcggggacgcctgctggactacaaggctgtgtttgatcacctggaatcgggccatctagctggtctggggattgatgttgcttggatggagccatttgatcctgaggaccctgttctgaaattcccaaacgtcattctaacgccccatgtggccggcgtcaccgagtattcctacagaactatggcaaagtctgttggtgacaccgcccttcagcttcatttaggcgaggcgttcacggaggtagagttcgtcaactaaaaaaccgtccaggcggcagccgtagacgcatgccattcgtgggctatcggaaccgctgatgcgatcatttgtagagaataatggatccgcgacttgtaagaataaacatgtagccagatgtttgatggtgatctccatgagaactctgccactggctgccttagctggtagtggtagcaagtcattttctcaaacattgccttctctttctctgtatcactgttgtcgtcatgatcacaactttctttgttagccgggttggttaggtgctctaggtaacactccttaagtttgagttcagttcaattcttaattcgactgaatttcaggctgagttttaaaaataatacctttttttttggtgttgttcacgcactagcctcagctagccgtcgtagtctcggacggcgattaggaggtcagatcgtgaacactgtcatttccatcatgtacgacgaatgaggttttcgcga

SEQ ID NO: 8120 - DNA, 1728 bp, Zea Mays
ctaaaaattagtccttaccaaacactgcctaaccgcctaaggattccgccgccggcaccttgccagctgacgccaccaatcaacgcttccctttatggccggagcaatagttggcagactcggccgccatcccacctccttgctcctcctaacactgccccgtcacgccgccgcacaccaccggctgcactctccttcctcctcccaagttgcaagagccggattgccaggtcagtattcaaaaatgggtgatccaagtgagaggaatggacacggcgctcttacccgggtgctattctgtggtccatattggcctgcttctactaactacaccagggagtatttgcaggactatccattcattcaggttgatgaagtaggtcttgagcaggtacctgatgttattcacagctatcatatatgtgtagtaaaaaataagcgtatagattcagatattattgccaaggcaactcagatgaagattataatgcagtatggtgttgggttagaaggtgttgatgtaaatgctgctacagaacacaaaatcaaagttgcacgaatacctggaagtacgacaggaaatgctgtctcttgcgcagaaatggcaatctatcttactctaggcattctgcgtaagcaaaaggagatggatactgctgtgaaccggaaagaccttggtgttccagttggagatacattatttggcaaaacaatccttatccttggatttggggccattggcatcgaggttgccaagaggctaagaccctttggggtaaaaattcttgctaccaaaagaaattggtcatcggacacattgccatcttatgttgatgagctagttgacaagaaaggtgggccggaagatatgtatgagtttgctggtgaagctaacattgttatagcatgcatgaccttaaccagcgagacaattggaattgtggatcataagtttgtttcatcaatgaaaaaggggtcatatctggtcaacattgctcggggacgcctgctggactacaaggctgtgtttgatcacctggaatcgggccatctagctggtctggggattgatgttgcttggatggagccatttgatcctgaggaccctgttctgaaattcccaaacgtcattctaacgccccatgtggccggcgtcaccgagtattcctacagaactatggcaaagtctgttggtgacaccgcccttcagcttcatttaggcgaggcgttcacggaggtagagttcgtcaactaaaaaaccgtccaggcggcagccgtagacgcatgccattcgtgggctatcggaaccgctgatgcgatcatttgtagagaataatggatccgcgacttgtaagaataaacatgtagccagatgtttgatggtgatctccatgagaactctgccactggctgccttagctggtagtggtagcaagtcattttctcaaacattgccttctctttctctgtatcactgttgtcgtcatgatcacaactttctttgttagccgggttggttaggtgctctaggtaacactccttaagtttgagttcagttcaattcttaattcgactgaatttcaggctgagttttaaaaataatacctttttttttggtgttgttcacgcactagcctcagctagccgtcgtagtctcggacggcgattaggaggtcagatcgtgaacactgtcatttccatcatgtacgacgaatgaggttttcgcga

SEQ ID NO: 8121 - DNA, 2379 bp, Zea Mays
acctttccaggaagctgaatcaacagaaacgcgtagaaataacgaaaagtacaaaaatattgcgctgaagtttccgtgtacgacggtcaggctcaggctcagcatgaaatagccgcgtccggcgtttcatcatctcagtccccggcgcggcaggtgaaattcgagtactcctgactgttcagttcactataatatcccttggtgccgttgcccttgcctcaaatctatacgtaagtggaaacgttggaggagatcgatcgatcgggatgggtgggtgcttctccgtgcacggtgacgtgcgcggcggcatggagggcgtcggcggtggcgcgaggacccagggcggcgcggcgtcgtcgtctgcgcagcagggcgggccgaacgatgcggtcgactatttcttccagacgcgcgggctccgcggcctctacacgcccatcgagttgtcattttcagcatcgaagttgcggaatacagattccttttcaaagagtgatcctatgttagtggtctacactaacatcaaaggaaagctagaggagattggccgtactgaagtgattttaaattcactggagccctcatggattacaaaggttacaatgtcttaccaatttgagattgtgcaaccactcatattcaggatatatgatgttgacacaaagtaccacaacactccagtgaagacattgaatttgacacagcaggattttctgggggtagcatgctgcaacttatcagagagtgattgtggacatggtcttcatggaacaatgacagtacatgctgaagaaagtgactcctctagaatggcagttgagatgactctgcgttgcgtgaacttggaaaataaagatgtgttctccaaaagtgatcccttcttaagaatatctaaactggtagagactgctggtcccattccaatctgcaaaacggaagtagtacctgacaacttgaaccctgtttggaggccaatcactttaacatcgcagcagtatggaagcaaggataacccactgctagttgagtgttttgattttaattccagtggtgaccatgaactgataggggccttccagacaactattactcagcttgaaaatctatatacctcaaagtctgcagcaattttttacaaccacaagggacaaagaaagatgaaagaacaattgtttgtggacaagtttcaggaaacagtccagcatactttcttagattatatatccagtggatttgagctcaatttcatggtggctatagattttactgcttcaaatggagacccacgtgtaccccagtccttgcactacattgacccctctggcagacctaattcgtatcaacaggcaatgctgggggttggcgaagttctgcagttttatgacaatgataggcgatttcctacgtggggttttggagcaagggtacatggttatgtatcacattgctttaacttgaatacagctacaaatgactctgaggtggttggagttgaaggcatcatgtcagcatacacctcttctctttacagtgtttcccttgctgggccaactatgttcgggcccgtgatcaacaaagctgcagatattgcaagccagtcccttcaatattcaaacaataaatattttgtccttctcattatcacggacggagttctcactgacatccaagaaacaaaagattgcattgtaagggcatcagacctgccattgtcgattctcattgtaggcgttggaaacgctgatttcaaacaaatggagatcttagacgcggacaatggtaagcgactggaaagctctacgggtaggatcgcgacacgcgacatcgtccagtttgttcccatgagggaagtccaaggtggcgagatctccgtcgtgcaatcccttctggaggaactgcccggtcagttcctgcagtacatgcgcactcggggaatcaagccacagcgggctccggggcttgcttcagcgcccgtttacccacctcagcagtgaccagaagaaaacgtgcacgagctgatccatttgcctcaactgtggattccgctagcgtcccgtcccgtggtagcctagtactcttgttcatacggtctctggttagctttctctttgccgcagttggtaaatatccatgctgtagaatctagatccagcacaaatagatagtaaaacactgctttcctctaggttaagctagacgatgtaaattcgtgctgcagattgccaagtattcaggttgtcgtgaaacgtcattattatcacctgctttcatattaagtactatcttgctaatagttgatttcgagcttgttctcagaagaagaagaaaaaaaagctatgataatgtgcgaggtttgatggtaataataaagaaaaggca

SEQ ID NO: 8122 - DNA, 2054 bp, Zea Mays
gacagcaaaaatctcctcggccatatccgtgaatcaatagacaagggaagaattgggacaacacacattcacacgagcacacactgctagaacccagccgaggatcaccgtacgctttgctccgctcatctcctcctccgcggagcaattccgtcgaacgcctcgcgcgcgcacgcgctctcgcaccgccctcggcctttgtcccatcgaatgccgtagcgctgtggacgggcgcgcgcggcggtgcctgccatggcttcgctctgccccttatcagccgcgcccgctttcccgcgcgctgctcgacctcgtgccgcaagcttcaggggacccgcttcctggagcggcctcgcggcgaccgcgagcaatgcctgtgtctgtagctgtggacttctgcccactggaggctacgcgaggctgcggtcgcgactaaggagtcccgtgcgcgccaagatcgacgaggcggacaagggcacgggcgccggtctgggcttcccctcgccacgccgtaggaagctacgcttgcgcctgcgaccacggctgcgcctcttgtggtggcggctccggcggctgtcgccgcgggagctcatgaccgacgccggggccgcgctgcggcgcgccgttcgccgcgtgcctcccgcggccgcggcgccggtcgtcctggcgcttctcctcgccgtggcgcggctcgcgctgcccaagaacgtggcccgggaggtggcctactcggacctcgtcgcggggctccgcgagggcgccgtggccgccgtcgctttcgaggaggactcgcgccgtatctacttcagcaagaacgctggggatgatgttggctccgacacgaacgagaccggtgagaacgctgcggcgccggcgccgaagtggccgtactacgcgcggagggtgccgcacgatgagggcttcttgctcgggctaatgcgggatggccgggtggactaccgttcgtcgccgcggcctgctgggaggctgctcgtggacatgctgagcacgctgctcacgctttgggtctcgctggtgcccgtgatgtggttcatacagcgtcagatgtctggtgcgggcggtgctgacaagcgacgcaaaccgaggaagcagagggtgggctttgatgatgttcagggcatagatgaagccaaggaggagcttgttgagatagtgagctgtctgcatggttcactgaattataagaagcttggagcaaaattgcccaggggtgttctgcttgttggccctcctggaactgggaagactctgctagcaagggcagttgcaggagaggctggaattccgtttttctctgtttctgctagtgaatttgttgaagtttttgttggacgaggtgcagctcgggtaagggatttgttcaaggaggccaaagaagctgccccgtcaatcatttttattgatgaacttgatgccgtgggtggaagtcgaggtagaagttttaatgatgagagggaccaaactctaaaccagctgcttaccgaaatggatggttttgactcggacatgaaagttattgtaatggctgctactaacagaccaaaagcactggatgctgctctttgtcgacctggccgcttctccagaaaggttgttgttggtatgcctgatgtggagggccgcaaaaagattctggatgttcatctaaggaatattcctttggaagaggatcacggaataatcagtgatctggttgctagagtaaccccagggctggtcggcgcagatctagcaaacattgttaatgagtctgctctactagctgcacgaagaggtcggaatactgtgtctcgggaggatattatggatgcaatcgagagggagaaatacggggtcactgggaggcaagaagctgattctgaaaggcaaggcctcaccaagttatttccatggctatctaaacctggaaataaaccatcaagccctgatgatttccgaggattgatgggttatcacacattaagctaacttagtagctcttgcaagagccctattgctcgctagtgaggagcttattttttggagttcggctggcg

SEQ ID NO: 8123 - DNA, 695 bp, Zea Mays
cgcatttggtaacgagaggagcggagaaggagcttcttggagaaagacggctcgagagagagctttccgattgcgatcccatcaacggccgccgaccgccgctggttttctttcttctcgcccaagccgcgccgccggcgcggtcctttgtaaaggcctcgcggcacgggagcggcctgcgctccctctctctggattaggcaaagcatcctcctgtttggatcggcatggagaagacgacgacgacggcgcagccggtctgcgcgcaggagtcgctggctctgctcaactgcgtcgcctcggtcccctacgaccgggatagagggtgaagaagttttcgctggcagaaccaagctccaccacaaccaccgaagctctgaagagcgatacgaagccctgagcattctgcaaagaaaactgtatcatctgattgggcgcggttgatgataagtctatgcctgttaatgtagcgttagatttgtacttttgaacccatgccagatgtacttgtgccagaaatcaccaatctgttgaactgaaaacgttacccgatgtccacacaaatgatacagtccatgatgccatttcgataagaaaggcaccatccatccaaggttttctaacattttgctgcgctgttgcttgaccgatgaatgttatgctggcccaatgcaatgcaactcagatttgcatca

SEQ ID NO: 8124 - DNA, 1319 bp, Zea Mays
ccagaccctagccacgactttccccaagcctcagcccctctccccgctcgtgtctccaagccgcaacggcgcagctcctcttcttggacgccgaaaccgggcaccgtcgtagcccctgtctccgctcgtctccgggaccctgcttggccctctccggcgaacctctgtgcccctgctccgccgccagttcgacgccgcctgctccagatcgacgttgtcgtcctccgtcctttgtccgcctgctccagatcgacgacgcctgctccagatcaaatccggcctccgtcctctgtgcccctgccctgccgctcccagatcgacgccctaccgctccaggtcgagctgctgctccagatcgacgcccaactgctccagatcgagctgcttgtcccagatcgacgctaagatggataacatgccaaagaacaggaaaccaaatgctcaatgggatctcagtgctgctagaatttttaatgagatatgtgtggaataagtattgacaaataatagaccacaaggttgtttgaacaacaaagggtacgccaatcttgtagccaagtttaatgaatggtcaggcagaaattacacccgtgttcaaatgaaaacccgttgggatgcactgaaatctgactttacaacatggaaaacactactccttagtgtgtctgggttaggaagagatccaaggattggttctattacagctagtgacgaatggtgggaagaaaagatagaggtatgcaaccttggctttgtttctattgtatgaaatggttatgttgcttgttataactattagagttgttgtgtttcaggccatgccagcatgcaaaaagtttaggcttgcagcattggagaatgaagatcttgaaataatgtttaatggggtgtcctgcactaatgcatatgctatggctccaggggcaaaagaaggattgcctgccaatgatagtgatgatgtggaggaggtgtctccaagtgttgaggacaagcaagctagaaaaagagatggctttcacctcaagtgaatcaaatgaagctgacataacaagtaattcaagtgactcaagtgactcaagtgactggatgtgtgaagctgctgcaattgcagcttatgcaatgctcgattgcggtacatcatctggaaagaagcaaaaaataagtgcaggagactggttatcagtgggttcagaggcatctcagttatccagagagttgttatgatatgtttagaatgagaaggtcagtgttctatagtttgcatgacattttagttaacagttatggtttacgatcatcaaatgagatgtgttcaattg

SEQ ID NO: 8125 - DNA, 1551 bp, Zea Mays
gtctgatttctctcatccctcccgcaccacggcaccagaccctagccacgactttccccaagcctcagcccctctccccgctcgtgtctccaagccgcaacggcgcagctcctcttcttggacgccgaaaccgggcaccgtcgtagcccctgtctccgctcgtctccgggaccctgcttggccctctccggcgaacctctgtgcccctgctccgccgccagttcgacgccgcctgctccagatcgacgttgtcgtcctccgtcctttgtccgcctgctccagatcgacgacgcctgctccagatcaaatccggcctccgtcctctgtgcccctgccctgccgctcccagatcgacgccctaccgctccaggtcgagctgctgctccagatcgacgcccaactgctccagatcgagctgcttgtcccagatcgacgctaagatggataacatgccaaagaacaggaaaccaaatgctcaatgggatctcagtgctgctagaatttttaatgagatatgtgtggaataagtattgacaaataatagaccacaaggttgtttgaacaacaaagggtacgccaatcttgtagccaagtttaatgaatggtcaggcagaaattacacccgtgttcaaatgaaaacccgttgggatgcactgaaatctgactttacaacatggaaaacactactccttagtgtgtctgggttaggaagagatccaaggattggttctattacagctagtgacgaatggtgggaagaaaagatagaggccatgccagcatgcaaaaagtttaggcttgcagcattggagaatgaagatcttgaaataatgtttaatggggtgtcctgcactaatgcatatgctatggctccaggggcaaaagaaggattgcctgccaatgatagtgatgatgtggaggaggtgtctccaagtgttgaggacaagcaagctagaaaaagaggtgttgatcacaaatccccaattaaaaaatcaaagaagaattttagagatatgcagttcaagcgttttgtggattcatttgtggaaaaagctagttcaagcaagtcttccgcaacatcttcgcctaatgatcatgttaggcaagagataacagaaatgatggaatcagttatctcagctgggatagttgaaggaagtgatgacatttctatgccactcaacttctcatcaagaaggagtatcgagatgtgtttctcacactaaagattccagaagggaagcttgcatggctcaagagaacttgggaggagaggaaaaaacataagctagttatatatggctttcacctcaagtgaatcaaatgaagctgacataacaagtaattcaagtgactcaagtgactcaagtgactggatgtgtgaagctgctgcaattgcagcttatgcaatgctcgattgcggtacatcatctggaaagaagcaaaaaataagtgcaggagactggttatcagtgggttcagaggcatctcagttatccagagagttgttatgatatgtttagaatgagaagctctttaactgcatcaatc

SEQ ID NO: 8126 - DNA, 2351 bp, Zea Mays
gtctgatttctctcatccctcccgcaccacggcaccagaccctagccacgactttccccaagcctcagcccctctccccgctcgtgtctccaagccgcaacggcgcagctcctcttcttggacgccgaaaccgggcaccgtcgtagcccctgtctccgctcgtctccgggaccctgcttggccctctccggcgaacctctgtgcccctgctccgccgccagttcgacgccgcctgctccagatcgacgttgtcgtcctccgtcctttgtccgcctgctccagatcgacgacgcctgctccagatcaaatccggcctccgtcctctgtgcccctgccctgccgctcccagatcgacgccctaccgctccaggtcgagctgctgctccagatcgacgcccaactgctccagatcgagctgcttgtcccagatcgacgctaagatggataacatgccaaagaacaggaaaccaaatgctcaatgggatctcagtgctgctagaatttttaatgagatatgtgtggaataagtattgacaaataatagaccacaaggttgtttgaacaacaaagggtacgccaatcttgtagccaagtttaatgaatggtcaggcagaaattacacccgtgttcaaatgaaaacccgttgggatgcactgaaatctgactttacaacatggaaaacactactccttagtgtgtctgggttaggaagagatccaaggattggttctattacagctagtgacgaatggtgggaagaaaagatagaggccatgccagcatgcaaaaagtttaggcttgcagcattggagaatgaagatcttgaaataatgtttaatggggtgtcctgcactaatgcatatgctatggctccaggggcaaaagaaggattgcctgccaatgatagtgatgatgtggaggaggtgtctccaagtgttgaggacaagcaagctagaaaaagaggtgttgatcacaaatccccaattaaaaaatcaaagaagaattttagagatatgcagttcaagcgttttgtggattcatttgtggaaaaagctagttcaagcaagtcttccgcaacatcttcgcctaatgatcatgttaggcaagagataacagaaatgatggaatcagttatctcagctgggatagttgaaggaagtgatgacatttctatgccactcaacttctcatcaagaaggagtatcgagatgtgtttctcacactaaagattccagaagggaagcttgcatggctcaagagaacttgggaggagaggaaaaaacataagctagttatatgtattcatgctgtatcttgaacttgattagtaatgctatttgttcatgttgtatcttgagcttgattagtattgctatttattcatgttgtatggttgagttatattattcatgttgtatggttgacagatggctttcacctcaagtgaatcaaatgaagctgacataacaagtaattcaagtgactcaagtgactcaagtgactggatgtgtgaagctgctgcaattgcagcttatgcaatgctcgattgcggtacatcatctggaaagaagcaaaaaataagtgcaggagactggttatcagtgggttcagaggcatctcagttatccagagagttgttatgatatgtttagaatgagaagttcaaatgatgtagcatgaacttggacaaaggtaacgagatccggaatatcagtacatcaaagcaagacattagaagactcatagaagatttatcaagatcatgcaagagcctaatacacaagataagagaatcccaaacaaagaaacacgaagaaacaaaaaaatcagcacaccaaaaaggcactggacgtgtcacgcgcgaatgacaactgtggctggataagaaaagagctgaagacaaagtgcacaattgtcttagtgtgcatcagatacaatgcactagacaggttacccagagagctctgcagagtgacccaaggagttacagggcatcgaacatgtctggtggtgcaccagatacggcactctataagggatgcaaatgcaactgagtcaggtatgatgcaccggacaagtctagtgttaacaccggtggcacactggatacccagaggcctcaatggtcgataacgactatttccaatggctaggtgatgtggaactcatcggacgtgtttggaggcttcttcttccgaaggtcctcaaaataccaacttaaaagttattctctagtctgcttttaagtaatacaggtgcaataccgaaggtcatcttcggacgtgggaataaaggaagtcagatgatacaaaataaatttctcatagtttcctaattaattactcaagtca

SEQ ID NO: 8127 - DNA, 2839 bp, Zea Mays
cggacaacgaacccagctcgaaaagttgtccaggagaaaccgaaggtcggcgggatccgctctccgttcgggcgcgagatccgccatcccaccagcaatggcggcggggatcgccggcgcggtggtggcagcgctcctgcttctgtatccggccagggcagcggcagcggcggcggtgggggaggggcggcggttgcacactctgttctcggtggagtgcggcgactacttcgactggcaggcggtggggctcctccacagcctccgcaaggcccggcagcccggcggcgtcacccgcctcgtcagctgcgcggaggaccagctcccgtcctaccgcggcctccgcatcggccacaccctccagccatcaacaagccagcaggggtagtgcattggctaaagcatagtccagaggccgacaatgttgattgggttgtaatcttggacgcagatcagattattcgagggcccattattccttgggaactcggagcagagaaagggaagccttttgctgcttattatggatatttgaagggctgtgataacatcctagcacagcttcacactgcacatccagaattttgtgacaaagttggaggaattctagccatgcatattgatgacttaagggctttagcacctctgtggctctcaaaaactgaagaagtgaggcaagataagtcccattggtcaaccaatattactggcgatatatatggcatgggttggatcagtgagatgtacgggtattcatttggtgctgcagaagtaggtctacggcacaagataaatgatgacataatgatctacccaggttatactcctagacctggcattgagccacttatcttgcactatggtttgccatttaaagttggaaactggtcattcagtaaattagaacaccatgaagatggaataatttatgattgcaaccgcttgttcgatccacctccttttcctagagaggttgagatgatggaatctgacccaaatataaaacgtggcttatttctaagcatagagtgcattaacaccttgaatgaaggactcttgttgcatcatgcatctgctggatgccctaaaccacagtggtcaaaatacctgagttttcttaaaagcaggaggttttcagagcttacaaaaccaaaatactggaagggtgaacaggttgacagcataatgaccatgcaacatgttgcattgtccaaggcaaacaatgaatatccaaaaatacacacccttttctctaccgaatgttcatcatattttgactggcaaactgttggacttatgcacagttttcgtttaagcggacagcctggtaacatcacgcgcttattgagctgtacggatgaggacttaaagaactataaaggacatgatcttgctcccacacattatgttccatctatgagccgacatccattgacaggggactggtaccctgcaataaacaaacctgcagcagttctccattggctcaatcatgtgcagactgatgctgagttccttgttatcctagatgctgatatgatcatgagaggccccatcaccccatgggaatatggtgcaaaacgtggccatcctgtttctactccttatgagtacctcattggttgtgataacatacttgcaaagatacacactcgcaatccctccgcgtgtgataaggttggtggtgtcattatcatgcatatagatgatcttcggcgttttgctctactgtggcttcacaaatcagaggaggttcgtgcagacaaagctcactatgcaaccaacattactggcgatatatataattctggctggattagcgagatgtatggctactcttttgcagcagctgagattaacctgcgacacatcattaggagggacataatgatatatccaggttatgttccactgcccagggcaaaatacagggttttccattatggtttgagatttggagttggtaattggagctttgacaaggcggattggagaaacgctgatgtagtaaatacatgctgggccaagttccctgaaccacctgatcctgctacgatcacgaaacaagatctagatgcacgggagagggattttctcagcattgaatgcgggagagctttgaacaaagccctatacctgcaccataagcgcagaaattgcccccggctagacaccattagcagcacatctaagaaaactgatcaagtttctgcttctaacaaaattgtgagtgttgcacaaaagtcaagaagtataagtagaggaaacatcgaatccatggacgagggaaggttgaagactgtcaagaggactgcagcttctgtacaacctctacatagatcaaggagactggccaggtcttctaggatgtggataattgctgtatgggcattatcaattgtggtgttcctattagtaatctccatgtttttcactgagcaaaggagaaacgcttcgagatctagggtttctagaagtttaaaggctcatgtctgagtattctctttttctaccgacacaatttctgactatagagcagacaatattcacaaactgttactttgtggacgtatataatacataaaaggattttgccaaaaggttatggtcctgggactgtataggctaacatctggtttgagttatcagaagccaaaggactagaacctttgcgaacgtctcctctcttttgtcaaaacttcccgtaaactgctagcatgtttcggtgccactgctgttgtacttgatttaataggttcttttattataacaatactgtgaagttccatatattatttctttcccttcgtgagtgagttggaaaatgtatgagttgaac

SEQ ID NO: 8128 - DNA, 1808 bp, Zea Mays
gctacagaagccatctgcacgctgcaacaacagcctctacgctacggttccttctatcctgaaggggcacgctactcccattccgccgcgcccgtagtcgccggtcctcttgctgcttcgtgctcccgcgcaatcagtgaatacctccacgcgcaacgccgcccgtcgactcctccatggaagctgatccgtcgccgccgtcggcgtgcgcgctgactgagtagctcgtggagaaggtcgtgctgcgcaccccatctgctgacccggcgatcctcgtccatgctgcactcgtctgcgcacgctggcgcatcgtgaagggcccgcggttgcgccgatgctgccgcaaccttcaccgcgagtgcgagggtcgcagcccccgatgcttggcttcctccccagcgccggcgcggggattcgcttcgtgctcacgtccaccttcggccccgcacgctggtggatggcgcgtgctggtcaccctccacggctgcgccctcctgtgcagtaacaccggcctccacgcgtccgtcgactgtgagcttgttgtttgggatcccggccgccggacataatgttgtgggacccacaggctggccggtaaaacggttggcctttattacttccgacgggccgaggcggccgtcagagataggttatttccgacggcggccgtcggacataaggctattttcgacgccttatgtccgacggcataaaaccgtcggacataggttatctccgacggttcaatccttatgtccgacggctttggccgtcggaaattgttccttttactgtagtgcatatactcgtcggaggagggcgtatcactttttctggtcagcagtggcattccgaattttaagccaataatattgaaactaaagataatggtgcatatagcatcaaatatgcccaagtggtcaaatctgcaattctgatttctgaatgtgaactctattttgctagaaacctcagattctgaagttgataaactgtccttggggtattcgaatttgttgttgcagttaactctgaataccgcacagcagctaagctgattgatgcagttaaagagctggacgaatagatgagatggataagaagcaggttgaacttcctctgaagcaactggaaaccatcttgacataataaaaccaagctctaatatcattgtaagaatctatgctgtgccggccggcccaggatcaatcaggatacacacgccctgacgcccatgaagtcgttgagagttaccacagctatgccttcattgcgtgccggtcaattcatgcggtgaacaaactaaatccgtcgttcgtgtaccgtctgttggagaagttcttcaaggatcagagctacagtggtacggttgatgaaataaccaagaaccttgttgtgcccatcatcggtgaaactaatttggcggcattcagagcaggttttaacgattcacattctgatcaggctacaaggatatctttcaagaacggctgtgcacgaggtgtgaccgggacaccctacttctttgtgaatggcatacccatcaacgattcaggttctcctctggaatacaaggactggatttctatcctgggtcccttggttggaaagatgtagcgcggttgctagtttgttcatcaataaagtcctagtagagagtaaacagacaaaagctgaataataaataacattaatcagcatcgtcattctcagaataaaaagagtgctaactctcatcggattcaaattgtgtacaagcaacagttcattctttcaggcaacatatcatgcgtgtgcaactctcccgg

SEQ ID NO: 8129 - DNA, 3994 bp, Zea Mays
caggtcaggcacgcgagtacgcgacgcacccgggtgggcccctttccgctcccctccctctcccctccgctcctcttctcccccagatctctctcttcttctcttgcgaagtcgccaaggccagtccccaatccccatccagccagaccgccggcgatgacggaccaccgcgacgtgatgttgcccttgtccctccaatacatagccacccgtgccctcctcctgctcgtcatcgcgtccgccgtttcctgctcttccttgccgccggaggacggcatccgggtcgtctctgcagagaaaagagcttgagtatcaatctaggccatctatcagtggagcttcgtcctttaagaatcttcttgcaaggctgccacctcgggttcattcagtttactatcgtgatgagattggtaacatctcctcatcccatctgcgcactgattcacacaagtccgatctagaaattgagcccagatatccgttatttggtgggtggcactgcacgttcaccattggctatggtcttccattgcaagattttgtctttgagtcagttgatggccggcgctacatcaaccttacttttggttgccctctattggatactgtggttgacgatcttacagttaaagttgtgcttcctgaaggatcaaaaaatccagagcatgtagttccttttgtgacagagaaacatcttgagactagttattcataccttgacgttgttggaaggacgacggttgtactgaagaagaaaaatgttgtaggggagcacaacgttcctttccaggtgtactatgaattcaatccgatcttcatgctggcggaaccattgatgctgatatctgcagtgttgctgtttttcgttgccttcattgcgtatcttcacatggatctttccatcagaaaatcatcataggcctgttggcaattctgtccaccacagtattttttgaggcacatgttctgctaactgtgattgatgaagtaacaatccttgttctagcgcactagttgaactgtttatcagtgcaccatcctcaatggagaaggacgatgtttttttttttgtgtgtgtgtgggtggaatatgattgcttcatgtagggctcacaacgatcagaaacgatatcatctataggaaaacgattgcctagaaatttagctggtttcataattaatcaacgtggtgactacaatacgatattgatatatgtttgaaattcaaattttaaatacagtaaacgttattgtctttatagaaatgatatgattattacgagccctcagttacggttttagcttattagttacggtttagcttcgtgcaggaataagaatgagatgaaccacgaactgaacattgaatgatagcgaaggtatgtatccatctgttcattaactgtaatccacttgtatccatgaaaacatacatctacaggtgacgcatgatggatgccaccgttaacgtggcatcaagaattcactgctgacgttgtattgtaccaaaaatcgtatgtggtcacggcttccatgatgacggcggcggcggcgtggccgggaacattggcggcacggcggagaacatggtgttcttgtcgacggtggtgacgccggctcccctaccgctgttggtgagagccaccagggccgcgacgaggccggcgttgcccaccagcgtcggctcgttctgcccgaaggtgttgcgcgagtccttgaagccgtcgttcttgtcaggcccgccgaccatggcgcccgccagcaggttggggtccgccttcttgctgtcgcgccacttgtagccgccggtgcacgagtacttgacgccgttgtgcggcgtggacgcgccacggtggtgcacgtgccgcgggtacttgctgccgaacccaaccacgtagctcatcttcttggggttgtcaccgagaatgtagttgacctgagacctggcgaactcccggaggtcgttggtggtcatgaagtttgggccgcagtaccagccggggacgttgacggcctccatgtagtcggcgtagagcgcggcgatgaaggagttggcgacgacgtactgcagcggctgccccctgccgtggttgaagagcgccatcccgcccttggtgaagttgaaggcggcgaagcgcgggaagtacatgcacatgttgaggctggtggcgttgtggtagccggctagcgactcctcgtacgggtagccggggttgaggaacatgcgcaggcgcgacagcagcagctgggcgcccgggagcttgttgtcccagctgaacacggagaagtcgaggatgctgaagaaggccttggcgttcttgggcagccgcgggtcggtggcgaaggtgatgtagctgctgttgccagtggcgtagtacatccaccccgcgctccacatgtactcgtcccagtagctggtggagttgtagtagtactcgatgtccggctgccggagcgagtagggggtgcgccgccccgactgccgcgcgaacttgtacacggtggccgcgccctggctgagcttcttggagtaggcggcgttgtcacggaacacgatggaggcagccgcaagtgcagcggcgacctcgccacccagatcaggggcggagctcacggacagtgaagggcgagggtacgccatgtcctccggccggttccagcagtaatggtcgtccggccggctgccgttgatcttagcagcacccacctgggcgtataacttgtcgatggtggaagcagaggagttgaaggtgagtagcagatagtcggtgccccacttgatgagctccctgacatggtcatactcccccatggccttgtacttggcgctgtactcgatcaccgaccagctcagcagcgtcatggagaaggccatcgggaagtggaacttgatgttgtcgccagcgtcgtagtagccgccgacgaggccacccttgacgtccttggcgtcggagccgtctgacaggccagagttcccgcgccacttgatgccattgttcttgggaaggtggccggctgcaagaattctcttcgattttatcagagaagggatcggagagacggacctttgcaatttgagcgatcacgtacagagaatacagatctacaggtgtgtgctccgtgcaagagattacagtacaggaatgaattcagcaagatctacaggcacgcagttagcagcttgattgagatccatccctaccgaaagcaattagaaaaacaaatacgtacatttctgggcgttgaagaagaggagcgccttgtgcagcgcctctgtgtactgatctggcggcggcgggcctggcttcttgtgcgggatggacttggcgatgatgatggggaggccgatgaggacgaaagcggcgacgacgcaccacaaggcccaccagaggagcttgcgcttgacgacgacacaaccgaggtccacgtacttgtccttcttcttggcctccggcgggcctagcagccagctctgctgcgtctcgtccagctcgtggtgctgccgcgccgacagcgcgccgcggtccaggtccatgttgcggctgtggtcatcctccgccgccccatcggcgatctcgaacgagccgccccagtggttggccgaatacatggcgggcgccgggcggtgggtgaaggtgaggtgaccgggccaccggggtagggagttttcaagaggaggcggccaggcgggggtgggtggttgacccgccgacggtgctggccttcccgtggaggggcagctggcactgtcggtgccgaattaaaaagcgtctcttttccgtgcaaatgcaatgcaacgtagcatgcttgccgatctgtcggttttgcgagttttgtagtttaattgtcacccacgtggccagctgcctccactaataatcaaacaaagaaacatatcctatgcgatgtaaagttgtaaactatattccatgtttagtctaacgactacgtattagtattactataaatatactaaatttaattaaacttttaag

SEQ ID NO: 8130 - DNA, 696 bp, Zea Mays
tgattgactgactcgagaatttgccgacgcttgaagaaggacctaatgtgagcttttacatacttgatgaacagcttgagctcttgagcaaggtgctgaatgcaggggatgacatgattggtgttgagtgcttagaagaagattgtgatggcaagtgtttctttgattgccgtcgtcgaggccgctgcagttcgcgcagaaaacaaccatcttggaggtatctaattccaatattgtatgtctcggttgaacttgtgaaggcgttgcaagcacatatcattaactgggatattcatatgtttgatgaggagatcggcaataccactcaggctggtcatcagagcatggaacctaaggaccaccacacaattcatcccgagttcccgaccaaggctttcaaggcacacaaggtttattacctcaatgagggtggcaagtttgaccatgcagatcgtttgttccaaagcattgagagcgcttacataaatagattatcaaatacaagtgacgtcaaagagcttattccagaattcttttacatgccagagtttcttgaaaattcaaattcatatcatcttggtgtcaagcaggatggggaacttataggcgatgttgctctccctccatgggcaaaggcttagcattgcaaagaacaacttctgcgtacagttatgtagcccagcttcataacttgaa

SEQ ID NO: 8131 - DNA, 1675 bp, Zea Mays
gtcttctggtatgaaaacccatcttggagaccagattctgaatcatgggaacaaatgcttattctggttcgagaagcggtatgaatgtgaggagaggattagattctgtttcatcagacaataggatggcaagaaatgaacggagtaatgatcaagcgggtcctcggagaggttgggacaaagggcagggaccctttaggttcggtgagggtccttctgcccgaagtgcatggcgagcatcaaaagatgaagcaacactggaggctattagagtggctggtgaagataatggaaattcgagggccgctgcaagagttgctattcctgaactggatggagaagctttgaatgatggcaaccaaggggacgaaagaggcccactttgggaggcctggactcgtgcgatggatgctgttcatcttgatgatatggactctgcttatgctgaggttctttcaactggtgatgctgaattacttgtaaagttgatggaacaaacgggaccgattattgatcaactttcaaatgaggttgcaaatgaagtcctacatgcagtgggacagtttctcgtggaagaaagcttctatgatgtagcattaaactggcttcagcagaatcctggcttttcatttggtctagaatgatggtccatcagttttactggattgctcaaggttgaagggggaaactgtagtgaagtatgtgataaatattgatactttctttgtcgaacacatgggttcttatttggtgaaacttgtttttacgttctcctttgtttgcccaatgataattatggtttccacctggagctggacagcaggtatgcgcttgcatgctagtataggttgaactaatccagctgtttcaattcacaggtgaaatcaatgcattactataatatatgtatgccctgacatggttgattaagctggatatatggttgtatctaatgtataaacatgaaacattagacaaataacagttcgcaaatataagccttggcacatattatttcctcatttgtactcaaatgtctggcattgtctggttttcatttctgagctagacatcttaccaaaatatatctcaatgtgttgcagttgactgacctggtaatggaaaacggctctggttatctcggaatacctctggatgcaaagcgggacctcttactgggacttcatgaggctaccgtgattgagctttctgatgattgggagggagcaacacccgtacagataatgaagcagctagcttcatcctggcgcatcgacctgcagcaacttatcaattagggttacattgattgtcgatatatgggttaatttgaatatttgaattgttcgtttccctctggttcttgtctggtctttagctattagtattaggaatattatattgggtggggtggaagtggcactgtgttgaaatggattggttgtattggaaaatatggtattgatgttgtctcaccttcattgaggctagggagcaacgaagaaaaattctaggttgggttttagatctccatcctcgtcctggtcctggtgacggaaaaagtttcctgcggggatcccataaactcttgcccgtatttctttcccatttccgctccacgcggggataaatatctgtcgggatcctggtctccgcttaaattataatcgtgaca

SEQ ID NO: 8132 - DNA, 3679 bp, Zea Mays
agtaacatcagactttcccaagtggaatattgcttagggcaagctccctccatcggtccgtctctctcagcttcttcgtcttctctcttaggttgacctctttgcctcaactgcgccgcccgctcaccaagccaggcagaggctgcaggggtcgtagagttggagggcccagtccatctgggaggtcccagtgccgcccgctcaccagttaccagccaggccgtcgggaggggagagagagagagagagacgaaaagatcgagacccatacgctcagatcgaagttcgacttctcctctccccctcccccaacctaacagattcgtgtagcacagatccatccgactttgggttgatttcttcctttgctgctgatcagaaagttacagatggatcatgctgaggtctctggtttgttgtgtattggtacacgtgaaacagatgggggtgaagaatcatatgcggctgagtaccctaaaatggatcaggataccaatgcaacgaccaaatttgatgtagtaatggagacttcagcaatgtatactgatcaaatcaacaccaatgcttgcttagatgaatatcacatgtctggaaaacagcctatggaagaaatgggatttggcagtgcacatccctttgaacttccatcagaaggaatggtagctgattctggggaagaaagcatgccatctagccctgacacatctaccagtaattatgatgcgcctggttacacggagcaaaatctgcagcatatctataattcgtatgatgcactggttgacaaagacggagttgtgcttactcctgccttcatgatatgtgacaaaactttgtatcttgaacctcacctcactttctcattggacgggatcaagattgagtatttggatttagattcctttgaagacgagaagctgtcagctctacaatgggaaatatctaatattatttccatcagttgtaaatggactcgtagtgttggatctgccttaataacactccttgttggatctacagcagaaacaggaaatgcaggtcctgttagagcacgattttctcttgatgattcgcaatggccaaggagacaacagaggatttgggaactgggaccaagatatcaagaaatatggaaagacatcccatcagatgattttgcattggagaattggagcatcgaaccctgtctgtttttccctaggcaatacttttccagcactgaggactttgaagatgttatttatccccaaggagatcctgatgctgtttctattagcaaaagagatgttgagctcctgcttcctgaaacctttgtcaatgatacaataattgacttttatatcaagtacttgagcacaagaattgaatctaccaagaagcgcaggtgccacttctttaatagcttcttttttcgcaagctggcagatcttgacaaagatcaggggagagctccagaaggtagagcagccttcttgcgtgttcgcaaatggacccgcaaaataaatgtatttgacaaagattttctgttcattccagtcaacttcaacttgcattggagtttaattgttatttgctatcctggcgaagtggcgacatttgaagatggtgatgccaagctctcagctaaactcccatgcattttacacatggattcacttaaaggaagtcacactggactcaaggatatcattcaaagttatttatgggaagagtggaaggaaagacaccctgaatcagcatcagataattcagacaagttcttaaacttgagatttgtctcccttgagatgctccaagtaacttcaaccctctgaagattgatgtattttctggctttcttagtgatgattggtttccacccccagaagcttctctgaagcgttcggtggtccgaaagttaattcatgagctggtaactggatcttttcagaatcatcccaagctagcttgtggtggtgagcagcttgacgaaagacatcaaagatgctcaaatcctggtgaacctgaaacagtttgcacagttgatgatggaactccatgaagtacagccatccaagtccatctgtttatatgattccaaagaggggctacctacttctggatgcatgttggacactggaagtgtcccaattgttgatgtacagaatctacaagagtcagaggtttgtgcaccagtgaaggatactgttgtttgcttgtcaatccaggatgagaaaaatgacccacttgcatctaacagtcaacttaatatgagatcatattccccagaaggtgatggcgtgattaaggaatcaaatcgtgtggtgacagataaggaaaatgataagtctttgtttctttctttggataatgaccaaaaagttcacagccaagcagaagctgaggtgcaggatattatggttcgtactagctgctcaatatctgaaattttagctcagaaaattaccagcaaagaacagccctcccaaaaaagcatagaagttggggatgagtgctttagaccttctcaagatatggattatgttatgatgtttgactccagcaaagatgagaatggaccaaatccagaaagattgacagctgaaggtgattgtggcgatcctcatgaacgtctggatttagtcacagtaggtgatatcggaaaaatggttgtagacaatgcaatcatcgaagatgtgaagagtaataacacaactgcaaacaatgtcaatcacggtgagctgcatgtttcattgcagttgccagagggaaacactgacaatggtatgactggtgttagcacagcttcctctttagacataaaagagggaaacaatgacaaagtagtggcagatgcctctgcacatgaaggtgatataaatgacaatggtagctctgaattgaaaataggaaatacgaacagtggtattactggtgttatcgcagcttcctcagacttaaaagaggaaaatattgacaaagtagtggcaggtgactgtgcacatgaaagtgatataaatgctaaggattgcactgagttgaacattggaaatactgataatagtattgctggtgatagtacagtttcccctgaggtgagcgcggaaaacactgatcaaatcatagcaggtgattgtggaaatgaaaccgatttaaaagctgatggtgagggtgctgacaaattcttagcaactgacagtgctcttccttgtgaagatgatgcaacttgcatggatggtgcgaatgtgattgtatcactagatgtaccccgtagcacgaagaatgatacattttccaagaacacatcttctgacgctgaaatgcctctgcctgttggaacctgtgagctcgtcgatagaccttcttccgagaatgacatgtctgagcacacatcttttgatggtaaacggcctgcggatgataggactttggaagagaacgaaatggttatgcctggtgatgaaaaaacagaggtgcattacaagcgacggaaggttttggcctcagagaaacaaagcagcttctccggagcaacttctacagattaggtttggctggctagaatcaataagctatagggccggtggtgcgtggtgcttccatcacatcgagatcaagattggcggtggattttgtggacgacaagggagaacggacatggagagacgcggtgcaatgcaagaccggaccggccggaggg

SEQ ID NO: 8133 - DNA, 3831 bp, Zea Mays
agtaacatcagactttcccaagtggaatattgcttagggcaagctccctccatcggtccgtctctctcagcttcttcgtcttctctcttaggttgacctctttgcctcaactgcgccgcccgctcaccaagccaggcagaggctgcaggggtcgtagagttggagggcccagtccatctgggaggtcccagtgccgcccgctcaccagttaccagccaggccgtcgggaggggagagagagagagagagacgaaaagatcgagacccatacgctcagatcgaagttcgacttctcctctccccctcccccaacctaacagattcgtgtagcacagatccatccgactttgggttgatttcttcctttgctgctgatcagaaagttacagatggatcatgctgaggtctctggtttgttgtgtattggtacacgtgaaacagatgggggtgaagaatcatatgcggctgagtaccctaaaatggatcaggataccaatgcaacgaccaaatttgatgtagtaatggagacttcagcaatgtatactgatcaaatcaacaccaatgcttgcttagatgaatatcacatgtctggaaaacagcctatggaagaaatgggatttggcagtgcacatccctttgaacttccatcagaaggaatggtagctgattctggggaagaaagcatgccatctagccctgacacatctaccagtaattatgatgcgcctggttacacggagcaaaatctgcagcatatctataattcgtatgatgcactggttgacaaagacggagttgtgcttactcctgccttcatgatatgtgacaaaactttgtatcttgaacctcacctcactttctcattggacgggatcaagattgagtatttggatttagattcctttgaagacgagaagctgtcagctctacaatgggaaatatctaatattatttccatcagttgtaaatggactcgtagtgttggatctgccttaataacactccttgttggatctacagcagaaacaggaaatgcaggtcctgttagagcacgattttctcttgatgattcgcaatggccaaggagacaacagaggatttgggaactgggaccaagatatcaagaaatatggaaagacatcccatcagatgattttgcattggagaattggagcatcgaaccctgtctgtttttccctaggcaatacttttccagcactgaggactttgaagatgttatttatccccaaggagatcctgatgctgtttctattagcaaaagagatgttgagctcctgcttcctgaaacctttgtcaatgatacaataattgacttttatatcaagtacttgagcacaagaattgaatctaccaagaagcgcaggtgccacttctttaatagcttcttttttcgcaagctggcagatcttgacaaagatcaggggagagctccagaaggtagagcagccttcttgcgtgttcgcaaatggacccgcaaaataaatgtatttgacaaagattttctgttcattccagtcaacttcaacttgcattggagtttaattgttatttgctatcctggcgaagtggcgacatttgaagatggtgatgccaagctctcagctaaactcccatgcattttacacatggattcacttaaaggaagtcacactggactcaaggatatcattcaaagttatttatgggaagagtggaaggaaagacaccctgaatcagcatcagataattcagacaagttcttaaacttgagatttgtctcccttgagctccctcagcaggataattcatatgattgtggcttattcttgctccattatgtggaattatttttgacagatgctccaagtaacttcaaccctctgaagattgatgtattttctggctttaatcatcccaagctagcttgtggtggtgagcagcttgacgaaagacatcaaagatgctcaaatcctggtgaacctgaaacagtttgcacagttgatgatggaactccatgaagtacagccatccaagtccatctgtttatatgattccaaagaggggctacctacttctggatgcatgttggacactggaagtgtcccaattgttgatgtacagaatctacaagagtcagaggtttgtgcaccagtgaaggatactgttgtttgcttgtcaatccaggatgagaaaaatgacccacttgcatctaacagtcaacttaatatgagatcatattccccagaaggtgatggcgtgattaaggaatcaaatcgtgtggtgacagataaggaaaatgataagtctttgtttctttctttggataatgaccaaaaagttcacagccaagcagaagctgaggtgcaggatattatggttcgtactagctgctcaatatctgaaattttagctcagaaaattaccagcaaagaacagccctcccaaaaaagcatagaagttggggatgagtgctttagaccttctcaagatatggattatgttatgatgtttgactccagcaaagatgagaatggaccaaatccagaaagattgacagctgaaggtgattgtggcgatcctcatgaacgtctggatttagtcacagtaggtgatatcggaaaaatggttgtagacaatgcaatcatcgaagatgtgaagagtaataacacaactgcaaacaatgtcaatcacggtgagctgcatgtttcattgcagttgccagagggaaacactgacaatggtatgactggtgttagcacagcttcctctttagacataaaagagggaaacaatgacaaagtagtggcagatgcctctgcacatgaaggtgatataaatgacaatggtagctctgaattgaaaataggaaatacgaacagtggtattactggtgttatcgcagcttcctcagacttaaaagaggaaaatattgacaaagtagtggcaggtgactgtgcacatgaaagtgatataaatgctaaggattgcactgagttgaacattggaaatactgataatagtattgctggtgatagtacagtttcccctgaggtgagcgcggaaaacactgatcaaatcatagcaggtgattgtggaaatgaaaccgatttaaaagctgatggtgagggtgctgacaaattcttagcaactgacagtgctcttccttgtgaagatgatgcaacttgcatggatggtgcgaatgtgattgtatcactagatgtaccccgtagcacgaagaatgatacattttccaagaacacatcttctgacgctgaaatgcctctgcctgttggaacctgtgagctcgtcgatagaccttcttccgagaatgacatgtctgagcacacatcttttgatggtaaacggcctgcggatgataggactttggaagagaacgaaatggttatgcctggtgatgaaaaaacagaggtgcattacaagcgacggaaggttttggcctcagagaaacaaagcagcttctccggagcaacttctacagattaggtttggctggtgtgagacttagttttagtttctgggatatgtgacctgtctagtccttgacaatatgctgcctgtgatatagtatatatttctgtaatataaggtactgccactaatgactgtagaaataacaaaaagaactggaatcctgaaccctgatgtctgcttgacagcgtggtttgagaattgagatactgtatatggtctgagtattgcacgacctgcactgcacatgcaagttgcacgatataggctgtttccaaacatgtggaaggccttgtttacctgattagttgggatagaccatgctatgattgttatgatttg

SEQ ID NO: 8134 - DNA, 1660 bp, Zea Mays
accacgcccaacacgcgtcataaaaaatgggtacgcatcaataaagaggagcttgggaagttgccaaggcctccgatttcgctaatgcgacgggtacatgaaggaaaggagtaccatagctgtgataggcctcagtgtacacacagcaccagtggagatgcgtgaaaaacttgctgttgcagaggaactgtggccccgtgctattcaagaactcactagcctgaaccatattgaagaggctgctgttcttagtacctgtaatagaatggaaatttatgtggtggcgctatcatggaaccgtggtatcagagaagtagtggactggatgtcgaagaaaagtggtattcccgcttccgagcttagggagcacctgttcatcttgcgaagcagtgatgccacacgccatctgtttgaggtgtcagctggccttgactctttggttctcggtgaaggacaaatccttgctcaggttaaacaagttgtgaggagtggacagaacagtggaggcttgggaaagaacatcgataggatgttcaaggatgcaatcactgctggaaagcgtgtccgcagcgagaccaacatatcatctggtgctgtttctgtcagttcagcggcggttgaactggccctgatgaagcttccgaagtctgaagcactgtcagctaggatgcttctgattggtgctggtaaaatgggaaagctagtgatcaaacatctggttgccaaaggatgcaagaaggttgttgtggtgaaccgctccgtggaaagggtggatgctattcgtgaggagatgaaagatatagagatcgtgtacaggcctctctcagacatgtatcaagctgctgctgaagctgatgtcgtgttcaccagcaccgcatctgaaacttcattgttcgcaaaagaacacgcagaggcactcccccctgtctctgatactatgggaggtgttcgcctgtttgtcgacatatctgtccccaggaatgtcagcgcatgtgtgtctgaagttggcgctgcacgagtgtacaatgtcgacgacttgaaagaggtggtggaagccaacaaggaggaccggctcaggaaagcaatggaggcgcagacaatcatcaccgaagaactgagacggttcgaggcatggagggactcgctggagaccgttccgaccatcaagaagctgaggtcgtacgcggacaggatcagggcctcggagctcgagaagtgcctgcagaaagtagcacctgaggtgcgacggcagcgacagccgcacccttgacgagacgctcgagaacatgcacgccctcaaccggatgttcagcctcgacatggagaaggcgatcatcgagcagaagatcaaggccaaggtggagaagacacaaaactgaggccaggaagcaatttttctaccaccattatctatatatatagcgtctccaatctcattccatttttttatcctttcactcagtgagcccttcccctgctcactgtgatcgttaactgtgtctgtgaattagagccatggcagcgtgttgtcaataacagcaatgtgtcccaattccccacagaagaaagactatatttatatgcatttattggagcaaatagtttacttatttattatggtggtagactaatctaaattttaattttctacgtttgtttc

SEQ ID NO: 8135 - DNA, 1981 bp, Zea Mays
gaacattcgacactccagccgaagaactggccgtgataacagcgccctctctgtctctctcctagtgttgtctccatcgtcctcctccccctttgcctccctcccaagttccaacgccgtgttcgccgccctctccctctaccggcctccacaccgtctccatcggccggcccgccccattgcccacacgacgacagttctcagctcgtctaacgcttagccgctgaagccattggagaggcgatatgggaagcccccggtgacgatgcggctaccgcagcacacggagcgtgcgggttcgccgaaaacctgcagcatcttccaagcgtggctgccccgtcaccttcgctgtcccggtcctgtctcgcagctgctggtcctgtgcgctgtccctggatgcccacgccgtcgatgccacggacacctcatagcactgttcctaaacggtataaaagcacctgtactggtcttcaccaagcaagcacctcagacaccaacatctacacacaatcacagtcacaatggaggccggagggttagtcagggtcagggaggccggctgggccaggttcgacttgctaccccatggctaggagccggaggtcgtagcgcagctgctctgcacccagcatgagttgccttggtccgatcaaagcttcttccgtacagtgacaacaacatgccacatattcttttggcaatttgtattgcttttaaaaaaaatctacttctttcactaaaaacttccttatccatgtgatatccgatgtattctacataactccaaaattgctaccgggcaatactcacccttacctattcttttaactgatatgtccaccttttcaggttattttggctattcattttaatgattgtatgtatgtgcctatgtatgataaaaaaaataatgtcgtttttttaccaatgtattgtgccctgtgctctatatctttaatgactttttatgggatttccgtagatagctccctccgttatttatttgtttatagttcaaaaataaaataacggacaacaaatattcgagaacgggattagtatataatagctgattatgactatcttttttaaaactatttgttccaaacttgatggacatctcgaggaccaaagtgacacattaaagagttatagcttcatacaaaacaggttaagttgcactatttcctctacatttttagatctaccacttatattagtgttttttcttcattttaagaaattgcatcgcaccttccatttgtttatgtaaaaaactatcactattgtgttctacataggatcttatttacatacatattttagtggaccataaaaaaaacagcgcgcgcagggcgcgcgttagacaccagtacatacatattaaagcccgacgcaaaacgtgcatctccttaagccatgtcaccactaaaatcttgatcgtcggatctgctttggacggtctcatcaagaagaacgcgtagcttccagactttcctcgagcatactttgttaccagcctggcaaattgaaaagccaacatgaatcaaacgtcggcgcgcggtggatctgaagcctgtgtgggggcgcggtcggcgaggagctggggcgcgcgtccccgcccagctcccccgtcgtggcactggaccgccacgcctgcgtccaccaagagacgtccgcaccaccctcgtccacgagcagctccaacgacctcatcgccgcattgcgcctgctcctgcgctgcaggctccggttaccgtcggtgcccacaccgaggaaggcgtaatccacgccaagcaacccagttactgagctactgagctgcaacctccgatatcgcgcacgtgtccaggagcattgaggaggcttggtacgattgcttggcgatgagcgagtcggatgtcgaagacgatttccaatgtgcaagatgatcctttttcacatggcttcgaaaacgaagctgcattgagcatgagagatg

SEQ ID NO: 8136 - DNA, 1144 bp, Zea Mays
tgagctccgctcctctccagtcaatcacttgattttgcatccctgccgcccttgactgatctaatggctgataaggcagattggtgtgatgccaatgtgaggcatttcattgatgtatgcaaaggagagatagatgctgggaatcggccgatgggaatgttcaccaaaactggttggaaaaatcttagaactaagcatgaagaaaaaacaggccagaagctaaccaaaaaacaattaaagaataagttggacaatatgaaaaaggaatatacatggttcatggagttcaagaattatgccactgggcttggatgggatgaggcaaagcaaacagttgactgttctaaggaatggtgggatgaacaccttgctagatgtaataatcctggaaaaggtattaaatgcaaccatgtgaggttcagaaaacaaggacccaagcaccttgatgatctacatatattgttcgataaggtacacgttagcggggctactgcatcctgtcctggagatatatcctcggatgagtcaagtgatgatgatgtggttgaggtacaaaaaactattgataatgttgatgtgaagctggctgcgttgaagaaatcaaaactaggaaaaaggaagcgtaaggactgctctactgctactgaagagaaggatgagaagagcccattctttcgactgtacaagaacacatgtttgaagatagaaactgcagcagagaagatctccacaagtgttgaagcatcatcgactcctccaaccaacccagtccctagtattgcagaggccatgaagatggtgaaagattgtggggtgcaagaaaaaactgcactaatgcacacagctaccttcctaattgtgaagcctgaatttagggaggtcttcagcttactagaaacaaatgaaggaaggctagatttgcttgaaagggagcatgaaaaggagtcgattaagcggatgtagaacactttcagtgcctttattttcagagttgtattgtgaaccaatatttttttatttcccaatgttaagaactatattttttcgtgagttgtgttgtgcttgtaatgtactatattatttgcttctatcattggtattgtgtcattggtcccagttgtgtgattgctgaaatctattgtta

SEQ ID NO: 8137 - DNA, 3772 bp, Zea Mays
ttgcgttgcagcatccactgcgtatatagccaacagagccattctctaccgatcgactaaacgcaaggcaagcaccccagcttgtggctctgtgcgtctgattgggaaattgcttggtcgctccaccgatcctctgcggcggccctgcgcgtgctcgtctcgtccctctgtctcgggagcgcctggatttcggaggtgcgtggaaattggatggcaacaaccggtagcccatcaagaactgcgctgccgtcgtcgccgccagctccgtcgtcctgcaagctcgccgccgcctgctgcttcgtcctgatcgtccccatcctcctcacgggtgagtttgtaattagcaacagccatgcaggtagtagtgctgctcctgtctgtgtactgttgtttgccaaattatagcccgcaaacttattagctcacctacgtttttgcgctgcctagtgcagtgttgcagctcgcatatggtttagagtagaggaccctttgctaaggttctatctagagtgtagaaggcacgtttgttatgctcatgtagtacattaccatttattattaatccaaaggcgaaatggaatcttttcgctaagcttgccaggtgcgccgtggcgtaaggcgccgcccactatatggcggcaaatctcagctccgaatcgccataccagcttttcgcggcccctttccgaagcgcaaataaaatgcccactgaccagctagcctccgctccttgattatctccacaccaacaagttgcagtggccagctaccatccagtcagtgtagacccggcgatctgggccgattatatttaggcagctctcagtactagtgatggcagagccacatattcatgtgcccatgtggtccactgagatcttgcttccattggatcacgtgttgtgcttcgttcatccaactccttacacggaaagtaacgtctagcgcagtgttaccaagcatggtcaaattatcgcatatatggatgcatcaaatgttccttcgatctcccttgtttcaatggccacacatacatacgatcaccactcactgtcagtctgtctgtcgctaacacagtaacacttcaccggaatgtacatggaccacaatctagatcgatcggatgagtttgtactggtgctcgatttggacatgtaccaaaaacaattaaaacaatcgacacaatatataattgcagatgagcatgtggccgtcgccgagtccctgtcgatcggcgtcaactacgggcagatcgccaacaacctgccatcgccggcgcaggtatcgtggctgctccggtcgatgcgggtcagcaaggtgaagctgtacgacgccgaccccaacgtcctgcgcgcgttcctcggcacgggcgtcgagttcgtagtcggcatcggcaacgagtacgtgccggcgatggtgagccccgcggcggcgcaggcgtggctgcagcagcacgtggtgccgtacctccgctcgggcgcgcgcatcacctgcgtcaccgtgggcaacgaggtgttcaagggcaacgacaccgccctccaggcggcggtgcttcccgccatgcagtccgtgcacagggccctgggcgcgctcggcctccagggccgcatcaacgtcaccacggcgcactcgctggacgtcatgggcgtctccttcccgccctccgccggcgccttcgcccccgcggcgctggcgcacctgcagccgttcctgagctttctgtcggcgacgcggtcgccgttcctcatcaactgctacccctacttcgcgtacaaggacgacccggcgcgggtgccgctggactacgtgctcttccgtcccaacgccggtgtcgccgacgcccgcacggggctccgctacgacaacatgctgtacgcgcaggtgtggacgccgtgtacgcggccatccaggggctcgggtacacggacgtggaggtcaaggtgtcggagaccgggtggccgtcgcgaggcgacgccgacgaacccggcgccacgcccgagtacgcggggacctacatccggaacctgctgcagcggatcgagatgaagcagggcacgccgctgcgcccggcgacgcccgtcgacgtctacgtgttcgcgctcttcaacgagaacctcaagccagggccggcgtcggagaggaactacggcctcttctaccccgacggcacaccggtgtacaacgtcggcctgcacggatacctcccgccgatgctggtgtcgtcgactgcagcacgacagctgattcgttattttgcactagtcgccatcgcgtccgtcgcatattcgtctgtcttatcctgacagtgtagcctaccgacggagcactaaacagctaagcatctcatgctactcacgactcaaggaacttctgagtaatctgctggccatctcaacttgggtacctttactgcatttcggatagcgatcacaagctcttactgtacacatactgacaataaggtagaactgactgaagcatatgcagcatccattcatcacagcttacattttgacccaaaaaggaaaggtacaaacagtagggagagctgcatggacagcacctattttgttgttcactccttttcaaatgctatgaatcaagaacaagtcaacacaattattaaagattaagggtcttcgtcttccgaagtattatctccacaagaagataatattcatcagacgaagaccatttgagacgaacattcattatttaatatgtcaatgggaatgcaaaagggtagagatggaactggatcttcattaattcatttatattcatgtcccacaaaatataaatgaatattcaacaatattgacattacagtggtacttttggcttgctcgaaggcgaggatacaagagagtgattatcattcagagtgagcagtacggtgttatttttcatctatttataggcacgagacatatcccaagcaaaagtacatttatgtcctcaagaattacacatgatcgtagtacaagttattaaggactaaatagtcttttcctcctccagttgtcatcattgtccatcgttcttattgcgagccgaagctgtccatatagtgatagcttcggtatttactcttatcctctttggatctagcttcatcttgtgtgccttcatcataagagaaaagcttatatcttggagatatgccaagatatgtatcataacgtagatacaggcatgcatgcgtgcatgtgctttctgatgccaagctgcagctgcccatggcacggtttctttatgcacgcacgcacgcagtactgccaccggtatggttttgtatatgccgcagtgcatcgagatatataggttgcgcctagagctgcctggcaccgtacgtggcgtttagcgctggcctttgtttgtctacaagcacaagtgcacgttgctgaatcacctagcaatgggcaatggtacggggtgggtaattaatctggaccggatgaaaccatgagctcatgctccatccaatccaggtgtgcgctgatgaaaatattgattttatacaacaaaaacacatgcatgttatgtattggatatatcatcttcatctatatctatctctactacttattaaggctgtaagggtagcctgtcattttctgttctgcctttttttattttctgttttgccctcatccctgtccggcagtaaaaaatgaaatctgtaagaattgtgaatcaaactcaagacctgctgctagattagagacaacatatccaccacaccacatcttattttgttgttatagtagaa

SEQ ID NO: 8138 - DNA, 706 bp, Zea Mays
acgggttttccggttaatataacaactaaagctttttttgtcagtctgagtctcataggagagctgctgcagccacgacctctggaaaattcaaggatgagatcgtccccgtgccaacaaagcatgggactacaactgcaggcaattccagtcaagtgagtgatggtgctggagctgttcttctcatgaaaagatctgtggctctgaagaaagggctgcccattcttggtgttttcaggtgcccggcgcgtggctactcttctaaatgaaatgaagcgccggggcagagactgcagatttggtgttgtcaccatgtgtatcggatctagaatgggggcagcagctatgttcgagctgtgttcggcccggctggaggtatcgaccatcactcaacactgtaacccgatggtgatcggcgaccgtgagcttccatgttattgcgttctgatacttgagacttttattatgactatgtatgagatattgtctcttattagtactggatgatgagatgtgtcttattatgactatggatgagacttttgtgatgtaattgatgagacttttgtgatgtaattgatgagactatggatttaaatattgttatgtgattgtgtgtgagatgttttatgtgaaaatatgttgtgctatatagctgttgatatatttgttatgttgtggaatgtggtgtaaaataaaaataaac

SEQ ID NO: 8139 - DNA, 1054 bp, Zea Mays
cacccattggcatggaggccccacgcgcagagagaatacgcgagacgcgacgccaccggcaggcagcaagcagccaagcaccaacccgagcccgactgcctgatcctacatactgcccgcaactgcaagcgaacgaagcgacggacgagagtacgagacgaggcacggaacggagcgagccagactacccacctaggcccagcggcatgaggggcagcgagatgttgaccgccgcggggggcgccggcacggccccgtccacggtctcctcgggggcggccgcggccgcggacctggttgctggagccgggggcacgggcgctatcggcgcgggcggaggaggcggcaacttccccctcgccgtcgccctcctcgccttcgccttcgcaaacttcgttaacctcgtctccatctgacgttgcaggttaaaagagaagaggtgggatgcaaggaaatttcttacttcagctggagtcatgtcatctctttctgcaactgtggggagcttggccgttgctgtgggtcaacaagaaggcgcagatagctctgcatttgcccttgcattgatttttgctgccgttgtaatgtatgatgcatcaggaattagatggcacacaggtcgccaagctgcgttgttgaatcaaatagtctgtgatttcccaccagaacatccaatcatttcaacctttcggccactacgggaacctcttggacacagcccacttcaggtttttgcaggagcacttgttggttgtgcagctgcttatttcatgggaaaatctgtataaggaataggaatgtatagggtttggcttgtacacgaattccattgacttatttttgtaaaaaaatatcattgatcaaccgcttcattttcctctatctgcacttcagagtgaaccgcacggggcattatctagaaaatggttagtatattctgtttgctgacacagaaacagattaggttgtgcagcacagcagcagtattcttccactggtaattgatttttttttgtttctattgcaactggctggaagtactaaacaagaccca

SEQ ID NO: 8140 - DNA, 2206 bp, Zea Mays
aaaaaatgcacgtcgattggcggtagcctgcctaaccatggcggcgggcgtcctgttcatcatccttggcttcctcctggtgctgccgtcagcaacggcaatagggcaggtctgcggcaacgccggcaactacacggccaacagcacctaccagtccaacctggcctctctcgccgccgcgctcccagccaacacctctacctctccccaactgttcgccaccgccaccgccggccaatcccccgacgcggtctacgcgctcgcgctctgccgcggcgacaccgccagcagcagcaacctcaccgggtgcgccgcctgcgtcaagaactcgttcgcctacgcgcagaggacgtgcccccacgccaaggccgccagcgtgtacgacgacgactgcctcctcggcttctccagcagcgacatcctcatccccgccaacaacatgagcacgctgttccagtactggaacccggcgagcatccccggcggcgacgcctccatggtgagcgccgacgtgaaggacctgctgacgcagaccgctagggcggcggccagcagcccgcggaggttcgccaccgccttcatggacgcatccggcagctccatcccgacgctctactcgctggcccagtgcacgcccgacctgtccgctggcgactgcctggcctgcctccagcggctcgtcagcctgctcaacgccaccacgtccgtgcgcctgggcgggcgggtcctcgtgctgcgctgcaacttcaggttcgagaacatgatgttctacgacggcgcgcccacgacgcgcgtcaccacgccctcgtcgtcagggcccccggcgccaccgtttccggcgccgacgacgacggataagagagctgctgggacgaagccctgggtagttgccgtgtctgtactctgtagcacctcctctagcggtagtagcagcactctgcttcgtcttgtactgccgctggcgaagcagaaggtacacaaaaggtaggcctagattactacgaaagcctacttataacagctcgcgagggggagacgaagtagactgggaaatggaggcgcacctctccgagttttgggtctttgacttgcatcagatattggaggccacagacaacttctccgaagaaaataagcttggcgaaggtgggtttggccccgtctacaagggccagttgcccgagggggttgagatagctgtcaaaagactcgcttcacattcaggacaaggtttcgtagagttcaaaaacgaggtgcagctcatagcaaagctccagcacaggaatctggtccggcacctgggatgttgctcgcaggaggaggagaagattctggtctacgaatacttgccaaacaaaagcctggacttgtttatctttgcagacgaagacagaagatcgttgctggactggaacaaccgtctggcgataatcgaaggaacggcagaggggcttctctacctacacaagcactcccggctgcgtgtcatacaccgagatcttaaaccgagcaacatcctcttggacagcgagatgaaccctaagatctcggacttcgggctagcaaagatattcagctccaacgacgtcagcagcgaaggaggcaccactacacggagagtggtcggtacatacttcggcgtcctcgttcttgagatcatcagtgggaaaaggaattccggcatccatgagtgcggagatttcatcaatatccttggatatacatggcagctctacgaagagggaaggtggagggagctagttgatgcttcgttgctatccatgcagcaccactcagatgaaataatgatggtgataatgaggtgcatgaacatcggattgctttgcgtgcaggagaatgcggctgatcgaccaaccatgttggatgttgttgccatgctgagtaccaagactaaggtcctggataagccgaaccacccggcgtatttcaatgtgcgggtagggaacgaagaggcgtccactactgctactactatgtcgtgcagtgtgtcgatgagataatataatgtatccatatatagtttgtgttttcaaggctgccatatcaatatttatttatctacataatataatgtatccatactttcatcctatctctctcatatatttttttattaaattgcatgtcatgtcatcctgtatatttatgtgacatactatttaatgagaatggtatatatatatat

SEQ ID NO: 8141 - DNA, 2235 bp, Zea Mays
gaaaaaaaatgcacgtcgattggcggtagcctgcctaaccatggcggcgggcgtcctgttcatcatccttggcttcctcctggtgctgccgtcagcaacggcaatagggcaggtctgcggcaacgccggcaactacacggccaacagcacctaccagtccaacctggcctctctcgccgccgcgctcccagccaacacctctacctctccccaactgttcgccaccgccaccgccggccaatcccccgacgcggtctacgcgctcgcgctctgccgcggcgacaccgccagcagcagcaacctcaccgggtgcgccgcctgcgtcaagaactcgttcgcctacgcgcagaggacgtgcccccacgccaaggccgccagcgtgtacgacgacgactgcctcctcggcttctccagcagcgacatcctcatccccgccaacaacatgagcacgctgttccagtactggaacccggcgagcatccccggcggcgacgcctccatggtgagcgccgacgtgaaggacctgctgacgcagaccgctagggcggcggccagcagcccgcggaggttcgccaccgccttcatggacgcatccggcagctccatcccgacgctctactcgctggcccagtgcacgcccgacctgtccgctggcgactgcctggcctgcctccagcggctcgtcagcctgctcaacgccaccacgtccgtgcgcctgggcgggcgggtcctcgtgctgcgctgcaacttcaggttcgagaacatgatgttctacgacggcgcgcccacgacgcgcgtcaccacgccctcgtcgtcagggcccccggcgccaccgtttccggcgccgacgacgacggataagagagctgctgggacgaagccctgggtagttgccgtgtctgtactctgtagcacctcctctagcggtagtagcagcactctgcttcgtcttgtactgccgctggcgaagcagaaggtacacaaaagctcgcgagggggagacgaagtagactgggaaatggaggcgcacctctccgagttttgggtctttgacttgcatcagatattggaggccacagacaacttctccgaagaaaataagcttggcgaaggtgggtttggccccgtctacaagggccagttgcccgagggggttgagatagctgtcaaaagactcgcttcacattcaggacaaggtttcgtagagttcaaaaacgaggtgcagctcatagcaaagctccagcacaggaatctggtccggcacctgggatgttgctcgcaggaggaggagaagattctggtctacgaatacttgccaaacaaaagcctggacttgtttatctttgcagacgaagacagaagatcgttgctggactggaacaaccgtctggcgataatcgaaggaacggcagaggggcttctctacctacacaagcactcccggctgcgtgtcatacaccgagatcttaaaccgagcaacatcctcttggacagcgagatgaaccctaagatctcggacttcgggctagcaaagatattcagctccaacgacgtcagcagcgaaggaggcaccactacacggagagtggtcggtacatacggctatatggctcccgagtatgcctccgagggcctcttctctgtcaaatccgacgtgttcagcttcggcgtcctcgttcttgagatcatcagtgggaaaaggaattccggcatccatgagtgcggagatttcatcaatatccttggatatacatggcagctctacgaagagggaaggtggagggagctagttgatgcttcgttgctatccatgcagcaccactcagatgaaataatgatggtgataatgaggtgcatgaacatcggattgctttgcgtgcaggagaatgcggctgatcgaccaaccatgttggatgttgttgccatgctgagtaccaagactaaggtcctggataagccgaaccacccggcgtatttcaatgtgcgggtagggaacgaagaggcgtccactactgctactactatgtcgtgcagtgtgtcgatgagataatataatgtatccatatatagtttgtgttttcaaggctgccatatcaatatttatttatctacataatataatgtatccatactttcatcctatctctctcatatatttttttattaaattgcatgtcatgtcatcctgtatatttatgtgacatactatttaatgagaatggtatatatatatat

SEQ ID NO: 8142 - DNA, 606 bp, Zea Mays
tcattttaaatgttgtctaacacatattaaaaaaagacggatcttgcatatctgcagaagaagaaagatgaggaaaaagcactgaaggagcttaaggccaaggcacagaagggcgcgattgggggctcgggtctgaagaaaagtggaaagaaatgagactggtcacccgtctccaatacctagaggatgataaggcagctgtctatctgtgttgcgcttcactaagtgtgattgtaacagtggtacctcttgtgttctgtgttccgcgatgttgcagttggttgcttgatcgaaagatgtttcaacctcccatctgctagctatgatacagatggtcccctgataataatgatgacatattctgtgatggatgccacagcattttttgtttttgtttttgcattcagatatttcagcttccttatagttttacatgtcccaactaggaatgagaagtcattctgttggtccaatctaaattttatgtgtgttagtggagtgccaaagagagtggatatgtagaacaatggtttgcatctagatctttttgcctagaacaaatgttcgcatctagatctgacctaatcttcagggctagtgtgcacg

SEQ ID NO: 8143 - DNA, 4765 bp, Zea Mays
cttgctttcgcacacctcaatctgtgccggacgcgaccaaattcgaaattgcccaacgtctcgcctctcgcgacctccgctccccatttcaaaccgaaaggtccgaaaccccatctcgaccccgttctgccgtatctccgatccgcctccgccgccgtctcccctgcccaggcgccggaagtccacctcgggctccagcatatccgcgatgcatctggacggcgtcgacgacgagctcggaggcggcagctgcgccccctcccccgcgcgctttgagctccaagaggatccttccttctggaaggacaacaatgtgcaggttgcgatccgtatccggccgctgagcggcagtgaggtgtcgatgcaggggcagaagcggtgcgtcaggcaggatagtagccagagccttacctggattggacaccccgagtccaggttcactttcgatcttgtcgctgacgaacatgtcacgcaggagggcatgttcaatgttgccggggtgcccatggtggagaactgcatagctggctataacagctgcatgtttgcttacgggcagactggaagcggaaaaacacatacaatgcttggtgacatagaaaatggaacacggaggaacaatgtgaattgtggtataactcctcgagtgtttgagcatctctttgaaaaagaattaaggagagatgaaaagctcatgtttacttgtaaatgctcatttttggagatttataatgagcagattctggatctgctcaacccaaattctgtaaacttgcagataagggaggatgccagaaagggtatacatgttgagaatttgacggaacatgaaatctccaatgctcgagaagcgctgcaacaacttattgagggagcagcaaacagaaaggtagcagccaccaatatgaaccgagcaagtagccgctctcatagtgttttcacctgccttatagaaagtaagtgggagtcacaaggtatcaagcaccaccgcttttctcgactcaaccttgttgaccttgcgggctcagagaggcaaaagagctcaggtgctgaaggggagcgattgaaggaagctaccaacatcaacaaatcactatcaactttgggacttgtcattacgaacctaattgctgtgtcaaacaaaaagtcacagcatgttccatacagagattcaaaattaacattcctcctccaggattcccttggaggaaattcaaaaacgaccataattgcaaacataagcccatccagctgttgtgctgctgagacattaagcacattgaaattcgcgcaacgagctaaatatataaggaataatgctataattaatgaggatgcttctggtgatgttcttagcatgcgtttacagatccagaaccttaagaaagtaatcagccgtttgcaaggacaattgggttctgataaaacagaaagcattgcctctcatgggtttgtctgcgagtcccctagcacattcaaatgggatcagggtcatggcatgttcactccacttacttttgataaaagggctacacagaggaacgattgtgatgctgcccttgtcgctgcttttaggagggaacaagagaaggaagcacaattgaaggcagtaatagatgcaaagcagactgctgaacagctggtagctcaaaagacagaagaggtaagaagtttcaagatgaggcttaagtttcgtgaagaacggatcaaaagattggagcaggttgcttcagggaagttatctgctgaagcacatcttttgcaagagaaggaaaaccttgtaaaggaattagaggtcctgcggggtcaattagatcgtaatccagaaattacaaaatttgcaatggagaatctacaattaaaggaagagctacgaaggttgcagtcatttgttgatgaaggtgaacgagaaatgatgcatgagcaaatcattgttttacaagataagctgcttgaggcacttgactggaagcttatgaatgagaaggaacctattaacaagggtctctcattatttggggagtcagctggcgatgaggaaaatgagtttcttcgtttgcaggctattcaaaatgagagagaaattgagtcgttgcgtaaaaaaatgacattctgccttgaagcaaaagataatcttgaaaggcatgtcaatgagttgaccacagagttggagcttacaaagaaacacaacaacacatataaagagttcaaggctgcccagctccaggagcaaggagaagcagatttacataacttgtctgacgctcagatggaacttaagactttggttgatgcaatagcttctgcgagtcaacgggaggcagaagctcatgaaactgctatcggtttggccaaagagaatgaagaattgaggctgcagcttaaggttttgattgaggataacaagagattggttgagctctatgaacacactgttgtcaatgttgaggcaaatcaagatggaaaccctgtagatgatctgttgaatgcccaaccagcagccacatcagatttccatgcacataactcatctagtgtggcacaggagtctaagatagtagacgaaaaatgcaccaatgaggacaatttctcaagagttacatctgttgaattgcgtcttcagctggaggagatgcatgaggaaaatgatagacttatggggttgtatgagaaagctatgcaggaaagagatgaattcaaacggaaaattttagagcaaagcgactctgaagctgtaaaacatattcagttggacgagaaagatgtcgaaatgagtgaagcagctgagaatcctgaagtgaaacatattcatgactccacaattgcagctttgaaagaagtgctgcagattgttcggagtaagttggagcttgtccaagataaggttgtgtctgctcaggatgcagtaaaatattttaaggcactcgaaatagctagtggtaaggccgaagaactttctgcaagaattgagcttcagcgtctaggtgcgcagcgtggtcaggaagaaatcactttcctgaagtctgtgctatcagaatcacagaagaagaaaaatgcttttgaaggcaagtatttcttgcctgcagcatcatgttggaacttggttttgaagaccaaaagtcttgcggagtccaagtttgatgccagctttggatcaatgaatcagaagaaagaacagttgaatcatctccaaactcgcaaaattgaactatctgctgcaagaacgagagcacgtgaatctgaaactgagttgaaaagcaaaattgatggccttaaagcgaaacttcgcgctcatgaagctcaaagaaaggaggaagaaaaggtcctgtttgctattgataacctggatacttccactacactaatgcataaacccaagaactatggcaaggcaaccgacctgctgaaatctgaggaggatcggatgaagcttctgtgtgaactacagaaggcccgcgaacagcgctccatggtacataaggaaataagaagcatgaatgagtgtgattatattgatcgtgagattggagtccttgaagcagaaatagaggattcctgcatctccatactggaaactgacattgagaagtttgtccgtgacaacactttagcagagatttgggagggtagcgcaaaggatctggaggcattgctggtcgattaccaagactgtgttttccaagtcaacttgaaggaggaagagatcaaggtgtgcagtgagtccttgcagtatcaagccagggacatggataaacttcagtcgaagctgaaccaagcgatccgggagctgggtgagcttctgcaagatagaagaagcctaaccgcttgcagtctggatgaacccacgctgcccgttggtgaaaaggtgtgccagccggcggcaacctgtgcggggagcgccaagggctccaggaaagaatcggcggcgggctcgcgatcgggaaggggagcggggcgcatgcgcgagcactggcacggcgacggcgacggcgacggcgaggacgagcatgagccccagccggggtgcggggagggcgcggggcaggcggcggcgaactgcgcggcggtgtgctgctgctgcccgctggcgctgctcgacgtgctgctgctcgtcaccgtccggctccccgcgggcgtcatgcggcgggtgaggaggaggcgccggcgccgccgcggccacggaggtgccggagccaaccggaagaggccggcgcccgcgtcgccttcgggaagcagcggcaaggcgatgatcggagcggcgacgctagacatcgacgaggaggcgcgcggcgaggtggagtcggcggcggcggcggagctggagcgcgagatcatgagctcgcacttctacggcgccggcttctggcgcagcgtctcctccaactccagctcctcgtccaggcgctaccaatagatgcgcgttctggcgtaaatagagcagcagccttcggcatcgtgcaagtgcacttattctgaatggacacgtgcgaaactggcacgtgcgggttgcatcattgtactgctacgccattgtctcgagcatggaccacgccagcagctgcagcttgggatggagaagcgaaaggggtcagtgattgtgcttaggtttttcatctctctcctaatcttttttgtgtaactggagcaggaaatgctgaaacctcaagcttctgtccaaacgatgtactcctatttagtattattgattgattgagaggccgatcgataacaaatgaacaaatagaacactgttcatgacgcagtg

SEQ ID NO: 8144 - DNA, 5233 bp, Zea Mays
tccgatccgcctccgccgccgtctcccctgcccaggcgccggaagtccacctcgggctccagcatatccgcgatgcatctggacggcgtcgacgacgagctcggaggcggcagctgcgccccctcccccgcgcgctttgagctccaagaggatccttccttctggaaggacaacaatgtgcaggttgcgatccgtatccggccgctgagcggcagtgaggtgtcgatgcaggggcagaagcggtgcgtcaggcaggatagtagccagagccttacctggattggacaccccgagtccaggttcactttcgatcttgtcgctgacgaacatgtcacgcaggagggcatgttcaatgttgccggggtgcccatggtggagaactgcatagctggctataacagctgcatgtttgcttacgggcagactggaagcggaaaaacacatacaatgcttggtgacatagaaaatggaacacggaggaacaatgtgaattgtggtataactcctcgagtgtttgagcatctctttgaaaaagaattaaggagagatgaaaagctcatgtttacttgtaaatgctcatttttggagatttataatgagcagattctggatctgctcaacccaaattctgtaaacttgcagataagggaggatgccagaaagggtatacatgttgagaatttgacggaacatgaaatctccaatgctcgagaagcgctgcaacaacttattgagggagcagcaaacagaaaggtagcagccaccaatatgaaccgagcaagtagccgctctcatagtgttttcacctgccttatagaaagtaagtgggagtcacaaggtatcaagcaccaccgcttttctcgactcaaccttgttgaccttgcgggctcagagaggcaaaagagctcaggtgctgaaggggagcgattgaaggaagctaccaacatcaacaaatcactatcaactttgggacttgtcattacgaacctaattgctgtgtcaaacaaaaagtcacagcatgttccatacagagattcaaaattaacattcctcctccagcttccattccattttgaaagttacacatttgatatttctcgctttctatccagttgtgctgctgagacattaagcacattgaaattcgcgcaacgagctaaatatataaggaataatgctataattaatgaggatgcttctggtgatgttcttagcatgcgtttacagatccagaaccttaagaaagtaatcagccgtttgcaaggacaattgggttctgataaaacagaaagcattgcctctcatgggtttgtctgcgagtcccctagcacattcaaatgggatcagggtcatggcatgttcactccacttacttttgataaaagggctacacagaggaacgattgtgatgctgcccttgtcgctgcttttaggagggaacaagagaaggaagcacaattgaaggcagtaatagatgcaaagcagactgctgaacagctggtagctcaaaagacagaagaggtaagaagtttcaagatgaggcttaagtttcgtgaagaacggatcaaaagattggagcaggttgcttcagggaagttatctgctgaagcacatcttttgcaagagaaggaaaaccttgtaaaggaattagaggtcctgcggggtcaattagatcgtaatccagaaattacaaaatttgcaatggagaatctacaattaaaggaagagctacgaaggttgcagtcatttgttgatgaaggtgaacgagaaatgatgcatgagcaaatcattgttttacaagataagctgcttgaggcacttgactggaagcttatgaatgagaaggaacctattaacaagggtctctcattatttggggagtcagctggcgatgaggaaaatgagtttcttcgtttgcaggctattcaaaatgagagagaaattgagtcgttgcgtaaaaaaatgacattctgccttgaagcaaaagataatcttgaaaggcatgtcaatgagttgaccacagagttggagcttacaaagaaacacaacaacacatataaagagttcaaggctgcccagctccaggagcaaggagaagcagatttacataacttgtctgacgctcagatggaacttaagactttggttgatgcaatagcttctgcgagtcaacgggaggcagaagctcatgaaactgctatcggtttggccaaagagaatgaagaattgaggctgcagcttaaggttttgattgaggataacaagagattggttgagctctatgaacacactgttgtcaatgttgaggcaaatcaagatggaaaccctgtagatgatctgttgaatgcccaaccagcagccacatcagatttccatgcacataactcatctagtgtggcacaggagtctaagatagtagacgaaaaatgcaccaatgaggacaatttctcaagagttacatctgttgaattgcgtcttcagctggaggagatgcatgaggaaaatgatagacttatggggttgtatgagaaagctatgcaggaaagagatgaattcaaacggaaaattttagagcaaagcgactctgaagctgtaaaacatattcagttggacgagaaagatgtcgaaatgagtgaagcagctgagaatcctgaagtgaaacatattcatgactccacaattgcagctttgaaagaagtgctgcagattgttcggagtaagttggagcttgtccaagataaggttgtgtctgctcaggatgcagtaaaatattttaaggcactcgaaatagctagtggtaaggccgaagaactttctgcaagaattgagcttcagcgtctaggtgcgcagcgtggtcaggaagaaatcactttcctgaagtctgtgctatcagaatcacagaagaagaaaaatgcttttgaaggcaagtatttcttgcctgcagcatcatgttggaacttggttttgaagaccaaaagtcttgcggagtccaagtttgatgccagctttggatcaatgaatcagaagaaagaacagttgaatcatctccaaactcgcaaaattgaactatctgctgcaagaacgagagcacgtgaatctgaaactgagttgaaaagcaaaattgatggccttaaagcgaaacttcgcgctcatgaagctcaaagaaaggaggaagaaaaggtcctgtttgctattgataacctggatacttccactacactaatgcataaacccaagaactatggcaaggcaaccgacctgctgaaatctgaggaggatcggatgaagcttctgtgtgaactacagaaggcccgcgaacagcgctccatggtacataaggaaataagaagcatgaatgagtgtgattatattgatcgtgagattggagtccttgaagcagaaatagaggattcctgcatctccatactggaaactgacattgagaagtttgtccgtgacaacactttagcagagatttgggagggtagcgcaaaggatctggaggcattgctggtcgattaccaagactgtgttttccaagtcaacttgaaggaggaagagatcaaggtgtgcagtgagtccttgcagtatcaagccagggacatggataaacttcagtcgaagctgaaccaagcgatccgggagctgggtgagcttctgcaagatagaagaagcctaaccgcttgcagtctggatgaacccacgctgcccgttggtgaaaaggtggcagcagaccttgaggccgtccggattcatgtcgatgaagctaagcagcttttgattctcgacaaccaagctaattcatgaacctgcgcagctagtttcaggtcccttataaagatgcgacgagtgacaggctagtctgtcttggcttctgctgttcagatccttagtacgtagtagcaagacatcagagatgggaagctgcggaatttgcttcattagttggaagctatctgaagccgaatctgctgattcttttttccgtggatcagctaccttcttctggtggtcttgcttcgagtcaaaacaacaggtcctgcaagccactgttccggatccgatttctcctctggtgtacacttcaagatggagcggagaaactgatccgacttaggcttgaccttttgcttctgtaactctccagagactggtagcaactagcaaccagtgggtggacttgtatcacaacttaatctgagccaggtgtcttattttatttatgctataagtgcacaaatgctgcactccagtttcttgtagaaattttcgggctgatcttgaattttacctgctgaagagtttccgtgttctgctgctgtactgtaaacaggtgtgccagccggcggcaacctgtgcggggagcgccaagggctccaggaaagaatcggcggcgggctcgcgatcgggaaggggagcggggcgcatgcgcgagcactggcacggcgacggcgacggcgacggcgaggacgagcatgagccccagccggggtgcggggagggcgcggggcaggcggcggcgaactgcgcggcggtgtgctgctgctgcccgctggcgctgctcgacgtgctgctgctcgtcaccgtccggctccccgcgggcgtcatgcggcgggtgaggaggaggcgccggcgccgccgcggccacggaggtgccggagccaaccggaagaggccggcgcccgcgtcgccttcgggaagcagcggcaaggcgatgatcggagcggcgacgctagacatcgacgaggaggcgcgcggcgaggtggagtcggcggcggcggcggagctggagcgcgagatcatgagctcgcacttctacggcgccggcttctggcgcagcgtctcctccaactccagctcctcgtccaggcgctaccaatagatgcgcgttctggcgtaaatagagcagcagccttcggcatcgtgcaagtgcacttattctgaatggacacgtgcgaaactggcacgtgcgggttgcatcattgtactgctacgccattgtctcgagcatggaccacgccagcagctgcagcttgggatggagaagcgaaaggggtcagtgattgtgcttaggtttttcatctctctcctaatcttttttgtgtaactggagcaggaaatgctgaaacctcaagcttctgtccaaacgatgtactcctatttagtattattgattgattgagaggccgatcgataacaaatgaacaaatagaacactgttcatgacgcagtg

SEQ ID NO: 8145 - DNA, 5304 bp, Zea Mays
acctccgctccccatttcaaaccgaaaggtccgaaaccccatctcgaccccgttctgccgtatctccgatccgcctccgccgccgtctcccctgcccaggcgccggaagtccacctcgggctccagcatatccgcgatgcatctggacggcgtcgacgacgagctcggaggcggcagctgcgccccctcccccgcgcgctttgagctccaagaggatccttccttctggaaggacaacaatgtgcaggttgcgatccgtatccggccgctgagcggcagtgaggtgtcgatgcaggggcagaagcggtgcgtcaggcaggatagtagccagagccttacctggattggacaccccgagtccaggttcactttcgatcttgtcgctgacgaacatgtcacgcaggagggcatgttcaatgttgccggggtgcccatggtggagaactgcatagctggctataacagctgcatgtttgcttacgggcagactggaagcggaaaaacacatacaatgcttggtgacatagaaaatggaacacggaggaacaatgtgaattgtggtataactcctcgagtgtttgagcatctctttgaaaaagaattaaggagagatgaaaagctcatgtttacttgtaaatgctcatttttggagatttataatgagcagattctggatctgctcaacccaaattctgtaaacttgcagataagggaggatgccagaaagggtatacatgttgagaatttgacggaacatgaaatctccaatgctcgagaagcgctgcaacaacttattgagggagcagcaaacagaaaggtagcagccaccaatatgaaccgagcaagtagccgctctcatagtgttttcacctgccttatagaaagtaagtgggagtcacaaggtatcaagcaccaccgcttttctcgactcaaccttgttgaccttgcgggctcagagaggcaaaagagctcaggtgctgaaggggagcgattgaaggaagctaccaacatcaacaaatcactatcaactttgggacttgtcattacgaacctaattgctgtgtcaaacaaaaagtcacagcatgttccatacagagattcaaaattaacattcctcctccaggattcccttggaggaaattcaaaaacgaccataattgcaaacataagcccatccagctgttgtgctgctgagacattaagcacattgaaattcgcgcaacgagctaaatatataaggaataatgctataattaatgaggatgcttctggtgatgttcttagcatgcgtttacagatccagaaccttaagaaaagtaatcagccgtttgcaaggacaattgggttctgataaaacagaaagcattgcctctcatgggtttgtctgcgagtcccctagcacattcaaatgggatcagggtcatggcatgttcactccacttacttttgataaaagggctacacagaggaacgattgtgatgctgcccttgtcgctgcttttaggagggaacaagagaaggaagcacaattgaaggcagtaatagatgcaaagcagactgctgaacagctggtagctcaaaagacagaagaggtaagaagtttcaagatgaggcttaagtttcgtgaagaacggatcaaaagattggagcaggttgcttcagggaagttatctgctgaagcacatcttttgcaagagaaggaaaaccttgtaaaggaattagaggtcctgcggggtcaattagatcgtaatccagaaattacaaaatttgcaatggagaatctacaattaaaggaagagctacgaaggttgcagtcatttgttgatgaaggtgaacgagaaatgatgcatgagcaaatcattgttttacaagataagctgcttgaggcacttgactggaagcttatgaatgagaaggaacctattaacaagggtctctcattatttggggagtcagctggcgatgaggaaaatgagtttcttcgtttgcaggctattcaaaatgagagagaaattgagtcgttgcgtaaaaaaatgacattctgccttgaagcaaaagataatcttgaaaggcatgtcaatgagttgaccacagagttggagcttacaaagaaacacaacaacacatataaagagttcaaggctgcccagctccaggagcaaggagaagcagatttacataacttgtctgacgctcagatggaacttaagactttggttgatgcaatagcttctgcgagtcaacgggaggcagaagctcatgaaactgctatcggtttggccaaagagaatgaagaattgaggctgcagcttaaggttttgattgaggataacaagagattggttgagctctatgaacacactgttgtcaatgttgaggcaaatcaagatggaaaccctgtagatgatctgttgaatgcccaaccagcagccacatcagatttccatgcacataactcatctagtgtggcacaggagtctaagatagtagacgaaaaatgcaccaatgaggacaatttctcaagagttacatctgttgaattgcgtcttcagctggaggagatgcatgaggaaaatgatagacttatggggttgtatgagaaagctatgcaggaaagagatgaattcaaacggaaaattttagagcaaagcgactctgaagctgtaaaacatattcagttggacgagaaagatgtcgaaatgagtgaagcagctgagaatcctgaagtgaaacatattcatgactccacaattgcagctttgaaagaagtgctgcagattgttcggagtaagttggagcttgtccaagataaggttgtgtctgctcaggatgcagtaaaatattttaaggcactcgaaatagctagtggtaaggccgaagaactttctgcaagaattgagcttcagcgtctaggtgcgcagcgtggtcaggaagaaatcactttcctgaagtctgtgctatcagaatcacagaagaagaaaaatgcttttgaaggcaagtatttcttgcctgcagcatcatgttggaacttggttttgaagaccaaaagtcttgcggagtccaagtttgatgccagctttggatcaatgaatcagaagaaagaacagttgaatcatctccaaactcgcaaaattgaactatctgctgcaagaacgagagcacgtgaatctgaaactgagttgaaaagcaaaattgatggccttaaagcgaaacttcgcgctcatgaagctcaaagaaaggaggaagaaaaggtcctgtttgctattgataacctggatacttccactacactaatgcataaacccaagaactatggcaaggcaaccgacctgctgaaatctgaggaggatcggatgaagcttctgtgtgaactacagaaggcccgcgaacagcgctccatggtacataaggaaataagaagcatgaatgagtgtgattatattgatcgtgagattggagtccttgaagcagaaatagaggattcctgcatctccatactggaaactgacattgagaagtttgtccgtgacaacactttagcagagatttgggagggtagcgcaaaggatctggaggcattgctggtcgattaccaagactgtgttttccaagtcaacttgaaggaggaagagatcaaggtgtgcagtgagtccttgcagtatcaagccagggacatggataaacttcagtcgaagctgaaccaagcgatccgggagctgggtgagcttctgcaagatagaagaagcctaaccgcttgcagtctggatgaacccacgctgcccgttggtgaaaaggtggcagcagaccttgaggccgtccggattcatgtcgatgaagctaagcagcttttgattctcgacaaccaagctaattcatgaacctgcgcagctagtttcaggtcccttataaagatgcgacgagtgacaggctagtctgtcttggcttctgctgttcagatccttagtacgtagtagcaagacatcagagatgggaagctgcggaatttgcttcattagttggaagctatctgaagccgaatctgctgattcttttttccgtggatcagctaccttcttctggtggtcttgcttcgagtcaaaacaacaggtcctgcaagccactgttccggatccgatttctcctctggtgtacacttcaagatggagcggagaaactgatccgacttaggcttgaccttttgcttctgtaactctccagagactggtagcaactagcaaccagtgggtggacttgtatcacaacttaatctgagccaggtgtcttattttatttatgctataagtgcacaaatgctgcactccagtttcttgtagaaattttcgggctgatcttgaattttacctgctgaagagtttccgtgttctgctgctgtactgtaaacaggtgtgccagccggcggcaacctgtgcggggagcgccaagggctccaggaaagaatcggcggcgggctcgcgatcgggaaggggagcggggcgcatgcgcgagcactggcacggcgacggcgacggcgacggcgaggacgagcatgagccccagccggggtgcggggagggcgcggggcaggcggcggcgaactgcgcggcggtgtgctgctgctgcccgctggcgctgctcgacgtgctgctgctcgtcaccgtccggctccccgcgggcgtcatgcggcgggtgaggaggaggcgccggcgccgccgcggccacggaggtgccggagccaaccggaagaggccggcgcccgcgtcgccttcgggaagcagcggcaaggcgatgatcggagcggcgacgctagacatcgacgaggaggcgcgcggcgaggtggagtcggcggcggcggcggagctggagcgcgagatcatgagctcgcacttctacggcgccggcttctggcgcagcgtctcctccaactccagctcctcgtccaggcgctaccaatagatgcgcgttctggcgtaaatagagcagcagccttcggcatcgtgcaagtgcacttattctgaatggacacgtgcgaaactggcacgtgcgggttgcatcattgtactgctacgccattgtctcgagcatggaccacgccagcagctgcagcttgggatggagaagcgaaaggggtcagtgattgtgcttaggtttttcatctctctcctaatcttttttgtgtaactggagcaggaaatgctgaaacctcaagcttctgtccaaacgatgtactcctatttagtattattgattgattgagaggccgatcgataacaaatgaacaaatagaacactgttcatgacgcagtg

SEQ ID NO: 8146 - DNA, 1253 bp, Zea Mays
tggtgactagacctgtcgcctgcccaaaggtccgagcagcggaatataacaatgtaaggagccagcttactgcaatcaacagaaagcaaagtgggagcttagcagttcgtgatctttccaatctggtaaaaccagaggatatggtctgctcagagcatctagtaacacttcttgctattgttccaaagtactcccaaaaagactggttgtcaagctatgaatcactcgacacatttgtggtacccaggtcatctaaacagctctatgaagacaatgagtacgcactctacaccataacactttttgctaaggttgttgacaactttaaggtccgtgctcgcgagaagggtttccaggttcgtgattttgagtatagtcctgaagcacaagaaagtagaaagcaggagatggagaagttactgctagagcaggaagttatgaggacctcgcttctgcaatggtgctatgccagctacagtgaggttttcagttcctggatgcacttctgcgccgtgcgcatatttgtagagagcattcttagatacggtctgccaccatcgttcctgtctgccgttcttgctccgtctacaaagggcgagaagaaagtgaggagcatcttagaggacctttgcggcaatgtccatagtatttattggaaaggcgaagatgacgtggcagttgctggtctgggaggtgaatcagaggtccatccttacgtctcattcaccataaactttgtttgagcattactggtgttacgccgtcaagtaaatcgaaacgatggaatggttctgtacattgctagtgttacggcaattctttgttgatctgtcagcttttatctgatcatgtaatttatatattggatatataagccgatcaataatgtagcttttgaggagactggaagtagatggatcacgatcaccatgtaatttgtaaaatggggctactgttactgtaataaaggcacatgtcaaatatcttcagctgcggtggcctcttgctgagctccctcggcctcctcggtactagtactgggcgcctcaaccaccaccgtcttccttacacggaacatggccaagtggatgtcaccgaagatgagtaggctgccggggtcgacggacgcggggaagcccgggttgagccggcgctcgttgatgtaggtgccgttggtgctgtccaggtccgtcaccagcaggctgccgcccttcttctccagccgggcgtgagcgcctgaaactgcatgacca

SEQ ID NO: 8147 - DNA, 2768 bp, Zea Mays
aattcgcataggccgtgctactgtgctagcaagcaactgatcctagtcatacactgggcagcaggcagcgagcattccactccacgacgcaaccatccggcgccggtctccgttcgtcgtcccagtctccgcgccgtcccgtaacaatcacaacactgcaggtagtagctcagtttcagtggtcgccggcgagccactcgactcgagcgcacggccaaattgttggaccgaaatccggttcctccccaccgaacggctacgcatccgccatgctcgtcgccctcctctgcctcctcgcctgctgcgccggcgccggcgcagcaggcgccgccgcgccgaacgcgcgcccgtgcgcgtcgccctactcgaccagcgcctacccgttctgcgacgcgtcgctctccatcccggcccgcgcgcgcgcgctcgtctcgctgctcaccctggacgagaagatcgcgcagctgtccaacacggcgggcggcgtcccgcgcctgggcatcccgccctaccagtggtggtccgagtcgctccacggcctcgccgacaacgggcccggggtcaacttctcctcgggccccgtccgcgccgccaccgacttcccgcaggtcatcctgtccaccgccgccttcaaccgctcgctgtggcgcgcggtcgccgaggccgtcgccacggaggccctcggcatgcacaacgccggccaggccggcctcacgtattgggcgcctaacatcaacatcttccgagacccaaggtggggccgcggccaggagacgtccggggaggaccccgctgtcgctgccgcgtactccctcgagtatgtcaagggtttccagggagaggaaggagaggaaggcagaatcaggctctctgcgtgctgcaagcactatacagcgtatgacatggagaaatgggaaggcttctcgcggtacaccttcaatgccaaggtcaatggtgtgcctatgtgtgctcacaaagatcttctgcagaagaccagggatgaatggggcttccaggggtacattacatctgattgtgatgctgtggcaattattcatgaaaaccagacatacactaaatcaggcgaagattcaatagcaattgttcttaaggcaggaatggatatcaactgtggttctttcctagttcggcatactaagtcagcaattgagaagggaaaaattcaagaagaagatatcgaccgtgccctttttaatctattctcggttcagttgcgtcttggaatatttgataagcccagcaacaaccaatggttctctcaactagggcccaacagtgtgtgcacgaaagagcatagagagcttgcagcagaagctgtaaggcagggtgctgtccttctgaagaatgaccataattttttgcctctgaagagaagcgaagttagacatgttgccatcattggaccatctgcaaatgacgcgtatgcgatgggcggagactatacaggtgttccctgcaatcctacgaccttccttaagggcattcaagcatatgctacacaaacaagctttgcccctggatgcaaggatgcttcctgtaactcaacagatttgtttggcgaagctgttgaagcagctaaaagagccgatattgttgtcgtaattgctggcttgaacctgacagaagagcgtgaggacttcgacagagtgagccttctccttccaggcaagcagatgggcctcatacatgccattgctagtgtagcgaagaagccccttgtgttggttctcctgggtggtggtcctgttgatgtttcgtttgcaaagcaagatccacgaatcgcaagcattctttggctcggatatcctggcgaggttggtggacaagtccttccagaaattcttttcggagagtacaacccaggaggaaagctgcctataacttggtatcctgaatcctttactgctattcccatgactgatatgaacatgagagctgatccttcacgaggctaccctgggagaacatatcgattttacactggagatgtagtgtatggctttggatatggtttaagttactccaaatattcatatagcatctcctcggctccgaagaagatcaccgtgtcgcgttcatccgatttgggcattatcagcagaaagcctgcatacacaaggagggatggactaggctctgtgaaaactgaagatatcgcttcatgtgaagctctggttttctctgttcacgtcgctgtttcgaatcatggtagcatggatgggagtcatgctgttcttctgttcgcgagatcgaaatcaagcgtcccgggctttcctataaaacagctggttggctttgagagtgtccacacggcggctggcagtgcatccaatgtggagattactgttgacccctgcaagcaaatgagcgcagccaatcctgaaggcaaaagggtacttctgttgggtgcccatgttctaacggtgggtgatgaagagttcgaattatccattgaactctgacagggatgtgccaagtcctaccattttatggagttcaaagttgggaataatctgatgaaacttgtaaagaaacacgttgtaaagattcattattgagctggatgcgtgtacggtaaacatgctgtgacctgtgaagattcatcatttgagttgggtgctagtacaattgcagccattttgcggtataaactgccgaaaaatacatccagcacactactctgaatcgtatagatagatttaattaaaaggttggaacaaacagcacactactgccagaaataaaaa

SEQ ID NO: 8148 - DNA, 1944 bp, Zea Mays
cggcgactttctctgcgcgcggtcaggcgaccagagatcacggtatagtatagaagaggggggccgggccggcgcgggcagcagcagcctgcagccatgagcgcgaggtgtagcgagcgcgcgtcctagggagggtcggagccgccccccgagttgccagcagcagccgcagagcggatccaggtcgcccggcgccccgcgtgcgtgctctgctcgcttccaagagaagacgctaccccagtcccagtgggcgcccgcgaagccacgaccggcagatcttggcgtcatcgaatcggccggccgatctgatcccccccctcctccccggtgaccggcgccgggcggccgttctagagaatcgcaggcgcagcatgaggcgcgtcgtgaggtggctcaggcagctactggctggcaggaaggacgagcgcggaggaggactcgaggtgagccatgtcggtagcggctggagcgacgggccggagaaggagaagaggaggtggagcttcgcgaagcagaggaagagcggaggcggaggcgcgcggtcgtcgggtccggacgccgtcgctcctgctgccgcggtggaacggtcgcagctggtggggaggccaggggaggacgcgagggctcgagaacaccgtgccgcgatcgccatccagaaaaccttcagaggctacctggctaggagagcgctccgagctctccggtcgctcgtcaagatccaggcgctggtacggggctacctggtgaggaagcaggcgaccatgacgctgcacagactgcagacgctcatgcggctgcaagccgactccatcgccgtcaagaatgcatcgtaccggagatccatggaacaagaagtaacccacatggagagggtctatgctcgggacgtccaggtgaagccgctcgcgacggcgccggtgcaccgccggatgctgtctgacagctcggactccatctacgagcgcagcccgcggatcgtggagatggacacttgccacctccgctcccggtcctcacggatcaccagcaggtacaacaagtacaagtacaacccggatggcttaccagagtaccaccaccgccacgcggcgccgacgccgtcgtgctcgccccttcccggcggcaacggcaagcatcagcccgcgcgggtctcgttccggcagagcgcccgcgaccgcgagcgcgacccccggggctccaagactgcgcagagcacgccccggctcgcctccccccacgactcctcctcgcccgccaagagcgtcgagcacagccagctggccagcacgccgcggcggcgccccgcgacgcagcgggaccgggaccgggacgcgctcgtcagcccgcggcacatggccggcaccgcgtcctccgcggccaggacgcggtgccacagcgcgccgaggcagcggaaggcgacggactccgagcaggcgccgtcgccgaggacgggcgcctgctgccaagaaggggcgtcgaggaggtcgtgctcgcacgcgcacgcccgcgggttctgcttccagtgctcggaatcgacccggacggacggattgtccgggatcagcgtcagcgacgaggtgggtgccagagactactacctggacagcttttggtgatcaggcacggatttgtacatactcgtagtcagtcatagacgctaaaacacctagcaaatcacggaacgagtggaagataacacgggatagccagacagtctcacagaagagtgtagatgctgaaacatacttgtacacacttgttgcttgggtgttggatggaagtgttcttatgtgaaggatgaagctaacagcattgtcagacagtggtactggctatgtagttatgctgttatggtcgtcagagcgcagttctttgtttggacccagttgttctataagctacctaagtgggccgggccatactagttgggcttgatttcacgtc

SEQ ID NO: 8149 - DNA, 989 bp, Zea Mays
ggcagtacaggctaccagcccacatgcttttctttccctcccgttccccgtctgtctccctctcgtcgcatcgcgcaccgcttccccagttcccccagctccccccaccttccgttgccttctcgaactcaacccccgcccccgtcgcggatcgtcatggccgccggcctcgccttccccgtcgcctcctttccactcgcctgcgtctcctcacctccccaccccgggcaccgcatctgctgcgcgatcccgtcgtcgtcctcgcgccgcaccgtcaaatcctcgccgctccgcgcgactaccgtcctctccagggaacgacggggcacgggccgtggcgcgtccgtagtgtgcgctgtccaaggccaggacacgaccatccaagatgtgacaaagtcaacatggcaatcactcgtgatcgagagcgagcttcctgtcctggttgagttctcggcggcatggtgcgggccatgcaagatgatagaaccagttgttggcaagctctcgaaggactacgaggggaagctgaaatgctacaagctaaacacagatgagagcccggacatcgcaagccagtacggggtccggagcatccccaccacgatgatcttcaaggatggcgagaagaaggattcggttatcggggccgtgccagagagcacactggtcacatgcatcgagaaatttgtcgagaggtagaatgcgtagtggatctcttgagcggtttcctttaaatcaaaaggtcatttcgagaccacttgggccatacagaacaattctataactgcctctagatgatgggattatatgtatattatatactctgttattattgtttgaagaaagcggcatgaaatttgtgtccaccccagccttggttttgttttcttattctttagaggctctgaactgtgtaacgtggacgaccgagaacctcgttctattcttctcataatatataagaatgcacacatgaaacatcattcctt

SEQ ID NO: 8150 - DNA, 1714 bp, Zea Mays
tcgacttatgccactcctccattccctttctgttctcttcttgcccgtgaccgtgatcgagctccttaaattcccccctcccaccatctatcctctccgcctcccctacctcgccacagttccacacccacacctgccacgtccctccagcttccgcactcgctgcgaaatccggaatgggcacgccacgagcacgattgttggcccgcattgccgtggcggccgtcgtgctcctcgcgccgacgacgacgtgcggggtggccgggcactcgcgggcgctgcggcccggcggcgggcgcggccagcagcagccgtcgtcgctgttcccggcgaacgcgacgcgcgcggaggcgatcgagcggcagttcgtggagtgggtgcggtacgtgggcgggctccggcacagcacgttccagcacgcggtcgcccgcgcgtccccctcctactcgctcgtggtggacaaggaccccgcgctcggcgacttcacgaccatccaggccgccgtcgactcgctcccggccatcaacctcgtccgcgtcgtcatcagggtcaacgccggcacctacacggagaaggtgaccgtctcggcgatgcgcgcgttcatcaccctggagggcgccggcgcggacaagacggtcgtgcagtggggcgacaccgcggactcgccgaccgggcccaagggccggcccctcggcacgttcaactcggcgtccttcgccgtgaacgcgcagtacttcctggcaaggaacatcactttcaagaacacgtcgccggtgccgaagcctggggcggcggggaagcaggcggtggcgctgcgggtgtcggcggacaacgcggcgttcgtggggtgcaggttcctgggcgcgcaggacacgctgtacgaccactcgggccgccactactacaaggactgctacatccaagggtccgtggacttcatcttcggcaacgcgctgtcgctgtacgaggactgccacgtgcacgcgatcgcgcgggactacggggcgctgacggcgcagaaccggcagagcatgctggaggacacggggttctcgttcgtcaactgccgggtgacggggtccggcgcgctctacctgggccgcgcctggggcaccttctcccgcgtcgtcttcgcctacacccacatggacgacatcatcgtccccaacgggtggttcaactggggcgaccccaaccgcgagctgacggtgttctacgggcagtacaagtgcacgggcccgggcgcgacctatgccggccgggtggcgtggtcgcacgagctcaccgacgacgaggccaagcccttcatctcgctcagcttcatcgatggcaccgagtgggtcaggctgtagctgtaaatctcgcagccgctcacgccaccacgccgcacactgtaaagaaacagagcaagacagtatatacagattttatactttccgttcctcgaccgagcccaaaactctggagtctggatgcagcgtctcgatggaatgagcttttgcccaaaacccgtactcgtcagataagggcgggtttgttggatacgagaggaattcttttgctatttaaattgaaaagcaagatgatttctcttcatagatctcgtgattcatgttcaccaaaccatccgcacgggaagaaatctcctctccatagatctcgtgatccatgaatcctatcactatccccatactttagtaacctcaaatcccct

SEQ ID NO: 8151 - DNA, 1392 bp, Zea Mays
ggcctccaagcggtcgaaacgggcccgaaagaatgggccatgtggcgcctcgggcttatctgcagaaaggggatctccgattcgcacctccaccacctgccgcgccggccggcgagcctcttcctcttcctccggtcgctccccttcccatctccatcttgatttcgattctctggtggctgggaaagcctgcgagagcgcgataaccggaaagatctgagctgctgcaaccgatctccggcgccatggggttcctcgaggacttccaagccagtgttgaagcattgccatctatgctgcatcggaactattcattaatgcgagagttggataaaagtttgcatggtgtgcaactagaaaatgagcagcgctgtcaacaagaaatagaggacattaagcatggacttgaatctggaagtattacatatgacccagcaaaattgaaattttccgaagaagcaatggaggagcagaaacattgtgttagaattgctgacgagaaggtggctttagccactcagacttatgacttagttctgctgcataatcatggctcatgacgcctctgcactgttgctaaattgtgaatgtgcgggattttgattatgctgatctataggttgatgctcacatccaacagctagatcagtttatgaggaagcttgaagaaatccggcaaggaaaagaggcagctgctgctgttactgcagggactgctgttgctactactgccactccaaccgtgaatgctggagcgacaactgctgatgctaatccgaagagtggacgatctggcgaaagaggcagagggggtcggaagaaggccaaggtacccacggagcagtcagtgccagtgccagtgccactgccacctattgacttagagttgcctgtggatcctaacgaaccgacatactgcctctgcaaccaagtcagctatgtgcaaaatcgagtggtatcactatggctgtgtgggcgtcaaggagcaacccaagggaaagtggtattgcccaaactgcatcggattccagaagaagcgaaaaggcaagtgatatgcagtccacaggctgctgtgctagtgtgtccttgcttgttaattgtgttgctgatgttgggtaacaaatgtagtagtagttgctgcctgtgacagtgcataccgttgtagatccagtgttctgtacatgttactcctccttcggtgctcgtagtttagggccatcaaccatttgttaacttcatggcctttttggcgattcatgccccttgtatgggtttcgcaatatcatgtctccttttcctggtatcacaatattatgcaatacagccggtttgtaacttttccctctttgaaaaaagaatatctaattagaattcctaaaatttgattgtctt

SEQ ID NO: 8152 - DNA, 1721 bp, Zea Mays
cttcctctcgctagggcacacacgacacgcccgcctgtgtgttgaagcattgccatctatgctgcatcggaactattcattaatgcgagagttggataaaagtttgcatggtatggcagttttgacttgtgaatcctattttattctattgaatctccttttctctttgaatatatatggcaaactaaacctgaaaacaataatggttgagtgtctcattgcattaagaggatgtgttttgtacttattatgcatgcaaatggacttaagttataaattaccattgactatactgttttatttctgattatatttgcaatatttccatccagcgcatagagccacaaatattcagtaggattgcggcaattacgttttgtttcatcttctaaaatttgatgaatgtcagtctttatgtgggctgtcacaatatatgtcaacctacaaatcatggcaaatgaacttttctataggattgtccagacgaaggcactgaattgatagttactaatgttattgttgctacttaaatatcaactgattttatttctccaaacagaaagtgcaatctgtgttcaatttaagcttttcagctttttgccctgaaaatagaccgccttctgtgcttcttattaggtgtgcaactagaaaatgagcagcgctgtcaacaagaaatagaggacattaagcatggacttgaatctggaagtattacatatgacccagcaaaattgaaattttccgaagaagcaatggaggagcagaaacattgtgttagaattgctgacgagaaggtggctttagccactcagacttatgacttagttgatgctcacatccaacagctagatcagtttatgaggaagcttgaagaaatccggcaaggaaaagaggcagctgctgctgttactgcagggactgctgttgctactactgccactccaaccgtgaatgctggagcgacaactgctgatgctaatccgaagagtggacgatctggcgaaagaggcagagggggtcggaagaaggccaaggtacccacggagcagtcagtgccagtgccagtgccactgccacctattgacttagagttgcctgtggatcctaacgaaccgacatactgcctctgcaaccaagtcagctatggtgagatggtggcatgcgacaatcctaatgtatgtgacatgccctttgtttactccagttttgacaagttccatttttcatgcccgtgctttggctgtatatcactttcgtatccatttggcagtgcaaaatcgagtggtatcactatggctgtgtgggcgtcaaggagcaacccaagggaaagtggtattgcccaaactgcatcggattccagaagaagcgaaaaggcaagtgatatgcagtccacaggctgctgtgctagtgtgtccttgcttgttaattgtgttgctgatgttgggtaacaaatgtagtagtagttgctgcctgtgacagtgcataccgttgtagatccagtgttctgtacatgttactcctccttcggtgctcgtagtttagggccatcaaccatttgttaacttcatggcctttttggcgattcatgccccttgtatgggtttcgcaatatcatgtctccttttcctggtatcacaatattatgcaatacagccggtttgtaacttttccctctttgaaaaaagaatatctaattagaattcctaaaatttgattgtctt

SEQ ID NO: 8153 - DNA, 3020 bp, Zea Mays
agactactcacaggtcactgtctcactcacttgaagctctaacagcaagccatggcaggacgagaagcggacaaagacccagagctgaaggtgctcggcgtgtggtcgagcccgttcgttatcagggcccgcgtcgcgctaaacctcaagggcctcgcctaccgatacgtggaggacaacctggacagcaagagcgagctcctcctcgcctccaaccacgtgcacgggaaggtgccggtgctcctccacgacggcaggcccgtctgcgagtcccgggtcatcgtggagtatatcgacgaggccttcccggccagcggcccctgcctcctccccgccgacccgtaccgccgcgcggtcgaccgcttctgggcctcctacgtcgacgacaagctctttcccacctggatacccgtctacaacggcaggacgagcgaggacagggtcgcggcggcgaggcaggtagtggccgtgctggagaagtttgagcgggcgttcgatgagtgctccggaggcaaggcgttcttcggcggggacgctgctggcctcgtggacgtcgtgctaggcggcttcctcgggtggctgcgcgcgtctgaggtgatgtgtggcgtgagggtcatcgaccccgccaagacgccgctgctggcggcgtgggcggaccggttcgccgcgctcgacggcgtcagggaggtgatacctgacgtgcagaggctgctggagtataacaagattaggcgagctcgtcgtgggctgccgtaggtgctgggccttgggccatctatctgccagcatgtggtcagtcaactctaagcaggagactttgacaaggttaaagtttagttcatgaaggtgggcaatctaattaggatgctcatgctttagctaggagtgccattagttttcctgttgaaaggcatgtttggttcctctttcctactgaaagagtttgtaatatctttactactattaagaaggtaaggggtatgctgccattactagttctgtcattcccattcctaccgttctcattcctattcccattcccggttctgtctccacccccgatgcccctcccccgcgtaacccccgtggctcaccgcaccacacgaaacctctgatcccatgacctcgacggcggccatggccggcaagcaggtgcaataccgtgccccaactcgccccgcacgtcgcccatcctgtcacccccacgcgatggccgcaactccgcgagacaaccgctgtccgccccccaccaccctcccccgcgacgccccctcccacgacgctttgtgcgcgtgagtctgcgactgccgacagccgtcgccgtactggagcccgatctgctggctccccctcaacctcaccaccatgcccccatcggacctcgtcacgccgtgcgtggcggtgccggtgatggacgcggcgttgctagccgtcatcgtcccgcctcgacgttcgatccatgctcgccacggttggtgctcgcacgcgatgtggcgtggcgaggttaccgcgggcgccgcggaggtggagggggaaggggaggatgagggcacgggcaagagagtgcatcgcggtggacggtctcgtgatgacaacaatgggacaggcaaccacgaccttgagctgctgagggagaaaaaggaccagtttgaccttgtgatcagcaacgtccacatgctggacatggacggcttcaagctcctcaagcttgtgggtctcgagatggaccttccggggattaacagctgaaaacctcgcccgatttgtaaagaagttttcttgttcaatgcggcattgaatttgggaggaatggcaagtctcatgaaaacttctatatgccctacacgtgaccactaaaagaaagagttagacaggacaaaaggctgcaggtgaagcggcagaagaagagcttttacaataaaccctaaacccttacaatgctgattttgatggagatgaaatgaatttgcatgtccctcagacggaggaagctcgcactgaagcgcttaattctcataggggttcaaaataatttatgtactcctaagaatgtgatggggggtacttcaatgcaataatgagcttcccacaaaattacccaaacagcccgccatcagtcagatttacctctgaaatgtggcatccaaatgtctatcctgatgggtgggtttgtatctctattcttcatccacccagtgaagatccaaacggttatgagctcgcaagtgagcgatggacacctgtgcacacagtatggcttcgtatactttgtttacatatcttttccccattgtaatgatactcatctcccttttatgtgtatactttttagagagaatattaccttgtagtctcattgtttcagtttatggtccaatttacaatggcttcactgtaaatgggaaaacaactcggtaggaatgcttttttgaattataaattatttatatttcatacaatgcttataggtatgtgatgagtcctccaatctgagaagtagagcatggtaaagcactccaagctgctctttcatcgggaaatttataggtgacacttgtgtcatacattgaactatggagtcaaacaaattacatattatccttcaacatttttcaccagtgggaactgtagttattgcatagaatagatggtatattaatcgttgagagccaatgtttacattaactgttatgcagaagaaaatttatgttttattttatatctaactgtactttgttgcagcttgtaggtactgatcacagcacattcaactccacacagattgtccatgtttcttttagtcaccattgatttatcactaggtcattgtgtttgtggccaacgagtattgtttctaacagttatgttcccatagctagctggattcattgttgtgttttgttcagggtactttcaccacttctggtatggttctgtctgtaatgtgccagggattattatattgtttttggtttggatttggaatggtttggggtccacaacgatgatgcgtcagagct

SEQ ID NO: 8154 - DNA, 2724 bp, Zea Mays
acgggtcgcggctagccggctagagtctcttttccaagcccactcttttttctcctctccacttcgttacgcggacagtgggaggagccacagccattataatagcacgccatacgccaaaagctccactggagccgagcagctactcctcccagtcccaggctcactgtcgctcctcccaagaacccgcccaaagaatcctagaaatccaagaaagggagcaaccaaaacaggaggaggtctgcaggaggaggagcaggtcagcaggaggaggtggtgctgaaggggaagatctcacaagtgtgtgaagaccacacagtctcgcgcactcgcaaacccagtgcgcgctgcggtcttcctcttcgcccaccttcttggagcggggaggttggccatgaggaggtggtggccggctgccctgctgggctgcgcagtggcggtgtccgttctggtggccgccgtggaatgcgctgtgacttacgacaagaaggcggtgctgattgatgggcagaggcggattctcttctccggatccatacactaccccaggagcacccctgatatgtgggaagggctgattcagaaagctaaagacggaggcttggatgtcattcagacctatgtcttttggaacggacatgagcctacgcctggaaattactatttcgaggagaggtacgatttagtcaggttcataaagacggtccagaaggctggcctgtttgtacatctccgcatcggtccctacatttgtggcgagtggaacttcggcggcttcccagtttggttgaagtatgtaccgggcatcagcttcaggacagacaacgaacctttcaagacggccatgcagggtttcactgagaaaattgtgggaatgatgaagagcgaaaacctctttgcatcccaaggtggcccaattatcctctctcagattgagaatgagtatgggccagaaggcagggagtttggtgccgcaggtcaggcatatatcaactgggcagcaaagatggcagtcggattgggtactggtgtgccgtgggtgatgtgcaaggaggaggatgcacctgatccagtgcccacaatgtggactgaagcttggagtggctggttcacggaatttggtgggaccatccgccaacgaccggttgaagatcttgcatttgctgttgctagatttgtacaaaagggtggttcttttatcaattactacatgtatcatggaggaacaaattttgggcgcactgctgggggtcccttcatcacaacaagctatgattatgatgctccaattgatgaatatggacttgttagagaaccaaagcacagtcatcttaaagaactccacagagctgttaagttatgcgagcaggctttggtttctgttgacccagcaattactacccttggtaccatgcaagaggttggtgttcagacatctcagatgcaaatgtggggagatggtgcctcatcaatgacgtgggagaggtatgatgaggaggttgattctctggcagctgctccattgctcaccacaactggtttgcttgagcagcttaatgtcacgagagacagcagtgattatttgtggtacatcaccagtgttgacataagctcatctgaaaactttctacaaggtggcggcaagcctctgtctctcagtgtgcagtctgctggtcatgccttgcatgtctttgtcaatggacaacttcaaggttctgcttatggtaccagggaagatcgaagaatcaaatataatggcaatgctagccttcgagctggtactaacaaaattgcactgctgagtgttgcctgtggattgccgaatgttggagtgcattatgagacgtggaacactggtgttggtggtcctgttgtgcttcatgggctggatgaaggttcacgagaccttacttggcagacttggtcctatcaggttggcctgaaaggcgaacagatgaatctgaactccatagaaggctcaagctcagttgaatggatgcaagggtcattgatagctcaaaaccagcagccattggcctggtatagggcttactttgagactcccagcggggacgagccattggctttggatatgggtagcatgggcaagggccaaatctggataaatggacaaagcattggacgctactggacagcatatgcagatggggactgcaaagaatgcagttacacgggaaccttccgggcacccaaatgtcaatcaggctgtggtcagcccacgcaacgatggtatcatgtgccaaagtcctggctgcagcccaccagaaacctgctggtagtcttcgaggaacttggtggggattcatcgaagatcgccctagtgaagaggtcagtctcaagtgtctgtgctgatgtatctgaggatcacccaaacatcaagaactggcagatcgaaagctacggcgagcgcgagtaccacagggcccaaagtgcacttaagatgtgcacgtgggcagtccatttccgcaatcaaattcgcaagctttgggacacctacgggaacctgtggagatttccagcaaggagattgccactcagctaactctcacacagtcctagagaagaaatgcattgggctccaaagatgcgtcgtcgccatctcccccgagagctttggaggagacccctgcccgagcgtgacgaaaagggtggcggtccaggcagtatgttctcccgtcgcgtagccttacttctccaagcaat

SEQ ID NO: 8155 - DNA, 2891 bp, Zea Mays
cctccgtacacacacacacgggtcgcggctagccggctagagtctcttttccaagcccactcttttttctcctctccacttcgttacgcggacagtgggaggagccacagccattataatagcacgccatacgccaaaagctccactggagccgagcagctactcctcccagtcccaggctcactgtcgctcctcccaagaacccgcccaaagaatcctagaaatccaagaaagggagcaaccaaaacaggaggaggtctgcaggaggaggagcaggtcagcaggaggaggtggtgctgaaggggaagatctcacaagtgtgtgaagaccacacagtctcgcgcactcgcaaacccagtgcgcgctgcggtcttcctcttcgcccaccttcttggagcggggaggttggccatgaggaggtggtggccggctgccctgctgggctgcgcagtggcggtgtccgttctggtggccgccgtggaatgcgctgtgacttacgacaagaaggcggtgctgattgatgggcagaggcggattctcttctccggatccatacactaccccaggagcacccctgatatgtgggaagggctgattcagaaagctaaagacggaggcttggatgtcattcagacctatgtcttttggaacggacatgagcctacgcctggaaattactatttcgaggagagcggcttcccagtttggttgaagtatgtaccgggcatcagcttcaggacagacaacgaacctttcaagacggccatgcagggtttcactgagaaaattgtgggaatgatgaagagcgaaaacctctttgcatcccaaggtggcccaattatcctctctcaggcaagtataatcttttccttagatttgattgagaatgagtatgggccagaaggcagggagtttggtgccgcaggtcaggcatatatcaactgggcagcaaagatggcagtcggattgggtactggtgtgccgtgggtgatgtgcaaggaggaggatgcacctgatccagtgatcaatgcatgcaatggtttctactgtgatgcattttctcctaacaaaccttacaagcccacaatgtggactgaagcttggagtggctggttcacggaatttggtgggaccatccgccaacgaccggttgaagatcttgcatttgctgttgctagatttgtacaaaagggtggttcttttatcaattactacatgtatcatggaggaacaaattttgggcgcactgctgggggtcccttcatcacaacaagctatgattatgatgctccaattgatgaatatggacttgttagagaaccaaagcacagtcatcttaaagaactccacagagctgttaagttatgcgagcaggctttggtttctgttgacccagcaattactacccttggtaccatgcaagaggcccgcgtcttccaatctccatctggttgtgcagctttccttgcaaactacaattctaactcctatgcgaaagttgtgttcaacaatgagcaatacagcctaccaccttggtcgattagcatccttcctgattgcaaaaatgttgtttttaacagtgccacagttggtgttcagacatctcagatgcaaatgtggggagatggtgcctcatcaatgacgtgggagaggtatgatgaggaggttgattctctggcagctgctccattgctcaccacaactggtttgcttgagcagcttaatgtcacgagagacagcagtgattatttgtggtacatcaccagtgttgacataagctcatctgaaaactttctacaaggtggcggcaagcctctgtctctcagtgtgcagtctgctggtcatgccttgcatgtctttgtcaatggacaacttcaaggttctgcttatggtaccagggaagatcgaagaatcaaatataatggcaatgctagccttcgagctggtactaacaaaattgcactgctgagtgttgcctgtggattgccgaatgttggagtgcattatgagacgtggaacactggtgttggtggtcctgttgtgcttcatgggctggatgaaggttcacgagaccttacttggcagacttggtcctatcaggttggcctgaaaggcgaacagatgaatctgaactccatagaaggctcaagctcagttgaatggatgcaagggtcattgatagctcaaaaccagcagccattggcctggtatagggcttactttgagactcccagcggggacgagccattggctttggatatgggtagcatgggcaagggccaaatctggataaatggacaaagcattggacgctactggacagcatatgcagatggggactgcaaagaatgcagttacacgggaaccttccgggcacccaaatgtcaatcaggctgtggtcagcccacgcaacgatggtatcatgtgccaaagtcctggctgcagcccaccagaaacctgctggtagtcttcgaggaacttggtggggattcatcgaagatcgccctagtgaagaggtcagtctcaagtgtctgtgctgatgtatctgaggatcacccaaacatcaagaactggcagatcgaaagctacggcgagcgcgagtaccacagggcccaaagtgcacttaagatgtgcacgtgggcagtccatttccgcaatcaaattcgcaagctttgggacacctacgggaacctgtggagatttccagcaaggagattgccactcagctaactctcacacagtcctagagaagaaatgcattgggctccaaagatgcgtcgtcgccatctcccccgagagctttggaggagacccctgcccgagcgtgacgaaaagggtggcggtccaggcagtatgttctcccgtcgcgtagccttacttctccaagcaat

SEQ ID NO: 8156 - DNA, 1134 bp, Zea Mays
ctcaaaaattcaaaccgcatcaagcttcccaagaccccagacgaacgccggcgcttcacacatcgcccgacccgaaccaaacccttcaaaccccagcgaaaagcgaaggcaatcggaggaacgaatccgcgcgaccaacacgttggcagcagcattaggatccggatccgaagaccgccagaccggagccggaggcgatgaagagaaaggaaaactccgcgcactcggcgccgcctctcaacaggccgcgcgggaagcgcaaggccctggccgagctccccaagtccaacggactgaacatgaaccacgactcggcgccgcggccgtcgaagccgagaacgcggtcggcggcgcgagctgaggccgaggcggaggcggcgatgaaacggcggaaggccggagacgccgcgcgctggccgatggacacgaggcagcctgacgctgaagcggcggttgcgccatacgtcggggacatcgaccggtacctccggtccctggagaacttgtcacttgaacaaagcacgggttatagagtctttgatctgcagaaatccatttatgtcatacatgaattgcagttgacaataaggtgcccaaatcaggtagccatcagggagaagtacaaggaccccaagtttgggtgcgtgtcgacaatggtttcaccacgagaaatccctacgtctttccttgaaggttgccataagtgaagtccggacttggacttggagaagggtttttgcagtaatgctgctggcgagtggcgatgcagaaaatagcttgatggtaggataatttaagggtaggtcggaaaatataccatggccagcgttgtagatcgttggtacggtactggtctcacagttggtagaatatgcaattgaaggctttttgtacaggagttaggctagtccgtgacacacacgtgtgcatcctctatggtctgtctttgcgcacattatgccgagcgccgaccatctcgtgctgttggcctgtctcaattaccaccagacatttgacacgtggaatctttttaagattcaatttttaaaaattgtatttctcaagctgtaacttcgattcacgaacggtttgaagcgtgtcattgagaaaaatataacgaacaaaatgagatcc

SEQ ID NO: 8157 - DNA, 1743 bp, Zea Mays
atttcggcctgcagatgcccgccacaaggccatctcaaaaattcaaaccgcatcaagcttcccaagaccccagacgaacgccggcgcttcacacatcgcccgacccgaaccaaacccttcaaaccccagcgaaaagcgaaggcaatcggaggaacgaatccgcgcgaccaacacgttggcagcagcattaggatccggatccgaagaccgccagaccggagccggaggcgatgaagagaaaggaaaactccgcgcactcggcgccgcctctcaacaggccgcgcgggaagcgcaaggccctggccgagctccccaagtccaacggactgaacatgaaccacgactcggcgccgcggccgtcgaagccgagaacgcggtcggcggcgcgagctgaggccgaggcggaggcggcgatgaaacggcggaaggccggagacgccgcgcgctggccgatggacacgaggcagcctgacgctgaagcggcggttgcgccatacgtcggggacatcgaccggtacctccggtccctggaggttgaaccgttgaggaggccaagccatagctattttcaggatatccagaaaaacatctgccccaaaatgagggctatccttgtggactggttggtggaggtggctgaagaattcaagcttcacgcagaaacactccaccttgcggtttcctacgtggaccgctttctcacaatgaatgtcgttgctcggaacaagctgcaactactgggtgtcactgcattgctcgttgctgcgtggtcaagatggagactgacttactaaaatctcttagctttcagattgggggtcccacagtgacaacatttctacggcaatttatagcttcgtgtcgtggaggcaatgtaagcggtactttggagcatgtgcatttacttctcttaatgttttttttcgataaatctgttttttttattcaaaattcagagtgcaagcagaggaaaacttgagtttgtgtgcagctaccttgcggaattgagcttgctggattatgactgcataagctatctaccctcagtagttgctgctgcctgcttgtttgtagccagattcataatccacccaaagactcgtccttggaacttgtcacttgaacaaagcacgggttatagagtctttgatctgcagaaatccatttatgtcatacatgaattgcagttgacaataaggtgcccaaatcaggtagccatcagggagaagtacaaggaccccaagtttgggtgcgtgtcgacaatggtttcaccacgagaaatccctacgtctttccttgaaggttgccataagtgaagtccggacttggacttggagaagggtttttgcagtaatgctgctggcgagtggcgatgcagaaaatagcttgatggtaggataatttaagggtaggtcggaaaatataccatggccagcgttgtagatcgttggtacggtactggtctcacagttggtagaatatgcaattgaaggctttttgtacaggagttaggctagtccgtgacacacacgtgtgcatcctctatggtctgtctttgcgcacattatgccgagcgccgaccatctcgtgctgttggcctgtctcaattaccaccagacatttgacacgtggaatctttttaagattcaatttttaaaaattgtatttctcaagctgtaacttcgattcacgaacggtttgaagcgtgtcattgagaaaaatataacgaacaaaatgagatcc

SEQ ID NO: 8158 - DNA, 1746 bp, Zea Mays
atgagtcggtggcaccagtctggctctggctctgcctctgcgtgatagcgcatttcggcctgcagatgcccgccacaaggccatctcaaaaattcaaaccgcatcaagcttcccaagaccccagacgaacgccggcgcttcacacatcgcccgacccgaaccaaacccttcaaaccccagcgaaaagcgaaggcaatcggaggaacgaatccgcgcgaccaacacgttggcagcagcattaggatccggatccgaagaccgccagaccggagccggaggcgatgaagagaaaggaaaactccgcgcactcggcgccgcctctcaacaggccgcgcgggaagcgcaaggccctggccgagctccccaagtccaacggactgaacatgaaccacgactcggcgccgcggccgtcgaagccgagaacgcggtcggcggcgcgagctgaggccgaggcggaggcggcgatgaaacggcggaaggccggagacgccgcgcgctggccgatggacacgaggcagcctgacgctgaagcggcggttgcgccatacgtcggggacatcgaccggtacctccggtccctggaggttgaaccgttgaggaggccaagccatagctattttcaggatatccagaaaaacatctgccccaaaatgagggctatccttgtggactggttggtggaggtggctgaagaattcaagcttcacgcagaaacactccaccttgcggtttcctacgtggaccgctttctcacaatgaatgtcgttgctcggaacaagctgcaactactgggtgtcactgcattgctcgttgctgctaagtatgaagaaattgagtcttctaagatgaaggtggtcaagatggagactgacttactaaaatctcttagctttcagattgggggtcccacagtgacaacatttctacggcaatttatagcttcgtgtcgtggaggcaatagtgcaagcagaggaaaacttgagtttgtgtgcagctaccttgcggaattgagcttgctggattatgactgcataagctatctaccctcagtagttgctgctgcctgcttgtttgtagccagattcataatccacccaaagactcgtccttggaacttgtcacttgaacaaagcacgggttatagagtctttgatctgcagaaatccatttatgtcatacatgaattgcagttgacaataaggtgcccaaatcaggtagccatcagggagaagtacaaggaccccaagtttgggtgcgtgtcgacaatggtttcaccacgagaaatccctacgtctttccttgaaggttgccataagtgaagtccggacttggacttggagaagggtttttgcagtaatgctgctggcgagtggcgatgcagaaaatagcttgatggtaggataatttaagggtaggtcggaaaatataccatggccagcgttgtagatcgttggtacggtactggtctcacagttggtagaatatgcaattgaaggctttttgtacaggagttaggctagtccgtgacacacacgtgtgcatcctctatggtctgtctttgcgcacattatgccgagcgccgaccatctcgtgctgttggcctgtctcaattaccaccagacatttgacacgtggaatctttttaagattcaatttttaaaaattgtatttctcaagctgtaacttcgattcacgaacggtttgaagcgtgtcattgagaaaaatataacgaacaaaatgagatcc

SEQ ID NO: 8159 - DNA, 1848 bp, Zea Mays
ctcaaaaattcaaaccgcatcaagcttcccaagaccccagacgaacgccggcgcttcacacatcgcccgacccgaaccaaacccttcaaaccccagcgaaaagcgaaggcaatcggaggaacgaatccgcgcgaccaacacgttggcagcagcattaggatccggatccgaagaccgccagaccggagccggaggcgatgaagagaaaggaaaactccgcgcactcggcgccgcctctcaacaggccgcgcgggaagcgcaaggccctggccgagctccccaagtccaacggactgaacatgaaccacgactcggcgccgcggccgtcgaagccgagaacgcggtcggcggcgcgagctgaggccgaggcggaggcggcgatgaaacggcggaaggccggagacgccgcgcgctggccgatggacacgaggcagcctgacgctgaagcggcggttgcgccatacgtcggggacatcgaccggtacctccggtccctggaggttgaaccgttgaggaggccaagccatagctattttcaggatatccagaaaaacatctgccccaaaatgagggctatccttgtggactggttggtggaggtggctgaagaattcaagcttcacgcagaaacactccaccttgcggtttcctacgtggaccgctttctcacaatgaatgtcgttgctcggaacaagctgcaactactgggtgtcactgcattgctcgttgctgctaagtatgaagaaattgagtcttctaagatgaaggtgaaaagatacaccgatatcacggataacacttacaccaagcagtggtcaagatggagactgacttactaaaatctcttagctttcagattgggggtcccacagtgacaacatttctacggtatgtcttctccatcattgtttcctgtgcttagaacaagcatagcatttgacgtaacttccctttgtatgttaccatataagaattatgccctggacttaaagaagttcagaatctaatactagataactgtttgttttaggcaatttatagcttcgtgtcgtggaggcaatagtgcaagcagaggaaaacttgagtttgtgtgcagctaccttgcggaattgagcttgctggattatgactgcataagctatctaccctcagtagttgctgctgcctgcttgtttgtagccagattcataatccacccaaagactcgtccttggaacttgtcacttgaacaaagcacgggttatagagtctttgatctgcagaaatccatttatgtcatacatgaattgcagttgacaataaggtgcccaaatcaggtagccatcagggagaagtacaaggaccccaagtttgggtgcgtgtcgacaatggtttcaccacgagaaatccctacgtctttccttgaaggttgccataagtgaagtccggacttggacttggagaagggtttttgcagtaatgctgctggcgagtggcgatgcagaaaatagcttgatggtaggataatttaagggtaggtcggaaaatataccatggccagcgttgtagatcgttggtacggtactggtctcacagttggtagaatatgcaattgaaggctttttgtacaggagttaggctagtccgtgacacacacgtgtgcatcctctatggtctgtctttgcgcacattatgccgagcgccgaccatctcgtgctgttggcctgtctcaattaccaccagacatttgacacgtggaatctttttaagattcaatttttaaaaattgtatttctcaagctgtaacttcgattcacgaacggtttgaagcgtgtcattgagaaaaatataacgaacaaaatgagatcc

SEQ ID NO: 8160 - DNA, 1947 bp, Zea Mays
cccagacgggcccaaatctatcgcaaacaggcctcgtctcgtcctcgtcctcgtccgccgccaaatcgaacccccccaaaccctagctacccggcgcaacgtccccttcccgcctctccgcggcgctgcgtgacacccggcctccgctacgaaacaccggggcgggtgtagcctagcgggcgggccatggcgtcaacggtgctggaggcgacgcgggcggcccatgaggatctggagaggctggagcggctcgcggtgagcgagctgcaacgggagcccgctaacccgcgtgaccgcctctttcagtcccaccgcgtccgccacatgctcgacctcgtcgtctccacctccggcaagctcgtggaaatttacgaggacaaggacaatgctaggaaggatgagatcaacactcatcttactgcacccacgcaaagtggactgtttagcaagtactatgaaaggctcaaagagatccgtgaatatcatcggcggaacccatctgcccgctttgttagtacaactgatgactatgaagagcttctaaaggaggaaccagttattgaattcactggcgaggaaacttttggccgttaccttgacttgcatgagctttataatgagttcataaattccaagttcggaacactgatggaatattcagcttatgttggctgtttctcccagacggacaagatctcacatagtcataaagctaccagagccattgcaagacattgataagatttttttaaagctggagagtgaattcgaggaacaatgggccaatgaaggaatacttggatgggggaataaagggacagaaaaagagtctgaaatagatctcgattactacagcacagttgaagaacttgttgagcttggcccagaaaaattaaaacaggctttagctgctcgaggtttgaagagtggcggtactgttcaacagcgtgcagatcgtcttttcttgttgaaggttacaccgttggaacaactagataggaagcattttgccaaagttccacatactaaagatggctcaaacacagctcctaatggtaatgctttcaaggaggatatgaagaaagaaattgcattgatggaagtgaagatgaaacgtctttgtgagctgctagatgaggcctttgtaaggacaaaggaaaatgcggagaagaagcttactttgacatatgaagagatggaagcagaacgggaagaggaggaggtacaagttgacactgagagtgatgacgaagagcaacaaatctacaatcctctcaagttgccgatgggttgggatggcaaacctatcccctactggctgtacaagctacatggccttgggcaggaattcaagtgtgagatatgtggaaaccatagctattgggggcgaagggcttatgagcgtcatttcaaggaatggcgtcatcagcatgggatgcgatgccttggcattcccaatactaagaatttcaatgaaattacatccatcgaggaggcgaaagcgctctgggagaaaattcaagcacgacaaggggtgaataagtggcggccagacctagaggaagagtatgaagatcaggaaggcaacatctacaacaagaagacctacactgacctgcagcgtcaaggcctgatctagggctcctgctggttaaagttgtcgggatttgttcagaacttatctcatgtagttgtaactctgaaaatattggcccatctggcatacattttatgtaataacatgattctccggaactcatgtgcttttcccggttgtcatggttgtctcgtgtgtctgtttgcccagcttggtcgtccgtagctatgttatgttttatataatcgtaaatgtgttattgtattaagcacaagttggtgtttgcatcacgtaaaacatatttttataaaaaaattagaaaaaaataaaactaggctgtttttggtcta

SEQ ID NO: 8161 - DNA, 2183 bp, Zea Mays
ccgaaaatgcccccgcctactctgcacgccggttcatacaaaaggggcctcacgtcacggcacacagcacgcagcacatcgctcactccgtcactcgctcctcctccactcctcgccttcctcggtcgcatcaagaacacgagcaggaaggagaagaggaggagtcctatcagagccagacagccaatcagtatctgtaccattaccgttcgggcaccagattaccaaaatcctgcagaggggaatggcgccgagcagctacgagatggcggcttccaccctgctgtgcggcgaggacagcagcagcatcctggacctcgaagcggggggccaggaggaggaggaggaggtgctgctggcgcggagcaggacgcgcggggagcccagcgtggtcttccccgtgccgtccgaggaatgcgtcgccggtttcgtggaggcggaggcggcgcacatgccgcgggaggactacgccgagaggctgcgcggcgggggcacggatctccgcgtccggacggacgccatcgactggatttggaaggttcacgcgtactacggtttcggccctctcaccgcctgcttggccgtcaactacctggaccgcttcctctcgctctaccagcttccggaaggcaagtcttggacgacgcagctgctgtccgtggcgtgcttgtccctggctgccaagatggaggagacctacgttcctccgtctctggacctgcaggtcggggacgcgcggtacgtgttcgaggcgaagacggtgcagaggatggagctgctggtcctcagcacgctcagatggaggatgcgagcggtcacccccttctcgtacatcgactacttcctccaccggctcaaagacggcggtgcgccgagcagacgcgccgtcctccgatccgcggagctcatcctgcgcgtcgcgagaggaacgtgctgcctgggtttcaggccctcggaggtcgccgcggctgtcgccgccgccgtggccggcgaggagcacgccgtggatatcgacaaggcttgcacccaccgcgtgcacgaggtacggcgtgtgcctgtccccggccacttctcgcgagtcttgtcgtcagattcaatgcgatgcgatgcaatacgttaagcgtgtaccgcatggatccaaatccaagtcgtaggagagggtgtcgcgatgcctcgaagcgatccaggccaccgtggccctgctggcgcctgcacagccgctgaaagctgaaggcccgagcagcggccgcagcagagcctcttcctcctctgccaccgtgccgcggagcccgaccggggtgctggacgctggctgcctcagctacaggagcgacgacgcggctgcggctgcggctgcctcgcacgcgagctccgcctggcgcgacgaggacggcgactgctccccggctgtttgcagcaagaggaggaagactagcagatgatgattagtacacaccagtgatggagatggaaggatcgatcgaaaagcccattccgcgcgctgatcagtgatcgtcgatctccttgacagaaagtcaagtggttttgatcgcactgaccgaagagtctggtctgctctgggagcttttgactccggtttgaatcgaagtgcctgtaagccaggcaaaggaggcgcaagcgcaaccaaaagcaggacattttggacatggcggtccagcaaagatcacgctcctctgaatgcagggtgctagtagaaatgtaccaaaggaaggggaaaaaaaggagcaaaggttttgaaggttgacaaagctgagacgggacgggacgaccaaactaaaggcagctcgacgatgacggggacgaggcgatgctggtgacatcaggcatgcgaagtagctatagccgcgtagtttgctttgttctgtaatttcccgaccattttccatttgtaaaagagagagagagagagagagagagagagaatgcaaaaaagagaggaaaagaacaattcaattcttgcgtgacaaattgaaaatagcggttaaccaactggaatcccaagaagcaggagaacagcaacatgacgacaggacccagaagacctggaaatgggtttctttgaggggttacgaactatcagcatcagcagttgctatgaaacatgaacccgctgggtcgctgccaccaaacatttgtttgactgcttgtctgcaaagaccatg

SEQ ID NO: 8162 - DNA, 1509 bp, Zea Mays
cagggagaggagagagccgctgttcgcgagcacgtggaacgtcggcggcgtggcgccaccggacgagctggacctgtcggactggctggacggcggcggcggcgacgacgacgacgggccctacgacatgtacgtgctggggttccaggaggtggtgccgctgcgcgcgcgcaacgtgctgggtgccgacaagaagcgcgtcgggatgcggtggatcgagctcacccgcgccgcgctcaaccggtcgtcgtcatcgcacgcgcagcgcgggggagggagcggcggcggatcaggctcaggcgacggcggcggcggcggcaggcagaaggtgcacccggtgcgggacggcggcggcggcggcgggctggcctgcagggactaccggtgcgtggtgagcaagcagatggtgggcgtcctgctcacggtgtgggtgcgctccgacctccgccgcttcgtccgccgcgccagcgtctcctgcgtcggctgcggcgtcatgggctgccttggcaacaagggtgccgtgtccgtccggttctggctgcatgaaacgagcttctgcttcgtgtgctgtcacctcgcgtcgggcgggcgcgacggcgacgaggcgcaccgcaacgccgacgccacggagatcctctcccggacggccttcccgcggggccaagcgctcaacttgcccttgccgcacaagattctagaccacgaccgggtgatccttctcggggacctcaactacaggatctcgctgccggaggccaagacgaggctgctggtggagcggcaggactggaagacgctgctggagaacgaccagctgcgcgccgaggtgcgccgcggcggcgcgttccagggctggagcgaggggcccatcgccttctccccgacctacaagtactgccccaactccgacgcctactacggctgcgccaccgccagcgccaccgccgacgcccgccggcacaagcggcgcgcgccggcgtggtgcgaccgcatcctgtggcgcggcgaggggatccggcaggcccggtacggccgctgcgagtcccggctgtcggaccaccgccccgtgcgcgccgtcttcacggtggaggtgggcgcgcccgcgcccgggagtaacctcaactcgctcaggagcttcttcatgtccgagaggttcgacggggctggcagcaggagccccgccgccgaccagctactccgcagggacgacgacgtcaacagcgccagattcagcgacgcgctttgagacacgcatgggatgggagggtggagatggaattgtcactccacttctccggttgcggattgtacttgcgcacagacagaagatcgtatctacaacatgctgctaagatacagagatggtttttttctttttttttaaaaaaaaatccaccctgttcccaacgttctgtaactactatacatttgtactcttgttgatccagtgagtatgattgggcctcaagtcaagtttgttgccatgggcaaccatgaatgacaacagaa

SEQ ID NO: 8163 - DNA, 2071 bp, Zea Mays
cgtcgtctgaaattcaggtggccgtcggatttttcgtggacgctccctagcggctcggtgtctccatgtgccgtgaaggttcgagaaccatcgtatgttcacgaatcgatttcctgtcacacacaggctctctacgatacgggaagtcgggaaccttccggatggactccttcctcagccatcgtagcttgcctcgcggcactggcggcggctccgcccggccagcacaaccgcagtcccagtcttctagacgaagcgaacgtgcgacgggaaaaacacggcccccgttggtcgaatccacgccggcgacgtcccctgccaccgcccaactgagtggtacaggtacaccgtacaccaatccatccgatctttgggcctaataccttggaacaagcaaaggggtcggacccctaaggcggcagtgctccactccatcaagcgatgcacgacgtcaatggaagactccgccggccaggaggtctgcgccgttcttggcattggggacaacatcaagggcctcttggccacgctgtcgcgcgttgacaccatcatctcctatgattcgtcccctcgctcaacctgcatcctatcataccctatcccgtgccaagtccctgattcacggtggctgtgtggtagtcggtaacgctgcatatgaacctgggcgacatcaagtgcgaggtgttctgcaaccaggtgccccgcacggcagagaacttcttggccctctacgctagcggctactacgacagcactgtgttccaccgcaacatcaaggcttcatggtataaggcggcgaccccatcggttccggcaatgcagggcctccatctgggcaccaagttcgccgacgagttcagggagtcccaaggtagcacactatgcagtgcagggcctaacagcggacccaacgtcaacggcagccggttcttcatcacctacgccaagcagccgttctgaaaaaaaaattgaacagagtcacccaagaatgtgcatgtctggaatgacagcttcagattaacgacaaccacaattttccaattgtgtggttttgatggagtcatgtatgggtaaccaggagaccatctgaataaatccgagaactacgactcattatattaagaagataggaaaaaaaggcttgagaattacgcctcatgattcatcgcatttttcttgatcgttgttgcttcaaggataacagtcatactcgagagaaatggtgaaatgaaatcattggacggctaagaacagcgcgccgatcggtgtgcaagaaaggctttctcaatgatgaaaactgcgtctgtaaacccctctatcaatcgcatcagcgcaccagctcacggaaagaagctcaagaacatggtgcctccttttttttctctaaaacttctgaaagttcctttaatccatgttttagctcttatcgcgtggtagaactagcgttgcagacgacaaataccacctttcatccatgacataaggcaaaggttagtccgcgcatagtttaatttgcaggggacgataacacttgtattagatgatgcaagttgcttgtcttacattttgaggtaggggaagaacacttttggtgagacaggaactggtctagagttatccctccgaaaaatcttgcagttcaaaatctgatctcttagtttttgccggtttcttcttcacatctgttccttttcttagtgatgtgtttagcttcctctgtactgctttgtatggaatccggttgaatattgggtcaggcttgtgcagtgcatcagaaaaaactctttttattttctggatttggcatagcatctcccagtgcctagtgccgggaaaccatgactgatgtctccagaatccagcatatgttctctcaactccactttattagggccagttcggtaactccattttcccaaactagtctttagtgtagactacgttactttgtggttttggttggtctagccataaggacatgtacaatggtaattaatgtagaggctcttaaggtgtttaaaaagttatttgcaaaaaaatcgtagagtcatctctctgtgaagagacgcag

SEQ ID NO: 8164 - DNA, 2371 bp, Zea Mays
tttgcatacacaccgctacgcccccggctccaaccctacccccctccgcctcctcgccggcgcgctctaccccgcctcactccccatcagtgtctctcatcggcggctctccgggcttcacgttggtccggggtacctctcgtgcgatccgcgcgcaatggagcaagatcaaagcccagccgtcgacagcgcggattctggcgccgcggcttttgattttgcgactggcaatgcacctagctcggctgtgaccagcggaagcgccgtggcccctgacggtggggctcaggcagctgatacttctgcctaccaggccgagcacacggagttgaatgggacgactggcgatatgtctaattaccaatctgcaggagctgcagagaatggcacagccgtcaccgagataggcgagccggttcctgagccatcctacgaggaagctgtgctttcagcagaagaggctagattgtggagtgttgttactgcaaattgcttagatttcaatgcctggaccacacttattgaggagacggagaaaaatgctgagaacgatattttgaagatacggaaagtgtacgattcatttcttacggaattccctctttgctttgggtactggaagaaatatgctgatcatgaagcgagacttgatggtgtcaataaagttattgaggtgtatgagcgagcagttcttgcagttacttattcagtggacatttggtataactattgtcaattcgcaatttcaacatatgatgacccagatatcgtccgaagactgtttgaacgtggcttggcatacgttggaactgattatcgctccaatattttgtgggatgagtatattaagtatgaagagtcactggaggcatggagtcacctcgctgttatatatacaagagtattggaacatcccatccagcagcttgatcgctattttaattgcctcaaggaattggcttcaaagcacagtttttcagaaatacttactgcggaagaagcctcggtgtatgttgtcacgtctgagaccagtgctcaagcgcctgatggtgacacacatcctgatgatatcgataaggctggtcaaccagaactttcatctttggcagatgcagaaaaccttgcaaagtatgtctccatgagggaagagatgtacaagaaggctaaagagtacgaatctgagatcattggttttgagctagctattagaaggccatattttcatgtcaagcctcttgacaatccagagcttgaaaattggcatagctaccttgactttatcgagaaggaagaagacattaataaggttatcaaattgtatgaaaggtgtgtgattgcatgtgctagttattcagaattctggatccgctatgtgcaatgtatggaggataaagggagtctagacctagcaaacaatgccctggctcgtgctactcatgtgtttgtcaagaagcagccggagatccatctatttagtgctcgctttaaggagcttaatggggatatttctggagcacgtgcagaatatcagcatctttactcagatttatgtcctggctttctagaggccatcgtgaagcattctaatatggaacaccgactgggagataaagaattatcttgttcagtttatgaaaaggccatcgctgctgagaagggaaaggaacagagccagctcttgccgacgttgcttattcagtactcccgtttcttatttttggccatccgagatttggagaaggcaagagaaatattaactgtgctgcatgagcagttaaatgctgtcattcatctagagtcaatttttccatgcgaaaagcgtattgattttttagactcacttgtggagaagtttgttacacctgaatcatctcagggagaggtggcaagtctagttgacaaagaggaaatatcttccatatttttagagtttttggatctctttggggatgcaaagtcaatcaagaaggctttaactcggcatacaactcttttttcatgtaagagaagcattctgccatcaaagaaacggaaagcagatgacactgttgtctcagacagggacaaatttgctaaaactgtggttactcagtcagccacgggaactgatccaaatgcttccaatcctcctgtttggcctgcaacttctgaagcatctgggcaacaatggggagcttcttatgcacagcaggctgcatatcctgcatatggaacttacgactacagccatcaaatgccccagcctgctcctcaagcagctgcctatggtgcttatcctccaacatactctgcacagtccagtttatctactggtattcagttacgaaatcaggaattgggacttagggtatcaatttgagtttaaatggat

SEQ ID NO: 8165 - DNA, 2649 bp, Zea Mays
gcctgaagcaccctcactttccccactccggagctgcacgggcacgcacgcagtttatccaacgccactgggcctcaacaacaacaatctcccaacgccgccgcttccgccgcatcaagcgctagaactaggaacccctcccaaaggatctcaagaagacaaggacaccgtcgagtcgccgccagtcgctcgatggggtgcgggcagtcaaagatcgatcaagaggaggcggtgtttcgatgccgggagcggaagcggctgatggctgacgccgtggcctcgcggaacggttttgccgccgcccacactggctacactgtccgcctgaagagcaccggcggcgcgctatccgatttcgcccaaggcgaggcgccggaccctagcctggtgtcctcccatacccaccacgctccggctgtggcgacgtcatctgtctcgactccgccaggcccctccgcagcttccgtcaacagcccctccccgccgccgccgccattcgccgacttctctcattctagcctccaaagatcctcatccacccccaacattcctatgccggagccgagggccgcagccaaaaaccgccctcctgccgatgcttctatccgagaggaggatgaggatgaggatgaggaggaacaggatggacatatcaagatcgatagcgatgacgacagtgacgacgacagtgacgaagacgacgatcaccatgagcatgacgatgttagtgtggatgacatggtgcatggacaacaatcaaagcggattttgatgagtagtgtgggatcttctccagtaacaccacctccgcctccaaggttgaaccacaccccaccaacgcttgccacagcaacgccaccgcccccggtgctggagtcacagatggctacctgggactacatctttggcccaactcccaccccaccacccaccctagagcagcctgctgctgatactttgtggatggaaaggcgtgataaggagccagtggctgaggtgaaggcacctgtggcaaaaacagttgttagtaagccagctgctactgaggaaaggccaccagagacggccgtagagaaggataaagcaattgaggagatgatggctaatctaccgccatcaaaacctattgtgaggaagccacccaaagcacctggcccatcacaagaagcagcacactaccagcatgcctcttcgatgggtgcagttgaaattcggaaggggaaggtaatggtggcatcaggaactgccagcttgctacagattgttacacggcttgatgataactttcttagagcttcagagagtgcgcatgatgtgtcaaaaaaactggaggccacccggatgcattatcactccaaccatgctgacagccgaggacatatcgaccactctacaaaaattatgcacgttatcacatggaaccgctccttcaagaacttacctgaccatgaggacctgaacgataattttgagattgatgatagatttgaaactcatgctgcagttctagatagaatgcttgcttgggagaaaaaactgtatgacgaagtgaaggctggggagcttatgaaaaccgattatcagaagaaggtgtctctattgcagaagcaaaagaaacggggtgttaaacttgaaaccttggagaagacaaaagctgctgttagccaattgcacacaagaatggccaagatgtggagttctatgtaccgccatcatagaagtcagttcctgatcatttctggaataagaggtttcgagattcctcctattccaagggagacaactgattctcattacatccagacttgtgagctacgtgacattgttagggagtggcatacgcagtttgagaaattgatggacaatcagaaagcatacatcagagcactcaatgcatggctgaagctcaatctcatcccaattgagagcaacataaaggagaaggtctcctcccctccaaggctggtggatccacccatcaagcacctgctgcatgcctggcatgacgagctcgaaaggcttccgattgagcttgcaaaaactgccatcaaaacctttgctgaagtcataagcactatcgtgcatcttcaggaagaggaagtaaacctaaggaggcggtgtgatgaaactcgtagggatctgaaccgaaagaaggcacagtttgaggactggcatcaaaagtacttggagagacagacagcagaaactcaaaacatagatcctgtcgaggataggaaacgcaccatcgaggaactagagattcggctgagagaggaggaggggcaccatcttaggcatgccaggcaggtgcgggagaaatcacttgcaaacctccggacacacctgccagaacttttcaggaacatgtccgattttgcttacttttgcaaagacatgtacaacaatcttagaaaaactgctgcgctgtccaaagatgaagtctaaggctgatgatatttgtgcgtgtgtatgtatactcgacaagcagtagaatgtttgctggtaacttgtcctgatgccgtctagaatacataatagtcggcattaattatgtttgtaaattggaatggacattccggactccccattgtttatttccatgctatgtactgcattggtgcgtggataaaaatctttgaattgctctaa

SEQ ID NO: 8166 - DNA, 1433 bp, Zea Mays
atattttctatgttttgttagcgattgatcttttttacatggtcaagttaagatgacattcatcagcgaattttcccaccgctcagcagtgacctcgttcccgtcctcctcgcatccctctcgtccgccgccgcctggctcgcgccgccgacagtttctcggcccagatcgagacacgcccgccatcctacaccaggtgccgaggccttcgccgatcaaagagatcccagacagcagatccgtccgtgccctgctcctcgaaccatggggacctctgcccaggaatcgcctctctggaagcgtatcgacgatgccgagtactatctagtcagtggatcatttgaccaggcggtgttgactgctttatccgtcgccgatgaaatacacatggcttctttggagagcgctagcgaccaggatgagctcctggagatgcttgaatcggctgggatggtgcttgtgcaggcactaaaagaactcaggagggcctctgagatgtttgctcagcttaagatgatgtttggttcagtgccatcagtgcctgctagagttttccttacaggagctaccattcaaatggcagaaggatctatatctgacctcagaccaatctttgaggagtaccttgccaattggagatatacggatgatgaggacctactaaaaaagcttcatgcagtgcaattagctgcaaataaaaaactgtccactgttgaaggggtaaaacaaacagcagagaggaacctttctacttctacaaatgactcaacaccatcgccacatgaggatcctccaaagatagttcctgcgtgcgatgggctcaaaaaggtcctgctgaagtctgctcaacaagctcagcatgttgcaaatcattttgatccgtttttctggtggtttcattcaattcgcctgaagtttgggaaaatacatattgttctacccagtggtaagttagtgtttctgttctctctgctgttctcagccatgtacgtgctgcgaaggaaaactgctggcttgaagagggctgtgttccagcaagctgcttccctgcgacgagcattttttgatgcacttcagcttgcgttctctgtccagatgaaccctctagctgctgttcaacaagtgccacaagcccctcgaggaagctggtgattggtgatgttctttatgccttgatctatgtaacattataactcaactgaaattcaacaggcaaccagatttcatgtcgcggaaaatgtggctgtgtaaatactagtgtgcttaatgcagcatgaatgtgatgatgacctgggtttttttgtgtccattctcacctgaagcatattggactggggattatttacaagagctatggcttttgaattggggaaacggattaagtgcaaccaaaccaattagtgtaaccgatgaaaccaagacataaggatgga

SEQ ID NO: 8167 - DNA, 1916 bp, Zea Mays
cgcgtcagcagcaactagcaaggccgccaagcggcccaggagtccaggacccaggccagctccaagcgaacagcctacgtacggctctatacctctcgccctctgagtctcgcgcggccatccgggctccggcttccagcatctaccaggcgtccttagaatacggtgcagcgagcagcaagtcgccgagcagccgagccaccgccgaacacagggcgccgccgagcagccgagccgccgccgagcgccgagtcttctctgagtgacttcggtacagacgacaaactttctccacacataccgcgccactccgccactcactgtgctgacggatggggtggtgctccccgtccacttcccggcagcttctctccacgacctcactcttcaccttcggcgcgggtctccttaccttcggcatccacctctcctacgtccacatcgagccccagcgcgctcgcacgctcgctcgggaccaattcgtccgtgactacctccgcaagaagcacgacaagtagcccgccttctgcggtccccaggtgattgcttggtagtcggagacgatggccctggtcccatcgaggtccgacagcgaggccttgatcccggaggtggagatgaatgccggcgccgaccagaccgcaacaacggcgcgggtcaccgtcgttcaggcgtcgtccgtgttctacgacacccctgcgactctcgataaagcggagaaattggtagcagaagcagctgggtatggttcacagttggttttgtttccggaagtctttgttggtggctacccacatggatctacctttggactggttgtcggcaatcgcactgccaagggaaaggaagactttcagaagtatcacgcatctgccatagatgtgcctggtccagaagtgtcccgcttatctgcattagctggaaaatataaggtgtttctggtgataggggtggttgagagggcaggatatacactttacaacacggtgctctccttcgatccactgggaaaatacctagggaagcaccgcaaggtcatgcctactgcactagaacgtgtattctgggggtttggagatggatctacaatacctgtctacgatactccgattggaaaaatgggtgctctcatttgctgggaaaacagaatgccacttctcaggacggccatgtatgccaaaggtattgagatatattgtgctcccacggttgattgcatgccaacttggctgtcttctatgacacatatcgcccttgaagggggatgctttgtgctgtcagcgtgccagttctgtcgtagaaagaactaccctccccctcccgagtacacattttgtggcctagaggaagagccatccccggaatccgttgtttgttctggagggagtgtcatcatctcaccattgggaacagtgttggcgggtcccaactacgaaagtgaggcccttctcactgctgacctggaccttggagagattgttcgagccaagtttgattttgacgtggtgggccactactcgcgacctgaggtgctgagtttagtggtgaagagcgatccaaagcccgccgtctctttcatctcagccgctggtagggacgatgactatgtgcagacctaatgacaaacatatctttggtctttagcttccttatacggcaatcgcatgcatctgtataattgtgggtttccggaacgttgcacgttccgtcagaataataataaactgttatgtacaataaaatagtaacaataaggctttgttcggttattcccattatacatggattggacgagattggaaaaaatttaaaagaagtttgacttgtttgagatttaaactcacccaatctcactcaatctatatggattgagagctaactaaacaacctaatggatatctatatagattgagagc

SEQ ID NO: 8168 - DNA, 1996 bp, Zea Mays
cgcgtcagcagcaactagcaaggccgccaagcggcccaggagtccaggacccaggccagctccaagcgaacagcctacgtacggctctatacctctcgccctctgagtctcgcgcggccatccgggctccggcttccagcatctaccaggcgtccttagaatacggtgcagcgagcagcaagtcgccgagcagccgagccaccgccgaacacagggcgccgccgagcagccgagccgccgccgagcgccgagtcttctctgtgtctatggcgtctccatgcaagtacacactacactggcaccgcgattgacagtcagaactttgattgcccgtccaatagagtgacttcggtacagacgacaaactttctccacacataccgcgccactccgccactcactgtgctgacggatggggtggtgctccccgtccacttcccggcagcttctctccacgacctcactcttcaccttcggcgcgggtctccttaccttcggcatccacctctcctacgtccacatcgagccccagcgcgctcgcacgctcgctcgggaccaattcgtccgtgactacctccgcaagaagcacgacaagtagcccgccttctgcggtccccaggtgattgcttggtagtcggagacgatggccctggtcccatcgaggtccgacagcgaggccttgatcccggaggtggagatgaatgccggcgccgaccagaccgcaacaacggcgcgggtcaccgtcgttcaggcgtcgtccgtgttctacgacacccctgcgactctcgataaagcggagaaattggtagcagaagcagctgggtatggttcacagttggttttgtttccggaagtctttgttggtggctacccacatggatctacctttggactggttgtcggcaatcgcactgccaagggaaaggaagactttcagaagtatcacgcatctgccatagatgtgcctggtccagaagtgtcccgcttatctgcattagctggaaaatataaggtgtttctggtgataggggtggttgagagggcaggatatacactttacaacacggtgctctccttcgatccactgggaaaatacctagggaagcaccgcaaggtcatgcctactgcactagaacgtgtattctgggggtttggagatggatctacaatacctgtctacgatactccgattggaaaaatgggtgctctcatttgctgggaaaacagaatgccacttctcaggacggccatgtatgccaaaggtattgagatatattgtgctcccacggttgattgcatgccaacttggctgtcttctatgacacatatcgcccttgaagggggatgctttgtgctgtcagcgtgccagttctgtcgtagaaagaactaccctccccctcccgagtacacattttgtggcctagaggaagagccatccccggaatccgttgtttgttctggagggagtgtcatcatctcaccattgggaacagtgttggcgggtcccaactacgaaagtgaggcccttctcactgctgacctggaccttggagagattgttcgagccaagtttgattttgacgtggtgggccactactcgcgacctgaggtgctgagtttagtggtgaagagcgatccaaagcccgccgtctctttcatctcagccgctggtagggacgatgactatgtgcagacctaatgacaaacatatctttggtctttagcttccttatacggcaatcgcatgcatctgtataattgtgggtttccggaacgttgcacgttccgtcagaataataataaactgttatgtacaataaaatagtaacaataaggctttgttcggttattcccattatacatggattggacgagattggaaaaaatttaaaagaagtttgacttgtttgagatttaaactcacccaatctcactcaatctatatggattgagagctaactaaacaacctaatggatatctatatagattgagagc

SEQ ID NO: 8169 - DNA, 2011 bp, Zea Mays
cccgaaaagccagaaacgagcggggagaaacgagggaacgacccaccgtcagatcacacgcactgctcacgctcgcacatcgcacgttcatggcacggggagtaactggcgacgccgcgggaagtagcgccgccgacgagcgggggaggggggaggccgcgccgccgcagtctgcaacgtggcagcgggtgcggagggccgggcagggggtggcggcgcacgcgctgttgctctgcttcaccgcgctcctcgcgctcaagctcgacggcgtcctctcactctcctggtgggcgcttttcatccctgtatggttgttccatgctgttgcggctcgatgtctattctcattaccggctccatcacctgaaagttgtcaacgggttccattccattccattgtcgcaacaccgttactagttgcctttgagctgcttctctgtgtttatctagaaggcctcaaccacaatggtcatgtggagcctttcatcatagatttaaagcttgtgttccttccactcttggctttggaaatcattacactggttgacaacttcaggatgtgtggtgctttaatgcctggacatggagaaactataaccgaagaagcaatttgggagaggcttccttacttctgggttgcaatttccatggtatttctactagcggctacttcactcatgcttctcaagttatgtgggtactccatctaatgcacgttttatcccaattcgagctatttttctacccataattttgctgcaagtggctgctgtatcttttgctgtttggagattgttcagcaggcttcttactaaacttaaagatggaactattagtcaagcacatatttctgtgtcttccaaagtcgatgagctatttatgatgatacagtgtggttcaaggctccttcactggtggtctattgatgaagatagcaaagaggaacaggctcacttatgctatgcaaataatattggctatagtaccttttgcagttatccaccagaggtggtaaaagagatgccaaaggaagttcttgtcaaagaggtacagagacttcaactggccttggaagagcaaactgaaatggcaaatcatagccaacagcagtgtgataggctaagaaatgaacggatcttgtgtcgaatttgctttgaaagagacatatgcattgttatgcttccctgccgccatcatgttctctgcgagccatgctctaacaagtgtcagtcatgcccaatttgccgattgaccgttgagggcaggctatttgtttatgatgcagtgatgtcatccaatccatcatgttacgcagtttaaaagtgcacatgttgacagtatttgtagggtacctacttctggtgttgacaaagatggcccacacctgtttcctggcagtgaatgacaggttgtgaaattcttggtatgaaattaggaagaaagctaagaaagtcttctattatcagattgcagcacaaacaaaacaaaagccacgatgcacatccgtctccaatgatatgacacagaggaagacgaagtatatggactcttgctcatatatatgcaagcgtgaataaccacttaaataactgagtttgttctctagccatatatgacatctggccagtttcgattagtttgcaaacgagttctggttaacagttggatggataaccttgcaaacatgtggagcttcaggttgtttagaagttatttggagttcagcaaattggcaatatcccactgttcaactttgatgattccatgaattcacacaactgaggtaccaccttttccagtgatgttcacctgtaacggcttataaatacatctgtacagatgcgataataatgtctatcaattttatctccaaggcataagagcattgagctttctcctagtcatgtgaaacactgagatagcttgagcatatctattgtatgcagtggcggaggatgggcaaaaaataaggtgttgctaatgcaaccacacatgaaaattcacaacataa

SEQ ID NO: 8170 - DNA, 2057 bp, Zea Mays
cccgaaaagccagaaacgagcggggagaaacgagggaacgacccaccgtcagatcacacgcactgctcacgctcgcacatcgcacgttcatggcacggggagtaactggcgacgccgcgggaagtagcgccgccgacgagcgggggaggggggaggccgcgccgccgcagtctgcaacgtggcagcgggtgcggagggccgggcagggggtggcggcgcacgcgctgttgctctgcttcaccgcgctcctcgcgctcaagctcgacggcgtcctctcactctcctggtgggcgcttttcatccctgtatggttgttccatgctgttgcggctcgatgtctattctcattaccggctccatcacctgaaagttgtcaacgggttccattccattccattgtcgcaacaccgttactagttgcctttgagctgcttctctgtgtttatctagaaggcctcaaccacaatggtcatgtggagcctttcatcatagatttaaagcttgtgttccttccactcttggctttggaaatcattacactggttgacaacttcaggatgtgtggtgctttaatgcctggacatggagaaactataaccgaagaagcaatttgggagaggcttccttacttctgggttgcaatttccatggtatttctactagcggctacttcactcatgcttctcaagttatgtggtgatgcagttactctggggtggtgggatttatttattaattttggggtactccatctaatgcacgttttatcccaattcgagctatttttctacccataattttgctgcaagtggctgctgtatcttttgctgtttggagattgttcagcaggcttcttactaaacttaaagatggaactattagtcaagcacatatttctgtgtcttccaaagtcgatgagctatttatgatgatacagtgtggttcaaggctccttcactggtggtctattgatgaagatagcaaagaggaacaggctcacttatgctatgcaaataatattggctatagtaccttttgcagttatccaccagaggtggtaaaagagatgccaaaggaagttcttgtcaaagaggtacagagacttcaactggccttggaagagcaaactgaaatggcaaatcatagccaacagcagtgtgataggctaagaaatgaacggatcttgtgtcgaatttgctttgaaagagacatatgcattgttatgcttccctgccgccatcatgttctctgcgagccatgctctaacaagtgtcagtcatgcccaatttgccgattgaccgttgagggcaggctatttgtttatgatgcagtgatgtcatccaatccatcatgttacgcagtttaaaagtgcacatgttgacagtatttgtagggtacctacttctggtgttgacaaagatggcccacacctgtttcctggcagtgaatgacaggttgtgaaattcttggtatgaaattaggaagaaagctaagaaagtcttctattatcagattgcagcacaaacaaaacaaaagccacgatgcacatccgtctccaatgatatgacacagaggaagacgaagtatatggactcttgctcatatatatgcaagcgtgaataaccacttaaataactgagtttgttctctagccatatatgacatctggccagtttcgattagtttgcaaacgagttctggttaacagttggatggataaccttgcaaacatgtggagcttcaggttgtttagaagttatttggagttcagcaaattggcaatatcccactgttcaactttgatgattccatgaattcacacaactgaggtaccaccttttccagtgatgttcacctgtaacggcttataaatacatctgtacagatgcgataataatgtctatcaattttatctccaaggcataagagcattgagctttctcctagtcatgtgaaacactgagatagcttgagcatatctattgtatgcagtggcggaggatgggcaaaaaataaggtgttgctaatgcaaccacacatgaaaattcacaacataa

SEQ ID NO: 8171 - DNA, 1677 bp, Zea Mays
ctccatagtccatgccccggtcgctttggcctttggggttaatcccgtgaccagcgaaaacgaggcgaaacgctgatgaccgagataaccggtgactgctttctccgcctccgcttctagaaagaggactgaaggagcgaggcgactgtcgccgcctatattaatacgcgccctcctccaacttctctcctctccactcctttctctcccagctcccaaaattccctctccgtcgccgccgctcccaaaatcccctctccgtcgccgcctctcgccaggtcgtttccaagccccgttgggggcctcgccggcgccggcattggatataacctcgcccgctacctccgtccgaatgcagggccttgatatttaatgggctggaggtggtacatgcatgttcgcagtgacaagaacacattgaaacgttggtttttcattgacaagaggcttgttaaagcatttttggtgcactaaccttttgttgtctgtaattggtttcacaacaagtttcttggggggttgtgtcctgttgatggatttgaagacaggcctcaattcacctgttattgctgaccatctccctacgttagcattgcctgctgctgtcatgactttcacaacacctactagctttccctctccggggctttgcttgaacactacaaagaagatacctctgcctggtaagattgaagaagttcgtgctgctggatggcttgatctcatgaaggcctcatcacctacccgcaaaaggcagatcaaggatgtcatctgtgatgctcaatctgatcttgatttgcaatactgcaactggacagtgaactatccttctgctttgatctcatttgaggcaattagtgatcttgctgggagtaaaaggttggcattgtttcttgactatgacggaacactttcaccgattgtggacaatcctgaaaatgcattaatgtctgatgagtgaggcatgcggcatcacttttcccaactgcaatcattagcggaagatctcgtgataaggtttttgactttgtgaagctaaatgaattgtactacgctggaagccatggaatggacataatgggccctgttaggaagactactgactccaatggcgtggaatgtattcggtcaactgatggtaaagaagtcaacctgttccaacctgctagtgagtttttacctatgatcactgaggtgtatgaaaaacttggtgagagtgttaaggacattgatggtgcaaggatggaagacaacaagttctgtgtatctgtgcattaccgtaatgtggcggaagatgactataaaaaggttttccatcgtgtaactgctgttttggaaggttacccttgcctaagactaacccatgggaggaaggtttttgaggtccgtcctgttattgattggaacaaaggtaaagctgtggagtttttacttgaatcgcttgggctcagcgagagtgaagatgttctccctatctatgttggagatgacagaacagatgaagatgcattcaaagttctgaaggcaagcaaccgtggctttggaatattggtgtcgtctatacccaaagagagtgacgccttctactccttgagggatccagctgaggtaactcatagcactgtggcaaccacaacgaacttttgctttgaatatttcttgggtcaaaaggaaaac

SEQ ID NO: 8172 - DNA, 1029 bp, Zea Mays
accaaaattccaaaaaaccaatgggctgaaagagaccctgaactatgcggcgcaatatttcgcgtagattcggtccagtatcagcccatctatggcggatgaaggaccgcgaatcggagaaaggccagaacagacgagagcaggaggacggagagcgccggcgaggaggcatggagccagacaaggccggggaggcagcgaaggagccgacggaaacggaggctggagactccgtggatccccgcgaactagtgtccagcgacgacgagatcgactactccgtcgagcctgatttctacgaccccgacctagatgacgtcgatgagcggtgggtgagcagacagaggaaaggccgcacatctgacgccgtgcttagctgccccgcctgtttcactaccctgtgcttggattgccagaggcatgagaagtacgtaaaccagtaccgtgcgatgttcgttcgcaactgcaagatcaagactgaccaggtcctgcgagagggcaagagcaagaggaagaaacgcagaggaggaagggctggtgatccagctgccgcatctgaaggcgaaagcaaggggcagtcctaccaccccgtctgctgcgaggtctgctcaaccgagcatgatgcggttttgaaagggggtctccgcgagctctagctgtgatggctctttgttggtggccagcctgatctttgtcctgattggacgtgttcatgcttgctctagcagcaatgaatgattgttggatgaggtgtcaggtgtgtatgatgctgctaaacatatcccacatgggaacaaagctagcctgggcctggccgtgcctccagatcccaagacgagacaatggcgcgtgcgctctgattatgggtagattgatttgcctgccaattcaatacccggctagtcccggccccggcaaagtcttggaggtcctgctgcttgggttctgtttgaattgattggaaataagttgctactagctagatagatagcagctaaaaatggcccgtatagctaattcaaacagctc

SEQ ID NO: 8173 - DNA, 2736 bp, Zea Mays
ctcatcaacccgctgggtgccagtgtggtaccggtacccttccctcactctcccggttctttcccggcgctggattcagatccgcacgcttctccatttccgtaaagctccgtgcctcctcctcgtctcttcactccaaatccaccgaggccatcgcctgggccccggggaaacccctcgcgctcgtggccctgtgagcagccgcagccatggcgcagccgctcgtcgtgaagaaagacgacgatctcgacgaggaagagtactactcgccattcctgggcatagagaagggcgccgtgctgcaggaggcccgagtcttccatgaccctcagctcgacgcgcggcgatgctgccaggttatcaccaagctcctgtacctgctcaaccagggtgatacctttaccaaggttgaggctacagaggtcttctttgcaacgaccaagctgttccagtctaaagatgcgggccttaggaggatggtgtacctcatgatcaaggaactctcaccttcagccgatgaggtcatcatagtaacaagctctttgatgaaggacatgaatagcaaaactgatatgtaccgtgcaaatgctattagagttctttgtcgtattattgactcaacccttctcacccaaatcgagaggtatttgaagcaagccattgttgacaagaatcctgttgttgccagtgcggcccttgttagtggcatctacttgcttcaaacgagtccggaagttgtaaaaagatggagcaatgaagttcaagaggctgtgcagtcaagagctgctcttgtgcaatttcatgcccttgctcttcttcaccaaattagacaaaatgatcggttggctgtcagcaagcttgtcactagcttgaccaggggttcagttcgctctccgttggcccagtgcctacttattcgctacactagccaggtgattagagagtctggtgtgtaccaaggtggagatcgtcctttctttgatttccttgagtcctgtctccggaataaagcagaaatggtcatacttgaggctgcaagagcaattacagaactgaatggtgtcacaagccgagagcttacacctgcaattactgtgctgcagttgttcttaagttcatccaaacctgttctcagatttgcagctgttcgcacacttaacaaggttgcatcaactcatcctttggctgtcacaaattgtaacatagacatggagagcttaatctctgatcagaacaggagcgttgcaacccttgcaattacaacactgttgaagacaggcaatgagtcaagtgttgatcgtttaatgaaacagatgaccaactttatgtcagacatagctgatgagtttaagattgttgttgttgaagcaataagatccctgtgcttgaagttccctctgaaatatcgctcattgatgaacttcttgagtaatattctacgggaagagggaggattcgagtacaagaaagccatagttgattcaattattatactcattagagatattcctgatgcgaaggaaagcggtttatttcacttatgcgaattcatagaagactgtgaattcacctatttgtccactcagatacttcactttttgggaaatgaaggccccaaaacatcagatcccagtaaatacatacgctatatatacaatagggtgatacttgaaaatgctacagttcgagctagtgcagtcagcacattggcaaaatttggtgccttggttgactcactcaagcctcgcatatttgtgctcctgagacgctgcctgtttgatggagatgacgaggtgcgcgatagagcgaccctttacctcaaattgttaggtggggaagctacagtgggtgagacagagaaggatgtgaatgaatttctcttcggctcacttgatgttccattagtaaacttggagacgagtctgcggaattatgaaccttcggatgtaccttttgatatttcatctgtttcgaaggaaacaaaatcccaaccccttgcggagaaaaagtctacaggcaagaaatcagcaggtccagcatctgctgtcagtggctctgtttctacagttgatgcttcgtatgagaagcttctttcgtccattccggaattcgctgattttggaaagctttttaagtcatctgcacctgtagaattgactgaagctgagaccgaatactcagtgaatgttgtgaagcatatttttgatcgacatgttgtgctccaatacaactgtaccaatacaattcctgaacaattgcttgaacaggttattgttttggttgatgcttctgaggctgacgaatttttagaagttgcttcaaagcctttagaatcattaccatatgattctcctgggcagacctttgtggcttttgaaaatccagaaggtgtcattgccaccggcaagttctcaaatatcctgaaattctttgttaaggaggttgatccatccacgggtgaagctgaagatgatggtgtcgaggatgagtaccagcttgaagatcttgaaatcgtttctgctgattatatgttgaaggtgggagtatctaacttccgaaatgcctgggaaaacatggatccagagactgagcgagttgacgagtatgggcttggagtaagggagagtttggctgaggctgtaagtgctgttataagcatccttggcatgcagccttgtgaggaatgagcattggttttcaccttaaatgatggcttatttcaccattggcttgtag

SEQ ID NO: 8174 - DNA, 2360 bp, Zea Mays
atggtcctgccttgtgaagcagggaacaagaaagaaagaaagatgcacgttgtgcagtgtgaccctagcaaaggagagatgcgatacccccggccggaccagcgatcgccattcaaagctgccagtgccacccgccatcccctgctcccactgccactgccagcacataagccctaccagtaccagaggctaccagcagagagagaaggcgagcgcgcgggcagaacccgcgcagaaaagcaaccacctccctccgcctcccccgcagggctgggccgcaccgcatcaccctcgccctcgcgagatccccaattcgccgcaggttcctcgccggagcgagcggcccccattgtggcgtggggctgccggttccgcggccaacagtccccctcctccctgctgctggagctgccttgagtcccgcgactcgactcgagctctgctgccgtggaggcggccaaggccaaggattcaagggtattttatagatgacgaaggcagcaactatttatgggagcaagacacagagcgatgccttgcggccagggccattgcgtccagcaaatattatcagaaataaatttcccacatacaagaatggttcaaatggtatagtaatcaagctggctgatggtcccgaaataccacctctcaaggagatagttgcaaaggagactgcagatctacttgatcgtcgtcagcgtctctctgtccgtgaacttgcgatgaagtttgagaagggtctcagcactgccacattgttgtcgaatgaggttaaatggagacaagtagctttgatggagcgggatatccttttgaagaatctaaagagtgtattagagtcactgagaggtcaggtgacaggcaaaactaaggatgaaatcgaggagtctatatctatggtggagatcctcacggttcagctctccaaaagagaagctgagttggttcaacaaaaagaagaggtcacaaaattagcaaaatcattaaagcaggcttctgaagatgcaaagagaattgttgaagaagaaagagctaatgctcatacagaaatagaaactgctaagggtgctgtccaaagagttcagcaagcagttcaggagcatgagaagatgtcccaaaatactgggaagcaaaagcaagacatggaagaactaaagaaagaagttagggaagctcggaggatcaaaatgttgcatcagccaagcaaggcaatggatctggaaaatgaaatacgaattttacgtaacacatttgctgagaagtctaaggattgtgttagtcttttgaaagagttggaaacgcataaaaggttaaaagaaaatggtaccatcccttcattcgatctggagggtctccaatgcttaggatcaatgctacgtatagttggtctgagtggtactcacatggatctgtcaaatatttcaatccagtggttccgtatacatccaaaagaaagcaacaaagagattatttcaggtgccacaagaccagtatatgctctagagccacatgacgtaggacgctatttgcaagctgaaatcgacgtaggcggcgaaatcgcagtagcaaagactgctgggccagtagaccctgatgctgggttggttgattatgtggagacgctcgtaaggaaacctgaaactgaattcaatgttgttgtgcttcaatccaatggcgtcgatcagccaaaagagtcggttcatgtactaaatgtcgggaggctgcggatgaggcttactaaagggaagtcggtagtcgccaaggaattctattcctcatcgatgcagttatgtggtgtgagaggcggaggcgaagcagcctcgcaggcgatgttttggcgacccagaaacgacctcagcttggtgctagccttcgagagcactcgagaacgcaacgcagccatcatgctcgctcggcgtttcgctgtagattgcaacatcatccttgctgggccaggcgacaaaactccctggtgaacgaagatggcacctgtgctctgccgataccagataccacccagcacccaccactcctgactgtcctgctcttcctcgcgtcgtaggttcctgaaagaaggcgccgtccgcaccattttaaccgcctgggcgccgcctttctatgtcactgtgctatgttttcccagtccgcgagggttgtaatctgttgttgctgggagatgcgacagcaatgtaagctacaagtctaactgtgtttgacatatgtttaggcctcgttcggttggcctggaacggccctattccatccggatatatttggtcaggattgaaaccggaaacaactaataatggttgttcggttatgtctaactcataataaaaccagattgaaaacaggtc

SEQ ID NO: 8175 - DNA, 1690 bp, Zea Mays
gtcttctccctctcccctagatccttcgacgccgccctccctcagctcattccctgccgccgctcatctgctggccttgtctcactgccgcccaaccattttcctccctcaagctagcacgcagcctcaactcctctcccacctcacgcacgtctctcccagccgttccttcatttctctggctcgtccttctccatggggtcgcgccctgctgcgccgtcgtgctggtcgccggctgagcccccttcagtgcctgacgccgcatctccctgccacctcccatggacgccagccctcagccatggatgccgaaccccctctctttagtgcctttctttacagcccctgcgtcgccgtgcgtgtaaggtgtttgtataaatgctcaagaggagtgccgtgtcatggccaactcttttggcgtcgtcggatgtttgatgttttgtgcatcccgtctacgacgccgtcgaccatcggtgaggattcgttcttgctttgtcatttcatcgatcgacgtctatttgctaatatgaattgtgtttatgtgcctatgtgtgttgaggagcgaaatccgtgaaatctaggtgaagaagagatggagcacgtcgtcgtcatggttgcagctttgcttttgtcgtcgtggagcctccaccagcgccgtgtagcattcaggaacaatggaaccaaaatacaggacattttcctacttcacgtctggatgccatccaattaatatcttctctacgatattgcaatggaagggactgctcttatgtgttattggtgctattccgcttgtacggccaacgaaataggtcctactacacaagggaaatagaggataccatactcttagcttcacagaagcctgaagtgtatgatgacattgctcgcgatacgtgctgcaaatttgggatagatagacctcaagttgtacctgtgcaaggactacctcaggtttgaaccatacttatggaatgcatgtaagaggtttgtgttggagcaccgggctggcgagaaccgtgctccaatcatttcagatgatagccccaacaaagatatcaacaatgccttctataatatcgtgatgatgaaaaagtcaaaggtcagttttgtggaaaacatacaatatgttggtatcttcaatagtataagatcatgtaccacacgtcgacatcaatattgactaatttctttcaataggatgggagaatgttgaatgcttcttcagatactatttcttggtctgtcaaatctgcttgacccaaatgcaagttttgttcaaatgtggcaaaaaatgattgtctcaccaattgtcagcacgttttcttccagcacgtttgcttccagcaaagttgtcagttcttatgattagatgaaaaatctagaattattctatcatttacacatccatatgacctttgtgatatgtgatgatgtgaggtattcaaccgtgtctaactactaattattgccttcttctatttgttgtataggaaaagatgaaatggaactcaaattttagtggtcgcacaagtgtggagccagttgatgaccaagtttttcaattagtattttagtttgaatttagagtacacatatgtatgagttatttgacaatgcttgtttatgagagattgaatgatacctatctatattatattaattataatgttattaaataaatgtgtgt

SEQ ID NO: 8176 - DNA, 4136 bp, Zea Mays
gcttgtccgttagttgctgctcccagttcagtaggccctctccataccacagcgcagcgtcagagatcccactacttcttgtttctagtctagtataaataaatgtgcatccaagtcactgatcaggagcaccaagccagctagcaactcaaaggaggaagactagaagatatatagccttctccttgtgtgacactcataaataaactgttagcagcttgcgagcactgcaagatctttctgctggcatctgaatagtcagctgctggcatctatccgggcacctctcgaccagccagaggcagatacctgatcccaaactagctggccaacatggcgaacgatgaccctgtggacgacgaaaaccccagatccaacaccactaataacagcatcaatgacaagttggctgaagtgttcgacatggtctcagtccacaaacatcagtataaaatgccgacgttcgccttccacaccaacaagacgatcaccgaagctttacatcggcctctactgcgagcacaagctagcatggcctctccaccagaggttgactcgtatgtctgttttctggtttctcataccagaattaacgttcttgaccttgtaaggcctcttcttgaccttgatcagtcccgatattgccgtgtttgccagccttctgcatccacctactttctgttcccttctatccctcctgagctaattgttgctcctatgtaatccgtgtttattatttcggtaccatgatgatgaaattagttttaatttattgtaagactagttcagttaatgttttcaccctgtggatgctctgcaatacatgaacatacatatgcaaacactcattcatccatttattttttattaaacaccatcaagtttttaaaaagagagacatgtacagtacaatcacccaaggacaattttagcaactagccccaatacattttagataattgaaaaagggtctctagctcagatgaccttatcacaactcaacgcatcgaagcaaaagagtttttgaagacaaagataatcgaagtcctgattctaaataatgaaagtcatgcataggatgcaaagagttgcattgttgtgatctctagagcctagcaaggcccaaccatgagcacttgttgaccttcacacgattgcaattgccaactaggcatagaaccgactctagtgggtatgtctgaatataaccccccaaagatatttgtgacgataaacaaagcagcccctacttttgatttgtgtctcctacttgttagtactctgtttttaggataactgtaatatataggattccaaaatcatgacccctatttttattggactcatttggtagtcacatatatttcatttatttttattcccatattctattttaggataattgtaatatataggatggaggacatggaggctatgctcgggataagggctagtagcgagacttagccagggaaggacggtgtcgtgtggatggcaagttcatggtaggataatcaattggaaggttgaactcaaatggatggccacctaggaacacctaagcgttggaggcgaggatgatgacaacaaatgccacatcccaatgttcattccaacttgaatttttcaataacatctctttgaagcttgcaatctcaccaatttcttcctgaaaatctaactaaaatactcgatacattacactatatgtttgtctcactagctttgttgtttgaaggttctttgtcatttgtagtttgactctcagtgcccatctatttggtaggttttggtcatgtttatttagcaggtcttggtcaggtgaagcctttttggaccttcaccactatggaacccgatgccttagagttggacatgtctttgtctaataaaggcctttggacctttgtcattatgtaacttgatgcttgagagttagatagttttcatcgagcgaaggttttgtacatgcgaacacaaggttgacctgacccttgtggttcgtgttgatgatgagtgattgtcaatgggtagtgtcttaggtcgagtcaaggactgacccataagattatgtatgtgcaaccatgtcggtcggcttctggtatgcaagtgtggagcacagggatggtggtcgatggctaaggtaaaggtcatgtgggcttgtgctgatggacagggagcggtgaagaacgagtgatgggtcttggctcctgggacacacacttgcgcgaggatgtggcaaagcagtccatgtttcttacgcgatcgaggactagcagcacacgtgtctaggatgtggagtacgtgcacgtggtgcgatacttatgtcggtttagtggttgagcctcaaaaccacccaacactacagacatcgagtttttaactgggtttagcctcaaacccggtggtggcagtttcggtggaaactggaggtaacacatggcatgatcatggagggtgcatcaaggcaaagcaacctcgtgtgaaggatatggccgtcagatgaaaactccaggagttggtccattttgccccggtggagtggataggctctatgtaaataggggtagtttaggaaatggaaataaccctatataaatagagtggagggctggttagttcaaaatctctttcgatgccatttgttttgatcacttgttttaaaactcctagttttcctctctaggtagtcaccagtttagctgggagatccacaacaattttgttctatcaactatgcctataatctgcaacgattaatccgaggaagggtcgctagtttggcccacatgttttggttggcttcaatctcagttttgttcccttgctgaatttttgaagtcgtgtgttcttgagttcttcccttcccttctattgaggatttgtggagaaccttcgagttcttgtgatatgggtgttgttagggattgatttgttaggagatagactctttggatcactgcgtactcccacacagtgcagttcttggtcgtgatttgagttcattcctctttcagctcatttttagaaaacctgaacaacacccccatcactctcggtattttgaatccgcgcatggatttttgagttgctcatgttcaaacttcaccagtagacatatttccctctgcgcaaactgtctataaaatttaaggacattctttaaagttttgcctccacggcactgccgggcaaagattttttatccttttcttcttaaacttcatggttcaccttttctccctcgtatcttgctgcctgcaaaatttgagagtgttctggaaaaattttgtagttcggcactgctgcacctacgagcggcactactgctcgacgtttttctcagactttgacctagaacttttactggacctttgggttctctttcgaatttcatgtaaaagtttgggttcaaatcaagtctttttgtccctattgagctctgattgtcctctggaacttggtaggagcagtcaatcgattcatggttgatctgttcttttgtgaagtgtttttgttgtccctggaggttggattgggtcaaggaatcaagtaacaagtactgttctcgcagttctagaattttgtagtggctctcattcaaccctctctggtcacctcactggtcctttagtacatttgttaagcaacttagtgtctgagagttgaacaagtcttcatcgtgtgacaaattttggatctttgtcgatggtggcaccgatgagtacgatagaagaagtaaggaagtcactagacaagtatattgatgtaataatatggggatgataattgatagcactattgaaacacgaagatagcgtgatggttcaatttcttctacatgcatttgcaatggttggcgaggaattgatgcaaaactaaattcatttgttgtgtaatcatccgtgaggagtcgaagacatgatgacaccaattgtcatttgatagttagggatatagacaagtgcacccatttaagtttggtaagtgttggggaccttcggcgtccgaaggtcctcaaaaacaggatttaacagtatttctgtagtacaatgtgtgaacaggtaccctcggactaaagtcggcattgcagtagaccggaataatacgaagcttgatacagagccgaaggtgtt

SEQ ID NO: 8177 - DNA, 1443 bp, Zea Mays
ttcagcttggccgcacagctcactcgtagctcagctgggatccatgtgggtttcagtgcacgcaacagccagaaaaaaaggttgttggatgcgtcgtcctccctgccctgggcgctgctgcctttgcctcattgtctgcgcgcctaaacgtactagctaccccgcctggccctgcctgcctttgtggaatcttgctgctggagcaactgcaaaggccaaaggcagaaagagagaggatttttcgaaaggtcagcagcagaatatgcaggcagagttgcgtggagtgttgagcgaggaagatgctgcggctgctggcgcagtcaatggcttcatgatggccgttccggtcccggccggcccgcatctctcatctccgtgccagtagcgatcactgattacgcgatcatctcctctccggatacttggcatatcaacagaacattttgatactggcactgaagggcagggaggcagcaggggggtcgtcggagctgatcaacctgaacaaggagacggaggcgtcctgcagcaaccgcagcgaggacagctccgagatcaacctcgacatctcgcgcacgccgccggcgtccgagggccccatggaccatccgccgccgccgccgccgcaccacgccgccggcggcggcttgatccctttctacccttccgtcggcggccgacatagtattgccgccggcgtgggtatggaccaactcctgcacgcctccaccccgaagctggagcaacacggtgacggctgcgccgtcgccgtccaggccgcggagaccgccggcagcttcggcaacctcctgtgtggcgtcgacgagacgccgccgttctggccgtgggccgaccaccaccacttccattgatcgatcatcgtccatcacaaacgatggcgatcgacactgtagtgagtagaaatatcggaggaaaggaatttatttggacaattctggcgagtgcatgcagcaagggaggagagaaaaaaaaggtcgtgtactcgtgtgtgatatctggtccatattggcggggtaggcgggtagctgcctgcctagctggtcatgcatggtgggaactgggaaggggttgtaaatggggaataagtggagaggcggtgtaatttaattaggtagattttggtttgagttttgatagtattttttttatctttttgagtcttcgttttttttttctttgcgatcttcttttttctttttggttgttgacacatataaatttgtgaattggcaagcatacaggcaaagttgtaagctgtgtataggtgttacgacagatggatcactgacgtacgagactcggggctaccctgtatgttagtggccaatgttaaggaagaggattggcttccccaaatttgcatggatcaagagcagtagggcagtacgcctctcaagtggcgaagctgaggcagacgacgaa

SEQ ID NO: 8178 - DNA, 1631 bp, Zea Mays
agggtatttgttccctcaaggcctcaacgcgagccaccccctccgtcctcaatccatttccattcttccctttcctgtctcctgttgccaccgcataggtgaggtaaggattctggcagaccaacgcatgctgagttgcaggtgcagtagaaagtttgaactctgtgcgtgatcgagtagaaattagaatggcgaatgtcatggattctgaggtagtgcaggtggtagagtcgtcgtttgtagtgccgagcgagccgacaccgtcggaggggctctggctctctccgctggacctcattctggccaacagaggccacaccccaacagtctacctgtacagctccagcagcaatgctgttgccgccgccgatggtttcttcgacgtggccaggctcaaggaggctatggccaagaccttggtggccttctaccccctcgctggccgcctcggcgtcaacaacgatggaagggcagagatcacctgcaccggcgagggcgcgctctttgtggtcgctcatgccgacctcactgtcggtgacatcgaggacgacttcaggccgtcgccggagctgaggaggctctttgttccacggattgagccagcatccgtcgtgttggccatacaggtgactttcctcaagtcgggaggtgtggtgcttgggacggctctccaccacgccgccatcgacgcctcaagcgcgttccacttcttccagacgtggtcagccttgtgcaagcacggcgaccgcgcgacagtggagctcccgtgccacgaccgcacgctcctccgtgcacggtccccgcctaccgtccacccggacgccctgtcgaggttccacccaaagctcactttctccgacccgtcaggacctctcgcctttcaagtcttcgccatttccaaggaccaggtcacctccctgaagcgcctctgtggcggcacgagcaccttctgcgccatcggcgccctcgtgtggcagtgcgcgctcgttgcgcgccggcttccgcccgactccgaagcacgcctcaccttcccggccaacgtccggcgcagggtgagaccgcctctcccgaaccgctacttcggcaacgcgttgatcaggctgggcgtcactggtgcggttcaggacattgcttcggaggctttggtatctgtcgccggccgcatcaaagacaccatcgatcggatggacgacgagctcgtgcgttctgcggtcgactactgtgagatggccgagatggacagccggcctgtaaagggcaccttgctagagacggagctgatgcttattagctggctgggcatgccaatgtacgacacggatttcggatgggggaagccagcggtgatgtcgcgggcggagtccatccgtggcggctttgtgtacataattgacgacgggccaacaaacggcgtcggcagcggcagcggcggcgtccgcgtgctcatgtgtatggaagccgcaaatatgaaggagctggagcggctgctttacgcaaaactctagactagagcctggacctgctaggtgcttgtgatgtggaacgaaacgctttggtaacaataaagggcccgagacgttacaaagcctgtatctggacggccggcctgctttttgtttgctcgcaggaaa

SEQ ID NO: 8179 - DNA, 1678 bp, Zea Mays
agggtatttgttccctcaaggcctcaacgcgagccaccccctccgtcctcaatccatttccattcttccctttcctgtctcctgttgccaccgcataggtgaggtaaggattctggcagaccaacgcatgctgaggtgcagtagaaagtttgaactctgtgcgtgatcgagtagaaattagaatggcgaatgtcatggattctgaggtagtgcaggtggtagagtcgtcgtttgtagtgccgagcgagccgacaccgtcggaggggctctggctctctccgctggacctcattctggccaacagaggccacaccccaacagtctacctgtacagctccagcagcaatgctgttgccgccgccgatggtttcttcgacgtggccaggctcaaggaggctatggccaagaccttggtggccttctaccccctcgctggccgcctcggcgtcaacaacgatggaagggcagagatcacctgcaccggcgagggcgcgctctttgtggtcgctcatgccgacctcactgtcggtgacatcgaggacgacttcaggccgtcgccggagctgaggaggctctttgttccacggattgagccagcatccgtcgtgttggccatacaggtgactttcctcaagtcgggaggtgtggtgcttgggacggctctccaccacgccgccatcgacgcctcaagcgcgttccacttcttccagacgtggtcagccttgtgcaagcacggcgaccgcgcgacagtggagctcccgtgccacgaccgcacgctcctccgtgcacggtccccgcctaccgtccacccggacgccctgtcgaggttccacccaaagctcactttctccgacccgtcaggacctctcgcctttcaagtcttcgccatttccaaggaccaggtcacctccctgaagcgcctctgtggcggcacgagcaccttctgcgccatcggcgccctcgtgtggcagtgcgcgctcgttgcgcgccggcttccgcccgactccgaagcacgcctcaccttcccggccaacgtccggcgcagggtgaggccgtctctcccgatccgctacttcggcaacgcgttggtcaggctgggcgccactgctgcggttcgggatattgcttcggaggttctggcgtccgtggccggccgcatcaaagatgccgtcgatcgggtggacgacgagctcgtgcggtctgcggtcgactactatgagatgaccgagatggacagccggccagtgaagggcaccttggcagagacggacctgcagattattagctggctgggcatgccaatgtacgacgcggatttcggatgggggaagccagcggtgatgtcgcgggcggagtccgtccgtggaggctttgtgtacctaatgagcgacgggccaacagacggcggcggcggtgtccgcgtgctcatgtgcatggaagctgcaaatatgaaggagctggagcggctgctttacgcaaaactctagaccctagagcctagacctgctaggtgcttgatgtgtggaacacaaaagacaataataaagagccaaagaggatacgactggctgttatttttttaatttgtctaaaaaactttgtgtttatgaaattccaccaccaactgatctacatcatacatgtatgacggagaagatccatcaatatggctagggat

SEQ ID NO: 8180 - DNA, 2234 bp, Zea Mays
gctgcgctcctcgattcgacccccgcttccctccaactcgcctccgcgctcggcagtcggcacccacccctcttcctcctctctgccggcaacaggacgcaggcgcataaaaaatagcaccgccaccaccacgctccacacgctgcagtttctggaaggccaccccctctgtccgctttaaggcgccgtccgcaccggtcgcctccctcccccactagcgctgccgcggccctcgcccatatacagcgcggccgcgcccaatcgttcgttccgttccgctccgccacagcggctccgcaccaaatacaggcgtgtccaccgcgctcgccccctgctggtctgcgctgctctcgtcttgctcgccctcttattccctctcctccccgctccgaactcccaaagcctccacccgaggaggaggcctgccaggttcgttgccggccgtgtttgttcgcccggccggccggcccgaccgaggggaagctgcagcctgctcgctcgctcgagctattgcgtaggccgttgacgatgtcatgtggcccctgtgcgtcatctccgagaagctcttcaggatggcgggcgacgacggcgcgcagggggcggcgggctcgccgtaccccgacgggcggatttcactagcacgccgatcgtactacatcgatgttccgcatgtgcagcaggccttcacctgggactgcggcctcgcttgcgtgctcatggtgctcaggacgctagggattgattgctgcgacggcattgccgatctagagaggctctgccgcaccacaaggttctctctaggactggaacttcacaattttaagtacaattagctgtacagcagaactaaagaaatgatcgtcaccttgattttgtggccctaacccctaagcatggcacatccagaaagtagaaggaacaaaaaaaaaggaaagtagtagtacagagctaaatgactgttgttcaatgatcataagagaatatttggtcagagtagtcataagttcagaaaaatgcaatagttgcttcatccaaaacaaatgcaggtatacttaaagaacgcaggctccattttttgtttgtttggaaaactaacgccctttaacacttctgtttgcagcatttggacggttgacttagcatatctgttaaacaagttttcagtcagcttttctttctgtaccgtgacccttggagcaaatccacaatattctgctgaatccttttatagggagcaattgcaagaagacatcgatcgagtggatgagctatttgggaaggcgctcgatgctggaattagcattcaatgcaggtccatcaccgcatacgacattgcttttctactgttatctgggcactgcattgctattgctttagtggacaaatcgaagctaaatttgccctgcatgagtgatcatgatgtacaacagcacaacgatgagcctgactacatgggacactatgtcgtaatatgtgggtatgatgctgatgattgtgaatttgagataagagatcctgccagttccaggaaacgcgaacgggtgacaatgaagagcttggacgaggcccggaaatcctttgggacagacgaggacattctcttggtctctttaacaggaaagagtgggatgaagctgtcgcgtaagctacttgcctgctccatgtagataaataaataggtcactagcaaccttgtgaatacgctgtacatgtccctgtagtagttatgactgtcgagtgccagccctgtacgtagctgagaacgttctcgcagttaccgctgataacagcagtgtggtagtgagcttagtaggcaccctgtatgttggcccatgccgtcgccaaaccatggccgcgcaaaggggttcagcggcagcaaaaggctctgctgaccttgtaaacgagcaagtgttctatgtacgattgttaactgaacgtgtacagatctccggaaataagaattaaaatcgtgctcctctctgcaaccgtgctccgtccgcttgctgtgctgtgctgggagcgctcgcgttgctgtcgcctgtcggagtgtcggtcgtgtctgaatctcgccaatcattcgaggtagcttctgccagacccaaccgctggtgagttgagtgttaggtcgcaggaatcgaactggcgccgaatccaacctctcactcacccttcctacctgcctgcacgttgctttctactagcggtttgcattttagagggagcgataataattg

SEQ ID NO: 8181 - DNA, 2530 bp, Zea Mays
cctcctcctagcccccaacctcccgcacccgcgccgctactgccctccacgcacgcaggccgccgcttcggtttttgagtttttccatcacacgcagaggtagagagcatccggattccagcttcaagtcccgaaccccacccatgtccgccgccgccgcgacctctgccagcgactggaccatagtccgccgccgcggccgccgccgaggcaacgccccacgctccacctcccagcccgatgccccgacgcctctccccgtgaccccagtcctctggtccccctccgattcctctctcgaccccgcccgcgtctcccgcctcgtcgcgcgcgcccacgccgccatctcccgcgtcgctgcctcccctctctaccacagcctcctccaggactcgtcgctccgccgccgcctcagtctcctcgccccggcccacctctccctcctcggcgtcggcagcttcgagtcctcccccgccgcgcgcctccagctcgcgctcgccgccctcctacgccgcgacctcctcccgaaagccgcctccgcggacgtcttcgaccccgtcctctccgccgtcgagtgcgcggccgccgcggcgctcggcttctccgtcccgagcctcgacgacgggtgccgccgttgcgctgaggagcccacgctcttctacatgccccactgcgaggcgtcgctctacgatgctctcctcgccgctaactgggattcccccgcgcagctacgccgcgtctgcgtgctcggcaacagcttccggcggtacgcgctccaggccgaggagaaccgctcgggccccgccgccaaggccccacatgtcctcgctgcagagcggttcgcgcgcgaggagcggttcggcgacccgagggatctggatgacgaagattggttcgcccacgcgttcaacgagacgagctggcatttcttcgagctgcgcgacgacgtcgacttgtccgccaccattgctgtaggagggagctaagttcattgatcagatgtaatatggtaactggatatcttcatgcgttgcttgattgaatgcaatggtgatcaagattctaagtttatcctatttatcggattctctgtgggatgcatactgtataccaattccaaggagaacggtgtatatgccaagttgccaactagggataacgatgaaggcaataagattgggaacaccaaaccgttagggacgcaatacagatttctctgttacatcataacccgtaaggtcaatttcatgatatttgttgttgatggcgtcgctgtccttgagtcaattggtagcaacaataaaggatacactgagatactttgtcaaacttttatgtatccgttcttatcgattggaggtacggattgctaggatggacacataccttatatatccattttatcattatcataggaagtttcctgaatacagatttatgttcacttatactgctttatgaatgaaatatatgcttcaatcgtattgtattctcttcaatttagatctcacctgctatagaataagagtgtacatgttgtcgatttaaattgttagcttcagtcatctcatgcatgcactatgtttgtctctgtgaataaattatgcttcctattgtagacatcatgtgatcataacaaattttatcgcagatgataaacctgttgtcgtttgtctctgttgataaaccatcacggccgtgctgcggtcgtttccgtgaatgccaacttgactgcaggcttggagtcctacaagcacaaagcagtaaaagctgccatggattatggctttcacatggccattacaaagtggcatgatgaggttgcaagggaaatggaagtgatggttaaggagcatgaggatggtgatgctggacaacagtggatgattgacctctggatagctggtctagaagggcatgctctctcaagacctccaattttagaaggagaagcaactgcacgggcaatccgtttagcgaagttcatcaatatgctactgtatgttcatgtgatgagcatagacgcaatggatgagattgccaaggctaaaagagaaggacagtcagatgccgagatctggaaattgcgactacagttgcacgtagcaatggtctacattgcaccacgcttgatgactaaggatgcgggatgcgttcagttgcggctgaggacaagttcagttgcggctgaggacaagcaggacagggacgtcctctctcgtccctctaattttgagggacaatcaaagacaattgggataatctagtcccaacctctgaccctgaaataaacaactctatttgagggatcgttctattccatcccgttctgtcattacaagtaaacacacctcaaaacatcttggtatagaactgaaatatgatattcgttgcatgtattgtagttcattttagtgatcgcctgtaaaattgtgtggcattggttctggctaaatttattgttgtattggtatcttgcttactgttttttttttgaactacacagacatgcggaattaccatgtttaga

SEQ ID NO: 8182 - DNA, 1810 bp, Zea Mays
actactagtactgccgccctaatccttttccttttggagttcgtgttatatctcgagcccccaccctgccgctcgctccccctcctcccgcttgattccagtggccctgcttccctcgtcgtcactctctctcgagagcagcaccggcacttcggacaggccgcagcagaagggagtagcggtctctgcgcaggcggcggccgcgaacgggaccaagggcgcggagctgatcgggtacgtcgacgtgctcgtgcggagcgcgcgggacatccagaacatctgcatctaccacaagcaggacgtgtacgcgcggctctcgctgcccggggacggcgcgccggcggcgtccacgcaggtggtcaacggcgggggccgcaacccggtgttcgaccagtcgctgcgcctcggcgtgcgcgcgggggacgtcgacgccgcgatccggtgcgaggtctggatgctcagccgcgtcaagaactacctgcaggaccagctgctggggttcgcgctcgtgccgctcccggaggtcgtcgccgccgacggcggcacgctcgcccgcgactttccgctcaccaccagcgacctcttccagaccccctcggggttcctgcagctcgagctctcctacatcggggtcgtgccggaggtcgtgcccatctcgccgacgcccaagccggcgctggccgacccggaggagccggagaacaacgccgccgggaacgggaaggagtacgagaagatcgagttccctgacctcaatctcgtggaggagaaccagatcatggtctccgagtacaccaggctgccgtgcgcggccgtggaaacgcagagctccgacagcctcctcacctcggagcacggggacggcgccacgaccctgggccacgacgccggcgtgcgcctcgtggagagcttctcgacggacaacagcaccgccgactcggtgagcaccttccggagcgacacgccggtcagcagcgtgtccaccacggagtcccccgctgccgcggcgttcccggccacccctcagtccaacttcagctcggagccgtctgggaacgcccactcgtcggctgaccgcaaggagaagccggcgttggagaccaccgacgcggaggtcgcctcgtcccgcaccgtccaggaggtcccggcggcgaactcacccggcgccgcgtcggaggccgccgtggacaagccggtgatcagcgtcaacatcgagcaggaggtgaaggtggacgggaaccagatcatggacatgtacatgaagagcatgcagcaattcacggattccctggctaaaatgaagctccctgccttggacttggacatagacaatggtagcagcgggaggagtagtcctgcagcagccacaaccgacgcagaatccactggtgccgactcgatcgcggtgaagaagccagccgccgccgggaagcaggataagccatctcccaaggtgttctatggcagccgggcgttcttctgatctcctgtccgcttgagcactggaagcacagcgctccagccgccgagtaacgaagcaaagagacggcatttgcagtcgcctcagctgaatcttactagcgcagaggaataacaccttctcatgctcttgctctagatttgccagatagggaattaattgctcgtttcaatgtattagttgctcgtttcaatgtatcggtcagtacttatgaaaaatcgtctggtttccctcttttagggctagtttatggactctactttttcaagaaatttctgtttttctaaaagaaattgaactaattttctttagtaaaatgaaaatccttcg

SEQ ID NO: 8183 - DNA, 1099 bp, Zea Mays
ctcgcaaataataatgtagggtatacaagagaggcagatttgacagccgtcctactccatttgctcctagtcccaaatactagcaggcggcaggcggccaagaccggtgtccctcgacgacctgccgagtgccgaggcaagacgcgaggaggctgtaatggcgggcgccgaggtgggagaagacaagtaccgctccttcatccacggcgagggcgagagggacaccgtgtggaggtacggcgccccgcccaactacgacgtggtcaacaagctcttcgaggaagagaggactcaggtgtggcccgagggctcgctggaggagaaggtgcagcggctgctcaagagctgggagatggagctggtgcacaaggcgcggcccgaggaccagaagaccgtcaactcggagaaatactctgccagcaccaacgggatgagcgctctgacccgggccgaggtgatggccatcggcggctacaacaacttcctgcgcaccaagctgcccccggagcaccgcatctacgacccggacagcgagaccgtggagtccgccatggccaccttcaccacggccttcccgcggggcttcgccatcgaggtgctcgacgtctacagcggcccgcccaggatcgccttcaagttccgccactggggctacatggaggggcccttcaagggccacccgccgcacggccagcgggtcgagctcttcggcgtctgcatcttccatacatgaaggtggacaagtcagagtacttctacgagcgcggcaacttcctcgccggcttcttgagtgcccctgcccctgatggctcaggcggttgccccgtgatgcgcgggaactgaatgggcctgcaatgggacattggaagactaggcattggaacattgggattattagcattagcgatcccgaatccgcttttattacggtttaataattccatcatgtaacatgacacttgcatttgtgtttgaataaacatttcagttgcttccacgtattagcagaaatgaatgaacattcttcctacagaactgtacggtctggtggccaacatttgccagcactacacggttgttggccactcaaatgttaggc

SEQ ID NO: 8184 - DNA, 2355 bp, Zea Mays
aaaaagaaaaagggcaaaaaagccgagcgggtttgaacgaagcgaaagcggagctgctctccccgcccgcgctcgctccatcgctttactatcattttgctcttttggtcgtttctcagcggctcacggatcgcgcgcgctcccccgctcgtcgtggcgcggccgcgctccacgtttcaatccgtttttgctgccgtgcggtgacgtgacgcctctaccgttggcgctttctgcagacggtgggactgggaccacgcggcgcggccgatccagatcccgcgcactcgtccgcgctgctgcctctcaccagcggcggcagcggcagcggctttgcctcgcggggcacggttgcgccagacgaggaagaggggagagacggggcgagctcggctgaatcgcaggaagtggcagaagcagcaaacgattcgttctcctactcactaagagagtgccagaagcagcggcgtctcaagtcagagaggtctgcactggtgcggccaccggcctcgcataagctcaataatgccggaggtattgagcttctagtgctctcgccgaggtgcttgattggtggtaacccgggaggaatgagcaagagctcaacgacatcatcccggagcagatcaggcacaggcacgttcccaagccctgggactccgagctgcaaccggcattgtgcaggcagcatgcagtactccaagggttggagttcagagcgcgtgccactgggcactggtaggaatagaaggtatgggggcagtggggttgtgcttccatttaacaatgggaggaagctgccatcgaaatgggaggatgcagagaagtggatcctaagtccagtttcctgtgatgggttggggaggatgtctgcaccagctccacatcatagacggcccaagtcgaagagtgggccacttggccatccagctggcattccaggggcttatgcggctgtttcaccgcttgttccttgctttgatggtgtgctggcagcagctaatttcgcagcacattcacctttctctgctggggttctcataccagagcacgggcgcattggcgacttcagcagtggaagagacagatgtggtgatgacggtagcagcagatcctactccgctgagaaagagtcctatatattaagatctgcaagcatacatgcatggacagaaacacttatggaggcatctgcttttgctaatatctcagaagaaaccgtacaagatgataaactgcaacgccagacagaagcaacttccatgatttccagtccaatcataaagaaagacatcggcacacagatgagtcctgaggatagtatatcttctccaaaagttgatgaccaagtaactgtgacccggtggtccaagcgacatgtaacacgaggctctgataagaggtcaacaaatattattgaatggaggaagaagaccactgaaacccgaactccatcttttgatgaaaaagaaagagaaagatgcatgtcacagtgcaaaagggaggaagcaaagatcacagcttgggaaaatctacagaaagcaaaagcagaggcagctatccgtaagctggagatgaaacttgaaaagaaacggtcatcatcaatggacaaaattttaggcaaactccgctctgctcagaagaaagcacaagacatgcgaagtgtagtttcttctagtgaaggtcagtgtagtgtgagggcaaccaagaagacatcttcctctgtcaaaactggcaggcctttcagctgctgctttacctaccgtgcttgctagttgtgatacacagttggtgcctgtggatacagcaatggatataggtctattcgacctcttctcaggcaacagttatggacgcgaagggaagtcagttgggttttgactacaaggcctaattgttaatgagatttgcactgatgaatgagatatcgttatggagcagcagacgaagaaagccacgcgaaatccactcatgtaactgatggagtggactaatgcagtctagtatgcgacgatcaatctctgtacacccggtagaaaaagttcatgagcttcatggcagttagaatcaggattgagctgatattcatcccgcttgatgtgtagctagcattcttgtaactggaattgtgtgtgtaatgcaaatcatgggcgcattagactgtaatgaagaaaaagtcagggctgcgcctttagaatgcagcttgctcactttttgagtttagtactgagactgggcttgtttgttattggttggcagcaattggaactgtgacgacgtatattttccttttttttggaacgcgctaaacttgttttcccgaattttatggcgaccaacaaagtacatattccattg

SEQ ID NO: 8185 - DNA, 2501 bp, Zea Mays
tttctgcgtgatgaaaaacaccacacaagaactggtgcctgaaggccggcagcgcccacgcatgcttgacttcttgcgccgcgttcacaaccaagccaacgtagaggggaccgaggaccgaggcccccggcgaaatccgtccacgcgccatttgtaaatcgcgctctcccggctcccgcaccccactccccgtttttctccgcaccgccctgctccccgaccccaactgccgtctccttcctcggggaatgcgaccgcgcgccagagcatgctccgcccggagcccgcgctagggttccccgccgccggccccgcccgcgcgcccgagcgccgccgtaagaagcagccgccgacgaggcggaggcgaccggccggtgccacaacggtgggactgggaccacgcggcgcggccgatccagatcccgcgcactcgtccgcgctgctgcctctcaccagcggcggcagcggcagcggctttgcctcgcggggcacggttgcgccagacgaggaagaggggagagacggggcgagctcggctgaatcgcaggaagtggcagaagcagcaaacgattcgttctcctactcactaagagagtgccagaagcagcggcgtctcaagtcagagaggtctgcactggtgcggccaccggcctcgcataagctcaataatgccggaggtattgagcttctagtgctctcgccgaggtgcttgattggtggtaacccgggaggaatgagcaagagctcaacgacatcatcccggagcagatcaggcacaggcacgttcccaagccctgggactccgagctgcaaccggcattgtgcaggcagcatgcagtactccaagggttggagttcagagcgcgtgccactgggcactggtaggaatagaaggtatgggggcagtggggttgtgcttccatttaacaatgggaggaagctgccatcgaaatgggaggatgcagagaagtggatcctaagtccagtttcctgtgatgggttggggaggatgtctgcaccagctccacatcatagacggcccaagtcgaagagtgggccacttggccatccagctggcattccaggggcttatgcggctgtttcaccgcttgttccttgctttgatggtgtgctggcagcagctaatttcgcagcacattcacctttctctgctggggttctcataccagagcacgggcgcattggcgacttcagcagtggaagagacagatgtggtgatgacggtagcagcagatcctactccgctgagaaagagtcctatatattaagatctgcaagcatacatgcatggacagaaacacttatggaggcatctgcttttgctaatatctcagaagaaaccgtacaagatgataaactgcaacgccagacagaagcaacttccatgatttccagtccaatcataaagaaagacatcggcacacagatgagtcctgaggatagtatatcttctccaaaagttgatgaccaagtaactgtgacccggtggtccaagcgacatgtaacacgaggctctgataagaggtcaacaaatattattgaatggaggaagaagaccactgaaacccgaactccatcttttgatgaaaaagaaagagaaagatgcatgtcacagtgcaaaagggaggaagcaaagatcacagcttgggaaaatctacagaaagcaaaagcagaggcagctatccgtaagctggagatgaaacttgaaaagaaacggtcatcatcaatggacaaaattttaggcaaactccgctctgctcagaagaaagcacaagacatgcgaagtgtagtttcttctagtgaaggtcagtgtagtgtgagggcaaccaagaagacatcttcctctgtcaaaactggcaggcctttcagctgctgctttacctaccgtgcttgctagttgtgatacacagttggtgcctgtggatacagcaatggatataggtctattcgacctcttctcaggcaacagttatggacgcgaagggaagtcagttgggttttgactacaaggcctaattgttaatgagatttgcactgatgaatgagatatcgttatggagcagcagacgaagaaagccacgcgaaatccactcatgtaactgatggagtggactaatgcagtctagtatgcgacgatcaatctctgtacacccggtagaaaaagttcatgagcttcatggcagttagaatcaggattgagctgatattcatcccgcttgatgtgtagctagcattcttgtaactggaattgtgtgtgtaatgcaaatcatgggcgcattagactgtaatgaagaaaaagtcagggctgcgcctttagaatgcagcttgctcactttttgagtttagtactgagactgggcttgtttgttattggttggcagcaattggaactgtgacgacgtatattttccttttttttggaacgcgctaaacttgttttcccgaattttatggcgaccaacaaagtacatattccattg

SEQ ID NO: 8186 - DNA, 2113 bp, Zea Mays
acacgcctccttccttccttcctagcccttccgtcctgtccagactccagactccctccacaccagtagggactagggaggacgccgccactgcgacctgccggcagacgtctgccccctgcttccggcatccggactcccctgcgccgcagttacgttacgccggcgatctcctcggctcaacccggggcctttctctctgcgccccgccagcccagctgctagcaacccagcaggtgaaggagaatggcgggaggtggcacgggcatcaggaaatacatgggggctcttaaggacaccacaacagtcagcatagcaaaagtaaacagcgattacaaggagctggacattgctattgtgaaggccacaaaccatgtcgagaatccaacaaaggagaaatacgtgagagatatcttttaccatctttcacccggaaggcctcgggcagatgtcgcctactgcatccgcgcccttggtagacgtctttcaaagacacgcaattgggcggttgctatgaagacattaattgtcatacaccgtgctcttcgggaagttgatcctgctttccgtgaagagcttattagttatggaagatctagctcccatatgctctatctgtcatactttaaggacgattctagcgcagaagcttgggattactctgcttgggtgcgcaattatgctttatatttggaggagaaacttgaatcattccgtgtactgaactatgatgttgaaaaggatccgttgttgccagctttacagcagcttcttttccgactacttggttgccagccacaaggggcgtcatcttataacgtcataattcagcatgcactttcaatggttgctctagagagtgttaggatccaaacagccatcaatgacgggatactcaatcttgttgacaagttctttgagatgcagagagatgacgcaataagggcactgggcatgtatagaagagcaatcgagcaggcagaacaactttcagaattttatgaagtgtgtaaaagtatacatattgggcggggtgagagattcctaaaaatcgaacagccgcctgcatccttcttggcgactatggaggaatatgtgagcaatgctccccttgcttcaacagttcaaagaaatcaggctgtactggccatagaggacagcaaaaaatcagaagttgaagaatcacaaccaacgctgcctcctccccactctccagctcaagaatctgggcctgagccagttcaacaagtcccacctgcagctgatccaacagatttactgggaatcaatgaaccaacccctgccacatctgaaatagatcaaaagaatgcgggggccttggccatggttccacaggataatgcgccaaaagcacctgcttctactaccagttctggaagtgtggagactagctgggagctggccttggtcactgcacccagttcaaatgggactgctgtcactccaagcaaattggccggtgggctggacttgcttacactcgacagcttgtacaacgaggcgcaccgaagagcgcagcagaacgcaagctacaacccttgggagaccaatccagcgtcaggcccagtgatgcagcagcaaatgtacgacccgttctacgcctccaatcaccccgtggccgcagcccgcaacgtccagatggctgccatggagcagcagcagcaacaacaacatgccttcgtgctccagcagcagcagcagcagcagatgattgtgatgatgatggcacagcagcagcagcagcaagcttcttccaatccgttgtatacggccgccgccgcccacacgtatggtgcaggggtgcagctccacgcgggcaacgcgtactctggagctgggatgatgtaagcgttgcacagaacctgctgtctggttctgaccggcatcttccgttctttcttgttttttctcattattttcttgcatttttttttacattgtaagaactgtgttagggctagaactagaaatctgatatagcatcaatatgagcacattcttgatgttcatgaccaataatggtcgatgcgatgatggctttgaactgaagcactaaaatagtatcgatccttgcaaatttaggacttgtttg

SEQ ID NO: 8187 - DNA, 1149 bp, Zea Mays
ccagagtgcgtccaactcggcgcgagtcatccttatagaatcacctctccgcctccaagcgccagtcgccgcctctccccactccctctcgtcgccgtcctctcccgttcgcaacgccacgctccccaccgccgaaatggccccgaagcgaggtggcagggcaccggtgccggccaagaagaagacggataaagtgacgaaccctctgttcgagaaaaggccgaagcagttcggcatcggcggcgcgttgcctcccaagaaggacctgcaccgattcgtcaagtggcccaaggtcgtgcgcatccagcgccagcgtcgcatcctcaagcagcgcctcaaggtgcctccggcgctcaaccagttcacccgcaccctcgacaagaacctcgctaccaacctgttcaagatgcttcttaagtaccggcccgaagacaaggctgccaagaaggagaggcttctgaagagggcccaggctgagaatgaaggaaaaactgttgaatccaagaaaccaattgttgtgaagtatggccttaaccatgtgacttacctcattgagcagaacaaggctcagctcgttgtcatcgctcatgatgtggatccgattgaactggttgtttggcttccagccctgtgcaggaagatggaggtcccatactgcattgttaaaggaaaggctcgccttggatcgatcgttcacaagaagactgcatcagtcttgtgtctgaccactgtcaagaacgaggacaagcttgagttcagcaagatcttggaggctattaagtttgatgaagtcaggaagaagtggggaggtggcatcatgggctccaagtcgcaggccaagaccaaggccagggaaaagttgctggccaaggaggccgcccagcggatgacgtagattatccactgttgagtttgcccctgtagtttgacgtggaagaaccgatgagcattgtgcactcgtattgtgtttttttgaatctactttcatatgtttctgtccatcagaccgtgtttagaaactttggaagacagttctacagtgtttgtgcaatgtcttatatcgaagtatatcatttgcgcctcaggcagttttgcttttatttgcctaagcaattggtcccgaattcagcattcgtgctgttagtcatg

SEQ ID NO: 8188 - DNA, 517 bp, Zea Mays
gaggtctaccgtctcctgcattgtacagcagccatagtgtttcctcttgaccatagcagtggttcttggttatataaggagagggagaccaacaagagaggcaatatgcaaaatggcagcgcgcatggtggatggaggcagagaaagcaataacaatgtgcagccactcaacaactcttcaggtccatgccatgcctttccacagctttcttgaacttcttcttcttctctctcttagaagggccgtatagcttctttgaacctctctctctctctctctcaaaagtgtacacgaacactttcttcattctctgcctctcgctctctgatctccgaagaaggtcaagaaagccgtgggaagaaatggcataacaagaactctgtaatgctgcagtgagatgtgaagttaaattggccctatctactatctatctatatgtttctgcaaatgtcaaggagctggagaatacaaaggatgcagaactcccgtcaaagaggcaacatgtcaaatgttgac

SEQ ID NO: 8189 - DNA, 4332 bp, Zea Mays
ccaatttcttcctcctcctgccttatcgtcttcctccttcctgccttgtcttcgtcctcgctcaacgccaatctctctcctcttaccattacccatttctcaaatttccaactgaaatacgcccgccccttttcctgcgcgctccgattccaaaccctcggagctctcaagacaagagattcaacagagccggagcggtagcacctctttcctgtttgcctgtaaccttcctgctacagtacgccgcagcgattagcggcccgaacccaaatccgcaacggcctgagcgagctattgagctcggcggggcgggattctcggcgtagagagtatccttcagctgtatcgcgaaagattgagccgaatcggttgctggagttgagccagctcttggacttcctgcgagcagaagtgatccggagattggagctgctggtcctgccgcgtcatgtcgctgttccggaagttcttctataagaagccgcccgatggtctgctcctcatcacagataacgtctacgtttttgatcactgcttctccctgaaagaggtggaaggggaccatttcgatgctcacattagaggcattgcagcagatcttctggaaaattttcgcgatcactcattcatgatctcgaatttcgggactaaagaggaagaaagccctatataccatattttgtctgagtatggtatgactgtattggactaccctggccactatgagggatgtccactcctcaccatggaaatgatccactgcatcttgaagtccagcgaaagctggctttctttgggtcagcataacttactgctaatgcactgtcaacgagggagctggcctattctggctttcatgttagctgctcttctaatatacctggggcattattccgacgaggagaaagtgctggatatggtctacaagcaatcgtctttggagcttttggagatgatttcacctctgaatcccatgccttctcaaatgagatatttgcgctatatctcgacgaggaatgtcatgcctgagtggcctccagctgatagagccctcacattagattgtgttattttgaggatggttccaaattttcatggccaaggtggtttccgtccaatattcaggatatacggcccggatcatctcatgccccctgatcagactccaaaagttcttttttcaactccaaagaaaagcaaccttgtccgtttttattcacagatgaactggtgaaaatagaccttcaatgtcatgtccaaggtgatattgtcctagagtgtatccatctgtatgaggatctggatcgtgaagagatggttttccgaatcatgttcaatacagcattcatccggtcaaacatcttgatgcttaaccgtgatcacatagacatgttatggaatgcaaaagaccaattccctaaagattttcggtttgaggttatcttttccgatatggacatagttacttcacatgtcacaacagagcctgttattcatcaagagaaacaaggacttggggttgaagagtttgctaaggtgctagatatctttaaccatttggactggttggatgggaaaaaagacaccgtacctcacacaacccagctaaagatctcagcgattaccgatgaacctgagactttctttgatactcgtgaagaacttgaatctgaaagttcttctggtgaaatttattcttctagtgttgttctgaaggtcggaaatgaattggatatgcttgtcagcactaaaccgagacatattccccaagattcaagttcagctaatgttcaatccaaatcacaaactacagtgcagtctccttcgcgaatgcggcgcacagcattgttatcaccttctaaggttaaggtttcaaagaccagtgcttcaccaatggaactgtcttcaagtacaatcatgccacaacaatcatcttcgccggttcagcctcggcgagtgatgtctgactctgcagtaaaatttttatcagagataacagaatcagcatcaggtgagatgtcttgttcacaaactccagttgaacatgaaccttcctctctgatggaaaacaatccagcaccaacagcatctctgttacctttgtgcacacctcctcctcttcctccccctccacccactgtctctttactccctgttcccactaagttacccataaatactagcacaagtaccatcaacatttcccttagagcaaccgtgcgttcctctccaccttcagaaccatcagtccctcctaaagatcttttgagaaccgaagagctgggtaaatcacaagaaccttcctatgaaactcgtgggaaattacaaactgatagtactacaggttccaatgatttcatactgtcaccagccgcttcatcttcactggatgaggaattgagcaacgcaagagcatctctcccgacagatttgccagcagtacctcaaaatccagacactaggccctttgcaattcaagcgacaagatctgaaactatgccgccgccgccaccaccaccaccaccgcctccgtcaaaatcaggcatgacgctgtttcctttgacacatggtgaagaggtaaaaatcactatagaaaaagtcgtaccacatcagcctccgcatccaccagcagcagcagcgtcattttcaagctcaaatccagatgctgtatctgtaattctagctccacaaaagagagctcggtctccaccgcccccgcccctgcccccacccccagggttggcaaaaccaccattttcctctctacggtcacgatcatcacctgaagtctcattgtctcaaccgcagtttctagataacaaggacagtgcaacaatggaatatccagacaccccgtctttgacacctacattttcacaaagcgttacacgggtgcaaacactgcatgttccacctccaccacctcctccatctcgaacaccgcctgttccacctccacctcctcgaacaccacctgttccgcctccaccaccaccttcatctcgaacaccgcctgttccatctccacctcctggaacaccacacgttccacctccaccaccacattcttctcaaacaccacctactccacctccaccacctccctcttcacaaagtttcccatccttaagtagaagaaatcgtgtggcagcccctcatccacctccgcctccagcaccactgtcatcccgtgttacttctgcaccatcagtaccaccttcacccccattacctcctcctaagctagccgtggccaataacacttcacagaagtcaccaacaatccgaccacctccacctccacccggcccccttcataagcttacgaagggaagtgttgccaattctaaccctcccccacatccagcattttcatttggtgcaaaggatcgtagcacagcccgctcaaaaagtcctagaagtttacgtgccaaccaggcatctaaaaggaccccgctgaagccattgcactgggtgaaagtttcaagagcaacacagggaagtttgtgggctgaaacacagaagtctgatgaaatatctaggaccccagagattgatatctctgagctggaaagtcttttctctgtaacgatgccaaatatggaggcaaaacgtcaacggcaacaacaacacccttctgttgcaacaaagcaagaaaaagttcatctgattgagctccaacgcgcaaagaattgtgaaattatgctgagaaacattaagatgccactgcctgatctaatgggtttagtagttgctcttgatgattccgtagttgatggtgatcaagtagattacctaataaagttctgtccaactaaggaagaaatggaactactcaaaagttatacgggcaaaaaggagaacctagggaactgtgaacagttcttcatggagatgatgaaagtaccaagggtggaatcaaaactgagaattttgtcatttaagataaagtttgttacacaggttgcggacctaaaaagtaatttgaataccatcaatttggttgctgaagaggttaggagctctgtgaaacttaagcgagtgatgcagacaattctttctttgggaaacgcattaaaccaaggaactgcaaggggtgcagctgttggatttagattggatagtcttcttaagctcagtgatatacgagcacgtaataataggatgactctcatgcattatctatgcaagtgaccgtattagaagattaaatgtaccgtcttggcaaaatacatccctgaagctcctttctatgaaaaagtttgtcatgaaccaatctgtgtgactttggactaatgtccttacttccattgtatgagcattgagtttcac

SEQ ID NO: 8190 - DNA, 5344 bp, Zea Mays
ccaatttcttcctcctcctgccttatcgtcttcctccttcctgccttgtcttcgtcctcgctcaacgccaatctctctcctcttaccattacccatttctcaaatttccaactgaaatacgcccgccccttttcctgcgcgctccgattccaaaccctcggagctctcaagacaagagattcaacagagccggagcggtagcacctctttcctgtttgcctgtaaccttcctgctacagtacgccgcagcgattagcggcccgaacccaaatccgcaacggcctgagcgagctattgagctcggcggggcgggattctcggcgtagagagtatccttcagctgtatcgcgaaagattgagccgaatcggttgctggagttgagccagctcttggacttcctgcgagcagaagtgatccggagattggagctgctggtcctgccgcgtcatgtcgctgttccggaagttcttctataagaagccgcccgatggtctgctcctcatcacagataacgtctacgtttttgatcactgcttctccctgaaagaggtggaaggggaccatttcgatgctcacattagaggcattgcagcagatcttctggaaaattttcgcgatcactcattcatgatctcgaatttcgggactaaagaggaagaaagccctatataccatattttgtctgagtatggtatgactgtattggactaccctggccactatgagggatgtccactcctcaccatggaaatgatccactgcatcttgaagtccagcgaaagctggctttctttgggtcagcataacttactgctaatgcactgtcaacgagggagctggcctattctggctttcatgttagctgctcttctaatatacctggggcattattccgacgaggagaaagtgctggatatggtctacaagcaatcgtctttggagcttttggagatgatttcacctctgaatcccatgccttctcaaatgagatatttgcgctatatctcgacgaggaatgtcatgcctgagtggcctccagctgatagagccctcacattagattgtgttattttgaggatggttccaaattttcatggccaaggtggtttccgtccaatattcaggatatacggcccggatcatctcatgccccctgatcagactccaaaagttcttttttcaactccaaagaaaagcaaccttgtccgtttttattcacagatgaactggtgaaaatagaccttcaatgtcatgtccaaggtgatattgtcctagagtgtatccatctgtatgaggatctggatcgtgaagagatggttttccgaatcatgttcaatacagcattcatccggtcaaacatcttgatgcttaaccgtgatcacatagacatgttatggaatgcaaaagaccaattccctaaagattttcggtttgaggttatcttttccgatatggacatagttacttcacatgtcacaacagagcctgttattcatcaagagaaacaaggacttggggttgaagagtttgctaaggtgctagatatctttaaccatttggactggttggatgggaaaaaagacaccgtacctcacacaacccagctaaagatctcagcgattaccgatgaacctgagactttctttgatactcgtgaagaacttgaatctgaaagttcttctggtgaaatttattcttctagtgttgttctgaaggtcggaaatgaattggatatgcttgtcagcactaaaccgagacatattccccaagattcaagttcagctaatgttcaatccaaatcacaaactacagtgcagtctccttcgcgaatgcggcgcacagcattgttatcaccttctaaggttaaggtttcaaagaccagtgcttcaccaatggaactgtcttcaagtacaatcatgccacaacaatcatcttcgccggttcagcctcggcgagtgatgtctgactctgcagtaaaatttttatcagagataacagaatcagcatcaggtgagatgtcttgttcacaaactccagttgaacatgaaccttcctctctgatggaaaacaatccagcaccaacagcatctctgttacctttgtgcacacctcctcctcttcctccccctccacccactgtctctttactccctgttcccactaagttacccataaatactagcacaagtaccatcaacatttcccttagagcaaccgtgcgttcctctccaccttcagaaccatcagtccctcctaaagatcttttgagaaccgaagagctgggtaaatcacaagaaccttcctatgaaactcgtgggaaattacaaactgatagtactacaggttccaatgatttcatactgtcaccagccgcttcatcttcactggatgaggaattgagcaacgcaagagcatctctcccgacagatttgccagcagtacctcaaaatccagacactaggccctttgcaattcaagcgacaagatctgaaactatgccgccgccgccaccaccaccaccaccgcctccgtcaaaatcaggcatgacgctgtttcctttgacacatggtgaagaggtaaaaatcactatagaaaaagtcgtaccacatcagcctccgcatccaccagcagcagcagcgtcattttcaagctcaaatccagatgctgtatctgtaattctagctccacaaaagagagctcggtctccaccgcccccgcccctgcccccacccccagggttggcaaaaccaccattttcctctctacggtcacgatcatcacctgaagtctcattgtctcaaccgcagtttctagataacaaggacagtgcaacaatggaatatccagacaccccgtctttgacacctacattttcacaaagcgttacacgggtgcaaacactgcatgttccacctccaccacctcctccatctcgaacaccgcctgttccacctccacctcctcgaacaccacctgttccgcctccaccaccaccttcatctcgaacaccgcctgttccatctccacctcctggaacaccacacgttccacctccaccaccacattcttctcaaacaccacctactccacctccaccacctccctcttcacaaagtttcccatccttaagtagaagaaatcgtgtggcagcccctcatccacctccgcctccagcaccactgtcatcccgtgttacttctgcaccatcagtaccaccttcacccccattacctcctcctaagctagccgtggccaataacacttcacagaagtcaccaacaatccgaccacctccacctccacccggcccccttcataagcttacgaagggaagtgttgccaattctaaccctcccccacatccagcattttcatttggtgcaaaggatcgtagcacagcccgctcaaaaagtcctagaagtttacgtgccaaccaggcatctaaaaggaccccgctgaagccattgcactgggtgaaagtttcaagagcaacacagggaagtttgtgggctgaaacacagaagtctgatgaaatatctaggaccccagagattgatatctctgagctggaaagtcttttctctgtaacgatgccaaatatggaggcaaaacgtcaacggcaacaacaacacccttctgttgcaacaaagcaagaaaaagttcatctgattgagctccaacgcgcaaagaattgtgaaattatgctgagaaacattaagatgccactgcctgatctaatgggtttagtagttgctcttgatgattccgtagttgatggtgatcaagtagattacctaataaagttctgtccaactaaggaagaaatggaactactcaaattcttcatggagatgatgaaagtaccaagggtggaatcaaaactgagaattttgtcatttaagataaagtttgttacacaggttgcggacctaaaaagtaatttgaataccatcaatttggttgctgaagaggttaggagctctgtgaaacttaagcgagtgatgcagacaattctttctttgggaaacgcattaaaccaaggaactgcaagggctgttggatttagattggatagtcttcttaagctcagtgatatacgagcacgtaataataggatgactctcatgcattatctatgcaaggttctttcggacaagcttcctgaagtgcttgacttcagcagggatcttgcaaatttagaacctgcctcaaagatacaactgaaggagttagcagaagaaatgcaagcgataactaaaggactggaaaaagtggagcaggaactggcaacagctgaaaaggatccttcagagacagagatattttacaggaaactgaatttattccttgatgacgcccaagctgaaggaaggtcgttagcttcgctttacagcagtgcggggaaaagtgccgattctctagcacattattttggtgaagatcccgtgcggtgtcctttcgagcaagttgtctcaacgttgctaagcttcacgaagacgttcgagcgggcccatgcggagaatgttaagcagatggagctggagaagaaaagagcacaagcggaagcagagaaagagaaggccaaactaactgcccacaagaagagggagtcgctggagcttggaatttcaggccggtgacacaccatatattgcatctgtggatagcacgcacttcactaattctgtgccgcctgatcacctagaccagcggcagaaaattttgtagcgctccttcagcgtgtatcacaaggaagctagggagaagtaatgatgtgtagtcctaatataacagttcactcgatgtacatagcagtttcagatctgttgcttctgtaaagaaaggttccacagctagctcacgaagggagctgcagtctctttggtttgtcaggaagttagggagaagtaatgttgtgttagtcctaatgtaacagttcacctaattagcgagaagcaatactgtacatagcagtttcaggtctattgctgttgtaaagaaaggttctgcaaactcgtttagctctcgatttatcttggggaattcacctgttactgccacttgctatagcaaatctgtaatcttgcgagtacattctccaatctccatttctactacgatgggcgtttggatgacggtaggagctgatatggctaagagcatgtacagttgtgtttaatgtagagtcttttgaggtgtttaaatgagatatctgcaaaaaaatgtagagtcgtctctccgtgaagtgacgtctctgtctcgtaacacaagtagcaatagacagacgacgtcacttcccattgtatgaattcgtctgttctatcaattcgatgttgtacagac

SEQ ID NO: 8191 - DNA, 1869 bp, Zea Mays
gtcaccatcaagcctcagctccccggcctcccactatctccgcgtcgccgtcccagtcactgtcccacgcgcccagcaccatccatccgtccgcaagggggaaagcacgctagctgagctgagctgctgagagagagagaggcaaaccctagcacgcacaagcacagcgacgtatacgcttccttccccccgccgattcatccatccatcgcagcgcgcaccgggcggggcgggccgggacgacgacagctaagctagcacatcgcaatagcatagcatctatctccgccgcagtacccaccaccaccaccaccaccatgatcttcccccctgccttcctgcaggattcctcgagctggaacgataaccagcagcagcagcaccaccaccagcagcaaggccacggccacctgcagattgccgtcagcggcagcggcgacgccaatcatgagctcctccagcaaccaatcatggggggagcgcttcccgatggaggaggaggaggtggtggcggggggcaggttgggggccccgccaagcccatgtccatggcggagcgcgcgcgcctcgcgaggatcccgctgccggagccggggctcaagtgcccgcgctgcgactcaaccaacaccaagttctgctacttcaacaactactccctcacccagccgcgccacttctgccgggcctgccgccgctactggacgcgcggcggcgcgctccgcaacgtgccggtcggcggcggataccgccgccacgccaagcgcgccaagcccaagcagcagcagcagcagcacgcggccgccgggaccggggctgccaccggcgcgatgcagcagcctcccgctgggtccatggcgtcgtcggccgccgcgtgcaccgcgaccacgacgatgacgaccaacgcgctccacgccgggcccggcggcggcatgctgcccatgctgccgccgctgctgcgcctagccgacttcgacgcaatgagcctcggctccagcttctccggcatatcgtccatggggaagcccggctccatcggcgcggcctgctacccgcactcggtcggcgggctggagcagtggagggtgcagcagatgcagagcttcccgttcttgcatgcgatggaccagggcccgctggggccacctctggccatggcgatggcggcgccaggagggatgttccagctaggtctagacaccaccagtgataacagccgtggcggtggcggcggcggagaagacgggtcgtctgccggagaggcgctccatatgatgcaagccaccaagagggagagctaccccgcggcaccaagagccatgtacggcgaccaacaacacaatcacctggctgctgctggtggctacacttcctattccaccaatgctgctgcaggtaaccatctcttgtaatggccggccgatcgatcgatcgagagctcaacaattcaagtgtcctgctatagctagctactacgacgtcgtgctacgatcgtatcggttcgtttcctacaaatatagcctagagatagagtgtctctgtctgtgtgatcgatggtattgttatgatcatatagaaaagaccagtagcatgcatgcacttgttgcaatgtttgctttcaagaagaaactctggagggaggagaggctcggtttggatgctgatcatgcgcaaatattactagtgtctacagctgctacttcattatagctgctagcatggtcacttgttttatgtttcttcttctgctgcttttttatctgatccctttgttagggtttactactactatcgatcatttgtggtcaagtaatgtgtactggtgtacgttcatcattttgttaacgaaaacacctatcatatatatgtcaa

SEQ ID NO: 8192 - DNA, 3161 bp, Zea Mays
gaggcgacccgtaacaacgcggagcgtcagcctatagccgtcgctcccgtgtcccgtccgccgtcccccttcctctcgtattcgcttcgccgcccaacccactgtgcaccgctgccttcccgaccgttctcgccgccgccgtctccgcgcctgccaccccgcgcgctcggccaccggcgcccacggtgcggctcgatcaaggccagatcagaacccgccccggtccgcgtcacgccgatattttctgttttttggtacggatctagggttttcctgctgcggattcgttcgattcgctcatggccgctgggcgccatgggggttacagggactacgaggcgagggagcgggagctcgacgcggaggcctccaggaggagcaaggagcagcaccaccatctcggcggccgccaccgcgacgtggaccgccaccgcgatggcgggcgcagcaggggtggcagagactttgccaacggctacggtcgccgacgctcgccgccaccccggagccggctggcgggaaggcttggtgaccgtgagcctggcgaggtgctgagcggtagtgcatctgatgactccggtgggaggccgcatagagggagggagaatggcgtgctcagttccggcagggagggtgatgtgatggcagtcactgatgactccggtgggaggtcgcataggaggagggagaatggcgtgctcagttccggcagggatggtgatgtgatggcagtcacagggatatcttcgccgagcaagaagaggaaattctcaccgataatttgggacagggatagcccaaagccaccacattctgatgcagccagggacaagaaagctgtagaacctgtgccttctgagctccctccgcccccgccgttgcctccacaagaccacatcacactgaggttggctgtggagaagtcacttatggatatagaacctactgttggtacagagagtgctgtgcagttgctggaacatgaggtgaataaggtgacagagcaggaagaggagtatgcaacaatgaggaacatatcgacttcaagatgggctggtgctaatgatgatgatgatgatggggcagctccagtgaagaagaaaagtctgtctcctgcagactcctctgtggcagggcagtggaaaagagcaagtccagaacctggtgaagtatctggaggaaggacaatgtctaggtcatctgactctgggaaaatgagtaatgatgagaaagaagactttgaagcaaatgaagatgactatatggatgtcgacaagggacatgctagtgacagtgatacagaaaaccgtatgtcagatactgactcagacaatgaaatacacagacctgaaacccctgaaagagagaaggcaccacacaggtgtatcaatatgcttcaagattgcagaagtgttgatgagtttgagaggctcaacaaaattaacgagggcacatatggtgttgtatacagagcaagggataagaagacaagtgagattgttgcattgaagaaggtaaagatggagaaggagcgagaaggtttcccattaacctctcttagggaaataaatatcctcttgtctttccacaatccttcaattgtggatgttaaggaagtagtagttggaagtagtctagatagtatttttatggttatggagtacatggaacatgatcttaaaggtgtcatggagaccatgaaacaaccatatacccaaagcgaggtaaagtgtttgatgcttcagctgctagaaggtgtaaaatatctacatgacaattgggtgcttcatagggatctgaagacctcaaatcttttgttgaataaccgtgggccccagaattgttgttaggaacaaaggagtattctactgctattgatatgtggtctgtgggctgtataatggctgagcttcttgccaaagaaccgttattcaatggaaaaacagagtttgaacagctagataagatttttagaacactcggcacacctaatgagaagatttggcctggctatgctaaattaccaggtgtgaaagtaaattttgttaaacaaccgtataatagactaagggataagttcccagccgcttctttttctgggcgaccaatcctgtctgaagctggttttgatctattgaacagactgctgacttatgaccctgataagcgcatatcagcagacgatgctcttaagcacaaatggttctctgaagttcctctgcctaaatcaaaggacttcatgccaacattccctgctcttaatgaacttgacaggcgttccagaaggtatctgaagagtcctgatcctctggaagagcaacgtttgaaagaactgcaagggaacataggcaaccatgggctttttgggtgaactagaagcacttgattgggtctgcaagggaacataggcaaccgtgggctttttggctgaactagaagcacttgattgggtcctgtccgtcctaactgttatgcttcacactgaaatcctgagttcatgaggttagatatcttctgaggattaacgcttcatccagatcgatcataaaagcaaatataatctacctgcatcataaggtgtggcgtgttggcttttattggttacaccagtttcacctttggaacttctctatgtaaaatattccagattggtacgttgtaaacaatgtccagtgtgttggatttaaatttaaaacgaaacatcatcattattagttttctttatgctccttgtgccttttcttttgatctttgcgttttgtttgcaagagacaaaagaagcgcaggggaaggatgccttttgctttcatcaggaaatcaatggcattaatacaacttagaagctaagctgtggctgcttcaagataggaagcttgatggctgtcagcttattgtacctaagtgactaaattttgtggagggccttcaaaagtgttcatctcttactagtgaaccatggtgggattgccgagccgttcggctaaccgggctagccgataattggtggtggtcggctccaccttatcactgttttggattttgaatttggtaaagtttgtaaattttgaaaacttttgatgacattttttgtataaatactatatattatttgaagattttctgctgaaaccaaatttcaaaatacacaacgaatttcaaac

SEQ ID NO: 8193 - DNA, 769 bp, Zea Mays
tttttttcagaaatctatgtgtacgcaaatgatgaaaattggtctttaatccatttttgccgtgtttgttgaatgtaccatctggtaaacagccttatgctttagcattttatctggagatcgattttcttgtaatatagaatctattaatactatagcattttatctcttataacggtttgtagtatcttgacaacattacttgacatattcatcattaattcttttcaggctagcccatcagatcctaaaacttttcccttcatcttactcggtaacaagattgatgtagatggtggaaaaagcagagtggtttctgataagaaagcaatggagtggtgtgcttctaaaggcaatatcccttattttgaaacttctgcaaaagaggactacaatgttgacaatgctttcctgactgttgccaagcttgctctagagcatgagcgcgatcaggacatttacttccagagtgttgcggatcctgtccctgagactgagcagagaagcggatgtgcatgctagtaacttttcaggatgtggccggtgaaatgccaaactcgtagcctcaattgctgtattcgtgcgtgcggctgtaacttgttggcgtccaatgcgttgagctgctggtgaaggcttatcgatgttccttggccatgcacgtttgtaattgtctatctgcctctgcatctgcaatgtggcaattgcttgtgaatgtttggtaagccagtcgtagaattggacggcaaatatgtagcatcgccgattgata

SEQ ID NO: 8194 - DNA, 1324 bp, Zea Mays
ccaccctcgtcgtccgcctccagagaagcagaaaatcgtgtcccgagtccgccgccctacgcctactgctcctcccaccaccaccaaacaaacaccacaccgcgcgccacgcctccgtctgccggcggtgaccgagccagctcatcagcggccaaggagcgggatgccggggccaggagcgcacctgctgtacgctctgtcgggcggtgcggcgctgtctcggctcgccggcccggaccgccgcttcgggccgcaccactgcgccgtctacgcagcgaacgcgttcctcggcccggacctcggctccttcgccgagtggctctgctccttcctcccctcggcctccgccgcgggggacctcgccatggccgccgtgcaccaccccttctactacccgctcctcctcggcctcccgctcgcctgggcctacgcctggctctcccgccgtctgcttcgcgccggcgtcctcgactctccctccggggtaccattaagaaagaggcagtgtttcttgctgatctctgccggctcgctctcccactttttcttggatcacttgtttgaggagaatgggcattctacaatgtacacttggatactgagcactggttggtggaaaggtcgtgctcctatcaatccagatgcagtgctcgtcgtaggacttctttgcacttgcctcatggggggatatgtgtacatcaacagagtgaatcatggaaggtctgcagcagaaaaatcaaaaccaatctttctttctcattctgatgatagccaccctgtactgtatgtggtgtgccagtcagatatacctgcggcaaccccctcaacctgccataggtgaagaagctgatctcggagtgataatatttcttgcgatttatctttttctcccacatggcctgtgcgccctttcgatgaatcaaaaggattatacagatgcactgaatgaattgccacttcaataatgcgtgtcgttattattcatttttcttccagtctgtgcagaatatcagtttggtaacagtctggtttctgcattatgttgtaattagatttagttactacctgaatgattactagtgcacttatgtatagccctgtaattctggaagcatatattattgtggaacaaagctgtatggatggtgctgacttctggtgaaaaagaatttcatctttttcattggtcgcagaggtggatcatatggatttgtattcaaggcacacatgactatatttttcatttggcactagttggtatatgctataaagtgatgatgtctgtcaagctaaaaaaaaaacatgtgcaacttcgtattgctat

SEQ ID NO: 8195 - DNA, 1875 bp, Zea Mays
ccagagaagcagaaaatcgtgtcccgagtccgccgccctacgcctactgctcctcccaccaccaccaaacaaacaccacaccgcgcgccacgcctccgtctgccggcggtgaccgagccagctcatcagcggccaaggagcgggatgccggggccaggagcgcacctgctgtacgctctgtcgggcggtgcggcgctgtctcggctcgccggcccggaccgccgcttcgggccgcaccactgcgccgtctacgcagcgaacgcgttcctcggcccggacctcggctccttcgccgagtggctctgctccttcctcccctcggcctccgccgcgggggacctcgccatggccgccgtgcaccaccccttctactacccgctcctcctcggcctcccgctcgcctgggcctacgcctggctctcccgccgtctgcttcgcgccggcgtcctcgactctccctccggggtaccattaagaaagaggcagtgtttcttgctgatctctgccggctcgctctcccactttttcttggatcacttgtttgaggagaatgggcattctacaatgtacacttggatactgagcactggttggtggaaaggtcgtgctcctatcaatccagatgcagtgctcgtcgtaggacttctttgcacttgcctcatggggggatatgtgtacatcaacagagtgaatcatggaaggtctgcagcagaaaaatcaaaaccaatctttctttctcattctgatgatagccaccctgtactgtatgtggtgtgccagtcagatatacctgcggcaaccccctcaacctgccatagtgcataacagagcaagcttcaaactgaggtcaaatgcctccgttgaatactctccattcaacctaggatcagcaaactctgatacattgccatcttggataagtgtagaagcctgggaacaaaagtgacattggcatagcagtattcatgatgttgattgctcgtcttcctgagaggagttggaggagcaccatgccgaagctgtacacatcccctgcagcattcaccctgtggttgtggcggtattctggatcaacatagccaaatgttcctctgacttcagagcttacgtgcgacacacctaagtcgatgactctagagagtccaaaatctgacagcttgggttccatatcaaccccaagaagtatattggttggctgtcatagaaagtgtgagtttgactaaacatgaatctatagatgcactgaagactttcagatcatgcaacaaaccttgatgtcacggtgaacgatgcagccttcagggtatatgtgcaggaaccaaaggccacaagcacttccaagtgctatctgaagcctctgaatccatggaagctcatacacaagaaaacactcctcctgcccgtcacagtaacctcttaatgacacaaggccagccatttgtcagcactcctctgtataccttgcctggaaccacaagatgaaccagttgcacaccataaaggacaacatatacttgaacagtagtctcctcatactcaagggatgccaacgcgacctctgcaagaaaaaaaaacatgtgcaacttcgtattgctattagtggaaaacagctatggccccaattatcaccccagcacagaggcatcctagcaacgcttcgtatcctgttgataaattttgaggagctcaaagcttgaaagatcaagtagaaaggcacactttgtcttcaactgtctgttggtttttactgctgttcagcctgtccttatgttgattgttttgttggatatgtggatgttaagttgttataatcgacttgaactcgccagatgtactacttcgcaaatctcttgtttggatctgtgaacacacagg

SEQ ID NO: 8196 - DNA, 983 bp, Zea Mays
gtcgatttttttttccagctccacttgagtcatgtgacgagaagatttgcagctagtatatcagaacggtggatttgggcccgagtgatagcgccggaggaagcgtgctccgtgtgggccctccctccggagcccgcccgcgaccgtttctgccgcatggaggaccgccgccgcgtgcggcgttagtcggccgggcggccccgccttccagttccagccgcttggaagccgtcgaggtactccccgccggcgtccaaccttacacagtccgtgttacggggcttgcccgtggcagcttcttctaccagtgcgtgtgcgtctacctccttctggagcccacccccgagatgatgatgatgaattgatgaggaggcaaagaagaagatagatgagctgatcaaggatatctgtggaatagagtttgatatcactgagcttgtgctttatagaaggatgccatagatataagcttggagtcatgggaattggtggaggtgtgccatcttgagaagaagtgattagtttcctctccaaggtgattctgcttgtagtgttatggagtccagcaggaggcaaacatgcccgcatgatgctgaagccgaaggagcggtgcgctccgtactcctcggtcaatattaaacatgagaaaagaagaagcatatcttccccggagataacaaaaaaatgttcgcaaaaggcacgcgatccaatacgagaacactcggaacactgcttttgtatatctttactgagtggacgatattcgcctgcccttgtgattctctgttttgctcgaatggaatggaatgtacatagcctggtgtaggttttcttgcacatgctggtcgtctagatagccatcgtcaggatcatgtgtcgctggacttgtaatgaaagtatatgattttactggagtaacaatgcctcctctcgtaatggaagtatatgtaatgtaatccgctggtgttgtttgccagcattcc

SEQ ID NO: 8197 - DNA, 1027 bp, Zea Mays
gtcgatttttttttccagctccacttgagtcatgtgacgagaagatttgcagctagtatatcagaacggtggatttgggcccgagtgatagcgccggaggaagcgtgctccgtgtgggccctccctccggagcccgcccgcgaccgtttctgccgcatggaggaccgccgccgcgtgcggcgttagtcggccgggcggccccgccttccagttccagccgcttggaagccgtcgaggtactccccgccggcgtccaaccttacacagtccgtgttacggggcttgcccgtggcagcttcttctaccagtgcgtgtgcgtctacctccttctggagcccacccccgaggaggtgggagcgagcgatcactgctgtgccgacttcggttataggagaaaaactcatgatgatgatgaattgatgaggaggcaaagaagaagatagatgagctgatcaaggatatctgtggaatagagtttgatatcactgagcttgtgctttatagaaggatgccatagatataagcttggagtcatgggaattggtggaggtgtgccatcttgagaagaagtgattagtttcctctccaagtgtagtgttatggagtccagcaggaggcaaacatgcccgcatgatgctgaagccgaaggagcggtgcgctccgtactcctcggtcaatattaaacatgagaaaagaagaagcatatcttccccggagataacaaaaaaatgttcgcaaaaggcacgcgatccaatacgagaacactcggaacactgcttttgtatatctttactgagtggacgatattcgcctgcccttgtgattctctgttttgctcgaatggaatggaatgtacatagcctggtgtaggttttcttgcacatgctggtcgtctagatagccatcgtcaggatcatgtgtcgctggacttgtaatgaaagtatatgattttactggagtaacaatgcctcctctcgtaatggaagtatatgtaatgtaatccgctggtgttgtttgccagcattcc

SEQ ID NO: 8198 - DNA, 1056 bp, Zea Mays
gtcgatttttttttccagctccacttgagtcatgtgacgagaagatttgcagctagtatatcagaacggtggatttgggcccgagtgatagcgccggaggaagcgtgctccgtgtgggccctccctccggagcccgcccgcgaccgtttctgccgcatggaggaccgccgccgcgtgcggcgttagtcggccgggcggccccgccttccagttccagccgcttggaagccgtcgaggtactccccgccggcgtccaaccttacacagtccgtgttacggggcttgcccgtggcagcttcttctaccagtgcgtgtgcgtctacctccttctggagcccacccccgaggaggtgggagcgagcgatcactgctgtgccgacttcggttataggagaaaaactcactcttatatggagactttacagatgatgatgatgaattgatgaggaggcaaagaagaagatagatgagctgatcaaggatatctgtggaatagagtttgatatcactgagcttgtgctttatagaaggatgccatagatataagcttggagtcatgggaattggtggaggtgtgccatcttgagaagaagtgattagtttcctctccaaggtgattctgcttgttatggagtccagcaggaggcaaacatgcccgcatgatgctgaagccgaaggagcggtgcgctccgtactcctcggtcaatattaaacatgagaaaagaagaagcatatcttccccggagataacaaaaaaatgttcgcaaaaggcacgcgatccaatacgagaacactcggaacactgcttttgtatatctttactgagtggacgatattcgcctgcccttgtgattctctgttttgctcgaatggaatggaatgtacatagcctggtgtaggttttcttgcacatgctggtcgtctagatagccatcgtcaggatcatgtgtcgctggacttgtaatgaaagtatatgattttactggagtaacaatgcctcctctcgtaatggaagtatatgtaatgtaatccgctggtgttgtttgccagcattcc

SEQ ID NO: 8199 - DNA, 2891 bp, Zea Mays
aagcaatcgaaggtattatactgttgaaagctgaaacaacacagtatcaaatcttaaaggtactattcaaattggagtgtgaaatgacacggtatcaaatctcaaggcatataaatacagttgaagcagtatggtatcgaattctcccaccaatagtgagcctacatttgatggcgtcatgaaatttcgtcttcatagtatgacaggatcattccctataaattatccctgtgtgttcacagatccaaacaagagatttgcgaagtagtacatctggcgagttcaagtcgattataacaacttaacatccacatatccaacaaaacaatcaacataaggacaggctgaacagcagtaaaaaccaacagacagttgaagacaaagtgtgcctgaaaagagcagggaggttacacttgagtacaaaatacgtgtggatggttagatgatctgctccagtagttaatgtttaaagaacaaagaacatgttgtttctaactcctagtttggctcatttgaagccgtccaagtagaggagtgctccagtaatctacttcatattttacacgggcccattgtacattattaaaccatgcgtatagagttgccacgtttgacatttgtctatctctcctctgctttgttgcaaatgtattgattactaaatagaaagggtgaaaactaatggatctccactaacccaacaacacaccaatccaagtccatctgtacatgtacaatcatacttgacactgctgacgttggattcagaatttctgatcaatacccccaaacaaattatgggatataatatttttttagtgcttttggcttcttctatgcggctatgccttgaccggcaatggttagtcattaacactttaattacgggatatgatttatttttgtgtttttggcttcttccatgcctatgcattggacggcaatggtcagtcactacacgcttcattggtaacatcgactggttatagattgtccatggagacatacttgtcttcattattagaacaacaacaaggtgagcgagaagcattcttgtgttcttccggtaagtgccataagctaaaggggatgcagagaggttggtttattttacttctcttgcacatacctttctacttgatctttcaagctttgagctcctcaaaatttatcaacaggatacgaagcgttgctaggatgcctctgtgctggggtgataattggggccatagctgttttctgcagtgttaggagaagaagagccagcaagtcccaaccatcaagaaacgatattgaggtcgcgttggcatcccttgagtatgaggagactacctgcaagccgatgtcgatcaaagaaatatacacagcaactgaaaacttgagtccatcaaacgtcattggacagggtattgcaggcaaggtatacagaggagtgctgacaaatggctggcctgttgcagtgaagcacattgttaagaatgagcatgcagaaacattcctaagggaagttaaaagcctgtcacatgtcaggcacccgaaccttgtgtcattaagaggttactgtgacgggcaggaggagtgttttcttgtgtatgagctgtgcatcaacggtaacctatcagaatggctatttggaaaagacaagaaccttccatggattcagaggcttcagatagcacttggaagtgcttgtggcctttggttcctgcacatataccctgaaggctgcatcgttcaccgtgacatcaagccaaccaatatacttcttggggttgatatggaacccaagctgtcagattttggactctctagagtcatcgacttaggtgtgtcgcacgtaagctctgaagtcagaggaacatttggctatgttgatccagaataccgccacaaccacagggtgaatgctgcaggggatgtgtacagcttcggcatggtgctcctccaactcctctcaggaagacgagcaatcaacatcatgaatactgctatgccaatgtcactggacaaaatggcttctacacttatccaagatggcaatgtatcagagtttgctgatcctaggttgaatggagagtattcaacggaggcatttgacctcagtttgaagcttgctctgttatgcactggccacaagaagcaacggccatccatggagcaagttgtgtcaagacttgagaaggctcttgagatatccatgagagatgatgcaaaacacaacaacattagcattgtcgaatcccttgcatagctattatgtgtaatccttaagacccttgatgtttacatgaccatgcttaagcatttttgtgcgctaagtgaacgaaaaaccattcgagtgatgagaaatttacatcagaaaagttaagacaaaccaatagaattagttcacacctataaccagagatactgaaagaccaaatctagggacagtactacgatctagacttctattagagcacaggcttgaatatttcagcaccttttctgtcacactatacagagaagtatagctacagtagagaaaaacctataagggctagtttggtgacaagggaattgtgggggattgaggaggaaattagtccatttcctcctcaatcccgcccaatcctcctcaattgctttgtcaccaaactagccctaaaggtgtcaagcatgatacctcttagtataatgagtttaatgcagcacttgaattcactgtgatggtccaagtgaatatgctatctttcaacttactataaaaaggaaacgctggtaagtgtacaaggcacgataactagcttgacagacatcatcactttatagcatataccaactagtgccaaatgaaaaatatagtcatgtgtgccttgaatacaaatccatatgatccacctctgcgacca

SEQ ID NO: 8200 - DNA, 3224 bp, Zea Mays
gtaacaccagctagcgctgttcatcccatcccatttccaatccgcgccaccacaaacaaagcctcaaaggcgaagagtcgccatgaaaggccgcgtggtcaagctccgtgaggcgcacaaggctggctcgccagccctctgttccgcctcctggggccccagcggacaacacgtcgtcaccgcttccgccgcggacactgccgtcctgatccacgacgccgccacggtgctcgccggcggtcggggctcgggttcgtcggcgctggctactatccgtctccacaaagacggcgtcacggcacttgcagtcgcgccgggccccagcggctcgctggcatcgggatccatcgaccactccgtcaagttttacaccttcccagaggggcagttccagagcaatgtcgcccgattcaccctgcctatccgatcactcgcttttaacaagaaaggcaccctactggcggccgcaggtgaagatgatggcatcaagctgatttcaaccattgacaacacgatatcgaaggtgctcaaaggacacaagggctccgtcactgggctggatttcgacccgagaaacgattacctagcatctgtggacagcttcggtaccgtcatctattgggatctttgcattggtgctgaggcccgtaccttgacacgtattgctcccacgtttcggtcggataactctgtcaggaatgttctgtgctggagccctgatgggcagacccttgctgtgcccgggttgaggaacaatgtggtgctgtatgatagggacacgggtgaggaggtgtgcacgctatatggagatcatgaacaaccagtgagcagcctttgctggtctcccaatgggaggtatctggccagtgctggcttggataggcaggtgctcatctgggatgtgaagtcaaggcaggacattgagaggcagaagtttgatgagcggatatgcagcttggcttggaaaccaaatggaaatgctttacttctgattgatgtcatgggcagggttggcatttgggaatcagtcgtaccttcgactatgaagtcgcctaatgagggcatacctgatctcaactccaatatggttcctctatttgatgacaatgacgatgagccagacacctcagttggcttggaggatgatgttgatgatactttcagcgattcaataactttcaaccacaagagaccaaggaggaagtctacgtttgatggagatagtgagaatgaagatttaatacatcaattggaatataccaaaagaatgaaagataagcaaaataaaaatgaggatgctgggaaggcaagaggtgattctgccacaccagtgacgttggttacatcaacaatgcaagctgctttccagcctggatcaacgccaccacagcctggcatgcgaaatttcctcgcatacaacatgcttggaagtatcactactattcaaaatgaggggtattcacatgtggaggttgacttccatgacacaggaagaggacctagagttccttccatgacagactattttggtttcacaatggctgcaatgaatggatcaggaagtgtgtttgcaaatccgtgtaagggtgacaagaatatgagcactctaatgtaccgcccttttggtagctgggctggtaacagcgagtggtcaatgagatttgaaggtgaagaagtgaaggctctggctcttggtgctggatgggttgctgcagtcacaagcttaaattttttgcgcattttcaccgaaggaggcttgcagatgcatatcctctcagttagtggcccggttgttacagcagcaggttatgaagaccagctagctattgtgtcacatgcttctgattgtttgccctctggagatcaggtgctggatgttaaagtattcaacatatctgaggggacacaatcaatgtccggtcgccttgttttgacaccattgtctcgattatcttggtttggattcagtgagaatggccaacttagttcatatgattccaagggaattctgagggttttttccaatcagtttggtggaagttggcttccattatttagttcggtcaaggcaagaaaatctgaagatgaaagccattgggtggtcggtttggatgcaaataatatattctgcattttatgcaaaacccctcaatcttatccacaggtgatgcccaagcctgtgctaagcatacttgagctgtcatttccacttgcgtcatcagatcttggggctaatagtttggaaaatgagttcttgatgaggaagttacagctatcccagattcaaaataaaatggaagaaatggctgcattgggccttgacaccacttcatatgatgatgaatcgttcaacatggaggcaggacttgaccggtgataagctcgttcgagcttctgagcttgcaagattattgaaactagagaagtcaatgaagggagctctatcactagtgacacgcctgaaacttcccatgctgcaagagaagttcagctccataattgaggagagggtgttaaatgataaaataatagctggagcaggaggattttgctctaatgctacaatcatgacgaacacaccagtgctgaccactcaggcaactctaccttctatgtttatgcaagatgggaaccgttcgcttgaatcttcattacccaaactcaatattgtcaatcaacaatgcaattcaactgaaccaaagaagccagcaggagaacgagggattgaaattaaggatagaactcaaaaagattcatctgcctctgttccatttgccaaggtacctaaaaacagtgaaaatcagaatcaggaaggaggcattgatcatactggtgcaaaaaaagagagcactaaatattgcaatcgagcagagcctcagaggccagttaacccttttgcaaaatcatcatcaagcaaagaacagtcatcatctcttttagattccataaaaaaaatgaaagttgaaaaacccaacgcaagaatttgaaatgaattattcttacttatgtcatggcctgtagggggacaaattgttagacctccactgacatctgcaggatctatttttttagttttcttctgctagcatatgtaataaccatttacttgtaaatttgtttctcatgtttggtggattattgtgccgttgggatgtcaacattatctgatatattacccctatttatgaaattagttgcctttgaattgctgtcatataatattg

SEQ ID NO: 8201 - DNA, 1582 bp, Zea Mays
atatattgcagattattctttttgcagagagagaatcaaaatcactttgcgtgcagcatcgattgggtcggaaatcgagggtttggtaagcgagatcgccgccggtgacagactgacagggacgagatggacgccggcggaggcggcgtcttggccgccgtgctctgcatgctgctggtcttcgccatcttccttctcctcctctggcgccgccgctccgatgccgccaccgccgataaccaccgcgtcccgccccagcccctccaggaggatcaggtgctgcacggtcgcgcggcggcgcgacggatgcgtcggaggcctggggctgccggagcaggctcctctactgcgtcaactagccgcaatgctgtagaggacgacgcggagagtgacgatgaggaggtccccgaaggtcgcaacgtacccagatcctccaaaaaggagaagaaaaggcaagagcgagagatgcagcgtcagaacctgcacgggattcatggaggagtaaacaagaccgatacgacgaaatgaggaggaagaaggatgaggagcgtgaggcacaagagaggcaattggaagaagaagctagggcacgaaaagcaaaggaggaggctgctgctgctttagagtttgagaaatggaaaggggccttctctgttgatgctgaaggtacaacagagagtgagacacaagacgatggtcagggtttgctccacaactttgtggaatacatcaagaagcagaagtgtgttcccctagaggacctagctgcagagttcaggatgcgaacccaggactgtatcaatcggattgttactctggaaagcatggataggttatctggggtgatggatgaccgtgggaagttcatctacatctccactgaagagatgaaggcagttgcagagtacattaggaagcaagggagagtgagcatatcacatctggccaacaactcaaaccagttcatcgatctggagccgaaggcccagtacgaggtggagagccagcaggatgacagtgcagaagcaggcacagaagcatgagaattccttgtgacctggcaccatgtcgtgctcaatgatgttttgtagtgtgatgacttaacatggtttgagttgggcactggccatataatatatgcagtagtcggtataaacatacttgttctgacatgctagataccattaccccatgcagagaactcaggcttttgttctatcatcatgattgaaaatcatcggttgaccttggtggtgttggggaggagggaggtggtgtttgagtctagcagcaagagatttggcaatgattctgtagatgacaaagactttgctcggagacaaggcagacttgtagtcaggttcacaaatcgtcctattagtaatatatagcctttgcagtgccggttgtgttcttttatgtgctttcttttcgtgcatttttactcaatttattgttgggaaattgggtgaaggtaagaagcgaaggccttcggggatgagagacaatttctgtcattagagttcgcgtcccccttttataggcgtacacttttaccctttggaagctagggtatatttct

SEQ ID NO: 8202 - DNA, 1369 bp, Zea Mays
tctctttttaccaacatcatgtgaacccactcctttttttgtaaccacgaaattaactttgtgtattttgcttgcaaaaccaattcaagttcaattatgctataatttttaattatagttacacttgtatgtatgtgcattttccatgaaatttcatagttttgcattaatcgtaggtttgaaactgcattagcataattgcaggaatacattggatttcatgttttatcttgatgtaacgccccattttttcgagccaatacatgcatgttaacattatgtaaattcatgtaaataggaacccgcctgacttagttcaataagatagttctgttcgtttcaaatatatttatgttttatcttgaggtaaggccccattttctggaggtcgtctttggacatgtacaaacaatctcaacctatgttgaaaaagtttttattcaattagtgctatccctatcctataacatatgtcatcattctggactcgatcccatcttgtatggacataaatccaacgcaagatacacaattttgcaacacttatatattgaacatgttgtcttttttgtaggccaacattttgcaccatacaacatagcaagctaatcgctatcctataaaatttgtcttttagtttatgtggtatcctcttgtcatatagaatgtcaggtctatgagaggtcaatgaagatggaagtggagcttcgggcagtacatgaaatgagagctgagcttgcacaagttcgtatggacattcaaaaccttggtgcaatgaggcaggaactcatgggccaagttcagggattaacacaggatttggctcagtcggcagaagatttgcataaggtgtctgcattacaagctgaaacccaggagatcaaacatgaaacacaacatttgaggtgtggagaaacttcgagctgaggttggtaacgcgtagaagaggtcacgggccattgtgtcttcaggcaatcaaggttatattggaagctatgggaaccctaaggccaattatgctgcaaacccttttaactctgggtatggcattaatcaagcaagtgctgccactgattatggttcccagtatggaactggtgcagcgcatggttcttgggtgcctacgacttgcaaagggcacccggacgtagataagtactgccaatttgccaggcctttcaccaaagtgtacacatagctttggcaatgactgtatgaatgttgtggtggatcagatgtttaacggataggaatcaggtagatgaattgtacacatgtttacttcagtttagcttctatcggtctgtgcaaaggaacatatatttattgaatcaagcgtgaatatattgaagtaatgtgcaattgtgaa

SEQ ID NO: 8203 - DNA, 2361 bp, Zea Mays
cttgacgtcacttcatccaccctgctttagttctatgcctaacatcttcatcaatattcttgtctctctgtagcattgatcctaaatacctaaagtgtccttcctaggcattacttgaccttccaaatgtgtagtagtgccgaaatcacatttcatatattcggttttaattctaccgagtctaacatccaaaataattttaataggtctatgagaggtcaatgaagatggaagtggagcttcgggcagtacatgaaatgagagctgagcttgcacaagttcgtatggacattcaaaaccttggtgcaatgaggcaggaactcatgggccaagttcagggattaacacaggatttggctcagtcggcagaagatttgcataaggtgtctgcattacaagctgaaacccaggagatcaaacatgaaacacaacatttgagatctggtattgagcttgagaagaaaggatatgcacagagttatgagcagggacaggacatgcagatttttttatttatttcagtggcttctttttatcgaacgcgcaggagaactgcgcatcttatatattaagaaaaaggagaaagaggtctaaaatagacccagtacaagctgccaaaaaaaatatatcaagacagaaaaaagaaaaggggggggggggtatccaaacaacccccagccacaccagcacctaaggccacaatctcctaagatctcttgcccctgccaagccccaccgaacagcatcctcatgaatatgctgcatgatgatgctgatgttgggggatgcaccatcaaacacacattcatttctatgcttccatagccaccaagccaccagaatcactaaggaattaaatcctcttttctggttttttggcacctggcactcagcttctctccaccagtcttggaaggtcgttgttgccaatcctggagtcaggcgatgcagccctaccttatgcaaagtctgccaccaagtgtctctggcaaacacacaagccactaagatatgctgaactgtttcctcctgctggtcacaaagggggcacctaacaggatgctcaagacctcgtctgcttaatctatccgctgtccagcaacgatttagagaagccaaccaaatgaagaatttacaccttgggggggcccaacttttccaaattctagtagctggctcaaaagagactgaaccagccataaaacgatcatatgccgatttagtggaataatctccagatgcagacggggaccatctatgcacatcaggaatccccggatgtaactgaaaaccttgcactaggtcccaaattactaagaagtcgaagataatctgagctgacaggctgccagatatgtcattaacccatctattgtttaccaaggcttcttgcacagatctgcttttcttgattctcactgtaatatggctgaccaaagtgggggcaaggacagatattgattgcccatgaatccagcgatcagtccagaacagggttcgagagccatcacctacagtagtgtggaccgaggcagagaaaagagctttgacattggaatgaaccttgaacaagaaatctgcccagggcctttccggttgagtttttttgagccaaagccatcttagatttaaagcccaaccaagaacttcaaggttatggatacccaggccacccatgctaagtggtctgcaaactcttgcccaaccaatagagcagtgaccacctctgatatcttttctgcctttccacaagaaacccctccgaattttgtcaatagccttgatcacccatttagggcattgaagcactataaggtgatggataggaatggctgtgagcactgatttaaccaaggtcagccggcctgctgtgtgaatgagggcagatttccatccggtgtggagaaacttcgagctgaggttggtaacgcgtagaagaggtcacgggccattgtgtcttcaggcaatcaaggttatattggaagctatgggaaccctaaggccaattatgctgcaaacccttttaactctgggtatggcattaatcaagcaagtgctgccactgattatggttcccagtatggaactggtgcagcgcatggttcttgggtgcctacgacttgcaaagggcacccggacgtagataagtactgccaatttgccaggcctttcaccaaagtgtacacatagctttggcaatgactgtatgaatgttgtggtggatcagatgtttaacggataggaatcaggtagatgaattgtacacatgtttacttcagtttagcttctatcggtctgtgcaaaggaacatatatttattgaatcaagcgtgaatatattgaagtaatgtgcaattgtgaa

SEQ ID NO: 8204 - DNA, 2768 bp, Zea Mays
ttgacgtcacttcatccaccctgctttagttctatgcctaacatcttcatcaatattcttgtctctctgtagcattgatcctaaatacctaaagtgtccttcctaggcattacttgaccttccaaatgtgtagtagtgccgaaatcacatttcatatattcggttttaattctaccgagtctaacatccaaaataattttaataggtctatgagaggtcaatgaagatggaagtggagcttcgggcagtacatgaaatgagagctgagcttgcacaagttcgtatggacattcaaaaccttggtgcaatgaggcaggaactcatgggccaagttcagggattaacacaggatttggctcagtcggcagaagatttgcataaggtgtctgcattacaagctgaaacccaggagatcaaacatgaaacacaacatttgaggtacatgctattaaatatgtgatctactcttttgaatatagaaggtctaaggattttccacatgcaaacaaactcgttattaatgatgcacaagagaagcaatgatacgcaactctcatgcctattcaaggaaaaaatacaaatcattattaatgttttatctgctcttccctgctttgccttacctcttcctagtcagcattatgagtaaacattgtcatttttcccttttcacctggtcaaaatgttaaactagtcaaaacaccctccactccaaactggattggtaagttcaaaaaaggatttagtggaattttgattttctgctgagtaatagagaggtgaatttgcaacgaatacctttgcttttattcaatcgtctggtatttattatgagccaatatgcagatctggtattgagcttgagaagaaaggatatgcacagagttatgagcagggacaggacatgcagatttttttatttatttcagtggcttctttttatcgaacgcgcaggagaactgcgcatcttatatattaagaaaaaggagaaagaggtctaaaatagacccagtacaagctgccaaaaaaaatatatcaagacagaaaaaagaaaaggggggggggggtatccaaacaacccccagccacaccagcacctaaggccacaatctcctaagatctcttgcccctgccaagccccaccgaacagcatcctcatgaatatgctgcatgatgatgctgatgttgggggatgcaccatcaaacacacattcatttctatgcttccatagccaccaagccaccagaatcactaaggaattaaatcctcttttctggttttttggcacctggcactcagcttctctccaccagtcttggaaggtcgttgttgccaatcctggagtcaggcgatgcagccctaccttatgcaaagtctgccaccaagtgtctctggcaaacacacaagccactaagatatgctgaactgtttcctcctgctggtcacaaagggggcacctaacaggatgctcaagacctcgtctgcttaatctatccgctgtccagcaacgatttagagaagccaaccaaatgaagaatttacaccttgggggggcccaacttttccaaattctagtagctggctcaaaagagactgaaccagccataaaacgatcatatgccgatttagtggaataatctccagatgcagacggggaccatctatgcacatcaggaatccccggatgtaactgaaaaccttgcactaggtcccaaattactaagaagtcgaagataatctgagctgacaggctgccagatatgtcattaacccatctattgtttaccaaggcttcttgcacagatctgcttttcttgattctcactgtaatatggctgaccaaagtgggggcaaggacagatattgattgcccatgaatccagcgatcagtccagaacagggttcgagagccatcacctacagtagtgtggaccgaggcagagaaaagagctttgacattggaatgaaccttgaacaagaaatctgcccagggcctttccggttgagtttttttgagccaaagccatcttagatttaaagcccaaccaagaacttcaaggttatggatacccaggccacccatgctaagtggtctgcaaactcttgcccaaccaatagagcagtgaccacctctgatatcttttctgcctttccacaagaaacccctccgaattttgtcaatagccttgatcacccatttagggcattgaagcactataaggtgatggataggaatggctgtgagcactgatttaaccaaggtcagccggcctgctgtgtgaatgagggcagatttccatccggtgtggagaaacttcgagctgaggttggtaacgcgtagaagaggtcacgggccattgtgtcttcaggcaatcaaggttatattggaagctatgggaaccctaaggccaattatgctgcaaacccttttaactctgggtatggcattaatcaagcaagtgctgccactgattatggttcccagtatggaactggtgcagcgcatggttcttgggtgcctacgacttgcaaagggcacccggacgtagataagtactgccaatttgccaggcctttcaccaaagtgtacacatagctttggcaatgactgtatgaatgttgtggtggatcagatgtttaacggataggaatcaggtagatgaattgtacacatgtttacttcagtttagcttctatcggtctgtgcaaaggaacatatatttattgaatcaagcgtgaatatattgaagtaatgtgcaattgtgaa

SEQ ID NO: 8205 - DNA, 3812 bp, Zea Mays
gcgagctcaccacgagtattttgcccagccctactggtcggcctccctgactccctccgccgtgggaaaggaaagcggaggaggaagaggagccaagccgctcgcctcaacacacccccacccaagcaacacgcggaaaaggcgaggcgatggtggtgcggcggctgggcggcgcggggcgcgcgctgctcacgctccccaacatccggaggcgggcgtccaactcctgggccgccgtctgcgacaccttcttctccactaagcaagtgttcgagaaccaccgcatcgtcttcaccgtcggcacctccatcgcctccgtcctcacggcttgggcaggctattcacttcgccacgtgcaacaatcaaggattgaacagaggcttgagtcaattgaatcatctgtccgcggtaggctggcgaggtggtgcttggtacgctcgaaggggcttgagaaaagagcaacaaaagctggtggggatgggtcacatgaagtcgcacgacagatggcactggcggcccttcaacaggctcaggaacagcaggttagcctccaagaacaagcgcgccgacgcccatccaagcaccgaggccccctcgacgtcaagcaacgcggcctctgcggacgttagctgtgcttctcagccggcagcgggcagtgcatgagcttatatatccacaacaatggactaggatgtgactgtgagcttggggccgcgtagtagtccatacgacttggtagaacagacaatgtgagtcagctcgatctgtggtggatcgtttttacatgcgtgaaccagtacagtgtacatacaaatgtacaatcatatgtactttgataaaccattacataagctattcacctttttttttctaatacaactgcgattatttgtactgttaaagccatatatacgagccttagcctatataaagcatggctagaggcgaggtatgtagcacagtataacatctttatgctcacatcttgcatactttgtcatctttacattcgccctgcggaaggacaaagcagtcagtaaaacgaagccaatgaaatgttcgctcgcatgcaaccagtatgattgttacagagcttcagccagatgaagcgagctcatgatcagaactcagaaggacaacttactgcagctcttcgggatgccatgatctcttctagcggaggtcgacctgtcaaagtaggaaaaaagagtgatcaaatttgttcaccccaatgcgcaagatattcaatgcacatttgcattagatttcattgaagttttgatccatgtgcatagttcttagcagctatacctgtaatttgcatacggtattttgcccacaaaccatatactgcatttgccatgctagctacctgcagagtattagaatatgattgtttttttagaacaaattagaaggtgaatgaagaagtaccggtgttagcaagaacataaaacttatgtttgatctcagttggaagacgttctgcttatataaaaagcatgcggctgaatggtgagcctatgaagtgaatggaccagtccaagatgatcatatttttgctctctgcaagtagcgacttacaggctcatacttagtaacagcataaacccatccaagtcctacttcctcgtacagttttctaaatgcctgcaataataacacaataaatattcacatgaaacatacctgatgtttagactaaaaagaaacaaattctgactaggccttttatttgtcttggcatcacactcataccctgttaagtttagcactatgttttggaatgagctcttttgtagcttggtcgaaataactatgttgatagaccatactattctacatcaagttctttagaacagtgtttcgaacgcgtcacctaggcatccaggcatacccagctcgccttgggaatcggtgccttgctgcctgggtgtccgagcggacccagcacttgcctggatgcctagtcgccttttaaacactgcttcaaaacattattcactaaggtttgtaacagtttagtgattctaagctatgcatgcaatgttgtcctgaatcctgtcaagaaaacatcagtacctaaattttgtttggctctagaagagaacaaaattgattttggcttgtacacactcatctatgcattaacatagttgctcattgtcaagtgaacacaagggaaacatatgtgctacaatattatgttaaagaaacatctagccattcattaataacatgtataactcaactggtcatttccttcatttgatgcaaaaatgttcagacagtcagcctagtctaatttaactatccaacagttcatctggcactaagccagtaggcagtagccaatctgcctattgcaaagttaaatcccagacgacttcagcaggacatgatgttaatgttctacctcaacgtctgtgacaacagttccatctgaaagaaccgcatgtatcctccccatggactgaaaagagaaagcaaatttatttactagaaattaaataaacaatgcacatgatcttctagcttcttatatttatctctttggccataatacaaaatgctaactttcagtctggtcccagtaaacaaattacgaataagatgtccttctacattcccccagaaagtgaatggtaggaactgagaaatcaaatagcattgctagcagtggagtaaatggtgatcatacaccaggctattgatgagtttaatatttttagattttttgagaaagcatagaagcatgaatgcagacaaactaggaacacgaaacaagttaggaaccatgaggaagcaattgaagtatcagcataacagtgccagtacaaatgacagtcataaaatattcaaaatcaagtgtttaagcaatgaaaaaaaggtcatcaatttttcagtggaacgtgcttgctaaaattggtagggttaatctacgtgtgtgccactatattaatgaaaagtaacttttataccatagcctttgccttttaggaaacaaaacatgacatgaccaatttcactaatggggaaccataaaccggcgagaaaaaactgaaataaattgaagtaatacgcacagtttcataatcaaggccctgattgtcatctggagagtaatctttcgagcttatgtcaacaaactttattgctccataggatttgtttctttctcttagcatgtttacctgcacaaacattaaagtacatgaaaatttagctgcagtggtatcagtatgatggccacctattgtttcaaccataaacaacattatcagttaagaaaatccatccagatttgaataagtataagtcaaatggcatgtgcctttcatgagatagtgctgcatattgagctctaacatgctctagcagtagtgatagggtcctaaaatatatagtaaaagctcatggtggagaactccatggtctgcactgagtgccactgaaagaatggggatggcatcaaaatgaactagccatctagttttgtaaaagttaagtggcatgtatacaattaatccttccgatatcccagctgaactgctgaagttcattgatataaatgataaagtatagagctggtgaagaattaatggggaaagttaatccagaagtatctgccaaggtatacaaactgaaagctgaagcattttcagaacataaatatcacatgaattcaacaagaatttatctacagcatgcgatggttaataatccaggcaataatctgtactctctcgcgaaagggcctctagctgagttggttaggtggtctgagtagcactcctcaggtcctgggttcg

SEQ ID NO: 8206 - DNA, 907 bp, Zea Mays
gatccatttgaaccggaggctaccgctgcctcaagggcctcctcgctcgctcgccagtcgccacccgctcacggagacagagaggccgatggcgagctcgctggcccgcctgggagcggcgctgccacgcgcgcgcccacgcgctgcgacccgcaccctgccaccgccgcggtgggacgccgcggcgctcggcgcctcccgccgcgccgcaccgaacgtttgcaggtgcctagttcattccgacgttaaagtagcccctacatcggacttcaaggacagtagcaaatctgaaacttggaggatcaagatgctctacgacggtgattgccctctctgtatgcgtgaggtaaacatgctaagagaaagaaacaaatcctatggagcaataaagtttgttgacataagctcgaaagattactctccagatgacaatcagggccttgattatgaaactgcatttagaaaactgtacgaggaagtaggacttggatgggtttatgctgttactaagtatgagcctgtagctagcatggcaaatgcagtatatggtttgtgggcaaaataccgtatgcaaattacaggtcgacctccgctagaagagatcatggcatcccgaagagctgcaggcgaatgtaaagatgacaaagtatgcaagatgtgagcataaagatgttatactgtgctacatacctcgcctctagccatgctttatataggctaaggctcgtatatatggctttaacagtacaaataatcgcagttgtattagaaaaaaaaaggtgaatagcttatgtaatggtttatcaaagtacatatgattgtacatttgtatgtacactgtactggttcacgcatgtaaaaacgatccaccacagatcgagctgactcacattgtctgttctaccaa

SEQ ID NO: 8207 - DNA, 145 bp, Zea Mays
gtcaagaagtaagcatgagagtacttccatgccaggaaagcagaaattgctgcaaaaacaggggaaaagcgagttgataggcaacatgacacatatacttggtaacacaaagcttaggatgatgatattcattctacttgcctga

SEQ ID NO: 8208 - DNA, 831 bp, Zea Mays
caaattcgaggaagcaaacaggtgggctgggcacctgtactgcgagcagccggtcacagcgcgcagcgccgtctcctgcgattcccggctgcctccacctcttctcccacagcgccggcgtgctcctctcctttcacgctacgttccctccggccccggcgtcgacggctaagaaacccttaacctaggaacgagttcgcaccctcgggacctgtggcgatgcatctcactctcgaattcgggggcgggctggagctgctcctggagaactccaccaaggtgcacaaggtggaggtcaccacgcccaaggacggccaaggcaaggtgacgatgaagttcttgctctcttgggtcaaggagaatctgatcaaggagcgaccggagatgttcctcaaggctgattccggaggcctggggttcttgtccttataaatgactgtgactgggagctgtgtggtggtcttgatgcagagttggaagagaaggatgttgtggttttcatctccactttgcatggtggttagtttgattacatcaggatgatagcatcctatgattttcctgaaaatcgcaccttgtatcaagtctttggaagggatggattggtctgagttgtgtggctttctggagatactaattgcaaactgtggaactgcacttgttggtgccaatatcatcaaactatagttccattttcttactgggacgcaggcacataatattgtgcacaaccgatcctgtatttttccagtactgctgtggctctcccccgtttgctgtatatacataaatgaaaggtcaagtgaagtacgtatttctaaacactgttca

SEQ ID NO: 8209 - DNA, 4157 bp, Zea Mays
cctaatctttaactactatttaagaaaagatcgatgctataataacaggggggaattaccataaaaacatgcccggctaatccctcgcccggcagattctcgtgtaataaaagagcctgcccgacaaaggaaataaaacggctgaaataacactatggtggtgaagaaaaggggatcactgcaacttcactgcgcagatgtctcccttgcgcgcacgtgagttggggccacaaatcccaatcactttccatctcgttttcgcctaaaatcctgacaaacagtagcgtggccggctctggagtttgctatttaaacccgtttcctctcttccccctcctcacaatcacaggcctcccggcctcccgtgcgctattctctatcagcttacccagcacacagtacacactctaatctccacacgacccaatagatatacggggctgaaggatgaagcttagagcaaaagggatcggcctcctgcttctccttgtcttgcttgctctttgctccaccattgaagtcggcgaggcaagaagaggcaagcattggaggtcgtcgaggagctcaccgggctcatcccagctcaagaaaggcaagggaaagaagagcagctcccaccggcagtacggcgccaaccggccaggtccgaagccaccggtcagctcgacaccaagctctggcgctggcaagggaaatcatcagaatccgtaccaaccaagcccaagtccaagcccgaatgcccctgacatccctcctatgccaagccctgccaatggcagcaggcattccactcccgagccgccggctccaagctgtgggaagggtcagcagcagccatcacagccgccgccagcgacctcgcagggtgcagtattcaatgtggttgattttggagccaagggtgacggagttacagacgatactaaggcttttgaaggagcgtgggctgctgcctgcaaaaagggggcatgtacagttctcgtaccaccagaactagagttcctagttgggccaatctcgttctctgggccttactgcaaatcgaatattgtctttcagctggaaggaacaatcctagctccaaccagtgctaaatcctggggttcaggcttgctccagtggctcgagttcaccaaactaaatggaatggttattcaagggaacggcattataaatggcagagggcaacaatggtggacctactcagacacagaagacgaggatgatgatgacacgtacgatgtggagtttgaaagaatgccacagattaaacctacagcattgaggttttatggtagtttcaacgttgtagtggctggtatcactattgtcaacagctcacagtgtcatcttaagtttgacaactgtcaaggagtgatggtccatgacttgactatatcctcccctgagaacagtctcaacactgacggaatacacctgcagaactccaaagatgtcagcattcatcatacaaacctggcttgtggtgacgattgcatctccatccagacaggatgcagcaacataaatatacataacgtgaattgtggaccaggccatggaatcagcataggtggactaggccgagacaacacaaaagcatgcgtatcaaatgttacagtaagagatgtcaacatgttcagaaccatgaatggtgtcagaatcaagacctggcaggtaagcttgagaacataagtacaaataaaattctaattctaattcaacatccggcattagtacataatagttaataatgtcacaaaagaaaatctgaaaaaggaaagaaaacgtacatgtcatcgtttgctatctatacaagcaataaccttgaaaagttcaaagaagaaaaatgatgtcacccaaaacaattcctagtgtctaaacaaagtgaactctcatttctcgcagggtggtgtaggattggttcaagacataaggttctcaaatatacaagtctcagaggttcaaacacccatcatcatagatcagttttattgtgacagaagcacttgcagaaatcaaacatcagcagtggcagtatcaggggttcaatatgagaatatcagaggaacatttacaatcaaacctgtccattttgcatgcagtgacagcttaccttgttcaggaatctctcttaccggtgtgcaactcagaccagtgcaagtaccccactaccacctgaataacccattctgctggcaagcttttggggagctctacactccaactgtccctcctatagcttgcttgcagattggaaaacctgctggcaataacttacagtcatatgatgacatatgctgaaacactcaaagtgcctttgtttgttgattggtgcttatccatgagtggtcgttgtgatagatgcgaccccatttgcaccattgcttgctgatgagcacatatacagttattttgaggtcatcttattacaacattgtagcttttttcatcaaagtaaacataaatatattcatttgaaatggtcatacagcaacagtatgtacttgagttctccaaaaatgagtaaacataatgacaattgtttatttaaataagtgtaaacagggctatggcaaagggtccaactataaattgataaacaacatgggcgtacatttacaactataatgatagctaatcctgaagaatgagattaataattagaagtcaatgtctaagggtaagatctcttggatcaaatacggaaagaaaatgattgctcggaaaaactagacaatgtttagaaaaatgagtaagcataatagtcagtttctagttaacaaatatgacatattgcactgcacgaatatgattaccatagagataacacttaggaaaggggctattgatgtgtttagctgaaataattatgaaaaatggcaataaaaatgttctgtaaatatgcagaaagaggaaataactaatcaaaagaacatgatatttagaaatcaattccaatgtaaacaacatccatatgcatattttttttttgctttgttttctagaacctcagctaaataataaaacaaagcagcataaaaatagtaaatatgtaaggtcctgcaatcggttactaacttcatattcgttaacacattatgaggaagaaggaaactgaaagcaagatttagaattgtgaaagatattgtaccagttagaaaaagataaaacatagcatatctttttttctgtgcctttcttaattttttcaactaaacatagtatacctatgtgtcgccagctgtctattatcaagaaaaagtatgaattggtcaagaattttccctctaccattcatcttattgtctccactcacactggttgccaaaattcttgaagctctaatccatcaatcaatatttaaaacttacataatcgtaggtagaagggtagacctggtaggctggtacagtggtgagagatatctcactaagtcagcagtttgcggtttcaaagcagcctctctgcattagcgaagggaaagcttgcctcggtttatcccttccccagatccgacttatgtggggggcctttggcactcggtctgccatgcccttagataatcgtaggtctagtgccatggaactggaagtcttcctaacttcctattgattaatctaaggtcacatatgttacatacttacacggaagttcaatataacttaaacactgatggccataattcgaaagttttgggaagatggtgatgtccaattgttagtggactacgtcatctgcagtccatactgccattgcacgcttgtccaacagtcgaccagccaacaaaatcgatgtggcatatgaaggttatatcatacaaacaaaaaactgatcaagtacaaaaatgcaagctctcaccatgaattggaacatgaaaataaaccacatccattaactctgatttggggatactagcaatgccaatttgacaaagaacatcacccactgtttgcgtcccataaatcaaacaggtgataaatctttatattttgatcccagggagggggtgatttacccaataaaagatgcagcctaactaatcctgtcactgaaacatgatgcatttgcatgttgtaagggccagctacagatttatctcattgttactttgttagaaattttgtgtctcagtggtacgtttattaagactgaga

SEQ ID NO: 8210 - DNA, 2629 bp, Zea Mays
aaatagctaaacccaaatcgataccaaacccagcccggaacgcacgccccccgccgccatcgccggcggccagccactacaagcgcggtgtccggaacctgtactgtactaccaaccccaacagcctggactctgatgagccccagttcatggcctgccatctctcccccctcttcaatctccgactcttgctgctgctcggcgctgtcctcggaaacgccgtccttgtccgcgccggcggggcggaggcgtcagatcgggctgagccggacccgtactcgatcctgacgtggcacgactactcgccgccgtcgcccccactcccgcccccggacccggcgtcgtcgacggcgacctgtgagggagacctccacgggaagggggacttccgcacgcactgcgaggtcttcgaggaggtggaactgggcgacgatatctacatcacggggaacggcagcctcgtgctcctctctggcgcctccctgacctgcgagaaggtcgggtgcgttatatctgccaatctctccggcgaggtgcacctcagccgcggcgtgcgcgtcagagccggcagggtctcgttggttgccaccaacatcacagtcgccgacacggtcgttgtgaacaccaccgcgctcgctggcgccccccctgaccggaccagtggcgttcccacagggacgcacggcgacggtggcgggcacggtggccgtggcgccagctgcttcgtcaaggaagggcagactcaggaggattcatggggtggtgatgcctatgcatggtctgacctcgaacacccttggagctacgggagcaaagggggctcgaccagtgttgagaaggactacggtggtgccggtggtggcatcgtgtggctgtttgctgatgatctggtcatgaatggcacagtgctcgccgccggtggggatagcaatgagaagggtggaggtggttctgggggaagcatctttataagggctgcatcgatgtatggtggtggcaagatcagtgcctctgggggtgatggtttggctgggggaggtggagggcgagtttctattaacgtttttagtagacatgatgacacccagatttttgttcatgggggaaggagttcaggctgtccagataatgcaggagctgctggaactctttatgaagcagtaccaaagagtcttattgtcagcaacaacaatttgagtacacagacagatactcttcttttagagtttccaaatcaaccactgtggacaaatgtttttgtaagaaatcgtgccaaagttgctgtccccttgctctggagtcgcgttcaggtccaagggcaacttagccttctttctggtgctattctaacttttggtctcactggttatccatactcggagtttgaactgatggctgaggagcttcttatgagtgactcaataattaaggtgttcggtgctttgagaatgtctgtaaagatgctcctaatgtggaactccagaatggaaattgatggcggtggagattcgatagttgcaacttctttgttagatgctagcaacctgatagttctgaaggaatcatctgtgatacactctaatgctaatcttggagtccgtggccaaggtgtcctgaatttgtctggggacggagacacaattgaggcacaacgccttattctatcgctgttctacagcatacaagttggacctggttctgttttacggggcccacttgtaaacagaagtagcgatgatgtggccccaaagctgaattgtgaagcagatagctgtcctgtggaaataatacatccaccagaagattgcaatctaaattcttcattgtcgtttacccttcaggtatgccgtgttgaagatattgatgtatggggtgtcgtacaaggaactgtaattcatttcaatagggcaagaagtgtcactgtgcatacatctgggaccatcagcgcaacaggctttggctgtcgatctggagtaggacaagggaaaatgttaagaagcggtgtatgtggtggtggtggacatggtggcaaaggtgggaatggtttttataagggagaccttgctgagggtggagctatctatggcaatgctgatctaccctgtgaacttggcagcggcagtgggaatgactccacagagttgtccacagctggcgggggtataatagtgatgggctcatgggattattctttgccaagtcttgccctctatggttcagtagaatcaaatggtggcagctatgctagtggctctgttggaggacctggtggtggttctgggggcacaattcttctatttgtgcacactttgtccttagctgaaagctctgtcctttcaagtgttggtggcttcggaagtactggtagtggtggaggtggagggggaaggattcattttcattggtctaacattcctactggagatgaatatgtgcctgttgcagctgttaagggatcaatacttacaagtggaggagtcagcaaagggttaggatattccggtggcaatggaacggtcacaggaaaagcttgcccaaagggtctttatggtacattttgcaaggatgtcaatagagcaaaagggcgtttcttctttcaggctttctgggtcaagttggaaggctttca

SEQ ID NO: 8211 - DNA, 520 bp, Zea Mays
ctgcactaaaccatttggatgcatcttgaagtcacgttccaaaggagcttgcaagctgtaagaattatggtacgggaaggattcaacaaaagtgcacagtttgtgaatactccacagccaccagaaatgctgaatagatgagagcccaacgacacatatacaatattaggttccataatcaaaaaatataatattaggttcgtctagttgctggccgccaacatgtatgtgccctaattgattagtagaggttttcatttgatcacacatcaagtcatgtaaattggattcacatattgttttcagattattatggggattatttggatttatgttttgtgtttttttttcggcgacaacccattgtatgtactgctccaacgttcatggatctcactaccaaaccacaaaatgtttagaatgacagacatgttttgaagttatctagcctgttcgtttcgaattaaagtcaattgttcggactgctgtaattgcaatccataaagaaaatactacagtg

SEQ ID NO: 8212 - DNA, 1710 bp, Zea Mays
gcacttgcttcaatactagctcgctcaccactcaccagtcaccagtctagcaagcaacaacaaaggcgtaggaggaagcttgttttggaccgagcaagcgagccagccgagcgtgggagagagagaaagaggaattaattgatgggcgaggaggccagctgcgacgccgtcagcctgacggaggccggcaccaacgccaagccggtgggcaaggaggtcggccgcgagccggctgcagcccccgccgccgcggccgacccccggctgcagggcatttccgacgccatccgcgtcgtgccgcacttccccaagcaaggcatcatgttcaacgacatcaccacgctgctgctgcgccccagggtgttcaaggacgccgtcgacctgttcgtcgagcggtaccgcgggatgggcatcgacgccgtcgccgggattgaggccaggggcttcgtgttcggcccggcgatcgcgctggctattggcgctaagttcatacctctgcgcaagccaaggaagctcccaggtgagagattccatgaccatgcatgttctgtttttcttcttcttcttaacccatctccacactctgcactgtacccagctgttgcttttgtcgatctagtgcccagcctgtggcgacaccctgatcaagtatatgtttagcgaggagggttcttgcttagcccataatctctgacaccgccagagttgtttgtctggcctgcatgcagttgcagtcccgtgaatgggatattaaaagaaaaatgcaacagacggtttatacgagaccgatcattcattcattccccacttctgtccacaatgttgtagaatcatgtgctgacaccggctctcggaaacaattattattattattattggaaggtgaggtgatctccgagaagtacgttctcgagtacgggactgattgcctggagatgcgtgtcggggccatcgagcgatccggcgagcgggtgctggtcatcgacgacctggttgcgaccggagggacactctgtgctgcgatcaggcttctagaacgtgctggagccgatgtggtcgagtgcgcgtgtgtcattgggctcccgaaattcaagctgggcatccgtagacatgatgactatacatgagattccggtcggcgtcgtttgttattgcctaaataattaaaactatagaaggatttgtacaagttgaatggaaaacctgtatacgtgctggttgagtctcgtgaataatcggagaaatgacaacttattctcaggtgtcagagtgatcagggatattggctgtttactccttgctactgcgattgaacagtggagggacgacatggacaaggacaagtatattcggtgcatcactaagtcttggtgaggggagagattgtagtgttttaggctgagtagtgaagagcctgtagttctgcacggaacatgatggttattagttgatgcaacagcgttgctgttctattattgtttgttgaattttgtggctttggtttgaagcctagcctgggctcaaacagggatatgcatggcgcttgagtgaacaacttcgacagcaacacacacatgcttaatgtcagggaagtagctaggaacctgctacttgttacccgtacgtagtgtcatggaactcataaggtttagtggcaaaattcataaaaatgacacgggaaacgaacacagcacgcgtagcaggggaaaa

SEQ ID NO: 8213 - DNA, 1656 bp, Zea Mays
aaaagccttgatgtgtccgtctccgtcatgaagacaaacattcaccgagccgaccgttgccttccccccaactcccagccccagcgtcaactgactacactcgctgactcgctcccccggttccccttctctgctcgccatcttttgctctccgcttggctcgtcaatcacctcctacgctccacacgccgccggcgactacaactgcttctgccgtggtcaggttttcatcaaggtagaaaaagaaacttttctgtccggtcatggctttcccaactgcagcagctgttttgcttaatgagaacatgcagattcataaagggttgatgcaccaagtgccaaaccactgaaatcatcagccaaacctgagagaaaggctcttcaggatgtgtctaacattcctaaaggcactgctttaaagaacagatccacagtcaaagaggggtccgccttgaaagaaaggcctgcactccacaatgtgtctaacaacctcaaagagaggtccatcctgaaagagaggcctcctcttcaggatgtgtctaacacccgcaatgagaggtccatcctgaaagagaaatctgccctgtgtagccatgaagctattaagaacccagtgaatatttttgctgatgacgaagagaccaaagggtgccatgaatgggctaaggatgggatggagggcactcacttcactggaaatgattctcagaagttggataaagatgtgcaacacaaacgtatcaagaagaaagtggcaaaagttacgtcagcattgtatggctggtcacatgaggtatatggtcatgtgatgtttatggctatggttcccaagttttctgaagaatcgaaagagctggagctggaaccagagattcttccagacatcactaggtgtatgtctacctcaggcaagagggatgatgcaccaagcgccaaacggctgaagcctaagcttcaagaaccgaaggctcttcaggttcaggatttgtctaacactgtcaaagggagcccttctctgtgcagccatgaagctgtgaagaacccagtgaaaatattcactgttgaagagaccaaaaagtgtcatgaatcggctaatgatgtgtcggagggcactcacttcacaggaaatgatcgtcagaagctggataaggatgtgcaaggtgacaaaacacagctggttgaagattctcctactgatgatgagcttgacgactacccatttttggacaacagtcctgttaagtttgagctgaaagatgagtcagtgattccagatattggagcaatctgaagtgatagtgtttgtgcgattgttctgtagcaatctatgtagtacgatgtttagtacatgttgtttgttctgtagcaaactatgtagtttgagctgaaagatgagtcagtgcctcatcgggtacttttgagtaccgtagcggttgtcaagtttcatgctctcctgaaacatccttcgcaactcgcaagtgaaactctggtttatgccctgaatcagctgctgaataagctaatgattgcatgagtatccgttgatgcatagtagtgaaaggaatggctaagagggagtgaattagtttttttttaattttgctcaaatctatgttttcagttttcagctaatgattgcatgagtatccgttgtac

SEQ ID NO: 8214 - DNA, 1424 bp, Zea Mays
gaaagcctatgtcccctgctccctctagcccttataaaagccatgactgccgccactcgactcagtaggttaaagcgacgcccgccgccgcaagccgtccgccttgcccctcgaaggcttggtcctcctccttgtatcccgacctcccccgcgacagacccgtttccccgctaggctagagttatcgttcctctgcagcgatggcgatcaagcggaccaaggcggagaagaagatcgcgtacgacaagaagctgtgcagcctgctcgatgagtacaccaaggtgctcatcgccctcgccgacaacgtcggctccaagcagctccaagacatccgccggggcctcaggggcgactcggtggtgctcatgggcaagaacacgctcatcaggcgctgcatcaaggtctacgccgagaagaccggcaaccacacctttgacccgctcatggacctgctcgtcggcaacgttggcctcatcttcaccaagggagacctcaaggaggtgcgcgaggaggtcgccaagtacaaggttggggctcctgctcgtgttggtctggttgctcctgttgatgttgtcgtgccccctggcaacactgggctggatccctcccagacctctttcttccaggtgcttaacatccccaccaagattaacaagggtactgtggaaattatcacccctgtggagctgatcaagaagggtgagaaggtgggctcgtccgagtctgctctgctcgccaagctgggcatccgccccttctcgtacggtctccaggtcaccagcgtctacgaggatgggtctgtgttcagccctgaggtgcttgacctttctgaggaggacctaatcgagaagttcgccactggtgtctccatggtcgcttctctttccctggcactatcgtacccaacccttgctgctgtgccccacatgtttatcaatgggtacaagaacgtgcttgctgttgctgtggagactgactactcgtacccacacgccgacaagatcaaggagtacctcaaggacccgagcaagtttgctgttgctgctcctgtagctgctgcggactctagtgctgctgctgcccccaaggaggaagagaaggctccagagcctgccgaggagtcggacgaggaaatgggcttcagcctgttcgacgactaagccgctcttatcgtccatccgcccctattccatgtggaaaggattgatgaagaagatgcaacatgcgaggatgaacgttgagattcgtaattttttttaatttagtgcactttgtatcaaattttgtatgaatttatattttatttatgaatatatattacctataccatatctggagcgtgcaatctattttttaaatggtatcaaataaaaggactaagcgcactgtagaaaagtattcagaggacacgaaaatggcacacc

SEQ ID NO: 8215 - DNA, 775 bp, Zea Mays
tttattcgctttgaagccaacaaagtgcattatgcatgcaccatttagcaatggtatattttgtccaagacgctggcagaggaggctgcttggaagttctcaagggataatggacttgaaatcgttactataaacccagcgatggttattggtcccctgctgcagcctacactaaataccagtgctgaagcaatcctgaagttaatcaatgggtcatcgtctacatatcccaatttttgctttggatgggttaatgtcaaggatgttgccctggcccatatccttgcatacgaggttccctcatcaaatggaaggtactgcatggtggaaagagttgttcactactcagaactggtgaacattatccgcaacatgtatcctacccttcctcttccggacaagtgtgcagatgacaagccgtttgtcccaccctaccaagtatcaaaggagaagataaaaagcataggcatcgagttgattccactggagacgagcgtcaaggagaccatcgaaagcttgaaagagaaggggttcgctagtttttgactcgagcaagctgtgaaacataagtgttactgtactacgtgatgttgcattgtatacatgcatcggacttcgcagttcccaagctattttggtagctttggtctgtaagattacctaaaataaactgagccacgttgccacgctgtagcttttggacatgttatgctttgatcggattgagacacgtgatatatgatcgttgcttacaaatgtggtacgctctatctcc

SEQ ID NO: 8216 - DNA, 2693 bp, Zea Mays
ctgaaaaatccccctcccctccccgaggttgcagcggcgagggaggggagagataataataatcgcaggagggaaaagcagcagcgcaggcgcaaaaagcaaatcaaagccacaccaccaccaccaccggcagctgccgagagccgcgcccgcgcccgaacacaagggagagcggccggagaggaaagccaaatccatccactccaccccgtacgccgccgccgtccctgtccctcccctcttcccgcgcgcatgggccccaaatcgccagcgccgcgacgagcgcgcctgcccccgcggcggcggtagcagcagcagcagctgctgctgtgtgcttcgcgtcttcgccggggatggcgcggctcgggcgagcgggctgccgctccggtccagcccgagcttttttttcaggaattcctgaagacacattgagaaattttatgtccaatgtcttgcctgctgtattgatcctggagtttctcagtgggaccaatttgattgttcaaacgtttgctctagaagtagtcgcccctgccatgcctccattccaagtgcagcataccagacacttagcaacagctgctcctgctcacgtagatgctgaccctccggatgcagcttcaaattctagcgcagctcctttgggattagtgcagcctccagtgtctcctcacagtggttgttgtgcaccgaacatggtacaaaaacgagggacccgggactgccattgtgtttatccagtgagaattgagctcttccttcgtaatgtttccttgacttcaaactggagcaacaaatttcttcaagaacttgcttctcagctcaacctgcgcgttaatcagtttgagattgtaaatttttatgttgttggagcttctgggctaaatatcacaatggatatagctccctacactggaattagctttgctgctgatcaagtcaaggcaatgaattattcacttactctgcatacagttcggattgatcctgtgttggtcggggactataatcttcttaatttaacttggttcaggtcattggctccagctccagctccagcattcacaatggcacctagggcctctccatctacagcatctacctttccaagacagagtgagggtccaagcaaaaatagacatgcaagcctgatcacagtggttattatatgtgttggttctctaattggagtcttgctgattgttttaacaatatgcttctgcacatttaggaaagggaaaaagagagtgcctcatgttgaaactcccaagcaaaggacagcagatgcagtttctacagtggagtcccttcctcgccccaccagcacaaggttcctttcatacgaagaactgaaagtggcaacaaataacttcgagccttcaagtgtgcttggagaaggtggttttggccgtgtcttcaagggggtactgggtgatggcactgctgtcgctataaagaagcttactaacggagggcaccaaggagataaggagtttttagttgaagtggaaatgctgagcaggttgcaccaccggaatcttgtgaaactgattggttattacagcagccgtgaatcatcacagaaccttctttgttatgagcttgttcccaatggaagcctagaggcttggcttcatggtacacaaggtgctagccgccccttggactgggacgccaggatgaggatagcacttgatgctgccaggggattagcatacctccatgaggattcgcagccttgcgtaatccacagggatttcaaagcatctaatatattgcttgagaatgatttccatgctaaagtgtccgattttggtctggcaaaacaggcgccggaaggtcggacgaactatctttctactcgtgttatgggaactttcgggtatgttgcaccggagtacgccatgacaggacacttgcttgtaaaaagtgatgtatatagctatggagttgttctacttgaactactaactgggaggaggcccgttgatatgtcacagccctctgggcaggaaaacctagtgacttgggcacggccaattctccgagaccaagatagattaggagagctagctgatcccaggcttggcggccagtacccgaaagatgattttgtgcgggtgtgcacaatcgcagcagcctgcgtttcgccagaggcgaaccagaggccaacaatgggcgaggtggtgcagtcactcaagatggtgcagcgctctgtggagttccaggaatctgtgccaacacctcccgctcgccccaacgtccggcaatcgtcgacgacctatgagtctgatggcacctcgtccatgttctcttcgggccccttctcaggcctcagccccttcgagaccgaaaccattccaaggactgcggttttctcagaagatctccatgaaggtcgatgactggtggggggtggctgccttgccatcgccgagccgagccgtttctctagagcctgtagccatgtagtcaagcattcaaaggctggtggtccaattggcctggccagccattgggaggaaaggggtacctgtaaattccatttttctgcgccgtctcaaaagactactactagattattacaacccacaaggacgttctctggctttgtatggaagaaatggttttgttcgaagttgctgctgtcctcagtccatagctcctgaattacgcagacagacagtcctaac

SEQ ID NO: 8217 - DNA, 627 bp, Zea Mays
atggggtggtacacaagagttctccgtcgtgcagaacgatgcagccgaacgaggtcgccgacaaggccattgtcataatgcagcacgccgcgaagcaggtcctgggtacgtgcaaggagaagctccacctggggaagccactcagcgtgtttgaagtgaaggaactaaaagaagcgcttgaagccattgccgaagcactggaccaggactcgctgctttgccaagttgctttggatgcgggtgctcccagcttagtagaagatcactgggacgacgaaggcggagaagccgtggtggcgggtctcccatggcctgaatccccacgtccggaggacttcatgtcccttgaaaagcacatagaaacctactggagcgtcgagtacgactcggacaatatgctgcctagcttatctgattagattaggtggtagatatgatggattaattcttcttcgcaagcaatttttttttcttgcattccttcctcctcctcccaccttccttccctctatttgtaaagctagcacccccggccaatcaatctcttttgaaggatgaaatgttactagatgcatatcctgagaatcatgcaaaaaatatattcatcttaaacacacaataaccaac

SEQ ID NO: 8218 - DNA, 801 bp, Zea Mays
gaaatatcgtggagagaaatctgcgattatgaaactgccattgttgggctttgacagaatcgccggccattggttggcccattttgtcatctcctcattaatccattcccctgtccattaaccgacggcgtcatctccagctccactccacttgactccgtccccgggcctgggcgaaccctagcgccgccccgccaaggttgcttcagacgatgcagccgaacgaggtcgccgacaaggccattgtcataatgcagcacgccgcgaagcaggtcctgggtacgtgcaaggagaagctccacctggggaagccactcagcgtgtttgaagtgaaggaactaaaagaagcgcttgaagccattgccgaagcactggaccaggactcgctgctttgccaagttgctttggatgcgggtgctcccagcttagtagaagatcactgggacgacgaaggcggagaagccgtggtggcgggtctcccatggcctgaatccccacgtccggaggacttcatgtcccttgaaaagcacatagaaacctactggagcgtcgagtacgactcggacaatatgctgcctagcttatctgattagattaggtggtagatatgatggattaattcttcttcgcaagcaatttttttttcttgcattccttcctcctcctcccaccttccttccctctatttgtaaagctagcacccccggccaatcaatctcttttgaaggatgaaatgttactagatgcatatcctgagaatcatgcaaaaaatatattcatcttaaacacacaataaccaac

SEQ ID NO: 8219 - DNA, 1647 bp, Zea Mays
atgttcaaggtattaatttctatatgaaagtttctccttcacaacaacctcaaggtatcaacgtgtgtgatcacccggaaaagaacccttgtacatacattaagtattgcattgatttggaaggagttgtttcgtgcgcctgccctgaagggatgagtggcgatggcaggaaaaacggtagaggctgctgttttagctgtcaaaagcacttccctcttgacacagttttgggtgtaagtcttgtgcttatggttacaacgaccactgctgcgtcgtgctactgctgggcagtaaagaaaagagagctaggaagaaagagagcggaattattcaggaagaatggtggcttactcctgcagcagagattttcaacaatcacatctcaaggcgaggaccaatattcatcaaagatattcagtgcggaagagctcaaggctgctactgacaactatagcgagagtcgaatacttggccgaggtggacaaggcacagtgtacaagggcattcttccagatcaaactgtagtcgccataaaaaagtccaaggtgttcgatgagagccaagtggagcaatttgtcaatgagattgccatcttgtcacagattgatcacccaaatgttgtcaagcttttgggatgttgtttagagacacaggtaccattgctggtttatgagttcatatctaatggaacactcttccagcacatccacaacagaaatgcaactcgccctctaacatgggaagactgcttaaggatagctgcagagactgcagacgcacttgcctatctgcactccgcgtcttctatacctatcatacacagagacatcaaatcaagcaacattctgttggatgggaacttcgtggctaaaatagcagacttcggtgcatcaagatcagtcccatttgatcaaacccatataactactcttattcaggggactattgggtacctcgatcccgaatatttccaaagcagccaactcaccgagaagagtgacgtttacagtttcggagtcgttcttgcagaactgttgaccaggcaaaaacctatttctgcagcaaggccggaagattcatgtaacttggctatgcatctggtggttctatttaataaagggcgcctacttcaggagatagagccacacattttggccgaagcaggtgaagaccaatgttatgccgttgcagagctttcagtgagatgcttaaacgtgaagggagaagaacggcctgccatggtggtggtggcttctgttttacaagagctaagaaggtcattcaccatagaccaggctgtcggaataaaagatgaatcgatacaggaaaacagtgaacaagaagagaaacatctacatgagtccagatcaattcccagtttgcagtcatcagaagtaagcacacaatgtagcatggaggccaaaatgtcatctttttgttgacaaaataagcaaattttatattaaaatcagaacacatatactgtgacaatctcataaactaatataagtatagctcgtataccagttaaattaaaaacataaatataaatactagtataaacatagcccatagactagtcatattaaacaacgtgaacagtaaatgccagtgtaatcatagcgcttataataattaaattaatca

SEQ ID NO: 8220 - DNA, 4256 bp, Zea Mays
gcccaaagcacctcgcacctcgcctctcgatccaccattctccgtccgccgtcacccacgcttgctggctccgccgacgcatctcgcaagctgccagcgcccccctcgcccctctccactgtggtccgcagccgcttggagcttgcagcttgcctgttcgtcgtctcggtcccagccggcagccggtcaaccctccaaccccctctctaggcggctaggcagcaagtctcccaggctggcaggctcccagccggcagcggcaggagcccgcacaatctgctcggcccctggcccctaccatgcttggccgcctgggcaccttggtgctaaacctgctgaggcagagagtagaaaggacatgacatcgctctactaactggccaccgttgcagctccagcaagtcgccattgctctagagatccacatgtggttctcggtgcattttcgtatcttttagaattgaactgtgaaaaacacaatggcatcgatcttatctggagcaaggagccttcactcactcgctctgctatcgcggatgttgggcgagacgactcagctcggtccttttaaccgcagcgtgcagcggaggtggagaaagcctgtagattcggcaagaacacgtcttgagggaagaacgagggatcataggctggacaaactaatggttcagctgaggaacttgaggctggccttggctttgcatgaggtgatatctcagcagaggaacggatacgcgtctctccagctcctctcaaggtggaggcatgaggtcgggctgaacattgaggtcggtgctttcctcaagaaatacccccacgtgtttcagacctacgtgcaccctgtcaagaggaaccactgctgcaaggtcacgcagaagatgtccgacttgatcgcagaggaagacgctgtggtcagggagaatgaggtcggcgtagttcagcggctgaagaaacttctcatgctctctgtggatggaactctgaacatgcacgcgttatggctcataagaagggagcttgggcttcctgatgattacaggtcctctatactgccgaaccatcgacatgatttaattctcaaatccccagatactctatcacttttctctagggatgaaacattggctgtagctaaggtcgacgagtggaggaaaagggagtacacagaaaaatggctagctgaatcagagacaaaatatgctttcccgatcaacttcccaactggatttaaggttcaaaaaggtttcagggagaaactcaagaactggcagaggcttccctacaccaaaccttatgagaagaatgattcgcatccgatatgcaacgtggagcggcttgagaaacgcattgttggtgttcttcatgagcttttgagcctgacggtcgaaaggatgatgccacttgagagactgtcacacttcagaagattgtacaccatggaggtaaacctgcgagaattttttctcaagtatccaggcattttctacatctcgacgaaaggaagcacacagacagtcatcctaagggatagttacagtaaaggatatctgattgagcctaaccctgtgtacattgtgcggaggaagatgctggacctggtattatctggatctcgtaacgttggtgaatgccaacaggatagtgcaacttggtcagctgaggagcatgatctgggaagcagccatgggtgccaggataacatatgctaggtggattctgcaattccatactggaacatggagttagaagtgacgcatggaaagaaccaattaactcaaccatgatcttgctgtaatatctacatataaaaatacctactgatatcgtctgcccggggtgaagcgatgcctagctgcggcattgccctgcctagcctcgcctcgtctccggcacgcgaacacccagctcggactctgtaaagaggaagtttaccacaatctctggtggactttctttgctcactgcccctgctcctccatcgctctcgtgcgccactgttctccatggatctcttcaatttgatgctaggtggcaacattgcacctagcaatgctatttttactatgctgatcaaggcatatgctaactgtggaatgctagatagggctatgattatcttcaatgagatgagagcaaggagtgaaacctgatgtggtaacctatttgacagtgattggtgccctttacagaattggtaagatggatggtgctgtggaaaaatttaatcatatgattgatcaaggagtaacacccaaaaaatctacttactgttgcctgattcaagttttttgtattcatggtggtttactgaaagccaaggaattggtttggaaaccatgaataaaggtatgtgtcctgacattgttttcttcagttcgataataaacaacctttgcaaactaggaagggtaatggacgcacaaaatatatttgacttaactgtaaatgttggtctgcatcctactgttgcgatgcatagtatgctgatggtgggtactgtcttgttggcaagatggagaaggcatcaagggtatttgatgctatggtgtctgctggcgttgaaccaaacaatgtagtgtatggtgtacttgttaatggctatcgtaaaattggaaggatcgatgatgagtcttttcaaagaaatgttgcataaaggaataaagccttcaactatttcgtacaacatcatacttgatgggttatttcaggcagggagaacagttcctgcgaaggtgaaattccacgaaatgactgaaagtggtatcacaatggacaaatggacatacaacataggtcttagtgaacattttaaaaacagatgctctgttgaagcaatcttgctttttgaagaattacgtgcaatgaatgtaaagatcaatatcaaaactctcaataccatgatagctggaatgtttcaaaccaggagagttgaagaagctaaggatctgtttgcttctatctcgagaagtgggctggtgccttctgttgtgacttacagtataatgatgacaaatcttataaaaggattggtggaggaggcagatgatatgttttcatccatggagaatgctggccgtgagcctgattctcgattgtgtggttagggaattactagagaaaaatgaaatggtcagggctacaacgtacctgtccaaaattgatgagaggaatttctcacttgagcattcaaccacaacattgttgatcgatctcttctcaagcaaaggggcttgtagggaacacataagatttctccctacaaagtatcgttttcttgcagggggctcgttaatgttcgattgcaagcagcagtcggtgatccagcagctcctctggcgcaaggggcgcctgatagtgatgtgttcgagggggacgcctctgctgtatgccccagtggatcctgcagagtcattcaagttctagagtttgtagattgtctccagccagtgattaacataatcccattacagttgaggtatgcagtttatttcctgattcagcctaggagtactttaacggcttattggaactggtctaattcagcactggagcaacaagggagcctaagctgcaaaaatgtggattgttccaacctgtgcatgtgttctggtgttagtttcttcagagcggacattgaacttaacagtgcaattttttagaactttgcagcagttttaagcacaagcacgcttcatcgacaataaattaaattcaaatcaacctgctggtttgtgatacgtaaaccatattatccattttcagcaaataaggttggtttgcacttaatttgttgatgatgaagcgtgcttgtgcttgaacctgctgcaaaattctgaaaatttgtactgtaagttcaatgtccgttcagaagaaactaacaccaggacacatgcacaggttgctacaatacacattttcttgcggcttaggctcccttgctactctagggctgaatcagactagttccaataaactgttaagtactcctaggctgaatcaggaaagaaactgcagatctcaactaatcgacatttatgcatggtattcggtgattagtagtattgtgatatgcacaggtcaaatttattattgggaatcatatacatctaaccagctttcaactcttctttcctccttataagatctatgatatcttcaagtttcttccgtcgaagattcagatataaaaagaacagccgatccaatgctgacggtggctcacacatgagtgggctgaaaattttacctattcagaa

SEQ ID NO: 8221 - DNA, 2408 bp, Zea Mays
cttaatccttatcccctccccacgtttccctcttcacttcccggttcccgcctgcatacggtacagtggtacacccaccgccggtgagccatgcctcccccggcggggctgcccccctggccgacgccgtccaccacgcgcctcgcgaccccgaccccgacgcggcctcctcctcgcaccacccacgttcggccgccgcctccaccttacactcgcgtccgccttcctccgcctccgcctgctacgacgccactgccgccccgcctggagcccgctgcgccaaaaccagcggccgtcgccacactcctgcctccctccactgcctctgcagcgtcttcttcgtccacctgcctcgactgcgtccattttggcaagtgctcagggtgcacgcacgaggtggacctcgacaagccgccggtgctgcaggaggtggcgaatttcttcaagggacacggggtcggagatttcaccttcagcaggggcaggctgtcccaatggcggtgccgagcaaagctagctgttcgtggaacaccagagaacccgttgattggtttataccaggaagggacgcatgctgttatagatattccagagtgcagagctcatcacccaagcattaatgctgctgttaagttgttaaggcaaggtataactgagctaagtattcagccatttgatgaagatgctggagctggtgaactcagatatgttcagatggccgtgacaacatataacacatctattccggttgataaaagatacgagcaagggaaagttcaagtttcattggtttggaattcaagagacgagcgctcccagaacgcagagaagctgacttcaataatagaatacttgtggacaaatggtgggccaaaaagtagtgtccatctcattcattctatatgggccaattttcagacatcaaccagcaacataatttttgggcataaatggagacatcttaagggggagagggacatgtgggagcgttatgggggagttgatatttctctggatccttgtagctttggccaggctaatactctgctgaacaagtatgtaccacgtagttcaacagttgttgatttgtactctggggctggtgttattggcctatcagttgctgcttcaaggaaatgtaggtctgtgaaatgtatcgagattaacaaacagtcaaagatgtcttttgagacatcagcaagccgacttccagcgaacctgggttgcaccattacttggcacaataccgatgcttcagttgaaccttcgcactggcttgaagggtcaagtgttgttattgtggatccaccaaggaaaggattgcacccatctgttatcagcgctttacagaaagttgctttgtctgagcgcaaggcatacaaggctaaaagttcgcttgcaaaggttaaggatgagaagagaccatggatcttacgggcaagggaggctgcagttcatgttgataatacaacaactgaagagggcaatgaaacgtggcctgaaactctcatatacattagctgtggatgggaaagttttaagagggactgcaaaagcttgatatccagcaaggcctggcagttggaaaatgctcatgcttttaacttcttccctggcacagatagcattgaaattctggctatcttcaaacgggaatcagaagctggtcaaaagaaaaagaagaaagcaaaaaagaaggctaagtagattaacaaaaggctgatccaccttgcggattttgtatttttgtgaatcttaggcattgatccagaacttcagaatgagtgctcatgtctgttatgaggaattttgcatcgtccgaaccaatcaagtgaccaatatgacacaggtcactcaaaatgtagccgtccaaaagcgtcggctcggaatgaaagggtcttttttgctaatcataccggggacttggttttgcgtaccacccgtggtgacattgtgacaggcaagtgggtgtttgcacacaagctgcacgccgatggctctttccaccgatacaagtctcgttagatccttggcgggtcagtggcttggagttaactatgataacactttcagtcctacggtgaagttagccactatgtgcactgttctatctatggctctatctggttttggcttgtctatcaattggacgtcaagaacgtcttccttcgtggcactctgactgagataatgtattgcaaccagcagatcgtttttgtagattcagctcatttgaacattgtatgcaaactcaacaagtcattgtatgatctgaagcatgcaccttgagtttggtatggtcactttgcttcctttgtctcgctggactttgatgaggctaagtcagaactcatcgttgtttatctatcgccagtggtgacactatgtgtctacttctgtacgtcgat

SEQ ID NO: 8222 - DNA, 2432 bp, Zea Mays
cttaatccttatcccctccccacgtttccctcttcacttcccggttcccgcctgcatacggtacagtggtacacccaccgccggtgagccatgcctcccccggcggggctgcccccctggccgacgccgtccaccacgcgcctcgcgaccccgaccccgacgcggcctcctcctcgcaccacccacgttcggccgccgcctccaccttacactcgcgtccgccttcctccgcctccgcctgctacgacgccactgccgccccgcctggagcccgctgcgccaaaaccagcggccgtcgccacactcctgcctccctccactgcctctgcagcgtcttcttcgtccacctgcctcgactgcgtccattttggcaagtgctcagggtgcacgcacgaggtggacctcgacaagccgccggtgctgcaggaggtggcgaatttcttcaagggacacggggtcggagatttcaccttcagcaggggcaggctgtcccaatggcggtgccgagcaaagctagctgttcgtggaacaccagagaacccgttgattggtttataccaggaagggacgcatgctgttatagatattccagagtgcagagctcatcacccaagcattaatgctgctgttaagttgttaaggcaaggtataactgagctaagtattcagccatttgatgaagatgctggagctggtgaactcagatatgttcagatggccgtgacaacatataacacatctattccggttgataaaagatacgagcaagggaaagttcaagtttcattggtttggaattcaagagacgagcgctcccagaacgcagagaagctgacttcaataatagaatacttgtggacaaatggtgggccaaaaagtagtgtccatctcattcattctatatgggccaattttcagacatcaaccagcaacataatttttgggcataaatggagacatcttaagggggagagggacatgtgggagcgttatgggggagttgatatttctctggatccttgtagctttggccaggctaatactctgtcatttaactctttgttgcataagctgaacaagtatgtaccacgtagttcaacagttgttgatttgtactctggggctggtgttattggcctatcagttgctgcttcaaggaaatgtaggtctgtgaaatgtatcgagattaacaaacagtcaaagatgtcttttgagacatcagcaagccgacttccagcgaacctgggttgcaccattacttggcacaataccgatgcttcagttgaaccttcgcactggcttgaagggtcaagtgttgttattgtggatccaccaaggaaaggattgcacccatctgttatcagcgctttacagaaagttgctttgtctgagcgcaaggcatacaaggctaaaagttcgcttgcaaaggttaaggatgagaagagaccatggatcttacgggcaagggaggctgcagttcatgttgataatacaacaactgaagagggcaatgaaacgtggcctgaaactctcatatacattagctgtggatgggaaagttttaagagggactgcaaaagcttgatatccagcaaggcctggcagttggaaaatgctcatgcttttaacttcttccctggcacagatagcattgaaattctggctatcttcaaacgggaatcagaagctggtcaaaagaaaaagaagaaagcaaaaaagaaggctaagtagattaacaaaaggctgatccaccttgcggattttgtatttttgtgaatcttaggcattgatccagaacttcagaatgagtgctcatgtctgttatgaggaattttgcatcgtccgaaccaatcaagtgaccaatatgacacaggtcactcaaaatgtagccgtccaaaagcgtcggctcggaatgaaagggtcttttttgctaatcataccggggacttggttttgcgtaccacccgtggtgacattgtgacaggcaagtgggtgtttgcacacaagctgcacgccgatggctctttccaccgatacaagtctcgttagatccttggcgggtcagtggcttggagttaactatgataacactttcagtcctacggtgaagttagccactatgtgcactgttctatctatggctctatctggttttggcttgtctatcaattggacgtcaagaacgtcttccttcgtggcactctgactgagataatgtattgcaaccagcagatcgtttttgtagattcagctcatttgaacattgtatgcaaactcaacaagtcattgtatgatctgaagcatgcaccttgagtttggtatggtcactttgcttcctttgtctcgctggactttgatgaggctaagtcagaactcatcgttgtttatctatcgccagtggtgacactatgtgtctacttctgtacgtcgat

SEQ ID NO: 8223 - DNA, 1907 bp, Zea Mays
tttgtcgtctttgctccccagctctttttcccacgcccatttctcaaaaagcgagggcatgaccgccccggcgtcgccgcactgtttcctagtaaaagacgcccactctttggctcctcgcctccctcctcccctccgtctcatctcctccctgtaggctgtaggagcattcgtgtgttcaccttttgctcccccacgttgatccttgaccctcgtactcctttcttgattccttctccgtgggatctcttgccaggagtaacctgccccgtgtccgcgctcgcactcgcacagacatgcttcttgccgcgtcttgaaaggggagaaagtgaagatgggtgcttgcgcttcagttcacaaggacccggggtaccccaaggagcagtttcttgactcgcccaccaaggcggaagctgcaaacgagaagggcggctgcggcggcggtgacgatgactttgctgatttcaagtccaaggtcgacgctgagcagcagcgggcagagttgaaccccaagagcccggattctggtagcaaggatgaagtgttcttcgaatctcgagcttggttagattccgactgcgaggatgacttctacagcgtgaatggaggtaatcgaacctttacacacgtttatttactataaatgtttaaagaagtttcaatctagttttagagatagcttctcataccctggccctgcatactgagatttctttggcaccagctgtcaagttgatcgtgtcatttccttttttaggttctcctattactataccagaagcatgatcaatgtggattgttcctttaggatacagctttatctgtctctagaatctaatggacctaatttatattttgattgccaaaaagtggatgcctttgattttgtctttgggcgctatcattatggacatggacccccacctttagtttcataacctatcccatgtggtcctctatcaatcactctacactctagcaatatcttggaaacataacatattcatttattggctttgacattatcaagggagttctgatgcacccaagtttatcccatgtgatttgcttcagttgccgcataatcttaagttgcgcccttatgcagatttcactccatctcgtggcagcacacccatccatcagcccagagcgcagacggtgatgagcaacatctttcaaccagacacgcacggttccaaatcaccggagccttctccaactggacggaggaagctagctgagctcctgcaggaggcaatgcaaaacggccccgaagaaagcaccgaccaggagctgcagttgcggtctgttgccgcagatgggaagccggtgtctgaatccacatccagctccgcttgcagcactgtgacgactccgatcgcagtcgctaacgccaagagccggaaggagaaggcgtggtacaccggacgctgttgcctgccgagctttgttcatagcctgaccttagatgagagtgagagggcgcagaagatgagctctaggccatgtgctgtttgacagtggggctccagtgccctcacggctcatgccctgagctatactgtaaaggagaagtattaagagtactgtatgtatagagagagggtaatcaagtggataatagctactagttaaatgctctgcacaccatgtttatcaattgcccttacctgtgtatatatatctaatcgaatctcaaatgtcaacagccagctgagctgtcctcttggcacttgcatttgcatgattgacgccagacaaatgtgttgttcattgctccattctattccaagtggaccttttaattttctctaaaaaacaaaagggtctctagctgagttggttaggtggtatgagtagcactacttaggtcctgagtttgaatttcagtggtagtgaatttc

SEQ ID NO: 8224 - DNA, 1880 bp, Zea Mays
tctacacacaacagagccttttgttcagtacggacccaagtccatttcttcttcttcttcttcttgctggggaacggtcccccagaattttctgcagatggatttggcttggtggcaagaaggtcgattgctgaagctcctgctgacatcaacgtcactacgaatagctcctttgtgctggcggcagataggacatatcgaagggaccctttgaatggcttcaggaaatacccgggcggctggaatatcagtgaagtgcactatttcgcttccgtcggatatacagccattccgctgttcgccattgctctcgtgtggtttgtgatctttttcctggttatgcttgggatttgctgccgtcattgctgttgcccgcatcacacctacaagtattcacgaacagcatatgctctatcattgatacttctaatactgttcacatgtgctgcaattgctggatgtgctatgttatacgatggccagggaaaattccacaagagcacaacaactactctgaagtttgttgttagccaggcaaactatactgttgacaaccttaggaacctatctgatagtttgtctgctgcaaagaaggtcgacatagcacagtcctttttgctgcctcctaatgtgcaaaatgagataaatgaaattcaaggaaagctgaactcatcagctactgatcttgctattaaaacaacagataatgccgcgaagatcaaaaaggtgctaaacagagtgcggcttgctttagttgtcattgcagctgtgatgcttcttctggcatttgttggcttcttgttatccatctttggtctggaattccttgtctctgtcttggttattattggatggatattggttactggaacgtttatcctgtgtggtgtatttcttcttctgcacaatgtcgtttcagatacttgcgttgcaatggaagagtgggttgctcatccgacagaacacacagccctggacgaggttatcccctgcgtggagcctgccacggcgaacgaatccctgtacagaagcaggcaggtgacgttcgagctggtgaacgtggtgaaccaggtgatcaccaacgtgtcgaacaggaacttccccccgcagctgacgcctttgtactacaaccagtcggggccactgatgcctctgctctgcaaccccttcacgcctgatctgagggaccgcaactgcagcagaggagaggttaccttggacaacgcaacccaggtgtggaagaagtacgagtgccagagcaccaccgtctcaggaggagccgagatctgcgcgacggtggggcgtgtgacccccagcatctacgggcagatgaccgcgggcgtgacggtgagccaggggctgtaccagtacgggcctttcctcatccagctgcaggactgcaccttcgtgcgcgacaccttcacgaccatcaaccagggctactgcccggggctggagcgctacagcaagtgggtgtacgtgggcctggtgatggtctcgttggcggtgatgctgtcgctcatcttctgggtgatctacgccagggagcggcggcaccgcgtgtacagcaagcagcaccagccgtacccggtggaggacaagccggcggcgacggtcccgggcgcttgaattgatatggcccgcccgttccagtgctccggcctactcccgtgccgctgtgcatactgtactccgcgcgctagttgggttttacgtggtggtgtaggtggatgatgtaccctggattgttgttcgtttgcttggtgttgctgtatgtttgctgattttaagttgttgtgcattctcgtactgacggtagctggacaatgaattgattgtgttgggattggttattattaggtgttcttcagttcgtttct

SEQ ID NO: 8225 - DNA, 2260 bp, Zea Mays
cttggcggttgttgactgttgtagacttttgtggtctcacctcgcggacggcggacataccccgtctcggttctcaaacaccgccgccgccgttctcccaacatctccccgtccaggtcgttgggtcagcccctatccttcaccttcacgacttcacctgcttctccactgcgcgccccgcccccggccccgtcgtgcgccctgctcagatccatcgcacggggcttgccgcaccactgcgccaagcaaaaggtgggcggccagcggcgcgtgcgcagatcatgcactggtaggactaatttgcaagatcttggaccgggatggttcgcctgttagttgtcttatgaagattggtaaggggagaaagaagatgaggaataaacagcgaaaatcatctgccctcggttctgatgcaggatgtggatcttctttatcttgtattgtatggagcttgtcctcttcatgcgaccagagaattagaggacatcgaggaggatcatttccgcttgccacctcctcacaaggtgaatcctcgtgcagtgaaaaggaggggacctcgtaaacaaccaaaggttatagatgattatctggaggagtcttcagcagtacatgcactgttctttccagatcaaatgactgctgtggatccaacaaaaggaggaaatgatagcatgtatttctatcctggtagagtgtggctagacactgatggaaacaccattcaagcccatggtggggggattatgtatgatcacaagactgccagattctattggtatggagaaaacaaggatggaccaacataccaagctcgccccaaaggaacacagagggttgacatcattggggtaagctgctactcatcaaaagacctgtggtcgtggactcatgaaggaattgtgcttcgtggtgagccttctaatgtcatccatgacctttataaatcaaaggtgcttgagagacctaaggtgatatataatgatcgcactgaaaaatatatcatgtggatgcacatcgatgatgctaactacaccaaagcatctgtcggtgtggccgtgagtagctctccgactggaccttttacttacctttacagctttcgtccacatggttgtgagagtagagacatgacagtcttcaaagatgacgatggaatggcttacctcttctattcttctcgtgacaatactgagctccatgttagcccattgacagaggactaccttcagatcacagcagcaatgaagagaatactaataaggcggcatcgtgaggctccagccgtcttcaagcaccaggggacctactacatgatcacctctggttgctcaggctgggctcccaacagggcattggcacatgctgcagagtctatcatgggcccatgggagacactgggaaacccttgcgttggaggcaacaggttttaccgccttacaacattcttatctcaaagcacatttgtgcttcccctccctggtttgtctggtgcatttatcttcatggcggataggtggagtccgtcaaacttgagagactcccggtatgtgtggcttcctctattcgtcggagggctcgcagacgaacctttagattacagttttggtttccctctgtggtcaagggtatcgatttattggcacaagaaatggcgcctcccagaagattggaagattgcaaacacagcaaatacataagatagctagctatacttgaaccgatagatcgttcataaacttgcttgaggattctaatcgcttgctcctcaagcttttgtacaaaacagtcatcctaaacatgcttcagtgatatatcttttttttggcgtgtgcatgtgtctgtaacttctcttggaaaaagaagtgtgtttcagataactgtattgataattggtatgaccatactctgtcgtttatgccaggacagcaaggtgcatcttgtcatgtttttttttgtttatcattaaacaagcatcaatagaggcttccctatgtccagcatcgtgacttcatcttctagactagatcacatttgtttggaaaccaaacttatataaatccagtgagtgatttatgtaacctctccagaaagtttacattaccattttgtttggaaactgaacttctctgaatccagcgagtgatttatgtaacctctccagaaagtttacattaccggcagacagaatccacacgcaaacgaacacatgctgtctcccacgtcataaatctcaagtatctaatctcctacagaaaacaaa

SEQ ID NO: 8226 - DNA, 1469 bp, Zea Mays
cccaccggccgcgcgtgcgccccatccaccaccgaccgggcccgtcgctgcaacaaaggcgttcagtttcgttccgtttgggttggtctgtttagtgcggcggcgacagcgacagcggaggagagcggggacgggaggggccatggcggacgcggcggcggacagggagagggacaagggcaaggacgaccgccgccgctgggcggctcgctgcggtttcgccgtcctcggcatcatgagcaccctcctcgtctacggcgtcctgcaggagaagatcatgagggttccgtacggagcggacaaggagttcttcagatactcgctattccttgttttctgcaaccgtatcaccacatccatggtgtctgcaatggtgttactggcaagtaagaaatccttggaccctgtggctcctctacacaaatatggcgttgtctccatatcaaacatactgaccacaacctgccagtatgaggccctcaagtatgtcagcttccctgtccaaacacttgctaaatgtgccaagatgatacctgtcatgatctggggcacaataataatgagaaagaagtatggtggaaaagattacttctttgctgtcatcgtgactctgggctgcgcattgttcattctatatccggcaatgatggatgtgagcccatttaataaaggcagagaaagcactatttggggtgtttcactcatgtttggttatcttggttttgatgggttcacaagcacgttccaagataaactcttcaaagggtatgacatggaaatacacaaccaaatattctacacgacagtgtgctcttgtcttcttagtttaagtgggctgattctccagaatcatctgattccagctgtggattttatgtttcatcacccagattgcttctctgatgttctaatcctgtccagcgtcactggtgattttcttcatcgaaaaggcctcagcgatgctcttcctataaaggttttcaaggagcatgaaacagagaatcttttggaactactgaattttagttaacattaggcggtagctatcaggatattgtagttgcttaacaaactcacccaccccacaaattgtcattcaacgaaggcatgccctccagcatcagtcggtaccgatgattgtcagcgaggtataaagcctctaccatccccttcccttgaacataacaggccctacagacagattccattttagtagaagcggtggatcgacaactgcgcctcgttggtctatcttttgtccaaatggcaggatgctgccaatgggcgttgtaagcgcaatcagccaattgggtggtaatgtaagctttagctttagatactgggagatggtctgtcaacagttacttttagcctaaacattcttgtacatctttgaaagtgaacagatttgtaatccttgtggcatataaatggtaacattgttcataacttttaaactgatatagaac

SEQ ID NO: 8227 - DNA, 1832 bp, Zea Mays
tcgtttcgcgtcctagcccaggacaagttccctttttcttctcccaagtctgcgactaggaggcgacgggccgacgggccaagtttcctttctcttctcagtctgcgactggcggcggcgaccatcacgcacaagccttcgttgctacctgcgctccgccaattcggtgagtcgcgctcttgctcgcttgttttgcatttcctttcaacctgtcttaaaaaccgacgaattttgtactgcgttttctcccgatttcctccctgaaaaaatcatcgaattttgaactatgttggtagcgcgcttgggctcagatcgcgtcttgggctccagaagcggtgattggagtcagatctgtgagctgcaaggtctagaggttttaaagcgcagttggtttgggggcggtgattctcgggtgttggttctgtcgcggtttgttgtgttttccagaatctcgggtgcgtcgaattctgcgagctctctgttttgcgacgtaccagtactgagaattggtattggatgcggctgggattcgagaatgccccttccaaattgccaactgttttctgtcgaattcatatccgtttttttttatggctgctgttgcaggtgaattgcagtctaagcaaagggaaaaggaaggatcttttctccagacttggtaattttggacgacaaggttttgtattatctgatttttcgggatggatgccaaaaggttcctgcatctggtcgaggagaagaaaagaagggtcctcgagaagaaagaagccccactaaagtgggagcagaagctagaaacagcagctaaggccaaggttgatgcagaagcaaaggtgaagaagctaaattcaagaaagcacaggaggagaggagatttgtcctcagactctgatagtgactatggcagcgatgttgatcgaaaacacttgaagaggaagaaccgcagaaggaacaagaagcatgagcattctgactctgatgatgccaggagacgcaatcgtagatctagaaggagcaccgactcaagtgatgagagcaacagtgaatacgagaccaggtctgaagaagaacgtccaaggaagaagcgctcgcacagaagaaggcatcaccggcactcttcaaagtcagactctgaaaactacagcagtgatgaggaacaacggagacctgccaaggaccattctcagagccgcaggcggcaccatcggtcatctgatgatgactcagacaaggacaaggtcaagtcaagacatgggaagggtctgagatctcgtgacgaggatgcaagagcagatttcaacagcaataagcatctcaggagccaatccttggaggagtcatcagatgatagagatgctgatgaatctgagaagatgaggaatggcaaaaggtctcacaagaatggcggccaccgtcaccatcaccatcgacaccaccatgaatgacatagtaactctgcagaacctaatgacaggaggcaagtactgaaagatggccagagggcccttgaaggtgacagcgcatactgaagatatcccagcaaggtcgagttaattgtccttattaaggacatgaagatcatttttttttcgttcctgatgttctcagataattattgtattgctgacaacatttctttgatttgtgaatatactaaacatgttgcctatgcatttgcttagatgtccgatctccgaaggctgaagtcgataaaagggctagaacggagacatttgtgtcactgtagtggtgcaatttaagtattagatcattaagacaccatagtgcaacagactctttgaacacgtctcaattaaacaccatgcatcgat

SEQ ID NO: 8228 - DNA, 2377 bp, Zea Mays
aagcacggtttcagttcaaaaccattctccactgttcctccgctccctctgtctcgtcgtctcccatctccggctagggtttgccctttccaccgcgtccgacgcctacctcgcccacgccgtcgattccgtcaatgcttcagcgaaacccgaagcagagggcgcggaggaggaggggggcagcgacaggaaggagcggaatggtggcccgacggcggatttggttggcgaggttgtgaagttggagaatggggacgggcctgtgacggtgggcggctcggtggacgagggtcgaggtggagatggcggtgacgacaaaggcctggctggtcagaatcagcctgctgtgaaccagcttttgctggcgccggctgaggaggatctggcattgtccaagatctcagataattccttcatgttcgattacaccactggtggcgatgactcggggactgaggaggagcaggctgccttcatgaaggagctcgagcgtttccacagggagaaaatgttggagttcaagcctccgaagttttatggcgaaggattgaattgcctcaaattgtggagacaagttactggattgggtggctatgatcaggtgacatcatgcaagctgtggcgtcaagtaggagagtcattcaaacctccaaagacatgcacaactgtttcatggactttccgtaacttctatgagaaggcactccttgaatacgagaaacacaaaatcgaaacaggagagttccaagtagcttcatctgctctaccagaccggtttggttctgagagtcaggtgggtggaagccatgtatctggttctggaagagccagaagagaatctgcaactcgtgcaatgcaaggttggcattctcagcgcctactagggaatggtgaaatcgctgaccctataattaaggataaagggcatattgtcttaaagaaggataaaactcctaaaagcagtggttctgccaagaggaaaaggacactatccctggaagatgacagggtgataccttataaatctgatcagctacagtaaatcccctgtgcacttataatattcacgcaagccatgcattctatttttctatctattgctgttagaagatcagtaataattgcaacactgcttcacacaattagcttcattctgttcttttgcatggataatcatagtccagcggggcgtaatatccatttgaataactacttaggcttggcatggcattagtttgtttttcttcttcatccttggacttcgattgatttgatgaattattgttatctagcagaaatgactcgatggttattgacatgggcccccctgctgattgggtgaaaataaatgttaggaaaactaaagattgctatgaagtctatgcgttggttcctggccttctgagggaagaggtacatgttcagtccgacccagctggtcgtttgatagttactggagagcctgagcaattggataacccatggggtgtcactccattcaagaaggtcattagtttgccttcccgcattgaccctcaccaaacctccgcagttgtcaccctccatgggcagctatttgtgcgtgcaccatttgaacaatcaaaataatgttgatgccacaatgaataatacaagtttaccgtatgggtggggattattttgttgtgacatgagcttagaatttctcaccctgaccgtcgccaaaaactaggtccttgctgattctaatgcttcaagactcttccgtgctagatctcgcctgtatcaagttaaactcattagttgacatagttctgtgtgtattcgggtgcgcccattggctgtgaattgtagctaaagcaaagttactaagcctagagtttaggatgttaatagcctgatgctcaacatgtccatggtttcttaatttaaccagcacaaagtgtactgtttgtagcaatgcagtatgtagcatgttcccattatttgagctctggaacatggacacaggtaggctcgttgcttgttgccggtgtattgctaattttgctattcaacttgtattgtcaaaagctatggcctccccctgtaacctgccttcttattgtgcgactttgtgattaccaagttagctcttaagatattttacatgatgggctttccgtcaggtctgaatgtgtgtgaggtttgacttacaggccgtgctgtgttggtacaagggcttgttttgtttccatagtgctaaagtttatcacatgttaaattttgctgaagtttagcacttgagggcttttaaaaaaataaaaggctgtagggaaaaccctacaacatgattttattaaataatgagaagagggaacaagaaatggaccaagagaaggaaacacacacaaaaaaa

SEQ ID NO: 8229 - DNA, 1937 bp, Zea Mays
ggacacaatctcagatggacgaaccagctggatctggcctgctcaaatggaaccgcgagctttcattgcgcctgaggatggagggggcaggcaaggatggcaacccgttgaggaattatcggattggcaagactctcggaattggctcattcgggaaggtgaaaattgcggagcatatcagcactggacacaaggtggcaatcaagattctcaaccgccgtaaaatcagaggcatggagatggaagagaaagttaaaagagagattaagatattgaggttatttatgcatccacatattatccgcctctatgaggttatagacacaccggctgatatttatgttgttatggagtatgttaagtgtggggaattatttgattacattgttgagaaaggtaggctgcaggaggaagaggctcgccgtttcttccaacagattatatccggtgttgaatattgccatagaaacatggtggtgcatcgtgatctaaagccagaaaacctcctattggattcaaaatgcaatgttaagattgcagattttggcttaagtaatgttatgcgggatggtcattttctgaagacaagttgtggtagcccaaattatgctgctcctgaggtgatatctggtaaactatatgctggacctgaagttgatgtgtggagctgtggggttattctttatgctcttttatgtggtactctgccatttgatgacgagaacataccaaacctttttaagaaaataaagggtggaatatatacccttcccagccatttgtctggtgcagcaagggatttgattccaagaatgctagttgtcgatcctatgaagcggatcaccattcgtgaaattcgcgaacatgattggttcaaaattcttctcccgcgctatttgactgtgcctcctccagatagtgcgcaacaagtcaaaaaggttgatgaggaaactctccgtgaggttttaggtatgggatatgacaagaacctgttggtggaatcaatccaaaaaaggctgcaaaatgaggcaactgttgcatattacttactcttggacaataggctccgtacaaccagtggctatcttggagctgaatgtcaagaagctatggactcctcattctcaaacatcgcatcatatgaaacaccaagttcagcacgtgggaatagacagcaaatatttatggagtctccagttggcttgagaccacatcttccagctgagaggaaatgggctcttggtcttcagtctcgagcacatccaaaagaaataatgtctgaagtgctgaaagctctgcaagaattaaatgtttactggaaaaagataggtcactataacatgaagtgcagatggagtcctggctttcctgctcaaattcataacaatcataacttcagtgcagggtccattgaaactgatagcctgagtgagaggttaagtttaattaagtttgaaattcagctgtacaaaacaagagacgagaaatacctcctcgatttgcaaagagtcagtgggccacagctcctctttctggacttgtgcgcggcctttctaactcaactgagagttctttgatttctggtgtcagctttccatcagttgcattccttgcgtttcactagaggaatgtctaaatcgctcacaaagctgtaaatagtaatctccagtagattggattttctggagtatgtagatggtaggcatgagaagatgttatgcctggcggcgatcttctgaaccagactgtgtggagtaacttatctcctaattctttacggctggccagctgccggtgaattagatcagtgcttttgctggcataatgtctatctacattaataatttcagctattacaacggttaattaaatgctgtgctgcttacaggccaaatgagattatgttttgaaggcaactctttttttttgcattaatt

SEQ ID NO: 8230 - DNA, 5852 bp, Zea Mays
cttttagcacatatgtgaaggactaaagactaaatcattttagtccatattttagtcctagtgtttggcaaaaaaagaactaaatgagactaaaaactagagattaatctttagtccatgtaaccaaccacccctaactcattcctcaaaccaaactctctattagcgagtccaataatgacaaacaaatgtgaaaaacacgatgttggcagtctcatttttgtaataacctttacctactggccataaccttggccttctccagcctctctcagttgcgaacaacctgatggcgaagaagaaaggctcggccgccgccgccgccgccatggcggatgagacggacgtctcgagtcctcagggctccgcccccggcagcgagggaggtggggagaaggagggcgcctttcttcttggggagccaacctgggaggacgctggcggcgggcggtggcggtgcgcggagacggggcacgagctgccggagcgggagaaggaggcctacgcgcggtcccgcgcttgccgcctcgcgctcattgaccacgccgtcgcgcagaagaagccgccgctcaacgccttcaagccccaccccgagcacaaatcgaagctggtatgcaagattacaggggatacaattaacaagttggaggatcacatatggaagcacatcaacgggaagagatttcttaacaagctagaaagggtagaagaccggatggcttctggtgagatgcctgatggagaacctgtgaagtcaaatgaagtggcaaagaagagcaagtcaagcaagaaggacaagaagaaagctaatgttgccagcacttctttgccaagagaacctaaaccagagatggctgattcagatgatccagatttctgggtgcctcctgttggaagtcgctgggatgacgatgacgggaaagacagatgggagtcattaccaggaaagcccaacttagcaaagaacgaaggtggttctgatgatgatggtggtgatgacaatgatacggctgacaaggatgatgctgaatcaatggaacttgcttcaaggacaaagcgaatgtcaatagaagcagctgggccaaggaagaaaaaacccaagaaggagcagtaagacattcgcaatttgtcaagactcaaatgaagaatttggtctcgttgggaagaagaagcgttatctatttgattattgggtcgtgtttcctcagatttgggtaatcaatgactggatttgtgttagcatgcttatggttaacgcctgtcaactgtgatacatctacatttgcacgtaccttgcatttttttttttggaaaactttgagggccaactatcagttgtcttttgctagggtttaggacgtgctatgattggacaacatagacggagctagagctccaaattccaagataactcattcgaaatattaataagactgtcctgatatattaggtaggaatattttagattgccgatttttatgtacttctgttccaaaacatcggttgcactcgctacagctggagcagtatctgcagacagaaaactgctttctactgtagctaaaacctgatgaagccgcagctgaattaaaaaaaaacagaaataaagagactggaccttagcaaaaaatacaggaaactggtatcaccagtaatcattgcaggagcaagtaccatccttaaaatgatgaaatatattccggtctcgaacaacaatctccctatcgtacaccttcgaaatcaactttgtggccgagtggcagtctgcgcagacccttagattcttcgacaagcgaattgttgcaccagggtccagcttcatgaggccaaacgcaatggccagcttctcgctgtgatgggaaacggatacttccttctcacgctcttcaacctctagcctcacatcagctgtgtttgggacatacccagccaccttgatcctgccaatcatctcctcgactttctggtatatctccctcaactcggggtggtcgctgtcttcggcaaagaactcgaagacaaccccgtccagctcaatgaggctgcagcctggagttttctcgatccctctatccttcatttcctttcgaaccatcgctgcgtccttccactgtcccgccgatgcatatatgtttgacaggagcacgtaatcaccactgtgactggggttcaaggagatgatctgcttcagtgcttcttccccgatcccaacatttctgtgaactgcgcaggaagacagtagcgccctccagataacagcgtttggctcgatgggcatggtcctgataaactggtacgcctcatctaccaaaccggcccgccccaacagatccaccatacatccatagtgctcaacccttggcttaatgccatagtcccgagccatgctatcaaaatgccggcggccctcttcaaccaggcagctgtggctgcaagccatgaggacaccaatgaatgtcacgtctgtgggctcgatcccggcctcgcgcattgacgagaagagttccaacgcttccctgcccctcccattggttgccatgccctttatcaaggctgtccacgtccacgagttcttcacaggcattgactcaaacgcttcaaccgcatcgtcaatgcatccacacttcgcgtagaagtccaccagtgcagtgccgagaatagttgtcagagataggcgcttccttcttacgtaggaatgcacccacttccctgtctcaagtgcacccaggacagcacaggcagagagcacgcttaccatggtcacatcgttcggctcaactcttgcaagctgcatctcactgaaaagaccgagcgcctctcggcattgatctgcctgcgtgtagcctgagatcattgcgctccaagcaaccacatccctggactgcatcccatcgaacagcctccgtgccttaccaatctctccgcacttggcatacatgtccatcagtgcggtcaccaatttcgggttcctcgccagcccctcctcgtccacatgtccagcaacccacttgccaagcttcgcgtcacctatccttccgcatgccgtgaccacactcaccaatgtgacctcatcaaaggccacaccaacctcaagcatgcccttaaacatctccaccacctccatccaatctccgttcttcaagtacgccgcgacgatcgcgttccacatcaccacgccactctcctccgccgcgtcgaacacaagccgtgccgccgcaacgtcgccacagctcgcgtacatatgaatcaagctgctcagaacgaaccgatcggccacgagcccacgcttgacggcgtacgcctggacgccgcgccctacgtccagggcgcacatcctggagcacgacttgagggcacaggcggcggtgtgctgatcagcggggcaggccgaagccgcgtggagcatttcgatgaacaggtgcagggcgtcctccgggtggcccgcgtgaaggaaagctcgcataaggacgttgtagcacggcgtcgaaaggggcgggagtggaaggatttggccgacccggtgagctctccggacttgattagtgccgcgtggagctgtggcaagtagctaggatctgcgcggagtggagcacgtggcggcgccggcccggcgcggcccggtgtggggagagccgccgtggggacggcggtggccattcgagatgccttgcttgggtttaactgcttatcgttggttattattatccaagtggtctctgcctctgcgtgagacactgatatctgggcccacacgatagagatacctgtcctccatttaaattccggatccgcctctagtctccggcgtctccgcacaacaactaatcaccatggcggcctccacctctccactcctcctcgcccttctcctcctacccgcgctcacggcagcggcctcgctcctggcgctgccgctctcgacggcgtcgcggtggattgtaggtgtggatgggcggcgcgtgaagctggcgtgcgcgaactgggcttcgcacctggagcccgcagccgcggagggcctggcgcggcgccccgtgtcggacatcgcagcgcgcgtggcagcgatggggttcaactgcgtcaggctcacctggccgacctacctcgtcaccaacgccacgctagcttcgctgccgctgcggtggtcgctggagcgcctaggcatgctggagtccgtcgccggcgtcagagtcaacaaccccgcgctcctcgacctgcccctcatcgacgtgttccggcagaactgatggcaacggcttcttcggagatgtgtacttcgaccccaatgaatggttgaaaggcctcagtgcaatggcgactatgtttaacaacacgaaatatgttgttggcatgagcttgcggaatgagcttcgaggaccgaaacaaaatgttagtttgtggtacaggtacatgcagctgggtgctgaagctgtacatgctgcaaaccctaatgtcctggttattttgtcgggcctggattttgacaacactctcagcttcttgttcaaagaaaaagttaggctatcattttctggaaagttagtttatgagcaacattggtatggcttctcagatggtggcaattgggaaactcagaaccagaacgatgtttgtgggatggttgttgatttcatatgggctaaaggattattcctacttcaacatggctggccgttgtttttctctgagtttggatttgatatgtcaggcacacatattggtgacaatcgctatcttacctgcttcttaagtgtggcagccgaaatggatctggactgggcaatttgggctctgcaagggagttactatatcagagagggtattttagcttatgatgaatcatacggattgctgacatgggactggtgtacagctagaaatcctagcttcattaaaaggatcaattctctgcaatcagcattccaaggtcctggtcttccaaacactcaacagccatactacataatattccatccccaaagtgggctctgcgtcttggccaggtcttccaagttacttgagttgggtccatgcgacgaatcaaacgcctggaactacacctcagcgtacgagctggtagtgaaaagcacagggcaatgccttcaggcgcagtcggtaggcaagaatgcgaagctcggcaccgattgcagcaaaccaagttcgaagtggcacctgatatcggattcaaagatgcatgtctcggctgagctcgcgaaaaatggaaccagggtgtgcttggaagccagtcctgacggtgccatcagaacaaatcagtgcaagtgcctaagcgtcgatccgacctgtgaccctgagagtcagtggttcaaagtgatcttaagcagcagagacatacctggaggcgactccatcttgcagttgccgtcacttggcccctggcctccgacatcccttagttcttgagagtctgaaagctgctcatttccatgtggtgtgaccaaagaggaatacgagcgagaattacgtgaaaaatctgcagggttgctgtaggcagctgggtactgtagcgttgcatttggtttttaatgtacagtatgaataatctattgtgctttggaaggaagtaagctgcttcttacttggtgttggcgtctgtggccgtcaaggctgagtatgtagctctgtaatttggtttgtatatctagaagagaaattgttcgaaaagctgctgtttttggcagcaccaagattgtatatccaccattttcatgtatgttgcgtgtatgagatctttgagagttgaaggaaactgagatatccaccatttgcatgtacgcaagacgaatttggatgcctattctgttcttgttaataaagtgttacctagttcctcttag

SEQ ID NO: 8231 - DNA, 2035 bp, Zea Mays
tgcggctcgaacgacgatgactaggtggacctcacggtgctcgacgacggtggcagcctgcagtcaatttgtcagtttattgagacatccaacttgcatgagttgatcaacaagcccatccctggttccttatggaggcatcatcttccttgcgcttccaagtttctcgttttagttcgttcaagatatggctatgcctttttctggtactcgttcttcagaactgcagcccagcactttcagattcaccatatttggtcggtatggggagctatgacataacagggccagcagcagacgttaacatgatgggatatgcaaatgctgagcagattgcatcaggaattcactttaggctaaaggctcgtgcctttatcgttgctgagcctaacggcaagcgtgtcgtgtttgtaaatcttgatgcttgcatggcatcacagcttgttactataaaggtgcttgaaagacttaaagcaaggtatggagatctttataatgagaataatgtggctatcagtggaatccatacgcatgctggtcctggtggttatctgcagtatgtagtttatattgttacatcacttgggtttgttcgccaatcatttgatgtgattgtcaatggaattgagcaatgcattgttgaagctcacaacaatctccaccctgggaaaatctatgtgaacaaaggtgacctccttgatgccagtgtgaatcgcagcccaagtgcatatctaaataaccccgctgaagagagaggcaagtataagtacaatgttgataaagaaatgaccctcatcaagtttgtagatgatgagtctggtccgattgggagtttcaattggtttgcaactcatggaacatctatgagtcgtacaaattctttgataagtggtgataacaaaggagcagccgcacgtttcatggaagattgggcagaacaaaatggcattccaaaacaggcagctcatgtaaatcacgatggtttggaatcttcacacatgacctctcgacttccgagaagagtctccccaataattcctgaaccaaatgagataactgatgacttagtacaattggcgtcatcctacgaagcctcaggtggacggcgattatcaagttcaagtatcaccaagcgtatcagaagtacccaacaaaacagacctaaatttgtttctgcattctgccagtcaaattgtggtgatgttagtccaaatgtcctgggaactttctgtatagacactggccttccttgtgacttcaatcacagcacatgcaatgggaagaatgaattatgctatggacgagggccaggatatcctgatgaatttgaaagtacccatatcattggcaataggcaatttcaaaaggctgtagatctttttagttcagcttctgaagaaatacaaggcaaaattgactacaggcatacttacctagatttctcaaaacttgaagtgaatgtccgtacaagtacaggaagtcagcaagttgtgaaaacatgcccagcagccatggggtttgcctttgctgctggaaccacagatggtcctggagcttttgactttaaacaaggagatgtcaagggaaaccctttctggagattagtaagaaacttacttaagacaccagggaaggagcaagtcgaatgtcaagcaccaaaacctatcttgctagacactggtgaaatgaaggaaccatatgattgggcgcctgcaattcttccaattcagatcataagaatcggccagctggctatcttgtgtgtccctggagaattcacaacaatggctggcaggaggctacgtgatgccgtcaaagctgtacttacaagtgacaacagtggtgaatttaataacattcatgttgttcttgcggggctaacaaatacatattcgcagtatattacaacttttgaagaatatgagatccaaagatacgagacccctgggtgcattattgcaagctgttttaaccgccgcggaccccttatatttagcgtcacaaagggacaattctacatttttttcatctttgg

SEQ ID NO: 8232 - DNA, 2888 bp, Zea Mays
cgcagcggagctgcacaaggtggacgccatcccagtcctacgactacgaggcgcccccgctctcggaattttcagcgggtcgcgtcgcgttctgtgcggggtgtcgcagtgccgaggtataaatggcggtcagtccctgcggccgcagcagcaactgaatcatccgaggaaggagggtggagggaggagggattttgccgatcacggtcaatttgtcagtttattgagacatccaacttgcatgagttgatcaacaagcccatccctggttccttatggaggcatcatcttccttgcgcttccaagtttctcgttttagttcgttcaagatatggctatgcctttttctggtactcgttcttcagaactgcagcccagcactttcagattcaccatatttggtcggtatggggagctatgacataacagggccagcagcagacgttaacatgatgggatatgcaaatgctgagcagattgcatcaggaattcactttaggctaaaggctcgtgcctttatcgttgctgagcctaacggcaagcgtgtcgtgtttgtaaatcttgatgcttgcatggcatcacagcttgttactataaaggtgcttgaaagacttaaagcaaggtatggagatctttataatgagaataatgtggctatcagtggaatccatacgcatgctggtcctggtggttatctgcagtatgtagtttatattgttacatcacttgggtttgttcgccaatcatttgatgtgattgtcaatggaattgagcaatgcattgttgaagctcacaacaatctccaccctgggaaaatctatgtgaacaaaggtgacctccttgatgccagtgtgaatcgcagcccaagtgcatatctaaataaccccgctgaagagagaggcaagtataagtacaatgttgataaagaaatgaccctcatcaagtttgtagatgatgagtctggtccgattgggagtttcaattggtttgcaactcatggaacatctatgagtcgtacaaattctttgataagtggtgataacaaaggagcagccgcacgtttcatggaagattgggcagaacaaaatggcattccaaaacaggcagctcatgtaaatcacgatggtttggaatcttcacacatgacctctcgacttccgagaagagtctccccaataattcctgaaccaaatgagataactgatgacttagtacaattggcgtcatcctacgaagcctcaggtggacggcgattatcaagttcaagtatcaccaagcgtatcagaagtacccaacaaaacagacctaaatttgtttctgcattctgccagtcaaattgtggtgatgttagtccaaatgtcctgggaactttctgtatagacactggccttccttgtgacttcaatcacagcacatgcaatgggaagaatgaattatgctatggacgagggccaggatatcctgatgaatttgaaagtacccatatcattggcaataggcaatttcaaaaggctgtagatctttttagttcagcttctgaagaaatacaaggcaaaattgactacaggcatacttacctagatttctcaaaacttgaagtgaatgtccgtacaagtacaggaagtcagcaagttgtgaaaacatgcccagcagccatggggtttgcctttgctgctggaaccacagatggtcctggagcttttgactttaaacaaggagatgtcaagggaaaccctttctggagattagtaagaaacttacttaagacaccagggaaggagcaagtcgaatgtcaagcaccaaaacctatcttgctagacactggtgaaatgaaggaaccatatgattgggcgcctgcaattcttccaattcagatcataagaatcggccagctggctatcttgtgtgtccctggagaattcacaacaatggctggcaggaggctacgtgatgccgtcaaagctgtacttacaagtgacaacagtggtgaatttaataacattcatgttgttcttgcggggctaacaaatacatattcgcagtatattacaacttttgaagaatatgagatccaaagatacgagggagcatcgacgttgtatggcccccacacgttgagcgcctacattcaggagttccagaaacttgctacagccatggtggcaaacaaagaggtcccgacaaattttcagcccccagacatgttggacaagcaaataggactcctcccaggcgttgtgttcgactccacacctcctggggtggagttcggagatgtcagctcagacgtccccgcaagctcaactttcaggaagggcagtgtcgtgaacgctacattctactcggcgtgcccgaggaatgaccttctcacggacggcacgttcgcgctcgttgagaagctggacggcagcaacagctgggttcctgcctacgacgacgacgactggtcactacgcttcaagtggtcgagaccgtcgaagctgagcccgagaagctttgcgacgctggaatggaccgttcctggagacgccccgtcgggcgtttataggttgaggcattttggtgcctccaaaccactgattgggtccatcaaacattttacagggacctctcgggcgttcgcagtgcgttaggttgcacaccgttgcgttgcgttcgacggcacacctgtcagagaatcgacaccgggtcatatatttactttgcatacctgccacagtatatggacatgttttccctatagtttttacatgctcctgatattaataacgctgtccatcgcccgttctgtttggtcatgacaaatacccaaatcgccatatagctacagactcgatgtgtgtgaaatttctatatattaaagcaggaaagaaatctgttctcagatt

SEQ ID NO: 8233 - DNA, 1539 bp, Zea Mays
cgcgggctgacgcagccgcgcgggacgtcaatctcacgcgactccgctgctggccgctgtttaaaaaccaaaaaccctcccccaaaacctccgaaatccccgcgacctcccctccccgtctcccctctccgctcccaaattcgtcgaacgccaccccacccgcccactgcaatggcgagcttcaatcccgccggcgccagcgccgccaaccataatcccaacaaatccttcgaggtgactccggcgcctggggactcggtgtccagcctcagcttcagccccaaggcgaaccacctcgttgccacctcatgggacaaccaggttcggtgctgggaggtcatggctggtggggcctgccaagcgaaggcctccatttcgcacgatcaaccggtgctgtgctcggcttggaaggatgatgggttgactgttttctcaggaggctgtgataagcaggttaaaatgtggcccctgctctcaggtgcccagcccacggttttctcaggccatgaggcacctattaaagaactcgcttgggtgccacagatgaatcttcttgtcagtgggagctgggacaagactttgaggtactgggacattaggcaaccccaaccagtgcatgttcagcaacttcctgagcgttgctatgctctatcgctttgttatcctctcatggtggttggcactgctgatcgcaacgtaatagtcttcaatctgcagaatccacaggctgaattcaagaggattacgtcacctttgaagctccagacaaggtgtcttgctgcatttcctgatcaacaagattgggtctatagaaggacgagttggtgttcatcatgtggaagagtctcagcaaggaaaaaactttacattcaagtgtcaccgcgatggcaatgatatatacgctattagctcgttgaactttcatcctgtgcatggtacattcgctactacaggctctgatggaagtttcaacttttgggataaggacagtaagcaaaggctgaaggcttataataggtgtccatcccccatcacatgcagcgcattcaatcatgatggctctatatttgcttacgcggtatgttatgattggagcaaaggtgctgagaagcataatccttctactgcaaagacaaatatatttctacatagtgcacaggattctgacgtgaaaggaaaaccccgcgctggaaagaagtaggcgtagcaatgataagtcagtgactggtgatcgtaggacagcaaatcagctctcttctcctgatagttagggtatttcttgacagtacactagactaaaagcatgtccttttatcacaaccattgcatttgcctcttttggctaagtaatttcggtggcagtgcacttacggcgggttatttctaaaatggaccatctgctgggcgggggcattgttgttctttggacgtctggttgttggtctactggtcgcttttgaagcttggttagtcaatttctcttcgtgctctctagttgcttgactacccgttgcatctttgattgtggtggaaggtcat

SEQ ID NO: 8234 - DNA, 1548 bp, Zea Mays
cgcgtcgcttggcctccaagtccaggtccatgtccaacagacaaaaaaaaaaccccgcccccggttcgtcacttcgtcgctttctcgtcgagccgcgactgccgactgcgaccgagagaattctctatccggtccccgtccggtttggttagagttcgcactcgtgattgggttggtcgcttggttcttccctgccggaagatacctttcgttcggtgtcgccaactcgccattcttgggaggtcttggtcgggaccggtgctgatggaggagaggtacgaggcgctgaaggagctgggggccggcaacttcggcgtggcgaggctggtcagggacaagcggaccaaggagctggtagccgtcaagtacatcgagaggggcaagaagattgatgagaacgtgcagagggagatcatcaatcaccagtcgctccggcaccctaacatcgtacggttcaaggaggtttgtctaacacccacacatcttgctattgtcatggaatatgctgctggtggagagctatttgagaaaatctgctcagcagggcgattcagtgaagatgagtccaggtatttcttccaacagctgatatcaggggtcagctactgccattctatggaaatttgtcaccgtgatcttaaacttgagaacaccctccttgatgggagtccaacacctcgtgtgaaaatttgcgactttggttactcaaagtctgctttgctgcattccaaaccaaaatcaacagttggaactccagcatacatagcccccgaggttctttccagaaaagagtatgatggaaaggtagcagacgtttggtcctgtggtgtcacgctgtacgtgatgctcgtgggatcatatccatttgaagatcctgaggatccaaggaacttccggaaaacgatcagcagaattcttggcgtgcaatactccatcccggattatgtgagagtgtcttcagactgcagacgccttctgtctcagatattcgttgccgatccttcaaaggatcacgatcccggagataaagcatcacccgtggttcttgaagaacctcccgagggagatctcggagagggagaaggccaactacaaggacgcggatgccgccgagccggcgcaggccgtggacgagatcatgcggattgttgaggaggccaagacccccggtgacatgtccaaggtggttgacccggcgctgctggccgagatggcagagctggagagcgacgaggaagaggcagacgccgatgacacctactgatcgctcctgcatgcagctcagcagctgctcagtcatggtgtccagtcctttgtgctgcagacatggcgccgccgagcgcccgagcttaacccgtgcgtgtgatgacggatgttgtattgcactctttacgctgtttgtataataaaagtctgtacaacgctgtacaattgcagattgccttgtacagatgaactagcgtgcagtgatatactcagtcccaaattctatgttccaaaacggtttaaataattttattttttagagagatcaaaatagttttaagt

SEQ ID NO: 8235 - DNA, 3103 bp, Zea Mays
tccttttttatgataccagaaggagaatgatgagaaagacaggagtgctgtaataaagatttttcaagatatgctggaggttgtaacaagagatatatttgacgaccaccttagtattttagagtcaagtcatggaggctcatatcaaaagcatgatggcacaaccacgtgggataaagagtatcagttgtttcaaccatctggagctatcaagtttcctctacaagtcacgaccacagatgcttggctagaaaagataaaaaggctggaactgctacttacggtgaaggaatctgctatggatgttccttcaaacctagaagccagaaggcgtcttacattttttaccaactccttatttatggatatgcctgatgcacccaaagtccgaaacatgctctcgttttccgcattgaccccttattacaatgaaccagttcttttctctataaaagaacttgaggaagaaaatgaagatggagtttccaccctattctacctgcaaaaaatttatccagatgaatggaaaaactttaaggaaagggttggattggaggaagaacttaaagagagcgaagaaagcgaagaactaaaggaggaacttcgtctatgggcctcatacagaggccaaacactagctcgaacagttagaggcatgatgtactacaagaaagctttgaatcttgaagcatttctagacatggccaaacgtgaagatctcatggaaggatacaaagcagccgagtcagtaaatgatgaacaatggaagatacaccagaggtccttatttgctcaatgtgaagcagtggctgatatgaaattcacctatgttgtttcatgccagcagtatggaaatgataagcgtgctgcacttgctaatgcccaagacatattgcagctaatgaggaaaccccactcaaaatcttgatcaggttatctatcggataaaacttccaggccctgcaattctgggagaaggaaagcccgaaaaccaaaaccatgcaataattttcacccgtggtgaaggtttgcagaccatagatatgaaccaggacaactatttggaagaatcccttaaaatgagaaacctgctccaagagttccttacggagcatggagtgcggcgtccatctatacttggagttagagagcacatttttactggcagtgtatcctcccttgcatggttcatgtcaaatcaggagcacagttttgtgactattgggcagcgtctccttgcaaaccctctgaaggtccggttccactatgggcatcctgatgtatttgatagacttttccatctgacaacgggtggtgtcagtaaggcatcaaagagtatcaatttaagtgaagacatttttgcaggttataactcaactcttcgtggaggcaatgtaacacaccatgaatatgtacaagttggtaagggaagagacgtcggattaaatcagatctctaagtttgaggctaaaatagcaaatggaaatggtgaacagactcttagtcgtgatatctaccggcttggacaccgctttgattttttcaggatgctttcatgctacttcacaaccgtggggttttatttcagtacactgttgacggttgttacagtttatgtatttctgtatggacgcctttatcttgctctcagtggacttgaagaggggctatcgcagggaagattgattcataatcatccccttcaaattgctcttgcctcacaatctcttgttcaacttggttttctgatggctcttccaatgatgatggaaattggtcttgaaagaggatttggtcaggcactaagtgatctaatcatgatgaacttgcaattggctactgtctttttcacattttcccttggcactaagactcactactatggaagaatgttgcttcatggaggtgctcagtacagaggtactggcaggggatttgtcgtctttcatgctaagtttgcagagaattatagactctattctcgcagccactttgttaaagggattgagctgatgattctgctcattgtataccaactatttggtcaatcttatcgctcaacaattgcctatatttttattaccttctctatgtggcttctggtattgacatggctatttgcaccctttctgttcaacccctcgggatttgagtgggcaaaaattgttgatgattggtctgattggaacaagtggatcagcaatcgtggtgggattggtgtgtcaccagacaagagctgggaatcttggtgggaagtggagcaggatcatctaaaatattcaggaacaataggacgctttgttgagataatcttggctatacgttttttcatataccagtatggccttgtttaccacttacatgtcacacataacaaaagcatcttggtatatttaatttcttggctcgtaattgtggcggttctgctcgttatgaagactgtgtcggtgggaaggcggacattcagtgcagatttccagctattcttccgtctgatcaagtttttgatatttgttgctttcattgctattttgattgtcttgatagtattacttcatatgacctttcgcgatatatttgtgtgctttctagcattcttgcccacaggatgggggatacttctgattgcacaagcttgcaagcctcttgctcgacatgtaggattatggggatctgttcgtgcccttgcacgggcctatgagataattatgggggtgcttctctttagtccagttgctatattggcatggttcccctttgtgtccgagttccaaacgcggatgctgtttaatcaagcgttcagtagaggactgcaaatttctcgaattcttggtggtcaaaagaaggaacgctccgctcgtaacaaagattgattagtcttctttcatgtgtgttccaatatgcacttgtaaatatttgttactgtctcacggggtatagtgtgtttttatgattacaatatgtaaatatcagatcaaggtgtcataattgtattcgttagattactgtgtgtgtttctattgtaatagtctttgatccagcacatgtacttttactacatatatacgcaaagtctactctaatcagggtttccaacatgata

SEQ ID NO: 8236 - DNA, 1168 bp, Zea Mays
acccatagtataaaccatagtgagtccagaataacatcccgtacatggtatccagacaagccgggattggctccgttgacagatcctgatccagtgtgatatttgggctgctcacagcacaattgggtccaataaagcccagccgggacgcagaggaagaagacccggagctgcgtcttccttccgtttcagcaccgcgcgcaatcggcctctcatcccctcttcctatcgcccgccgccgccgccgccgccgcccgtccgcttcagtacgacgtcgagcaaggggaggtaaaagttcgtttggcgtgcgccatgtttaagaagttctcttcagaagatatatctggacagaatcaagttaaggcttctgtacaacgaaagattcggcaaagtatcgctgatgagtaccccagccttgaacctttgctagatgacttgctcccaaaaaagtcacctatgattgttgttaaatgccaaaatcatcttaatcttgtagtggtgaataatgttcctctatttttcaatatacgtgatggtccttacatgccaaccctgcgtcttcttcatcagatcctgatatcatgaaaaagttccaagtggatagaggtgctatcaaatttgttctatctggcgcaaacataatgtgtcctgggttgacttcacctggtggtgccttagacgacgaagtcgaggaggaaacaccagtggctataatggctgaaggaaaacaacacgccctggcaattggatatacaaagatgtcagcaaaagacataaggaccatcaacaaaggaattggtgttgacaatatgcactatctaaatgatggcctatggaagatggaacggctcgaatgagtagaattctctgaggggttcataacttgcggcagatcgtattgatggacatatgaaaccagcaggaccctatttgcacagctggtatcgttttaaagatgaagtactaagaagctttatttacctgaggcaacttgagcttactccgaccctttggtgtggagtgcatgtcagaaacaggattatgaatgctgtgttcagtgcttttcacaaattgttgtattttcaccagaacaatttgccctcaattggaagtgaggaaatccataacgatctataagttatttgatcttacagtttgttgtgtgtaa

SEQ ID NO: 8237 - DNA, 1352 bp, Zea Mays
caagtgcctgccggttcttcgtgatgagctcctccgacgatgatgtggaccgacgatgagcaaatgcggaaatgatcatgcctgcacgtgttcttgaaggagctgttccacgtctatcagttgggagcatttgctgatagtctgtgaacttctgaaggcaaatctgtacgagtttcagaaattcaacagagaatcagggggtgaggtttacttcacaatgccaagactgcagtcaatagctattcagtgtctggaggcgctgcagtttctgcatggtctcggtctaatccactgtgatttgaagccagaaaacatattggtaaagagctacagcagatgtgaaataaaagtaattgatcttgggagcagctgttttgagactgatcatctatgttcatatgtgcaatcacgatcttaccgtgcacctgaggttatactgggcttgccttatgacaaaaagatagatatatggtcacttggttgtatattagcagaactttgcactggaaatgttcttttccaaaacgattcgcctgcaacattacttgctcgtgtgatgggcatcattggcgccatagaacaagctatgcttgcacagggacgggacaccttcaaatatttcactaagaaccacatgttatatgaaagaaatcaggaaagtaacaggcttgaatacttgattccgaaaaagacatccttgcggtaccgcttgcccatggctgatcaagggtttatcgagttcgttgcgtgccttctagaggtgaacccgaagaagcgcccaagtgcctcagaagcattgaaacatccatggctttcttttccttacgagccaatatcttcatgacacaaattgctattggatcctgggtggcttaacatatgcgacaacacctaagcaccatgaaattttggtagatcaaggcgaaagattttctaccacggctgagccatggcaaacccagattcggtttgatcacgcgtggtgccacaatcagctggtctttgacgctgtgtgcaatcaatccatgccctgtgttgcgcttgtaatataactttattttttttttctctttctagccccgatgtaacaggccattttgttttttaggtactttgtgatgcatttttagcaatagggctgtcatgttgtacatggtgtgatcattgttgaactccgtgccatgctgtgcacatgttagggttctaacccaagcccagaatgtcattcattgcattgccaggtctttaggagattgccttccgtgcttgtctgtgaaacagcttacaagttttacttgccttttctggttgacatcttgccatctagagtttatatatacgatgtatctggg

SEQ ID NO: 8238 - DNA, 1063 bp, Zea Mays
agaaaccggtttttaaaaactaagataaaaaaccagttttttataaactacaacgcttccaaacggtgccgtaatcgaccccaccgggccaccgttccttgccaactgccaagcatcaccgcgaaatctaataactcgttgctcttcgtcttcgctccgcgatcgatccaggagggggaagcagaaggagggatggcggagaacccgcagctgtttgggaatgggatgccggtgccgttctacagtgagatagctcctggtggtcatgtgaaaacaaaaggcacaatttacctgtctaatataaggatggtgtttgttgccaacaagcatgttggcaacttctttgcttttgatatgccactgttgtttgtgcacggtcagaagttcaatcagccaatatttcactgcaacaacatctctggattcgttgagccagttgttccagacaaccagaacagggccctgtactcaactcacaccttcaaggtcttgttcaaggacggcggctgtggtactttcgttcctctgttcctcaacctgactgcatctgtgcggcgctacaaccagtttgaaacccagtctgctgctagcatggcacctcgtgtggaccctctgcaagctgtgcagactcctgttgatgacatgatgcgtcatgcgtatgttgacccaaacgatcctaccaagatcttccttcagcaacctgcgccagaatcgcagctgaggaggaggaactaccacggcccagctgatgcaaattagcgcttggctggattggcagaactcatgctcaattaagtgctgtgtccatttgagcatttcacctatccttgtcgtttaccacaactgacttcaatattcgggtacccctgggtcctgtgaccttacatatatagtacataatgttgcgagttctcgcaatatgtaatgtacataagtggcgtgttcatatattattgctggagcctggagggtcaacttggatgtgggttgcttggatattgctgatctgctggtgctgcatgtttctctgaatctatcattgttcttgttcggggcttgtggg

SEQ ID NO: 8239 - DNA, 1191 bp, Zea Mays
agaaaccggtttttaaaaactaagataaaaaaccagttttttataaactacaacgcttccaaacggtgccgtaatcgaccccaccgggccaccgttccttgccaactgccaagcatcaccgcgaaatctaataactcgttgctcttcgtcttcgctccgcgatcgatccaggagggggaagcagaaggagggatggcggagaacccgcagctgtttgggaatgggatgccggtgccgttctacagtgagatgttcgtcctcgcccgggatggcgtcgagttccacgtcgacaagatcccatcaggaggatatatctccaggacaggatgcagaagacccactaacatgtacctttccaaacaacatatgcagaattaagagctcctggtggtcatgtgaaaacaaaaggcacaatttacctgtctaatataaggatggtgtttgttgccaacaagcatgttggcaacttctttgcttttgatatgccactgttgtttgtgcacggtcagaagttcaatcagccaatatttcactgcaacaacatctctggattcgttgagccagttgttccagacaaccagaacagggccctgtactcaactcacaccttcaaggtcttgttcaaggacggcggctgtggtactttcgttcctctgttcctcaacctgactgcatctgtgcggcgctacaaccagtttgaaacccagtctgctgctagcatggcacctcgtgtggaccctctgcaagctgtgcagactcctgttgatgacatgatgcgtcatgcgtatgttgacccaaacgatcctaccaagatcttccttcagcaacctgcgccagaatcgcagctgaggaggaggaactaccacggcccagctgatgcaaattagcgcttggctggattggcagaactcatgctcaattaagtgctgtgtccatttgagcatttcacctatccttgtcgtttaccacaactgacttcaatattcgggtacccctgggtcctgtgaccttacatatatagtacataatgttgcgagttctcgcaatatgtaatgtacataagtggcgtgttcatatattattgctggagcctggagggtcaacttggatgtgggttgcttggatattgctgatctgctggtgctgcatgtttctctgaatctatcattgttcttgttcggggcttgtggg

SEQ ID NO: 8240 - DNA, 1092 bp, Zea Mays
tagcagtacaaacaatatgcgaaagtggagctaacacttttttcctagctgtacaacaagaataacaatccctgaaatactggaggatgagtggttcaaaaagggctacaagcgcccggagtttgacgagaaatatgacacgccattggatgatgtggatgctgtcttcaatgactcagaagagcaccacgtgacagagaagaaagaagaagaacccgtagctctcaatgcatttgaactgatttcaaggtcagcaggcctaaatcttgggaacctatttgactcggagcaggaattcaaaagagaaacgaggttcacgtcaaaatgtccaccgaaagaaatcattcgcaagattgaggaagctgcaaaacctctaggatttggtgtccagaagaaaaactacaagttgaggctagagaaagtaaaagcagggaggaagggaaacctgaatgttgctacggagatactacaggttgcgccctcccttcatatggtacaagtccggaaagcaaaaggcgacactctggagttccaaaagttctacaagaacctttccaagaccttaaaggacgttgtctggaaatctgaagacctgcaaatgcgagctgcttcttagcatccactagatggcgagatgttcgtacgtgtcagattccattcccgtagcatgatgtgtcgtcagccgtttctgttcactgcactctgcatggtccggtgggcgcgtggcttggcattttcagagaccgcgttgctcgttgcagcccgggatgaaggcgatgcagtaggttttgtggatgtggtgagctctgtatatgcctattgatgagtcatgttgcaagctgtaacgacactatgatccgtgaagtgtagaagcagccaagtatgttctttctatgctgccccatttcccggcagtttccatgcattttgaagaaaaaaatagtggctaactcattgatatttgtatttggtcatcattaataaatcgcctctccatctgtgcatgacccctctatcgttgtaagatttttttacaatcctcatctttctaaggttctgtttttttaccagattatataattcagctcaaat

SEQ ID NO: 8241 - DNA, 2124 bp, Zea Mays
acataagcttttatctaggcttgcggctacttgcatcggagcaagtcagtcacatctcacagctcagtgagatccagagccaaagggcggggcgtctcccactcccaatcccaagtccagccgccgccgtctcttgctcgctccaaaagccgttttccagagatctttttcagggccagacgccagccgccgtctctcgcttgcctgcatttccgatcctgaggcagtcctcatctcattctcatccaaccgggaggttgggaacgagatcacagctacagttacctgagtagtaggatcctcctcagatcggcttcaaaaatcaaagtgggggggacaacaaggcaggggatgagtgcagctgcaaccaaggtgaagagacgtgtgggcaagtacgagctcggccgaaccataggcgaaggcacattcgccaaggtcaggttcgccaagaacaccgagaccggggagccggtggccgtcaagatcctcgacaaggagaaggtcctcaggcacaagatggccgagcagattaagagggagatttcgaccatgaagctgattaagcaccctaacgttgttcgcatatatgaggtgatgggaagtaaaacaaaggtctacattgtgctggagtatgttaccggcggcgaacttttcgacacaattgctaaccaaggtcgaatgagggaaggcgaggcgaggagttacttccaacaattaatcaacgcagttgattattgccatagcagggccagaaaatctactgcttgactcatatggaaatctgaatgtctctgactttgggctgagcgcgctgtcccagcaaatcaaggatgatggattgctgcacacaacttgtgggactccaaactatgtggcaccagaggtcctagaagatcagggctatgatggtgcaatggctgatctgtggtcatgtggagttatcctgtttgttctgctagctgggtatttaccttttgaggactctaaccttatgacgctgtataagaaaatctcaaatgcagaatacacatttccaccatggacatctttccctgccaagaggttgttgacaagaatccttgatccaaatccgatgacgagaataacaatccctgaaatactggaggatgagtggttcaaaaagggctacaagcgcccggagtttgacgagaaatatgacacgccattggatgatgtggatgctgtcttcaatgactcagaagagcaccacgtgacagagaagaaagaagaagaacccgtagctctcaatgcatttgaactgatttcaaggtcagcaggcctaaatcttgggaacctatttgactcggagcaggaattcaaaagagaaacgaggttcacgtcaaaatgtccaccgaaagaaatcattcgcaagattgaggaagctgcaaaacctctaggatttggtgtccagaagaaaaactacaagttgaggctagagaaagtaaaagcagggaggaagggaaacctgaatgttgctacggaggttgcgccctcccttcatatggtacaagtccggaaagcaaaaggcgacactctggagttccaaaagttctacaagaacctttccaagaccttaaaggacgttgtctggaaatctgaagacctgcaaatgcgagctgcttcttagcatccactagatggcgagatgttcgtacgtgtcagattccattcccgtagcatgatgtgtcgtcagccgtttctgttcactgcactctgcatggtccggtgggcgcgtggcttggcattttcagagaccgcgttgctcgttgcagcccgggatgaaggcgatgcagtaggttttgtggatgtggtgagctctgtatatgcctattgatgagtcatgttgcaagctgtaacgacactatgatccgtgaagtgtagaagcagccaagtatgttctttctatgctgccccatttcccggcagtttccatgcattttgaagaaaaaaatagtggctaactcattgatatttgtatttggtcatcattaataaatcgcctctccatctgtgcatgacccctctatcgttgtaagatttttttacaatcctcatctttctaaggttctgtttttttaccagattatataattcagctcaaat

SEQ ID NO: 8242 - DNA, 2358 bp, Zea Mays
tctgcatctgcaaaatactgcgtgctctcttcttctggttctcctcatcacattcaccgtcgtcgtcatcacataagcttttatctaggcttgcggctacttgcatcggagcaagtcagtcacatctcacagctcagtgagatccagagccaaagggcggggcgtctcccactcccaatcccaagtccagccgccgccgtctcttgctcgctccaaaagccgttttccagagatctttttcagggccagacgccagccgccgtctctcgcttgcctgcatttccgatcctgaggcagtcctcatctcattctcatccaaccgggaggttgggaacgagatcacagctacagttacctgagtagtaggatcctcctcagatcggcttcaaaaatcaaagtgggggggacaacaaggcaggggatgagtgcagctgcaaccaaggtgaagagacgtgtgggcaagtacgagctcggccgaaccataggcgaaggcacattcgccaaggtcaggttcgccaagaacaccgagaccggggagccggtggccgtcaagatcctcgacaaggagaaggtcctcaggcacaagatggccgagcagattaagagggagatttcgaccatgaagctgattaagcaccctaacgttgttcgcatatatgaggtgatgggaagtaaaacaaaggtctacattgtgctggagtatgttaccggcggcgaacttttcgacacaattgctaaccaaggtcgaatgagggaaggcgaggcgaggagttacttccaacaattaatcaacgcagttgattattgccatagcaggggtgtgtaccaccgggatttaaaaccagaaaatctactgcttgactcatatggaaatctgaatgtctctgactttgggctgagcgcgctgtcccagcaaatcaaggatgatggattgctgcacacaacttgtgggactccaaactatgtggcaccagaggtcctagaagatcagggctatgatggtgcaatggctgatctgtggtcatgtggagttatcctgtttgttctgctagctgggtatttaccttttgaggactctaaccttatgacgctgtataagaaaatctcaaatgcagaatacacatttccaccatggacatctttccctgccaagaggttgttgacaagaatccttgatccaaatccgatgacgggttgattttgcgtccatattatagctgagcaactctttcattcctagcagattcatctctccagttccaaatacagttaaatttgctgactagattggtcgaacaaagcagaagaaaattcgtgtgacttcagaataacaatccctgaaatactggaggatgagtggttcaaaaagggctacaagcgcccggagtttgacgagaaatatgacacgccattggatgatgtggatgctgtcttcaatgactcagaagagcaccacgtgacagagaagaaagaagaagaacccgtagctctcaatgcatttgaactgatttcaaggtcagcaggcctaaatcttgggaacctatttgactcggagcaggaattcaaaagagaaacgaggttcacgtcaaaatgtccaccgaaagaaatcattcgcaagattgaggaagctgcaaaacctctaggatttggtgtccagaagaaaaactacaagttgaggctagagaaagtaaaagcagggaggaagggaaacctgaatgttgctacggagatactacaggttgcgccctcccttcatatggtacaagtccggaaagcaaaaggcgacactctggagttccaaaagttctacaagaacctttccaagaccttaaaggacgttgtctggaaatctgaagacctgcaaatgcgagctgcttcttagcatccactagatggcgagatgttcgtacgtgtcagattccattcccgtagcatgatgtgtcgtcagccgtttctgttcactgcactctgcatggtccggtgggcgcgtggcttggcattttcagagaccgcgttgctcgttgcagcccgggatgaaggcgatgcagtaggttttgtggatgtggtgagctctgtatatgcctattgatgagtcatgttgcaagctgtaacgacactatgatccgtgaagtgtagaagcagccaagtatgttctttctatgctgccccatttcccggcagtttccatgcattttgaagaaaaaaatagtggctaactcattgatatttgtatttggtcatcattaataaatcgcctctccatctgtgcatgacccctctatcgttgtaagatttttttacaatcctcatctttctaaggttctgtttttttaccagattatataattcagctcaaat

SEQ ID NO: 8243 - DNA, 2282 bp, Zea Mays
cgtacatgccccgtgataaacaaaccattccccgcaagaaacagcaaacaggcacagccctcccctcctccactcctcgccctctctctctctctctctctcatcccgtcccgagaagcggacaaagcgcggcgctgcagatttcgatccggttcccaatgcctcccatgctcgccgtcgccccgtgctagctcctctcccgtctccgcttcctccacctgccgcgccagcgccacgccgcctggatccggcgagcgcgtggccgggagcctcagatccgagcgaaacccagccttcccgtggtgacggccttcgctctagctccagattggctggcggctgccattcctcctcctcctcttctcgctcgaggtttcaaggcgggtccgttcagctctgtgctggcgtgacagtggaaaggcttactgttgccatggtattggtgtgacgaacccgtcaaggttttgcgcaagatgtggaagcagctcctcagcaagctgccccggaagtcgccggcctgcggggattcgggccagtgcagcaatggcaccggtatacagcgcacgagcagctgcgggagcatcccgcccggccgcccggcctccgccatccggcgcatgtcatccgccgtcttcccctcgagtgtcgtggccggtatcgagccgctggtctcgttcaaggatgtccccaactcggagaagcagaacctgttcgtcagcaagctgagcctgtgctgcgtcgtcttcgatttctcggacccgaacaagagctcagtggagaaggatatcaagaggcaggcattgctggatcttatagagtttgtcgagtcgaccaacgctcgcttctcggaggcagccatcgcggcctgctctaggatgtgtgccatcaacctgttccgggcgttccctccgagttgcagatctggctcatcaggtggtggtgagggcgacgaggaagagccaatgttcgaccccgcgtggtgccacctgcagcttgtttatgagctgctgctgaaatttatcggatcctcgtccttggacgcgaaggtagggaagaagcactttgatcactcattcatcgtgaagctccttaatcttcttgactccgaggatccaagagagagggattgcttgaaaactattctgcacagggtatatgggaagttcatggtacaccgtcctttcatccgcaaagcagtgagcaacatattttaccagtttgtctttgagactgatcggcacaatgggatcgcggagctgctggaggtctttggcagtgtcattagtgggtttgcattgcctctgaaagaagaacacaagatctttctttggagagttctgattcctttacacaaaccaaaatctgttggtgtgtatcttcagcagttgacctactgtgtaacacagtttctggaaaaggacccaaagcttgcaagctcagtgataattggtttgttaagatattggccgataacaaactgtcagaaggaagtgatgtttctcagtgagattgaagagatcttggagtctaccagccaagcagaatttcagaaatgtatggtaccgttgtttcggcgaattgctcattgtattaccagttcccacttccaggttgctgaaagagcgctcttcgtatggaacaatgatcacattatcagcttgattgcacaaaaccgccaagtgatcatgcctcttgtcattccagcgctagagcaaaacattcagaatcactggaaccaggcggtcctgaatctgaccgtgaatgtcaagaaaatgttatctgagatggacgacgatctcttctcgtcatgcctggcgaagtacaaggacgaagaagaaaaacgcgtgtcgctagaagcgaagcgtagacttacgtgggagaagctcgagtcagctgcagctttccagccagtgactggccatacagccgtcctagtaggccaccggccgtcagcaaatctgatcgccaccatgatctagctcatgcatgtatgccgaacaagcgaatgtggtgctctcccccccttttggtgaggcgcagcaagtgtagtgttctctattttgctcctgcttattattattttccttttgctggtatgggtaatcagtgtagtagtaagttgtaactatttccggatgtttatgttcttaaggcaaggatacctgtaacttaagactgccgagtgctgacactctacatgtatctttgcctgtttatggatgaacaggtgtcctacagtttaatttcaaaaaagatgagtatatctaaaaaaacataaaaaa

SEQ ID NO: 8244 - DNA, 1833 bp, Zea Mays
gcttacatcatcccctccacagtttacatcctgtgatcctgataagttggcacttcacagttcaaaccccccaccaaatctgaatcccccatacacctctcccatatatatatcagccttccgcccatcccaaccccaagtacacagagaaacaaatacagagaggcagaggcgccatcatctcccttcttcttcacccacaagcctctagatgggagtgcagaggtacaggttcttctgctgcgggtgtggcgccaatgcggcggccgacggccgggaacgcgacgaggacgggggcttcggggtgtccgacggcaaggccgagaagggggtcgaggccggcccgcgggggctgtcgtgggcgcaggttgaggcgatgacgggcgggttcacctcggccgtggtcggcgagggcgggttcagcaccgtgtacctggcgcgcctctccggcgcgctcgccgccgtcaaggtccaccgcagcagcgagcgcctccaccgcgtgttccgccaggagctcgacgcgctccagcgcgtccggcacccgcacatcgtccgcctcctagccttctgcgaccagcaagacgaaggcgtgctggtgctcgagttcgcggcgaacgggaacctgcacgagcggctccacggcgggggcaaggccgcggggacgatgccgtgggcgcggcgggtgtcggtggcgctgcaggtggcgcgcgcgctcgagcacctgcacgaccgctgcgagccgcaggtggtgcacggcgacgtgaaggcgtccaacgtgctcctggacgcgtccatgtccgccaagctgtgcgacttcgggtcggcgcggatggggttctcggccgccgtccgcccgcgctcgtccgcgcgcaccatgctgggctcgccaggctacgtcgacccgcactacatccgctccggcgtggtcaccaagaagagcgacgtgtacagcttcggcgtcctgctcctggagctgctcacggggatggaggccttctgcgcggaggaaggccggctcctcactgccgtcgtcgcgccgcggctcagggcaggcgacccgccctgcgacgcgcgcgggttggtcgacgagaggctcggcaccgcctacgacgccgccgaggccgccgcggtggcggcgctggccgcggcctgtgtcggcgacaaccccagcctccggccgtccatggccgacgtggtgcgcaccctggagcagcgcgcgcagggatccatctccgccgtggagaggagatcggacggccagaggaaggtgtgagccacgagggcggggtcgtcgcgtcctccgaggcgcccagatctggcttgccgacttgttaacttgcggtgctgacgtgcgtgcatcgcacacgtggcgcgcgaacattggttgctaggagaacaaagcgttgctggtgtgcgagcacatcaaaaggacgaatcaaaaaagaagtggagaaaagcgtggtgaaaattgaagagagagagagagagagagttgattaggggaaaggtttggaggaggtaaaaaggcagggctaatctgtgtgctgatggggggtttgcatcatatgttatgtgccaaagcagcatctacttgggagagcccaaaaaatatggatcgtgcagcacacgattctaagattttgttgattcttattggtagtttcttttgttattttggcaaagtacatggagtgtttcttctttgtacctataatttagctagatttcaatttgtattggatttgttgagagcttggtttgttaaacctgtgtgaatggggaaaaaatcgcttcttgagaatgcgcctttggtgaacggcacagtcattgttc

SEQ ID NO: 8245 - DNA, 2084 bp, Zea Mays
ctcgtgtgtactagtccaatcccctcccaatcggtcaacacaagtacacaccacaaacacccatctcctccgcctctgctcccttctgctcacccgcacgatggcgccggaggcgcgaggtgaggcggcgctggtgtacagagacgcattggcgccagtggaggaaagggtgcgagacctgctgggccgcatgacgctgcgtgagaaggcagcgcagatggcccagatcgagcgcaccgtcgcgacgccgcgagccctcacggagctcggggctggcagcgttctcaacgccgggggaagcacgccctgcgagcaagcctcccccgccgactgggccgccatggtcgacggcttccagcgccttgcgatctcctcccgcctcggcgtccccatcctctacggcactgacgccatccacggacacaacaacgtctacggcgccaccgttttcccccacaacgtcggtctcggcgcctgcagggacggagagctcgcgcgtaggatcggcgaggcgacggcgctcgaggttcgcgccactggcatccactggacctttgcgccgtgcgtcgccgtctgtcgggatcctaggtggggcagatgctacgaaagctacagcgaggacccagagatcgtgcgctcgttgaccaccatcgtcagcggtttgcaggggcagccgccagcagaccatcctcatggttaccccttcctcgcttcgcctagggagaatgtacttgcttgtgctaaacatttcgtaggggatggtggcacggacaagggggtcaatgaggggaacgccatttgctcctatgaggatttggaagcaatccatatgacaccttacccggattgtatagctcaaggggtggcaacagtaatggcgtcctactctaagtggaatggggagccattgcattcaagtcgctacttgttaacagatgttctgaagggcaagttaggctttaagattgggagggcattgacaggatctgtgagccacaaaagcctcgagggtctgattatcgctattgcattgcacaatcagtaaatgcaggaatggacatgattatgatacctcacaggtttgagaaatttttggatgatattgtgttcttggtggaggcgggggagataccaatgtctcggattgatgatgctgttgaacgaattctgagggttaagtttatttctggagtgtttgagcatccattttcagaccaatctctactggacatagttggttgtaaggaacatcggttactagcgcgtgaggctgttcgcaagtctttggtacttctgaaaaatggcaaggatcagaataagccattccttccattggccaaagatgcaaaaagaatactggttgcaggaacacatgctgatgatattggatatcaatgtggtggctggacgatagcatggcatggagacagtggaaaaataactcttggtacgagcatattggaggccatacaagaattagtgggagtgcaaactgaagttgtgtatgagaaatgcccaaccgaagctatgattgaaactggggggttttcctatgcggtggtggttgttggagaggttccatatgccgaatgggacaggagatagaactgaccttagtattccgtttaatggctctgaccttatcatccgtgttgcaagtaaaatccctaccctagtgattgttatatctggaaggccattaattattgagtcacaagttttggaaaagatagaagctctagtcgctgcctggctgcctggaagtgagggcatgggaattaccgattgcctctttggagatcatgattttgtgggcacattgcctgtgacatggtgtaagtctgttgatcaattgcctatagatgctggagactctaactatgacccgctattccctgttggatatgggctaaaaatgtttcgaagcgataatgattcaacataactttattatttattgggtacatttgaatctttgtgatgttaaatactctgtatttattggctattggaacttaaaatgaaataatatattgttgtagtatgcattgtactgttttgaatacattattcttcccttagat

SEQ ID NO: 8246 - DNA, 2010 bp, Zea Mays
atcgaatcggactccgatccgtgcagcccaccggcgagacggcgagacgccgaagctagcacacttcatgccatctgtctgacgtgatgcgtgtggcctctctgcttttactggatccctagccagctcaggagaaactcagaatagtactatagccaagtccatccagtcctttcgcggcgtcttccttgctcaccgcggctccggcgatgtcggccgccggctcggcggctctacctctccgtctacaactgggtcgtcttctccgtctacaacagccgccatcatggagattcttcatgggcttgtagggttggtgaggtctccagtctctgcaactcttccacaaattggatccagattattcctcacgtgaggtgtcttgtggagttttcccgagacccagtcacatcttcttgctactgccctgatcataagctggtctgtcactgagatcatcaggtactctttctttgcaatgaaggaggcatttggatctgcaccttcctggttatcatggctttggtaaatttggatttttcctccgaatctggagagtaatcctaccacctttgccaaggaaatttcccttgaacgtgtttttgcgtactgatcgtctgcacgtacagcagctttatgctgttctatcctacttgtatctctagtgaagttggtctgatctacatggctttgccttacatgaaggtacaccgatcctactagaaaaccgaagaggtatagtatgcatgctgttcacatctcataactaccatttttaaccgttttttcttgtgggaccacaatttcaagcatcggtcttaggccctgtttgggagggcttcacttcaattattacagctttgattttgcagcttcacaatgaaagcctcaacagattagtcagcggtgttcaagagtgtttggtttgcacatacactctaccttttataatacagtaaatttgtgtgatttttccttaaatatccttgatgattagcgggtgaagaaagagatctaaatcgataagtcatgtaatcaatgtcatggtaggtaatttttgtgcaacttcatgagaaagtatgaaaacggtgtttttaaagcacccttcgagaagctttaaaaattttatgaaattggtctctggtttcagttttttttttaaactatagccggtggaggtaaaatagacttgaaattcttgaagtgaagctctccgagccataagatgcgcaacacatggaacttgtcatacgactacttgtacccatctgttcttgccctcctggtttatgttccagttggattgcaaaagaccccttcgctaatcggaacaaaaaaaaatcccgttcgccggctcctcccgtcgtgccctcggatatatggccatcgattctgagttctggccacatcaatccccgggatttagaggctgtttgttcgtggctaaatatgtcacactttgattaagaaaggagaatttgctggccatatacttggatttagcgtgggtgcctgggtggtgtactggtgtctggtaaccagtagcggctagcaacagccgtcaaagccaccaccttaaagccatgggcagcagcatctcagggtcttcgtcttcctccctgcagcgcttcaatggcggcgggtgacgacgggtcggcggttcggcggctctacctctccgtgtacaactgggttagcttcttcggatggttgcaggtgctgtaccacgtgaccttggcgctgttgggtagcggccatcaggccgtctacgctgctgtcaaactgccactcctgttctcacaaactgctgccctagcagagattcttcattctattacagggctcgtgagatctccaatcagcgcaactcttccacaagttggtgcgaggatatttgttacctggtgcatcgtctggagttttcctgagacacagtcccatgtcctcgttacttccttggtcctaagctggtctatcactgagtagtctggagctacagctatagagcag

SEQ ID NO: 8247 - DNA, 3485 bp, Zea Mays
cccgatccgaacccattcaattccaaattcacaaccctgccagtggttggcccgccgctgccaaatcgaatcggactccgatccgtgcagcccaccggcgagacggcgagacgccgaagctagcacacttcatgccatctgtctgacgtgatgcgtgtggcctctctgcttttactggatccctagccagctcaggagaaactcagaatagtactatagccaagtccatccagtcctttcgcggcgtcttccttgctcaccgcggctccggcgatgtcggccgccggctcggcggctctacctctccgtctacaactgggtcgtcttctccgtctacaacagccgccatcatggagattcttcatgggcttgtagggttggtgaggtctccagtctctgcaactcttccacaaattggatccagattattcctcacgtgaggtgtcttgtggagttttcccgagacccagtcacatcttcttgctactgccctgatcataagctggtctgtcactgagatcatcaggtactctttctttgcaatgaaggaggcatttggatctgcaccttcctggttatcatggctttggtaaatttggatttttcctccgaatctggagagtaatcctaccacctttgccaaggaaatttcccttgaacgtgtttttgcgtactgatcgtctgcacgtacagcagctttatgctgttctatcctacttgtatctctagtgaagttggtctgatctacatggctttgccttacatgaaggtacaccgatcctactagaaaaccgaagaggtatagtatgcatgctgttcacatctcataactaccatttttaaccgttttttcttgtgggaccacaatttcaagcatcggtcttaggccctgtttgggagggcttcacttcaattattacagctttgattttgcagcttcacaatgaaagcctcaacagattagtcagcggtgttcaagagtgtttggtttgcacatacactctaccttttataatacagtaaatttgtgtgatttttccttaaatatccttgatgattagcgggtgaagaaagagatctaaatcgataagtcatgtaatcaatgtcatgttttttttttaaactatagccggtggaggtaaaatagacttgaaattcttgaagtgaagctctccgagccataagatgcgcaacacatggaacttgtcatacgactacttgtacccatctgttcttgccctcctggtttatgttccaggccgtcaaagccaccaccttaaagccatgggcagcagcatctcagggtcttcgtcttcctccctgcagcgcttcaatggcggcgggtgacgacgggtcggcggttcggcggctctacctctccgtgtacaactgggttagcttcttcggatggttgcaggtgctgtaccacgtgaccttggcgctgttgggtagcggccatcaggccgtctacgctgctgtcaaactgccactcctgttctcacaaactgctgccctagcagaggtaaactggtcttaagcctagtcgcatgttttatcgaacgtattaatgtgataattttagcgaagatcacaggtctaggactctaggatttgaaactctctcgtctcgtcgattgttttgaaatggatgtagaggtgtttggtttatcgagactaaattttagtttctctattttatttattttaattcctaaattataaacaaacgtttttgccccgcatcaccctcttgcatgtgcggcagcaggccgtcggctagtagaagacgctacggattaaaatcaagcgaacaggttagacaataatatataggcagttgtgtttcctttatctccacataaacaatggatctaaacattaaatactaaacacagacaaaatccaataaaagcactatgcaaatatttttactggatcagctacataattttgctagaaagattatatgtgtccaaaggggcacacttagaccccaggccatgttcagttattcctacgccacaggggttaaatgagtttggaagattttagtagaacttttaacctaatgtggatttaaacccactcaattccctcccatctatatctattgagatgaaaacgaacaagttctcaatgaaaatccatctgtttgagttattaatacatgtgataacacttttagaaaaaaaaggaaacattgcatctaatatgtgatgatcatcgacatgaccaggcatgtattggtaaaataggtactaagatagacaagtttccatccgagaccaagccattaaatttaatttttatcaatataatgtatgtatgtttaatgacagtgttggaagagagtttattaacaaataggaagacagtttgtatccaatctttcaatttagttgttattattacacgtagtacccctgtgtggtcctacaagaaactttgtggaattccttgtatcatcctagccgtggattatcagtgtttatatttctttgcacatgtactaatttactaagtaattgagtttcactggtgatgctgtctcgctggtagcacagattcttcattctattacaggtaaaagaggttcttctttcttcccaatttatgtttttcgatctttatcaggactgagactttctaaacaatgaaaatatatcctcaaagattccaacttgaaaaatatatatattttttaaaaaaaattgactctcttgcattggttttcttttaatttaaaaaaaaactacgcaacgatgatatgttgaactgctaaaagggctcgtgagatctccaatcagcgcaactcttccacaagttggtgcgaggatatttgttacctggtgcatcgtctggagttttcctgagacacagtcccatgtcctcgttacttccttggtcctaagctggtctatcactgaggtcatcagataccctttctttggcttgagggaggcatttgggatcacaccttcctggctcctatggctcaggtacagcacgttcactgtactctaccctgttgggctgatcagtgagctcggcttaatcttcactgccatgcctcacatgaaggtgagtgagctgaagaaacctgcaggagcccatgcatgctgctcatcagtgtgaggctcatcagctgggcagcgagtttgacctagtcttggcaacaactttgcagggaaggtccttctacatctgcgctgcactgaccactatctacattccagcgttcccgcacatgtacggtcacatgctcgcccagaggaagaagaacctgtccaaggcgaaagccgcatgacgctccagacgagcctaggcctcactgtcccagacggagagtaaccactgtctctaaccacgggatgtcagagtgcactactcttatcaggtggcaataacaccggggttgtaccaaggaatatactggatagctcttccatgggcaaatcaataataaataaaatcaccatttatat

SEQ ID NO: 8248 - DNA, 4747 bp, Zea Mays
ctttcttatatcaaatccctctgtgagaaatctccacaagttggagtctctcacgctttacacgagtgatctcaatcaaagcaaaggagtaaggagggagtagaaacacacataagagtacaagagcagcaacaccacgcatacaagcaaaagtgagaatgcaataatcaaaacgacagagtttctcttaagaaaacactcaattctctatagcatgagtgtgtggttgcattgaatcggagtttaagagtgctcttagtatacttggtaacaactctatgcacctagaggagtcctttagtcatttcttctttgtttggaaggccctggacgccttctgtccgtgggcgcaccgaacagtctggtacacgttggacagtgaacattgcacgatttccttccttttcctgcgaagccaaccgttgccggtcgttactgccattgattatgagaaatcaatataaactctagaacagagctactctacacagagttttggaatagagctgtttttggaatggaatggagccataccaaacatgtccttattaaatgtggggtatgtctaaagcatatctctactactatttatgaacatagtgtaggcgtgcacgattgcatggcgcacggttctgccaactccggacgcgcctgtcgcgccgcgaatcgcggccgccgcatcctcagatcaataccgcggccgtcgtcttctctccccccgcatggtggcccgtcgtccccttccaaccctcctccctcgcctgccggtgtccctttcttcccccgtgtggcggctcgcacccgcacgagatctagactaccttcccaccctcctcccctgcccgctcgcctgtcggcgtccctttcttctccccgtgcggcggcccgcgcccgcacgagatctagactagacgccgagggcacgacgctttgcctgcctcgcctccgtcccctcgtcgcctccacgactccacctctacctcctcggtgagagagagagagagcgggggagagagggcactagaccaccagcaagcatgaggcagaggaggagcgtggcggcgccgctacactctaatccgctggctaccccatcaggagagagagagaggggggagagaaggcaccagacaccgccagtaagcatgaggcagagaaggcaccagacatcgcgctatcctccgcatccgccgcccgtcggcttcgtccgctgcgagaattctcgtgtcgcccatcggcgacaactgtccgggtgctgcaagccaccgacggtgtgcgggtacgcgtacgcgagcccgacggcgtggacgagcccggcggcggacgcggactgcgtggcgtggagcaacgaccccgacctgctctgctacgcctgcgcctcatgcaaggccggcgtgctgggcggcttgcacgagcagtggcgcagggccaccatcgcgctcatcttcgtctacgtcgtcggctgcagcgcgttccgtaacgcgcagaccgaggacctcttccgccgctacaaatggggaaattattaacgatctctcccactgatctactgcgtacgtacgtacacgccgacttgaaacgggtgagttgcgctttctgtttctggccgtcttttttattattattttgcgaaatcgatctgtttctggtgctcttggcacagtggttagtgttgtagaatgtggacaacagctagaatgctagatgttaattctataggagcttatttatgtatctattctatctctatctgcgatatctgaagctaaggtaacatagattgttccatgagacatgcctacttttctggccacaggattttcagcaatccggttcaccaagatttgagcccaatgccccatcccattcgtggcgtgtgctcgccaaattggagcacgccgtaagcgctcttcgcgtccttttgttggggatggttgcgagttgtgttaaggtcgctcagcaattatgtgttacatgcaaaataaacatgaaaagaaatggtgtgtttaaatctatactactctattatctatacaactatattaaaaacctaaatatggtcagctggttactctattaagaacctagattcacatgtataagaccggtagcagtcattacaaacctccatgcggtggggtggattggctcatccacatttacaagtactcggatagacatcaattagtattagataatatggatttcggtctcaaaggtatgtttctactattaacaatacatgcaggctcaatatataaaacttgtaagtcgttatagatcagctgcaatcaatttatgaataacaaatattaagtactagatatagagcaattgcaaaataattagctgtataattgaacttgttagttttaaggctatgtcttttcacttttgctcctcccccattagaaacagtagcctatatttatataataacaccggacattctcataggtgaatgaagaactaaatttcttgtatgtgctgcagcacaatttgtgccacagattcagctcaaaagtcgatacgataacaaaattggtgtttttatatgttcttcaacatttcttttctgtacgttgaatttagataattgcagtggttgattctccctccttttttatctttgttatttcttgggccgtggtggaggaggttacagcggcagcggtggacaatttggctggttggatcttatttgtgcgctcgtattgtatgttttatgcagagtcggaaggacgtggagggtcgctcttagtcatcaagaggtccgtctctttctgacgtgtttgcatacaaacagaaaatcttatagtttgccaatgtcgtttgttctagcaattttctatctactaaatcataaacatattagttgtttggcatagtagatcaaatgcataatctaattactggactagaaaaaatatgatccgttgtgctttgaatggtttctctctgtttcctagatgcagagcatggctcttattctttgcatgtttaaatcgattgtagtgatttgtttagttctgctctgcaaccctttgagagatacatacctgggtttgtatatttgtccatttcagaggtcaatgtattaccttgtcaggcagcttcaagatttctaaaattgacaaaaatggttggaagatcaaacatcgagaattcactttctacaagtggaacaattgcatatgagggcattgatctattgacatgtgcccatatttctatttatttgtcttcaagttctagatatctctcttattctgatttctagatatctctctaaaatttatggttgtgttagatatctctcttattctgatttctagatatccctcttattctgatttctagatgtgcttggtacaggtcagttttacctgatattctgtttttgttccttgtttgtttgaactgaggttgatttaggttgtgaacttgtgatgacaaaaataacatcctgctgataacctcaaatggcctgtctacgagatggaaaatggcctgatgataacctcaaaattttctccattatgggcaacaactattgagcagccaagatatcaacaacgaagaataaccaatttcgaattcacatcaatcaacaataggacctgtccctgatcaacttcaaaagcgcttaggaagacgttttcagctgaaaagaagaaaagtaaaatccggaaggcatgggatggaactaaagtcatttataatgttgcttcatggggcaccactgctgttggggtctacaataatcgagcattacttacgatcgcaactacaacgtttcagacttcctgccgtgtgatatccaagttcctttgaatattgtgtcaactactagggcatgttagaattgcttgcgtgtgtgcttttccattgttcaggtagcataaagtttgagaccatttgtttattctatgctgatgagttcgactgctaattagcaggaccttccagtcaaaagcagcatgtgtattgtataactgtaaatattgccttgatttgaacaaatttgttttttgtgctagaactttatttcacgaacttcatatgatagaccctactttagagtatttctttctcttctcatttcacattattgttatcacttctctttcaatgagaattttctttcttattttattttattttattttatgtagaagtgtagaaccatatagtctctttggctaatttaatatggttttgttatctggaaatcttgactaatatatttatcacatctttaaaagtggtattttgaattattagatcgacatgttaacaactgggtgggggtattctatctactatctttactactataacacactacttttaatagttctagtcgtggtttttgtgcgtcgcgcccccacccgctcgctcgttttccacgctgtgctatccaggagcgtccgtccgctctctgacatccacaaacactatcctttgagcattacatatctttttgaactgatttagttgtgcattaccattttattcaaaattttgtatgccgtcgcaacgcacgggcacttacctagtaataccatatattgacacatacatctaaatccatataaaaattacactgaaacatataataccatatattcactatacctctacactttgagaaatgaggaacaagatatatggttttgtagtcaaggaagaaaaaaaccaacattcgttaattgagaaggtgtttttttcagaaaaaataacaaaa

SEQ ID NO: 8249 - DNA, 4182 bp, Zea Mays
tccccatcgtgtcgtgtcgtgccgtgcgcttccgagacagctcactccaccagcagggccgtcaccaccacgtcggcgtcgccatccatcgtcctcgtcggagcccaggccagctgagagctgactcctctccccgaaaggctggaaccgtccaaaaaggaagggtgcggatagcgtgtccaaatcgaaatcgagcagagttcctgggcgactgggcgcctctctattttaagctgacctccctccagataaactccgccagcgcagaggcctcgtccgtctccgtttccgtctccctccccgcgccacctcactcgttcgccgcctccgccggcgcccgtgcgccatctccactccagcgcgctctacgccgatcgagctgccaggaggttgtggatttcatgtccgtgatctaggcgccttacttggactcagggcaatgacaccttgctgggcaatggagttgttgggattcttgctgagacttgtaatatgtgggaaagaagggcgccgttaactccttcccattgtgcccgccttctgctaggaggaggcaagaacggacctcgagtaaaccggattattgtgcagccaagcacaaggaggatccatcatgacgctcagtatgaggatgcaggatgcgagatttcagaagacctgtcagaatgcggccttatcataggcatcaaacaacccaagctgcagatgattctttcagatagagcgtacgctttcttttcacacacacacaaagcccaaaaagagaatatgccactgttagacaagatccttgaagaaagggtgtccttgtttgattatgagctaattgttggagatgatgggaaaagatcactagcatttgggaaatttgctggtagagctggactgatagatttcttacatggtctcggacagcgatatttgagccttggatactcgactccatttctctctctgggacaatctcatatgtatccttcgctcgctgcagccaaggctgcagtcattgtcgttgcagaagagatagcaacatttggacttccatccggaatttgtccgatagtgtttgtgttcactggagttggaaacgtctctcagggtgcgcaggagatattcaagttattgccccatacctttgttgatgctgagaagcttcccgaaatttttcaggccaggaatctgtctaagcaatctcagtcgaccaagagagtatttcaactttatggttgtgttgtgacctctagagacatggtttctcacaaggatcccaccagacaatttgacaaagtaatgcatgtctcttcaaacataagtggatttgtagtttctccttgatgggtgactattatgctcatccagaacactacacccctgtttttcatgaaagaattgctccatatgcatctgtcatcgtaaactgtatgtattgggagaagaggtttccaccattactaaatatggatcagttacagcaattgatggagactggttgtcctttagtcggcgtttgtgacataacttgtgatattggaggttccattgaatttatcaacaagagtacatcaatagagaggcctttctttcggtatgatccttctaagaattcataccatgatgatatggaaggtgccggagtggtctgcttggctgttgacattctccctacagaattctctaaagaggcctcccaacattttggaaacatactatctagacttgttgctagtttggcctcagtgaagcaaccggcagaacttccttcctacttgagaagagcttgcattgcacatgctggcagattaactcctttgtatgaatatatccctaggatgagaaatactatgatagatttggcacccgcaaaaacaaatccattgcctgacaagaagtatagcaccctggtatctctcagtgggcacctatttgataagttccttataaatgaagctttggacatcattgagacagctggaggttcatttcacttggttagatgtgaagttggacaaagcacggatgatatgtcatactcagagcttgaagtaggagcagatgatactgccacattggataaaattattgattccttgacttctttagctaatgaacatggtggagatcacgatgccgggcaagaaattgaattagctctgaagataggaaaagtcaatgagtatgaaactgacgtcacaattgataaaggagggccaaagattttaattcttggagctggaagagtctgtcggccagctgctgagtttctggcatcttacccagacatatgtacctatggtgttgatgaccatgatgcagatcaaattcatgttatcgtggcatctttgtatcaaaaagatgcagaagagacagttgatggtattgaaaatacaactgctacccagcttgatgttgctgatattggaagcctttcagatcttgtttctcaggttgaggttgtaattagcttgctgcctgctagttttcatgctgccattgcaggagtatgcatagagttgaagaagcacatggtaacggcaagctatgttgatgaatccatgtcaaacttgagccaagctgccaaagatgcaggtgtaactatactttgtgaaatgggcctagatcctggcatagatcacttgatgtcaatgaagatgattgatgaagctcatgcacgaaagggaaaaataaaggcatttacatcttactgtggtggattgccatctccagctgcagcaaacaatccgcttgcctataaattcagttggaacccagctggtgcactccggtcagggaaaaatcctgcagtctacaaatttcttggtgagacgatccatgtagatggtcataacttgtatgaatcagcaaagaggctcagactacgagagcttccagcttttgctctggaacacttgccaaatcggaattccttgatatatggtgacctttatggtatctccaaagaagcatccaccatatatagggctactcttcgttacgaaggttttagtgagattatggtaaccctttccaaaactgggttctttgatgctgcaaatcatccactgctgcaagatactagtcgtccaacatataagggtttccttgatgaactactgaataatatctccacaattaacacggacttagatattgaagcctctggtggatacgatgatgacctgattgccagactgttgaagctcgggtgttgcaaaaataaggaaatagctgttaagacagtcaaaaccatcaagttcttgggactacatgaagagactcaaatacctaagggttgttcgagcccatttgatgtgatttgccagcgaatggaacagaggatggcctatggccacaatgagcaagacatggtactgctccaccacgaagtcgaggtggaatacccggacgggcaacccgccgaaaagcaccaagcgacgctactggagttcgggaaggttgaaaatggcaggtccaccactgccatggcgctgaccgtcggcattccagcagcaataggggccctgctattgctaaagaataaggtccagacgaaaggagtgatcaggcctctgcaaccggaaatctacgttccagcattggagatcttggagtcgtcgggcatcaagctggttgagaaagtggagacttgaaagttccctgatacacagataaagatagtatgatatagcagggcacatgtatcttttgtattaactccgttctggaatatatatttgtgaactaaaatgtgacaaataaaaagaacgggtggagtatattgtaagagacggcaaagaaacctctgtatatatgacctgtcgatatcaaataatgccgatcagttagttggcttggctcttttgagggtttagtttatactagtaaatgagagcaaccagcgaagcataaacaagatgagacgtcagagcagcaacaacaacctgcgttgcctttggtttatattgcatcggttctccgaatgaactttgcatcctgtgcacatcagacatgtcccagagggatttcattttcattaaattgacatatcagcaaatctgcttatgcgtcgagatatttatgagaggggaagagagcttcatgaaaccaaaccggtcctcacgactacccaggcgatgaaatccccgctaggctgattgcttgatctatctactgcggctgctccag

SEQ ID NO: 8250 - DNA, 2743 bp, Zea Mays
aaggaagccctctcagcctgcttcagccgaaagaagagagagaactcctcaagctgctcccccaaattccggtcctcctaaacccccgcccccacctcctcctcaccggcgcgaccccaattccgggacctccccgatccccatgaacccgatctaaacatgtccgccgcgctcgcctgtctccgccgcacctccaagcgccgccgagacgcgcccgatcatgccctccccccattgttgaagcagccgctgatggcccacgccggcgccgaagccgctgagtcgtcttcgtcgtcctcggcctccgcttcgggggtcgatggcgcctctgcggcggcggcggcggcctccgcatcgtcgccctccgcgtcgccccgggtggtgcacttctttgtgcgcgctaccgattccagaaccatcgcgatgcacgcggggtgggacgacaccgtcggcgccgtgctcgaccacctcggcgcctgtgggtacgggcgcgatttgcggctcctctacgcgggacggcagctcgcgctggattccaccctcgctgagctccgcctcccgccggactccacacttcaccttttggcgcgtctcaggtccactcagcaccctcacgcgtggcagctcgcatcgcacatcgccagcactgccgccatcgcggagtccgagccctctaggatgccctccgccgccttctccctcgacgaactagtgaaggagtttatcctccgcgcccaccgcgccaacctgaggctttcccgctacgatcgcgccgctacagtcgaggaccgggccgcggcggaccacaccgccgagtacctcgaaatcttcctccaggccggcgccgccttagcgctggcaggaatgaattactgtatagatcatgtcgtcgtacacttgcctcagctttatccactcgccccaagctacccccttctatgaactcaccaaccaggttgatcgagcaagtcctgccatttgcccgtgaaacagtggatatggtccttgatgggcttgcatcaatgccaatgattatatcgcctagtgatctagatgagttctcaaactttctcaaagtgatgtgccagcaggcacgccgttggatttctgatgaggggccgatacccagtattttttacagcagggagtctcagcatggtgacacatggatatggaggtttcacatcatgtcgatgtacatgttgaaaaggttggatgagtgcttgaagacattggagatggacctgccattgtcatcagagagtatcggggtcatggaaagtcaaaccatatgggctgctcgatcacacatcctggtcatgttgactgaacttgatttcatcgcagcgatttatgaggatgtggggcacaacctacagcttgtgttgctggcacacaaagcaccactcaatgctcttgtccgttgttccaagagaaatgagcgtctacattggctcgtgaagcataagaatcttctctgctttgaggcaagaaggagtttagtcttcatgatgctgcctgaagggaaggatgactttggggagctgcatgagatgttaatcgatcgatcacatttacttgatgaatcctttaattacatcgcacaggcagaacaagctgaacttcacggtgcgctgtttatggagtttaagaacgaggaagctacaggtcctggtgtcctgagggaatggttttgtttagtgtgccaagctcttttcagtccgaagcaagttcttttctcaccttgtcctgaggataaacgaaggttctacttgaacgaaacatctgccgtggatccactgcacctgaagtacttcacttttgcggggcgaataattggattagccttgatgcataaagtgcaagttggagttgttctagaccgtactctgttcttgcatcttgctgggagaagtattacattagaagatatttctgttgcagatcctgtcaaatatgcaagctgtaaaaagattctagagatggatgctgctgaaattgataatctatacctgacattttctcgaggagctcatgagttagctaacccattttgcggaaggatttgctgacatactagttaatccaaaacgccgggaagaactttttgagtgtttagacctcgaagactttgatcgactgttagggggaagcaacaatgcaataaatctgcaagattggaaatcacatactcaatataatggctacaaagaaaaggatcgtcagattaccttgttctggaaggctgttgagcgcatgtcgatcgagagacagaggcagctcctcttcttctggacctcagtgaagtatttaccatcggacggcttctgtgggctgagctccaagctttacatatacaagacgtccgattcacctgaccggctcccgtcgtcgcagacctgcttctaccggctctgcctccctccctatacatctatgaaaatgatggaaaaccagctgcagaagatcacgcaagagcatgtgagctgcagcttcggtgcatggtagttgctgctgttctggattgattctgaacccggtatatactgtacatatggtaggctagtgacaccttagcgtctcgttgagtccgttcctagagcttgaggaggtaatatgttgtctttcttttccttttgtacgtatcgtgggttagtgttccgacactttcatttaattaatctaatgcaaaaggaatggataggaagcaggtttattgatccctcgaattgataggaagcgg

SEQ ID NO: 8251 - DNA, 2336 bp, Zea Mays
aacacctctggtgtgtccggagtggaggttaaagtacttggagtatgttgtagtgttgctaaggaatgggagacgcaaggatgaggctgcaaaggagctacaggttatgggaccatctgtcctcaaatctgcacctttatgttcatgctaaatctgcctcttctaaggatgatgttaaaagcactcacagtgctgccagaggattgcctgttcacagtgtgacaagcagcatgcaagttaatcatgaacctgaagctgaaacccagaagacagtggtgactcataaaaaaagagattggggtcatcaaaaaagagattggggaacaattgatcgaggtcaatcagaagcagttcctcttagaagcgttgtagccaatgtttctcatgtggatgaaaaggattttcacaaatcacatgcagatgaaaaggcttttcataaatcacattctctaagacgaacccgctcgcctgacatgcataaccacagaaagaggagcagagaggcagatgtgcagtctaccaagaggtcatcccacccagttgttagtgcaccacgtcggcttcttcagtttgctgttcgtgatgctgtcagaactgtgcagccagttacttctagttctgaatcagattccaagcgtattcgttctgtagtgtcaacattggcatcagattccacacttgatatcactcatattaggttacagaaaacaaattcagatttgagagtaccaggtgccacagcagcactaagagctgcagctgaggctgctggagatgctctcaaggatagcttttctagaagtgtttttagtagattgggcagaatgcccacaataaattctactgaacaatcaccttatcacagagaacaagatctcaaaggcaaagaatatgggaatatagataatatacaagcagaaaatcaagttgaatttgacgaaagaaatcaacatggtggcagcgatgtttacatgcgcgatcagagaacagaggaagctactggttttattcccaatattgatgagtatgatcagaacagtgcagttaggtctaatggattgggttctcgccaaagcgcattgcctgctagtggaggtaaagagtcattagtactggggtatgtaagaggagcttctgaaataagaagcagaagattgatagcccaggggccacatgctggttcaggaccaagaccatctgaaaagacccaaaatgtttctggtaacactaacatgcagaagcttccaattcatgtaactggagatgccgttgcatttgatcatcaagtgccaatggagaaggttgctgatgcaaggaaatcacatgtgaagaccgcacaggctaatgatgtatccatgatgactgataagtccaaagatttgatacagccgagttcaatgctgcaggcacagaaggcttctggtgctgctggatcaaatactacaggccaacctgaaggtggccctgattctagaactgtctttgttagtaatgtacattttggttcatcaaaagatgctctttctcgtcacttcaataagtttggagcggtcttaaagacccatattgtgactgatggtgtcactggtcagtcaactggctcagcatatattgagtttttgcacaaagaatcagcagaacaggcattaaccctgaacgggacatcatttatgtcacgcattttgaaggtcgttcggaaaagctccactgaagtaacccagctgcctgtcttgccccgtgcttcttggggatcaccatttgcttcaaggctcattagaactgcatacccaaggccgaactatcccggtgcaattcgtgggcgactatcactcaggggtgctgcccggagtttacagtggaagcgtggtgttgctgattcaggagatgttggaaaacctagtccaactgcacctgggaatcagttggtcaccccggccacacgaaacttcacctacacacgcacggagccaaaaacaaatgcgggagcgatggcatgactgatcagctgtagcatgccgcagcgtcgcagaaagagatcgtgattgatgactgtttcgtagtccattcagctgcttttggtaaatatttaagtagctgcagatcttagtttgtagcaggctggtttttgtggacctcaaccttgagtaatattctgtgaggttttctgtgctgatttttcaccgtcagcacacccgttgttctgctggctgttcggagttcgtggatagagggtaaaatatataaaaagtagttttaaatgaaaatacgaacgcgataggtaggttgcaacatttgttttttttattgatggattatttaggatgtgtttgtttgca

SEQ ID NO: 8252 - DNA, 3329 bp, Zea Mays
gtaggacgcgttaaggatgaggaggcggaccgagtcgacgaaagtggctccggtgctggtgccatcgaggcggtagacaccggtggcctcaaacgaccgcagctcgtcgctgacttccatctgcggtggcagcggcaagggtttggcagaatgtcagatactctgcgagcgaaacgtgagttggcacagcagacaacacccgcgtgcagcgctgcaatccaaagaagcgaagcaaccaacccccgaaatcttcaacggcgccatcgccactgcgtcatgcccgtcccgcccctcctctcgccacttcgcctgccctcgccagcgccgcccctccaccgcaatggagcgccatggcggcgcccgacgcaactacgtgccgcactacgggtcccccctccgcttcacctggggctcgccgcggcccgtggcgatggcgtgaggcggttcgtcgggacgctgggctcgaagagagcgcgagctgttggtgcaattagggtttctgcgatctctggagacggcggtggcggtgctggtggtacgggaattgcggcggcagcggccgccactgtggtctttgctgtgatgaaccgggtgctctacaagctggcgctcgtgccaatgaagaattaccccttcttcctcgcccagttcgccacatttgggtatgtcctagtgtatttctcaattctcttcataagatttcgcgctgggattgtcactagagaaatgttagcgcttccgaagccacagttcatgctaattggtttactggaagcgctaggtgctgcttcaggcatggctgctgctgctatgttgcccgggccatctattccagtgttgtcacagtcctttctggtttggcaacttatcttatctgccctcatcttgggaaggaaatatagagcaaatcagatccttggctgcttgcttgttacagctggagtaattctagcagtggccgggtgtgtattggaatagttgttcttattttgcttactcttctgatgcacttccgtaacaatctctaaataataatgagttgttatctattatattgtgcaccatgtttttttaatctggcatgctcatgtaaagatgatgctgattattatcaaagctcctggttcattctagataccgctgattgcatcttaggatcgacatacaatataagagaatttgcatatgccatttcagtttgcctaaataatcacagtgacactactagaattagtggtctaaatgttgatcagtagattcaaatttaacagatttcttgtctgtttctagttttcagtggcataattttgagaagaaacttcttgttcccacacgataaaatacatcttggaagatcataaatttttaaaaatagtatggtggatcatttgtacagggtaccattatggtgcatgtgttatgctcataccttgattagattttgagtttctcttagtcatcctcttttcttgatgaacacagtggagccagtaatggtccgattctctttgaagtcaaattcttttggccagcagtaatgatgatttcagctgcatttcaagctgctgcttccattatcaaggttgagtgttcatagtagtgttgtggtgggattttcatgttaatccagctatatagtttttttgtactattacaggagtttgttttcattgatggtgcaaaacgccttgagggaaagaagcctgatatatttgtagtcaactcttttggttctggtttccaggtaagacaatagagattcacttctttcaataattgttccttttgctcactgaaaatctttgttgttgcaccatacaggcactttttattttcctactccttccatttctctctaacttgaaagggattccttttgctgaactccctgcatacctaacccgtggtgctgcatgctttctgaatgtgggagggaatctgaagggtgagtattgtttctcatatcacattcatgtggtaaataagtggagcttctcatattatataatttcaaatctatggttaattagagaaaaagtgatgttctcatattatatgatttcaaatatatggttgattggagaaaagggatcttcatgaaatctttcacaagtgaatattatccatctcaacctttttgttttggtattatctatattattgaggtatgcatggcataaatgtttaacactttgctagctatgccaaactcaaaacgcttgtggccagcagtcttgaacatgattatctatgatctatgatgcaagatcatttgctaacggtttagatttttcagattgccatggagctcctttgctaccacttctctacataactctgaacatggccttcaacatttctgtccttaatcttgtgaagatgtctacagcagtggttgcttcgctgacatcaactttagcaggttatgcattttgtttccccacttcatattttaatgtttaagcagagtacttgtgcaaggcaatatggcaacttggcaagggcatatggtgctttatgttttataaaaactgaggtgccatgcaaatctttttgtgcagttgtgctagaacagatttcctgataagtagtcgacgtactctataactcgatgcactcatggctcaccaccaaaactttaaggaaacaagccctttttaagctgacttctgtttggtttgttgtatgtttgttttaacactatatgcttctctgcagtacctctttccatctatatactgtcactgcctctaccatatctacccgaaggaacaaatttgagcgcatcttttttgattggtgttgctaccttagtgctcggattgcttctatacaatcttcctcaagaatcaaccaatcaagtaaaggaagattaatctaaacccatatcagatataaggttaacaggaagctattggtgctccactaagaaaatagccgcattttgttgacagtggcttcacagtttggtacataactcatgaagagcagtgttcttctgccacaaacatttgcggtgcaaacatttgaggcaccagctgacttcaaagtttagaaacagcaagttcttgtttcatctgttaacaaaatcctaatggattatgcagctatatataagctctacctgagcggatgtaactactaactactttcagatgagtaagggctttacaaattcattggttgtataattgttctcaccattttttggtcaattcaagactaacataccagactccgtgggatttattatgtaaataagtaatgattgtaaccattataaatcttgattgtatggccaaccatttcaagtgaatgctagatacacg

SEQ ID NO: 8253 - DNA, 4088 bp, Zea Mays
gcaggctttcgagcgaaaacgaccgcgcggacgggcgcgcccggcccacccacccgctggtaggacgcgttaaggatgaggaggcggaccgagtcgacgaaagtggctccggtgctggtgccatcgaggcggtagacaccggtggcctcaaacgaccgcagctcgtcgctgacttccatctgcggtggcagcggcaagggtttggcagaatctgaacttggaactactgggtctccttccttcgagccggtgcagagggccgagcgtcgccgtcaccgccgacgcccgagtttgcgggccgcctccagtcctccctccatctcaggtaagcggccgccgagcagccccgggccaggaggcgggagcgagcacgcgggcgtggggaggtcagtcagggaggcacgcgccgtcagtcgggttcaagtatcattggccccctaccagtcagatactctgcgagcgaaacgtgagttggcacagcagacaacacccgcgtgcagcgctgcaatccaaagaagcgaagcaaccaacccccgaaatcttcaacggcgccatcgccactgcgtcatgcccgtcccgcccctcctctcgccacttcgcctgccctcgccagcgccgcccctccaccgcaatggagcgccatggcggcgcccgacgcaactacgtgccgcactacgggtcccccctccgcttcacctggggctcgccgcggcccgtggcgatggcgtgaggcggttcgtcgggacgctgggctcgaagagagcgcgagctgttggtgcaattagggtttctgcgatctctggagacggcggtggcggtgctggtggtacgggaattgcggcggcagcggccgccactgtggtctttgctgtgatgaaccgggtgctctacaagctggcgctcgtgccaatgaagaattaccccttcttcctcgcccagttcgccacatttgggtatgtcctagtgtatttctcaattctcttcataagatttcgcgctgggattgtcactagagaaatgttagcgcttccgaagccacagttcatgctaattggtttactggaagcgctaggtgctgcttcaggcatggctgctgctgctatgttgcccgggccatctattccagtgttgtcacaggtaatacatctacatatgccactgggtcacttctgattacttcatacctaattgtgggaggcgtgaatcatgtattgcttacaactttacatataaccctgtaaatgcttgtcaaatggatgttgttcttgcaattactgttttttttacttagcatttctcgttagattgttttttcatcctaagtactaaatacattagatcgacacagagatgatttttgtagttacgatgatgtgtttccacatgcttgcttgtgtattgttttcactgatatattaaatcatcatcactattatataacaattgtataagttacaattaacttgtccacctttgctagtgacatacaatctttctaggatgtagttattttttgtatacatccgttggattcacccaccttcatgactacttttcacgtgaccttcctattaattgtctaacatgcttgtcatctttgtgtagtcctttctggtttggcaacttatcttatctgccctcatcttgggaaggaaatatagagcaaatcagatccttggctgcttgcttgttacagctggagtaattctagcagtggccgggtgtgtattggaatagttgttcttattttgcttactcttctgatgcacttccgtaacaatctctaaataataatgagttgttatctattatattgtgcaccatgtttttttaatctggcatgctcatgtaaagatgatgctgattattatcaaagctcctggttcattctagataccgctgattgcatcttaggatcgacatacaatataagagaatttgcatatgccatttcagtttgcctaaataatcacagtgacactactagaattagtggtctaaatgttgatcagtagattcaaatttaacagatttcttgtctgtttctagttttcagtggcataattttgagaagaaacttcttgttcccacacgataaaatacatcttggaagatcataaatttttaaaaatagtatggtggatcatttgtacagggtaccattatggtgcatgtgttatgctcataccttgattagattttgagtttctcttagtcatcctcttttcttgatgaacacagtggagccagtaatggtccgattctctttgaagtcaaattcttttggccagcagtaatgatgatttcagctgcatttcaagctgctgcttccattatcaaggttgagtgttcatagtagtgttgtggtgggattttcatgttaatccagctatatagtttttttgtactattacaggagtttgttttcattgatggtgcaaaacgccttgagggaaagaagcctgatatatttgtagtcaactcttttggttctggtttccaggtaagacaatagagattcacttctttcaataattgttccttttgctcactgaaaatctttgttgttgcaccatacaggcactttttattttcctactccttccatttctctctaacttgaaagggattccttttgctgaactccctgcatacctaacccgtggtgctgcatgctttctgaatgtgggagggaatctgaagggtgagtattgtttctcatatcacattcatgtggtaaataagtggagcttctcatattatataatttcaaatctatggttaattagagaaaaagtgatgttctcatattatatgatttcaaatatatggttgattggagaaaagggatcttcatgaaatctttcacaagtgaatattatccatctcaacctttttgttttggtattatctatattattgaggtatgcatggcataaatgtttaacactttgctagctatgccaaactcaaaacgcttgtggccagcagtcttgaacatgattatctatgatctatgatgcaagatcatttgctaacggtttagatttttcagattgccatggagctcctttgctaccacttctctacataactctgaacatggccttcaacatttctgtccttaatcttgtgaagatgtctacagcagtggttgcttcgctgacatcaactttagcaggttatgcattttgtttccccacttcatattttaatgtttaagcagagtacttgtgcaaggcaatatggcaacttggcaagggcatatggtgctttatgttttataaaaactgaggtgccatgcaaatctttttgtgcagttgtgctagaacagatttcctgataagtagtcgacgtactctataactcgatgcactcatggctcaccaccaaaactttaaggaaacaagccctttttaagctgacttctgtttggtttgttgtatgtttgttttaacactatatgcttctctgcagtacctctttccatctatatactgtcactgcctctaccatatctacccgaaggaacaaatttgagcgcatcttttttgattggtgttgctaccttagtgctcggattgcttctatacaatcttcctcaagaatcaaccaatcaagtaaaggaagattaatctaaacccatatcagatataaggttaacaggaagctattggtgctccactaagaaaatagccgcattttgttgacagtggcttcacagtttggtacataactcatgaagagcagtgttcttctgccacaaacatttgcggtgcaaacatttgaggcaccagctgacttcaaagtttagaaacagcaagttcttgtttcatctgttaacaaaatcctaatggattatgcagctatatataagctctacctgagcggatgtaactactaactactttcagatgagtaagggctttacaaattcattggttgtataattgttctcaccattttttggtcaattcaagactaacataccagactccgtgggatttattatgtaaataagtaatgattgtaaccattataaatcttgattgtatggccaaccatttcaagtgaatgctagatacacg

SEQ ID NO: 8254 - DNA, 657 bp, Zea Mays
gggggctccatgtttgacgctggctcaagagctagatcaagcgggagatttagactatgaagttgatcaaacatcccaatatggtccaactgcatgaggttatggcgagcagaacgaagatatacatggtccttgaatttgttgatggaggtcaattctggaaggctaggagaggatgaatctaggatatattttcatcaacttataaatgcaattgattattgccatagccgaggagtgtaccatagagacctgaagccacagaatttgcttctggattcaaatggagctcttaaagtttcaaacttcggcctaagtgcatttgcaccacaaacaaatgtatgatctctagtcagtaactagaaacaaatgtactatctaggcactctgtgtcacgcatgtgacccggtcccggattcatgacccatagtcatacgagtgtaccctctttctaaccatccaagcactccatgtcatgtatgttgtacccagaatgcacgatccatagtcatatgagttagaacaacccacatagtactggatgatgagatgtgtcttattatgactatggatgagacttttgtgatgtaattaatgagactatggatttaaatactgttatgtgattgtgtgtgagatgttttatgtgaaaatatg

SEQ ID NO: 8255 - DNA, 6726 bp, Zea Mays
ccccaaccgggcttcttcggtcatccacctagacggcaatggaggccgccgctgccgacctcatcgccgccctctcgtccccatcctcattcgctggcctctactctcgcttcgccgcctacctacagcccttcaccccctacctgcacagctcaaaccctaacaccaagccaccgcagaagagggcgacgaagcagaacaagcagccgccgcctcccgacgcggccaccctccgcccccttgcgaagcgattcctgccgtttctcggtcgcgcgctccacctcctcccgccgctcgtccgcgcttgtcctgtttcgggcgataagggcggcgaagccgccgacgaactgcttgagatctacggcctcctcttggactgcctagaggccatatcaccctgccttgcggggaaaccctactccgtgttgctccaacgcggccgcttcatctgttgcctcgagtcgcgcggtcacttcgcacgcgccagtgcggaggctgccgctaccctcgacgccctccgctccgcgctctctccacccaccacgagcaccaagtcgcgacgtggtgctgcaggcgttgatcccgtcctccttccggaccccggcagcgctggggaggctggcacggatcctgaagtcaccctccttgcggttgagctcactgtttgccttgctaattgttccagcaagggcaaggtgaaggaacctaccccttatgaacgactcatcagccttttcaaacagctaaaaccatggcttcgattgctcgcaagatttgctcttctgtagatttgacttggggagggagcacacagcttttgctccatgtgctaaaaactgtcactgattctgttgtacgtttaaaggatgatttaccaaaatctgtaaatgagcttctggtatttgtggcgtatttttgccggttcattctttctgccaatagggatttatctgttggcgcttcagaactactttataaacaaggtggttatttctctgaggtttcctctcctactgcctcaatgcttcttctttatgcgactgggttatacttgagtgcccagcaagcagaaagtgaaataccaccctatttatcggtgggtattcccaaggatcaaaagtatctacatgccttagagaagggtcttggcacattagcacgatgcccacatgataatacatctttggtcacatacttggactctttggagtttattagcaagatattatcacagcaagtgaatacactttggaaggacttctctgaaggaaaaccaacccattattctggtaacatggactatgtcttgacagcactgcatcagttcattgattcgagcttcacgtcttttagctgtaggcaaatgtctcaaggggacaacgagagacagcatgaacaacatggaaccttactgacagtccttgtttccgcgatcaagttttcctttcttaccaagaaagatatccagaagagcttgggtttcatcgtctgtgccatttcaagtaaatggtttacacttgaggagctcaaattcttgataccttcacttggcaacatcggagtgacacttcataacactggacatgttaaagaggcaccaaaggctttagaactgtgctgccaaacaatatgggcacacatcagccttttttactatagactatcttcaagaacaaaaggaaacgacattatgacagatctgtcgatggatacactgaaggatatggatatcattttggatgcattttcaagaattgcaaagatggttgatgctctctgtagatgtggcacagagatagaaacaccacttgtgattgttgcgaagagtttgtctataatgttgcctgatggcgacaattctgaatataacaaatgttcttttatactgatcaaggcatgggttaaggcagtacacaaggattttagggatactaaggtggatgatgctccacttctctatccctttcttctgaaatatcggtctccatggccaattaagctgataggcttaatagtagagcaggagttattagcatatggattaactgaagcccgaagcatagaattctgctctaaaatgcagataaggatcatagatgttctgcttcataaaatttactgtacgaaagaacattttttggagagatcaagggttcttattagaaaggcaggtgcacttcgtgcatctggagtggaaaacataaaaaactgccttgagtctctacgtgatgccatatctttactggaagacaaacttggtggggaggtaatatttgatagcgctgagaaagcacttaacttgtggttggacatggaggcttttgaccattcttcttctgatatggtcttgcaacagccatcaaaaactattgtaccacttatttgtttcctggttgatttgttgtctatgaagggctgttttgagcttcagtttaagttgtgcaaggttatgataatgatatggaagcaagaaaaattacccattgagaagttgttgtccttgctgagaacgctgcctagtgccttatttattcctcaatcatgtaagcatccctttggaaggcagttcagtttcgtcacgagtgttgatgaagtcagcaaagttgcctcatctctggtatctggagatacttcaaatgagcaatctacctttctagctggatgtttatactatgacttgtcagaaaaagttttttcacgcggacaacttttccaggccttttcatatggaaacaaagccctccatttgcgcaaaaagctcctaaaaaagaagttcaaaatcaattcgggcatatctggaaatatggaaagacaacactgtgggcaggacatctctcttgaagtgtgtggccctacaatagttgagatttggccaaattccagcagttcagtcaacactaaagattttttccttaccccatggaatgtccttaggtgctatcttgagagcactttacaggttgctatgatgcacgaattgattggcaatggtgctgaagctgaagttctcttacagacaggaaaagagatatcaaatttccatggtttatcagttttctgtattgtatttacatcatttctaggtcaactatattgtaagcggcagctatgggatgaagcggagagtgagcttaattatgcccgagatcttgtgaaaaatgatgcaacaatttcatgtaagctctgcagtctgactttggggatatctgttgacatgcaagttggtgatctgtcttggagtctgtttgaaaaaaaaattcataaacagattacagctggtttgtctaacactttaggcatgtaccaatctgcaatagacaaattgaatagcactaacttggaatattgtaacgggtcctttgatagacatacaactggttatcttgtgtgcagcaaagactgtataccgagcaagtatgaagcttgtaatttgggggcagaacccctaacttcaaatgatggattgttatctccatgtagtgtttgcatggtaatacaagttcgaaggaaaaactcagggaatgctgaagctggtccacctttagatgcaaaagcaaggaggtcatcaagaaattcatcacgtttagctaagggacagaatgtagagactcttgcaaagactagaactcgctctagtaaacgaaatgcatgtatgaaaagtgagaaggttttaactgagctaaatagtaaaaataacgtaactgggagtaaggaattggctgcagatgcttctgtttgtggtgaagcagagtgttttcctgatggcattgatcacagcaaagacgacctatgcaatatgtttggttgctggagctgccttttcattaaatccctcaattcggggtgcattcagaatattttgcagctgagattggactatgttcaccgacactaccttgtgtcacttcttttaaaaaaagctagagccttgggatctcatagcaatggggactgtgaagttcatagtgtctattggaagtgcatatcactgctgttcttcaggtcccttccacaagattgctgtaggacttatgggccttatttaattggactaatcatggataggagcattggtgattttcttcctttagagtgtgcagaaatactattcaatatgagcttcttcttgctaaaaagccccctttctgaacagtcaagggacatctgctgtatcttctctagtgtaacaatggcagacgttgtcccctggttgctcaaagcttttgttctatccagagagagcccctcacttgttcaggaggtttgcaagttacttgcatgcatattcttgctatcaactacagattcctcaattcaactgcctttgggttctcataaagaatctctttctttgaatcactgggccacatacttccatcaagtttctgtgggaactaatctcaattgtcattactttgctagcttacaagcatcgtccgaggaaaaggttccaaaggacacctataaagatttcagaaatgagacagatgacaatgtctcgaaatttctcaggttgtcatcaagggacatcaaatatattgagaaacatatgacagaattcttccaaaaacttcctgatgtaccagttctgtgcattagtatgcttggaggtgattatgttaatgcccttctgaaattccattgccatcctccgttttttcctgcttggatgttgctttcaaggtttgattcaacaaatgaacccacaacattgcttcttccagtggattctatttcagcagaaatgcaatttgaagattcctgcaccaaagatttgggcaatccaacgagagttttagataagtggcaatgcccttggggctatggaattactgactatgtagccccagtttttagaaatatactcgaggagaattttatgtccctctccagcgcaacccttactattgatgatgtaaatgcagatcgtgtcaggtggtggtcccatagaatgaagctcaacaattaccttgctaacacattgaaagacattgaagattcttggtttggaccctggaaatgccttctgttgggccatcaattatctgatgaacacattgagactgcctcatcaatgattatcactggtctggatacagaattcgaatttgaagtcaatccaatgctcatcaaggctatccttggtggtgctgtgtcagtggatgaagtacaagaatgttttctccaactcattttgtataaaggttactttggaaggggaggatgctgtgggaaagatagacttaaagctttctcttcctgccaaatggatgatggatctatggagacactcaaacgtataataacggatgcatcatatgagttgcctcagccagctgatagagatccagttattttagttcttgatgtcaatgttcagatgcttccttgggagaacctgcctgtactaaggaatcaagaaatttatcgcatgccgtcaatgggtagcatctttttagcattatctcgaaccaataatgattacaaagatcacagttctccttttcctgtcatcgatcctttcaatacatattatctgttgaatcctagcggtgatctgagtagcacacaagaagaatttgttcagttattcagaaactatgagtggaagggagtggctgggaattctccgaaggctgacgagctggttttggccttgacaaatcatgacctattcctgtactttgggcatggaagtggaacccagtatatttctagtaaggaagtcgaaaagatagataactgtgcagctgctcttcttatgggatgtagcagtggaacacttcattgcaaaggaagttatgctcctcgaggggccccattatcatatttatttgctggttcccctgctatcattgcgaatctctgggatgtttcagacaaggacattgacaggtttagtaaggctttgctcaattcatggttgcatgacaaatctctagatggcaacaattgttcaaaatgttgccagctaacaatggagcttgagtccatgagtattgcttccaaggaaaatggtaaagcaagacgacaaggcacacgaggaaagaagcaacaacatataaatgatagtaccaagtgctgcagctgcaagcagaggcgaatagcttcatatataagtgaagctaggagggcttgcaggcttccacttttgataggcgcatctcctgtgtgttacggcgtgcctacaatcattaggaagaaagtaatgacggattctaccacgagagagatgacctaaaagtgtggtagtatcggcatggtattggtgactattgatagtgtgatctatggcgttgatggagttggcacgaaagtgtgccagctcaaatgcactgactaatttatgctttatacccagtgcttggacgcatggtcttgctggacgacctgcagtgggcgtgcacctattggtattccagagctgtaacgagtgtatattgaagtaaatgttctgtacaatggcgctgtacataactgtaatgtcactggagcatcacttagagaaagtatgttgaggctattgatttcaattgtataacgtgtactatagttttgtccaggaacatagagaatgcatgttgaggcagttaatttcaattgtataaaatgtgtactacagttttgacccttgtaagttacttataagaagctgttgtctatactgtactgaattctacatgaagttacgtaggcagtatgacggaagttttgaaagcatgtagg

SEQ ID NO: 8256 - DNA, 6830 bp, Zea Mays
gggcttcttcggtcatccacctagacggcaatggaggccgccgctgccgacctcatcgccgccctctcgtccccatcctcattcgctggcctctactctcgcttcgccgcctacctacagcccttcaccccctacctgcacagctcaaaccctaacaccaagccaccgcagaagagggcgacgaagcagaacaagcagccgccgcctcccgacgcggccaccctccgcccccttgcgaagcgattcctgccgtttctcggtcgcgcgctccacctcctcccgccgctcgtccgcgcttgtcctgtttcgggcgataagggcggcgaagccgccgacgaactgcttgagatctacggcctcctcttggactgcctagaggccatatcaccctgccttgcggggaaaccctactccgtgttgctccaacgcggccgcttcatctgttgcctcgagtcgcgcggtcacttcgcacgcgccagtgcggaggctgccgctaccctcgacgccctccgctccgcgctctctccacccaccacgagcaccaagtcgcgacgtggtgctgcaggcgttgatcccgtcctccttccggaccccggcagcgctggggaggctggcacggatcctgaagtcaccctccttgcggttgagctcactgtttgccttgctaattgttccagcaagggcaaggtgaaggaacctaccccttatgaacgactcatcagccttttcaaacagctaaaaccatggcttcgtattcttactaatgaagtcagcaggaagtatctcccgttgcttatgaatgccatgagccggtgtaccctttttctggtttctgagtcttcccttttcaatactgatctagtgcatggattctgtcgttacacgatgcaagagtgtgtgggggaggggatgattgagcttttgccagcaattgctcgcaagatttgctcttctgtagatttgacttggggagggagcacacagcttttgctccatgtgctaaaaactgtcactgattctgttgtacgtttaaaggatgatttaccaaaatctgtaaatgagcttctggtatttgtggcgtatttttgccggttcattctttctgccaatagggatttatctgttggcgcttcagaactactttataaacaaggtggttatttctctgaggtttcctctcctactgcctcaatgcttcttctttatgcgactgggttatacttgagtgcccagcaagcagaaagtgaaataccaccctatttatcggtgggtattcccaaggatcaaaagtatctacatgccttagagaagggtcttggcacattagcacgatgcccacatgataatacatctttggtcacatacttggactctttggagtttattagcaagatattatcacagcaagtgaatacactttggaaggacttctctgaaggaaaaccaacccattattctggtaacatggactatgtcttgacagcactgcatcagttcattgattcgagcttcacgtcttttagctgtaggcaaatgtctcaaggggacaacgagagacagcatgaacaacatggaaccttactgacagtccttgtttccgcgatcaagttttcctttcttaccaagaaagatatccagaagagcttgggtttcatcgtctgtgccatttcaagtaaatggtttacacttgaggagctcaaattcttgataccttcacttggcaacatcggagtgacacttcataacactggacatgttaaagaggcaccaaaggctttagaactgtgctgccaaacaatatgggcacacatcagccttttttactatagactatcttcaagaacaaaaggaaacgacattatgacagatctgtcgatggatacactgaaggatatggatatcattttggatgcattttcaagaattgcaaagatggttgatgctctctgtagatgtggcacagagatagaaacaccacttgtgattgttgcgaagagtttgtctataatgttgcctgatggcgacaattctgaatataacaaatgttcttttatactgatcaaggcatgggttaaggcagtacacaaggattttagggatactaaggtggatgatgctccacttctctatccctttcttctgaaatatcggtctccatggccaattaagctgataggcttaatagtagagcaggagttattagcatatggattaactgaagcccgaagcatagaattctgctctaaaatgcagataaggatcatagatgttctgcttcataaaatttactgtacgaaagaacattttttggagagatcaagggttcttattagaaaggcaggtgcacttcgtgcatctggagtggaaaacataaaaaactgccttgagtctctacgtgatgccatatctttactgcaaaagatctcacatgattcaactcgtaccaacactactgcaaacaatcagttggccattgcgtactgtttgtatgcgcagtgtgctcaggaagacaaacttggtggggaggtaatatttgatagcgctgagaaagcacttaacttgtggttggacatggaggcttttgaccattcttcttctgatatggtcttgcaacagccatcaaaaactattgtaccacttatttgtttcctggttgatttgttgtctatgaagggctgttttgagcttcagtttaagttgtgcaaggttatgataatgatatggaagcaagaaaaattacccattgagaagttgttgtccttgctgttcaccagtgggcgccttagtcatgcatgctgttatctcccactggatgagcgatttctttctattgccaaagagcatcttggtgtatgttgccatgatattgaattttggataaactgtttcaaaggagaccatccttctctctgtatgtttcttcagagaacgctgcctagtgccttatttattcctcaatcatgtaagcatccctttggaaggcagttcagtttcgtcacgagtgttgatgaagtcagcaaagttgcctcatctctggtatctggagatacttcaaatgagcaatctacctttctagctggatgtttatactatgacttgtcagaaaaagttttttcacgcggacaacttttccaggccttttcatatggaaacaaagccctccatttgcgcaaaaagctcctaaaaaagaagttcaaaatcaattcgggcatatctggaaatatggaaagacaacactgtgggcaggacatctctcttgaagtgtgtggccctacaatagttgagatttggccaaattccagcagttcagtcaacactaaagattttttccttaccccatggaatgtccttaggtgctatcttgagagcactttacaggttgctatgatgcacgaattgattggcaatggtgctgaagctgaagttctcttacagacaggaaaagagatatcaaatttccatggtttatcagttttctgtattgtatttacatcatttctaggtcaactatattgtaagcggcagctatgggatgaagcggagagtgagcttaattatgcccgagatcttgtgaaaaatgatgcaacaatttcatgtaagctctgcagtctgactttggggatatctgttgacatgcaagttggtgatctgtcttggagtctgtttgaaaaaaaaattcataaacagattacagctggtttgtctaacactttaggcatgtaccaatctgcaatagacaaattgaatagcactaacttggaatattgtaacgggtcctttgatagacatacaactggttatcttgtgtgcagcaaagactgtataccgagcaagtatgaagcttgtaatttgggggcagaacccctaacttcaaatgatggattgttatctccatgtagtgtttgcatggtaatacaagttcgaaggaaaaactcagggaatgctgaagctggtccacctttagatgcaaaagcaaggaggtcatcaagaaattcatcacgtttagctaagggacagaatgtagagactcttgcaaagactagaactcgctctagtaaacgaaatgcatgtatgaaaagtgagaaggttttaactgagctaaatagtaaaaataacgtaactgggagtaaggaattggctgcagatgcttctgtttgtggtgaagcagagtgttttcctgatggcattgatcacagcaaagacgacctatgcaatatgtttggttgctggagctgccttttcattaaatccctcaattcggggtgcattcagaatattttgcagctgagattggactatgttcaccgacactaccttgtgtcacttcttttaaaaaaagctagagccttgggatctcatagcaatggggactgtgaagttcatagtgtctattggaagtgcatatcactgctgttcttcaggtcccttccacaagattgctgtaggacttatgggccttatttaattggactaatcatggataggagcattggtgattttcttcctttagagtgtgcagaaatactattcaatatgagcttcttcttgctaaaaagccccctttctgaacagtcaagggacatctgctgtatcttctctagtgtaacaatggcagacgttgtcccctggttgctcaaagcttttgttctatccagagagagcccctcacttgttcaggaggtttgcaagttacttgcatgcatattcttgctatcaactacagattcctcaattcaactgcctttgggttctcataaagaatctctttctttgaatcactgggccacatacttccatcaagtttctgtgggaactaatctcaattgtcattactttgctagcttacaagcatcgtccgaggaaaaggttccaaaggacacctataaagatttcagaaatgagacagatgacaatgtctcgaaatttctcaggttgtcatcaagggacatcaaatatattgagaaacatatgacagaattcttccaaaaacttcctgatgtaccagttctgtgcattagtatgcttggagatcgtgtcaggtggtggtcccatagaatgaagctcaacaattaccttgctaacacattgaaagacattgaagattcttggtttggaccctggaaatgccttctgttgggccatcaattatctgatgaacacattgagactgcctcatcaatgattatcactggtctggatacagaattcgaatttgaagtcaatccaatgctcatcaaggctatccttggtggtgctgtgtcagtggatgaagtacaagaatgttttctccaactcattttgtataaaggttactttggaaggggaggatgctgtgggaaagatagacttaaagctttctcttcctgccaaatggatgatggatctatggagacactcaaacgtataataacggatgcatcatatgagttgcctcagccagctgatagagatccagttattttagttcttgatgtcaatgttcagatgcttccttgggagaacctgcctgtactaaggaatcaagaaatttatcgcatgccgtcaatgggtagcatctttttagcattatctcgaaccaataatgattacaaagatcacagttctccttttcctgtcatcgatcctttcaatacatattatctgttgaatcctagcggtgatctgagtagcacacaagaagaatttgttcagttattcagaaactatgagtggaagggagtggctgggaattctccgaaggctgacgagctggttttggccttgacaaatcatgacctattcctgtactttgggcatggaagtggaacccagtatatttctagtaaggaagtcgaaaagatagataactgtgcagctgctcttcttatgggatgtagcagtggaacacttcattgcaaaggaagttatgctcctcgaggggccccattatcatatttatttgctggttcccctgctatcattgcgaatctctgggatgtttcagacaaggacattgacaggtttagtaaggctttgctcaattcatggttgcatgacaaatctctagatggcaacaattgttcaaaatgttgccagctaacaatggagcttgagtccatgagtattgcttccaaggaaaatggtaaagcaagacgacaaggcacacgaggaaagaagcaacaacatataaatgatagtaccaagtgctgcagctgcaagcagaggcgaatagcttcatatataagtgaagctaggagggcttgcaggcttccacttttgataggcgcatctcctgtgtgttacggcgtgcctacaatcattaggaagaaagtaatgacggattctaccacgagagagatgacctaaaagtgtggtagtatcggcatggtattggtgactattgatagtgtgatctatggcgttgatggagttggcacgaaagtgtgccagctcaaatgcactgactaatttatgctttatacccagtgcttggacgcatggtcttgctggacgacctgcagtgggcgtgcacctattggtattccagagctgtaacgagtgtatattgaagtaaatgttctgtacaatggcgctgtacataactgtaatgtcactggagcatcacttagagaaagtatgttgaggctattgatttcaattgtataacgtgtactatagttttgtccaggaacatagagaatgcatgttgaggcagttaatttcaattgtataaaatgtgtactacagttttgacccttgtaagttacttataagaagctgttgtctatactgtactgaattctacatgaagttacgtaggcagtatgacggaagttttgaaagcatgtagg

SEQ ID NO: 8257 - DNA, 7220 bp, Zea Mays
ccattcccagcctcgcagctccgaaatcggtcactttttcccgcccattcccacccccgagatctccaaagcccgaccgcaaaatttccccaaccgggcttcttcggtcatccacctagacggcaatggaggccgccgctgccgacctcatcgccgccctctcgtccccatcctcattcgctggcctctactctcgcttcgccgcctacctacagcccttcaccccctacctgcacagctcaaaccctaacaccaagccaccgcagaagagggcgacgaagcagaacaagcagccgccgcctcccgacgcggccaccctccgcccccttgcgaagcgattcctgccgtttctcggtcgcgcgctccacctcctcccgccgctcgtccgcgcttgtcctgtttcgggcgataagggcggcgaagccgccgacgaactgcttgagatctacggcctcctcttggactgcctagaggccatatcaccctgccttgcggggaaaccctactccgtgttgctccaacgcggccgcttcatctgttgcctcgagtcgcgcggtcacttcgcacgcgccagtgcggaggctgccgctaccctcgacgccctccgctccgcgctctctccacccaccacgagcaccaagtcgcgacgtggtgctgcaggcgttgatcccgtcctccttccggaccccggcagcgctggggaggctggcacggatcctgaagtcaccctccttgcggttgagctcactgtttgccttgctaattgttccagcaagggcaaggtgaaggaacctaccccttatgaacgactcatcagccttttcaaacagctaaaaccatggcttcgtattcttactaatgaagtcagcaggaagtatctcccgttgcttatgaatgccatgagccggtgtaccctttttctggtttctgagtcttcccttttcaatactgatctagtgcatggattctgtcgttacacgatgcaagagtgtgtgggggaggggatgattgagcttttgccagcaattgctcgcaagatttgctcttctgtagatttgacttggggagggagcacacagcttttgctccatgtgctaaaaactgtcactgattctgttgtacgtttaaaggatgatttaccaaaatctgtaaatgagcttctggtatttgtggcgtatttttgccggttcattctttctgccaatagggatttatctgttggcgcttcagaactactttataaacaaggtttcctctcctactgcctcaatgcttcttctttatgcgactgggttatacttgagtgcccagcaagcagaaagtgaaataccaccctatttatcggtgggtattcccaaggatcaaaagtatctacatgccttagagaagggtcttggcacattagcacgatgcccacatgataatacatctttggtcacatacttggactctttggagtttattagcaagatattatcacagcaagtgaatacactttggaaggacttctctgaaggaaaaccaacccattattctggtaacatggactatgtcttgacagcactgcatcagttcattgattcgagcttcacgtcttttagctgtaggcaaatgtctcaaggggacaacgagagacagcatgaacaacatggaaccttactgacagtccttgtttccgcgatcaagttttcctttcttaccaagaaagatatccagaagagcttgggtttcatcgtctgtgccatttcaagtaaatggtttacacttgaggagctcaaattcttgataccttcacttggcaacatcggagtgacacttcataacactggacatgttaaagaggcaccaaaggctttagaactgtgctgccaaacaatatgggcacacatcagccttttttactatagactatcttcaagaacaaaaggaaacgacattatgacagatctgtcgatggatacactgaaggatatggatatcattttggatgcattttcaagaattgcaaagatggttgatgctctctgtagatgtggcacagagatagaaacaccacttgtgattgttgcgaagagtttgtctataatgttgcctgatggcgacaattctgaatataacaaatgttcttttatactgatcaaggcatgggttaaggcagtacacaaggattttagggatactaaggtggatgatgctccacttctctatccctttcttctgaaatatcggtctccatggccaattaagctgataggcttaatagtagagcaggagttattagcatatggattaactgaagcccgaagcatagaattctgctctaaaatgcagataaggatcatagatgttctgcttcataaaatttactgtacgaaagaacattttttggagagatcaagggttcttattagaaaggcaggtgcacttcgtgcatctggagtggaaaacataaaaaactgccttgagtctctacgtgatgccatatctttactgcaaaagatctcacatgattcaactcgtaccaacactactgcaaacaatcagttggccattgcgtactgtttgtatgcgcagtgtgctcaggaagacaaacttggtggggaggtaatatttgatagcgctgagaaagcacttaacttgtggttggacatggaggcttttgaccattcttcttctgatatggtcttgcaacagccatcaaaaactattgtaccacttatttgtttcctggttgatttgttgtctatgaagggctgttttgagcttcagtttaagttgtgcaaggttatgataatgatatggaagcaagaaaaattacccattgagaagttgttgtccttgctgttcaccagtgggcgccttagtcatgcatgctgttatctcccactggatgagcgatttctttctattgccaaagagcatcttggtgtatgttgccatgatattgaattttggataaactgtttcaaaggagaccatccttctctctgtatgtttcttcagagaacgctgcctagtgccttatttattcctcaatcatgtaagcatccctttggaaggcagttcagtttcgtcacgagtgttgatgaagtcagcaaagttgcctcatctctggtatctggagatacttcaaatgagcaatctacctttctagctggatgtttatactatgacttgtcagaaaaagttttttcacgcggacaacttttccaggccttttcatatggaaacaaagccctccatttgcgcaaaaagctcctaaaaaagaagttcaaaatcaattcgggcatatctggaaatatggaaagacaacactgtgggcaggacatctctcttgaagtgtgtggccctacaatagttgagatttggccaaattccagcagttcagtcaacactaaagattttttccttaccccatggaatgtccttaggtgctatcttgagagcactttacaggttgctatgatgcacgaattgattggcaatggtgctgaagctgaagttctcttacagacaggaaaagagatatcaaatttccatggtttatcagttttctgtattgtatttacatcatttctaggtcaactatattgtaagcggcagctatgggatgaagcggagagtgagcttaattatgcccgagatcttgtgaaaaatgatgcaacaatttcatgtaagctctgcagtctgactttggggatatctgttgacatgcaagttggtgatctgtcttggagtctgtttgaaaaaaaaattcataaacagattacagctggtttgtctaacactttaggcatgtaccaatctgcaatagacaaattgaatagcactaacttggaatattgtaacgggtcctttgatagacatacaactggttatcttgtgtgcagcaaagactgtataccgagcaagtatgaagcttgtaatttgggggcagaacccctaacttcaaatgatggattgttatctccatgtagtgtttgcatggtaatacaagttcgaaggaaaaactcagggaatgctgaagctggtccacctttagatgcaaaagcaaggaggtcatcaagaaattcatcacgtttagctaagggacagaatgtagagactcttgcaaagactagaactcgctctagtaaacgaaatgcatgtatgaaaagtgagaaggttttaactgagctaaatagtaaaaataacgtaactgggagtaaggaattggctgcagatgcttctgtttgtggtgaagcagagtgttttcctgatggcattgatcacagcaaagacgacctatgcaatatgtttggttgctggagctgccttttcattaaatccctcaattcggggtgcattcagaatattttgcagctgagattggactatgttcaccgacactaccttgtgtcacttcttttaaaaaaagctagagccttgggatctcatagcaatggggactgtgaagttcatagtgtctattggaagtgcatatcactgctgttcttcaggtcccttccacaagattgctgtaggacttatgggccttatttaattggactaatcatggataggagcattggtgattttcttcctttagagtgtgcagaaatactattcaatatgagcttcttcttgctaaaaagccccctttctgaacagtcaagggacatctgctgtatcttctctagtgtaacaatggcagacgttgtcccctggttgctcaaagcttttgttctatccagagagagcccctcacttgttcaggaggtttgcaagttacttgcatgcatattcttgctatcaactacagattcctcaattcaactgcctttgggttctcataaagaatctctttctttgaatcactgggccacatacttccatcaagtttctgtgggaactaatctcaattgtcattactttgctagcttacaagcatcgtccgaggaaaaggttccaaaggacacctataaagatttcagaaatgagacagatgacaatgtctcgaaatttctcaggttgtcatcaagggacatcaaatatattgagaaacatatgacagaattcttccaaaaacttcctgatgtaccagttctgtgcattagtatgcttggaggtgattatgttaatgcccttctgaaattccattgccatcctccgttttttcctgcttggatgttgctttcaaggtttgattcaacaaatgaacccacaacattgcttcttccagtggattctatttcagaaatgcaatttgaagattcctgcaccaaagatttgggcaatccaacgagagttttagataagtggcaatgcccttggggctatggaattactgactatgtagccccagtttttagaaatatactcgaggagaattttatgtccctctccagcgcaacccttactattgatgatgtaaatgcagatcgtgtcaggtggtggtcccatagaatgaagctcaacaattaccttgctaacacattgaaagacattgaagattcttggtttggaccctggaaatgccttctgttgggccatcaattatctgatgaacacattgagactgcctcatcaatgattatcactggtctggatacagaattcgaatttgaagtcaatccaatgctcatcaaggctatccttggtggtgctgtgtcagtggatgaagtacaagaatgttttctccaactcattttgtataaaggttactttggaaggggaggatgctgtgggaaagatagacttaaagctttctcttcctgccaaatggatgatggatctatggagacactcaaacgtataataacggatgcatcatatgagttgcctcagccagctgatagagatccagttattttagttcttgatgtcaatgttcagatgcttccttgggagaacctgcctgtactaaggaatcaagaaatttatcgcatgccgtcaatgggtagcatctttttagcattatctcgaaccaataatgattacaaagatcacagttctccttttcctgtcatcgatcctttcaatacatattatctgttgaatcctagcggtgatctgagtagcacacaagaagaatttgttcagttattcagaaactatgagtggaagggagtggctgggaattctccgaaggctgacgagctggttttggccttgacaaatcatgacctattcctgtactttgggcatggaagtggaacccagtatatttctagtaaggaagtcgaaaagatagataactgtgcagctgctcttcttatgggatgtagcagtggaacacttcattgcaaaggaagttatgctcctcgaggggccccattatcatatttatttgctggttcccctgctatcattgcgaatctctgggatgtttcagacaaggacattgacaggtttagtaaggctttgctcaattcatggttgcatgacaaatctctagatggcaacaattgttcaaaatgttgccagctaacaatggagcttgagtccatgagtattgcttccaaggaaaatggtaaagcaagacgacaaggcacacgaggaaagaagcaacaacatataaatgatagtaccaagtgctgcagctgcaagcagaggcgaatagcttcatatataagtgaagctaggagggcttgcaggcttccacttttgataggcgcatctcctgtgtgttacggcgtgcctacaatcattaggaagaaagtaatgacggattctaccacgagagagatgacctaaaagtgtggtagtatcggcatggtattggtgactattgatagtgtgatctatggcgttgatggagttggcacgaaagtgtgccagctcaaatgcactgactaatttatgctttatacccagtgcttggacgcatggtcttgctggacgacctgcagtgggcgtgcacctattggtattccagagctgtaacgagtgtatattgaagtaaatgttctgtacaatggcgctgtacataactgtaatgtcactggagcatcacttagagaaagtatgttgaggctattgatttcaattgtataacgtgtactatagttttgtccaggaacatagagaatgcatgttgaggcagttaatttcaattgtataaaatgtgtactacagttttgacccttgtaagttacttataagaagctgttgtctatactgtactgaattctacatgaagttacgtaggcagtatgacggaagttttgaaagcatgtagg

SEQ ID NO: 8258 - DNA, 2701 bp, Zea Mays
cgatgtgcctagagctggcaaacaaaggaggcacatctgcagtttgtcaagagctgccttgccatgagatacgaggcactgttgcttagagatgctaaatactgcaacgaccttcacttgcaagtgtcccgtcaggagtggttaacttttgcaatggattgtcttgataatggcttctacaccattgcctccaaggcacttggactctgctaattccattgaggagaaggacaagatcattgagataacaggactccagaacttggccaagtcattatctacacaacattgtgacacgcgcagcgatagatcatcagcgcgcggttctagacttcactggcatgagttcattgcgaccaaccagcctcttcgtgagtattgcgacgcttccagaggctgtcgagcgataaacagagaaaaggctatatatctctctcagacttggctgctggggcggcgctatccatggcgaagtgggcgtcggccgcgagggctacgacgatgacgatagaccgacttgacgctctcaacaggtttgggatgttactaggagtcaagtttttgttgagatgagggagcatgagcgacgtgtgtggtcggtggacttctcaattatggacccaacaaaattggtcagtgggagtgatgatggatctgtgaagctgcgggatatgaatcaggctgggagtattggcactattaaaacaagggcaaatgtgtgttttgtgcaatttcaacctgatactgctcgctccattgccatcggctctgcagaccacaaaatttactgctatgatctacgtcacatacgagctccttattgtacactagttgggcacacaaagactgtaagctatgttaagtatctggatgcatcgacaatagtatctgcatctactgacaactcattgaagctttgggacttatcgatgagtacaggaaggataattgacagtccagttcaaacatttaaggggcatacaaatacaaaggttggataaaacttccacatgtacttgttctcttttcataatattcgtctacaagtggttagtgtctggttttatcttttgtaagtgtaactagtagaatgtctgatgaaaagaatatggtagtttaattttgaaagttgtactgttgcaatgaaacactagggtacggttggttacttcacttgctttgctcaccttgtctcgtccagcaaggtgagctttgccagcatgggcgagccaatcttgctctcctccaccaacaagcaaaaatcttgctagcacaagccccaaagcgaactcaccaaggaaacaaacgctagttctatcttgatttatgtatgagcaaggaaatgaaatctggctggagaaccaaacacactctactctaatactgtatatgtatggattatcctattgtgacaattatcggtgctatcctttatacaactatagtgccttttacaactgtatctgatcgatttgtgaggttatgaacaaatcatcaacattggtgatccagatgttcttttcctttttttctcataccaactatcaagggacatggtggaaacacagagggcactataacaatatgtatccattatagcactataacacagagggcactataccaaatttgattacttcgacattctgttgtgatatattgaatattgtgcttgtattgtgctgttaatgaactgttatggaggcttcccatccggggagggagaaaaataaaactgggtattaaaaaaaattattcagtaagggtgtcggtccccacattcttatatggcacagctaggctggggaccgcgcgcacagtaagagtgtccgccacgtcactggccgacactcttaacataagagtgtcagttgcatgctgaaccgacactcttaacgtaagagtgtcggtccccgcacttttatacgaataagagcgtctattttagagtgttggcttatttcagtaagagtgtgtgtttttgcccgacactctttaccttgtttcttgtagtgtttgagatgactaaggatcgatatctgtcttaagatttgtcttttccttacaagtgaagagattgcatggttcaatgaagtaataacctatgatctatgggccaggtctttgatgagtaccttaacttgcatgatagcatactcatacagtaatattgttgcatgtcgctcttaacaaatttcattcaggaactgggccatgctgatgttcaaaagagttgtcagaagttcatgacatctggtatttattatatcttcttttgtagtgggctggtgtggtctgcttagcagcaggtagcactacaaccagcaatgtatggatgaattgaaggtagtaaagaacgcagacaatcttatagaaactctgcatcttgaaactggcatgattgacaaagaagctggatgaatcctttggattggtgtcttcttatcaccaagcagtaatgtgaagcaagtttatttgttgactaagaacagatgagcacaaatcagtgaagagttcgttgcactagagatggaggatggataggtggtagatttcaatatggctttgatactattgtttccctttacaatctttgtacagaacaagaaaaatgacgttgtatgtggatactattgtaattcaagaatttatttctgaataataaatatatttgtttataatttgtgtatggatttggcat

SEQ ID NO: 8259 - DNA, 2760 bp, Zea Mays
cccatccacctccatagacatgccctagggcttcttcgatgtgcctagagctggcaaacaaaggaggcacatctgcagtttgtcaagagctgccttgccatgagatacgaggcactgttgcttagagatgctaaatactgcaacgaccttcacttgcaagtgtcccgtcaggagtggttaacttttgcaatggattgtcttgataatggcttctacaccattgcctccaaggcacttggactctgctaattccattgaggagaaggacaagatcattgagataacaggactccagaacttggccaagtcattatctacacaacattgtgacacgcgcagcgatagatcatcagcgcgcggttctagacttcactggcatgagttcattgcgaccaaccagcctcttcgtgagtattgcgacgcttccagaggctgtcgagcgataaacagagaaaaggctatatatctctctcagacttggctgctggggcggcgctatccatggcgaagtgggcgtcggccgcgagggctacgacgatgacgatagaccgacttgacgctctcaacaggtttgggatgttactaggagtcaagtttttgttgagatgagggagcatgagcgacgtgtgtggtcggtggacttctcaattatggacccaacaaaattggtcagtgggagtgatgatggatctgtgaagctgcgggatatgaatcaggcaattttattcttgcacctactgctgggagtattggcactattaaaacaagggcaaatgtgtgttttgtgcaatttcaacctgatactgctcgctccattgccatcggctctgcagaccacaaaatttactgctatgatctacgtcacatacgagctccttattgtacactagttgggcacacaaagactgtaagctatgttaagtatctggatgcatcgacaatagtatctgcatctactgacaactcattgaagctttgggacttatcgatgagtacaggaaggataattgacagtccagttcaaacatttaaggggcatacaaatacaaaggttggataaaacttccacatgtacttgttctcttttcataatattcgtctacaagtggttagtgtctggttttatcttttgtaagtgtaactagtagaatgtctgatgaaaagaatatggtagtttaattttgaaagttgtactgttgcaatgaaacactagggtacggttggttacttcacttgctttgctcaccttgtctcgtccagcaaggtgagctttgccagcatgggcgagccaatcttgctctcctccaccaacaagcaaaaatcttgctagcacaagccccaaagcgaactcaccaaggaaacaaacgctagttctatcttgatttatgtatgagcaaggaaatgaaatctggctggagaaccaaacacactctactctaatactgtatatgtatggattatcctattgtgacaattatcggtgctatcctttatacaactatagtgccttttacaactgtatctgatcgatttgtgaggttatgaacaaatcatcaacattggtgatccagatgttcttttcctttttttctcataccaactatcaagggacatggtggaaacacagagggcactataacaatatgtatccattatagcactataacacagagggcactataccaaatttgattacttcgacattctgttgtgatatattgaatattgtgcttgtattgtgctgttaatgaactgttatggaggcttcccatccggggagggagaaaaataaaactgggtattaaaaaaaattattcagtaagggtgtcggtccccacattcttatatggcacagctaggctggggaccgcgcgcacagtaagagtgtccgccacgtcactggccgacactcttaacataagagtgtcagttgcatgctgaaccgacactcttaacgtaagagtgtcggtccccgcacttttatacgaataagagcgtctattttagagtgttggcttatttcagtaagagtgtgtgtttttgcccgacactctttaccttgtttcttgtagtgtttgagatgactaaggatcgatatctgtcttaagatttgtcttttccttacaagtgaagagattgcatggttcaatgaagtaataacctatgatctatgggccaggtctttgatgagtaccttaacttgcatgatagcatactcatacagtaatattgttgcatgtcgctcttaacaaatttcattcaggaactgggccatgctgatgttcaaaagagttgtcagaagttcatgacatctggtatttattatatcttcttttgtagtgggctggtgtggtctgcttagcagcaggtagcactacaaccagcaatgtatggatgaattgaaggtagtaaagaacgcagacaatcttatagaaactctgcatcttgaaactggcatgattgacaaagaagctggatgaatcctttggattggtgtcttcttatcaccaagcagtaatgtgaagcaagtttatttgttgactaagaacagatgagcacaaatcagtgaagagttcgttgcactagagatggaggatggataggtggtagatttcaatatggctttgatactattgtttccctttacaatctttgtacagaacaagaaaaatgacgttgtatgtggatactattgtaattcaagaatttatttctgaataataaatatatttgtttataatttgtgtatggatttggcat

SEQ ID NO: 8260 - DNA, 2492 bp, Zea Mays
ggctacatgggtggctgcttctggtagcttcggtcgcccgccgcgccgccgccaggctgagtggaaggtagggggaagcaaggaaccagagggtgtgatgtggatgtagaggattggatgctataatggcgcaagctgctgtcgagcccgctttgaatggtggctctttgattgggaggcagccggtggttccaaggatgaagaggaagacaccgtctgaactgaggcggcgtacctctgaaaagcttggagatgatctgttaccttctgccacattggataggtcaaacaatggacttcggaacacagagcaacaaaagatttccaagtacatcaacacacgtgttacagaggtgttccctgtgagaaaagcaagaaaccttgggaaggaaaattccaaggatgtcttacagaataatgagaaggtttctaagtttgttaatggtacaccagcctcaaattttgcatcatcttcacttctatgtggtcatggtgacactgctaagttggacactttagttccaaccatggaggctgcaaagccaggtttcaagaaagttgagaaatgcagtgaaaatgctctgcggagtgtatctgagcttcatgtaggcgatgagaagcagactggttctaacaaatttgatatggaaaaggtactgaaagggtttggagctcgtgatgcttttgtggcttctgggctcaacggccctaatggacaagttggtggtactgtgtcgaagccttcagacatatgcccttctaagatcactgttcctggggaaaaagctcctctggattttaccttaaagactagtttgcagtttgtttcatcgtcatctgtgaagtggtgtcacaagctcaatacaagttttggcagaagtagcatcactggagccattggtcagagctgtcctcgtgggtgtcaaaatttagagtgctcaaagcttgagagcaaaaaggaatttctattctcaaaggctttacagtcatgggtatatccacaatcgctgttgccttcctctatcatatctgctatgctctcatcaactgcaggagaaagtgattttcttctcaaaagacatcaggactgggaagattcatttcagaatctttactacatgctccggaagaacatgttgaatatattctatgtttatacaacacaatttgttgctctcttcattagtggaagctgtttggagaaaaagcagtctagtaatgcctacttatcacaatctacacgtggcctacgctcattactacggaaacatggcgtttgcttttctatgcctctttgcagcactgaagtggagcaggctactgaggacgaccttattgaactttcagaaatcgaaaggcgcaatgtcggacaggcactccatttggatgctttatctgacgtggataacaccacgcagtcgctgctttcgtttactggcaacgagaacgttcatggcctatacgacgttctattgaattacaagtccttgctgaattcattatctgctgtggatgtcccagtcttgtattcaccccagccatttcaaaatggctgtctacacatcccagaggtgaagtgtagggagatgaggagagcagacatgtcatccggcgggttcgacacagaacagggatccgcatttgcgtcgacggcaggcaacgtatgctacagcatggaagtaaaggacgcggttctgccgccatgggtggtctctgggctgtgcgccgccatgagcttggacgcgaccagctttgatctgacgatcgccacggagccgtcgtcgatgggcttgaacgtggctctcgactccatgggcaccaccaccacggatgtccagcctgaaggatccaccccctccagctgctctgcgcccacgacgcccttggtgggtgccgttcctgacgcggccctcgtccctgccctgcactccgcctcgctgcgccgcctcacctacacggacggcggcgggtacgttgcgcacacaaccgtgtgagcgcctctgagcttgagagcccggccctcctcggtatgcgcagcgcagcgcaggcttgttcttttgagaatttggagcctgccctggcctttgtcgtacaaggacgacgtgtcgttacacgcttggttgggttggatggtaactaaactatgaggccagacttcttctggtggtctggaaaaggaacacttatgcttgaactcggtgtgtgctttttgcctggtcgtactgtcgttcaaagttgggaccgttcttaccttgccgtgacaccgcctgttggtgtgagctcctgctgtttgaattctgaagacaaccatcaccgttctgcggttgacagaggacggtttcttgattctttttttcttctctcgtgtgcattgtatttgtattgcaccctgcacttgccggctgtcccggtcggtctagcacatcctgctgagttcctgactcctgagccaggaccgaccgtccaaccagttgaagaacggacggagcggc

SEQ ID NO: 8261 - DNA, 2521 bp, Zea Mays
taatcgtacacgcaccttcgaattttgatcgagcagacgaacgattggaaatcgtcgcctcgcagcacgttttccgttgcactctgcagccggatccatcctcccggcatgggcccgtgcttgccgtgggcgctgggcctcctcctgccgtcgctctgggaggccaaggtcgccttctccgccacggcgctgctcatcgccgcgctcatcctcttcctcctgacaacggaccagcacgccaagtccacggccaccggcggcaacaggccagcctcgtccgcgcgttcatctgcaaccgcagcctaccaccgagtcgcgggccgccgccggacccgcgcgaggggcgaggcggcttctgatgatatcacttgcgctcagggcggcggcggctacgtcgtcaagctggagctgctctcggccaagtacctgatcggcgccaacttggacggcagctccgatcctttcgccgtcatctcctgcgccgaccagaagcgcttcagttccatggtgcccagccagagaaaccctctgtggggggaggacttcaatttcctggtcgaacaactcccggtagaggtaaccataacaatatatgactgggacactgtgtgcaaatgcaaagttattggatctgtaactatagttgttctcactgagaacgaatcgggggctagttggtacgaactggacagcaaatttggtcagatctgcctgcgtcttcgttcaactaaagcatttccagattctgatagctcctttgaagaatgcaatggagctgagtccccgagaaagatgatactgaataagcaacgtcaagcgatgattgaaggcattggccctctgcaaatcatatataaacttcctcatgatgaaattgttcaccaaagttactcctgtgctctggacaggtgtttcttgctccatggccgtatgtacatctcccaatggcatctgtgcttccactctaacgtattctccaaacaattgaatgtgattattccattgcaagacatagacgagataaaaagaagccagcattctcttatcaacccagcaattactatttttcttaatgctggtgcaggtggacatggaacacctcgtgcatgcagtcaaaatggaaggatcaggtataccttcgcatcattctggagtagaaatcgtacatttagagctctagaggctgcactacaaagttatgaagcaaccttggaagctgaaaaacaggtgagagcacatgtacttctacaaatagaaaataacagtgtgttcagcagtaagacggacaacacaaagacaccagaaaaaaacattgaaaaggctataaaattccaacctttcatcaatgaccatgttcttgcagatataaccagtaagttcttccctggtacacctgagaagtttttcagtacaatattaggtgacagttcaatgtttttccagcaatatagggacgcaagaaaagatacaaatttgaagctaagcaggtggtgtgcctcagaagagtatggtggcaaggttcgtgaagtgactttcaggtcacaatgccacagtcctttgtgccctcccgacaccgcagtgacagaatggcagcatgcttctttctcgagggataagaggaacttgatctatgagacaaagcaccaggcacatgatgttccttttggttcttacttcgagatccactgcaggtggtcgctaagaacaacctccaattcaacatgtcaagtaaatataaagatcggtgtaaacatgaagaaatggtgcatattgcaatccagaataaaatctggagcaactgatgagtaccgtagagaagtttgcaagattttggaggctgcctgtgattatttcctcaaatctgaggcaaatagccatgacagtgacgagattgtgatggtgtcttcaccatgaaagcctacagatgaaaaagatgtacatagtgccatgcacatatgcaagtgcagtggaaacaagtttgcaagattttgcagggtgattgtggtcacatccaaaagctggggaacagacaaccagcaatgatattgtggcaatattcaagaaaagtgcagtggaaaaccacctgtggaatcgcatccacatgaagaagaggcttcagattatggagacattcctgctaagtagtgaatcagtatgatgtgtcatccagtacataaaccatgtgattatagtagttacccagattcccagaacaagataggttatgttgatgttacatacaatgctcaaagcaaaaggaggaactccaaaattctgcgaggaccagtgcaatttgacctgctgacatagtagtgcaagttaactaaattaccttaaccagtccttataacataatgttcacataaaggagtacacgggacagaaatctctcccctcgttcattgacaccaatcagttcctggtaacttgtctgtcagtttcttgtgacttcaaactcctgtatgcaacatatattgttggtaataatttggcatttgccctgctatgatggatttctaac

SEQ ID NO: 8262 - DNA, 2048 bp, Zea Mays
tcgatggccctattgcgtaaaacaataaacccgccttccccaccactggtcatcagtctccactccacgcccgacagagcaggaggactcagaaatggcaatcccagtgcgatcggctgccgcgccccgccgcctcgttccgtcgatacctccggcgagctctggacatgttcgaggactggcgtgcttcggtacccgaaccgggcctcgcggtgcaagagggttgtcaatggtggtcgccgactccaccagccgtcgggccaagcaagcggacggcggggacggcgtccttggggcgcctgttctcggagggctcgggatggagggattgggggatcagctcagcgtggtgatgaagttcggggggtcctcggtgtcgtcggccgcgaggatggctgaggtggccggcctcatcctgacgttccccgaggagcgccccgtcgtcgttctctctgccatggggaaaaccaccaacaaccttctccttgctggagagaaggcagtagggtgtggagttatccatgtttctgaaatcgaagagtggaatatggtcaaaagcctacatatcaagacggtggatgaacttggacttccaagatctgtaatacaagacatgctagatgaactggagcaactattgaaaggtatcgctatgatgaaagagctgacgcctaggaccagtgactaccttgtttcatttggagaatgcatgtccaccaggattttttctgcttatttgaacaaaattcgtgtcaaggcacggcagtatgacgcatttgatattggtttcattacaactgatgaatttggtaatgcggatatcttagaagcaacctatcctgctgttgcgaagagacttcatggggactggatacaggatccagcgatacctgttgttactgggttccttgggaagggctggaaatctggtgctgtaactactttaggccgaggtggtagtgacttgactgctacaaccattggtaaagccttgggactgagagaaattcaggtatggaaagatgttgatggtgtacttacttgtgatccaaatatctacccacatgcaaagactgttccatacttaacatttgaagaggccacagaacttgcttattttggtgctcaggttttgcatccacaatcgatgagacctgctagagaaggtgatattccagttagggttaagaattcatacaaccctaaagctccaggcacccttattaccagacaaagagacatggataaggttgtactaactagcatagtgctcaagtcaaatgtcactatgttggacattgtgagcactcggatgcttggtcagtatggtttttctggcaagggtatttgctatatttgaagatctatgtatatctgtggattgtgttgctaccagtgaagttagtgtttctgtgtcacttgatccatcaaagatctggagtagggaactgatacagcaggaacttgaccatgtagttgaagagcttgagaaaatagcaattgttcgtctacttcagcagagggcgataatttcacttatcggaaatgtggagcaatcgtctctcatactagaaaagacgggacgtgtgctgaggaaaagtggggttaatgttcagatgatctcgcaaggagcgtcaaaggttaacatgtcgctgatagtccatgatagcgatgcaaaggcactcgtagaagcccttcatcaggcgttctttgaagacgatgtcctatcacaagtcgaagcggagaacctactcgtgggctgatcaacgtaggctttgctgggtccaggcgtgttatctgttatagattcccactcgcctccatgaacggcatgggcattggatcattgatcatgttttgcttgaaacaagtatgtcttccaggttctcagccaatgactgcaaaactgtgtttctgttttagaactgtttgcagacaccacagtctgagctgcgagcaccgattgtcaacaagatggcaagcctgtgatataattccaactgtctctaatcaatatatataataaacattatcaatatctattaatt

SEQ ID NO: 8263 - DNA, 2562 bp, Zea Mays
tcgatggccctattgcgtaaaacaataaacccgccttccccaccactggtcatcagtctccactccacgcccgacagagcaggaggactcagaaatggcaatcccagtgcgatcggctgccgcgccccgccgcctcgttccgtcgatacctccggcgagctctggacatgttcgaggactggcgtgcttcggtacccgaaccgggcctcgcggtgcaagagggttgtcaatggtggtcgccgactccaccagccgtcgggccaagcaagcggacggcggggacggcgtccttggggcgcctgttctcggagggctcgggatggagggattgggggatcagctcagcgtggtgatgaagttcggggggtcctcggtgtcgtcggccgcgaggatggctgaggtggccggcctcatcctgacgttccccgaggagcgccccgtcgtcgttctctctgccatggggaaaaccaccaacaaccttctccttgctggagagaaggcagtagggtgtggagttatccatgtttctgaaatcgaagagtggaatatggtcaaaagcctacatatcaagacggtggatgaacttggacttccaagatctgtaatacaagacatgctagatgaactggagcaactattgaaaggtatcgctatgatgaaagagctgacgcctaggaccagtgactaccttgtttcatttggagaatgcatgtccaccaggattttttctgcttatttgaacaaaattcgtgtcaaggcacggcaggtacttcttgatattttcttgatttgcacagtgattcagtgagcttttcaggttatgaatgcagcagcctacaagaatttgctatagtatccctgccctatggtgggggtgtcttgaaactttgattagtcattgatatttttactacatatgcacttcgtgatctcaagtttcagctcattatgttagttgattgccactagtattctgcggaaatttcacatttcgataatgattcgttcattgtccttttatgtgtgcgtggaaaatattcttagtattttttagattttgtgattaatttggtattgccataaaattgtaaccttttagatgatggagataatctccgtccacttcaccaaccaggttacacaaaccattttatcctttaaaatgtggacaacaggatttgaacccttatagtagtggagtcacacacccacaactcaattgagtgtttgactatgatctggatttccctttatttaatatctcaatttgatacaggggccatgtaaccagcctagctgcaaatccccatatgacgcatttgatattggtttcattacaactgatgaatttggtaatgcggatatcttagaagcaacctatcctgctgttgcgaagagacttcatggggactggatacaggatccagcgatacctgttgttactgggttccttgggaagggctggaaatctggtgctgtaactactttaggccgaggtggtagtgacttgactgctacaaccattggtatggaaagatgttgatggtgtacttacttgtgatccaaatatctacccacatgcaaagactgttccatacttaacatttgaagaggccacagaacttgcttattttggtgctcaggttttgcatccacaatcgatgagacctgctagagaaggtgatattccagttagggttaagaattcatacaaccctaaagctccaggcacccttattaccagacaaagagacatggataaggttgtactaactagcatagtgctcaagtcaaatgtcactatgttggacattgtgagcactcggatgcttggtcagtatggtttttctggcaagggtatttgctatatttgaagatctatgtatatctgtggattgtgttgctaccagtgaagttagtgtttctgtgtcacttgatccatcaaagatctggagtagggaactgatacagcaggaacttgaccatgtagttgaagagcttgagaaaatagcaattgttcgtctacttcagcagagggcgataatttcacttatcggaaatgtggagcaatcgtctctcatactagaaaagacgggacgtgtgctgaggaaaagtggggttaatgttcagatgatctcgcaaggagcgtcaaaggttaacatgtcgctgatagtccatgatagcgatgcaaaggcactcgtagaagcccttcatcaggcgttctttgaagacgatgtcctatcacaagtcgaagcggagaacctactcgtgggctgatcaacgtaggctttgctgggtccaggcgtgttatctgttatagattcccactcgcctccatgaacggcatgggcattggatcattgatcatgttttgcttgaaacaagtatgtcttccaggttctcagccaatgactgcaaaactgtgtttctgttttagaactgtttgcagacaccacagtctgagctgcgagcaccgattgtcaacaagatggcaagcctgtgatataattccaactgtctctaatcaatatatataataaacattatcaatatctattaatt

SEQ ID NO: 8264 - DNA, 5373 bp, Zea Mays
atgtccaacacttcaggaggatcattgatggacggagcagctggaggcaacctggcaagcaggaatgacagccagggcgtcattagtagctctcactcagggtcagaccacgtgaccaaagtgccgagcgtgaggaggcggacacatcctcccatgaggttggggagtgaggtgccagagccatccccgaagatgcggaaggtggtaaatgaggaggatacaccttgtggagcttcaaatacgggcaagatcagtgcttcaccttctgcggtgtcgagagatcccaacggaacttctacctccgaagaccatgctggagggcattcaagtgagtatgccacagttgggaatgctaggggctcaccaattaaacgaagatgtatgcagacaagtcactacttgggactatttacacccctaaaagggaaacacacagatgaagttgctaaatccaagcaatcaactgtttccacaaaaacaaagaagtttaaggaaattcaatttcagaaacttcagagattgccagatgggtgccatcctgattttgataatgatcatctgtgttctgtaaataatcatgacctgcttcctgaaatgagtactccaagtgctgaccttcatctacttactgagacaggagtggaaaacatgaggacacctaaaagtcttcacgctgaacttaagcgtgagctgtcaaagctaaatacggtgttaaagctaccagataatgtactctttctggccaaccagttccttgaatatcttttaaataatcatttagttgtgcgggagccacggagcatactgcatgcgttcaacatagccttgtgttggcgtgctgcttcttttctgaaatacactgagttggatcatcgagaatcacttgcccttgcttcagatggattgaattatgaatgcaatgaggagctcgcagaacttttctataaaaaaataggcatcctaaaagaaaaggttgcacataaaccaggtggaataatcaatggtagattatcaccacatgagagctcatctgctaacttgagaagtgaccacagtttccggaagcaggcaatggatcttcatggtaacttcacaaaaggcactgaagatagcccatctgccactgatcagatggtgatggtttcagatgaacaagaattgctatctgctccagatgctggtagagaacatctcttaagtgaagaatcttctagtagtgctgcaatgaaaagaatagatttatttaacagcatatttttctcaagagagagggatatcattgagaagcaacaacttgagatattaaatttaagaacactgagagacaatcaagttaagaaactgaaagaggctccagtttttcaaacttgatgcactgcattctacaacactggctgaagaggaactgatgaaggaaaaactcaaacaggaagtagtatcaggtgaattagaccaatttcctgatcattgcgttactctaccagattccaattctgtcattgaggaatttatccattttaagaaacaaaatgatgatagtcatgttgaccaaaaaatggctttggatggtgaccagcttatggatgacagaccgatggaaattactattttacgcagtttgttttcaccagaggcttgttctacacttgcagtgagaaatgagcctacagaagctcatttgaggtctggtgggagagcatcatcagaatatgtagatcttccagataacaataatcactgtatttctgttggaattgactaccaaggaggttgttctgctagttctattcctacaagtcatggttcaatcaatcaggaattttcgactggtgatgacagaaatattgaacatgccaagggtgacattattgctaatccaagtatggttccaggaagtgcaacttctcttgtggtaatcaatgcagaaaatgatagtactgttgcagcagatccagaccacttggaatcacatattttggcttctgtcacgaccttgcagcatccaacatcagaagaaccgtctgatacattacatgcaatggcagttcaggatctgcaaactgagatgcaaacaacatgcccaacattgggtgctcaacatcagaaggtgtgccctgatgattctagtaaaatgaaccatgaaccagatacaacaactggaatgttgcaggaagggacaacttctgaccatttaggtgattccagtaaggtgaacgttgaaccagatataacaactggaatgtctcaggaagggaaaacttctgaccatttagatgattccagcactggagttaaagaaaaaaatattgacactgtcattgcagatccattgaattcagaaaatcaatcttatattgctatgccagaagcttgggtagctgaaattcagagtgatcagtcaagtatgcctgcacaacatagtacaagtcttcctactcagcggaagttaccagttttgggacatccaccagaagaagcaaatccatcaagtaatttggacacagaggctgcccagaagccagatattcaaccatcaagctcaacgttggatgctgacagctctgaaacaaggcatcagccagaaactacaacagttctgtcacaggtaggcagtaaaaatcacgatgttggcacttttcacgcacaaaaagcccaatcagactcaccaattttggctgccccacaaagcacagctatgttgtcacttcctttggaggctggaactcctgctaatgtatcaagtacgtcttccctgcaaagtaacggtgtatcttcaaggcacacacctgctgtttcagaatcatcaggtatgttgggcactcagccagaacaggatttgcatcatgacctggggccatccatgtcattgttgggtgttccacttcaaagaatgctcccagatgacaggagccaaacagtctgtcagccagatagaggaactgatttgtcagggaaaggcgaaactgaatatctagcttgtaccaccagcgatctgtccacccttccactttctggtgaagctgaaactgagaatggtcaagcaagtatgcctgcacaggaaatcacaagtccccatgcccaacatagtttagctttagcaacttcacagcatccagttggtgatttgcagccaccgacgttgattctgtctgaggaaacagaaagggctggtctcttgtgcacctcagcatctcaggatttgcaactgtcaatgataacacaggaggatgttccacttgaaagaactgatctgtcgggcatgcctgtgacacaaagtacaactgttctgcagagtgtggaaccttcatgtgatccacatgcagaagaggcaggtacttggggtatgttgtcagctccagatttgcagtccagaatgcagtcatcatctcaattgcaggatcaaattgcggaagcagaaggagcaggcatttttggcaccattccagctcagaacttgcagcctgaaacgtggtcatcaacctcagctcagcatatctcaccattgaggacacaccctgatgagagaattcaaataggtcttcagccaaatacgacaccggttcctgagctgctaggccaactatctacattgacacctgcaggtctattgtctagtaacgaaccactaatgaatgagcttgaaaaactgaaatactgcaacgccgtgctctgtaaaaaccatgaacagaagaaatcacaacttcaaacagagtgcaaccaagaaatagagaaggtaaaggagaagtatgagttgttacgtcaagaggaagattctgtgtatcatcgattgaccacagaccttaaccgtatctacacgaaagttcttgtaaatcaatcactagctgaattctttaaagcatctctagttcaagagagatctgcaaggcccacaatttggcaggcaccccagtcctctcagcatgctccgtgtgggacaacagcagctcaagccacactattaccggttgcctcatctttagccactcgaccaacagttttgatgtcatatcatacaacaggacctcacctcccaccttcacaggtggctcggccaccggcttctggggctatccaactgcaacctgttttacctggaaaccattccagagcagcaccatcacctgttggttcaatgcatccacgacatggaatctacagagctgttggagcacaatcacgtgggcctgctcctcatctccagcaactcaggatgccagcaccgtttgcaatggttcacagagatggacagcatccacccagtatcatgaatcccggggttataccatcgagacagtctgtccatggtaattttgaaagctctgcttctggcaatgcactggcaggtatctcatttgcatccatggcaccaagttcaggtcaccaggcgatgtcgtccacatcagactcacatccagttttcccagcatcctcgcttctaccaggttcaggtccagggtcgatgacaaactttgtgcggtcaagtaccagaatccctgttgtcatggcgagcgaacaagcaccacgcctgaatccatatgttcaccacatcggaggtggtccactgaacgctgcaccagcaggaattcagcaagctagagctcatataggacgcactcctcaggctgcctcagatcagagtcaggacgtgctgcatcgcctactactacagttgcccgaagtcatggcgccaagcttagctcagccaaccgcatcaagctcacacccggctcccatggcagcccggcagcaagcagggctactgaatccagctcctgacaacgtggcatgtccactgaacgcagtggctggagttgggcgccccggagcccgcataggcagccagtcgtaccaggtatcggcttcgttgctcgagtgggaggcgacgctcagggttggcctgattcgtggacaccaaggcacgtaccccttgggacagggatgttctgacctggctggaggaccccccggcacatccgctgcccagggatgcggctccggcgccagcagagaggtggtgtgcctatctgatgacgaggagtagcatagcgtagagagtagtagttttttttttgggctgggctggtctgtgcaacgtagatgtgcatgggttggataggcaacagtagagcggcacgatatcgtcgcccccttttagcagcagcggcatccttggaagcaggagatgtctggctctgatgagggtagtatgtcgtatttttggggggtgggggactggtggcgtggcgtggcggcagcagcatattagtgaatagtgatagcatatgaaccctaattctgatatatagtcttgtcgtttcatagcctggtggtgattgtttggtgtggggctggaatgatcatatattattatta

SEQ ID NO: 8265 - DNA, 5475 bp, Zea Mays
atgtccaacacttcaggaggatcattgatggacggagcagctggaggcaacctggcaagcaggaatgacagccagggcgtcattagtagctctcactcagggtcagaccacgtgaccaaagtgccgagcgtgaggaggcggacacatcctcccatgaggttggggagtgaggtgccagagccatccccgaagatgcggaaggtggtaaatgaggaggatacaccttgtggagcttcaaatacgggcaagatcagtgcttcaccttctgcggtgtcgagagatcccaacggaacttctacctccgaagaccatgctggagggcattcaagtgagtatgccacagttgggaatgctaggggctcaccaattaaacgaagatgtatgcagacaagtcactacttgggactatttacacccctaaaagggaaacacacagatgaagttgctaaatccaagcaatcaactgtttccacaaaaacaaagaagtttaaggaaattcaatttcagaaacttcagagattgccagatgggtgccatcctgattttgataatgatcatctgtgttctgtaaataatcatgacctgcttcctgaaatgagtactccaagtgctgaccttcatctacttactgagacaggagtggaaaacatgaggacacctaaaagtcttcacgctgaacttaagcgtgagctgtcaaagctaaatacggtgttaaagctaccagataatgtactctttctggccaaccagttccttgaatatcttttaaataatcatttagttgtgcgggagccacggagcatactgcatgcgttcaacatagccttgtgttggcgtgctgcttcttttctgaaatacactgagttggatcatcgagaatcacttgcccttgcttcagatggattgaattatgaatgcaatgaggagctcgcagaacttttctataaaaaaataggcatcctaaaagaaaaggttgcacataaaccaggtggaataatcaatggtagattatcaccacatgagagctcatctgctaacttgagaagtgaccacagtttccggaagcaggcaatggatcttcatggtaacttcacaaaaggcactgaagatagcccatctgccactgatcagatggtgatggtttcagatgaacaagaattgctatctgctccagatgctggtagagaacatctcttaagtgaagaatcttctagtagtgctgcaatgaaaagaatagatttatttaacagcatatttttctcaagagagagggatatcattgagaagcaacaacttgagatattaaatttaagaacactgagagacaatcaagttaagaaactgaaagaggtatgccatgcagttgttcaacacattcggataagtaacattgacgaagagatggaaattgaccaaataaagttagtaattcagtggttcactatgtttatgcattctttcttggcgcacatcaggctccagtttttcaaacttgatgcactgcattctacaacactggctgaagaggaactgatgaaggaaaaactcaaacaggaagtagtatcaggtgaattagaccaatttcctgatcattgcgttactctaccagattccaattctgtcattgaggaatttatccattttaagaaacaaaatgatgatagtcatgttgaccaaaaaatggctttggatggtgaccagcttatggatgacagaccgatggaaattactattttacgcagtttgttttcaccagaggcttgttctacacttgcagtgagaaatgagcctacagaagctcatttgaggtctggtgggagagcatcatcagaatatgtagatcttccagataacaataatcactgtatttctgttggaattgactaccaaggaggttgttctgctagttctattcctacaagtcatggttcaatcaatcagaaatattgaacatgccaagggtgacattattgctaatccaagtatggttccaggaagtgcaacttctcttgtggtaatcaatgcagaaaatgatagtactgttgcagcagatccagaccacttggaatcacatattttggcttctgtcacgaccttgcagcatccaacatcagaagaaccgtctgatacattacatgcaatggcagttcaggatctgcaaactgagatgcaaacaacatgcccaacattgggtgctcaacatcagaaggtgtgccctgatgattctagtaaaatgaaccatgaaccagatacaacaactggaatgttgcaggaagggacaacttctgaccatttaggtgattccagtaaggtgaacgttgaaccagatataacaactggaatgtctcaggaagggaaaacttctgaccatttagatgattccagcactggagttaaagaaaaaaatattgacactgtcattgcagatccattgaattcagaaaatcaatcttatattgctatgccagaagcttgggtagctgaaattcagagtgatcagtcaagtatgcctgcacaacatagtacaagtcttcctactcagcggaagttaccagttttgggacatccaccagaagaagcaaatccatcaagtaatttggacacagaggctgcccagaagccagatattcaaccatcaagctcaacgttggatgctgacagctctgaaacaaggcatcagccagaaactacaacagttctgtcacaggtaggcagtaaaaatcacgatgttggcacttttcacgcacaaaaagcccaatcagactcaccaattttggctgccccacaaagcacagctatgttgtcacttcctttggaggctggaactcctgctaatgtatcaagtacgtcttccctgcaaagtaacggtgtatcttcaaggcacacacctgctgtttcagaatcatcaggtatgttgggcactcagccagaacaggatttgcatcatgacctggggccatccatgtcattgttgggtgttccacttcaaagaatgctcccagatgacaggagccaaacagtctgtcagccagatagaggaactgatttgtcagggaaaggcgaaactgaatatctagcttgtaccaccagcgatctgtccacccttccactttctggtgaagctgaaactgagaatggtcaagcaagtatgcctgcacaggaaatcacaagtccccatgcccaacatagtttagctttagcaacttcacagcatccagttggtgatttgcagccaccgacgttgattctgtctgaggaaacagaaagggctggtctcttgtgcacctcagcatctcaggatttgcaactgtcaatgataacacaggaggatgttccacttgaaagaactgatctgtcgggcatgcctgtgacacaaagtacaactgttctgcagagtgtggaaccttcatgtgatccacatgcagaagaggcaggtacttggggtatgttgtcagctccagatttgcagtccagaatgcagtcatcatctcaattgcaggatcaaattgcggaagcagaaggagcaggcatttttggcaccattccagctcagaacttgcagcctgaaacgtggtcatcaacctcagctcagcatatctcaccattgaggacacaccctgatgagagaattcaaataggtcttcagccaaatacgacaccggttcctgagctgctaggccaactatctacattgacacctgcaggtctattgtctagtaacgaaccactaatgaatgagcttgaaaaactgaaatactgcaacgccgtgctctgtaaaaaccatgaacagaagaaatcacaacttcaaacagagtgcaaccaagaaatagagaaggtaaaggagaagtatgagttgttacgtcaagaggaagattctgtgtatcatcgattgaccacagaccttaaccgtatctacacgaaagttcttgtaaatcaatcactagctgaattctttaaagcatctctagttcaagagagatctgcaaggcccacaatttggcaggcaccccagtcctctcagcatgctccgtgtgggacaacagcagctcaagccacactattaccggttgcctcatctttagccactcgaccaacagttttgatgtcatatcatacaacaggacctcacctcccaccttcacaggtggctcggccaccggcttctggggctatccaactgcaacctgttttacctggaaaccattccagagcagcaccatcacctgttggttcaatgcatccacgacatggaatctacagagctgttggagcacaatcacgtgggcctgctcctcatctccagcaactcaggatgccagcaccgtttgcaatggttcacagagatggacagcatccacccagtatcatgaatcccggggttataccatcgagacagtctgtccatggtaattttgaaagctctgcttctggcaatgcactggcaggtatctcatttgcatccatggcaccaagttcaggtcaccaggcgatgtcgtccacatcagactcacatccagttttcccagcatcctcgcttctaccaggttcaggtccagggtcgatgacaaactttgtgcggtcaagtaccagaatccctgttgtcatggcgagcgaacaagcaccacgcctgaatccatatgttcaccacatcggaggtggtccactgaacgctgcaccagcaggaattcagcaagctagagctcatataggacgcactcctcaggctgcctcagatcagagtcaggacgtgctgcatcgcctactactacagttgcccgaagtcatggcgccaagcttagctcagccaaccgcatcaagctcacacccggctcccatggcagcccggcagcaagcagggctactgaatccagctcctgacaacgtggcatgtccactgaacgcagtggctggagttgggcgccccggagcccgcataggcagccagtcgtaccaggtatcggcttcgttgctcgagtgggaggcgacgctcagggttggcctgattcgtggacaccaaggcacgtaccccttgggacagggatgttctgacctggctggaggaccccccggcacatccgctgcccagggatgcggctccggcgccagcagagaggtggtgtgcctatctgatgacgaggagtagcatagcgtagagagtagtagttttttttttgggctgggctggtctgtgcaacgtagatgtgcatgggttggataggcaacagtagagcggcacgatatcgtcgcccccttttagcagcagcggcatccttggaagcaggagatgtctggctctgatgagggtagtatgtcgtatttttggggggtgggggactggtggcgtggcgtggcggcagcagcatattagtgaatagtgatagcatatgaaccctaattctgatatatagtcttgtcgtttcatagcctggtggtgattgtttggtgtggggctggaatgatcatatattattatta

SEQ ID NO: 8266 - DNA, 1428 bp, Zea Mays
cttcatcttcctcgcagcgccggcgttccatcttccgctcctcccttattcgcgctcggcacgcaggcggcggcggcggcactcaggctcgggatctcagcgacggcgctcaggctcgggatctcagcgacggcgcccaggctcgggatctcagcgacggcgtcagcggcttcccttcagcctcgcgccctcgccttcgatcctccgcacaccggccggtgaccctgcgttatttctctgagggcactcatgatttagcacaagtcatactgatctctaactctggtgacataagctgttgttagggtagcaaatcaagagataaaaatggcagattcaatggtagcgagcttctgggggcctgttacatcaacaactgagttgtgcgaggagaattatgcacactcatcatatatagcagaattctacaacacaatttctaatgtcccatgtgttcttttggcgcttattggattagtgaatgctttccgccaaggttttgagaagcgattcagtgtcctgcacatatccaatatgatacttgctattgggagtatgatttttcatgccaccttgcaacttgtcctacaacagagtgacgagactccaatggtctgggagatccttctttatatgtatgtcctttattcgccggactggcattacaggagcacaatgccaaccttccttttcctatatggtgctgcctttgctgtagttcatttctttgcccggttccaattcgtattcaagctgcattacattggcctctgcttcctctgcatcccccggatgtacaagtactacatacagaccaaagacgtggctgcgaagcggctcgcaaagctgtgggttctcacgttaacccttgggactctctgctggctagttgatcgcatcttctgcaagaagctttcgcattgcgcgggtgggaggcgcgaatcacctaccttcttggatttttgccttatgtcaaggtccagaaaccagagaagaagagggaatgatttgtctctgcttaacactgatgctactcagtccaccgccagtaagctaatgtctatcccccaccccatcccccacccaatgtgcgcagacaagttgtggcatttttgtatatgggcatccaaatgattacggactataaatgttctgatgtcacactggatttcggtaacttttgactggcacctgttttgtaccatacttaatcatcgaacggagattagttggagtggttggttggtgtcctagttttggccatctttcttttggtttctttgcaattgccttttggtggtaataggacagggttatttgtttattcgtttgtcgttgaatggagtccagttgtactagttatcatcactccgcatggggatacatccttccatatgatgaccgttaattcattgacttgtgttggtg

SEQ ID NO: 8267 - DNA, 1628 bp, Zea Mays
cccatcttcatcttcctcgcagcgccggcgttccatcttccgctcctcccttattcgcgctcggcacgcaggcggcggcggcggcactcaggctcgggatctcagcgacggcgctcaggctcgggatctcagcgacggcgcccaggctcgggatctcagcgacggcgtcagcggcttcccttcagcctcgcgccctcgccttcgatcctccgcacaccggccggtgaccctgcgttatttctctgagggcactcatgatttagcacaagtcatactgatctctaactctggtgacataagctgttgttagggtagcaaatcaagagataaaaatggcagattcaatggtagcgagcttctgggggcctgttacatcaacaactgagttgtgcgaggagaattatgcacactcatcatatatagcagaattctacaacacaatttctaatgtcccatgtgttcttttggcgcttattggattagtgaatgctttccgccaaggttttgagaagcgattcagtgtcctgcacatatccaatatgatacttgctattgggagtatgatttttcatgccaccttgcaacttgattcagtagatgaactttcagaatattgatacacccattaagggacgaagtcgggaagaaccattagggtgtgggggcttagctatattaaattgctagcctacaacagagtgacgagactccaatggtctgggagatccttctttatatgtatgtcctttattcgccggactggcattacaggagcacaatgccaaccttccttttcctatatggtgctgcctttgctgtagttcatttctttgcccggttccaattcgtattcaagctgcattacattggcctctgcttcctctgcatcccccggatgtacaagtactacatacagaccaaagacgtggctgcgaagcggctcgcaaagctgtgggttctcacgttaacccttgggactctctgctggctagttgatcgcatcttctgcaagaagctttcgcattggtatgtcaacccgcaggggcacgcatggtggcatgtgcttatgggcctcaactcatactatgcaaacacattcctaatgttctgtcgggctcagcagcgcgggtgggaggcgcgaatcacctaccttcttggatttttgccttatgtcaaggtccagaaaccagagaagaagagggaatgatttgtctctgcttaacactgatgctactcagtccaccgccagtaagctaatgtctatcccccaccccatcccccacccaatgtgcgcagacaagttgtggcatttttgtatatgggcatccaaatgattacggactataaatgttctgatgtcacactggatttcggtaacttttgactggcacctgttttgtaccatacttaatcatcgaacggagattagttggagtggttggttggtgtcctagttttggccatctttcttttggtttctttgcaattgccttttggtggtaataggacagggttatttgtttattcgtttgtcgttgaatggagtccagttgtactagttatcatcactccgcatggggatacatccttccatatgatgaccgttaattcattgacttgtgttggtg

SEQ ID NO: 8268 - DNA, 690 bp, Zea Mays
atggatcctcttgatgagttcttcgaatcatcgtctgacgatgatgttgaagatatcgagttagtattgctttcgtcaacggtgcaaatcgtatcaaggaagtttgcaacttcaaggatgaggcactccgcaatgtctcagcgtgtcatccatcgtgatcaccgtgctggtgaatacctcatcaagcaccactactttggagacaacacggtgtcccctggtaaccctgctcacgtctttcgtcggaggggagttgtcgtaaggacatcaagagggcattcagagtgttacaggcacgatgggcagtgttgcgtggtcccgaggatggatgggatcgagataaccttgaagaaacaatgacagtgtgtatcataatgcataacatgatcgtggaggacgaaggggatcaagtaactaatgtggatttcgcaaacatcggcattccagctgacctttcatcaagtgttctagaagttcacaacgactagcttacaaaccacctggtcgtcgagaacatcgacataactcgcagaggcatgtacacaacattgaaacacggtcttgtcaagcagcatttggtgaggaaggtatcaatgtcttgattacaataagagctttgataacaataattgtaagtcatatgtcttcgagtcgtgtagttctgaagagtgtggttgttgctagtgtttc

SEQ ID NO: 8269 - DNA, 1824 bp, Zea Mays
ttctttagtgcctctccagcttcagcttcacgtgaagctgacccaaacgccttgttgaaaaacaactcctccttgggaccagtcacctttgggagctggttttgacctggccggccggtggcacgctccccgtacgagcacgcaactacgcaaggccaccccgccggtctctccttccgccgccagatcctccgctccttcgcccacagccgccgcggccgcggccctcctccctggttgttgcactgtagtactggagtggaggtccggtcccacgtttgggcgtggactcgacaagcgccaaaccgagcacccccaaatcctgattctgctcaacactgcgcctgaaatattttctccggtggggctgcaaaggcaaattaggagcgcttccaagttccaatccccgtttgcttgtacagggtataattaaagaggcaacggagtcatgacccttttgagggagtattagtaaccgcatgatcttttcgagggaggcacgatggaaggaaataacctaccctctggaagcttgatgcaaggaacaccttacagtaatgtggacttgcagcatcataaacatatgcaaatgcctgcaccaagctctggaaaccaggctttcaaccactctcaggtgcctggcaatttccccatttgtctgaaccaggttacagattccgaccagctacctgaattccaatttggagagcacggcaaggtcaatcaccaccatcatcctcaccatcacaagcagcatgcaacgaatagcatgagcgatgatgaggagcatggtgtgcatgaggatgccactgatagccagatcggcaagggaaagaagggttccacatggcatcggatgaagtggactgattcgatggttaggcttttgattactgcagcatcctacactggggaagacccaggagctgatttaggaggtggtaggagaagctgtgcaatgatgcagaagaaaggcaagtggaaggccatatcaaaagtcatgggcgagcgaggctgcctcgtgtcgccgcagcagtgtgaggataagttcaatgacctaaataagaggtataaaaggcttacagatatccttggtcggggtactacttgcagagttgtggcgaacccggaacttctggatggcatggctaatctctcagataagatgaaagatgccgcgaggaagatattgagctctaagcacttgttctatgaagagatgtgctcctaccacaacaataattggttcagtttacctgaagatcctgcacttcagcgatcgttgcagcttgctcttaagtgtaaggatgagcatgatgcaaggaagcgagcaagtggagatgctgatgaagatgatcaaagtgcagacactgattatgaagaagagaatgatgatgagcatcccatcacgcatgccaataaggggaccctactcacgcgtaaaagattgcggtacatgccggcggatatggaggatgtaggtttcggcaactcttccagctcacatgactgtagctggagatctgatccccatagcattgcagtggacatcaacaaagcttctccagatggaactaacttggcttcggttcaaaaagacttggctacacagtctgcggagattgagaaacagcgtatggaaattgaagttgaggcattggagcttgcaaaacaacgtctcaagtgggaggcatttagtaagaagaaggacagagagctagagaagatgaggttggaaaatgaacaaatgaagattgagaataaacgtttggagctagaggagctggggattcataattattctcgccaatcatctatgtgctg

SEQ ID NO: 8270 - DNA, 3585 bp, Zea Mays
ctcggggtcggagcttttcaaacgcccctggctctgtggaccgctcgtccctgccgttgcgagcgcgagcgcccgagctagtgagctgcgtctgcgtgcgagatccgcgaggggcgggcgaggacggcggagtcgccggcgcgagcgaataaggcgaccggcttgcgcgcgacgagggcgatggcccgcccggctgccggagcgcacgacgtggggatggcgctgcgcaaggccgaggaagccgctgcgcggaggtgcgaggcggcgcgatggctgcggcagatggagcccgccgcagcagagtccctgccggagaggccttccgaggaggacttctgcgcggcactgcgcaacggcctcgtcctctgcaaggttctcaaccgcgtcaatcctggcgccgtccccaaggtcgtggagaatcctgtcatcacggtccagacgttcgatgggccggcacagtctgcgatacagtacttcgagaacatgaggaacttccttgtcgcagttagtgcgatgaacctgttgacgtttgaaacctctgatatagagaagggaggttcgtcaatgaaagttgtcgactgcatactctgcctcaagggataccacgagtggaagatctcaggtggcattggtatatggcggtatggtggcatcgtgaaaattgcatcctccagtaaaaggcctgcttcacatttaaacagaggtggaggctcagaccaacaaatgctggaatttgtgcatcttctctctgaggtctctcttgaggaatcaagagttgaagaagcccagcattctctttttcagcgctttgttcttcaagttgtacgagcattccttctggaatggggtgaagctgaagatttgcctcttgatgatatggtcatcgaaacagtactcgaacaagcttgtaaagaatttaccattttgcttgcttctcacagaaatcaggtgaggtcacttctaaggaagatgatgaaggatgacaatggaactctttctaaaatggatttgatcgaaactattacaaaatgtcttaaggagaatggtgagtgcatgtcctcttcattgcgattgcctcgtggcagccatggacacttggatgatgtgggattacttgaaaaccaacaagaaggactggagaagttaaagatgtcattcaatgaaatgaagcttcaagttgaatcgactcgtgctgagtgggaggaagacttgaggaggctagaaagctactttgaggctcagaatcataatgcttaccaaaagttgctggaggaaaatcgtaagctctataatcaagtacaagatcttaaaggtagcattagagtttactgcagagtgaaacctttcccaaaggcacaatctgatcaaaggtctactgttgatcatattggggaaaacggagaaatcctgattgcgaatcctcaaaagcaagggaaggatggacggaaaatattcacattcaacaaaatatttggacctagtacttcacaatctgaagtttttgctgatacccaaccattaattagatctgtcatggatggatataatgtatgcatatttgcatatggtcaaacgggatctgggaaaacttacacaatgagtggtccagatgtaacagcagaggaaacctggggtgtaaactacaggtcgttgaatgatctgtttgaaatttctcaaacaagagcagattccattacatatgatgttaaagttcagatgattgaaatatacaatgagcaagtgagggatttattaatgactgatggtgcaaacaaaagattagagatacgcaataattctcatgtaaatggactcaacatcccagatgccaatattgtgccagtcaagtgcgcacaagatgttttggatctgatgaaagttggccagagaaaccgagcagttggatcaactgctcttaatgaacgaagtagccgctcacacagttcatgtacaaggaaaggaggtaatttcaggctcaactctaagagggtgtcttcatctagtggatctcgcgggaagtgagagggtagacaaatctgaagcgactggagaaagactaactgaagccaagcacataaacaaatctctgtcagcacttggtgatgttatatctgcacttgcccaaaagagttcccatgttccatatagaaatagcaagttaacacaagtgctgcaggatgccttaggtggtcaagcaaaaacattgatgtttgtgcatgtgaaccctgaaacagactcttttagtgaaacaatgagcactctcaaattcgctgagcgtgtagctacaatagaacttggtgccgcccgtgcaaacaaggaagcaggccaggtcaaagacctaaaggaagagatcgccaagcttaaattggcattagatgaaaaggaaaatgaagtggcacagtttaaagatcttgctaaccgtgtgacttctgagatgagaaatgcaagaacaagatcacctttaaccgccagcatgtccttgaaacctgaagtcagtcaagaatccagtgtagacacctgtacaagtgagataagaagttcatcatctggcaagcaaagaaggttccgttcaccgttgtcagtgagagagctagacgataagtcacctgtcatcagcagggaactgtacctgagtgcgcgaaagtacaagactccctctcctccggttagaagctcactctctgtcgagagaggcagctttgccaaaatcgtggagaacactggaagcatcgactgcacaccgatatccaaggtcgaagtgcctccaaaagtgtggtccagcaactcgaagaccacaccttcatctgtcctgacagctcagagcctacggaaattccgggactccgaggagaacagaaccaaaattccgcccgctgtccggcagagcatggcgaagaacaggtctgagagtacgccaaagactcacaatgaagagaaaccggcgaacaggcaccactcgggtaccaaagcgaggtcagaggccaggaacacgagggactcgtccgaaatcgagaacgagtttgcgggcgatgaacctactttccacttcaaccgaactgcgaagaagttaccgacaaaggtgatgtcaagacagtcccagaacatagatgtcagtgtcagggcctctgtccggggggagatggagcctctgaccgaaggaaggcaacgccggaactggagcaagccgccgcacgccgagaggaccaatatgccgttgccggacatccggcgcagtgtctccctgccgcgcgggaagaaccctcttgtgtgaatctagctcgtttcgccaaccaggcattctttcattggttgtttgtttctttatcctgcggttcgatccgaatgtaggctctacggctgtgtagaacacttcatccggatgcataacacaaagtctgtcgagttgcttccaccaggctcccatgaaaacgcaaagttcacgctcttatacgcgatgtaaaaatgtatgggttaatgttgcactgcaggctgcagcatctcgttccagtggtgattccgtaccaattttgttcttatattattatatagaccaacaaatatattattaatacatcacaaaatata

SEQ ID NO: 8271 - DNA, 3611 bp, Zea Mays
cccacccccaccgcccctctccctcggggtcggagcttttcaaacgcccctggctctgtggaccgctcgtccctgccgttgcgagcgcgagcgcccgagctagtgagctgcgtctgcgtgcgagatccgcgaggggcgggcgaggacggcggagtcgccggcgcgagcgaataaggcgaccggcttgcgcgcgacgagggcgatggcccgcccggctgccggagcgcacgacgtggggatggcgctgcgcaaggccgaggaagccgctgcgcggaggtgcgaggcggcgcgatggctgcggcagatggagcccgccgcagcagagtccctgccggagaggccttccgaggaggacttctgcgcggcactgcgcaacggcctcgtcctctgcaaggttctcaaccgcgtcaatcctggcgccgtccccaaggtcgtggagaatcctgtcatcacggtccagacgttcgatgggccggcacagtctgcgatacagtacttcgagaacatgaggaacttccttgtcgcagttagtgcgatgaacctgttgacgtttgaaacctctgatatagagaagggaggttcgtcaatgaaagttgtcgactgcatactctgcctcaagggataccacgagtggaagatctcaggtggcattggtatatggcggtatggtggcatcgtgaaaattgcatcctccagtaaaaggcctgcttcacatttaaacagaggtggaggctcagaccaacaaatgctggaatttgtgcatcttctctctgaggtctctcttgaggaatcaagagttgaagaagcccagcattctctttttcagcgctttgttcttcaagttgtacgagcattccttctggaatggggtgaagctgaagatttgcctcttgatgatatggtaggtcatcgaaacagtactcgaacaagcttgtaaagaatttaccattttgcttgcttctcacagaaatcaggtgaggtcacttctaaggaagatgatgaaggatgacaatggaactctttctaaaatggatttgatcgaaactattacaaaatgtcttaaggagaatggtgagtgcatgtcctcttcattgcgattgcctcgtggcagccatggacacttggatgatgtgggattacttgaaaaccaacaagaaggactggagaagttaaagatgtcattcaatgaaatgaagcttcaagttgaatcgactcgtgctgagtgggaggaagacttgaggaggctagaaagctactttgaggctcagaatcataatgcttaccaaaagttgctggaggaaaatcgtaagctctataatcaagtacaagatcttaaaggtagcattagagtttactgcagagtgaaacctttcccaaaggcacaatctgatcaaaggtctactgttgatcatattggggaaaacggagaaatcctgattgcgaatcctcaaaagcaagggaaggatggacggaaaatattcacattcaacaaaatatttggacctagtacttcacaatctgaagtttttgctgatacccaaccattaattagatctgtcatggatggatataatgtatgcatatttgcatatggtcaaacgggatctgggaaaacttacacaatgagtggtccagatgtaacagcagaggaaacctggggtgtaaactacaggtcgttgaatgatctgtttgaaatttctcaaacaagagcagattccattacatatgatgttaaagttcagatgattgaaatatacaatgagcaagtgagggatttattaatgactgatggtgcaaacaaaagattagagatacgcaataattctcatgtaaatggactcaacatcccagatgccaatattgtgccagtcaagtgcgcacaagatgttttggatctgatgaaagttggccagagaaaccgagcagttggatcaactgctcttaatgaacgaagtagccgctcacacagttcatgtacaaggaaaggaggtaatttcaggctcaactctaagagggtgtcttcatctagtggatctcgcgggaagtgagagggtagacaaatctgaagcgactggagaaagactaactgaagccaagcacataaacaaatctctgtcagcacttggtgatgttatatctgcacttgcccaaaagagttcccatgttccatatagaaatagcaagttaacacaagtgctgcaggatgccttaggtggtcaagcaaaaacattgatgtttgtgcatgtgaaccctgaaacagactcttttagtgaaacaatgagcactctcaaattcgctgagcgtgtagctacaatagaacttggtgccgcccgtgcaaacaaggaagcaggccaggtcaaagacctaaaggaagagatcgccaagcttaaattggcattagatgaaaaggaaaatgaagtggcacagtttaaagatcttgctaaccgtgtgacttctgagatgagaaatgcaagaacaagatcacctttaaccgccagcatgtccttgaaacctgaagtcagtcaagaatccagtgtagacacctgtacaagtgagataagaagttcatcatctggcaagcaaagaaggttccgttcaccgttgtcagtgagagagctagacgataagtcacctgtcatcagcagggaactgtacctgagtgcgcgaaagtacaagactccctctcctccggttagaagctcactctctgtcgagagaggcagctttgccaaaatcgtggagaacactggaagcatcgactgcacaccgatatccaaggtcgaagtgcctccaaaagtgtggtccagcaactcgaagaccacaccttcatctgtcctgacagctcagagcctacggaaattccgggactccgaggagaacagaaccaaaattccgcccgctgtccggcagagcatggcgaagaacaggtctgagagtacgccaaagactcacaatgaagagaaaccggcgaacaggcaccactcgggtaccaaagcgaggtcagaggccaggaacacgagggactcgtccgaaatcgagaacgagtttgcgggcgatgaacctactttccacttcaaccgaactgcgaagaagttaccgacaaaggtgatgtcaagacagtcccagaacatagatgtcagtgtcagggcctctgtccggggggagatggagcctctgaccgaaggaaggcaacgccggaactggagcaagccgccgcacgccgagaggaccaatatgccgttgccggacatccggcgcagtgtctccctgccgcgcgggaagaaccctcttgtgtgaatctagctcgtttcgccaaccaggcattctttcattggttgtttgtttctttatcctgcggttcgatccgaatgtaggctctacggctgtgtagaacacttcatccggatgcataacacaaagtctgtcgagttgcttccaccaggctcccatgaaaacgcaaagttcacgctcttatacgcgatgtaaaaatgtatgggttaatgttgcactgcaggctgcagcatctcgttccagtggtgattccgtaccaattttgttcttatattattatatagaccaacaaatatattattaatacatcacaaaatata

SEQ ID NO: 8272 - DNA, 2662 bp, Zea Mays
caaaattgacaaggcattaggtacatgtacgctgcatcttccaatgagcagtcctgtacaaacaatttatgctgaaggaaaagtttctataatcaagaaggttgtttgtctcaaggcctgccgggaattacatgctgttggcgctctcacagattatctcttgcccgaatcgagtgttccatgtgaagatgaacctgatattgttgtggacaaatacaaaaatgggcaacctgactactttccagagcaattagtggataattggtcgtccttttctcgtcgtggcttttattattgctacatggtatcactggaaggttgttctaaaactactccagctgagatagtattagctgtaaagtgcgacatgggatctgacttcatctcgaactcattcaaattgtggggtgtgcaagattatttgagttttaccatgagatatgttggcatcattcatctaaatcaggaacagcatctcctggagctgtgtatctacttctgccagtagtttctggaaaaattgattggcgtagcatcaaattctcagcctcggaaatgcctgaagctactaacatggatatgcgacactgctatccttgtaaagatactggtatagtgcagacaaaagatggcactttctgctcgtgcatgcttcgaaattctattgtctgtacaccacataatggcatgttttatgctgtttgtggctttcttgacttgaatgctaattcgcttctacatagaagtgatggcagtttccttagctacaaaacctattttaaggaaaggtacaaccttgatttaagatgtgaagatcaagctctcttggaagctcgtaaacttgtggaagtgcggaactttctccacaagtgtaactataaaaaagaaaaagaaagaagtggtaagagtgtggttgaattgccacccgaactgtgcatagttgtcatgtcaccaatgtccgcaattactttgcgcagcttcacatttattccttctataatgtatcggatccagtgtatgctcctttctatgaatttgaaaatgcaattgggtccaagcatgcagcagtttgatattccagcactaaagattctggaagcacttacaacaaagaattgccaagaggaattttcgcaggaatcattagagacacttggggactcttttctcaagtatattacaacccaacacttttttgtcaaatacaaacatcagcatgaaggcatgctaaccaagatgaagaaaaacgtgatctcgaatgcagctttatgtcagctggcttgcagtaacaatcttgtgggatacattcgaagcgaagctttcaatcctaaaacatggatcgttccaggggttggctatgacatatgtgataggagtctgaggaagctgaaaagtaagagaattgcggattcagttgaggccttaatcggggcgtatctcagtactgctggtgagcaggcagcatatattttcttaaaatctttaggaatggatatagagtttcacaaaatgccaattgagagggtaatcacaatcaaagcagaagagttcattaatgttaaaagtttggagctattgcttgactatagtttcaatgatccttcattgttgatggaagcactgacacatggttcatatcagattgctggcactactccatgttatcagcggctggagtttcttggggatgctgtattagatcatatttttactgattatttctaccatcagtaccctgaatgcactcctgaactgctgacagatctgagatctgcttctgtgaacaatagctgctatgctcatgcagcagtaaaagcaggattacataagcatgttcttcactcgtcatcagcactgcacaaaaggatggccgactacctggacaagtttgagcagtcattttcaggtccatcacatggttgggaagcaggcatcagtctgcccaaggttctaggtgatgtggttgaatctatcgctggtgcaatttacatcgacgccaagcatgacaaaggggtcgtttggagaagcatgaaacggatactggaacctcttgtgacacccgacacccttcagaatgaccctgtgaaagagctccaggaattctgtgatagcaaaggttacactttggagtacacggtaactcgtgacaacggtgtatcctcggtggtcgcagaagtgcggaccgaagggactacgtacaaggccactcggacaggcttctctaagcttgacgccaaaaagttggcagccagttccgtgctccgtgatttgaaggctgcggacacaaagcagtactctgcaaatggtatcagttgcacttaaacttcatagctctatggtatatacttttgtacaaaatcgtcgaatcagtaaggtgtgcaggtgcctaggcacgctaccctacttttactgcatctacgtctacggccacactaaagcagtacgtgcaacaatgttttgttttggtcatgtctcttgagagtgaaagtgtagcgttatttttattttgattcgcatttttgggataggcctggtggtgcaccagggcaccaagcgagtatgtggtccgtagggtttttagattactcttgtttcgagatgattggattaaattcttgtagagctgattggatggttcaatatcttggtttttagaatggtc

SEQ ID NO: 8273 - DNA, 4720 bp, Zea Mays
ggcgaacggcagaaagccaaggccacaaaattgctgcgaatctgggaaagcccaccaccgtccccgcgagagccaccgaggtagtcacgattcgaatcctctggcgtggatgggatcaggaaggaggacgcgaaacgaatcggatcccttccccttgccgagtcaaaaagcgtagcgaagcaagcgcaacgcaatcgtgtggcgattgcagggcgtgtgccgtggaggagagcggcagcgcaaccgtcaccaccaccaaacccctccgcattctctcgtgcacgcagcacgcgtccctaaacctccctctcccttccgctttttgtaatcctcgtcgccatgacccgcgccgccgccgaagccgccggggaggtggtggtggaggaggatctgccgccatcctgcgacccgcagacacaggcgagatggtaccagctggaggcgctggagcgcgcgctggccgggaacacgcttgtgttcctcgagacgggcgccggcaagacgctcattgcggtgttgcttctccgccgcttcgcacaccgcatccgctcctccccgccgccctccttcgccgtcttcctcgtccccaccgtcgtgctcgtgaaccagcaggcgggcgtcatcaaggagcacacggacctccgcgtcgcccagttctacggcgacatgggcgtcgacttctggaacgcggacacctggcgcggcaggatcgacggggccgaggtgctcgtcatgacgccacaaatccttcttgataacctccgccacagcatcttcaggctgcgggacatcccgctcctcatcttcgacgagtgccaccgcgccaccgggaattccccgtacgcctgcattcttaaggagttttatcatccgcaactgaattctaggccatcagattccattccaactatatttgggatgaccgcttctttaattgcaagaaatttggcgcttgacaaatattcagaagaaatatctgagtttgagaatctcatgaatgcgaaggtgtacactgttgccagtgaatcagcactattgcaatacattccaattgcgactacaaagatagttgagtacgatgattatatcgtaacgtctgagttatatagtcatactatccgttgcttgaacaaattggaaacaaagcatttagaaatcctgaaggggaaactgcatggttcacctttggaaaattcagagaaaagaataaaaaaattaaatgcaatgttcttatattgcatatctgatcttggagtatggctggcagcaaaggctgctgagattctacaatcaaataaggaaagctgtgtgtccttttggggcgaagaattggatgaaaaacttgaaggatttgttagaaactatgtcagagatgtatatagtgatctttcagaaattatattgaagatgacaaagaggggcgtacaacgacatattggtgaggacttcgctgaggatctgcaagatgggttattaacatccaaagtttattttcttatcaaatctcttatggggtataggcatatgcaagatttgagatgcattgtttttgtcgaaagagttattacaagcattgtgttggaggcccttctgtcaactattaatcaaatgtctggatggagtgttagatacatggcatcagggcgtaattgtggtttgcaacatcagagtaggaataagcatgtggaaatcgttgattcatttcggagtggaaaggtgcatctgattattgccacacaaattttggaggagggactagatgtgccaagttgtaacttgataatccgttttgatcaggcagcaactgggagatgtcaatgctctttctaagacacagaagtttctgaaaagtggacaaatcatgcgggaagaatctcagagattggaatctacttgttgtcagcctcttctaaacacactatgcaatgaagaattttatggtgttgaatctactggagcaattgtgactttgaactctagtattcaattgattaactttttctgctcaaagctaccatcggatgagtattttaaacctctaccaagattcaaaattgacaaggcattaggtacatgtacgctgcatcttccaatgagcagtcctgtacaaacaatttatgctgaaggaaaagtttctataatcaagaaggttgtttgtctcaaggcctgccgggaattacatgctgttggcgctctcacagattatctcttgcccgaatcgagtgttccatgtgaagatgaacctgatattgttgtggacaaatacaaaaatgggcaacctgactactttccagagcaattagtggataattggtcgtccttttctcgtcgtggcttttattattgctacatggtatcactggaaggttgttctaaaactactccagctgagatagtattagctgtaaagtgcgacatgggatctgacttcatctcgaactcattcaaattgtggggtgtgcaagattatttgagttttaccatgagatatgttggcatcattcatctaaatcaggaacaggtaattgccgcgagaagattccagacaacaattctttctttgcttattagtaatgacctttcggaggtcagcaattatattaagaacttacttgaaatgccagcatctcctggagctgtgtatctacttctgccagtagtttctggaaaaattgattggcgtagcatcaaattctcagcctcggaaatgcctgaagctactaacatggatatgcgacactgctatccttgtaaagatactggtatagtgcagacaaaagatggcactttctgctcgtgcatgcttcgaaattctattgtctgtacaccacataatggcatgttttatgctgtttgtggctttcttgacttgaatgctaattcgcttctacatagaagtgatggcagtttccttagctacaaaacctattttaaggaaaggtacaaccttgatttaagatgtgaagatcaagctctcttggaagctcgtaaacttgtggaagtgcggaactttctccacaagtgtaactataaaaaagaaaaagaaagaagtggtaagagtgtggttgaattgccacccgaactgtgcatagttgtcatgtcaccaatgtccgcaattactttgcgcagcttcacatttattccttctataatgtatcggatccagtgtatgctcctttctatgaatttgaaaatgcaattgggtccaagcatgcagcagtttgatattccagcactaaagattctggaagcacttacaacaaagaattgccaagaggaattttcgcaggaatcattagagacacttggggactcttttctcaagtatattacaacccaacacttttttgtcaaatacaaacatcagcatgaaggcatgctaaccaagatgaagaaaaacgtgatctcgaatgcagctttatgtcagctggcttgcagtaacaatcttgtgggatacattcgaagcgaagctttcaatcctaaaacatggatcgttccaggggttggctatgacatatgtgataggagtctgaggaagctgaaaagtaagagaattgcggattcagttgaggccttaatcggggcgtatctcagtactgctggtgagcaggcagcatatattttcttaaaatctttaggaatggatatagagtttcacaaaatgccaattgagagggtaatcacaatcaaagcagaagagttcattaatgttaaaagtttggagctattgcttgactatagtttcaatgatccttcattgttgatggaagcactgacacatggttcatatcagattgctggcactactccatgttatcagatctgagatctgcttctgtgaacaatagctgctatgctcatgcagcagtaaaagcaggattacataagcatgttcttcactcgtcatcagcactgcacaaaaggatggccgactacctggacaagtttgagcagtcattttcaggtccatcacatggttgggaagcaggcatcagtctgcccaaggttctaggtgatgtggttgaatctatcgctggtgcaatttacatcgacgccaagcatgacaaaggggtcgtttggagaagcatgaaacggatactggaacctcttgtgacacccgacacccttcagaatgaccctgtgaaagagctccaggaattctgtgatagcaaaggttacactttggagtacacggtaactcgtgacaacggtgtatcctcggtggtcgcagaagtgcggaccgaagggactacgtacaaggccactcggacaggcttctctaagcttgacgccaaaaagttggcagccagttccgtgctccgtgatttgaaggctgcggacacaaagcagtactctgcaaatggtatcagttgcacttaaacttcatagctctatggtatatacttttgtacaaaatcgtcgaatcagtaaggtgtgcaggtgcctaggcacgctaccctacttttactgcatctacgtctacggccacactaaagcagtacgtgcaacaatgttttgttttggtcatgtctcttgagagtgaaagtgtagcgttatttttattttgattcgcatttttgggataggcctggtggtgcaccagggcaccaagcgagtatgtggtccgtagggtttttagattactcttgtttcgagatgattggattaaattcttgtagagctgattggatggttcaatatcttggtttttagaatggtc

SEQ ID NO: 8274 - DNA, 4770 bp, Zea Mays
ggcgaacggcagaaagccaaggccacaaaattgctgcgaatctgggaaagcccaccaccgtccccgcgagagccaccgaggtagtcacgattcgaatcctctggcgtggatgggatcaggaaggaggacgcgaaacgaatcggatcccttccccttgccgagtcaaaaagcgtagcgaagcaagcgcaacgcaatcgtgtggcgattgcagggcgtgtgccgtggaggagagcggcagcgcaaccgtcaccaccaccaaacccctccgcattctctcgtgcacgcagcacgcgtccctaaacctccctctcccttccgctttttgtaatcctcgtcgccatgacccgcgccgccgccgaagccgccggggaggtggtggtggaggaggatctgccgccatcctgcgacccgcagacacaggcgagatggtaccagctggaggcgctggagcgcgcgctggccgggaacacgcttgtgttcctcgagacgggcgccggcaagacgctcattgcggtgttgcttctccgccgcttcgcacaccgcatccgctcctccccgccgccctccttcgccgtcttcctcgtccccaccgtcgtgctcgtgaaccagcaggcgggcgtcatcaaggagcacacggacctccgcgtcgcccagttctacggcgacatgggcgtcgacttctggaacgcggacacctggcgcggcaggatcgacggggccgaggtgctcgtcatgacgccacaaatccttcttgataacctccgccacagcatcttcaggctgcgggacatcccgctcctcatcttcgacgagtgccaccgcgccaccgggaattccccgtacgcctgcattcttaaggagttttatcatccgcaactgaattctaggccatcagattccattccaactatatttgggatgaccgcttctttaattgcaagaaatttggcgcttgacaaatattcagaagaaatatctgagtttgagaatctcatgaatgcgaaggtgtacactgttgccagtgaatcagcactattgcaatacattccaattgcgactacaaagatagttgagtacgatgattatatcgtaacgtctgagttatatagtcatactatccgttgcttgaacaaattggaaacaaagcatttagaaatcctgaaggggaaactgcatggttcacctttggaaaattcagagaaaagaataaaaaaattaaatgcaatgttcttatattgcatatctgatcttggagtatggctggcagcaaaggctgctgagattctacaatcaaataaggaaagctgtgtgtccttttggggcgaagaattggatgaaaaacttgaaggatttgttagaaactatgtcagagatgtatatagtgatctttcagaaattatattgaagatgacaaagaggggcgtacaacgacatattggtgaggacttcgctgaggatctgcaagatgggttattaacatccaaagtttattttcttatcaaatctcttatggggtataggcatatgcaagatttgagatgcattgtttttgtcgaaagagttattacaagcattgtgttggaggcccttctgtcaactattaatcaaatgtctggatggagtgttagatacatggcatcagggcgtaattgtggtttgcaacatcagagtaggaataagcatgtggaaatcgttgattcatttcggagtggaaaggtgcatctgattattgccacacaaattttggaggagggactagatgtgccaagttgtaacttgataatccgttttgatcaggcagcaactgggagatgtcaatgctctttctaagacacagaagtttctgaaaagtggacaaatcatgcgggaagaatctcagagattggaatctacttgttgtcagcctcttctaaacacactatgcaatgaagaattttatggtgttgaatctactggagcaattgtgactttgaactctagtattcaattgattaactttttctgctcaaagctaccatcggatgagtattttaaacctctaccaagattcaaaattgacaaggcattaggtacatgtacgctgcatcttccaatgagcagtcctgtacaaacaatttatgctgaaggaaaagtttctataatcaagaaggttgtttgtctcaaggcctgccgggaattacatgctgttggcgctctcacagattatctcttgcccgaatcgagtgttccatgtgaagatgaacctgatattgttgtggacaaatacaaaaatgggcaacctgactactttccagagcaattagtggataattggtcgtccttttctcgtcgtggcttttattattgctacatggtatcactggaaggttgttctaaaactactccagctgagatagtattagctgtaaagtgcgacatgggatctgacttcatctcgaactcattcaaattgtggggtgtgcaagattatttgagttttaccatgagatatgttggcatcattcatctaaatcaggaacaggtaattgccgcgagaagattccagacaacaattctttctttgcttattagtaatgacctttcggaggtcagcaattatattaagaacttacttgaaatgccagcatctcctggagctgtgtatctacttctgccagtagtttctggaaaaattgattggcgtagcatcaaattctcagcctcggaaatgcctgaagctactaacatggatatgcgacactgctatccttgtaaagatactggtatagtgcagacaaaagatggcactttctgctcgtgcatgcttcgaaattctattgtctgtacaccacataatggcatgttttatgctgtttgtggctttcttgacttgaatgctaattcgcttctacatagaagtgatggcagtttccttagctacaaaacctattttaaggaaaggtacaaccttgatttaagatgtgaagatcaagctctcttggaagctcgtaaacttgtggaagtgcggaactttctccacaagtgtaactataaaaaagaaaaagaaagaagtggtaagagtgtggttgaattgccacccgaactgtgcatagttgtcatgtcaccaatgtccgcaattactttgcgcagcttcacatttattccttctataatgtatcggatccagtgtatgctcctttctatgaatttgaaaatgcaattgggtccaagcatgcagcagtttgatattccagcactaaagattctggaagcacttacaacaaagaattgccaagaggaattttcgcaggaatcattagagacacttggggactcttttctcaagtatattacaacccaacacttttttgtcaaatacaaacatcagcatgaaggcatgctaaccaagatgaagaaaaacgtgatctcgaatgcagctttatgtcagctggcttgcagtaacaatcttgtgggatacattcgaagcgaagctttcaatcctaaaacatggatcgttccaggggttggctatgacatatgtgataggagtctgaggaagctgaaaagtaagagaattgcggattcagttgaggccttaatcggggcgtatctcagtactgctggtgagcaggcagcatatattttcttaaaatctttaggaatggatatagagtttcacaaaatgccaattgagagggtaatcacaatcaaagcagaagagttcattaatgttaaaagtttggagctattgcttgactatagtttcaatgatccttcattgttgatggaagcactgacacatggttcatatcagattgctggcactactccatgttatcagcggctggagtttcttggggatgctgtattagatcatatttttactgattatttctaccatcagtaccctgaatgcactcctgaactgctgacagatctgagatctgcttctgtgaacaatagctgctatgctcatgcagcagtaaaagcaggattacataagcatgttcttcactcgtcatcagcactgcacaaaaggatggccgactacctggacaagtttgagcagtcattttcaggtccatcacatggttgggaagcaggcatcagtctgcccaaggttctaggtgatgtggttgaatctatcgctggtgcaatttacatcgacgccaagcatgacaaaggggtcgtttggagaagcatgaaacggatactggaacctcttgtgacacccgacacccttcagaatgaccctgtgaaagagctccaggaattctgtgatagcaaaggttacactttggagtacacggtaactcgtgacaacggtgtatcctcggtggtcgcagaagtgcggaccgaagggactacgtacaaggccactcggacaggcttctctaagcttgacgccaaaaagttggcagccagttccgtgctccgtgatttgaaggctgcggacacaaagcagtactctgcaaatgatccagcaccaccatctgctggccacctttgccctgtcacccccacgatggctgacgtgcaacatgggagggtgccacgtgaagtcggtcacccatgacgtgtaccgctcggtgttgcacgccattcgcctcatccttcgccacgacccgggccggacagcgacgacgcgttccttgacgtccccatgtgcaaggtcaggaaaacctccgctcccaacacgccgtggcccagcgtcggcaccctctccggtgggataagggaaatgaaagtaacacttgcgtgggatccccgaatgctccttttatttagagg

SEQ ID NO: 8275 - DNA, 1911 bp, Zea Mays
cttcccaccgttctcttgacgactcctcgtctcctcgtcgtagtagttgcagccaccggtcttgagagctgccacctatttgccttgacgcggagaaaagtatacctggggggttggggcttgccgccgcaactatccccggcctcggctcgcctgcactgcacctctctccttggtttcttcccgttacccgtctcggcagatgcctctcttcctgcagcttcaacttcagggtgcctgtccacttagtcagtactgcagcggcgatatctgaaggtccgactaatgtgatgtcaatcacatgctgcttgcctgtcgtcgagtgcgtgtactgcctggcgtgtgcgcggtgggtgtggcagcgctgcctccactccggaggctacgacagtgagacctggggtgttgcatcggctgaagagtttgagcctgtgccgcgcttgtgtcggatcatcctctcggtctatgaggatgaccttgagaacccccaatgggcgcctccaggtggttatggcatggagccacgttgggtggtgcagcggagaatatatgaagacactcatggtcatgcaccaacataccttctgtatgttgatcaccagcattcagatgttgtgcttgctgttcgaggaatgaacatggcgaaggagagtgactatgctgtccttctggataacaagcttgggcaaaggaggtttgacggcggctacgtgcacaatggcttgcttaaggccgccgagtgggtttttgatgctgagtgtgatgttctgaaggaccttctggagaggaatcctggctatacactcacatttgctgggcattctcttggctctggtgtggtgtcaatgctagctttgctggcagtgcacaacagggagctgctcggtggcatagacaggaagaggatacgatgttttgcaatggcaccagcccgatgtatgtcactgaatttggctgtccgttatgcagatgtcatcaatgcagttattcttcaggatgattttttgcctcgcacagacattcctttggaagacatcttcaagtcactattctgggtacctgatgtagtcctctttgtacagcttaccatgccttctatgtggaagatgcctaatagacacatatgtggaagatacccccctattgtgagaacagcagttcctgtggatgggagatttgaacgcattgttctctcttgcaacgcaacatctgatcatgctattatatggatagaaagagaggcgcaaagggcattagatttattgctagagagtgagaaaaccatgcaagcacctgcggttgaaaggatgagcagtgagatcactgttacaagagatcacgacgaagagcagcaggaggctctgcggcgtgcgatcatgctaggggttgctgatgtaaacatgccatcaacatatgccgaggcctccccattactatcagacagcggaaggcgcagggcagtatgggaggagtggatcgcaaggatcttcgagaaggatgaatcagggcaaatggttccacggagatgatcgtggcgacagctcaaggcatgcttgcttgatgggtcggtttcttgatgctgcttccactctgtttcgagcctattttgaaacttcggaacggtaatgtaagatgagtaggggttagggattagatcatgtatttagggctagtttgacaaccctatttttctatgggatttttaatttcctaagggaaaacgaactaattttctataagaaaatgaaaaacccttggaaaattggggttaccaaaccagcccttagtgagtgagatggtgtatagcatgaataattttccctttggttgacaaaaaatgtgggtgcctattgtacttacacatcagtaatttcattgtataagaatataagatattgtagaatcttgggt

SEQ ID NO: 8276 - DNA, 2018 bp, Zea Mays
cttcccaccgttctcttgacgactcctcgtctcctcgtcgtagtagttgcagccaccggtcttgagagctgccacctatttgccttgacgcggagaaaagtatacctggggggttggggcttgccgccgcaactatccccggcctcggctcgcctgcactgcacctctctccttggtttcttcccgttacccgtctcggcagatgcctctcttcctgcagcttcaacttcagggtgcctgtccacttagtcagtactgcagcggcgatatctgaaggtccgactaatgtgatgtcaatcacatgctgcttgcctgtcgtcgagtgcgtgtactgcctggcgtgtgcgcggtgggtgtggcagcgctgcctccactccggaggctacgacagtgagacctggggtgttgcatcggctgaagagtttgagcctgtgccgcgcttgtgtcggatcatcctctcggtctatgaggatgaccttgagaacccccaatgggcgcctccaggtggttatggcatggagccacgttgggtggtgcagcggagaatatatgaagacactcatggtcatgcaccaacataccttctgtatgttgatcaccagcattcagatgttgtgcttgctgttcgaggaatgaacatggcgaaggagagtgactatgctgtccttctggataacaagcttgggcaaaggaggtttgacggcggctacgtgcacaatggcttgcttaaggccgccgagtgggtttttgatgctgagtgtgatgttctgaaggaccttctggagaggaatcctggctatacactcacatttgctgggcattctcttggctctggtgtggtgtcaatgctagctttgctggcagtgcacaacagggagctgctcggtggcatagacaggaagaggatacgatgttttgcaatggcaccagcccgatgtatgtcactgaatttggctgtccgttatgcagatgtcatcaatgcagttattcttcaggatgattttttgcctcgcacagacattcctttggaagacatcttcaagtcactattctgtcctctttgtacagcttaccatgccttctatgtggaagatgcctaatagacacatgtatacctgaaagtgtgatgttgagagatccaaggcgcctctatgcacctggtaggctttaccacattgttgaaagaaaacctttcagatgtggaagatacccccctattgtgagaacagcagttcctgtggatgggagatttgaacgcattgttctctcttgcaacgcaacatctgatcatgctattatatggatagaaagagaggcgcaaagggcattagatttattgctagagagtgagaaaaccatgcaagcacctgcggttgaaaggatgagcagtgagatcactgttacaagagatcacgacgaagagcagcaggaggctctgcggcgtgcgatcatgctaggggttgctgatgtaaacatgccatcaacatatggtacgttcaacgaaaatcctacttctgaaccagccgaggcctccccattactatcagacagcggaaggcgcagggcagtatgggaggagtggatcgcaaggatcttcgagaaggatgaatcagggcaaatggttccacggagatgatcgtggcgacagctcaaggcatgcttgcttgatgggtcggtttcttgatgctgcttccactctgtttcgagcctattttgaaacttcggaacggtaatgtaagatgagtaggggttagggattagatcatgtatttagggctagtttgacaaccctatttttctatgggatttttaatttcctaagggaaaacgaactaattttctataagaaaatgaaaaacccttggaaaattggggttaccaaaccagcccttagtgagtgagatggtgtatagcatgaataattttccctttggttgacaaaaaatgtgggtgcctattgtacttacacatcagtaatttcattgtataagaatataagatattgtagaatcttgggt

SEQ ID NO: 8277 - DNA, 2559 bp, Zea Mays
cgcccctatccactcactcccacgcggccacaccgcctactctgttctcctccccaccactgccgcagcaccgagaaccatggccgccacgtcgcccttctcctcgtacccccctcgcctacactccaaaaccttgaagcctcgtcattctcgcccgctccaccacaaggccgcgcccgccgcctccgccccgcgtccgctactcctctccttccccgcgcctgcacgccactgcggtgctgggctccgcgcttcagcggcgcagaaaaactctgctgattacaagttcgatgaagacgacgacgacgacgaggaggaggagtacgaatacgacggcgaagaggaggagtgggaggaggaggatgatgaggatgcgatgaacgtggaggcgatggaggaggaagcccgtggcgccgctgccgacctcgccaaacgcctcgctcgggagctccacatcgatgatgatgtcagggagaaacgaagaaacatcagggataagacatctgtgtctaaacacattccagataatcttcttccaaaggtggcaattattggtaggccgaatgttggtaaatctgcactcttcaatcgtcttgtcggaggcaatagggctatagttgttgatgaacctggtgtgacaagggaccgcttatatggacgatcttattggggtgatcatgagtttatggttattgatactggtggggtaattactttgtcaaagtctcaagcaggtgtaatggaagaacttgccgtcaccactactgttggtatggatgggattcctctcgccactagagaagctgctattgcaaggatgccatcaatgattgaaaaacaagcagttgcagctgttgatgaagcatccgtcatactattcgttgtggatggtcaggcaggctggtcttgtggcagctgatatagagatttctgattggttacgacgcaactactctgacaagtgtattctacttgctgtcaataagtgtgaatctccacggaaagggcaaatgcaagcattagacttttggtcactcgggttttctcctctgccaatttctgctatcactggcacaggaactggagatctccttgacctggtgtgttcagagttgagaaaatttgaggtattggatgccgttgaagaagagaaaaataaggttcctgctattgccattgtgggaagaccaaatgtgggtaaaagtagcattctaaatgctttggttggagaagatagaactattgtcagcccagttagtgggacaacacgtgatgccattgatactgagtttactacagcagatggggagaagtacaaactcattgatactgctgggatccggcgcaggacagcagttatttctgctggcagcacaaccgaatcactttcggtaaagcgtgcatttcgagcaattcggcgctctgatgtggttgcccttgttattgaagcaatggcctgtgtcacagagcaggattataaaattgcagagaggattgaaaaagaaggaaaggcttgtgtcattgttgtgaacaaatgggatacaatcccaaacaagaaccacgagagtacaacacattatgaacaagatgtaagagaaaagcttcgcatacttgattgggcacctattgtctactgttctgcgacaaatggcaccagtgttgaaaagataatttctgctgctgctttggttgagaaggaaaggtctagaagactcagcacctccattcttaatcaagttattagagaagctatagcattcaaatcaccaccaagaacaagaggtggcaaaagaggtcgtgtctattatacaacacaggctgccgtcggtccaccaacattcgttctatttgtaaatgatgcgaagctcttccctgacacgtaccgccgttacatggaaaagaaactccggtcagacgccggttttccaggcacccctattcggttactgtggcgtagcagaaggcggccagacaaacgaggtaaatctgctgacagtagagcgcagagcccaggaacccctagtgaagtggctctagccgcctaactaaaccgcggcctccagaaatgctcgccacagatcagctcgaccactgggaatggaattctatcgaggcggcggcagttgcttgctccaagaacctggatcggctgaggagctagctgttcatggagtagcgctctcatgttcgggccttggagattttgttgcgtctatatactactagtacggatcagacggagaaagcacattgggccaatgaatgaatagtcacacttcaccgacagagctccaagcacgctttttccacagcgctcttggaacatgtaagattgtaccgaaagaatggcgttagaatgaccatgtaaatgtaatcgtagactgagttctcggatgtgtgggtaaacagcatacttaggtgccgtttggttgttttgtttacgaaatgtaacttaattggtaacggtaatatgttaggagtattttattttgaacgagaaaaaggcgtgcggactgccaattacatattcaagaagatatacagcgccaaaactgtggg

SEQ ID NO: 8278 - DNA, 1479 bp, Zea Mays
ggggttctgctgatgacatgggccaaagttatgtgactgctgggaagcacgaggagactccagaggcttttccacttcctagaggcgtcgcaatagtgcgggcagatgctggatgggctcactgtgttgcaataacagatgaaggtgatgtttatacatggggttggaaagagtgtgttccaactggaagggttattggagaccaatcttcagttggaaccaaggagaaggatgaaagacaaatggcaatggccactgaccaaggtgtgagccccaggtcgcaggtgtctaggacaagcagcggggcagcatctggtccttctgaaagcagaggcactgatgatagcacaaagcgacgaaggttgtcttcagcaaaacatggccctgagagctcgacatccagtgacgaaagtctttccgcacccccttgtgttgtgacatttaatacaggagtgaaaatagtgtctgtagctgctggtggtcgtcatacattagcactgtcagatttaggtcaggtatggggttggggatatggaggagaagggcaactaggtctgggctctagaatccgaactgtttcttctccccatcctgtaccgtgcattgaatcagcactatacagcaaggatcgcccatcagctatgaaagattcaggagctcttcttacatttgggtgggggctgtatggacagtgtggacaagggaatacagatgatgttttaagtccaacgtgtgtatcgtctatcctgggatccaagatgcaagacgttgctgcgggtctgtggcacactgtatgtacatccgtagatggtgatgtttattcctttggaggaaaccagtttgggcagcttggcactggttctgatcaggctgagactgttccaaaattggtagatgctaccagcctagagaataagaatgccagatctgtttcttgtggagctcgccatagtgctattataacagatgaaggcgaggtattctgctggggatggaacaagtacggccagcttggccttggcgactcaatggacaggaacgtgccttgcagtgttcctgtggacgcttaccaccccctaaacgtgtcctgtggctggtggcacaccttggtgctcgcggactcgcctacttgaaacctgacaaagaaattaccttagattgacaattttgttaggaactcgtaggctcgtgcagatgcggtgatgctgcatttcatcgtgtacatacatggcagtgcatgcagatatgtgtattcattctttggcggtgcactcttcaacctgtgcaacgtagacaaagcttgtatcgcaccgcgtatacagttgagtaggattgcctcgacaaattgtgcatttcctccgttgctgctaatgtacaaaattccacaagctagacagggcaaccgatgcgttcctcgttgcagaagacagatctccaaaataattaatgtttgtgtatcgtgatggttgcgattccgat

SEQ ID NO: 8279 - DNA, 1654 bp, Zea Mays
gaaaaagtgaaaacggcgatgttggccgtcccattttaatctgctaactggcgcgtgcacgagctccgccccggccccgtccgaggcggaggaaggggacaggacgcctttggctgacgctgcgaacgcggcggaagagctgtaccgcctccgtgacacctttttcccccgggacccttccgagaaagtcgccgcactccgcgcccgcgccgacgccgccctcgcgctcctcgacgccttcccgtccgaacaaaagaagtctcgacaactgcgtggtgtttatgaatttttgaggggaaaaatactggatgtctttcctgattatcataaggaggctgaagatcatttatccaaagcagtaaagttgaacccatctcttgtagatgcatggttatgtttgggtaactgcatttggaagaagggggatctatctgcagcaaagaattgtttttcattagcactaagcaagggttcagataagaaaatactgtgccagatctccatgcttgaaagaagtatggctcaaggtagtgtagaccaggcgcttttagtagaagagagcattaagcatgcaaaagaagctattatgctggatattagagatggcaattcttggtataatatgggcaatgcttatctcactagcttctttgtgggaggagcctgggatcacactaagcttcatcattcagtgaaagcatatcaaaatgctgagaaggataaaactatgaatttaaatccagacctctactataattgggccacagcagacaaatatttagagaattatgaaagggcccttcgtggttttgaagttgcagctttaaaagatcccgggcttggtgctaatacagaagttcagaagatcatcagtctccttgataagcttgataatgcaatgaagggacaattacgatccaaaagattagcatcatttgtgtcatccttgagtggagtcaaattgaaatcatcgcacaagaaagccaccataagcactctatcagtgggtttgaacaaagccgttgctgttttgggaaaagtaattctgttcataagacatgacaatgttgctccgctgtattatttaatatgtgacttggaacggtcatattttatactgtcagtgtatgggctacataatgatgcaattaaagacggtgatcaagtggtattatttgaaccatactaccgaatccttgatgcatcatgtaaagacaagcactatcagttcaaatcaatacgagtggactttccagaacaaattctagttaacgagagagttccagcacctcatcatgttgcacgggcatcaatccatgcacacaacaaatcttgaccggaaaaccattctgcaagtttttatcagggtactgtgtggcgtcaataccgtgagcaactgccagctgggcatatcatgtgtactcgcgtaaatgtgtagtgacatgttaccctatggctcaaaatgtgtaaggaagacttgggaacatattaaccatctcatttctccaattttcgttagttgttttcatcaaccttagaccatgatgacacctcaagccgtaagaatcacaagtagtttgcgtgcgtccatgcacgtgtgaagtttttacaattccacataataattgattccagacaaaaaaatgtagagctc

SEQ ID NO: 8280 - DNA, 1722 bp, Zea Mays
agacctcgacctcccctcccacatgctcttcagtctttgggacttcacagggcacggcaccaagagaggggagaatctttcgccctgaaaaagagcaaagtttcagcccccccccccccccccccccggttccttcccccaacgaaccagcagagatatatcgcagggaacaaaacacaaggaggccaccagccgtagccgacacatggacacgcagcagagcgtcgtcgccgccgcgatccagtccagaggcatggtggccgccgccgcaaaccaccccgtcgtcgcggcgggagacgttggcagctcgccccgcgccacgtgcggcggcttcgtcgccctcgacgtcggcgcgctgtcgtctctggccggcgacgccggcccaccgggcacgcccaccgcgccgccgcggacacccaaggtgatgcggtcgctgtcgaggaagggcgacaggaagccggccgaccccgacgccaacgccaacgccaacggcaccgccggtacgtcaccactccagacggttgccttgcctctccttggaatcgcgcgctgagtgaaattgatgcaatggttattattattttttctcgtggctctctagtttctttttatcttctttgtttggcttgcgtttatgattcgcttaagctagtgtcagcagaggtgacaattgacagcgatgtattagtattgccgataattccaacgacgtatcaaagagatgcaagggatgatgtatgtattggtacgtgtgctgcaggtggcggcggtagcgagcggcccgcagcttgttccgtgcacgtggcggccggcgaactcggggacgcgccccggcagcgcgcggctggtcgtccacacgccgctggccggcacgcccggaagcaagtcccggcggttcggcaggcggcggcgccgtggctcgatccccggagggtggtcctcctcttccccacgctgtccagcgtgggaacgctgatcctcctctacttcacgctatccatgagcagggcggacaccagtagtggcggcgccagcgacgctcggtgagacgccggcggtcgaaagcgaagggggcatttttgcctcgtctgagaattttcaaacttgcaaagattgacaagaatcaatacaagtagggccaggcatatcgacggtgaagagatcgagccggctggggattttgtggacaagtttgtgatggtagacatacttgtttcttcttgtattatctctctctctctctccttttttttcggattctctcaaaaagggatacatgtcgctttacagcgtaacagataatactgaaatttttactcccctctgatgctaaaaacacaaccaaaccattttcgccacatgtcttaacagggatggccaattgtctttgagctcggatgccgttcattcaacagtggtgtgtgtgtatttgttccctgaacctaacctcaacgaacaaacaaaccatgttgcaaatcacaaggggtgatccaagataatttgggaccctctatgcacactggcattaagaacaagttcaataataaagtcaagcgcttcactattgagtcaaattatagaatagtagtctcctaattgtgcataagaatttttttattgttaatttacccatgttccactttctctttctcctcacatcgttgtgttgttgagtggtggcccaccactatatagactctcgtgtccaacttagggtttgtt

SEQ ID NO: 8281 - DNA, 1312 bp, Zea Mays
gaacggcaccgccgcggtgctcgtggacgccgccccggccggctgctgcacccccgcctcgccggcctcagcgtccatctccgaccaggacgagagcactgcagcacagcagggcggcgggtccgcacacgcgatggcgcgaagacgacggggtttccttccctcctcgagctcgaggtcgaggaccgaccgagaggctcggacggcgcggcgccgtgcgcaggggcagggctcgtcacgggcgcgctggtacttgctcagatggtgccgtgtcagaatacgcgcacaagtcagggggcaatctgcaaaccagacatccgatgctgcgtgagtggacgagagggctccggctcacatctgctgcgcccgccgcagcaagacgcgccggaggaggccaagcaagcagctctagtcttcgtcgcgtgcggctctcgccggtggcctgcagcagcagcagccatgatgatggcgtgtgccctcgccgtcgcccagccagcagcatctctcgcgccgccatccggcaagaggaccctctccggcggccgccccccgcggctgccacctcccaggctttcaggcaagctaataaggagccgcgctgtcgttgccaaggctgcgcaggacgggtcggaatcgtccgggaccgggagcatagtgaaatacgtcacgagctctttcagcaccgcggaagacattttcgccctagctggtataggctttgccgcagtagctgcattatgggcttcggtcaacctcattgagatcatcgacaagctcccggtccttcctcttctctttgaactagtcgggatattggttgcatggcttttcatctacaacaatctcctcttcaagccaaaaaggaaagaatttctagagaacatcaaaagctcaggatctcgaatcctggggcagtaacctttgtaggcgacagttgacagcaaccactctgtcatgggttctctgcaagcatgccgaatgtaattatgcaatgtaactgtatgcgagctatgggtgttaacattttttattgtataagcatcaccaattttctgtacaggttagtgtgattaaaatcgttctcctagtaccaggacttggacttgtacgagcctaataagaacatacgcccgaatccttcctgaactgaatgcttcggctattgaatttcacgttcaagggcgaagggggtattttacatctaaaattatggaaaacaacgcaacaaagacgaaaaaggtgccaaagagattcagtaatcgccagcggttgtgaatgtggagatagttacgattatcttgtgggttagcaa

SEQ ID NO: 8282 - DNA, 14553 bp, Zea Mays
gcacgctaccggccggccaactcttgaaggataactagaaaaagaggcgcgcttcgcggcgccctaccgagccaaaagaatagagtcgagaagggtattataaagaagcaaagcacaaaaggcccttgaaacatgagtgctgaactgaatgcctttagagagctcgtcagataggaggtagacatggctgttaaagagaaatcagcaaacgtatgcagctggcgatcgatggttcagtagtggtagtcctaatcgtcgtcttcttccttccagagctcatcatgagctgttcctaatacaatattgtgtagtgctcagatttcatttttgctgatgatggcaactaaagtggctttgttgcagggagggagaattacatttgatcatctctttggacttctgctaatcgtggttgtcttgctcagcggatctctgctgctgctgctgcttcgagcggctggttatgagactccggcagcatcagcttcatgcccaggcacatgatctgcatcttctgggtttctgttgaccattcattagcaataaatgagagggaaagcattagtttgttttttgttgcccattcattagcaataaatgagagggaaagcattatcagtataaccaacaaatcctaccatagattgttacaatgatattagagcttggttttattatgtcaagatggtttccagttgcttcagaggaagttcaacctgataagacaatagtgataatcttcagaaccttcttcataactctgtagcttttacaaaaataacatgaggtgtaaaacctacccctgctggcccagcgtcgaccaaatatgtgtttcaatcatacaaaactgactgctggtatagacagataatgatgtacaaagatttactcaacataatgttgcttacttattgtattggttccttcattatcatgctaagttgtcaaaacatctattccaagtacaatttctgtttttttcttatagcctttccataaacttaagattgcatggttcagtataatagatgcaaatgtcatgaacttatagcgtaaagaagagacctgcttcttctccatctcatctattcgtccagctctttaactgcatcaatcagctgcactaaccaaaattagtgtgagaaattttgcaatagatagatgaactgaagtgcaaaacaaggatgataagttggcgtgcagatatcagcttgagttctaagttataaccttagcttttgtgcatgattcagagtccaataactacaccagcaaatcagaataccccaaggacagtttatcaatttcagaatctgaggtttctaggaaattagagttgccattcagaattgcagacttgacctcttgggcatacttgctgctatatgcaccataatcttcagttttcagtagtacaagaaaacccaacatcatttcatcgaatgtaatctagcaaactacctataacaaaacatcttctctgtattgcaattttacgcagttccctgagtgtttgagagaaaatatatataaagtaaaaggcttgtgaagatcaatcaaaataaagatgtgcttaccaaacagaatagctgctatcttaagctgcttatcaggatacttggggaagaacttatattcttcaaaaagatttgagtgcatacagttgaaaaattgatacctccctgtcaacaatagcattcaaataatacaattatgaagagttgggtacagacccgtataagcaaaattctactaaagcaaacatatcaacataggttattgcaaaatagaatagagtactaatcaggcagcaactttgaaggcaaaggaactaacagtaagcattgaaatttctagattatcctaagcttttgtcggaaaaatgcgatccttccatagtactgccccaatttggaacggataatatctacaaagcttatcttaaatataatatacaacaaaataccaacaaacaataaaacaagtttcaaagaaatgatcatggctgtcatttagcgctcgggttaatgtaatactcaaaagtgtaataaagagaatagagataatctcaatggtttgtggcctctactaattattgcatgtgctcaacactagttaaaagtggatgaatagaacaatgaacacataattaatctgtgcatcatgctgagtttttatttggatgtgcatttgtgcttaataaaataaatataccattaatagcatctcaatggatccatagaatttaaagtttaacttgaaaataaaaccatgaaaatagggaagagaaaggaatattattcaatacaaataaaattatcattaaaatatctgcaccacagttgatatgatcaaaataaataattagccagtatacaaagtgccacaaagtttgaatttgaattgaagtttgaatttgaaaaagaaatgaaacagaaaataaaaagaaaaagagaagaaaccttacctgggccgactgtacccattctggcccatctcctccttcactcccgccagcccactctattccctcccctgttctttttcctttgtgctagtgacgtgtgggtcccactcgccagcctcttgtgccatgcttgcgttcaatgactggtgggccacccctcgtcaggctcatctcctccctaacccgctcgatgcctgggatttccgagctccgctgaaccctggcgagatccccgtgcgggtgcgtcgccctcgcccacttgccgaccctgaaacgcgggacccacgtggtcaggcgcttcaccccccacggaaagaacgagtccaggatcagtgtccgcgcggagatcgcgcaggtttggccaccggcgtccgtgatccgatctccaaactccccagccgagatcctcgctgcctgcccctatttaaacaccaatcgcggcttggcctagctaccccatcgaaattcctcacgcgcagaacaccgtagccgacccgccaccgccgccgcgggcgattcctgcgattggtcgccagccgagcttctgtcggtggtcagggtgctcctccgtgactcgcggagggtcgccggggcgccagcacgggggtacgaccctcggggacgggcgaattgcgcgtcggggccatcttcctccgccgtttcgcagcagcagcgtgggcaggatcctgtgcgtcgccatagccggtaataagtctatccctgtcacctatatgccttctacattgtgttgctgcgccgaatcggaaaacggggtcgggaatgcggggatttaggtccgccggccatgggtgccgccgcggctcggggagcgccgccgtgggtggccgtcagtggtgcggatgcgccgtggccgttgatctgatgatgggcggccaagattagatggtagctacctcttccgctaggaagaactcggaccgtagatctcgcgatgtacggtagaaatccgatcgcgggttcattaaaccgtgaccgtcagatttagatccgacggcctatatcaccccgtaccccttcgccgcaacattttgcacaatagcccctcgggaatcatggattagaacccgctgtccagctcgggttgcatctgagtctggggagttttcttagataagcccctgtgctttctggaatttgaggcccaatccagtgcagtttgaaattgaataaataatttggaaaatggatttttaatagaaaaataattgctagaacttcaataattcatagaaaattcatatgaactccaaatttgaccattccagttcctaaattttcataatattattttctatccatttgtgtctctgttttaacatgaaagatgatttaaaatttatctagcacttaatcttgtattaagcacataaaacattagaaaattcataacttaaaatatataactccaaattaataattcctgttcctgtgatcttatttaaatatgtagattattaatatgaattttgcatatatgtttggtgtaatgttaattttgcctatcccatgtttgtttgtattgctacgaatagcagtgaggtcacgagaatctgaagatcatcctggtgcctggaatctcaagtcccaggcaagttgtgcccttgatcacttcttttacccactcatgttctgattaatcataatgatctgcataggataattttgatgggacccaataggttaccctagtttgtctatctttataccttgtttaccactgaactttttgggtagtacttgctagtgctttatgtggttttggttatgaagatacattgttcacgattatacttttactatctgtttattatcactgttcatgataagatcattatgttaattggaacatggagcgaccacccgggaaaacagtgctaccacaagggtttatggacgcccttggctgattaattaggaaagctagtggaggactaccttacccgaaaggggcaagggcagtaagggagtggtcagtgtagggaggccctcgggaggattttgctgcgatggcggtcctgcaagagattcctgcattggagcttcctataaactgtagcgggttttctgaagctagtggaactttgtaaaggcctcgtagtgttaccctgcctcgcctcctcggtagaggtgtatgggaagtcgcgatcccttggcagatgggtaacatgacttgtgggtaaagatgcgcaacctctgcagagtgtaaaactggtatactagccgtgctcacggtcatgagcagctcggaccctcacatgattaatttatggaactaaattcaatttgtcatatgcattgcatcgcaggtgatgttgttacttttgttctactacttaattgggtttggtatttacttatacttagtaattgctaataaaattttgaccaactttaaaagcaatgcttagctctaaccatcctctttggtaagccttacacttcacatgaactcccacctttggcgagttcattcacattattccccacaacttgttgagcgatgaacgtatgtgagctcactcttgctgtctcacaccccccccccacaggtcaagaacaggtaccacaggatgaggcgcttggaggatgctgtgacgagttcgtgagaggtctaggccgtcgtctcccagtcaactttgggttgctggaccgttgtctccttataatgtaattatttatttattttgtatagaattcctgttaagtagtaaagatgtgacattcgatcctgtgccatgattcatcatatgtgtgagacttggtcccagcacacctggtgattatgttcgcgcccaggtcttggtgcccctaaaacccgggtgtgacagttaattaaactgttgagcatatatcttcttcagtatttgataagctgatccaaacttatccccatcaacaagtttttgcagcatgttgtgaatgattgtccaaaccaaagggtgagtcagaaaaacaacaaaaatcagtccaaactaattctagctgtagcctaatttgcacctcttatctgtagattctttgaagcgccatatgagcaaacattttgcccaaaaggacacaacaatagcctagcaaactggttgtagcaagaaagggaaaagatttgtacctctaacaatgactcctgtgcgaacacaaggttgatgtgtcccttgtggttcgggttgatgatgagtgattgtcaacgggtagcactctggggtagtcagtggactgaccagagtgtgagattatgcttgtgcaaccatgtcgggcggcttgtggtgtgcaggtgtggagcacagggacggtggtcgacggctgaggtgaaggtcatgcgggctcgtgctgatggaccgggagcggtgaagggcgagtgctgggtcttgactgacggaccggagcagccgggtgactagccgtggtggctgacacctgggacacgcactcacgcgaggacgtggtggagtggaccatgttgccggcgtggtcgaggactggcgggacacgcgtctgatcgtggagatgcgcacgcggtgtggtactcacgatgggtttggtggtttaagcctcaaaaccacccagcgctacggatggcgggttttgctgagtttgggcctcaaaactcggcggcggcggttccggagggaaccggtggcggcacgtggcatgatcgcggagggtgcgtcaaggcgaagcaactctgtgagaaggacgtggccgtcggatcaattatccaggagttggtccatttcgcccccagtggagtggataggctctatgtaaatagggttagtttaggaatagaaataaccctctatggtctataaatagaggggtagggctgattatttcagtatccttggctgccattttgttttagactactcattctagagctcctagttttccctctagtagccacctcttgtgccaagtgatccacagcgattttgtaaccttcgactgtgttcttgatcttcaagtttaatccgagaaagggtcgccggtacggcccacagcgtttgttcacatctccatctcagttttacatacttgctgaaatttggagttgttttggtcacttgttcttcctttccccctctcttgtgtttttggtggaaaatctttgattcttttgagaggatttggtttggggattgtttggtggtgagttgcacttctcggatcactacatacgcccactcggtgcagtttttggtcgtgatttgagaagaactcagtttgaactcgttctagaaaaccccaacaaaaccccaatttctggctgtaattttagatctgcggttgactcacaagtccgattgagctcaaaatttgtggagaccttggaaacatatctgctcaggtgtgtgcaaaatttcatctgaatcggagttcgtttggttcagttttggatccaagaacagaatttcgtgctgctgaaaacagcacttgttcgcgacacggttttggaccgattcggacttttcggtgtccgatttgcgatccgtttgttttgctggtctcatatgagtattaggaacattttgtaatcatgagatcactggttcgctgatgtgttcttggtttgagcgcttgcttcatctcaattgaagcgtggcgttcattttcagtgtttggaggcaaaatttgattggctgccattcaccccccctctggtcgtctcaccggtcctacaattggtatcggagccggttaaggatttcccttccctaatcggttcgaaatccgcgtaggtgacatggaacgttgttctggcaagccaccgttcttcgatgggacgaactacccgtactggaagatccgcatgtcggccttccttcagagtattgggtatcgcgtctgggagatttgcctcgacgctggattcgatgctgagagccctcgtatcactccgattcagttggagtttcatgatgcgaacaacaaggctcaaaatgctttgttctcggttctctcgcttgttgaatttgagtgagttggacatttgcctacggctcacgagatctggtccaccctcgagagattccatgagggcaatgatcatgtaaagaccagactctttgagacgtacaggcgagagtacgagaacttcgttcagttggctggagagacgatcgacacgatgttctctcgattccagtccatcgtgaacaagatgcgtgccaacaaggcacagctaccctatgatgatcatgagagagcactcaagctacttcatgctctggatcggagggtttgggaggtgaaggtctcggcgatcatcgagtcgcccaactacgagaccctcaccgtggacgagctattcagcaagctcaagtccaccgagattgaccaccagactcgggccaagattgagaactctggtgcacccaccatggccctggtctctggaggtggttctgcttctaacccctcacctgttttgtttgctctatcttctttgttgaccattacagatgatcaggtggagagccttggggatgaggagctggcgcttgtggccagtcggttcacacggttccacaacaaccgtatgagccggcggcgtggcgggtcaaaggatggatgctacaactgtggcgaccccgaccactttgtcgccagctgccccaagaagggcaagctagaagctggcccgcgcgaccaccactctggtcggcgcaagggcaagcgcgacacctccagcaagcacaagtcgaagggaggcttcgacaaggaggcgctcaagaggaagtatcgccagaaggcgaaaatcaaggagcgtgccttcctcgcctccctcagcgacctcgaccacgactccgacgagtctgcttctgcctcgagcgatgaggaggtcgagaggcacgttgaggacaagctcaacggtctgtgcttcttcgccggcaccgcgggaggcctctgcaccatggcactcggtgaggacgcggtcggcaccagcaacgacaaggacatcggcgacgacactacttctgaggtactacctttcgccgatgatctcgctgctgaggtagaagagctgacggctgctttggctagtcaggataagttgcttaggcaggctgctcgtgataggagagagtttagatccaagtacgagagcacgcttagggaacttgagtctgctagagcttcagttgtggtgtccgacgagactgaatgtgatgagtgcgctctacacatgtcgaacatcaccactttgcagaccaagtacgccaccttgctagatgagcgcgacgagttgagatctaggtccagcttgttgggtgtgtgtaccgtttgtcctggcttgcagactgagctagcagagagagacgctaggatagccttgcttgagaaggctagctcagtgagtgcccctgcacctgtgcagtgtgcactttgtgagggtttgcagtctgcccttgagtcctgcagacacgacaagacaaggatcgaggaagaaaacacataccttcgatctgtcttgagctgggtgtcgtgcagtgagccccagttgggcatgatggtcagtcagttcaagaggggaactggcggaccggggttaggctttgctgctaaggatgggagtgtcgctcgctttggaaaggttggtgagtgcagtggtttgacaccttcagagaaaccttcatccactcccaagcttatcaaaatcacccctcctaagcctatcacccctgtgagagatggtgtgattgaggagcctagacgtcctgcgaggcctagaggtgctttgcctcttgctgctaggcctcagggagtgagaccacgtggtggtcatgcccgacgaggtgctggtcgtgtgccatatggccaaggaccccgtgacagaggctttggttcttacttccccagcaaccacaatttccttcttgtggggcaaatgccgcagcactggtattcttcacagtttacttaccccagtgctgtgccatttgctcaccccgtgtcttactgttgatgcaggacggaggcctggagaacacgtggctcatggattcaggctgttcgcgccacatgaccggaaactccaaatggttctccagcctcgaccccgtgattggtaaggaatacatcacattcggggataagtcaagaggtaaggttatttctcgtggcaccattcgggtgaacgagagctttgttctcaaggatgttgctttggtttcgaatctgcatttcaatctgctttcagtttcgcaactccttgaggatgactttgaagtgcgttttaaaaacggcttgtctcgggttttggatgcccgtggggatcttgtttgccagatttccccttttggtcgagttttcagtgttgatttttcacattcttctggcccttctcgatgtttgttggcaggatcttcctcttctctttggaagtggcataggaggctaggtcacttgagcttcgatcttttgtgtcgtttgagctcacttgacctcatccaaggattgcccaaattaaattttgagaaagatcttgtctgtcacccttgtcgtcatggcaaaatgattgccgcttcccattccccggtcaccaaggtgctgacctcgcatcctggcgaattgcttcatatggacactgttggtccagccagggtttgctcttttggagggaagtggtatgtgcttgtggttgtcgacgactactctcgctactcttgggtgttctttatggcggcgaaggatgaggcttttactcatgctcgagatttgattcttcggttgcagaatgagtttcctaagaatgccatgagagctatacgcagtgacaatggcacagaattcaaaaatactcaggttgcaaccttttgtgcttctttgggactcgagcatcagttttcctctccgtatgtgccccagcagaatggcattgttgaacgcaagaatcggacccttgttgagatggccaggacaatgcttgatgagcataggactcctaggcgtttttgggccgaagcgatcaacactgcttgccatgtgtccaatcgcatctttcttcgggcttttctgaacaaaacttcttatgagctgcgatttggacggccacccaaggttagctatttcagggtgtttggctgcagatgctttgtgctgaaacagggaaatttggacaaatttgagtctcggtcttctgatggggtttttctgggttatgcattacattctcgtgcttatcgtgttcttaatctggagactaaccgcattatggagacttgtgaggttacattcgatgagactgcaccttgtccatcccctgtctttgagcctgcaggtccagatcagatgggacagaccatctttgtggaggaggagcacgacgacgccgattggggtgatcccgagccgactccactggctgccccagtcgagcctgcttccactattcggctgacgggcctgaccccaattcttccaccacttggggtccgctcgagtcagctcctgctgagactggaggagctgaggctgctgttgagggggaggccacttcctcaagggaggctccacagcacattcagcgtcgtcacccacctcagcagatgattggagagcttcacgagcgagtcactcgctccaggtcacagcagatttctcactttgctcactcagcttttgttgctacttttgagtcccgggatgttggacatgctttatctgatcctaactgggttaatgctatgcatgaggagcttgaaaattttgaaagaaatcaggtttgggttttggtgccacctccttctaactgtcatcccatcggtaccaaatgggttttcaaaaacaaacagagtgaggatgggttgatagtgagaaacaaggcgaggttggttgcccaagggtattgccaaaaagaaggaattgattatgaggagacctttgcccctgttgcccgtttagaggccattaggatccttttagcctttgctgcttcaaagggttttaagctttttcaaatggatgtcaaaagtgcctttttgaatgggtatatagaggaagaggtgtatgtgaggcagccccctggttttgagagttccaagtttcctaaccatgtttttaaacttcaaaaagctttgtatggtttgaaacaagcccctagagcctggtatgagcgtttgaaatcttttctgctttcaaaaggttttaaaatgggctctgtggataaaaccctttttctcctcaagcatggcagtgacacccttttagtccagatttacgtggatgatatcatctttggtggttcttctcatgctcttgtgtctagattttcagatcttatgagcagggaatttgagatgagcatgatgggcgagctgaacttctttcttgggctgcaaatcaagcagacccaagaagggacctttgtgcatcaaggcaagtatacaaaggacgtcctgaagaagtttgacatgggcgagggcaagcctctttcgacgcccatgtccacatccgcaacacttgatatagatgagcacggcgagcccgtggaccagaaggagtacaggagcatgattggctctctcctgtatttgactgcgacgaggccggacatacacttcgcagtgtgtctgtgcgctcgtttccaggcttccccacgcacatctcatagaacggctgtaaagcggattatgaggtacctacgtttcactcctgagtttggtttatggtactcctcatcgtccgtcctgtctttgtgcggctattctgatgctgattttgcgggttgccttttggagcgcaagtctacttctgggacttgtcagtttttggggacttcgttggtttcctggtcttctcgcaaacagtctagcgttgccctgtccaccacagaggctgagtatgttgctgcagctagctgttgctcgcaattggtttggatgatggctaccttacgggattttggcttggattttcatcatgtgcctctgctttgcgatagcacgagtgccataagtgttgccaagaatcctgtgctgcattcgaggaccaatcacattgatgtccgctttcactttcttcgtgatcattatgaaaaaggcgatatcgatttgcgccacgttgatacccaacgacagcttgctgacattttgaccaaaccccttgatcaaaaaacatttgttcatttgcgagggaaattgggtgtttgtttcccttttttatttgagggctcccttttggtcttttcttcttatcttctgctttttcatgtagattttagtctttcattttcttttgtattatttctgcatatcatattattttgagcttcacttgtataactgctagaatgtgattatgctcctagtagtatgttctttgtgttcatgatgatgctatggcatgcttaggctccttttgctcatattgatacaatattgttgagctaagccgttttcataattgtgaacttgactattacttgctcaatttaaaattgttcaccattgagattggcacctagcatgtgtaggatgtgttgaaatcctttttgctattactagtatgctaggtggctatgtctcatgccttgagtcattcacttgtcttgattcattcattctgtgctaaaaagtcaaaatcaagataagtgacaatcagaaagatcgagatggatttgcatttgtcaccacatcattgtatcaacactgcttccttttgcacttttggatgaacttgagcagtgtagtggaagatcgaaaccggtgtttttagcttctgattgcttttctgcataggctacacccggttgaaaagttggacaaaaacaatgcttacaacctctcgcactcacatgcttttcaatgaaatttggaatccgctgcaaaatccgataaatcttgaaaatttcaaatggtatctatttcagatatgtttctagcatgatgagtgaccgctgtctggggtagttcaccttgtttacctgtgattggcacttagttgattttcctgcttactatatgcttagtgctgtctttgtggtgaacacctctttgaaatgcttaaaactgaatcaaaatgcttacacttcacatatcttgtgcatataatcagtttgagcatctgctagcacgtgcatttattgctgcacacttagcacagcaccacttagaacatttttacactctgactggtatactcctgaagctcctgcattttctccatttcctactctctgttccatttctgcattttctcagggggagttctcttgtcgaggggaagtttttctttctacccttgtttgtgcttgatgagttcacttgtcaacaagggggagagtgtgacggaacctcccaagtaattaggcccacctacaattgtccttgtctaacagacatcagacaccctgtaggtgttcctaagttacttgacaagctcggtatctttccttacctcaccaggaacgtttcacccgtcttgcagacattacagatcatcggagataaagaaatgcggaagcgattacataatcttacatttatttccaaagtaagctcaagttaagttattacagaccagttctaaaaagtgagtgcataagagtaataattatacaaaccggggagacacaacttctcccgaaggactaaaaaaacaaaagatctcaagtggaggaccgagtcctcccgcacttcagtcttgatgttctcccttgggaaccaccttagtacagaagcagcaaaagtctgctacttcccctcctaaaaacaacaaagggataaaccctgagtatggaattactcagcaagtcttacccgactaaggaaaagactctcaagggtatgctggatatatgggagtcaaggtaaggctttccaatagtcaaaagactctgttttgcagaaatgcttactaaagtggatccttaaaaatccaattttatttatcaagttaggtagaattacctgcactagagttctttctaccctagttcaatcactggtcctgcactagccaatttcttaaccaaaaacccatcatctttagtggaatgctacgtgtagggcagtgaccaagtcttcataaccgcgaaggtacggcgatccgaatcgattatactc

SEQ ID NO: 8283 - DNA, 1834 bp, Zea Mays
ctggagtgagcaatataggatgagtgaaaggaatagtcgtgcaaatgaagcgccatcttggccatcatcatgggatgtggtggctgacaggaacaacccaccaagaagatggaatggccgtccagcttctagcaatgcaaggagcgtgaccaaatcctatgatcagggaccaaatgcatgtcgatggaccaataatttctcagctagtagagaggaaagttacagaactcgctttcagcacggcgaacccttgcgcagtggtcactacaataatcaatctcgagttgcgcctgctaatcaaaatcggttcaacaactacaatgcttcgagtgagtggcatggctctgtggaagggtatagaggatggcccaagcagcatgttgggccagaaccacatgccaggttgtcacatgaatgcagtagtagttttcaagaaggcgatgtaaggcatactcctagatcagcttatggggaagaatcacatggccaaattagtgttcttggctcatggcaagctccaggaacctactacaattgtggacctcagaatagaactgtttgtcctgagtttcagaacagagggtcttttcaacaaaggtttggttcatatggagctgcagattctggatttggtagggccaatggagacagacaattcaatagtcttgagcgacgagtgccatatggtcgaattggtggtcaaggcagaggaagaacttcctgccaagggagaggagatacaagaggatggcatgaacggtttgtttgccgttggacagaacctcactgtcaggtgcagaatggcggtttggaaattgcatcccacaaactgctagctcctgggcagcaagggacgaagaggaactggtgtaaagcagaatcatcagattcaccgcaacaggacaacacaaaaaggatacttggaagtgtagatcaacctcctggccctgggccagtttgtcatggtggttctggagctccctcccctgaacagcatgcttctagacagggagcagtgaagagaggtgtatgtgaagctgaatcgtcagatttaccaatacaggatgagtcctcagaagtaacactaaaacaaagtgcagataaacctctttgtaccacagaggatggcaattctggagctggttcctgtgaactgcctgttcctgagcagggtggggtggggatagacttgcgtgaagcaggaccaccagatataccatgtcaggttccggatggcagttctgaagcattccttgaactccttgttcccgagcatagggggatggaagccggcttgtgtaaagtagagccatcagatgcaccttatcagggtcaggatggcagtcctggaaccgcttcacatgaacaacctgtccctgagcagcgagggatgggaagagcagactcgtgcgctacagaaccattgtcagtacaccaggacagcacagaaaataaacctgaaaccgtagaacaagatagctagacagtagacacttctgaattttgatatgttacctttctttttctgctctgtatagaaacctgtgcataataagcatgtagggcctgattggttggggtggtccaatcctgcctggctgctttttggagctagggtaagctggcaaggttcaagtagtgcaggctgagttgtttggtttcatttttgagctcgtcctgggtggatgaagaatctgattgatggtcggtttaatgtagggtgaaaacggtcggaaacgatgagtaaacactaaaataattttcgttttcatattttttttctccgaaacgagatcgaaaacggtaactccggaaacgaaaacgactttggtaa

SEQ ID NO: 8284 - DNA, 2413 bp, Zea Mays
atgcccccccaacccttgcactgcctgtatctcgcctgcacgcgtggaggatcagatgtgacagcgtttgacaaagaccaagagggattcagggatgtccccatgccttcgattcagacggctggctctgtcccacatcttcgggatgcaggaggtttctgatccaccagaaacagtaaggaaagcagaaacaaaaaatattacttccattgggaaggatgtgattttcgagcaagatccatgctcttcatatcagttatggggcagtatgaaatttgaagaagatggccatttgctgtctcaggcaaagagggatttgtcacatttggattatagagcacagtctgccgacaccaaatatgttactgaacttgggtcacatgcatgtttgaaggatccattgccaatgggaagagattatcataggcagaagctacaattttctacttcagactgttcttttgagaaggcttctgcattagaagcagcatcaagtagcccagatgcattagggacaatgagaaccaaaatcaaatccagcaccctcagtgcaagtccagattatctttcgtcttatcctactgctgctccttgcatgcggaagtgtccaggagcagttgaacttgatcacggtttgggtcattcagaacattccaacagaagatcagaccaatttactttattttcaagccgtaatggtcgatctgtagaaaaatgcaaagagatggttcaatatgccagagggttccaccatgcagatgagatcaatcatgttccatttcaatggtgctttgaggatgaaggtccttcagtatcaagaggcctgcagtatggcgatgagatcccttctttatctaggaagaagtataacgtggcaccttcacgctcaagtcagtggcactatggtcctcaaaccgcactgtcctcaaggagacccgactatggtgatgagatcccgtcactctctcttcactatggttaccgagataggacccatttgcgttctggtaattggtgccatgatgctgaggcacgtataccgtcaagataccagcaaggtacttctcatggcaatggtcactcaaggaattgtttttccaggattaataccaacgagcaagccaaagttatcacaagcaaacatacctttgcaaaacctaggatgattaacagaaactgtagtgaccaacataggatcaatatgaaaggtaatcgctggagaaattctgaggatttaatggaccaagttcgtgggccgagggcaaataaattgaacaatgcttcagtatcctccactgtgaaagatatcacaagtccattgatccgtagaaatcagtataatagatcagatttttcagttcaatataatcaggccaagttttttatgataaagtcatatagtgaagatgacattcataaaggtatcaaatacaacgtttgggcaagtacaccaaatgggaacaataagctggatgctgcataccatgaagctcaaaatttaatggacagtggggaaaggtgccctgtcttcctattcttctcggttaacaccagtggacagttcgtaggtttggctgaaatgttaggtcctgttgatttcaagaagaccatggatttttgggaagaagataaatggagtggctttttccctataaaatggcatattataaaggatattccaaatcggttgttcaaacatataattcttgaaaacaatgacaacaggattgttacttttagcagggacacacaggagattgggttgccgcaaggtgtgcaaatgttgaaaattttcaaggaacagcctcagggaacatcaattctggatgattttgatttttatgaagaaaaggcgaatgcacgccgcacccaaaagagaggaaattcagagtcgacatatggagctcgattctctgatgactcgaaatctattgaaaatttggaggcaaacatggagagttggagtttgttcgagactttggagtaatgcaaatatagatatctgcacaactgaaataaagatcaagatgggtcagtgaactagttgaaggcactgacgctccttcaaagtgtttatatggttgcaattgaaactgcttataattgttatatagtgtttacgtagaagcacggatgtgctggtaaatacagccccggtgcaattttaacaccagacgtttcctgaaacatgtttactttgatatattatagaattccacagttttgttgttttggtgctctcctacgtgctagagtcaatcttattggcatttcacggttaggaacagaaaacccaagaatagctaggaatatcttgcttcaggacacaacggtagcctgttgtggtaacagatgaggacataaacgcttcagtgcgtgaaaatgctaaagaattctgttcaaaagaatgcca

SEQ ID NO: 8285 - DNA, 1476 bp, Zea Mays
aaaatgtacctgctggctcacagagatggtattaggccgggacaagttcattctgataatcccaagctcctcgatcatagaaatatatggatataaggcgcgatttccatatggccgaaggggaaggtgaatggagctactccaagaactcaaatagctgtccgcgagactaagccaatggtcgagactgctgtcaaacaggtgtacgcagctctcctccccagaaccatggtcgtggccgacctcggatgctctgcagggccgaacacgctgctcttcatctctagcgtcctgagcagcatcgctgctgcggctgctgctgaacggtgcaagccgccgagcggcggcggagacgatgacgaccatcacgtggagcttcagttcgtcctgaacgacctccccggcaacgacttcaaccacctgtttcggtcagtcgaggaggagttcagaagggcagcaggttgtgaaaggggtcctcctcctcctccctactatgtcatggggctaccggagtcctattacaacaggctgtttcctcgtcagagtgtgcatctgttccactcctcctactgcctccactggcgctcccaggaacctgagggactagaggcgtggagaaaaccttgtctaaacgaggacaacatctacatcgcaaggacgacggcaccttcggtggcgaaactgttccaggagcagttccagaaggacttctccctcttcctcaagctgcgccatgaagaactcgtgcatggagggcggatggtccttatatttctcggcaggaagaacgaggatgtgtacagtggcgacctcaaccagctcttcgcactggtcgcaacagcgttgcagtctcttgtttcgaagggcctcgtggagaaggaaaagctagagtctttcaacctgccgatctacgggccgtcggtgggagaagtgaaggatctggtcacgtagagcggtctgttcagcatggatctgatcaaacagttcgagacgaactgggaccctctcgacgactcggagggtggcgacgtcgtcgaggacagtgctcgcagtagcatgaatgtcgccaagttcatcagacccgcgctgaagtcttcaattgtctaccattttggagaagccataattgacgcatggtttgccgagttcaggcgccttgtcgctgagcaccttgagaaggagaagaccaagttcaccaccttcgccatgtgcttgaagaaagaataatatggttaagtatatatagatctatttggatgcgtgtgtgcgcatatggatcgtatatatgtgtattatattgctcacatggtatatgtgtattattattactcatagggtgtagctagctactcgcatgtgtattatatttctagctttagagtgtatatgggacaatagagtatatgcacgtatattcattatacgatcgatcatactaaaccagaatgcatactacgcataatatacaagtaatat

SEQ ID NO: 8286 - DNA, 2311 bp, Zea Mays
aaaatgtacctgctggctcacagagatggtattaggccgggacaagttcattctgataatcccaagctcctcgatcatagaaatatatggatataaggcgcgatttccatatggccgaaggggaaggtgaatggagctactccaagaactgtaggcgtcaagtgatattctatcccttttcttattagaatatgactatattttatgtaacatgcatgtctttcgtattcaacttatcctagctagcttactgcaaatgcatacccatcgagttggtttcattcttctcatggaaagatagatgggaaactatctttatgactagtttgggatcaaggacattggagtggattaaggtggttaaaatttctttcaattcaaaattacacaataagagggttttagcctatctccaagagattctttatttttactctttattttactctgtatttatctttttataaagtttacactttatatataacatctcactccaatagaccatctatttagtttgactagtcagaggctaaatttaactagtgagtgagccaatttaaagaatcggatagcttgacgagttaaatagtatgtctgttgaagagttattttgctattgggtagttaaaatttggcttcacgagccatttggctagtctcttgtacatgtttttttagataatggaaaccaggttctggctttgtcctccacaaaaggagtgtacagccttacatataaactgacatcaaaagaccagcactctcaacatagagtgcaatcttacaccacaaacagatatactaaaacctcaaaacgtctgttcataaaacttcaaccaaaataagaaaacagttgcatagatatgctttcgatccgtcgacacgtctccttgatttgcttttaatctcctctaatttacttgctcccagactaacccttactgatttgattccttgttcttgcatcgacgcatcctatcagcaaatagctgtccgcgagactaagccaatggtcgagactgctgtcaaacaggtgtacgcagctctcctccccagaaccatggtcgtggccgacctcggatgctctgcagggccgaacacgctgctcttcatctctagcgtcctgagcagcatcgctgctgcggctgctgctgaacggtgcaagccgccgagcggcggcggagacgatgacgaccatcacgtggagcttcagttcgtcctgaacgacctccccggcaacgacttcaaccacctgtttcggtcagtcgaggaggagttcagaagggcagcaggttgtgaaaggggtcctcctcctcctccctactatgtcatggggctaccggagtcctattacaacaggctgtttcctcgtcagagtgtgcatctgttccactcctcctactgcctccactggcgctcccaggaacctgagggactagaggcgtggagaaaaccttgtctaaacgaggacaacatctacatcgcaaggacgacggcaccttcggtggcgaaactgttccaggagcagttccagaaggacttctccctcttcctcaagctgcgccatgaagaactcgtgcatggagggcggatggtccttatatttctcggcaggaagaacgaggatgtgtacagtggcgacctcaaccagctcttcgcactggtcgcaacagcgttgcagtctcttgtttcgaagggcctcgtggagaaggaaaagctagagtctttcaacctgccgatctacgggccgtcggtgggagaagtgaaggatctggtcacgtagagcggtctgttcagcatggatctgatcaaacagttcgagacgaactgggaccctctcgacgactcggagggtggcgacgtcgtcgaggacagtgctcgcagtagcatgaatgtcgccaagttcatcagacccgcgctgaagtcttcaattgtctaccattttggagaagccataattgacgcatggtttgccgagttcaggcgccttgtcgctgagcaccttgagaaggagaagaccaagttcaccaccttcgccatgtgcttgaagaaagaataatatggttaagtatatatagatctatttggatgcgtgtgtgcgcatatggatcgtatatatgtgtattatattgctcacatggtatatgtgtattattattactcatagggtgtagctagctactcgcatgtgtattatatttctagctttagagtgtatatgggacaatagagtatatgcacgtatattcattatacgatcgatcatactaaaccagaatgcatactacgcataatatacaagtaatat

SEQ ID NO: 8287 - DNA, 2570 bp, Zea Mays
gggctaaactttagcagggattggaagacctagtccacggtgaccaactgaccatggccagcattcactccactctgctccacgcgagccacgaggtgcgagagtgcgacgcgagagaggcagatatcagtggggcaatataaaataaaacaaaaagaaataaaaactgcatcggcatttattccgttgggcctcgcttccgatgcgccggagctcgcacgcgatgggagcgcaagcgtttcggctgctgctgcttctgctgctcgcggcggcggcggcggaggcgcgcttcgttgtggagaagaacagcctgatggtgacgtcgccgacttcgttgcggggacgacacgacagcgctatagggaacttcggaatcccacagtacggcgggagcatggcgggcgccgtcgtctaccctaaggacaacgccaagcctggcgcgatgcccacgttcctcctcatcgaccgcggtgagtgcttatttgcgaagaaggtttggaatgcacaaaatgctggtgcctctgcagtacttgtagttgatgacaaggatgaaccattgataacaatggatttacctcgtgaagatgacgaggcttcaaagtatatacaaaacataaccattccttctgcattaatagatgaaaaatttggtgaccagttgaagaaggctgttaaagatggggaaatggttaatgttaatcttgattggagggaggctgttccacatccagatgaccgtgttgagtatgagttatggacaaacagcaatgatgaatgcgggcctaaatgtgatatgctgatgaattttcttaaggaatttaaaggagctgcccaactacttgagaaaggtggctatagccaattcacgccccattacattacttggtactgtcctcaagcatttgtgatcagtaaacaatgcaagtctcaatgcataaaccatggaaggtactgtgcacctgatccagagcaagattttagcacaggctacgaaggaaaggatgtggtggtagagaacctcagacagttatgtgtgtttaaagttgcaaacgaaaataagaaaccatgggtctggtgggattatgtgactgattttcacataaggtgtccaatgaaggagaagaagtacaataaaaaatgtgcagaaactgtcatcaaatcactaggtctggatgtgaagaaggtcgataaatgcatgggagacccaaatgctgattctgaccacccgttacttaaaatggaacaagatgctcagattgggaaaggttcaagaggagatgttactatattgcctacacttgttgtgaacaaccggcaatatcgagggaagcttgagaggaaagctgtcctcaaagctatttgtgctggttttgaggaaactacagaaccaaatgtttgcctgagtgatgatatagagacaaatgagtgtctgaatgacaacgggggctgctggcaagacaaatctgctaatgtaacagcctgtagggacaccttccgtggtagagtgtgtgaatgccccactttcaatggcgtacaatttaaaggcgatggctacagcaattgtgaacctgctggaccaggaaaatgcttgataaaccatggaggatgttggcatgaaactcgcaacggaaaaacattctctgcttgccaggaatctggagatgggaaatgcctgtgcccagctggtttccgaggggacggcgttaaaaaatgtgaagacattgatgagtgcaaggagaaaaaagcttgtcagtgtcctgaatgcaactgcaaagatacatggggtggctatgactgcacttgcagtggtgaccttttgtacatcagagagcatgacacctgcataagcaagacagcagttcaggctaaagcagcatgggctgcagtgtggggtatcttgatagttgttgctgttgtggcagcgggaagttatgttgtgtacaaatacagactaaggacatatccagatagtctaatttgcatgaaaaatcacatgtatgatcaactcgatctataatcgaagctatcgtactaccacttaagtacttaatatttgactaatgatgtatccaaaatgtactgatggaatatcttggcgttccaatctccttgagaaaattgacaaaagcacaattgcagacctttattgattgacttgctataaccgtttgtgagttggaaagcgaatgtgttgaccaaagagagcctacggattttggttgaattcgtgcttacttcaatgctagtttatctttgatggccattgaccttttcaccttgggcaatcaaggttattgacatgatcagaagaggattattgtggagaggaagaaatgatgtgatgggaggtcacttcactgccttgtaacttgaaccaaagtgtatcttcctcgtgagcttggtcgacctggcatctctaaccttcagaaccttggatgggtgcatcaagcaaaaatggccatggctgaaaaaaaatcttagtcatccatggacaattttcatgttcaagtccatccatgtgttgaggcctttttctccgcagttgtttctgtagtcgaggatggtcacaa

SEQ ID NO: 8288 - DNA, 3478 bp, Zea Mays
atgtgggtcaatgtagtgctaaagaatgttcccttgtatgtatttagttttctgattattggcattcctggattggaattctctcttttgaatgaacaaaatgttgttatcattcctgaagctattttctcgctgtgtgctggcttttcatcaccagtaattaattcatcggatatattgcaactgtttggtcattgtaaaattcattccaagatgtctcttgaggatgataactgggttcttaaagatgaactaccctactctgtggaagctttgtcagaaatcactctggatacttgtaccaaggttatgtctcataaatgccaccttatacatcttccggggactatccagcaaccaatgctcctagagctcatggaattcatgaaaggatttgtggcttcaaatgagcagtttgagaaagtggacttgaataatcttgttcttgtttgttctcttctctgcaatctgattcattgtgcattgttgtcaaggaccatggaagaaaaatcttcacttttgcaagaaacagtagattatgtcaccaatattttaaaacatattgtgtcatttgttgtgaagaagaatgatgaactttctcatggtcttactaacataagttcagcattggatacaatgggctctgctttctcctcaatcaagagcttactgtcttctccaatatttaatctgtcaagagttgataatggagtttgttctgttgttatcaaaagcattactgaattacttgatgaactcttggtggcaatttctcagctgttttgtcagatctctagtttagtgagcaattttgatgcagagagtactggtaaaatgctaccaacatctagtatcaatttagaggacctaaatcctgttttggactgtaaaagtagtgttgctgatatggatcttgatgtgatggactctagtgaagtagattctgtcacagctagtgcgagtggaagtatgggtagcttcttacgacctttggaatggaagctagatctagtttgcattatttcaacttttttctcagtttcatcacttcatacatgggaaattttgtacagcttggtggataaagaaggtgacgtgaaggttcgccaggccatcttgcttaacctttgcagaaacatctccgcgtcatctaaaactgtatctttagtggtccattttatagttgatatgagggacagaggtgcaagttcattacttggacctgcagagtgcttaactcacatacatgctttattaaaagcgttgatagctatccatggtggacagaatgctgatggaaagcaaccaggacgcgaagtatttttcagtgagaaccaggatatcttatttgacttgttaaatagggctacagacataagttctgtagattggttttctcgcatcaagttcattgattgtgtctcctcctttgtttgcctgttccctgatgttgcccaggatttgatcggatgtttgcttgacatgctgcatgatgctgattaccgtgtcaggttgtatttggctaggcaaatcgtcgtgttattccaaacatgggaagggcacaatgaattatttaatgatgtttgctcaagcattggtgccaagatggtgaagttctcaaatatttctccagttacagctagagaagtcttagctgttggtccacaatctgttctcgtaattgaaactgctctcattacactagctcatttggctgtgcatagcgaggatgttgaagttgagtgtttgttcatgatttctgctgcggctgctatagagccttctcagcgagaattagcttttgcgttatttgattccatttcaaggaggcttggttatgcttcaagaagcaagtatctggaccaagtgatgggcccgattctttttcgatgggttgcttgtgagatgaatctaatttcacttgttgaggtgcaagaaatgtttggttatggatctgctgagccaaacaactttgttgaacattgtagttcatggcttctccctttcctcattctcaggggtgatggtgctgatatgaattggatatcgaagattttatctcaacctttgtcaatcattatcaagagatacttcgttccaatctttggaatgtgcattgctgtcagatgtggcacagggccagagaaggacttagctgaaactgtcttatgtgaatcagttttgcagcttggtgaaatttctgaacttgagcgtgatgatctcattaaaaaacacatggttgcgatcgttgcctttttgctctctgtttcttcatctgctcatgggccacaaattccatatttttccaagaagaatgttgcactttcagtcagaatggttgttgatggatttgtggacacaatggatgataacttggctgatacagttgttagtgataaagttaatatatttcgtgctgacagagtttttaagttcctgttgtcgatacatcagcaagttgcagatgccagccattccaggcacatgggtcatcgtctttgtgcaattgaggttttaatagatgtacttgggcacagagtggttcttgagagcacttgcttctatattatttctatagtggggaactatattcagcaaaaaccactgcaaggccagtgctgtaatattttgtctaaattgttggctgcttttgatggaaacacctctgctgaaaccctgcaagtgcttggcagacagcttcaggtagtagttccaaaattaattttttcctgcctaattaatgagaaagaagaaagaagtggtactgaagattcatcaagagttctttctttactccatcaattgacagtggagattgatcctctgctttatgattacataagagagttagaaccacttcctgatcttgattgcttgaaagatgtacaggagtttcatgcttcactttctgcctcacattcttcaaggaatcagttcttaaagtttgttaataaggctccttatttaccaccagaactatttttgttgagtcttcgtgcgtatcacaaaaagttatttttgggagaaatcattcgtagaagtgacctatctgcggctgatacaaacatggttagctgctggcatagtgacccagatgtcatttctgctgtatgggctcttgttgacatttgtagctcatcatctgtagcaaatgaagcttcttgggtgcttgctgattttatctctagggctggtatatctgatgcacatcaagtaatattccgtctgccaactaccaccgaaaattattctttacaactacatactggttctgcttccaaggaggataaattatccacaaactatggtatttctgatgatgttctggttgggcttttgaaactcttgaagacttatttatctgatgaatctgttgaaataatagatgctgcttcacaaacactgaggattggagagaagaggcttgaatcaccctcccaggtgtcggtgacggtggctcgacgacgtcggcgcacag

SEQ ID NO: 8289 - DNA, 6418 bp, Zea Mays
gtgagccccccggccgttggcgccttgcgcgcgcgtcctcgccaggtgccgcgcgccccgtgcatgccgcgggcggccagcacgtggctcgtaatggacccgcccatgacgaatggaattgggaggacgcggccatgaatccacccatggtttgtgttgataaatcgtgcatgcaggttgccatcgcgtgcaccagagagtcagagtgcggagggacctcgtcgcaaacctcacttgcccggcccaaccgtacgtgacgctcctcctctataaaaggagacgcgtgcgctgcagtgtgcacagaacagcccgtcgcgcgccgctgcgttgagccaaggcgcaatggcaacctccacctcagttcccgtcctcctgctcctcgccgccgccgccggcctcctcctgctccccggctcgctggcgtggcagagcagcaactgtgcaccgggcgcgcccggcagtggctcgccgacgtggccttcacccggctccggctccggcggcggccacagcaagccgcccaagcaccaccatggcaagccgcccaagtgcccgccgtgcaaccctccgtacgtgcctccgacgcctcggccgtcaccgccgtacgtgccaccgtatgtcccgccgacgcctcggccgtcaccgccctacgtgccaccatacgtccccgtcccgccgacgcctcggccctcaccgccgtacgtgccaccatacgtccccgtccccccgacgcctcggccctcaccgccctacgtgccaccatacgtccccgtcccgccgacgcctcggccgtcaccgccgtacgtacccccgacgccacggccgccgactccgccctacgttccaccgacgccgccctacgtcccaccgacgcctcggccatcaccaccaccgtacgtgccaccctacgtccccccgacgcctcggccatcaccaccctacgtgccaccgtacgttccgccgacgccgccggcggtgcggacgtgcccgatcgacacgctgaagctgaacgcgtgcgtggacgtgctgagcgggctgatccacctggtgatcgggcaggaggccaggtccaagtgctgcccgctggtgcagggggtggcggacctggacgcggcgctgtgcctctgcaccaccatccgcgcgcgcctgctcaacatcaacatctacctccccatcgcgctcaacctgctcatcacctgcggcaagcacgcgccgtcgggcttccagtgcccgccgctctacgactgatgaacaccaccaccagccaacacttctatacgcgccgccatgcatgcatgatgtgatggcatcctgtgcaagctagcgctagctagtagtagcatgtctaccatttgctccgtgatttctctagttcttgctctcgcgagtatgcgtacgtaatgcgttgcttctcgtcaggactcgggaacttttccaactccgatgctaagcgtgtagcttgcttaatcagtcgatgtaccatgttaatcaagtgctagccctttctctgctctgtcgtcgaagttcttcggtcttcacttcttgatctgcagatgatatatgaaaacgttatacgaaatggaatataatattctatcttgttgacaacgactgactctggcactgcgaagtgttgcatgcagaacttttatatgaataccaaagttttttttttgcctatgtttttggcagtgtaatatggaggcatgtgttctaatatttgcagggaagcacctctttgttgacgtacgattctgatgtgatgtagaactaaggaacattttttttggacatttcgattgttttgtcggtgtactcttaactattttgttttccgtatgtggttgttagacagtttacaggttcctaggaggtgcaggtgcttaaatggaggtgcttaaacggctaaaactaaagggatgattcaagtaacggattaacggtgacaaagcagaaggaaaaaatgacagctctagtctaacccacttattcgatgcaatcacgttcagcagcttctgttgcttctacttcttgattcagatatattataagttagatcataacaatgattattggtcagacaattacagttttaatgcccccctctatcgatggtattcaatctcgattttcaaatgatgagcatgaagattaaggattgtctagttctaacttctaagtattagtagtgttcgagggatacttggactagtgatagaatcttagttttatttctttagccgtactataaggggtatgaatggaaagcttgacctatagttgagtatatatagtagttccctctatcttcactagatttcgtctagtgcagcaccattgagtccgttgtgcaccagacatcacaacatcggacagaagtcgtcatagcggcagctgcagcctccactcatcggacgtgtacagtagtgtatcgtacatagcctccatcaaattggtatgaagagatgtccacccaagctgtcccgttccatagacgttttctcgaggaacaattttcctagtatggcaattggcaaaattagctctgcaccaaaagtggcatatgaatgggcctacaacttgggctttaggagttgtctgggtagacgggctaaaaatgtctgttcgcaacgcccgcgcacacagagcaggcaagcaagggcgtctcagtcagagccccaccaggctgcccactcggcccagcagacaaacaggcccaccaggctggccgactaagaattcacaccacgtccttggtccggtggtaaccgcagacccgtacctcattccggctcccttctcccgtacgaattcaaggcgcacgcggacgcacggcaatacggcacggcgctcagatctcaacggctgccgttgccggacagcgagcaccctcgaccgtcgtgtcacctgacaacgcagccgcagcagcttccttcccctgcaaggaagaacgagaatcgaatgcctcgcactgacgtggcagtccggaccaaccaatcatacagcgcccccgaaaaacccacgccctcccaaagaccgcaaccgcaaaaggcttgcacagcacgctcctcctcgattcccgcctgccgcgcacgcgccgccgtcgcactgacatcaaggacccacgtgccggctcgcagcgcagacggcagaattcttgtgcattctatggccgactgacatctgggccagcgcgtcggtttcttgggctccggcgccgcgggagtgccgcccaccaaccccacccgcgctccacgacgccaaatccgcgcgggaaacgcctccgcgcccgcgcgccaaacccaatccaaacccaaacattttcttctccagcgagcacccaaaaaaaataaatagatcctccagctccagctccgcttcattactcctcgcctcttccgcgcccaaacactaccgcctccctcccacccctagtccccctacccccccatccaatcctctgctcgccttgtctcgacccggcagcggcggcggcttgggcgcgcacacacaccaggtgttcgattggagtcctcgccgaagcggaagatgtacgtggtcaagagggacggccgccaggagacggtgcacttcgacaagatcacggcgcgcctcaagaagctcagctacggcctcagccaggaccactgcgacccggtgctcgtcgcgcagaaggtctgtgcgggggtctacaagggcgtcaccaccagccagctcgacgagctcgccgccgagaccgccgcggccatgaccgcgtcccaccccgactacgcctcgctggcggcgaggattgctgtgtcgaacctgcacaagaacacaaagaagtccttctcggagacgattaaggacatgtacatgcacttcaacaagagatccgggctgatggcccctcttgtcgctgaagatgtttatgaaatcatcatgaagaatgctgctcgcttggacagtgagataatttatgatagggatttcgactacgactactttggcttcaaaactctggagaggtcttacctgttgaagcttgatggtaaggtcgttgaaaggccgcagcacatgttaatgagggtttcactggggatacacaaggaagacatcgagtctgccatcaggacgtaccatctgatgtcccagcgctggtttactcatgcttcaccgacgcttttcaatgctggcacgccgaggccccaattaagcagctgttttcttatatgcatgaaagatgacagcattgagggaatctatgaaaccctgaaagagtgtgctgtaataagcaaatctgctggaggaattggtgtctcagttcataatatccgtgctactgggagttatattcgaggaacaaatggatcatcaaatggaattgttcctatgttacgtgtctttaatgatactgctcgctatgttgatcagggtggtggcaaaagaaagggtgcatttgctgtatacttggagccttggcatgctgatatttttgagttccttgatctgagaaagaaccatgggaaggaggaaaatcgtgcaagggatcttttctatgcgctatgggttcctgatttattcatgcaaagagtccagaataatggagaatggtcattattttgccctaatgaagctccagggttggctgattcctggggtgaggagtttgataatttgtacaagaaatatgagagccaaggcaaggcaaagaaagttgttccggcacagaccctttggtttgacattttgaaggcacagatagagactggtacaccatatatgctttataaggaaaagtaaccagcagaatctgggcacaattaaatcgtcaaacctgtgcactgaaataattgagtttacaagccctactgagaccgctgtctgcaacctagcatctattgctttacctcgttttgttcgggaaaaggatgttccgttggagtcccatccatctaagcttgtgggtagcagtgattcaaaaaatagatattttgattttgagaagctagctgaggttacctcaactgttacttacaatcttaacaaaattatcgatattaattactatcctgttgagacagcaaagaggtcaaacatgcgtcacaggccaattggcataggtgttcaaggcctggcagatactttcatattactgggcatgccgtttgattcaccagaggctcaacagttgaataaggatatattcgaaactatctactatcatgctctgaaagcttctgctgaacttgctgctaaagaaggtccctatgaaacatatgaagggagccctgtcagcaagggcattctccaacctgacatgtgggatgtagtgccatctaacagatggaactggccatctctaagggagaccatttcaaaagttgggataagaaattctcttcttgttgctccaatgcccactgcttccactagtcagattcttggcaacaatgagtgttttgaaccctacacgtctaatatatacagtcgacgtgttctaagtggggaatttgttgtggtcaacaagcatcttcttcatgatctgactgaaatgggcatttggactcctactttgaaaaaccagataatatacgacgacggttctgtccagaagatagcagaaatcccggacgatcttaaagcaatctacaaaactgtttgggagatcaagcagaaaactttagttgacatggcggtcgaccgcggatgctacatcgaccaaagccagagcctcaatgtccacatggagcaagcaaactttgggaagctgacgtctcttcacttccatgcttggtccaagggcctgaaaactggaatgtactatctacgcacacgagctgctgctgatgcgatcaagttcacagtggataccacgcttctgaaggagaatgggaacggggttagcgatggaaagcccgcggaggaagacgtagacgctaaaatggcacagatggtctgttctttgaacaaccgggaagagtgcctggcgtgtggaagctagattggagattccatctggacactgcacttcgtgatctgtgaacacaacattacatacagccggctgatgattggagctcagtaaccagaacgaagtctgtgatgtaggtcgagttggaagttcccataatgggaatagcttgtacctgaatactgctacggcgctacctctggtctgtattgctctaaggtgtttgtgctgctgccaatgtactgtaaatatctaccagcgtcaatgttgtcgatgtgctctaagatacagtatgttttaaccgtgctacactctttgcattggatcgaacatgatgtaatgcatcgtcttccataatgatacgagtgctggaaaacagaacaatgtaaactaattagtctgtatcctcgatcgcgatatgcacttggtcctttcggcagtgtctgtctgcacagtatttcctca

SEQ ID NO: 8290 - DNA, 2036 bp, Zea Mays
ctccagcctcccggaccggaagctccacgtggcgcgacagctcgtctctgtcgtctatggcggcggcagaggtgtactcgccgaccgcggcggcgcagcagcagagggagaaggcgacgtcgcaggtgtggcgggcggtggtggggtggatcggcttccttgttcaggttctgcttcagatcctccggggcacgccgtcctgcgcccaactctttccttcggcggcgtccggtacccgctcctcttcgggcctgcggcctcgaactcgtcgccggaggtggcctccgtccgtccagctctgaggcgggcccatggaaatcgttgccatatcagatcagcttcgccacggaccccatctgcgacccccggtgacgcgctccgcccacagctctgaggcgggcccatggaaatcgttgccatatcagatcagcttcgccacggaccccatctgcgacccccggtgacgcgctccgcccaccgcccaccgccgcccgggaatggctcgagcgctgctcctgctgcgagtagctgtagctcgctaccctcctctcccggcctcacccgcgctcctccagccgcagccgctgctgcgctgccacgcgccctcccagtacaaatcccagctccgcttcctctcctccctctcctcgtccgtgcccaacagctcagatgctcccagcgacggcgggggcgaccgcgacggggaagaagatggcgcgaagagtggcagccacgtcgattacttggggatgagcgacgaggagctcatggagcagtgcgatatgggcacgttcaaggcgtccggccccggcggccagcactgcaacaagcgcgagtccgccgtccggctgaaacaccttcccatcggcatcatcgcccaggctgtggaggatcgatcacaacataagaaccgagcgtctgctttatctcggcttcgaaccctgattgctcttaaagttaggaggccgataaacctggaagactacactccacctgttgagcttcttcagatattacccctgaagtccagcgttagaggaaatgatgttggcccccaaatcggtccaaataactcaaaattttctccaggaatgcaagcattattagacctgctgtttgctgttgaagattctgtatcagatgcagcaaagattttaggcctaagcaccggtgctttgtcaagattgattctgtcagatgattctctccgaacggccgcgaatgaactgcgagcttcgaagggcaccggtgctgtactacgtgctcctgacgttgcaggacagcgtgcacaaggtcttctacgccgtcgtcgaggccgctgcagttcgcgcagacaacagccatcttggaggcgttgcaagcacatatcattaactgggatattcatatgtttgatgaggagatcggcaataccactcagggtggcaagtttgaccatgcagatcgtttgttccaaagcattgagaacgcttacataaatagcttatcaaatacaagtgacgtcaaagagcttattccagaattcttttacatgcccgagtttcttgaaaattcaaattcatatcatcttggtgtcaagcaggatggggaacctataggcgatgttgctctccctccatgggcaaaggatgataactcaagtgacgagtttgacaaagattctattgagagtgatgatagatctcttgaagagctaagctgggagacactagaacttcttgtggtacctcatatattcagcatcagacgaagcacatggagatcaaccttcacttcgtccgtgagcgtgtcgccgacggtgatgttcgcattctcagcatcccgaccacttcgtagtttgccgacattttcaccaaggggctgccgtcgagtgtattcactgagtttcgatctagtctcaacatctgtacaggatagaattgagactgtaggaggtgttagactcctgctaagggttaggcctgggccttcttgtatttacctgattacccctatgtaatgggcttggcccacctaactgccatatataaattaat

SEQ ID NO: 8291 - DNA, 2069 bp, Zea Mays
atggcggcggcagaggtgtactcgccgaccgcggcggcgcagcagcagagggagaaggcgacgtcgcaggtgtggcgggcggtggtggggtggatcggcttccttgttcaggttctgcttcagatcctccggggcacgccgtcctgcgcccaactctttccttcggcggcgtccggtacccgctcctcttcgggcctgcggcctcgaactcgtcgccggaggtggcctccgtccgtccagctctgaggcgggcccatggaaatcgttgccatatcagatcagcttcgccacggaccccatctgcgacccccggtgacgcgctccgcccacagctctgaggcgggcccatggaaatcgttgccatatcagatcagcttcgccacggaccccatctgcgacccccggtgacgcgctccgcccaccgcccaccgccgcccgggaatggctcgagcgctgctcctgctgcgagtagctgtagctcgctaccctcctctcccggcctcacccgcgctcctccagccgcagccgctgctgcgctgccacgcgccctcccagtacaaatcccagctccgcttcctctcctccctctcctcgtccgtgcccaacagctcagatgctcccagcgacggcgggggcgaccgcgacggggaagaagatggcgcgaagagtggcagccacgtcgattacttggggatgagcgacgaggagctcatggagcagtgcgatatgggcacgttcaaggcgtccggccccggcggccagcactgcaacaagcgcgagtccgccgtccggctgaaacaccttcccatcggcatcatcgcccaggctgtggaggatcgatcacaacataagaaccgagcgtctgctttatctcggcttcgaaccctgattgctcttaaagttaggaggccgataaacctggaagactacactccacctgttgagcttcttcagatattacccctgaagtccagcgttagaggaaatgatgttggcccccaaatcggtccaaataactcaaaattttctccaggaatgcaagcattattagacctgctgtttgctgttgaagattctgtatcagatgcagcaaagattttaggcctaagcaccggtgctttgtcaagattgattctgtcagatgattctctccgaacggccgcgaatgaactgcgagcttcgaagtgtttctttgattgcagggcaccggtgctgtactacgtgctcctgacgttgcaggacagcgtgcacaaggtcttctacgccgtcgtcgaggccgctgcagttcgcgcagacaacagccatcttggagggttggcgaggtatccggtctctgcaactcttccacagattggatccagattattccttacatggggtgtcttctggagttttcctgagatggccccattcacctctaccaacaggtatctaattccaatattgtatgtctcggttgaacttgtgaaggcgttgcaagcacatatcattaactgggatattcatatgtttgatgaggagatcggcaataccactcagggtggcaagtttgaccatgcagatcgtttgttccaaagcattgagaacgcttacataaatagcttatcaaatacaagatggggaacctataggcgatgttgctctccctccatgggcaaaggatgataactcaagtgacgagtttgacaaagattctattgagagtgatgatagatctcttgaagagctaagctgggagacactagaacttcttgtggtacctcatatattcagcatcagacgaagcacatggagatcaaccttcacttcgtccgtgagcgtgtcgccgacggtgatgttcgcattctcagcatcccgaccacttcgtagtttgccgacattttcaccaaggggctgccgtcgagtgtattcactgagtttcgatctagtctcaacatctgtacaggatagaattgagactgtaggaggtgttagactcctgctaagggttaggcctgggccttcttgtatttacctgattacccctatgtaatgggcttggcccacctaactgccatatataaattaat

SEQ ID NO: 8292 - DNA, 2066 bp, Zea Mays
ggggatgtgaatattgaggaggaacccataaacaaagaagatcatatattgaatgtgtcacatacagaaggtcatgaaaaccttttgatttcgccaggagacaaacatggtacatcccttcgtgaggatgtgaatattgaggaggaacccacaatcaaagaagatcatatattgaatgtgtcacatatagacggtcataaaaaccttttgatttcgccaggagacaaatatgctacattccctcatgaggatgtgaatattgtggaggaacccacaatcataaaacctttttacagtttatggctgaaaatgatatgtctactggtgttatcttatatgatgacgtaaaggattgtatgataacagttattgtaagagaaatgagtgtagactttctaaattacatttttaataaattcgagagaggaaagtgttggagtgatggctgagaattaagtgatatggaaatggaagttgaagcaagaagaaagtttgtcattaccaaggaggctgacgcagatcttactgttgaagatgacacacaaaatatatttgttcatcttggttttctggtaccgtattataaaaaaggaaactcaatccagcattttttgattccttcggaaaagatatattatacttttctgatcttaagaatttttcaataaaatggaaaaggtttgtcaaactcattagatcagcgttagctttgaaagcgcctttggtcagattaaccttaatctgtgagatgtctacaattatcgtattgcagctttaattatctaattctgcatattattaagtattataaaaaaatgtcaagattgacgtgcttcagtaaaatgggttatgccacacagacaggtctaccactacaggaacaatatctctttaaggtatttttatgataagtggtgttgtaacttatgacacgtaatgtggtatttaagaaacttcgttaagcatgtcctgacctacgtaaaagagtagaggaaatgctgaaggaagtttcttcaataccacattacgtgccataagttacaacaccacttatcataggaatacattaaagagatattgttcctgtagtggtagacctgtccgtgtggcataacccattttattgaagcacgccaatattgacattttttgataacacttgatgatatgcagaattagataatttaagctgcaatgcgataactgtggacatctcacagattaaggtcgatctgatcaaagacgcttttaaagctaacactgatctaatgagtttgacaaacattttccattttattagaaatttcttaaaatcatgaaagtataagatattttttctcaaggaataaaaaaatgctagaattgagttttctttcttataatacggtaccaggagaccaagataaacaaataaattttgtgtgccctcttcaacagtaagatctgcgtcagcctacttggtaatgacaaactttcttcctgcctcaatttctatttccatatcacttaattcccagccatcactccagcactttctttccttaaatttattaaaaatgtaatttagaaagtttagacccatttctcttccagtaactgttgtcatacaatcctctacgccatcatataagataacaccagtagacataccattttcagtcataaactgcaaaaagtttttatgactgcaaatgcaaagtaaacacatatcactaacttaaacaaatagaaattaacatgcttattaaaacgacgttaaaacgacgtttaaacgtcgtttaaactataaaacgctgacagaaagtgaaacgacaacgttttacgattcgtcgtaaaacgtcgtttaaacgtcgcgttttgacgtttaaacgcgttatagagtgaaacaccgcgtttcgggcgtttaatgcgtctgctgctagaaattggcccaacctaattagaaactcccgcccagcccgcccaggccgccgctacaggccgcactatcaccagcccaattaggaactcgcgttctcaccagccgccgcactccagggcgcgctccagcctccaggccgccgctg

SEQ ID NO: 8293 - DNA, 2435 bp, Zea Mays
attcgcttcagcctcacgcctacccacgacgctgggagacccgaacgagcgaggacgagcgcccgcaacaccgatgcgccgccgccccctggccctagcgcctcgcgccgtcgctccatggccggtggccctagcgccccgcgccgccgctctgtggccgatggccctagccctaggcgccgccgctccgtgggccgtggccctatcgatcatgccggagcaccgcccaccggctagctggcagcccgcagccgccacggcaccacgcgtccgactcccacgtggccatgcctcgtcctccgtgctcgcctagccgctagcagcctagcgcgacagtcggcaggagacaaacatgctacataccctcataagaatatgaatattgaggaggaacccacaaacaaagaagatcatatattgaatgtgtcacatacagaaggtcatgaaaaccttttgatttcgccaggagacaaacatggtacatcccttcgtgaggatgtgaatattgaggaggaacccacaatcaaagaagatcatatattgaatgtgtcacatatagacggtcataaaaaccttttgatttcgccaggagacaaatatgctacattccctcatgaggatgtgaatattgtggaggaacccacaatcataaaacctttttacagtttatggctgaaaatgatatgtctactggtgttatcttatatgatgacgtaaaggattgtatgataacagttattgtaagagaaatgagtgtagactttctaaattacatttttaataaattcgagagaggaaagtgttggagtgatggctgagaattaagtgatatggaaatggaagttgaagcaagaagaaagtttgtcattaccaaggaggctgacgcagatcttactgttgaagatgacacacaaaatatatttgttcatcttggttttctggtaccgtattataaaaaaggaaactcaatccagcattttttgattccttcggaaaagatatattatacttttctgatcttaagaatttttcaataaaatggaaaaggtttgtcaaactcattagatcagcgttagctttgaaagcgcctttggtcagattaaccttaatctgtgagatgtctacaattatcgtattgcagctttaattatctaattctgcatattattaagtattataaaaaaatgtcaagattgacgtgcttcagtaaaatgggttatgccacacagacaggtctaccactacaggaacaatatctctttaaggtatttttatgataagtggtgttgtaacttatgacacgtaatgtggtatttaagaaacttcgttaagcatgtcctgacctacgtaaaagagtagaggaaatgctgaaggaagtttcttcaataccacattacgtgccataagttacaacaccacttatcataggaatacattaaagagatattgttcctgtagtggtagacctgtccgtgtggcataacccattttattgaagcacgccaatattgacattttttgataacacttgatgatatgcagaattagataatttaagctgcaatgcgataactgtggacatctcacagattaaggtcgatctgatcaaagacgcttttaaagctaacactgatctaatgagtttgacaaacattttccattttattagaaatttcttaaaatcatgaaagtataagatattttttctcaaggaataaaaaaatgctagaattgagttttctttcttataatacggtaccaggagaccaagataaacaaataaattttgtgtgccctcttcaacagtaagatctgcgtcagcctacttggtaatgacaaactttcttcctgcctcaatttctatttccatatcacttaattcccagccatcactccagcactttctttccttaaatttattaaaaatgtaatttagaaagtttagacccatttctcttccagtaactgttgtcatacaatcctctacgccatcatataagataacaccagtagacataccattttcagtcataaactgcaaaaagtttttatgactgcaaatgcaaagtaaacacatatcactaacttaaacaaatagaaattaacatgcttattaaaacgacgttaaaacgacgtttaaacgtcgtttaaactataaaacgctgacagaaagtgaaacgacaacgttttacgattcgtcgtaaaacgtcgtttaaacgtcgcgttttgacgtttaaacgcgttatagagtgaaacaccgcgtttcgggcgtttaatgcgtctgctgctagaaattggcccaacctaattagaaactcccgcccagcccgcccaggccgccgctacaggccgcactatcaccagcccaattaggaactcgcgttctcaccagccgccgcactccagggcgcgctccagcctccaggccgccgctg

SEQ ID NO: 8294 - DNA, 2594 bp, Zea Mays
attcgcttcagcctcacgcctacccacgacgctgggagacccgaacgagcgaggacgagcgcccgcaacaccgatgcgccgccgccccctggccctagcgcctcgcgccgtcgctccatggccggtggccctagcgccccgcgccgccgctctgtggccgatggccctagccctaggcgccgccgctccgtgggccgtggccctatcgatcatgccggagcaccgcccaccggctagctggcagcccgcagccgccacggcaccacgcgtccgactcccacgtggccatgcctcgtcctccgtgctcgcctagccgctagcagcctagcgcgacagtcggcagtcatgaaaaacttttgatttcgccaggagacaaacatgctacataccctcataagaatatgaatattgaggaggaacccacaaacaaagaagatcatatattgaatgtgtcacatacagaagggagacaaacatggtacatcccttcgtgaggatgtgaatattgaggaggaacccacaatcaaagaagatcatatattgaatgtgtcacatatagacggtcataaaaaccttttgatttcgccaggagacaaatatgctacattccctcatgaggatgtgaatattgtggaggaacccacaagtaaataagatcgtatattgaatgtgtcacacacaaaggggtacatttatcagctattccaaattttaaataataaaataaatcaatttctacttttattacctgaaattaatttctatttgtttaagttagtgatatgtgtttaatttgcatttgcagtcataaaacctttttacagtttatggctgaaaatgatatgtctactggtgttatcttatatgatgacgtaaaggattgtatgataacagttattgtaagagaaatgagtgtagactttctaaattacatttttaataaattcgagagaggaaagtgttggagtgatggctgagaattaagtgatatggaaatggaagttgaagcaagaagaaagtttgtcattaccaaggaggctgacgcagatcttactgttgaagatgacacacaaaatatatttgttcatcttggttttctggtaccgtattataaaaaaggaaactcaatccagcattttttgattccttcggaaaagatatattatacttttctgatcttaagaatttttcaataaaatggaaaaggtttgtcaaactcattagatcagcgttagctttgaaagcgcctttggtcagattaaccttaatctgtgagatgtctacaattatcgtattgcagctttaattatctaattctgcatattattaagtattataaaaaaatgtcaagattgacgtgcttcagtaaaatgggttatgccacacagacaggtctaccactacaggaacaatatctctttaaggtatttttatgataagtggtgttgtaacttatgacacgtaatgtggtatttaagaaacttcgttaagcatgtcctgacctacgtaaaagagtagaggaaatgctgaaggaagtttcttcaataccacattacgtgccataagttacaacaccacttatcataggaatacattaaagagatattgttcctgtagtggtagacctgtccgtgtggcataacccattttattgaagcacgccaatattgacattttttgataacacttgatgatatgcagaattagataatttaagctgcaatgcgataactgtggacatctcacagattaaggtcgatctgatcaaagacgcttttaaagctaacactgatctaatgagtttgacaaacattttccattttattagaaatttcttaaaatcatgaaagtataagatattttttctcaaggaataaaaaaatgctagaattgagttttctttcttataatacggtaccaggagaccaagataaacaaataaattttgtgtgccctcttcaacagtaagatctgcgtcagcctacttggtaatgacaaactttcttcctgcctcaatttctatttccatatcacttaattcccagccatcactccagcactttctttccttaaatttattaaaaatgtaatttagaaagtttagacccatttctcttccagtaactgttgtcatacaatcctctacgccatcatataagataacaccagtagacataccattttcagtcataaactgcaaaaagtttttatgactgcaaatgcaaagtaaacacatatcactaacttaaacaaatagaaattaacatgcttattaaaacgacgttaaaacgacgtttaaacgtcgtttaaactataaaacgctgacagaaagtgaaacgacaacgttttacgattcgtcgtaaaacgtcgtttaaacgtcgcgttttgacgtttaaacgcgttatagagtgaaacaccgcgtttcgggcgtttaatgcgtctgctgctagaaattggcccaacctaattagaaactcccgcccagcccgcccaggccgccgctacaggccgcactatcaccagcccaattaggaactcgcgttctcaccagccgccgcactccagggcgcgctccagcctccaggccgccgctg

SEQ ID NO: 8295 - DNA, 1149 bp, Zea Mays
aaaaaaagctaatggcgagaaacataaattcagattatatagacttttcacatttgggtggattcgacatgggcatcaattttgacgaatttgaagaaaatgtgaaaaagctcatggagtatcttgattcagctcatgataaagctgtcgaattcattgaagatgtccatgcaaaattttatggtccctttactgatgatgaggtgccaaataacgatcaatctagtcgctatgttatcaccgagtcttcaccaacatctattgagaaggagctagttggaccaaacactgaactttcaactcctcctgcatgcttcattaccatggagaacagttctactggctgtgatactgatgctcataaaacccaatcagaatcattttcaacaaaaagtacagatatcctaatacacactacagatttttgtaatgcactgctgctagaagattctagcacaaattatgagatgacagtttgcttgcaaccctaccaggcaactttgcctgggacacaagcaaaccggcctgaagtgcacatggtatcaaccatatcatacagtgcaaatagccctgtggaatcaactatacatggaacttgcacttcacatgactctagcacaagtgcgtccagctgtgctgacgatccaagtatgtcgactgacagcatggttaaatctgtggacatggatggtcagaagcacatgaaaaacgacaaaattaagaaaatgcttttgaggaacctgtcgaggaaactcaggtggtcaaaggcgcaggcagacacgcatcagaccatggcgcctggatcccagggcgcagaagaccctggatatccactggtttctccatcggatgatgatctggaggatagttgggagatcctgtaatatataataaaccgccaagaacctccgtgacttttcttttttgagctaagtttatccatgtcaggttaactggttttgagggaaggcacgtggcgtattttttacagatctccttggttacagacacgtgagatgttgcacgtacgtgcggcacatccatcggcataataactgtaattctagttgaggatacgtaaagctgtttggattctgtttcggaccttaactgcatgcagacaagacaatgagacaagcgtgtgtccac

SEQ ID NO: 8296 - DNA, 1206 bp, Zea Mays
tccgagctcactcgtcgccggcggctgttgcagacagctctgaggaagttattttatggaatccagtgagttctgtaaaaccacagcaatcacatgaacttaccaccatacctcaagatgatcatgcacttcatgctttggaaacagaagtgacagagcaagttggactcaactgttctggacattcagattcttctgtttgcagtggagtgtcaccgctagaaaattcttgtgcaaattgtgaagagaaaatggtattacacagtgcaaatgaccctgttggagtaacagtgcatgaaaatggtgtacgtgtcctggcagattccactaccctaacccaagaatatcatgtatcttacacattacacatggaacaaatgatagagcaagctggactgcattgttctggacattcagatatcctaatacacactacagatttttgtaatgcactgctgctagaagattctagcacaaattatgagatgacagtttgcttgcaaccctaccaggcaactttgcctgggacacaagcaaaccggcctgaagtgcacatggtatcaaccatatcatacagtgcaaatagccctgtggaatcaactatacatggaacttgcacttcacatgactctagcacaagtgcgtccagctgtgctgacgatccaagtatgtcgactgacagcatggttaaatctgtggacatggatggtcagaagcacatgaaaaacgacaaaattaaggtgcacctagcccctcaaccagaaaacgcgtcatttaagaaaatgcttttgaggaacctgtcgaggaaactcaggtggtcaaaggcgcaggcagacacgcatcagaccatggcgcctggatcccagggcgcagaagaccctggatatccactggtttctccatcggatgatgatctggaggatagttgggagatcctgtaatatataataaaccgccaagaacctccgtgacttttcttttttgagctaagtttatccatgtcaggttaactggttttgagggaaggcacgtggcgtattttttacagatctccttggttacagacacgtgagatgttgcacgtacgtgcggcacatccatcggcataataactgtaattctagttgaggatacgtaaagctgtttggattctgtttcggaccttaactgcatgcagacaagacaatgagacaagcgtgtgtccac

SEQ ID NO: 8297 - DNA, 1750 bp, Zea Mays
ctttgtttgttgttttcttttctttcttccccgaaaaggctggacggcggctccgagctcactcgtcgccggcggctgttgcaggagattaacaccattttttgacaaagaaaaaaaaagctaatggcgagaaacataaattcagattatatagacttttcacatttgggtggattcgacatgggcatcaattttgacgaatttgaagaaaatgtgaaaaagctcatggagtatcttgattcagctcatgataaagctgtcgaattcattgaagatgtccatgcaaaattttatggtccctttactgatgatgaggtgccaaataacgatcaatctagtcgctatgttatcaccgagtcttcaccaacatctattgagaaggagctagttggaccaaacactgaactttcaactcctcctgcatgcttcattaccatggagaacagttctactggctgtgatactgatgctcataaaacccaatcagaatcattttcaacaaaaagtacaggtttatcctcaatgaatcatgtgtatccagaaaataatttatctgaaggagctcatatcgactcaaacgatctttgtattagaatatatgacagctctgaggaagttattttatggaatccagtgagttctgtaaaaccacagcaatcacatgaacttaccaccatacctcaagatgatcatgcacttcatgctttggaaacagaagtgacagagcaagttggactcaactgttctggacattcagattcttctgtttgcagtggagtgtcaccgctagaaaattcttgtgcaaattgtgaagagaaaatggtattacacagtgcaaatgaccctgttggagtaacagtgcatgattccactaccctaacccaagaatatcatgtatcttacacattacacatggaacaaatgatagagcaagctggactgcattgttctggacattcagatatcctaatacacactacagatttttgtaatgcactgctgctagaagattctagcacaaattatgagatgacagtttgcttgcaaccctaccaggcaactttgcctgggacacaagcaaaccggcctgaagtgcacatggtatcaaccatatcatacagtgcaaatagccctgtggaatcaactatacatggaacttgcacttcacatgactctagcacaagtgcgtccagctgtgctgacgatccaagtatgtcgactgacagcatggttaaatctgtggacatggatggtcagaagcacatgaaaaacgacaaaattaaggtgcacctagcccctcaaccagaaaacgcgtcatttaagaaaatgcttttgaggaacctgtcgaggaaactcaggtggtcaaaggcgcaggcagacacgcatcagaccatggcgcctggatcccagggcgcagaagaccctggatatccactggtttctccatcggatgatgatctggaggatagttgggagatcctgtaatatataataaaccgccaagaacctccgtgacttttcttttttgagctaagtttatccatgtcaggttaactggttttgagggaaggcacgtggcgtattttttacagatctccttggttacagacacgtgagatgttgcacgtacgtgcggcacatccatcggcataataactgtaattctagttgaggatacgtaaagctgtttggattctgtttcggaccttaactgcatgcagacaagacaatgagacaagcgtgtgtccac

SEQ ID NO: 8298 - DNA, 2018 bp, Zea Mays
ccgttgccattggtatgctcctcctctgctccctcctcgtcgtctgtcgtctcctcgcgctcgtcctccgctgcccgactccggcgtcgtccccacagtccgcaccagccgacccaaccaccgctcaagccttaacccaacatttatctgtatcccgtggcaaggagcatctgcgcgtcacatccgcgatcgcgcgctctacgtcgcctcccgccgccgccgcacggccgcgacggatgctcggccaccgcttccctaccgccctccgcctcccacatggtctgctgcagaggaggagcatcatggcccgccgcggcctgaccatcatggccggtggcgaggcggagggtccgctcgcgggtttcttcgactacatggagcggctgcgcaactacgagcgctcgggcgtgccgcgcggcgccggcaccgactccgacgacgggtttgacctcggacgcatgcgccggctcctccgccggctcggcgacccccacacccacttcccggctgtgcatatcgccggcaccaaggggaaaggttctactgctgcattcctgtccaatatcatgagggcccaaggctacaatgtaggctgttattctagtccacatcttctaacaatacgtgaacggatttctgttggaaatgatggaggccctgttccagtacgactgttgagtgatctttttgacgaggctaagaaagccattgatgaagcaatagaatcggaaaatggatccctgacacattttgaggtagtttttactgctctctcatttcttctattctcacaacagaatgttgacattgccatcattgaagtcttggtggagctagggatgcaacaaatgttattcgaagtactgaattagcagcatctgtcataacaacagtagggagggaacatctggttgcattgggtggctccctgcaaagcatagcaatagcaaagtctggaatcatcaaacaaggacgaccggttgtgattggtggaccattttcagaagatattgagcaaattattcgtgacagggcattcttgacacaatctcccgtgatatctgcttgtggtcatggcatcaagagctttacaaaatgcatagattgggataatggtaagccgtatcaacgctgttacatcagcattaagatttcaagggatgtacccttgtcgattgaaatgcatgacataaacctccagctgctgggagatcatcaacgtcagaatgctgtcacagctgcttgcgcagctctctgtctctgtagtcaaggatgggatatctctgacgcttctatccaagccggcttagaggagacccaacttcctggtaggagccagtttctcacagcagaggaagcctcggcacttgggttcgatagcgcatccactgtactaattgatggagctcatactgaggaatctgcaaaggctttatcaggcgtgataaaaactgtcagaccagaagggcctctagcgcttgttgtcggaatggctagtgacaaggagcatcttgcgtttgccgagcagcttctctcaggtcaaacgcctgacgttgtgctgctgacagaggcgagcgtcgccggaggaacctcccgcgcaatgccagcctcgtccctgaaagaagtatggatagccgcggcacgcgatcgtggcatcgagtacgtggacatcggtggcgtcagtggtgctgaaaccccagagcacattagtgatctcttggactgcagtccatcgtcgaattccggaagaaagcccatggtgatcgggtgccaagacgtggcgccgttctcctcgaacctgatcgttgctgcctcccagctcctggagagcagaggcacggctccaggcctcatctgcgtgaccggctccctgcatctcgtcggggccgtactgcaacagatgggacggcattagaggaaacaaccatttcatctttcatgccatataatacactggatgattgtgtctacactgaactcggagtggtgggtggtgctgctgctgacgaatctctagt

SEQ ID NO: 8299 - DNA, 2589 bp, Zea Mays
ctactactccatttggcgcctatgcctatcccatccgtttctccagtttcgtcttccccgctcgctgcagctccactcagagcctccgttcccaactcgaatctccccagatcctccgcatcatctgaaaacccagatgcttctcctccagcccagtgcagtccctgcgcctgctctgcgggggaggcctcggccacgtcggcggctggtgccgcctcccctcgcctccgcgcccgcttccatcgtcgtcagctccgacgaggacgcattcaccaggtgctccgggtacctgttcgaggagggcgcggccaccgagtcggagctccccaccgcgtacgacctccccggcatcgcggccgtgtaccgccgccgcccgctcctcgtgctccgccgctccctgcagatcggcacctccttcggccggtggttcgcgctgcggtacctcgatcgcgtcaacgagcgcgccgacgacatgttcgagcttcgggcggctcagctcaggaggatactcttggagcttggcccggcatttgtgaagatcgcacaagcagtttcgtcacggccggatgttgttccacctgcataccttgatgagctctcactacttcaggaccgcatagcaccattttcaaacgatgttgcttttaatattatagagaaagagcttgggcttccactggatatggttttctctgagataacaccagagcctgttgctgctgcatctcttgggcaggtttaccaggctaggctccgctccagtgggaagattgttgctgtcaaagtacaaagacctggagttcaagcagcaatttcattagacatatatatcttgaggttcctagctagtcttgcaaggaaggctgccaagttgaacacagaccttccagctgtgcttgacgaatgggcatcaagcctattccgggagatggattatagagaagaagcaagaaatggacttaagttcaggttgaattcttcatccattagacaagagaattgtttgggaaatttagagatgtgtcggttcctgaaatgtatctggaacagacaagaaggcgagtccttatcatggaatggatcgaggtgcagtctgtgatcttattgaactgttagcaaatgaacatgcatgcaaaaaatgcagttcataattctacttgcactctgtgatcttctagggggaaaagttatcagaagtcagagatcaatatttggttgaggttggagtatattgttcactttcacagctattagaatatggattctatcatgcagatccacaccctggaaatcttttgcgtacagttgatgggaaattagcctacttagtttacttcctccaactgcccagaaaggtgaagtcacaaaggcattgacaggtgtatttgagaatgctgttaacagaggagttcagaatataagctttggagatctgtcaggaaatcttggacgaacaatgtataaattcaagttccagataccgtcttacttttcccttgtaattcgaagccttgctgttttagaaggtatcgcaatcagcttcaatccaaagtataaagttctggggagttcatatccatggattgcaagaaaagttctcactgacagttcaccaaagcttcgatcaactttgcagactcttctttataaggatggcactttccaaattgatcgcctggaatctttgttaactgagtcacttcgtgcaagaacagagcaatcattggtcagaaatgaacaagatgtcgacagtacgagatatgcaattaagcaagtcttgtcattcacactcgctgaccagggtgcctttgtgaaggacttacttcttcaggagattgctaagcctccagattgccattcggtggtggaccatccccattgacctcactagatgacgaagatgccacaaacttaagaaatctgtatcgcctgctcctacttttatctaaggtttctcagaaggaaaatccatctccaattcctgaatataacagtgccatagagaaggaaggtggtagcacggatgaacttgctcttgcgctgtatggaatgacctctctgccagaatttcttccagttctttctgtcattcctgaggtaagttggacataagttacgtgagaccatatatgtcaaaatccacatggcacatggctcatttgtgtatacccttctccatcgaagcttccaccggagtcccaacagcagttgcttcttctgccagcggatttaaccaatcgtattttatctcgggctctcgcgagaaccattagaagactcatgtaaagccataggtgcagaaattttcggtccctgcttaatttttattttactattctttttggttcactgctagaagatggggatttttttagcatctcatctacaacccaagatcaatcccttttttgttatctacgattactatgtacatattgttcaaactaaagcaggcattgtaaatggcccatgttgttatgcacatatggtgtaactgataaactttaaatatatgtgaacatagaaataattctgtaatgcaatttgcctcgaaagcatggattcatgtcattttcttgtttcaccatc

SEQ ID NO: 8300 - DNA, 2611 bp, Zea Mays
ctactactccatttggcgcctatgcctatcccatccgtttctccagtttcgtcttccccgctcgctgcagctccactcagagcctccgttcccaactcgaatctccccagatcctccgcatcatctgaaaacccagatgcttctcctccagcccagtgcagtccctgcgcctgctctgcgggggaggcctcggccacgtcggcggctggtgccgcctcccctcgcctccgcgcccgcttccatcgtcgtcagctccgacgaggacgcattcaccaggtgctccgggtacctgttcgaggagggcgcggccaccgagtcggagctccccaccgcgtacgacctccccggcatcgcggccgtgtaccgccgccgcccgctcctcgtgctccgccgctccctgcagatcggcacctccttcggccggtggttcgcgctgcggtacctcgatcgcgtcaacgagcgcgccgacgacatgttcgagcttcgggcggctcagctcaggaggatactcttggagcttggcccggtatgtctcatttcctattgccttatctgatgatcataaagtttattgatgttccttttttaatcacaggcatttgtgaagatcgcacaagcagtttcgtcacggccggatgttgttccacctgcataccttgatgagctctcactacttcaggaccgcatagcaccattttcaaacgatgttgcttttaatattatagagaaagagcttgggcttccactggatatggttttctctgagataacaccagagcctgttgctgctgcatctcttgggcaggtttaccaggctaggctccgctccagtgggaagattgttgctgtcaaagtacaaagacctggagttcaagcagcaatttcattagacatatatatcttgaggttcctagctagtcttgcaaggaaggctgccaagttgaacacagaccttccagctgtgcttgacgaatgggcatcaagcctattccgggtaaatcacatttgatgcaggagatggattatagagaagaagcaagaaatggacttaagttcaggttgaattcttcatccattagacaagagaattgtttgggaaatttagagatgtgtcggttcctgaaatgtatctggaacagacaagaaggcgagtccttatcatggaatggatcgagggggaaaagttatcagaagtcagagatcaatatttggttgagatccacaccctggaaatcttttgcgtacagttgatgggaaattagcctacttagattttgggatgatgggagaattccgacaagaacttcgtgatggatttattgaagcttgtcttcatcttgttaaccgtgattttgatgctttagcaaaagactttgtaacccttggtttacttcctccaactgcccagaaaggtgaagtcacaaaggcattgacaggtgtatttgagaatgctgttaacagaggagttcagaatataagctttggagatctgtcaggaaatcttggacgaacaatgtataaattcaagttccagataccgtcttacttttcccttgtaattcgaagccttgctgttttagaaggtatcgcaatcagcttcaatccaaagtataaagttctggggagttcatatccatggattgcaagaaaagttctcactgacagttcaccaaagcttcgatcaactttgcagactcttctttataaggatggcactttccaaattgatcgcctggaatctttgttaactgagtcacttcgtgcaagaacagagcaatcattggtcagaaatgaacaagatgtcgacagtacgagatatgcaattaagcaagtcttgtcattcacactcgctgaccagggtgcctttgtgaaggacttacttcttcaggagattgctaagggaatagatgcacttggtgtagccacattaagttctgcaacgtctgcagcagcctccagattgccattcggtggtggaccatccccattgacctcactagatgacgaagatgccacaaacttaagaaatctgtatcgcctgctcctacttttatctaaggtttctcagaaggaaaatccatctccaattcctgaatataacagtgccatagagaaggaaggtggtagcacggatgaacttgctcttgcgctgtatggaatgacctctctgccagaatttcttccagttctttctgtcattcctgagcttccaccggagtcccaacagcagttgcttcttctgccagcggatttaaccaatcgtattttatctcgggctctcgcgagaaccattagaagactcatgtaaagccataggtgcagaaattttcggtccctgcttaatttttattttactattctttttggttcactgctagaagatggggatttttttagcatctcatctacaacccaagatcaatcccttttttgttatctacgattactatgtacatattgttcaaactaaagcaggcattgtaaatggcccatgttgttatgcacatatggtgtaactgataaactttaaatatatgtgaacatagaaataattctgtaatgcaatttgcctcgaaagcatggattcatgtcattttcttgtttcaccatc

SEQ ID NO: 8301 - DNA, 3474 bp, Zea Mays
ctactactccatttggcgcctatgcctatcccatccgtttctccagtttcgtcttccccgctcgctgcagctccactcagagcctccgttcccaactcgaatctccccagatcctccgcatcatctgaaaacccagatgcttctcctccagcccagtgcagtccctgcgcctgctctgcgggggaggcctcggccacgtcggcggctggtgccgcctcccctcgcctccgcgcccgcttccatcgtcgtcagctccgacgaggacgcattcaccaggtgctccgggtacctgttcgaggagggcgcggccaccgagtcggagctccccaccgcgtacgacctccccggcatcgcggccgtgtaccgccgccgcccgctcctcgtgctccgccgctccctgcagatcggcacctccttcggccggtggttcgcgctgcggtacctcgatcgcgtcaacgagcgcgccgacgacatgttcgagcttcgggcggctcagctcaggaggatactcttggagcttggcccggtatgtctcatttcctattgccttatctgatgatcataaagtttattgatgttccttttttaatcacaggcatttgtgaagatcgcacaagcagtttcgtcacggccggatgttgttccacctgcataccttgatgagctctcactacttcaggaccgcatagcaccattttcaaacgatgttgcttttaatattatagagaaagagcttgggcttccactggatatggttttctctgagataacaccagagcctgttgctgctgcatctcttgggcaggtttaccaggctaggctccgctccagtgggaagattgttgctgtcaaagtacaaagacctggagttcaagcagcaatttcattagacatatatatcttgaggttcctagctagtcttgcaaggaaggctgccaagttgaacacagaccttccagctgtgcttgacgaatgggcatcaagcctattccgggtaactcttctccatatatgatggcatgctatttaaatagtgaacatatctatacatcagtttgttcatttatttcagttcacttcaacacatttcaatttggttatagcatttgtaggcattggcatgagataaaattagactgtagtatgaaaagtaaccattaacttgaggcttagaatagtattcctatgcggacccttaagaatgatttcaatgggctatgtggatagtgacagtttgctagaaaaaaaaacaatctaggaaaaattatgggaggtggaggtcaacatccaaaatgtggtattggttgcgggatccaaatgaacatttaaatttgttaattatttttttgttctatgatcctattcatagttcactatgctcaagtaattttgaggctgcaagttatggacacatgttaccatatatccaaggaggaacataaatatcaatctttttcaatgtgatagtggtttgaaaccattgcatttgtacttttaccgtgagagtccatagcttttgtgataaacatgttttcagaagcctggccaagaaaagttgatattattctagtattctagcaggactgtgctagcagtattctaggctattgcagattctgactaaaacattaggtgtatatccttagatattcacattgaatacaggtaaatcacatttgatgcaggagatggattatagagaagaagcaagaaatggacttaagttcaggttgaattcttcatccattagacaagagaattgtttgggaaatttagagatgtgtcggttcctgaaatgtatctggaacagacaagaaggcgagtccttatcatggaatggatcgagggggaaaagttatcagaagtcagagatcaatatttggttgagatccacaccctggaaatcttttgcgtacagttgatgggaaattagcctacttagattttgggatgatgggagaattccgacaagaacttcgtgatggatttattgaagcttgtcttcatcttgttaaccgtgattttgatgctttagcaaaagactttgtaacccttggtttacttcctccaactgcccagaaaggtgaagtcacaaaggcattgacaggtgtatttgagaatgctgttaacagaggagttcagaatataagctttggagatctgtcaggaaatcttggacgaacaatgtataaattcaagttccagataccgtcttacttttcccttgtaattcgaagccttgctgttttagaaggtatcgcaatcagcttcaatccaaagtataaagttctggggagttcatatccatggattgcaagaaaagttctcactgacagttcaccaaagcttcgatcaactttgcagactcttctttataaggatggcactttccaaattgatcgcctggaatctttgttaactgagtcacttcgtgcaagaacagagcaatcattggtcagaaatgaacaagatgtcgacagtacgagatatgcaattaagcaagtcttgtcattcacactcgctgaccaggttggaccgaaaccaaactgggcaaataatttttgaatactgaaccataaccaaacaagatagaacttggcagataaatatttgaagctctatgctctcttgcagggtgcctttgtgaaggacttacttcttcaggagattgctaagggaatagatgcacttggtgtagccacattaagttctgcaacgtctgcagcagcctccagattgccattcggtggtggaccatccccattgacctcactagatgacgaagatgccacaaacttaagaaatctgtatcgcctgctcctacttttatctaaggtttctcagaaggaaaatccatctccaattcctgaatataacagtgccatagagaaggaaggtggtagcacggatgaacttgctcttgcgctgtatggaatgacctctctgccagaatttcttccagttctttctgtcattcctgaggtaagttggacataagttacgtgagaccatatatgtcaaaatccacatggcacatggctcatttgtgtatacccttctccatcgaagcttccaccggagtcccaacagcagttgcttcttctgccagcggatttaaccaatcgtattttatctcgggctctcgcgagaaccattagaagactcatgtaaagccataggtgcagaaattttcggtccctgcttaatttttattttactattctttttggttcactgctagaagatggggatttttttagcatctcatctacaacccaagatcaatcccttttttgttatctacgattactatgtacatattgttcaaactaaagcaggcattgtaaatggcccatgttgttatgcacatatggtgtaactgataaactttaaatatatgtgaacatagaaataattctgtaatgcaatttgcctcgaaagcatggattcatgtcattttcttgtttcaccatc

SEQ ID NO: 8302 - DNA, 3480 bp, Zea Mays
ctactactccatttggcgcctatgcctatcccatccgtttctccagtttcgtcttccccgctcgctgcagctccactcagagcctccgttcccaactcgaatctccccagatcctccgcatcatctgaaaacccagatgcttctcctccagcccagtgcagtccctgcgcctgctctgcgggggaggcctcggccacgtcggcggctggtgccgcctcccctcgcctccgcgcccgcttccatcgtcgtcagctccgacgaggacgcattcaccaggtgctccgggtacctgttcgaggagggcgcggccaccgagtcggagctccccaccgcgtacgacctccccggcatcgcggccgtgtaccgccgccgcccgctcctcgtgctccgccgctccctgcagatcggcacctccttcggccggtggttcgcgctgcggtacctcgatcgcgtcaacgagcgcgccgacgacatgttcgagcttcgggcggctcagctcaggaggatactcttggagcttggcccggtatgtctcatttcctattgccttatctgatgatcataaagtttattgatgttccttttttaatcacaggcatttgtgaagatcgcacaagcagtttcgtcacggccggatgttgttccacctgcataccttgatgagctctcactacttcaggaccgcatagcaccattttcaaacgatgttgcttttaatattatagagaaagagcttgggcttccactggatatggttttctctgagataacaccagagcctgttgctgctgcatctcttgggcaggtttaccaggctaggctccgctccagtgggaagattgttgctgtcaaagtacaaagacctggagttcaagcagcaatttcattagacatatatatcttgaggttcctagctagtcttgcaaggaaggctgccaagttgaacacagaccttccagctgtgcttgacgaatgggcatcaagcctattccgggtaactcttctccatatatgatggcatgctatttaaatagtgaacatatctatacatcagtttgttcatttatttcagttcacttcaacacatttcaatttggttatagcatttgtaggcattggcatgagataaaattagactgtagtatgaaaagtaaccattaacttgaggcttagaatagtattcctatgcggacccttaagaatgatttcaatgggctatgtggatagtgacagtttgctagaaaaaaaaacaatctaggaaaaattatgggaggtggaggtcaacatccaaaatgtggtattggttgcgggatccaaatgaacatttaaatttgttaattatttttttgttctatgatcctattcatagttcactatgctcaagtaattttgaggctgcaagttatggacacatgttaccatatatccaaggaggaacataaatatcaatctttttcaatgtgatagtggtttgaaaccattgcatttgtacttttaccgtgagagtccatagcttttgtgataaacatgttttcagaagcctggccaagaaaagttgatattattctagtattctagcaggactgtgctagcagtattctaggctattgcagattctgactaaaacattaggtgtatatccttagatattcacattgaatacaggtaaatcacatttgatgcaggagatggattatagagaagaagcaagaaatggacttaagttcagagaattgtttgggaaatttagagatgtgtcggttcctgaaatgtatctggaacagacaagaaggcgagtccttatcatggaatggatcgaggtgcagtctgtgatcttattgaactgttagcaaatgaacatgcatgcaaaaaatgcagttcataattctacttgcactctgtgatcttctagggggaaaagttatcagaagtcagagatcaatatttggttgaggttggagtatattgttcactttcacagctattagaatatggattctatcatgcagatccacaccctggaaatcttttgcgtacagttgatgggaaattagcctacttagtttacttcctccaactgcccagaaaggtgaagtcacaaaggcattgacaggtgtatttgagaatgctgttaacagaggagttcagaatataagctttggagatctgtcaggaaatcttggacgaacaatgtataaattcaagttccagataccgtcttacttttcccttgtaattcgaagccttgctgttttagaaggtatcgcaatcagcttcaatccaaagtataaagttctggggagttcatatccatggattgcaagaaaagttctcactgacagttcaccaaagcttcgatcaactttgcagactcttctttataaggatggcactttccaaattgatcgcctggaatctttgttaactgagtcacttcgtgcaagaacagagcaatcattggtcagaaatgaacaagatgtcgacagtacgagatatgcaattaagcaagtcttgtcattcacactcgctgaccaggttggaccgaaaccaaactgggcaaataatttttgaatactgaaccataaccaaacaagatagaacttggcagataaatatttgaagctctatgctctcttgcagggtgcctttgtgaaggacttacttcttcaggagattgctaagggaatagatgcacttggtgtagccacattaagttctgcaacgtctgcagcagcctccagattgccattcggtggtggaccatccccattgacctcactagatgacgaagatgccacaaacttaagaaatctgtatcgcctgctcctacttttatctaaggtttctcagaaggaaaatccatctccaattcctgaatataacagtgccatagagaaggaaggtggtagcacggatgaacttgctcttgcgctgtatggaatgacctctctgccagaatttcttccagttctttctgtcattcctgaggtaagttggacataagttacgtgagaccatatatgtcaaaatccacatggcacatggctcatttgtgtatacccttctccatcgaagcttccaccggagtcccaacagcagttgcttcttctgccagcggatttaaccaatcgtattttatctcgggctctcgcgagaaccattagaagactcatgtaaagccataggtgcagaaattttcggtccctgcttaatttttattttactattctttttggttcactgctagaagatggggatttttttagcatctcatctacaacccaagatcaatcccttttttgttatctacgattactatgtacatattgttcaaactaaagcaggcattgtaaatggcccatgttgttatgcacatatggtgtaactgataaactttaaatatatgtgaacatagaaataattctgtaatgcaatttgcctcgaaagcatggattcatgtcattttcttgtttcaccatc

SEQ ID NO: 8303 - DNA, 2577 bp, Zea Mays
ccgctgcttcttctcccctccctcccctctccatcccagaacccattcagtcgcggacggcggacgctcctatcccctagcctagcgcgcgcggacgcagccactatgccgggccatccaacccctgccgacgcgctcctcggcggcggcacatcccgccaccacgcggagcttctcctccatagcggcgatgacggcgtctctgtcaaggatctccgcctccgccgcgtcgtcccgcccgccgccggctccctcgataccttccccgagtgcgccgcacccgtgaagcccggatttgtcgagatcacgcctctagaggccgtgtcggctgctactgcggcggcggccggggactttgaccggaagttggcgcccccgcggtccaagctcgtccgcgatccgcgttcgtttgggtaccggcgtctgctgcctttcctgaacgagctgacgaagaacgatagctcaatcggcaaggaggtgttcccgcaagacacagctgcgcactcaaaggatgtgctcggcggatctgattctcggctggctgatgaagctataggcgttagccactgcgaacctgaagccatggtggttaacaccggaggagacaccgatgtgaaagatgcctgcaacaatgtctcggaagagatcaagattgcccctcatgacctaaccaacaaaccgttgcttgccggatgcacaaggtcgaggtttgttcatcatccgagctcgttcagctacaagaggatgctgccatttctcatggagaatgacatttctgctcaggaatgtaacagggtcaaaattcgaaaaattgcagaggaaaggcagctagcatcaaatgagaatgatgtctcagccagtgggcagcattgtcttgctgcatctgatgactcttctcaggaatgcaatagaggtcaagttgaaacaatggaagaagaaaagccagcaaaagcagatgagaataatgtccttggtggcagacagcttcagcctcctgttctagaagcgcctcctcctgatttcagtgtagttgaaatgcaaaatgtcatgcagcatgaagcttcggcttcaagtcaagttcccctaacttcttttgagggtgaattaacatcagctggggacagtgtccaggctgttggagaacatcagcttgttgcatcagaagagtctctagacgaacacaaaagagatgaagtcaaaagaagcatacatgatgcagtaaaatcagatgggggctatgctttggatagcagagaatttcagcttgctgcatcagaagtctctccagaaaacagcatggctgaagtgcaaggagctgcacaagaagaatcgttacctttagatggagttgaggaaaggtcagacaagggtgactttgtttccacagagcaggctcagctctgtgtcacaaatgaatctttggctgcacagctgcaaggtaatgttgaattcgctgaagtaccacagtgccaaaacttggacccaggatgtcatgatgttggttttggtagccgtaccaagagagtgataccattgttgcatcggcattgtgcacaacaacctcaggattccgtggtttctcttgatgatcagcttcttgacgatgacatacaaatgatctgcagacctgattcccgtgctgttgacagatacttatcagtcgaggaaatgtctggatgcattatgttaactgagtcagcatcaaacaaagcagggatatcgcggccaagaggtgcccattcaatggaaaaaggatctctgtctcctaagaaaccttctccaaagaaaggaatactcaagaggaatacaagggggtgtaagggtatctgcatgtgcttagactgctgcacattccgactacatgctgaccgagcttttgagttctctaggaagcagatgaaagaagcagatgatataataactaacttactgaaggaggtggccagtcttaggagtctgctggagaagcctgctggccaacaggaatcaacgcaagcagcttgcagacatgcttctcgggtggaggaggtggccagaaacagttgccagcagatgttcgtggatctaaattcccactgcagaatccctgcaggcaaatcatagctgatgctcatggaagctaacctgctgtttgaacacagaaaccaagggttagattcaccgaatacgtcgaggaaaagaaggccttaccatctccacgcaggagcaaccgtagtaggtgacagaatttcagaaagtggtggcggcctgacctgctgaccctacggatcgtgttgcttggttgttcagtacataatctgtgctgcttggttgagtggttgtcacagaaggaagattgaaatgaaatgaccgacttttttttgcgaactggaacatgcctatttgcaaactttttagttgtgaaatgatggtcccttggttgtaagaagtctggcatgtgttggtttatgatgcttgaggtctgtactaccaagtactgtgtgctccctattttccacattgtttagatccaactccaagaaagagttctaaaattgggtcctaaattttaaaataggacccccttttgaatgattt

SEQ ID NO: 8304 - DNA, 2472 bp, Zea Mays
ttattattaaagatgctgtgaacatggaagaaaggacaaacatagttattataaattgtcataggtatattattaaagatgcttttggatattgattctttcttttttctagagcaaacatttgatgattcgtctatgcatatatcttaagtcttattgacggttgatagttttgtcaggggttatgttgctatgcttcagaagaaggatccaaaactttgctctcatattttccataaccagccacaatatgatgagcaccatgattcgtccccagttttggtgtcgaagtatcatcgatgggattgctcaagatgtcttgatagtgtggaagtttcaggccataggccaacatcggaaaatgtttctatgcagcagaatggaatgaatgatggctgctctatttcaattgtttggattttgcctaatagtgttgattccagaagactgttttcttgcacacatcaatcatctcaagggaatgatcgattgaccctttcaaagactgcccaagaatgcaattcaaaatgcagttctcctggcaacaaagcaattactgcgatgaatgttccagtagctgaagaaaatgttccagaggcactcgttgatacgagggttccatctatagaagttttacaggcctctcccaatagtattgatttgtcagcaaatatcttgaatgctgtctcgaagaatgtcagcgatctacctgatgatgttgaagaaaatggcacacagaatccacacagtctaaaaccttgtgtggcgccaaatgaagatgagaataacatagctaatgatgacctcaatgagcctaatgtatgtaaaccagtatctgggcacaaaagcaaacaagtctgcaacatgggtccacgccgagcatcgtcaaaaagaaatgttgaatctgatggtaagaggaaaaggaataaatctactaaactgcctggtatttcagatctcaaattttgtcagagaaagccaaaaaagacaaggctgttatcagaactcataggttctgaacaggtaggggtttctggagatgccgttcaagtggaccatactaacagtgttgatctctgtgagggtggtaaaagaaaaatgcaccttgaggttggaaaaggtaatgacactactaatcagcaagtggacaaaatccagtcaagagctgtcaagaacaaggcaaaatacacaggagtagacaagttagaagatggatcctctctaatgaactggctgaaaagcactaataaggaagttagaacaaagaaaaaagactcagaacacaagaatcttgattcctcttctatttcaaggtcttacccagatatagttgcttctaatgatatgcatcatgattttctaccctcagttggggatgtgggccaggcagatgtaccatctactaccagtgccaagcatgggaatggaaatgcacagaatgacaaactggagcaaaatatgcagaagatggatggcttgtgtgaaaatgaatctagaaacttgaaacagaggttcttctcaaatgaaaaatcaacgattttgctaaagagaaaggtactgtccacttccgttgtccatgatgagaacattgagaacagtaatataaagagagatatgctcaggtcagatgatttgcctcaaaaggaacctgaagtctctgtacaaagatatttggcaaaggtttctcttggtaaacaaaagatccagaatgtgtctggcctccacaagaagaatataccaaagaataagaaaggaaagcagaaggtgcacgagaaacaaaatgtgatagacgacttccccatggacattgttgaacttctcgccagaaatcagcacaagagacaattgatgactgacaccaattctttggaaaactgtcatactcaacccaaggtagctcaagttgattgtgctgcatttgcagccaagggttgtcccaccaatgcatcaaatgagttcaacactaatttccaaaaatctttggcatcagaaagtaagcagaagtccttacagtctgtcaaacaacgagagaatcactttttttagccaagtcagtgtgcttgtcagcatcaagattggcaatcacaacactgtcgtcctgcttgaaaactgaagccagcttctcataaatctaaattcaagtacatgttcagtccacaaaaaaaatgaagaccgctgcaataatttggaaattttcaagctaatactctactaaccggagcaagatgcttgcagtgaccacacctgtaaacagaagggtcaacaatgcagttcaatttcagtaaagtagcgtgatggaaataatttaggtggacataagttgaacatgataaccaaccatggggcataaaactcatcaaggacaattgagtcaaaggtctctgaagtcagaaccacgacgcttgaaggaatggcagctatcttgacattggtacctgaaacaatgtgcattagttgacaacatccaattct

SEQ ID NO: 8305 - DNA, 2163 bp, Zea Mays
actctgcacttgactttcgcgagtgccccccatgcccgagtcacctgcatctccggccaaacccccctcgcagccgggatctccgctcaatgccgccactccgtccccagcgtcggcattgctgcgaggctccgtgctgctcatcgccttcctcgtactccagctcgtgctcctctggaacatcctcggcctccccagctcccgcttcctcccggtgccgggccaaagagacactacctggcccaacggcgcagtcaacggcggagcgtgcgatgaggggctcatctacgtctacgacctcccgtcggagttgaaccacgacctcgtcgacgactgcgagagcctgtggccctggtactcgttctgcccgtacctaaccaacggcggcttcggcgaggcggccgccacgctgcccgtcttcttcaacgtcacacggaacgtgtcgttgcccagctggtacaacaccgaccagttccagctcgaggtcatcatccaccgccgcctcctctcccaccggtgccgcaccaccgactcgtcgctggccaccgcgttctacgtcccgttctacgtcggcctcgacgttggcagccacctgtggggggacaactctaccgctgccgaccgcgacagggcaggcttgaggctgctccggtggctcaagaaccagacgtccttccagaggtccggcggctgggaccacttcatcacgctggggcgcatcacgtgggacttccgccggtacggcgacgacgggtggggcaccaacttcgttgtcctgccggggatagccaacgtgacccgcctcggcatcgaggccgaccggctggaccccatggaagtcggcgtcccgtacccgaccggcttccacccccgcaccgccgccgacgtgcgcgcgtggcagcggcacgtgctctccctcaagcgcagcaagctcttcggattcgccggtgcgccgcgctccgggttccgggacgacttcagggaggtgctgctggaggagtgcgaggacgctgggagcgagcactgccgctccgtggactgccgcggcacgcggtgcaccgacaacggcgcggcggtgctggagctgttcctggactcgagcttctgcctgcagccgcgcggggacagcttcacgcggcgctcgctgttcgactgcatggtggccggcgccgtgccggtgctgttctggcggcggaccgcgtacgaccagtaccggtggtacctgcccccggggccgcgcggcgaggagggggagtggtcggtgttcatcgaccggcaggcgctgcgcgtgggcaacgtgagcgtgcgggacgttctggaggggctcagcgagcggcgggtgcggcggatgcgggagcgcgtggtggagatgatcccgcggctggtgtacgcgtcatcgtccgacgggctcggcgacggcatggaggacgccctcgatgtggcgctgcgcggcgtgctggagcggttccggcggcgccgggcgagcaccgcgcctgtaggtgtttcagcaaagcactcgccaggccgcttcgtcgcccggagtgtcgacggcaaatcgacgccgccgcctccttctgacggcaaaaatggttcggtagcgacggtcagtaaggacgactcaggaacaaatccgagccccccggcttcgtcacacataaaaaccgtcgtgtccatagcatcggcttcaactggaacgagcttgcaaaaatcgtgaagtaactgaagagtgaagaccttgaaccgtggacatagaaatgctgaatttcgttctgctgcatctgcatcttggaatttggatcgcggatatccagggtcaactgtagcagagagtgagatctagggcggaatttgttggttacggtggaatttgttggtttaccggggagggccgaatgggaaccaccgcttgcgtttaaaaaaaacggtttatatgttttgctgctgccacactgccgtgctagatgcattggcgttaattgcagttgaccaagtggtagattctttacaacatctagggctcttttggaatggagaaatttcacagaaatgctatagaaaattatacaggaattagttcaaaatcacagggaaaacccaggattcaggaatttatacttcaatccaaaagaggccggcacaaatttgtatcctactcctctccgc

SEQ ID NO: 8306 - DNA, 2551 bp, Zea Mays
cgcggtctcgctgctcgcatcaccctccgtgcgtgctctgttccccccgatttttccctctcccttccgagttccaatctcatcggtcgtcgccccgctgctccagctcttcccattcgttcccactccctcgcgccgaagcaactcctgaatcctcctgcgcgccaaaaccctagccgcagatcccgcacctcgccgcccggagcccaagcggcggcgtcgacgtccgcgcacgcaccgaccattgccgctcgccgcattggggcgcttacggcgtcgcctccgctcccggggcagagatctgggtcgaggagacctggttgcgcgtgggctgcgtaggggatgtggcgggggcggtgtgccccggggatcagcgtggcggcgctggccctgctcgccgtcgcggctgctgcaggagccgccgcgggggatcccgatcccgacgacctcgagcgcgcgtttccaatagtggagccagaccacagacacactaaacttcgtctctcagagcaaggtctagaagcaattcgaaggatcgaaactcctattgctgttgttggtgtcattggtccctatcgatctggaaaatcatttctcctcaaccagcttctctccttatcttgtgataaaggttttggagttggtcatatgcgagatactaaaactaaaggtatttggatttggggtactcctgttgagatggatgttgatggttccaaagtttctgtcctttatctagacactgaagggtttgaaagtgttgggaaatcaaatgtgtatgatgataggatatttgctttggcgactgtcttaagctcggtccttatctacaaccttcctgagacggtacgtgaagctgatatatctaggctttcatttgccgttgaaattgctgaagagttctatggaagagtgaaggggcaagatgttgcttttgagccagcaaagcttctctggcttatccagagggatttcctccaaggaaaatctgttcaacaaatggtcaatgaagccctccaacgggtgcctaatgataatggtgacagatatattaatgaggtcaatcaaatacgagattctttggcagttatgggcaaccacagcactgcttttagcttgccccagccacatcttcaaagaacaaaattatgtgatatggaggacaaagagcttgaacccttatatgtaaaacggcgggagcaactaaagcagcttgtttcgtccattgtaaaaccaaaaatcgtgcagggtagaactctaaatgggaaggactttgtgtctttcttgcagcagattcttgaggctttgaataaaggcgaaattccatcaactggatctctggttgaaatttttaacaaagccattcttgatcgctgtctgaaggtgtacagggagaaaatggatagcttaaacctaccagtgccggtagacgaactgcagaaacttcatgagatgacaaatggtgaagctagaattctctttgataagcagcactttggcaaacatcatgctgctcagtcggccctcaagcttgaagatgagattaaagaggtgtacagaaacttccttctagctaatgaatatcaatcgtcaaagctatgtgaagctcgcttttctgagtgtgaagataagatggatcaccttcaagtcttgaaacttccttcaatggcaaaattcaatgcaggctttactcactgcaaccaaagtttcgtaaaggactgcgtgggacctgcaaaagaaagctacgaacgtagaatgtcaaagatgcttgccaagtctcgtgctcttttcatcaaggagtacaataacaagcttttcaattggttggcgacattctctttggtcatggtggtgatcgggcgctttgtcatcaagttcttcctacttgaaattgttgcttgggtgatgtttatcttcctagagacgtacacgagaatgttctggtcagcggaatcactgtattataatccagcttggcacatcattgtttcttcctgggagatgatcgtgtacagccctattcttgatctggacagatgggccatcccaattgtcataatgctatcattgggggttctttactggaggtgcttcggccgcagaaggaagcgggatggtacaaaacatctgcttatagaagaggctacactgcccgtgcttttggatgggcatgttttgatgctgccttgcctatggatctccaattgttttttggtggacgaagagagacagtgaagctgctagcgatggccgatggggcacctgcacaagcctccgttgtaattgtaattctacttctctgccttctgtagctaggctatccttacatgtcacggtctcaattctttgcttattgtttacatccactgcaatttttgcaaggattttgtttttatcgggtcatatacaatgtagttgttatttagagcgtgcaccgtgacattcatatgctcgaagtctggcggtggaatttggaaacgtgccttttttatactgctattatacagttaatgtactcatgctatccttttggccaggagctgtgtttttg

SEQ ID NO: 8307 - DNA, 1734 bp, Zea Mays
atataaggcaaagcagataaaaagcttaattttttaagaaggtaaaggcaatgactgaaaagtgaggagggtcagaggtgtacagataaggatgagggctgaaaagaggagcaggaaggcttggcttgctgcaatgcctgtgctgtttggcgccacaaaaggagcagaggtgtgttccttcaaatgccagatagcccactggagacaaggtcacaaagatgaatgccatccaccaagtgttaatacaaggcatgatgatgaagaagaaaaggctgaagtgggaagagctgccaaagagaatgtatcagttggtgttaaacaggttgctgaaatgaacaaaccagatgtaggatctgaaacttctgatgcaaaccatgatttgaagagttcaaatggtaaaagtaaacatatgccttctaaagcagtatgttccagtgtagagattcctggaggtcataagtccaacaacacagttgaaatttctcaaaacgttcagtctgttgacagtagtaagatgggatcaagtatcaaacatgcaaattttgttgaagatggttcttccaccgaggacttaaatgaggaataccaaagagctaaggatgccactgttgttgaggattgttctcagacaaacagtaccaggtagcttgaagacagtagcattcaccacgcagttgcatctgttgtctttgagtccaaaagttctaggacaagagcttaggctaattgttatgcaaatgctgtttttcagtgtttgatgtttactcgaccactcacaacatatcttttggaagggcttcacgcaaaaaactataattctccactactatgtgtgtcacgttacattttcactatgtgcttgagtatttgtataatacctcttgcgctgtaggttctcaaaatggatggtgcttcctgtgtgaattttaaaaactcattgtggagggcaaacggtgcaaccttgtcaccgacaggaatactctctcatttgaatgacattggcagtagctttggtcctgaaatgctccaagaagctggagcagctcatacttatatagaatccttcgcttaccgtttgtacatattgattatccggtgcgtggcgccaccactggtgccggagctggacagggacgccgtggcccctgcgggcagcggtgaccggaaggcggccaagctcgggagctggagcagcatgagcagcaaccgcggtagcaagaagcggaagagcagtagcagcagcttcgggaggagatccacatccacctgcgaggaaaggcagggggtcttccgcatgctcatgagctggaaccaggagagccgattcagcaacaagatcaagacgacgacgagcaaagaaagatgaacgaaatgaagtgttcttagcttggtgtgattattcggggggttgcttgctggatggtttttgttcgtttagtgtctggccttagcttacttattacttttgttagtactctactagcagagtacatgcatagagtcagtggtgtggctgtggcgtggatcagatcattgatttgatcgagctgtacaaatagcgaggcgatacatgtcactgagttgatcagttgacaaggtggtttagaccatgttgaggcacggagaaacatcatccctaggttttagtttgtctggctttgctcgtcattttgtacttgctcttctcacatatttgttcgcttagaatttacttcaaactcacgtccttttggc

SEQ ID NO: 8308 - DNA, 4575 bp, Zea Mays
acgtccaggaaaaatatcgaaacaaggacgaaaaacacgaagaattacggaagagcaccccatcttcggtttctttcctccggacttcttcctgcttgcggcgtccgccaattcccttccctacccaaaccctagagcaaagctgaatggccctcgccacgagctcgcgagagactctgcgccgccgccggtgactgctgatccgcccgccgccgccgcgcccggtgctttgtcacgcaggaggcgacggtatggcgtcgaggcagcacaatgcacagttccacaaatccaagacgctcgacaacaaatacatgctcggagatgagatagggaagggggcgtacggccgcgtatacaaggggcttgacctggagaatggcgatttcgtggccatcaaacaggtctcgctggagaacattccgcaggaggatctcaacataataatgcaagagatcgaccttttgaaaaatcttaatcacaaaaatattgtcaagtatctgggatcactgaagacaaagagccacctccatattattttagagtatgtggagaatggctcacttgccaatattatcaagccaaacaaattcggacctattcctgaatctttggtggctctttacattgctcaggtgttggaaggtcttgtttatctgcatgaacaaggtgtcattcatagagatatcaagggcgcaaatatactgagtaccaaagagggtcttgtcaaacttgctgattttggagttgccactaaattgactgaagctgacatcaacactcattctgtggtcggcactccatactggatggcgcctgaggtcattgaaatgtccggcgtttgcgctgcttctgatatctggagtgtgggttgcactgtaattgagttgctgacatgtgccccgccatattatgatctccaacctatgcctgcactgttccgtattgttcaggatgtgcatccaccaataccagaaggactgtcacctgaggttactgattttctccaacagtgtttccaaaaggatgcgatgcaaaggcctgatgcaaaagcattattgatgcatacatggttgcaaaacttaagacgagctttgcctggttctcttcggcaacctactccattgaggaacatcgatggtgatgatgaaggctcaagaggtgataatagcttgggtttttgcgacacaccaggagatattcaaacaactattacttctaatgttgaccaggagaatgggagtaaagaaccaattatggactctactgtacaaagtaaatctgaagagcttcatgatggaaatttaaaacttactgagggcagtagttcaaacagtgtggcgcttatgaaagataatgtggtccttaataaaggtccgacactagttttacatgagaagttaccggtggaatcttcatctggaggtgctgatttgaatggcaaagtaatggcacatgaactattgcaaggtggtccgccaggtaaggtagagctggagaataaagaaagttcaagtagtgatgtgttctcctttcaggctggaagacagaatattggcttccaaaaggtggttgaaccttcagttgttgaggggccaaaacagcttagtagatttagtgacaaacctgaagatgcctctttggaagacttatttccaccaaatgataaatggggagataatggggctgaaccttcaacatcaactactgtccaagaacttaaatataatggtgtacaaaatgcgttcttgaaggggctcaatgctagggtggagaagcaaaaagaaaatgataacgagtctatgaatggtggaaagctaattgaatttgccatgcaactagaaaatattgacgcgttgggttttggtgaacatattcctggagagagtcttttccctgtgcagtctgtggaatacaacaaaatagtagcacaactgagaccaggggaaagtgaagatgtaatactgttggcatgccaaaagcttctatcaattttcagttaccgccctgagcaaaaacatatttatatggcacaaaatggtttcctcccgctgatggaactccttgaaattcccagaaatcgtatattatgctctgttctgcagcttatcaacaacattgtaaaagatagtacatgcttcctagaaaatgcttgccttgttggccttattccagtggtgatgaattttgcagagccaaatcgtccaaaggatgttcgggtgcaagcatccttgtttcttcagcagctttgtcaagccagcaccctgacattgcaaatgtttgttgcatgccaagggatccctgttttggtaagctttatggagcctgactatgcaaaatacagggatatggttcatcttgcaattgacggcatttggcaggtcttcaagctccagcattcaactccaagaaacaacttctgtcgtatagcggcaaaaaatgggatgcttcctaggctggtgaatacactatatagcctgaacgaagcaacaagatttgcttcagtctcagggtcaggtgcttcagtaacacagaatggctcaaccccccgacgaagatctggccaattagacccttcagttcttgaaagttgcaaggcaaggctggatcatcatcattcatctggttctctgcaatctctacaaacagacgcagataagcaccatatattaatggactcgtcatctcctaggtttagtgataaaaccggcagtaacttggagaggaatgataacgacttggttattcggccacagaggcttagtgtttctgctggaaggacatctacagacagatcaccaaagcatgtagaactagtttcaaatggtcatattagcggtcaaaatgaccaggtccgacctctactgagtttgttggagaaagaaccaccttctcgacatatatctggacaacttgattacgtttgccacataactggattggaaaggcatgaaaccattttgccactattacatacatcgacagaaaggaaaacaaatggtgaacttgacttaatgatggattttgctgaggtctctagacatggaagagagaatggccatctggactcgagtataaaagtttcaaatagagttcatagtatgaaatatgcaccttcgacaagtgcctctaatgaaggagcatcaacttctggagctgcatcgcaaacagcatctgatgtggcacgcgaatatcttgaaaaagtagctgatcttcttttggagtttgcacaggcagacactgtggtaagatctctgatggccagccaaagccttcttacaaggctttttcagatgtttaacaagatagaacctcctattcttcttaagattcttaggtgcattaatcatttgtcgggtgatcctaattgtctcgagacacttcaacgcacagatgcaatcaaacatctgataccgattcttgagctttgtgatggacctctggtttttcaaatacatagtgaggtcctcaatgctttgttcaacctttgcaagattaataaaagaagacaggaacaggcagctgaaaatggaatcattcctcacttgatgaattttgtcatgtcagactcacctctgaggcagtatgccctgcctttgctgtgtgatatggctcatgcttctcgcaactctagagagcagttgagggctcatggaggactagatgcgtacttaaatctgttggaggatgatgtatgggcgtgcacggcattagattctattgctgtttgtttggctcacgataatgatcatagaaaagtggagcaggcactgttgaaaaaagaggcaattcaaaagttagtgaagttcttccaagactgcccagaacagtattttgtccatatattggactctttcttgaagataataatgaaatcttctaggctaaacacagcaatggccaccaatggcttgacagcattgctcattgcaaggcttaaccatcgagacgctattgcccgcctgactctgctgaaactcataaaggttgtctatgagcatcatcctcgaccaaaacaggtcatagtagagaatgacctccctcagaagctacaaaacctgattgaagaacgcaggggtggacaacggggcggccatcaagtgttggtcaaacaaatggccacctcattgctgaaggcgctgcacatcaacacagtattgtgattttgatgggtcatgtgttttcctctcaagttagtgtttacgttttcgctagaggaagaaaaggggcgtccttctctttttgcctccttttctgctgtggtggcttctcacgagcaccagactcatttgttgtacctgatccctccttttttgggagaaaggttcaacgttttggtgcaggataaaatgggcttgctatcctccagtgctgtgtatatctagcgtatgttagtgaagaaattgcaaattagacaatctaattaaaaaaatttaaaccatattgacattttgttccgtgtgttagtagattttccctagcctgacccacttgcaccaagcaaaatggttgatatcgtggacgtctttaacaggatgcaagaaagcatcacatagttcttttgatgcattacattac

SEQ ID NO: 8309 - DNA, 2575 bp, Zea Mays
gaatgtcaccttctgttttgcagttccttcaaatgccagatagcccactggagacaaggtcacaaagatgaatgtcatccaccaactgttaatactaggcccgatgatgaaggaaaggctgaagagggaagagctgcccaagagaatgtatcagttggtgttaaacaggtttctgaaatgaacaaaccagctgttggatcagaaacttctgatttaaaccataatttgaagagctcaaatggtaaaagtaaacatacgctttcagaagcagtatgtaccagtgcaaaggttcctggaggtcatcagtccaacagcacggtcgaaatttctgaaaatgttccagtgtctgttgacagtagtaagatgggatcaagtatgaaacatgcaaatgcaaattttggtgaagatggttcttccaccaaggacttaaatggggtgtcaccatataggtcaggttcaacagcgaataaccttgcaacatctctgaagaaaatggtcaggcagcaaactgcaccaaaagttgtgaggcattatccatcagaatctacactcttcccatatgaactttttgtgaggctctatgtcaaggttgagttgcgcccgtttggtcttcataacctaggcaacagttgctatgcaaatgctgttcttcagtgtttgatgtttactcgaccactcacaacatatcttttggaagggcttcactcaaaaaactgttctcaaaacggatggtgcttcatgtgtgaatttgaaaaactcattgtggagggcaaacggcgcaagattgccttgtcaccaactgggatactctctcatttgaatgacattggcagtagctttggtcctggtaaacaagaagatgctcatgaatttcttaggtatgcaattgatgctatgcaatctgtatgcacgaaggaagctagaaaaggaggtgttcttcggtcagcggaagaaacaactcttgtccaattgatatttgggggctatttgcgatctaagatcaaatgttcaaggtgccatgttagttctgaacaatgtgagcccatgttagatcttactgttgaaatagacggtgacattagttcgctcgatgaagcacttgtgcgctttacatccacagaagccttggatggagaaaacaaatatcactgcagcagatgcaaatcttatgaacgtgctaaaaagaagctgacaatagaagaagcgccgaatattctgactattgcactgaaaagatatcagtctggcaagtttggaaagatcagcaaagccatcagatttccagaaaccctcaacatagtttgctatatgaatccagatactgatgacatatcgccagtttacagcctctatgcagtggttgtccatcatgatgtcatgaatgctgccttctctggtcattatgtatgttatgttaaagatacacatggaaagtggttcaaggcagatgacagtcaggtgaaacctgtatctctggacaatgttatgtcaaagtgtgcttatatgctgctgtatgcaaggtgttcaccgagggcaccgagctctgttaggcaggctatttcggacccagcacgcccgaagaaggccaaacagaaggtggttccaggaggaacaacatggcgaggaggttctttcaacaggcaccaagatggtcagcggcatagcaaccacacggcagatgaccttacccatgcatttgacgaatataggaatgcaccatattcgccttcagattctccgagtcctagtgagagttcatccctctttagcaactctgatgcagggtcgcacagcactgtaagcaccgatagcagcgagagcacgaggaactcgaccagcaccgaggagtatgagtatgtgttcggagctgctgatcagatgtacccaggaggccccatgggaggagcacctgtggagagtgatcaaatgtacccaggaggccccatgggaggagcacctgtggagagtgactattctacgtattcccgatccaggtccagcttgaataccagctcatcaggccgggatgcatacagtgcggctagctctgccgaccacaagcatcaggtcgtcggttccggtgggcaggttgagggcgatgagagcacgtccttgttgtatactgacagaagtaatcagcagttgagcagtaagttaacagaccaatataggcagttagatgggagcggacatgaccctggagaaaccaggggcggtgtcttattgagaagaccatctagggacaggaccgctcaaacattttattgatgtgcagggtttgggctgtagagaaataatgtaatgtagcctgtaatattatctcgctgcattgtgtaaaaagagaagagagatgtcgtagtccataaaagttgaatccccaacttggtgatataatcccgaggaacctgtaacaaatgtcacgtattccacgggatcgacgtaggactgtaggagtagatcataagattaatgcaaaagttcattgaacacagactctgaaatctgtgggcctggcaacgctcaaacagatggcgtgtcactactcactagtaggctcgattttttgcaagtacaa

SEQ ID NO: 8310 - DNA, 1189 bp, Zea Mays
gctggttgcctggttggattcctgatgaattgttttatccagctgagctgatagccttagcctcatttcaggtcatggcaatagttgcagattttatgcttgtatggcttcctgctccaaccgtgtctttacagccaccactagcgatgaattctggagccattgctaagttcttctacaactgcccagataatgccttccaggttgctttgtctgggacgtcatactcacttttgcagagagtaggagcaattttgaggaatggtgcaaagctttttgctgtcggaactagtgcctctctgattggcactggtgtgaccaatgcactgataaaagcaaggcaggctgccagcaaggattttgccggtgaagttgagaatattccaattttatcaactagcgttgcatatggtgtgtacatggcagtttccagtaacctcaggtaccaggttttagctggagtgattgaacagcggatgctcgagccactactgcaccagcacaaactagtattgagtgcagcatgttttgcagttcggacagggaatacgtttttgggttccctactgtggatcgactatgccaggtggataggcgtacagtaggctcaagcatgggtacacaaatgcagttgctcggagttccagcaatatgggttcttcgtgattttatattaccacgcttcctccaactggcaagtactcgtttgcttcatgggagactcttaggacagattttgatatcattctttaaacaatgccttgaggaaagcgtgatttatcgaaattgttcccgcaagcaagagagtgaatttgttttgagggcttaaggttgtgttgtgcgtgttggattggattgattaaaattcgtagtttcgtacagttttgtcattgtttgtgcaagttcctgtgatttggttatcgtggtcgagcaccatttttgctggccatgcctacaccaaagtttggcattactggcaaacatatccgggtgttgtcacgagaagaaaaccattctaacaagtgggcttaaaagtgaaagtgagcccaaatacaaacaaaaccaacgaaaggagttggtagaccgagtgcaaacagcaaaaaatagtaaaagtagatcacagcacgtcaaaaaaaacagagggccggcaatgccttacgagctgtaaatattcgcaacgagaaattca

SEQ ID NO: 8311 - DNA, 1727 bp, Zea Mays
ttgccttgcatttttcatttgccagatctaccccaccgctagtagttgttgtagtactatactacactcctctccttcttggctagctagcaattcaaccagctctctctctctctctcttttgtatgtatgtatatgtgtatataaataaccgtgcacgcagtgtgactagcaagcagtacacagaggatctggtaagcaactaagcaagtgtactgaggacggaggcatcgatccagcgttccagctagcacgcacgcagccagcacccagcacccagcagtagaatctatatatcgtacgcaagtagtggatcgaggcatctatctgcagtccctttcttcttcttcctcttgattgataggtgcgccgaagcttgttttgttgggtggcctttgtctctgtcgtctcgtctcgtctcgtcttccgcccggccgccaccacctgcaggctatactagctagctattaagtccggccaaccaagcagctcgatcaggtcggtcgacggcggggacagttcggagggaggaggcggccggagaccgaaggacgcctaccatcaactcgcggtcctggccgcgctgccgaaaaattaaaggaagaggacgaaggctgaccgatggacgatcgttatcctcatcatcagtcgtcgatggcgacaccggcagcagcgagcaagatgagcaagaagctgcagggcggtggtgaccgtagtagtggcagtagtagtaggggcagcggcaacagtgataagcagcaggtgccggcggcggcgatgaggaagggcccgtggacagaggaggaagacgctcagctggtctgaggcgcaccggcaagagctgccgcctccgctgggtcaactacctccacccggggctccggcgcggccgcatcaccgccgacgaggagcgactcatcctccagctccacgcgcagtggggcagccgctggtcgcgcatcgccaggagcctccccggccgcaccgacaacgagatcaagaacttctggaggacgcgcgccaggaagcagaaggcggcggcgcagcagcagcagcagcagcaggacagccggagcagcaagacggcgacggcgtcggcgttctcagggtcagcgtcgtccgtgactaccaccacgtccagctgctctggctctcctagtccgaccagccgcggctgtggcacggccacgtcatcgtccgctctgaccgagtccgcgctgcggcaaagcggcggcgaagacgaggacgccgagctcgacgaggcgtccaccaccaccaccaccacggcaagccagcgtcaacaccaagacgacgaccaccagcagcagcaccaggagtgctacgcctcggaccacttctggaacgacatcgcggcggcggaggcggccatctacatgttgatcgacggcggctggacagggtccggccccggccatcccgccgccgatccgccttcgtcgccggcgtgggagtactgctctgattactcgctctggaggatcgacgacgacgagtactacgagaagatgctcgactcctcctcctgattcgattatccagccatcacacgcatatgcatatctatcattagcttatttctttcttttttttgtgctgattagtctagcatacagcagctatgagaatccaaagcttcggttcggctttcgttgcatctctttgtataatactgtaacatatctatatatatatatgtatgatatgat

SEQ ID NO: 8312 - DNA, 2153 bp, Zea Mays
atttttggtgtgatctgaccagccgaccagggcaccggctcggcttctactaaggactcggtggaaatggagttcttcaccgagtacggagaggcaagccagtaccagatccaagaagtcattggtaaaggcagctacggggtagttgctgcagctgtagatacccgcaccggtgagcgggttgctatcaagaagatcaacgatgtgtttgagcatgtctcggacgccacacgcatactgcgggagatcaagctccttcggttgcttcgtcacccagacatagttgagattaagcacatcatgctccctccatctcggagggagttccaagatatttatgttgtttttgagctcatggagtctgatctccatcaagtgatcaaggccaatgatgacctcacccctgaacatcaccagtttttcctgtaccaacttcttcgtgctctcaagtacatccatgctgctaatgtatttcatcgtgacctaaagcccaagaatatactggctaactcggactgcaaactgaaaatatgtgactttggtcttgcccgtgcatcatttaatgatgccccttcagctatattttggacagattatgtggcaacgaggtggtaccgggcacctgaactatgtggttcttttttctccaaatacactcctgcaattgatatttggagcattgggtgcatatttgctgaacttctcactggaaggccactatttcctgggaagaatgttgtacaccaattagatattataacagatcttcttggaactccatcatctgagaccttatctcggatccgaaatgagaaggccaggagatacttaagctgcatgcggaaaaaatatcccgtgccctttactcataaatttcgaaatgccgatcctttggctcttcgtcttttagagcgtttacttgcatttgatcctaaagatcggcctactgcagaagaggctctagctgatccatactttgcatcccttgctaatgtggaacgtgagccatcaagacacccaatttctaaacttgagtttgaatttgaaagaaggaagctggccaaagatgatgttagagaattgatctatcgagagattttggagtatcatccacagatgctggaggagcacatgcaaggtggagaacagattagcttcctctacccgagtggagttgatcggttcaaacggcagtttgcacatcttgaggagcattatagcaagggagaaagaggttctccactgcaaagaaagcatgcttctttaccaagggaaagagtggttgtatcgaaggacggtgatactgatcaacatattaatgaccaggagagaagtgcagattctgtcgcccgcaccactgtgagccctccaaggtcagaagacgacgacatgagcgatgtgaaatccacaagcttaagctctcggagctacctgaagagtgcgagcataagtgcttccaagtgtgtcgttgccacgaagaaacacccggaggacgatggaatcgctgaggaaatggaaggcgccgtcaatggattgtctgaaaaggtctccaggatgcactcgtaagcaggactgcccctggcaacagcaaccttgttgcaaggtttctgtctctggtacactgtattccgacgacagccttggaaaggcaaacactgtatgtcacacagcagtacagcacactgtgctgcgaggttgggttttgcttgcgtacatccatccacagctagttcgactttacctgggtggaagaggaacacaccaccgcctgatggccctttcttcatcgtctgcatttccaccgtgtcatgccagcgctgcgtggcacctctagaaggtagaagccctgcatggattcatgaagaattcctaagatgtagcactagtcagtgcatggaggaaacatagtcggcctgtcgaccatgagatgttttcttgcaaatggagtctggacctatggttttcagttttattacaacggcttctgccgtaggaagtgtcagcagtgtatcatccctgtaatacccaatttataagagaccatataaaaggagaaaaatcatttgctttatgtatgtgtataacatatccacttatcatcacatgtgaatgccatatttaaagataaataactaataaaaagttataccact

SEQ ID NO: 8313 - DNA, 853 bp, Zea Mays
aataggtgattgatttctcgatttgggtcgattggagcaatcgttggctattctatcggcatgaataattgatgagacaaactcaatgtcaaacatatttctttgagttttcttcattgatagagtcaaaggcataaagataggacgacaactgacagcacacccctgactaagcagtggagaggtaaagcatcacagtagtctggaggaaaccgacaacacaccggtgaccaagcagtggagaagaggagcatcacagtagtctcgcattgcttatggattgtggggaatggaaccactctgttcaacagcaattttgtttggcaaaagattgtcaaggacacaagggatagaggttgtttttaaatgccactgatgagaaggagttgttgaatgcaattttcaagcttgctgttgagtatcctcacgcggacaatttagctggcgaggagacaaggcagcgattgagtaccaggataagtctattcaatgtcgctgaggcaacagttacaagatcctagaagaaaacccgtggcagctctacactacaataaaggtgataaatatgtctcacccaatggaaggcgcgaggatgttgcagcattcgaacaacgccaacgagctgctcttgcgccggaagctggaggagcagcagcaggctgccgaacttcagcacgccattgagctccagagccgccgcctcatgggtctccagctgctcgacctcaaggctcgcgcagctgcgacagcagcggcggcatcggcactgccaacaccagttgccaatgccttcgcgtccagccatcctttgagcaccatggcagtcgagtcgccactagagtccggagagtag

SEQ ID NO: 8314 - DNA, 3098 bp, Zea Mays
ctagtagtaggtagtagtagaggagaacagccactcagccagccccctttacttgcacacaatagacaacctcgaacagaaaagaagcagttttgccgtccgagatgagccgccactgtgtgactctccttgtgatcatctttggattactgcagatggctgtggctctctactctaatccaagttcaacgcacccgaactgcacggagagatgtggcaacgtcagcatccaatatcctttcggcttcggatccggctgcttccggcagcccgatttcagcctcacctgcgacggcggcggcggcggcaaccagccgcccaagacctttctgcatgacggcatcaccgaggtcttgcccgattccggtgtcacggtgggtctgtcaaggcttattgatgtagccatttcccacaccatctttatggcacctggtattcctagttacaacttctcgtggaatctcagttctttcactatgttggatggctcattcaacgtaactgggtgtgacttcgatatatatcgtcaagaaccgggcaagaatggttccataccgcggtgtacaaatagctgcccccaaaacatcaccgagacggtggccagacagaactgcaatggaaccgggtgctgccgtctttacgttggagaagttgttcctgatttccagctgaaatttgtgctccacaataatgacactagaggtgatcatgatgctctttctaatggaagcaccctgtggaatacaataaacattaccagcaactgggcccaaatcttatgggatatagatgatcaaccgacatgctccagagcgaaggacaaaaatataaactacgcatgtgtcagcaactacagccattgctttgacgctgaactgtttgatattggttatagatgtggttgtaacagcggttacgtaggcaatccctatgtagttgatggctgcaagcgtgacgaaggatatagtccaaatcaactgaaggaaaactgctcgaggtcctgtggtaatatcagtgttccatatccctttggtttagaggaaggttgctctgcaaggaagctatttaaactcaactgcagaaatgcgacagcgtctatgctccaattcgatgacgaccgtgttgtggcgtttataaatgttgcagagagtctcgtgggcatcaggtttacctcacatttcgaagatgatcagcttgggatatatgtaccaggtgaacccgatctctttatgggtcttggggaatcagtggtctcaatgcactgggcagctgccaatcttacatgcgacgaggccctgaaaaataaatcacaatatgcatgtgtcagttcaaacagcaaatgtttaggagtcaattcaaaggatggttatattggatacagatgcaaatgcttagatggtttccaaggaaatccatataccatcagtgatggttgtgaagatatcaatgaatgtaaaacacaacacatttgcaaagagaacgaggtatgcaacaatgttgtagggagctactactgcaccaattgccctgataaaacagagtacgatgcagcaacaaaccagtgcaaagcaacaaaacagctgggtcttgttttgggtgtgattattgggctttgtgttggctttggcattctagtatcttgcttgggcgggatgcttgtcatccgtagatggaaaagggacattcaaaagcaactacggagaaaatactttagaaaaaaccaaggacttctcctagaacaactaatatcatctgatgagaatgcccgcaacaatacgaagattttttctctggaagagctcaagaaggctacaaatgactttgatacatcacgcatacttggacgtggaggccatggaatggtttacaaaggaatcttgtcggatcagcgtgtggtagcaataaaaatttccaagatcatggagcaaggtgaaatcgacagttttatcaatgaggtcgccattctttctcagataaaccaccgcaacatagtacgactcttcggatgttgtcttgaaactgaggtcccacttcttgtgtatgatttcgtatctaatggttctttgttcgaaattctccatgccgctgaggcaagcaacgatttccagttgtcttgggacgattgcttaaggattgcattagaggctgcaggggcactttattatctccattcttcagcttcagtctcaatcttccaccgtgatgtcaagtcctcgaatatacttttggatggaaactacactgcaaaagtttcagattttggtgcgtcaaggttggttcctattgaccaaacccatgttgttacgaatattcaaggcacttttggctacttagatcctgagtactaccacactgggcaactaaatgagaaaagtgatgtgtatagctttggagtggtacttgtggagctactccttcgaaagaagccggtttttacaaatgagactgggacaaagcaaaatctgtccaactatttcctttgggaaaagaagatgaaacctgttacagagatagtggcttctcaagttctcgaggaagcaacagaggaagaaattaacatggttgcctcccttgccgagaagtgcttgagactccgtcacgaagaaagacctacaatgaagctagtagaaatgactctacagtttttgcgagcagagcggttgaactcaagtagtgatgttcctgcgagcaagcaagaggtggaagaacttttgggtacaagcacttcctattctgacactttgctggacaataaagctgctacaacatcccaacaatcaaagggatattatagtttggagcaggagtttgcttctactactctaccacgttagatttgtcactcgagtgtgaattattaccgttgtcatttacgttataattcgtgaaccaaacaacacctcggtgcgttgtcatttacttgttattctgtcatgaaaaagtatattgactatggcagcaaacgtagcagcaccttgaaacacattattacagattcttcagttcattcttaataatcttcccagagcactgtctattagatatcatcttcttcatctctattctgcaacaacaagaccatatgttgtagagtagat

SEQ ID NO: 8315 - DNA, 3605 bp, Zea Mays
ttaagatggagggagtactagcacaagtgtagttggcaggctatttaccgatgatcaatttttattaccagagggtgttccacttcggcaagggcaagagcgagggcaacaagaccatgaaggaactgctgggcggcaagggcgcgaacctggcggagatggcgagcatcgggctgtcggtgccgccggggttcacggtgtcgacggaggcgtgccagcagtaccaggacgccgggtgcgccctccccgcgggcctctgggccgagatcgtcgacggcctgcagtgggtggaggagtacatgggcgccaccctgggcgatccgcagcgcccgctcctgctctccgtccgctccggcgccgccgtgtccatgcccggcatgatggacacggtgctcaacctggggctcaacgacgaagtggccgccgggctggcggccaagagcggggagcgcttcgcctacgactccttccgccgcttcctcgacatgttcggcaacgtcgtcatggacatcccccgctcactgttcgaagagaagcttgagcacatgaaggaatccaaggggctgaagaacgacaccgacctcacggcctctgacctcaaagagctcgtgggtcagtacaaggaggtctacctctcagccaagggagagccattcccctcagaccccaagaagcagctggagctggcagtgctggctgtgttcaactcgtgggagagccccagggccaagaagtacaggagcatcaaccagatcactggcctcaggggcaccgccgtgaacgtgcagtgcatggtgttcggcaacatggggaacacttctggcaccggcgtgctcttcaccaggaaccccaacaccggagagaagaagctgtatggcgagttcctggtgaacgctcagggtgaggatgtggttgccggaataagaaccccagaggaccttgacgccatgaagaacctcatgccacaggcctacgacgagcttgttgagaactgcaacatcctggagagccactataaggaaatgcaggatatcgagttcactgtccaggaaaacaggctgtggatgttgcagtgcaggacagggaaacgtacgggcaaaagtgccgtgaagatcgccgtggacatggttaacgagggccttgttgagccccgctcagcgatcaagatggtagagccaggccacctggaccagcttctccatcctcagtttgagaacccgtcggcgtacaaggatcaagtcattgccactggtctgccagcctcacctggggctgctgtgggccaggttgtgttcactgctgaggatgctgaagcatggcattcccaagggaaagctgctattctggtaagggcggagaccagccctgaggacgttggtggcatgcacgctgctgtggggattcttacagagaggggtggcatgacttcccacgctgctgtggtcgcacgtgggtgggggaaatgctgcgtctcgggatgctcaggcattcgcgtaaacgatgcggagaagctcgtgacgatcggaggccatgtgctgcgcgaaggtgagtggctgtcgctgaatgggtcgactggtgaggtgatccttgggaagcagccgctttccccaccagcccttagtggtgatctgggaactttcatggcctgggtggatgatgttagaaagctcaaggtcctggctaacgccgatacccctgatgatgcattgactgcgcgaaacaatggggcacaaggaattggattatgccggacagagcacatgttctttgcttcagacgagaggattaaggctgtcaggcagatgattatggctcccacgcttgagctgaggcagcaggcgctcgaccgtctcttgccgtatcagaggtctgacttcgaaggcattttccgtgctatggatggactcccggtgaccatccgactcctggaccctcccctccacgagttccttccagaagggaacatcgaggacattgtaagtgaattatgtgctgagacgggagccaaccaggaggatgccctcgcgcgaattgaaaagctttcagaagtaaacccgatgcttggcttccgtgggtgcaggcttggtatatcgtaccctgaattgacagagatgcaagcccgggccatttttgaagctgctatagcaatgaccaaccagggtgttcaagtgttcccagagataatggttcctcttgttggaacaccacaggaactggggcatcaagtgactcttatccgccaagttgctgagaaagtgttcgccaatgtgggcaagactatcgggtacaaagttggaacaatgattgagatccccagggcagctctggtggctgatgagatagcggagcaggctgaattcttctccttcggaacgaacgacctgacgcagatgacctttgggtacagcagggatgatgtgggaaagttcattcccgtctatcttgctcagggcatcctccaacatgaccccttcgaggtcctggaccagaggggagtgggcgagctggtgaagtttgctacagagaggggccgcaaagctaggcctaacttgaaggtgggcatttgtggagaacacggtggagagccttcgtctgtggccttcttcgcgaaggctgggctggattacgtttcttgctcccctttcagggttccgattgctaggctagctgcagctcaggtgcttgtctgaggctgcctcctcgttggcaaccggattgcctgctgctggtggatgtggtgatcaacagtattattacagagccatgctatgtgaacattactagtagcagtgctcataaaagctacaatcccatctcccttttttttccagtcatgtaaaacttccaaactgctccatggttcaaaactctgttcttcaatacatcatcaattatcgattatatacgtggcaaggttttttctttgtttgcttttttcttttctttctggcatgtgtttttttggttttcttggtgtgtgtgtgaggtgtgcatgtcgctgttgaggcccttgctgcacagaccacctcaaactttaagcctcgaaaaagctggtactatttttttagaactctggagtctggtcaatatgcaattgactggtttgcttctgaggctcttcttgcattcatgcctttacggccactctttggcacctgtaacacaggtaaaaaaaatgttaaaagatggttcaggaacacagcagttttcaagccagggaaactgtactgtacagaaaccaagagatcgttcgacatacctgtgcccgcacatctacctaacattctcgaggaccattgccgatcaaaggcccacacatcgtcttcttgttccggcagttgataagaacctagtacataagagacagtacatcatcaaaataaggagcaggtgaaaagcaccatctgcagtatgcagtatgcaacctggcacatggcatactatgtgatactgtacatgagtacaggaaaggatagcttattacaatatcggtgagttacgacacacaaattatagacatttgtcaggataaagaagttatgccgttttgttgcgcagtgtcccacgccatgattaatccaaaccactgattgactcattttttt

SEQ ID NO: 8316 - DNA, 602 bp, Zea Mays
aaagatcttgcaaagtgttgtgctcaacagatcacagagaacatcctaggagaaataggagatagaaacttctctattcttattgatgaatcacgtgatgtatctgttaaagaacaaatggcggtgatattgagatatgtgaataatcaaggccatgtgatggaacggtttcttgccctcaagcatgtcaaggatactacatcagatgccttgaaggaagctatttttggccttcttgatcaccatggattatctatatccaagatcagagggcaaggatatgatggagcatcgaatatgcgagcaagtgttgagagaatattttcggcaatgaacatcattaagagagaattgcgtaacaaaattgaaaatgattggatgaatgatttgatggtttgctatacggagaaagagatattcaaatcccttgatgatgagactattactagaagattccagcgtcttaaaactagaagaatgcaattgcctcgagtcacaactacaagattgacaacttagtgattggatttttgttggtgattttggtgccacactacagattaagagagaaatttcgttgtgcatatggaggtagaaatggg

SEQ ID NO: 8317 - DNA, 4190 bp, Zea Mays
aggtttgttgctttatttcctgacttagagcaatttcttgacccttatgcagagctggtccacatggattcaagattcagggaatgttggttcctcctgcttaggcaattcgggctgcaagttttggcaccgcaatcatctaatataaatttcatggaatggtggcatgaagcaaatgaagctattcagggtcccttcagagatggcctaaactctcttattgtgctaggtgcttgggccttatggaatcatagaaaaacacatgcatctttgatggttttgctccggaagttgtcacaatttctggatccgataggtggtaaatttctgcattttaggcattactctgataattcaaagtctccttttctgtatcggtgcagactagaagggactgtaagtgaatatgaggcccttttgctaacagaaagacaacaaaatgaagcagctaatgctgcagttgctgaatctcaagcaagaagtgaagcattggtaagcaagctcgaagatgctgtgaaacaaaatgatctcctccatgaagctgctcaaagatttgaagaagctacaaaaaatttggaatcttcactaacatttgagaagcaacggcatcaggcaaatttgatagaattagatgaagcgcgagaaaagattgaagaacttcaaagagaagttggggacactgatgaaaaatccaccctgcttcagactagtatacaaagccttgaagaaaggttaggagagaaggatgctctattgacaacagaaaggctagaaagtgaagcaactaagaaatcgctcaatgaatctgaggatagaaacaaggacttactaatgaaaattgaagttgctgagaaagacattgctcacttccaagaaactgtccaaagaaatgaagaaaatatggcagcactggaaacttcgttgagatctgaaaggcagcaaaaggatgcaatcatgaaacaactagctgaatctcagggtgaaataggagagctgcaaaggaagcttgaagatgctgatgccagaaatgggcttcttcaagattctttgcagagactcgaagaaagtacagcagataaagattctttattggctacagaaagacatgaaaacagtgaaaccaagaaggaattagctggttctcagaaaaagattgcggaattgctaactgaagtgcaagataccggtgcatatattgcagaacttgagggctcggttaggagacttgaacaagatgtctctgccaaagaggtcttattgcttacagaaaagcaggcacacgaggcaacaaggaagactctcactgaagttcaggaaaaaagtgaagaacttctgaagaaaattcatgataatgataaacatattcttcagcttcagtttactatacagaggcttgaggaaaccacagttgcaaatgagaatttgctgttgagggagagggagcagaatgacacaacaacaaaagcgcacaatgaaagtcaagaaaaatatgaagaattactaaagaaatttattgatgttgacaggaaaatcgaccttcttcaaggtaccatagaaaggcttggagaaaatacaacagcaaaggattctctgttgctatcagagagacatgaaaaggctgctattaagaaagcacttactgaggctgaagagaaaaatgaagagttactgatgaaagttgaagatgctaatgaaaaaataggacaccttcaaactaagataaatatgcttgaagataatgtagccgcaaaagatgtttctttagaagctgcaatcaaggaaaatgacgcaaccaggaaatctcttactgaagctcaagagagaaatggtgaattactcaagaaaatcagtgacagtgactacaggatccatttacttcaagacacggtacaaaagcttcaagtagatgcaatatcaaggttgtcgtcttttgtaatggaaaaacaagaaagtgatattgcaaagagagccgttactgaagctcatgaaagaaatgaagatttactaaagagaaatgaggacctcctcaagaggaatgatgatttgattaagaaaattgaagactctagtaaaattgtcactcaacttcaggaagctctacaaagacttgaaggaaaagcatccaacttagaggttgagaaccaagttcttcgtcaacatgcaacttcaactccaccgtctactgctaaatctccagcttcacgctcaaagatctcaaggatccatagaagtccagagaatggccatattttgaatggtgacattaggcaaactgaaatgaagccctcaactggcacatcagcagcaattacctcagtagctaatgttcctgacttgggcgaccaaaaggagtttgaacatggagaaaaactgcaaagaataccaaaacagaaatatcagccttcccataaccagcagccccaagacgatcagcagtggctagtcacttgtatttcacaatatcttggattttctgggagcaaacctgttgcagctctccttatataccaatgtcttctccattggaaatcatttgaagccatgaagacgggtgtctttgatagcattttgcatgctataaactcagccacagaggttcaaaatgacatgagaacattggcgtattggttgtccaacttatctacattaacagttttccttcaacggtcattcaaaactactaggaccacaatctcaactccacaaaggagaagattttcgtccgagaggatgtttggaaatcaaacttcaaatgctgggcttgcttatctcagtggtcaatcagttggatctgctggattgctccaagttgaagcaaagtatcctgctttgctattcaaacagcagctcgtggatttaattgaaaaggtttatggcatgataagtgacagcgtgaagaaggaactaaaccctttgcttgaattgtgtatacaggatccacaaacttctcagtcaagtattgcaaaaggtaatcttaatggcatgggtcaacagaaccaactcacacattggctgggcatagtgaaaatcctcactagctacttggatgtactaagggaaaatcacgttccctcaattctggtgcataaacttttcactcaaatgttctcacttattgatgttcaattatttaaccgattacttttgcggcgtgagtgctgttcttttagtaacggggaatatatcagagctggactagctgaactaaaacattggtccgacaatgctacaagagagtttgcaggttcagcgtgggaggcattgaggcatattagacaagctgttgatttcctggtgatttctcttaagccaatgaggacattaagagagatacgcactgatgtgtgccctgccctcagtatacaacagctagagcgaatagttagtatgtactgggatgatgtgaatggtacaaacactatttcagcagagtttacatcaagcttgaaatctgccatacgtgatgaatccaatatggccacaaatttctctatactgctagatgatgattccagtatacctttttcacttgatgatattacaaagacattgccggtcattgagctggctgatgacgactttctgccatttgtccatgaaaacccaagctttgcgtttttattgcaaagaggggagtagtcttttttttttgtcaccattgtgacttcacctacctgtggataagtcaggattcctgctaggatgtacagtacgcgtgattctttttgtaccaggtagcaaggcatcaaagattagatgctaggtgagcttataggcttctggtttctattgatttgtttgttggttgtatatttgtattcaggttttccttgccattttttctacttgtagccgttttttgggcttgtatactaggtggtaagggcagaagaccctgccctgtaagcatagttacacaaggtcttgctgtaggtatggaagctgtacatgtgttgtaacggattataaaagggggaaagtagtgcgtagtgatggctttgtggttggtgtgttgcttacctttgatcaatgatcatgtattggttcgtcatatattgtttattgtactgcacaccattccattgtagataacatacacgctcaagacttgttctgggatgtcaaatgagtaatctgttacggtacagaaatgtcatgcttacttccagatcttctgtaatgaacacaaa

SEQ ID NO: 8318 - DNA, 1849 bp, Zea Mays
ctaaaacctgtttgtcggtggtttatttgtcagggaggaaagggttaggagggcctggctgttacagccaggatgatgtggatgccctacgggctcttgcagaagagccagggattgacgatctgttcttgacatatccttttttcccttatactgtttctttcactgcttgctaatattaatattgagttgctttgtgttagcatctattctggatgcatcaaatttaggttcccttgacagtaacgagattgcactaatgaatggccgactggagtggtcagtgggtctgacacttccaatgtgcctaatcaggttttggatcccaatgggtatgatcctattgttgctgaattggttgctgagattaaaccaagatatcacattgctggcacaaaaggtgtcttttactcaagggaaccatatgtcaatgattctgctgctcatgttacccgctttattggacttgctaatgttggaaacaaagagaagcagcatctgtcatgtccagtgctgatatcaatgccaagcctccaaacgccactttgtcaccatatgttggttcagcaaaatcagttcctatcgaagaagctccaaaacgtgcagcggagaacatagattcacaatattggcgttatgatgtcaagcggcaaaggcatggggaagctggtgggggtggattgtgtttcaaatttgtatcctcaggatcctgtcaaagagggagtagatgcagttataggcatgatgaagaggcagtggagcattaccagagaaatgtctgttttgattttctaaacaaaggaaaatgtgagaggggcccagaatgcaagtttgttcacagtctttctggggagactgctctaagggatgcaagacctcctagtgaaagaagacgagtggagagcagttgctggttctgcttgtcgagtccagatgtcgagtcacatcttgtcattagcatcggtgaaggttactactgcacacttgcaaaggggccacttgttccaaatcacgttctaatgattcccgtggaacactgccccagtacattgatgatgcctccggaagcagaggcagaacttgggagatataagattgctctgagtaagtactttgagaagcaaggaaaaactgcagtctactttgagtgggtttcaccacgctctcaccatgcaaacctgcaggctgttcctgtaccattgtctaaagcagacgctgttaacaagatatttcatctagcagccaaaaaactgggatttgaattctctatggtgaatccagatggtgcaaaaactgctagagaatcattgatgtctcaatgcgaaagcaaatcagggctgttttatgttgagctcccggaaggtagaattctcttgcacatggtcgacagtaacgagaagttccctgttcagtttggacgcgaggtgttagcgggactgctaagcatggcggatcgtgcagattggaggaactgcaagatttcaaaggaggaagagattaaactggtggacgatttcaaacaaggtttccgcgaatttgaccctgcagagtgaaaacaatgctctgcgcctgtgtttttgttttgcaatttgtagtctatttttgaggtctcatttgaaatggacatatatgaagcacaagaatgtagtaacgttttccaatgccgcaatttttgttttagggctagttttggaaccacatttttcaagggattttcattctcctaagcaaaattagttcattttcttttgtgaaaataggttggaaaaatggtgttttcaaactagcccttagataaacgtatgtctgatctcggcgtgagtgggcacgcctagggatgaaaacggac

SEQ ID NO: 8319 - DNA, 2306 bp, Zea Mays
tgcacgcagagtgttcgacaaaatggccagggaagggcatgaggtacgaggccatgtgtgcgcgggactgcatggcatgggcaaggaggggatacgagcggacactgtcacatggaaccccttgatccatggcctgttcaaggatgccagggtgaaggaggcggctcagctcttcacggagatggtagcgacacaggtgatgccggacaatgtgacctagaccacactgattgatgggcagcagttcaatcagttcacttacaaggctctcatccatggattctgcaagccaaggagctagatgaagccaaggaaaccttctttcacatggttgatgaaggtgctttgaatgcatcttatatcttatggttccagttagtaaaaaaagcgacctagtgctggagattcccatatgagtggagtggggtctgtctgatatggttccagttagtaccactagctaattgcaaggaccgcatttggcagttgaaatggcactaagatcattgtgtcgctatcgtaggcaaccagtttgcaatctcactgattatcttgcgagaatatcataaactatatcttctgatgacgtggttgcttttgctgtatgctgggttttcacccaattatatcatattttcatggcttgtcgatggtttctgcaagaagaacaatgcagatgcaatgctagccacccctgatgaacttacggaaagaggccttccaccagataaagcggtatatagatatctgattccaaggctttgcagaaaagggctggttgatcaggcacaataagtgtttgaccagatgcagggcaaaagccttagttggtggcagccttgtattcaccacacttgcatacacgtatctgacagaaggaaagcaagttattgcttccaatatcttggatgatatggcaaataatcaatacataacgcccaagttttacaaatgtctgtgtacctcttatgctgattgaaggaaacccttaatatgatgtgggtttgcggctttgcgctattttgagaggcttaatcacaaagagtgtacaaactgatgcaccaagcgaggctgggaccaatgaagcttgcagttgagaatggggtatgtgctcctgtttcaaggccaggctatctaggggcaggggctacacctgatacttgagtacaattggatcagtcttcgttggtgttatcgctgaataccttgatctttgagatgtattatctgggattgtgttgcagccaggtgtggaagatattcatcccttgcggctttcagctttgggtcagtattcagctccgaagaaagtattcaagccaaatgagaatatgaaaaacttctgtcaaggctctgtccaaagcgtataaggaagtctattggtgccaggcaaatatcgcttgattctttgggtggtgttggtggtacagaaactgtgctggactgcagaccgacttgctcaatgaaatttgccgcatcggggtgtgctgtcatcactgtgatcaggtcgatgagacagctgatcacctgctcactaattgtgcctatacggttctgttgaagatagatcctctgattactggtggagcacagacagttagtggactggtgcagaaaggcctcaattcttaagcatcagaatctcttatgttttcaaattcaatggtgctgcccagacatggcaggtgccttgctgcttgctgatgaggagctgcagctttggggaatggctgggggctctagggcttagactgtctccagcaacgttctctatatacattctctatatccgtcttttacagtgttctctaaaagatttcatctcctatatctactttctctccaacaacgtcctctaaatcacgtcctctatatgtaaatacctatattaaagacatttttaattttttaatttttgtacatacgtatttgtcatactctcaaatgtattgtacatattttagttttattaaagcggttgtttaaagtattcaaatagatagagaatcgtttagagaaactctacatatagaggatccagcagcgttctctaaatttagaggaccgtttagaggatgttgctggatggagtagaggacgtcctcgtcctctaaatttagggtacaggaccctttagagctccttgttggagctagtcttaccctagtacctaaggcatgcatgtaaaggtaagaacgggcagtaagttgtccttttgtataatggtgatgatatgcagctaatctctactactaattatgtaagtaacataggcgtccacactcgcacgttctgtcgcgcccgcg

SEQ ID NO: 8320 - DNA, 2363 bp, Zea Mays
caccagacacgccaaaagcgttattttaagggcggcgccaccactattgtcgcctgcttcaccctccctgctcactgccgcctaccctcgttgaagcgcgctctctcgctctcgctctcctcgcgcttcctcccactcccactggacagagaggagggttagtggaggtaacagcgttagctaggggggaagcacggaagcgggaagcaatggcgaccggcggcggcagcagcaggagcgacgacgtgcgcgggctcaagtttggcaagaagatctacttcgagcaggacggcgggagcgggagcggggcgggggcggtgggcggcaggaaggggaagggcgtggccaccggtggcgcgaggccggcgtccgccgcctccgcagcccagccgccgaggtgccaggtggacgggtgcggcgtggatctgagcgccgtcaagcagtactactgccggcacaaggtgtgcaacatgcactccaaggagccgcgcgtcttcgtcgccggcatcgagcagcgcttctgccaacagtgcagcaggttccaccagctacatgaatttgaccaagggaaacgtagctgccgccgccgcctcatcggtcacaacgagcgccggaggaagccaccacctggacctctcacttcacgatatggccggctcgctgcatcacttcaagagcctggcaggttcagaagcttcctgctcgacttctcgtacccaagggttccaagcagcgtgagggatgcgtggccaggaatccagcacggtggcgacaggatgctgggcaccgtccagtggcatgggcaccaagaacctcctcacccacaccgcagtgcagctgctggctatggcaaccatgctgcatacaactgccatggcggcttggtagcaggcggggccccaatgctctcctctgccgcctttgagctcccgcctggcggatgtgtcgcgggagttgccgccgactccagctgtgctctctctcttctgtcaactcagccatgggacacgacctcccacgaccaccggtccccagcaatgcccgcggccggcgccttcgacggcaccccggtggcgccgtccgtcatggcgagcagctacgcggcgtcgagcgcctggacgggctcgcgggaccccgctgccgacggcgccaggaacgcgcagcgtctcgacgatgctctgcacctggtccacccaggctccgcggcggtccacttctccggcgagctcgagctcgccctgcagggaagcggcgggccgccacacctgccgcgcgtcgaccatggcggctccggcggcggcaccttcaaccattccaccaccagcgcgatgaactggtccctgtagcagcactgcctgccttcatccggtcgccacgccacgagatgtggagggagcacttttgcattggacaccaccctggttttgtgcgccttaccttgccgttctcgttttttcagggtggagaaactgggattcctaaccatagtagatctaccgtgaattcccttcccgtgtagtagcgcattgcgtccatgaactcatttgatcgatcgtcgtgtcaccgtgtgcgtaactgcgtatctgtttggcgtaactgcgtatctgtttgttgaatctttccgaacattgcggacttcccatgctgcttcaagcaacaactcgggctataaatatatcgtactactggagaacctcggcgagctggtacggccgcgatgagttcggcagacaagacgcatggttcgcacggcgcgtggtctgtcatcgacgaggcgttcatgaaggctccgccgtcggacgacccggcttgctccgtgcaggtggacgctgtcgcataccgcgagaccatccagacctgggtggaagacctgcgcgccaagaacggggcgcgcccgctctcagcggccatgtaccgccgccggcgcgccctcaaccactgcagcgtagctctcgagttcgcccagcggcgcagggtggcggtgggcctggaggacgacgagctgtgccggtccgtgcaggccgcgatggacacccaggtggtcggttcgtgcgcctactgcggctgcaatttctccgtcgtggccgtggtcgccgtggggggcctgggcatggcctgcggcgtctgtttccggctggttcgagtgtacaacccggtgccgctggttcgcaaccccccggcgaacgcggaggagaggtggaagggctggctgccatggtaggcgcggcagccacgaaggacgcctacgcgattttcatgatcagcggaaatgtagcactgttctaacacacatctgatagactggttattttgcagttctattagtatttttttagttaagcaatagattgcatagattgcaa

SEQ ID NO: 8321 - DNA, 3238 bp, Zea Mays
cagccgttctcctctcagccgtcgccgtcgctctcctctcctccacactgctctcctctctcctccgagccgcagctcttctctctccctctcccctgcgcgccgccactgcgggcatctacaccgctgccgctcctctcttctccgagccgcagctcttctctctccttctcccctgcgcgccgccgctgcgtggccctacacgccaccgctacgggtgccctacgcgccgccgtcactgctccagctctcctctgtttcccagccaatgccgccgctctaactccccaaggcatcgccccgacgacggctcaacgacgccccgtcgacgcctcgcggacgccctgcgccgcagcgggcgctttacgctccatggcaaggcgcgttagatgcctcaggttccacgcgcgccttagcccctaagcgacgctaaggcggcgcttcaaggacgccttgataagcatgattgggaggttatctatgcttatagcttttgctctggggtgaaaacatggattacgactttggtggcacctcacccgatccctatgggggtggaagcatccacctagtgtgtgatcattgcggtaccagtgacaactacaccactgacgacgctgatgatggccaattcacgtgccgtacatgctctgccgtgcacactacacaggcaactgctgctgatcctcatgacttccccgccactggcaacatctctgtccgtcgtgttgccacccagcccacccccaagcttggtgcccgcacacccgcgccttacctgaggacccctcaggctgctcccgtgcctgctactgccgcttttgatgacttcacagagctgagtgagccgcgggactttgtgtctggatctggcacgtgtggggagcctgaggatctggcagtgcaggtccgctggcgctatgtacggggtctccaggtgatcctgcagcggcagctggaggtgctggtggagcggcaccagatgacaagaaacctgatgagatgaagtatgaatgggatgatgatatgtcgctccaacgaaaagacaggcacaagctggagtttgcctttttgcgttcgttgaggatgatgctgccggtttactcaacattggctgtttgtttcttggcctgtcatattgcccgtgaagccatcttgccaagtgacatttacaggtgggcaatggaggggaatatcccatatgtggctgcttttactgaagtagacaggttccttgggagctctttccaagactgccctttggatgcaaggcagctgttcaggccggtgcgagttatcggagcatggcaactggaagctgcagctggatccatagcacaaagagtagccttgaggcttccttcagttaacttctatgcaattgctcaacgttgtttgaaggacttgttactgcctatagatagaatcctcccccacgcatgccaaatttatgagtgggcaatgcctgcagaattatggttgtctagtaatcctgctagagtcccaacacgggtttgtgtgatggctatcctaattgtggccctacgacttctttataacatcaacggtcaagggatatgggagaagatttgtgaggaaggaagaaacccaagtgaatctcactatgatgcaaattcatctacttccaggaagcttgaggctagtaacagtgaggagtttggcacaagagaactgttgtgtgctatttcagttgcctatgataaaatcaatacgtcacatgactactcgagtgatctccgctcttatctcaaatactgcaaggaagttgtttttgctggaattacatcttcagatgaacagactcatctaatagagatcttttgggatatgtacaaagccagggaggatgataatatagaagatcatgtaaaatcccagtcccattctatggcagacattccaattacaaatggagtgaggaaacactaccgagatggagcttttgttaaagcaagttccttttctgcatcttcaggtcatgatgcaatgcaaatgctcaagtcagagatgcaagatcatggatttcattatatgccacctaggaaaccaaggaaatcagatggttatcttcgttataggcggcggcggctaagtggtggctttatttttgttgcacatgctgattattacttgttgctacgtgcttttgcaaagcttgcagaaattgatattcgtatcatgcatattagaataccccctccattccttctggaaaaaaacatgtggtgccattgcgtaactgtggttttgaagaatatacgtagcttgatacctcaggaattgagggcttctttctgtggcctcttggcattggtaagcaacctgagcacaaggacagggcaggatgtgggtctgtatttgctgaagcaatatgtaccaagaattatgccccccttctttagaacggacataattatatcagggtcctaatcagtactgtggtagattcagcaacagttccagtagtagacctcagtgcttggcagcaatggcactggggatctgcaatcatgaggcagtttcagtttgggaactggagtggcaagaggaaaaaggctggaacctgggctttttaaagaggctaatcagtactgtggtggattcagcaacagttccagtagtagacctcactgcgcggcagcaatggcactaagggatctgggttctgcaatcatgcggcagtttcagtttgggaactggagtggcaagaggaaaaagcatggaatttaggctttttaaagaaatgctatcagtattgtggtcgattcagcaacagttccagtagtggattcagcaacagttcaaggttagtacaattggtcttgtcaaagctgccgacagaactaaaaagatatccagcatagtgtaatgcatcttgatgtactgccgacatttatttcgttccagcttctgcagcaagagctgatcgtttcaaaggtgacgagaaattggtcgtactagagatgtactgtctattcgctgtatttgcaagtttaaaccaattattcgaactactgcagctgtaatccagagacaatataatatagaaaaaatagaagtcggtggttaaagccgtaacaaacatgctaacaaacatgctagtaggcttcaattgttaagggcttctttgtttcagcttttttgatgaacttttatgagaatctaactatggtgaaaatctgagtatcatgtgtattacatgcgtagaaagataaaa

SEQ ID NO: 8322 - DNA, 3459 bp, Zea Mays
cagccgttctcctctcagccgtcgccgtcgctctcctctcctccacactgctctcctctctcctccgagccgcagctcttctctctccctctcccctgcgcgccgccactgcgggcatctacaccgctgccgctcctctcttctccgagccgcagctcttctctctccttctcccctgcgcgccgccgctgcgtggccctacacgccaccgctacgggtgccctacgcgccgccgtcactgctccagctctcctctgtttcccagccaatgccgccgctctaactccccaaggcatcgccccgacgacggctcaacgacgccccgtcgacgcctcgcggacgccctgcgccgcagcgggcgctttacgctccatggcaaggcgcgttagatgcctcaggttccacgcgcgccttagcccctaagcgacgctaaggcggcgcttcaaggacgccttgataagcatgattgggaggtgaaaacatggattacgactttggtggcacctcacccgatccctatgggggtggaagcatccacctagtgtgtgatcattgcggtaccagtgacaactacaccactgacgacgctgatgatggccaattcacgtgccgtacatgctctgccgtgcacactacacaggcaactgctgctgatcctcatgacttccccgccactggcaacatctctgtccgtcgtgttgccacccagcccacccccaagcttggtgcccgcacacccgcgccttacctgaggacccctcaggctgctcccgtgcctgctactgccgcttttgatgacttcacagagctgagtgagccgcgggactttgtgtctggatctggcacgtgtggggagcctgaggatctggcagtgcaggtccgctggcgctatgtacggggtctccaggtgatcctgcagcggcagctggaggtgctggtggagcggcaccaggtaggcgcgtttgtgtgtgctgttgccggcattgtctgggtgcggtgggttgctgcatccagggtgtttgatggaatctgggcccgccaggtgcttgaggaccacaaggccgtggggagacagaagtgttatggtagcagatatgagctgtttttatgctttcccttgttaatcatttccatcggaagaactgaatggactctgacataaatctatctcttgttgcagatgacaagaaacctgatgagatgaagtatgaatgggatgatgatatgtcgctccaacgaaaagacaggcacaagctggagtttgcctttttgcgttcgttgaggatgatgctgccggtttactcaacattggctgtttgtttcttggcctgtcatattgcccgtgaagccatcttgccaagtgacatttacaggtgggcaatggaggggaatatcccatatgtggctgcttttactgaagtagacaggttccttgggagctctttccaagactgccctttggatgcaaggcagctgttcaggccggtgcgagttatcggagcatggcaactggaagctgcagctggatccatagcacaaagagtagccttgaggcttccttcagttaacttctatgcaattgctcaacgttgtttgaaggacttgttactgcctatagatagaatcctcccccacgcatgccaaatttatgagtgggcaatgcctgcagaattatggttgtctagtaatcctgctagagtcccaacacgggtttgtgtgatggctatcctaattgtggccctacgacttctttataacatcaacggtcaagggatatgggagaagatttgtgaggaaggaagaaacccaagtgaatctcactatgatgcaaattcatctacttccaggaagcttgaggctagtaacagtgaggagtttggcacaagagaactgttgtgtgctatttcagttgcctatgataaaatcaatacgtcacatgactactcgagtgatctccgctcttatctcaaatactgcaaggaagttgtttttgctggaattacatcttcagatgaacagactcatctaatagagatcttttgggatatgtacaaagccagggaggtcatgatgcaatgcaaatgctcaagtcagagatgcaagatcatggatttcattatatgccacctaggaaaccaaggaaatcagatggttatcttcgttataggcggcggcggctaagtggtggctttatttttgttgcacatgctgattattacttgttgctacgtgcttttgcaaagcttgcagaaattgatattcgtatcatgcatattagtgtgttgaaacttgagaagagactcgcatgtattgaggagcgaattgaaagaagcttgaacaccttacataacttttctactggaacagtagatgagctaagatctgtatctgactgaagttcctagtgtagtctcatactctgctagcatggaataccccctccattccttctggaaaaaaacatgtggtgccattgcgtaactgtggttttgaagaatatacgtagcttgatacctcaggaattgagggcttctttctgtggcctcttggcattggtaagcaacctgagcacaaggacagggcaggatgtgggtctgtatttgctgaagcaatatgtaccaagaattatgccccccttctttagaacggacataattatatcagggtcctaatcagtactgtggtagattcagcaacagttccagtagtagacctcagtgcttggcagcaatggcactggggatctgcaatcatgaggcagtttcagtttgggaactggagtggcaagaggaaaaaggctggaacctgggctttttaaagaggctaatcagtactgtggtggattcagcaacagttccagtagtagacctcactgcgcggcagcaatggcactaagggatctgggttctgcaatcatgcggcagtttcagtttgggaactggagtggcaagaggaaaaagcatggaatttaggctttttaaagaaatgctatcagtattgtggtcgattcagcaacagttccagtagtggattcagcaacagttcaaggttagtacaattggtcttgtcaaagctgccgacagaactaaaaagatatccagcatagtgtaatgcatcttgatgtactgccgacatttatttcgttccagcttctgcagcaagagctgatcgtttcaaaggtgacgagaaattggtcgtactagagatgtactgtctattcgctgtatttgcaagtttaaaccaattattcgaactactgcagctgtaatccagagacaatataatatagaaaaaatagaagtcggtggttaaagccgtaacaaacatgctaacaaacatgctagtaggcttcaattgttaagggcttctttgtttcagcttttttgatgaacttttatgagaatctaactatggtgaaaatctgagtatcatgtgtattacatgcgtagaaagataaaa

SEQ ID NO: 8323 - DNA, 3466 bp, Zea Mays
cagccgttctcctctcagccgtcgccgtcgctctcctctcctccacactgctctcctctctcctccgagccgcagctcttctctctccctctcccctgcgcgccgccactgcgggcatctacaccgctgccgctcctctcttctccgagccgcagctcttctctctccttctcccctgcgcgccgccgctgcgtggccctacacgccaccgctacgggtgccctacgcgccgccgtcactgctccagctctcctctgtttcccagccaatgccgccgctctaactccccaaggcatcgccccgacgacggctcaacgacgccccgtcgacgcctcgcggacgccctgcgccgcagcgggcgctttacgctccatggcaaggcgcgttagatgcctcaggttccacgcgcgccttagcccctaagcgacgctaaggcggcgcttcaaggacgccttgataagcatgattgggaggttatctatgcttatagcttttgctctggggtgaaaacatggattacgactttggtggcacctcacccgatccctatgggggtggaagcatccacctagtgtgtgatcattgcggtaccagtgacaactacaccactgacgacgctgatgatggccaattcacgtgccgtacatgctctgccgtgcacactacacaggcaactgctgctgatcctcatgacttccccgccactggcaacatctctgtccgtcgtgttgccacccagcccacccccaagcttggtgcccgcacacccgcgccttacctgaggacccctcaggctgctcccgtgcctgctactgccgcttttgatgacttcacagagctgagtgagccgcgggactttgtgtctggatctggcacgtgtggggagcctgaggatctggcagtgcaggtccgctggcgctatgtacggggtctccaggtgatcctgcagcggcagctggaggtgctggtggagcggcaccaggtaggcgcgtttgtgtgtgctgttgccggcattgtctgggtgcggtgggttgctgcatccagggtgtttgatggaatctgggcccgccaggtgcttgaggaccacaaggccgtggggagacagaagtgttatggtagcagatatgagctgtttttatgctttcccttgttaatcatttccatcggaagaactgaatggactctgacataaatctatctcttgttgcagatgacaagaaacctgatgagatgaagtatgaatgggatgatgatatgtcgctccaacgaaaagacaggcacaagctggagtttgcctttttgcgttcgttgaggatgatgctgccggtttactcaacattggctgtttgtttcttggcctgtcatattgcccgtgaagccatcttgccaagtgacatttacaggtgggcaatggaggggaatatcccatatgtggctgcttttactgaagtagacaggttccttgggagctctttccaagactgccctttggatgcaaggcagctgttcaggccggtgcgagttatcggagcatggcaactggaagctgcagctggatccatagcacaaagagtagccttgaggcttccttcagttaacttctatgcaattgctcaacgttgtttgaaggacttgttactgcctatagatagaatcctcccccacgcatgccaaatttatgagtgggcaatgcctgcagaattatggttgtctagtaatcctgctagagtcccaacacgggtttgtgtgatggctatcctaattgtggccctacgacttctttataacatcaacggtcaagggatatgggagaagatttgtgaggaaggaagaaacccaagtgaatctcactatgatgcaaattcatctacttccaggaagcttgaggctagtaacagtgaggagtttggcacaagagaactgttgtgtgctatttcagttgcctatgataaaatcaatacgtcacatgactactcgagtgatctccgctcttatctcaaatactgcaaggaagttgtttttgctggaattacatcttcagatgaacagactcatctaatagagatcttttgggatatgtacaaagccagggaggatgataatatagaagatcatgtaaaatcccagtcccattctatggcagacattccaattacaaatggagtgaggaaacactaccgagatggagcttttgttaaagcaagttccttttctgcatcttcaggtcatgatgcaatgcaaatgctcaagtcagagatgcaagatcatggatttcattatatgccacctaggaaaccaaggaaatcagatggttatcttcgttataggcggcggcggctaagtggtggctttatttttgttgcacatgctgattattacttgttgctacgtgcttttgcaaagcttgcagaaattgatattcgtatcatgcatattagaataccccctccattccttctggaaaaaaacatgtggtgccattgcgtaactgtggttttgaagaatatacgtagcttgatacctcaggaattgagggcttctttctgtggcctcttggcattggtaagcaacctgagcacaaggacagggcaggatgtgggtctgtatttgctgaagcaatatgtaccaagaattatgccccccttctttagaacggacataattatatcagggtcctaatcagtactgtggtagattcagcaacagttccagtagtagacctcagtgcttggcagcaatggcactggggatctgcaatcatgaggcagtttcagtttgggaactggagtggcaagaggaaaaaggctggaacctgggctttttaaagaggctaatcagtactgtggtggattcagcaacagttccagtagtagacctcactgcgcggcagcaatggcactaagggatctgggttctgcaatcatgcggcagtttcagtttgggaactggagtggcaagaggaaaaagcatggaatttaggctttttaaagaaatgctatcagtattgtggtcgattcagcaacagttccagtagtggattcagcaacagttcaaggttagtacaattggtcttgtcaaagctgccgacagaactaaaaagatatccagcatagtgtaatgcatcttgatgtactgccgacatttatttcgttccagcttctgcagcaagagctgatcgtttcaaaggtgacgagaaattggtcgtactagagatgtactgtctattcgctgtatttgcaagtttaaaccaattattcgaactactgcagctgtaatccagagacaatataatatagaaaaaatagaagtcggtggttaaagccgtaacaaacatgctaacaaacatgctagtaggcttcaattgttaagggcttctttgtttcagcttttttgatgaacttttatgagaatctaactatggtgaaaatctgagtatcatgtgtattacatgcgtagaaagataaaa

SEQ ID NO: 8324 - DNA, 979 bp, Zea Mays
cacacaccggccggcccctatcacccgtttcctcacgacggaacgggacgatgccgcagcagtcagcgtaacaaaaagaaagcaaagggtgaaaggggaagggggagaataatctcggtttttagcacgcaaacacacggcacgagcagctgagcgcccatggcaggtccccggcgtctcctactcctcgtcccgctgctcgtgctcctcggcgcgcacccgccgcagtgcgggtccgcggaggaggggacgaaggtctccctggagctctactacgagtcgttgtgcccgtactgctcgcggttcatcgtcaaccgcctcgcggggatcttcgaggacgggctgatcgacgccgtccacctccggctcgtcccctacggcaacgcgcgcgtcgcatccaacagcgagatctcttgccagcatggtccgtacgagtgtctgctcaacaccgtggaagcttgcgccatcgacgcctggccggatctggatgtgcatttcagcttcatctactgcgtggaggacctggtggtgaaacggcagtacaaggactgggagtcctgcttcgagaagctgggcctcgaccccaagcccgtaacagaatgctacaaaagcgagcatggccacaagctcgagctcaagtacgcgaaccagaccgacgctctcgagccgccgcaccggtacgtgccctgggtggtcgtcgacgggcagcccctgcttgaggattacgagaatttcgaggcttacatctgcaaggcttacaagggcactccaccgaaggcctgccagggcctgggacgtctgcagatggccctcgagacagcggcggaggcgcgcaacggcgtcagctacaactccggtgtcagcaagcttgcgactgctgaagatgagggtggggagcataaggctatgaccctgagtggggtgtggcgccgcgctcaccgcatcggcacgacgacggcacatggcatgagatctttgg

SEQ ID NO: 8325 - DNA, 1438 bp, Zea Mays
caagtcgtctccctcccgtgtcttgtccactgtgcggcatccttcctggcaaaatcacctccgaggcacggcgttgcgtccacctgccgtgtacgcattcccggcgcggctccgttgcgttccagtcagtgcggcgacgccgccaacgtctcacatggcttgtcggatctcaaggtgtagatgataaagttatgagcatcagggccgatccatttatctatgaggggcatactttacatgagctacaggtgctcaggcaattcctagctagctattaccactaaggagagaatcagagactgaaaaagcaatggccgatcttgttgttggcttggccaagacagtggtggagggggccctgaccaaggctcagtcagcgattgaggaggagacaaaactgcagcaaagcgtgcagcacaaccttgtgttcatcgctggcgagtttgagatgatgcactccttcctcaatgttgccaatgaggagcgtgtcaagaacaacgttgtgaggacatgggtgaggcaggtccgtgatctggcatatgatgtggaggactgcatagagtttgtcacccacctggacaaaaagtcaagctggtagcgccaaatgctgccaccttgcttggcagcatcagcattgcccataaaagaggcagtcactgagatagagcagctcaaggttagggttgaggacgtgagccgaaggaactcacgctacagcctcatcagcgactctggatccaagcccatcatgcagcaacagacggcacccaaaactatttttggcacaatggtgcttgacatgatggttgaggcgagggacaccgcaaaaaggcagcaaggtttaggagatctcacccagctactaacaaaggaacaagctgacctgggggtaatctcagtgtggggaacaggcagtgaactcggtacaacatccatcatcagaaaggcctaccaggacccagaactctgtcaaaaatttgaatgtcgtggctgggtgaagcttacacaacctttcaatcctcatgagtttctccgcagtatggtcgcccagttctacgcaaacagttgcctgcaaaatggaatggttataaatgtcgatgaactgaagaggattgaggaaatggcgacaacgggaggcggactcattggggcatttatggataaagtaaatgagaacagatacctaatcgtcctggaaaatctgtccacaattggagattgggacaccatcggaacttacctgccagacaggaagaatggcagtcgggtcattgtatccacacagcagtgtgaaattgcaagcttgtgcattgggcattcataccaagtagcagaggtgaagcagtactcagcagagcactctgtatgtgtcttcttcgaggaggcaacgacgctgactatggatgatttgttggccaatgagcgtaatgaatttgaa

SEQ ID NO: 8326 - DNA, 3695 bp, Zea Mays
atggccgatcttgttgttggcttggccaagacagtggtggagggggccctgaccaaggctcagtcagcgattgaggaggagacaaaactgcagcaaagcgtgcagcacaaccttgtgttcatcgctggcgagtttgagatgatgcactccttcctcaatgttgccaatgaggagcgtgtcaagaacaacgttgtgaggacatgggtgaggcagcgccaaatgctgccaccttgcttggcagcatcagcattgcccataaaagaggcagtcactgagatagagcagctcaaggttagggttgaggacgtgagccgaaggaactcacgctacagcctcatcagcgactctggatccaagcccatcatgcagcaacagacggcacccaaaactatttttggcacaatggtgcttgacatgatggttgaggcgagggacaccgcaaaaaggcagcaaggtttaggagatctcacccagctactaacaaaggaacaagctgacctgggggtaatctcagtgtggggaacaggcagtgaactcggtacaacatccatcatcagaaaggcctaccaggacccagaactctgtcaaaaatttgaatgtcgtggctgggtgaagcttacacaacctttcaatcctcatgagtttctccgcagtatggtcgcccagttctacgcaaacagttgcctgcaaaatggaatggttataaatgtcgatgaactgaagaggattgaggaaatggcgacaacgggaggcggactcattggggcatttatggataaagtaaatgagaacagatacctaatcgtcctggaaaatctgtccacaattggagattgggacaccatcggaacttacctgccagacaggaagaatggcagtcgggtcattgtatccacacagcagtgtgaaattgcaagcttgtgcattgggcattcataccaagtagcagaggtgaagcagtactcagcagagcactctgtatgtgtcttcttcgaggagggattgcaaggtaatggtgataaaagcatggaatctgatagagtagtagacaacaacaatgaaatgtcaatgcaggatgaaataacccacggtactggctttctgtccgacagaattccaacatctaaacggaaggatgcctctgattgggtgaagaattttcaacttgttgaacgcaagtcagaaatgaaccaactcgataatgaaggggtcgtatttaatgtcaaaggtctagaagacaaagcagccctcaagcttttcaaaaagcaggtacataggcaaaaaccatcatctcctataaaggactccatagatgaagagctacaagaacttattttgaagtgtggtggtcttccaaaagttatagttgccgtagctaactttttggcacctaaaacagtctcatggatggacagtgcaagttctatgaatctcaaatttatgcaagagctggagagcagcccagagtttgcttgcctgcagccactctttggttggctgcactcctactttcgaacatgcccggattttctcaagccatgtatcttctatctgtcaatttttcctcgagatcacagtatccggagaaggcgattggtgagacggtggattgcagagggctatgccagggacacggacaaaatttctgcagaggaaagaggggagcagttcttctgcaggctcctcgatctgagcataataatgcagaaaccatattcagtcaccaccggattcagagacagcagaatgactttgtgtcaagtcaacagttttgtccgagagtatatcatctctcgtcaaatggaagagaaccttgtatttgaactgggaggcagttgcaccctaacctctcagcgcatggggcgtcacctcatcatactgaaaagctgggacagagacagaattgtgtttgagagcattgacttctcaaggctacgatctttgacagtgtttggagaatggaagccattcttcatatctgataggatgaggttgcttcgggttctggatcttgaggatgcatctgatttaaaagatgaagacctcaaacaaatgatgaagctgctttgtcgcctcaagtatctttccctacgaggatgcactgggatctatagcctgccgaattcattaggttgcttgaggcagcttgagactctggatgtcagacatacagccatagcaaccatgccaaggactatcaccaagctaaagaagttgcagtacctccgcgctagtaccaccaaaccaactaaggaacaaccaacacccgatactgctgttacacccaaaccaacaaagaaacaaccaaatccacacacctcggtatcatggacgtcatccttgttccacagacatcgacaactagagggtgttgtggttcctactgggctagagaaattgactgcattgctcaccatcggtgttgttaatgtcaattctgctcgggggaggtccatcttgaaagaggtcaggaagctcacccaattgcgcaagcttggagtgtctggaataagtaggaacaacagcaaagatttctgtttggccatctcaagtcgtgcgcatttagactccttatcagttaagctcaagaaggacaatcaggactgcttgtgtgtcaccccagatggctaccttccccccaagaacctacagagctttaaattgtatggccttgcagacagttttccaaaatggatcaatcaacttgaaaatctcaggaagttagttttggagatgactatattaacgcaagatactatcaagggactcaaggatcttaaagtatgtattctgcgtctaattaccaagcagcttcctgatggtaagctcaatttttgtgtcatgttgcatgggcagcaattacgttgctatgaaacagtgaagatactcgagatctcttgcagctccagcttagatgtggcttttggatcacaatcactgcaaaatcttgagctgctgaaagtttcctgctgtagtggttcagggtcggtaatgaagctctctgggctagaaaaactgtctgaatctgaactcaaggaagtccagattaagggttccgatgatttcatagtaaaaacagatgtggaggaacaacttgccaggcacccaaagaaacctgttttgaaggttgaaaaggtactgtcgtccactggggattttgagctctagagtgtcagtttcctatcgttacgatatcaaggattagtgactggtgctgtttgcttcctcttatttcttcagtgctattcgatccaatctaaccgattagaaagatcagttatgcagccatcgtgccaataataaactgtgaaacctgaaagcttccttcttggccacatattgatcagtctatttttcttgtgcctgtggtttatttattcctactgcatagtcccagtctggatttgttctaaaagatatggatggtgtgcaaatgtgtttatgtatatagagaatgttggaccagtgaattgctattgtacttttctgttgctctcatgtattgtagtttcgtggtgtatcttgctacatccatgttctcttgtggttgtttgtgtgtacatttgttttgaatggtttttgcgatgttactgttggtgcctttttggggacgccaatcactgcgtgagaaccggcggcggtgccctctgcagaggctcggatggtccgtagccaggggccggacggtccgcgac

SEQ ID NO: 8327 - DNA, 3817 bp, Zea Mays
cgtgagtcaagtcgtctccctcccgtgtcttgtccactgtgcggcatccttcctggcaaaatcacctccgaggcacggcgttgcgtccacctgccgtgtacgcattcccggcgcggctccgttgcgttccagtcagtgcggcgacgccgccaacgtctcacatggcttgtcggatctcaaggtgtagatgataaagttatgagcatcagggccgatccatttatctatgaggggcatactttacatgagctacaggtgctcaggcaattcctagctagctattaccactaaggagagaatcagagactgaaaaagcaatggccgatcttgttgttggcttggccaagacagtggtggagggggccctgaccaaggctcagtcagcgattgaggaggagacaaaactgcagcaaagcgtgcagcacaaccttgtgttcatcgctggcgagtttgagatgatgcactccttcctcaatgttgccaatgaggagcgtgtcaagaacaacgttgtgaggacatgggtgaggcaggtccgtgatctggcatatgatgtggaggactgcatagagtttgtcacccacctggacaaaaagtcaagctggtagcgccaaatgctgccaccttgcttggcagcatcagcattgcccataaaagaggcagtcactgagatagagcagctcaaggttagggttgaggacgtgagccgaaggaactcacgctacagcctcatcagcgactctggatccaagcccatcatgcagcaacagacggcacccaaaactatttttggcacaatggtgcttgacatgatggttgaggcgagggacaccgcaaaaaggcagcaaggtttaggagatctcacccagctactaacaaaggaacaagctgacctgggggtaatctcagtgtggggaacaggcagtgaactcggtacaacatccatcatcagaaaggcctaccaggacccagaactctgtcaaaaatttgaatgtcgtggctgggtgaagcttacacaacctttcaatcctcatgagtttctccgcagtatggtcgcccagttctacgcaaacagttgcctgcaaaatggaatggttataaatgtcgatgaactgaagaggattgaggaaatggcgacaacgggaggcggactcattggggcatttatggataaagtaaatgagaacagatacctaatcgtcctggaaaatctgtccacaattggagattgggacaccatcggaacttacctgccagacaggaagaatggcagtcgggtcattgtatccacacagcagtgtgaaattgcaagcttgtgcattgggcattcataccaagtagcagaggtgaagcagtactcagcagagcactctgtatgtgtcttcttcgaggaggtacataggcaaaaaccatcatctcctataaaggactccatagatgaagagctacaagaacttattttgaagtgtggtggtcttccaaaagttatagttgccgtagctaactttttggcacctaaaacagtctcatggatggacagtgcaagttctatgaatctcaaatttatgcaagagctggagagcagcccagagtttgcttgcctgcagccactctttggttggctgcactcctactttcgaacatgcccggattttctcaagccatgtatcttctatctgtcaatttttcctcgagatcacagtatccggagaaggcgattggtgagacggtggattgcagagggctatgccagggacacggacaaaatttctgcagaggaaagaggggagcagttcttctgcaggctcctcgatctgagcataataatgcagaaaccatattcagtcaccaccggattcagagacagcagaatgactttgtgtcaagtcaacagttttgtccgagagtatatcatctctcgtcaaatggaagagaaccttgtatttgaactgggaggcagttgcaccctaacctctcagcgcatggggcgtcacctcatcatactgaaaagctgggacagagacagaattgtgtttgagagcattgacttctcaaggctacgatctttgacagtgtttggagaatggaagccattcttcatatctgataggatgaggttgcttcgggttctggatcttgaggatgcatctgatttaaaagatgaagacctcaaacaaatgatgaagctgctttgtcgcctcaagtatctttccctacgaggatgcactgggatctatagcctgccgaattcattaggttgcttgaggcagcttgagactctggatgtcagacatacagccatagcaaccatgccaaggactatcaccaagctaaagaagttgcagtacctccgcgctagtaccaccaaaccaactaaggaacaaccaacacccgatactgctgttacacccaaaccaacaaagaaacaaccaaatccacacacctcggtatcatggacgtcatccttgttccacagacatcgacaactagagggtgttgtggttcctactgggctagagaaattgactgcattgctcaccatcggtgttgttaatgtcaattctgctcgggggaggtccatcttgaaagaggtcaggaagctcacccaattgcgcaagcttggagtgtctggaataagtaggaacaacagcaaagatttctgtttggccatctcaagtcgtgcgcatttagactccttatcagttaagctcaagaaggacaatcaggactgcttgtgtgtcaccccagatggctaccttccccccaagaacctacagagctttaaattgtatggccttgcagacagttttccaaaatggatcaatcaacttgaaaatctcaggaagttagttttggagatgactatattaacgcaagatactatcaagggactcaaggatcttaaagtatgtattctgcgtctaattaccaagcagcttcctgatggtaagctcaatttttgtgtcatgttgcatgggcagcaattacgttgctatgaaacagtgaagatactcgagatctcttgcagctccagcttagatgtggcttttggatcacaatcactgcaaaatcttgagctgctgaaagtttcctgctgtagtggttcagggtcggtaatgaagctctctgggctagaaaaactgtctgaatctgaactcaaggaagtccagattaagggttccgatgatttcatagtaaaaacagatgtggaggaacaacttgccaggcacccaaagaaacctgttttgaaggttgaaaaggtactgtcgtccactggggattttgagctctagagtgtcagtttcctatcgttacgatatcaaggattagtgactggtgctgtttgcttcctcttatttcttcagtgctattcgatccaatctaaccgattagaaagatcagttatgcagccatcgtgccaataataaactgtgaaacctgaaagcttccttcttggccacatattgatcagtctatttttcttgtgcctgtggtttatttattcctactgcatagtcccagtctggatttgttctaaaagatatggatggtgtgcaaatgtgtttatgtatatagagaatgttggaccagtgaattgctattgtacttttctgttgctctcatgtattgtagtttcgtggtgtatcttgctacatccatgttctcttgtggttgtttgtgtgtacatttgttttgaatggtttttgcgatgttactgttggtgcctttttggggacgccaatcactgcgtgagaaccggcggcggtgccctctgcagaggctcggatggtccgtagccaggggccggacggtccgcgac

SEQ ID NO: 8328 - DNA, 4125 bp, Zea Mays
cgtcgatcgacgcgttcatgccattgacccgtgagtcaagtcgtctccctcccgtgtcttgtccactgtgcggcatccttcctggcaaaatcacctccgaggcacggcgttgcgtccacctgccgtgtacgcattcccggcgcggctccgttgcgttccagtcagtgcggcgacgccgccaacgtctcacatggcttgtcggatctcaaggtgtagatgataaagttatgagcatcagggccgatccatttatctatgaggggcatactttacatgagctacaggcaattcctagctagctattaccactaaggagagaatcagagactgaaaaagcaatggccgatcttgttgttggcttggccaagacagtggtggagggggccctgaccaaggctcagtcagcgattgaggaggagacaaaactgcagcaaagcgtgcagcacaaccttgtgttcatcgctggcgagtttgagatgatgcactccttcctcaatgttgccaatgaggagcgtgtcaagaacaacgttgtgaggacatgggtgaggcaggtccgtgatctggcatatgatgtggaggactgcatagagtttgtcacccacctggacaaaaagtcaagctggtagcgccaaatgctgccaccttgcttggcagcatcagcattgcccataaaagaggcagtcactgagatagagcagctcaaggttagggttgaggacgtgagccgaaggaactcacgctacagcctcatcagcgactctggatccaagcccatcatgcagcaacagacggcacccaaaactatttttggcacaatggtgcttgacatgatggttgaggcgagggacaccgcaaaaaggcagcaaggtttaggagatctcacccagctactaacaaaggaacaagctgacctgggggtaatctcagtgtggggaacaggcagtgaactcggtacaacatccatcatcagaaaggcctaccaggacccagaactctgtcaaaaatttgaatgtcgtggctgggtgaagcttacacaacctttcaatcctcatgagtttctccgcagtatggtcgcccagttctacgcaaacagttgcctgcaaaatggaatggttataaatgtcgatgaactgaagaggattgaggaaatggcgacaacgggaggcggactcattggggcatttatggataaagtaaatgagaacagatacctaatcgtcctggaaaatctgtccacaattggagattgggacaccatcggaacttacctgccagacaggaagaatggcagtcgggtcattgtatccacacagcagtgtgaaattgcaagcttgtgcattgggcattcataccaagtagcagaggtgaagcagtactcagcagagcactctgtatgtgtcttcttcgaggagggattgcaaggtaatggtgataaaagcatggaatctgatagagtagtagacaacaacaatgaaatgtcaatgcaggatgaaataacccacggtactggctttctgtccgacagaattccaacatctaaacggaaggatgcctctgattgggtgaagaattttcaacttgttgaacgcaagtcagaaatgaaccaactcggtaactatattgctaagataatgaaggggtcgtatttaatgtcaaaggtctagaagacaaagcagccctcaagcttttcaaaaagcaggtacataggcaaaaaccatcatctcctataaaggactccatagatgaagagctacaagaacttattttgaagtgtggtggtcttccaaaagttatagttgccgtagctaactttttggcacctaaaacagtctcatggatggacagtgcaagttctatgaatctcaaatttatgcaagagctggagagcagcccagagtttgcttgcctgcagccactctttggttggctgcactcctactttcgaacatgcccggattttctcaagccatgtatcttctatctgtcaatttttcctcgagatcacagtatccggagaaggcgattggtgagacggtggattgcagagggctatgccagggacacggacaaaatttctgcagaggaaagaggggagcagttcttctgcaggctcctcgatctgagcataataatgcagaaaccatattcagtcaccaccggattcagagacagcagaatgactttgtgtcaagtcaacagttttgtccgagagtatatcatctctcgtcaaatggaagagaaccttgtatttgaactgggaggcagttgcaccctaacctctcagcgcatggggcgtcacctcatcatactgaaaagctgggacagagacagaattgtgtttgagagcattgacttctcaaggctacgatctttgacagtgtttggagaatggaagccattcttcatatctgataggatgaggttgcttcgggttctggatcttgaggatgcatctgatttaaaagatgaagacctcaaacaaatgatgaagctgctttgtcgcctcaagtatctttccctacgaggatgcactgggatctatagcctgccgaattcattaggttgcttgaggcagcttgagactctggatgtcagacatacagccatagcaaccatgccaaggactatcaccaagctaaagaagttgcagtacctccgcgctagtaccaccaaaccaactaaggaacaaccaacacccgatactgctgttacacccaaaccaacaaagaaacaaccaaatccacacacctcggtatcatggacgtcatccttgttccacagacatcgacaactagagggtgttgtggttcctactgggctagagaaattgactgcattgctcaccatcggtgttgttaatgtcaattctgctcgggggaggtccatcttgaaagaggtcaggaagctcacccaattgcgcaagcttggagtgtctggaataagtaggaacaacagcaaagatttctgtttggccatctcaagtcgtgcgcatttagactccttatcagttaagctcaagaaggacaatcaggactgcttgtgtgtcaccccagatggctaccttccccccaagaacctacagagctttaaattgtatggccttgcagacagttttccaaaatggatcaatcaacttgaaaatctcaggaagttagttttggagatgactatattaacgcaagatactatcaagggactcaaggatcttaaagtatgtattctgcgtctaattaccaagcagcttcctgatggtaagctcaatttttgtgtcatgttgcatgggcagcaattacgttgctatgaaacagtgaagatactcgagatctcttgcagctccagcttagatgtggcttttggatcacaatcactgcaaaatcttgagctgctgaaagtttcctgctgtagtggttcagggtcggtaatgaagctctctgggctagaaaaactgtctgaatctgaactcaaggaagtccagattaagggttccgatgatttcatagtaaaaacagatgtggaggaacaacttgccaggcacccaaagaaacctgttttgaaggttgaaaaggtactgtcgtccactggggattttgagctctagagtgtcagtttcctatcgttacgatatcaaggattagtgactggtgctgtttgcttcctcttatttcttcagtgctattcgatccaatctaaccgattagaaagatcagttatgcagccatcgtgccaataataaactgtgaaacctgaaagcttccttcttggccacatattgatcagtctatttttcttgtgcctgtggtttatttattcctactgcatagtcccagtctggatttgttctaaaagatatggatggtgtgcaaatgtgtttatgtatatagagaatgttggaccagtgaattgctattgtacttttctgttgctctcatgtattgtagtttcgtggtgtatcttgctacatccatgttctcttgtggttgtttgtgtgtacatttgttttgaatggtttttgcgatgttactgttggtgcctttttggggacgccaatcactgcgtgagaaccggcggcggtgccctctgcagaggctcggatggtccgtagccaggggccggacggtccgcgac

SEQ ID NO: 8329 - DNA, 4468 bp, Zea Mays
aacacccctcactcgtcgatcgacgcgttcatgccattgacccgtgagtcaagtcgtctccctcccgtgtcttgtccactgtgcggcatccttcctggcaaaatcacctccgaggcacggcgttgcgtccacctgccgtgtacgcattcccggcgcggctccgttgcgttccagtcagtgcggcgacgccgccaacgtctcacatggcttgtcggatctcaaggtgtagatgataaagttatgagcatcagggccgatccatttatctatgaggggcatactttacatgagctacaggtgctcaggcaattcctagctagctattaccactaaggagagaatcagagactgaaaaagcaatggccgatcttgttgttggcttggccaagacagtggtggagggggccctgaccaaggctcagtcagcgattgaggaggagacaaaactgcagcaaagcgtgcagcacaaccttgtgttcatcgctggcgagtttgagatgatgcactccttcctcaatgttgccaatgaggagcgtgtcaagaacaacgttgtgaggacatgggtgaggcagcgccaaatgctgccaccttgcttggcagcatcagcattgcccataaaagaggcagtcactgagatagagcagctcaaggttagggttgaggacgtgagccgaaggaactcacgctacagcctcatcagcgactctggatccaagcccatcatgcagcaacagacggcacccaaaactatttttggcacaatggtgcttgacatgatggttgaggcgagggacaccgcaaaaaggcagcaaggtttaggagatctcacccagctactaacaaaggaacaagctgacctgggggtaatctcagtgtggggaacaggcagtgaactcggtacaacatccatcatcagaaaggcctaccaggacccagaactctgtcaaaaatttgaatgtcgtggctgggtgaagcttacacaacctttcaatcctcatgagtttctccgcagtatggtcgcccagttctacgcaaacagttgcctgcaaaatggaatggttataaatgtcgatgaactgaagaggattgaggaaatggcgacaacgggaggcggactcattggggcatttatggataaagtaaatgagaacagatacctaatcgtcctggaaaatctgtccacaattggagattgggacaccatcggaacttacctgccagacaggaagaatggcagtcgggtcattgtatccacacagcagtgtgaaattgcaagcttgtgcattgggcattcataccaagtagcagaggtgaagcagtactcagcagagcactctgtatgtgtcttcttcgaggagggattgcaaggtaatggtgataaaagcatggaatctgatagagtagtagacaacaacaatgaaatgtcaatgcaggatgaaataacccacggtactggctttctgtccgacagaattccaacatctaaacggaaggatgcctctgattgggtgaagaattttcaacttgttgaacgcaagtcagaaatgaaccaactcggtaactatattgctaaggcacgtgtctatggtttgcaaatactgtctgtgtgggggatagctggtgttgggaaatcagccctcgttaggaacatgtactttgacagaattcatcgaaatgaccaattatttgagaagtacggttgggttgatgtaacccacccattcaatttaagggacttctcccggagtttgcttttggatttccattcagaacctgttcaagccatgggaatcaaagaccctactcaagagtgtcataagattctagaagataaccggtgccttgttgttattgatgatttgcagtccattgaagaatgggacttaatacaagctgccttggtgtctagaccttctagaagtattatcattgtcattacaactgaagcaagtatcgccacatattgtgcagataatgaaggggtcgtatttaatgtcaaaggtctagaagacaaagcagccctcaagcttttcaaaaagcaggtacataggcaaaaaccatcatctcctataaaggactccatagatgaagagctacaagaacttattttgaagtgtggtggtcttccaaaagttatagttgccgtagctaactttttggcacctaaaacagtctcatggatggacagtgcaagttctatgaatctcaaatttatgcaagagctggagagcagcccagagtttgcttgcctgcagccactctttggttggctgcactcctactttcgaacatgcccggattttctcaagccatgtatcttctatctgtcaatttttcctcgagatcacagtatccggagaaggcgattggtgagacggtggattgcagagggctatgccagggacacggacaaaatttctgcagaggaaagaggggagcagttcttctgcaggctcctcgatctgagcataataatgcagaaaccatattcagtcaccaccggattcagagacagcagaatgactttgtgtcaagtcaacagttttgtccgagagtatatcatctctcgtcaaatggaagagaaccttgtatttgaactgggaggcagttgcaccctaacctctcagcgcatggggcgtcacctcatcatactgaaaagctgggacagagacagaattgtgtttgagagcattgacttctcaaggctacgatctttgacagtgtttggagaatggaagccattcttcatatctgataggatgaggttgcttcgggttctggatcttgaggatgcatctgatttaaaagatgaagacctcaaacaaatgatgaagctgctttgtcgcctcaagtatctttccctacgaggatgcactgggatctatagcctgccgaattcattaggttgcttgaggcagcttgagactctggatgtcagacatacagccatagcaaccatgccaaggactatcaccaagctaaagaagttgcagtacctccgcgctagtaccaccaaaccaactaaggaacaaccaacacccgatactgctgttacacccaaaccaacaaagaaacaaccaaatccacacacctcggtatcatggacgtcatccttgttccacagacatcgacaactagagggtgttgtggttcctactgggctagagaaattgactgcattgctcaccatcggtgttgttaatgtcaattctgctcgggggaggtccatcttgaaagaggtcaggaagctcacccaattgcgcaagcttggagtgtctggaataagtaggaacaacagcaaagatttctgtttggccatctcaagtcgtgcgcatttagactccttatcagttaagctcaagaaggacaatcaggactgcttgtgtgtcaccccagatggctaccttccccccaagaacctacagagctttaaattgtatggccttgcagacagttttccaaaatggatcaatcaacttgaaaatctcaggaagttagttttggagatgactatattaacgcaagatactatcaagggactcaaggatcttaaagtatgtattctgcgtctaattaccaagcagcttcctgatggtaagctcaatttttgtgtcatgttgcatgggcagcaattacgttgctatgaaacagtgaagatactcgagatctcttgcagctccagcttagatgtggcttttggatcacaatcactgcaaaatcttgagctgctgaaagtttcctgctgtagtggttcagggtcggtaatgaagctctctgggctagaaaaactgtctgaatctgaactcaaggaagtccagattaagggttccgatgatttcatagtaaaaacagatgtggaggaacaacttgccaggcacccaaagaaacctgttttgaaggttgaaaaggtactgtcgtccactggggattttgagctctagagtgtcagtttcctatcgttacgatatcaaggattagtgactggtgctgtttgcttcctcttatttcttcagtgctattcgatccaatctaaccgattagaaagatcagttatgcagccatcgtgccaataataaactgtgaaacctgaaagcttccttcttggccacatattgatcagtctatttttcttgtgcctgtggtttatttattcctactgcatagtcccagtctggatttgttctaaaagatatggatggtgtgcaaatgtgtttatgtatatagagaatgttggaccagtgaattgctattgtacttttctgttgctctcatgtattgtagtttcgtggtgtatcttgctacatccatgttctcttgtggttgtttgtgtgtacatttgttttgaatggtttttgcgatgttactgttggtgcctttttggggacgccaatcactgcgtgagaaccggcggcggtgccctctgcagaggctcggatggtccgtagccaggggccggacggtccgcgac

SEQ ID NO: 8330 - DNA, 2819 bp, Zea Mays
atgccgtgtcagtcgagtcccaggcttgcaccatgggacccgccatgcatcaccacgaggacgtcagccacgaaccactgcagggataagaacaacaagtggcatggagcgctacttcacgcaaccagaagaagggggtccgggcaacagatgaaagacttcttctctctctctgaagaaggaacaatgactgggtgggctgccgctgccgacgcaacctacgccgcagccctagccagagccgaggccttcatcggtatcttctccggcgacgagcacccacagtgctatgtaaaggtggatgtctcctacaaagagaagaggacttggtcgccgtggtcatggtcgtggaaggggtgccacggcagaaaaggatatggatcatctcgatatctctgtaccttcttcaccaagtactacctctgacagagaagatcagcctctgttgattccaagacaatccccagcttgctatgtaggaccgtcagaagtatccaccatgttactgaaccctaagatcaaccatcgttccgatgcgatttttggtgatcaggctgtggagcagctgaagttacgtcatcacaagcctctgaaatttcatgagagatatcgtccttacctgagagatgcaggtttgcttgggctctcacaaatttgccagaagatgcctcagttggacaaagcattgataactgcccttgttgagcgttggaggccagagacccatagcttccatttggcatctggggagataactgttacacttcaagatgttgcaatgttgtttgctcttcctattgatggtcgtccggtttgttctaccactgatcatgattatgcgcaagtggtccttgattgtttaggcctggatgcaaggggtccagcaatgcctggaaagtctttcctgcattacaaatggcttaagaaacacttttatgaattaccagaggaggtggatgatatgacagttgaaaggcatgttcgggcatatatactgagccttttatgtggggtgctctttccagatgggacaggaaggatgagtctgatatatcttcctctgatcgctgatctttcacgtgttagcacatacagctgggcttctgcagttctggcattcctgtaccgatctctttgctcggttgcctcctcccacaatatcaagaatattggtggttcattgcttctcttgcagctttggagttgggagcgctttcatgttggcagaccattggttcggtcacctttatgcacagagatgggcattgaacatgacttacctccaatcggcttccgttgggtggggtcacgcacacaaagtgagagtgctaatcgctgccttaagcagtacagagatgaactgaacgttcagcgagttgatcaggtgaagtgggaaccctacctgcagttgaaatgtatttgcccgagcgagtgatgcggcaatttgggcttcggcagtgcattccaccacctttccggcctacactacagtcgttacatcgtatcagtagacgtggcaaagaacgagagaactgggaagaaacacaccatgagtatatccaggaatgggaagcacgacgacagcgcatatttcgagatacagagcaatatgatccatcttcttatgaggagtatctgcgctggtactcaggagcaacacggcggtaccttgtcccagcaaccagtgacgacggtgaagcgggaccttcagctccaactgacgatttctcagatcttcagtaccaagccaaatctccaataatccgcaaagcagttgataaactggaaagcatggttaagaaagccaagagagccatgacaaccacagctgatacaaccactcaagccttggttgctgagtttctgcttggctttgaggatgtgttacaagatcttggcgagatccagaataatagtggttcaactgttccaccttttcacttggatagtccacattttgatgctgccgcaagtcaacagacacctcaacttttgcttgaagctgaggaaaatttaggtaccaaccaagaagcacaactagaggaagatgaagaacttaacacagtggagcgtgcttcattggcactggagactgtggaagaggaaaacgacttctccaacgacgtgctccctggaaatctttcactgggcgtggaggaagactgtgattcagccacaccagccaatgggatttgtgatgcagccactcccatgaccgatttggttgttcctcggtcagatgagggtctccatcaagatcaacatctagaagaccacaccgaaattgagccggctacattgatggtggagcctaagtgtgaggagggcgatggttccagcttcgtgctcccaccaagccctccagaactgatgctcgaggaacaggacgattcagggttaatagctctaggtactggatcatgtaccgaacagcagagccttggagtaggagaggctgaggatcaggaaaaccctcgcacaggcacagctcagcatggcatcatgatagtggagcgtacgggtgaggaaaacagcagttgcaatggcgtttattcttcctgcccaccgtcatctgtcattgttgaatcgagcagtgattatctgtgttagttatgtagggagtagaagctttttttatatttaaagatctgacatgagattgttagttcctttgttgctggtggcatggggtttgattctgtaacttgtttcgtcgtgattgtcttgataatatgagggtcttgaaaaccgggggccgttatacgccgacccagttggagtgtaatcctcagcgttccgttatacagcctcgtttgtct

SEQ ID NO: 8331 - DNA, 3046 bp, Zea Mays
atcgtcaccttcctcttccttcttcggttcttcgccagccgtgcgcgcttctccactgccctggagacaaaggagcaccccgcgatctcccggcgggacccggccccacctccccgcccgcgtgcctctgaaacggagaagctgccggttcccagccggccaggctactccgactcttcctttccctccagccggcgaggcgtccaagcggattagcggagagcgtcggggcggcgacatgtgggtgttctacctgatatcgctgcctctgacgctgggcatggtcgtcgtcacgctccgctacttcgccggccctgccgtgccgcgctacgttgtcgccaccgtaggatacgcatggttctgctccctctccatcatcatcctcgtccccgccgacatctggcagacattaactgccagtgcgaaggggggcattggattcttttggagctggtcctattggagcacatttatcctaacatgggctgtagttcctactatccagggctatgaagacgcaggagatttcactgttaaagaaaggctgaaaactagcattcatatgaacctgcttttttattcaattgtgggagccattggccttattggtgtcatattactcttaatcatgcatagagcttgggatggtggtattgtgggatttgcaatggcatgctcaaatacctttggattggtgactggtgcttttcttcttggttttgggttaagcgaaattccaagaaacatttggaaaaatgcatactggtctcaccgccaaaaagtactttctcatagagttgccaaaatggctgtaaagcttgataatgcccatcaagaatattcaaatgcaattgttgttgctcaagctacatcaaatcaaatgtcaaaacgtgacattttgaggccttacatggatattattgataacatgctgtctcaaatgctgcgggaggatccatccttcaaaccttctggtggtagattcggtgaaaatgatatggactatgatacagatgataaatcgatggccacacttcgacgccaactcaggagggcccatgaggagtactataggggcaaaagtgagtatatgacttgtgtcatggaagccctcaaactagaagacaccataaaaaattatgaacgccgtgatgctagcggatggaaatatgtatcaagttttagagacagacgttcgggcacacttggaccaattttggatactattggttgctgcttttgtacccttgatgtatatgttcatttgcacatattattcattattcaagattggtatgttgatgttctattccctgactccaagacaaaccagctctgtcagcttgcttatgatctgttcaatggttgcaagatatgcacctcctatctcttataactttctgaatctcatccgccttggtggcaatgctaaaactacatttgagaagagaatggggaacattgatgatgcagttcctttctttggcagaggcttcaacaagatctacccactgattatggttgtttatacgctattggttgctagtaatttctttggccgtgtgattgactttttgggaagctggaaaaggttcaagttacaacaggaagaagagaatatagatggtttagatccctctggaatgattattgtacaaaaagagagatcttggatcgaacaagggtgcaaagtgggtgagcatgttattccattggcaaggaatttcaatggcgtgaacacagatattgaatcacaaaatgtgccattggttggaaacacagtggagatgaaagtaggggcagcttcttccagaaatgatgggagagctggccagttgaaatatgcaaacagcagggagactatcgccagcaaatacacttctattagggaacagaaccggcagtcagggaaggcagtgaaaaaggaaatttcatcaaactctgtatctttgcttgaagaaagaagttctgagcagtggtccaatactggtataccaccaactggtgtgtctgcaacatgggcctcgatgaagataggttttcaaaatttcaaagccaatttgggttcgaagaagtttcttcctttgcgccaggatccaggatttgttctaaatttgagtgtctcttcacctgaatctcttgatgacatattccaaaggttgaaacgacggcctgcaaatgtgcttgtggattaccttgatgacgatgacaacaacaacacacgagatatggatgtgcatttccaggatcaatgaaataggttgtgatattcttttaggttcagaatatgcatgcacagaaaaactaaaaggattggtatagcattagacgctcaaagaagatatagaggatgtatagatctgatgatggtttggtgtgattcctggaatctcaagacgcctgccatctgaaaaaacttcaaaatggaagtaagatatgatgacaagctgactgcctttgcagaaaggcttgagatttccccaccaagaaggtttgggacttctacttcactatatggggaaaatatcctatgcaatcacttatcctggtgcaaacatgcaatcaagcgatctgatgcatctgatctagatctaattatgactgttattttatatttaaccccttccacctaaaacatagtacctattttacttttaactccttccatgaaaccgttggatctagattggatgctctcgatagtttgattgcacgcttgtaccaaaatgagtgattgcacaggatatgtcctccactatatgcaggtaacattgttgacttgttgattatcttaccttttttgaatctgtattggagatgctgatctgtgatcgaagccaaaggatgtaaatgtgtacctaggattccatgtgaaggttaacgtgcctgagttgtaacctgtaaaaacgtactatcaaatatatacctaatcgggacaaaaaccccaagtgtttctgtgtagcagacgtcagacctgtatttgacggcaacttgtggacacttcttgtctactgcctgacataaaaaatgcacatttgtacttcat

SEQ ID NO: 8332 - DNA, 3612 bp, Zea Mays
atcgctatcgccttcatttccaatgaatggtgcttgctttcatccccaggatggtggtattgtgggatttgcaatggcatgctcaaatacctttggattggtgactggtgcttttcttcttggttttgggttaagcgaaattccaagaaacatttggaaaaatgcatactggtctcaccgccaaaaagtactttctcatagagttgccaaaatggctgtaaagcttgataatgcccatcaagaatattcaaatgcaattgttgttgctcaagctacatcaaatcaaatgtcaaaacgtgacattttgaggccttacatggatattattgataacatgctgtctcaaatgctgcgggaggatccatccttcaaaccttctggtggtagattcggtgaaaatgatatggactatgatacagatgataaatcgatggccacacttcgacgccaactcaggagggcccatgaggagtactataggggcaaaagtgagtatatgacttgtgtcatggaagccctcaaactagaagacaccataaaaaattatgaacgccgtgatgctagcggatggtgagtttattgattttatatttgcaatgtaatctcgttgctttaaaaatcttgtgtgcgagtagcatttcagtcttataggaatgttattttgtcccattcaattatattagtattgtttttttaaacaggaaatatgtatcaagttttagagacagacgttcgggcacacttggaccaattttggatactattgagaatggggaacattgatgatgcagttcctttctttggcagaggcttcaacaagatctacccactgattatggttgtttatacgctattggttgctagtaatttctttggccgtgtgattgactttttgggaagctggaaaaggttcaagttacaacaggaagaagagaatatagatggtttagatccctctggaatgattattgtacaaaaagagagatcttggatcgaacaagggtgcaaagtgggtgagcatgttattccattggcaaggaatttcaatggcgtgaacacagatattgaatcacaaaatgtgccattggtgcgtggaatgatttctttgcttacataggagattcaactatctgttgttatcttttgatctttttgaaaccctctcttctccctccttttgtgggttcagagaatttctgaaaattgcatgcatgatcttttttacccactggttatggaaggtccaaatgataacccttgcccttgccccaaaatcctggtgggtcacataacatctaatgagattacatcatgttcatactaaacggaggcttctttgctgttttatgtagtcctgtgtcgactaggtgcgcgaaccatgtcaacatactctgaaaactgaattggatcagcacatcagttaaactaagggggcctttgagaagaggtttatttggtctttttgtccaagagagatcttggatggaacaagggtgcaatgtgggcgagcatgttatcccattggcaaggaatttcaatggcgtgaacacagatattgaatcacaaaatgtgccattggtgcgtagaatggtttctttgcttacataggagattcaactatctgctgttctcttttaatctttttgaaatcctctcttctccctccttttgtgggttcagagaatttctgaaaattgcatgcatgatcttttttacccactcgttatggaaggtccaaatgacagcccttgccccaaaatactggtgggtaacataccatctaatgagattacatcctcttcatactgaaccgatatttggggaggctgttttatgtagtcctgtgtcgactaggtacacgaaacatgtcaacgtactctgaaaactgaattggatcagcacagcagttaaactaaggggcctttgagaagaggtttatttggaccaattatgtttttggaataaaatatttgatggatactccctccatcctagaatataaggacttcaaatttttggacaaattaagcagcaatgaagaagtctatgtgcccccttcttaaatagccaggccaactcctgttggtttaatttctggccatcttgggttaatccatggcacaaaatggctgattttaagaagattgcacagatgagttctcagaagtccttatgttctaggacggaggagtatgttttagtctagggatagtttagtgggtgagatgagtgatggactgatatctttcctttggtcatttgcagctgaaatttaccttatttttgttacttggtatctactggtttctatttccatttggctactgtgttgcaggttggaaacacagtggagatgaaagtaggggcagcttcttccagaaatgatgggagagctggccagttgaaatatgcaaacagcagggagactatcgccagcaaatacacttctattagggaacagaaccggcagtcagggaaggcagtgaaaaaggaaatttcatcaaactctgtatctttgcttgaagaaagaagttctgagcagtggtccaatactggtataccaccaactggtgtgtctgcaacatgggcctcgatgaagataggttttcaaaatttcaaagccaatttgggttcgaagaagtttcttcctttgcgccaggatccaggatttgttctaaatttgagtgtctcttcacctgaatctcttgatgacatattccaaaggttgaaacgacggcctgcaaatgtgcttgtggattaccttgatgacgatgacaacaacaacacacgagatatggatgtgcatttccaggatcaatgaaataggttgtgatattcttttaggttcagaatatgcatgcacagaaaaactaaaaggattggtatagcattagacgctcaaagaagatatagaggatgtatagatctgatgatggtttggtgtgattcctggaatctcaagacgcctgccatctgaaaaaacttcaaaatggaagtaagatatgatgacaagctgactgcctttgcagaaaggcttgagatttccccaccaagaaggtttgggacttctacttcactatatggggaaaatatcctatgcaatcacttatcctggtgcaaacatgcaatcaagcgatctgatgcatctgatctagatctaattatgactgttattttatatttaaccccttccacctaaaacatagtacctattttacttttaactccttccatgaaaccgttggatctagattggatgctctcgatagtttgattgcacgcttgtaccaaaatgagtgattgcacaggatatgtcctccactatatgcaggtaacattgttgacttgttgattatcttaccttttttgaatctgtattggagatgctgatctgtgatcgaagccaaaggatgtaaatgtgtacctaggattccatgtgaaggttaacgtgcctgagttgtaacctgtaaaaacgtactatcaaatatatacctaatcgggacaaaaaccccaagtgtttctgtgtagcagacgtcagacctgtatttgacggcaacttgtggacacttcttgtctactgcctgacataaaaaatgcacatttgtacttcat

SEQ ID NO: 8333 - DNA, 3635 bp, Zea Mays
gtccatcgtcaccttcctcttccttcttcggttcttcgccagccgtgcgcgcttctccactgccctggagacaaaggagcaccccgcgatctcccggcgggacccggccccacctccccgcccgcgtgcctctgaaacggagaagctgccggttcccagccggccaggctactccgactcttcctttccctccagccggcgaggcgtccaagcggattagcggagagcgtcggggcggcgacatgtgggtgttctacctgatatcgctgcctctgacgctgggcatggtcgtcgtcacgctccgctacttcgccggccctgccgtgccgcgctacgttgtcgccaccgtaggatacgcatggttctgctccctctccatcatcatcctcgtccccgccgacatctggcagacattaactgccagtgcgaaggggggcattggattcttttggagctggtcctattggagcacatttatcctaacatgggctgtagttcctactatccagggctatgaagacgcaggagatttcactgttaaagaaaggctgaaaactagcattcatatgaacctgcttttttattcaattgtgggagccattggccttattggtgtcatattactcttaatcatgcatagagcttgggatggtggtattgtgggatttgcaatggcatgctcaaatacctttggattggtgactggtgcttttcttcttggttttgggttaagcgaaattccaagaaacatttggaaaaatgcatactggtctcaccgccaaaaagtactttctcatagagttgccaaaatggctgtaaagcttgataatgcccatcaagaatattcaaatgcaattgttgttgctcaagctacatcaaatcaaatgtcaaaacgtgacattttgaggccttacatggatattattgataacatgctgtctcaaatgctgcgggaggatccatccttcaaaccttctggtggtagattcggtgaaaatgatatggactatgatacagatgataaatcgatggccacacttcgacgccaactcaggagggcccatgaggagtactataggggcaaaagtgagtatatgacttgtgtcatggaagccctcaaactagaagacaccataaaaaattatgaacgccgtgatgctagcggatggaaatatgtatcaagttttagagacagacgttcgggcacacttggaccaattttggatactattgagttcatttggcaatgtatactgagaaagcagcttcaaaaagcatttgctgttatccttggttgcatgtcagctgctatcttgttggctgaagctactttacttccaagtgttgatctatctctcttttctattcttataaaagttgtaggaaaacaagaggttttagttcaggttgctgcttttgtacccttgatgtatatgttcatttgcacatattattcattattcaagattggtatgttgatgttctattccctgactccaagacaaaccagctctgtcagcttgcttatgatctgttcaatggttgcaagatatgcacctcctatctcttataactttctgaatctcatccgccttggtggcaatgctaaaactacatttgagaagagaatggggaacattgatgatgcagttcctttctttggcagaggcttcaacaagatctacccactgattatggttgtttatacgctattggttgctagtaatttctttggccgtgtgattgactttttgggaagctggaaaaggttcaagttacaacaggaagaagagaatatagatggtttagatccctctggaatgattattgtacaaaaagagagatcttggatcgaacaagggtgcaaagtgggtgagcatgttattccattggcaaggaatttcaatggcgtgaacacagatattgaatcacaaaatgtgccattgtcctgtgtcgactaggtgcgcgaaccatgtcaacatactctgaaaactgaattggatcagcacatcagttaaactaagggggcctttgagaagaggtttatttggtctttttgtccaagagagatcttggatggaacaagggtgcaatgtgggcgagcatgttatcccattggcaaggaatttcaatggcgtgaacacagatattgaatcacaaaatgtgccattggtgcgtagaatggtttctttgcttacataggagattcaactatctgctgttctcttttaatctttttgaaatcctctcttctccctccttttgtgggttcagagaatttctgaaaattgcatgcatgatcttttttacccactcgttatggaaggtccaaatgacagcccttgccccaaaatactggttggaaacacagtggagatgaaagtaggggcagcttcttccagaaatgatgggagagctggccagttgaaatatgcaaacagcagggagactatcgccagcaaatacacttctattagggaacagaaccggcagtcagggaaggcagtgaaaaaggaaatttcatcaaactctgtatctttgcttgaagaaagaagttctgagcagtggtccaatactggtataccaccaactggtgtgtctgcaacatgggcctcgatgaagataggttttcaaaatttcaaagccaatttgggttcgaagaagtttcttcctttgcgccaggatccaggatttgttctaaatttgagtgtctcttcacctgaatctcttgatgacatattccaaaggttgaaacgacggcctgcaaatgtgcttgtggattaccttgatgacgatgacaacaacaacacacgagatatggatgtgcatttccaggatcaatgaaataggttgtgatattcttttaggttcagaatatgcatgcacagaaaaactaaaaggattggtatagcattagacgctcaaagaagatatagaggatgtatagatctgatgatggtttggtgtgattcctggaatctcaagacgcctgccatctgaaaaaacttcaaaatggaagtaagatatgatgacaagctgactgcctttgcagaaaggcttgagatttccccaccaagaaggtttgggacttctacttcactatatggggaaaatatcctatgcaatcacttatcctggtgcaaacatgcaatcaagcgatctgatgcatctgatctagatctaattatgactgttattttatatttaaccccttccacctaaaacatagtacctattttacttttaactccttccatgaaaccgttggatctagattggatgctctcgatagtttgattgcacgcttgtaccaaaatgagtgattgcacaggatatgtcctccactatatgcaggtaacattgttgacttgttgattatcttaccttttttgaatctgtattggagatgctgatctgtgatcgaagccaaaggatgtaaatgtgtacctaggattccatgtgaaggttaacgtgcctgagttgtaacctgtaaaaacgtactatcaaatatatacctaatcgggacaaaaaccccaagtgtttctgtgtagcagacgtcagacctgtatttgacggcaacttgtggacacttcttgtctactgcctgacataaaaaatgcacatttgtacttcat

SEQ ID NO: 8334 - DNA, 396 bp, Zea Mays
acacactgttgcaggtctattagcagacccacttaataaatgtaaaacaacggagggccagagccagtttatctctgaagataatatatcatctggtcggtgtcagttactaaaggaggatttgattaatgcaacggttgatgtgagtgacatctctgagtcatttgatagttgcccatattatctaagtagtcaagtagtcgtttactgtctttggcctgatttactttggtatatggtcgaaatttttaaactttgctgctcacattctaggacaagcgcaggggagttcattgccagtggaagtgatgatggtagatggtttatatgggagaaaagaacaggaaggcttattaaaatgcttgcaggggatggagctgttgtgaactgcataca

SEQ ID NO: 8335 - DNA, 1691 bp, Zea Mays
ggccaagctagacacacacctgtttgcttcgattactacgtgtgcaaggttttcaattcggcaagggaattgaactggacgtgcccaaagtccaaactgcatttcagctaatcaacaggtcaagggctacacctaaacacgagagaggtgcgtctacgtccaaagtgcacaacacctcgaactcgctcgttcatttgggttttgttttccattgcaggtagttggcaaccgaagcttcatcaagcagagagtacatatctacttcacgatgaacaacctcgctttagcccttttgccaatcctgatgatgcagctgggatcataactagtggcattgtcatcatcctggtcatgaaattcgtcaccagatggatcgaggtgacacgagaatggcagatggagcgcgcgcggctgcaggccttggagatgcagccacgtcctggagatgggcgccgtgaaccggttcctggacgacatactgcgggagaagcccgcgcggttcacgccggagaacctccgcgagttcacccgcaactacgcggagcggctcgggtccggcggattcggcgtggtgtaccgcggcgcgttcccgaacggggtgcaggtggccgtcaagatcctcaacagcacgctggaccggcgcgccgaggagcagttcatggcggaggtgggcaccgcggggcgcacctaccacatcaacctcgtccgcctctacggcttctgcttcgacgccacgaccaaggcgctggtgtacgagtacctcgagaagggctcgctggaccgcgtgctcttcgacctcgagggcgacgcgctcggcttcgacgcgctgtccggcatcgtggccggcacggcgcgcggggtgcggtacctgcacgaggagtgccagcaccggatcatccactacgacatcaagcccggcaacgtgctgctcaccgcggactacacccccaaggtggccgacttcggcctcgccaggctctgcaaccgcgacagcacccacctcacgatgaccggcgcgcggggcacgcccgggtacgcggcgccggagctgtggctgccgctgcccgtcacgcacaggtgcgacgtgtacagcttcggcatgctggtgttcgagatcctcgggaggcggcgcaacctggagctgcagcaccccgccgtgaccgtgagccaggagtggtaccccaggtgggtgtggcagaggttcgaccaggggaagttcggcgacgtcatggcagcgtcggggatccacgccaaggacggggagaaggcggagcggatgtgcaaggtggcgctctggtgcgtgcagtaccagccggaggcgaggccgtccatgagcagcgtcgtcaggatgctggaaggagaggaggagattgcgcggcccgtcaatccgttcacgtacatggcgagcgtgcacatggtttccagctccagcagcggcgacggcgacggcggtagcgctgccgcctccagctattcgtccaaagaactacggggaggcaccaggagtgccgctaataatcagggcagatgaacacatgcgttccttttctttgtcgtaatgcattgataccatcagttggttgaatagtgctgcttacttcagctatgatccacttggcttgcaattcaagatgtttgcaacatggaaatcatagaatgtcatttaatcaaacttccattttggaccaatt

SEQ ID NO: 8336 - DNA, 3722 bp, Zea Mays
ggaaacacgaacacggtcacgcactccgccgatcccgccaccgcggcgcggggacgcgcacatgctgccacgaatactcctccagtcctcccccgtggtgccggcccccacctgacccccgatccccgcaaccttctatccagaggggaaaaaaagaagacaaaaaccgccggcgagcatgggcacgcaacccggctcggcggttcgtgtcgctgcggatgagagctcgctccctggactttacttaactctactctgagtctcggatgctccagagtccagacttccgggattagaaatccacgcacatcgccgtgcacgcacgcgacggcggagatgtccgtggccgtggggaagcgggtgctcgatacgggctggctcgccgcgcgctccaccgaggtcgcgctcaccggcgtccagctcaccaccacgcacccgccggcagctgaccccgccccagccgcgccctggatgagcgccgccgtccccggcaccgtgctggggacgctgctcaagaacaagctgatccccgaccccttctacgggctgaacaaccaggccatcatcgacatcgccgacgccgggagggagtactacaccttttggttcttcaccacgttccagtgtgccctgtcaggaaatcagcatgcgactttaaacttccggggaataaactactcagctgaaatgtatttaaatgggcacaaggaggtactaccaaaaggaatgttccgaaggcacaacattgatattactgatatcctccatcctgatggtaacaatctgcttgctgtccttgttcatcctcctgatcaccctggcaaaattcctcctcaggggggccagggtggtgatcatgagatttggattgtcttttgcttctttttttagcaaagctcaaacaagacttgtgttgcttagttgccaatgtgttttccctcggatgattggaaaagatgttgctacacaatatgttgaaggatgggattggatgtgcccaataagggatcgaaatactggtatctgggatgaggtatcaatttccatatctgggcctgtgaatataacagacccccatctggtttcaacttttcatgatgattttaagaggtcatacctacattgtacacttcagttggagaacaaaagttcttggattgcagattgtaccttgaaaatacaagtttcaactgaacttgaagggaacatttgtttggtggaacaccttcaaagttatgcaataacagttcctcctcaatcagatatagagtacaccattccttctttattcttctataagcccaacttgtggtggccaaatggcatgggaaagcaatccttatacaacattgagattagtgtggatgtaaaagggtttggagaatctgattcctggagccattattttggattccgcaagattgagagtacaattgatgattctacgggtgggaggatcttcaaggtaaatggtgaacctatttttatccgaggagggaactggatattgtcagatggccttcttagattaacaaagaagcgatatatgaccgacatcaagttccatgctgacatgaacttcaatatgcttagatgttggggtggtgggctagcagagaggcctgacttttatcatttttgcgatgtctatggtctgatggctctaaagttaccagttttagtgcctatcatgactgaatctacgttccctaagtggtggaaaaagtcaaaaaaggtatggcaagaattttggataactggagatgttgatggccgaggaattcctgtatctaaccctaatggccctttggatcatgatctctttcttttgtgtgctagagataccgtgaaattactcaggaatcatgctagtctagctttatgggttggtggtaatgagcaagttccaccggttgacattaacaaagcactgaagaatgatttgaagctacatccaatgtttgtaagttaccagacatcaaaaagtgaagtaatatatttatctgaagaatcaactgaccctagtaaataccttgatggtactcgggtgtatgtgcaaggatcaatgtgggatggttttgcgaatggtaaaggggacttcactgatggtccatatgagattcagtatccagagagttttttcaaggacagcttctacaaatatgggttcaaccctgaagttgggtctgtaggggttccagttgccgcaacaattagggccacaatgcctccagtaggatggagcattccgattttaaagaaaagaattgatgggtacatcgaagaagtaccaaatccaatatgggactaccacaagtatattccatactcaaaaccagggaaggtccatgatcagattgaactatatggagccccaaaagacctggatgatttttgtgaaaaggcacagctggtgaactatgttcagtacagagcacttttggaaggatggacttccttcatgtggacaaagtttacaggtgtcctaatttggaagacgcagaatccttggactggactaaggggccaattctatgatcacctccaagaccaaacggctgggttttatggttgccggtgtgctgctcaacctattcatgtccaactgaatttggttacctattttgtagaggtggtaaacactacagctgatgaactcaaagacatggctgtcgagatttcagtgtgggatctagatggtgcatgcccctattacaaagttaccgagaaaatagttataccgccaaagaaagtgaagcaaattatcgagatgaaatacccaaagatgaaagatgccaagcctgtgtattttctgctcctcaagctcttcaggctgtcagacaatggaacaatctccagaaacttctactggttacaccttcctgggcaggactacaaatcgctggagcagtatcagcagaaaaagattccattaaaaattgattctgatgtttcagtctcaggcacgaggcacaaagtaagaatgacagtagagaacatctcaaagaagtccgtagtagacagcacacgttcagtatcagcaatggatctaggtgatgcaagtggttcccacagcactcgcaaagaaactactcggaagggaaacgggagcgacggactgtggaggaaaatacgcagtggcctcggggtcgcaagaccaagcgacaaccgaagaacactggaggtcagcgggaccgattcaggggttgccttcttcctccatttctcagtgcacacctccgaatcatccacggacggggaggaatacaatgacacaagaatcctcccggtccactactcggacaactacttttcgctgacgccgggggagaacatggccgtcgacatctcgttcgaggctccccagggatccagtcccagagttgtcctcagaggctggaaccatcatctggaccacgccgtgatgatctgagatccgtgtaataaaataagcacgtaccgaataaagtgcagacatcagatcgtgttcgtgcctgttgttggattataattaggcttgtcctaattttattttattttattaaataaatcgtacgacctaaattgaattctaggttaaatggcttcaaggtactctatatccttcgtaattgttttagatgtcagtgttatttaaagcttatatatacatccttataaaagtataattattgtatttagagaagagaaagtaaaaaaagaaaatataaaaaacagattgc

SEQ ID NO: 8337 - DNA, 1497 bp, Zea Mays
gtcattccgctcgtctctctcgctcacatcaactctccaggcaaaatatcctgggcgcgatggatgcaacgccagcgagcaagaaggccacgccggccgccgccgtcgccgacgcggtcccgctcgctgcgcagcaggcggcggagcagctgtcgtcgcccgaatccgtcgccggcgtgagggcgagcggcagcgaggacgacgacgagcaggtggagaggttctacgcgctgctggacaacatccgcgccatgaggggcatggtcagcaccggcggcgcggcaccggggaggaagcgggcgcgcgacgacgagcccccgtggcggccggcgttccggatggaggacttcgagcttgaggaattcgactccggctccgcggggtgcgacgggggaaagaagaagagggagagcagcatcgcgaagcggccggccgacgaggaggagcaggccgaggtagtggaggccaaaggtccccggtgtgggccgcggccgccccagtcgcacaagccgcggcgcgagggagtgcgagccgtcgacacgtgacaggaattagaatacacagccctgccctggtccaatttgcacgtctttcacatttacgatgatatttctatattctatattctatctatactactctattaagtttgtagtgtcagtgtccacacatgcaatgcccccgcctcgcgttgctcgtccccctgccctgccgcgagtcgtctccgcccacgtcgtctcccgaaatctcgccccccgagacgcgcccgcgccacggctgccgctccttccgccccgcctgcccacctcgaccacccctcccccgcgggtgctgccagaactggtgggtggatgatctctccgtggtcaaggtcgaccactcccaggtgtccgcagtctccgcatatttcaggtcaggcctccccgccgcgatcgatgggtccgcggtctccgtccacttccgccggatgtccgtgttcgcctccacccgccccgtcgcggccgccctcggcgccgccgcgttcgaggaggtgctcacgctggtccccggtctacttctcccgcggcgccaaggccgtcgtcaagtacgagccccgcgccttagctgtctccgtcgccgcctccactctcgacctcgcgagcagcacaggggcggggaagtggcggggctgcgacgcggctcgatggcacgggcagtgtcagtgcaagtgccgacgcctttgcccgcgcggagcaggggcgtgagggttctccacgaggtgctgcccagcttgaggtctgccaggccggtgccttcttctgttgctgacgggggtcctgatgcgaggaaggaggaggtggcagcaccggactgcacggaagaggggtctccggaggcaaagcactgcacatcggtagagcctgtgttcgtcagctttggtggatagttaatatattttttttgaacaaaatggcacctgaaatgtttcaattttcgcacgaatgtttaataacgagt

SEQ ID NO: 8338 - DNA, 2692 bp, Zea Mays
ctcgcgtttccgtttcaaacgattcaaaccaaactatcgtggcctcttggggcccactgtctcctctacctcctccgtcctccggatcccaaaatctcaaaccgtcaaacgggacctgatacctgagatacgcgcatggcgtcgccgcgccgcattccctctgtgcctgccagatccggcaacaaagagaatatatctcaagatggagaagctcccttggattttgcaaccttgcctaaagaagggcctgccactacaaggcggaagaagaagcttgcaggtttcaacttgaggaaaagcattgcctggaatcctgcttttttaactgaagaaggtgttttggataactcggagctttctgtgcttactggctcccaaccgatggcaaataggagccctggatcaggggtcagtagtataatgtccccatcctgtcagtcagggagatatggtaacacatatgtacggaaggaagccgcagggaattcacatggaaaattgcctgcaagatatcacagggcagaaagccagggaaggaaattgttttcttcagcaaaaactcctcagggggacaatcagaaagaatctgctggaacacaaaacagaagctctgcaagaatcatccaaatatgtacaccaagagtaccagctggatctatatatcctaatgaagttttaggcaggattgagcaggccttaaagttttttcccttgataacaatgtcaagaataccaaaacaattacgaccttctcttcctaaggtcccaagaagtacttcatctgtgacaaacaatttggaatcacacaaaaaaatagctccagttaaagctgaactagttcacagagtaactggattccctgctagattgaagatcaatcctgtatcttctggacctagcatagagaaggctgtggtgcctgctgttactgccatacatgaagaagccactgtgaaatgcaaaaaaaacccagcacacccacaaattagcccatccaccccctttgatagcactgtgtcaaaacttgctaagccatcagcacttcgattgccttcaccttcacttggttttttcactcaggaaaaagcgcatgtgccacatggtgatgctgctaaaagaaacgtggggaggtgtttctcttcaaatacttcagcgcttgatagacctcccagatacaggcagtctgaggaaagcagactccacctagcaaagcagctgtcaaccaatggcactgttgcttccaatcttgtgctacctgtgactagagagggccatctcaaatctttggtggttccagaaaatgaatcatcgtcaaaagttatcattacatacttagaaaaatctggaaatgtaaataatcaagcaatgccaaaggctgatttcttattggcaggaactggagctactgatactacacaaccaatgaatttagaaaagaaagatgacgctggaaatagtgagacattgcttgtagaaggaatggatgatatcaaagagattgaacctcttgataatttctacgctcctgaagctatttgttcctcaaccattcgacctgttgaggattctttctcgcttgaagccagttattcctcaactaaacctattgtagagagtaaattgtcactctcttgcatttcttctaaagtacactcctctagtgagcttagttgtcaaggcaagtcagtcagtgatcccagtgcagcgatggacatggaaaactctaatgttggagatactgcacttagcgcttctttgtcgaaaggcaggagttgcactccagctcttgatttgttgcaaggattttattcatttgatcgccagaatattgaatgtcctatgctgatggaatcagtatctacaatatgtgcagaccagctgccacattgtgacagtttaagcgatgaaacgccagccctagctggcagtcattcagatttgaatgattctttgtgtgatgaagctaaacctgctttgtcaaaagaaccaaatactgaaggtgaaatggagcttcaaacaaacagtaccatagctgtaaaggaaactccgttgttagatgtggggtgtgggcatattcacaattataggaccacagattgttctacgagattggaagcacctacaccttgtgtggaaagacgtcatgctttattagtagaaccaaatatggaagaaaaaatggtgcttgacacaaacagattgtcagctatacagtacacaccacatatagaaaagaacaaggcactggaaagatcaccggcaaatacaatccgtaaagatcatctgaagaacttgataccatttacagaagaatggcttgctgtcatggagtcttgtgggcaggaagttttggaacaaaagaccggtgctgtgcaaaattctcctcctgacaaaacacctccagaaccgagtccttggtcaccggttaaacggaaggcgcaagatgttggaccatttgactgtacgaagtactccaaaagcatccgaacctctgggcaactgaaacagttggagacagaacagctggaacagccacgtcctgttgccctattttgtccgtctaattctgacgaatagctagagatggttctgtcccaatttatgactctgtactaaacaatcttatttaaaaatcgttctatcgttgcaactaaacacatactggttttctggacggaatgtgtgttccatt

SEQ ID NO: 8339 - DNA, 3332 bp, Zea Mays
attcaaaccaaactatcgtggcctcttggggcccactgtctcctctacctcctccgtcctccggatcccaaaatctcaaaccgtcaaacgggacctgatacctgagatacgcgcatggcgtcgccgcgccgcattccctctgtgcctgccagatccggcaacaaagagaatatatctcaagatggagaagctcccttggattttgcaaccttgcctaaagaagggcctgccactacaaggcggaagaagaagcttgcaggtttcaacttgaggaaaagcattgcctggaatcctgcttttttaactgaagaaggtgttttggataactcggagctttctgtgcttactggctcccaaccgatggcaaataggagccctggatcaggggtcagtagtataatgtccccatcctgtcagtcagggagatatggtaacacatatgtacggaaggaagccgcagggaattcacatggaaaattgcctgcaagatatcacagggcagaaagccagggaaggaaattgttttcttcagcaaaaactcctcagggggacaatcagaaagaatctgctggaacacaaaacagaagctctgcaagaatcatccaaatatgtacaccaagagtaccagctggatctatagaagaaagtacaaaactcatctgcttctacatctcagatgtcaagaataccaaaacaattacgaccttctcttcctaaggtcccaagaagtacttcatctgtgacaaacaatttggaatcacacaaaaaaatagctccagttaaagctgaactagttcacagagtaactggattccctgctagattgaagatcaatcctgtatcttctggacctagcatagagaaggctgtggtgcctgctgttactgccatacatgaagaagccactgtgaaatgcaaaaaaaacccagcacacccacaaattagcccatccaccccctttgatagcactgtgtcaaaacttgctaagccatcagcacttcgattgccttcaccttcacttggttttttcactcaggaaaaagcgcatgtgccacatggtgatgctgctaaaagaaacgtggggaggtgtttctcttcaaatacttcagcgcttgatagacctcccagatacaggcagtctgaggaaagcagactccacctagcaaagcagctgtcaaccaatggcactgttgcttccaatcttgtgctacctgtgactagagagggccatctcaaatctttggtggttccagaaaatgaatcatcgtcaaaagttatcattacatacttagaaaaatctggaaatgtaaataatcaagcaatgccaaaggctgatttcttattggcaggaactggagctactgatactacacaaccaatgaatttagaaaagaaagatgacgctggaaatagtgagacattgcttgtagaaggaatggatgatatcaaagagattgaacctcttgataatttctacgctcctgaagctatttgttcctcaaccattcgacctgttgaggattctttctcgcttgaagccagttattcctcaactaaacctattgtagagagtaaattgtcactctcttgcatttcttctaaagtacactcctctagtgagcttagttgtcaaggcaagtcagtcagtgatcccagtgcagcgatggacatggaaaactctaatgttggagatactgcacttagcgcttctttgtcgaaaggcaggagttgcactccagctcttgatttgttgcaaggattttattcatttgatcgccagaatattgaatgtcctatgctgatggaatcagtatctacaatatgtgcagaccagctgccacattgtgacagtttaagcgatgaaacgccagccctagctggcagtcattcagatttgaatgattctttgtgtgatgaagctaaacctgctttgtcaaaagaaccaaatactgaaggtgaaatggagcttcaaacaaacagtaccatagctgtaaaggaaactccgttgttagatgtggggtgtgggcatattcacaattataggaccacagattgttctacgagattggaagcacctacaccttgtgtggaaagacgtcatgctttattagtagaaccaaatatggaagaaaaaatggtgcttgacacaaacagattgtcagctatacagtacacaccacatatagaaaagaacaaggcactggaaagatcaccggcaaatacaatccgtaaagatcatctgaagaacttgataccatttacagaagaatggcttgctgtcatggagtcttgtgggcaggaagttttggaacaaaagaccggtgctgtgcaaaattctcctcctgacaaaacacctccagaaccgagtccttggtcaccggttaaacggaaggcgcaagatgttggaccatttgactgtacgaagtactccaaaagcatccgaacctctggtacctaactgcagacgtttgagttcacattctatcacggtatagccacggtgataaggtcagggcatccgagcttttggtaccctaactgcagaccttgaccttcacgctctgtcaactgacatggtacagtcactgtgataaggtcagggactcccagccgaacacggcgtaaatacctgctaccgattgtcatttttgaccaaactaactgcgatgtagttcagcagccttgttgacctgcatttttttgcttccccccccccccccccccccccccctttcccccctttttttgttattgtgaaatactgttgagatcacgccccaagcaaacgcttggtaattaagaagggaaaaaagagagagagagaggagaaaggatctattattatgtttgtctcgattgtccttttttggccattagtaggtgactattgatgtctgaaattccgaacgggatacctgatcgaattccttgagagttggtcaggccaatgcagaattgaggtttcacggcggcaagccggcaatcctgctgccccagccaccagagaagagagtcagattttctggtgaacacgagagagcatcttgatgtgcatcttccattcttcctacctcgtcctgttccccttctctagtgtcgtgtagcgctcagcgttgttatgtgtttggttgcagggcaactgaaacagttggagacagaacagctggaacagccacgtcctgttgccctattttgtccgtctaattctgacgaatagctagagatggttctgtcccaatttatgactctgtactaaacaatcttatttaaaaatcgttctatcgttgcaactaaacacatactggttttctggacggaatgtgtgttccatt

SEQ ID NO: 8340 - DNA, 2845 bp, Zea Mays
acgacgaccatgccaaccacagcgccaccggtggatgcagaacctcccgagtgcccggtgtgcctctccccattcgacgcggcctccgttgtgccgcgcgtcctcccgtgcggccactccctctgcgggtcttgcatcgcggccctcccgcccgcctccgcggccgcaggcgcctcctccctccgctgccctctctgctcccagtgcgtcccctacgcccgcgcgctcggcccctcctccctccccaaaaacctcgccctcctcactcttctcccctccccatcgcatgctctcagcgccgccaccctcgtcacagcgccgcttccccacccccatccgctccacgccgcccactcgcgcctcctttcgcgcttccgccatgccgtcctccccgagtccgcctccccgctcggttccgagccaagccccgtccacctcgcgttcggatccctcggctccgacctcggcgcgccctggttctgcgcgcggggccgccccgtgagcctcctcccgatcgagacccaaccagtccccccgacgaagcaggaagccgaattctaccggcccagccacgcgacgcgggtcctcgccgcggtcgacgcgctcagcgacgcgaccaaggaggagctggccggtctgatcgcctcttccgcgaggctagcacggatggtgagcaggctctacggtgtctggatgtcccctcacgcgccgccactatggatggtctctgaacggcacccacgtacggtttcccaattgttggaggaggagattatcaatagagaggagacggtggtgcgggccggattccttgtaatggaggcatgtgaagtgatcatggggttgcacagcgaggggctggtgctggggtgcctcgggctggactgcttctgcctcgatcgttttgggcactgcatgcttgatttgaatcaggcgttggccttgtgccggggagtccaagctggggctagctcgaacagtgttcgagctttcatcgctccagaggtggcggcagtgctaggtgacacgttgcggacggagggtcgtgattttgatggtttggttggctgtacctcggatatctggtcgttgggttgtgtgttcgtggcacttcttactagggatgaacagcttgtgcctgtggcaggttggaactctgaaggactgtatgatgattgggagaaggaagtggttacaaggcttgatgccacattgcttggtactatacttgaaccattggctgcagttatagcatcgtgcttgagatatgatccaaaatcccgtccagagattgctgatgtttggaaatgtattagaggcttgttgacaaaatttggtgatgttactttagctcctgatgatgatgttgcagctcagaagagttttagatgtttactccttggggagttatcctccatgtttgttgattctggtgctgttgagtcagatgataaaacacaactgtctcgaggagctgatggcaacagttcgaatcaggatcatggaagtaatgatggtttcttaaacaatagcggaaatgatttgtcaggaatcgatggtccacagtctgtcggagtgtttaaatcatcaacactgcttgcccaccgtgattgtgtaacaggattagctgttggaggtgggttcttgtttagctcttcttatgataaaactatcaatgtgtggtcactgcaggacttctctcatgtgcattgtttgaagggtcatgaacacaaaatcacagcaatagttgttgttgacaatgatagccattctctttgtataagtggagacagtggcagcggaatttttgtctggcgtgtggattctactctgaaggaagaacctttgaataaatggtatgaacataacgattggctctatcgaggggttaactgcttggctgtctctggaactggttatctttacactggtagcagagacaaaactatcaaggcttggtcactagaggtcataaatcaactgtgtcttgccttgcagtggccagtggtattctttacagtggaagttgggatggtaccattcgtttatggtggctcactgatcatacaccattgtctgtcctggaagatgatgcagcaggaagcatagcccctgtattgtcgatttcagcaggaaccaattttgttgcctcgtcatatgagaatggctattttaaggtctggaagaacgatgtgcttgtcaaatcagaaaagcttcaaaatggtgctgtttatgcagttaaattgagtggcaaatggctctatactggtggatgggataaagtcataaacatccaggagttgttggatgatgagtcagaggtagaactccgagacgtcgcttccattacttgcgactcaattataacttcgatactgccctgggatgaaaggctgatagttggactatccaacagggaaataaaggtttactacaaggcatcatgactctttgcttcaaccccatgtatacattgtgaatagttcagtatacagtaaacgtgagatagaggattggaatccccaggactagaatacatcaaaagtacaatccgtgtttttttctttaaacaacaggggcgttcgtgtcccctccttttttttatattttctacaaagggatagtatacaaggggcctgtttggttcagcttttttctgaccagcttttctgaaaatctggctgtggggagaatctggctgtgggagagaatctgggtatcattacgattacctgtggaggaagataaagttgttcataggcgcagtatctaaaaagtgacgtattcctactattacaacgactcaaccgattatgtgtttatattgattttggatggtttttgc

SEQ ID NO: 8341 - DNA, 3094 bp, Zea Mays
gcggtctgggggcagagaacggtggacttgagcgcggtctggtgccctaaacgttggtagccccggagatttggagaaggatttgcttccacatttcagtcaagacatccaggaatatttatgtaccgagaaatttatgctaccagaaacttccttccagatgctaaaacaagttgacccattgcttacatctatggccctacaatcccaaatggagcacaatgacactgaacaatgtgacaatgatcagtcactgcgcagcagccacagatgtgtaaatatagagaagcctgtgtttgtgttccctacagatgtagtcaatgaaagtgaaacaggaaatctccaaaaggatccgcctgcaccaacttctgtttttcaccaaccatgtatgccccaaagcaggtcttacgtccctccgcaagaagatactattgatgctgttggtctaggcactaggtcctcagaaaggattcctattgtggaggggaacatgtctgttggatctgtgcttgcttcagatggctgtgatgcacctttgcagggaagcattactgagcccttttcccagcaggataaacatgaccatactgctacagttgaaccaaaatcttgtaagcaaaaatctccaagtctatctcactgtgctgatggagatggggcaaatgatggtggctccagcaatcagtcatctaaggtttccattcatgaaggactgagctctcatgccacggtaacttcaggttttgacagaatcagcgatgtcttaccaacagatgcatctggacctgagcatttgcctgagtgcataacagcacaggatacaaacatgatttcacagcttgacagcaggaaagctcatttgagtgctctgcaacaggataggggtgagaaagtaacccaagatctggaagatatctctgcaaatattgggctagtggaaaaggaccatgttcatggggatctgactttgcaatctgccagtgttttgctttctataagctgcaatggtgctaatcaaggaagtaaatctgaaaccaaccttcaaccagggattgttgctacagaggataggatggctttggaagagcagaatgcagacaagtctcacttagaattcagcgataccaacatggctaatcaagctctgcatgatgattgcagcgtcatgaaaaataatgcggtacatggcgggctgactgcacagactgctgcagtgtctcaaaactgcaatgtaaccttacatgataaaacttcagaagccaattgtttttctgagccggaaaatgaaaagaacattcaaaaaaataattgtcatacttatgttccaggttcttctcaggataggggtggagaaagtgcaaaggagacatcaaatgagctaaagtctaaggacgcttctccagaaatatttgtccatttcgaggatcaatacatcattgatactttggagggcttgtctcaacaagatttgtgcttgaaatgtggcaaaggtggtcagttgttggaatgcagccgctgttttttagctgttcatagtagctgtttgggttcatcagcgacatttgaagggacaaatttattctactgcccaatatgctcttataagaaagctattgaagcatgtaaaaaggcaaacaaaacatattgcgaagctaggaagaaccttgctgctttacttagcaaaacacaagtcaccaagcaagttcagccaggagatgcccatgaaaatgaagtaaataatcttgctcatcaggttaaagagcctaatcagcagaggaggaagcagaaaataaatgctataggtaagggttatcctaaggaggtactcactgagaaggttcctttccagaactctggttcgtctgcatccattaatatacattcagtgctccagaataacaatgaaatacaagttaaggattcagagaaaaggcggcaagcagtagacgaagaaggtcgcaaagaagctagtaatgacaactcatctcatgaaacaggatcttcatctcagataagatgtgattctcctttgaatcaggacgttgaggctgaccaggatggtaatcttacagcttctaaccaacctggtggttctgatgaatcagaagcaacatcttctgatgactctggcaggccatcatcttcttggcagtcatcacgttattggcgttgtacgagacacaacaaaaaaggattgcaagataaggagccagctgtatcaagtaaatctaaggaggatcaacaaatgcctacttcaccagcgaaaagaaagtctgcaaacccgcaaaagcactattccaatcctgttgcgagagctcgaagacgcagaaaactctggtggacagcagaagaagaagcaatgttgaaggatgggatggcaaaattctctccacataatgatggtcaaatttcatggacccagatactgcaatatggccgtggtgtgtttaacatcgcgcgcctgccatgtgatttgagggtcaagtggaggaacatgcagatgaaggagaggcgggcagtctcttacacacacatataactgttgtgtgtcatactaaattactaaccatgccttcatttgtttgtgtccatctgcagatataattgatgtggcagatataaccttgcctttatttgtttgtggcaatcttacacacacatataacactgatgtggtactagaacatagcgaatatgcaagtaggaatggaagtgggtttctccgaaataggatgacagaggtatagtttttcccttcttttggtaagtacggcgttgattggttgtgtgatttggtgaacctagacctactatacccgtagatgatgtaaagagattggtagacactcactatgtactctgaaaagaggtatcagagtcgacttccttttgtttcttttgggattgaatctaacagtttagatgataacatccggcagctgtgtttcatccggcaactgtgcatagcaggctcagggacacgcaatgttcttgcatgagtttagggttcaattcgtaatactccctccatttcaaaatagtatttgttttagagtattaatagatttatacaatatttggtgtatgtgtttta

SEQ ID NO: 8342 - DNA, 2986 bp, Zea Mays
gtctactttcattctactgctatgagtagcaattccccgcgcgcgctctctccgccccggcactaggccaacggcaatcaccactcaccaggtgccaaggtgtcttgtcggccccttcaccaagtgttagtcgggtccttcgccggcgacgggcaccaccagtatggacgaatcacgaaaaagagctgtctctactgcaaatggtaaaaatataagttcatcccttgatgaagactttggaaatgacttcctttcatcttggaagttaccaaaatcaggaaaagacacgattgacttcagtgttgactcagttcccaagagtagcaagaaattcagctttgacaacctagatgattttgggcttaatggagcctttgacaaattaccgtcctttcaaatgggcatgtctgatctggatttttctagccctgacaagaaaaaagtgaagcacaccagttcaaatgcagatctttttgaaaagaaaaaggaaactgacaaggacaatttctccttttcttttgatttcaatgagttgggaaagtttagtcttgatggaaagctaggaattgaagaaaagagtactaatagatttaatggcaaatctgaccctgtctcctcagaggttaaaaaggatacacaaagaggccttttagccaagggcaatgctatccttgaagagaataatagtaaggataaaatgcatacacttgatactcgcacttcaagaccttctcatctgacgaatcatgagaatgtgaagaatgccagtcaaccaacttcaaatatcgatgttgctgattcatctgacaagatgcaagaacataccagtgtcaatcctgcaacaatggaacaaactaaagtagactcagtgctcaatgacaatcctggagagcatcctaaagagatatatgcaatgaaggcagctgttaacataccttctcaggatttctcctgcggtgccatatctagtgaagatccaacacaagggccagcagatcatgtgaacagtaaagatgcacctatagtgaactgtggtaaagttcatgtatcgagggagagtaatgatgatgagcagtcgaatggtttacaatccagggacaccagcattattaattccaatgtgtcaagaagaccgtcgggccaatttaactcccagaatgaggttcttgaggaaagtgtttcgcttaatgaaggaagtcaagacaaccaaagttttagtggcgctcctaagaagtttttaaagaagacatcacatgggacaacaaataccgaggaagagatttcaggtcccaagattctctcttgttcagtgcagagggaaatcagaagtgttgaacctgcaccgatgaaggagagaggaagcttctctcttttatccaagtctgtacatatgaaagcaaccagggttgaactaacttcagaaacagccttaaatcaatcatccagtgcaagtaaagtgataaaaaagatgactacacatcctacagacttgaagagggaacacatgcaagctaatgcagtccctcacaaatctaaaactgctttatcaaaaacatacagcaagctagcatcaaatgggctattggccacctccatgaatgccaaagttgacacgaatgccaaattaggccttgagcctcctatctcggggaagtcgtctctactgaatgctcgaagcagcacaccacatagcgctggacataaagttgttgcaagtcatgtgcttctaaaagctagcaatacttctgattcattgcaaggtgttccttccaaagataataaatcgtcaacaatttctcaactgacaggagcaagaatcacaaaattaggaatcagaagtctgaaatctgacatggccctagagaaagaatcagtacaagtgagtgggacaaagtgttccccggtaacaacatccagaatccttgactccattcctgaaggaaaacctgcattgcctagcccatccataatgcagaaagttcctgaggaatcagctctaaatccaaaagctcctaaagtgctcaaacacatcatgagatctccagctgtaagaaaatcacctagaactgttccggagttgggaaatgaaatgattctgggaagtggaactccaaaagctcatgtggataatgcaatctcctcacgtatgccacctgggatgggagccatttcagatctagagttgcctgtgttagaaaatgatggaaacatagaaaaagctgaggcttgtagaaaggagcttgaggatatatgcattctattgaaaaggaaacatgcagaagctaaagagctagcagttcgggctatcgttaacaacaatacgatgctgatgttaaaccacccgatgattgaggagaaaatttactctattcagaaatttgcgaacgacctgaaatccaagaagtacttatttgaggaagttggcaccattaactctcactgacgtgggacaaatgcagggagcaaatgacttatccagcggagcatgggtaatgtaaatgcaacaaaagagctcaggcgtccagcgtaaatgcaatcttgaatgtgtttcaggaatatctctactgatggacgaagcgaaccttcggacgaaaaggcgtgtagagaagcttcgcacatgcgtgcgagtgaaagggtgttagctaaagttgatagcttcggcgacaatagagaggcttcgggtgcaagccaaaggaaaaggcgacgaaggccttaacccgcgcagccgaagatggagaaaatacgctactgccctaatgacgtctgtaaacattgaatggcacaattgtaatcctgtactaggtcggttcgtctcggttcgtctctcctataaatagatggacagtacctcgtataaagtacatttatccaggtgctacagcttcacatagcccagcctacgaaacaccttcgtgctatcttgcatcaagaagtcaaaggtatgattgtaagcttgtcttgtatgagaagagaaataaaatgttaa

SEQ ID NO: 8343 - DNA, 2545 bp, Zea Mays
gcggaaagtcaaacagtaacgcccctttacttttcggagattaccaccaggcccctatacacaccgcacaatcttctgtgccccatatgtacccattttaaccttgaccaaccagacgcaccggcctcgccggcgatgccctcctccacctccgccggcggcggcgccattcccgccggcccaccgtcgacgctctctccgaacgcggctccctacaccttcctcgcgcgtcagtcccgcgccccacccggacgcctccaagatggtgatgctccaaggttgattgataataactttgtgttgtatggagaggacaacagttcttattcggtgccactggcagcacaatcaggaatgaagcagagtgacactgtttactcaagcagctcgcatggaacacaccaaggtcagccaagctccgcacgtggaattcctgtcggtgtttatccatctccaacgtcctcaattgcgatagtttcagagccatcagtgaccataggttctgatttcaaccagcaccttgttccattgacctcaggtaagggaagcagacagccaagggtgacgatcagaagccctccaaataagacttcagaaactaacaacaccatttttggttctgttagcaaattggctataaggaaaaatgatgagtccaacaaagagactgggaaacatgtctccttcagcaggaacttacaactcggtagtcctgctcatggaaatggcaattcaaatggcgccatggctctttcgaaagagctaaatcctgattttggcgtgaagcctcttgtcttgtctgcatgcactagcccatgtgttacaatggctgatgatttgaaccctgatccatcggagtgttctgtggattcaccttgctggcgagggacagcttctcgcctctctccatttgatggccttccaacatcaattgtgcaatcagtgaaacaggaactagtgcctattgatgcagggaaggaacaaagctctaccactgattgcgaggctccaactaaacttcagaatttggtctgttcaaagagtacacaaaaccattcccaatcccatgttaaattgggtctgtccaaagaacctggagacatttgtgcaaatatcacacaatattcccatcgaaagaagcactttgcagaacatagtgcagtgaattgcaatgcagaccaacactgtttagcagtgatagatgattgcataaagcgatctggcctaaactctgctgctcctgattttgttcccttagctgttaggaaatcaaataccagcgatggttcctgttcttcatctggaacgaacgtatcgggaattctgaaagagatcaatagtttgtcggaggtgttatgcaataattattctgatgaaattaagctagaggagcatgaccacagcctcctccaatcagtaattgggaatcttcagagttatcttcacaaagcaagcaaggttcctgctatggttgattctgacaagtcagggggactaaaggcttgctatgctcagaatgcagtttcaaaacctgtcgcaggagactacaacggtagtttcactgccgataatggaaaaggcataagtatctctaatcttggtgattctagtcctttggtcggtgacttaaggaaaaagagcgtgacagggtaccagcctgcactcagcaattttccaaaggagctctcatgggaggagcggtcacaggctcttatctataagaaactgtggtttgatgcagaacgcacaaactgtgctttgaagtatcaacttaaacaaacgcgtgtggaaatcgacctagagtcaagcacagctcatattggcgggggtccaagaaacagttctttccatctatgtgatgtgggtgtagatccaagtagttcctatggatctgccataacttgcccaccgatgatgctcaagggccatcctggagaaagaaagagtcataacctcctttctgctgctgaccacattcagtcaggagacagcagtgctctgtcaagaccaaaaggttacatagccgtgccagagaatattgaggatggatatttcttgtcagggccggaagaaaccggtgtccgccgccatgcacgtcctggtctacaaagtaggcccctcggaaggttgaacacaagtacgtcagatggaatgtcatcctcgtatgtcactggaagggatgacattctgcgtggcagctgcgagtttggatcttcagattgggagcatgtgttgaaggaagaaatcggctcaacctaaaaaaaaatttgaagggatctggcaataagtatatagtactgtacatgtatgagctaccacgaagctaggaattcggatcttcttgattttttttttgcttgacaaggctgatgaatgggcactggttggaatggtgctgctctagcctacggaaaaccccttatttatcttgtcttgggaacaatgcctataaatcataacttggatggctatgctaattttctactgtgccgaatgcagatgttattttggcacacgattaagaagttcaggagtgccatatttc

SEQ ID NO: 8344 - DNA, 2172 bp, Zea Mays
ggagagggggaggagataccagttcccatttcccaaccatgccattgccatcggccgcccagagcgctctcgtcgtggcggccgtcgccatagccaccgccaccgtcctcctccccttcccacggacgccgccgcgggaccgcttcgccgacatggtgctggccaacggcaccatctacaccgcggaccccgcccgacccttcgccgacgccatgtccgtccgcggcggccgcgtgctccgcgtcgggacctacgagtccgtcaaggtcgcgtcgacgtttcgctctgccccttcctccatctgataccctgccctgtatgctgtgtgttgcttgcaggagctcaagggccctcgcactcgtgagctgaatctcagtgggaacgtggtgctgccggggttcatcgactcccatgttcacttcatagacggtggattgcagctagcgagggtgccacttcgtggggtcagaagcaaagatgacttggttgccagggtcaaggaagctgtcagaggtagtgtgctagtattttgttccaatgcattttcctgccacaaactactgctgtgatgcaaagacagagttatgctctgcttggtgttctccaattctacgtttgaatagacactatgcaatatgttctgcttgggtatggcaatctattcgaatgcccgtttctgtatatcatgctcccaacataagtttgataagcaacctgggcagtggatcttgggcggaggttggaatgatgattttgggggagatggtctcccggctgctgtttggctggatgatatctcacctgataatccagtctggctctctcgcatggatggtcatatgggagtagccaactcattagctatgaagattgctgggattgacaaaaacacaaacgatccaattggtggaactatcatacgaacaactgaaggagaaatctataaatgggctcactctatggaaaaatgattttgagagtatgcttattcttcccaatgcccacatggtctcgtgtttccgatcttattagtgaacatggtcgatcgctaagtcagtggatccatctaggtggtgttaaagctttccttgatgggtctctgggttcttcaagcgcgttgttccatgagccttatgagggtgatccggataattatggtctccaaatgacagatttagacagcctacttaatagaacactagaatctgacaaatctggactccaggttgccatacatgcaattggggataaagctaatgacatactactggatatggttgacaagattgttgatttaaatggagcgaaggaccgtagattccggatcgaacatgcccaacatctggctccaggtgcagcaaaccgctttggcaagcatggtaccattgcatccgtgcagccagatcatctactagatgatgccgaccatgcttggagcaagattggggtggaaaggtctgagcgaagctcctacacatttcgatcactgttagatggcggtgcgcagctagcttttggttctgactggcctatttcagacatcaaccccttgcaagctatccgatccgcagtgttccgcaagcctcctggatgggaggtcccctggatccctgcggagcgcttgaccctggatgaatcactgaaagcgcacacgatgtctgctgcctacgcctgcttcctggaccacgccgtgggcagcctttctgaagggaaatacgccgattttgtggtggtaccttctacatcgtgggacgaattctccagcgatttgccggggcatgtcctggcgacgtacgtgagcggcaggcaagcttatccatgacagatagcagttgtgtaagtgttggagaccaaaaagagcagcgcggacagtccggccctgaggccggaaggccggacgatccgcggtccggacagtccgcggtgatggcgcggacggtctgcgcgtgcgcagagtcagttaggatttctagtttctcgcgggatttgttacctaaaaccgcgggattaactcggaaatctgttggaagcggatccagacctcccctttatatcgatgaagggctacggccgattgaactccccaacaatcgaacaaatcaagtctatttctcgtttttaccttacgcattaggaatagttctagtctagttctagtttagcctctcaatc

SEQ ID NO: 8345 - DNA, 2264 bp, Zea Mays
atgccattgccatcggccgcccagagcgctctcgtcgtggcggccgtcgccatagccaccgccaccgtcctcctccccttcccacgtacgttacgcagccctctcctctcttctgttcccctcgcgcgcgacgccaaaggctgacccgtccgcctctcctcccattcgcagggacgccgccgcgggaccgcttcgccgacatggtgctggccaacggcaccatctacaccgcggaccccgcccgacccttcgccgacgccatgtccgtccgcggcggccgcgtgctccgcgtcgggacctacgagtccgtcaaggtcgcgtcgacgtttcgctctgccccttcctccatctgataccctgccctgtatgctgtgtgttgcttgcaggagctcaagggccctcgcactcgtgagctgaatctcagtgggaacgtggtgctgccggggttcatcgactcccatgttcacttcatagacggtggattgcagcatgcgctagcttcctaatgctactctctgatactctgcagctagcgagggtgccacttcgtggggtcagaagcaaagatgacttggttgccagggtcaaggaagctgtcagagataagcaacctgggcagtggatcttgggcggaggttggaatgatgattttgggggagatggtctcccggctgctgtttggctggatgatatctcacctgataatccagtctggctctctcgcatggatggtcatatgggagtagccaactcattagctatgaagattgctgggattgacaaaaacacaaacgatccaattggtggaactatcatacgaacaactgaaggagagcctactggtcttctagttaatactgctatgaaacccatatttgatgtcattcaaaatgtttctaaccatgaaagaagagaggctcttcttagagcaagtagacatgccctaatgaggggagtgactactgttgttgatgttggaagttacttccctggggcctcagctgagaaaacgtggcaagattttgcagaaatctataaatgggctcactctatggaaaaatgattttgagagtatgcttattcttcccaatgcccacatggtctcgtgtttccgatcttattagtgaacatggtcgatcgctaagtcagtggatccatctaggtggtgttaaagctttccttgatgggtctctgggttcttcaagcgcgttgttccatgagccttatgagggtgatccggataattatggtctccaaatgacagatttagacagcctacttaatagaacactagaatctgacaaatctggactccaggttgccatacatgcaattggggataaagctaatgacatactactggatatggttgacaagattgttgatttaaatggagcgaaggaccgtagattccggatcgaacatgcccaacatctggctccaggtgcagcaaaccgctttggcaagcatggtaccattgcatccgtgcagccagatcatctactagatgatgccgaccatgcttggagcaagattggggtggaaaggtctgagcgaagctcctacacatttcgatcactgttagatggcggtgcgcagctagcttttggttctgactggcctatttcagacatcaaccccttgcaagctatccgatccgcagtgttccgcaagcctcctggatgggaggtcccctggatccctgcggagcgcttgaccctggatgaatcactgaaagcgcacacgatgtctgctgcctacgcctgcttcctggaccacgccgtgggcagcctttctgaagggaaatacgccgattttgtggtggtaccttctacatcgtgggacgaattctccagcgatttgccggggcatgtcctggcgacgtacgtgagcggcaggcaagcttatccatgacagatagcagttgtgtaagtgttggagaccaaaaagagcagcgcggacagtccggccctgaggccggaaggccggacgatccgcggtccggacagtccgcggtgatggcgcggacggtctgcgcgtgcgcagagtcagttaggatttctagtttctcgcgggatttgttacctaaaaccgcgggattaactcggaaatctgttggaagcggatccagacctcccctttatatcgatgaagggctacggccgattgaactccccaacaatcgaacaaatcaagtctatttctcgtttttaccttacgcattaggaatagttctagtctagttctagtttagcctctcaatc

SEQ ID NO: 8346 - DNA, 2367 bp, Zea Mays
gggggaggagataccagttcccatttcccaaccatgccattgccatcggccgcccagagcgctctcgtcgtggcggccgtcgccatagccaccgccaccgtcctcctccccttcccacggacgccgccgcgggaccgcttcgccgacatggtgctggccaacggcaccatctacaccgcggaccccgcccgacccttcgccgacgccatgtccgtccgcggcggccgcgtgctccgcgtcgggacctacgagtccgtcaaggagctcaagggccctcgcactcgtgagctgaatctcagtgggaacgtggtgctgccggggttcatcgactcccatgttcacttcatagacggtggattgcagctagcgagggtgccacttcgtggggtcagaagcaaagatgacttggttgccagggtcaaggaagctgtcagagataagcaacctgggcagtggatcttgggcggaggttggaatgatgattttgggggagatggtctcccggctgctgtttggctggatgatatctcacctgataatccagtctggctctctcgcatggatggtcatatgggagtagccaactcattagctatgaagattgctgggattgacaaaaacacaaacgatccaattggtggaactatcatacgaacaactgaaggaggtaacacaactaattaacatgggtcttagccctctgattgtaacttaatcagtgaagtgcacttgaaccaaactcaatcacttcagtgagcatttgaaagctatttacttttaaacatagatatgttctcgatgtaaaaataaatcaagaaacttgaaagcaaactgcatggtagctcatccgttgatctaataagtagctacaatgatcagaaggacctaatcataagctttgtatacagtttgtaacaatattcttgtactttatgccttatggtactgcaaaggttcattgaatcttgtggttaggaatgaccaactatctggcctctgttattacttgtagagcctactggtcttctagttaatactgctatgaaacccatatttgatgtcattcaaaatgtttctaaccatgaaagaagagaggctcttcttagagcaagtagacatgccctaatgaggggagtgactactgttgttgatgttggaagttacttccctggggcctcagctgagaaaacgtggcaagattttgcagaaatctataaatgggctcactctatggaaaaatgattttgagagtatgcttattcttcccaatgcccacatggtctcgtgtttccgatcttattagtgaacatggtcgatcgctaagtcagtggatccatctaggtggtgttaaagctttccttgatgggtctctgggttcttcaagcgcgttgttccatgagccttatgagggtgatccggataattatggtctccaaatgacagatttagacagcctacttaatagaacactagaatctgacaaatctggactccaggttgccatacatgcaattggggataaagctaatgacatactactggatatggttgacaagattgttgatttaaatggagcgaaggaccgtagattccggatcgaacatgcccaacatctggctccaggtgcagcaaaccgctttggcaagcatggtaccattgcatccgtgcagccagatcatctactagatgatgccgaccatgcttggagcaagattggggtggaaagatttcagacatcaaccccttgcaagctatccgatccgcagtgttccgcaagcctcctggatgggaggtcccctggatccctgcggagcgcttgaccctggatgaatcactgaaagcgcacacgatgtctgctgcctacgcctgcttcctggaccacgccgtgggcagcctttctgaagggaaatacgccgattttgtggtggtaccttctacatcgtgggacgaattctccagcgatttgccggggcatgtcctggcgacgtacgtgagcggcaggcaagcttatccatgacagatagcagttgtgtaagtgttggagaccaaaaagagcagcgcggacagtccggccctgaggccggaaggccggacgatccgcggtccggacagtccgcggtgatggcgcggacggtctgcgcgtgcgcagagtcagttaggatttctagtttctcgcgggatttgttacctaaaaccgcgggattaactcggaaatctgttggaagcggatccagacctcccctttatatcgatgaagggctacggccgattgaactccccaacaatcgaacaaatcaagtctatttctcgtttttaccttacgcattaggaatagttctagtctagttctagtttagcctctcaatc

SEQ ID NO: 8347 - DNA, 2744 bp, Zea Mays
ttcaattcagagagggagagggggaggagataccagttcccatttcccaaccatgccattgccatcggccgcccagagcgctctcgtcgtggcggccgtcgccatagccaccgccaccgtcctcctccccttcccacggacgccgccgcgggaccgcttcgccgacatggtgctggccaacggcaccatctacaccgcggaccccgcccgacccttcgccgacgccatgtccgtccgcggcggccgcgtgctccgcgagctcaagggccctcgcactcgtgagctgaatctcagtgggaacgtggtgctgccggggttcatcgactcccatgttcacttcatagacggtggattgcagcatgcgctagcttcctaatgctactctctgatactctgcagctagcgagggtgccacttcgtggggtcagaagcaaagatgacttggttgccagggtcaaggaagctgtcagaggtagtgtgctagtattttgttccaatgcattttcctgccacaaactactgctgtgatgcaaagacaggttcggttacctatgcccaaattcagttctgaatcatctcattctgtgtagtaacaatatccaaataaacaagagtagattctttgtcagagttatgctctgcttggtgttctccaattctacgtttgaatagacactatgcaatatgttctgcttgggtatggcaatctattcgaatgcccgtttctgtatatcatgctcccaacataagtttgataagcaacctgggcagtggatcttgggcggaggttggaatgatgattttgggggagatggtctcccggctgctgtttggctggatgatatctcacctgataatccagtctggctctctcgcatggatggtcatatgggagtagccaactcattagctatgaagattgctgggattgacaaaaacacaaacgatccaattggtggaactatcatacgaacaactgaaggaggtaacacaactaattaacatgggtcttagccctctgattgtaacttaatcagtgaagtgcacttgaaccaaactcaatcacttcagtgagcatttgaaagctatttacttttaaacatagatatgttctcgatgtaaaaataaatcaagaaacttgaaagcaaactgcatggtagctcatccgttgatctaataagtagctacaatgatcagaaggacctaatcataagctttgtatacagtttgtaacaatattcttgtactttatgccttatggtactgcaaaggttcattgaatcttgtggttaggaatgaccaactatctggcctctgttattacttgtagagcctactggtcttctagttaatactgctatgaaacccatatttgatgtcattcaaaatgtttctaaccatgaaagaagagaggctcttcttagagcaagtagacatgccctaatgaggggagtgactactgttgttgatgttggaagttacttccctggggcctcagctgagaaaacgtggcaagattttgcagaattagaaggattcacttgtcttgtttttatctatgaccttatttgtactcctggcatactgacacaagatcttattagtgaacatggtcgatcgctaagtcagtggatccatctaggtggtgttaaagctttccttgatgggtctctgggttcttcaagcgcgttgttccatgagccttatgagggtgatccggataattatggtctccaaatgacagatttagacagcctacttaatagaacactagaatctgacaaatctggactccaggttgccatacatgcaattggggataaagctaatgacatactactggatatggttgacaagattgttgatttaaatggagcgaaggaccgtagattccggatcgaacatgcccaacatctggctccaggtgcagcaaaccgctttggcaagcatggtaccattgcatccgtgcagccagatcatctactagatgatgccgaccatgcttggagcaagattggggtggaaaggtctgagcgaagctcctacacatttcgatcactgttagatggcggtgcgcagctagcttttggttctgactggcctatttcagacatcaaccccttgcaagctatccgatccgcagtgttccgcaagcctcctggatgggaggtcccctggatccctgcggagcgcttgaccctggatgaatcactgaaagcgcacacgatgtctgctgcctacgcctgcttcctggaccacgccgtgggcagcctttctgaagggaaatacgccgattttgtggtggtaccttctacatcgtgggacgaattctccagcgatttgccggggcatgtcctggcgacgtacgtgagcggcaggcaagcttatccatgacagatagcagttgtgtaagtgttggagaccaaaaagagcagcgcggacagtccggccctgaggccggaaggccggacgatccgcggtccggacagtccgcggtgatggcgcggacggtctgcgcgtgcgcagagtcagttaggatttctagtttctcgcgggatttgttacctaaaaccgcgggattaactcggaaatctgttggaagcggatccagacctcccctttatatcgatgaagggctacggccgattgaactccccaacaatcgaacaaatcaagtctatttctcgtttttaccttacgcattaggaatagttctagtctagttctagtttagcctctcaatc

SEQ ID NO: 8348 - DNA, 2100 bp, Zea Mays
cttccgtcgtctcccttctttccccttcgctcgcttctcttctttgccgtccagtcgtcgtcgtctcctcgtgggctcgcggccgtggcgcattaaggattcgaacccactcgtcaaagagaatccatccgcaaaatcgaaagcaacagcagctgattattaaagccccgctttttcaaaagccgcaagggctatacccctagttgtaaattggcggaaaggaaattcgcctcctcttctccaattgcagctgcagttgcgtgctcgagaggggtgaagaacctagaagccctgccagcgcgcggcgccggcgccttgtttactctgcgacggcacgctgattgcattggtactgttcttctcctgatcaccacacatgacaagggtcatccatgactccggagatgacatgcagaaggaggcacttgatttggtctcatctgacgttaatttccccaagggccatttcccagactataggattggaccaaacaaccaaatcattgatccagaggagacacatgaggctgtacctctcaaggagattgttgcaaaggaaacagcgcagctgctagagcagcacaagcgtctttctgtgcgtgatctcaaggagaaatttgagaagggtctatctggcgcttccaagctttctgaagaggccaagcggcgagaagccgcttcattagacaggcaggttcttcttaagaagctcagagatgttttagacacactgaaaggccgtgtggctggtcgaaacagagacgatgctgaggaagctatctcactggtggaggcactagctgtccagttgacacaacgagaaggggagttaatttatgagaaggctgaagtaaaaaaattggctaacttccttaagcaggctactgaagatgcacgcaaagtggctgaagaggaaagggcccttgcactggctgaaattgaaaaggctagagctgcgatcgaaaaagttgagaaagcatggcgtgtacatgattttgcgtcaagtagcagagagaaggcggaaatagaggaacttaggaaagaggtccgagaggctaggagaataaaaatgctacaccagccaagcaaggtcatggacatggagtttgagcttcaggcactgcggactctcatctcagagaagactcagctatgcaatcagctaaagaaagagcttgccatgatcaagaggttagaagacgatagttctggcctctttgagcttgaaggttctaatacccttggatcacagctttgtattatcccgcgagttgatggtgcttcaaacatcacgaactgtccaattcagtggtatcgtgtaatttctggaggcactagagaactcatatcaggagcaacaaaatttatgtatgccccagaaccgtttgatgttggccgattgttgcaagcagagatagttttgaatgcagacaaaattatagttcagacagatggccctgtagataacgctgcaggacttgaacgttatgtggactcactaatgaaaaggacggatattgagttcaatgtagtagtaacccaaatgaatgggaaggattactcgtcgaattctgttcatgtatttcacattggaaagctgagaataaaacttcgaaaaggatggtccacaaaagcaagagagtcgtattccactacgatgaagttatgcgggagccgtggtggtggtaatgctgcagctagggcagttttctggcaccctaggaaaggctcgtcctacactctagccttcgaaacagacagggacaggaatgctgcgattatgattgctcgcaagttcgcttcgaattgcaatatcgctctcgctggcccaggcgaccaaggcacctgatgaagtgatcacgctatgttttgacggcgacaacagtacataattagggcgtggattggctgattgggtggcgtgcttgtcttagttttgtcgatttgtgcttgtgagggtagaggttgtacacggcgtgaggcattgttttttaacatgaggattctgccatgtatggtagttcataaaccttagaatccataatagcaaattttattcatgatattacacaggtacggcaatctaagatatcatattaa

SEQ ID NO: 8349 - DNA, 2810 bp, Zea Mays
ttttttctttcgcttttcatcttgtaagcctaaaacacgtacgccgccaagcgatccttccagaaacgtaacaggaagggaaccattcggctaatcatagttcccatatacctctgcctcataatcagcgtccttcaaagggtcatcaacagcttcctagacaagccaaagttcaggtgtggttgcaagtgcatcgacgatgccaacggcagcacagccccctgccagaacgtgtgtggaatccagtactccacgctggatcaggcgcctagttgccccattccaaatcctccgaaatggcctgccctcgtgcaagtacccctcccggagtatcgcgccgtgcaggactcctcaggcttgtttacaggcttccctgacgcatcatgcagaaagacacaatcttgccctgccagtataccctttgctggagcaaatacaactctatctaatagtatcatgcagaacctgctcacaagctcaccactcttaaatctttctgattacacgagcatatcaagtcttttgcttggtacagatgttccaggatcttctacgggattcgttgaacctgcttttatctcggctcgacccatatatgttcttcaaccacagtgcaagtccggtgattcagttacaatcccaattaccgtcggttctgttaatgcccagaaagcagagataaaatgtgttcaaggtttacccttgtggcggaacagttcaataacaattaatgaggaaacatttcggggctaccgaaaagggaaaactgctaaagggataaatgaaattgcgatgggctatgattttcaagactcaaacgagaatcattttaatgtccttactttgtataactcaacgtatgagaatgcctctttcattccaatgccatttgcacttctgcgcattccacactcattgaatgcggtatcaaacgcctatctccaactaatacaaggttcgggtgtaaaaatgttgctcgacttcacaaaagaaatgcctaagcaagccacccgtctgacatttgatttttctgctgtggctggtgtgaactttttcaagataaacgactacagtatacagtttgttttctttttcagcttcattaatctgcagattgtactggccttcctagcctcatcattcttttcgaaagttaacactgctcaggcaattgcgtacctgtacatatttgggtcagggttgatggctggatatcttattcgcaattttattgaaggggggaaattcccaagacactggatcacagttctggagataatacctgcattttctttatatcgaggactatatgagcttggccagtatgctgttagatcttcagaaacaggaagccctggcatgcgatggagtgatttaaatgaccacatgaatggcatgagagatgtgttaatcataattattttggaatggttggttttgcttcctgtcgcatattatttcgactatgcttcttcagttggacacagatctagtcccctttctataatcaaacatctcttaaagaaggaccccacctggagaaggataactgctaatgaaatagatggtaaggatgttcacatagagatggagaaggtagacattatcaaagaaagagaggctgttgatcaagtgctacagcagcaacaaactagtggctatgctgtagtctgtgatgacctaagaaaagtatatcatggaaaagatggtaatcctgataagtttgcagttcaaggagtatcacttgctttgccttatggagagtgccttggtattcttggtcctaatggcgctggcaaaagctcttttattagcatgatgattgggtttgtaaagccaacatcagggaacgcttttgtacgggggttcagcatacaaaatgacatggaaaagatatacagcagcatgggagtttgcccacagaatgatatgctttgggagacactaactggtagggaacatctccagttttatggccgactgaagggcctcagtggttcatccttggatcttgttgtcgatgagtccttaaggagtgtaaatttgcttcatgggggtgctcctgataagcaagtgaagaagtacagtggtggcatgaggaggcgccttagtgtcgccatctcgttgatcggagatgctaaagttgtgtacatggatgagccaagcaccggattagacccagcttcgaggaagagtctctggagcgctgtgaagcaagcaaagcaggatagagcaatcattctcaccacgcattccatggaagaagctgaaactctttgtgacagactgtgtatcatggtcgatggaaagctccagtgcataggcactcccaaagagctcatagctagatacggagggtactacgtgctgacgatgacgacactgccggagttcgaacaagaggtcgaagatctggtgcgcaggctctcgccaagctccaggaaggtgtaccatctgtcggggacgcagaagcacgagctgccgaagcaggaagcgaggatctcagacgtgttcatggccgtagagagcttcaagaagagggtggaagtccaggcctggggcctcgcggacaccaccatggaggacgtgttcgtcaaggtcgccaaaggggcccagtccagcgaagaactctcctagagtcgtagtctacatgtaatggtgcaagggcaagggcctgctgttgatgctaggtgtatatatatgtacagcacgtaaaattttcttccgttgcaaagcaaatggtttggtttgctcacctttgattttggaattttgataacaaagattatttgattgaattgattgttttt

SEQ ID NO: 8350 - DNA, 4795 bp, Zea Mays
caatctgaaaaatactctcatttttctttttgttctcttcttcttctatcctcctcgtcttcctcgtgacttctccaaggtgaaaccctagctgctgcttccgccactcacgccgctcgccgccgacgccgactatcgccggaaacaggtcaacaggagagcccgttcaagtccgggacccctcaattgtccttttctctctctccccgcccaacttcccctgctctgccgccgcctccccagtccggcgtgcatcagcagcgacatcagagtcggcgatgggaggcgtcaccgacgttctcgtccccttatgttgatgaagtggcgtgccgtggagattcctttttgaccgatttcttgccggttttttccttttctccgtcgtgcaagatcagtcctttctttttttctccgtccacggttcgatcaggttttaccttctcttcgtcgtgcaagatcaatccttcattttctccgtcgtgcaagggggtcagttgaatcagatgctccacgttacgtccacccttgagctcgatggcagaaggaagcagtagccataggaggagtgcattctcccctgggctggctgtgttattatctggcgatgaagctaagattagctcccagaagtcgcacctggtgtcctatcatgacgaaattgggcaccaggctgttgagaggacgatagagcacatctttgatctccctcacaagtcagtggtccggcctcctggaccagttgacacaggcttcgtgcactcagtggtgaggaatcaagctagaaaatttgatcttgactgggaaaactgcattcggggataccatcgcagcgtcttcattgtggacaaaggtgctgggcagaggaaggtggttcttgatgattcgagcatttgtggtagcttcaggaatgtccggggaccttcacttgttgagagttccgcccctttcagcagtgccagggctaatgcttgtgtgtggaaaggcaaatggatgtatgaggtgacccttgagacgtctggagttcagcagcttggatgggctactctctcttgtcctttcactgatcagaaaggtgttggtgatgctgatgattcatattcctttgatggccggagggtgactaagtggaacaatgacccaaagccatatggccagccatgggcagtaggtgatgtcatcggttgctgcatcaacttggatgcaggagaaatttccttttacaggaacgggacttctcttggtgttgcatttgatggaattcgcagcgtggaacctaagaagggatattatgctgcagtatccctctcggaaggagagcgttgtcatcttaatttcggctcacatccattcaggtatcctgttgatgggtttgatccattagaggcgccaccacgctcttggtcgtttgtcacataccttcttagatgcctgttccggttgctagaagttcacaacctggagaaatctgaatcagcatacttcgagaaactgaggagggtgaaaaaatttgcaccactacaagaactctttggacccatttcagaagggatctgtgcagaaattttcagtgctattgaagcaagccaggggtgccttgagtatattgcctggggctcgttgatcactctactcttagatgttttcagaactcgtgagccgcatgatttctcatgccttgatcaggttcttgaccttttcctccggttcccaggttgcacttcattatttcaggagctcattgtggccctttcttgcatgtgcaaagttgcaccacttgtgttgacagaatgcccatattctgggtcatatccatttttagcgctggtttgccaccttcttaggcataaggatgtaatgtgtttatggtggaaagcagaagatttcgttttctcgtttgaaggcttccttacaaggaagattccaaataagcaggatctacagtgccttgtgccatctgtttggtggcctggttcttctgaggatgaagttagcatgacactgacgatgacaacactctcagatgcaataaaaaagattgaggagatgcatcgtgaactttgcagcttggtaatatgctttattccaccaatgtctacgcctcagcctccaggctctgtatttaggtcctttgtacaaagtttggtgctcaaagctagaggtggagatcataggatggttgtcaatgggactttcaacaacactgtgcttgtttcattgtacacagtaatcctgcatttgttgtctgaaggattttctatggattctgctggatctgcatcatcctctaaagcgaactttgggaatggtgttggatttcttcacaaaggtggaaaacgcaagtttccgacacaattatttttcaggaatgatgcctatcacagtgtaattcctagaatcggtggaccaccaagtattttgatgcatcaccaatttgatgctgtggaaaatgaagtgcagtgggatgaaggctgcatgaatgatgaagagacacgtgttacacacactacagcacagaagccttgttgctgctcagtgacagatgttgctgttggcctaagatacaaagaaactgctaagtatgtgccatcaacttcaaaaggctcatgtaagcctatgcctgaaagatctcctcatgttgctgctgagtgcaatggtagaggtctgagtgatgagatcgaagacaaacctagcacaagtgctcaatcagaaattgaatatggataccaatcactgcatagtcttgaaaacatgccaatggcaactcaatcttcgtcggaaacacttaaagaagaagagctgcttgatgttatgttgttgttatatcatctcggcatctcaccaaattttaggcaggcattttatttcatgtctcagcagtcgcagtccatttctttactagaagaaactgacaggcagatacgagaaaaatcatgctcagagcaagtaaggcgtttgaaagaagcccggaatagctatcacgaggatttggtagattgtgtacggcattgtgtttggtaccgggccacccttttctcccagtggaagcaaaggggaatgtacgcaacttgcatgtgggtcgtggagcttcttttggtccttagtaactcaaatagcatgttccactatgttcctgagttctatgtggaatcactggtggattgtttccatgcactgcgaaggagcgatcctccttttgtttcccctgcattatttctcatgcaagggttggcctcgtttgtcactttggttgtcaagcacttcgatgatacaaggatatataaagaattcatgcttgttttcgagaacaatcgggaggctataaataaaatgcctagatcactgttatcagcttttgacaacagatcatggattcctgttacaaacatactttcccggttctgcaaaggctcaggatttgcttcctataagaatggtgaatccgcatcatctgcaacttttcaggttctactgagggagacatgtattcatgaacaagagctgttcttttcctttcttaatcgacttttcaatacactcagctggacaatgaccgagttctctatgtccatccgggagatgcaagataaaaaccaggttgctgatttgcagcagaggaagtgcagtgtaatttttgatatctcatgtagccttgcgagaatcttggaattctgtacccgagagattccttgtgcttttctcatgggaccagatatgaatttgcggaggttgactgaattggttgtctttattctcaaccacatcatatcagtagctgatgcagagttctttgacatgacactaagacggccagggcagcatcaagagaaaacaaatcgtactatgatcttggctcctcttgtgggcattatcctcagtcttatggaatgtagcagcacatcagaacgaagggagctaaatgatgtgattgcagtgttcgccagcatggattgccctgccacaatccattttgggctgcagtacctactgagctacaactggagcaatgttcttcgaggggattcatcccttgcaaagctagcgcagcttaaagagttctcccattacttccgacgcattacagcgtccgtggatggtgaagaagaagaccatagcctaaacgcgggcgatgaagacgacgaccacacttgttgcatttgctacaactgtgattccgatgcaacattccagccatgccatcaccggtcctgctttggctgcataagcaggcatctcctgaacaaccagaggtgtttcttctgcaatgcagtggtaacatcggttactagatagccgattcgcgagcgatgcgctgctctactcattgcctctttcggtatcgtgatccgaaggaagatggtgccactgatttgtcttatctattttgcttgacctgagggctggggcgctggcgtcccagagatctttccattgcttttccaggaagaacgcgttacctttgtgcacgagggtcagaagcggttcttcgttttccttgctgtatatgtaaaggccagggtgtagggggagattccacgactgtaaatatgatgagatatgaaacagaaaagggggtggcagatcaacatcgaccttctgtaattagccagaataaaagaactagatgctttatattgagcagagctctcgtctttttgatcctccccacggtgtagtatcaagaatgaataaatcttctgtttcttgtctggttgtagcatgccagcatctgtaagttgtaacaattcagtgaatttatttaccttcagcaaaaagggtaaaaaggttgcctcttcaa

SEQ ID NO: 8351 - DNA, 1224 bp, Zea Mays
cgcaggcagtcgctctcgcgcggcggctctccccgcctcgttcgcccctaccgcgccatcaacgtgcctccccgccgcccctgtcctccccatgcccgccgctcccacccgagatggttagcgcccctcctccttccggtcccttcccctgcctcggccggccagccatggattcaccaagcgggctctggtggcggccggcgccgtcgtcgtgtcctccattcccgtcaaccccctcgatgtcgccaagatatgtttaccagacgaattgatatctaggctatttatgtggttactaattttgactcctctaagacatatttacacagggttggtcgttatgggagatatgggcaccttggtttggcagtgaacttgaccacttacaaagattgtttcaacttatatagtattgataaaaaaaacttggaacggaaattaagacaatacccccacaaattgacctgtttgtatactgccaatgatgatagcgacagcttcatgagcgtcaggcacattttatttattttgacctgtttgtatactaacttaacacaagcttttttgtcaataacgtgggattcggaattttctgagctttgtgtagtggaggaggaggagaggcccatgtcggtggagctggaacccatcgccagcgagcagcagcttaactaggtccttggagaggcgtagcagctccagctcctcatcgtcctgctctgcttttctctgcggtaaattgctggcttaaatgcatgctgcttgaaccctataatcagatagaccatcccgaatgcaagtcaaggcctgatagtggtctttctgcaattacagagctggaccctggttatataacagcaggatcagtaagagttaatggcccagtgacggattcaaggtatcctgctcaccaacagatcccacaagcatacggttaccgccaaatgcctgcaaggttggacagtaccaacccatcacaggccatgggaggttacacgctgcagtcacagaaggaaacattatttgaagagttgccattttgaagagttactcgaatccaatattttgctcttttgaattccttggtgtacactggcaaatattagcatatttgaagagttgccatttcgatcatcatcttcatttgtactttttgggtcagatctaataaagcatcagcattaaatttacaatgatcacctaaatccatggtttttattgcct

SEQ ID NO: 8352 - DNA, 1504 bp, Zea Mays
cgcaggcagtcgctctcgcgcggcggctctccccgcctcgttcgcccctaccgcgccatcaacgtgcctccccgccgcccctgtcctccccatgcccgccgctcccacccgagatggttagcgcccctcctccttccggtcccttcccctgcctcggccggccagccatggattcaccaagcgggctctggtggcggccggcgccgtcgtcgtgtcctccattcccgtcaaccccctcgatgtcgccaagatatgtttaccagacgaattgatatctaggctatttatgtggttactaattttgactcctctaagacatatttacacagggttggtcgttatgggagatatgggcaccttggtttggcagtgaacttgaccacttacaaagattgtttcaacttatatagtattgataaaaaaaacttggaacggaaattaagacaatacccccacaaattgacctgtttgtatactgccaatgatgatagcgacagcttcatgagcgtcaggcacattttatttattttgacctgtttgtatactaacttaacacaagcttttttgtcaataacgtgggattcggaattttctgagctttgtgtagtggaggaggaggagaggcccatgtcggtggagctggaacccatcgccagcgagcagcagcttaactaggtccttggagaggcgtagcagctccagctcctcatcgtcctgctctgtacaaaagatgatattgattttgtggctggtttcatttgttggaatgctcttcaactttcttacgctcatttacattgcttttctctgcggtaaattgctggcttaaatgcatgctgcttgaaccctataatcagatagaccatcccgaatgcaagtcaaggcctgatagtggtctttctgcaattacagagctggaccctggttatataacaggtcctctctcttcagtatggaaagaatgggtcaaatggtgtgtagagtttggcattgaagctaatgcaattatcgctgttccgtatgattggagactgcccccatcaatgcttgaggagagagatctgtactttcacaaattaaagtttgtaacacttgcctcaacttgttatgaagcaaccaaatgctatacatctgttagcaggatcagtaagagttaatggcccagtgacggattcaaggtatcctgctcaccaacagatcccacaagcatacggttaccgccaaatgcctgcaaggttggacagtaccaacccatcacaggccatgggaggttacacgctgcagtcacagaaggaaacattatttgaagagttgccattttgaagagttactcgaatccaatattttgctcttttgaattccttggtgtacactggcaaatattagcatatttgaagagttgccatttcgatcatcatcttcatttgtactttttgggtcagatctaataaagcatcagcattaaatttacaatgatcacctaaatccatggtttttattgcct

SEQ ID NO: 8353 - DNA, 1554 bp, Zea Mays
cgcaggcagtcgctctcgcgcggcggctctccccgcctcgttcgcccctaccgcgccatcaacgtgcctccccgccgcccctgtcctccccatgcccgccgctcccacccgagatggttagcgcccctcctccttccggtcccttcccctgcctcggccggccagccatggattcaccaagcgggctctggtggcggccggcgccgtcgtcgtgtcctccattcccgtcaaccccctcgatgtcgccaagatatgtttaccagacgaattgatatctaggctatttatgtggttactaattttgactcctctaagacatatttacacagggttggtcgttatgggagatatgggcaccttggtttggcagtgaacttgaccacttacaaagattgtttcaacttatatagtattgataaaaaaaacttggaacggaaattaagacaatacccccacaaattgacctgtttgtatactgccaatgatgatagcgacagcttcatgagcgtcagtggaggaggaggagaggcccatgtcggtggagctggaacccatcgccagcgagcagcagcttaactaggtccttggagaggcgtagcagctccagctcctcatcgtcctgctctggctgttgttgaaaaagctgtatattatgctcttgtatggatcaataggctgttggctgtcggtcatgacatcgccatcaagacagataggaaagttatattttttcctaactatatatgctcttacctattcctgttctccatagtacaaaagatgatattgattttgtggctggtttcatttgttggaatgctcttcaactttcttacgctcatttacattgcttttctctgcggtaaattgctggcttaaatgcatgctgcttgaaccctataatcagatagaccatcccgaatgcaagtcaaggcctgatagtggtctttctgcaattacagagctggaccctggttatataacaggtcctctctcttcagtatggaaagaatgggtcaaatggtgtgtagagtttggcattgaagctaatgcaattatcgctgttccgtatgattggagactgcccccatcaatgcttgaggagagagatctgtactttcacaaattaaagtttgtaacacttgcctcaacttgttatgaagcaaccaaatgctatacatctgttagcaggatcagtaagagttaatggcccagtgacggattcaaggtatcctgctcaccaacagatcccacaagcatacggttaccgccaaatgcctgcaaggttggacagtaccaacccatcacaggccatgggaggttacacgctgcagtcacagaaggaaacattatttgaagagttgccattttgaagagttactcgaatccaatattttgctcttttgaattccttggtgtacactggcaaatattagcatatttgaagagttgccatttcgatcatcatcttcatttgtactttttgggtcagatctaataaagcatcagcattaaatttacaatgatcacctaaatccatggtttttattgcct

SEQ ID NO: 8354 - DNA, 1633 bp, Zea Mays
ctcccacccgagatggttagcgcccctcctccttccggtcccttcccctgcctcggccggccagccatggattcaccaagcgggctctggtggcggccggcgccgtcgtcgtgtcctccattcccgtcaaccccctcgatgtcgccaaggagcaggacgatgcagtggggcagcatctctaatcatttaagcttcaaattaaccagtccattatattatgcaactctgtgaatagaattgagctactggctaagaaaataactgaactcggttattcatgcttcacattcatgctaagagcctaagatgttgcaagacaacagaaactgagtgtttcatgagtttcataatggtgcttgcagaaaccttttgtgcacagatatgtttaccagacgaattgatatctaggctatttatgtggttactaattttgactcctctaagacatatttacacagggttggtcgttatgggagatatgggcaccttggtttggcagtgaacttgaccacttacaaagattgtttcaacttatatagtattgataaaaaaaacttggaacggaaattaagacaatacccccacaaattgacctgtttgtatactgccaatgatgatagcgacagcttcatgagcgtcaggcacattttatttattttgacctgtttgtatactaacttaacacaagcttttttgtcaataacgtgggattcggaattttctgagctttgtgtagtggaggaggaggagaggcccatgtcggtggagctggaacccatcgccagcgagcagcagcttaactaggtccttggagaggcgtagcagctccagctcctcatcgtcctgctctgtacaaaagatgatattgattttgtggctggtttcatttgttggaatgctcttcaactttcttacgctcatttacattgcttttctctgcggtaaattgctggcttaaatgcatgctgcttgaaccctataatcagatagaccatcccgaatgcaagtcaaggcctgatagtggtctttctgcaattacagagctggaccctggttatataacaggtcctctctcttcagtatggaaagaatgggtcaaatggtgtgtagagtttggcattgaagctaatgcaattatcgctgttccgtatgattggagactgcccccatcaatgcttgaggagagagatctgtactttcacaaattaaagtttgtaacacttgcctcaacttgttatgaagcaaccaaatgctatacatctgttagcaggatcagtaagagttaatggcccagtgacggattcaaggtatcctgctcaccaacagatcccacaagcatacggttaccgccaaatgcctgcaaggttggacagtaccaacccatcacaggccatgggaggttacacgctgcagtcacagaaggaaacattatttgaagagttgccattttgaagagttactcgaatccaatattttgctcttttgaattccttggtgtacactggcaaatattagcatatttgaagagttgccatttcgatcatcatcttcatttgtactttttgggtcagatctaataaagcatcagcattaaatttacaatgatcacctaaatccatggtttttattgcct

SEQ ID NO: 8355 - DNA, 2474 bp, Zea Mays
tttttataggagcaggacgatgcagtggggcagcatctctaatcatttaagtccattatattatgcaactctgtgaatagaattgagctactggctaagaaaataactgaactcggttattcatgcttcacattcatgctaagagcctaagatgttgcaagacaacagaaactgagtgtttcatgagtttcataatggtgcttgcagaaaccttttgtgcacagatatgtttaccagacgaattgatatctaggctatttatgtggttactaattttgactcctctaagacatatttacacagggttggtcgttatgggagatatgggcaccttggtttggcagtgaacttgaccacttacaaagattgtttcaacttatatagtattgataaaaaaaacttggaacggaaattaagacaatacccccacaaattgacctgtttgtatactgccaatgatgatagcgacagcttcatgagcgtcaggcacattttatttattttgacctgtttgtatactaacttaacacaagcttttttgtcaataacgtgggattcggaattttctgagctttgtgtagtggaggaggaggagaggcccatgtcggtggagctggaacccatcgccagcgagcagcagcttaactaggtccttggagaggcgtagcagctccagctcctcatcgtcctgctctgagcatcaaggttcgacaaccaacatattctcgtgtgaggaaatggaaaagtgatgtcttgaggacattttttatcttttgatgttgataattgttcatattattatggttcaacaactcctagcaccaagtcattctgtatgatctgttaacttgatagaagttaacatcatttgattttaagaaatgtaatcatatttcctgattgctcagaattgacttgttcatcatttttcaatgtccctaattggtattagatttttgtgatcttgtgtcatattctgtgatcaacaatgtacaatttgttgaataggctgttgttgaaaaagctgtatattatgctcttgtatggatcaataggctgttggctgtcggtcatgacatcgccatcaagacagataggaaagttatattttttcctaactatatatgctcttacctattcctgttctccatagtacaaaagatgatattgattttgtggctggtttcatttgttggaatgctcttcaactttcttacgctcatttacattggtgagttctctgtccatgttaattttaagtgagtatgtaactatatgctctcatacgctttagggatccgctacgagcagcctacacatttatcatctgttcccatgcttatttttccttttttttattagtgatgggaatcgtatatccataaatagatctggagactggagcagtttttgttgggataaactttgtactggaccggagcatcttatctctggatgtgagtgccatgaaagtgatacccaacaaacaactaactctggaacacctttggtatgtcgggtaggcgcaaagccagcaagacaacaactgcttgagcagctttggccagttttgcttgccaccatgaatagccatatgttggccatcacatggtaccttgttcgtcccaaactagaccagagcattacaagcaatgactgccatatctaaaattgaaaacatgtgcggcttataagtatcctaaatttgctccacttctaagtatccaagatctactggttttgatgcgttccattgcttgcagcttttctctgcggtaaattgctggcttaaatgcatgctgcttgaaccctataatcagatagaccatcccgaatgcaagtcaaggcctgatagtggtctttctgcaattacagagctggaccctggttatataacaggtttcaggtcctctctcttcagtatggaaagaatgggtcaaatggtgtgtagagtttggcattgaagctaatgcaattatcgctgttccgtatgattggagactgcccccatcaatgcttgaggagagagatctgtactttcacaaattaaagtttgtaacacttgcctcaacttgttatgaagcaaccaaatgctatacatctgttagcaggatcagtaagagttaatggcccagtgacggattcaaggtatcctgctcaccaacagatcccacaagcatacggttaccgccaaatgcctgcaaggttggacagtaccaacccatcacaggccatgggaggttacacgctgcagtcacagaaggaaacattatttgaagagttgccattttgaagagttactcgaatccaatattttgctcttttgaattccttggtgtacactggcaaatattagcatatttgaagagttgccatttcgatcatcatcttcatttgtactttttgggtcagatctaataaagcatcagcattaaatttacaatgatcacctaaatccatggtttttattgcct

SEQ ID NO: 8356 - DNA, 2493 bp, Zea Mays
cgcaggcagtcgctctcgcgcggcggctctccccgcctcgttcgcccctaccgcgccatcaacgtgcctccccgccgcccctgtcctccccatgcccgccgctcccacccgagatggttagcgcccctcctccttccggtcccttcccctgcctcggccggccagccatggattcaccaagcgggctctggtggcggccggcgccgtcgtcgtgtcctccattcccgtcaaccccctcgatgtcgccaagatatgtttaccagacgaattgatatctaggctatttatgtggttactaattttgactcctctaagacatatttacacagggttggtcgttatgggagatatgggcaccttggtttggcagtgaacttgaccacttacaaagattgtttcaacttatatagtattgataaaaaaaacttggaacggaaattaagacaatacccccacaaattgacctgtttgtatactgccaatgatgatagcgacagcttcatgagcgtcaggcacattttatttattttgacctgtttgtatactaacttaacacaagcttttttgtcaataacgtgggattcggaattttctgagctttgtgtagtggaggaggaggagaggcccatgtcggtggagctggaacccatcgccagcgagcagcagcttaactaggtccttggagaggcgtagcagctccagctcctcatcgtcctgctctgagcatcaaggttcgacaaccaacatattctcgtgtgaggaaatggaaaagtgatgtcttgaggacattttttatcttttgatgttgataattgttcatattattatggttcaacaactcctagcaccaagtcattctgtatgatctgttaacttgatagaagttaacatcatttgattttaagaaatgtaatcatatttcctgattgctcagaattgacttgttcatcatttttcaatgtccctaattggtattagatttttgtgatcttgtgtcatattctgtgatcaacaatgtacaatttgttgaataggctgttgttgaaaaagctgtatattatgctcttgtatggatcaataggctgttggctgtcggtcatgacatcgccatcaagacagataggaaagttatattttttcctaactatatatgctcttacctattcctgttctccatagtacaaaagatgatattgattttgtggctggtttcatttgttggaatgctcttcaactttcttacgctcatttacattggtgagttctctgtccatgttaattttaagtgagtatgtaactatatgctctcatacgctttagggatccgctacgagcagcctacacatttatcatctgttcccatgcttatttttccttttttttattagtgatgggaatcgtatatccataaatagatctggagactggagcagtttttgttgggataaactttgtactggaccggagcatcttatctctggatgtgagtgccatgaaagtgatacccaacaaacaactaactctggaacacctttggtatgtcgggtaggcgcaaagccagcaagacaacaactgcttgagcagctttggccagttttgcttgccaccatgaatagccatatgttggccatcacatggtaccttgttcgtcccaaactagaccagagcattacaagcaatgactgccatatctaaaattgaaaacatgtgcggcttataagtatcctaaatttgctccacttctaagtatccaagatctactggttttgatgcgttccattgcttgcagcttttctctgcggtaaattgctggcttaaatgcatgctgcttgaaccctataatcagatagaccatcccgaatgcaagtcaaggcctgatagtggtctttctgcaattacagagctggaccctggttatataacaggtcctctctcttcagtatggaaagaatgggtcaaatggtgtgtagagtttggcattgaagctaatgcaattatcgctgttccgtatgattggagactgcccccatcaatgcttgaggagagagatctgtactttcacaaattaaagtttgtaacacttgcctcaacttgttatgaagcaaccaaatgctatacatctgttagcaggatcagtaagagttaatggcccagtgacggattcaaggtatcctgctcaccaacagatcccacaagcatacggttaccgccaaatgcctgcaaggttggacagtaccaacccatcacaggccatgggaggttacacgctgcagtcacagaaggaaacattatttgaagagttgccattttgaagagttactcgaatccaatattttgctcttttgaattccttggtgtacactggcaaatattagcatatttgaagagttgccatttcgatcatcatcttcatttgtactttttgggtcagatctaataaagcatcagcattaaatttacaatgatcacctaaatccatggtttttattgcct

SEQ ID NO: 8357 - DNA, 2868 bp, Zea Mays
cgcaggcagtcgctctcgcgcggcggctctccccgcctcgttcgcccctaccgcgccatcaacgtgcctccccgccgcccctgtcctccccatgcccgccgctcccacccgagatggttagcgcccctcctccttccggtcccttcccctgcctcggccggccagccatggattcaccaagcgggctctggtggcggccggcgccgtcgtcgtgtcctccattcccgtcaaccccctcgatgtcgccaagatatgtttaccagacgaattgatatctaggctatttatgtggttactaattttgactcctctaagacatatttacacagggttggtcgttatgggagatatgggcaccttggtttggcagtgaacttgaccacttacaaagattgtttcaacttatatagtattgataaaaaaaacttggaacggaaattaagacaatacccccacaaattgacctgtttgtatactgccaatgatgatagcgacagcttcatgagcgtcagtggaggaggaggagaggcccatgtcggtggagctggaacccatcgccagcgagcagcagcttaactaggtccttggagaggcgtagcagctccagctcctcatcgtcctgctctggtaaccccactttcctagatcggtttgtgcctgtagggtgttcttgttaaagtttgcttgtaatgtctgtgagattgcaatcatggtcgtgtatgattgcggtgttcacagattttgtttgcttgttcctagatagtcatttatgtggtgcaaatttagcatcttggatgaagtgaaaatggacaattttgttcatttgttattaggttctggcacttggacttggtatttagtaactgagaatttacttatttagtagttatacagcccgtgtcattgtcgttgggcgaatgaatttcatcgtcagtctattgcatgaatgataaatgcatgtcggtggccttttgccgaatctaccattttgtttgttcctcatctccattcctatctgcttgtttattggtagtagaagtagaactgctatttatggctgaggcctgagggaaaaaataatcaaatgttcaaccaacttcatttttttcttgagtgcatgggttgcagcctttggctagcttatgatctcgtgtggtctatttaccatataaataaatagcagcattagttcaatttgatgttcatagttctctctctctaaagagtcatatgttagattcatgggaaatacttgaactatacatttttttaatgtatcagatgtgtgaattatcatgtccggatcaatttcaaccaaccaacagttcctttagcaaatttgtcaggcatatttatgcacttgttcgcataactgagactatattatttttataagactaaggtcagactattgatggtttggtttgggtggcaccttgttcttcgttccttgccatttccatgccatccttttattatatacatacatttatttggagataaaatttgatgtcaagagaaacttgtctttctttcactctccaactcatcttcgtagtttgattctcatgggaggaccctgtttccatcatgctgcatctttttatctgataaagtgatatttcttagagcatcaaggttcgacaaccaacatattctcgtgtgaggaaatggaaaagtgatgtcttgaggacattttttatcttttgatgttgataattgttcatattattatggttcaacaactcctagcaccaagtcattctgtatgatctgttaacttgatagaagttaacatcatttgattttaagaaatgtaatcatatttcctgattgctcagaattgacttgttcatcatttttcaatgtccctaattggtattagatttttgtgatcttgtgtcatattctgtgatcaacaatgtacaatttgttgaataggctgttgttgaaaaagctgtatattatgctcttgtatggatcaataggctgttggctgtcggtcatgacatcgccatcaagacagataggaaagttatattttttcctaactatatatgctcttacctattcctgttctccatagtacaaaagatgatattgattttgtggctggtttcatttgttggaatgctcttcaactttcttacgctcatttacattgcttttctctgcggtaaattgctggcttaaatgcatgctgcttgaaccctataatcagatagaccatcccgaatgcaagtcaaggcctgatagtggtctttctgcaattacagagctggaccctggttatataacaggtcctctctcttcagtatggaaagaatgggtcaaatggtgtgtagagtttggcattgaagctaatgcaattatcgctgttccgtatgattggagactgcccccatcaatgcttgaggagagagatctgtactttcacaaattaaagtttgtaacacttgcctcaacttgttatgaagcaaccaaatgctatacatctgttagcaggatcagtaagagttaatggcccagtgacggattcaaggtatcctgctcaccaacagatcccacaagcatacggttaccgccaaatgcctgcaaggttggacagtaccaacccatcacaggccatgggaggttacacgctgcagtcacagaaggaaacattatttgaagagttgccattttgaagagttactcgaatccaatattttgctcttttgaattccttggtgtacactggcaaatattagcatatttgaagagttgccatttcgatcatcatcttcatttgtactttttgggtcagatctaataaagcatcagcattaaatttacaatgatcacctaaatccatggtttttattgcct

SEQ ID NO: 8358 - DNA, 3038 bp, Zea Mays
cgcaggcagtcgctctcgcgcggcggctctccccgcctcgttcgcccctaccgcgccatcaacgtgcctccccgccgcccctgtcctccccatgcccgccgctcccacccgagatggttagcgcccctcctccttccggtcccttcccctgcctcggccggccagccatggattcaccaagcgggctctggtggcggccggcgccgtcgtcgtgtcctccattcccgtcaaccccctcgatgtcgccaagatatgtttaccagacgaattgatatctaggctatttatgtggttactaattttgactcctctaagacatatttacacagggttggtcgttatgggagatatgggcaccttggtttggcagtgaacttgaccacttacaaagattgtttcaacttatatagtattgataaaaaaaacttggaacggaaattaagacaatacccccacaaattgacctgtttgtatactgccaatgatgatagcgacagcttcatgagctggaggaggaggagaggcccatgtcggtggagctggaacccatcgccagcgagcagcagcttaactaggtccttggagaggcgtagcagctccagctcctcatcgtcctgctctggtaaccccactttcctagatcggtttgtgcctgtagggtgttcttgttaaagtttgcttgtaatgtctgtgagattgcaatcatggtcgtgtatgattgcggtgttcacagattttgtttgcttgttcctagatagtcatttatgtggtgcaaatttagcatcttggatgaagtgaaaatggacaattttgttcatttgttattaggttctggcacttggacttggtatttagtaactgagaatttacttatttagtagttatacagcccgtgtcattgtcgttgggcgaatgaatttcatcgtcagtctattgcatgaatgataaatgcatgtcggtggccttttgccgaatctaccattttgtttgttcctcatctccattcctatctgcttgtttattggtagtagaagtagaactgctatttatggctgaggcctgagggaaaaaataatcaaatgttcaaccaacttcatttttttcttgagtgcatgggttgcagcctttggctagcttatgatctcgtgtggtctatttaccatataaataaatagcagcattagttcaatttgatgttcatagttctctctctctaaagagtcatatgttagattcatgggaaatacttgaactatacatttttttaatgtatcagatgtgtgaattatcatgtccggatcaatttcaaccaaccaacagttcctttagcaaatttgtcaggcatatttatgcacttgttcgcataactgagactatattatttttataagactaaggtcagactattgatggtttggtttgggtggcaccttgttcttcgttccttgccatttccatgccatccttttattatatacatacatttatttggagataaaatttgatgtcaagagaaacttgtctttctttcactctccaactcatcttcgtagtttgattctcatgggaggaccctgtttccatcatgctgcatctttttatctgataaagtgatatttcttagagcatcaaggttcgacaaccaacatattctcgtgtgaggaaatggaaaagtgatgtcttgaggacattttttatcttttgatgttgataattgttcatattattatggttcaacaactcctagcaccaagtcattctgtatgatctgttaacttgatagaagttaacatcatttgattttaagaaatgtaatcatatttcctgattgctcagaattgacttgttcatcatttttcaatgtccctaattggtattagatttttgtgatcttgtgtcatattctgtgatcaacaatgtacaatttgttgaataggctgttgttgaaaaagctgtatattatgctcttgtatggatcaataggctgttggctgtcggtcatgacatcgccatcaagacagataggaaagttatattttttcctaactatatatgctcttacctattcctgttctccatagtacaaaagatgatattgattttgtggctggtttcatttgttggaatgctcttcaactttcttacgctcatttacattggtgagttctctgtccatgttaattttaagtgagtatgtaactatatgctctcatacgctttagggatccgctacgagcagcctacacatttatcatctgttcccatgcttatttttccttttttttattagtgatgggaatcgtatatccataaatagatctggagactggagcagtttttgttgggataaactttgtactggaccggagcatcttatctctggatgtgagtgccatgaaagtgatacccaacaaacaactaactctggaacacctttggtatgtcgggtaggcgcaaagccagcaagacaacaactgcttgagcagctttggccagttttgcttgccaccatgaatagccatatgttggccatcacatgcttttctctgcggtaaattgctggcttaaatgcatgctgcttgaaccctataatcagatagaccatcccgaatgcaagtcaaggcctgatagtggtctttctgcaattacagagctggaccctggttatataacaggatcagtaagagttaatggcccagtgacggattcaaggtatcctgctcaccaacagatcccacaagcatacggttaccgccaaatgcctgcaaggttggacagtaccaacccatcacaggccatgggaggttacacgctgcagtcacagaaggaaacattatttgaagagttgccattttgaagagttactcgaatccaatattttgctcttttgaattccttggtgtacactggcaaatattagcatatttgaagagttgccatttcgatcatcatcttcatttgtactttttgggtcagatctaataaagcatcagcattaaatttacaatgatcacctaaatccatggtttttattgcct

SEQ ID NO: 8359 - DNA, 3335 bp, Zea Mays
cgcaggcagtcgctctcgcgcggcggctctccccgcctcgttcgcccctaccgcgccatcaacgtgcctccccgccgcccctgtcctccccatgcccgccgctcccacccgagatggttagcgcccctcctccttccggtcccttcccctgcctcggccggccagccatggattcaccaagcgggctctggtggcggccggcgccgtcgtcgtgtcctccattcccgtcaaccccctcgatgtcgccaagatatgtttaccagacgaattgatatctaggctatttatgtggttactaattttgactcctctaagacatatttacacagggttggtcgttatgggagatatgggcaccttggtttggcagtgaacttgaccacttacaaagattgtttcaacttatatagtattgataaaaaaaacttggaacggaaattaagacaatacccccacaaattgacctgtttgtatactgccaatgatgatagcgacagcttcatgagctggaggaggaggagaggcccatgtcggtggagctggaacccatcgccagcgagcagcagcttaactaggtccttggagaggcgtagcagctccagctcctcatcgtcctgctctggtaaccccactttcctagatcggtttgtgcctgtagggtgttcttgttaaagtttgcttgtaatgtctgtgagattgcaatcatggtcgtgtatgattgcggtgttcacagattttgtttgcttgttcctagatagtcatttatgtggtgcaaatttagcatcttggatgaagtgaaaatggacaattttgttcatttgttattaggttctggcacttggacttggtatttagtaactgagaatttacttatttagtagttatacagcccgtgtcattgtcgttgggcgaatgaatttcatcgtcagtctattgcatgaatgataaatgcatgtcggtggccttttgccgaatctaccattttgtttgttcctcatctccattcctatctgcttgtttattggtagtagaagtagaactgctatttatggctgaggcctgagggaaaaaataatcaaatgttcaaccaacttcatttttttcttgagtgcatgggttgcagcctttggctagcttatgatctcgtgtggtctatttaccatataaataaatagcagcattagttcaatttgatgttcatagttctctctctctaaagagtcatatgttagattcatgggaaatacttgaactatacatttttttaatgtatcagatgtgtgaattatcatgtccggatcaatttcaaccaaccaacagttcctttagcaaatttgtcaggcatatttatgcacttgttcgcataactgagactatattatttttataagactaaggtcagactattgatggtttggtttgggtggcaccttgttcttcgttccttgccatttccatgccatccttttattatatacatacatttatttggagataaaatttgatgtcaagagaaacttgtctttctttcactctccaactcatcttcgtagtttgattctcatgggaggaccctgtttccatcatgctgcatctttttatctgataaagtgatatttcttagagcatcaaggttcgacaaccaacatattctcgtgtgaggaaatggaaaagtgatgtcttgaggacattttttatcttttgatgttgataattgttcatattattatggttcaacaactcctagcaccaagtcattctgtatgatctgttaacttgatagaagttaacatcatttgattttaagaaatgtaatcatatttcctgattgctcagaattgacttgttcatcatttttcaatgtccctaattggtattagatttttgtgatcttgtgtcatattctgtgatcaacaatgtacaatttgttgaataggctgttgttgaaaaagctgtatattatgctcttgtatggatcaataggctgttggctgtcggtcatgacatcgccatcaagacagataggaaagttatattttttcctaactatatatgctcttacctattcctgttctccatagtacaaaagatgatattgattttgtggctggtttcatttgttggaatgctcttcaactttcttacgctcatttacattggtgagttctctgtccatgttaattttaagtgagtatgtaactatatgctctcatacgctttagggatccgctacgagcagcctacacatttatcatctgttcccatgcttatttttccttttttttattagtgatgggaatcgtatatccataaatagatctggagactggagcagtttttgttgggataaactttgtactggaccggagcatcttatctctggatgtgagtgccatgaaagtgatacccaacaaacaactaactctggaacacctttggtatgtcgggtaggcgcaaagccagcaagacaacaactgcttgagcagctttggccagttttgcttgccaccatgaatagccatatgttggccatcacatggtaccttgttcgtcccaaactagaccagagcattacaagcaatgactgccatatctaaaattgaaaacatgtgcggcttataagtatcctaaatttgctccacttctaagtatccaagatctactggttttgatgcgttccattgcttgcagcttttctctgcggtaaattgctggcttaaatgcatgctgcttgaaccctataatcagatagaccatcccgaatgcaagtcaaggcctgatagtggtctttctgcaattacagagctggaccctggttatataacaggtcctctctcttcagtatggaaagaatgggtcaaatggtgtgtagagtttggcattgaagctaatgcaattatcgctgttccgtatgattggagactgcccccatcaatgcttgaggagagagatctgtactttcacaaattaaagatcagtaagagttaatggcccagtgacggattcaaggtatcctgctcaccaacagatcccacaagcatacggttaccgccaaatgcctgcaaggttggacagtaccaacccatcacaggccatgggaggttacacgctgcagtcacagaaggaaacattatttgaagagttgccattttgaagagttactcgaatccaatattttgctcttttgaattccttggtgtacactggcaaatattagcatatttgaagagttgccatttcgatcatcatcttcatttgtactttttgggtcagatctaataaagcatcagcattaaatttacaatgatcacctaaatccatggtttttattgcct

SEQ ID NO: 8360 - DNA, 1938 bp, Zea Mays
ctttttgcaagttttgagagcggcaaagcgttaggcgttagggcatccacctcgtcgtaggcggcggtctccatgtcgaccgcatccggcaacggcaacggcggctcctcctcttccatgttatacgacttgtacggccctaatgcaaagcctgatgtggtttttaaggaggctgctttaaactctacgttaaatctgcaggatgttcagggtctagttacttgggttattggtgatggcatgctgccttcttgggtgtttgttaaggaaaactatcaagtctggatgatcttggggacataccattccctgttacatattacactctctcagagaaagacttggaagataatggctactctttcaatttaccaggttttgtccctactgtttcagctccttcaggttcctcgccacataaagttcttgcacttgattgtgaaatgtgtgtgacaaaagctggatttgagctcacaagagtgacattaattgatattaaaggattggtggtgctagatagactagttaagcctgctaattcaatcattgattacaatacaaggttcagtggaatcactgctgagatgttggctgacgtgtccacaaccctgcaggaaattcaggaagagtttgttggacttgtatataaagaaacaattcttgttgggcattccttggaaaatgaccttatggcattacagatatcccatggtttaatcatcgatacagctgttttgtacaagtataagcgagggtctcgctgtaagattgctttgcgtgtcttgacgagaaagtttctcggccgggagatccagaacacaggatctggacatgacagtgtggaagatgctaaagctgctctagaacttgctatattgaaaatcaaacatggcagaaattgacatctatactgcatgagagtgggaaaaaatgctcccttgttgatgatgtatctgttctcgagcggtattcagatacttcttgcaattcaattgctgttttttgtgatgatgatgccctctccagatcaatgaaggaggtgaagaataacaaagtcaccttcatttggactcagttctcaggattgatttcttacttccaccgaagagctcaagatccagaaaagttgaaatcatgtgtcgcagaggctattgcattaaaaacatgtgatggaaaaactgcttcaaaagaagcaagaagtaaaatttgtcctgaattaaaggaaattctgtgtggattggataaaaagataaagaaattatatggtgccctgcccgagaatgctatgcttattgtatgcactggccatggtgatactcctctagtacaaagattacggaaaatgcttcaccatgaagaagaaacaatagacagccgagaaactattgttcaagctttgggagatttacaagcccaagccgaagttgctctatgcttctgctgcgtcaaacgttaactgcatctttgaattagtgtgctgatgggtatggcttcggcgattataggagggtgtcaggcatgcatgctgacccgctgatgtgaaaagttccggcaggcagagattgaattttggaagctattctcatgctgtcttttttttcttttttctgtcagatactatgatcaggctgtagatgtcagcgtaaggcatagtgatgcattatcagaactggtctttcggtagcaggccagcatgtcagcatattaataggatcatttttcagatgaatatacggatcgcagaggaatgtaggaaactattgtaacagccatattattgtgataattaaaaccaagttctggaatcgatgatactacgaggcttgccatttacagttgcgaaaaaaatatagcaaaggtaaagtttatacaagcatatatgttgcattcctttctctcggatatagagagaaaaggaggtaactgtgttgtaacaat

SEQ ID NO: 8361 - DNA, 1437 bp, Zea Mays
catgcatgtgcaaatggctgctacgcgcctacgctgcagtcgtagagacactataaataaacaccaggttccattcgtctctgcagtctcacccacaagagacacaaacctagcgcaacaagcaatcgaaaaagagatttggctacaaccaattaaccatattggccagcagtgtacgtgggaacgatggccctcatgcaggagagtagtagccaggatttgctccaagctcacgacgagctcttgcaccattccctgtgcttcgccaaatcgctcgcgctcgccgtggcgctagacctccgcatccccgacgcgatccaccaccacggggccggcggcgccacccttctccagatcctcgccgagactgcgctccacccaagcaagcttcgcgcccttcgccgcctcatgcgcgtgctcaccgtcacgggcatcttcagcgtcgtcgagcaaccaccagcaggtggtggtgatgattcaaccgtccacacgtcggacgacgaagctgtcgtcgtctacaggttgacggcagcctcccgcttcctcgtcagcgacgacgtgagcacggcgaccttggctccctttgtgagtctggcgctccagcctatcgctgcctgtccgcacgccctgggtatctccgcgtggttccggcaggagcagcacgagccgtccccgtatggcctggcgttccgccagaccccaacgatctgggaacatgctgacgacgtaaacgccttgctgaacaaaggcatggccgcggacagccgcttcctcatgccaattgtgctgagggagtgcggcgagacgtttcgtgggatcgactcgttggttgacgtcggtggtggccatggtggcgccgccgccaccatcgccgccgccttcccccacctcaagtgcagcgtgcttgacctcccgcacgttgtcgccggtgctccgtctgatggcaacgtgcagttcgtcgcaggcaatatgtttgagagtattccacctgcaaccgctgttttcctcaagaaaactctacatgactggggtgacgatgagtgtgtcaagatattgaagaattgcaagcaagccatatctccacgggatgcaggtgggaaggtaataatcttggatgtggtagttggatataaacagtcaaacataaagcatcaagagacacaagttatgtttgatttgtatatgatggcggttaacggagttgagcgtgacgagcaagagtggaagaagatcttcactgaagctggattcaaagactacaaaattctacccgtcattggtgatgtatcggtcatcatcgaggtctatccttgaatgctttgtgaacaaaggcctccataataaactgaagaccaagaagcgcatttcaagttacaagcgtaccagtggcggacctagaaaacttcaaaatcctgggcatttgatttgcgagataga

SEQ ID NO: 8362 - DNA, 4859 bp, Zea Mays
gtggtgcacggttctgcctttgttccgcgcccctgcgtccggaaatctcgccgcgcccctgcgtccggaaatctcgccgcgcccctacgcaatcacctcctcctctcccctcactacgccgccacctcctcctctccccctcactgcgtcgccctcctctcccactcactgcgtcgtcccctggatcctcgccccagcctctccaaccgcctccgcgctgtcccctggatctcgcgtcgcgcgtctgcagcacgcccgccacacacgccgcgattggagattggtggaaagcggtccgcggcttcaactccgacatctccggcgagctcgagcgcctcgctgcaacgacgggggcgacgctcagatccgacgtgccggacgcggccgccgtggatctgaacgacctcgagtccatggatctgtcggcggacgctgctccgctggagcacatggagccgttcgtgctggcatgcgcgcgggtgctgggcccgacgccgggccggacgcgtggcgtcgccgacggccgggtcgtcttctgggacggcaagcggtgggtcccattcgcgacggcctctccgcgctggacgcaggagctctgcggcgggcccaaggcctcgccgctggagtatctccccacgcccggcgatggcgccctgcacctcacgcccgtgctccgcccccacacccagcaggcaggcatggatctcgcagggcagggatctcgcggatcacgccgtgcggggatctcgcggatcacgccgggcggggatctcggccaagcctgatcagaagtttggggccctatcaaagcgattcgcagaagtggaggctgggggatcgaagcggaggtggtggagatgacggaggcgctgaagtccgtctggaatccggtgacacagaaaaagatcagagtttctccttctacttcgtcgggtgaagtcccggtggtggacaacacctcgacgctgatccctctggaagctgcggcaggcattgctggtgccgatgcaacccacatttggcattcccactccaatcgaagggtttttggtgtcgctgaacaggacactaggcttctgctctgcttactaatccattggtttcaagatgacagaagccgtcatcaaactgaatacttcttctaactgaatacttcttcccagctgacagatcagatcaaacttgacgtgtgttaggtatcagagaaaaaaaccaaggcatggtgcacttctaaagagcacatctgcagctgcccgctcgggctccgtttcgataagactagggacctgtacatcgccgacgcctacttcagcttgctcaaagttggccccgagggcaggctggagagttgctgtgaaaactctcaagtgagggaacatgatcatgtgcacgcaagatcctgatgactgttggcagaatcaagtcatagttaaataaacaggcccccacccgacggcgcgagcgaggcacgcggccctcccggcggggtggacgcggcccctggctgtgaggcgacgatggggctggaggctgcgatggcgctgggcgacccgccggcggactacgcatccatcgcgacggtggggctgttcgtggcattcatgtgcgtctgcatcgtcgtcgggcacctcctcgaggagaaccgctggatgaacgagtccatcaccatgctcttcatcggctttgggaccttgatgttgcaatgctgtatgttggggattgcaggggctgggaactagagcagtcatcctgttcgcgtcgagcgagaagcattcacgtgtgctggtgttcagtgaggacctcttatttatttacctgctgccgctgatcatattcaatgcagggttccaagtgaagaagaaacagttctttcgaaacttcattactattacactgtttggtgcagttggcaccttgatctcttttactgtaatatcccttggcgctctaggactaatatcaaggcttaatatcggcgcacttgaactgggagactatcttgcacttggggcaatattctcggccacagactcggtttgtaccttgcaggtgttaagccaagatgagacaccattcttgtacagcctcgtgtttggtgaaggtgttgtcaatgacacaacttctgttgtgttgttcaatgcaatccagaactttgatcatggaaatatcagcggtgccaaattactgaacttcattggcagtttcctttatctgttcggctccagcaccattcttggagtagcttctggacttcttagtgcttataccattaagaagttgtactttggcaggcattcaaccgatcatgaagtttccattatgatgctaatggcttatttatcttacatgctagctgaaaaagttcgagggtcacaaccaagcatgcctttgcaacattgtcgtttatcttcgagacttttctgtttctttatgttggtatggatgcattggatatagagaagtggaagattgtcggtcaaacttataggcatactctctccctctttctctctcttcattgctcaactagaagatctttcttctggatctgtattttctatcatgtgcagcccggtaaagtctatcgctttgagcagcaccattttagccttggtgctggtttcaagagctgcttttgttttcccactatcctttctatcaaatttgaccaaaaaactccaaatggaaagatatcttttaggcagcaggtaagtctttaacttagcaacatcttaacttcttatgttctcttgaaacagttgttatattccttacatgatattggtcatttaggttattgtttggtgggcgggtctcatgagaggtgttgtgtctattgtgttggcttacaataaggttaatcttgtgtttggtctatctggtttgagctttggtctggaattatgttactgcttttgtttcctctatccattccaaaacataggacattttttgttgtcgtaagtcaaaaattctctaactttgacagagtttatagaaaaacaaaccaacatcaacagccttcatttcttaatcttatatagaagttgcagtattttagtctaatagatggacatgttttaaattttgaggcattgaaacaatttgcatcatgaaggcgttcgacttaatgtttccaaggttctgtggcagtgcgaggcattttgggaggtggtgagcgcctcgcttggcaccttcattttcgtgatgatgctgtccttcaggctgcagtgccacacaagttcgtttggtgtaggtgctgcttgatttttggcggtgcatgccgggtgttcgacaatgtttctgaggttttgtggcagtgcgaggcattttgggagggacatcatcatgcccaacttgaagtcgtccgtgaccacaacagcgagcgcggtggagtacatggatgaagtattgaaggcgttgtcgccaggtagtaccttcttcccactcatgacactacctcgtagacaacacaagtctagatgttgctggtgcagctgttcaacacgggcaaggtgctgttttccaatgtggtcgtcgacggcggcatgttcgtcttggccctcctcacctaccgcagcttcttcgcggcgccatcattctccctgtccgtctgattttctatcaggttgctcgatcgtcgtcaatataatccgtgtcaacaaattttaatcttggttcataagtaaagaacagaaaaggaaaacctagatgtctataattatacgtacatcaaatctaatgattttaggtacatattttctgtttgccattgcaaaatctaatcacgtgaattttatagttccaatcggggctatgtctatgtactcttatttttgtccagaacccttatgtaaggggaagtggaaagaaatggattggcacactgctggatggatcttcctcaatacgtttatcgaccgccgccgccgacgacggaggagcagcacctctcgtctgtccaccgctgaccgctcgtttgtcagcctagcaccggggtgcatgaacgcccagtatatgctacagcaccgccgcccctggccctgccgcctgcgccggtcgttgccctgtgcactccgcgggcctcgggaatggccaaccaggacatttatcgtcttattccttgccgaggggagtcctgctccagtagtggtctcagaaggggcaaataccatggatgttggcaggcctgtgcttgtgcagaatgcaccaaggacaagactggatgcagggacatgggggacgatggggattggattggggtactgtattgcagctgcagtagctgaacctgaatgactcgtggttgctgtggagggcgattctggatttggcttcggtgcaatggaggttgaggggcttcaacagtgatgctgttttagcaatggagacgatccattccctgtcagcttcaaaatcaagttacccaatggctgatctcacccaactcttcatgacagctactcaagaagggaaaagatcagaatcgcaaggccagattcttagggtggaatgctatagcttaatgccctaatctttatatgcctcttcttatatctgcacttccatgggcaccgggcgacactaaattcacaagataccccctccacctcaaggtgtaagaccatagcttccatcgctctttacgttatgtaatatatttgtagtatgctaatttgattcaccataatccttaccattcatactattatgcttgtttttctctcttcagtaatcgtcgaaaatggttcattgttcatagctcaagccaacttaattttaacgcaaaaatgtagcagtacttaaagtttcatctgtaatttatcaatggataagtgagttagaaatagtatttatca

SEQ ID NO: 8363 - DNA, 1499 bp, Zea Mays
  misc_feature (1499)..(1499): n is a, c, g, or t
gttcatagaatgatgtgaagttgaagtttcgatcatgagttgcctcgggaactcaagtgaagaaacaagcggggccggaaccagggccagcatggagcgcgtaaagcacgagaacttttgccgtgccgtcgcagaggacaacacagcgctcctcctctcagcagtgggaaacttcaggaaggaggccctgtgccgcatccgcaagggctccgacgcctcgagggtgctggaccaggagatgtccgtcaggctactccacctcgcttgcaagcacgacgcagtagagtgcgcgacgctgctcctagagggcggcagcgggatcacggcggcccccattgatgcaagggaccagctcacgcggacgccgctgcacgtcgcagctgagacccactcggccaggtgcatagagctgctactctccaagaacgcccgtactgatctcagggtggttgacgggagaccacttctcccgcttgagatcgcgctaatgagcaggagagttcaaactaactggtccgtggacaacccaattgaggatcttctgtcttttcttaaacaaagggatctcaatgcagtaaggctcctggcagagaaaaccagagtggttggggagcttgcttacagatacgccatggaaggatgtgtccctgcattgacaatgctgcttctggtggttgaagagaagatatcgtcacaggttagtgtggttatagagggtgtcagaacgaagcgttcaatctacaactccattgtggacgaggctttatcaacgggagatacttcagctcgtgatggacatgaaaggagaaaggccctgctctgtgagattcagctgcttaaccaatttggatcggcatcatggagggaccacaatgacaagagaacactaccccctctactgagagctgctaaggttggagatatgaatgttataaagatgctcctgatgggtaatgttgatgtcaatgaagccgactctgaaggaaacacagcacttcactggtgccttagtggtgcttcatgtaccaaggaaccaaggattgtgtggcttctgctcaagaatggcgcaagagttttccaggggaacaaattagggctcacaccagtacacagcgctgcagctaagggcaattacaaagctcttcagtcacttctgcttcatgcccaagattgtgttgatatacctaccaagaccaaagaaacgccattattttttgcagtgaagaatggttctgtggattgtgcaaaacttcttttgcgtttcggggctgataccaaagcccggaacctgagaaagcaaagacctattgatgtggcaacatcccaggacatgcgtttcatccttagctctgcgaatgtgttactattttcagggaaccataactcacctcaaaagaatcgtgtgatgagaaaggaaatttacaaagagcttggtgatgaatttgacgattttgacaaggattcctgtgatgaaagctacactgggcttaagacatcan

SEQ ID NO: 8364 - DNA, 836 bp, Zea Mays
atggctgaagatgacatggaactatggaagtgggtgttgcttccgaggatcaggacagtgacgacgatgttgatgaggatagaaaggaacaaatttctcattgattttttgagttgggaagtggcaaccacacttcaagtggtgggaacacaaaaaaacagatgtacaatcaatcctggtgacagctgtaagcctaaatggtattctcctgttggtaggtcattttactctcccaacttagggagacgtcaaaaacttggtgagggattagaaagttggcgtggtttttaccaaagcataaggccgacacagatgggcctttcactgaatattgatatgtcctctactgcatttatcgagcctctccctgtgattgattttgttgctcagcttcttaacagagatatctcagttagaccattatctgattctgatcgcgtgaagattaaaaaagccctaagaggtgtgaaggttgaggtgactggaaacatgcgcagaaaatatcacatttctggcctcacctcacaagcaacaagagagctatcgtatgtgtctttcattgctggtatgagattccctgttgatgatcgtggtactgtgaagactgtggtgcaatacttcatggagacttatggttttagtatccagcacaccactttaccatgcttgcaagtgggcaatcaacaaagaccaaattatctgcctatggaggtttgcaagatagttgaaggacagcattactcaaagagactcaatgagaaacaaatcactgctctactgaaagtgacctgccagcgccctcaagagcgtgagctggacatcttacaggattccgg

SEQ ID NO: 8365 - DNA, 2062 bp, Zea Mays
atggagtgtggtgctggaaaagaagggtatgatgcctacaagcctggtcaccaagcagttggagggagcaggggcaagttcatgggggcaagggtgacagtgaaaatggcatgtgggttgcaggttctcagaaagaagcaactcgtgagcttgggaaataaagggcagtgtgccaacataaaggaagagggagtatcggctggattgaggattcagtttgaggagtgggttgaaaaagaagaagtgattggtgatcactatttatacctcaaatttggggtggggcattttggaatggatgaaaatggtgacgaggtagaaaatgatttgaactcatctgaagaaaaggaaaataagtacggtgtggaggatttcatagagaaagaggatgattcttcttcgaaaagaaataataagaaagtgaaatgcaatgctgacactaaaggggtttttattcatgctagcgtgaatggtgaatttatggagattttgaaaaagaaggctaatgaaattttagatttagctgtggacaaggccttaggaaagattgttgatagagtattgaaggaaccatttgatataactgggtttgaaagctggcttatagccgcttttcaaagatatttaatcagggacttgaaagttgcaaaagaagagcaagacattggattttatgctggttttgtcggggcaacatatttcctcggaagaaccataagtgctgtgccatggggcatatttgctgacaagtatggaaggaagccatgcattgtgattagcatcctctcagtgattgttttcaacacactctttggacttagcacaacttactggatggcaattgtaactaggggattgcttggattgctttgtggtatattgggacccatcaaggcctatgcttcagaagtcagtaggaaggaacatcaagctctagggatatcttttgttacatcatcacgagcgatagctcttgttattgggccatctattggaggctttcttgcacagcctgcacaaaagtacccgaaattgttctctgaagagtccatatttgggaggtttccatacttcctcccttgctttgtcatatcggtgctagcggttggatcatgtattgcatgcatttggcttccggaaacgctgcactttcatgatgatgaaaaagcagaatgtattcaagaattagaatcacaagttggtggttctaaatctacagagaatctgctaaagaactggccgttgatgtcagcaataatcctattttctatcttttctctccatgacactgcttatcttgagatattttcactctgggctgtgagcagcagaaaattccagggccttagctttacatcccaggatgttggtactgtgttcgccttctcaggactcagtgtactggtatatcaacttactatttatcccctcctttcgaagtattttggaccagtcaagatatttcggcctgcagtgatcttgtccataattcttctcataacatatccattcatgtccaatctacacggcctggagctcaaaatacttgttaacatagcctcaattctgaagaacgtgtttgctgccactattactattgcgtgcaacattttgcaaaatactgcagtgacacaaaagcagagaggcactgctaatggcatctctgttactatgatgtcaatgttcaaagctgcagctccggcagcagcaggaattattttttcatgggctcagaagcacatatatgggctattcttacctgccaatccaatgaagcattaataaatatgggtatatgaagttcgttacctatgaattacatctggagtgcattgtcaggttacacacaagaaatatggggatccatgacgaacaccatgtgacctttcagtagaatgtcataataatattgtgataaaatggttagctaccatggatgtttcatctacacaccagcttggtttgttatttatactaaggaagaacaaattctagtcttatgatcaactacagtcaggttttgaactgcaagagatcatatcttaagtggtacatacatttc

SEQ ID NO: 8366 - DNA, 2088 bp, Zea Mays
atggagtgtggtgctggaaaagaagggtatgatgcctacaagcctggtcaccaagcagttggagggagcaggggcaagttcatgggggcaagggtgacagtgaaaatggcatgtgggttgcaggttctcagaaagaagcaactcgtgagcttgggaaataaagggcagtgtgccaacataaaggaagagggagtatcggctggattgaggattcagtttgaggagtgggttgaaaaagaagaagtgattggtgatcactatttatacctcaaatttggggtggggcattttggaatggatgaaaatggtgacgaggtagaaaatgatttgaactcatctgaagaaaaggaaaataagtacggtgtggaggatttcatagagaaagaggatgattcttcttcgaaaagaaataataagaaagtgaaatgcaatgctgacactaaaggggtttttattcatgctagcgtgaatggtgaatttatggagattttgaaaaagaaggctaatgaaattttagatttagctgtggacaaggccttaggaaagattgttgatagagtattgaaggaaccatttgatataactgggtttgaaagctggcttatagccgcttttcaaagatatttaatcagggacttgaaagttgcaaaagaagagcaagacattggattttatgctggttttgtcggggcaacatatttcctcggaagaaccataagtgctgtgccatggggcatatttgctgacaagtatggaaggaagccatgcattgtgattagcatcctctcagtgattgttttcaacacactctttggacttagcacaacttactggatggcaattgtaactaggggattgcttggattgctttgtggtatattgggacccatcaaggttacatcatcacgagcgatagctcttgttattgggccatctattggaggctttcttgcacagcctgcacaaaagtacccgaaattgttctctgaagagtccatatttgggaggtttccatacttcctcccttgctttgtcatatcggtgctagcggttggatcatgtattgcatgcatttggcttccggaaacgctgcactttcatgatgatgaaaaagcagaatgtattcaagaattagaatcacaagttggtggttctaaatctacagagaatctgctaaagaactggccgttgatgtcagcaataatcctattttctatcttttctctccatgacactgcttatcttgagatattttcactctgggctgtgagcagcagaaaattccagggccttagctttacatcccaggatgttggtactgtgttcgccttctcaggactcagtgtactggtatatcaacttactatttatcccctcctttcgaagtattttggaccagtcaagatatttcggcctgcagtgatcttgtccataattcttctcataacatatccattcatgtccaatctacacggcctggagctcaaaatacttgttaacatagcctcaattctgaagaacgtgtttgctgccactattactattgcgtgcaacattttgcaaaatactgcagtgacacaaaagcagagaggcactgctaatggcatctctgttactatgatgtcaatgttcaaagctgcagctccggcagcagcaggaattattttttcatgggctcagaagcacatatatgggctattcttacctggtaaccagatcttgttcctgacgctaaacatggtgtcaataattgggctagtgctgacattcaagccatttctctcccagccaatccaatgaagcattaataaatatgggtatatgaagttcgttacctatgaattacatctggagtgcattgtcaggttacacacaagaaatatggggatccatgacgaacaccatgtgacctttcagtagaatgtcataataatattgtgataaaatggttagctaccatggatgtttcatctacacaccagcttggtttgttatttatactaaggaagaacaaattctagtcttatgatcaactacagtcaggttttgaactgcaagagatcatatcttaagtggtacatacatttc

SEQ ID NO: 8367 - DNA, 2428 bp, Zea Mays
gtggaggtgtcctgcgcgccgcacccccgcgttatcaggctccgatcccatccccgtcccgctctgcctggcctctgtcgcggggtcgcatcgcatgcctccatgccttggctggcagcatttactatttagccgaggtgtgggtgggggcgttggcggcaaccggcaacaccgtcctcccctccccctcctcctcccgcgtgctctcctctcctatcctctctgcccccggtaactacaactgttggagtaggcccgggttggccacggccgccacactgctccgctctgctctctgaaggcattgcctgcgcggcttcttcctccgccggcgtcggtccgcgagttgttggcatggccgccgcagggacgcagctaggccggcttctgggcggcctatggttcctggccgcgttgctaggacgaccgggcgccacggcggcggccgccgggcagccggcggcaccagcggtggccgccgtcgacgggcggcgcgccgtcgcggcgaccggggaggacttcgtgtgcgcgacgttggactggtggccgccggacaagtgcgactacggcacctgcgcctggggccgcgccggcctgctcaacctgtttctctctgtcctctcgcgccgccgcaggatctctccaacaaggtcctgctcaatgccgtcagagccttctcgccgccgctgctgctccgcctgggagggtcgctgcaggacaaggtgatgtacgggtacggcgccgggcggccgtgcgcgccgttcgtcaggaacgcgtcggagatgcacggcttctcgcagggctgcctgcccctgcgcaggtgggacgacctcaacgccttcttccggagatccggtgccaaggtcgtgttcgggctcaacgcgctcaacggccgcgtcccgttgccggacgggtccatgggagggccgtgggactacaccaacgcggcgtcgctgatccggtacaccgcgaacaagggctaccgaatccatggatgggagcttgggaacgaactgagcggcactggagtgggagctcgggttggcgcggaccagtacgccgcagacgtgatcgccctgaaagcgctagtcgacgacgtgtaccggagcgagccatcgaagccgctggtggttgctcccggaggattcttcgaccaagcctggtttactgagcttgtcgtcaagaccgggccggatctactgagcgtggtcacgcaccacgtctacaatctaggaccaggaagggacacgcacctgatcgacaagatcctcgacccgtcaaccctcgacgggatggtcagcacgttcagcgacctccagcggctgctcaagtccacggggacgtcggctgtggcgtgggtcggggaagccggaggcgcctacaacagcggccgccacctcgtcactgacgcgttcgtgttcagcttctggtttttagatcagcttgggatggcagcgaggttcgacaccaagagctactgcaggcagagtttggtcggcggcaactacggcctgctaaacaccacgacgttccagcctaaccctgactattacagtgctctactgtggcatcgcctcatggggaccaaagttctagcagtaacattcagcggcacgaacaagatccgcgcgtacgcgcactgcgcgagagattcagtaagcaattcagccgcccttttttttcatctcctagagaattcacgctctctcgatgttgcgtccagccaggaatcactctgctgctgatcaacctgagcggcaacgccaccgcgcgggtctcggtgacggcccaaggggctgccgcggcgcacgcgcacaggcacaggcacgacgcgaggaagcacggcggcggcaggaagttccggcacgtgcacgtccccggcttcgccggcggcggcgaggcggcggcgggcgccgtgagacacgagtaccacctcacccccaaggacggcgacctgacgagccaggtcgtgatgctgaacggcagggcgttggccaccgacgcggcggggaacatccccgccctggaggcggtcgaggtggacgcggcgcggcccatcgccgtcacgccctactccatcgtgttcgctcgcgttccgcatttcagtgccccggcgtgtagggtagaccggtagagtagcggtttagatgggtagattcataatgggtttggcgtgattggtgatgatggacagctaagctttccatctggtgagatgaggtgaagtgaggtgcaaggcatctgtcgaaagaaaagggatgcaatgcaatgggggtgagtttgttttctttttacgattggaattgtaaaaggtcgaagaaatttatgatgatcagcgatgggaaagggaaaaactcgttcccgtttgtctttctgttcatggttggaaacaccagtgaaatcgacgtaagagcggtactaacgaaat

SEQ ID NO: 8368 - DNA, 2928 bp, Zea Mays
ccgtcaaccttctttctcgcgcccaaacaggagttctctcgttctaaaaaaagattgcgaaaggacatgaatcccatgaggatcgagcatatggaggagcctagttcttgatccaatctcccagcatgcttgacgaacgcgaagacgaacgtggggcgaacgctgcatgctaacgcggaagatggaggagcgcgtcgggtgcagcaatgccgcgacgtccttcgacgactccgccaccggcaggacggcgggcgccgcggcggcgcagtgctccacggtgtcggtgttcctcgccaagatcaacggcgccgcgcgccacgtcaccgccgtctggagcaagagcctcatcaaccagtccttcaccgtctccatcgaacggccgggcgacggcgacgggccggtcacccacagggtggagctgaagccgtggccgttctggagcaagaagggcggcaaggcgctcgacgtgggcggcggcgaccgcgtcgacatgttctgggacctgcgctcggccaagttcgcggcggcgggcagcagcccggagcctgccggcggctactacgtcgcgctggtcagcaacgacgaggtcgtcctcctgctcggcgactgcaagaaggacgcgtacaagcggaccaaggcccgcccgtcgctggaggacgccgtgctggtgtgccgccgggagagcgtgttcggccgccgcagcttcgcggcgcgcgcgcggctcgacgccaggaggagcaaggagcatgagatcgtcatcgagtacgcgctcgccgccgcgggctccagcagggacccggagatgtggatcacggtggacggctccgtgctgctgcatgtcaagagccttcagtggaagttccggggcaatgagacgctgctcgtcgacgaggagccggtgcaggtcatctgggacgtgcacgactggctcttcgccgggccgggcacgcaggcagtcttcgtcttcaagcccggcgcaccgccggagatccaagaggacagcggagggaacgccatccagggtgacgggactgacttctgcttcttccttcaggcatggaggacggaatgaggcggtgaaatttgaagggcaaggcaatgatcttgtcctcgcgctactgatctgttgatgtgaatgacattgaaagcgtatccagctttacaaatttgtaaccaggaacacttcgtcaatccaagtttctgtcactggaaatttaatccaagcacacaagatatacaactttctttttacactgcaatggaactgacgtaagatatcaggtacgtaagcaactgcgaagtgtttataactcatagcagatacaacaagagcacaagattcatatcgttggccctgatggccacatacattcactccaccagaaaagctgtgtagagcccaaagaactgcttattctagaacaagtcatgactatcatcatagcaactaatctctactctccatctctcccttgttaccaacgtagctgtgaactagtctatttcctccatctgcacagtggcactgcaatgtgcaatctcaaatacctgaacatggcaacaaaaatatgaaacaaaaaagaaggcgtgatgtctagatgatcatctatcattcactccatcacagcaacaccgccagctgcctttatctttgctatgatcgcttccgcttcctcctttgtgagcgattgcttcagaacgactggggccttctccaccagctccttggcctccttcagccccagatccgtaaacgtcctgatctccttgatgatcttgatcttcgcagcagcgtcgaacttctccaacctgacgtcgaagactgtcttctcggctttcttctcagcctttccagaacctgccccagagccgacctgggcaccgaaaccgaaaccctggccagataccgcctgtggcggctcctggttcagtctgaggagaagggctggagcaatctgtttgatctcctcgggagggagagcagcgatgcgatcagctagttccacgactttctccgaaggcggcggcataggcccgtaggggtcgtatacatcggggtacttgtacttcttagcacccatgtcctttgcagcctcagtgctgtatagatgagcccaaattgctgaaagacgactgccagaggatggttttgaaagacatagccgtcgtgctattgtacagagactcatcctaatatcagttattcagttatgtgagcgcaatattcttctcctgcaccataacaagcaagaatcagtacaaaatgagactttgaagaaaaacttccagatcagattgcaccctgaatccatgaacatctcgtagcatgcatatataagcatgtataggcatggtagtttaaagggatcagctacatataagtcacaaagccagtactgctagcgctaggtgacgttccggatcggagtcgccattttacaagtttttaaggtatctcatttaaaccaataaatagcataataagttaataacttgcgccagaaatgtatctctttcatatcaaaatttccccatccttttcccaacctcccagtttctgactttctgtaatctgcaccgggagcacaccgatatgcagtgcagcgagagcaacaaatacagcgaaactgcccaaggtcatctattcacgagcacgggatgatccagtacaggacatctgtggacatatgtgcaaccgataaagtttttttctcaaaaaaaaaacgaagtttctgcgtgtatacaaaacgtacgtatacgactgcgtcagatcccaatacacggagattaaggtttagggtttgggttactcggtttcggacagagcggggagggaagagaccggaagggcgtaccggagggatgcacgtcgccggtgaagggcgggcccgacgaagagggcggcggcgctcgcccagtcgccgccag

SEQ ID NO: 8369 - DNA, 596 bp, Zea Mays
cgaggatacttgctcttttacacgacggttggtgacacttttgttactgaggacactacaaatgtgatgtttcctcgggaagtaacagttccaggctatacacacccattggttgcagttggcacagatctccatttcggaagatgaagatccacgtcaagttgatgcagagatcaaatctgctactgttaattatgctctatatgatggcttctttggtaaatccacagtgtgcccttctttaagatcatctacagcccagttgctggacgcgcttctgcttgcgaagtgacaaaccagtcgtggttccatatcaatggttacgagtggttattcccttctcccttgttttcccgagggaacacaggacgggctaggtgtccataatcataagtcccataaaggaaattaatttaattattatagagttcatatgtaacatttttgtcgtccctgatgaaatatggtgaatttgtcacgcccctatgctgatattatgattggcagattgctttaggtagtgtttggttgaggagccaaatagaacggagccattccatcctgattctaggaacggagccgctctgttctgtgtt

SEQ ID NO: 8370 - DNA, 3125 bp, Zea Mays
caatcacagctctcgtcacgacagataaggccatgtgcatccttcgccactcaccagcgctctccagtccacttcacttcatccctgatcggcgatcgcgtcgagcgagcagcgctataacgcacgatgaacttggcgtccgtcgttccctgcgcgcaggcattcctcgcgttaatgactcccgccgctggctcccaccgtcgggtccacacgcatgcggcggcctccaagagcggattggcctgccgcgtcgcgcgcagcgggggcacccggtggctgccggtctcctgtgcagccgggggcggtgcagcatgggaggaatttgcttggtgaggggcttggagtactcttgggggagataggcgttcgcttcatgcttatccaacagagtgagtcatcaaatcagatctaagttcttgaataaactggtgcaatttccagtggtctcaattctttcatctacgatgagcactaatagttgagaaagaacatgccaattcatatcccggttcatacctgctcccgatatctattatcgaggatacttgctcttttacacgacgggtaacagcagttctcatcctctcttatggattctacttgcttctgttccatgtttagcatcgctggcccgagtgttattcctgttgtccaaaatctttgagccttactgctacagggtgtgctgaactttgattctatccatcataatcaaaaaggggaaaaggtgatgtctgcactttctagtttctggaaaagaactctttatgctgtcctttattatgaaataagtgtaggttgaaactcatatatttagttttttgccactaagattaactgtgtgggaagttattatttggaatatttaaattcatgggaaattaaaataaacaaataaaacttatttactcactaggaaaatcatttttagggtgttacatcagtagatccatacagaacaatccggtaaggagaagcagcaatactgggtgcagttgcattagggtttgttgaacaaaggtttccagtagtagtttgcaatccccaggcagaaaatatggtggaatagcaactgatctgcaactagcttatcagccactattgggaatcccaccggcgaacctgcaggttgtcactggggagagagcacctgcagcgctctatgtgtagccaaagaatgtaaggatgcagcttggtccacagtagtaaaaccaaactttgttggcactaaaaaacaagtggattgagcagcttgaaaaggagaattattcagcttcctctattgtgctgaactgacttctgaagcactattttttgctgcaagtgcagttataaggaaaggtgttactgctatgcattggtgctggacctcatgatgaagcattgtgctcattctgtttaggttctgaacttttgtgtttctttcacaggcagtgaagaccattattgtcagtcttgtcttgtgccccattgctataatcatctttttcattgggatcaatctcaataggtgggatggcttgtataaattcgtcaacctctaaagtgaaagttatgtcataacccaccttgatcagtggtacacgggaattgttccatattcaacactgtgcatgtcaacatcttgggctgcaccaaccacaattcccactacccaaaaagctaggtgctggcgccaagcaaagagcttgcctgaaatatggatctggatgaccaagtgcaatagaaatagttttagggtggagaaatgattgggactgatacctgatctatatttttcccttttgtgtgcacacatcttagctagcaatgcatgtattttatataacttctgttgctccttaatatcaggttggtcgtaccacagtcaaatctacagaagacctgattcttggcgttcccttgataactgtcaatctgttggacttgtacttaagtctcatgtatacacaattatacatatgaatatgttgtaagttgtgattagtcgattaggagtcttacattgaaaattttacatccagtcatctagctgcaaagcttgctatcttagcttttgaagctttagaaaaaagattgttagataaactgtctgtcccaagttcgcttgtcatgatatatttttttcttcaaatgtgtttgagttttttctctagaatatttactattacaatgactcaacccatctttctctgtagttggtgacacttttgttactgaggacactacaaatgtgatgtttcctcgggaagtaacagttccaggctatacacacccattggttgcagttggcacaggttacagagaaaagttttttgtcaaagtatatgctgccgcgttctatgtagattactcacttcgccttgatactgagcaatggaaagcaaagactggtattgagagctttgacagttcctctgttttcgactccatttttaaggcaccggttgtgaaatcattgagtataattcttgttagagccgttgatggcaagacctttgtgaatgctctaaatgatgtcattgcccgccaaataaaaaacccaaacgccgaggaagaatcttccctgtcaaccttgcagaatacctttcttgggcgcaatctcaaacagggaacaagcatatacttaacttggcttgaacccaaaagaatgctgatctccatttcggaagatgaagatccacgtcaagttgatgcagagatcaaatctgctactgttaattatgctctatatgatggcttctttggtaaatccacagtgtgcccttctttaagatcatctacagcccagttgctggacgcgcttctgcttgcgaagtgacaaaccagtcgtggttccatatcaatggttacgagtggttattcccttctcccttgttttcccgagggaacacaggacgggctaggtgtccataatcataagtcccataaaggaaattaatttaattattatagagttcatatgtaacatttttgtcgtccctgatgaaatatggtgaatttgtcacgcccctatgctgatattatgattggcagattgctttaggtagtgtttggttgaggagccaaatagaacggagccattccatcctgattctaggaacggagccgctctgttctgtgtt

SEQ ID NO: 8371 - DNA, 3137 bp, Zea Mays
caatcacagctctcgtcacgacagataaggccatgtgcatccttcgccactcaccagcgctctccagtccacttcacttcatccctgatcggcgatcgcgtcgagcgagcagcgctataacgcacgatgaacttggcgtccgtcgttccctgcgcgcaggcattcctcgcgttaatgactcccgccgctggctcccaccgtcgggtccacacgcatgcggcggcctccaagagcggattggcctgccgcgtcgcgcgcagcgggggcacccggtggctgccggtctcctgtgcagccgggggcggtgcagttggtgatgcagcatgggaggaatttgcttggtgaggggcttggagtactcttgggggagataggcgttcgcttcatgcttatccaacagagtgagtcatcaaatcagatctaagttcttgaataaactggtgcaatttccagtggtctcaattctttcatctacgatgagcactaatagttgagaaagaacatgccaattcatatcccggttcatacctgctcccgatatctattatcgaggatacttgctcttttacacgacgggtaacagcagttctcatcctctcttatggattctacttgcttctgttccatgtttagcatcgctggcccgagtgttattcctgttgtccaaaatctttgagccttactgctacagggtgtgctgaactttgattctatccatcataatcaaaaaggggaaaaggtgatgtctgcactttctagtttctggaaaagaactctttatgctgtcctttattatgaaataagtgtaggttgaaactcatatatttagttttttgccactaagattaactgtgtgggaagttattatttggaatatttaaattcatgggaaattaaaataaacaaataaaacttatttactcactaggaaaatcatttttagggtgttacatcagtagatccatacagaacaatccggtaaggagaagcagcaatactgggtgcagttgcattagggtttgttgaacaaaggtttccagtagtagtttgcaatccccaggcagaaaatatggtggaatagcaactgatctgcaactagcttatcagccactattgggaatcccaccggcgaacctgcaggttgtcactggggagagagcacctgcagcgctctatgtgtagccaaagaatgtaaggatgcagcttggtccacagtagtaaaaccaaactttgttggcactaaaaaacaagtggattgagcagcttgaaaaggagaattattcagcttcctctattgtgctgaactgacttctgaagcactattttttgctgcaagtgcagttataaggaaaggtgttactgctatgcattggtgctggacctcatgatgaagcattgtgctcattctgtttaggttctgaacttttgtgtttctttcacaggcagtgaagaccattattgtcagtcttgtcttgtgccccattgctataatcatctttttcattgggatcaatctcaataggtgggatggcttgtataaattcgtcaacctctaaagtgaaagttatgtcataacccaccttgatcagtggtacacgggaattgttccatattcaacactgtgcatgtcaacatcttgggctgcaccaaccacaattcccactacccaaaaagctaggtgctggcgccaagcaaagagcttgcctgaaatatggatctggatgaccaagtgcaatagaaatagttttagggtggagaaatgattgggactgatacctgatctatatttttcccttttgtgtgcacacatcttagctagcaatgcatgtattttatataacttctgttgctccttaatatcaggttggtcgtaccacagtcaaatctacagaagacctgattcttggcgttcccttgataactgtcaatctgttggacttgtacttaagtctcatgtatacacaattatacatatgaatatgttgtaagttgtgattagtcgattaggagtcttacattgaaaattttacatccagtcatctagctgcaaagcttgctatcttagcttttgaagctttagaaaaaagattgttagataaactgtctgtcccaagttcgcttgtcatgatatatttttttcttcaaatgtgtttgagttttttctctagaatatttactattacaatgactcaacccatctttctctgtagttggtgacacttttgttactgaggacactacaaatgtgatgtttcctcgggaagtaacagttccaggctatacacacccattggttgcagttggcacaggttacagagaaaagttttttgtcaaagtatatgctgccgcgttctatgtagattactcacttcgccttgatactgagcaatggaaagcaaagactggtattgagagctttgacagttcctctgttttcgactccatttttaaggcaccggttgtgaaatcattgagtataattcttgttagagccgttgatggcaagacctttgtgaatgctctaaatgatgtcattgcccgccaaataaaaaacccaaacgccgaggaagaatcttccctgtcaaccttgcagaatacctttcttgggcgcaatctcaaacagggaacaagcatatacttaacttggcttgaacccaaaagaatgctgatctccatttcggaagatgaagatccacgtcaagttgatgcagagatcaaatctgctactgttaattatgctctatatgatggcttctttggtaaatccacagtgtgcccttctttaagatcatctacagcccagttgctggacgcgcttctgcttgcgaagtgacaaaccagtcgtggttccatatcaatggttacgagtggttattcccttctcccttgttttcccgagggaacacaggacgggctaggtgtccataatcataagtcccataaaggaaattaatttaattattatagagttcatatgtaacatttttgtcgtccctgatgaaatatggtgaatttgtcacgcccctatgctgatattatgattggcagattgctttaggtagtgtttggttgaggagccaaatagaacggagccattccatcctgattctaggaacggagccgctctgttctgtgtt

SEQ ID NO: 8372 - DNA, 1981 bp, Zea Mays
cgggcgctgcagtagcgcagcgcagccacgccgcggcaacagcaacaccgcaccatggcgcttcttcttcatccccgcctcccgtcccatcctttccgcgcggcagcccaccaccaccacgccatctcggacgcctcttgcttccttaccctccacggccccggaaggaagcgccgcatgctgctcgcggcggtcacgtgccgcgcagccagggtcaaggagcccgctccgagcgcaggcgcctcgcctccgccgccgccacaggcgctgacgaaggaggcgcacaagtacttcgaccacgccgtggtcaccgtccgcgcgggcgacggcgggcacggcgccgtgctcgccatgccgccggcgccctccgcggacgccgccaagccccgcggcaggttcaaccggggcgagaagaagagcaagaaggtgtcgtacaagcgcaactacgacgggtccgtggcgctgccgacgggcgggcacggcggcgacgttgtggtgtacgccgacgaggccgaggagacgctgctgcggttccacgagaaggcgcggtactgcgccaaacggggagggaacgtgggcgccgctggcggcacgctcagctcgcggatgcacagcgggttcgccggggagacgctcaggatacccgtgcctgaactgttgtgaaacgcaagaagggggctgttctggcggatttggctcatcactgtgatgaagtgctcgttgctagaggtggacagggcggaatcagcttgattgatgtgcctgagtacaagaggaggaaagccatggctttatccccaaacatcatgcgagatactagtgacaaagtattaacgcatggtcaacctggtgaggaagtaagcttggagttgatcttaagggtagttgctgatgttggccttgtgggacttccaaatgctggaaagtcaacacttctatcagctataacacttgcaagaccagacattgctgattatccattcactacattaatgcccaatcttggccgacttggtggagatcctgctttaggggcgttacagttttcctcagaagcaacattggcagatttgccaggtctaattgagggcgctcatctaggaaagggccttggccgcaatttcttaagacatttaaggagaactagagtaatcgtccatgttgtcgatgctgctgcagatgaccctgtcaatgattataagattgttagagaagaattaaggatgtataacccccaatacctggagcgaccttatgttgtggtcctcaacaaaattgatcttcctaaggcccaagatagactatctgcactggtcttagagatatcttcaattggatgtgaagaagggcatgagcaaagtggcagcaaagataacctaaatggacgagtaagtgatcatcaggtcttatcagaggctaaagctgaaggtgttgaaaaggagctcggggactatccaagacctgaagctgtcgtggctgctagcgtattgaggcatatcgggatcgacgagatgctgaaggagataagggcagccctgagaaaatgctttgatcacaagttaccagaacattgagcaaattaaatccatggagagttttctgaagcaacggcaccagcggtttctgaagggtgaaaacactaatgctggagcacagcggtttttcaggcgtcgtttgtaacacgggttctccagtgaaatttctgcgaaaattgaatttgttgtcgtccacagctgccgtttgtaggtgacagtacaacgtatgtgaatagattagtttgagttatgtcggcgctgtcattgtatcattcgtctccaatctgcgcagatttgcagtgtagcattcatctcttgtctgcacagatgcacgatgcggcatttgtcttctgtggtttcagtcctgtgtactacaagaaatacactttgatggaactatcgctttgtgacaacaatttcatttcacgaatcaatgtgatgtgcca

SEQ ID NO: 8373 - DNA, 1837 bp, Zea Mays
cttgcgcttttcactagtttggattcggacttcctgagctccgccgattccttcctcctccacctcctctcctcccccagccgccgccgctgctcatcttatctttatctcatccccatcgcccgcccttgctccgcccccgggaatcgtcgatggcggcgtcggcgttgtggcagccgcaggagcaggggctccgcgagatctgcgcccacctggaggcgcatatctcacccaactctgaccaggcccgcatctggcagcagctccagcagtacagccagttccccgacttcaacaattacctactcttcatcctggcccgcggagaggggaaatctattgaagttagacaggcagctggtctattactgaaaaacaatctgcgaacgacttacatttccatgcaatcttcatcccagcattatgttaagtctgagctgttaccatgtataggggcaaccaatagggcaattagatccacagttggaacagtgatcagtgtgcttttccaaattgtacgagttgctggatggattgagttgtttcaggcactccataagtgtttggagagtaatgacctggatcacatggaaggtgctatggatgcgatatacaagatctgtgaggatgtccctgaagagcttgatgttgatgttcctggtttgtctgaacgaccgatcaacgtgtttatgccaagaatactgcagtttttccagtcaccacatgcaagtttgagaaaactatcattgggtatcataaaccagtacatagtagtgatgccatcggcactctacatgtctatggatcagtatattcagggattattcaaccttgcaaaggactcttcagcagatgttcggaaactggtttgttcagcctgggttcagctcattgaagttcgcccatcaattttggaggtctgcatactgtgatgtgagcatgcctcctgaaggtttacaggagttcttgccgcacttaatcccgactttgttgtcgaacatggtatatgctgacggcgatgagtcccttgatgatgctgaggaagatgaatcctttccagacagggaccaggatttgaagccccgcttccatgattctcgattgcatggatcggaaactggagatgacgatgatgatgctgatgctgtaaatgtctggaacctgcggaagtgtagtgctgctgggttggatgttctctctaatgtgtttggtgacagcatccttccaactttaatgccattgattgagcaaaacttggctcgaacagatgatgattcttggaaggagagggaaactgctgttttatgtctaggcgctatagcagaggggtgcattagtggtctatacccacaccttcctcagattgttgcctttctaatcccacttcttgatgataaatttcctcttatacggagtattacgtgttggacgctctctcgatacagcaaattcattgttcagagccttgatcatccaaatggacgcggacaatttgataagattcttatgggagtgctcagaaggatattggatactaacaaaagagtgcaagaggctgcttgttcggcgtttgcaatccttgaagaggaagcttctgaagaattagtaccccatttggaagtaattttgcagcacctcatgtgtgcctatagaaaataccagagacgaaatctccggatactctatgacgccctcggtaccctggctgatgctgttggagcagaattaaatcaggcaaaatatctagacatatttatgccgcctttaatcacaaagtggcagcaactttccaattatgacaaagatctatttccactccttgaatgctttacatcta

SEQ ID NO: 8374 - DNA, 5043 bp, Zea Mays
ctacgtacaagtcgaccgagtgaggaagttgaactaattgccgagcgaagaagcaaaaatcatatcaatagccatagaagcacatcattagtcttgcgcttttcactagtttggattcggacttcctgagctccgccgattccttcctcctccacctcctctcctcccccagccgccgccgctgctcatcttatctttatctcatccccatcgcccgcccttgctccgcccccgggaatcgtcgatggcggcgtcggcgttgtggcagccgcaggagcaggggctccgcgagatctgcgcccacctggaggcgcatatctcacccaactctgaccaggcccgcatctggcagcagctccagcagtacagccagttccccgacttcaacaattacctactcttcatcctggcccgcggagaggggaaatctattgaagttagacaggcagctggtctattactgaaaaacaatctgcgaacgacttacatttccatgcaatcttcatcccagcattatgttaagtctgagctgttaccatgtataggggcaaccaatagggcaattagatccacagttggaacagtgatcagtgtgcttttccaaattgtacgagttgctggatggattgagttgtttcaggcactccataagtgtttggagagtaatgacctggatcacatggaaggtgctatggatgcgatatacaagatctgtgaggatgtccctgaagagcttgatgttgatgttcctggtttgtctgaacgaccgatcaacgtgtttatgccaagaatactgcagtttttccagtcaccacatgcaagtttgagaaaactatcattgggtatcataaaccagtacatagtagtgatgccatcggcactctacatgtctatggatcagtatattcagggattattcaaccttgcaaaggactcttcagcagatgttcggaaactggtttgttcagcctgggttcagctcattgaagttcgcccatcaattttggagccacatcttaaaaatgttactgaattgattctgcaagctaataaagattcagatgatgaagttgctctggaagcttgtgagttctggtctgcatactgtgatgtgagcatgcctcctgaaggtttacaggagttcttgccgcacttaatcccgactttgttgtcgaacatggtatatgctgacggcgatgagtcccttgatgatgctgaggaagatgaatcctttccagacagggaccaggatttgaagccccgcttccatgattctcgattgcatggatcggaaactggagatgacgatgatgatgctgatgctgtaaatgtctggaacctgcggaagtgtagtgctgctgggttggatgttctctctaatgtgtttggtgacagcatccttccaactttaatgccattgattgagcaaaacttggctcgaacagatgatgattcttggaaggagagggaaactgctgttttatgtctaggcgctatagcagaggggtgcattagtggtctatacccacaccttcctcagattgttgcctttctaatcccacttcttgatgataaatttcctcttatacggagtattacgtgttggacgctctctcgatacagcaaattcattgttcagagccttgatcatccaaatggacgcggacaatttgataagattcttatgggagtgctcagaaggatattggatactaacaaaagagtgcaagaggctgcttgttcggcgtttgcaatccttgaagaggaagcttctgaagaattagtaccccatttggaagtaattttgcagcacctcatgtgtgcctatagaaaataccagagacgaaatctccggatactctatgacgccctcggtaccctggctgatgctgttggagcagaattaaatcaggcaaaatatctagacatatttatgccgcctttaatcacaaagtggcagcaactttccaattatgacaaagatctatttccactccttgaatgctttacatctatcgcacaggcattgggaccaggatttgctcagtttgcggaaccagtgtttcaaaggtgcattaatcttatccattcgcaacagttgtcaaagattgatcctactgcagctggtgcggtgtatgatagagaattcattgtttgttcgttggacctactatcaggacttgcagaaggtcttggcgctggtattgaaagtcttgtaagttcttgtctttgcatatggtatcattttcctttccaagtacattttagacatgatcacacaaacacaccactcacatacccacatgggtgcgtcaggggtggagttcaattatttaatcactgggttcaatcatactatcatattggggccatgctgaatatgtacttagaggaagaatttgctattgttaaaggggaactatagtgtattaaacaaaagtcatcagggccagctggctctgatggaagcacgtagctccgcccctggggtgtatcctagcacacatctaaactagggaggcctactcacagaatgtatcacatgcgatgatgtgagccttaagatctgagtgggttaaatcctaaacaactgactacacttggttctctttcggtagtatctgatgtttttgctgtatacgcatgaatctcttattccatttgaacttgttaatgtgagacaatacactgattgttccaatatctactgtattgtttacagaaactatcagttctgttacatggggctgtaccatgggtgccgagtagattgtccagctggtaattttgctggtagctgagtttaggcatttttaaacaagttccaattttgtctgtatagcatgtagcctggatgaatgttaggtgcgactcctcaggcttgagatctcacttctcactggaatacctggatatgtttttcttttccaatagaaagagttagttccacttgttatgttggttttaccaatgactgtcatatagcgaagtctgagtttattgaaactaagtgctgatgctcggccatgatactgtgcagtaataaaattgaattaaatccttccatctctcacccctctccaacctgtctatccgtccttcgacccaccatctttcactattacctttctagcattgagtttgggcttgcaaaaccttcgccgcaccattcatgtcatggcctggctgcctgagaccgtgtgcattgtggcacacctatggacatgtggttcgacttccacctttcttaaactcggagcaggtgcacacaatagccacccatttgagttgagcgctgaacctctctatggccagtatagtggccatgtgcaattctgctcaggtgaacagtgcgcgtgcattcctgttcacaacgggctcaaggtgggtatgttgcccgtttgttggttagagattagaccagattgcgctgttttctatttccttaatccaagagagctttattcaaggtcaagtctttccatgtcactaagcaaggaatagattgaagtttctagttacctccctgccctttgtggggtatagtcacactattgtggatttgtggtttagagccaaataaagtatggctgtgacatctgcactttcttgaagggcaattactctgaagaattttcctttgtttgctgattatacttaaaattttagtaccaaatatgcataagttcgataggtatcttttctttgttgtaggttgcacagagcaatttgagagatctacttttgcaatgctgcatggatgaagcagctgatgttcgacaaagtgcccttgcacttcttggagacctttctagggtttgcccaatacatttgcatccacgccttcaagaatttcttactgttgcagcgaagcaactgaaccctcaatctgtgaaggatgcggtatcagtagctaacaatgcttgttgggctattggagaattagcaatcaagattggcaaagaaatagcgcctgtggtgatcaccgttgtttcgtgcttggttcccattctaaaatccccagagggttcgaacaagtcacttgttgaaaacagcgcgatcactcttgggaggcttagctgggtgtgtccagacatcgtggcccctcatatggagcatttcatgcaagcatggtgcaaggcgttgtgcatgatcagagatgattttgagaaagaggactcgtttcatggattgtgtgcaatggtggcagcaaaccctacaggaggcgccggttcattagcttacatctgccaggcctgtgcgagttggactgagataaaaagtgaaggtcttcacaatgaggtgtgccagattctgaatggctacaagcagctgcttggaaacggtgggtgggaacaatgcatggccaccctgcaaccggatgttgtgcagaaattagctagatacggagtatgatggcagtggtcgtgtggtttcatcatctttttacgctggagacagagatcaggatggttggttgggtcacttgctcgtccctcccgcctcccagtcccaggcaaggcgacattgatgaaagaaaggtttttgtagcgtgtaattcttttcttcctcttcctcttagcagttggcctgcattaaacatattaacatgtaaggattcgaggaacacatggtggaacacaaaatgcaaaaaagtagggaaaggaaccttcgactttgagatgaagatgcgcacggtatgaaaggcacggtctggaagattgatgaatcagttccgaagctatggatgaagaagcttcggcttagcgcaaagacggtgatggagaatgaaaccgacctaaaggggaaaagactgcttagtcctcgacagattactccttagtcaatagtaaatgtcaaggacatgaatgtaattttacccaggctgcgtcctgtgcctataaatagatgaacagtaacacaatattgttcacgctgatttgtaatcactcgcacgtcgctcttggattcttacattctgtcaagccgaagatacaaatgtaattcaatattattaatgtttgttcatgatcatataatgag

SEQ ID NO: 8375 - DNA, 4370 bp, Zea Mays
aacgagacccccaagtcccaactgccttgatggccaaggaaacaggcctgccagccagccgcctttcgaaaccgagcaccagggagcagacgcggtctctggaacccaggttccagcgagcaaaccatctaaccaggcgctgagaattctgtgcggaggaggcggatggcaatggtggcggcggcggaggggagcgggcgcagggacgccgaggcggagctcaacctgccgccagggttccggttccacccaacggatgaggagctcgtggtgtactatctctgcaggaaggtagcgcggcagcaggtgcccgtgcccatcatcgcggaagtggatctttacaagttcgatccgtgggatctgcccgagaaggcgttgtttggtcgcaaggagtggtacttctttacgccgcgggaccgcaagtacccaaacggctcgcgccccaaccgcactgccggaaaggggtactggaaggcgactggggccgacaagtcgatcgtgcccatgggcagcaccagggcggcggggatcaagaaggcgctggtgttctactctggcaaggcgcccaggggcgtcaagacggactggattatgcatgagtaccgcgtcgctcaagcggaccacaccctggggaagaagggctcacagaagctggacgagtgggtgttgtgccggctgtataacaagagaaacaattgggacaaggtgaaggtcgaggagcaggagttggaggcggcgccgcgccgacagcatcacttgcagagcgcggaggattccatgtctaacagtttccagacgcacgactcggacatcgacaacgtcttcgagctacaaaattgctacggtaacaacatggtgcaagggcaggccatgacccccaggaacgacattggcgtcgtgacggtgaaggaggacaacgactggttcaccgacatgaatctggatgatttgcaggcatcctacaacatggcccatacgacgaaccattcaacagttacgttccaatctttcttcttaaaactccaccccttttgcccacaccggactaccggagacgcccacgtccgcgctgctggccaatgcggcccaattctacacggcttgaacctaggtagccacgagccctcagcccctcactccgtcacccaccagccgccgctacgtgacgaggtctcccgtgtgacacagactgccgtccttcgcctggcgagtggtgacctgcgacctccgtctccggctgccgtcctctgccatggtccgtggaccgtagtccggcagcagcagggctccagcctctgcccgaccgcttgcccgccaccggcgtctgctacctccgcatccggcctctgggcaccggtctcccgtctctgcccccggcgttcatcgtccggtctccgacaccaggccctcagctacagcagtacagcaccagttcccgcaacagcgaggtcatcgacgccgccatctaggacggctcttaagttgcaggaagcaggtgaagtgaacctcatgtccagttcttgctcctctttaactagtaactagatcatttgtagtgatggaagctgtaaagaagctccatgctcatctcgttgtttctggcctgcacaactgtcaatatgcaatgtccaaggttatcagattgtatgctcttcatcaatcagatttggtttctgctcataaagtatttaagcagattgagtcaccaacaacttttctttggaatactcttctaaggggtcttgctcagagtgatgcaccaaaagatgcaattgttttttacaagaaagctcaggaaaagggtatgaagccagacaacctgacatttccttttgtgttgaaggcttgtgcaaaaacttgtgctccaaaggaaggtgaacagatgcacaaccatgttataaaacttggatttcttctggacatctttgtttccaattctctgatttatctatatgctgcttgtggtgctctggcctgtgcaagatccgtctttaatgagatgctagttaaggatgttgtgtcctggaattccttgattggtggatacagccagcacaatagacttaaagaggtattgacattattcaagctaatgcaggctgaagaagtgcaagctgataaggttacaatggtcaaggtgatttcagcttgcactcatctaggagactggagcatggcagattgtatggttaggtacatcgagcataatcatattgaagtggatgtgtacttggggaatactttgattgactattactgtagaattgggcagctgcaatcagctgaaaaggtgttttctcagatgaaggataagaacactgtgacactgaatgcaatgatcactgcatatgcaaagggtgggaatttggtctcagcgaagaaaatattcgatcaaattcctaacaaagatttgatttcctggagttctatgatatgtgcatactcgcaagctagtcacttctctgattctctggagctcttcaggcagatgcagagagccaaggtaaaaccagatgctgtcgtgattgccagtgtactttctgcttgcgcacacttgggtgcacttgatcttggtaagtggattcatgactatgtgaggagaaacaatatcaaagctgataccattatggaaaactctctgattgacatgtttgcaaagtgcgggtgcgtgcaggaggcactacaagtgttcacggatatggaggagaaggacaccttgtcgtggaactcaatcatactaggactagcaaacaatgggtttgaggatgaggcgctggacatttttcacagtatgcttactgaaggtcccagacccaatgaggttactttccttggtgtgctgatcgcttgtgccaacaggcaactagttgaggaagggcttgaccactttgaaaggatgaaatcagttcacaacttggaaccacagatgaagcattacggatgcgttgttgatattctcagccgtgctggtcagctggagaaggcggttagttttatcagtgagatgcccctggctcctgaccctgtggtttggaggatactgttaggggcgtgcaggacacatggtaacgtggctgttgccgagatggccaccaagaagctcagtgaactagaccccggtaacagtgcggactccatgttgctgagcaatatttatgcaagtgctgatcgatggagcgacgccatgaacgtcaggcgatggacggctgataatgcagtgaggaagtcgcccgcttgtagtgttgttgattcagctagctcgacgaatagttaggacccaccgaattgccttcgttgtcaggtctaattttgtcaacagcactgtctattatggtagtaacctcgtctcaatttggtcaggggaatacatggcgccggagccgtgacgccccagtggtgtcttaagatgtgtcgaccctttcagggccttggaattgacagaacaaagggccccggaaataccagcctgactcccagctaggtctaatgcaggcctgtcttctactgatggaatgttgaagaaatctttatcagcatccgagagtgtattttctcagacgctgacatgtattttgcgaagtcgttcttcgccttgctgctgatgcacttaaagagaggcgcagcaaggccactttgatagagttcatcgtctactatggataaggcctgtgtgctcgagctcgggatcgtcaggaagctcacgaccagctgcgccaaggccgggaggagcatctccctcgcgctcgaggcctttccctgcgacatccaggagcagctcaatcggttcatggatggcagaatcgatggcatactttgaggctttatacatctcactgggcaccagagcgatggcaggagtatgaaccacttttgaattactgtcgtgataatggaataaagcttgttgcatgtgggactccacttgaggtggtaagaactgtgcaaacagaaggaattagaagcctttcaaaagctcaaagaaagctttatgctcctccagctggctcaggcttcatttctggctttacatccatctcaggccgatcattgatagacaaaatttcatcaacttgtggttccccttttggcccaagctcatatttatcagcacaggcaagagtagtcgatgattataccatgtccgagacaataatgaaagaaattactgatggagatccttcaggaatgctcgttgttgtaactggtgcgagtcatgtaatgtatgggccacgaggaattgtagtttttttttataaaaagtaacttcatttgataacatacaagaaaggtatgatattttttttctaagatggcaaacgcttgtacgtgaataatatattaataaaacttgatttgatttttagaccatc

SEQ ID NO: 8376 - DNA, 4401 bp, Zea Mays
aacgagacccccaagtcccaactgccttgatggccaaggaaacaggcctgccagccagccgcctttcgaaaccgagcaccagggagcagacgcggtctctggaacccaggttccagcgagcaaaccatctaaccaggcgctgagaattctgtgcggaggaggcggatggcaatggtggcggcggcggaggggagcgggcgcagggacgccgaggcggagctcaacctgccgccagggttccggttccacccaacggatgaggagctcgtggtgtactatctctgcaggaaggtagcgcggcagcaggtgcccgtgcccatcatcgcggaagtggatctttacaagttcgatccgtgggatctgcccggcgttgtttggtcgcaaggagtggtacttctttacgccgcgggaccgcaagtacccaaacggctcgcgccccaaccgcactgccggaaaggggtactggaaggcgactggggccgacaagtcgatcgtgcccatgggcagcaccagggcggcggggatcaagaaggcgctggtgttctactctggcaaggcgcccaggggcgtcaagacggactggattatgcatgagtaccgcgtcgctcaagcggaccacaccctggggaagaagggctcacagaagctggacgagtgggtgttgtgccggctgtataacaagagaaacaattgggacaaggtgaaggtcgaggagcaggagttggaggcggcgccgcgccgacagcatcacttgcagagcgcggaggattccatgtctaacagtttccagacgcacgactcggacatcgacaacgtcttcgagctacaaaattgctacggtaacaacatggtgcaagggcaggccatgacccccaggaacgacattggcgtcgtgacggtgaaggaggacaacgactggttcaccgacatgaatctggatgatttgcaggcatcctacaacatggcccatacgacgaaccattcaacagttacgttccaatctttcttcttaaaactccaccccttttgcccacaccggactaccggagacgcccacgtccgcgctgctggccaatgcggcccaattctacacggcttgaacctaggtagccacgagccctcagcccctcactccgtcacccaccagccgccgctacgtgacgaggtctcccgtgtgacacagactgccgtccttcgcctggcgagtggtgacctgcgacctccgtctccggctgccgtcctctgccatggtccgtggaccgtagtccggcagcagcagggctccagcctctgcccgaccgcttgcccgccaccggcgtctgctacctccgcatccggcctctgggcaccggtctcccgtctctgcccccggcgttcatcgtccggtctccgacaccaggccctcagctacagcagtacagcaccagttcccgcaacagcgaggtcatcgacgccgccatctaggacggctcttaagttgcaggaagcagtgatggaagctgtaaagaagctccatgctcatctcgttgtttctggcctgcacaactgtcaatatgcaatgtccaaggttatcagattgtatgctcttcatcaatcagatttggtttctgctcataaagtatttaagcagattgagtcaccaacaacttttctttggaatactcttctaaggggtcttgctcagagtgatgcaccaaaagatgcaattgttttttacaagaaagctcaggaaaagggtatgaagccagacaacctgacatttccttttgtgttgaaggcttgtgcaaaaacttgtgctccaaaggaaggtgaacagatgcacaaccatgttataaaacttggatttcttctggacatctttgtttccaattctctgatttatctatatgctgcttgtggtgctctggcctgtgcaagatccgtctttaatgagatgctagttaaggatgttgtgtcctggaattccttgattggtggatacagccagcacaatagacttaaagaggtattgacattattcaagctaatgcaggctgaagaagtgcaagctgataaggttacaatggtcaaggtgatttcagcttgcactcatctaggagactggagcatggcagattgtatggttaggtacatcgagcataatcatattgaagtggatgtgtacttggggaatactttgattgactattactgtagaattgggcagctgcaatcagctgaaaaggtgttttctcagatgaaggataagaacactgtgacactgaatgcaatgatcactgcatatgcaaagggtgggaatttggtctcagcgaagaaaatattcgatcaaattcctaacaaagatttgatttcctggagttctatgatatgtgcatactcgcaagctagtcacttctctgattctctggagctcttcaggcagatgcagagagccaaggtaaaaccagatgctgtcgtgattgccagtgtactttctgcttgcgcacacttgggtgcacttgatcttggtaagtggattcatgactatgtgaggagaaacaatatcaaagctgataccattatggaaaactctctgattgacatgtttgcaaagtgcgggtgcgtgcaggaggcactacaagtgttcacggatatggaggagaaggacaccttgtcgtggaactcaatcatactaggactagcaaacaatgggtttgaggatgaggcgctggacatttttcacagtatgcttactgaaggtcccagacccaatgaggttactttccttggtgtgctgatcgcttgtgccaacaggcaactagttgaggaagggcttgaccactttgaaaggatgaaatcagttcacaacttggaaccacagatgaagcattacggatgcgttgttgatattctcagccgtgctggtcagctggagaaggcggttagttttatcagtgagatgcccctggctcctgaccctgtggtttggaggatactgttaggggcgtgcaggacacatggtaacgtggctgttgccgagatggccaccaagaagctcagtgaactagaccccggtaacagtgcggactccatgttgctgagcaatatttatgcaagtgctgatcgatggagcgacgccatgaacgtcaggcgatggacggctgataatgcagtgaggaagtcgcccgcttgtagtgttgttgattcagctagctcgacgaatagttaggacccaccgaattgccttcgttgtcaggtctaattttgtcaacagcactgtctattatggtagtaacctcgtctcaatttggtcaggggaatacatggcgccggagccgtgacgccccagtggtgtcttaagatgtgtcgaccctttcagggccttggaattgacagaacaaagggccccggaaataccagcctgactcccagctaggtctaatgcaggcctgtcttctactgatggaatgttgaagaaatctttatcagcatccgagagtgtattttctcagacgctgacatgtattttgcgaagtcgttcttcgccttgctgctgatgcacttaaagagaggcgcagcaaggccactttgatagagttcatcgtctactatggataaggcctggtgcgagtgttaattctctcgagtttatgtttgttcgtcggcgcatagcttctgtttaggtaggtgagtccgagctcgtgcctgaccgcgatgacagtgtgctcgagctcgggatcgtcaggaagctcacgaccagctgcgccaaggccgggaggagcatctccctcgcgctcgaggcctttccctgcgacatccaggagcagctcaatcggttcatggatggcagaatcgatggcatactttgaggctttatacatctcactgggcaccagagcgatggcaggagtatgaaccacttttgaattactgtcgtgataatggaataaagcttgttgcatgtgggactccacttgaggtggtaagaactgtgcaaacagaaggaattagaagcctttcaaaagctcaaagaaagctttatgctcctccagctggctcaggcttcatttctggctttacatccatctcaggccgatcattgatagacaaaatttcatcaacttgtggttccccttttggcccaagctcatatttatcagcacaggcaagagtagtcgatgattataccatgtccgagacaataatgaaagaaattactgatggagatccttcaggaatgctcgttgttgtaactggtgcgagtcatgtaatgtatgggccacgaggaattgtagtttttttttataaaaagtaacttcatttgataacatacaagaaaggtatgatattttttttctaagatggcaaacgcttgtacgtgaataatatattaataaaacttgatttgatttttagaccatc

SEQ ID NO: 8377 - DNA, 5342 bp, Zea Mays
cgcccccatcgaaacacagccaaaaagccaccccgtgcaaaacacatagagctcccagtcccaacccggtcaccctccctctcctgctcctcgcatcgccggtgtcctcgacggctcgcgccgtcgcgctctcgcaaaaccctagctctgcttccctccgtcgtctcgcccgttcgattgaatcgcgccgcagaagctgttgcctctcatctctctccccgccctcctccggaaaccctagcccactccgcgaggccgcgatggcggagaggaagctggatcgaccctcggcgctcggcaaaggtgggctgtcgcttgggatcgaggaggacagggttgccgccgccatggggttcgtcgaccactcgaaagatcagcaccacctggataacagcattcccctctctcctcagtggctctacgccaaacctgctgatggaaagatctcgctgcctcatgggtcctcccttgaacttgctgaaaaggaagtgaggatgttggaaggaactgttgacaggaaagaacgaaggagaaatgcatttgatgctgacagtggtcttcgttggcttgaagaggagagggagacaagcctgcttgggagaagggagcgcaagaaggatgtggaccgggatgtggataatcgcaagattgatcgccgatctgacaatgtttctgcaagggatatcactgatccgcgtgcagctcctgcatctgaaaggtggcatgatggttccacccgtggcctggggaacgagggtcgccgggatggaaaatggtcatcaagatggggacccgatgacaaggagaaggactctaggtcagacaagaaggttgatgcagagaaggatgaaacccatgctgataaactgacattcacaggaaggctgctgtctgagtctgattcccgtgataaatggaggcctcgtcaccggcaggaaagtcattctgtcggaacagctacgcaccgtgctgctccaggctttggatccgagaaaggacgtgttaaggactcaacaaatgttggttttgccgctggaagaggaaggggaaacccgaactcagttgcatccttcaaccggccatcatctgcaggatcaatcggtgctccagctgtgcatgggaaatttgcaaaaactgctgttagtttctgctacccaagagggaagcttcttgatatatacaggcagaaaaatatgatgtcgtcgtttgatgatgtccacatgaaactggacgaaattccttctgtgacactctctactgctgcaaaacctctagcatttgttgcaccagatactgttgaagaggctctcctggaagatattagaaagggtaaagtcattagcagtgaaggaatcaatgggattggaaacaaaaaggagagggcaaaagagctcgaagaacctgcttctggcattgatgatgacatgggcaaagccagttttgcaattgctgggttgggtcaagaagggtcgtcaggtttaatctcagtgaatgatgcctcctatgttgaagggacacttcctagtggtgtcagtacatctctgctgaagataagtctggaggaaaatgccatcagcaatcaacatgggattactgacacccaggaaggtttgaaaactgctgaaatcaaggaaaatgctgatcatgctcttggcactaagttacctgatgattcgaacaccctgtttgaggtaccatcctttgagcatcttcaagaacccactaggccataccaaagcaacaacatggatataaaagtgggtggccatgctaattatccagaagagttgacattatattatctggatccccaaggaggtgtgcagggtccatttctgggtgctgacataatctcttggtatgaagatggatacttcggtttggagttaccagtacgtctgtctcagtttccagatgatgttcctttccgtccacttgtcgaagtcatgccccaccttgcgcaaaagacgcaatcgcgtatacctctgccttgtgatggaaattctgagtctctggaatcatctcaaagtaaatttgaatccagtgtcccttctacttcctctgggaggactgaccaattttctatttgggattctgaaagcaatgctgttgatcctaaaagaggtgatcatgaagcatcaataccttctcgtagtggttggctgtcttcaccggaaacaggaaaggatatatcaaatactagtaatcgccagcaacacattcctgaatcagtgaatcaggatgctgaagtgttgtacactggtaggcctaacagcagcatgggtcaatccctacgagaccttgagaatgaccgtgcagatttccaatcgacaccacatgaccctcattctgtggctggagaagctaatttgctgcaacataatgtcccaagggacagtgatctgagtcctcttggcttactttggtctgagctggaaggacgtccaaaacaacctctctcatctaatgtacttagtgtaaatgaacgtagaaatcccaagcctacaacacccaaggacattccacctgtaaacatgagacaagggccacttagcagaatgaatgaagtttctagtgtgcgcgatgagtggcctgcaaactttggtcggctggacaacatgaatgatgcaaacatttctggcagaatccatcaggttgaagcggagcatcatttgaattttgatgggcacctgctgcttcaacagatccgacgggagcaacagcaacagcggcaggagcaattgatggcccataataatttagagttttctggtgcatttcccgggcaggtgtttgatcctttgaaccaacaccgacagcctatgaatcaacagattcctgatgtggagcatcttttgagaatccagtttgaacttgagcaacagcagcaacgccaactccaacaagagcagcaccaacggcagctacagcagcaacggcaagcccagcttttgcaacggcagcagcagcagcagcagcaacagcaacaacaaatgatccttgagcaattgttgcagcaacagctgcagggttcaaattttggcccaacaagtatggttgatcaagtcttacttcgtgaacatgtattaaatgaactgcaccagcagcctcaccatttgcaaaggcagcatgatgcagctattgaacagctcattcaagcaaaatttggtcatgggcttcatagggagcaccataatgatatgttggatgttctctcgcgttcaaatcagagacagatgcttcctttagagcagcaacttcttttaggccttcaacacgagcagcaacttaagtctcaacaattggcaaatgctctgcggcaacattcaggccaggaagaagaaaggcacttaagtggggtctggccaatggatgctgctgcccagtttatccgctcaggaaccagtccaaatcagatacacagtcgtttcgatctccttgagaaccttcagagatcgtcatcgtttgatcatcatgaacatctagaccgcagcttatccttacacgaacagttgcatatgggaggtcaaggtattcgctccctagagcggactggttctttgcctggtggtggtcctggaccaaacccagatgtcataaatgccctaacacgtcatcatggacttagtcagttggaaacacatggtgatgtataccctttagttcaaatgcctatgcttccttcaggtgttcatccccagcaacttaggcatcaggatcagcttcctggttctcacataggaaggcttgaaaggcactggtcggatgccaatggacagttacaaaacagtctaatggaatcttcacacatcaaccagttgcagattgaagcggagaaggagaggaggaatgtggaaatgaacctttctgttgacaatccacatgcatggggagcccttatgaataaagataggaatacagagcaagatttgactgatatgattcataaaaaacttgtccttcaatcacagcagtcccggggttttcctgatgtttctgttccggcatcatttcgacgtaaagatcactttgtgcaacctgttgtggagagccctctgagatcagtggacatgtcgtttgaggagtctctttctgaaaggtcactttatgcaaaatcagggcagttggcacaagaaggatcatctaatcttggtactttacccaacagtattgagaacactggaaaatttaaccttagatcaggatctggatcaatgcttgagcagaagcattttcttggaattgacgatgttcaaagtgactttctagagaccacaggtggtagaacatcagctaatcaactggttgggagtgtcaatgaattaacaaggggtaaaaggcagggttctagtgcgagtttggctggggatgatcctaatttggctgatgaaggtgttagtaaatgatgtccatgtgcaggtctgattctggcatgtccaaaggaagctctcactccttactaaagcgctctacaaaccaacatactactacatctcagtctgttcccacagatctgtcagcaatcaggctgaagaaagcaggacttgcgtcctctgatgagaataagatggaagcaggatttgcctcagtagcccagggtatggaaggctgcgttcctagcaacaaagagacgggggcgtatggcatgccatcagccaccaacaatccagatgcctctggtcagtccttcagcgaagcgttgaagagctcgaggaagcctccgttgcagtacgatgcctccgaatctgcagactgtggcccaggtggtaagggcgcgaaaaagaaaacgaagaaaggaaagcagattgacccttctcttcttgggttcaaggtccacagtaaccggatcatgatgggcgagattgttcgagatgattagagtgtacatacgcggtaggaggtggccttagaagaatcaagattggctccaagccaaaccctaacctctgtacatgcccagccctggtgcccgctcacctcggcagaaattttgtgactgcatcttctcttagcctcttgctagctgtagtattgcccgatttctcagatttagaaaaaggagcctttcttatcggtgccccacagaagtgtcatagttttgttgatctgtgaagatatcgtagcactggagcatggaacgtttggtgtgctgttgtttcgctctgttttaataggggtaagggtctcacatgtaggagaggcctcctgctgctttggttggcattggacattgttcaactatcagatgtagaatgtcatcgcgatgtacaaacgtaataaacaaacttaggacgatcagtatcaactatatacaggcaaagagaaaaaaaacagtatcaact

SEQ ID NO: 8378 - DNA, 2312 bp, Zea Mays
cgcaacgacgcgcctcggcctcgcagaaacaggggccaaaaaggaaaagagaaaagaggaaaagaacgcagggaatgggcaagcagcagcaggcgccaccggcgcggcggtccacggcgatgtcggcgcctccgccaccgaagcgccggaagaagaagggccggccttccctcctcgacctccagaagcggagcctccgcctcgagcagcagctccagcagcagcagcccaaggggcgacgctccaaccgccggagcgccggctccgcggacgaggacgacgacggccccgcctccggctccggccgccgcgagaagaagctgcgcctcgtcatgggcctccacgacggatcacccaagcaggtagaaaagacgaggaaagcgacggatgggcatgaagagccgtcagattccgggcccacaacacctttgccaaacaaaaagttattgctcttcatccttgataggctacagaagaaggatacatatggtgtattttcagagcctgttgatcctgaagagctacctgactatcatgacattgtaaagcatccgatggatttttcgacaatacgtaagaagctcgataagggtgcctattccaacttggagcaatttgagtgcttggtgaaagctttacgccttattcatgcagtcatgctagaagaatgccacattttgttctggaatgaatatgaatattcgatattgcttttagtgttcctgcagttctgctacaaagacgatgtgttcctgataagcaccaacgcgatgtgctacaattcaccagatacaatatactatcgacaggcacgaggtattcaagagatcgctaaaaaggattttgagaatcttaggcaagatagtgatgccagtgatccagaaccggaaccagaattggagctggagccagaaccagaagaaccaaagccacagcctcgcaggggcaggcctccaaacaagaacaatgccaaacagaaagttgggaagccaccaacagaacgtgctactgcagatttttctggtgcaacgcttgctactgccgcaaatattggacgccatgcacaggcagatgttgatctgtcacgaagagcaatggataaagcgatgatggatatgctgagagcttcttttgccaatagaaggaatgagcataattggtctggcgagcggaaatttgaaagatttgaagagtgctcaggttataggggtacatggtccgcaaaaatggggaagaggccaattctgatggaagatagtcgccgaagcacatattgtgagactcaaccatccaattcaatatatgagctgccggtatcgtcatcctacaatgggacaaagaagctgctagtaccagttggggttcagttacagcagtcctattcccgcagcttggcacgatttgctgcacaacttggtcctgtgtgctgggagattgcatcaaggcgaattgaacgaagccttgctcctggaacaaagtttggtcgcgggtgggtaggagatggcgaaacaccaaactcttttcagccacccgtactagctgcattttcagaaacaacgacaccgcaagaccgtacagcagcttcaggtgagcagccatgcccatctatgagcagccctcctgccaccgaggcctgtgctggcaacgacagaagccatttggcgggatctcagccagatgctacgccatatgcttctaccagcacaacgcagaggatgagttccgaagcattagcaagccagcaatgtggatcactaccacaaatttcgataaaccgagctgaacgtacccttgagatgatgaagggcagccccaataatcttcacggacacccaggcatgcagcaaactgcgaatggtttcaatgctgttccaggaccaatgatgttcccacatgtggctcaactggtggtgaatcagatgcagacacatacggctgattgataacgttgtgtgtgtgtgccggggggcggggggtgtcgcctttgatccgtcgtgcctcaacctggggctgcaactgtgagcctgttgtgtaattgcttaagtagtcattaggatgatagcgtgcatagatgtgttgggtggatgctgtaacagcggtgaccggtgagttgcgattctgaatgtgtagcagaaaaaccacaggcgaaatgaaacatctgtatagattatcgaggaatttttttagcatgaaaccgtgcgaatcagtttgtctattgtctgtatggtttatatacatcaacctgacggtgttctcggactgcagatgccacaatgtagataagaagtactgcttccgttcttcaatatttg

SEQ ID NO: 8379 - DNA, 935 bp, Zea Mays
acttcctcctgacctttttgagtctcttcttccacccggcggcagcgggcagcgcaggcgagcagaccaagtcgcctgcagagtgcagactgcagatacagtccgtgctctgacggagcaacaggagaagcagagcgagccgaggcggagtcgacagcttggtgccttatcatggaggaagcggggaggggctgcggcttgctcaaggtggttgtgacgcacggccggaacctagccgtccgggatttcacgtccagcgacccctacgtcatcgtccacgttgccgacaagaccacaaaaacaaaagttatcaacagttgcctcaatccagtttggaatgaagagatgacattctccatgaaagaaccagtaggaataatcaaatttaacgaccatcacctttggcaggaggtgttcgactgggaccggttcaagtacgacgacaagatgggccaggctttcctggacctgcagcctgtggcggcggcaaccaagctgcggagggcgctgcggctcacagctggcgagaccaacctgcggaaagtgaacccggacgccgacaactgtctgctctcagatagcttcgtgacgtacgccaacggggaggtcgcgatagatgctaggctgcggctgcgtgaggtcgagtccggcgagctgttcgtcactataaagtggattgaacctgacagcgccaacactggaaagcaagcggatcactagctagcgatgcattttgcttgcagcactgcaaatatgtaatatgacctgatgtgggctgatttatgaggattttttttaaatcgtatatttttattatcaattacaatgtagaaggtgttgtatgagaatttgagatgcatcatgtcggtcatccagtgcccgacgtgtcacctattagcagcggctatcctataacaacgcatgttttagacatt

SEQ ID NO: 8380 - DNA, 3769 bp, Zea Mays
atggcctcttgttcaggaaagaaccaagaagacaccgaaaccgaagactcggcccatttgctgcgcgagcagcaggagtccaacgccgccgccgccgtctctgcagagccgccttcccttgctccgcagtccgagatcactgaagaagaggtccatgggccaccggaagccggagaccgggacccctccgccgccacagccgcggcggccgaacggaagggcgacgagaccatgtctcttttccgacggggctccgaaggtggcaagccccctcttcctccacgccctccctccatctcgagaaccagaggtccgagctccgcaggcggcaagccccctcttcctccacgccctccctccgcctcgagaaccagagttccgagctcctcgggcggcaagccccccagcccgccctctccgccccgcagcatattccacgaggtgtgggggagcagcatggcgatgagagatggtgacagagagagtcgcttcgatttgaaggacgtgttcgatgaactgatggtggagtgccggcggaacggggaaacggaccagaaagccgaggctgaggtaatatcagcatctaagagagattttgagtctatatcaggctgaggtaataccgagggaacggaatgcgcaggtgttatttcctagatattttgactacgttcttgagcgattcctgttttcttgtgattttgcatttgggagatcgaatcctgccgttcatggggatcttgtggggaggattttaggatactggagtccggggctaagaaattgtatggcatcctggagcaggggtggaatccttaggcagacgttggggccagtttctctttctttgttgcttagagtggcaacgatcttgcagagacttttttaggtgcatgttcttgcgctgttgtaatcggtatttctgttcagtttgttgtcatgctttcatttcaccgtcaaatatgtaagggcccatccctatgtttatttgagatagcataaaccaatgtagtttctttagatcataggctgaatacatgcattgctggttttagcctttgcctggctgatttctggactaaagcataatcatattttgagtagctgacaaggctcgataagtgccaattttgttatcactgctcctttatttgaatatttgatgttagttttggaacaggtgaaagacaagaaaccgctctggagaaaggtacaatatgacctgaatatttcttcatctttggttgtgattggtaactggtgtgagcactcttgtgccaattttttgtgtttcagatgttggatcaggattgttcagtctttgttctatccatgcttatatgaaatattgggacgataaaatatattctggcaggagatcatgttcaaaatgggtgtagcatagagatgaaagcaatggcagatgtttatagtttctgttctgccaagattatatgattttttattactattgtgatcagaaatggaatttcaagtgcaaaaaacaacatttttgtgatgtttttataattttgaaaagtgcgaagtgttattgcttacactgatattattaacggtcagtatttatgtcttattcttcattgtaccacaaattgtccttgttgccgtgtttctaaggaattctgaagccaaacatacaggattctgatgttgatgaatagtctaatagctgaagttagtatatgattagtaaaagaggcaattgtcagatacataagatcttggatattactgtagtaatatctttaaaaagttccattgccttctccattgtttccttctgtgaactgttgggtcttggcattaattatttactgttgcttctaatctaatcctgccaaaaaatgtgaaatttttaacccattttatgtgaaatagttttttgacaggataggaaactccaaccgaaattacacgacacctgatgtgaactaccagaaagttcacataaccgagctcattaggcattacgatctctttgcaatggttgctgtacaaggagtggaattgcatttacatgctctgaacctttgtcgtgaatattctgaatttaggcctgtgcatggagatggagagtgtttctacaggagcttcatattttcatacctcgagcaagttcttgataggcaggatacacatgaggagcaccgtcttcttgctgctgttaaaggagtggctaggcaacatgcacgccttgggtgggcgtgggcctccgaattttccaggagccacaaagatatgcaccattgtttcaatgtagtggaataggggcatgccatcacaattttacaacctgttcatgggttcaaatttgaatttattggaaatgtaacaatctaatgctaataaatatacatgttgacataagttcatttttacagaacagcatcatgagacatcgttgtagagagataaaagagatcatgtttcttccttacaccaagacaatgcacacccatgctgctttgtgtggccatctgatcaaatactaatcctacatgcttattaaatattttctttctcaactactatcttatagttgtttactggtagaagtggcgcagacaaatcttacgttggtcatatctttttgcaccttgttataaacagtcagtactgtgtaaagccttattgcaagaaaatatctgattcgtttaggcatttaagaagctaataaataaagtaatgagatggaagacacaaagacgagggaagcatgtaccgacaattaacagctaccgcatggagaaacttcttgagttcttcagagataacaagaggatagacgacagtgagtagcccttcctccacttgtaatcctaatttctagttcattgttcaaacacattttgttggccagtttttactttcctcagattggtagcagctatctggatatgctcgcacaggcaagagtttgaaccacttatacctgagctcagccaaggttacactctcaccgaggtaagtagcaccgctagtttaccttggattcttggattacttggttctatcctcgtatctctctttatttaaaacagtggtgctttcgagaagttatccagcgtaaggtctttacagatcatattcagataacagcactagtcagggcgcttcgggtgcctctgcgagtggagtacctctttcaagtagatggtcaagacctctatactggcggccaagattcccaagatgatatgccaagaagcacgtgttggccacgtcgttatcaccaggtaccccctgatcatgaagttccccgagtgaccgtgctgtacacgcaggagcactacgacatcatatacccatagcatcctggtagtcctgtgacaatacagagagcccggcctctaagactaggagtccaagtcaataccagataagtagctgcagtggtgagacatcaagtcaacagactgaccgggtagagggcggaggcgggaggttaagttcgtccctgaccagtgaccatgactatgatgaacatgtgttgagagaagctacgggattgagaattacgcatacactgacgagatagataggcatatatttgtggattctttatcctgttggtacaaactgctggtgccaataggattgtggatgatcagtagttgctcctcccttgtatctgacaaggctgaaaactttgttctgtagctcagtttaggtctcgacttggtacatttattttattttttctgtgaattgtgatcacatttccttaactatgttcctgtggtaactt

SEQ ID NO: 8381 - DNA, 1686 bp, Zea Mays
tgacacgtacgtactaacgcccggcgccggacaccggccctgtcactccctcagtcgtcagtcctcagccgttagctactttgttcttcccagtgtgtccgtgctctggtgtgtggcctccgtctcacgcctgagctgcaagccctcttggcgccacacagcgcaggatgagccacagaacagaagcgtctcttcctcctcctcttcttcctcctcatctgcaccaccacagaacacagattcgcgagcccaagaccaagagcaagagaagaagagctcagctgctgctgcggtgctgccggtgccgggcggagtttaacatcgcgccgcagctaactcaacgcagttaagcttctcctactcctagcttagccaatagccatggcgctggctagccaggtcgccgctaaccagccgccgccgccgacgctctcctcccccgcccgccgcctcccaagagccagcagcaacgctctgctgctgctccagccggcggccgcggtcctcggcggccggaccctgaggcttcggcctcccggcgcgcggaggagggccctggacgccgtcgtcgtcgcgcgggcgtcgtctgaggcgaaggcggagaccgccgaggcgggcggcggcggcgggggagcggaggaggagcggccgtacgaggagtacgaggtgacgatcgagaagccgtacgggctcaagttcaccaagggccgcgacggcggcacgtacgtggaggccatccagcccggcgccgccgccgacctgaccggccagttcgaggtgggcgacaaggtgctggccaccagctccgtcttcggggaggagatctggccggcggcggggtacggccagaccatgtactgcatccgccagaggatcggccctctgtacatgaagatggagaggaggtttggtaagtgggacggcgccggcgacctcaccgagaaggagatcatcaggttcgagaggaactccggagtggtcagcggcagggtgcgggagatccagctgcaaaactaccagaggaagatggagcagaagatgcagagggaagaggacctccgcatggggctcaagctgtacaagacgggaagtacgaggaggcgctggagaagttcgagtcggttctggggtcgaagccggagcccagcgaggccgccatcgccagctacaacgtcgcctgcagctactcgaagctgggccgggttcagtagaggctgcgctttctgcgctggaggatgcgctcaagtcagggtatgaagacttcaaggcagttcgcaccgacccggatctcgcgaacctgaggaagtcggaggagttcgagcccttgctgaagaactacgacgagtcgttcatcaacgagaacgccatcaacgccatcaagtccttgttcggactcggaaacaagtgaggcgattgttagcttagcttgccctcgtacctgaccatttgccgtgcagatacattgtgtgtatgagtactgtccaaatgtaaaggaaaatatgcaattgtgcttgtcagccacatgccaaatatgttaaggatcaagaaggtgaatatgttagcggacaaactcacgagacaagtattgagaactctggattggattcttttttcaggttcaaacagtttaatgacttgtcaagaaaagaaaacgcatcaattcttcctggttcaccattttttact

SEQ ID NO: 8382 - DNA, 4287 bp, Zea Mays
cggccccgtccctcctccgcacggacctgacgcggggcacggtcgaggacggcggcgcagggcggggtggaggtctccaggacgcaaggcactagcgggctcctccctcccgcgcgggcaccaacggcgagcggaggactggcgctggcaatggctaatggcgcgaagcaacagctggtacgttctgcacttctgctccacctccctaaaatcttggccgagctccgccactgaccatccccacttgtttccccagatacgctgccgcctcctatcgctccccttcctccgccgcggcatccactcctccgtgccaacttcggtcggcgccgctacagatgctacactcctgggtcgcctcacccgcctcctcctcctccaccgtttctctgccgtcgctcgcctcctctcctcctcggcccccctcacccctgcactcctccacgcggcgctgcgccgggtccgcctcgacgccgacgccgcggtgcacctcttccgcctcgcccctttccccccttccctcctcgcgcacgcccagctgctccacatcctcgtccgcgcccggcgctccgccgacgcccgcgcgatcctggcatccctcctctccgcacggcccccggctccgcctctctttccgcacctcgtcgaggtatataaggagttctccttctccgcagcctcattcgacctgctcctccgtgcacttgccaacgccggccaactcgacggcgccctccaggtgttcgacgaaatgcgaacgctcgggtgccgccttagcatgcggtcctgcaacagtatactcaacaggttagcacagactggggacctgggcgccacagtggcagtgtttgagcagatgcagcgtgcaggggctctgccagacaagttcacggtggcgattatggcaaaggcttactgcaaggttaagggggtggtgcatgcattggagttcgtggaggagatgacaaagatgggtgtggaggtgaacctagtggcgtaccatgcggtgatgaatggctattgtgaggtggggcagaccaacgatgcaagaaggatgttggactcgctgcctgggagaggtttttcaccgaatatagttacatatacattgcttgtgaagggatattgtaatgagaagaacatggaggaggctgagggggttgttcaggagattaggaagaataagcagcttgtggttgatgaggctgtttttggtgcagtgatcaatggctattgccaaatgggaagaatggaggatgcagctcgattattgaatgagatggtggattctaggctccaggttaatttgtttgtgtataacataatgattaatggatattgcaagttggggagaatggtggaagcacataacattttgcatgaaatgacaggtgttggtgtgaggcctgacacatacagttacaatagcctagttgatgggtattgcaaaaagggtttgatgaacaaggctttcgaaacatataatacaatgttaaggaatggattcgcggcgacgacattaacatataatgccctcctaaaaggtttttgctcgcttggctcaatcgatgatgcgctcagactttggttcctgatgttgaagaaaggtattgcacctaatgaaatcagttgtagcaccttgcttgatggtttcttcaagtcaggtaaaactgagaaggccttaaatctttggaaagaaaccttagcaaggggtttagcaaaaaatacaaccacatttaacacagttatcaatgggttgtgtaagattgagaggatgcctgaagcagaagagcttgttgacaaaatgaagcaatggagatgtcctcctgatattataacttacagaacattatttagtggttattgtaagataggtgacatggatagagctagccgcattctgaatgaactggaaaatttaggttttgctcctacaattgaatttttcaattctttgataactggacacttcatagctaagcaacatggaaaggtgaatgatatactctttgaaatgagtaataggggactttctcctaacacggtcgcatatggagctctgattgctggatggtgtaaagagggagatttgcatacagcctataacttatatcttgaaatgattgagaaaggtctggtaccaaatctttttatttgcagttctttagtgagttgtttctacaggaagggaaagtttgatgaggcaaatttagtgttgcaaaatcttgtgggtactgacatgattccagatatcagtgcgcccagacttgagatagggaaagtagcaaatttcattgataccgttgctggtggaaatcatcattctgcaaaaatcatgtggaacattgttatttttggtctatgcaaattgggaaggattgaagatgctaaaaacttgttggcagatctaaaagacaaggggtttgttgctgataatttcacttattctagcctcatccatggttgttctgcttcaggatttgttgatgtagcttttgatttgagggatacaatgttgagtgttggtctcactccaaatatagtaacctacaattctcttatatatggtctctgcaagtctggggagttatccagggctgtcagtctttttaagaagttgtggacaaagggtatatcccctaatgctatcacatataatacattaattgataagcattgcaaggatggttacataaccgaggcctttaaactaaagcaaaggatgatagaggaaggtattcatcctactgtgttcacctattctatactgattaatggtctctgtactcaaggctatatggaagaagcaatcaagcttcttgatcaaatgattgagaataatgtggatccaaattatgtcacatattggacactgattcaaggttatgttagatgtggtaacatgatagagatttcaaagatttatgataagatgcatatccatggacttctgcccaccaatgtttctggggatgtaaaacaatcatgtcctgctatacacaacccgaatagagaaacatgtcagatgaagatgcacagccagtgctagctgctatcacattctttgcatgtctacttcttttgaaagatggcagtgacttatgtttgtatgaggagcaaatcatgggacccatttctatcttgggatgatatccaatataattgtctaattgtcttctgcgaaggggcctggtcatatcatgagaaatgtttccaacctccctcacatgtcagccaagtggtatcttctaactacaggctggattggctttctaagtgcagagacttgttgctggtgactttgccccttttatctggtacacgctacattccatcaatattgcagtccgtatcctatccacgattgttcttcatggatcaggctttaagcaaggtttaccctctttttatacctaggaaaaatgtttgcacaggtggtgaagaaaccccattgacagaaagtggttcgagttactttggagctgactctggattctgtcaagaaacagtcttttggttccaagagaagcaatagttttagtttctctggtgcatcttctcactccatggagaggcatcgatatttgcagagaggaatgttgtcgtcatcaaaggcccttcgaactgcttttgaatcgaacattgcttcaaggtcagaaaagcaagcgcagccgctaaacagattgatttgaagtgaagttcagccgtatcatcagacatcatgcacacaaccatcatggtaaattcctgttcagcacgcacagtaggtctccgtgtgctctgtacggcctagtgctgctgcgctagctggttgggtgcgtccgtgcgtggacgcgctgtagcaaccagggcacccctgtccatggtcgcgatcgcggcctccgctggcctggcccttggcgtgtgcggggcgtagagacggaggagaatgttgtactatgtgcgggcgcggcgagcgaagccggctggaccagaccagaccacaccagggccagagccagggccacgtggcattggctcggcgtagagaacgtcctcccaatatctatgaatttactacaatatacgtctcattatttttagattcatatatgtatccatcacgggggcctccggcctcgttatagcaagtatgggctgactgtaatataatatccaactccgattcaaaactgtaatgtttattacaaaatttgacttagaagtagtgtctaaaaagtggcatggcaattggcatttggcaagtacaatatgcttgcatttttacgaaggcaaggcagagaattc

SEQ ID NO: 8383 - DNA, 2592 bp, Zea Mays
catttatcacttggagcactagtttctagctgccggtaattgaacggttttccatccatcacaaacagtgcagttctagaaattgtttatttctagtaagaccaagatcatgtgtgtatgcacttcatttgagagattctcttagtcaatcttgataagaaggcaaatccaacattttctttagacgccttgacttttgcgttatgtccacaactgtttttagcgataatctataatgttaattaacacttatatctgcttcaatgctatccagttgggttccttgatttatattttattggcatagatacaaagcttttgatcaacttgaaggactagaagttgcttggaaccagatcaaagttggagatttacttcggaacaatgatgatttggagaggctgagatcagaagtgcggttgcttaaaaccctcaagcataaaaacataataaagttctacaattcatggcttgacaaaagaagcaacaatataaatttcatcacggaggttttcacatcagggacgttgcgccagtaccggattaagcacaagaaggtagacattagagctttaaagaaatggtcaaggcaaatcttgagtggtcttgtctacctgcacagccatgatccaccagtgatccatagagacttaaaatgtgacaatatattcgtgaatggaaaccagggtgaagtaaagattggagaccttggtttagcgactatcctggataatgcacgttcagctcatagtatcattggtacaccggaattcatggcaccggaactctatgacgaggaatataatgagcttggtgaaaagccaggttcactggctaagattggtgatcctgaagtaaaattatttatagagaaatgcattgctaaagtcactgaaagactttcggcaaatgaactcttaatggatccttttctcctagatgttagtgatgaaaaaatattctatccagtgcatccaaatattaatacaacagtcgagagtcaacggaaggatttgaatacaatatttttgaagctgcgcattgctgatccaacaggtcatgcccaaaacatccacttcccctttgatattgaagcggacacttcaatcagtgttgcaactgagatggttgtgcagctcgatctcacagatcaagatgtaacggcaattgcagaaatgatagatgctgaaatacgttcgcatattcctgattgggcagcagaggagtcaattgacaaccaaggggatgaagctgctcactctgagacccatagttcagaaggtgatgagggaacttctgaactgcgtgatgagatcggtgcctcacataacggttttgttcaagaacagcttccctctggacggaagtactggtcagactcacccaggagagacggtgaaatatctcaatcggtggtggaacatcaaattggtgatagtagtgccaatggaataccaaagaggaacaaagtagatgccatgtttgaacgaatatcatcatctgtggacttgtcgaacccatctgcggtcgacagcatgtctagggatgcttctgttggtggcagccctcactctttagacggtgaggaggagcacaattctgatcagcatctggcagcaggtgtcactgagaggttaatagacctgttggctcagcagcaagaggagcttcgtgcgctgcaaaggaagcacaaggcggacatagaggagatgctgaaaatcgtacctgcggaggatcgggaagagaccttaactctatgccacttgaaggcggaacagaaaaacagagccgccgaaccttagataaactgtctcatgtgcatgttcctctgtgtgctgttagatttatacatactcacaccaaggagttgttgtttacactttacagccgttgttgtgcaaaagttggacctctgttgtgcagaagataagtctgaagcctttttcattgttcttttttgacataatggagaagctgggggagtgcttgtctctggaggacctccaattcagtgaccgagcactaaatagtaatcaggttctttttgacataatggagaagctgagtttttgacggcaaagatgaagttcctgcccaccaaatgaaatctgcagatgccactttgatgccgctgcgtgcctgaattaacggttcataaggagtgcctcccttcctttttcttttcttttcttatttgtttcttctgtactttgacttgccaaggatatacatcagtgtttgagctgttccaaacttgcaatgacagactttaaagtgcaattattttccggatcacatggctgcccaagttctcagagctgtgcgcacacacacacacacatatacagatagataaatatatatttctctgaatgcaaacaggcaggatatgcatacagatagatgtatgtatgtatttgttaattgcaagtgtggcgtggaggctgctgaggaagtctccatgcactcccagtgatgaggtagcagcagatctggattctggagtgggcagtggatgataaaacaagcatttgcgcaacacatgcgttgctccagatctcccacatgcatatgcctggctgccccagctct

SEQ ID NO: 8384 - DNA, 5099 bp, Zea Mays
tctccttcaagcaagggcaaaattgtctgttaaacaaaaagtaaaatcacaagtacacctaatgtgtgacaggcaatatcagttctactgagatctctctcttcatataaggatcttgattcagtcatggctgagaatggagggtcgcctttgggtcttgcaattttccattcagctgcagaaattcttgaagttttggttgtggattcaactgcttcatcgcttgaatcatggattgggtttgctgttgatctgcacaaggctctgcattcatcttctcctggttcaaacaggaaagatgcaccaacaaggttgcttgaatggattgatgctggtgttgtttatcagagaaatggtgctcgtgggcttcttcgttattctgctattcttgcatctggtggagatgctcatctttcttcaggaaatgtgcttgtgtcagattcaatggatgtagaaaatgtagttgcagattcaaacagtagagatggtcaggtcatcgataatcttcttggtaaacttgttgcggataagtattttgacggagttgctctatgcagcacttctgtggtccaattaacaacagctttccgtatcttggcatttatttcggatgataagcctgtggcgtcatccctttttgaagaaggcgccataactgttatatatgttgtcctgatgaactgcaagtctatgcttgagcgtttatcaaatagttatgattaccttgttgatgaaggggctgaactgagttctaccacagaattacttctagatcgaactcatgagaaagctattgttgacctcatgattccctcacttgtcttgttgataaatctccttcatatattacgtgaaacgaaagaacaataccgcaacaaaaaacttcttagttctcttctgcagttgcaccgagaagttagcccgaggctagcagcttgtgctgcagatttgtccttcatgtttcctacttttgctataggttttggtgttgtttgtcatcttatcacgtcagcacttgcttgctggccgttgtataattgggcacctggtctgtttcattgccttcttgaaaataccgaggctactaatgcgtccgtaccattgggcccgaaggctgcttttagtctgctttgtctcctgggtgatctgttcccagatgaaggcatatggctatggaaagttgaacttccttctctcagtgccattagatctttgagtactggagcagtgctagggcctcaagtggagaaaggggtgaactggtacctgcatcctgaacatgtgaccatattacttgtgaggctgatgccacaacttgataggcttgctcgtatcattgataactttgctacttcggtcttgatggtgatacaggacatgcttcgtgttttcattgttcgtgttgccttagaaaagattgagtgtgcagttgttcttctacgccctatatttatgtggttagatgataaagttgacaaaacttccctgtcagagagagacacctttaaggtccatcagttgcttcagtttactgtaaaattgtctgagcatcctactggcaaggtgagaggttttttgctatctacgattcttggaagctgtttttcttgtggtcccttctcatttctcttaattcaggcattgctttggaggatggggttcacaaggattcttagcaagttactacagaattgtagccgagcatctttcccgtatgataatcagacttttggaagggcgcactctaagaatgaccttatgctcaaatggaggatccctttgtttaaatctattgcatatatctttagtatcgacccatgtaataatgagaaggctgatgttgaagagtccctgaatgagaagtctgttcatgaatgctcttctgtcatgcatgacctcatgatgttctgccaggttttgcctgttggccgggaaatgttagcatgttcgttggcgttcaaggaattggtttattcttatacctgtagaagtgcagtaactttgatactttcacaaatacatacttccaacaaagatgttcttgaaaaagatgagagtgaccctaaccataactcaccatctctggatggttggaattgcttttcctcattgttcaagtgctggaagaagcttgtaaagtatgttggttctaatgaacgaacagattatttagtagaaactatttattccttgacactaggtgctatcaccctcagccagtatggtgaaaatcttgagggtctgttaatactgaggtatctatttgggctcccttctgatcctagtggttccttggaatcatctggtgagagtccaagtgagattgagttattcatgaagacatatgaagagaagatatgccagggcattgaaaattcagcgactgctgttggaaagactcttttacgcaagctactgaattcgatcaaattactacgctcaattcttgagaattctggtcaatccgcagatacagttcagatggttcttgaagaaggcactgactcactgtctgaaattgctcgctctgttgttatgacagctcatcttatgccatccctagccaatgtgtcagtaaatgatgaatctccttttctcttctctaatatgtggaaggttattgttgattcagaagagcctcttgactgccaagagggtgaatttgcaaagaggctagtttgggagttgcctgattcttctcttgatagacaactagcacctggccaatctgccaggaggaaattagcactgggagagagtgcaagtaggcgtgtaagggataatcaactgcctgaacccactgggcagttctcacgaggtttaaatacatccaatgcttcttcgggacatacacgcagagacactttccgtcagcggaaacctaacacaagtagaccaccttcaatgcatgtagatgactatgttgcaagagagagaaacatagatggtgcaagtagtgcgtcaaatattgtgaactctaccccacgaggaacacttagtggaaggcctccatccattcatgttgatgaatttatggcaaggcagagagaacgtcaaaatcatgcgccagccccaactggagatgcacctcaagctaaaagtcagacaacaagtttagatgacagtcttcgtactaagccagagaacttgcgtcaacccaagactgatctcgatgatgatcaagaaattgaaattgtctttgatgaggaatcaggttcggatgataaacttcctttccctcaaccagatgatagtctccaatctccacctgtcattattggggaaaattctcctggtcctgttattgacgagacagaaaatcaggagaatgaaagagttccctttttccagagggccacatctatcccgaaggacgatgaaaatcttggcattggcatttcttcccagactgcaatgctctcagaagctaacagttctttggaactgaaacattcagtttctagcccagggaagaattcttttcgtgatcatgctgaagagtctaattatgattctattggtgtatctgggagaccatctttacaagcagatcatcaacaattatctcgtagacatgaaaagagaagtccacgaaaattttctgagacttctctgtcaaatggattccatgggcgtgagcatagacattccaataaccatccacctctgccaccaatgccacctccaatttcatccgtgtccatgcaaaatactgattcagttaataggcagtcatcttcgttcagtgctcgagatcgaccaacacctaatccttctggttatcctacacaatcttttgactctagtatgcctagtgctttcacaggccttcagggtcaaactcaatacatgcttgcaggcgctggcagttcatcagcgaatgagttacccaatgtggaggccaagcttctatggaacacatttccagcaaataggatccctctggagaccttcagctcaggtttacctgctcggccgatgccaccccttacaccttattcagctgttgctactcagcacgctacgatgaactctggctctcctgcaaacctgtatagccagggcagtgttgtccagccttctccaactgcttctattattagtgattcaaatttggccatgaactccgcatctggcagcatgcttgcatcgaatctgctgccatcatttgcatcacaatttctgatgagcaggccttcaatgcctactccgttttttggcacgcctcttcaacaagttcaattctcatccggtcttccacaaaatatttctaaccctcagccacctgtctcaatacaaccacggccacccccacccccaccacccccgcagcagccacatccttctcagacactccaacaacttggtgctatccaattaccacaccaagatcagcagcactcatatccccatagtgctatcttgccacaagttacgttgcagtttcctaaccagctacccattcctcaagtacaattgtatcatcaaagccagcaggaatctgggcaaacactgaggcaagttggtgaacaatcacaacttcagaaccagggtatgcaagcagatagtttctctcaacagcagcaagactcagggatcaacttaaaccagttcttttcatctccagaagccattcagagtctacttagtgatcgtgagaagctctgccaacttttagagcagaatccaaaacttatgcaaatgctccagttgtagtcgcactggaggtgctattgtgaaagtgaaatctgatgctggtcgatcgctaggttcctagagtatggtgttgttttgttttcggctatggctgtagctagatgaaagcaactgccagcttgctagtcgccgaaatgtattcctatgtacattatatgtaactttgttctgtaatgtgaaaatttgtaatgttagtgcgtatctaatttatagttttaagtttaccttagtggttagatcgtgtgacatgcgcagcgacgggaaaacgacgccgccttttgtctgcaaaggcatttgacgctaactacctgtagagttctgaatatcctgttgcactcttgtgtgtatctggttgctttaatgctcgaaaatgaatatcctaa

SEQ ID NO: 8385 - DNA, 6422 bp, Zea Mays
ctattgtgacgaaccacttagttctgcgtggaacttatcgcagtctcacccttgtaatttatggcaataccgccgaagaccttggtcaattcaacatagaactaggtctggaccattctcttgctaatgttgttagctctccatcagagggaaagcttgaagaccttccaccagcgctacattcatccaagttgtcatttgaagaatcattatcatcattgaaaccatcgagttttcatgccactgatgtcgacttatcaattgaagcgaagaaagtcttgcatttggctctgaaaatgtaccaaatatctgatgtggagaatcttattcccaacctaagaagtgcagttctctcagctatttcaaaatatgtgactgctagtacaaatcatattctacacactttgagtcaagattcagcaaatgcgtttatcaacagtgattttgattctcaggaaattaacaaaattcttgctgaagctggtaaggagctctctgaaatttggaagaatgtccatgctgttactgagagtaatcttttcaatgataatggttttaccattggagtagatgaagacttgcccacgaccaagattctaattgagttgtttaaccattgtttcccatattacaagaaattatctttacttgatctacaatgtccttctcagagcaaatggttggttctgtctttgagtttggttctcctgctatgctcctcaaaggagagttgcttttattttgttgatactggtgggatggagcaaattattaatctgctttgctggaggacaccaaaatctgcagctaccacattgcttctcctaggtattgtggagcatgctactcggaatggttttggatgtgaagcttttctgggatggtggccacgagctgagcacaccagcatacctgttggcagcagcgatggttattgctctttactgaagcttctactggaaaaggaaaggcatgatattgcctctctagctacatatgttctacagcgcttgcggttttatgagatactatctaaatacgagtctgcggtagtcaaagtgatttccaatattcaggcagataaactttctactgatggagttccatttcttatttctgctagtgttgaacttggtgaaatgctgaaattgataattttctgtggccctattgaagatccatcaccagtggctactgctagtagaatatttaagtctgaacatttagaaggcttgctttcgtacaaagcaacaattgatcttataacttcgtccaaatacagttttttgcagtatgatacggatccatacttattgtctcttatccaggaaagaagtttttttcctctgtcagcggccttattgtcatcacctatattgcatttaccaaatggccctgccgccgaaattttgatggggatagcatcatcaattgaatctattatcctctccctcctcttttgtcgttcagggttatcgttcttgctcagtcagcctgaagcaactgagcttatacttctttctcttcaagatgcagaaaaaatgaataaatcagaatgcataactcttcgacaggcttttgttcttttatcaaaagggttcttttgccgcccaaaagaagtgggattgataacagaattacatcttaaagtgggaagtgctgccactaggatcctctcagttcctccgaattctgatgaacttttgtgggttctctgggaactttgtgccatttcaaggtctgattctggccgacaagcattattagctcttgggtactttcctgaggcaatatcagttctactgagatctctctcttcatataaggatcttgattcagtcatggctgagaatggagggtcgcctttgggtcttgcaattttccattcagctgcagaaattcttgaagttttggttgtggattcaactgcttcatcgcttgaatcatggattgggtttgctgttgatctgcacaaggctctgcattcatcttctcctggttcaaacaggaaagatgcaccaacaaggttgcttgaatggattgatgctggtgttgtttatcagagaaatggtgctcgtgggcttcttcgttattctgctattcttgcatctggtggagatgctcatctttcttcaggaaatgtgcttgtgtcagattcaatggatgtagaaaatgtagttgcagattcaaacagtagagatggtcaggtcatcgataatcttcttggtaaacttgttgcggataagtattttgacggagttgctctatgcagcacttctgtggtccaattaacaacagctttccgtatcttggcatttatttcggatgataagcctgtggcgtcatccctttttgaagaaggcgccataactgttatatatgttgtcctgatgaactgcaagtctatgcttgagcgtttatcaaatagttatgattaccttgttgatgaaggggctgaactgagttctaccacagaattacttctagatcgaactcatgagaaagctattgttgacctcatgattccctcacttgtcttgttgataaatctccttcatatattacgtgaaacgaaagaacaataccgcaacaaaaaacttcttagttctcttctgcagttgcaccgagaagttagcccgaggctagcagcttgtgctgcagatttgtccttcatgtttcctacttttgctataggttttggtgttgtttgtcatcttatcacgtcagcacttgcttgctggccgttgtataattgggcacctggtctgtttcattgccttcttgaaaataccgaggctactaatgcgtccgtaccattgggcccgaaggctgcttttagtctgctttgtctcctgggtgatctgttcccagatgaaggcatatggctatggaaagttgaacttccttctctcagtgccattagatctttgagtactggagcagtgctagggcctcaagtggagaaaggggtgaactggtacctgcatcctgaacatgtgaccatattacttgtgaggctgatgccacaacttgataggcttgctcgtatcattgataactttgctacttcggtcttgatggtgatacaggacatgcttcgtgttttcattgttcgtgttgccttagaaaagattgagtgtgcagttgttcttctacgccctatatttatgtggttagatgataaagttgacaaaacttccctgtcagagagagacacctttaaggtccatcagttgcttcagtttactgtaaaattgtctgagcatcctactggcaaggcattgctttggaggatggggttcacaaggattcttagcaagttactacagaattgtagccgagcatctttcccgtatgataatcagacttttggaagggcgcactctaagaatgaccttatgctcaaatggaggatccctttgtttaaatctattgcatatatctttagtatcgacccatgtaataatgagaaggctgatgttgaagagtccctgaatgagaagtctgttcatgaatgctcttctgtcatgcatgacctcatgatgttctgccagtcttgagggtctgttaatactgaggtatctatttgggctcccttctgatcctagtggttccttggaatcatctggtgagagtccaagtgagattgagttattcatgaagacatatgaagagaagatatgccagggcattgaaaattcagcgactgctgttggaaagactcttttacgcaagctactgaattcgatcaaattactacgctcaattcttgagaattctggtcaatccgcagatacagttcagatggttcttgaagaaggcactgactcactgtctgaaattgctcgctctgttgttatgacagctcatcttatgccatccctagccaatgtgtcagtaaatgatgaatctccttttctcttctctaatatgtggaaggttattgttgattcagaagagcctcttgactgccaagagggtgaatttgcaaagaggctagtttgggagttgcctgattcttctcttgatagacaactagcacctggccaatctgccaggaggaaattagcactgggagagagtgcaagtaggcgtgtaagggataatcaactgcctgaacccactgggcagttctcacgaggtttaaatacatccaatgcttcttcgggacatacacgcagagacactttccgtcagcggaaacctaacacaagtagaccaccttcaatgcatgtagatgactatgttgcaagagagagaaacatagatggtgcaagtagtgcgtcaaatattgtgaactctaccccacgaggaacacttagtggaaggcctccatccattcatgttgatgaatttatggcaaggcagagagaacgtcaaaatcatgcgccagccccaactggagatgcacctcaagctaaaagtcagacaacaagtttagatgacagtcttcgtactaagccagagaacttgcgtcaacccaagactgatctcgatgatgatcaagaaattgaaattgtctttgatgaggaatcaggttcggatgataaacttcctttccctcaaccagatgatagtctccaatctccacctgtcattattggggaaaattctcctggtcctgttattgacgagacagaaaatcaggagaatgaaagagttccctttttccagagggccacatctatcccgaaggacgatgaaaatcttggcattggcatttcttcccagactgcaatgctctcagaagctaacagttctttggaactgaaacattcagtttctagcccagggaagaattcttttcgtgatcatgctgaagagtctaattatgattctattggtgtatctgggagaccatctttacaagcagatcatcaacaattatctcgtagacatgaaaagagaagtccacgaaaattttctgagacttctctgtcaaatggattccatgggcgtgagcatagacattccaataaccatccacctctgccaccaatgccacctccaatttcatccgtgtccatgcaaaatactgattcagttaataggcagtcatcttcgttcagtgctcgagatcgaccaacacctaatccttctggttatcctacacaatcttttgactctagtatgcctagtgctttcacaggccttcagggtcaaactcaatacatgcttgcaggcgctggcagttcatcagcgaatgagttacccaatgtggaggccaagcttctatggaacacatttccagcaaataggatccctctggagaccttcagctcaggtttacctgctcggccgatgccaccccttacaccttattcagctgttgctactcagcacgctacgatgaactctggctctcctgcaaacctgtatagccagggcagtgttgtccagccttctccaactgcttctattattagtgattcaaatttggccatgaactccgcatctggcagcatgcttgcatcgaatctgctgccatcatttgcatcacaatttctgatgagcaggccttcaatgcctactccgttttttggcacgcctcttcaacaagttcaattctcatccggtcttccacaaaatatttctaaccctcagccacctgtctcaatacaaccacggccacccccacccccaccacccccgcagcagccacatccttctcagacactccaacaacttggtgctatccaattaccacaccaagatcagcagcactcatatccccatagtgctatcttgccacaagttacgttgcagtttcctaaccagctacccattcctcaagtacaattgtatcatcaaagccagcaggaatctgggcaaacactgaggcaagttggtgaacaatcacaacttcagaaccagggtatgcaagcagatagtttctctcaacagcagcaagactcagggatcaacttaaaccagttcttttcatctccagaagccattcagagtctacttagtgatcgtgagaagctctgccaacttttagagcagaatccaaaacttatgcaaatgctccagttgtagtcgcactggaggtgctattgtgaaagtgaaatctgatgctggtcgatcgctaggttcctagagtatggtgttgttttgttttcggctatggctgtagctagatgaaagcaactgccagcttgctagtcgccgaaatgtattcctatgtacattatatgtaactttgttctgtaatgtgaaaatttgtaatgttagtgcgtatctaatttatagttttaagtttaccttagtggttagatcgtgtgacatgcgcagcgacgggaaaacgacgccgccttttgtctgcaaaggcatttgacgctaactacctgtagagttctgaatatcctgttgcactcttgtgtgtatctggttgctttaatgctcgaaaatgaatatcctaa

SEQ ID NO: 8386 - DNA, 1518 bp, Zea Mays
ctcccctatgccctatggcctatggccgctccattgaccgtggaggtggtgtggaatattgcgttgcttgcgcgagctcttacgcatcttcttctcttcgagccttccacagttctacctcccgcccgctggtccctagccgtcaagagattccacgctactggctttcttgccccacgccgtatggttatcgtccagcacgagcggagaaactgaaacacgatcccaaccaattcagaacccgatttggtgatcacctccattctcggtagcacttaattccagggacagcaataagaattgctcctctccaagttcttttggagcgtaatcttatccgtttgggtcggattgatatttgataacttgattgccatttggggagttgcgggagagagagagagatgggccagagcaaggcggagttcttgaagcagttcggtggggactacggttacccggacgcgcctaggggcatcgacgagctgcgggccgccgagttcaagcgcctggaagggatggtttacctggaccatgctggtgcgacactgtactcagaggcacagatgacggatgttgctagagaccttatgtctaatgtctatgggaatcctcatagccagaacgattcaagcatggctacaatcgatgctgttacttctgtgcggcatcaggtcctaaaatacttcaatgcatctccaagggactacaaatgtatatttacatcaggggcaacagcagccctaaaacttgttggtgaatgttttccatggagtagagacagttgctatatgtacacaatggaaaatcataatagtgttcttgggataagagaatatgctctgagcaaaggagctactgtatcagcagttgatgttgaagaggttgttgatccatcaaagaatcatgagagtgatagtttatttaaggtttcaaaacgctcaaaccaaagaagaggtgacaatgtgcttttgcacaattatcagaatggaagcctgtcagctatttcaggaaacaatttaaatctatttgcattcccttcagagtgcaatttctcagggcataagttcaacctcagcttggtcaagctcatcaaggaaggaaaatttatggatttctcatcacaacagcagggccagtggatggttctgatagatgctgcaaaaggatgtgcaactgaaccaccaaacttgaccctgtatcccgctgattttgttgtctgttcattttacaagatatttggctatccaactggtcttggtgccttaattgtaaaaaatgaggctgctagtttactgaacaagacatacttcagtggaggaacggtagctgcttcaattgctgacatcgactttgttcagaaaagaaaaggcattgagcaaactcttgaggatggaacaatctcattcttgagcatatcttctcttcgatatggctttaagataattgaattagtagaagaggttcacatcatgaagataatatgcacttatctcttgacatttgttaatggttgag

SEQ ID NO: 8387 - DNA, 2372 bp, Zea Mays
cgggggtgggtgggtgaaccgagtccggggggcagtttgtttggtgactgcagaaggattcggtgaggaatctcgtcatgcagacttcaaaaccaaggagtgggtcttcagatgccccgcagaggacttctccaaggacaccgcgggcatctcgtgtggccaaaaccggagggaatgaaaccgattctacaggagttaccccgacaagaacgcctacggagaggagccctaaggttactgagaggcggtctccacggagcccaattactgagaagaagcgcccaagcaggctatcggaactggagtccaaggtcagccagctgcaagatgaactgaagaaggccaaggagcaacttagctcgtcagaggcacggaggcgccatgcgcagcaggaagccgaggaagcaaagacgcaagagcaggctgcagccgcctcgaagctggaggagttgcagcgccagcttgacgagttctcagctgcggaggaatcccgtctccaggaactgcgcaagatctcgcaggaacgtgaccgtgcctgggagtcggaactcgaggcagtgcagaggcagaaatcagcggacgcagccgcgctcggctcggccatgtccgagatccagcggctgaagcagcagctggaagcttcagcagagtctgacgcggcccgcgcgaagcagtgcgagtacgtggaagctgagatcgagggcttgaagcaggagatggagatccgcctagcgaccattgagggcctgaaggtgaatgtcagcgagagtgacagggctgcggctgaggcaaatgccacggtaaatgagaccaagcagcagctggagacagcgaaggccaccattgactcacttgtagctgagggcgtccgcatgcaggaatgcctgaggtcgaaggacatggagctcaatgagtccaaggctctcgtggcatcgctccaggaagatatgaagaagtcacatgacacggacaatgccaaggccaaggccaatactgatgtccgctctgagactgaggctctgcagaaggtgctggtgaccacaagtgccgccgacgccaatgggagctgtggaagctatgacccagagatcgaacagttgcggactgctcttgaggtcgctgagatcaggtaccaggagcagcaaactcggatgactatcgagactggaggcttgtacgagacattggagagtgtgagggccgagtgcgcccgcgaactgtgcgagctcaggctggagctgaagaacaagaacgatgcactcatggaggcaatggcaggagccgccgcagatcctcacaggccagacgcgatgcagcagccggagctggaggcgaagctgatgaggtccatcaccgacgcggcggagctgaaggcatgcctgatggacaaggagaacgcgctgcagagcctggcggaggagaacgaggcgctgaaggcgggggcgggcagggcggaggcggagctgcggcgcaagtacgaggcggcggtggcggagctggagctggccaaggccgcggagcaggacgtgcggatgcggctggggctggtgacggacgaggcggacaggagcagccggcgcgctgcgcgggcgtcggagcagctggacgcggcccaggcggccggcgcggagatggaggcggagctgcggcgcctgcgcgtgcagtccgaccagtggcgcaaggccgcggaggcggctgcagccgcgctcggtgggggtggggggaaggacggcaacggcggcacggtggagaggaccgggtcgctggggcccgagtacggcagctccatcggcgggaagctgatgagctcgccattctcggacgacgtggacgaggagtcacccaagcggcgcaacggcggcggcggcggcggcggcggcgtgctgcgcaggatgagcgggctctggaagaagagccccaagtgagtgagactgagatggggtggacggggtccgggatagccgtaggtgcgaggtgatgcaatagcagcagtatgagtaggagggatactggtgaatgctgcagggaagacgacgacgctctttctggacaagacacggagacacagctctagtctaggtggtaggaagcatgatcgtctctgtctgataacatttggctggtacttgagtgaacctcgtgtcgaggagcagctgcttttggctgcctgttctgtaccttactatgcttcattcagtcaaaaaaattcccacatgtgacatgttcttggttcttttttctttttgaagcgtttttatttcattttcccttcagaagctatgctgtacatctaatacgttacttgcctggctgatgatttggatgtatgtatctgggcagtatcactgcgcgttctctcagcgcgatttcac

SEQ ID NO: 8388 - DNA, 3697 bp, Zea Mays
gctatttgcaattttgccgtgggggtaacccatggagatcacggaggagcagcggcgtcgcgccgaggccaaccgcctcgccgccctcgagaagcgcaagcgctacgcagaggccgcggctgccaccgcctttcccacctccggtgcctccacattccctgcctacgacactgccgccgccgccgagtggaggctcgccaaatgcccaagaatcgccccgcccgcgcgccagttaccgtttgtaccgctgccccctcgtccttccccaccgccgctgccgccgactccgcctcagccgccggtggggttccaggttgtgctggaggtatgcggccccgacgagttctgggtggcggtggtgccggtagaaggcagggcctaccctggggaggccgagtgcctcggcgccgtccaggactgcctcgctgcggcttcggttgtacaatactctgcaacacagtcgctaagtcaaagcacacatcttcgtcctgtatttaagcttgtggactatggtgtggtgttgaaatgccttaagaaattacctggagcttctgtgcaagaaataccttctagcacaaagagaattattcagaatatacctaggtatcacgtccaaaagtgggcttctgatgaagaagtacatgagcttctcaagaaactgccacagcaaataaaagatgcgcttttacccttccaacttgaaggagtgatgtttgggcttcgaaggcgtggacgttgcctaattgcagatgagatggggctcggcaagactctccaggcgattgcaatagcatgctgtttcaaggacgagggctctatattaatagtatgtccagctgtattgcgttattcttgggcagaggaattggaacgctgggatccttcatttatgccaaaagatattcatattgtatttggtcgtcaagacagtcttgaacatctaaatgctactccaagggcagtgattatatcttaccagatgctaagtcgccttagagaaagtatggtgaatagaacatgggcactgatgattgttgatgaatcacataacatacgctgcacgaagaaactagaagaaaaatatgagacaaaagctgtgctacatctagcttcaaaaactgaacgcatcatattgctctcggggacaccctctttctcaagaccttttgatatctaccaccagataaatatgctatggccccacatgcttggtactgataaatttgattatgcgaaaaaatattgcttgctgcatgttgcacgaagttatcaggggaaaatgtttaaggacttctctaagggcaattaggcgactgaaggagcatttgttgaatgaactgccccccaagcggcgacaaattattaggttgaagctaaaggcaccagatatcagggcagccacatcttcatgcggcaaaagggtgaaccctaacagttgtaatggaactcttacaattgaattgcccagtaaaagcaatgatgatgaaaatacaaaagaggaagaagaagatgattgcaagaaatctccaaggagtctcaccccacaagagattggtatcgcaaagttatctggatttagtgaatggttctcaaatcatttcatcatgaatggatttgatgctaaccataacctggatccccagtctagctgtcagaaaacaataatatttgcacatcacttaaaggttctagatggaatacaggtgtttatctctgagaatgagatcagatttgttcgcattgatggaagcacacttcaaagggaaaggaaagaagctgttgattctttccgtttggatccagaggtgaaggttgcaataattggaattactgctggtggtgttggcttagacttctcatctgctcagaatgttatttttgtggagctcccaaaatcagcttcagaattgcttcagaacacattggatgaatcacactggctccagttaaaccagagtctgttccgtgtctcgtctttgatgaatggaaaaaaggatgctgtaagggagattgaggttgatcaagtgtgccaacttgaagaaatcaaggacaccgaggaaacacaacgcaaactgcatcctttggagaatcataatgcagatttgacccacgtaccaaaaaaacttctggaaagtgatgatttgtccattgatggttttcttggcatcgaagatttggaatttgacttggatttcaccattaggacaattcctcttgaatttgaggatgaaaaccccggcacatccttgaaaaataatccaactccaacagtacttgaagacagatcttgtattgatgtttctctttcaccagctgcagtcttttgctctgtactatctagttgtaaatcaataaagattttccaattcaagtggagtctctgcgttttgaggttagccggcacacaggacgaatccacttgtacagttgtgttcctggacatgattcaagacccaaaccactttgtgaaaattttctgccagaagaattgaattcacctttatgttctcccagtgatgttaaaacaagaactcttctcttgaaaaagattccttcattttgcaatgtgttcaatgcattcatcaaagagtggttggcactaagaccaattgatcaaaataaattgcttggaaagccattacaacttccgttgaaccttgagttgtgttttctgaaagatagcatcaatcatagcacagaagggatacttaaagggggaagtaagaggcgtgctgcatcattgaatgatgtcagtaatcctttgccagaaaatgctgaatggagacaggtggtgttgcgtaatggcacctgtaaagagagacagtacactcagggctggaccattgatgatgaacctctctgcaaactttgtcaaggactttgcaatggaaggcttgcaaagtcaccagaatattttgaagatctattctgtagtttagcttgtttccaggaatacagattaagaaccagtggcagggccctccggcaggcactgtttcaaatagaacgtggcaagtgctcccaatgcaagctcgattgttgcaagcttgtcaaacacattaaactcttacctttgggaaagcgagaagaatacatcagaaaggttgctccaaacattgcaagtagaaagaaactcctagataaacttgtccgtgaaccaattgatggaaatgcttggcatgcagatcacataatacctgtttataaaggaggaggggaatgtaaactcgagaacatgagaacactgtgtgtggcttgtcattatgaggtcaccagaactcagcacaaggaactaaaagaaataagaaagaaggctaaagagcacttgaaaaacgccttgaataaacaaaaggataaaccaagtgaagcaacagaagaactagatgacgaatcgttgctgatagctgtcccgggtagtgcctactccttaggatttcctggcaacggatctgatgaaaaggctgctgaatagggcatgtttcatttaccttgattattgttcaaaaagggcgctggtattttttagctcgcgtcctttttttgtacatgttaaatgctaccaagcgtttgtaagctgttcggctgctcttataagcagcactgataagcaacactattgcagctgcagagctagaattatctcacatttttgggcttgttcgttttgatgctaaaccatgtggattgagttggattg

SEQ ID NO: 8389 - DNA, 3081 bp, Zea Mays
aagcaagcgtgcctcccgtgaaccgagagcggtccacccgccgtgtccgtcaagtgaaaccatggacgtgccgctcccgctgctgctgggctccctggccgtttccgtcatggtatggtgccttgtgctccgccgcggcggggacgggaaggggaagcggccgctgccgcccgggccccggggctggccggtgctgggcaacctgccgcaggtcggcgccaagccgcaccacaccatgtgcgcgctggcgcgggagtacggcccgctgttccggctccggttcggcagcgccgaggtggtggtggccgcgtcggcgcgggtggcggcgcagttcctgcgcgcccacgacgccaacttcagcaaccgcccgcccaactccggagccgagcacgtggcgtacaactaccgggacctggtgttcgcgccctacggctcccggtggcgcgcgctgcggaagctgtgcgcgctccacctcttctccgccaaggcgctggacgacctgcgcggcgtcagggagggcgaggtggcgctgatggtgagggagctcgcccggccgcggcggggagagggagggcgggccgccgccgtggcgctcggccaggtggccaacgtgtgcgcgaccaacacgctggcccgggcgacggtgggccggcgcgtgttcgcggtcgacggaggggagggcgcccgggagttcaaggagatggtggttgagctgatgcagctcgccggggtcttcaacgtcggggacttcgtgccggcgctcgcctggctcgacccgcagggcgtggtcggcaggatgaagcggctgcaccgcaggtacgaccacatgatgaacgggatcatcagggagcggaaggccgccgaggaaggcaaggacctgctcagcgtgctgctggccaggatgcgggaccagcagcagcagccgctcgcggagggcgaggacaacaggatcaacgagactgacgtcaaagcgctcctcctcgaggagggagccgccattgccgtagatctccaggagcttcttgagggttagagacgggaggatgacagttagagtagtgatgaggtaccttgttaacaagctgggccttgaggacgattcacagcatagattgactaagcacttgggcgagccgcacaaagcacaagccacctcacatttgttggagagtcgagagagctacagacagatggcgaactgtgggttgtgggagttggagaagcaagcaacgaactgttcgggagctttgagagcggggaaggaatctgcatgcgacgcggaggtggtgaggccgctctcaaagctcccaaacagcagcattgggctctacgattcctcgttcgagtgtgacgcgtgcggcgttgggtttgtcgctgagctatctggtgattacaaacacgtgactgttaatgatactattgagatgcttgagagaatggctcaccgtggtgcctgcggctgcgagaagaatacaggagatggtgccggcatcatggtcgctctaccacatgacttcttcaaagaggtcgcaaaggatgctgggattgagctacccccactaggcgagtatgctgttgcaatgttttttatgccaacagatgaaaagcgtcgtaagaaaggcaaagctgagtttaagaaggttgcagaatcactgggacatgtaatactcgggtggcgtctggttccgactgacaactcagacttgggtgaatctgcactcgagactgagccagtcattgagcagcgtaggaggcttacctgctctataagcttcattgtattgttctacaaaggctttaatacaatcaggtattatcaagaaaacaagaagaaaagaaacagatggctactttgagggcgacagtgggcatgctgctcgggcgtcgaggacatgcacaggttcccggtgcgctccccgtggatggaccgcggcgacctcatccgcagtcccgccgcgcgacagatcgtgtccaactacttcaggacgtgcgcatcccgtatcagcagaagcgcatgttcggcttcgtcaccttcgtgtacgctgagacggtgaaggtcatcctgagcaagggcaacccgcactttgtgtgcgacgctcgcgtgctcgtcaagccctacaaggagaagggcaaggtccccggtaggtttaggaagctgcagcacacgcaccatggcggagccgagttcgtcggttgcgcgtcgcccactggattgctggattccagggacccctacgccctcctgcttctttcaggtgcccagaacctcttcacggctgggacggacacgacatccagcacggtggagtgggcgctggccgagctgatccggcatccggacgtgctcaggaaggcgcagcaggagctcgacgccgtcgtcggccgcgaccgcctggtgtccgagtcggacctcccgcgcctcacgtacctcacggcggtgatcaaggagacgttccggctgcacccgtccacgccgctgtcgctgccccgcgtcgccgccgaggagtgcgaggtggacgggttccgcatccccgccggcaccacgctgctggtgaacgtgtgggcgatcgcccgcgacccggaggcgtggcccgagccgctccagttccggcccgcgcgcttcctcccgggcggctcgcacgcgggcgtcgacgtcaaaggcagcgacttcgagctcatcccgttcggcgccggccggaggatctgcgcgggcctcagctggggcctgcgcatggtcacgctcatgacggccacgctggtgcacgcgctcgaatgggatctcgccgatggcgtcaccgccgaaaagctggacatggaggaggcctacgggctcaccctgcagcgcgccgtgccgttgatggtccggcccgcgcccagactgctgccgtctgcctacgcagcgcagtagaaaaaggattctcttctcgatggctatccccgtccttctcgcatgcacgcatgggtcgtggaattgtcaactcggcactcttgttgatgtgtgtaaactctaatctctgctattaagggtccaatatggacatccgcaccgtgggccatgcccagcctcagccatcatcgccc

SEQ ID NO: 8390 - DNA, 1229 bp, Zea Mays
catcctgtactgtatttcttcctgttcttgagcggcggcactggctgagcgccggcacctgcgcgtgatgaatgaacaagagaagagaatagacgacgcagagagggggaaggagctgcgaggtgcgagaaaaaggaggccaaaagcagccgctgctgctgctgccttgttggcaagaatgtttggaagaggatctcctaggatgaacctgatccaagctgcagctatgcaaagagtatcccctagatctactactaacaagcgcaagaagagaacatcaccaaaagttggtcgtcttagagcaaactggaatagtggactagaaaagggtttaattgaaattcttcaagaccacaacaatgactattataagggccaaaatgggtggtcatcggaagcatggaatagaattgtcaagttattccatgagaaattcccttatgtcacatttacaaaatgtcaaatccaagataaagagaaagagttaaagagagactacaaggctcttaaagaggcaagacaacaaagtggggtatcatgggatgagcggttgtgtagaatagaggcagaagaacccatttggaataacctcaccactagtaacgagagacttaagaagtttcggactaaatctttcccactatttgaggctttaggagagctacatgatgagatgaaagaaaaacaagatgaggtggagaaaagggcgacaactaatgcaaatgaggatgatttccctattacaacatgcattgctattgttgatggaatggaagagctttctgatgatgagaaggttgatgcttatgatgtgtttaaggacgcccaaaatagggccattttcatgactgccaaagatgctacacgcataaaatggttgaggaagaagattgctagaacatgatatgtgttgtttgaaacttgagggctcaaagaaaatgcaatgaagaatttggaagaccttgaaattattactagcaattgtttaaaagcaatctagtaggcgaactttccgttggaacctgtcatatcacttgtgaaatcttcattttttaaaagcacctctgaatgtgatccttcgtgtcattaaatcaagactacaaagatggatgtttatttaatttaccataagcacctctgaatgtaatacttcttgttattaaatcaggactagaacgatgaatgttttttctaagcacttttaaatgctatgttaatttgcacattcg

SEQ ID NO: 8391 - DNA, 1310 bp, Zea Mays
agcacgttccctgtgtggcccatatttatctttggcaaatcaagtgttcaagtggattaggggcctatacacgccaatacgccggggatagaaaaatccccaccgaggcgtggaagacagccatcgttctcgcgtggcggcgtcgctaaccctagatcaagacgagtgcatccacggctctccacgccgccgccgatctcgtcgagaggcatccacgactctccacgccgccgccgatctcgttcatccagcgtcaagaatgtttggaagaggatctcctaggatgaacctgatccaagctgcagctatgcaaagagtatcccctagatctactactaacaagcgcaagaagagaacatcaccaaaagttggtcgtcttagagcaaactggaatagtggactagaaaagggtttaattgaaattcttcaagaccacaacaatgactattataagggccaaaatgggtggtcatcggaagcatggaatagaattgtcaagttattccatgagaaattcccttatgtcacatttacaaaatgtcaaatccaagataaagagaaagagttaaagagagactacaaggctcttaaagaggcaagacaacaaagtggggtatcatgggatgagcggttgtgtagaatagaggcagaagaacccatttggaataacctcaccactagtaacgagagacttaagaagtttcggactaaatctttcccactatttgaggctttaggagagctacatgatgagatgaaagaaaaacaagatgaggtggagaaaagggcgacaactaatgcaaatgaggatgatttccctattacaacatgcattgctattgttgatggaatggaagagctttctgatgatgagaaggttgatgcttatgatgtgtttaaggacgcccaaaatagggccattttcatgactgccaaagatgctacacgcataaaatggttgaggaagaagattgctagaacatgatatgtgttgtttgaaacttgagggctcaaagaaaatgcaatgaagaatttggaagaccttgaaattattactagcaattgtttaaaagcaatctagtaggcgaactttccgttggaacctgtcatatcacttgtgaaatcttcattttttaaaagcacctctgaatgtgatccttcgtgtcattaaatcaagactacaaagatggatgtttatttaatttaccataagcacctctgaatgtaatacttcttgttattaaatcaggactagaacgatgaatgttttttctaagcacttttaaatgctatgttaatttgcacattcg

SEQ ID NO: 8392 - DNA, 1138 bp, Zea Mays
gaaggaaaaaaacttgtccgggctcgcgtttctgattcccgtggatctctcatctcgcttgtctcctccatagcagccaggcagccagcatggcggcggctagggtttgcatcgccggtgcatcttgagatccgctgctgctcacgtgtccacgttgcatcgcctttaatccccacatgctccatccatacgctgctggtgctcgtcgctattctcttcatcgtcgggacttgtcggcactactaccatcgccatctgaaccgagctcatgtgcatttacagcggtgaccgagcttggatcctagcgaggacaaaacaacccaaaatttttatgaatgaacccaatgagacaactaagtcagcatgtgactattctatcaagcggtgtttggatcttctagaatcgattctttcagatgaggaaaggacacaggcaacaatgtgctaaagtatgagatcaatagagaattttttatgaacttcaagaattaaaaaggttcatttgttatgggtcaagggcaaaagcactccgaaggtaacttactttcatgtgtttgtatttctagtcaattaacatatttaccatgttttatatttgaatttcatagaaaataaaaaaactcatagaaacttgaaaagtattcaattgaaaaacatcaatacatctacacaaggatctatgagcagtatagcaaactctacctacagtcgatgctacctgttgctgctttagttttctgtttgcacaattttatgtaattgtttgaattttatctaattgtaggcctaatctacattttgacttctttgaatcatgtctgctgatggtacttacaaggtgtctgctgatggtacttacaaggtggacatattgtactggatttacactagcctgcttgcaggtcgtcatccatttttgggacattgttgtgaagattggcatgagaaccacctgtatgaactttggaatcgttaactttggagtgccttctgccttgtggcaatttatgtaatttgaatttgtatggaatgttttgttcgattcacgtatttataccgaacaaagtttatccttgctaccaattttgtggattgtaacaacattttagaattctttgttttttcctgtttttctatg

SEQ ID NO: 8393 - DNA, 1773 bp, Zea Mays
aagacggccaacgtgcatgacgctaccatcgtaacagagcaccctgttgtcaggattggcgttgtcttcagtgggaggcaatcccccggagggcacaatgttatatggggcctctatgatgttgtaaaggctcacaactccaacagcaaaattattggttttcttggaggaaccgatggattatttgcacagaaaactattgaaatcactgatgaagctcttccatcctataaaaatcaaggtggttatgacatgcttggtcgtacaagggatcagatcagaacaactgagcaggtaaaggcaacaataggtacatgtcaagcattgaagttggacgctcttgttataattggaggtgtcacatccaacacggatgctgctcagcttgctgagacatttgctcagttgaaatgtccaacaaaggtagttggtgttcctgtaactctaaatggagatctcaagaaccaatttgttgaaacaacagttggttttgataccatatgcaaggtgaactcgcagttaataagcaatgcatgcatagatgccctttctgctgaaaagtattactactttattcggatgatgggacggaaagcatctcatgtagcattggaatgtgctcttcagtcacatccaaatatggttatcctaggcgaggaggtttctgtgtcaaaacttacaatatttgatattacaaagcagatatgtgatgctgtgcaggcaagagctgaaaaagacaaatatcatggagttgtacttattcctgagggccttgttgagagtattcctgaactgtatgctttgctccaggaaattcatggactgcataataaaggtgtttctgttgagaacatctcttctcatctttcaccttgggcatctgcactatttgaatttttgcctccatttattagaaagcagctgcttctccatcctggatctgacgattcagctcaactgtcccagattgaaattgagaagcttctagcacaattggttgagaccgaaatggacaaacgcctagttcttggacatgtatgttatcacatcgtagcggctggtttgaacggctacatggccactgtgaccaaccttaagagtccagtaaacaaatggaaatgtggtgctgctcccattacaagatggtcacgtggtgctgccaccagtcaaatcggtaagcctgctgtccacatggcgagtgttgacttaaaaggaaaagcatatgagttgttgagacaaaattcttctagcttcatgatggaagacatctaccgaaaccctgggccacttcagttcgaagggtcaggtgctgatacaaagcctatttcattgtgcgttgaagatcaggattacatgggaagaatcaagaagttgcaggagtatttggagaaggtgaaaagcattgtgaagcccgggtgctcgcaggatgtccttaaagcagcggtaagcgccatggcttctgtgacggagatgttgaccatcatgtcttccctttcatttagtggacaggcgaccatctgaaggccaagctgaagatgtcatatgctgttgcgctctcatgtcccgaacatatttgtgtttttttgggaaagaaacatacaatttttgttctcattctagtatcgtctacctatgtcaaactacaatatgataggacccttgctaaataattgtttcgtttgctggtatttctcatctttgatgctaggcatgttgaaaagttgattgagatgagttaaaataagagcataatttgaactggttacaattaca

SEQ ID NO: 8394 - DNA, 1842 bp, Zea Mays
aacgtgcatgacgctaccatcgtaacagagcaccctgttgtcaggattggcgttgtcttcagtgggaggcaatcccccggagggcacaatgttatatggggcctctatgatgttgtaaaggctcacaactccaacagcaaaattattggttttcttggaggaaccgatggattatttgcacagaaaactattgaaatcactgatgaagctcttccatcctataaaaatcaaggtggttatgacatgcttggtcgtacaagggatcagatcagaacaactgagcaggtaaaggcaacaataggtgtcacatccaacacggatgctgctcagcttgctgagacatttgctcagttgaaatgtccaacaaaggtagttggtgttcctgtaactctaaatggagatctcaagaaccaatttgttgaaacaacagttggttttgataccatatgcaaggtgaactcgcagttaataagcaatgcatgcatagatgccctttctgctgaaaagtattactactttattcggatgatgggacggaaagcatctcatgtagcattggaatgtgctcttcagtcacatccaaatatggttatcctaggcgaggaggtttctgtgtcaaaacttacaatatttgatattacaaagcagatatgtgatgctgtgcaggcaagagctgaaaaagacaaatatcatggagttgtacttattcctgagggccttgttgagagtattcctgaactgtatgctttgctccaggaaattcatggactgcataataaaggtgtttctgttgagaacatctcttctcatctttcaccttgggcatctgcactatttgaatttttgcctccatttattagaaagcagctgcttctccatcctggatctgacgattcagctcaactgtcccagattgaaattgagaagcttctagcacaattggttgagaccgaaatggacaaacgcctaaaggaaggcacttataatggaaagaagttcaatgctatctgccacttttttggataccaggccaggggtgccctgccttctaaatttgattgcgattatggctacgttcttggacatgtatgttatcacatcgtagcggctggtttgaacggctacatggccactgtgaccaaccttaagagtccagtaaacaaatggaaatgtggtgctgctcccattacatctatgatgactgtgaagagatggtcacgtggtgctgccaccagtcaaatcggtaagcctgctgtccacatggcgagtgttgacttaaaaggaaaagcatatgagttgttgagacaaaattcttctagcttcatgatggaagacatctaccgaaaccctgggccacttcagttcgaagggtcaggtgctgatacaaagcctatttcattgtgcgttgaagatcaggattacatgggaagaatcaagaagttgcaggagtatttggagaaggtgaaaagcattgtgaagcccgggtgctcgcaggatgtccttaaagcagcggtaagcgccatggcttctgtgacggagatgttgaccatcatgtcttccctttcatttagtggacaggcgaccatctgaaggccaagctgaagatgtcatatgctgttgcgctctcatgtcccgaacatatttgtgtttttttgggaaagaaacatacaatttttgttctcattctagtatcgtctacctatgtcaaactacaatatgataggacccttgctaaataattgtttcgtttgctggtatttctcatctttgatgctaggcatgttgaaaagttgattgagatgagttaaaataagagcataatttgaactggttacaattaca

SEQ ID NO: 8395 - DNA, 3554 bp, Zea Mays
tctcattcccatgggccggaagaagcgaacctccgcaccaaaccctactccgccaccgctggacgcctcccgccggtcgccggcggcggcggagaagccagccggcatcggcagggaagatgccgccgtgcgcgccgaggtcgacaaagcgcttgcgtgcctgcagcggggcagccacgcgcgtgcgcagcgcctcacgagggacgccatcgcccgccacggggaggcctcaccgctgctcctgcgggcgcacggcaccgtccacgctcgcgccgcctccgtcctcgacgaccacgccagccgcgcgcgccaccagcgtacagcgctccaggcggcccagcgcgccgtccagctcgcgccggactccatcgagctggcccacttccacgccatgctgctcttcgacgctgccaccgactcccgcgcctacgatgaggtcgtcgctgagtgcgagcgcggcctcagcatcgaggccccctccgaccccgcgccccactccctcaggttgcccggccccgacgtcgaccaggtccagtccgagctccgcaacttgatccagaaggccaacctcgcctccatctcctcttgggtcaaaaacatgggcggcgcgggggacgacaagcttcgcctcatccctgtgcgccgtctagcggacgagccaatggaggcccggcttgtccccacggcgccctccccgcgccgcccaaacgagatcaagaaggcgaccaagaccaccgaggagcgccgccaggagatcgaggtacgcctggctgccatgaggctgctgcagcagcagaaggagcagagcaatgatgttgtgtctgctacccctgcctcttcccggtcacatggagatgatgccccctcatcgtctgagtcatcggtgggcggacatcgagctgaccggagaaaaggtgggtctaggaaagcaacaggctcatccgcgtctgagcgcactgaccaggtgcgtgcctactggggctcgataccagtggagcaaaggcttgcattcttaaacactagcatttctgagctcaagtcacactatgcttctgcaatgcacaaggagaaagatgctgccagtgcagcatctgatgtgctcaatgaggtgatacaatttgccaacaagcatgacaagtgggagttcatggtatgtggtaggtgtcgggagcagtttacacatgtggaggcacaccggtggcatgtcatggttgagcatgttgggctactctcatccgagctgcaggaaatggttccgcaggagattgatgctgactgggcagaaatgctcagtggttgcaactggaggccattggatgctactgccgcactgaaactttttgaggaagatcaacacaacaaccttggaccagatagggaggatgaatcgaattcgttagatagttggagtaacaaagccatggacatgtcagaatcctcagcctggtcacacaacgaggagtctagcggttttggagtggtggtgagggaaggtgacaccaagtggccattctcagatgatgacgaaagggccaagattttagaaagaatccattcatcgttcaaaatccttgtgaagaaccataatctttcagtgcacaatctaaacagggtgattcgatttgctgtagaggaactcagggggttgccatctgggtcactactgcttaatcactctttggacgagtcgccactttgcattcgcttcttggaggcatcatcactgcagaaagtagataatttcttgcaggacttaatgcaggcttctggacttaataggaacttacagaaggctgaaggattaggtgacggggatagtttcatccaaaaccacgatgtactagagaaggttacccttaattctgattcatcagaactgatcattgatgggcacaccttcggcggaaagtttgattccgagagtgttgatactgatgcattgctttcatggctgtacgccggatcttcaattggtgagcagctattggcctggaatcgtatgatcgacgaaaggtcaaatcagtgcgtcgaccttattcgagcacttgggagggagttcaacaacctgcaaaactcatgtgaacggaaacttgaacagctgagaaatgaggatgcctttacttctgtggagggcctcttttgtgaagagcaaacacgaagggagcaggtgggacggtatggattccaaactttcgaggagctcctcaggaagcggcaggagtttttggaacacaacactgaggagcagtccgacagtaacagatctgagatagatgcaatctcagctattttgaaggaacttcacacatcacactttggttatgatgaggcccttactggcatggccccacgcttttctgacttcgatgggggcgaagaagatgaatggaggctgcatgattttatacatccaaatgattcaatggtacacatggttgtatcaaagatgaaggaacatgttactatggagattagcaagatagatgctaagattatgcgaactttatctgtgatgcggcaactagagcacaagcttggacctgtttctgctcttgattatcgaatgattcttttaccccttatgaggtcgttcttgcagagccatttggaagagctggtggataaggatgcgagagagagatctgatgctgcaagggaagccttcttggctgaacttgctttggatgctaagaagaatgcaagcaaagggggtgatatgaaacaatcccatgaaaaatcaaaggataagaagaagtttaaggattctcgtagggcaaaggagttcaaggattcaagctggagcgaccagtctctcattcaccaagacagtgctgacgaggaaacaacagagacatttcaaattcttgctgattgtgatgatctggattgcaaattctccacaagtgatgattacttcaatgaacaagaggaagaacttaggcataaggtacaacttgaagcagaggaacgaaagctggaagagactctggaatatcaacggcggatagaggaggaagcaaagcagaaacatcttgcagaacaatgtagaagtacttatgcatcttctgtaattggtacagctcgtctttcaagcactgggaatcaggataaccatgaaagtgcaatcaatcactcttcccgtacttatctcgaaggcataaagtttggtgattttcgctacaccgagaacaatttcagccagaaacttaatggattggattcatctgatgcacatgcattaaccagcagtgatatgaatgctcctagatggaccagcacttgtaaaatcgctccctacgcaaaccacagctatcaaactggaaaacaaaatcggctacatgtgttgccttcagatgatctgcaatttgctcatagagatcacgctgcaggaacagagaagccaaattttgagaaagttggcagtggtgcaataccatcagcggatttgtgcatcaaggatgattttgataaaaggtttcaagaagatcttgatgaagcagtgcgccaaagccttggaatttcgatgatttctcacttaagtcctatcatttaag

SEQ ID NO: 8396 - DNA, 5218 bp, Zea Mays
ccggctggctgcgcgtcttgttttatggggtatccgcgcggcgctccggttcgcccccaaatctcattcccatgggccggaagaagcgaacctccgcaccaaaccctactccgccaccgctggacgcctcccgccggtcgccggcggcggcggagaagccagccggcatcggcagggaagatgccgccgtgcgcgccgaggtcgacaaagcgcttgcgtgcctgcagcggggcagccacgcgcgtgcgcagcgcctcacgagggacgccatcgcccgccacggggaggcctcaccgctgctcctgcgggcgcacggcaccgtccacgctcgcgccgcctccgtcctcgacgaccacgccagccgcgcgcgccaccagcgtacagcgctccaggcggcccagcgcgccgtccagctcgcgccggactccatcgagctggcccacttccacgccatgctgctcttcgacgctgccaccgactcccgcgcctacgatgaggtcgtcgctgagtgcgagcgcggcctcagcatcgaggccccctccgaccccgcgccccactccctcaggttgcccggccccgacgtcgaccaggtccagtccgagctccgcaacttgatccagaaggccaacctcgcctccatctcctcttgggtcaaaaacatgggcggcgcgggggacgacaagcttcgcctcatccctgtgcgccgtctagcggacgagccaatggaggcccggcttgtccccacggcgccctccccgcgccgcccaaacgagatcaagaaggcgaccaagaccaccgaggagcgccgccaggagatcgaggtacgcctggctgccatgaggctgctgcagcagcagaaggagcagagcaatgatgttgtgtctgctacccctgcctcttcccggtcacatggagatgatgccccctcatcgtctgagtcatcggtgggcggacatcgagctgaccggagaaaaggtgggtctaggaaagcaacaggctcatccgcgtctgagcgcactgaccaggtgcgtgcctactggggctcgataccagtggagcaaaggcttgcattcttaaacactagcatttctgagctcaagtcacactatgcttctgcaatgcacaaggagaaagatgctgccagtgcagcatctgatgtgctcaatgaggtgatacaatttgccaacaagcatgacaagtgggagttcatggtatgtggtaggtgtcgggagcagtttacacatgtggaggcacaccggtggcatgtcatggttgagcatgttgggctactctcatccgagctgcaggaaatggttccgcaggagattgatgctgactgggcagaaatgctcagtggttgcaactggaggccattggatgctactgccgcactgaaactttttgaggaagatcaacacaacaaccttggaccagatagggaggatgaatcgaattcgttagatagttggagtaacaaagccatggacatgtcagaatcctcagcctggtcacacaacgaggagtctagcggttttggagtggtggtgagggaaggtgacaccaagtggccattctcagatgatgacgaaagggccaagattttagaaagaatccattcatcgttcaaaatccttgtgaagaaccataatctttcagtgcacaatctaaacagggtgattcgatttgctgtagaggaactcagggggttgccatctgggtcactactgcttaatcactctttggacgagtcgccactttgcattcgcttcttggaggcatcatcactgcagaaagtagataatttcttgcaggacttaatgcaggcttctggacttaataggaacttacagaaggctgaaggattaggtgacggggatagtttcatccaaaaccacgatgtactagagaaggttacccttaattctgattcatcagaactgatcattgatgggcacaccttcggcggaaagtttgattccgagagtgttgatactgatgcattgctttcatggctgtacgccggatcttcaattggtgagcagctattggcctggaatcgtatgatcgacgaaaggtcaaatcagtgcgtcgaccttattcgagcacttgggagggagttcaacaacctgcaaaactcatgtgaacggaaacttgaacagctgagaaatgaggatgcctttacttctgtggagggcctcttttgtgaagagcaaacacgaagggagcaggtgggacggtatggattccaaactttcgaggagctcctcaggaagcggcaggagtttttggaacacaacactgaggagcagtccgacagtaacagatctgagatagatgcaatctcagctattttgaaggaacttcacacatcacactttggttatgatgaggcccttactggcatggccccacgcttttctgacttcgatgggggcgaagaagatgaatggaggctgcatgattttatacatccaaatgattcaatggtacacatggttgtatcaaagatgaaggaacatgttactatggagattagcaagatagatgctaagattatgcgaactttatctgtgatgcggcaactagagcacaagcttggacctgtttctgctcttgattatcgaatgattcttttaccccttatgaggtcgttcttgcagagccatttggaagagctggtggataaggatgcgagagagagatctgatgctgcaagggaagccttcttggctgaacttgctttggatgctaagaagaatgcaagcaaagggggtgatatgaaacaatcccatgaaaaatcaaaggataagaagaagtttaaggattctcgtagggcaaaggagttcaaggattcaagctggagcgaccagtctctcattcaccaagacagtgctgacgaggaaacaacagagacatttcaaattcttgctgattgtgatgatctggattgcaaattctccacaagtgatgattacttcaatgaacaagaggaagaacttaggcataaggtacaacttgaagcagaggaacgaaagctggaagagactctggaatatcaacggcggatagaggaggaagcaaagcagaaacatcttgcagaacaatgtagaagtacttatgcatcttctgtaattggtacagctcgtctttcaagcactgggaatcaggataaccatgaaagtgcaatcaatcactcttcccgtacttatctcgaaggcataaagtttggtgattttcgctacaccgagaacaatttcagccagaaacttaatggattggattcatctgatgcacatgcattaaccagcagtgatatgaatgctcctagatggaccagcacttgtaaaatcgctccctacgcaaaccacagctatcaaactggaaaacaaaatcggctacatgtgttgccttcagatgatctgcaatttgctcatagagatcacgctgcaggaacagagaagccaaattttgagaaagttggcagtggtgcaataccatcagcggatttgtgcatcaaggatgattttgataaaaggtttcaagaagatcttgatgaagcagtgcgccaaagccttgtcattatggcatataaggcggtttcgggacgagttccttaaaacatcatcactgcacaagcatgttgaagatccttgtgctgtctgcgctttatatggtatcttcattgacctgagcaaagcagccaagggacacggagaagctgttgcgcctacttcattgaggatcgctttgagcaaatcctacccgaacagcaaattctttcaggagggccagatgaatgatgcatctgaggtactgggtgtaatctttgagtgtttgcataagtcatacacttcgcgtactgtctgccatggtaaacctcatgagaagaattctattggatcatgggattgtgcaaatatttcttgcatagcacatagtctttttgggatggacgtatatgaacggatgaactgtcacaattgcaagatggagtctcggcggctcaaatatacttcatttttccacaatattaatgctagttcactccgaaccgcgaagatgatgtgtccagattcttcatttgatgaacttttgaaggttgtcataatgaatgatcaactagcttgtgatcaagacgttggcggctgtggaaaaccgaatcacatacaccacatcctttctactcccccacatgtctttacagttgaacaacaaagagaatgtggatgacatatctgcaactttggctggtatttcaactgagatagacattagcatattctaccgtggcctagatcaaggaagcaaacacaccctggtgtcagtggtttgttactatggccagcattatcattgttttgccttcaaggatggacgatgggtcatgtatgatgaccagacagtcaaggttgtaggtagttggggtgatgtgctcgtgatgtgtgaaaagggtcacttgcaaccccaagtgcttttctttgagtctgcaaattaatcattcttcagagtcgtaaagtgttgtgcagtggttaacatgccctcaaatatagggtttttacctgtggccgtgaagattagaaatagagtagcaaattcgttttgagcgggggtatagagtagcaaattcaacagctgcgttggtctctgagctttggtcgagcccctcgtaataagtagtcacctgaggattaaaggagagctgtttacccctctgtttttttaacctttggtatacttgctgaacttcggatccttcatctgccaatgagatttcactgccgatcaagttggtggggacgcattcgacatgaactgccatccaacaattctagccggatctgcctaaagctcttcattatgcaccagttatgtatagaattttgtgcttacaatgaggtgacaggtataggagtgtgactgttttgaggccagaaggtttagagaatggaaggaaatggaattgttggtgcggtgtgtatctgtggagtactgtttgaaaagaggaacgatatctggaatacggtagactttgagaaatctgtagtacacgagtctatgtaaacagggactcgatgagattatgtgagatgagtatagcgatgaataccagactccttatcactactgtttttatagttaaattcttattttttttatttagctaaagattgcgcgcctaagatataaaagaaaccgttgaagtgacaaaagactcaga

SEQ ID NO: 8397 - DNA, 5273 bp, Zea Mays
ctcattcccatgggccggaagaagcgaacctccgcaccaaaccctactccgccaccgctggacgcctcccgccggtcgccggcggcggcggagaagccagccggcatcggcagggaagatgccgccgtgcgcgccgaggtcgacaaagcgcttgcgtgcctgcagcggggcagccacgcgcgtgcgcagcgcctcacgagggacgccatcgcccgccacggggaggcctcaccgctgctcctgcgggcgcacggcaccgtccacgctcgcgccgcctccgtcctcgacgaccacgccagccgcgcgcgccaccagcgtacagcgctccaggcggcccagcgcgccgtccagctcgcgccggactccatcgagctggcccacttccacgccatgctgctcttcgacgctgccaccgactcccgcgcctacgatgaggtcgtcgctgagtgcgagcgcggcctcagcatcgaggccccctccgaccccgcgccccactccctcaggttgcccggccccgacgtcgaccaggtccagtccgagctccgcaacttgatccagaaggccaacctcgcctccatctcctcttgggtcaaaaacatgggcggcgcgggggacgacaagcttcgcctcatccctgtgcgccgtctagcggacgagccaatggaggcccggcttgtccccacggcgccctccccgcgccgcccaaacgagatcaagaaggcgaccaagaccaccgaggagcgccgccaggagatcgaggtacgcctggctgccatgaggctgctgcagcagcagaaggagcagagcaatgatgttgtgtctgctacccctgcctcttcccggtcacatggagatgatgccccctcatcgtctgagtcatcggtgggcggacatcgagctgaccggagaaaaggtgggtctaggaaagcaacaggctcatccgcgtctgagcgcactgaccaggtgcgtgcctactggggctcgataccagtggagcaaaggcttgcattcttaaacactagcatttctgagctcaagtcacactatgcttctgcaatgcacaaggagaaagatgctgccagtgcagcatctgatgtgctcaatgaggtgatacaatttgccaacaagcatgacaagtgggagttcatggtatgtggtaggtgtcgggagcagtttacacatgtggaggcacaccggtggcatgtcatggttgagcatgttgggctactctcatccgagctgcaggaaatggttccgcaggagattgatgctgactgggcagaaatgctcagtggttgcaactggaggccattggatgctactgccgcactgaaactttttgaggaagatcaacacaacaaccttggaccagatagggaggatgaatcgaattcgttagatagttggagtaacaaagccatggacatgtcagaatcctcagcctggtcacacaacgaggagtctagcggttttggagtggtggtgagggaaggtgacaccaagtggccattctcagatgatgacgaaagggccaagattttagaaagaatccattcatcgttcaaaatccttgtgaagaaccataatctttcagtgcacaatctaaacagggtgattcgatttgctgtagaggaactcagggggttgccatctgggtcactactgcttaatcactctttggacgagtcgccactttgcattcgcttcttggaggcatcatcactgcagaaagtagataatttcttgcaggacttaatgcaggcttctggacttaataggaacttacagaaggctgaaggattaggtgacggggatagtttcatccaaaaccacgatgtactagagaaggttacccttaattctgattcatcagaactgatcattgatgggcacaccttcggcggaaagtttgattccgagagtgttgatactgatgcattgctttcatggctgtacgccggatcttcaattggtgagcagctattggcctggaatcgtatgatcgacgaaaggtcaaatcagtgcgtcgaccttattcgagcacttgggagggagttcaacaacctgcaaaactcatgtgaacggaaacttgaacagctgagaaatgaggatgcctttacttctgtggagggcctcttttgtgaagagcaaacacgaagggagcaggtgggacggtatggattccaaactttcgaggagctcctcaggaagcggcaggagtttttggaacacaacactgaggagcagtccgacagtaacagatctgagatagatgcaatctcagctattttgaaggaacttcacacatcacactttggttatgatgaggcccttactggcatggccccacgcttttctgacttcgatgggggcgaagaagatgaatggaggctgcatgattttatacatccaaatgattcaatggtacacatggttgtatcaaagatgaaggaacatgttactatggagattagcaagatagatgctaagattatgcgaactttatctgtgatgcggcaactagagcacaagcttggacctgtttctgctcttgattatcgaatgattcttttaccccttatgaggtcgttcttgcagagccatttggaagagctggtggataaggatgcgagagagagatctgatgctgcaagggaagccttcttggctgaacttgctttggatgctaagaagaatgcaagcaaagggggtgatatgaaacaatcccatgaaaaatcaaaggataagaagaagtttaaggattctcgtagggcaaaggagttcaaggattcaagctggagcgaccagtctctcattcaccaagacagtgctgacgaggaaacaacagagacatttcaaattcttgctgattgtgatgatctggattgcaaattctccacaagtgatgattacttcaatgaacaagaggaagaacttaggcataaggtacaacttgaagcagaggaacgaaagctggaagagactctggaatatcaacggcggatagaggaggaagcaaagcagaaacatcttgcagaacaatgtagaagtacttatgcatcttctgtaattggtacagctcgtctttcaagcactgggaatcaggataaccatgaaagtgcaatcaatcactcttcccgtacttatctcgaaggcataaagtttggtgattttcgctacaccgagaacaatttcagccagaaacttaatggattggattcatctgatgcacatgcattaaccagcagtgatatgaatgctcctagatggaccagcacttgtaaaatcgctccctacgcaaaccacagctatcaaactggaaaacaaaatcggctacatgtgttgccttcagatgatctgcaatttgctcatagagatcacgctgcaggaacagagaagccaaattttgagaaagttggcagtggtgcaataccatcagcggatttgtgcatcaaggatgattttgataaaaggtttcaagaagatcttgatgaagcagtgcgccaaagccttggatacgatgcttatcctgctggtacaataagcacttcaaatgaaacagaagtgtatggcactggccttaaaaatgccgctggtgaatacaattgtttcttgaatgtgattattcagtcattatggcatataaggcggtttcgggacgagttccttaaaacatcatcactgcacaagcatgttgaagatccttgtgctgtctgcgctttatatggtatcttcattgacctgagcaaagcagccaagggacacggagaagctgttgcgcctacttcattgaggatcgctttgagcaaatcctacccgaacagcaaattctttcaggagggccagatgaatgatgcatctgaggtactgggtgtaatctttgagtgtttgcataagtcatacacttcgcgtactgtctgccatggtaaacctcatgagaagaattctattggatcatgggattgtgcaaatatttcttgcatagcacatagtctttttgggatggacgtatatgaacggatgaactgtcacaattgcaagatggagtctcggcggctcaaatatacttcatttttccacaatattaatgctagttcactccgaaccgcgaagattcttcatttgatgaacttttgaaggttgtcataatgaatgatcaactagcttgtgatcaagacgttggcggctgtggaaaaccgaatcacatacaccacatcctttctactcccccacatgtctttacagttgttttgggatggcagaacaacaaagagaatgtggatgacatatctgcaactttggctggtatttcaactgagatagacattagcatattctaccgtggcctagatcaaggaagcaaacacaccctggtgtcagtggtttgttactatggccagcattatcattgttttgccttcaaggatggacgatgggtcatgtatgatgaccagacagtcaaggttgtaggtagttggggtgatgtgctcgtgatgtgtgaaaagggtcacttgcaaccccaagtgcttttctttgagtctgcaaattaatcattcttcagagtcgtaaagtgttgtgcagtggttaacatgccctcaaatatagggtttttacctgtggccgtgaagattagaaatagagtagcaaattcgttttgagcgggggtatagagtagcaaattcaacagctgcgttggtctctgagctttggtcgagcccctcgtaataagtagtcacctgaggattaaaggagagctgtttacccctctgtttttttaacctttggtatacttgctgaacttcggatccttcatctgccaatgagatttcactgccgatcaagttggtggggacgcattcgacatgaactgccatccaacaattctagccggatctgcctaaagctcttcattatgcaccagttatgtatagaattttgtgcttacaatgaggtgacaggtataggagtgtgactgttttgaggccagaaggtttagagaatggaaggaaatggaattgttggtgcggtgtgtatctgtggagtactgtttgaaaagaggaacgatatctggaatacggtagactttgagaaatctgtagtacacgagtctatgtaaacagggactcgatgagattatgtgagatgagtatagcgatgaataccagactccttatcactactgtttttatagttaaattcttattttttttatttagctaaagattgcgcgcctaagatataaaagaaaccgttgaagtgacaaaagactcaga

SEQ ID NO: 8398 - DNA, 1835 bp, Zea Mays
ccacaaatcacgccaatccatggcagcccgcgtgccccgctcccccgcagcgcctggctcccctttccttgcgcgacgcgagatcggcgagattgccctcaacgcgctcgcgtcgcgccgcggatcccccaccctcctcccctctgcacgccgccatcaactcgcaccggccctcgcccgtgatccatcctctcccccgcggcaatgatatggcgtcccccctcaaccgaccattcccgcagcggatccgcaccaacccgttcgcgccggcctctggaagaagaatccaccgaaggcgaaaacgacgacggaggtccggctgactcgtctgggtctttgcaatagcggcaagcgggttggagctccgcttcgggcaggggagaaccacgtggagacctggagtcacgctgcctagactcgccgctgggtggattcgtcgcgatggaggtcggattgtgaacacgccgtccagttaggacgctgtcgtcttcagatccaggggatggggttgctcggcatggcggccaagggcccctcgcccacgcgtcgcctaatgccacagccgcacttggccgtctcctcgctggcggcctccgtggctctgatccactgcttcctcaacacccggagatggttgacgtcgccttcgtcgtctcctcgccagtggcctccaccagccccgcagtccaagacaaagccacgacatgagtcaacccaagtccggtcgcacctacaccgatggccgtacccaacaagttgagctttaagaggaacgtggtgtcattgtcatctgagctcaagggtgtgaggagcaagcttgcttcctaggagcagctgtttgtaagggaatctcaaactagaaaggttagtatgtaactggtaccttcgaggttgttggtggggtttgtgccgacaaggaaaaaaatttagcagcttgcggagacaaaaacaaggagcatggaagaggaagtaatcaagctgcagaaatgcttacaggacaaggatgggcaactgtgttcatccacaagtagcacggaacagtaccatcatgagttggatgatcttagaacacatctgtcatttactcaagctacaggagaagcaggtgttgcatcagctaagttagctcggatgtagtgcatgtcattgctgaaagagctgaatgagaaggacaactcactcaaagaccatagacttcgagtgaacaatctaggtgagcagcttgatcttctccagaaggatgtacaagcaagggaggtcacacaaatgcaacttaaagatatagttataaggatcgagaccaacatcatggatgaagttgccaaagcttttgaaattgcgatgttgagaggggaaatcagaatattgtctactcactggacgaacaaaaccaagaaccttgaatcacaggtatggtgcataaaaaagtaggaaccacaatgagattgtaatgctgcacatggcacatcaaggtgcgcaagatatgtaccgtagaaattatcgtaaagtgcacacagctgtatgtatagatgtttagaagtggtcgaagttaggcttgctcaaccggggcaatgatttacttagcctgctgaaatgtactataggtagcattcaagtttgtgaccatcatgcaagtacatgtgggtttgttgaaattgagtggtcatcggagaagtagcaaaatgttccctatcgagagctcgtgtactatatttgttttatgaacttaatttttattacaacataacatgtggtcatacatatgttattgctacaatattttttccgttgcaacgcacgggtatttacctagtacccaaaatatataaagtgat

SEQ ID NO: 8399 - DNA, 405 bp, Zea Mays
aaattaataaaaaaaagttagaagcgagaagacgatggaagaatccatttctcaaacaaaaatgctattaatgatcgcactcgacttgacactggagtcaatcttggttcatcaaagtaaaaaaggcagaaaacagacacgatgacatctgtttttgacgccttgattaaacacgtggccagcggcctgctacagcctactgcctacagatgcaaatcagtaccaggcgtgctctccgtgagctctacgcctctacctgtgtcttggcgacgactgggcgaccgacgacgcagccgtaggacaggcgaccgacgacgcagccgtaggataggcgaccaggtcttcctgttggctcttgcccttcgccggcgacgagcacccgccagatttgcatcctcactgagc

SEQ ID NO: 8400 - DNA, 3115 bp, Zea Mays
ctcatctagcctgctgcctgccatacctagcagcgtttcacttcacttcaccgccgccgatggatgcccatgctcaccggtcttcccccgccccctcaccgccctattctagctatttagtgctgctagcctagctctactgctacaactacagtaccagtagtacgctactagcctgccctctcctttccgctcgctcgtggtcgcgggcatctcatctccctccctcctcttcctcttctcccctgtgccagccttgtacaactgcctgctcctgtgccactcccaatcccccccttccatccaccaccaccacctcctcccccctccgcccttttctttccccttttcctcacgcccctctttccagtttgtgctgtctgctgtgctgtgctgtgctgtgctcgccggccggctggcctgatctttccaactccccccctctcccccctcctaacctcaccacgcctccagtagcgctagccagcagccacctccatgcgcgctagctagctcctggcacagctccagcttctccgatccacctccataattctgccgtgcggccaccagcagcagctccggccgggaaaggcgcaagattccgccttgggttccttgcgcgcgcgcgggtaattaagctaccttgctagctagcaagctcgctccacgcgccggccggccggcatgcagcagccggccatgccgcctccattctcgcctgccgcggcgggccagcacgccacgcccatcagcagccgcccgccggagccacacccacacccacacccacagcagcaaggcgacgagctcggcggtgggtcggcggcttttttccggaggcagcagcttggtcgtcgtcttggaccacgacggcggcgcacccgcgggcgacggcgggccttccggcggcaaccggtggccgcggcaggagacgctggcgctgctcaagatccgctccgagatggacgccgcgttccgggaggccgccctcaagggacccctctgggaccaagtctccaggaggctggaggccatgggctacaagcggagcgccaagaagtgccgcgagaagttcgagaacgtcgataagtactacaagcgcaccaaggacggccgcgcgggccgtggcgacggcaaggcataccgcttcttctccgagctcgaggccctccacggcgccgcgccggcggtggcgtcgctcgcgcgtcggcctgtggccatggcgcccgcgccaccaccaccggtcacggccctcgtgggcgcgtccaccggcatggcgccgaccgccttgcatgccgagccaccgccgatgccgcagcctgcagctccggctccaacggggacggggacggggactgggactggcagtgtcactgctaccatcgcgccccctgcaggcgccgccgccagcgacgcggcggcggcggcggcatgcatgatgacgcctggtgacgtcagcttctcctcgggctcggacggggaggacacggatgagaccggcggcggcagcgggaagcggaagcgggacggcggggaggacgaggacggcttcggcggcagcatcagcagcaagatgatgcggttcttcgagggcctgatgcggcaggtgatggagcggcaggaggagatgcagcggcggttcatcgaggccatcgagcggcgggagcaggaccggatgatccgcgaggaggcgtggcggcgccaggaggtggcgcgcctcgcccgcgagcaggacgcgctcgcccaggaacgcgccatggccgtgtcccgcgacgccgccgtcgtctccttcatacagcgggtcaccggccagaacatccccatgcccgtgccctcgcccgtcgcgcctccgccggccttcatcaccgcgctcacgcatgcgccgccgctgcagcccacgccggtcgcttccgctgcaccggcagcgccagccccggcgcaagcgcaacaccaaccgccgccgccagctcatcagctgtcgccgaagaaaccgcaaactgtaatgccgttgacaccacaggcgccccaacaaccgcaggtacagccacgccaggcgccgtcgccgtcgccgtcgccggcgacgcatccgcagggcaataaggagatcgtcgtccgcgctccgccgccggcggagtcgcaggacacggcggggttcggtggcggcgcgccgtcgccgtcgaggtggcccaaggcggaagtgcacgcgctgatccagctgcgcacggagatggagacgcggtaccaggactccgggcccaagggcccgctgtgggaggacatctcgtcggggatgcggcggctcgggtacaaccggagcgccaagcgctgcaaggagaagtgggagaacatcaacaagtacttcaagaaggtgaaggagagcaacaagaagcgccccgaggactccaaaacctgcccctactaccaccagctcgacgcgctctaccgcagcaaggcgctcgcgtcgtcgtcgtccgggcccggtgcagctccggcgctgccgccgccgccgccgccgccgcagcgcccagatcagcaggctgctgctgcggcgccgcccgtcaccgtcgtgctagccccggtgccactgtcccagacggggcctcacggcaacggaaacggcaacggcaatgggtgcgcgggcaggggcagctcggacaatggcggcggcggctccgggggcatgcagaagcagcaggcgagcaacggcggggttgctgccgccaggttctccgccgtggatggcgccggtggcaatggcgttgcgacgaacaagcgagaagaaggcatcgtcaggaaggaggaggcggtggcggcggagacgaggccacagccggtgtcgatgaacgacagctacgtggacagcgacagcagcatggacgacgacgaggaggacgacttttacgatgacgatgatgagggcgacgttggcgacggcgggaacaataagatgcagtacgagatccagttccagcagcagcatcagcatgttcagccgcagcagcagcagaaccagagcggcggcggagtccggccgaacgcgagcggcagcgccggcgctggcgccgggccggcagcgacaacaagtataatattgaaattaatactatatcca

SEQ ID NO: 8401 - DNA, 6586 bp, Zea Mays
tgttccagttccagttcccttttcccttcccctcccttcttcacccatcatctccgcctcttccgttcccacctcactcctcgccgcgcgccgcctcgctccccaccgccgcgccgcagtagggttcgcaagcccgcagcagagcgcgtaccgcaccctgccccccccccccccccccgctctgtccaccccacgccggcctctcgctgccgctcgccgcaccgcacgagaggcgagatcggcggctcccagattcgtacccgggccacagtccctcctcgccctgcgtgtcggcgccgcctccacacgcccgcgcttcaccagccccgacggaatctctcccggaggcgcgcgattcgccgcggggatggtacggtagggccgcagtcgctagggtttccgcgcccggtgccgccatggacgccgagccccgccgggagggttccgatcgggcgcccgccgccgactcctccgcggcgccggacggtgacgaggcgatggcccgtggcgtcgctgctgcggagaagcctacagcggccagtgaggcgggggctggtggagacgtcgcggcggcggagcgtgggcgtgacggggagacgccggctggagatccgggggtggtggctgacgaaggcggtgctgtgggcgaccagtgtcctgcggcgcctcaagcgagcgaggtggacgagggtggcgccgcgggcaaggagcggtctgatggtggtctggcgaatggggcagttgagggcagcagcattgcgggggaagtgccagatgtggctcctgtggtatctgaagcacggatggacgaggacgggggttgctccacaggcaatgagtactctgaaatgaagatggaggtggatggcggctgcgtagcagaacgagagggcgatggtcaggaacaggaacaagagtgcactgcagctgctgtggaaagcgaggttaagacgggggaaggtgacggcggagtggtgaatcaagggactacggcacatgctgggggtcttcaggttaaagaggaggtgggggaaggcttggtgggccgctacattggacgtagcgctccagggcgcacgaggattcttattgggaaggttgtgtcctatgatagcacagctggggtctacagcctggtgtttgaggacggacacgctgaggagctggggcttcctcagctccaggagcttctcatgtcggatgataatggtgcattaggcatgaaggtgagctgccggaagaggaagctagacttgctggtttcatcagggagcgccttggaggtcaaagagccaccaagtactaggcagagggttgatggatgcgagatgtctgccaggcctgatgagctgcagcatagtgcgtctggctcggatatgtctgaggatgttgagtcttcgagcaattcatcagatttcactagagaagaaacatctgagccatgccctcctgtacaggctgtggagttgcctccgtcgtcaggcgacattcctgtgccagaagagtccataagttctctcctctctgtttataacttcttgcggtcgttcagtgtgcagctgttcctgagtccatttggactggacgattttgttgcggccattaattgcagcgtgcagaataacttgttggatgctgtgcacgtctcgctactgcgggctctgaggcggcatcttgaatctagatctgcagaaggatctcgatcggcttcaaattgcctgaagtacctggattggacattactagacgcattgacttggccaaatttcttactagagtacctgtatgtgatgtgttgcattaaaaatctaggggggaagagctttggtagaagccttctagtcgccgaatactataaacttcctgttaccatgaagttgagggtgctgcaaatactctgtgatgatgtcattgaatcagaagaactcaaaactgaactggaaaatcgagtaggctacaatgaggagatggagtatgagatagaatctagtgcatttttggaggctggttcaagatcagtctcaactagagcagcaaaggcctcagcttgcaaaaacacgaatgatttccataatcttctcgaaagtgctccaaatgtaacaaatcccgaaactgctccagcagtcctgtctcaggatggcaatagtgatgattgccgaatatgtgggatggatggaactttggtatgctgtgatggctgcccgtgggcatatcattcaagatgtattggtcaaaacaaagctttccttcctcagggtgactggttctgtccagaatgtatggttaacaagcttggcccaacttcctcaagaattgagcgtggtgcaagaggagctcaaatgtttggcattgatatgtgtgggagactattcttaggaacttgcaactatttgctggtgatcgaaacagcttcagatgcagagtcttatgcaagatattacaatcagtatgatgttgccaaggtcctccaaagccttgctgtctcagatgcatatgtggacatatgcaagcaaataaaggactactggaaacatttacttggtataattcataacgagagatcaacaacaggtaaagaagttggtgcgaaagtagcacttcctcaaacaaacgcgcagcagaaatttgtggctaatcagagcgcaatgtgctcagtcgaatgcctggaggaacaaaaatgcaagtcaagcttaggtgttgtcactgagaaaaatgctgaagttttcaagcaaactgtgtcagctcagaacaacatacataatgcacacagaaatggagcttttggaccatctgtggtatcctcagtttctcatcagaatggatccattgtaacaggtgggtctaacatagcacaggcgcagccagctcagagtattttccatccagacccatccaccgtttctgtgacgtcaggatcattttgtccatcttctctaggtaaacaccaccttcagatgtttccggaaagatctggaaacatgagtggtgtcaaggcagcaaaattgtcttcttttaaaccacaagcttacatgaacctctacaatcatggcaatattgcagcatctgctgctgccaatatagctgttattacatccgatgacagtaaagtttcagcatcccaactgactgcgaaacaccggaagaaaatggctgcagacaatgctctacaattgaaagcattttcttcagcagccacacaatttctttggccgagtaccgaaaagaagcttatggaagtcccaagagatagatgtggttggtgccttgcttgtagaagttcagcaattggaactaaaaaggcttgttttcttaacatggccacttcaaatgctgttaaatgctctgctcgaattcttagtgtaatgcgtgtaataaaaaattctgatagccactttcctagtattgttgcttatttagccaacatggaggaaagtttgcgtggcctcttggttggttcactacaagatatgcagcagaaagaaaggtggcatcagcaactacaagaagcttcgaactgcagaactgtaatacccctcttgcttgagttggaaagcaatatccgtggagtagcattttctgcaagttggttgaagccaatagacgattggcctttggaatctcctggtccatcaacgggcgcatctcgtcctgcacaataccaaaaacgtggggttggtggaaggcgtggcagaagacgttcggttgcatctgaatctggtactgctactgctactgatgaggacaacagctggacttggtggactggaggaaatatttcaaaacgtactttgcagaggggggctcttctacattcaaccagaagaaaagctgctcgccaaggtggtaaacagtggatagcaggtttatcttaccatgaaggttccaaatttccaaggcgatctcggcagtttgtctggagaggatgtgttggaataagccagacttcatctcaacttgctttacaggttagatatcttgatgcccacatcagatggaaggatttcatccctccagatcatattccctcagatggaaaaagttatgatgctgatttttctgctctcagaaatgctgtagtctgtgataaaaaaataattgataataagataagatacgcacttaagtttcgcaaccaaaagcatcttcctgtgcgtgtgacaaaaaatatcttggaatcagaaggtgatcaggatgaaaatagcaaattgtggttttctgaaaaccatgtgccattgtacatgctgcgagaatttgagctgcacgctggggataactccttgcctactccaggaatttcagactctaactgttttaccaatttgtacccacgacgagtaaaagcatatgctggagatgtcttttcctatctttttcacaagggagaagtctatccctgcacctcatgcaagaaggatgtcatctacagggatattgttaaatgcaacacttgtcaaggtaattgtcataaagagtgtacatcaagttctgttgttagcaaaggaagcagtgctacttccagtttgatatgcaagttatgccttcagaagcggaatcttatgcttactagctacaatacaaatgcaagctatatccagcctcaacaaaagggtaatggccaacaaccagtgaccgctctcagagttaagtttaaggttagttcttcccattctgcacagccatctgcgaaggtggaagctcagtcgagtatgaatgtgaaagcccggccagttgtaaacgtgaaaacacaaccatttgcaaaggtggaagctcagccaattatgaatgagaaagtccagccaactgcgaagatggaggtgcagccactcgcgaagatggtaactcagaacatcactggtgtccaagctctgccaaagacaaaagctaaaaagtcaaagtcagaaaaagaaaagaaacctaaaaaagttcaagcgatcacatattttggtctcgtatggaagaaaaataagactgacaaggatgatggaagtgagttcagggcaaatgatgtaatccttaaaagcaaggatagtataggttcatcaataagaccaacatgctgtctctgtgacaaagcttattctccggatttcttgtatgtacgctgtgagaggtgccggaattggtttcatggtgatgccttgcaacttgaagaagaaaggattggtgagttggttgcataccggtgctgtaggtgccgaagaagagccataccacattgtcctcattctgatggttatacaaagcctgaaccagaattaagtgaacaaacagttgctgcatcatctcagtcaactatgctatctagtgaggacacttatgctttagcagatcaggacccactgcttgcttcttacgggatagttgaaccgattggtgatgatacaatggatgttggtttgtcaatgaacatgtcaagctttgcccctggaagtaaccagaaactgtctataagaagagcacaagcaaaaagtactgaatacattgaccaaggtggaagacctgtgagtgagtataatatccaaaatcaacctccagggattggaaacatcaatctcagccacacgaatgaaatttctttttcagaggtagacagtgttgatgcttcagagctattggggtgggatttaccccaaggagctgcatatgctacacctcttgatttcactgctaatcaccagtcgaatgacacttgctgtggcagctttggaatggacgagtatgagccccagacttatttctcgttcaccgagttacttgaagctgatgatacacagcttgacaatgcctttgggatgtctgctggtctgcaaggtgattgcaatggcacaggaagctttgttcaacaaggagatggtttgtctttcatggtagaagatggagcttcaaatatgaacttcccaacaaatgatcccacccccgatgaggtagcgtgcagcaagtgcatgcatactcagccaccacctgatctcaaatgtgctgtctgtgacctgcacatacacaggcagtgctcaccgtgggatcaaggtgaagaacctgttgacagcagcaattggagctgtggtggttgccgggagtggcgatgattgacttctgaacttcattgcatctgttaatagtgccagctgccggctgttatcacaaggtgggaggtacatcgcgaagtgcgacgtggatctgtaggaaaaatctccaccaagctgttacgcagtgctaattgttgttcggatgctggggttggttatttgaccaaagtttaaccatcatacagttacaatagcaatgactcctgcgatatttacactgtacatactaaagaatgggtcgacgaagaccttttgtcattctttaggctgcttgtgtgtgtgttggtggggggggggggggggggggcgtagagataagggaggatgttgttatcaccatgtgtgtggttctgaaaaccatattcatgaagctgtgttaccttgaattctcgtgctgtctttcagatagaagtgtcttggtcagaggccatttctacgcatatgcatctttgttcgatatattttctccagctttgaaatcattatctcaatatgtgagaaat

SEQ ID NO: 8402 - DNA, 879 bp, Zea Mays
cttgattagcaatcactgctgcgcccgataggtggcagcgagccagcgagccagcgacccacccgactctgttccaacgagccttccctcccaaacttgcacgctgcccccgcgctcgcctccgcccccgatccagatccagggaacggccatacaccatggcggatttctccaagctgagataacattgtttgatggttatattgtcgtttacaagtttgtacatgaccttcacttttttgtcaccgctggagatgatgagaatgagctcatcttagcaagtgtactacatggtttttctgattctgttggtcttctactcaggggtgatgttgagaagcggactgcgcttgagaacttggatttgatacttctctgcattgatgaaattgtggatgggggaatcatcctggaaacagatgcaaacaccattgctggtaaggttgcaaccaatgctgttgatggttctgtgcccttttctgagcagacgatatctcaggcactagccacagctagggagcaccttgcaagatctctactgaaatgaacaaccagcaatatgtatgacatatatgtgtgttaaaggttgggctactgaatgttaagggtctttgtagtcgttattcatcccaaagtgctgctgtgacagagcctagttgaatatccgagggattggtcacatgctcgttattttttttgaaccagtgagtttgtagctgccatatttcaggtaaaacataaaataaagagttgtaattgggtgtaatataattttcaccatacaaaaaaaatcatctcaactatcaaaccatggtaaaaggttcaaaattatctatcaaatgattatccctccagaaaagcaaaatacaaagactcaag

SEQ ID NO: 8403 - DNA, 1058 bp, Zea Mays
cttgattagcaatcactgctgcgcccgataggtggcagcgagccagcgagccagcgacccacccgactctgttccaacgagccttccctcccaaacttgcacgctgcccccgcgctcgcctccgcccccgatccagatccagggaacggccatacaccatggcggatttctccaagtgatatgtctgtttcacaggaatcttgcccttctgtgaagaacattttacttctggattctgaaggaaagcgtgttgctgtaaagtatttctcagatgattggccgactaatgcatcaaagttagcctacgaaaagtctgtttttactaaaactctaaagacaaatgcacggacagaagctgagataacattgtttgatggttatattgtcgtttacaagtttgtacatgaccttcacttttttgtcaccgctggagatgatgagaatgagctcatcttagcaagtgtactacatggtttttctgattctgttggtcttctactcaggggtgatgttgagaagcggactgcgcttgagaacttggatttgatacttctctgcattgatgaaattgtggatgggggaatcatcctggaaacagatgcaaacaccattgctggtaaggttgcaaccaatgctgttgatggttctgtgcccttttctgagcagacgatatctcaggcactagccacagctagggagcaccttgcaagatctctactgaaatgaacaaccagcaatatgtatgacatatatgtgtgttaaaggttgggctactgaatgttaagggtctttgtagtcgttattcatcccaaagtgctgctgtgacagagcctagttgaatatccgagggattggtcacatgctcgttattttttttgaaccagtgagtttgtagctgccatatttcaggtaaaacataaaataaagagttgtaattgggtgtaatataattttcaccatacaaaaaaaatcatctcaactatcaaaccatggtaaaaggttcaaaattatctatcaaatgattatccctccagaaaagcaaaatacaaagactcaag

SEQ ID NO: 8404 - DNA, 1090 bp, Zea Mays
cttgattagcaatcactgctgcgcccgataggtggcagcgagccagcgagccagcgacccacccgactctgttccaacgagccttccctcccaaacttgcacgctgcccccgcgctcgcctccgcccccgatccagatccaggagtggagatccgcgtccatcttctattgattaggataccgggtggaatagggaacggccatacaccatggcggatttctccaaggaatcttgcccttctgtgaagaacattttacttctggattctgaaggaaagcgtgttgctgtaaagtatttctcagatgattggccgactaatgcatcaaagttagcctacgaaaagtctgtttttactaaaactctaaagacaaatgcacggacagaagctgagataacattgtttgatggttatattgtcgtttacaagtttgtacatgaccttcacttttttgtcaccgctggagatgatgagaatgagctcatcttagcaagtgtactacatggtttttctgattctgttggtcttctactcaggggtgatgttgagaagcggactgcgcttgagaacttggatttgatacttctctgcattgatgaaattgtggatgggggaatcatcctggaaacagatgcaaacaccattgctggtaaggttgcaaccaatgctgttgatggttctgtgcccttttctgagcagacgatatctcaggcactagccacagctagggagcaccttgcaagatctctactgaaatgaacaaccagcaatatgtatgacatatatgtgtgttaaaggttgggctactgaatgttaagggtctttgtagtcgttattcatcccaaagtgctgctgtgacagagcctagttgaatatccgagggattggtcacatgctcgttattttttttgaaccagtgagtttgtagctgccatatttcaggtaaaacataaaataaagagttgtaattgggtgtaatataattttcaccatacaaaaaaaatcatctcaactatcaaaccatggtaaaaggttcaaaattatctatcaaatgattatccctccagaaaagcaaaatacaaagactcaag

SEQ ID NO: 8405 - DNA, 1149 bp, Zea Mays
cttgattagcaatcactgctgcgcccgataggtggcagcgagccagcgagccagcgacccacccgactctgttccaacgagccttccctcccaaacttgcacgctgcccccgcgctcgcctccgcccccgatccagatccaggtactcttcctttcgccgcggctgagaagcaactctccctctctgtcctcttcctgtcgccgcactcattttctcttgccgggtggaatagggaacggccatacaccatggcggatttctccaagtgatatgtctgtttcacaggaatcttgcccttctgtgaagaacattttacttctggattctgaaggaaagcgtgttgctgtaaagtatttctcagatgattggccgactaatgcatcaaagttagcctacgaaaagtctgtttttactaaaactctaaagacaaatgcacggacagaagctgagataacattgtttgatggttatattgtcgtttacaagtttgtacatgaccttcacttttttgtcaccgctggagatgatgagaatgagctcatcttagcaagtgtactacatggtttttctgattctgttggtcttctactcaggggtgatgttgagaagcggactgcgcttgagaacttggatttgatacttctctgcattgatgaaattgtggatgggggaatcatcctggaaacagatgcaaacaccattgctggtaaggttgcaaccaatgctgttgatggttctgtgcccttttctgagcagacgatatctcaggcactagccacagctagggagcaccttgcaagatctctactgaaatgaacaaccagcaatatgtatgacatatatgtgtgttaaaggttgggctactgaatgttaagggtctttgtagtcgttattcatcccaaagtgctgctgtgacagagcctagttgaatatccgagggattggtcacatgctcgttattttttttgaaccagtgagtttgtagctgccatatttcaggtaaaacataaaataaagagttgtaattgggtgtaatataattttcaccatacaaaaaaaatcatctcaactatcaaaccatggtaaaaggttcaaaattatctatcaaatgattatccctccagaaaagcaaaatacaaagactcaag

SEQ ID NO: 8406 - DNA, 2713 bp, Zea Mays
atgatccagtacttcaagattgctggctggtcggtggaagactcccaaattgagggtaaattccctagaaacagcaaccccaaggagattattgtaaaaattccaaacagcatgtttcttttctgcttgatcaacgattacaagatggctgttcaattctcaatggcttcgtcgcgaaaagtgaggaatgcaaataaacgctacaccaaaatcaacgaagattggcaggataaagatgagacaaatgtacataaaagtaaagtgcgaaagaaaaagttatctgacatgcttgggtctcaatggagcaaagatgagctcgagcgcttctatggagcctacagaaaatatggaaaagattggagaaaggttgctggtgcaatacgtgataggacatctgaaatggtggaggctctttacaacattaataaggcatatttatctcttccagagggaacagctactgctgcggggttaatagcaatgatgaccgatcactacaatattctggatggaagtaacagtgatcatgaaagcaatgattcaccaaaagcttcaaggaagccacagaagcgtggtcgtgctaggtttcaatctgtttctaagacatctgatgcacgttatgctgatctagggcaatctcagccttcttcatcaagctatggctgcctttcgttgttgacgaaaaaatgtgctggagatctgcttgtagggaacaggcctcgtgctgttggaaaaaggactccaagagtacctggtgcaagtatatactatcgagatgacaggggtgtaacagataggcgtgcaaaaacagttgctaacaatggtgatgatgaaggagctcatgtagctgcgcttgctctggcagaggtatttcaaagaggaggctcacctcaggtttctgaaacatccaaatggtgatcacatgttcctgtctcctgttaaaagtagtgacagaaaaaatgctgattcagagatgggaagctcaaagttgcatgggtttcatttggatgctgattaccccgaaggtagcttaggaagcagggaggccgagactggtgaatattgcaaaggttcatcatttttgacgaaaaatgaaggttctggtaagcctctgaagaagggaaaaaagtctcagaagaggaggaaaaaagctgcacataaaacaggtgatcagttcgaggatgacagagaggcttgtagtggaactgatgaagggcataggtcgataaagattaaagaagactcagagctggagtcattgggatggccgtctagcacgtcaaataaaagaagtcgtcaattgttttttggtggattgctaacaaaagaacagtagcggaggcccttgagggtatggcgtggattagtgatatcagggggaccatctcttgggcagttattttcgatctcctgatcctgtgcgaagctgtcacagaagttcatctacaggctgggaccaccgacaagcacttttggagattttccacttctggccagtattctgcgaaggcagcttatgagctgttcttccttggctccactgccttcgggcctttgaaaggatttggaaaacttgggctcctgccaaatgcaagttctttttgtggttggtcatgcataacagatgctggacagcagatcgtttggcaaaaagggatctccctcaccctgcggtctgtcctctctgtgatcagcaagcggaaacaatccaacaccttctcatttcttgtgtttttgcaagacaattctggttcacgctgctgcaaaagatgggggctgccgaacctctccccagacttggatgccaccaatctggacagttggtggaatagtgctgctgagaagctgcctggagaccttcaagccggctttaattctatcgtgatccttggcgcttggagtatctggcgtccccgcaatgactgtgtcttcaatggcatgtcacctagtgtgaccacggctatcacccttgctagtgatgagctgaggatgtggagcctcgctggtgctaaaggtctcaacctgctgtcagccctggtttttgtgttcgatccagggtgggggttttttcttgagtttttgggtttttgggtttgtgtgtgagttgtgctgtgttttgtgggttgtgttctggtgaccttgtggtcgctgggctgtttgggtgtgtgtttgtgtgtgtgtgtcgtggtgttttgtactccctttttatctttaatggaaagatacgcagctctcctgcgtgttcgagaaaaaatatgtccttgttttgcatacattggctgatctatctgtgaatatcctaccaccttcatcagtaatggaatctgaatcttcagcccaaattaaggatgaaaacaaagatgttgattctgatgacaggcctggcatgcctgcggcagtatcagtgtatgagcagaaagttaactccaaaagcactgcaaggaaagttaaaaggcagcctgaaatttcaaattcagagatggtcactaggaaaaaagctaaagttactaaagatcctcatcacgatgggagcaccacttctgatgtaaagcagcaagcttgtacatgtggtgtcaaaacagagaaaaagaagaggaaatcatccacgacaaaggtaattcccaaattattatttgttgatcatttctgtaaggaaaagtatgtttctgctgaagaagggaaggtgtcgtctaatatcgccatgaatatcgca

SEQ ID NO: 8407 - DNA, 3666 bp, Zea Mays
gagcatggtaggctgttcaattctcaatggcttcgtcgcgaaaagtgaggaatgcaaataaacgctacaccaaaatcaacgaagattggcaggataaagatgagacaaatgtacataaaagtaaagtgcgaaagaaaaagttatctgacatgcttgggtctcaatggagcaaagatgagctcgagcgcttctatggagcctacagaaaatatggaaaagattggagaaaggttgctggtgcaatacgtgataggacatctgaaatggtggaggctctttacaacattaataaggcatatttatctcttccagagggaacagctactgctgcggggttaatagcaatgatgaccgatcactacaatattctggatggaagtaacagtgatcatgaaagcaatgattcaccaaaagcttcaaggaagccacagaagcgtggtcgtgctaggtttcaatctgtttctaagacatctgatgcacgttatgctgatctagggcaatctcagccttcttcatcaagctatggctgcctttcgttgttgacgaaaaaatgtgctggagatctgcttgtagggaacaggcctcgtgctgttggaaaaaggactccaagagtacctggtgcaagtatatactatcgagatgacaggggtgtaacagataggcgtgcaaaaacagttgctaacaatggtgatgatgaaggagctcatgtagctgcgcttgctctggcagaggtatttcaaagaggaggctcacctcaggtttctgaaacatccaaatggtgatcacatgttcctgtctcctgttaaaagtagtgacagaaaaaatgctgattcagagatgggaagctcaaagttgcatgggtttcatttggatgctgattaccccgaaggtagcttaggaagcagggaggccgagactggtgaatattgcaaaggttcatcatttttgacgaaaaatgaaggttctggtaagcctctgaagaagggaaaaaagtctcagaagaggaggaaaaaagctgcacataaaacaggtgatcagttcgaggatgacagagaggcttgtagtggaactgatgaagggcataggtcgataaagattaaagaagactcagagctggagtcattgggatggccgtctagcacgtcaaataaaagaagtcgtcaattgttttttggtgaatcttcagcccaaattaaggatgaaaacaaagatgttgattctgatgacaggcctggcatgcctgcggcagtatcagtgtatgagcagaaagttaactccaaaagcactgcaaggaaagttaaaaggcagcctgaaatttcaaattcagagatggtcactaggaaaaaagctaaagttactaaagatcctcatcacgatgggagcaccacttctgatgtaaagcagcaagcttgtacatgtggtgtcaaaacagagaaaaagaagaggaaatcatccacgacaaaggtaattcccaaattattatttgttgatcatttctgtaaggaaaagtatgtttctgctgaagaagggaaggtgtcgtctaatatcgggacaaccacacaaggtgatacaacacaagctgacttatcatcaaagggtaaaagctgccgtaaaataggcattcagcaagcactaattgaagaatgcaaatcaaccaaggttgccaatgatactggaagtgataaattttctcactcagtgaataatgttattgatcttaaggacaaactctctcactgcttgtcctcacgtttgcttcggaggtggtgtatgtttgaatggttctatagtgcaattgattatccatggtttgcaaaaagtgaatttgtggagtacttgaatcatgtcaagctgggtcatgttccaaggctgactcgtgttgagtggggtgtcataaggagttctcttgggaagccccgccgattgtctaaacaatttttgcatgaggagagagagaagctttctcaatatcgcgattcagtcaggcaacactatgctgaacttcgatctggtgttagagaaggactacccacggatcttgcacgacctcttgcagttggacagcgtgttatagcctgtcatcctagaacaagggaacttcatgatgggaatattctgacagttgacaataatcgttgtcgggttcagtttgatcggcctgagctgggtgttgagtttgtgatggatattgattgtatgcccctccatcccatggaaaatgagtccctcaggcaaaaaaacatcgtgaataaatacttatccgaggtgaaacttgaggatcagatgaatgacttgggtagtgggggtgcagcaaggttcgcatcaaatgtgaatgtgaattgtggcgatgcagcgttccaaataccttctagccacccggttggcacagttgattcaattgtacaggccaaagctacagttaatgaggttgcaattgcagcacaacaagcaatgtacaatcagccatgcagtctctcacagatacaggaaagagaagctgatataagagctcttgctgaactatcacgtgcccttgataaaaaggaagctttattggtagagttgaggcacatgaatgaagaagtgtccagaaagcaaaaggatggtgagactgttagagttgaagcatttcaggacgcaatatgctatggtgcttgtgcagctaagagattctaatgatcaagtagcctcagctttgctttctctgcggcaacgtaacacgtatcatggaaatcaattaccgtcatatcctatttccatggaaaatggtggaaccattactggagcaccagatccatataaccgttttggttatattaatccagaatccggttcccaagtaatggaagttattgagacttcaaggtgcaaagcaaaaatgatggttgatgttgctgttcaggcgatgtgcaaagtgagggaaggagagaacgcctttgctaaaatcggtgaagcactagatgatctcgatagtcgtggcacaggctctggttcaagcatactaggaataagacggatacctcccgattcagggaaggcaaatacatcctttcaagataacggaacgcctgcccctgcagcaatcaactcttcaggtccaagattgcccaacgggtatgattctgaagctcaggttcctactgatttgatttcgtcctgcgtagccacgatacttatgattcagaactgcacggaaaagcagtatcatcctgccgaagttgcacacatccttgattcggccctgtcacgcctacaaccgtgcagctcccagaacatcccgatcttcagggagattgagatgtgcatgggcattataaagaatcaaatgttggcgttgatacccacaccaagcggctagttccttgctttcctgtgagctggccggaagaggggtaaatttcggaaagaaaccggaatactgtatgtggcgtgtattgttttttttttcccattttttactgatttgttgtgttgtacaagctgtatgtttttttactgtcgtacaagctgtatgttattgctttatacatgtataatagtaatcatgaaagttcattgttctggcaagcgcatgtacattcagcttgaaatactgaaccctttttccaaacggaaattttttcctgttcctttacttttttgaaattcttgcgttccaaacggggc

SEQ ID NO: 8408 - DNA, 3802 bp, Zea Mays
atgatccagtacttcaagattgctggctggtcggtggaagactcccaaattgagggtaaattccctagaaacagcaaccccaaggagattattgtaaaaattccaaacagcatgtttcttttctgcttgatcaacgattacaagatggctgttcaattctcaatggcttcgtcgcgaaaagtgaggaatgcaaataaacgctacaccaaaatcaacgaagattggcaggataaagatgagacaaatgtacataaaagtaaagtgcgaaagaaaaagttatctgacatgcttgggtctcaatggagcaaagatgagctcgagcgcttctatggagcctacagaaaatatggaaaagattggagaaagttttttttatgcccttctagacagaaccgagacataaaaatacatttagttgctggtgcaatacgtgataggacatctgaaatggtggaggctctttacaacattaataaggcatatttatctcttccagagggaacagctactgctgcggggttaatagcaatgatgaccgatcactacaatattctggatggaagtaacagtgatcatgaaagcaatgattcaccaaaagcttcaaggaagccacagaagcgtggtcgtgctaggtttcaatctgtttctaagacatctgatgcacgttatgctgatctagggcaatctcagccttcttcatcaagctatggctgcctttcgttgttgacgaaaaaatgtgctggagatctgcttgtagggaacaggcctcgtgctgttggaaaaaggactccaagagtacctggtgcaagtatatactatcgagatgacaggggtgtaacagataggcgtgcaaaaacagttgctaacaatggtgatgatgaaggagctcatgtagctgcgcttgctctggcagaggtatttcaaagaggaggctcacctcaggtttctgaaacatccaaatggtgatcacatgttcctgtctcctgttaaaagtagtgacagaaaaaatgctgattcagagatgggaagctcaaagttgcatgggtttcatttggatgctgattaccccgaaggtagcttaggaagcagggaggccgagactggtgaatattgcaaaggttcatcatttttgacgaaaaatgaaggttctggtaagcctctgaagaagggaaaaaagtctcagaagaggaggaaaaaagctgcacataaaacaggtgatcagttcgaggatgacagagaggcttgtagtggaactgatgaagggcataggtcgataaagattaaagaagactcagagctggagtcattgggatggccgtctagcacgtcaaataaaagaagtcgtcaattgttttttggtgaatcttcagcccaaattaaggatgaaaacaaagatgttgattctgatgacaggcctggcatgcctgcggcagtatcagtgtatgagcagaaagttaactccaaaagcactgcaaggaaagttaaaaggcagcctgaaatttcaaattcagagatggtcactaggaaaaaagctaaagttactaaagatcctcatcacgatgggagcaccacttctgatgtaaagcagcaagcttgtacatgtggtgtcaaaacagagaaaaagaagaggaaatcatccacgacaaaggtttctgctgaagaagggaaggtgtcgtctaatatcgggacaaccacacaaggtgatacaacacaagctgacttatcatcaaagggtaaaagctgccgtaaaataggcattcagcaagcactaattgaagaatgcaaatcaaccaaggttgccaatgatactggaagtgataaattttctcactcagtgaataatgttattgatcttaaggacaaactctctcactgcttgtcctcacgtttgcttcggaggtggtgtatgtttgaatggttctatagtgcaattgattatccatggtttgcaaaaagtgaatttgtggagtacttgaatcatgtcaagctgggtcatgttccaaggctgactcgtgttgagtggggtgtcataaggagttctcttgggaagccccgccgattgtctaaacaatttttgcatgaggagagagagaagctttctcaatatcgcgattcagtcaggcaacactatgctgaacttcgatctggtgttagagaaggactacccacggatcttgcacgacctcttgcagttggacagcgtgttatagcctgtcatcctagaacaagggaacttcatgatgggaatattctgacagttgacaataatcgttgtcgggttcagtttgatcggcctgagctgggtgttgagtttgtgatggatattgattgtatgcccctccatcccatggaaaatgagtccctcaggcaaaaaaacatcgtgaataaatacttatccgaggtgaaacttgaggatcagatgaatgacttgggtagtgggggtgcagcaaggttcgcatcaaatgtgaatgtgaattgtggcgatgcagcgttccaaataccttctagccacccggttggcacagttgattcaattgtacaggccaaagctacagttaatgaggttgcaattgcagcacaacaagcaatgtacaatcagccatgcagtctctcacagatacaggaaagagaagctgatataagagctcttgctgaactatcacgtgcccttgataaaaaggaagctttattggtagagttgaggcacatgaatgaagaagtgtccagaaagcaaaaggatggtgagactgttagagttgaagcatttcaggacgcaatatgctatggtgcttgtgcagctaagagattctaatgatcaagtagcctcagctttgctttctctgcggcaacgtaacacgtatcatggaaatcaattaccgtcatatcctatttccatggaaaatggtggaaccattactggagcaccagatccatataaccgttttggttatattaatccagaatccggttcccaagtaatggaagttattgagacttcaaggtgcaaagcaaaaatgatggttgatgttgctgttcaggcgatgtgcaaagtgagggaaggagagaacgcctttgctaaaatcggtgaagcactagatgatctcgatagtcgtggcacaggctctggttcaagcatactaggaataagacggatacctcccgattcagggaaggcaaatacatcctttcaagataacggaacgcctgcccctgcagcaatcaactcttcaggtccaagattgcccaacgggtatgattctgaagctcaggttcctactgatttgatttcgtcctgcgtagccacgatacttatgattcagaactgcacggaaaagcagtatcatcctgccgaagttgcacacatccttgattcggccctgtcacgcctacaaccgtgcagctcccagaacatcccgatcttcagggagattgagatgtgcatgggcattataaagaatcaaatgttggcgttgatacccacaccaagcggctagttccttgctttcctgtgagctggccggaagaggggtaaatttcggaaagaaaccggaatactgtatgtggcgtgtattgttttttttttcccattttttactgatttgttgtgttgtacaagctgtatgtttttttactgtcgtacaagctgtatgttattgctttatacatgtataatagtaatcatgaaagttcattgttctggcaagcgcatgtacattcagcttgaaatactgaaccctttttccaaacggaaattttttcctgttcctttacttttttgaaattcttgcgttccaaacggggc

SEQ ID NO: 8409 - DNA, 3817 bp, Zea Mays
atgatccagtacttcaagattgctggctggtcggtggaagactcccaaattgagggtaaattccctagaaacagcaaccccaaggagattattgtaaaaattccaaacagcatgtttcttttctgcttgatcaacgattacaagatggctgttcaattctcaatggcttcgtcgcgaaaagtgaggaatgcaaataaacgctacaccaaaatcaacgaagattggcaggataaagatgagacaaatgtacataaaagtaaagtgcgaaagaaaaagttatctgacatgcttgggtctcaatggagcaaagatgagctcgagcgcttctatggagcctacagaaaatatggaaaagattggagaaagttttttttatgcccttctagacagaaccgagacataaaaatacatttagttgctggtgcaatacgtgataggacatctgaaatggtggaggctctttacaacattaataaggcatatttatctcttccagagggaacagctactgctgcggggttaatagcaatgatgaccgatcactacaatattctggatggaagtaacagtgatcatgaaagcaatgattcaccaaaagcttcaaggaagccacagaagcgtggtcgtgctaggtttcaatctgtttctaagacatctgatgcacgttatgctgatctagggcaatctcagccttcttcatcaagctatggctgcctttcgttgttgacgaaaaaatgtgctggagatctgcttgtagggaacaggcctcgtgctgttggaaaaaggactccaagagtacctggtgcaagtatatactatcgagatgacaggggtgtaacagataggcgtgcaaaaacagttgctaacaatggtgatgatgaaggagctcatgtagctgcgcttgctctggcagaggtatttcaaagaggaggctcacctcaggtttctgaaacatccaaatggtgatcacatgttcctgtctcctgttaaaagtagtgacagaaaaaatgctgattcagagatgggaagctcaaagttgcatgggtttcatttggatgctgattaccccgaaggtagcttaggaagcagggaggccgagactggtgaatattgcaaaggttcatcatttttgacgaaaaatgaaggttctggtaagcctctgaagaagggaaaaaagtctcagaagaggaggaaaaaagctgcacataaaacaggtgatcagttcgaggatgacagagaggcttgtagtggaactgatgaagggcataggtcgataaagattaaagaagactcagagctggagtcattgggatggccgtctagcacgtcaaataaaagaagtcgtcaattgttttttggtgaatcttcagcccaaattaaggatgaaaacaaagatgttgattctgatgacaggcctggcatgcctgcggcagtatcagtgtatgagcagaaagttaactccaaaagcactgcaaggaaagttaaaaggcagcctgaaatttcaaattcagagatggtcactaggaaaaaagctaaagttactaaagatcctcatcacgatgggagcaccacttctgatgtaaagcagcaagcttgtacatgtggtgtcaaaacagagaaaaagaagaggaaatcatccacgacaaaggtttctgctgaagaagggaaggtgtcgtctaatatcgccatgaatatcgcagggacaaccacacaaggtgatacaacacaagctgacttatcatcaaagggtaaaagctgccgtaaaataggcattcagcaagcactaattgaagaatgcaaatcaaccaaggttgccaatgatactggaagtgataaattttctcactcagtgaataatgttattgatcttaaggacaaactctctcactgcttgtcctcacgtttgcttcggaggtggtgtatgtttgaatggttctatagtgcaattgattatccatggtttgcaaaaagtgaatttgtggagtacttgaatcatgtcaagctgggtcatgttccaaggctgactcgtgttgagtggggtgtcataaggagttctcttgggaagccccgccgattgtctaaacaatttttgcatgaggagagagagaagctttctcaatatcgcgattcagtcaggcaacactatgctgaacttcgatctggtgttagagaaggactacccacggatcttgcacgacctcttgcagttggacagcgtgttatagcctgtcatcctagaacaagggaacttcatgatgggaatattctgacagttgacaataatcgttgtcgggttcagtttgatcggcctgagctgggtgttgagtttgtgatggatattgattgtatgcccctccatcccatggaaaatgagtccctcaggcaaaaaaacatcgtgaataaatacttatccgaggtgaaacttgaggatcagatgaatgacttgggtagtgggggtgcagcaaggttcgcatcaaatgtgaatgtgaattgtggcgatgcagcgttccaaataccttctagccacccggttggcacagttgattcaattgtacaggccaaagctacagttaatgaggttgcaattgcagcacaacaagcaatgtacaatcagccatgcagtctctcacagatacaggaaagagaagctgatataagagctcttgctgaactatcacgtgcccttgataaaaaggaagctttattggtagagttgaggcacatgaatgaagaagtgtccagaaagcaaaaggatggtgagactgttagagttgaagcatttcaggacgcaatatgctatggtgcttgtgcagctaagagattctaatgatcaagtagcctcagctttgctttctctgcggcaacgtaacacgtatcatggaaatcaattaccgtcatatcctatttccatggaaaatggtggaaccattactggagcaccagatccatataaccgttttggttatattaatccagaatccggttcccaagtaatggaagttattgagacttcaaggtgcaaagcaaaaatgatggttgatgttgctgttcaggcgatgtgcaaagtgagggaaggagagaacgcctttgctaaaatcggtgaagcactagatgatctcgatagtcgtggcacaggctctggttcaagcatactaggaataagacggatacctcccgattcagggaaggcaaatacatcctttcaagataacggaacgcctgcccctgcagcaatcaactcttcaggtccaagattgcccaacgggtatgattctgaagctcaggttcctactgatttgatttcgtcctgcgtagccacgatacttatgattcagaactgcacggaaaagcagtatcatcctgccgaagttgcacacatccttgattcggccctgtcacgcctacaaccgtgcagctcccagaacatcccgatcttcagggagattgagatgtgcatgggcattataaagaatcaaatgttggcgttgatacccacaccaagcggctagttccttgctttcctgtgagctggccggaagaggggtaaatttcggaaagaaaccggaatactgtatgtggcgtgtattgttttttttttcccattttttactgatttgttgtgttgtacaagctgtatgtttttttactgtcgtacaagctgtatgttattgctttatacatgtataatagtaatcatgaaagttcattgttctggcaagcgcatgtacattcagcttgaaatactgaaccctttttccaaacggaaattttttcctgttcctttacttttttgaaattcttgcgttccaaacggggc

SEQ ID NO: 8410 - DNA, 2292 bp, Zea Mays
tctgctgatgtttcttccgcccccattactgcgccggcccctcgcctccgtctgaccatatcgccttgcagtctacacaatagtagggaagtagttaaaaaaagagggggttgcccagctcgttagatcctgcggcttaccatttcttggatcagttaggggaggatagactcttcatttggattcatgtccttcccggtcaatttgggtcagtttgtttaccatagaaaggtggcatcttttggcttctgctctttggtctatgtggatccagtgccaaattggaccgaccgaagctgattcttgctggcagaaagtgcccaactgtgctaccatttatttccaatgaatccttggctatctactcaaataaacaccgagtccgtgaggccatttcgtctctgcttatgtaggattcttatgttcatgtggacatgtggcgcattgcctggcctttcgcaaatcagtttcttctggagtgcccaagtggttcttctcttcccatatcgatataaggctaacaccgtgtgatgcctgcctcaatacatcttggccccaagaacactctgattctgtgcagttccatacggtccaagcatcatggggctcttaggtatgatgggcgactcttttggttgctcggcgactggggagcgacttgtgtctgctgcaagagatggagacatccaggaggccagggctctcttagaactcaatccccgccttgctcggtactccacgttcgggatccggaattcgcctctccattactcggcagcaaagggccaccatgagattgtctccctcctaatcgagtccggtgttaatattaaccttagaaattgcagagggcagactgctctgatgcaagcttgtctatatggtcactggaaagttgtacagattctagttctttttaaagctaatattcacaggagagattgttttagcggcgcgaccgctattcattttgccgcgctaaaaggtcatactcgctgcattcggcttcttgtggctgattatgtgcctagcttgtcagagttttggaccattatgcgtggaaagtccacagatgaaatgaaaaagggtgcctttgatgccgcgtctctccagagactagttaatggaaagtctgatggtggtgtcacccccgcttcacttggcagcccttcatggacatgctgagagtgtacagttgctgctagaccttggagcctctgtctctgaggtgactgtcaatgatggttcaacaattgacctcattggttcggggagcacacccctccattacgcggcgtgtggtggaagtgctgtttgctgccaacttctcattgcagcaggagcaaacatgggagctcaaaatgttaacgggttgactcctttattggtggctcgttcgtggcacaagactagcatcgaaggtattctaagcaagcaaccagaaaaccgaatgcgtattcttccttcaccatacctttgcttaccactgatgagcattgtcaaaattgccagggaatgtggatggaggaaaacttccgcctcatccacttgtcaggatccatgtgtcatatgtttggaggtggaatgcactgtagctgcagaaggttgcggccatgagttctgcaccaaatgtgcactctacttgtgctccaccactagcagctcaacatccacccgtggagttcctggctccatatcatgccctctgtgtcgccatgccatcgtctccttcatgaggctcaccagcactaccccgataaaggagcttccatggacaagcgcgtcactagctctatgtgcagcgggctcaaacactggccgccctgaacatggcgggtccttgcatcgaaggcctgacctgcgtcgactgcgctccatctcagttcagctgggatgctcttcttttagatccattggctctgggaagctgtcgtccatgaagctgaactgcacaggagctgaagaggcggtgccttgcctcgtcagctgcctcaggcccgatgtgcagcgttcatcgtcgtacaggggaagaattaggagatattcagagttttgaaaggatggttttgtggcgtccttcctgcgagtttttagggtttgggaatttaaacctgtgtcgtcatgttcctcttcgtttgtttccctgttgtttaatatgcatgcagtcctcgttgtgaagatctatttgtgtacatggcccgtttgtcttcattacttttacttatatgtgaattatataccatctctgttttgcaattaccgacaagttaatactcccttcttttattctac

SEQ ID NO: 8411 - DNA, 2665 bp, Zea Mays
atggagggccgcgacgacgacgacacgggaggggccggcgacggcgcgggtgtcgggaagggcggggagaagaaggggaggaagtcgccggagtccaaggccgtcatcgacaaggccggggagggcaaccggatggtcttcttcgatggcccggcgctggcgttcgacctggaggacctgctccgcgcctccgccgaggttctcggcaagggcgcattcgggacggcgtaccgggccgtgctggaggacgtcaccacggtcgtcgtcaagcggctcagcaaggaggtcagcgccgggcgccgtgacttcgagcagcagatggagctggtcggccggattcgccatcgcaacgtcgtcgagctccgcgcctactactactccaaggacgagaagctgcttgtgtacgattactacaccagcggaagtgtatccaacatgcttcatggttttgggtacccgttgccatctctagccctgtcgtcctgtccacgccctcagccaaaccctagcactcggtcgcgcacaggcacaacgcagcgcagtcgcgccgtcggcattcagccgtcgcggactcgccgcccacccaggtcccaggctgggagagtggcagacacccactccgccactcgtcctcagccaccgaccaccgtccgtggttccccgttcgccaccggccaccgccagtccaccacccccccggcgcggcggcgcccctcctcctcccacacagcacacatgcgcacggcttcagctgcagttcatgaacacgactgaaggattgcaatggttctgttttttctgaatagcaccatgccaggactgccatccgagaaggagtcgatacccaacctcatcttgcgaggctttggcaccatcgaccgtgtgaaggcgaagctggagcaggcctgccctgaagtggtgtcatgtgccgatatcttggctctggtagcaagggacgtcgttgtactgaccaaagggcctcacggggatgttccaatctggcggagagatggtagaagatcggtgaagcaagatgcactggacaacctccacgcgcccttcttcgatgttggtcggaacatgtgccagttcttcatgcccaagggcctcaacgccaaggaccagattgttctgctaggtacccctccttggagaacatagggcttttgctgatggtgatgctgtattctgggataaggaatatgctcatgcattgaaatgttacactctagtacgtccttggttatctcctaatatttaacctgcatttatagttaccagtttagcacttcagaatatatctattgtcaagccgctgcatgtcgagaattctgatgaatttgataactagtgctggttttaccttactataaggccttgttcgtttccgtcggattgcacccggaatcgttccaactaatcaaaatttatataaattagagaagcaatccggtcaggaatcgttccgacccaccaatccagccgaaacgaacaagccctaatgattttccttatctttaacaatgtgcactcatacattagtgttcaaaaagaagcacataaaagtttcttcaaacatgctatgaaatttggtatcttattgttaaaccttgctttacctgctagtgtttatgcgcaaaattagaacttactgcctaatgtttatgattttaagattataatatttttgtcaatatgtgccaaaataaggtaacgttcatcctgaatcagcgattgtctaagcctgcagaagtgttagtaggaaccgtgctggggctgtatgaggacatcagatacaagtctgagtaaaaaaaagtgcacctgaaacaggttgatattattggactgggttctgggggttgatattattggactgggttctggtaccgaggtggaccagaaacttaagtatgctaatgatctttcctcgggtgtgatactcggaagagagcttgtgaaataagtgcatgcaccgctggtgcccaggtaaggggtcagcgccttttgttttctgccacctcacatacgtttcagtagttttgattgggtaatcatctgtatagacttcaccttgtgattcatcctgatatgtaataacgaattttgcacgtaaagacacataggtttgtcaggatgcatgcttgttagctgtttgcttatatgatcctgaaagcccttaagaggctttatttatggttaaaagctcgaacaattaaggatgtcagtgctggttctgatctcttcgaggtagaaccaacaaagtggtttcctgatagagctgcctcttgtatgctttgcacaatactttttcgtctaaaatttttgcacttgccatcattgctaattttgtggttattttcaaagggtagaagtttgatgcctactggtaagatactttacatctactgatttatgagccgtagaccggacaggagatgaagatgatgccttacatgaatgccaaggcaccgaacggtgaagcctgggtggccatcattactcacctattgatgcatttgttctcactaagacgtaggaattctttggactatgtatttagctcagaaatttctgtttctgtatgttgtacctcttatactaactcataattctttaccttacaatattcagatgactatatataacatttgatacaaaaacataa

SEQ ID NO: 8412 - DNA, 1920 bp, Zea Mays
gggccggcgtcgagtggagatccaatcgaaaatcgaactgacttcatcttctgttggtcaacaggagagcccgttgaaatcctggacctctcaattgtccttttctctctccccgcccaccttcccctgttctgccgcctccccagtccggcgtgcatcagcagcgacatcagagtcggcgatgggaggcgtcatcgacgttctcgtccccttatgttgatgaagtggtgtgccgtggagattccttgaccgatttcttgccgacaaaaagagtagagcagcaaaatggagaaccatggaaaattggatgggtgggatgaagttctggaagaagaagatgagttagcgagtgtatgcaaatatcctattagcacatcgtacctttcttatggaacaagcagaaggggcaaaagtgtaaagaagcctagattctcattacgaggatatgattttgttccattagatgttaagactgataacttgtgcattggggagcaagatggttcttctgcagtgccatcaactaaagcttcacaaaccatggtggctgaacggttggaaaacgttgaggaacaaactgaagatttggcaccagagtttgcccttccacccaaagcaaatactttagtttctgagctgctagataatttacagcgtaggggtggttcttttgtcaggacaccatctttggtgtgtgttgtcttgcattattttttcatattggagttcttacataacacttatattacttctgaatattttaatctagttgcaccaacatgctccaagcatatcaatcagggagcaggaagtttcatccggagtgccaccaactaaagcttcacaagctttgatggatgaaccgtttgaaaatgacaatggacaaactgaagagttgccatcagagctcccctgctcgatcaagagaccaaaattttcagttgcagaacttctagaagacctacagggtagaagtggttcttatgttgagacagcatctttgtcacaccaacacaccagagctaaacattggaagccaaagttcctttcttccgagaagaaaacaatagctattctaggagacaggagtattgacagtgaggaccccttggagcatgtaattgacggaacatctagcgaggaggaagatgctactcaaaaccacttgagtttggtgaacaaagatgagaaccagcaaactatggctgacctatttcaagaagtttttaatccaacaaacatggatggtgccatgaaatcaatgagatcaacaggagctggtaactatggaagaatgcaacagattatgcacatggagaaagattggcatgtggaattctcgaggcagtatagcagagagcacagttattcaggtgatttaaagggaactactgttcagattatgtcaaggtcattggaaggaaagctaacagtctgcagctgcatgttccaggaaaagggcaatgatgccactataagtaatgcctcagcagacggcaccatggatgaaagcagaactaggaggactattatcttcagtccaaagatatgtaacaatgtagatcttctggttggaaacataattcatatcttcccaccatggaaggaagttaaaatacaagaagagcatgtgattatttgcacctacttctcgcaccaccaccggacttgatactcggagatatttctgtgctagctgcaaagctagaggcagaccgccagcataaccgttgctgacagtttaatgttgatgtactcgcagggtctattctgtttgttttgtaatcacaagtgtactggctgcaaagctataggcagaccgcaagcataaccgttcctgatagcctaatgctgatgtacttgcagtctctcttctgttttacaatcacaagttactgaggcctagttcggattctctaa

SEQ ID NO: 8413 - DNA, 3201 bp, Zea Mays
gggccggcgtcgagtggagatccaatcgaaaatcgaactgacttcatcttctgttggtcaacaggagagcccgttgaaatcctggacctctcaattgtccttttctctctccccgcccaccttcccctgttctgccgcctccccagtccggcgtgcatcagcagcgacatcagagtcggcgatgggaggcgtcatcgacgttctcgtccccttatgttgatgaagtggtgtgccgtggagattccttgaccgatttcttgccggtaagacggagtctgccatctgcgtggctggtcatcgcggtgagcaaggaacgacgaagtgcgcccctccgcccttcggctcgtcgttgtgccttgcgtcgtcgggtggagttccttcccctgcttcaagctaattcggtttttccctctcatcctgtcagttttctctttgttggcattttcggttctctgctgtgaggttttttaaggtgattttgttcgcatctgtgatttgtgtctctgtgttcatcgtttgatgagggattcgatgccaaattcatttgaatcgattacaggaaatcatgcaaaaaatcaaacacatacctgtagaattgcgttggattggattccaaaaaataatgaaggaaaaaggaaaaacaaatctgatccgattttgtggcctgcatgcttactaacttcgtttttaagaggctccaggaaaatgtaattttgggtagggtttgtcaagcggtggtgcctgaatgtatcttctcctgtcacctccctcctttcacattagagttattgggtctacctttactgggtctactcctggatcctgctctatttaattatccttttttgtgccaaagcagccaaaccgccaatcaccacaaattgtagattaatgtttccagcattagcttgctgctcctggttccatacctgcaatcagttgcaaatacaccatgttttgtactaccccctcccccaattaaactttataattaaatgaaaaagtgtaggagtttgcctagtgaccacaaagcattttttggtgcattggaatcttgtgtatgcttgaatttaaaattatgaattcaaatgttgttgaattacatgcaggacccataaactttgaattattatgatgtgaaaaatgatttataatacagtatgtgcacaagtgtagatagatataagaaaatgaaatataggggaagggatcattggtagtgtcaccctaaagtgctggaaaagttttaaggtgcttcccatagaacaacttcttgggggagcactattggtatggaattgctcttattcagtttttttggggtttctgaggatcctccatgtcccctagattattgacctcactttgttctttgtatcgatttattgttgtaggcagttataatagtaggaggtatgcgtgctttgtagaatcatacagatgcttgttgaacatgtgtctttgtttctgtgtctgtgtcaacaagatgttctagcatcaacaagatcctgattagcatgtcaacttccagacaaaaagagtagagcagcaaaatggagaaccatggaaaattggatgggtgggatgaagttctggaagaagaagatgagttagcgagtgtatgcaaatatcctattagcacatcgtacctttcttatggaacaagcagaagtatgttatctcatttccagcatctctcctcttagagagaatgttgtgagcaaaggaggactttgttttgttaaactataccaggtggacaatctaatgcgtgtcctctgtttccatactgcagggggcaaaagtgtaaagaagcctagattctcattacgaggatatgattttgttccattagatgttaagactgataacttgtgcattggggagcaagatggttcttctgcagtgccatcaactaaagcttcacaaaccatggtggctgaacggttggaaaacgttgaggaacaaactgaagatttggcaccagagtttgcccttccacccaaagcaaatactttagtttctgagctgctagataatttacagcgtaggggtggttcttttgtcaggacaccatctttgggagcaggaagtttcatccggagtgccaccaactaaagcttcacaagctttgatggatgaaccgtttgaaaatgacaatggacaaactgaagagttgccatcagagctcccctgctcgatcaagagaccaaaattttcagttgcagaacttctagaagacctacagggtagaagtggttcttatgttgagacagcatctttgtcacaccaacacaccagagctaaacattggaagccaaagttcctttcttccgagaagaaaacaatagctattctaggagacaggagtattgacagtgaggaccccttggagcatgtaattgacggaacatctagcgaggaggaagatgctactcaaaaccacttgagtttggtgaacaaagatgagaaccagcaaactatggctgacctatttcaagaagtttttaatccaacaaacatggatggtgccatgaaatcaatgagatcaacaggagctggtaactatggaagaatgcaacagattatgcacatggagaaagattggcatgtggaattctcgaggcagtatagcagagagcacagttattcaggtgatttaaagggaactactgttcagattatgtcaaggtcattggaaggaaagctaacagtctgcagctgcatgttccaggaaaagggcaatgatgccactataagtaatgcctcagcagacggcaccatggatgaaagcagaactaggaggactattatcttcagtccaaagatatgtaacaatgtagatcttctggttggaaacataattcatatcttcccaccatggaaggaagttaaaatacaagaagagcatgtgattatttgcacctacttctcgcaccaccaccggacttgatactcggagatatttctgtgctagctgcaaagctagaggcagaccgccagcataaccgttgctgacagtttaatgttgatgtactcgcagggtctattctgtttgttttgtaatcacaagtgtactggctgcaaagctataggcagaccgcaagcataaccgttcctgatagcctaatgctgatgtacttgcagtctctcttctgttttacaatcacaagttactgaggcctagttcggattctctaa

SEQ ID NO: 8414 - DNA, 3776 bp, Zea Mays
gcgtgcgctgtctccccccaggccccccacctctctggctctctctctctctgcgagtctgcgacgacggggctaccgccgcctccgtacgccaggtgccgaggtcttcgttggtcctttcgccggcgacatccaccagaaattatatcatcaattcattaccgggtgtacatttgtacacagtacacccatgtccttcactggatccgcccctgtagtgaggataatatctttggagtttcggagggggcgcgctagaaggatggtttccaaaatgagaatctcttgtacggcagatttcggaatgctctcggttctagaccatttcagtgttgttcgcgtgagaatcatacatatgtccggaagctgttggaccgagtgtcggagagatcaaagctccttaaaaaggtgtctgttttggtgggttacagtaatccacaagatttagttgagaaacaaagagcccctggggaatcttctgcagagttgattagtgccttgaaagaaatcgatttcccagaaattactgcaaagtttccatgcataaaagttggtgatgcatcacctgttgaactgtatgaggattctactaacatgaagtttaaagaagctgcactttctgaaaagctcacaaatttcatccaaggctcagctcgaaatttggagtcagcttatgaattccataatgactgtcatccattgaatcaaacacccacaactgcaggtgatctttcaatcagtgaagagatccctctcattgaaccaatagttgatacgaagtcccccgagtcattgtcagatgctataacctctgacaatagtatactggataaaagtataaggtgcttgcctggaacaactagtaggcaatatcgccagctagaggatggtggtttccatacggtccgcaaattattgcagcattttcctcggacttatgcagatctgcaaaaccctcaaggccccatagaatatgggcagtatattatgttatctggtactgttatatcttccaggggaatcaaggttaagtccactttaggtcttcttgaggtggttgttggttgttccataatcgagtctgaattgagctcttcagttgagagtagtcactctggagcagagcaaaagagaattcacttgcacctcaacagatttttcagtggcgcacgtttttcttcccaacattttcttaacttaatgtcagcaaagcacaaagaaggggatcttgtttatgttagtggtaagataaaaaaggtgcttgctaatggccattatgagttgaaggagtacacaattgacgctattgaaggagaaggggaacacagcactatgcttgctaggaaaccacaccctatatacccgtcgaaagcgggattaaaacctagtctgcttggcctttcaatctctagggccttgaagatattgagcccagatgttgatccagtgcctcccgatgttctcgttgaattcaacttgcctaatctctttgatgcttacatgggaattcacaaacctaaggatcgatctgaagctgattttgctcgaagaaggcttatatttgatgatttcttttacctccagttaggaagactatttcaaatgcttgaagcagttggtacgcgggttgagaaggaggaattgttatacaagtgcaaaagtcatgagctgaatactgttggtgtagatgattggtctcctcttacaaagaaattgttgagggctcttccttattggcttactcctagtcagttggatgctgttcaagagattatatgggatctcaggagaccagttcccatgaacagactcttgcagggggatgttggttgtggaaagaccattgttgctttcctggcatgtatggaggttgttaattcaggatttcaggctgctttcatggttccaacagaggtgcttgctgtccagcattatgaacacctaacttcattgctagagaagtttgatggagatgagaaaccaaatattgccttgctaactggttcaacgtccacaagggagtcaaggataattcgagatggtctgaaaactggagagataggcatggtcattggaacacactgcttaatagctgataaaactgaattttcagctttacgtatctctgttatagatgaacagcagcgctttggagttgtacagagaggcaggtttaacagtaagctatatacttcttcctcaaagttgagtggtgaaaatacaagttcagacgaggcttctgattctgaaacatttatggctccacacgttcttgcgatgtcagctacccctattccaagaacattggcacttgctttatatggtgatatgtctcttactcagatcacggacctgcctcctggaaggcaacctattaaaacccttgctcttgaaggaaatgatgtagggtttgaagctgtcttccagatgatgagggatgaactgatagacgggggcaaggtctaccttgtgtatcctatcatagatgagtctgagcacttgccacaactccgtgctgcaacagctggatttgattccataaagcaaaaattcgaaggctatccctgtgggctattacacggccgcatgaggagcgatgagaaggaagaaactctcaacagttttagaagcggagaaacacgcattctcctgtcgacacaggtgatcgagatcggggtcgatgttcctgatgcttccatgatggttgtcatgaacgctgagcgatttggaatctctcagctgcatcagctgcgagggagagtaggtcgcggtgagaggaaatccagatgcatattcctggcttcaacttcgagcacgctgccaaggctgaaggtgctcgagaagtcctccgatgggttttacctggctaatgcagacctgctgctccgtggccctggcaatctactaggtaaaaagcaatctggtcatcttccagaatttccaatagctagattggaggtcgatggtggtattttacaagaggcccatcttgccgctctgaaagtgctggtcgcaagcaacgacctagcgttgtatccacggctgaaggtggagctcagcatgaggcagccattgtgcattcttggagattgacatgtcaacagtactgctcgtaggctcgtagcattgggcgacgcgtgtactgtggataactattggtcgtaggctcgtagcgtcggcaaagttgacatgccgtctggtgagcgaggcgtgtaccatgaataactgttagactgattgtgtgagtgtgtgtgggctggtaccattgttaggctgccggttcattagggttagagttgagtctatatattgtaaccccttctctatgcaatacaatgatccacttcactattctacatgttattagactaggttagggttttctgaaacccacagtagccaccggtcgcctcccaccccacagcagccgccaccacctgagccgtcgtcgccctccaggaggctcctccctctcggggcggcacttgcccctggcgcggctgtgcatgggcgcggcccctcgtagctcggcgcgggagtggcagcccctggcctcgacggcgcgaggcgcgaccccctggcagtgtggacgcgacggtccgtccatggcggcgcggccacgccggccccggcgcgggaaacggctcggcggcgcacgacacggagcctcatcacgaggcaatggtggccacggcgccgccctggcggctggctcctccggcgaggtacagcctcggcgcgacctaggcgcgagcgtaggctcgtgggcctcctct

SEQ ID NO: 8415 - DNA, 2888 bp, Zea Mays
ccccttgaattggatttgctcccaaatccggcgagaaagcgaccatcactccacgccaagctgcggcgcccggacaagagatttttgacattataaaacgcgacagatttataaaaatcaatagactcaaaatctttttatgcgtagagacgggctattaagctgctgcatctaacgccgtgactcgtctccatcctttctcttttctcttccaccgggtcgacgcagtgcagcgcgagcttcagcgtgtccatgagctgctcgtccgcggccgtcccggcggcagcgtcgcgcaccagctccaggtcgaacagcatcgtccatcgttccattcccatccataccccctcaatcggccgggatgctgggtgtagggacggccgcggcggtgctgctcggggccgtggcgttggtgctcgcggatgccgctgcgaggagagcgcactggtggtacagggaggcggctgaggtggtgctggtcggcggcgtggctttggtggtggtggacgccgcggcgcggagggcgcacgggtggtacagggaggcggcggcgcggctgccgccgggggagatggggtggcccttggtcggcggcatgtgggccttcctccgcgccttcaagtccggttcggtcgcactcgcacgggcgtgtaccaaggcttcatgttcagcagcctgacggtgctgatgacgacggcggaggcgtgcaagcaggtgctgatggacgaggacgcgttcgtgacggggtggcccaaggcgacggtggcgctggtcgggccgcggtcgttcgtggcgatgccgcacgacgagcaccggcgcctccgcaagctgacggccgcgcccatcaacggcttcgacgcgctcacagggtaccgtgccgtaggtgctcttccccatgatttcggcggtggcgcacagcaggtcgtcggccgtgaacgccagcggcccatcaaagtgcaccagcttgccgcccacatcgccaccggactccacctccgccgccgacgaccacataggggcggcgacaccggttctgacgggagaagaaaacggcgcgcggacggacagcgacggagcatgattaatggttctcctcaacggctaataacgattcttcaggaaagttttactcttattaaactccctgacatcgtccaaggaagcaagtgatttcattatgaaagattggtctattttctccaaatttgatcataatggagcttacctccccatgttgccaatcgactctccaatatctcatgatgttgggttaggattgatatcacaagtcggaaacttagttgaatgttcatttcaacatccaaggcatatatgtgctacggggagtggcacagttcaggaagcattcagctgtttgaacaagtttgctgaagctttctatttctggttttctagagcatcgaatcctaagctattccaaaggctatcagctgctgcaggctcaagttcaagagtttgtcggtcacacataaagcaagtggcctcttgcttgcagcatttaccaggactacagtttggttcacaattaagaaaagatcatgctgtacagatgcttttagcgaggcttgcaagcacaacttttggacgcctgtggacggaggtggaggagcatcatgcctgcaacatccttatgttggctgccgctactgtagtaccaccatttgaaaacatatgctggctgagtcaatggcactaagaaaagatggtgggaacatcccctgctggacagtcatactcggaagaaatccgtccaggttgtgcgtgtgttgctgtgccaagagtactcttgcgagaagatgtaacagaaccgaaaactggcatcaagttccccactctacttaaagacaattccaatctgactacagaggtccttgttggaatgggtttcagaagcatgcgaataatgagggttaaagatctgaatctttatgcctttggattatatatacaacctgattctgtttgcaaaaagctgggtccaaagtatgcttgtattccagatgctgagttgaaggatcacccagatttctatgaagatcttttgagggaaaatattgatatgactgttaggctagtagtaagctacaatggcctcagcattggcacagttcgagatgcatttgagaagtctcttgccttccggctgaaaaagatgaatcctaatactgattatgattgcttgaagacatttggttcttgttttaatgaatacattcgtatacctgctggtacaaagatagacttccggcaaacatccgatggtcagctaataactgaaattgatggcaaacaaattggcactgtccacagcaaatatctctgcagaaccttcttcgatatgtatattggtgacccccctgtttcagttgagaccaaacacggcattgcgcaaaatgtggctggactcatgagaagatgctaggaaaacagggaaaccaaaccgaagaactcggaactatttcctccatctatacaaggagagatgtacatagaaaggaagccaggagaggattgattgtatttttagtggtagacagcgactttgtatgctgtaattaacaggcagaaggtttcgacagacaggcctggcatccttagcaaatgcctcctatgcttctcatatggtatggcattttgccatttcctggttcgctgggggcactgtatcatgagcatatccaagagcttctcagaagtctcccctaaattatgttttttttttgaaaaatggcggttccttttaccaatcattctcactaattttttaaatgtcccttagaactgattttcaggagttattttgtacaacaggaggatgtttctctatcccaagtcaaaaaaatggcggggttcagctttgtccctac

SEQ ID NO: 8416 - DNA, 2992 bp, Zea Mays
ccccttgaattggatttgctcccaaatccggcgagaaagcgaccatcactccacgccaagctgcggcgcccggacaagagatttttgacattataaaacgcgacagatttataaaaatcaatagactcaaaatctttttatgcgtagagacgggctattaagctgctgcatctaacgccgtgactcgtctccatcctttctcttttctcttccaccgggtcgacgcagtgcagcgcgagcttcagcgtgtccatgagctgctcgtccgcggccgtcccggcggcagcgtcgcgcaccagctccaggtcgaacagcatcgtccatcgttccattcccatccataccccctcaatcggccgggatgctgggtgtagggacggccgcggcggtgctgctcggggccgtggcgttggtgctcgcggatgccgctgcgaggagagcgcactggtggtacagggaggcggctgaggtggtgctggtcggcggcgtggctttggtggtggtggacgccgcggcgcggagggcgcacgggtggtacagggaggcggcggcgcggctgccgccgggggagatggggtggcccttggtcggcggcatgtgggccttcctccgcgccttcaagtccggcaagcccgacgccttctttgacagtctccctttcctggatacatgctcgatgctcctagtaaacactaaacacctctcaatggatggatgctgtcgttttttgcctttgcccgccctgaatggctgctgcaaagtctggaactgaaacagcttattaaggcagattaagttcggtcgcactcgcacgggcgtgtaccaaggcttcatgttcagcagcctgacggtgctgatgacgacggcggaggcgtgcaagcaggtgctgatggacgaggacgcgttcgtgacggggtggcccaaggcgacggtggcgctggtcgggccgcggtcgttcgtggcgatgccgcacgacgagcaccggcgcctccgcaagctgacggccgcgcccatcaacggcttcgacgcgctcacagggtaccgtgccgtaggtgctcttccccatgatttcggcggtggcgcacagcaggtcgtcggccgtgaacgccagcggcccatcaaagtgcaccagcttgccgcccacatcgccaccggactccacctccgccgccgacgaccacataggggcggcgacaccggttctgacgggagaagaaaacggcgcgcggacggacagcgacggagcatgattaatggttctcctcaacggctaataacgattcttcaggaaagttttactcttattaaactccctgacatcgtccaaggaagcaagtgatttcattatgaaagattggtctattttctccaaatttgatcataatggagcttacctccccatgttgccaatcgactctccaatatctcatgatgttgggttaggattgatatcacaagtcggaaacttagttgaatgttcatttcaacatccaaggcatatatgtgctacggggagtggcacagttcaggaagcattcagctgtttgaacaagtttgctgaagctttctatttctggttttctagagcatcgaatcctaagctattccaaaggctatcagctgctgcaggctcaagttcaagagtttgtcggtcacacataaagcaagtggcctcttgcttgcagcatttaccaggactacagtttggttcacaattaagaaaagatcatgctgtacagatgcttttagcgaggcttgcaagcacaacttttggacgcctgtggacggaggtggaggagcatcatgcctgcaacatccttatgttggctgccgctactgtagtaccaccatttgaaaacatatctccgaagatgctggctgagtcaatggcactaagaaaagatggtgggaacatcccctgctggacagtcatactcggaagaaatccgtccaggttgtgcgtgtgttgctgtgccaagagtactcttgcgagaagatgtaacagaaccgaaaactggcatcaagttccccactctacttaaagacaattccaatctgactacagaggtccttgttggaatgggtttcagaagcatgcgaataatgagggttaaagatctgaatctttatgcctttggattatatatacaacctgattctgtttgcaaaaagctgggtccaaagtatgcttgtattccagatgctgagttgaaggatcacccagatttctatgaagatcttttgagggaaaatattgatatgactgttaggctagtagtaagctacaatggcctcagcattggcacagttcgagatgcatttgagaagtctcttgccttccggctgaaaaagggtacaaagatagacttccggcaaacatccgatggtcagctaataactgaaattgatggcaaacaaattggcactgtccacagcaaatatctctgcagaaccttcttcgatatgtatattggtgacccccctgtttcagttgagaccaaacacggcattgcgcaaaatgtggctggactcatgagaagatgctaggaaaacagggaaaccaaaccgaagaactcggaactatttcctccatctatacaaggagagatgtacatagaaaggaagccaggagaggattgattgtatttttagtggtagacagcgactttgtatgctgtaattaacaggcagaaggtttcgacagacaggcctggcatccttagcaaatgcctcctatgcttctcatatggtatggcattttgccatttcctggttcgctgggggcactgtatcatgagcatatccaagagcttctcagaagtctcccctaaattatgttttttttttgaaaaatggcggttccttttaccaatcattctcactaattttttaaatgtcccttagaactgattttcaggagttattttgtacaacaggaggatgtttctctatcccaagtcaaaaaaatggcggggttcagctttgtccctac

SEQ ID NO: 8417 - DNA, 4387 bp, Zea Mays
ccggactcgccacctcctgcgcctcccctcttcctgtccaggcctccagggtttaggctcgccgccgtcccgtcccgtcccgtcccgcctcgcccaccgcgcgccgcgatgcctccttccaagggcaagaagaagaacccatcgacgtcgccgcggccgtccccacgcacgccttcatcttgtccctccgctggctccggaactggcgatggcgagagaagcgtcgacctcccatccatcgccgccgccgccgcggagcagttcccggcgctcgtgccacgcggcggtagtggctactttgctggcatcgttgccgaagtggcccctagggatgggagccgcggcggccgcttggggaggctctggctctccgaggccgctatggtcggcgccgggatgcggcctgggtgctttgtctccgtctcactaatttcgtcaagcagtgatcagttagatggttttccattaattaatttatttgaggagtgcaacagattctttgatcttgatctggacaatgatctcctttatggtgaagctgggaaaaactttgtggttgctacagttctcccctcgcgtgaggttccaaagaatggtatcaagctctcttgggatcttgcttgtgttttgggacacccttttgtaggtcgatcattgtttatttgccccttatgtacacttcaggccccaaagcgtagtgatgatgttcatattttacgggtaatgaaatgcaagaatctttatcttagcctagttccacctaatgttggatcttccaaaggcattgaatcagagtctgactaccatcctgaaagaagcgcaatggttatggagacacctaagaggggtccttcaactccactgcgtaagaaggaatcgcatcactttgcttccaacaatggctcttcaatgtgcttggatccaaccactgcaagatcagcactagcagatgagaaaatcaatgagttgttgcatacttcagcattgtggtggctcaatggtagacacttgcttaaaggaaactttgttcctctctcaatatgcggaaaactgtctctatttgtggtcatgggagcagaaccagatagttcttctcaagatgttttgtatgagaatgggaatacactgtctaatgcagaggattcaactaaatcccaggaaaacccagttttattccttgttgacagaaccacaaaagttcatttatctgattctgtctgcacaaagcagcttgactcagataaaccgggtttaccatcagaacctcacgagtatgatgataaaagaaatgcagatttcaatcattctccaacacttggtgggttatctaaagagtcagcaaccataaaaggaataatttcattttcactagctgatcaaattggtctgccaagatacaaaggtattcttctttatggtccacctggaacagggaagacctctcttgcttcttcctgtgcctatgatgcaggggtcaacctttttacaatcaatggaccagagatcattagtcattattacggagaaagcgagcaatctttgtacgatgttttcacttcagccaagcaagcagcacctgctgtggagtgccatccccaggacagaggatggacatacttcgccaccttctaattggagttcatcactctctgaccaatgaagaagttgagtctgttgctctagcaacccatggatttgtgggtgctgatctagcagcagtgtgcaatgaggctgcattgagtgctctccggcgttacatcagcctaaaagaaaattcaattcaacaacttggtcatcctggctgtagtttttataagtgtaatagtcaagatactgaagattcaagctcattatcgtcatctttctcaaagttgaccatgtcatcatatgttgcttgcatgaacggtggtaacataaaaagtagcgagtcttatgatgatacagatgaaataccactatatgtaaccaataaggattttgacaaggctaaaacaaaagttagaccgagtgcgatgcgcgaggttattcttgagcttccgaaggtacgttgggaagatgttggtggtcagtgcagtgtcaaggagcaactgattgaagctatccaattaccacaaaaatgcccagaagcatttgaacgtttagggatccgaccccctagaggattgctaatgataggaccaccaggttgcagcaagactttgatggctcgtgctgcagcttctgaagcaaaattgaatttcctggctgttaagggtcctgaacttttcagcaagtgggtcggtgactcagaaaaggcagtgagatcgctatttgcaaaggcgcgggctaatgcaccagcaatattattttttgatgaaatagatgggcttgcagtaactcgtgggcaagaaaatgatggcacgtctgttgctgatagggtcctcagtcagttgcttgtggaaatggatggtttggaccagagagttggtgttactgttattgcagctacaaatcgccctgacaaaattgatcccgcacttctgaggccaggtcgtttcgatagggtgctggatgtgcaaccacctgatgaagctgaccgtgcagatattttccggatccatacacgcagcatgccatgcagtgccgacatgaatctaaatgaactcgctagactcacagaaggctacactggcgccgacataaagctcatctgcagggaagctgctgttgccgcacttgatgagaggtttgacattcaagaagtagcaatgagacatttcaattctgcgatcgacagaacaaaaccttcagatgtcaagttcttccaagaacttgcaaagcaattccgcagatcgttgacttcactgaggaagcaataattctgagaaagcgttgaggaatgggtcaagcatcaccctctcactccctacatttttgcttggtccagagaatggagttggttaatccatacaagtacacggctagcttagccatctggaatcagttcatccaaagaaataaaacatggggtgacctcattctggatattcatgtgatttctcaaagcaggcgccacatcagtgaacctggcgtgactgaatctgggctggtatctaagaagccttgtcctcgttgctctgcatcttcgaaatttctgcgttgttcctctgacttcaattactatgccactgtagatagtattgctttaaaagttgactagaattttctgttccagaaacctttttgctgctatttattgggggagcaattttctcttttctgactcttctcaacattacactcgagagaaacttgctagacatgtttatagatcgagacagtttcagtgggcctgttttaaccttgtcttatctcttctttggaaggatttgagcattgttgccaacattgttccctgtcatcttgctgtcggcctgatttttgtctctgggttactgaacttggtggtagcagtaacatctgcatgttttcttggtgtctttggtccactggagctgtcaactgctgtatgagtagatgtcagatgcgatgttcttccagttttctgacttgagcctgtctctcgtcatactcaatgtggccctctgatttagtcccaagcaagggttgctcgtgcttcttagaggcttttacagtcagagtcctgatatctgaacttgcacactcattttctggtcgatcaggcacaggatccacaggtgaccgttcctcaacttcgcatggactgtcagcaggcgcagtggtatcctcttcaatgtgttcgtcagattcatcaatgtcctggatagctaatggcagcattctgcatcaattggcggagttccagccacaagttcagatgcttcagctgacgaatcttgcacgtggggattgctttcagaatgatcaggtgcttttttcaagtgatgctttcagtgatgaattcaggcttagagcagtactgctaccactttttacaggaatgcttgatcccaaacttgcagctgtcatggcaagagctggtggatgctcgtaggaaatgcgggaccggcttctacttcctctttaacatcaggtgtcatgctgctgccatccataactactagagcagcatttatcaggtcttcacatttgttatgtgagggactaaaatttagttagaggaaccaaacatggtcttagtcttcaactcttcatggtttgagcatgggagaaggggggagtggactataaattgggcgtagaggttgtggatttgtgaacctagaatgaaatagattctgctgttattctcaagaaattgaggcatgaagtctaaaaagacgaatttaaaggaaaaataaataaatgttgcagcagtttaaacagccaactttaatccgaagctaacagcctgctttgaacgtta

SEQ ID NO: 8418 - DNA, 4092 bp, Zea Mays
cgccgttgcggaattgcggagcgcgccgccaaaacaaacgcgtcctgctgccggaatcagaagatcccgaggggttctgatctgagggcccaccatcctctctacacggcacaggaacccaactactactactacaatcgttgccagggagctcaaccgactcgggaccaaaatcggctgctgttgctggctgggacgaaatcggaggcatccgcctttctcgagagatcgagctccgcgccggagcaggcgggccaggcggtgccgctgctgcctgctggtgggtttacaacatagggatggagtcgagatccatccggattcgacattcgaggtcttctgctttgctgttttaaacctgtagaggcagaggacttgggaatgctgaaaaatgtgcctgcaaaccgacgggggaattttttgtgcaaacaagattcgacctctgttcaagcagatattgttggcttctcatgagtatgggcttcatgctgatactgcccttattttcaatgatttaaagcacagtagattgaaggcctttatatttgttggccatcaccttggagacgacggttaaaatcttctacattctttgataagtggtgtggcgcttgttcattattctatcgttgcatagtttgatacgatggatgggaggaggacaattttgatgggacgatatgaaattggtaaacagctgggacaaggaacctttgcaaaggtcttttatgctcgtaatcttactactggcctggctgttgccataaagatgattaacaaggacaaggtcatgaaggttgggctcatggagcagataaagagggagatctcaataatgaggttagtgaagcatccaaatattcttcagctttatgaggttatggctagcaagagcaaaatttattttgttctggagtatgctaaaggtggtgagcttttcaacaaaattgctaaggggggaaagctcagtgaggatgctgcgaggaaatatttccagcagttggtcagtgctgttgatttttgccacagtcgaggtgtctatcaccgtgacttgaagcctgaaaaccttctacttgatgagaatgaaaaccttaaagtctcagattttggcctaagtgctctagctgagtccaagaggcaagatggtctcctgcataccacatgtggaactccagcttatgttgctcctgaagtgctgagtagaaaaggttatgatggtgcaaagtctgatgtgtggtcttgtggagtaattctttttgtgcttgtggctggttaccttcctttccatgacacaaatttgatagagatgtacaggaagatttccagagccgagtttagatgccctcgttttttctcaactgagctgaaggatctgctacataaaatccttgttccagatccaagcactagaatttctatctcgaggataaagaggagtgcttggtacagaaaaccggttgaagcacatgcaaagaaaaatgaggcagaaacaagcgagaatacttgtacgggtgaaggtacaacttctgtctcaacagagtgcagtacgtctgagggaaatcaagggccattaagcctcccaaacttgaatgcatttgacatcatctgtctctcaacaggttttaatctttctgggttttttgaggataagtatggtcgcagggaagagagatttactaccagacagcctgtaacaacagtatttacaaagctgaaggagcttgccaaacgcctaaagttgagggtcaagaagaaagaaaatgggaccttgaaattggcagctccgaaggaaggaaagaagggtatgcttgagcttgatgcagagatttttgaggttgctccttctttgctcttagttgagttgaaaaaaaccaatggggacacgctggagtatcaaaagctagtgaaagaggagataaggccggcactgaaggatattgtttgggtttggcaagatgatcaacaccagtgctcacaatcaccagagtctctattatcaccaccggagacacaggatgaattgcgattatcattgcctcagcaagagggtcaagacttcttagaagccccattgccatcactatcgcttgaccagttgaaatcaccaactgccccagagcaagcagagcaactgccacaaccagaacagttgcaaacgccaatcgctccagaggagcaaattaactagctctaacagccagctgatgccaaaaaagcaaaggaaaaaggtcccgacaaaaaagaaaggatttgcatgtacaatatcagcagtggagtgttgaatcgtagtacacttgctgtccatgtcctgcagaggaacgtctctcctggagacatacaaaggcatccagatatgtccccatcgaagaaacagttaacaaacaacaatgattcgctgtactggtcaaatgaaaaatatgactactcttgctcttggttggatgaccgggcaatgatttcagctttgcttgatgtggtcatagaagaagactctgcaagtctactccccccggagcgctctcccctcttcctcttgtagctggtgtggaggctgagctgcatccggtctctgttggccataagagcatggatgcagaaatgaaacagccacttgagggatccatgtccctgaacatcgacagcgaaggtgaaccccacattggaaatggatcgatcgtcgtcgagaaccctgcatctgacctggtgaagtcagaatctgaccgaataaaaaccttttaccagacggtcctgtcggctatcatggtgttcgtcacggcagcgctatcaagctacaaggacatgaagcctctttactcgaccacaagccacggcaaagctcacctcagcaacctcctagtcgacgagggcctattcatattcatgaccttcttgtgtgctatggtcctaatgatgtctgagttcgtcgtgcaccagcatggccggcggggccatgtctggtgctgggttcgcaccattctcgttgcagtcaccggtgtgatgctaatcgtggctgacacaatcctcctcatcgtgacgaaccgaagcaacatgttgctgtcagttcttcttgtaccggaggtgttgcttttcggcgtggccgtgagcgttggagcatggatgcaagagagtttacccagctcggagcttggcagcaggtacgattccgccatgaagggaacctttgatatagctacagttggcaccattgtctcgttcacgcttcaggggggcatcgtctttggctacctgaaaaccccagacagtaatcaggtcaagcatgacccgccgctggacctcgctgcgtgctacgccacctcgacgctctccctgaccggaatgacaatgtgtgccatgccgctggcatatctccccaacggcatgctggaggttctcgtcagagtcgtcgagaggcttaggagtgctgtgctggccgctctggcgatgatggcgctggtcgtctcagtggagttcctggatggattcgtcgtggtctccttctttcccgacgccgtcacgattgccctgtactacgtggtgaagctgttctcggcatgtcaaccccgagaggagatctcacagctggacttcaccttccggatcgttgccgccgcggggttcacgctaatgactggactctatgcggcttttacggggacagatcactatggcttcaacctcaagaccgctatgttcatcctgttgcttgcagttgtgtcgagcttgagccgtctggcaatcccacttcacatgcctgaggcgggagtgggaggagtcatcgagttcggcattgttagtatagctctctcttttcccctgctggcgcttctggctgccattccattggtgttcaaggtcttcgtcgaccattacatcaatcgctagtctttgggttgtctggcgcaattcttcctgtggtacagtgccagtaatgaatgatgcgtttttaaactaagggcataaatttaaaaatcttatttttattactgcatttactcagtctaggttgcttgtttggaagagcaacagcaagagactagccagatcctttgtaaggataaatttggctattattagaagaaaaatgtctttaaa

SEQ ID NO: 8419 - DNA, 4330 bp, Zea Mays
cgccgttgcggaattgcggagcgcgccgccaaaacaaacgcgtcctgctgccggaatcagaagatcccgaggggttctgatctgagggcccaccatcctctctacacggcacaggaacccaactactactactacaatcgttgccagggagctcaaccgactcgggaccaaaatcggctgctgttgctggctgggacgaaatcggaggcatccgcctttctcgagagatcgagctccgcgccggagcaggcgggccaggcggtgccgctgctgcctgctggtgggtttacaacatagggatggagtcgagatccatccggattcgacattcgaggtcttctgctttgctgttttaaacctgtagaggcagaggacttgggaatgctgaaaaatgtgcctgcaaaccgacgggggaattttttgtgcaaacaagattcgacctctgttcaagcagatattgttggcttctcatgagtatgggcttcatgctgatactgcccttattttcaatgatttaaagcacagtagattgaaggcctttatatttgttggccatcaccttggagacgacggttaaaatcttctacattctttgataagtggtgtggcgcttgttcattattctatcgttgcatagtttgatacgatggatgggaggaggacaattttgatgggacgatatgaaattggtaaacagctgggacaaggaacctttgcaaaggtcttttatgctcgtaatcttactactggcctggctgttgccataaagatgattaacaaggacaaggtcatgaaggttgggctcatggagcagataaagagggagatctcaataatgaggttagtgaagcatccaaatattcttcagctttatgaggttatggctagcaagagcaaaatttattttgttctggagtatgctaaaggtggtgagcttttcaacaaaattgctaaggggggaaagctcagtgaggatgctgcgaggaaatatttccagcagttggtcagtgctgttgatttttgccacagtcgaggtgtctatcaccgtgacttgaagcctgaaaaccttctacttgatgagaatgaaaaccttaaagtctcagattttggcctaagtgctctagctgagtccaagaggcaagatggtctcctgcataccacatgtggaactccagcttatgttgctcctgaagtgctgagtagaaaaggttatgatggtgcaaagtctgatgtgtggtcttgtggagtaattctttttgtgcttgtggctggttaccttcctttccatgacacaaatttgatagagatgtacaggaagatttccagagccgagtttagatgccctcgttttttctcaactgagctgaaggatctgctacataaaatccttgttccagatccaagcactagaatttctatctcgaggataaagaggagtgcttggtacagaaaaccggttgaagcacatgcaaagaaaaatgaggcagaaacaagcgagaatacttgtacgggtgaaggtacaacttctgtctcaacagagtgcagtacgtctgagggaaatcaagggccattaagcctcccaaacttgaatgcatttgacatcatctgtctctcaacaggttttaatctttctgggttttttgaggataagtatggtcgcagggaagagagatttactaccagacagcctgtaacaacagtatttacaaagctgaaggagcttgccaaacgcctaaagttgagggtcaagaagaaagaaaatgggaccttgaaattggcagctccgaaggaaggaaagaagggtatgcttgagcttgatgcagagatttttgaggttgctccttctttgctcttagttgagttgaaaaaaaccaatggggacacgctggagtatcaaaagctagtgaaagaggagataaggccggcactgaaggatattgtttgggtttggcaagatgatcaacaccagtgctcacaatcaccagagtctctattatcaccaccggagacacaggatgaattgcgattatcattgcctcagcaagagggtcaagacttcttagaagccccattgccatcactatcgcttgaccagttgaaatcaccaactgccccagagcaagcagagcaactgccacaaccagaacagttgcaaacgccaatcgctccagaggagcaaattaactagctctaacagccagctgatgccaaaaaagcaaaggaaaaaggtcccgacaaaaaagaaaggatttgcatgtacaatatcagcagtggagtgttgagttaggctcaactcgtgtcatttactatatttctcctttcaccttgcaatccgaaaatttacaattcctgtaccaaaatgcatctatctgttctgtttttttttttgctttctttggattgctgttatccacgaattaaacaaatgatatgaataagttttcattataaattgccattttttgtttctttatagaaatatgtgtggattgtgaagaaaatgataacaaaaatagttgatacttctttgagggaggtggaaatttcttgagaggaacgtctctcctggagacatacaaaggcatccagatatgtccccatcgaagaaacagttaacaaacaacaatgattcgctgtactggtcaaatgaaaaatatgactactcttgctcttggttggatgaccgggcaatgatttcagctttgcttgatgtggtcatagaagaagactctgcaagtctactccccccggagcgctctcccctcttcctcttgtagctggtgtggaggctgagctgcatccggtctctgttggccataagagcatggatgcagaaatgaaacagccacttgagggatccatgtccctgaacatcgacagcgaaggtgaaccccacattggaaatggatcgatcgtcgtcgagaaccctgcatctgacctggtgaagtcagaatctgaccgaataaaaaccttttaccagacggtcctgtcggctatcatggtgttcgtcacggcagcgctatcaagctacaaggacatgaagcctctttactcgaccacaagccacggcaaagctcacctcagcaacctcctagtcgacgagggcctattcatattcatgaccttcttgtgtgctatggtcctaatgatgtctgagttcgtcgtgcaccagcatggccggcggggccatgtctggtgctgggttcgcaccattctcgttgcagtcaccggtgtgatgctaatcgtggctgacacaatcctcctcatcgtgacgaaccgaagcaacatgttgctgtcagttcttcttgtaccggaggtgttgcttttcggcgtggccgtgagcgttggagcatggatgcaagagagtttacccagctcggagcttggcagcaggtacgattccgccatgaagggaacctttgatatagctacagttggcaccattgtctcgttcacgcttcaggggggcatcgtctttggctacctgaaaaccccagacagtaatcaggtcaagcatgacccgccgctggacctcgctgcgtgctacgccacctcgacgctctccctgaccggaatgacaatgtgtgccatgccgctggcatatctccccaacggcatgctggaggttctcgtcagagtcgtcgagaggcttaggagtgctgtgctggccgctctggcgatgatggcgctggtcgtctcagtggagttcctggatggattcgtcgtggtctccttctttcccgacgccgtcacgattgccctgtactacgtggtgaagctgttctcggcatgtcaaccccgagaggagatctcacagctggacttcaccttccggatcgttgccgccgcggggttcacgctaatgactggactctatgcggcttttacggggacagatcactatggcttcaacctcaagaccgctatgttcatcctgttgcttgcagttgtgtcgagcttgagccgtctggcaatcccacttcacatgcctgaggcgggagtgggaggagtcatcgagttcggcattgttagtatagctctctcttttcccctgctggcgcttctggctgccattccattggtgttcaaggtcttcgtcgaccattacatcaatcgctagtctttgggttgtctggcgcaattcttcctgtggtacagtgccagtaatgaatgatgcgtttttaaactaagggcataaatttaaaaatcttatttttattactgcatttactcagtctaggttgcttgtttggaagagcaacagcaagagactagccagatcctttgtaaggataaatttggctattattagaagaaaaatgtctttaaa

SEQ ID NO: 8420 - DNA, 1998 bp, Zea Mays
ggaattttcgtctgggtgcgtttgcgtcggctcccaggccccagcttctccgtggcgatatgccgatatccgataaaccccgcacatcctgactgcaactctgaacagcgaagcacccatggccctcgccaccacagccgtctccctccaccttttcctcacccggcccgcctccgtgctccgcgtaggccgcggcctcccatgcctcctcctccgagccacttcgtccacctccgcctccccggacttcaacatcaccttcgcggagcccgcgccgtccaaaaaggccccgtccgcgcagccgctggtcccgtggatcgtccgcggggaggacggcaagccccgcctcagcacctccccgccgccggacgtaatccaggccatcgcgctcgcggaggcggaggccaagaaggccgccaagaaggaaaccctcaagggccagaatggcgcagttgccgccgccgccgcggctgcttccaatgccagcgtcaagggcaaggaaaggaagcccgccccgaccgtgccgcccaagttctccaaggcagccaggaggttttacaatgagaatatcaaggagcgggagccgcaacggctcgccaaggtccttgccgccgcaggagtggcatcaagaaggaccagtgaggagctcatcttccaagggaaggtgactgtcaatggttcagtctgtacttctcctcagaccaaagttgacatctcaaaggattctatctacgttaacgggaaccgcatttccaagaagttgcctccaaagctgtattttgctgttaacaagccaaaggggtacatttgctcatgtggtgaagagtcaaaatctgttgtctccttatttaatgattatttgaagggctggaacaagattcaaccagggttgccaaaaccacgcttgtttactgtgggtcgtcttgatgttgccacggctggtctgataatagtcacaaatgatggtgagtttgctcaaaagcttgcacatccttcttcaaatgtaacaaaagaatatgtggtgactattgatggtgccgtgcacaaaaaacatctcatagctatcagtgaaggcacaaaaattgatggggtcatgtgcattcctgatttagtagaaccattggctgcccaatcagatacaagaaagacccgcctaaggatagtggttcatgaaggacggaatcatgaagttcgtgaacttgtacagaatgcagggctacaggtttatgcattgaaacgtgttcggataggcaggttcaggcttccagcagatctgggaattgggaagtttgttgagctcaaacaggctgatatcaaggcactagatggcaacaactagagatgacatctgatgtggctaataagcgcatcttgtccaaagatggtagtaatcctcaaagtcacaatacatgagctgctactcaactcagaaagcttgtgaatgttctggatgtccattggtggtggtggctgatgatcaagtgtggcaaacatgttttgccttgaagaacttgtgaactactccatacttcgcctgcgctgcgaatctccacatcatatcaaacggcagaaccaagtccgcgatgcagcagtcgtttggtgaggatggaacattgtcaaatagcgatcttctgttggcatatacattttactctctattctaaattataatttttttagatgcattgtttttactaaattaaaatatcttatagtttagaatgcatcttgtccaacaggtagtcaataatggcagacgagttatatttggccaaattacattgtactccgtgtaccgagaactgtttttttaagaatcctttattgaccaggaatttttttcttgtaattgtggcactgttatttctatagtcatgagaatcccttcatttttagggctagtttgggaaccctattttaccgagggatttttatttttctaagggctactttagtaacatcaaatctccttcgggattggaagggattggggtagaa

SEQ ID NO: 8421 - DNA, 2290 bp, Zea Mays
cggcgctatcagttccgcacgccactctggtgccaggaatattccgctcctcctgccctccgccctcgacccttccgcaaacccagctctctgctggcagttcgtgagggcagcatgagggcgccgctgctgctatgggcggccgccacgtggctggccgtcagcgccgtggcgcaccctggcagacgtggcggcggcggcggggagcagccgctgtcgaggatcgccgtcgagagcgcggtcctcgccgtcgacgatgcggcgcacgtcagggcgtcccccttggtactggggctcaagggcgagagcagcgaatgggtggacgtggagttcttccatcccgacccatccagcgacgactggatcggtgtcttctctcccgcggatttcagtgctgcgatctgtgagcctgagaatccgaggcagtctcctccagtgctttgctctgcacctatcaagtaccagtttgcaaccttcaaaaatgatgggtataacaagaccggaaagggctacctgaagcttcagctgatcaaccagaggggagatttctcgttcgcacttttttcaggaggcctcttgaagcccaagctgattgccgtctccaacaaggtggcatttgcgaatccgaaggcgccggtgtacccacgtttggcgcaaggcaagtcttggaatgaaatgacagtaacctggacaagtggctatgatattacagaagcggttcctttcgttgaatggggcgagaaaggcggacgccggtttcttgctccagctggaactctaacgtttgacagaaacagcatgtgtggtgcaccagcgcgaactgttggttggcgccatcctggctacatccatactagctacctgaaggatctgtggccagactcgcggtacacttacaggcttggccacaggctaatgaatgggacccgcgtctggagcaaatcatacagcttcagagcatcaccttaccctggacaagattctttgcagcgagttgtcatatttggagacatgggaaaggcagaggcagatggttcaaatgagttcaacaacttccagccaggttcactgaatactacgtaccagatcacgagtgacatagaaaacatcgacatggtggtccacatcggggacatctgctacgcgaacggctacttgtctcagtgggatcagttcactgcacagatcgaaccgattgcttcgacggtgccatacatggttggcagtggtaaccacgagagggattggcctggcaccggttcattctacggcaacctcgactccggcggagaatgcggcgtccctgcccaaaccgtgttctacactccggctgagaaccgcgcaaagttctggtacgcaacggactacggcatgttcaggttctgcgtcgctcacacggaggaggactggaggcccgggaccgagcagtacaggttcatcgagcggtgcctgtcgtccgtcgacaggcagaagcagccgtggctcgtcttcctcgcgcaccgcgtccttgggtactcgtcctgcgcctactacgagtcggagggcacgttcgaggagcccatggggcgggaagcgctgcaggagctctggcagaagtacaaggtcgacctcgccttctatggacacgtccacagctacgagaggacgtgcccagtctaccagtgcgtcgtcgacgcgtcggaccactacagcgggccgttccaggcgacgacgcacgtcgtggtcggcggcgcgggagccagcctctcggagttcgccgcctcgaagatccagtggagccacttcaccgacttcgaccacggcttcgtcaagctcaccgccttcaaccactcgtcgctgctgttcgagtacaagaagagccgcgacggcaacgtgtacgaccgtttcaccatctcgcgcgactaccgggacgtcctcgcttgctccgtcgacaactgcccccggaccacactggcctcatgaagcctcacgatcgcggtggttttcacttttcagacaagggattcggtccgtgcggtgggtctcttgcagggcagcagcgattcaagttactgtacatagttttttttttctttttttctttttttggtagtgcgccaataaatgaggcgttttctttactgcctccgttacctgcatgtgaaactatgttgttctacccgtagctaaaatatgttttagtatgagaagggttaaccaaaacgttttggtttattttccgggacactgccgaaaacgagagaccgaccaatatttgtaatctacaacggctattaaggtcaaacaccag

SEQ ID NO: 8422 - DNA, 3116 bp, Zea Mays
aggatgcccaatacttgtatatcaactcaagatttgtgaataggaacccaattcataatatgcttaataatctggcatctagttttcgatctcccattacaagggggtatgcagaaattgatgttcagagcaggaagaggcagaaggctgatatctaccctgcttttatactaaacttttactgccctagatccacctacgatctacattttgagcctacaaaaaccattgtggaattcaaggattggcgaactgtcttgcttttctttgagcaatctgtcacaaactactggaagaagcatcaactgcaatcaccaaaagtgaaattgaataagggcctcctgaaggatcataatgtgcagaacgaaaaagagtatgctcacttcgaaagcactcagcagacgaatgcagtcaaagacaccaacagtgatatgagttccacaagagcaacaagaaattcacactgcttttcttttgttatggagccatccattcagaatgtctgtttctctggaaggatcactaattcatgccgcccggatgacaatgttgccagtattgattacaagttagggtataagcaaatgcattatcctgaaaatggcagttataagtggttagacgatggcccttcccatttaaatgatgatatctcaagtgttaacccaacttgttggaaaaggcaaaggactgaaggtatattccatgagtatgcatattctggtaatcttgtaatgctggaagatgtgccaactgaaggttattttgctcacgaacaagagactgagctgattggtccagaagttgaaataccagaatcttgcttcagggctctcaataagccaaatggaatgacgcccgattttgtgcaaaataaaaccaacttgaaggcacaaacctcaggctgggatggattatatgacaagtttgaaaagttaaatggggattgcttactcgataatggattttatcatgatggtggtagcacttccaagggcacctgtcgagttttgagaaagtccagcaccagtaagaagttggggactgcagctggatgtgttgaagggctagaggctgatgctattaaccagatgaatttccctgatattcatgctctatggaacagtgacttgatagataggtcgtccttcaaggatactttaaatcatttttctcacccatccttgttggctgatacaccttgcagtcatccaaggaccttgcacacccttaacaggacatcagataaatgctttcgttcttggaactatgaaaacattgacagcaatgttagatttagcaatgattcatctattatatttgaaggaactaaaaattttgataactttaacaatgaaatacagtcgcttaattacttcaatgataagtgtggttcaaccgaccagcttggttttgaagaagacctgacaacttggaaatcaaaatttgacatgaggttgtcagtcaatatttctcctgagacagcaggtgataatggttgtcatttgaatgttccttctttgaatattgcaaatgacaacctgtttactcaagatctgttgaatcaacacaactctggactaaatcagagactcaggacttcgaagtgtagtagatttagaagtcattctgctccaccattttatagagggaaactgaaattctctagattaaatgtgccactgagcaaaccaagcacagatagcgataaagatatctgcgtcaataacccggaagacaatgcacctggacctgtggatatcccatgtattagttcaacccagcctattcctgagactgatagcagtgaatttccagacctaaattttagttctgtgaaaatgtctgaagttgcatgttctgatgagatcgaggactccactgctcaaataactaaatggcaagatgaccctgtccagcatacagctttgaacttgccacatggtccttttggatgctatgatgatatacttagcatttcttctggggccttacatctctcttgtagctcgctaattcctgaatgtgttgacaagaactgctttgaggaggcaagggttttgttgcagctggacaagaaatttattcccgtcatatctggggaaactatcctccttgtcgatcagcatgcagctgatgaaaggatacgtttagaggagctccgtagcaaggttttatcagaaggacatggagttagttacttggactctgaggaggaattgtctctccctgagactgggtttcaactgttccagaagtatgctgagcagattcagaaatggggctggatcatcagcggcgggagcaattcatctgaatcattcaaaaagaacatgaacattctgaagagacaagtccgtcttgtcactcttgttgctgttccatgtattttcggtgtcaaattgactgggaaagatctcatggagtttatttggcagcttgacgagactgatggatcgtcagatatgcccccagcagttctccgtattctgaacttcaaagcatgcagaggagcgatcatgtttggcgaccccttgctaccatctgagtgctgtctgattattgaagaactgaaagcaacatctctatgcttccagtgtgctcatggtcgcccaaccactgtccccatcttgaacatcgcatccctccacgatgagctggcgaggctccaaatgctgagtggaaggaaggcagagacctggcacggcttggggcaccatgagcccagccttgagcgtgctcacatgcgcctcgaacgactgagaaagctacgccgaggcctgtagccatagtggtttgaatcagataaaagggtgtgtgtttcgtatagtttgtagagaagcgagtgaaatctcagtgtgctctataattgtacatatactagatattcattcatgacaaagaggtaaaacggcgcccatcaccgtcacctgacaggcgagcggggttttccacggcatgttgtaaagtttgtacattctggttgccatgaaaatctatgtaaaattcaattcaaccgtgccaatgtgattagctgaagttgagatgggtgtgatacattcgagcaagtttaagcaggctttatgatgttgctatgtcacataactgactagaaa

SEQ ID NO: 8423 - DNA, 3200 bp, Zea Mays
ctgccgtcgccgcctacctcggcaacagtcaggacttaggacgcaactcatccccgccgcgagcaacgccaatgctccgaccgctacacgctacagccgccgccaccgctagctaggcccagccgcctcctcccttcccctccacgacgatggacccgaccacgcccgtccttgcgctctccaaggccttcgcctcctcccgcaccaagcccttcctcctcctcgccccgcaccgccgccgctccctcttcgccgcccgcgcgtctgccccctcctcgtcctccgtgccgggcgacctcctcatctcgctcgcgcggctcgcgctccgcggccccggaccccccgcggcgcctcggcggtggttcgcgagtgtctcttctgcctcgcctctcgcctcgggtggtccgccccgcggcggaggcggtcgggggaacggtgatggtgacggcggtggtggtggcgacggctggaagcgcccgcgcgcttcccagggagcgggtgtggtggaggaagcggcagcgcagggagccgatgtcatcgtccttgacgttgggggaatgtcgtgtggtggatgcgcagcaagcgtgaaacgtattctggagagtgagccccaggtacggtcagcaactgttaaccttgccactgagatggcagtcgtctgggcagtgcccgaggatagtgttgttcaggattggaaggagcagctgggtgagaagcttgccaatcagttgacgacatgtggctataaatccaatcttcgagattcttcaaaggttggttcacaaacagttttcgaaagaaagatgcaagacaaacttgaacagctgaaacaaagtggtagagaacttgctgtatcatgggcattatgtgcggtttgccttgtgggacacatttctcacctttttggagttaatatgccactgatgcacgtcattcattccactggatttcatttgtctctgtcaatatttacatttgtcggtcctggtcgaagactaatacttgatggcctaaagagtctgttgaaggggtctccgaacatgaatacgctggttggtttaggtgctttgtcatcctttgcagtcagctcaattgcagccttcattccgaagctggggtggaagacattttttgaggaaccagttatgttgatagcttttgttcttctagggaagaatctggagcagagggcaaaacttaaagctaccagtgatatgactggactgcttagtattcttccatctaaagcacgcctaatggtggataatgatgctgagaaatcatcattgattgaagtcccatgtgatactctagctgttggggactatgttgttgtgctacctggggatcacatcccagcagacggtattgtgaaagctggaaggagtacagttgatgaatcaagtttgacaggtgaacctatgcctgtaacaaagataacagggaagtatcagcaggaagtattaacttgaatggtaaactcactgttgaagttagaagacctggtggtgagactgtcatgtctgacatacttcacttagttgaagaagcccagacaagggcggcccctgttcaacgattggctgacaaggttgcagggaactttacatatggagtcatggcactttctgctgctacttacatgttctggagtattttgggttctcaacttgtacctgctgctatccaacatggaggtgcaatgtctttggcattacaactttcttgcagtgttctggtaattgcttgtccttgtgctcttgggcttgccactcccactgctgtactggttggcacttcattaggtgcaacaagaggacttcttttacgtggtggggatgttttggagaagttctctgatgttgatgccgttgtgtttgacaagactggaactttaacaattggtagacctgtgataactaaagtaataccttctagaggcatgggcgatgcgaatacaaaggatttgggggccaaccagtgggcagaggctgacattctgagttttgctgctggagtggaatcaaatacaaaccacccgcttggaaaagccatcatggaagctgcaggggctgccaactgcgtcattatgaaggcaaatgatggatccttcatggaagaaccaggatctggtgctgtggctaccattggtgagaagcaggtttctgttggaacattagattggattagaaggcatggggtcattcacaaccccttcccagaagcagagcattttggccagtctgttgcatatgtagcagtgaatggtgctctggctggtcttatttgttttgaggataagctcaggggagattctcgtcaagttatcgagacactatctaaacaaggaattagtgtatatatgttatctggggacaaggaaagtgctgctatgaatgtggcttcagttgtcggtatccaggcagacaaggttcttgctgaagttaaaccacatgagaaaaagaagttcatatctgaactccagaaagagcacaaggtagtcgccatggttggtgacggcattaatgatgccgcagcactagcttcagctgatgttggaatcgcaatgggtggaggtgttggggcagctagtgatgtatcttcagttgtacttatgggcaacaggttatcccagcttatcgatgctttagagttgagtaaagagaccatgaagacggtgaagcaaaatctttggtgggctttcctgtataacattgttggactacccattgctgctggagcattgcttccagctacggggacgatactgacaccatcaatagctggagctctgatgggttttagttcggtcggtgtgatggccaactcgttgcttttgagggtgaggctgagctcaaggcggaagcgagaaccactgaaagccatctctgatgaggttgagaaaaattactcatcgaaatggagtacctgagtagttcggatcttagaccatgttcacgttcactcattcatatgatttggacacacgcatcaaaggcagttgtcagttgaacaaatgaaacagatgtagtatgcaattgctgaggtcagtcagttcctgtggtttggtagatcttcatggtgtgctataatataataccccctctattccaatttataaattttttgacttttttttaccaagtttgattagcttgtcttatttattttttttcgaaaaaatagaaatttcacttaaa

SEQ ID NO: 8424 - DNA, 5317 bp, Zea Mays
ccagtcgtccttccttctcattccccaagccaaacccccgggctccatcgaaccaaacctatttgaatcgccaaagccggtggcggtgggtctcactctcacagccctccgctcctcgtcctcacccctgcttcgcttgcctagccttccgtcgtcccctgctgtcagtccccgaagacggcggcgccgccggccatggaggaccccctcgccacggcgccgccaccgcgccggccccaccgggagcggcggcaccggcggaaggcgtcggacgccgccgcggccgcgctggcggcgcaggcggcgtcctcctacggcgacgtcttcggcgggcccccgcggttcgcgccgcctcctgcggcgttcgccgcgggggcggggactgcgccggcggactacgccgaggtgttcggcggagtcgcggcctcctgctccatcccctacctcgacctgccgcccgccgttgccagcggagtcggcgccggcgggtacggcgagatcttcggccgcttcgacttcggggagtttgcggtgccgtacgaggacatgctttctggtgcagagtctctggtggaggagatcgcgtcaccaagtgggagctcaagatcatcaactagaaaagaatcggtccgattggatactgagccatctgtaccctatcaacaagttccagatgctggttctggcaggcactctgatgacgagcaatttcatgcagtctcctttcctccagatggcgagcaaacgttcactatgtcatataacaagatcacccggggaaggccagatgatcttgttgaaatgaccgcttgcatagtagaaccttcaattagctatgtggttgactcttgcaatttgtcaaatgatttagaaatggattatgtcccagtaatggacagtggcacaaatgctaatgttgtgaaagaaaagatgaacctaccaaacattgcagattccggcctggagtgtgctgatagtgcttatgtggttgatcatcagcaacatatcccaacatgccctcccatctctgaaaatatttgccaggatgaaaactacaacaagaggtctagcacacattcagtgtcaagcgaggaagcaccttcccctgactatccattcttaagggtatccaacatcaaccttccagcagcacccatcaaagtacaaccaccaccgatgcccccatctaaattgcttaataaaaagggaagcaacgaaaatggagattctgatgtcaatcctaactcagttgctgctgctgctgctatgaaggaagcaatgcaatttgctgaagccagattaaaagctgcaaaagaattgatggagataaaaggtgtcagctctaaattccgtaagcggccagttcatcacaaaagcacaaaatcaactgaaattaaggaatacaatgcacctgaaaaagcacatctatttgaagaaaagctggatatgagaagattggtaaaagaggaaaatcaaagcaatgatatagctttgctggataaaaacacgggcagtgttgcacttgagcacagtgatcatgacaaaaaagggattatatcaccagggaagcctaaggagatgatgcaaaacgacagtgaactagaacaattaggagagtggacatcagatgctgatttttatgaattggttagcaatgatcagaaatgcagaactaatggagctgaatgcagagacaatggtctgatgacaaattccttagccaagcttgaccggtctgagaatgaaaaattaggaggctttgcaggtgagtcaaaaaggtctaggaaattgtgggattgtaacaacagaacatgtctgcggactgaacatgtaaatcagggaaaagatggtataggttcattggaggttgaacaaaagaatactaggtctccagaagttacagaacatgtaaatcagcaaaaagatgctatagattctgtggaaactgaacaaaagactcctaggtcacctgaagtttctccttgtaatgaaagggtgacgtatgaagagccaaccaaaggaaataatgatctgatgacaaattcttccaccaagctcgaccagtctgtgaaagtaaaggaagggggttttgcaggtgagccaaaaaggtttagaaaattgtggggcagtaacagtacaacagttctgagaacagtgcatgtaaatcaggaaaaagatgctatagctttcgtggaggctgaagaaaaggcacctaggttttcggaagttcctccttgtgatgaaagggtggcatcccaagaggcaactgattcccgtttagaacaatgtctaggggtggggaattctctaggtcacgaaaatggtgcacaatttgagacttcatgcgtgaataatttaccttcagaggtccatgcagacccagaaatctccagttcattttcggaatgttgttcatcaggaagtcatgccaatggtaatgaaaatcattctgaaagcacagctcaggaaactgcatttgtagggaactctagccaaaatgtcaacaataaagaggaacttgagcttccgtgcattgatgggttgccttgtacttcagcaaggaatcagattttgcaggaacattttaatgttattaatgctgatgaaaacaaggaaattgaagtgaaaatatcaaaattagaagggtcttccaaatcttatttgaattttgaggaagaaaagttacccagttttgttgatgaatcatgcctacagaacaaaaatgaaagagaaaatgaagtaaattcagaatcacccatccatgaaaagatgacaaagttcgggtttgaggacaaaggtgatgcatatgaagattttcaagagggagatatggatcaggttgctggatctgctgaagaggaaggttatgttacttcaggaagtggtattgctaatgaaagcgaatatgaagaagcagaagatgatatatttgtaggagacatggaatcaaatgtaagaacatgtggtagttttgacaaagatccatatcagcgccaagaatcacaaggatcatggggaccccaagatttggataatagaatggacaaaatcagtgatacaatatctcatggaaaggaaagggagactaaagaatccttgctggagaatgttgaaaagacagcggcagaagaagtactaaaccatgactgcagggaagggcagaaatccatggaaaccgttgactacatatggcccaaatatgtatgtgcagaatttaatgtaagtagtgacaaagatggtaatgtgtttgattctgctgatgaacttatcagcgacaatggcagtgattatgccatgaacatgagcacaatgtcaaataatctgcaagcttcattttcagaagcatgcagtagcattcaacatctttctcaaaaacctcagtctatttctgctgagaaggctgatgaaagcactcctgttcttggaaatcttgaagtggactgcggagaagcaggtagaaaaattccaagtgaaaattgtgaagtctcagaagaagggcaaaatattggaatcgaaatggaagaaagaaaaagagaagacaatatatcaaatataaggttcatggatcagcaaccattttacttggacagtgacattagacctaaggctgcagaaggtactgcatcagaaactattctaaaatccagagaagaggatcttaatgttcagagaactaaagtgaggaatgacataaaagaggctgaaggagaactcgagaaggaggtaaaagttgttgaagagaaagaaaaagaatgcaaaatgggaaaagagaaggaacaagataaagagagacaaagaagagagttggaagaacagaaggaacgggaaatggagcgagcaaaagataggcttgctgttcagagagctacaagagaagcacatgaaagggcattcgccgaggttcgagctaaggctgaaagaatagcattagaaaggatcacctcagcacgtcaaagagcatccgcagaagcccacgagaaagaagagaaggcaaccgctcaagcagctctggagcaggcttcaagggaagctagaatgaaagcagaacgtgcagccgttgagagagcaactgctgaagctcgggagagggcaattgaaaaggcaaaagctgctgcagatgcaaaggagcgaattgggaagttcaggtcctctttcaaggatagttttaaggcacctaatcaggacaatcaacatgaggcatcatctcagaagacggcttataataagcatggaaaaagcatggattcttgtgttgaagtagtcgaggttgagtcagctctacgacataaagcaaaattggaaaggcaccaacgcacagctgagcgagcggcgaaagcccttgctgaaaagaatatgcgggatatgctggtgcagagggagcatgctgagaaacatagactggctgaatttcttgatcctgaagtcaagagatggtcaaatggaaaagaaggaaatctgcgagcattgctgtccacattgcaatatatacttggttcagacagtggctggcaggcagttcccctcacagaccttatcacagctgctggtgtcaagaaggcatacaggaaggcaaccctttgtgtccatccagataaagtgcagcaaagaggtgctacaatcagacagaaatacatttgtgagaaggtgtttgatcttcttaagatccttattataatgcaagcattcgacttttcctttcgaatggagcaccatattctgcattcatacccagctatccatattctctgttccagacatggatatctgttagatggacctatatatggggaatatgcattacggtctcattgctggcctattgctgtttcattcccttcatgttcatttctgaatgtgaggcttggaataagtacaattctgaagagcgctagtgggataggtggttctttatcaattgtttacgggggacaggatattggctaggtatctctgtagcatttgccatactgattattttttacattggtgaaaatatgcagctgtagagggcatcttctggtcattttttatccatatcaatgcaatagtagagcatatgttgtctcttatctagcatccccaagtttacctttgctagactttagttgtgcaccttttgcgttactttgaccattcctagcaaagtttgcctacgtttggcgatcaacttgaagtagttgaatttatattttctttctgtggctgagtgactcgcagttgcgggggccttctattcgaactagtagctgcaatatgctcacggagaatttgtaccatttgtattaaagaatatcatgtgttatgttactagttggag

SEQ ID NO: 8425 - DNA, 3151 bp, Zea Mays
caagaattagtgctttgaagtcaagattggaacaagtgctaattatcttcaccagattccgatgccgagccattcgaagtgcactgcattctttgtcaaaactcttggaagctgattcgtgctgcatgtttagtaccttcactgctatcaaagatccattatctagctcgcctttgaagaccttaccaaagcttcctttccctagcaagttgtcatcagtgaagttgctggttgcacgaacaagttcatagtatgagatcagctgatagttctgcaagcctgtgtctgagggtactagtatctttcttcggttgttcaccttcattcttaccaacatatacaaggacacagataaagcaaaaaatgccaggagcgaaggcgaggaaggccacacagcgcattgttccccattaatgatttgagtgtgatatttgagaacactcctccttctggtatctgtccatccaatctgttaaaagaaaggttcaagttggcaagattgagatatatcatcatgtggagttcaccaaaggagactgggatgtcacctgacagcttgtttcctgataaatccatcatggtaattgctgtcaattttccaacatcagcaggcaggaacccacttaaagagttctgtgacaagtcaagctcaataagtttctgaagatcccacagacttgttggtatggttgaagacaatgagttttgggataacgtcataatttgcagctggcttaggctactgatattgcttggaatgggaccggttagtttattgttgtcaagacgtaaacgaactaggtttgttaatccactgatttcttctgggatggtgccagacaagctgttgttggagaggtccaattcttggagactgttcatgtcagtgattggtgtagggatcttcccactcaggttgtttccactaagagacagtactgataagctggtaaggttagcaaatgtaccagggatgcttccattgatgttgttgttacctgcttgcaaaatttctaggagcgtgctatggtttccaattgaagttggtagcatccctgtgaactcattatttgaaatgacaatggtagtcaggcttctgcaattggataatgcagctaggaaatctagattcccagagagacggttcccatcaacaaagatgcgaccgagattcagcaagttgctaaatgacattggcactgatcctgtcaatctgcttctagatacgtctatttgggtaaggtccgatagattgcctatggattctggaatggcaccggttagttggttgtttgcaagacctagaaactggaggtttgtcaactgtcccagttctggtggaatccccccttgtagattgttttcactgaggtccaacacaacaagcatggtattgttgctcagctcaactgggatcattccagtcaggttattcattgacaaggctattgcagtaaggtttggaagtgttgccagccatgacggcacagggccagtgaaactgttcgcagcaacgtacagtgagtcaaggttcttgcatgcagagagtcctacagggattggcccgctgaaatggttttcttggagagacagcatttgcagcagagggaggtgaaagctcccatttccaggaatgggacctgagagattgttccgtccgacatacagtgcttggagctgcgaactattaaacaaagaaggcggcatggagcccgagaggaggtttttttctatggtgagcacctccagctttagcaatgagctgacgctatcaggaattgctcccgtcaagctattcgagccaagatatatttcactcagatcgggtgtgctgttgaacaggctctgtgggatcggtccgcttagatcattgtaagcaagatcgagaacctcgagcctagtgatgttgccaaggctgggagggatggtacctgacagtctgttgtgtgatagatcaagggtctgaagccagggcagactgccgagctcgtctggcaggggacccatgacgctggtgttgctgaggacaagggtcgagaggaaagagaggttaccgagctgtggcgtgatgctgccctggagcggcacgtcgctgaactcgaggccagtgacgcgttgcctgctgtcacaggagacccccgcccacgagcagaatgatgcagtagcagtccagttgctggcaaggatgccaagggggtccttgagcattgctttgaaggcgagcagcgcagcaaggtctgtggcactggatggtggtggggtgagtgcggtggcgctgcgtgctgcggcgacggcgagcaagatgagtaccatgcggacgcggacgaagaaggccattttggtgagagtctatgagtatgattgacagaatatggatgtggtgacgacttgactgctgctcttataagcagctttggacgtccagttggctcaagtggttggaaacgtagagcgatctgaagccgatttgtgttgaatatggtcagcaagctgtttccttttcttactcacagagtcacaggctgctgcttcttggaaataacgacttcgttcttcgaaggaactgctttcagacgtaccaactggcgagcaacttgtgctaaattaagctctttattctacccgcacattggatttgtgtggatttggtacaaagaagtccatgtatgggctttagtttggagggtttttttttttcatttagaaactacctgtgtggctcctctcctttgactactttcagcgctaaaaaatggatggaaaaaatcttctgcaaagcatattgatacccatctcctccgtaatgaagagaatatataatagaaactacctgtgagaacgaaatgaatttgtactgtgtattccattttttagataatggaaagtattaaaacgatccggcttttcccttttgcgaggttagggcgagtagtttacatcactcggaaaaacactcccaacagacaggaaggacacaaccttcagccaaaaccttaaagacaaactaattgctttaccttaaagagaaactaatttaaagcaattatattcgaaaaacgccaaccaaaatgagcaaagatatacatggccaccgtctctaacgagtttattggaaccaagatatcacgaacacagggcttcttaaaattgg

SEQ ID NO: 8426 - DNA, 3663 bp, Zea Mays
tttatattccggaaaaattcaggggcgcatttggaatatagagcttgcatgcttgagcaagagtcagggttcttcttcaatatgaagtacttcgaggagaaggtccatgctggggagtgggatgaggtggagagatacttgtcaggattcaccaaggtagatgacaataggtattcgatgaagatcttctttgagatcaggaagcagaagtatttggaagcgcttgataggcatgatagagcaaaggctgtagatattcttgtcaaggatcttaaagtcttctcgacattcaatgaggagttgtataaggagataacacaacttctcactcttgagaattttagggaaaatgaacagttgtctaagtatggggatactaaatcagctcgaagtattatgctggttgagctaaaaaaacttattgaagcaaacccccttttccgggaaaaacttgtcttccctactcttaaggcatcacgcctccgaactctaatcaatcaaagcttgaattggcagcatcagctttgtaagaaccctcgtccaaatccagatatcaaaactttattcaccgaccatacatgttctccacccaatggagctcgtgcatcgccggtatctgtaccactggcagctgttccaaagccgttccaacctccacctggtccatctttagctggttggatggcaaatgcagccgcctcttcatctgttcagtctgctgttgtagcagcagcatcaatacctgttccacccaatcaagagtctgagcaactaatgaagcgcttgaggcctggtggacatggcattgatgaggccacatatcctgctcccacccctcaacctgcatggtcagtggatgatcttccaaggacagttgcttgttcattgtcacatggatctaatgtaactagcatggattttcatccaactcggcatacactgcttctagtgggatctgctaatggtgaatttacactttatgagatcggtctgcgtgaaacattactttcaaagcccttcaaaattcgggatataaatgcatgttcaccacaatttcagaatgctgttgtcaaagattcctccatatccattaatcaagttacctggagccctgatggagaaatgattggcgttgcattcacgaaacatttgatccatctgcatggataccaaccaccaaatgagacacgacaccttctagagattgaggctcattctggaggtgtaaatgatatagcattctcccgaccaaataagcaactttgtgtggtcacttgtggagatgataaactaataaaggtatgggatatgcatggacataaattattcacatttgaagggcatgaggcacctgtgtattctatatgtccgcatcacaaagagagtattcagttcatcttctcaacttcccttgatggaaaaattaaggcctggctttatgacaatatgggatctagggtggactacgatgctcctggcaagtggtgtactactatgctatatagtgctgatggaactaggttgttctcatgtggaactagcaaagagggagactcctatttggttgagtggaatgaaagtgaaggatctatcaagaggacatattctggattccgtaaaaggtcagctggtgttgctggtgtagtgcagtttgatacagctcagaatcacattctggctgctggtgaagataaccatattaaattttgggatgttgacaataataacatgctgatctgcaccgatgctgaaggaggcctcccagctcttcctcgcttgaggtttaataaagaaggcaatcttcttgctgttactacagcagacaatggttttaagatacttgcaaatgctgatggacttagaactctacgcgcattagggagccggcctccttttgaagcatttaggccgcaatacgaagcttcttctatgaaggtctcaggtgctcctgttgttgctagcatctctcctaacataggccgaatggatcacttggataggaattctcctgcaaagccatctcctatactgaatggtggggatacagcatcaaggagcatagatataaagccaagaatctcagaagaaaagcctgataaagcaaaaccttgggaactaatggaagttctaaatccccagcaatgccatgtagcaacaatgccagaaactccagaccaagccagaaaggttgtccgacttctgtacacaaattctggtgttgggttgctagcactagggtctaacgccattcaaaggctatggaaatggagtcgaaacgaacaaaatccgagtggaaaagccacagctagtgttgtgccacaccattggcagccaaatagtggtcttgtcatgacaaatgatacagcagataccaatccagaggaggcagttccatgcattgcactctcaaagaatgattcctatgtgatgtctgcttgtggtgggaaggtttctttgtttaacatgatgacattcaaggtgatgacaacattcatgccacctccaccagcatcaacatttttagcatttcaccctcaagacaataacatcatagcaataggaatggaagattcaaccatccacatatacaatgtcagggtagatgaggtaaaaactagactcaaaggacatcaaaggaggataactgggttggcattctccaccaaccttggcatacttgtttcttcaggcgctgatgcacagctctgtgtgtggaccaatgacacctgggaaaaaaagagaacagtctcgatacaaatgccagctggaaaaactccttcaggagatacacgggtccagtttagttctgatcaaagtcacttgctagtagtacatgagactcaactagccatatatgacgcatcaaaaatggagaggatctatcagtggataccccaggacacattgtcagcttccatatcgcatgcatcatactcatgtaacagccagctagtttttgctgccttcactgatggtaacttaggtgtttttgatgcggagaacttgagattaagatgtcgaattgcaccatcggtgataaacagcaatccacctgttcaccctcttgtcgtcgccgcacatccccacgagccaaaccaatttgcggtcgggctgtcagatgggtccgtcaaagtgctggagccattggagtccgaagggaaatggggagcgcccgctccggcagacaatggcatcattcccaatggcaagacgccagcttcgtcggctactagcaaccctgctgcggatcaaatccaaagatagattgtattccctaagcttttctttttctgcaaactttctaattacactgacttatttgtatgtggatgccgttaggatattatcgtcatttgttgtaaaaaggacagaataggttttatgttcaggtgtggttaactttcaggtactaccctagttatcctgttcatggaagattatgtttgcgatacggggtaatagtgtctataaagtatgtcgcctaaggttttctcaggtttagctcgatagctcaaatgatgtaagctatatatttcttcatgaatgtaaagcaatacatagtttttgctcaagatctatttttacctggttttacatagtttttgctcaagatctattttacctggttttttaatatagcgtgtgttcatcgaaaaagaggaa

SEQ ID NO: 8427 - DNA, 4059 bp, Zea Mays
catagcttctctctctcccccaaccttctcttccacatctccgcttctctctcgcctccgcttcgcttcgcgagagacgggccgacgacggaaccctaggattcgcgcccgcctgagcggccaagccaccaggaccgcgccctccggacccgggggcgccagacaagctccggggcgcgcggatcgaccactggccggcttaccgccgccgctgccatgtcgtcgctcagccgcgagctcgtcttcctcatcctgcagttcctcgacgaggagaagttcaaggagaccgtgcacaagcttgagcaagagtcagggttcttcttcaatatgaagtacttcgaggagaaggtccatgctggggagtgggatgaggtggagagatacttgtcaggattcaccaaggtagatgacaataggtattcgatgaagatcttctttgagatcaggaagcagaagtatttggaagcgcttgataggcatgatagagcaaaggctgtagatattcttgtcaaggatcttaaagtcttctcgacattcaatgaggagttgtataaggagataacacaacttctcactcttgagaattttagggaaaatgaacagttgtctaagtatggggatactaaatcagctcgaagtattatgctggttgagctaaaaaaacttattgaagcaaacccccttttccgggaaaaacttgtcttccctactcttaaggcatcacgcctccgaactctaatcaatcaaagcttgaattggcagcatcagctttgtaagaaccctcgtccaaatccagatatcaaaactttattcaccgaccatacatgttctccacccaatggagctcgtgcatcgccggtatctgtaccactggcagctgttccaaaggctggtgctgcatatccaccactcacagctcatactccgttccaacctccacctggtccatctttagctggttggatggcaaatgcagccgcctcttcatctgttcagtctgctgttgtagcagcagcatcaatacctgttccacccaatcaagctgtctccatgttgaaacgcccagctctaacagactatcaaagtgcagagtctgagcaactaatgaagcgcttgaggcctggtggacatggcattgatgaggccacatatcctgctcccacccctcaacctgcatggtcagtggatgatcttccaaggacagttgcttgttcattgtcacatggatctaatgtaactagcatggattttcatccaactcggcatacactgcttctagtgggatctgctaatggtgaatttacactttatgagatcggtctgcgtgaaacattactttcaaagcccttcaaaattcgggatataaatgcatgttcaccacaatttcagaatgctgttgtcaaagattcctccatatccattaatcaagttacctggagccctgatggagaaatgattggcgttgcattcacgaaacatttgatccatctgcatggataccaaccaccaaatgagacacgacaccttctagagattgaggctcattctggaggtgtaaatgatatagcattctcccgaccaaataagcaactttgtgtggtcacttgtggagatgataaactaataaaggtatgggatatgcatggacataaattattcacatttgaagggcatgaggcacctgtgtattctatatgtccgcatcacaaagagagtattcagttcatcttctcaacttcccttgatggaaaaattaaggcctggctttatgacaatatgggatctagggtggactacgatgctcctggcaagtggtgtactactatgctatatagtgctgatggaactaggttgttctcatgtggaactagcaaagagggagactcctatttggttgagtggaatgaaagtgaaggatctatcaagaggacatattctggattccgtaaaaggtcagctggtgttgctggtgtagtgcagtttgatacagctcagaatcacattctggctgctggtgaagataaccatattaaattttgggatgttgacaataataacatgctgatctgcaccgatgctgaaggaggcctcccagctcttcctcgcttgaggtttaataaagaaggcaatcttcttgctgttactacagcagacaatggttttaagatacttgcaaatgctgatggacttagaactctacgcgcattagggagccggcctccttttgaagcatttaggccgcaatacgaagcttcttctatgaaggtctcaggtgctcctgttgttgctagcatctctcctaacataggccgaatggatcacttggataggaattctcctgcaaagccatctcctatactgaatggtggggatacagcatcaaggagcatagatataaagccaagaatctcagaagaaaagcctgataaagcaaaaccttgggaactaatggaagttctaaatccccagcaatgccatgtagcaacaatgccagaaactccagaccaagccagaaaggttgtccgacttctgtacacaaattctggtgttgggttgctagcactagggtctaacgccattcaaaggctatggaaatggagtcgaaacgaacaaaatccgagtggaaaagccacagctagtgttgtgccacaccattggcagccaaatagtggtcttgtcatgacaaatgatacagcagataccaatccagaggaggcagttccatgcattgcactctcaaagaatgattcctatgtgatgtctgcttgtggtgggaaggtttctttgtttaacatgatgacattcaaggtgatgacaacattcatgccacctccaccagcatcaacatttttagcatttcaccctcaagacaataacatcatagcaataggaatggaagattcaaccatccacatatacaatgtcagggtagatgaggtaaaaactagactcaaaggacatcaaaggaggataactgggttggcattctccaccaaccttggcatacttgtttcttcaggcgctgatgcacagctctgtgtgtggaccaatgacacctgggaaaaaaagagaacagtctcgatacaaatgccagctggaaaaactccttcaggagatacacgggtccagtttagttctgatcaaagtcacttgctagtagtacatgagactcaactagccatatatgacgcatcaaaaatggagaggatctatcagtggataccccaggacacattgtcagcttccatatcgcatgcatcatactcatgtaacagccagctagtttttgctgccttcactgatggtaacttaggtgtttttgatgcggagaacttgagattaagatgtcgaattgcaccatcggtgataaacagatcaatccgtagtgtcattgagcttactcagggcttcaggcagctggggtgcctattctgcctctgcaatccacctgttcaccctcttgtcgtcgccgcacatccccacgagccaaaccaatttgcggtcgggctgtcagatgggtccgtcaaagtgctggagccattggagtccgaagggaaatggggagcgcccgctccggcagacaatggcatcattcccaatggcaagacgccagcttcgtcggctactagcaaccctgctgcggatcaaatccaaagatagattgtattccctaagcttttctttttctgcaaactttctaattacactgacttatttgtatgtggatgccgttaggatattatcgtcatttgttgtaaaaaggacagaataggttttatgttcaggtgtggttaactttcaggtactaccctagttatcctgttcatggaagattatgtttgcgatacggggtaatagtgtctataaagtatgtcgcctaaggttttctcaggtttagctcgatagctcaaatgatgtaagctatatatttcttcatgaatgtaaagcaatacatagtttttgctcaagatctatttttacctggttttacatagtttttgctcaagatctattttacctggttttttaatatagcgtgtgttcatcgaaaaagaggaa

SEQ ID NO: 8428 - DNA, 3646 bp, Zea Mays
ccgacatgagcccgctccccgccccgctctaggaccatatctgcaccgtccggttcctcggccacacgaatctccacgcgcccgggaagaaaacattgccaccacctccggccgctccgctctttcctttcaaccggagcgacgagagtcgagagacacgaggtgccgcaagagaaaggggaaatcgcagttatcatcggggaatccgaccccaagcatcgaactgctttcgtgccgtcggctcgttcccggcatgtagctgctacttgtcagctttcaaaggtttctgcatctgcatgacgcctaatctacattgttaaaggttttctgatggatggtgataaggtgaaggaatcagctccggattgtgcgtccggtgcagcagagccaaccaagaagcaggataagaggaaacgtgcctatgctgaatttgatgtggtggacaagaaatctgtatctgctgaatggcagcaagaaatggatgcactgtataaatactacaaggaggtttctggtcatcagctgaacccagaggagctttcatgcaccacaaatgactctattatagcatgcttgctggaggagagcagtctttcttgtgccaagttaacagatggaatctacaagaggatgaagctgcaatatggtgtcactgagtcttcagtgcgcacctcagtactcaacattggtaggagatcttcatatgggatttctgctatggatgtcaatggtctggaggatgagtcggattcaagcctttggtgttgggagacagaagatttggcattattacccttgcatctacgtagtagtttgagcattcgacgcacagctcggaaattaatccataaaaggattctggttctttcgggcaagctggctaccaaagatgccagtaatgcttgtagcaaccagaacagccttatggaaaatgctggggaagcgctagatctagatgagattcgctctatcattgagtcaaaacacaagaatgatgatgacattaaaacggaggcacaagatttccaagccatcaggaaagccgtgaagaaacagcaaatgatggtggggcatattcaaactgagaaaaataagaaagaacgggaacttaggcatatctatgagaaaactgagagagaagcaaaacgcatcgagagagaaaataagcggctaaagaagcatcaggaagaagaagagagggcaaagaaaaagaaggagaaggaagaggctgagttgaaaaggaaggcttcgattcaaaagcaagcaaacctcatggaacgtttttttaaaagaaaggcggatagcaacataggaagttcagatagtcaccacatggagaggactacatgctcaaaatcaacaggaaacattgaagaacttgctgttgcagctacgtcagcaatggattgtacattatgtaaagaaaatcatttgagcatggaggaactccggatgatacatgttgcaaaatggaggacactctttcaacataacagattgcgccattggggtgttaggagaagtcctaagattcagttgtttcttgagctaaggctacaaaagccctctacgcctatagcttctgatagtatgtcaactccaacaaaagaacagtcatccctagagagcacaggaaaccttgatatcaccaagcttctggatgaacttgagataccatctcgttctcagaatagcacatcgtcttcagttttgcttgtgaagaagcttctgcagtttgataatagctctaggccagcatactacggtacctggagaaagaagagttctacagttagcgcaaggcaaccctttcagagggatgaagaactcaattatgatgttgagagtgatgaagaatgggaagaggtggatcctggtgatcctggtgaaagactctctgattatgaggaagatgatgagaaaaccatgaatgaacatgatgccatgattgatgcagaaaaggaaactgagaacagtttcatagtgcctaatgactatctttcagatgatgaggttataccataatatgtattcctaatatcaacccctgaatatgaaaaatgaaaagaaaatttaagtgacaagtcaatgcaattgctgcagatcatttaaagcatgggttattacttttaatactgaattttatttttccatgtatacaaggatcctcttaatgtgttgtaggtaggggtggtaatgggatgtagattttacactacaaactttaaggattgaatcggattaggatcggcccctattcctattcattttttaactaatttttttttagggccctaactttttgtgaaggggcatttggatcgtgatccattaccagtttaccacccctagttgtaggatgttcttcagaacagttttaatctggccaatgctaactactgattgcacctcaataaatctttgatgaaatcacctcaagtcatgttgctcttgattccttcatggcatgattggttctgcagaaccttcttttattttatgtagggcatgcaatgtgagtctgtatgtgtcagatttgatggaatcagtagcctgctgagcatccctggggttacagttgaggaacttaatgctctactgcaaaggcagaaagctcttcatatcatcacggagcatgctctcaaaatagacagacctctagtcatatgtaacctggatcataggaaacttggcctgctgaatgctgaaggtatcactggaatgctgaagatggagaaaatctgtttgcaagctctttgtatgaagaaataccctggcagccccatcattgatgtgcctgtggttaatacgaccattgaggatggattttgccgatcaaacaaaaagagccctagaacacccgtatcatccaaagccatttcagaatcagacatgcctgaatttgccaaacttgttgcatcatgccctcaagggagagtcaaactggtggagttgttacatgagacatttccatatgtctccaaggcacgacttaagaacaaagttggggagattgctgagtttaccaaaaaccggtggcaggttaagcaggatatcttggatcggtacaatttatctctttctccagataaaggtgaaggcctgaaatgtgcagcatcgtgctgctcccagcagtgccagccacccaatgagtcaggtaatacaggcgaatcttcttctccccagtgctccctgaaatccgaaatggtcaggcaacaactcggcgcacaagggtcatcacatggcagcgcacggcacccgagcaccaagatggcaggcgggcagtaagacttgtagcactgcgcatgtacatttgcctgttaggttataaaatgtactatagtatagtaatgtagtttcagtatgtagaagcctagaaaccagcaagcagcaggggccgaagcctgtttttgtgtagctcaggcagtttgtgatgaatggttcccccctgcctcccatgtaaattcacactgcttcctggtgttgttacacacctcatatgcgtttatgtgcttgtatagcagtgcactgtgcacgaggtgttcgcgctactgcagtcatctaaaaccttcgtagatattattgctgtcacttccagaatactaatttgggcctaactcttagagagcaatctatggtcttagag

SEQ ID NO: 8429 - DNA, 4516 bp, Zea Mays
ctactactgcagtgccggccatcagccgtaacatagcggcgagatgtccttcttgttccgtaaaagcgcgcccgtagccgcaggagatcgcgcgctccgtcaaggacccccctcgtcgccctcgacaccatgaccggcgcggcggcgcgaaggtatatgcgcggccctccaacatcttggtcccgcattccatccgcgtgtgcaggactgcaggctcgccgctaacgtctcgtccacccaccaaccggatcatcttgggtcctgtcaacgaggttgagttgcttttgtttctggacttgtgcggagtcccatagagatagagtcgcgtttttttggtagactcccttttcttggtgacagactgacagtactccagttctctgtcagttgacgaatgttgcttgacatcggcaagtagagattgctggtattgatgggggcattgcctgatactttgttaattgtcagggcggtttgaatggttggtctgtctctttagcttgtcgctcaaagcttcagaaaacaactgactagtggattgtaatgagggctgtgaggttgcaattgccactggattgcacatttgtgcctccatgtaggtggtggtaatggaagtttggttctacactcatttgtttgatgtagttataaagttaatcatgacagtgagatgacacttggtcttacttgttcaccacatgtataagttagcagttgtgatctttttgcaacatatcattgatctttgacatacaacaactgcaagagccagatcacttccgaatctgcacttctctcatgttcttttcaacactgttcgcatggaaatagataattagatatgtatgttgagccagctttaagtgagaacctgtttacttatttaatttacagttttagttgttctctggttgatgtgtagcccctgtatagatttcttgtgcactgagcagtgaacaccatggtacaaaaaacatgttgctcatgaatttgtgcatgctcctgttaggctcttgaggatgctgagaaaaacatacttacgtttaggcatacacttgctggtgaagtggaaccaaatcaagagcaggttctgcagatagcccttgagatttgcaaggagggtgttatttccttctttgttcagaatcttccttccttgggttgggaggtatgtttttttcttcttctgaaattcaggaggactgcatatcattgcattaatagaagaaagaaagggttgggaggtatgtatattcacaaattgagtgtgacaacctttttcactgtgttattagccttattggtgccccaacggatttcttccgtgtcttgtctccacgagaatagctatattcaacgttggctcgccaagcctatcacaacccttctcttcctttactagggcttcgaacctgctatgttgagacaacgtaggcggagttatgttgctccagtatattgaaaatcattttgatcttctggatttccttgttgtttggtaaggcctgtttctgaagttatgaattggattggaacacagggaattggagcatgctgattcgtttcttggctggaaatgggaatgcaattgcagaaatatatagataactgattgcttcctatggctatttatttttaccacttatatttgcatagttgtattattttgtgtgtttgtttgtgaaatgcatttgtagtatatgcaatagttttaccacttctacttgcattattttttttcctcaaacgcacaagagagttgcacatcattatattaagagaggagaaaaggtctaaagtggaccagagtacaaagcccggagtgcagaaaaaactggacgtaagcagtaagcaccatgaacctaacacccatgcctcctctccaacaacacaagagaagaaacataagcaaaggataaggcagacccgactagtctaaactgtagcactagaagtagccaagaccctatttaaggcaactgcaagcccaagactctcaagatgcttagcacccgccttatcccagcagatcaattaatctaaaaacagtcttttgacagtgctaatggaaggattcactccatcaaaaacaaccttgttacgaagaagccataagcaccaagcccctagaattatgacactattgaagccttttatcctgctcttatgcacttttttaagagcctttccccaccgcacagcaaaagagatctcatcaatatcaaaagtgagatcacccagtcccatgagcgacaaaatatgatgcaaaaactgtctagcaaaactgcaagtgcaaaggagatattgggttgtttcttgctcttgatcacataggggacacaccaggtattgcaatcctctcatttgaagtctatcaacagtccaacacttattccttattgacaaccaaaggaaaaacttgcattttgagggagcccaagtcttccacaatcttttcgatggctcaaatgaaatggaacccatgaagaaggctgtatagcaggacttgcattatttttgtgtgtttgtctatgaactgctcctgtagtatatgccattgtaatactcctgcgcctgactgatttaactatgttttaccagctacaagaacttggaagtaaggtttggaatatttgttcaactatattttcttttcttagtggatctgcaatagcatacagtttccagcatatatgccttcgcctgacatctgtttttttagaacctctggccctttgtagttgcatgcatggacagatatagtacataatgcattcgctaaaacaagcagtcatggaaatgtactctgtagtatgcagatgttagattttgcaaaaaaaactaaagcaaacaaacaaataaatgagttagttaattttgcaaatgattatgttttcatacatttgattttatactgctctttcagatatatattggagtcaagtagcttcgagttgtttttccagtaagttgaattgccaaacttcgatattgcttctgatgctctgaacaccttcaaggtaaatataatcttgtcaatttgatctttaaaataaaaaatggatttatgtttgcttcttcaggattgatgtttgctgttgacaagatacttgcaggatttgctaaccaaacatgaagatcaagtctctgaattcctgagctcaaattatgaacagggtacaaaaatgcgatgctttaaggcacttcgctgcatgccagtttcgttcagagtttctgttagaggccccaaatgctcaatagtgaagagtttcattttcgaagttcgttacttaaacattatggtgggtcttctgaaggtattagagtataagttccctgcttatatttaaagaatcagcaatgatattgatcacccttctcatttcctctgtttcttgatttttcacttaagtagttatgacattttagtgccattatcttgtgaaaaatggcggttgttattagcacaatagatgagagatcctgctttggcttttggatatcttgccaagcaaaggtcatcctcagagactaagatatacgtgcagaactatactcttgcaattgttctttagtgactgccagagatccggccattcagatctaaatggctttctgtttatagctaaattgcatagcaccattgttcatgttgaatactaccattttatttctctgggctatttatgtattgcttgggtaccccagtcatcttgtatctaacagtgagtattcgagcagttctcatagtttctaatacaaaagtagttcaaatattccttcttaaatgaaatgacacgcaaatctcctgcgttgtttgagagaaaaaaagtagtccaaatatacacacttgccaactagccagtgctacaaattttcttcttttaagacaaatgatgaaaacaacacaggttagtcatagatagtttgttttcatcttcataactagtggccatctttttcatgctatacacattctttttttaatgcctctactaagtactacctccgttctcgaatatttgtcgtccgctagtttatttttgacctaaaacgtgacaaataaaaaagaacggagggagtactagccagtgtcttttgtaggattcaaccaaaaatatcaggatatgttccttgcacattttgaaggtatttgttgccaatccaaacaaacctcgagagattatctcaggttttggctgacaatcacagagaactgttgaagctactccacaatctccccactagcaaaggtattactactgtattgcctaattctaacattttaattatcaaagaaatcgagaagcttgcgcggatgtcagtataaaccctcaggaaattcgaacatagctccttgatgttgatgttcaggaaccctttctcacctcaaagttctgaagacatcctgtgtaatgtgctgccctgtatggagcttgtttttcatatatggaaaagaattcgctgcaggaataaactgcactgtggtttggtgttggtaccatcgagaaaattg

SEQ ID NO: 8430 - DNA, 1398 bp, Zea Mays
ccagccgtcacggacgtgccccagccgtcacggaccgcgagtttgctctgtccttcggcgtccctaggcttcgccgccgccgagaaagcaaggattgaggctcaggtgaaggctgctgaagcagctgcacaacaaaagtttgaggaagaaatgagggtgaagcgagagcaggaaagggaagcagcacggctggcagtacgcatggtacaacctgcttgcggttttctgacctgcaagtttatatgcttgatggtatgaagggataaatctcctcttgtgcagatgaagaagactgttgatattgacaacagtgacttcctaaaggagctggagaacttcagcaaaacgtggcagtcgaatccacctggcaaattaatcgtggattttattgatggggacttgccaccggggttagggagccctctggagaggcttggcctgttcatgaagaacgatctcgaggatgaggtggaacaggaagtcgaggacagcgcatcaccctcgatggacgttgacatgaggaaagatttagcagggcatgaaatgcaagacagcatatcacccgtgaaggtcattggcacgaaggatgacttccagggagcggacattaacacgaggaaagatttccaggaagacgcagcagggcatgaaatgcaagactgcatatcagccgtgaaggttattggcacgaaggatgacttccagggagctgtagggcatgaaatggcgaacagcctatcaccatccactttcgttgacacaaagaaatattccgaagggacagaacatgagatggtggatagcatatcgcctttgatggatcctaacaccgaggaaggggagatcagctgctgacgttagctacacttgtcatccacatcatttgttgagttcgtgaggcagacatccttgctgggttgttggattaggcgacatcataagcagagtgacgaagaaacgctattcccctctggttgtgtcgtagaacaatgtggagaacatgtgtcagccgaactgagtagtggttttggctttgttgcggttttttttcctgtcgtggtcttgtcagtcgggcactccgctgtatgctgggttacctgagctcgtcagctggatgacctgtataaaaacatgatgaaattagggaggggttaatttagtgctagtatatattgtaggtgtaggactgtaggagcttatggtggagccggctgcagcacacaagctatagcattgttctcagatttggtcagcgcgccgtagtaccttgttactgtattcattctaaaacttgaataaaatgatgccagtcgcacaagttactgtaggagtagctatgacatgttatttgaaatactgtgttcggtttattcgatgaaagtgacgcttcctgagttc

SEQ ID NO: 8431 - DNA, 2773 bp, Zea Mays
ttcctccatgtgctttttttttaatacacaggagagctgcgtattaattatattaagaagaaagaaccacagcttgcacaaaacaccgcaaagaccttggaagtactcgatacaagagtaaaaagagcaagaattgcaaagatgtatctgttcctcctgacgtaaaaaaagaagtgggacaatgtttcctacatgctggttcaaagagaaacttttcagaatctcttactcaaggaaatgttgtcagtaatcacatgggtaatttctctcatttgagccattctcatggaggtgacactttagagaacaaggagagtacaattgtgaagaaaaatagatcggatggaagtgattttgaagactctcttgtttcaaaatcagatagacgcagaccgatttctcaagtattgcagagtagtgaaaacttgcttcctcacttaaagcaaaacaatgattttggggctttgttaatcaaggagaataataatccttcacttgccacctcccggtccagaagaaataaatatacatacatggctagtgattctggtgaaactcagagtcatagtgatttaccttctataaagatgactgctactggagctgattttgagaatgaaagctatcttcggcatactggttatttttctgaggagcagacttcttctgacttcgttgagaagcaagtaactgagtcttcagagagggaatgctcagaaagtgagactgaagaggatgctgaacttctgcaaaatgcaagtgtgattctacctatagaatcacatgctcctgatccgtattctgttccaatatatgagaagttcaagcatgtggattatggtgacaatgaggtggcctattctaattatatgccccagttgaatgaatctgaggaagaggatggttcttctgagctgggtgtctctcagtggcacatgaaaggtaaacgtaacaatcgtaatgccacaaagagatcagtggacatgagagatggaaatacatggttaaaaaactacaatgggtcattaaaagggtctttgcataacacaaatgatgggaatcccagaaaagaaggtatgcacacatctggtgaaaagttttttgaggaaagcatttaccaaattaaagaggaacccagttatgatgattctgatgaaactaatgtatttgaggacacgagccattcagaggctaacttgtactatggtaaaagatgcacttcattcttgagaaccacaagagatcttagtcgaagatacagttactttaatgactatgagaatgactcttcaaatgtttctcccctaaataaggacactgaacagatgtaccatgttgatcggaatgcgtattgggatggaccttcattttaccaaacgaagttgacttcacgttttggtggcatgaggccaatgttgttcaatgttaacctcaaagttcaggctagctaccaaggagagcatgtccctcttgtctctttaatgagcagacttaatggcaaagcaattgttggacaccctatccaaattgaaatagttgaagatggttccacagatcatctgatattatgtggtgacagtggtatgcaagagagctcagctgctccacctgcttggccaacaggtagaaggactgccatgcaaagagttccccgttcaaatccatcaggagcactgttggatggcgataatgaaggtggtcttgtgtattctgattatgagatgaaaccaaccaagttgtacacttcttccaatcatcaggttaaggtgaataagaaaagcagttcaaatactaggaggtcagtagctaagtcccaaaagaagtcatccaagaaaacaaacctctcaagccagaaacgtagagttctctcttccatttccactgcaaaaaaacatcatggagaaggtggccgagcaaaggcacattggcgtaatgacatattgggtggtttaatcagatcagaaggagttcctctagtgacatgtgtcccaacgaaggttgtgttcactaggatattggaagcagttggcaggccacctctatctgtcgttcaccgtgttagaatgactagtccttcagtgcgagatcctccgtaggcttcaactgtagtgctatatatggttatatgttgccagccattgacatgcaagtttgatgtacattctgttaattgaagaggcagaccattcaatcatccggtagcacctgtgaagagtcagattgatatggttgctctaaaataacttggaacagctgagctcttattagcagtggtaacctgtaaaaatcaataacgcttgtgtatttctgactggagactgatcatgaatgcttcagagcagcttgtgtatttctgactggagacagatcatgaatgattcagagcagctgagccgttgataccatgaaggggtactctttgatgtagctaggagtctaggactggtggctgtcttttggtttcgtcacaactgtttactgtaaagtactaacttaagcattttaggtgtcaatttagttaaaacatttgtgtcatcatatatagcaataggtcataggttttctaatgacatgtataatcccccaattatatcctgatgtatctgttatttgttgtcgagatgtagttgattcagctgtatgtttagaagcatgtgtatctagtcgatgtaatatatcagagcaagtactccaacatccaaatggtgtaacaacctagtcatccatgtgaagattcctccatagacattgtgaacaaaaagatcattccata

SEQ ID NO: 8432 - DNA, 3597 bp, Zea Mays
caggaaccaaactaccccaaagaaaagaaaacctttttatttcacctttttcctcaaaaaagagagggaaatcatattccagggccgcccgcgccggaaccgaccacttcgccggcagcgagccggagactacgcggagcccctatccccgcgccggcgtgggcggagggaggagaaggagcagcagcagcagcagaaggataaaggggggctttgggagcctctgagaagaagattctagaagctacctgaggcgaggcgagcgcgccgcggcacgagtgatctcggtggaataagtcgcgcggggccggcgccgtgggggatgcgcctctggatgccgacacgctccgggatttgaatggtagccagatctcgagggggaggggagcttctcgaagcggggtaaggcgcgcggtctggttggccggcggttagggtttggcgggagcgggatggtggggagctcggtggagggaggagcagacggagatgggggctgctgcggcgtcggggacacctcgcccgggaccatcgtgtgggtgcggcggaggaacgggtcctggtggcccggcaggatcctgggccctgaggaactcccaccgtcgcagatcatgtcgccgaggtccggtacgccggtcaagctcctcggccgggaagacgcaagcgggattggtacaaccttgagaaatcaaaacgtgttaaagcattcaggtgtggagagtttgatgcctgtattgagaaggcagaggctacgcaagggactcttgtgaagaaaagagagaaatatgcacggagagaagatgctgttcttcatgcacttgaattggagaggaaacagtttgcatcgaagtatcagattcaaggtttcagacctggaccatctggtaatatttctgcttgcacaaaacaccgcaaagaccttggaagtactcgatacaagagtaaaaagagcaagaattgcaaagatgtatctgttcctcctgacgtaaaaaaagaagtgggacaatgtttcctacatgctggttcaaagagaaacttttcagaatctcttactcaaggaaatgttgtcagtaatcacatgggtaatttctctcatttgagccattctcatggaggtgacactttagagaacaaggagagtacaattgtgaagaaaaatagatcggatggaagtgattttgaagactctcttgtttcaaaatcagatagacgcagaccgatttctcaagtattgcagagtagtgaaaacttgcttcctcacttaaagcaaaacaatgattttggggctttgttaatcaaggagaataataatccttcacttgccacctcccggtccagaagaaataaatatacatacatggctagtgattctggtgaaactcagagtcatagtgatttaccttctataaagatgactgctactggagctgattttgagaatgaaagctatcttcggcatactggttatttttctgaggagcagacttcttctgacttcgttgagaagcaagtaactgagtcttcagagagggaatgctcagaaagtgagactgaagaggatgctgaacttctgcaaaatgcaagtgtgattctacctatagaatcacatgctcctgatccgtattctgttccaatatatgagaagttcaagcatgtggattatggtgacaatgaggtggcctattctaattatatgccccagttgaatgaatctgaggaagaggatggttcttctgagctgggtgtctctcagtggcacatgaaaggtaaacgtaacaatcgtaatgccacaaagagatcagtggacatgagagatggaaatacatggttaaaaaactacaatgggtcattaaaagggtctttgcataacacaaatgatgggaatcccagaaaagaaggtatgcacacatctggtgaaaagttttttgaggaaagcatttaccaaattaaagaggaacccagttatgatgattctgatgaaactaatgtatttgaggacacgagccattcagaggctaacttgtactatggtaaaagatgcacttcattcttgagaaccacaagagatcttagtcgaagatacagttactttaatgactatgagaatgactcttcaaatgtttctcccctaaataaggacactgaacagatgtaccatgttgatcggaatgcgtattgggatggaccttcattttaccaaacgaagttgacttcacgttttggtggcatgaggccaatgttgttcaatgttaacctcaaagttcaggctagctaccaaggagagcatgtccctcttgtctctttaatgagcagacttaatggcaaagcaattgttggacaccctatccaaattgaaatagttgaagatggttccacagatcatctgatattatgtggtgacagtggtatgcaagagagctcagctgctccacctgcttggccaacaggtagaaggactgccatgcaaagagttccccgttcaaatccatcaggagcactgttggatggcgataatgaaggtggtcttgtgtattctgattatgagatgaaaccaaccaagttgtacacttcttccaatcatcaggttaaggtgaataagaaaagcagttcaaatactaggaggtcagtagctaagtcccaaaagaagtcatccaagaaaacaaacctctcaagccagaaacgtagagttctctcttccatttccactgcaaaaaaacatcatggagaaggtggccgagcaaaggcacattggcgtaatgacatattgggtggtttaatcagatcagaaggagttcctctagtgacatgtgtcccaacgaaggttgtgttcactaggatattggaagcagttggcaggccacctctatctgtcgttcaccgtgttagaatgactagtccttcagtgcgagatcctccgtaggcttcaactgtagtgctatatatggttatatgttgccagccattgacatgcaagtttgatgtacattctgttaattgaagaggcagaccattcaatcatccggtagcacctgtgaagagtcagattgatatggttgctctaaaataacttggaacagctgagctcttattagcagtggtaacctgtaaaaatcaataacgcttgtgtatttctgactggagactgatcatgaatgcttcagagcagcttgtgtatttctgactggagacagatcatgaatgattcagagcagctgagccgttgataccatgaaggggtactctttgatgtagctaggagtctaggactggtggctgtcttttggtttcgtcacaactgtttactgtaaagtactaacttaagcattttaggtgtcaatttagttaaaacatttgtgtcatcatatatagcaataggtcataggttttctaatgacatgtataatcccccaattatatcctgatgtatctgttatttgttgtcgagatgtagttgattcagctgtatgtttagaagcatgtgtatctagtcgatgtaatatatcagagcaagtactccaacatccaaatggtgtaacaacctagtcatccatgtgaagattcctccatagacattgtgaacaaaaagatcattccata

SEQ ID NO: 8433 - DNA, 2544 bp, Zea Mays
cgccccggcgcctccccggaacgacctcccacgtggtgggccctcccccgcgttccacctgttttctccgttgacagcgcatcgagccttgcactgcccccactttccagtgtcacttgcgtaactcacctcgctgggtggggcccaccgggagccccgtgcgccgcgcgcgcgcgaggggtcaaactaccgccgcgttgtcgcgctcatcgtcgccgcgtgctgtggtctgctgctcctgctgctacccctcaatctccccgcaccgcacctcacctcccccagctcctcctcttcctctaattgctacacgctttcgaggctagggttgcctcgtcctcctcgctgtccacatggcgcgaatcctcatgcggctcctcctcctcgccgcggcggcggcggtggcggcgggggacggctgcctcaactccggctgcgtcgcgctgggctcctacctcgtcgcccggaaccagaacctcacctacatcgccagcctcttcggcatcggcgactaccacgcgctggcgcgctacaaccccggcaccacaaacctggactacatccaggccggccagagcgtcaacatctccttcacctgcggctgccacacgttccccaactcggacgccacctacctcggcggctccttcccgcacaaggttgtcaccggcgacacctacggcggcatcgcccagaactacaacaacctcacctccgccgcctggcttgccgtcaccaacccgtatcccacgaacaacatccccgacaccaacaccgtggtgaacgtcacggtcaactgcacctgcggggacccgaagatctcgtcggactacgggttcttcctcacctacccgctcatgggccagaccctcgccgccgtcgccgccaactacagcttcaactcgtcgtcgcagttggacctgctccgcaagtataaccccggcatggacaccgctacatccgggctcgttttcatccccgtcaaagatggcaatggaagttaccatcctttaaaaccaccaggaaacggaggttctataggagctatagtaggaggagttgttggtggtgttgctattctggtcctgggcgtcttgttatatatcatgttctataggcgaaaaaaggcaaacaaggctgccttacttccatcttctgaagattctacccaacttgtcaagctgatagtagctctggagttccaggaattactgttgataaatcagtagagttctcgtatgaagaactttttaatgccacagagggatttagcatgagtaacaaaatcgggcaaggtggttttggtgctgtctattatgctgagctcaggggcgagaaagctgccataaagaaaatggatatgcaggcttctcacgagttccttgctgagttaaaagttttgacacatgttcatcatttgaatctggtgcgcttgattggtttttgcaccgaaagttccttgtttcttgtctatgagttcatcgagaatgggaacttaagccagcatttgcgtggaactggttatgagcctctgtcttgggctgccagggttcagattgcactagattcagcaagaggtcttgagtacattcatgaacatactgtcccagtgtacatacatcgggacatcaaatcagcaaatatcttgatagacaagaactaccgtgcaaaggtcgcagattttggtttaacaaaacttacagaagttggtaatacatcactacccacacgtggaatcgtgggcacatttggttacatgcctcctgaatatgctcggtacggtgatgtttctccaaaggtcgatgtttatgcctttggcgttgtcctctacgaacttatttcggccaaagacgccattgtcagatcaaccgagtcttccagtgattcaaagggattggtttatctgtttgaggaggctctcaacacaccggatcccaaggaaggccttcaaagactgattgatccggcgctcggcgaggattaccccatcgactcgatcctcaagatgacggtcctggcaagggcgtgcacgcaggaagaccccaaggcaaggcccacgatgagatccatagtggtggcgctgatgacgctgtcgtcaaccagcgagttctgggacatgaacgcgatccaggagaaccaaggtgtcgtgaacctcatgtccgggagatgactcctgtccctgtgggctgtggtatatattattgtacgtcctacctgccttcccctgggcaattgtacattagggctcatttgtacggcccgttgacggccagagaggagggccactgtaggtatttacaatgtaatatcttgtcactcaagggttttctcccgtgtttaggctccctttggaacaaaaaggaaatttcctgaacctgtgttttttgctgtattttttaactaatttctatgaaattcttatagcattcatgtgaaattcctgcattctaaaggatcggaaggtcgttgagagccgcgtgtgagttactggggttatgtacaactctgaagatacttataaaagttattaatatttacttattt

SEQ ID NO: 8434 - DNA, 3302 bp, Zea Mays
cgccccggcgcctccccggaacgacctcccacgtggtgggccctcccccgcgttccacctgttttctccgttgacagcgcatcgagccttgcactgcccccactttccagtgtcacttgcgtaactcacctcgctgggtggggcccaccgggagccccgtgcgccgcgcgcgcgcgaggggtcaaactaccgccgcgttgtcgcgctcatcgtcgccgcgtgctgtggtctgctgctcctgctgctacccctcaatctccccgcaccgcacctcacctcccccagctcctcctcttcctctaattgctacacgctttcgaggctagggttgcctcgtcctcctcgctgtccacatggcgcgaatcctcatgcggctcctcctcctcgccgcggcggcggcggtggcggcgggggacggctgcctcaactccggctgcgtcgcgctgggctcctacctcgtcgcccggaaccagaacctcacctacatcgccagcctcttcggcatcggcgactaccacgcgctggcgcgctacaaccccggcaccacaaacctggactacatccaggccggccagagcgtcaacatctccttcacctgcggctgccacacgttccccaactcggacgccacctacctcggcggctccttcccgcacaaggttgtcaccggcgacacctacggcggcatcgcccagaactacaacaacctcacctccgccgcctggcttgccgtcaccaacccgtatcccacgaacaacatccccgacaccaacaccgtggtgaacgtcacggtcaactgcacctgcggggacccgaagatctcgtcggactacgggttcttcctcacctacccgctcatgggccagaccctcgccgccgtcgccgccaactacagcttcaactcgtcgtcgcagttggacctgctccgcaagtataaccccggcatggacaccgctacatccgggctcgttttcatccccgtcaaagatggcaatggaagttaccatcctttaaaaccaccaggaaacggaggttctataggagctatagtaggaggagttgttggtggtgttgctattctggtcctgggcgtcttgttatatatcatgttctataggcgaaaaaaggcaaacaaggctgccttacttccatcttctgaagattctacccaacttgctactacatccatggataaatctgccttgtcaaccagtcaagctgatagtagctctggagttccaggaattactgttgataaatcagtagagttctcgtatgaagaactttttaatgccacagagggatttagcatgagtaacaaaatcgggcaaggtggttttggtgctgtctattatgctgagctcaggggcgagaaagctgccataaagaaaatggatatgcaggcttctcacgagttccttgctgagttaaaagttttgacacatgttcatcatttgaatctggtgcgcttgattggtttttgcaccgaaagttccttgtttcttgtctatgagttcatcgagaatgggaacttaagccagcatttgcgtggaactggttatgagcctctgtcttgggctgccagggttcagattgcactagattcagcaagaggtcttgagtacattcatgaacatactgtcccagtgtacatacatcgggacatcaaatcagcaaatatcttgatagacaagaactaccgtgcaaaggtttgcctggttcatggtttttttttaaacatgtttcctgaatgcttgatgaaataattatgtctaccttccaggtcgcagattttggtttaacaaaacttacagaagttggtaatacatcactacccacacgtggaatcgtgggcacatttggttacatgcctcctgaatatgctcggtacggtgatgtttctccaaaggtcgatgtttatgcctttggcgttgtcctctacgaacttatttcggccaaagacgccattgtcagatcaaccgagtcttccagtgattcaaagggattggtttatctggtaatcaactcttttactttctgttcatggggaaaagaccagtggtctagttaagcacacgggtgctagttctggtattggtttggcttccattgtcatttctcttagatgctggagtttgtggccaatttatttgtgaaaaggggaaaaaaactttcaggtcttgtgcttcactaccatgagggtatttgttacttcccagtgtaaaatttgcataagtagtttaggtggtgtttgaatgcgctaaagctaatagttagccgctaaaattagctgaagactttcaaacagtctagctaatagttcagctattagctacttttagcaaattagctaatagttgctagctaattccactagtaatttttttgtcaactaactattaggtctagtgccttcaaacacccccttagtacatcctgttttgaataattgttttcacctgatcatcttttattctttctctcgtttgttgtcatatgtgttcgtgaatgattaggctgtagacaatggagcaaactcttttcttcttcttcttgccagcaatatttgtaacagtacggcttccaaagctatatatatagtagtacaggctttggatgctttcctgcttgatgactcaccagtcatgataccgcaaagtgcagtttgaggaggctctcaacacaccggatcccaaggaaggccttcaaagactgattgatccggcgctcggcgaggattaccccatcgactcgatcctcaagatgacggtcctggcaagggcgtgcacgcaggaagaccccaaggcaaggcccacgatgagatccatagtggtggcgctgatgacgctgtcgtcaaccagcgagttctgggacatgaacgcgatccaggagaaccaaggtgtcgtgaacctcatgtccgggagatgactcctgtccctgtgggctgtggtatatattattgtacgtcctacctgccttcccctgggcaattgtacattagggctcatttgtacggcccgttgacggccagagaggagggccactgtaggtatttacaatgtaatatcttgtcactcaagggttttctcccgtgtttaggctccctttggaacaaaaaggaaatttcctgaacctgtgttttttgctgtattttttaactaatttctatgaaattcttatagcattcatgtgaaattcctgcattctaaaggatcggaaggtcgttgagagccgcgtgtgagttactggggttatgtacaactctgaagatacttataaaagttattaatatttacttattt

SEQ ID NO: 8435 - DNA, 3346 bp, Zea Mays
gcaaaagtatactgtttgttaggaaactacgagttgattccaagcatggaaactctaccaaatggctcagtaaataatgctgagcttaaccaggaaaatgagaagtccatgtatgctagtgagtctgaagaagcacgggatatttttgtttacagagaagatgttgtgagcttgaagtccaaggaggatgtccgtggtgtagtattggaggtagctggggaatatgattatgatggtagcatcactgatgatgacattgatactgaggaacatgaagataaaactgcttatggagctgaaaatggtgttgccgatggtggcttgcagtgcagtttggggcccggggagcccggtgcctccacatttgttcttgtggcttacgattatatcgaaagcggaggagcttttggggatccatacaaactctacggtgtctcacagagtcagaaactattaccaaacaaaacagaagatgatagcatgtcgatacaactagaaacgaagggagatcagcaatctgttcctctagaggagcagaacccagaggaccttactcttttgtctcgtttctcatatacaaactggcaattaactgactggtgtctttctcagcgatacacttcatgtactaacgataccatgattgattctgataagcatacatggcagatatgtacatgctcagaaaactcagttccactgtctggtattccagaatctcaagctgatgctcagattgatacagatacaggtcacaggcagacagatgttgattctactgcagatgtattgagtatgtcggatggagataattcatgcatagccaaagaatcagaaacaggaactagtgcatcaagcatctcaaatgagggtccacaggacaatgcaacatctagaaaaaagtttaggaaagatgggacaaaggaatgtggagtagccgcaacagcattgatccctatccacagtccaaatgaacatgaattcttcccggagcagtatgttgtggataaagtcacaaatgatgttggtgttgatgattcttctgaaccaaggcgtgtgggtcttgttagaggtgttaatgctaaggaccgaacagcaactgtgtcatggtttaagcctcctctacatccagaggagccaaaggagatcgcatgtaacgaaattgtgagtgtatatgaactggatgtccatccagattatgattattgctatggagatattgttgtccgcttgccgcctgttaaaccggtaattgagtcaaccaatagcaaggaacaaatggaactggataagacgttagattcctcggaaggatttgctgcttcatattctgcaccccctgatactagtgcagacgaacagctttcacagaaggaatcctgcttgcagtttacaagcctctcttgggctggaaatatagttggctttcaagacggtgagattgaagtcatttggggtgatggatcgatttctaaggttggtcctcatgaaatatatgttgttggtcgtgaagatgatggtgcctcactagatgatggaacagcctctgatggttctagctgggagactgttgatgacaacgaaatggatgtacttcatgattctgcaaagggtgattcgcaaaatgtacctgagaatagcattggaagggaaaatggttcattcagctcccaggatggaagttctgttgcaactggtcccctttcagttgcttttgagtttgtgacccgactggcgagtgatctctttgctcgaggtagaaggcatttagatggatcatcagatgctatggatgaagttgagtctcactggtctaatgagatttcagaaattggtgatgacattgataagtgtaataagaatcatgtggaatcaccagagcatgctgcagtcatagaaaatgattcttctgtcgagaagtctgtagatgtggttatggctgataatcctgtacattctgaatgtttcaaacactttgatgttctgcaatgtcctctagaccaccactaccttgaaaacacaacccagggtacaggtggaaaaaagtgggtcaaaaaggtacaacaggaatggagcatacttgagaagaacctaccagactatatttatgtcagggtatttgaggatcgcatggatctcttgagagccgtgattgttggagcaagtggaacaccctaccaagatggccttttcttctttgatttccaccttccacttgagtatccgctagtccctccgtcagcatactatcattctggtggtttgcgtgtaaatccaaacctgtatgtggacgggaaggtttgcttgagtctcttaaatacctggactggcagagggaacgaagtttgggatccatcatcatcaagtattctccaagtactagtttcacttcagggattggttctcaatgaaaaaccctattttaatgaggctgggtatgagaagcaagttggtactgttgaaggggagaagaatgcagtgccgtataatgagaatacgtacctgctgagcgtgaaatccatgctgtatatattgagacggcctcctttgcattttgaggattttgtgaagagccacttccgcaagcgtggtcactacatccttaaagcttgccacgcctatttgcaaggaaatgttgttggcactctcaccgacgacgcgtgcaccaccgacagaagcaaagagcactcgagctctgttggcttcaagcttgtactagcaaagattttaccacggttgattacagccctgaaggacactggagctgactgcgaccaatacgagcacctcgggagaacagaaaccgttacagaaagctgatcattgagtgatttgtacttgattcttttgctttttctctgttttttggggtttcagaaagatggtgacttcaccaccaggctgttttcctataaatgtacattcaaagtttgttgtttcagtcaaacatttggaaaatttggcccaaatgatttagggggggggggggggggggtttgaagtcactagagataatagttagttagctaaaaattgttagtgttattagctagctaactattaccaaatttgctaaaagtatctaatatctaaactattagttagactgtttggatgtcttggctaattttagcagctaactaatagttttagtgcatttaaacacctcttattcgttacatggaactgaactacactgtacagctgatgtttggttaaacttgtaccagcgaagagttggcaatactggaaccaggcctagagattcctggaacagagatttgatgtccatgtatttacgggtggtattggtttcacgaatatacactcgcgggggataaaaaac

SEQ ID NO: 8436 - DNA, 3587 bp, Zea Mays
gaaggcacacaggacacagccgccgccgtttcttcttctcccatcatctccctcgcagcgccggcgctccatcttccgctccctccctttactcgcgctcggtaagcaggcgacggcggcggtgctcaggtttgggctctcagcgacggtgtcagcggcttcccttcccgcctctcgctggtcgcctcgcgccctcgcctccggtcctccgcgcaccggccggtgaccctacttgaatagagggctattaattgtttggaatctacttttgtagttgattccaagcatggaaactctaccaaatggctcagtaaataatgctgagcttaaccaggaaaatgagaagtccatgtatgctagtgagtctgaagaagcacgggatatttttgtttacagagaagatgttgtgagcttgaagtccaaggaggatgtccgtggtgtagtattggaggtagctggggaatatgattatgatggtagcatcactgatgatgacattgatactgaggaacatgaagataaaactgcttatggagctgaaaatggtgttgccgatggtggcttgcagtgcagtttggggcccggggagcccggtgcctccacatttgttcttgtggcttacgattatatcgaaagcggaggagcttttggggatccatacaaactctacggtgtctcacagagtcagaaactattaccaaacaaaacagaagatgatagcatgtcgatacaactagaaacgaagggagatcagcaatctgttcctctagaggagcagaacccagaggaccttactcttttgtctcgtttctcatatacaaactggcaattaactgactggtgtctttctcagcgatacacttcatgtactaacgataccatgattgattctgataagcatacatggcagatatgtacatgctcagaaaactcagttccactgtctggtattccagaatctcaagctgatgctcagattgatacagatacaggtcacaggcagacagatgttgattctactgcagatgtattgagtatgtcggatggagataattcatgcatagccaaagaatcagaaacaggaactagtgcatcaagcatctcaaatgagggtccacaggacaatgcaacatctagaaaaaagtttaggaaagatgggacaaaggaatgtggagtagccgcaacagcattgatccctatccacagtccaaatgaacatgaattcttcccggagcagtatgttgtggataaagtcacaaatgatgttggtgttgatgattcttctgaaccaaggcgtgtgggtcttgttagaggtgttaatgctaaggaccgaacagcaactgtgtcatggtttaagcctcctctacatccagaggagccaaaggagatcgcatgtaacgaaattgtgagtgtatatgaactggatgtccatccagattatgattattgctatggagatattgttgtccgcttgccgcctgttaaaccggtaattgagtcaaccaatagcaaggaacaaatggaactggataagacgttagattcctcggaaggatttgctgcttcatattctgcaccccctgatactagtgcagacgaacagctttcacagaaggaatcctgcttgcagtttacaagcctctcttgggctggaaatatagttggctttcaagacggtgagattgaagtcatttggggtgatggatcgatttctaaggttggtcctcatgaaatatatgttgttggtcgtgaagatgatggtgcctcactagatgatggaacagcctctgatggttctagctgggagactgttgatgacaacgaaatggatgtacttcatgattctgcaaagggtgattcgcaaaatgtacctgagaatagcattggaagggaaaatggttcattcagctcccaggatggaagttctgttgcaactggtcccctttcagttgcttttgagtttgtgacccgactggcgagtgatctctttgctcgaggtagaaggcatttagatggatcatcagatgctatggatgaagttgagtctcactggtctaatgagatttcagaaattggtgatgacattgataagtgtaataagaatcatgtggaatcaccagagcatgctgcagtcatagaaaatgattcttctgtcgagaagtctgtagatgtggttatggctgataatcctgtacattctgaatgtttcaaacactttgatgttctgcaatgtcctctagaccaccactaccttgaaaacacaacccagggtacaggtggaaaaaagtgggtcaaaaaggtacaacaggaatggagcatacttgagaagaacctaccagactatatttatgtcagggtatttgaggatcgcatggatctcttgagagccgtgattgttggagcaagtggaacaccctaccaagatggccttttcttctttgatttccaccttccacttgagtatccgctagtccctccgtcagcatactatcattctggtggtttgcgtgtaaatccaaacctgtatgtggacgggaaggtttgcttgagtctcttaaatacctggactggcagagggaacgaagtttgggatccatcatcatcaagtattctccaagtactagtttcacttcagggattggttctcaatgaaaaaccctattttaatgaggctgggtatgagaagcaagttggtactgttgaaggggagaagaatgcagtgccgtataatgagaatacgtacctgctgagcgtgaaatccatgctgtatatattgagacggcctcctttgcattttgaggattttgtgaagagccacttccgcaagcgtggtcactacatccttaaagcttgccacgcctatttgcaaggaaatgttgttggcactctcaccgacgacgcgtgcaccaccgacagaagcaaagagcactcgagctctgttggcttcaagcttgtactagcaaagattttaccacggttgattacagccctgaaggacactggagctgactgcgaccaatacgagcacctcgggagaacagaaaccgttacagaaagctgatcattgagtgatttgtacttgattcttttgctttttctctgttttttggggtttcagaaagatggtgacttcaccaccaggctgttttcctataaatgtacattcaaagtttgttgtttcagtcaaacatttggaaaatttggcccaaatgatttagggggggggggggggggggtttgaagtcactagagataatagttagttagctaaaaattgttagtgttattagctagctaactattaccaaatttgctaaaagtatctaatatctaaactattagttagactgtttggatgtcttggctaattttagcagctaactaatagttttagtgcatttaaacacctcttattcgttacatggaactgaactacactgtacagctgatgtttggttaaacttgtaccagcgaagagttggcaatactggaaccaggcctagagattcctggaacagagatttgatgtccatgtatttacgggtggtattggtttcacgaatatacactcgcgggggataaaaaac

SEQ ID NO: 8437 - DNA, 2604 bp, Zea Mays
cgggccggaccggcccaatcgaagttttacgagccaaaacgtgaaagtgtcgtccagccagccacgtggctccggcagggcagagcgtttatccaactcggctctcagcgactgcccaccaccaccactgaggattcctcttccggcggcggcggcggcggcagcgatgctcctcctgcgcgccaacgcgctcgccgccgtaccggtgtccttctccataacgccggcggcctcctatagctgcttcccctggccgtcttcatccaccactgccgcgagctgctccgtcggctcctctgccaggctcgacgccgccgtgcagtacgacccgctccgccccggctccgatgcgtgggcccatcccgacggcatggtcaccgcggagggtgacgaggagaaacagcgctatgacacggagggggagtccaacgactgggaaggggaagggccccaaggatcatcagaccccgagggcatcaacgtgccgcgccagcgctacatcgccgtccccaaggaggccctcctcgatgctgtcctctcgcagttcgcgtccgacgacgacgacgccgcggacttcaagcgctgcgccagatgcttggacgccatccttcacgccgagcacaagaggatgctcgaggagatgcgcacctcctacatgctcacgcaacgccaccgggacgaggaagaggagcaggatgacactgacaccgcctcgggctcggactacgtcaacggcaaagccggctccggatttttcggcatcacccaactggatggcacgttgttccttactagaagcgtggacttgagaactctgctcggattgaccccagaccccgattcccagaccaggcgtggatacgcgactgagaggcagaaaggcctcctgttggttgagaaacttgattacttgcaatcaaaactcttgcagaatgtctttttcagcctctccaaacccttgaaaaagccagggaaatggcttaatgagttcctggcaggctttgaaaagatcaacagataaccagggatttcagatctggatagacaaactgagactatggcttaaagagcaaacttatgcagataattcactgctgttgatagaaagctcttcatgggacaagcttagttctgatcagttacctgatgcagatgttcctatttggatcgctgcacaaagggcagtctctcgttatgaaggaattttgtcacctgttggtcctcgtggaagactgttaagaagattgcttaaatggactggactaataccttctctgccagaagcaacgataaaatccaacaatgaaactaaacatcttgaaggacatgtgaggccaaactttctaccaagaattacccttgctaatatatgggaacctgcaagcagagaatcttgcaataacaatatctgggagatggtgaaagcttcttttcgtattctgtttgggaggtctactcttcaggaaccagcattccaggagttaatactactttacactgatgaagttgttccaagtgaaacgaaggacgagatggttccgctgcaactgaaaatttatgagaggattccgatcccagatttgccagtagttttcccccacaagaaattgtccttccgcatcctagatacagtaaggctagatattgctactgtaataggtctattggcatatgtggtgaactacaaatttgagagtttagcctcatctccgtcagctttttcttcttgatatagttgctggtactgcactcgtcatacttgttttccgtgtagcactgggctacaaacagacccgggataggtaccagcttctggtgaataaaaccctctatgagaagacattggcaagtgggttcggctcggtttacttccttctcgatgcttctgagcaacagcaggttatattcatcactgagcagtacaaagaagcacttttggcatatgccatgttgctctgcagaaagaagtatgaggtctcatctcgtgcaagcataagagatgcatgcgagcagtttatgcacgagaaattcgaggcaaagattgagatgccgatcgacaaggcaatggagacactgctgcggttggggctggtgattgagcttcccactgatggtgggtcgagcgtgattggtctcccatgctcggaggcatacaggatcctgaaaagccgttgggacggcttgctggaacaagatacagaacaaggctgattagaacgagacatgtacgttggtggcttggagtggagtgggatgggatgccgtgctggtacatactcgacgcgtcggcaaagctcactcttgtttgtatgtatacgtaccagttgttgcagcaagtgtatatgtgctagctacgtgcatgtataatcgtgatctagtttgttgtacacaaacgattgcagtgtatgtatatgggagcacatgtttttttcggaagactagccatgtgtctgtaagtttttctatttgtaagttggtttccatttataaatatagagcataaacactgttctgttagctaggtgagtatcctcataattatagcataattttagttttttatcatttaaatatatgaaattttagttttttatcatttaaata

SEQ ID NO: 8438 - DNA, 2612 bp, Zea Mays
cgggccggaccggcccaatcgaagttttacgagccaaaacgtgaaagtgtcgtccagccagccacgtggctccggcagggcagagcgtttatccaactcggctctcagcgactgcccaccaccaccactgaggattcctcttccggcggcggcggcggcggcagcgatgctcctcctgcgcgccaacgcgctcgccgccgtaccggtgtccttctccataacgccggcggcctcctatagctgcttcccctggccgtcttcatccaccactgccgcgagctgctccgtcggctcctctgccaggctcgacgccgccgtgcagtacgacccgctccgccccggctccgatgcgtgggcccatcccgacggcatggtcaccgcggagggtgacgaggagaaacagcgctatgacacggagggggagtccaacgactgggaaggggaagggccccaaggatcatcagaccccgagggcatcaacgtgccgcgccagcgctacatcgccgtccccaaggaggccctcctcgatgctgtcctctcgcagttcgcgtccgacgacgacgacgccgcggacttcaagcgctgcgccagatgcttggacgccatccttcacgccgagcacaagaggatgctcgaggagatgcgcacctcctacatgctcacgcaacgccaccgggacgaggaagaggagcaggatgacactgacaccgcctcgggctcggactacgtcaacggcaaagccggctccggatttttcggcatcacccaactggatggcacgttgttccttactagaagcgtggacttgagaactctgctcggattgaccccagaccccgattcccagaccaggcgtggatacgcgactgagaggcagaaaggcctcctgttggttgagaaacttgattacttgcaatcaaaactcttgcagaatgtctttttcagcctctccaaacccttgaaaaagccagggaaatggcttaatgaggctttgaaaagatcaacagataaccagggatttcagatctggatagacaaactgagactatggcttaaagagcaaacttatgcagataattcactgctgttgatagaaagctcttcatgggacaagcttagttctgatcagttacctgatgcagatgttcctatttggatcgctgcacaaagggcagtctctcgttatgaaggaattttgtcacctgttggtcctcgtggaagactgttaagaagattgcttaaatggactggactaataccttctctgccagaagcaacgataaaatccaacaatgaaactaaacatcttgaaggacatgtgaggccaaactttctaccaagaattacccttgctaatatatgggaacctgcaagcagagaatcttgcaataacaatatctgggagatggtgaaagcttcttttcgtattctgtttgggaggtctactcttcaggaaccagcattccaggagttaatactactttacactgatgaagttgttccaagtgaaacgaaggacgagatggttccgctgcaactgaaaatttatgagaggattccgatcccagatttgccagtagttttcccccacaagaaattgtccttccgcatcctagatacagtaaggctagatattgctactgtaataggtctattggcatatgtggtgaactacaaatttgagagtttagcctcatctccgtcagctttttcttcttgatatagttgctggtactgcactcgtcatacttgttttccgtgtagcactgggctacaaacagacccgggataggtaccagcttctggtgaataaaaccctctatgagaagacattggcaagtgggttcggctcggtttacttccttctcgatgcttctgagcaacagcagtacaaagaagcacttttggcatatgccatgttgctctgcagaaagaagtatgaggtctcatctcgtgcaagcataagagatgcatgcgagcagtttatgcacgagaaattcgaggcaaaggtgaaagatgacggatacattattgtttccgttctcatgattgagatgccgatcgacaaggcaatggagacactgctgcggttggggctggtgattgagcttcccactgatggtgggtcgagcgtgattggtctcccatgctcggaggcatacaggatcctgaaaagccgttgggacggcttgctggaacaagatacagaacaaggctgattagaacgagacatgtacgttggtggcttggagtggagtgggatgggatgccgtgctggtacatactcgacgcgtcggcaaagctcactcttgtttgtatgtatacgtaccagttgttgcagcaagtgtatatgtgctagctacgtgcatgtataatcgtgatctagtttgttgtacacaaacgattgcagtgtatgtatatgggagcacatgtttttttcggaagactagccatgtgtctgtaagtttttctatttgtaagttggtttccatttataaatatagagcataaacactgttctgttagctaggtgagtatcctcataattatagcataattttagttttttatcatttaaatatatgaaattttagttttttatcatttaaata

SEQ ID NO: 8439 - DNA, 4181 bp, Zea Mays
gccagaaccgccagatgctgcgaaggcgcagagcccggagcacccagcagcgacctgttccgttggcgttggctcaccacccgaccaccgtgcgcgcgagcaaagagagcccctgcccccctgctgctctccgcgcccactgttccctcttcatccaggcacaggtgacacgggcacctgttcacctttgcagggccctgagcccctgcggccggcctgtagccctgaactgatgaacctgcagttgcagctcattttgcaagacacggacagctctctccttttcgtgctccctttgctcccttttctttcagtcgcttcacactccacggactcgagctttggctttgtggcgcctgtgaatctgccaacaaagaaaggactgaagggggagggaggagagggctgatccaagtgctttcacccatctgcttgtttctccatttgttggcctgcaatggcggggagcttcgacctgaggacgccaaccagaggcgtcgagcaggatgagacaacattaatatggtactcaaaagggagggaaaaacacttgagcttaagctccgtgtcagctgtggttcttggccagaagacgataaaatttctgcgacagcgttgtccagagaaggaaccccattccttttcacttatatacaaaaacggagagcgctcacttgacttgatctgcagcgatagagatcaagctgaaaactggtatctgggcttgagggccctattaccaactccttgtaatccatgttcatcaattgaatcaaggagcagtaggcagatcgacagttgtacaaatactcccagcagctatattcagcttaagagtaagttactaagtgtgcatggcacaccaaggcacatacaggtatgttcatcgcaaaggaagcccaagaaggcacacggaacattttttggtggtagcgctgattgttcagaatcattattttacacaaggcagcgaacattctctgacataggtacctacttggaaaatcttacacgcaagatgtcaaatccagaaatacatgatttgaaggatgttatggttggtaaccaagaaaaggagcagaaaattacccaaacacctaaactgaaaacctttgaaggaccccgtgcagcatgtaggttagattctctgaaggatgtttttttctggggtgatgcttttggaagtattttagagtgtggtgatacctcaaaaccccttccaatgttagtggactcaacgaacatgcttgatgtacaaagcattgcttgcggagagactcatgcggccataatcactaagcaaggagaggtctactcctggggaaatgagagcagtggcagaattggaaatcaagtaaatatcaaagtctcccggcccaaggtcgttcaatctcttgcctctttacatgtgaaggatgtggcctatggatcaaagcacacttgtgcagtaactgtttctggtgaacttattgaatggggagaaggaccctatatgggccagttggacagctatgcgaggaatcaatggtttccgcataaattgtttagtccactggacggcatatctgttgtgaagattgcttgtggtccttggcacacagcaataataacgtcttctggtcagttatacacatatggggatggaacatttggtgttcttggtcatggagatacacaaggaactacccggcctaaagaagtagagtctttgaaaggctcaagagtgaaatgtgtggcatgtgggccatggcacacagctgccattgtggaagtgatcagtgatttcaagagcaattcaccaagaagcaagctgttcacatggggcgatgcagatcgggggaagctgggtcatgctgacaaaaagatgaagcttataccaacatgtgttgattcactcacagactatgattttattcaggtgtcctgcgggacggcactcactgttgctctctctgttactggtgtggtctttactagtggcagttcgatgcatgggcaattagggaacccccatgcagatggtaaaactgtttctgctgttgaaggactacttaagagcgagtttgtcagacatatatcatcaggttcttcccatgtagcagtggtgactacaaatgggaaagtgtttacatggggtaaaggcaaggaagggcagcttggtttaggtgacttccttaataggagcactccaactttagtagatgcattggaaggtaggcatgtggaaagcctatcttgtggttacaactacactgcagcagtatgtctgcataaagtaatctcaaggaaggacctctctgtatgtagtggttgcaagatggcttttggtttcactagaaagaagcacaactgttaccattgtggatccatgttctgtaattcctgtagtagtaacaaggttgccaaggcagcacttgcaccagataagagcagaaggtatcgtgtgtgtgatgggtgtttcagtcagctactgaaagttgtggattctggtaaggtaaagtctgaactaaataccagcaaaggagctgaaattataaggtcatacacaccaaagttgtctcgtatattcagggatgtaaacttacctgtggaaaaggaaaaggtggctttagtacaacgctccaatcagagaaatgaggtcctgtacactccagtccaagcgaaatctcagagatgggggcaagttgagtgcccagctcaatttctatctgcagaagacagttctcattatcaatctatatcgaagaatcacatgtatagtgcctctgtttccgagagaatgcatgaccccacagtgctgaagtctggcagatctttgcaacagcctaatgatgaccagaggaaagatcttaacagcatagaagaaaccttgctcactgaagaagtaaagcagcttcgttcacagatgacacttctcatggagcaataccatcagaaagctcttcaggttgaactgtataaacaaaaactcgatgagacatggctaattgttaggaatgaggctgcaaaatgcaaagctgccaaagatatcataaaggttctaactgatcagtgtaaggccttgtcagagaaacttttggtcggtcagcaatatgagaaccttgagacaaaatctaatatcagccaaggacaaacattttcagcagatttgcaacatcatcccagtgaaaaatttgccacaggcaaattcggacaactcgacaacaccaaaaatcaccagaccagcagccaaggagacgaagaatatacaccttcttcaagttctgatgtgcaggtagaaggattgtgtggtcatttgaatggttcaagaacatttgacagtaatggccgtattacagaagggaattccattgttgctcgcgtcacctccaatggtgtgatcgagcaaatcgagcgtggggtgtatgtcacatttgctgtatcaccttgtggcaagaaagacataaaacgtgtacgattcagtcggaagcattttggcgagaaggaagctcaacactggtgggaagagaataagggcagcgtctatgcaaagtacagcactgaaaaagcgcaacatcagctagaggttacaatcaagagtgtacaagagtaaccacaagttggattgggttacctactgctgagcaagatgaaaaaatgacatggagcaaataagatgatattaacggaacagataactgaccgtcctttttcaatgaaaataggcagtttaacttattgtagatacgaatgtacagataagaatgagtgaatgacggctggatgcctcctttcttttctccatttcctcctgattcagttggcatgatctagtctgatgaacaatgcagtgctgaattgaaccagtatcagtcgtaattttctggcagaaagtagaatttgttcagtattagttgtttcccttgattcttcagagcaactaaacctgcaacaatggaagtttcagacacaaagctaatagttgtcagcgttcatattctgacggagaaagcatccaactgaaaacagttctaacactcggcgccaataggaaggcaaggcttatcctttcgagtctccaccataccaccaccaacaatggcgagcattcacgccggctttgcctccaccatcgttgcttgcagaagctttagcttcactatcgtggcatgcccctccccctcgcccgcgcattgtacggc

SEQ ID NO: 8440 - DNA, 2590 bp, Zea Mays
cgaaaccccagcaagcaaacgctagagtgtagacggactgagggagagccctcctcgtctcctccgcccctcctccaggtttgcgtgagatcggcgagcgaatcacgcacacagctgtaggatggagtggggatttgctgtctctccctcttgattgcagtttaatcctttccatttcatccgtccgttcctcgtccacccgagtccgttgaccgttgaagtacagtgggacagggagcaaccgccatcatccctgttcgtcatctctcccaccatcaacaccaacatgggcagcaacacggaaagggccaggaaggcgttgggcgccatgaagctgatcggtttctctaagaagcaggccatcccagtactcaaggaactcctcaaaatcttcaacaacaactgggagcccattgaggatgagagctaccgtgccctcgcagatgccatcctcgataggcaagacagcaagcaaacccctccctcccaacagggcacccaagcagcccatgcggacttggagcctcttagatcaacaagggacgatcggcaacaatatctttctgctagccttgatgacacatgtgaagatgataatgaaacacccctggtcaagaggcccaggatgggcaccgctaatttcagaccagagctgcagccaccacagcaatccagtgtttcaacccaaggtgctctgcctgcttcaccacaaacgagtcgtcggcaaactcggtccttgactgtagagccacacgctgctggccatgaatatcctttagctgtcaacgatgctctagttgtgaaagaacccaaaccagaaccacaaattgatagagcagaagattttgtggctggtcctaatgccacacaactcaatgatggatcttcagaacaaacttcgggttttggtgcaagaggcaacatagttcaccaagctcaaagtcttggcaggagcctgcaagcagccgcagtgtgcaagaatggggtagggtctacagttcaaaatactcatgagacttcgattgtggaggtggacgttgcttcctcagccaatggtgaggtgaagatgtcattgaaatgcagcttgggttcttcaaatttcagcattagtatggaggaggttttcaaaatggtggaggagaagtgccttcactcatacaagatgctaccttcagatctttctattggcaagctgctgagtgagaaccttgtttgcagaattcacttgttgcttggaatcctgagttggctcactgtaatcaaaagacaacccatgatactactgatatatccaaaggcgaagagcggcgccagttccatgttcttgtgcaagaataacagggggcgagttctcctatacacttgagggcctgcttaagacagcattccttgatgaatgtacctcagtgaatcatttcctacaagagcaccataggttctactgtccagtttgccctcttgaaagatctaagaacgaaggctcacctggtccatgtaaaggtcatattgtcagaaaattcattaaagaatgctggagtaaatgtggatgtggcatgcagtgtggaaaccgtgtgattcagcgtggtataacatgcaaattacaggtgttctttacacgtgagggtaaaggctggggagtacgcacagtggaagatctcccaagaggtgcctttgtctgtgaatatgttggagagatactaacaagtgctgaattgcatgaaagagcaattgagaatgcaagaaatggtaagcatatgcatcaagtgctcctggacgctggttggggttcaggtgtagtattgagggatgaggacgcttgtagccttgatggttcattttatgggaatgtcgggcggtttatcaaccaccgatgctacaatgcaaatttagttcagatccctgtagaagttgagacgcccgatcatcattatcaccatctggcatttttcacgaacaagaaagtggaggcatttgaagagttaacttgggattatggcatcgattttgatgacatggaagggcccagtaaaccgttcagatgcatgtgtggaagtagatactgccgcgatccgaacaatccaaggaggatgggtagagcagctgctaagcgaaagtaggcagggagcgcggacttggttggagttgagcacaccaacttttgctgtgggggggtctggtttcgtgtttgatgtggagtaatgcagtaccatcacctcagctagtattaagtgtagataggtgtggatgattttggtgaatggtgttatggacggaaatgctgcaggctgagcgacctagtaacctatgccatgtagtggcatctaaattagcctgggattgtgtatgcgtaaaaagaacgcctaagacttaaccatgttattatgtcagcttggtacatggtgataaaaagaatctgaccatttcatgtcagccacaattcttgggacggtcggagagtgaactagtatgtcgctggtgcgttgcaggcctgtttggttgtatgcatattgtctaaaattagttgctcaaattgttgtcacatcttagcacgcgtaagtgaatcttcctttatttttaaaattcactgacg

SEQ ID NO: 8441 - DNA, 2596 bp, Zea Mays
aaacgctagagtgtagacggactgagggagagccctcctcgtctcctccgcccctcctccaggtttgcgtgagatcggcgagcgaatcacgcacacagctgtaggatggagtggggatttgctgtctctccctcttgattgcagtttaatcctttccatttcatccgtccgttcctcgtccacccgagtccgttgaccgttgaagtacagtgggacagggagcaaccgccatcatccctgttcgtcatctctcccaccatcaacaccaacatgggcagcaacacggaaagggccaggaaggcgttgggcgccatgaagctgatcggtttctctaagaagcaggccatcccagtactcaaggaactcctcaaaatcttcaacaacaactgggagcccattgaggatgagagctaccgtgccctcgcagatgccatcctcgataggcaagacagcaagcaaacccctccctcccaacagggcacccaagcagcccatgcggacttggagcctcttagatcaacaagggacgatcggcaacaatatctttctgctagccttgatgacacatgtgaagatgataatgaaacacccctggtcaagaggcccaggatgggcaccgctaatttcagaccagagctgcagccaccacagcaatccagtgtttcaacccaaggtgctctgcctgcttcaccacaaacgagtcgtcggcaaactcggtccttgactgtagagccacacgctgctggccatgaatatcctttagctgtcaacgatgctctagttgtgaaagaacccaaaccagaaccacaaattgatagagcagaagattttgtggctggtcctaatgccacacaactcaatgatggatcttcagaacaaacttcgggttttggtgcaagaggcaacatagttcaccaagctcaaagtcttggcaggagcctgcaagcagccgcagtgtgcaagaatggggtagggtctacagttcaaaatactcatgagacttcgattgtggaggtggacgttgcttcctcagccaatggtgaggtgaagatgtcattgaaatgcagcttgggttcttcaaatttcagcattagtatggaggaggttttcaaaatggtggaggagaagtgccttcactcatacaagatgctaccttcagatctttctattggcaagctgctgagtgagaattcacttgttgcttggaatcctgagttggctcactgtaatcaaaagacaacccatgatactactgatatatccaaaggcgaagagcggattgttgtgctgattgttctggcaactgtttatcagcgccagttccatgttcttgtgcaagaataacagggggcgagttctcctatacacttgagggcctgcttaagacagcattccttgatgaatgtacctcagtgaatcatttcctacaagagcaccataggttctactgtccagtttgccctcttgaaagatctaagaacgaaggctcacctggtccatgtaaaggtcatattgtcagaaaattcattaaagaatgctggagtaaatgtggatgtggcatgcagtgtggaaaccgtgtgattcagcgtggtataacatgcaaattacaggtgttctttacacgtgagggtaaaggctggggagtacgcacagtggaagatctcccaagaggtgcctttgtctgtgaatatgttggagagatactaacaagtgctgaattgcatgaaagagcaattgagaatgcaagaaatggtaagcatatgcatcaagtgctcctggacgctggttggggttcaggtgtagtattgagggatgaggacgcttgtagccttgatggttcattttatgggaatgtcgggcggtttatcaaccaccgatgctacaatgcaaatttagttcagatccctgtagaagttgagacgcccgatcatcattatcaccatctggcatttttcacgaacaagaaagtggaggcatttgaagagttaacttgggattatggcatcgattttgatgacatggaagggcccagtaaaccgttcagatgcatgtgtggaagtagatactgccgcgatccgaacaatccaaggaggatgggtagagcagctgctaagcgaaagtaggcagggagcgcggacttggttggagttgagcacaccaacttttgctgtgggggggtctggtttcgtgtttgatgtggagtaatgcagtaccatcacctcagctagtattaagtgtagataggtgtggatgattttggtgaatggtgttatggacggaaatgctgcaggctgagcgacctagtaacctatgccatgtagtggcatctaaattagcctgggattgtgtatgcgtaaaaagaacgcctaagacttaaccatgttattatgtcagcttggtacatggtgataaaaagaatctgaccatttcatgtcagccacaattcttgggacggtcggagagtgaactagtatgtcgctggtgcgttgcaggcctgtttggttgtatgcatattgtctaaaattagttgctcaaattgttgtcacatcttagcacgcgtaagtgaatcttcctttatttttaaaattcactgacg

SEQ ID NO: 8442 - DNA, 2659 bp, Zea Mays
gtcagaattcactcatctctcttcccgtggttcgaatgtggttgaccccctgccgattggccttgttctaccgcttcaagccaccttccatttcgtctaggcacttgtttccaatactagttcttgtgggacagggagcaaccgccatcatccctgttcgtcatctctcccaccatcaacaccaacatgggcagcaacacggaaagggccaggaaggcgttgggcgccatgaagctgatcggtttctctaagaagcaggccatcccagtactcaaggaactcctcaaaatcttcaacaacaactgggagcccattgaggatgagagctaccgtgccctcgcagatgccatcctcgataggcaagacagcaagcaaacccctccctcccaacagggcacccaagcagcccatgcggacttggagcctcttagatcaacaagggacgatcggcaacaatatctttctgctagccttgatgacacatgtgaagatgataatgaaacacccctggtcaagaggcccaggatgggcaccgctaatttcagaccagagctgcagccaccacagcaatccagtgtttcaacccaaggtgctctgcctgcttcaccacaaacgagtcgtcggcaaactcggtccttgactgtagagccacacgctgctggccatgaatatcctttagctgtcaacgatgctctagttgtgaaagaacccaaaccagaaccacaaattgatagagcagaagattttgtggctggtcctaatgccacacaactcaatgatggatcttcagaacaaacttcgggttttggtgcaagaggcaacatagttcaccaagctcaaagtcttggcaggagcctgcaagcagccgcagtgtgcaagaatggggtagggtctacagttcaaaatactcatgagacttcgattgtggaggtggacgttgcttcctcagccaatggtgaggtgaagatgtcattgaaatgcagcttgggttcttcaaatttcagcattagtatggaggaggttttcaaaatggtggaggagaagtgccttcactcatacaagatgctaccttcagatctttctattggcaagctgctgagtgaggtatgccaatctgttgtgcagttgggcactatgcattctgaggttaatagggacagtggcagcttgcataatgaagtagttgttccatttgtgaagccaatctcttgtgaggctgctgtgggcataagtgatgatgtggctggtgggtcatcagtccttgaatcctcagaaccttgtttgcagaattcacttgttgcttggaatcctgagttggctcactgtaatcaaaagacaacccatgatactactgatatatccaaaggcgaagagcggcgccagttccatgttcttgtgcaagaataacagggggcgagttctcctatacacttgagggcctgcttaagacagcattccttgatgaatgtacctcagtgaatcatttcctacaagagcaccataggttctactgtccagtttgccctcttgaaagatctaagaacgaaggctcacctggtccatgtaaaggtcatattgtcagaaaattcattaaagaatgctggagtaaatgtggatgtggcatgcagtgtggaaaccgtgtgattcagcgtggtataacatgcaaattacaggtgttctttacacgtgagggtaaaggctggggagtacgcacagtggaagatctcccaagaggtgcctttgtctgtgaatatgttggagagatactaacaagtgctgaattgcatgaaagagcaattgagaatgcaagaaatggtaagcatatgcatcaagtgctcctggacgctggttggggttcaggtgtagtattgagggatgaggacgcttgtagccttgatggttcattttatgggaatgtcgggcggtttatcaaccaccgatgctacaatgcaaatttagttcagatccctgtagaagttgagacgcccgatcatcattatcaccatctggcatttttcacgaacaagaaagtggaggcatttgaagagttaacttgggattatggcatcgattttgatgacatggaagggcccagtaaaccgttcagatgcatgtgtggaagtagatactgccgcgatccgaacaatccaaggaggatgggtagagcagctgctaagcgaaagtaggcagggagcgcggacttggttggagttgagcacaccaacttttgctgtgggggggtctggtttcgtgtttgatgtggagtaatgcagtaccatcacctcagctagtattaagtgtagataggtgtggatgattttggtgaatggtgttatggacggaaatgctgcaggctgagcgacctagtaacctatgccatgtagtggcatctaaattagcctgggattgtgtatgcgtaaaaagaacgcctaagacttaaccatgttattatgtcagcttggtacatggtgataaaaagaatctgaccatttcatgtcagccacaattcttgggacggtcggagagtgaactagtatgtcgctggtgcgttgcaggcctgtttggttgtatgcatattgtctaaaattagttgctcaaattgttgtcacatcttagcacgcgtaagtgaatcttcctttatttttaaaattcactgacg

SEQ ID NO: 8443 - DNA, 2764 bp, Zea Mays
ggactgagggagagccctcctcgtctcctccgcccctcctccaggtttgcgtgagatcggcgagcgaatcacgcacacagctgtaggatggagtggggatttgctgtctctccctcttgattgcagtttaatcctttccatttcatccgtccgttcctcgtccacccgagtccgttgaccgttgaagtacagtgggacagggagcaaccgccatcatccctgttcgtcatctctcccaccatcaacaccaacatgggcagcaacacggaaagggccaggaaggcgttgggcgccatgaagctgatcggtttctctaagaagcaggccatcccagtactcaaggaactcctcaaaatcttcaacaacaactgggagcccattgaggatgagagctaccgtgccctcgcagatgccatcctcgataggcaagacagcaagcaaacccctccctcccaacagggcacccaagcagcccatgcggacttggagcctcttagatcaacaagggacgatcggcaacaatatctttctgctagccttgatgacacatgtgaagatgataatgaaacacccctggtcaagaggcccaggatgggcaccgctaatttcagaccagagctgcagccaccacagcaatccagtgtttcaacccaaggtgctctgcctgcttcaccacaaacgagtcgtcggcaaactcggtccttgactgtagagccacacgctgctggccatgaatatcctttagctgtcaacgatgctctagttgtgaaagaacccaaaccagaaccacaaattgatagagcagaagattttgtggctggtcctaatgccacacaactcaatgatggatcttcagaacaaacttcgggttttggtgcaagaggcaacatagttcaccaagctcaaagtcttggcaggagcctgcaagcagccgcagtgtgcaagaatggggtagggtctacagttcaaaatactcatgagacttcgattgtggaggtggacgttgcttcctcagccaatggtgaggtgaagatgtcattgaaatgcagcttgggttcttcaaatttcagcattagtatggaggaggttttcaaaatggtggaggagaagtgccttcactcatacaagatgctaccttcagatctttctattggcaagctgctgagtgaggtatgccaatctgttgtgcagttgggcactatgcattctgaggttaatagggacagtggcagcttgcataatgaagtagttgttccatttgtgaagccaatctcttgtgaggctgctgtgggcataagtgatgatgtggctggtgggtcatcagtccttgaatcctcagaaccttgtttgcagaattcacttgttgcttggaatcctgagttggctcactgtaatcaaaagacaacccatgatactactgatatatccaaaggcgaagagcgggtaagaatacctgtagtaaatgaatttggcagcgagacctgtcctccatccttttattacataccaagaaatcttgtcttccaaaacgcttatgttaacatctcgatttctcgaatttgtgatgaagattgttgtgctgattgttctggcaactgtttatcagcgccagttccatgttcttgtgcaagaataacagggggcgagttctcctatacacttgagggcctgcttaagacagcattccttgatgaatgtacctcagtgaatcatttcctacaagagcaccataggttctactgtccagtttgccctcttgaaagatctaagaacgaaggctcacctggtccatgtaaaggtcatattgtcagaaaattcattaaagaatgctggagtaaatgtggatgtggcatgcagtgtggaaaccgtgtgattcagcgtggtataacatgcaaattacaggtgttctttacacgtgagggtaaaggctggggagtacgcacagtggaagatctcccaagaggtgcctttgtctgtgaatatgttggagagatactaacaagtgctgaattgcatgaaagagcaattgagaatgcaagaaatgatgctacaatgcaaatttagttcagatccctgtagaagttgagacgcccgatcatcattatcaccatctggcatttttcacgaacaagaaagtggaggcatttgaagagttaacttgggattatggcatcgattttgatgacatggaagggcccagtaaaccgttcagatgcatgtgtggaagtagatactgccgcgatccgaacaatccaaggaggatgggtagagcagctgctaagcgaaagtaggcagggagcgcggacttggttggagttgagcacaccaacttttgctgtgggggggtctggtttcgtgtttgatgtggagtaatgcagtaccatcacctcagctagtattaagtgtagataggtgtggatgattttggtgaatggtgttatggacggaaatgctgcaggctgagcgacctagtaacctatgccatgtagtggcatctaaattagcctgggattgtgtatgcgtaaaaagaacgcctaagacttaaccatgttattatgtcagcttggtacatggtgataaaaagaatctgaccatttcatgtcagccacaattcttgggacggtcggagagtgaactagtatgtcgctggtgcgttgcaggcctgtttggttgtatgcatattgtctaaaattagttgctcaaattgttgtcacatcttagcacgcgtaagtgaatcttcctttatttttaaaattcactgacg

SEQ ID NO: 8444 - DNA, 2431 bp, Zea Mays
ggatgattactgctctcagttggtcatctggtattcatggttcatggcattggacagaggctggagaaagctaatcttgttgatgatgttgttgatttccgtcgtgtaactgctaacctagctgaaagatacttaacttcgtatcaaagaagtacccagagggttctatttataccctgtcagtggaggaagggcttgaagctcagtggtgaaagtactgttgagaaactcactttggatggagttaagggccttcgagtcgcattaggtgccacagttcatgatgttttatattatatgagtcctatctactgtcagcatattattgactcggtctcgaaccagttgaacaaactgtacatgaaatttctaaagagaaatcctggttacagtggaaaggtttcattgtatggccactcgttaggaagtgttttgtcgtatgatatactttgtcatcaagaatccctttgggccccatttccaacagagtatctgaacatggaaacatctgatcgaaatcaaggagcaaaatcagccaatgaagctgatctgcatgattcaggcgcaaaggatcatgatacttctagtctagggtattcttgtgctgataatgaaaacagtgtcattgatgaagatagcaccagaactgacgtgtcatgtatggacagcatcctcccatcatgtgtgcttgaggattcaccaaataaccatgacactgtcgtgcctcgtggtgcggttgttgctgatcaaaatggagaagaaaagaaggttgagaattatcagtcggtgtatgctgaggaaggaacaacttcaggtgtaatcacaaaaaaggctgaaggatcaagcatttcaagatctgctaaggaagtccatgaagaggtcctcgacaaagaaaaattgatggtccttgccaaagacaaattgatcctttcactagaagaagaggtgaaatgtcttaaagctaaactagatcagcttgaacaacataatcatctagtgactgaaaacaccagtggtgttgagtatcatgaagggcaaaattataatcatgccttgaactctggcaaacttttcgtggcacaagaaagtacaaaccagtcctactcaccgcaaatcaaatacacgaaactaaactttaaggttgatacattctttgctgttggatctcccttgggtgtcttcctttccctgcgtaatgtccgtattggtattggcaaaggacaagactattggcaagataagaacgtaattgaagagatgccatgctgccggcagatgttcaatatttttcatccttttgaccctgtagcatacaggtgggcttttatacagaattgaaccacttgtatgtgaagattatctaaagaagcgtcctgtaattgttccctaccatagaggcggaaagaggatacatgttggagtgcaggagttcagagaagatatttctgcacgttctcaagcaattgcccgtcaattgaagtcactgaaggtcaaagcagtagctgctatactagcattgagcagaaatgacacagaagaggatggtgagagtgctaatgagaaagaaaaatcatatggttccattatgatggaaaggttgaccagttcaccgaatggtcgaattgatcatgtgcttcaggagaaaacatttcagcatccatatctatctgctttgggagctcataccaactattggcgagatcatgatactgctctcttcattctcaaacatttgtatcgtgatatacccgaggatcctccaagcgatgtcattgaaaggatgcctattaaactattttatgagagagatccagttgaggaagaaacgcctgtgacgttttcagatcatgcagcaattaaggaattctgcagaaaggtgaaagcttactcaagaaaaatggaggatgatgccaactgccaagcctcgtgatggatttttagtctctcgttacggcctcacacgttcctgggcaagcagaagcaagatgcagacatgggaaggaagaacgaatcgtgatcccaagaaaagaatccacgagatgcagttccacgcttcacgccagaatcagagcacttggagaatgttgtacggagtagagtcggttgccttgctcgttcctacatttataatgcagtgttgtacatagaacgtccgactgtagttttgtgcatcttgaacgtaatgttatgctgcctgctttaaatgctacagaatatatttttgcttttgcatccctagtgtgcgtcaattgcaaagtggttagctcctacttatttagcatgtcttttcattatgtctatcatgggcaaaagtactacataaaaaaggactcgcttagggcccggttgattttttttttttgaaagtttaggtattacaaagacctagttttatagctaaagcgatgcaaaaccaccgtgatttcaaaag

SEQ ID NO: 8445 - DNA, 3004 bp, Zea Mays
catcgtcagagggaggaagagctgcttgcgtactggtggagggagtacgctgaatgcagtgcaggaccaagaggatccttggttgaaagtgatgattctgcatatctttataaggttgaggaagagcgggttggggttcctgtgaaaggtggactatatgaggttgatttgatgaggcggcattgcttccctgtgtactggaatggggaaaaccggcgtgtcttgagaggccactggtttgctcgcaaaggtggcgtcgactggattcccgtgcgcgaggatgtctctgaacaacttgagttagcgtataattgtcaggtctggcatcgtcggaaatttcaaccttcaggcctatttgcagcaagggttgaccttcaaggaagtacaccggatttgcatgctctttttactggagaggatgatacttgggaagcttggcttgtctttgatacaggtcctaagtttggtagcaacacaatcaaattaagacgcggatatttctgttctgaatctgcaagtacaaagccttcacaggatgaattgcgtcagaaaaaagaagaggaaatggatgattactgctctcaggttccagttggtcatctggtattcatggttcatggcattggacagaggctggagaaagctaatcttgttgatgatgttgttgatttccgtcgtgtaactgctaacctagctgaaagatacttaacttcgtatcaaagaagtacccagagggttctatttataccctgtcagtggaggaagggcttgaagctcagtggtgaaagtactgttgagaaactcactttggatggagttaagggccttcgagtcgcattaggtgccacagttcatgatgttttatattatatgagtcctatctactgtcagcatattattgactcggtctcgaaccagttgaacaaactgtacatgaaatttctaaagagaaatcctggttacagtggaaaggtttcattgtatggccactcgttaggaagtgttttgtcgtatgatatactttgtcatcaagaatccctttgggccccatttccaacagagtatctgaacatggaaacatctgatcgaaatcaaggagcaaaatcagccaatgaagctgatctgcatgattcaggcgcaaaggatcatgatacttctagtctagggtattcttgtgctgataatgaaaacagtgtcattgatgaagatagcaccagaactgacgtgtcatgtatggacagcatcctcccatcatgtgtgcttgaggattcaccaaataaccatgacactgtcgtgcctcgtggtgcggttgttgctgatcaaaatggagaagaaaagaaggttgagaattatcagtcggtgtatgctgaggaaggaacaacttcaggtgtaatcacaaaaaaggctgaaggatcaagcatttcaagatctgctaaggaagtccatgaagaggtcctcgacaaagaaaaattgatggtccttgccaaagacaaattgatcctttcactagaagaagaggtgaaatgtcttaaagctaaactagatcagcttgaacaacataatcatctagtgactgaaaacaccagtggtgttgagtatcatgaagggcaaaattataatcatgccttgaactctggcaaacttttcgtggcacaagaaagtacaaaccagtcctactcaccgcaaatcaaatacacgaaactaaactttaaggttgatacattctttgctgttggatctcccttgggtgtcttcctttccctgcgtaatgtccgtattggtattggcaaaggacaagactattggcaagataagaacgtaattgaagagatgccatgctgccggcagatgttcaatatttttcatccttttgaccctgtagcatacaggtgggcttttatacagaattgaaccacttgtatgtgaagattatctaaagaagcgtcctgtaattgttccctaccatagaggcggaaagaggatacatgttggagtgcaggagttcagagaagatatttctgcacgttctcaagcaattgcccgtcaattgaagtcactgaaggtcaaagcagtagctgctatactagcattgagcagaaatgacacagaagaggatggtgagagtgctaatgagaaagaaaaatcatatggttccattatgatggaaaggttgaccagttcaccgaatggtcgaattgatcatgtgcttcaggagaaaacatttcagcatccatatctatctgctttgggagctcataccaactattggcgagatcatgatactgctctcttcattctcaaacatttgtatcgtgatatacccgaggatcctccaagcgatgtcattgaaaggatgcctattaaactattttatgagagagatccagttgaggaagaaacgcctgtgacgttttcagatcatgcagcaattaaggaattctgcagaaaggtgaaagcttactcaagaaaaatggaggatgatgccaactgccaagcctcgtgatggatttttagtctctcgttacggcctcacacgttcctgggcaagcagaagcaagatgcagacatgggaaggaagaacgaatcgtgatcccaagaaaagaatccacgagatgcagttccacgcttcacgccagaatcagagcacttggagaatgttgtacggagtagagtcggttgccttgctcgttcctacatttataatgcagtgttgtacatagaacgtccgactgtagttttgtgcatcttgaacgtaatgttatgctgcctgctttaaatgctacagaatatatttttgcttttgcatccctagtgtgcgtcaattgcaaagtggttagctcctacttatttagcatgtcttttcattatgtctatcatgggcaaaagtactacataaaaaaggactcgcttagggcccggttgattttttttttttgaaagtttaggtattacaaagacctagttttatagctaaagcgatgcaaaaccaccgtgatttcaaaag

SEQ ID NO: 8446 - DNA, 3062 bp, Zea Mays
cccccaccccctcccggcctcccctccctcagtccctcctcagccagtctatcgtggcccctcgcctcgctcctctgttcacacacgagcgcactcccctgtctcggtgtctcctcccctctcgctctccatgttcgcggcttccaacgccacggccacccgcctcatcctcccgcgtccttcagtcccgttccgcgcactcctcattccccgccggcggggtcgcctccgccgcgcggtccacgccaacgccgtcgcaggtggcggaggaggcagcgagggcgttgcgaaggagccgccgcggacgctattccccggcgggttcaagcggccggagatccaggtgccagcactcgtcttacgcgtcggcaccgaggaggcgctgcggtgcggggatgaggtggccgacgccgtgtcccggggcgtgggcatcgtcgtgctcgaggccggagaggagggtggaggcagatcgtacgaggccgctcgcgctctcagggccacggtcggggaccgcgcgtacctgctgatcgcggagcgcgtcgacgtcgcttccgcagtcggtgcgagtggcgtcgtgctcgccgacgacgaaggatacaatctgcaaactctgcattaagcgcttcaagttctgaaggggctgattttctgattgtaaatactggcagtggtgattttgtggatgttataaatgatgttgttggtcaacatgtgaagattccgattttcgtcacgttgaatcatttaagtgaaggaacttattctgacttcacatccaggttgctccaatctggtgcatctggagttgttacatccttagctggcatggaactcctcaatgacgatcttataaaaaaagacttcacaaaggtgggctcagctgaggaactcccacaagcgagttactcttctgctgggatgctggaagatgttaataatgtaatggtcctaactcgtgattgcgagaagactaaagttgctggatttacaaaattggatgaagaagtgataaagttgatagaaatagaaaagcctattctgaacgaagctatcactattatccgcaaggcagcaccaatgatggaggaggttgagcttctagtggatgctgcttctcgcctgagtgagccatttttgttggttattgtgggtgaatttaactcaggaaagtcaacttttataaatgctttacttggaaggcagtatcttcaggagggagttgtgcctacgacaaatgagatcacactactatcatattctgaggttgaatctgaaaactttgaacgatgtgagaggcatccagatggtcaattcatgtgctatttatctgttccaattttaaaggaaatgaatctagttgatacacctggaacaaatgttattcttcagaggcagcaacgactcactgaagaatacgtgccacgagctgatttggtgctctttgtcctatcatcagatagaccattaactgaaagtgaggttggatttcttcagtatgtccagcagtggaagaagaaagttgtatttattctaaataaattggacctctatcggaacagcaatgagcttgaagaagctactgcatttgtcaaggaaaatgcaatgaaattgcttaccgcagaggatgtcacactgtttcctgtatcttcacgctctgctctggaagccaaactttcatattccaaaaacagtgatggaaagcattcaaccgaagctatgtataatgatcctagatggagaagcagcaaattttttgaacttgaggattacttactgagtttcttagatagttcaacggaaaatggaaaagaaagggtccggctgaaacttgaaacaccaataggcattgcagatcgattgttaacttcgtgtcaaaggctggtgaaactagaatatgaaaaggctgttgaagacttagcatccatcaaggatcttgtttatggtgcaaacaattatgccatcaaacttaagtctgatagcagttcctggcagaaccagatttcgtctctcattgagagagcaaaaggtcgagcagttacactcatggaatctacacttcagctgtcaaatattgaccttatttttgcatacacgatcaaaggaaaaacaggcagttccatgagagccacatcatttgttcagaatgatattctgagtccaacccttgatgatgctgtgaatttactaggtgactactcgacatggttgagttctagcaatacccgcgaagcaaatgtatatttggagtgtttctgtgaaagatgggatgcactggttgctccggaagaaagggctctgttagatccaaatgggcttgttaatgaaggggagaaactcaccataaaggcactggaaggcttcaatgccagtgctgccgccaaagattttgaagaggaaattcgagaattggcttttggaacatttggagggctaggtattgctggactgtcagcttctctgttgacatctgttttgtcaactacccttgaagatcttcttgcccttgctctttgctcagctggcggtttttttgttttatcaagtttccctggtcggcggaagcatgcaatagacaagattaacaaggctgctgatgaactctctcgaaaagttgatgaagctatccaaaaggatatctcacagagtgctaataacctaatccgcttcgttgaggttatcagcaaaccttaccaggaagcatgtcagcgaaaaatagattggttacagggcgttcagggtgagctatctgctgtcgagcgtaagctccaaactttgaaagttgaaatccaaaatcttaatggatcataaggtttcatttcaacttgtttatttgcaattattttttggatactaatagtttttgttggtttatactgcgttgtgatgctattgagttgacgtagtgcctttcctgtatatgatgaagtctgaaagtgtaatatgtgttgtaaattcagaataagtgataaactatcacatgataattacacaccttgagaaccgagaaggatgttttgaaaacttgcctttttgataattttacaatatgatgtgggcaagaa

SEQ ID NO: 8447 - DNA, 4744 bp, Zea Mays
ccggagtagtagcaaagcaattgcatatcatcacccatcgtgcgtcgatagacgatgatgccggagtcgcatccgcatccccacgcgggggcggtgctggcgtcgacgtctagccgtcggagcctcagcttggggtcctccatctcgcagtcgttccggcagatggacacggaggaccccttcgcgcggtcgcagtcggagcatgagcaccgcgacgacgaggagaacctgcgctgggccgcgctcgagaagctgcccacctacgaccgcatgcgccagggtatcctacgccgggcgctcgaccaacaacaagagagcggcggcggcggcgtcgagatcgtcgacatccacaagctggccgccggcgacgggggccgtgcgctcctggagcgcctcttccaggacgacagcgagcgattcctgcgccggctcagggaccgaatcgacatggttggcatcgagctccccacagtggaagttcggtacgagcagttgacggtggaggctgacgtgattaccgccgggagggccctcccgacgctgtggaacgccgccaccaattttcttcagggtctcattggacgcttcggttcttcaaacaagaggaacatcaccatacttaagaatgtcaatggtatcctgaagccatccaggatgacgcttcttcttgggcctccatcctcagggaagagcacactaatgcgagcactcgctggcaaacttgacaaaaatctcaaggtctctggcagcattacgtattgtggccatccaatttcagaattctatcctgagaggactagcgcgtatgttggtcaatatgatctccacaatgccgagatgactgtaagggagacacttgatttctctaggcggtgcctaggcattggtgccagatatgagatgattacagaacttgctagaagggagcgggatgccggcattaagccagatcctgagattgatgctttcatgaaagctactgcagtacaaggacaggagactaatattataacagatctcactctcaaggtgcttgggctggacatttgtgctgatgttattattggtgatgagatgatcagaggaatttctggcgggcaaaagaaacgtgtgacaactggggagatgctaacagggccagcaacggctttatttatggacgaaatatccactggtttggatagctcgagcacatttcagattgtaaagtttatgaggcatttggtccatgtaatgaatgaaactgtcatgatctctctgctccagccaccgccagagacctacaatctttttgatgacataatcctgctatcagaaggatacatagtgtaccatgggccacgcgagaatatcctggaattctttgagtctgtcggtttccggtgccctgacaggaaaggtgtcgcagactttcttcaagaggttacttccaagaaagaccagcaacaatattggtatcttgatcaggagcaatatcattatgtatctgtacccgactttgcagaacgtttcaaatcattccatgcatgccaacagatgcagaaggagttgcaaataccttttgaaaagtccaaaacccatcctgctgcgttgaccaccaaaaaatatgggctttctagctgggaatcactcaaggcagtgatgtcaagggagcagctattgatgaagcgcaactctttcatctatattttcaaggtcacagtgttgatcatccttgcattcgtgtccatgactgtgtttctcagaacaaagatgccccatgggcaaattgctgatggcaccaaattctttggggccctgacttttggtttaataacgatcatgttcaatgggttcgctgagctacaattgaccataaagaagctaccagttttctacaaacatagggatttcttattcttccctgcatggacctttggagtggcaaacatactcttaaaagttcctatctcgctcgtggaatcagtagtatgggttgttctcacatactatgtgatgggctttgcacctgctgcaggaaggttctttcgtcagtttatagctttctttgccacacaccaaatggcaatggctttatttcggtttcttggtgctgttttgaaaacaatggttgtggccaatacttttgggatgtttgtgctgctcattattttcatttttggaggatttgtcatccgtagaaatgacattaaaccttggtggatctggggttattgggcatcacctatgatgtatagccaaaatgcaatatctatcaacgaattccttgctagtaggtgggctattccaaacaatgacacgactattgatgcaccaacagtaggcaaagcaattcttaaatccaaaggcttgtttactgaagaatggggattttggctttccattggagcccttataggattcattattttgttcaacagtctctacctttgggcccttacatatttaagtcctagtagtggctccaatgccctagtttcagaaggtgaagatgatgtaaatgaaatagcattgaaagaaagaagcagagatgcaagaagcgaagatgaaatatcccaagttgtatacggggatctaggcactaatggagcaacaaacacactagttcagtcacgagtcactttgcctttccagcctctttcactttgctttaaccatgtaaactattacgtcgacatgcctgcggaaatgaaggaacaaggattcacagaaagccgtttacaactgctctctgatatcagtggtgcttttaggccaggggttctaacagcattagttggtgtgagtggagctggaaagaccactttaatggatgtcctggcaggaaggaaaactagtggagccattgaaggagatattaccctgtccggataccccaaaaaacaagaaacttttgcccggattagtggttattgtgaacaaaccgatatccattctccgaatgttactgtatttgaatccatcacgtactctgcatggttgcgtctttcctcggatattgatgatggtacgaaaaagatgtttgtggaggaagtgatggcccttgtagagcttgatgtgttgtgcgacgctcttgtgggtctccctggagttagtgggttatcaactgagcaaagaaaaaggctgacaattgctgtggagctggtagcaaacccttcgatcatcttcatggatgagccaacttctggtcttgatgctcgagctgctgcgattgtcatgcgtacagtaagaaatacggttaacactggacgtactgtggtctgcacaatccatcagccaagcatcgacatatttgagtcttttgatgagctactgcttttgaaacgtggaggtcaggttatttatgctggtgaacttggtcgccactctcacaaattagttgaatattttgaggcgattccaggtgttcaaaagatcacagaaggatataatcctgcaacatgggcgctggaagttagctctcctctatccgaggctcgattgaacatgaattttgctgaaatttatgctaactctgtgctttataggaaaaatcaagagctcatcaaggagttgagtgttccctcaccagactaccaggacctgtcattccctacaaaatattcgcagaatttctacaaccaatgcgccgcgaacttttggaagcaataccgttcctattggaagaatccgccctacaatgctatgcgctacctgatgacatttctcttcggccttgtatttggtacagtgttctggcaaaaaggaaagaacatagattcacagcaagatttatataatctactcggagccacttacgctgctaccttctttctgggggcttcaaatagcatcacggttcagcctgttgtatcaattgagcgagcagtgttctaccgtgagaaggcagcggggatgtactctccattatcctacgcatttgctcagacgtgcgtggaggtgatctacaccatcttacaggggatactgtacacagtcatcatatatgcgacgatcggatacgactggaaagcggataagttcttgtacttcctgtttttcatgaccgcgtgcttcaactacttcgggttgttcggcatgatgttggtagcgtgcactccctccgcattgctcgccaacattctcatcacgtttgctctgcctctttggaacctcttcgctggattcctcatcgttagaccggcaataccaatttggtggaggtggtactactgggcgaaccccgtgtcgtggaccatctacggcgttgttgcgtctcagttcggcgagaaccaaggcgagctttcagttcccggtgggaagcccgtggtggtgaagcagttcttgaaggataatctcggcatccagcatgacttactcggctatgtcgtgctagtccatttcgcctacatcattgcgttcttcttcgttttcggttattccatcaagttcttcaacttccagaaacgttagctgcacctctactctctgctgtctcacacggacggtcatttgtaatctactttctcgtacgtcgaagcaaatgcttgtttgggaagcctgtttgcaagtagccaagtactagtatattctcctctagcatgttccttcaatggaaaatgttaaaaaaagatgacgaatacataaagtgacatctttgtttagatatcggtgtcgtatctgttgtaccgtaataaaaaaattgttgggactgactgacacgtggttaggtgggtccaaacgctcgaaaagggtaaacataggt

SEQ ID NO: 8448 - DNA, 2135 bp, Zea Mays
caacgctaaaaaaaccacccccagctccgttctcttccaagtggccagtgccgtctccggccaccgcccatggctatgccttcctccaccacggcggcgctctcccgcctcgtcgaccgcacccgggttccggaccccacactgcaacgccatgcggttggggccgtcttccgccacctcctctccctccccgcgcccctcccagcggccgcccacgacgccacctcagccctcctcgcttcgccccaccctgcagtcgccgcgcacgctgcggcctccatcgcccgtctcaccgccacccgccccgatctcctcccctcggatgtcgccctcccgctcctcatcgcgcccctcgcggcctcaccgtcccccctgctcgcctcctgcctcgtcaaggcagtctccgcgctcgcaacctgcgccctccgctccggctctcgcttcccggcccacgaccaccccttcatccaggcgctcgcgtcgggggctgacggcgctcgagcggagctgatgcggcaggcagccgggatggttgccgaccgggtggattgggtggtcaagtttctgaggccgttcgtgatgttctccgtggtgaggaagggggacgccgcatttgccagggatttgatcggtgcattggccgcagcagccgtggcagcagggaaggctagtgtcgcgatcccggttctgaagatgctccaagacagcatgctgcatttcggccgcggggacgatcaggaagtgcggctatggcttagttccgcagagtgtttggttgatgcttatgtcgtgctactgaggaagttagctcatggtcaaatgcctacatatgatgctcaagcaagtagtgcgacattgatggaaacactcctatcacaatattcatttcatcaaaaatttctgggaattgattcaacaatttttgggttatcaaaacatttattcttggtgcaaaaggatcttggattatgctatatacctgagatttctgttgtccttagctctctttcttactctctcactgggctagagtttgaacatgaacagctagctgccttgaaacttctgagctttttgattgattggaaatatgaaaatgtgcttgacagtaaagaacaaacacatcacgtcagtgtggagcttctctgtgttctggcagttatcaaccttaccatttcaccatccaaatctgtgaaagcagtggcatatcatgttctgtcaaggttcagcttgtttgttttagacttgccagcttctcattcatcagaggaacaagatatttcaacgagttaccacataagcaaacctgcacttcttcttcctaaacttttgcatcatctatggtccaagccatcttcatcatgcttcagttttatgaagtacatagctaccaaggcctcacctgattctggccagagtgacttggaagcaaattattggactcatcaaataaatgcctatctgacagcccttcacagagaaaagcatacattagatgtcaggtcttcaaaaacgacttcagccatatcatctctgataagctctgtagcatctgttttggtaatgcatccaaaacttggtacttctgcagcagaatctttggccatgcttggcacatcggacccaagattgggtatgccactttttgtagttatcctcttctacagcaagattctatgcagcagcggtaaattttcagcggaaatctcggcttctcttctctcctgctactgggttgaggcgctgaacacggccacctacgaggcctatgatcgatgtaaacaggttttgctgtgtctgatgatgaagtgtcgacctctgaaggtcctgctcctttcgagaccgagccccctggtgctggtgattgcgatggtcttgctggagatggtggagcacgaacatgggatcctgcaggtcccggagatgcttttgacaagtcattaccccccccccccccttagaccagcattggtaatagagggaggagtaacacacttctgtacaactggtccgggtgttgataatagatggtcatagggcaactgaccctgcacaaaaggtgttgctgcatcagttgacaccgaacaagaacttcaccatcttcgtcatgtctgtcattaccagaatctccaaaa

SEQ ID NO: 8449 - DNA, 4954 bp, Zea Mays
agagtgttcctctagctgtgcatccccatctctcgtctccctcccttcttcatgctcttcctgctactaattctagaagcctctagcgagtgctaacattcagtttaacccggcctccactcctctcctctggcccgtggcctggctatgggctccgccgaggcggatggaagcgcattgccggacgcggagcagcagtagcagcggcggccaagcaagcgggggatctggatccgaggttctaccatcgggctcctcacggcggcggcggcggagaaggaggcggagcgcagcaagacgcagatgagcagcggcggcaacaccaccggctgctgcagctccaccaacaagtgcagcaggaccaagacccaccaccggcccccctcttccagctccagcacctgcaggccgcggcggcggcggccgtgaggcagcggggcggcttgttgtccgccgggtatgcccttctcgcccccatgggcgacgctagccagtcccactcccactcccactcccaacaccacggcttccagccgcagctcctatccttcgggggagccggccagcaccacgcgcaccagttcacggcgcaggcggcgtcccacttgcggccacgaggacggggagcggtgggcgcgggcggcgaggccgtggccacgacgtccgcgtcgcgctcgcgcgtgaggggcggcggcggggaggccgtggcggtgcagggaggccacattgcgcgctccacggggcgcaaggacagccacagcaaggtgtgcacggcgcgcgggacgcgggaccggcgcgtgcggctggcggcgcacaccgccatccagttctacgacgtgcaggaccggctgggctacgaccgccccagcaaggccgtcgactggctcatcaagaacgccaaggacgccatcgacaggctcgagacgacgctgcccgcggccaatgccgcgccgccgtcctcctcctggacgcacccagactccgccgagaactccgacgaccaggcgcaggccatcaccgtcgcgcacacggccttcgacttccccggcgccgacggtttcctagttccggcgtcgctcgactcggacacgatcaagtcgttctttcccgtggctggcacgggaggcggcgaggccgaggcgtcttcgtccgcgacggcggcgcagtcgtcggccatggggtaccaaagctacacgcctgacctgctgtcccgcaccggcggacacagccaggagctgcggctgtcgctgcagtctctcccagaccccatgttccaccaccggtcgcacggccacggccacggcggcgatggctccgcgcagcaggcgctcttccccggcgccgccagctactcgttcggcggcggcgctgcgtgggccgagcacgcgcagagccagcgcgtggcgccgtggaacgcgcccgacccaggcggcgggagcactggcggctacctgctcaacgtgtcgcagtcgcagcaggcggcgcttggtggccagagccagttcttcttccagaggggaccccttcagtccagtaaccagccctccgactccgagcgaggatggccggagaccgtcgaagccgacaacccgatgcagcatggtgggccgaccatcgggttcgcgcccggtaccagcttctccgggatccgcatccccaccaggatacagggcggcgaggagcacaacggcggcagcggcaatggcgacaagccgccgccgcctccgtctgtttcctcggcttctcgccagtgacagcagcagtggagcacagattactccatccaaccagcatgaccattgatcagtgcagcgtgtatcactaaaatctcacacgccagctcctcaacgtgcacccttgttgtgatgtgagaatctctttcgtgattcttcttcgttgtagcactgtattttcccaccgcaggattgccgtttcttgtactactgagtttctggtgcagttctgttgtccccattccaggagagaagagaaacgacaaaggttgcatatgttcattgcatggccttatgctggacactgcaggtgcaggaggacgcagcgacagcagcagcagctttcctgtgccatctatgatctccatccgtccatgactgggcagcgggcactgcgagaacgacacaagaaaaaggttttgtgtctccttgctgtcatcagtacgtacaggatctggcgcctctgctgcgtgtcattagcgcactttaaggaacggaaaagctaattgtctcgtttccatcgctctgctgctccgcctcttcactttctcgcgctgtcgtcgtctcccagtgtggctgccacgctcgccccagcctcctgccgcgcgccgcgctgagcctcctgccgcgcgagcctccagtgcggctgccgcgtgcgccctccagtgttgttgccgcgcacgccatgagttgtcgtgggcgaggtggatccgacgagatccatggcggaggccgaggaggccccgactagatctatggcgggggacgaggtagctccgacgaggtacatagcgcgggtggaggcagctgcgattccgacgaggtccacgtcggagggcgaggaggccgcgactggatctatggcggggggcgagttggctgcagcaggatccatgttggaggaggggaaggtccgacgggatccatggccgggggtggtggagctggctgcgacggtatatacggcagagggtgagggtgtcccgacgggatccattttcgctgtccggcggcagcaacctggggtgaagcaggcgggtctggagttccactgcgcgaagggcatcatttcctctcctatggttaagttgattgaaacttttgctgttttttgcaagtctcagagagctgcttatagggagaaggtgttaattgaagcagagaaacaatttccgcatgatttcacttttttcaaggaaaagttattagctgattttggccaaatagtggatgtcgaatgcattgatagtacttgccaagttctgtatgacaaggtcaggggttgttgttcaatttgcaagtcaaggtgtactgaagctatcgtcgattctctaaaaattttggctgaagcaatgactattaagcatcagaagtttttgaattccaacaaccttctggcgaaagatatggatattaagtcagatgagaaagctaccaaaattgatactaatgtgcagccagttgatgttaagtcgaatgagaaaggggctggtgtgggcattgttgaggcttctcatggaaaagctcatgtggttattacaaatcccctgataacagtgcccatacagttggagacaccaattgttaataggctggatggaaataatggaacatctttgaatccaccagtggagtgtgctcatcctctcaacaagcgattccattactcaaaaactgataagttgggtctctttccacgtacaaagcttttctcacctgtgggtctttttgaccttcaaattacagatgatgaaagtgatcacaatggaaggggcagaaatactgcagctgctatatgtccacacgagccagctggtgttccaattgggctaggccaacttgctcctcctatagccacccatgttgtttatggtgcaacatcagcagcggcaacaggttgtgttaacaatgatgtttatagtggtgttgcttctgtgatgttgtctcagattccaaaggcacatgctgctggtgcatttttagcagggaatgataatatatatgagcctacactagcattgaattattcaaagttaaactcaactgaaagacatagaaactccggaggaataagtggcaaaaaggaagaagttattgtcattgctgatgatgtaggggctgatcaggaggtgcaaactgctgctgttaatatggttggcgctaatttacatggtagtagtagatccaaatcagcagctgcaattgatcagatatacaatgatatgagcatattcaacgtagagtcagaagctgggggattctttttggaaaatcaactagaagttggaaatgtagtcaggaatgatgttggtgaaaattggttacaagttcaaaatgctcacgcccgtgttccatgttctaatgtgctattgcgatattataatattctttgtggcatggggcggagccaatggaaagaccaatatgaagttgaagatctaaggaaatcgtttctagttgaagatctaaggaaatcgtttctaggggctaattctactttgaagttgcatcactctaacaagctgtattttccagtgtgccatgcgaaccattggtttttgttcattgttgatttgaagaataagcgttttgtttttatggattcatattttgatgaggaagatccttttcaatgctttgttagagacaagcttattcggatgtttaaagtcctatggttattatattctgattcaaacatagatgtatcatcattcaaaattttatatcccgcggtaccaaaacaggaaaatacgcatgactgcggtattttcacacttcaatacatggaatattgggatatatttgttgatatgatgctcaagatccgcactgaggacatccctcaaattcgaatcaccttggccaaggatctctattttagtgagaagaacactgaagacaagtctctagtttgcaacatgtttcttcagaatattgatcctcagattgtcaactagcatatttgaaccgttgggaagtagttgttcgtgttttctatggatgttggagcagcaatggcagagatttctgattcatcatcgtcaagttttgatccatagcttctttttccaataaaaaaaagacatgttatatctcatgttcattctatgttcattttccccagtgtatgtaataaaagtgtgatttcgtactattattgaattaaagagtttgttttttactgtttagtaagttcctttttttgtctagagtttttt

SEQ ID NO: 8450 - DNA, 437 bp, Zea Mays
  misc_feature (437)..(437): n is a, c, g, or t
ccaaagcccaatactgcagctctagcggtagcggccagccgggtggaatcttctctccgtccctggtctagcaatcaagcgccctgccgctctaggcaccaaaacctcgcgaggcaaccgcccgccggcgccgccgacgtagcaagagggtgagctgaggactagaggagagggaagatgtcgttccgcgcgcgggagatgtacaagaaggtggtgcggcgcttgggtggcgaggggaagctgccggctgagctgatgaagtcggtgaaggacatactgccggacagcaacgtcgtcatggggcgggccaagcgcggcatcttcgcggggcgacacatccggttcgggaacaaggtctccgaggacggcggcaacaaatggctgagcttcaccgctgcgagatcatgctggagcatatgaagtgtggcactcgtgcn

SEQ ID NO: 8451 - DNA, 2907 bp, Zea Mays
ccccactccccagcaagtctctaccaccatctcttctgctactgcaactgagaaccccagcaactgaaaaccccattctccgcggagcagccccattattaagcaatgctagtagacattgttgatctttccagtgatgatgacgaggtggctgttacagaagaacacagtgttgatggaaaaggtgtttatgcgaaggcaaatttttttgacttaactattgacgatggcattcttgaaggagagcatattgcttacgaacaagaacaaggagattctgctcagggcacatcattttataaacaagagttcattgcagatgatggacaagctgaagctgcccagtgcatagtaacattagagttgcaaaatcttggagcagatggtggatgctatgcttctcaatgcacagagacattgttggtgcaacaacttagaagaaatgatggacaaaatgatgctgcccactccacaggaacactaccgatacaagaacttagaacagatggtggacaacacgatgcggcccagtgcacaacaagtctacatatgcaagagcttagagcaactgatgtacaaggtgatgctgcctgtttcacaccaacattacagaggcaagaacatacagcagggaatgaacaaggtgacactgtccagtacacaacaacacaacagggtcaggaatctattgcagatgacacacgaggtgattttactcactgcacaacagcactgcaatggcaaggatctcataaagctcagtgcacaacaacattactaaggcaggagtttctagcagcaggtgatagaatgcaagatgctgcactgttgagaaattcagctgaagctaccacatccttgacaagtacacaacaagggagacacatgagaactgaattattcaatgtgtcaactgcaacaccatttccccggcaattttggaaagctggagagaaagctggagactatggattagcttctcaagctgatctcaacaatgaccacaaccgcttacagattcaccccaagtttcttcattctaatgctacttcacataaatggccattcggtgctattgcagaactgctcgacaacgctattgatgaggtgagcagtggggcaacctttgtgaaaattgataagatgaagcattctcctaagggggattattcattggtaatagaagataatggcggcggcatgagtccaaaatctctacgacaatgtatgagctttggattttcccagaaaagcacaacttcatccatcgggcaatatggaaatggcttcaaaactagcacgatgaggcttggggcagatgctattgtattcacatgcactaaagatgataggagattgacacgaagtatcgggttgctgtcttacacattccttatgagaagtaactgcaatgacatatttgtaccagtggttgattatgaattggatgccttgtcttcaactttcaagaggaaaatgaactgcggtgaaaaacattttttatctaatcttttcactattttgaagtggtctccattttcgacagaagatgaattattgaatcaattcagcaatatggagtgccatggcacaaaaatcattgtattcaacttgtggttgaatgatgcattggaaatggagcttgactttataactgataaagaggatattttggtctcaggagcaccggaaatacgagcagggcggaatacagtggaaagcttgacacagatgcatgtagcaaaccgtttccgatattcgcttcgggttgatgtcattactacaattggctacttaaaaggtgctccacgacttgatatctatggatttagtgtctaccataagaaccgtcttatactgccctattggcctgcaggttcatgtagtggacgtagaagaggcattgctggggttttggaggcaaacttcataagacctacacatgataagcaagattttgagaggacgggtcttttccaaagacttgagacacgattgaaagacatggcaaaagagtattggacttaccattgtcatatggttggttacactcgggtcatgaaaaagcctcctccagcacattatgtatcaactattgctgagaagggtgatgataacttagcagctcagtctaccacaaagacttatggttacaattcaagagccagggtaccggtagcattgcagccttgttccaatgcatataacacacaagatcctatgcatgctgatgttggtgtcgtgatggatcaaatgaactatggtgcatgcccttcaatgactataaatgtggggacaacattacattcactaagatatgcaccacaacaatctcaatctgaactatgcaaacgaagaaagtcttcggagattcactggagatctcaaaaaaagcagaacaccaatatttattcggataaacctgaaagcgatagtggaacagagatggcagagttcagagttgtacttgactcgtccaccatgctaaaggctgagtgctctgaacttgaggcagcaggaaagcagctggcctctaaggcagataaattgaggatagaactcgatgtgtggcagcggatgtaccagggcctaagtgacaaattgcgatcctacgatgggcttcaaaggttgcgttgcagtcgccattgcagcagctccagtattgggttcatatgagctaagagaagcaattccagcgttggattcacaatcaagttagaaatggcattagtccctcaaagtctatcttttcgtgactgtagatctggcagtatattatttgttagacctagtaagggtttttggggctagtccccttgtaattaactgcataccctgtgtaaggcagacccatctatacttagtctattaatacaactcctaaccctagttagggctagtttttcc

SEQ ID NO: 8452 - DNA, 3091 bp, Zea Mays
cgaaactgaaacatcagagcaaaacccccttctccccactccccagcaagtctctaccaccatctcttctgctactgcaactgagaaccccagcaactgaaaaccccattctccgcggagcagccccattattaagcaatgctagtagacattgttgatctttccagtgatgatgacgaggtggctgttacagaagaacacagtgttgatggaaaaggtgtttatgcgaaggcaaatttttttgacttaactattgacgatggcattcttgaaggagagcatattgcttacgaacaagaacaaggagattctgctcagggcacatcattttataaacaagagttcattgcagatgatggacaagctgaagctgcccagtgcatagtaacattagagttgcaaaatcttggagcagatggtggatgctatgcttctcaatgcacagagacattgttggtgcaacaacttagaagaaatgatggacaaaatgatgctgcccactccacaggaacactaccgatacaagaacttagaacagatggtggacaacacgatgcggcccagtgcacaacaagtctacatatgcaagagcttagagcaactgatgtacaaggtgatgctgcctgtttcacaccaacattacagaggcaagaacatacagcagggaatgaacaaggtgacactgtccagtacacaacaacacaacagggtcaggaatctattgcagatgacacacgaggtgattttactcactgcacaacagcactgcaatggcaaggatctcataaagctcagtgcacaacaacattactaaggcaggagtttctagcagcaggtgatagaatgcaagatgctgcactgttgagaaattcagctgaagctaccacatccttgacaagtacacaacaagggagacacatgagaactgaattattcaatgtgtcaactgcaacaccatttccccggcaattttggaaagctggagagaaagctggagactatggattagcttctcaagctgatctcaacaatgaccacaaccgcttacagattcaccccaagtttcttcattctaatgctacttcacataaatggccattcggtgctattgcagaactgctcgacaacgctattgatgaggtgagcagtggggcaacctttgtgaaaattgataagatgaagcattctcctaagggggattattcattggtaatagaagataatggcggcggcatgagtccaaaatctctacgacaatgtatgagctttggattttcccagaaaagcacaacttcatccatcgggcaatatggaaatggcttcaaaactagcacgatgaggcttggggcagatgctattgtattcacatgcactaaagatgataggagattgacacgaagtatcgggttgctgtcttacacattccttatgagaagtaactgcaatgacatatttgtaccagtggttgattatgaattggatgccttgtcttcaactttcaagaggaaaatgaactgcggtgaaaaacattttttatctaatcttttcactattttgaagtggtctccattttcgacagaagatgaattattgaatcaattcagcaatatggagtgccatggcacaaaaatcattgtattcaacttgtggttgaatgatgcattggaaatggagcttgactttataactgataaagaggatattttggtctcaggagcaccggaaatacgagcagggcggaatacagtggaaagcttgacacagatgcatgtagcaaaccgtttccgatattcgcttcgggtgtatgcatctatactatacctacatgtacctgaaaactttcaaatcatcttgtgtggacgagctgttgaaccacattatgttgtcaatgatctcatataccgtgaatgtatcatatatcgaccacatgttcaagtaaccacagagccaggttgatgtcattactacaattggctacttaaaaggtgctccacgacttgatatctatggatttagtgtctaccataagaaccgtcttatactgccctattggcctgcaggttcatgtagtggacgtagaagaggcattgctggggttttggaggcaaacttcataagacctacacatgataagcaagattttgagaggacgggtcttttccaaagacttgagacacgattgaaagacatggcaaaagagtattggacttaccattgtcatatggttggttacactcgggtcatgaaaaagcctcctccagcacattatgtatcaactattgctgagaagggtgatgataacttagcagctcagtctaccacaaagacttatggttacaattcaagagccagggtaccggtagcattgcagccttgttccaatgcatataacacacaagatcctatgcatgctgatgttggtgtcgtgatggatcaaatgaactatggtgcatgcccttcaatgactataaatgtggggacaacattacattcactaagatatgcaccacaacaatctcaatctgaactatgcaaacgaagaaagtcttcggagattcactggagatctcaaaaaaagcagaacaccaatatttattcggataaacctgaaagcgatagtggaacagagatggcagagttcagagttgtacttgactcgtccaccatgctaaaggctgagtgctctgaacttgaggcagcaggaaagcagctggcctctaaggcagataaattgaggatagaactcgatgtgtggcagcggatgtaccagggcctaagtgacaaattgcgatcctacgatgggcttcaaaggttgcgttgcagtcgccattgcagcagctccagtattgggttcatatgagctaagagaagcaattccagcgttggattcacaatcaagttagaaatggcattagtccctcaaagtctatcttttcgtgactgtagatctggcagtatattatttgttagacctagtaagggtttttggggctagtccccttgtaattaactgcataccctgtgtaaggcagacccatctatacttagtctattaatacaactcctaaccctagttagggctagtttttcc

SEQ ID NO: 8453 - DNA, 3710 bp, Zea Mays
ttcacccccagctggcgttggcccgcaaaaacaaacggaaataaatcagagaatcccctgataatcaatccagtccacccatcgaaccgaacacattttctctctcctgcggctcagcccaccaccgaacccgagtgacccacacacgcagacgcattcgcaccaaagaaagcgaggaagaaaagaaaagcagggtcgtgacaggacggggggaagagagacctccactcacggactcagcccccgccggaaagcactgagcttccgagcggcccgccgcgaggaacgcgtgacctcgccgcgcgctgttgcggctgggcgggcggcgcattcaggatctgctagggttccccgccggtggggtcctggccatggcgagcccgcgctcggccggcggtgacgaggcgatctggatgaagctgcgcgaggccgggttcgacgaggacgctgtcaggcgccgcgacaaggcggccctcatcggctacatctcgcggctcgagtccgagatctatgaatatcagcacaatcttgggcttattttattggagcggaaggagttgacgtccaaatacgaacaactcaaagcttcttttgaagccactgagatcatactcaagcgagagcgagcttcgcagcagtctgctttatctgaaacaagaaagagggaagaaaacctaaaaaaaaatctagccattcagaaggagtgcatatcaaatcttgaaaaggcacttcatgatatgcgcggggaaacagctgaaataaaagtttcatatgaagcaaaactggctgaatcccttcaaatgatggagacggcacagaaaaagtttgatgaagcagaagagaaacttctcactgcaaaatcattagaagcagactgcattcgaactcgcaacacctctctgagaagactgcaagacattgaagatcgcgaagatcagctaagaagataccaaacatcttttgaacttgagaatgcatcgaaagagaaagagattaacctcctgaggaaatcgttggatgataccaaaaaaattttgcatgaaaaggagcaatgtttactgaaagaacaagtacttcttaatcagagggatgacagcatccttgagagacttgcgtacataactagctcagagaaaaggttggaggaggaaaagttaaatctcgaagatgaaagaaaggttcttttggaagagaaaaataagctggatctgaacatgcaggcaattatatccagggaggaagctataattcagaaggaatccatacttgacaaacgtgaaagtgaactattgattctccaagagaccattgcaagcaaagaaagggctgaaatagaaaggctccgtcaagaggaagaaattgccttggtgaggaggaggcaggaatttgacactgacatggaaattaagctcacttcttttgaggaagagattgatgcaaggaaagccttgctcgatcaaagggaaaccaccatcaatgagaaggaggatgcagtggcgcaaagggaacagaatctcaaccttaggtttgctgagttagcgaacaaggaagaatctttggtgaagaaatcagatgagttaagggaggaagagaaaaggctctcctctgagagagagacactgcacattgatctgcaaaaagaaaaggaggaaattcataacatgaaattggatttagagaaggaaaaatctttctttgaggaggagaagcgtgaagcgattcaagctcaggagaatctagcaataacccaaaatgagcgagaagatttacaaagtttgcaggtgaaacttaaagatgaaattgatagtctgagagcccaaaaggttgacctaatggctgatgcagaaaggctattatcagaaaaagaaaggtttgagattgaatgggagttgatcgatgagaagaaggaggaactacaaaaggaggcagccaggattgctgaagaacgaagagtaatagatgagcatctcaagagcgaatttgatattatcaaacaagaaaaggaagatctccgtgttcagttaaaaattagtacagaatcccttgctcatgaacatgctgaattcatgaataagatgcagcaagagcatgctagttggcttagcaggatacaattagaaagagaagatctgaagaaagatattgatatccagagaaccgagttactgaattctgcaaaggctaggcagatggaaatagattcatatttgagggaaaaagaagaggagtttgaacagaaaaaatccaaggaacttgaatacatcaattctgaaaaggaaactatcagctcaaaactagaacatgtcaggcttgaattgcaaaaacttgaggaggagaggaaaaggtctatgctggagcgagagagaagagaggaagagctgtctgaaacaaagaagactatagacgcgcttaatgagcaacgcgagaagttacaagagcaaagaaaactgcttcattcagaccgaaaatcaattacacagcaaatgcagctgcttaatgagttagaagagctgaagattgaatctgagaacaggcaactgtctttgagacagtgtgggaaatcaaagcatgctggtgtggaaaacctggaagacaacggtgttcacctgtctcctgatgaggatcaaaatgctagtccaaaacaaactactgtaaagaaattggaagtgtccccttcagtctccacaccaatttcttgggttaaaaaatgtgctcaggtgatattcaaacgctctccagagaagagtgctgatcccaacaatgatatacctccaaagttgggaaatgtcaatgactgtacctccttagctactgcctattcagatggattgtttgcttgtcacctggaaaatggtgctgagaaagtaccacaagctatcgacggtctgaaagttgggaaaaagaggcttaataatgcactctctcatggtgactccgaaatttcacagccaaaacgcaagcagcaaaagagcgctactcagattttgagagtgattggaggagaaattgattccaactgcccatcagttctagaagaaaaatgttcaaagaatgaacatgatgcagtcccagttggtttgtgtgggaagggaccacaaaatccccaagcagagcattcagaggatatttcagtgtctgcatctgaaccgtcgaacggacctggtgttgtggactctgaggacaaggatggagcagatgaggagtctgacgatgaaggcgaggacgaggaggaagagaagacgtcatcggcgaagaagctgtggcgtttcctcatcacatgatttatttatctttgtcgtacgataaaaaatagcacggctaactgtaggttctatatgatggtaggaggccacttaggcatccaaagctctactagtttcattggctttgtcatggcgtgtcctctggtgtgtagtagaggtggaagaaggtactggtttggttgtgtgcttcgggtgttgtgagtagcgcggtggctttggaaggcgctgtggactgtctctcccccacctactaccacccatgccttttttttcttcctgtttatcttgtccgcaggaagacgtgtgtaaagtgattgacagtttccgggttggtgtgaaaatgagcctgcgtggttgctaccatggtccaagtgttagtgctcgcgtttgtgttgcttgtttgagctgtaacagtggttgctaccatgattcaagtttgattcaaac

SEQ ID NO: 8454 - DNA, 1262 bp, Zea Mays
cggggagcccagtcgagcgccggggaagacgacgcagacaggcgcggtgcagacagtcggccgtggatccgttctaagaaacggactgccgtaacaacgatttgagcgccgactaaatcttacacagataccgaaattccaaagttcaacggattataatactaaaattccaattacgttgttcgggatatatattttcagaagcccaatgttaatgatatcacgtttccaaaaagctcagccatggcggcacgacgccacctgactccgttgaaagaaacccaccttggccacctctctgccccaccatgcggccccctggtcccatttgtctgacactaccccctacctccccgtcccaacctcgtctaatcgctgcggcgccagtgcccaaatctaaaccctagcgccgccaccgccatgctgcgccgcatcgccgccgtcgccccgcgggccttcttctcctcgtcacccccgcacgccccgtcgcttccggcgtcgggctacatcccgcgccgcgagtacggcctggtgcccatggtgatcgagcacacctcccgcggggagcgcgcctacgacatcttctcgcgccttctcaaggagcgcatcgtctgcatccatggccccatcaccgacgacacggcctccctcgtcgtcgcccagctgctcttcctcgagtccgagaaccccgccaagcccgttcacctctacattaactccccggggggcgtcgtcacggcgggcctcgccatctacgacacaatgcagtacatccgctcccccgtcaccacgctctgcatcggccaggccgcctccatggcgtcgctactcctcgccgcgggggcgagcggagagaggcgggcgctgccgaacgcgcgggtcatgatccaccagccctccggtggcgcgtcggggcaggcctcggacatcgccatccacgccaaggagatcctcaaggtgcgcgaccggctcaataagatctatgccaagcacacgggccaggccatcgaccgcatcgagcagtgtatggagagggacatgttcatggacccggaggaggcacatgaatgggggctcatcgacgaggtcatcgagcaccgccctgtctctcttgtgtctgatgctgttggcagtgatccgccaaacctcggtggaggcggaactgaggtgaataaagggacggacgagccatctccagcgtgatggcattgggcagtcacaagcacttgatagctttctataatgagaagctgatttcatag

SEQ ID NO: 8455 - DNA, 2746 bp, Zea Mays
gcagtctcgtccgtttctcttctcctgtgtctatctccacctctcctccacccgggcgatctgctctttggacttcagcggtttagcccaaacccttcttcctcctcggtgcactccaatgcgtcgcattccgtccttctaatcccgacgcattctctcgttgcagaccccatcgttctatctctccgtcgtcatctatctgtgctccccacctcccgctcccttttcgttgcgcctcggggccgctgcgctggtgatttgcgtcgcctccccccctggggttaatgtgacggccctgccgacgatcttgcctgacgactagtttcttctctagctgggctactctccattcagtggttatggagcctcccaggaagaataagtccagtggcatgcaagtcaaggaggaagtgaagttagaagatggaaatgatttgttagtcaagcgcaggaggactgaacttccaggttccattgttcaactacaacagaaaattgaagtatttgacatggagaacaaagtgccagatggtctttcagttgaagattctactggcaaggatcccatggatgtgctcactagatatgcagcacagaactctggtcaagggaatagttgcagtaacgaacctgcaatctcgagactgacaaaaatatgcaaggcaattggctggaaagaaccatcatatgactttgaagaacaaggacctccgcataacagaattttgccccctggacgacatattatcgtttttggacccttagctcggcgccacaagccacgacgtcaatgtaacacgtctcggcgacgtgagttatggcatcgaggacaacacagttccacttgttggaccctcactatgacgagcaccataggggacgactcatcgcagaagggcaggtgttgcccgttctgcggtccaggacccatgacaggtttctagacatgcggtacgacgacaggtacactcctctccttgagagggctggcttggacgtcgtatcgttccaggttcgccgcgggttgcccacaatcaacattgcggcgatcacagctttggtcgataggtggcggccggagactcacactttccatcttccttgcggcgagatgaccgtgacactgcgagacagccagaagcaacttggtctcagtattcgtgggcgtccagtgaccggtcaggcagcgcccggtggctggagacagagagtcgaggcctttcttggaagggaggttcccacagacacaccaggtagccacacatctggggtttctctcgcctggcttaggcagtcgttcggggagtgtccagctgcagcagatgaccagacggaggctacagctgggcttctgcagtgctatccttcctgtacagacaactttgtgaggcttgtcgtcggacggcaaagaacgcaagtttaggcggttgcgtgtacctactccagttgtggatgtggtcgcacctaccggttggtcgccctattgagtttgctcctcgaccttggttcgacgtcgtcggcttgcgactacgaccgacggcggcttaccgttgggaccaggtccaggctccgttcgcacgtcaccagcgcgcctacgtcgagtactcaaacgagctggacgcacttacaccgtcgatggttagctggcaaccatatgatgagccaccgttgccacacattcagttgagctccgcgtgcacgacagatgaagacatttatttattaaggtgtccactgatttgtttctatgccgttgagtaccacttgcctcatagagtagcacgccagttcggtctacgtcaggagttccctgtggagcccttctcgacatcggtagaactccacaagttcgaccgccaaaagcagaagaagatcactgactttgaggcgcaccaccaagtgtacattgacgaatgggaccaaatgcatgacctcctctaccagagcgatcagtcccacaccaactacaactttcgcgagtacatctcttggtatgtcggtgtaactcggtgcaagttgaagggccagtggacatcagcggactacgccgaactagagtcttcagatgacgaagacacatcctatgacctagttactcggcatgggacacacgtggaggctgcaccaatcctagatagagtgggcaactccatgatgcagtctgtggtcgacatcgagcatttctctaagaccacttctgacgacaggacacttgcctttctctcacaccatggtgacacctcgctaggacttggagctatcaccgttgcacagggctcgtcacgtacgacacgagatgcgtttgcgagccacaaggaggacgaggatgacattaagattcctctcgacaagattggaccataggatgctcctaagacaaccttcacagcctataccacgcagacgatggcgacgatcgcgcaaccctaacaccccaggcatcaacgctcttggggccaagggcaacggtaactagaaggatgcgagggaaacatgatggtgcatgtcttctgctttggcttttttgtgctatggactatggatgacgatatagactttctgcgttgtacactttggttgatgatatagattatctgtggtatgcactttgtttgatctagttgtgtgatgcgctatttagagatatatatgctcatatcatattagttttttttataattgtggatgttactaaaaccatgtccagtagtctatccatactttagctgttgttctgcactgtaga

SEQ ID NO: 8456 - DNA, 1437 bp, Zea Mays
tctaatttgttcggtcctcggaataaaggaaccgttgcttcacttgcaagctagcactgctcatgggcatatgacttcggcatctagaacaacaacactttacacttcaggcatctagaacaacacagcgtgttaaagacgacgacgacgacaacgggggaagctttcatgctcatgggcaacacgtggccggtgggcatggcgggagggaacacggcggcgacgctgtggtgcagccactgcggcatgggcatcgcggcgccggcgcccgggtccggctctatcgtccggtgcgcgttctgccgcggggtgacgcgcgtcgagcaccagcgcggcggcgtgggcgagagagccatgacgacgaggacgctcgcggctgcagcctcgctgccgcggcagcttccggtctccgcggggcccgtcgagatcccggccagctaccccagggtgagcggcggcaacaagaagcgggcgctcctggtcggggtcagctacacgggcaccgcgcacgagctcaaggggacggtcaacgacgtcaaggagatgaggaggctcctctgcgacaggttcgggttcccgggcgcctgcatcctggagctcaccgagaaggagagtgaccccaccagggtgccgacgagggagaacctgctgcgggcgatgcggtggctcgtggaggggtccagcagcggcgactcgctggtgttccacttctccgggcacggcgtgcagaagctggacatgaacgacgacgaggtggacgggtacaacgaggcgctctgccccatggacttcgagcggagcggcaagatcctggacgacgagatcaacgacaccatcgtgcggccgctcggcaagggcgtgaagctgcacgccatcgtggacacctgccacagcggcaccatactggacctcccctacctctgccgcatgtccagaactgggtactggcagtgggagaaccacgcccgcccttcgggcatgctgacgaagcgccccaacggaggcctggccatctccatcagcggctgcagcgacgaccagaagtccgccgacgccagcggattttccgatgagtcgtcttcgatcggcgccatgacggacagcttcatcaaggcggtggaggccgagccggggacgacgtacgggcggctgctgagcgcgatgaggacgaggatccgtgacggccaggggagccgccgcctccccggcaggcttggctccttcgtccgctggatgatcccgtccagcagcgtgcagctacacgtggatctaagttttatgcaagtatttgcattggtacacctccaacttagggatgacaatgggtacggtggacgggcgggtaacgggtatctgccggatagcggatacccggtgggtacggttatgggtagagatccatactcacgaacgtttatgggcacgaatatggtttaa

SEQ ID NO: 8457 - DNA, 1044 bp, Zea Mays
ccctaggtaggtgcaaagggataggatgggagatggttgcaatggttgagcacacatgtcgctaggttctctcctcacggcaccatcgtggcatcggccatgccagcgccctctaccggctcgccactcagtttaactataacagtggacaactagcaccaaagacgattattgatcaaatttatgggaacacactatcaatttcggaaataaaaacagcagacattcctgataatgtcctatcctctgttggagttgtaagcgatgaatgtgtttgacttccaacttatcaaggatttgcttttctcggcctgatttcaggtcttcctctctgtatatgtctctttttgtatttaaattttattgcgagtgtattacttgagtaataatgtaactattaaaccccttataatcatgttcacatcgacctaatcaaataatcatattttggtttatttatagtgcatggttggtgatattggagataagttcttcacaaagagagcactaaggggcgttcatgctgtaatttgtctaactgataatggtttcttctctgaactgatcgacttcaagggtgttgggttgcaatgctcctataatttcctgttatccagctagctctagcatcaatcatttacccctatgagatttagatgaggttgcagctacagaaatagtggtggtttgcatgctattatgaatagcaagctgaagaagctagcaaagaaggatgaagaagtggttgttgcatctggcatcccatgtacaacaatcagaactggttctctacaaagcgctcccggtggcgagagaggtttcaattttactgagcaaccaagggaagaaaacgcaaagaggatgctgctgccatatgtgtggaagctttgaatagcattccccaaaagacactcatttttgagagggattgcgaatggacattctgggcagcgtgtgaccaaactgattcgacggtgttgggatgaagatcatgatgtgtgtctgactttttttggagattattatggaactccaagatgttct

SEQ ID NO: 8458 - DNA, 3797 bp, Zea Mays
accacggtaccagagcacacacggaggtgccaccgcgcgccgcagccggagcatggcgacgccgctggccgggaagggcccgatcgcggcggcgatcccgcggtccccacccccactggccgagggcggcgcgggagggtcggcggccgaggcgcccgtgctcatcttcgtctacttccacaaggcgatccgcgcggagctggagcggatgcacgccgcggcggtgcgcctcgccatggggcgcgcgggcggggacgtggccacgctcgaggcgcgctgccggttcctcttcaccgtctacaggcaccactgcgacgccgaggacgcggttatttttccagcacttgacattcgagtgaaaaatgtcgcagggacatattctcttgaacataaaggagaaaatgatcttttcgcacatctattcactctgctacagttggatgtgcagaatgataatgctattaggagggaacttgcatcctgtactggagcaattcggacgtttgtatcccaacacatgtccaaggaagaagaacaggtcttcccgttactcatcaagaagttttcacacgaagagcaagcagatttagtatggcagttcttatgtagcatccctgtaaacatgatggcaaaatttcttccatggatttctgcttctgtttctacagatgagaatcaagatattcttgactgcctaagtaaaatagttcctgaagaaaaactcctccaagaggtcctcatgattatggcatcacacatcttaacttcccatttgtaaaattattggcgtatttcacttcagttttttactttgtgaaggttgttttcacgtggtttggagggaaatcagaaagcagttctacatgtgagtctagctctggccaaacagataaacatgcacattcacttgaacacaccaaaattggaaagaggaagtctatagaatcaagtcagcttgtcactcatccaattgatgagattctgtattggcacaatgctgttctgagagaactgagtgatatagcagaggagactaaaaggatacatcagtctggagatttttctgacatagcaggatttaatatgaggctgcaatttattgcagatgtgtgcattttccacagtattgccgaggatcaagttatattccctgcagtggatggtgaattgtcctttgtgcaggagcatgctgaagaagaacggcgattgaataaatttaggagtttaattgaacaaattcaactagcaggagccaagtcaactgtagttgattttcattcagagttatgctcacaagctgatcaaataatgcagaaaattgagagtcacttcaatgatgaggaaataaaggtacttcctaaagctaggataaagttctcaccggagaaacagagggaacttttatatcagagtctatgtgtcatgccactaaagctgttggagcgtgttctaccatggtttatagtgaaactgaatgatgcagaggcagtgtcttttcttcagaatatgcggttggcagcaccttcctctgaaactgcattggttactcttctctctggctgggcgtgcaaaggtcgtctggaggacacatccaaccctggaaagttcgtatgcatggcatcaggagcggtcacttgtgcgtcagatgggaatggtttcaaaacatgccagtcactctgtccatgttatgtaagtagcaatggagctttttcaaaaccagttaagagagcaagtcaaggagaatctagcacaaatactgacagaaatcatagctcacacaatgctgctactgaagcatcgcaatgtaacaacagagcctgttacattcccaggttaagagtagaaagtagctaccttggtgttcattcatctacccctacaaaatcctttcgccctctgtctttcaattatgttgcaccttcattatattcaagccttttctcatgggacacagatacactagtatccggcccagataacatttctaagccaattgataccatattcaaattccacaaggcaattcgcaaggatttagagtttttggatttggaatctggaaagcttattgacgggaacgagtcttgccttagccaattcattggaaggtttcgtttactgtggggtctatatagagcacacagcaatgctgaagatgagattgtatttcctgctcttgaatcgaaggaggcattgcacaatgttagtcattcatacactcttgatcacaagcaggaagaaaaattgttccaagatatatccactgtactatctgaactttctcaactacatgatggtttgagctatcctcttgatgttgaagctggaacaaatgatatttcaagtaatgagattgattgggctagaaagcgtaatgaacttttgacaaagcttcaaggattatgcaaatctatccgggtcacgttgtcaaatcatgttcatagagaagaacttgagttgtggccattgttcgataaacatttttctgtagacgagcaggataagattatcggtcatataattggaactactggtgctgaggttctgcagtcaatgttaccttgggttacatcagcacttagtttagaggaacagaacatgatgctggatacatggaagcaagcaaccaaaaacaccatgtttgatgaatggctaaatgaatggtggaagggaccttcaacttcatctgacccatcagacaaggcttctactccttcagaagaaagtcattttcaggagaatcttgaacaaaatgaccagatgtttaggcctggttggaaggacattttccgaatgaatcagagtgagctcgaggctgagattcgaaaggtctctcgagattctactcttgatccaaggaggaaggcctatctgatccaaaatctcatgaccagccgttggatagctgctcagcagaaatcaccacaaccaagcgtcgaaggacataatggatgtacacgacgacctggatgtgttgcttcgtaccgagacccagggaaacaaatatttggctgtgagcattacaaaagaaactgcaagcttgttgctgcatgctgcgataagttattcacttgcagattctgtcacgataaagttagtgaccatacaatggacaggaaatcagtgatggagatgatgtgcatgcaatgtctgaatgttcaacctgttggtccaaattgtcaatccccttcttgcaatggactgtccatggccaagtattattgtagcatatgcaagttcttcgatgatgaaaggagtgtctaccattgtcctttttgcaacttgtgtcgccttgggagcggattgggcactgatttttttcattgcatgaagtgcaattgttgccttggcataaagatgatagaacataaatgccgggaaaagatgctagagatgaactgtccaatctgctgcgactttttgtttacatcgagtgcaccagttaaaggccttccttgtggccacttcatgcattcggcttgttttcaggcatatacttgtacccactacacttgtccaatctgctgcaaatccttgggagatatgacggtgtattttggcatgcttgatggtttgctggctgcagaacagcttcctgaggaataccaggaccggtgccaggatatactgtgtaacgactgcgagagaaaaggcaggtcacggtttcattggctctaccacaagtgtggtttctgtggttcttacaacaccagagttatcaagactgatacgctgtttcctgggaacatctcggtttgtatcagcgatacagttggagaccttctgaacactgtccc

SEQ ID NO: 8459 - DNA, 2756 bp, Zea Mays
agtagccagccacccaatcattgccccccaactgcgcgtacccgtccccgcctcctcctggatggatctcttttttgttcgcttctccgcccgtcgcgtccacactccccctcacgtagtgcgagactgcgagggatgatcacgcgtttccacaccatcagctcctgctgcccttttgtcttcccctctggatgctctcgtcgtcatcacttgttcttcttcgagctaccagctgcctatcatggtcatcatggtcgagctgctgcccccacttgcctctctaatcctcagtcctctgtagagctggtcctcctacccctcactttgccttgagcaatttggtttctagcatctgtggggtggcttgtgggtggtcgccttggactgctccttcctccacctgccgcgccggcagggcgacgaggtccaaaagcctggtggggctcatcatcaagaacaccgaagcggcgagagtggcatgggatctgatccgaggcggagctcgaggagctgaggggctgtacgtgctcttggatccggtagagattccgtgccctcgtgttcgtccccggccgccgcgatggggaacacgtgcgtcggccccagcatcaccatgaacggcttcttccagtccgtgtccacggcgctgtggaagacgccgcaggacagcgacgcgctgcccgccgccgccgccaatggccccggcggcgccagcccgggccggtcgcagtcggcgctgccgaagccggcgtccgacgtgcaccaccacatcgccgtgctgagcgaggcccctgagcccgtcaagatcggcgcctaccactcggagccggcgcccgccgtgcagagcgaggcccctgagcccgtcaagatcgccgcctctcactcggagccggcgcccatggccgccaagcctggcgccgccgccgccaacgccagccccagccccagccccaggccgcgtccgcaggtgaagcgcgtgtcgagcgccgggctgctggtgggctcggtgctgaggcggaagacggagaacctcaaggacaagtacagcctggggcggcggctcgggcaggggcagttcggcacgacgcacctgtgcgtggagcgcggcacggggaaggagctggcgtgcaagtccatcctgaagcgcaagctggccaccgacgacgacgtggaggacgtgcggcgggagatccagataatgcaccacctggcgggccaccccagcgtggtcgccatccgcggcgcgtacgaggacgccgtggccgtgcacctcgtcatggagctctgcggcggcggcgagctgttcgaccggatcgtgcggaggggccactacaccgagaggaaggccgccgagctcgcccgcgtcatcgtcggcgtcgtggaggcctgccactccatgggcgtcatgcaccgggacctcaagcccgagaacttcctcttcgctgaccactcggaggaggccgctctcaagaccattgacttcggactctccatcttctttcgccctggccaaatcttcaccgacgtcgtgggcagcccttactacgtggcgccggaggtactgaagaagagatacgggccagaggcggacgtctggagcgctggcgtaatcatctacatcctgctgtgcggagtgccgccattctgggcagagaacgagcagggcatattcgaggaggttctgcacgggaggctggacttcgagtcggagccgtggcccagcatctccgacggcgccaaggatctcgtgaggaggatgcttgtcagggacccgaggaagagactgaccgctcacgaagttctacggcatccgtgggttcaggtcggtggagtggctcctgacaggccgctggactcggccgttctgtctcgcatgaagcagttctcggctatgaataagctgaagaagatggctcttagggtgatcgccgagaacctgtcggaggacgagatcgccgggctgagggagatgttcaagatgatcgacgcggacaacagcgggcagatcacgttcgaggagctcaaggttgggctggagaaggtgggcgccaacctgcaggagtcggagatctacgcgctcatgcaagccgcggacgtggacaacaacggcacgatcgactacggcgagttcatcgcggccacgctgcacctgaacaaggtggagcgggaggaccacctgttcgcggcgttccagtacttcgacaaggacggcagcggctacatcaccgccgacgagctgcaggtggcgtgcgaggagttcggcctgggcgacgtccagctggaggacttgatcggggaagtggaccaggacaacaagccgacggtgggggtgctcccgaagaaggccgacctgcagaacagcttcagtatcgggttcagggaggcgctcaggatggcctagacctctctgtctctgctcccctgctgcctgcgtgtaggtgtagatgattgaattgagtgcatgtcagtgcagttgctgtagagaccaccgtagcatagagagctgatgagatgcgagttgaggcgggccaggagacgtgtacatgtgccatagtccatagccatacaggcggccctgcagcggtttggctgcttggttccaaacggttctgtttcatgtcgcgtgcactggagcacatgtgccatatctgcctgctgctgctactgctatatgccgtgcacgtgcacgtcggtgacctgaaacctggctgtccgccggccaccgagctctaacggaattctgccatgctctccgg

SEQ ID NO: 8460 - DNA, 1472 bp, Zea Mays
ctcccctcgggcctcgccgcctcgccgcctcgcaccttttactgaaggtttgacctcacctgcccctcctctcctctctccgccccctgctcctccgagtgaccgtacgccgtagctcgacccggccgatccccgaaaccctagacgcgccgctggtcgccggaggccgggccatggacgtcggcgcggagctgcgcgaggcccaccgcctgacgggccacgccgaccgcgtgtgggcgctcgcttggaaccccgccccgggccccggctccagccccgttctcgcctcctgcagcggcgacaagaccgtccggatctggaagcgcgcccctgacggcgcctggcagtgctcggatgtgctggaagacacgcacaaccgcacggtgaggtcctgcgcctggtcccccaacgggaagctgctcgccaccgcgagcttcgacgccaccacggcagtgtgggagtacaacggcgccgactttgagtgcgtcgccacgctggaggggcacgacaacgaggtgaagagcgtgtcatggagcccgtctgggtcactgctcgccacatgcagccgggacaagatggtgtggatatgggaggtgctgccagggaacgagttcgagtgtgtctcggtgctgccgggccacacgcaggacgtcaagatggtgcagtggcacccaattcttgacattttggtctccgtcagctatgataattccatcagggtctgggctggtgatggagacgatgagtggcactgtgtgcagacactaactgaagccaataactgtggtcattcatcaacagtatgggcattatcctttaaccttaaaggtgacaggatggtcacatgcagtgatgaccaaacgttgaaaatatgggacacaagtgctgatttgtctcaaccaaaaactggcgaaggtcatgactcttgcgaggatattatagctagtggtgcgggcgatgatgcaatctgcttttttactgaggagaagggtagcatggttgaaaagccctcatacagattaatattaaagaaagagaaggcacatgtcatggacataaactgtgtgcgatggtgtcctcaggacccaaggttattggcatctgcgagcgacgacggcacggtgaaattgtgggaactgagagggaatgtgcttgattgagttctgttgtaatcactgtagcgtgcgttgagataatagagcagattaggtatcacctttggatttctgttctactgagctcggctctctgtagttcatacttgtatatcgagagggtattttatgatggtcttttacaagatttaccgtgcaaactatgaaccgtgccatcctctcagagacatggtattgatcgtgtatacattatggaagggacagccgaacatgtccaaccattttttaaagttcaattcatgtacaatgatgagtgatgaataatgaataaagatttgcagcttcttgtatgcggaa

SEQ ID NO: 8461 - DNA, 525 bp, Zea Mays
ccaaaaccatagtaaccctacccttttgaaactcatggatcctataaatggtcttcgagtcctgatcattgatgaagataaagatgatgcaaaccatatgaaggacatgctccatcaatacaactttcatggccctggagctaatacagatggagaacaaagtaatgccacaaactcttctactaataaagagtatatgaataacgatatttatgaagtgcaaagctccacaggaagcaattcagtagatatgggccttgtgaactatccagaatctgaagatggtgaaactgtggagaaatgtcctaatgcataccaagaccctgaagttggcacatctcccaacaactaaagctacacctagattatgttgcattatggaggcgcatcaatttggacatagtagaatcaataattactatgatctaatatgagactaaataatcaataatagccatagtaatgctaatggaaatacatgtatcttcatgtaaaacaagatcctatgttcaaaacccatacata

SEQ ID NO: 8462 - DNA, 1477 bp, Zea Mays
gattgctcatgatccagtgaagcatgaacttactaaacacataggtgttgatgcatcctttactcgatcacattgtcagcagaagactattgatcttcaatatgtgccctcagaatatcaattggcagatttcttcaccaaagcacaaacaagagcacaacatcagtttcacttgatcaaactcaaagcttcagatcctccatttccaccttgagtttgaggaggggtgttaaggcccattaggcccaggcctactagctatatatattacctacagtccttagggactaatcatctattatcaatcccaagacatgaaaccaaattggttcaaagagatgcacattattcctctcagacaatgctcaatacctctctctcatagtttactagtatggctcatcaacttaattctcaggtgcatctcatgagcttaactggaatatcagcttcaaaataatacaaggaatttgtcatggtttacagttcttacatgaatcgcaaagacccataattcacatggatctcaaacctggcaatatattgttggatgataacttaatgcccaaaattgccgattttggtttatcaaggctctttggcgaagagcaaacacgtgcactcacttcaaatgttgtgggatcaagagggtacatggctccagaatattactacagaggtgaagtctcaaccaaatcagatatatacagtctgggcatccttataatcgagatagtaacagggttaaaagtcgattctaacactgtagacttatcgtctaagaaccttatcgacaatgtacaaaggatttggacaaaaatgccgcagatagcttctaagtacccgacgttggaagcaagcaacctccaacaagttaaaagatgcattgatgctgggttaaattgtgtgagcgaaaaaccaagagaaaggccatccgcaggggaaattatcaagcagcttaacggaagcagctttccatctcgcaactagatgcttagggcctttggtctttttctagtttctgaccactaaaagctgatgcggaccgtcaatcgccttggcttttcaatcaccttttatgagaatcgtttcagtaaaaaccatctaaaattaacataaacacataaccgattaagtcgtcacaatagtaggaatatgtcactttctagattatgaactctttggaccacttcattttcttccatacgtgatctctacgatacttagattctcttcacaaccagattctttctgcagccagattctcaaaaaagctggtcagaaaaaaatgaaccaaataggccttagatcttgatctaaatcaaattcttagggcaaattttgtaaccctatttttctaatagatttctattttactaaggcttcgtttgtttcgttggaattgaattccattctaatgatcataatttagacacaaactaattgaattaaaatatttgtatatgtaatatatttg

SEQ ID NO: 8463 - DNA, 2684 bp, Zea Mays
cgggtcaacggttcacacggtcataattggaagagttcgagttgcttgattgcttctgcggatgcgcttcccccatcctcacccaaaacctaccggcaaaacctacagcccttcgtctcccacacgcactctgccactcatctctaggttgtgtacgatcatcagcgagaggagctccctcgcttatttgtctctgaaacagacatcattgcttcaggtattctccagttagggaatgaagggagattccagcagacaaaatagcttagaggacaactcacaaatactaagtgcatttccaagggaaccaaagctagaattcctaaaaaacatcacgaaagacttctcaagtgaacgagtgattggacatggtgtctttggagtggtttataagggcatacttcagaatggacaactggttgctgtgaagaagcttgtgcaaacatccggagttcatgatagacggtttcagaatgaggcaggcaatctccagtttctggagcacagaaatatagtcaagttacttggttcttgttaccaagtagaaaagaaattggtggagagaaacaacaaacattttctatcagatgttccagaaaagtttctatgctatgaatatctgtctaatggaagccttgacaactatatttacgatgaatcttctggaattgattggaccatgcgcttcaaaataatcttggggatatgcaatgggttacattttctgcatgaggagcgaagtgaagccatagttcatttgaaccttaaacctagcaacataatgttgggtgacgacatggtgccgaaaattgcagattttgggctttcaaggttgtttggtgaagaacaaaccagaactctcaccaaaaacgttgtgggatggataggatacattgccccggaataccattacagaggagaaatatcagttaagtcagacatattcagtttgggtgttcttattcttgaaatagtgacaggactgaagagggacctcaatattcaagacatttcttctgagttactaattgacaatgtatctaaaaattggacagaaatgtcgcatatagaatcaaagtatccatccttggaagaacaacacctactacaagtaaaaagatgcattgaacttggtttgaactgtgtggagtctgatccaaagaaaaggcctactgtaggatcaataattggtaaactcaaagaaatcagtcatgaagctagcatacacaaatttatggagaagaaactgcaactgataactgaattcccaagggaaccaaagctacacttcatagaggttatcacaggggactttgccaatgaacgtgagattggtaaaggttcttttggggtagtttataagggagtgcttcaaaatggagaagtggttgcggtcaaaaggcttttggtagttgcaaaaactaatctggataagcaatatctgaatgaagtatctagtctgattgatctcaaccatagaaatatagtgaagctatttgggtattgtaatgaaatacaacggaaactggtggagtcccatggaacatatgtttttgcagacacagaagaaaggatactctgctatgaatatttgcctaggggaagccttgacaagtatctttacggtgcatctcatgagcttaactggaatatcagcttcaaaataatacaaggaatttgtcatggtttacagttcttacatgaatcgcaaagacccataattcacatggatctcaaacctggcaatatattgttggatgataacttaatgcccaaaattgccgattttggtttatcaaggctctttggcgaagagcaaacacgtgcactcacttcaaatgttgtgggatcaagagggtacatggctccagaatattactacagaggtgaagtctcaaccaaatcagatatatacagtctgggcatccttataatcgagatagtaacagggttaaaagtcgattctaacactgtagacttatcgtctaagaaccttatcgacaatgtacaaaggatttggacaaaaatgccgcagatagcttctaagtacccgacgttggaagcaagcaacctccaacaagttaaaagatgcattgatgctgggttaaattgtgtgagcgaaaaaccaagagaaaggccatccgcaggggaaattatcaagcagcttaacggaagcagctttccatctcgcaactagatgcttagggcctttggtctttttctagtttctgaccactaaaagctgatgcggaccgtcaatcgccttggcttttcaatcaccttttatgagaatcgtttcagtaaaaaccatctaaaattaacataaacacataaccgattaagtcgtcacaatagtaggaatatgtcactttctagattatgaactctttggaccacttcattttcttccatacgtgatctctacgatacttagattctcttcacaaccagattctttctgcagccagattctcaaaaaagctggtcagaaaaaaatgaaccaaataggccttagatcttgatctaaatcaaattcttagggcaaattttgtaaccctatttttctaatagatttctattttactaaggcttcgtttgtttcgttggaattgaattccattctaatgatcataatttagacacaaactaattgaattaaaatatttgtatatgtaatatatttg

SEQ ID NO: 8464 - DNA, 1315 bp, Zea Mays
gagatcgagccatcagctcgagtgctgctcagttcacgccagggaggcatgcagctcatcagaagggaacctcagacaagcatggcgggcggcacgaggtcacgctgccccgtgctgctgctcttgctcctcggtgtgactactgctcgactggcttcaggcgtcgtcaccgacggcctattaccaaatggcaattttgagctcgggccggccaagtccgatctgaacggcaccagggtgatgaaccaaaactccgtaccgaactgggagatctttgggttcgtggagtacatcgggtccgggcagaagcaggacgacatgatcctagcagtgccggaaggtgcatgcgccgtgcgtctgggtaacgacgcgaccatccggcagaagctagaagtgatccggaagacgacctactccatcaccttctgcgcggcgcgcacctgcgcccaggccgagaggctcaacgtgtccgtcgccgccgagtccggcgtcctcccgatccagaccgtgtacaccagcagcgggtgggactcctacgcctacgccttcagagccaggcacagcaccgcgtggttcagcatccacaaccccggccacgaggacaacccggcgtgcggccccctcatcgacttcattgccatcaaggccctgaaccctccgcctctcgctcagggtaacatgctgaggaacggagacttcgaggagggcccgttcatcttcccggacacggcgtggggcgtgctggtgccgccgatgagcgaggacgacgtgtccccgctgccggggtggatggtcatgtcggacacgaaggtcgtcaagtacgtggacgcggcgcaccacgcggtgccgcgcggcgcgcgcgccgtggagctggtggccggcagggaggccgcgctggtgcaagacgtgcgcaccgtgcccggccggcgctaccgcctgtcgctgtcggtcggggacgccgcgaacgggtgcgagggccccatggccgtcgaggcgtatgcggcgcgggcgacgctgaggacgacgtacgagtccctggggaagggcgggagcaggcgcgccgcggtcgagttcgaggcgaccgcgaacctcacgcgcgtggtgctccagagctacaaccaccacatgaagcccgacgggacgctctgcgggccggtggtggacgacgtctccctcgtcggcctgcgctagcacgccgcgcgcaggcggtggaccctctctttgatgatgacgatgatgcggaatctagtgccccggcggggttgtaaggctctttttgggccttgcagtgtcttctgtgcctcggttggtggat

SEQ ID NO: 8465 - DNA, 558 bp, Zea Mays
gtagcatgtacttggtcttaaaatatactgtgatgttttaatttcccctacccactgcaggcgtatgcagaggaagcgaaaatgctgattaatgaagtaaacaatgcactatcatctttcttaacagtagacaaattggaaacattatactcaagggtttcagaattcccagttaagctaacagaatcatcgactttgttttgggagttatcttctgcaaaggagctggagggttttctccttgctgcggatggtgccaactttagcattccagagctgaacattcttaagcaacgttactcaaattgttgctcttgggtgagtcgtgctaagaacatactcggaaaactttatgctatgagtgactatcacaatgctgttgaggagttgacaggcattctgaaggaagcagaattactaggagtaaaagttgatgaattgcctattgtggagaaagaactaaagaggtccttatgtaggaagcaagcatctgaggcacttgcaacagtaatgtcaatggaggtggttgaagaagttttaaaagaagctttgatgtaa

SEQ ID NO: 8466 - DNA, 4652 bp, Zea Mays
gaactaccaccgggtgcgggtagctagcgggtagggtaccaaaacggcggcgctagaaaggaaaacctgccgtactgtcccctcttcccttttactgccgcctgccggccgcgagggagggagggacggaggtgctcatctgtgcggcggcttcggtgtcggtcccaggggaggcggggagccatggcgcggaagcacggctggcagctcccagcccacaccctgcagatcgttgcaattacagttttcttccttctggtggttgcgttttatgccttctttgtgccgtttttgggaaagcaagtagttgagtatattgcaattggcgtttatactcctgtggcacttgcagttttcatcctttacattcgatgcaccagtataaaccctgcggatcctgggatcatgtcaaagtttgaggatggccttatcaatataccaaccaatggctctggaatagaaggcatgaatttgccccagaaagtaaacaatgctacaggaacaaactctccaatgtctacttgcagaagttctctagatgggcattctaatcaaagaggttcatccataggggaggcaaacatgaatctaggatcacaactgccaaagaaaagatcaagctgttggttgctaggtgggcttctatgtgctacatttgtcaaggaagactgccgaaaaactgatgactcggagcagcaagcaaatggggaggaggctctgttttgcacattatgtaatgctgaggttcgcaaattcagcaaacactgcaggagttgtgacaagtgtgtggatggatttgatcatcattgtcggtggctaaataactgtgttgggcggaagaattatttcacattccttgctctgatggcaatcagtcttatctggcttgcaattgaatttggagtgggaattgctgttattgtactatgttttgtcgataagaatgcatcaagaaatattcaagacaagttggggaatggcttgactcgtgctccatttgctgttatcgtgggcatatttaccttactttcattggtggcatgcatacctttgggcgaacttctctttttccacataatattgataagaaaggggattacaacttatgattatgttgttgcaatgagagctatgagtgaggcagctccagaggacgaggaaggagaaaatatcatttactcgccatcaaattcagcaacaactgggttcagtgtaggaagttcacttggtattcaccacaaaggtgcttggtgtactcctccaaggatatttatcgatcaggatgaagtgatcccacatctggagcctggaatggtgccttcaaccgtggaccctgatggtgctggatatccggaaagagcaaatagagccaagaaggcagtcaaaatcagtgctcgcagcctcgcaaagctcgataagaatgaggtaatgaaagctgctgcaaaagctcgggcatcatcctcggttctgcgaccaatagatgcccgccatggtcatgaagctgatgtcatctccagcggcagtgccagtgtcaggagcagcatgagtgttgactacagtggcacaaaggaatcaaacagcgagatgaaactttctccgcttcataactcatacccccaaagccttgcaagccaggatgaatacgataccggcacaccaaccgcaagcagtttaagcagtctggtcaacatccacaagcttgcatcccactctcagttcagtgctgcgcctcgccctgcacctccggaaagacctgtgccggcgatggtgcggccacctgttcccaccacacaaataaccaacccagggataccgcggccagctgttcccacaacacaaacaaccaacccgatgttccaatcagccacatcttatgttcgagagaaccgaagggcctctgtcgtctgggatcaagaggctggtcggtacgtgtcagttcctgcacagacaagaacgggaactggagccgacctgccagcaagaaacccacggttcttggcgaacccaagtggcgagccaagcagccatgtgaggggtgttgcacccggcaacacatcgtcctcagcaatgccgtcagggcagccttcggagaggctgacctactctgggcagtcgatattcttcggtggccccatgctgaacacccctagcctgggcgcccagaggaacgaggcaggcgcaagagcgcgtccggagggaagcagagatcctaatgcccagcagcgtgacatccggggtgagaaagcgaggacaggctccttgccagtatttgctcctgggacgatattgcagaggcagaaggggcaagcagataaaacctcgcgggctttgctagtttgcttcaccccttcccttctccccaccgcccccgtccccgtcccccaccactggcactcaggtgaagggattcctgtgccgccgcctgccctcgccttctgcctcccggcgcccactcggccttgcggataatttgcggctcggtcccgggcgtgctcagtctcggttccagtggccgcttcgatgtacctgaccgccgtttccttcccccccgcagccgccttctcgtcctcatcccagaagctgctgcctaggtcggccggggtcggccggcgtctggtggtgcgggcagacgtcaaggtcatatcgacgggcgaggcctgccgccgcgggctcgccgccggcattgacaagctcgccgacgccgtcagcgtcaccctcggccccaaagggaggaatgttgttattgaccaagatgatgtacctaaagtaattaatgatggtgtcacaattgccaaggctatagagctcccaaatgcacttgagcatgcaggtgccacgctacttcaagaactagatagcatccaagacaaatagcgctgttggtgatggaactacaacggcaattgttttggctcgggaaatcatcaatcttgggttgttggcagttgccactggtgctaacccagttgcattgagaaggggtattgacaaagccgttcatgagctaattaagatcttgaagagtaaatgtatccctgtgagtacaaaggaggacataaaagctgttgcgtcaatatcatctggcaatgatgaatatgttggtaatctcattgctgatgcattggagaagataggtcctgatggtataatcaaaattgagtcatcatcttcaatatacactacagttgaggtgcaggaaggaatgaagatagacaagggatatatttctccatacttcatcacaaatcaagacaaatcaattgttgaattcgaaaatactagagtgcttttaactgatcagcgtgtgaatgatgttcaagagatacttcccttgctggagaagacaacacagttgagtgtccctttattaattattgccgaggatgtgtcgcatgaggtatattcaacactggttcttaacaaactgaatggattgctaaatgttgcggttgttaaatgtcctggtttgggagatgaaaagaaggccattctccaagacattgctattatgacaggtgcagatttctttgctagtgaccttggctggggtcttcatggcattacttctgatcagcttggtatggctcagaagatcacaataactagtgaatccacaactatcatagcacatccttcaatgagaccagagattgaggccagaatcatgcaactgaaaaaagatctagaggagacaacgagttcctatctaaaagaaaggttctctgcaagaatcgctaaactttcaagaggtgttggagtcatcaaggttggggcagccactgaagctgaactcgaggataggaaactgagagtagaggatgcaaagaacgcaacttttgcagccatcagtgaaggcataactcctggtggtggggtgacatatgttcatttatcaaagcatattcccagcatcatggaccttgtggacgacacagaggagaaaatgggtgtaaatatagttgggaaggcacttcttgtccctgctatgacgatagctcgcaatgccggggcagacggtccagctgtcgtggagaagcttctcgccagcgagtggcgggttggttacaatgcgatgactgacgagtttgaagaccttgtcgctgctggtgtggtggacccgtgcagggtcgcgagatgcgtgctccagaactctgcttctatcgcagggctgattcttatgactcaggctatgatgtttgacaagatcaagaagaagaagtctcccatccccgagattcctggtattccaccgcttcagataagccaaaaagctaaggcttgagctgttggatgctgccctggtgttgttggctggatgagttgtgttgacctaggaagcagcagaatgcccagtgagctgcccaaaccaggtagaacagtgagcacttggaatgcccatgttacactcgttatataatttggtggtcggtgcagtattacttgtcatgtctgcataaattttgcattggcgggtgagtcggcaaccaatttatgtctgacttgggaacgtaaacgaacgaatggttgatttgttgctacatagagggccccctttgggcatcatctcgagcaaagctattttgccttgtatctccctttgaaagcagatctgtttcatcaattaacatacgaggtaacacagtagcttgtag

SEQ ID NO: 8467 - DNA, 2169 bp, Zea Mays
ggcgcgtatacgagcgaaggaaacggaagtttaagttattcccaaattgaacggcccaaagggaaaccccaccacaaccggtctcgagtctcgacagatcggcgtcgatgaccctaccactcgctggccctcccacgccttccccggcatggccgagcccaccccaccgtccctcccctcgtccgactgcgcagacgtgctcgtgggatcctccgccccctccttcccctacatccgcggctggtcattcacctccgactcgggcgctgctatgggttctgtagaggaacatctccaacccaaggtgtgcgtgcagacgagcacctccgcggggcttgagcagatcctgccctggctcttctatcacaaggtcgtcggcgtcgcgcagttcctgctcttcgtggagggcaaggcggcgaaacccaatgtcgcgggagtcctcgagtcaattcctggggtaaaagtggtgtacagaactaaggatcttgaggagcggcaggcacggaggcggttccctgtccctcttttaatattctaaggagtgacggaagttacatgataggcaccgagtcggctatcaagttcatgatggaaccgagtcggtacaaagtcatacgtgaattgaattctatgtcttcgagtttatctcttattctgttgagatcttactatatctgcgcttctagaatcctcctggtggttgtaggctcccctggtcctattgccgagtccttcggcttgtggccgagcccatgagctcttttgctcaggctcttctttacgaagcttggatagatgccctagtatatattattgataggacatagcatgtcataatgtctggcttggcatgttctttgatagagtttttatcactcatctctgtcaccttcctgatgtattttattgcttgggctcaagtcgaatctggaatgagacttggctttcaggatttttctacaaaccttgcaactatgaactctttgtgaagcaatccctcaacatggagatggctattgtaatggctcgggatggtggcatggattggatcatacatttagacactgatgagttactttatcctggcggagctgctgagtattctgttagacgtttgttagctgaggtccctcgtgatgtcgacatggttatttttccaaactatgaaagcagtgttgagcatgataatataaaagatccattcagcgaagtatctatgttcaagaggaattatgatcatcttcctaaagatacttactttggcatgtataaggaagcgacacgaggaaatccaaattattttctcacctatggtaatggaaaatctgctgcacgaattcaagaccatctccgtcctaatggcgcgcacaggtggcataattatgcaaagagcccaaatgagatcaagttggaggaggctgcagttctgcattatacatacactaaattttcagatttgacatctagacgtgatcgctgtggatgcaagcctacaaaagaagatgttaagagatgtttcatgttagattttgacagagcagcttttataattgcatcaactgctagtgaagaagaaatgcttcgctggtacaatgaacgagtcgtgtggaccgataagcagctgaacttaaagcttctgaggaaaggagtgctgactcgcatatacaccccaatgacaattgttcagagtctgcgcgaatccggtgtcttcacttccgccattacagctggccaacctgctgtgaatgccaaactctcacccaaggaaaccaatgcgcagagccaaaatgttaccgcacctgggaacatgacaagagtggtcagatctactgattcaaaggcatctggcagaaagatactgcaagccgttgatcttgccttcagcgatactaatgtaactgctgttccaccgttgtcgccgcccagtttggacgaacacaggcatcatagtgaataataatgtcatacgtatcatatatatattttttgctcggcgtataagttcctaagaaaaggaggaaaagaaagttactgacatcttcgttaagagaagtgctaacatcagcttggatggtcaatttttatgcaatcgagctttatttgtttcatttttaaactaaaattaattaatatctcgaacgaattttgaagaaacatttggattgtggt

SEQ ID NO: 8468 - DNA, 2510 bp, Zea Mays
gtccatctcaccgtctccttgaaacgcacccgagccaggtcgagccgtcgagtcgagtcgtcgacgacagcacgcggcgggcggaaggggacgcagacacgcagttgcaggctcgcagcagcaagaaggaggcggcgtggaaggggaggcagatgcgggaggcccaccgcagggtcgtcgcaccagatggacacgccggataggccccgcgccgccgccgccgccgggttcgaggattctcctgtcttcaatttcatcaacaatctctcgcctataccaccacctaaacctttagactcagcacataatgtgcagctattcaagtcatcagacttggcacctgtttcttcgatctttgcctcaccacatgttaatccagtgaaggaaactaaagttttgatcagggatgaatctgttcaccttcctcaagaattgcactcgcctagcagtgtcaggactcgaatagacacctcaggctcttttagaatgatcagatgcaaagacattgtgtcggacaattgcaatatcacttgtcaactaaacgaggcatctattgattcttctgatcatacatcaaactctacaggccaattgactcaatccatacaggatgctgctggcagtatggaaagcgataaggatcaatgcgatgccaataaaacagaccttaccatatcccaggagtgcacaggcctagaaggtatgaaccttgatgagagtggcccagacaaaatggattcgtcacattctgggattgttgttcatgaaaaccagctatctgaacaaaacaatgacgaacctgcagcatataatgagggttacattattacacaccaatcaactagtgatatgctcactttagccataccatctggaacagaaacacaaccagtgaatgatacacaaatggctgataacccctactcttgtgaatccttgttggatgatcagtcaagtggatattgcacccagaattctgtgcatgaaccccatttgtactggactggggcagttgaagggtctgcagtatcctatactccccaaacactccctggtgctttgcaaagtcagctgatgccatgtaacaagctcagtgaaccaaaagattacgtgcctactgagcaaaatttactgtgagtgttttgctgctggagtctattgttctgagccttgttcgtgtatcggctgtcagaacaaccagagtcatatggaaacagttctgtctacacggcaacagattgaatctcgcaatccattagcatttgctcctaaagtcattcatacatctgagcctggtatggacttaggggacttttccaataaaactcctgcttcagctcgtcacaaaaggggatgcaattgcaagaagtcgtcgtgtctaaaaaaatactgtgaatgttttcagggcggcgtgggatgctccgtaagttgcagatgcgagggctgtaagaatgcttttggaaaacgggagggggcttctgtgttaggcataggggaacctaaacagggattggaagaaaagtatgtttgtgtgaaagaagaaaaaagtgaaatcgataaacagcttgttgtctaccagactactgacgctgctcctgctgaaaatgtactgaccacaccttccatggtggagtgcagacccttggcttgtcttccacccgcaagctccaagaaaagctccaaaaaaccacggtcttcaacaaagctcacaggacatccttctcggccgtgcaacttacaagctcctccaaagaccgacgttgtgctctccccattcgaaaactacgcggaaatggtcctcggtgatagcacatcagatatcctgaagggaaattcatctcctcatacttctgttaaagttgtgtcaccgaataagaagcgaatctctcccccacggatgggtatcgggctatctccaatctgtaggagtggcaggaagctgattctcaagtccatcccttctttcccttcccttggtggtgatgtaaacaacgaggatccgaaggccaagctcccagcgccttgaatttatcatgttttgtgtcactcgtggcccttcccgttggttctcgaaatcgcccacgcgctgactgcaccagactgtttctaccaccataccatcagatagtggatggacaaccaagcgtgcaccgtttcatcatttgtgtaattgtgtttgcttcgattaataattattcacgtactgctataataacccactgtgatggcagaattctacctacctcccagaaccaccagtggcatttggtttgctggtaagttatgtctcggctcaaggacgttgctgtgttgcctgtgcctgtatgtctgtataatttatgttcattatccgggatcaagatgtggaacctctatgtacctgatggcagaactgttaagacatattttattttatttttatctgaggttaaactgtgagacttatttgtgtaaggtcatactgttttttacattttttccaggaacgtgcctgagcatgtctttcatta

SEQ ID NO: 8469 - DNA, 2864 bp, Zea Mays
tgctgatttagcgagttgtggtgtccgtttggattgtcaccccgtccccacgagattagacaagttctggtgtatgcattgttcggaaatggagggtttggactttggaccttctgccctccaatgctagtgcttagatcggcaaatcacagcattgtctgataggtttggtggtcttctgtccatgggaaatgcgagttcttcagagcctgaggattctcctgtcttcaatttcatcaacaatctctcgcctataccaccacctaaacctttagactcagcacataatgtgcagctattcaagtcatcagacttggcacctgtttcttcgatctttgcctcaccacatgttaatccagtgaaggaaactaaagttttgatcagggatgaatctgttcaccttcctcaagaattgcactcgcctagcagtgtcaggactcgaatagacacctcaggctcttttagaatgatcagatgcaaagacattgtgtcggacaattgcaatatcacttgtcaactaaacgaggcatctattgattcttctgatcatacatcaaactctacaggccaattgactcaatccatacaggatgctgctggcagtatggaaagcgataaggatcaatgcgatgccaataaaacagaccttaccatatcccaggagtgcacaggcctagaaggtatgaaccttgatgagagtggcccagacaaaatggattcgtcacattctgggattgttgttcatgaaaaccagctatctgaacaaaacaatgacgaacctgcagcatataatgagggttacattattacacaccaatcaactagtgatatgctcactttagccataccatctggaacagaaacacaaccagtgaatgatacacaaatggctgataacccctactcttgtgaatccttgttggatgatcagtcaagtggatattgcacccagaattctgtgcatgaaccccatttgtactggactggggcagttgaagggtctgcagtatcctatactccccaaacactccctggtgctttgcaaagtcagctgatgccatgtaacaagctcagtgaaccaaaagattacgtgcctactgagcaaaatgccttgtcacagcacttacgtggcatgcgtaggcgcagccttttcaatgaaaaggctggaattagtaataaaggtgtagacaaaacttcggatcatcatcctgtaaattcaactacccccaaatgcaaaactatttctggtgacaactcaaagcctctaagaacccctccatgcgcattacctggccctgctggatcttctccagcaccttttgagcaaaacattataaatgatgatttcactcaaacaactgatgttgcaactgccgaagcttctagtcagggtagtcccaagaagaaaaggcataagtttgacaatggtgatggcacttcatgcaagcgttgtagttgtaagaagtcaaaatgcctgaaactttactgtgagtgttttgctgctggagtctattgttctgagccttgttcgtgtatcggctgtcagaacaaccagagtcatatggaaacagttctgtctacacggcaacagattgaatctcgcaatccattagcatttgctcctaaagtcattcatacatctgagcctggtatggacttaggggacttttccaataaaactcctgcttcagctcgtcacaaaaggggatgcaattgcaagaagtcgtcgtgtctaaaaaaatactgtgaatgttttcagggcggcgtgggatgctccgtaagttgcagatgcgagggctgtaagaatgcttttggaaaacgggagggggcttctgtgttaggcataggggaacctaaacagggattggaagaaaagtatgtttgtgtgaaagaagaaaaaagtgaaatcgataaacagcttgttgtctaccagactactgacgctgctcctgctgaaaatgtactgaccacaccttccatggtggagtgcagacccttggcttgtcttccacccgcaagctccaagaaaagctccaaaaaaccacggtcttcaacaaagctcacaggacatccttctcggccgtgcaacttacaagctcctccaaagaccgacgttgtgctctccccattcgaaaactacgcggaaatggtcctcggtgatagcacatcagatatcctgaagggaaattcatctcctcatacttctgttaaagttgtgtcaccgaataagaagcgaatctctcccccacggatgggtatcgggctatctccaatctgtaggagtggcaggaagctgattctcaagtccatcccttctttcccttcccttggtggtgatgtaaacaacgaggatccgaaggccaagctcccagcgccttgaatttatcatgttttgtgtcactcgtggcccttcccgttggttctcgaaatcgcccacgcgctgactgcaccagactgtttctaccaccataccatcagatagtggatggacaaccaagcgtgcaccgtttcatcatttgtgtaattgtgtttgcttcgattaataattattcacgtactgctataataacccactgtgatggcagaattctacctacctcccagaaccaccagtggcatttggtttgctggtaagttatgtctcggctcaaggacgttgctgtgttgcctgtgcctgtatgtctgtataatttatgttcattatccgggatcaagatgtggaacctctatgtacctgatggcagaactgttaagacatattttattttatttttatctgaggttaaactgtgagacttatttgtgtaaggtcatactgttttttacattttttccaggaacgtgcctgagcatgtctttcatta

SEQ ID NO: 8470 - DNA, 3265 bp, Zea Mays
tatatttgtattttttcattgtgtgcttctgcttaggattttactaggatctagatatctctatatcgaagggcagctgtctcaccgagtcatcaaatcgtggagcgatatttgcagggaagacttgcctcgatttatcccttctatagaccttactcatgtgagagcctccggcaacggagtctgcccctagatatctgcatatcatgggaatatgaaaaggctatcctgtcctgtatatctatttctgttttgtaggattattaaggatttggaaggatcctagggaatagttgaatcaataattttggggggaaattaccctcatccctccagaatggagaacaagtcagatgaccttcagcacgagcatggtatgcccgatcagacgtctcgtcccttcacttcactcttactgtcggcaacatctgtcgcccaagcagcacaacaagataccggttctgacatcaaatcgcttagtctgctgcatggaagtagcttactcccacctgatgatggttacatctggaaggcgcgcgcgcagaacattgttccaggctgtgaatatcccaccatgtattacaagtgcgcccaggacaactgcaacacaaataaattggtggtatgctctgctgatggtcatcaggttcttgagacggttcttagtggttgccacaaccacccacgtcagcaagattgtgatctacccatacccaaggtatcaaaaacggatacttcaatgcctgtgtccagagagggagatgatgagcaactttcaagttcaagtgatagcgatgaagatgatgttgaccaagcaagagttgaagacatgtgccacatccagctgaaaggatcactgcacaaactggaactgcaaattctcaccgacatgctggtagaagaagaccgaagtccaaggtgtgggaagaattcagtgctgtgttaagagatgacaaaattcaatgggccgaatgtaagcactgtaaaatgagccttggtggaacaagcacaggaagaacaacccatctgcggcggcatcttaagatctgtccagcgctacctgcaactgatcggatgcagaaacagaggtcatctccacatcctggttccaccattgagagcatctggaagttcgatcaagacagatctcttgaattgctcatcaaggttttagtgtccaaccttttctcctctccattgacaagcagcacaacttttagacagctatgggctggcatctgccctactaatgatgtgttatcggacgctgctattgaagagaagtttctcagtatttttgagaatgaaaagcttaagcttaaggaggaaatagcacttgcacctggcggagtttttctgacagctgcaagcagttctcttgaaactaagaacttcatctttttgaccgtgcacttcattgataaagaatggaacttgaataggaaaatcattagatgttgctttacggggtgtgaagactttgatgctgagtattttgttagcatgtttccgaatttgcaatcatgccacaatttcattaatgggaatgtgagagcagctgaagaagaaatagtgaaagaggcagtacaaaattggaggcttgagtggaagcttctaggaatttcatcacgtaagtcattagctgatgctgctgtactggctcttgagaagaatcttacagaacagaactatcttcttgccaaatgtaagttgttgaatctcccctgcataatagatgccctaaatgacctttttggttatgaaatcaatgaatatgtactaagtacaagtaagatgtggtttcagtacatgacatgcaccccactacgtagggataaatacaaagaaatcctgtcacgcctgcaaataaaccgaccttcttttggttcgcagagatggtacttaactttccactcattggaagctgctttgcagtttaacaatgagctgccagaccctcaacagatagactccagatattatccagctaagccatcttttgcacagctaaaagcagcagagaacttttgtgatcttgtaagggcgatttaccatgcagtaaaagtagtttccagaacttgcaatggggccttgaattcacaatttcacgcaatttggaacttgaagatggctctgctccgttcatctacaaaggaaaacatcgaccaagtttttaatattgaacaaatgaagctgaaatttgaccagctttggaggaaatggtacctatggctgtcgttagctgttgttctagatcccagatataaattcaggtttcttcttgtttgctttaaggaagcctttggtagtcatgccaaaaggtacatctttgaagtgcgaggaaagctgtatgagctctttcttcagtactcttgtcatgttgatcaacaaaatagtgacagctttgatcagagaaccaatgatttacagttggatacacatggtagcacaccagtgcatgccacaagtcaaaatttcattgagcaagcagcacatgaggaactgggagaagtcattagataccttgaagcagagcttattcctcaaaatgccaattttgatattttgaaatggtggaaggaaaatgctttgacatatccagctcttgccaggctggcttgcgacatcttagcaattcctggatctgcggtctctgctgaatctgcatttgatgaaactgatgaacgggtgggacttttcaatctgaagctgagtcctgaattagttgaggccctcgtctgcacccaggattggatcaaatcttcagaaataatttctgacgaagttggtggaaatataaatatgcctgcctagtgcacagcaagctccctcggccgtttcattggttcaataaaaaaatgaagagccctttagaccttctcagtataatgcgtgacggagtctaattggcaatgcttgttttgttgtgctattcagcgtgcaaaatatgaacaatattagtcttttattaagtcaattttgcagtacatggctgaaatatggaatgtgtactatgtgaatggctgaaatatattaaaaaaaacttcaaaacccaataattgtttttgctgacggatcagatttgaggtgagatgtgccatatatatttatctttgaagaacgtaataaggttcgtcgcttaattttgtttggagagtttgttctgacagttcataaaggctcttgatgaacaagtttttagcaggagattttttactaaaaaatctggaaattttgtttgatggatagcaaatcgaaatcgttt

SEQ ID NO: 8471 - DNA, 2956 bp, Zea Mays
gcgtagccgacgacgccgacgacgaggcagccatggccgcccccgccgcccggagaatagttggcgctgaggttcccatacccggctcggacaagctgcggtggatcgacctcaccatcccctcgtcctccgccgctgcgccggcgagcccctccgatcccttcgtctgcgtgcccccgcgtgctgcctcggggtgccacatcatcccttcgggcgattctcagtattacctctcgtggaggattcacgaggaacacccaaatgtgctggaggtcattgaacttagtccctccaaggagttccctagctttggactgcgtcttgccttccaggaggcgctatctccattcgcctttctatgtgaacgagagggtcgcaggcaaggggagcttgtatatatgctatatgtgcttaccgtttctggagttgctcttttgtgccacctacgcagcccattttcctacgtatctggttcagtgctgcatcaggatgatatagctgagtttaatctccaaactcaagctcagagcgcaaaggttacagcggtaacagcgaagccaggatgtattgtgattggtcggcaagatgggtccatctgttcttacagtcttggcaaattagccccaaactcaccaggtttctcgaatgaactacgagatgatgctgggattggacgtttatggactctcatgtcaagaacaaagactgtgggtcctgtgcaggacatagtagcaactgttgtaaatgaaagggacctgttatttgttcttcatttggatggacacttgcgcatatgggataatcacatgaaacttctcaactataatgtccactcaaatgacattgaaggccatccgtccaggctatgggttggtaaggctgatgatgatcaggagttgatatctttggcgattctgcatcaaaacactgtggttcaaggttgtgattatgttgctgtatatggcttcggtttttctgctgcggaaaggttcatgttctcttctgaaccttcaatttctactatacctttgctagaggggaagcttgcggacttgaaaatagccacatataagctttggatacttaaagaatttggctccatgctctatgaaatattacagtatgacattgacaccgaaactgcaaaatgttgtagtgagaaggtttgctgttatgtgctacaagaagatgctatcagtgaacagttgtttcaaagttctgacaatgcattggatgatttggtttggacagctgattcaatgttctcctccttgaaggaacaggcttttactttgatttcatccatgtttctgcggaggctacttcaaccaggagtaaaccactgttctgccctacgtgaaaccttactagagcataaaaggttcctatcagattctgagttccagtcacttacagcaaatgggctacgaaaagagatattatctattatagaacaagagggaagttcacagacagcaagtgctacagcttatcactggaaacaattctctgcacggtacctccacaattggtgctggcacaataagccctatggattgtttcttgatactacaaatgaagtgtttggtttagtaagaaagggttcattttctctattccgttgtttggagggtctggagatgcttatttatggttatgaccatggggtgaacttactcgacgatgtgtctgattttgaactcctcaatgaggtcctcagatgcatgggcaatatacaccatttgctggggagatcttccacagcagcatattatgaatccttaattagttctattatatcatctgatgaaattgtttcacatatagtaaagattctagagactggttttagtcatcagtcatcctcatccctcagtacattactaggaatggatacttatgtagaaagaaggcaggcagctcacaaaagtcaaaggaagttttctgttgagatgttacgatcttttcatacgttgcaatcaagatcagcatcctggtcggcagtattcgatgtgattgagaagtttatgaagtgtttgaacacaaacatgaacgtacaatcgtatggatcaaagagagtttgtaatgtaaattctgtgttactagttcaagctacttcacaggttgccagaacaatgtttgagtgtgcatttgatctgtttctgttccttagctatctggttggtgttggtgggcaggaacctcaccaacctcaccaccaaccattgacgattttagctatcaactttcttctcttcagcttggtaaatcagatgaactgtctttgcacagaaagcttggctgctctgattttacattggcttctttacttgattttccaaaatctcctgaaggggacgttatgtcaccttgttttctcggtccagcggaaataataaatctagtaaggaggtttagtagtttgattatgcatggaggaaattttgaatgtgtacacactttcttgggatgcacaattaatctatcagctgttctcatcagacatagtcagtatgaagctgctcagaatctgctgggaattctggaaacatacttgaacaatggaaaagtatcgcatactggtcaagatgcagacactgcatgttcagcatatcttcatctcaatggattttgccttctgatgattgcacatgatgaagcaaatattattttgagagaatccaaggttcatgatgctatccgatgctttttcagggctgcatccgggtatgaagctccaaaggctttggagaacttttcattggaaacagggtttcaagtttctggggaatctagatctatttctttgtggagacttaactactatgagtgggcaatgcaaatttttgagcaacactccatgagcgagggggcgtaccaatttgctcttgctgcactagaactagttcttctcgacgggatagataatggaattgaagctgagggtctccagaga

SEQ ID NO: 8472 - DNA, 3073 bp, Zea Mays
ggcaaaacccctccttcccgcggcggccgccggcgtagccgacgacgccgacgacgaggcagccatggccgcccccgccgcccggagaatagttggcgctgaggttcccatacccggctcggacaagctgcggtggatcgacctcaccatcccctcgtcctccgccgctgcgccggcgagcccctccgatcccttcgtctgcgtgcccccgcgtgctgcctcggggtgccacatcatcccttcgggcgattctcagtattacctctcgtggaggattcacgaggaacacccaaatgtgctggaggtcattgaacttagtccctccaaggagttccctagctttggactgcgtcttgccttccaggaggcgctatctccattcgcctttctatgtgaacgagagggtcgcaggcaaggggagcttgtatatatgctatatgtgcttaccgtttctggagttgctcttttgtgccacctacgcagcccattttcctacgtatctggttcagtgctgcatcaggatgatatagctgagtttaatctccaaactcaagctcagagcgcaaaggttacagcggtaacagcgaagccaggatgtattgtgattggtcggcaagatgggtccatctgttcttacagtcttggcaaattagccccaaactcaccaggtttctcgaatgaactacgagatgatgctgggattggacgtttatggactctcatgtcaagaacaaagactgtgggtcctgtgcaggacatagtagcaactgttgtaaatgaaagggacctgttatttgttcttcatttggatggacacttgcgcatatgggataatcacatgaaacttctcaactataatgtccactcaaatgacattgaaggccatccgtccaggctatgggttggtaaggctgatgatgatcaggagttgatatctttggcgattctgcatcaaaacactgtggttcaaggttgtgattatgttgctgtatatggcttcggtttttctgctgcggaaaggttcatgttctcttctgaaccttcaatttctactatacctttgctagaggggaagcttgcggacttgaaaatagccacatataagctttggatacttaaagaatttggctccatgctctatgaaatattacagtatgacattgacaccgaaactgcaaaatgttgtagtgagaaggtttgctgttatgtgctacaagaagatgctatcagtgaacagttgtttcaaagttctgacaatgcattggatgatttggtttggacagctgattcaatgttctcctccttgaaggaacaggcttttactttgatttcatccatgtttctgcggaggctacttcaaccaggagtaaaccactgttctgccctacgtgaaaccttactagagcataaaaggttcctatcagattctgagttccagtcacttacagcaaatgggctacgaaaagagatattatctattatagaacaagagacagcaagtgctacagcttatcactggaaacaattctctgcacggtacctccacaattggtgctggcacaataagccctatggattgtttcttgatactacaaatgaagtgtttggtttagtaagaaagggttcattttctctattccgttgtttggagggtctggagatgcttatttatggttatgaccatggggtgaacttactcgacgatgtgtctgattttgaactcctcaatgaggtcctcagatgcatgggcaatatacaccatttgctggggagatcttccacagcagcatattatgaatccttaattagttctattatatcatctgatgaaattgtttcacatatagtaaagattctagagactggttttagtcatcagtcatcctcatccctcagtacattactaggaatggatacttatgtagaaagaaggcaggcagctcacaaaagtcaaaggaagttttctgttgagatgttacgatcttttcatacgttgcaatcaagatcagcatcctggtcggcagtattcgatgtgattgagaagtttatgaagtgtttgaacacaaacatgaacgtacaatcgtatggatcaaagagagtttgtaatgtaaattctgtgttactagttcaagctacttcacaggttgccagaacaatgtttgagtgtgcatttgatctgtttctgttccttagctatctggttggtgttggtgggcaggtttctttgttgcaaaatgatgttgccagaataaaactgaagctgttcccaatgattcaagacatattgggacaatggattgttctccattttgtaggaacctcaccaacctcaccaccaaccattgacgattttagctatcaactttcttctcttcagcttggtaaatcagatgaactgtctttgcacagaaagcttggctgctctgattttacattggcttctttacttgattttccaaaatctcctgaaggggacgttatgtcaccttgttttctcggtccagcggaaataataaatctagtaaggaggtttagtagtttgattatgcatggaggaaattttgaatgtgtacacactttcttgggatgcacaattaatctatcagctgttctcatcagacatagtcagtatgaagctgctcagaatctgctgggaattctggaaacatacttgaacaatggaaaagtatcgcatactggtcaagatgcagacactgcatgttcagcatatcttcatctcaatggattttgccttctgatgattgcacatgatgaagcaaatattattttgagagaatccaaggttcatgatgctatccgatgctttttcagggctgcatccgggtatgaagctccaaaggctttggagaacttttcattggaaacagggtttcaagtttctggggaatctagatctatttctttgtggagacttaactactatgagtgggcaatgcaaatttttgagcaacactccatgagcgagggggcgtaccaatttgctcttgctgcactagaactagttcttctcgacgggatagataatggaattgaagctgagggtctccagaga

SEQ ID NO: 8473 - DNA, 3113 bp, Zea Mays
actccatctcgccgcccaaaacccactctctccaaaaaggcaaaacccctccttcccgcggcggccgccggcgtagccgacgacgccgacgacgaggcagccatggccgcccccgccgcccggagaatagttggcgctgaggttcccatacccggctcggacaagctgcggtggatcgacctcaccatcccctcgtcctccgccgctgcgccggcgagcccctccgatcccttcgtctgcgtgcccccgcgtgctgcctcggggtgccacatcatcccttcgggcgattctcagtattacctctcgtggaggattcacgaggaacacccaaatgtgctggaggtcattgaacttagtccctccaaggagttccctagctttggactgcgtcttgccttccaggaggcgctatctccattcgcctttctatgtgaacgagagggtcgcaggcaaggggagcttgtatatatgctatatgtgcttaccgtttctggagttgctcttttgtgccacctacgcagcccattttcctacgtatctggttcagtgctgcatcaggatgatatagctgagtttaatctccaaactcaagctcagagcgcaaaggttacagcggtaacagcgaagccaggatgtattgtgattggtcggcaagatgggtccatctgttcttacagtcttggcaaattagccccaaactcaccaggtttctcgaatgaactacgagatgatgctgggattggacgtttatggactctcatgtcaagaacaaagactgtgggtcctgtgcaggacatagtagcaactgttgtaaatgaaagggacctgttatttgttcttcatttggatggacacttgcgcatatgggataatcacatgaaacttctcaactataatgtccactcaaatgacattgaaggccatccgtccaggctatgggttggtaaggctgatgatgatcaggagttgatatctttggcgattctgcatcaaaacactgtggttcaaggttgtgattatgttgctgtatatggcttcggtttttctgctgcggaaaggttcatgttctcttctgaaccttcaatttctactatacctttgctagaggggaagcttgcggacttgaaaatagccacatataagctttggatacttaaagaatttggctccatgctctatgaaatattacagtatgacattgacaccgaaactgcaaaatgttgtagtgagaaggtttgctgttatgtgctacaagaagatgctatcagtgaacagttgtttcaaagttctgacaatgcattggatgatttggtttggacagctgattcaatgttctcctccttgaaggaacaggcttttactttgatttcatccatgtttctgcggaggctacttcaaccaggagtaaaccactgttctgccctacgtgaaaccttactagagcataaaaggttcctatcagattctgagttccagtcacttacagcaaatgggctacgaaaagagatattatctattatagaacaagagggaagttcacagacagcaagtgctacagcttatcactggaaacaattctctgcacggtacctccacaattggtgctggcacaataagccctatggattgtttcttgatactacaaatgaagtgtttggtttagtaagaaagggttcattttctctattccgttgtttggagggtctggagatgcttatttatggttatgaccatggggtgaacttactcgacgatgtgtctgattttgaactcctcaatgaggtcctcagatgcatgggcaatatacaccatttgctggggagatcttccacagcagcatattatgaatccttaattagttctattatatcatctgatgaaattgtttcacatatagtaaagattctagagactggttttagtcatcagtcatcctcatccctcagtacattactaggaatggatacttatgtagaaagaaggcaggcagctcacaaaagtcaaaggaagttttctgttgagatgttacgatcttttcatacgttgcaatcaagatcagcatcctggtcggcagtattcgatgtgattgagaagtttatgaagtgtttgaacacaaacatgaacgtacaatcgtatggatcaaagagagtttgtaatgtaaattctgtgttactagttcaagctacttcacaggttgccagaacaatgtttgagtgtgcatttgatctgtttctgttccttagctatctggttggtgttggtgggcaggtttctttgttgcaaaatgatgttgccagaataaaactgaagctgttcccaatgattcaagacatattgggacaatggattgttctccattttgtaggaacctcaccaacctcaccaccaaccattgacgattttagctatcaactttcttctcttcagcttggtaaatcagatgaactgtctttgcacagaaagcttggctgctctgattttacattggcttctttacttgattttccaaaatctcctgaaggggacgttatgtcaccttgttttctcggtccagcggaaataataaatctagtaaggaggtttagtagtttgattatgcatggaggaaattttgaatgtgtacacactttcttgggatgcacaattaatctatcagctgttctcatcagacatagtcagtatgaagctgctcagaatctgctgggaattctggaaacatacttgaacaatggaaaagtatcgcatactggtcaagatgcagacactgcatgttcagcatatcttcatctcaatggattttgccttctgatgattgcacatgatgaagcaaatattattttgagagaatccaaggttcatgatgctatccgatgctttttcagggctgcatccgggtatgaagctccaaaggctttggagaacttttcattggaaacagggtttcaagtttctgatctatttctttgtggagacttaactactatgagtgggcaatgcaaatttttgagcaacactccatgagcgagggggcgtaccaatttgctcttgctgcactagaactagttcttctcgacgggatagataatggaattgaagctgagggtctccagaga

SEQ ID NO: 8474 - DNA, 3062 bp, Zea Mays
atggagcgaggacggggtggtagtggcggtcgcggtggcggccgcacgtttcagaggaacaatgcgggggaggagtggcccaacctcgtcggcgtggtgctgtcgtggagcctagcggatgtcatgaacaaggacctcttcaaggacaaggtcaagcagataccgtccacgttccccaacctcaagagctacctggagtgctacacctctccattgctggaggagctgagagctgagatgtcgtccagcctggaatccctgtcaaccgtgccttctgtcaggatctcacggatagaagaaaagagagacaaacacgaaatttatctggcttctgattgccaggttgctaagccacacaatcgccctgaatgctacactccaagtgtcggtgatgtaattctcttgtccgatgtgaagccgggccacatttctgatactactcgcaacggaaggccgtaccgagttgcctttgtcacagatgcggatggaggggatgaatacgacgactcaccaccggctaagtatggcatcgtagcgtcaggcaaaatcgatgccgccgatgacgaacgccaagatggtaaaagtacctcactttttgctgcttgtctgctcaacattgtgacatacatccggatatggcgttgccttgattatgaagcactcagaacaaaccgaggccttatagagaagatggtaaactatcagccgagaacagcacggaggatgctggtccaactgacagcgtggagatatggaccaagttgtctgcaatggaacttaacacttctcagaacgatgctgtcttgaactgcatttccaaaatgcactccaagagcagcacatttacccttatctggggtcctcctggcacagggaagacaaaaacaatcagtgtgctgctttggttaatgagagaaatgaagcatggtacgctcgtatgcgcaccaacaaaccttgccatcaaacaggttgcttcacgtttcttgaagctggtccaagagcactctggcgacacaaggtgcttgggagatgtcctattgattggcaacaaagagcgcatgtgtgttgatggtgacctcaaacaaatatatttatatgaccgtgtaaggaggctttttggctgctttgcaccattgaccggatggaaacatcacctatcttccctgtctgattttcttgagaatggctactcacagtacctccaacatctacaagacagtcaggaaggtgatacgccttcctttttctcttacgccagaaaaagatttgccgttatttatatggagctcagaagatgtttcaatgatttgttgttacatgtcccaaaatccagtattctggaagtgaattacaacagtatccttttacttcttgaaatgcttgaagagttcaaccacatgattcagtgcaggtattttggggatgaaattaggaaagttttcttgtacagtaatgatgaacctgatcagacaaactcgagtgtagtcactcttggcaaaatgaggataaaatgccttgaggaactgagcactctgttaagttgcttgaagcttcctctaacatcctcaaagcctaccattcgtgatttctgcattaaaagcgcttccatagttttctgtactgtatctagctccacaaaaataaccgctaacaaaaaggtagagtttcttgtggttgatgaggctgcccagctgaaagaatgtgaaacactgatccctttgcgtctgtggaccttaaagcatgctgttctaattggtgatgagtgccaattaccagcaacagtcaaaagcaaggtttgcactgatgcattatttggaagaagcctctttgaaaggttgagttcacttggacacgaaaagcatctacttaatatgcaatacagaatgcatccttccattagtattttcccgaacactagcttttatgaagggaggatctcagatgccactaatgtcatggaaaaagaacaccgaaggatgtatcttccaggttctatgtttggtccttactcatttataaatattgaagatggaagggaggaacgtgatgaacttggccatagcaaaagaaactttgtagaagctgctgtcattgaagaaatattataccgtctccgaagagcttgctttaaaaccaaaaggaaagtcacggttggtgtcatatgcccatacaatgctcaagttgtagcaatccaagggaaaatagagaaaatgaggttcgacccattgcaagtaaaaactaattctgtcgatggctttcaaggtggtgaagaagacatcatcattttatcaactgtgaggtcaaactcggttgggaaggtaggttttctttcaaacgcacagcgggcaaatgtgtgtttgacacgggcaagacattgcctttggatcctaggaaatgcaacaactctagcaagcagtggatctatttggtctgatctagttcgtgatgcaaaggataggcggtgtttcttcaatgccagtagcgactatgttatctctcacgtgattgctaagcaaaggagagatctcgacagagttaatgttgaaaagagcatccatatctcaagttccaaaaactgcagggtttgggttgaaacgcgatccccaaatgacctgaatgaacagggcacttcttcgacgagtgtttcacattacgctggaatcccgtcaagtgacattgttgttgtttctgaattccagcgtccaagcaataaaaatgaggatgtcgaggatataactgtcattccaaataaagagaatgataaggatatcaatgctatgcccgttattccagataaagggaatgtcgttgatggcaaccatatcctcgccattccttgcgccatgttgagtaatctagctagatggtgtatccgttcgttccgatcttaattgttcctttatgtctcctatccctttttactcctaagtttacagcattatatataagtgtctctccataacatggtcggatgtttgatttttgtaatgtgggtttgaataatgaaaatgtatgtttgggcctttttagcctcccttgactgttgagagaaaaaaaagcta

SEQ ID NO: 8475 - DNA, 2077 bp, Zea Mays
cttcacagtaacttcatctgcgcattctatttatgcatgctgcgctgccaccgtcttgtcgagctccggccacagccgtagacaccacaactacccatgcacccacggcgttgccttggaccctgcatgtagatgttggtcgcgatctgcagtccgcgacgatcttgagcatctgatggctggggtttataaatggaaactggcatcttataaacagatggaacgtacgaaagttgcatcagagaggttgtcattaagatctaatagcaccaagcatcacgatactgtacatcttggtcttggtcattttgggaaggatggcaatctcatttgtcgttcacttaagtcaatattaaaaccaaaggcaagacagtatgctattgtcaaggtacataataaagatgttgacgagggttgcagctccaaagacaatgagattatttctagtccatctgataggaaagaaggaagtcagctgagggcactggaatcttatttttctaaattcaatccctctcagcagttatactctttgcctcagaagaagcacaaaagtggtccatcatcgtcaaatgaagttgatgcaatcattgctgatgaggatgctaatttgaagaacagggcagactctttgcaggtacagattgacagaggacacacaggtaaagtcacttgacttaccagtatggatgtgtcaccaccaaaacttattaatttaaaagaactatgttacttaggtatcaagagtaatcaaaatactcccaacgaggtttacaaggagtacttgatatttgatgaaaaaagtctcctggacatgcatacagatgatcaagcgtctggtttctgtttgacaaacttattggctggtgttaatattgcagttctgttatttgaaatagcaagtccagtgaaaaattctgaaaatgaatatttatccctccctttgttgtatggtgccaagataaacaacttaatactttcaggggagtggtggagactactaacaccaatgtgcctgggcatatggtcaaaggacattttttctgatatacatacttggaggaatctgtggtaatttgagcagttttgttcacactcctgagataaccgtttgtggcacaggtcaaaacaagcaagtcattgacaaggacgtttcagaaagtatgttctggcaggctgtgatagctgcagctttgagcttcttattgagcatttttgggagaattgacaactgggcacatcttggggcgaccatttctggaattttctttggttatctgacatgcccaagtgtagaatttgacaattctgcaaagaacggtcaaaaggaagccgtggctcttattaggcaacaagctcatccatgcaaatccgctgcagtctttttcataaccatacttgcgtttgctgtactcgccttcgcttatgggacacaattcaacaatatggatctggaataggcaaatagctaagtgttgtcatggttcacttcatatatatatatatgcatgcatgtagcccgacagctatatattccggaatgtgaatgagcccgagatgtaagaaaacgttgtacactatagatcagttctatgcgtaaccaggttggaatttttccattccgtatcatgtatacactacaatagtgaatagtctagtacagttggtttttggattggctagagcttatcagtgtctgtaagcaggtgaagccacggacggcataactatttgtacactcggtttgcataagaaccgactgcacatctgcatttgcaccgtcggttgcaagttgtgatagactcggcgggaagttttatgtaatataaaataaagtataggtgaagtacatgtttttagtataaatttttatcctgtaattttatagttattgaattttatgactaagagttggtaatcgtgctagtagtgttttatcttggatcactgcatatgtccccttgatgcagtttttggttgtaatccgagcggtttgagttcgtttgaggaaaccccaatacaaaatcttagttttgtctgtattttcagatatgtgattgatttataaatctgattg

SEQ ID NO: 8476 - DNA, 2227 bp, Zea Mays
cggccgcagcatccttatcccctcgcttaactccaaccccgtggtccatggagattggagaccttgtccaggaaccttcaaattcctcccctggccctatctctccatccgcgcgctctgctctccctgcccgcaccccgcagatcccgaatggccatgcctaccgccgcctgcaggtcggggccggatgcactgcaagctgcggccccgagcaccgggctgaactgaagaggtgtcgaggtcgccattaatcctcaacaaccagctgccaccaacgctatatgctcaccatcgccagcaacttggtggcatctgatggctggggtttataaatggaaactggcatcttataaacagatggaacgtacgaaagttgcatcagagaggttgtcattaagatctaatagcaccaagcatcacgatactgtacatcttggtcttggtcattttgggaaggatggcaatctcatttgtcgttcacttaagtcaatattaaaaccaaaggcaagacagtatgctattgtcaaggtacataataaagatgttgacgagggttgcagctccaaagacaatgagattatttctagtccatctgataggaaagaaggaagtcagctgagggcactggaatcttatttttctaaattcaatccctctcagcagttatactctttgcctcagaagaagcacaaaagtggtccatcatcgtcaaatgaagttgatgcaatcattgctgatgaggatgctaatttgaagaacagggcagactctttgcaggtatcaagagtaatcaaaatactcccaacgaggtttacaaggagtacttgatatttgatgaaaaaagtctcctggacatgcatacagatgatcaagcgtctggtttctgtttgacaaacttattggctggtgttaatattgcagttctgttatttgaaatagcaagtccagtgaaaaattctgaaaatgaatatttatccctccctttgttgtatggtgccaagataaacaacttaatactttcaggggagtggtggagactactaacaccaatgtgcctgcactctggtttcttacatatagcccttggttgttgggcattgcttatatttggacctcgagtatgcagggcatatggtcaaaggacattttttctgatatacatacttggaggaatctgtggtaatttgagcagttttgttcacactcctgagataaccgtttgtggcacaggcccagtattttctttaattggagcatggctggtatatcagggtcaaaacaagcaagtcattgacaaggacgtttcagaaagtatgttctggcaggctgtgatagctgcagctttgagcttcttattgagcatttttgggagaattgacaactgggcacatcttggggcgaccatttctggaattttctttggttatctgacatgcccaagtgtagaatttgacaattctgcaaagaacggtcaaaaggaagccgtggctcttattaggcaacaagctcatccatgcaaatccgctgcagtctttttcataaccatacttgcgtttgctgtactcgccttcgcttatgggacacaattcaacaatatggatctggaataggcaaatagctaagtgttgtcatggttcacttcatatatatatatatgcatgcatgtagcccgacagctatatattccggaatgtgaatgagcccgagatgtaagaaaacgttgtacactatagatcagttctatgcgtaaccaggttggaatttttccattccgtatcatgtatacactacaatagtgaatagtctagtacagttggtttttggattggctagagcttatcagtgtctgtaagcaggtgaagccacggacggcataactatttgtacactcggtttgcataagaaccgactgcacatctgcatttgcaccgtcggttgcaagttgtgatagactcggcgggaagttttatgtaatataaaataaagtataggtgaagtacatgtttttagtataaatttttatcctgtaattttatagttattgaattttatgactaagagttggtaatcgtgctagtagtgttttatcttggatcactgcatatgtccccttgatgcagtttttggttgtaatccgagcggtttgagttcgtttgaggaaaccccaatacaaaatcttagttttgtctgtattttcagatatgtgattgatttataaatctgattg

SEQ ID NO: 8477 - DNA, 2695 bp, Zea Mays
tgtccagcagaggccgtcctctgttgtggtggtgttgacgataaagtgcatcatctttgtccaatttgaagcacgctgaggagtgacgacaggggaaaaacactggagatggttgatctattactcgccactcacctatgtaaagagtcttgtgagggaaatgaaagtgtcagacataatgtttgaatgaatgtcgtgtgcctcttttgggcttgaaaactttaatatgtaaggcttgaactagggtcggatttgagcattgagatactgcagtaatatgttgatgggtcctcctaagtaccgaatctaatgcgtgcctgttatgcctgcgttattatttatttattggccatttgtttggtgttcagtggaaatatcgatttagggggtgtttggtttgtagggactaatttttagtccctacattttattccactttagttacaaaatcatcaaatatagaaattaaaactctattttagtttctatatatatcaatttatatactaaaatggaataaaatgaagggactaaacattagtccctagaaaccaaacacctccttatacggctggaatattgtttgtgccctcacttgatccgttcattcggaactgatgaaaatgtgatgggctgacgggtgcgattcagatgtatgcggtctgcttgtagtgtccagcttgggcagcgtaattacgcatatacggtctacttccgtactcccaatttcgtatacgccgttcactacgaatacaccgtacgccgccgcttccacagttccacgtaaaaacgcgcaggccaggccccgcggctccatcgtgctcccatttcgcttcctttcccctaccgcatcgatggaccacgcgccagcgccccctttcgccgtgcacctcgtcaccggcggcggatcctcgtcggggatcgccctcctactgcgctccctcgccgccgcccgtgtcgtcgctcttgacgcagagtggaagccgcgccgccgcggtagccctgccgctgccgaccctgcggccctgggcgacgacacgacgccggcgtccgagacatctccagcgccgccgaagttcccgacggtgacgctgctccaggtggcctgccgcttcagcgatggtggtggaggtgagggcgagcgcagcgaggtgtttgtcgtcgacctgctttccgtgccgctcgccgacctgtgggcaccgctgcgagagctgttcgagcggcctgagacgctcaagctggggttcaggtttaagcaggacctggtgtacctctcctccaccttctccgccgccctcgggtgcgattccggattcgatagggtggagcctttcttggatgtcaccaacatttattactatctcaagggccatgataggcagaagaagcttccaaaggagaccaagagtttggcaactatttgtgaggagctgcttggtatccttttgtccaaggaactccagtgtagtgattggtcatgccgccccttaagtgaagggcaaatacaatatgctgcgtcggatgcctactacttgctagacatatttgatttgttccaaaaaaggatcacaatggaaggaaaatgttcatctacaacagaacttacttcagacaggcattgctcatcagtggtgatagaatgctcttcttctggatatggcatttgctcgggtagttgtttgatgtccatagtaaccaagtacagtgagaagataatattgacagaatctgatgcaaaaccgcgtacctccagacgaaaagaaaaactgaagattcctgccaatgccaaacgcaaagataatgtggattgcagtagtgaatggcagggtccccctccatgggatccttccattggtggggatgggtacccaaagttcttgtgtgatgtgatgattgagggcctagctaagcacttgcgatgtgttggaatagatgctgcaattccatcttcaaagaaacctgaaccaagggatctattaaatcaaacatacaaggaaggaagaatattattaacacgggatgccaagctcttgaaatatcaatatttagctggtaaccaggtatacagagtgaaaagcctgctcaaacatgatcaactagctgaggtcattaatatcttccaattaaagatttctgaggaccaacttatgtcgaggtgcacaaaatgcaatggtagctttattcagaaaccacttaccctagaggaagctgttgaagcctcaaaaggtttccagattattcccacgtgcttgttcaaccgaaatctggagttctggaagtgcaccgattgcaaccaactctactgggaggggactcagtaccacaatgcagtccaaaggttcttgtcagtgtgcaacattagtgactaagcagcacgtacggccttggtactcatttgtaaaattgtaaggtactgagataccatcacctccgaaagatcgaaaataatctgatctttggcatccactcgtgcacgatgaggcatgccatccatttttagtggtttgctgttcgtcactgagatgctgttgtaaggaaaatagaccttgacttatttgattaatggactttgctccatgcacatccaagaggaaaggttctagatacgtagagttataggccaagtgctatgactgttgccctgcccccgaaaaggattcatgctatctattattaaactaaaccttacgttcct

SEQ ID NO: 8478 - DNA, 4718 bp, Zea Mays
ggacgtaggtatcgtgtcggtgtgcagtgtgttgtcatctccatctccagctccagcgccgccttgctctgtgtgcttccgcccgctctgtgttgctattgctaaactagtgtgttctgtcgctatgggctccctggccaccgcggacgggccgttgccgccgctcaagtaccctcaggctcgccgggacgaagacatcgtcgacgactaccacggcgtcctcgtgccggacccttacagatggatggagcaggtggattcgaaggaggtgaaggagttcgtggacgcgcaggcggccgtgaccagcgccgtgctgtccagctgcgaccaccgcgggcgcctgcgcgggcagctcaccgcgctcttcgaccacccgcgcttccgcgcgcccttcaagcgccggggcagctacttctacttccacaacccgggcctccgcccgcacagcgcgctctacgtgcagcacgggctgggcggcgagcccgacgtgctgctggaccccagcacgttcagcgaggacggcacggtgtcgctcggcgtggtcggcgtgagcgacgacggcgagcacctggcctacggcaccagcggcagcggcagcgactgggtcaccatcagggtcatgcgcgtgcgcgacaaggagcacctgcccgatacgctgtcctgggtgaaattctcgcgcatcgcgtggactcgtgacggccaagggttcttctactcgcgttttccggctccaagaaatggcaacagggatgcgctggattctgggatgaagactggcgtcaatctcaaccacgaagtctactatcatttccttggaacagagcagtcacaggacgtgttgtgctggagagaccctgatcatcccaagtacatatacatccctcaagtcacagaagacggcaagtacgtgatcctttcggtctcagaaacgtcagagccggtgaacaagctgtactactgcgacctgtcggctctcgctcacgggctgggcggcgtgaagagcgcccatggcaacggcatgctccccttcgtcaagctcgtggacaggttcgaggcctactacgggctcatcgctaacgacggcacccagttcacgttcctcacgaacaaagacgctccaaggtacaagctggcgagggtggacgtcgacgacgacgagcccgggtcgccgtggtggaccgacgtggttcccgaggacgaggacgggaaggcggtcctggagtcggcgtgcgccgtccacggccacaagctgctggtgagctacctgtcggatgtcaggtgcgtcctgcagatgaggagcctggtcactggggagctgcttcacgacatacccgtcgacatcggcactgtcagcgggatctccggcagacgatgcgacgccgaggtgttcgtcgagttcgcgagcttccttacccccgggatcatctacaggtgcgatgtcggctctgcggtcccggagatggacgtgtacagagagatctcggttccaggattcgatcgaaacgagtttgaagcgaagcaggtgttttatccgagtaaggatgggaccaagatcccaatgttcatcgtatccaagaaggagatcagcctggacggatcgcacccggcactactgttcggctacggcggcttcggcgtgagcgtgacgccgcagttcagcgtcgcccgcgtggtcctgatgaggaacctggggttcgtggcgtgcgtcgccaacctcaggggcggcggggagtacggcgagggctggcacagggccgggtcgctcgccaacaagcagaactgcttcgacgacttcgtcgccgccggcgagttcctcgtgtccgctggctacaccagcccggcgaggctgtgcgtcgagggcggcagcaacgggggcctcctggtagctgcctgcgtgaaccagcgccctgatctgtttggctgtgccctggcccatgtcggagtgatggacatgctacggttccacaagttcaccataggtcgtgcatggacatgcgacttcgggtgttcggagaacgaggaagagttccagtggcttatcaagtactcccccctgcacaacgtgcggcggccgtgggagaacaaacgggcggccgcagctgccaacggcgacgcaagctgccggggcttaggcggccagtaccctgcaaccatgctgctgacggcggaccacgacgaccgcgtggtgccgtcgcacacgctcaaattcctcgcgacgatgcagcacgtcctgcgccccggcgcggatggcagcccgcagacgaaccccgtcgtcgcccggatcgagcgcaagagcggccactgctgcggccgctccacgcagaagatcatcgacgaggctgcggatcggtacgcattcgccgcgaagatgatgggagtctcttggatggactgactgagtaacccaccaaatgagtactgcgcatttggctcaggctgttagaccaacgccagcagcgacccgcaaacggctccggctgcccaatctccggaaaaaaatttgttgcagcccggctgcaaaccaggttgtttgcagcccctcacaaaaaggaagataggtcccacccgcaggtaaataatacaactaaaacgttatctggtggacctgcaggtggggcctatccacctttttgtgaggggctgcaaacagcctggtttgcagccgggctgcaacaaatttttttcccaatctccgcgctcgcgtcaactgtagacgtctccagcagctcccgcatcgcgcccccatcctccgcgccccctctcgccaacgcccattccggcgcgcgctgctcgcgccccgcatctcgcactcgccaaccgagacgcgccgcgtgtccgccgcgcggggcccacagacgacgctccacaggcgagatgcgccgtcgctgcccggatgcgtgccgctgctggagatggtggccgcgcatctgtgggccccgtcctccacaacgcgcagaaagggggtcgggagcggggacgttgctggagatggtcttaggttacaatgtatcggtgctgtattgtaagcggccaggctggcaacttggcgtgacacatgtttggttctgcttctggtttggaaaattagaagctgaactaaaagggcttcttttctgcgactactttaaaaaaaacagcttttctttagtgtaaatttgagaccttgttattgatacttacgaagtttgttatattaatgcacagtaaattgaaactagattagaatttaaataattaagtgttataataaacgagatatttttaataaaatattattacaaatataattaaaaattgatttatttgtaaaaatatcagaaacacaaattgattcatctattttctagagtctagtacataaacaaaacttttttttaaagtgttgatcttttatctctactactctatatgtccttattgtaggcgtgcacacccgtgttctgcctctcgacgcctgtctgcccgcgccccccgcttgtgatgcccatctcgtctccccgctgtggcagccgccttcgcgtccgccgcgagatccctccgcgcacgggcgcgtcccccacaaaccgcgctccgtgaaatccgcactcccctcgccgcctccccagcccgcagcctctcctcaacctccctccccaaggagctggcggcggcgcgactgcgtcgggagaggacgcagaggacgccgcgcgggggctgcggcaggagctcgactccgagcaggcctccccggagatggcagccagatccggctattgagccccctaaccgagcggatccaagatagttttttttgtctccagttgctctacacagcaagtctatgaggaaggagcaaaagaagttgctctttcagttgtcagcggaattaatttaactcaagcatacttgcctatggcaaacaagcagtggacttacacaatgatcgaaatgacagactgttcgtgctatcggtttggaaagaacatgtggaaagctaatctcggatcttgcttccttcagaagacccaaaggaccttgaacagcaaaatctaaggtttcaacattgcagacacacaagagtccagcatgcgccaacgctcctgcagttgatgcttcttccagtagtttgtgacagattgctcaaagaaaagcaagacagctcgccaatcctagaagtggaaaaaaacaacatagaataattagccagctacagggagtaaaccattaagagaagaaacatcgtaatgccatgtttccaaatgggcacaaagaaacttcaagcacctctagacggaagctgtctgcactgaagatcaggacacgaatatcgcgagctttatcaaggctcgccttgtgcggaaggtgtatttctgtgagatctccaagatgaagcattagggggtcaatcgccccagattttacatgtagctaacttagtagggcacccataatccataatttattctctgtagttgtagcagcgacctagaggtgttattctgtagcacattgtgtaacatgtaggagagagataaacacatatccccattctttctactgaaacaccagaaatagttgctcttgctccataattcattaatgtgaacttctgaagccatgccaaggtcttatattgatcctctgttgtcatattgataaaaatagggtatgtaaaaccttttctcataacagtttaacacatattttatatataagttatcgtaatattacatgtttcc

SEQ ID NO: 8479 - DNA, 4916 bp, Zea Mays
ctttattttatctttatacatcgtacatgttttctctccctgtctctagtactgtcgacatttttaaaattgcgcaatttttttaagaacggggaagaatgcccggagcgctctataaaacctgggggatcagaggaggaggacgtaggtatcgtgtcggtgtgcagtgtgttgtcatctccatctccagctccagcgccgccttgctctgtgtgcttccgcccgctctgtgttgctattgctaaactagtgtgttctgtcgctatgggctccctggccaccgcggacgggccgttgccgccgctcaagtaccctcaggctcgccgggacgaagacatcgtcgacgactaccacggcgtcctcgtgccggacccttacagatggatggagcaggtggattcgaaggaggtgaaggagttcgtggacgcgcaggcggccgtgaccagcgccgtgctgtccagctgcgaccaccgcgggcgcctgcgcgggcagctcaccgcgctcttcgaccacccgcgcttccgcgcgcccttcaagcgccggggcagctacttctacttccacaacccgggcctccgcccgcacagcgcgctctacgtgcagcacgggctgggcggcgagcccgacgtgctgctggaccccagcacgttcagcgaggacggcacggtgtcgctcggcgtggtcggcgtgagcgacgacggcgagcacctggcctacggcaccagcggcagcggcagcgactgggtcaccatcagggtcatgcgcgtgcgcgacaaggagcacctgcccgatacgctgtcctgggtgaaattctcgcgcatcgcgtggactcgtgacggccaagggttcttctactcgcgttttccggctccaagggatgcgctggattctgggatgaagactggcgtcaatctcaaccacgaagtctactatcatttccttggaacagagcagtcacaggacgtgttgtgctggagagaccctgatcatcccaagtacatatacatccctcaagtcacagaagacggcaagtacgtgatcctttcggtctcagaaacgtcagagccggtgaacaagctgtactactgcgacctgtcggctctcgctcacgggctgggcggcgtgaagagcgcccatggcaacggcatgctccccttcgtcaagctcgtggacaggtacaagctggcgagggtggacgtcgacgacgacgagcccgggtcgccgtggtggaccgacgtggttcccgaggacgaggacgggaaggcggtcctggagtcggcgtgcgccgtccacggccacaagctgctggtgagctacctgtcggatgtcaggtgcgtcctgcagatgaggagcctggtcactggggagctgcttcacgacatacccgtcgacatcggcactgtcagcgggatctccggcagacgatgcgacgccgaggtgttcgtcgagttcgcgagcttccttacccccgggatcatctacaggtgcgatgtcggctctgcggtcccggagatggacgtgtacagagagatctcggttccaggattcgatcgaaacgagtttgaagcgaagcaggtgttttatccgagtaaggatgggaccaagatcccaatgttcatcgtatccaagaaggagatcagcctggacggatcgcacccggcactactgttcggctacggcggcttcggcgtgagcgtgacgccgcagttcagcgtcgcccgcgtggtcctgatgaggaacctggggttcgtggcgtgcgtcgccaacctcaggggcggcggggagtacggcgagggctggcacagggccgggtcgctcgccaacaagcagaactgcttcgacgacttcgtcgccgccggcgagttcctcgtgtccgctggctacaccagcccggcgaggctgtgcgtcgagggcggcagcaacgggggcctcctggtagctgcctgcgtgaaccagcgccctgatctgtttggctgtgccctggcccatgtcggagtgatggacatgctacggttccacaagttcaccataggtcgtgcatggacatgcgacttcgggtgttcggagaacgaggaagagttccagtggcttatcaagtactcccccctgcacaacgtgcggcggccgtgggagaacaaacgggcggccgcagctgccaacggcgacgcaagctgccggggcttaggcggccagtaccctgcaaccatgctgctgacggcggaccacgacgaccgcgtggtgccgtcgcacacgctcaaattcctcgcgacgatgcagcacgtcctgcgccccggcgcggatggcagcccgcagacgaaccccgtcgtcgcccggatcgagcgcaagagcggccactgctgcggccgctccacgcagaagatcatcgacgaggctgcggatcggtacgcattcgccgcgaagatgatgggagtctcttggatggactgactgagtaacccaccaaatgagtactgcgcatttggctcaggctgttagaccaacgccagcagcgacccgcaaacggctccggctgcccaatctccggaaaaaaatttgttgcagcccggctgcaaaccaggttgtttgcagcccctcacaaaaaggaagataggtcccacccgcaggtaaataatacaactaaaacgttatctggtggacctgcaggtggggcctatccacctttttgtgaggggctgcaaacagcctggtttgcagccgggctgcaacaaatttttttcccaatctccgcgctcgcgtcaactgtagacgtctccagcagctcccgcatcgcgcccccatcctccgcgccccctctcgccaacgcccattccggcgcgcgctgctcgcgccccgcatctcgcactcgccaaccgagacgcgccgcgtgtccgccgcgcggggcccacagacgacgctccacaggcgagatgcgccgtcgctgcccggatgcgtgccgctgctggagatggtggccgcgcatctgtgggccccgtcctccacaacgcgcagaaagggggtcgggagcggggacgttgctggagatggtcttaggttacaatgtatcggtgctgtattgtaagcggccaggctggcaacttggcgtgacacatgtttggttctgcttctggtttggaaaattagaagctgaactaaaagggcttcttttctgcgactactttaaaaaaaacagcttttctttagtgtaaatttgagaccttgttattgatacttacgaagtttgttatattaatgcacagtaaattgaaactagattagaatttaaataattaagtgttataataaacgagatatttttaataaaatattattacaaatataattaaaaattgatttatttgtaaaaatatcagaaacacaaattgattcatctattttctagagtctagtacataaacaaaacttttttttaaagtgttgatcttttatctctactactctatatgtccttattgtaggcgtgcacacccgtgttctgcctctcgacgcctgtctgcccgcgccccccgcttgtgatgcccatctcgtctccccgctgtggcagccgccttcgcgtccgccgcgagatccctccgcgcacgggcgcgtcccccacaaaccgcgctccgtgaaatccgcactcccctcgccgcctccccagcccgcagcctctcctcaacctccctccccaaggagctggcggcggcgcgactgcgtcgggagaggacgcagaggacgccgcgcgggggctgcggcaggagctcgactccgagcaggcctccccggagatggcagccagatccggctattgagccccctaaccgagcggatccaagcaagcatacttgcctatggcaaacaagcagtggacttacacaatgatcgaaatgacagactgttcgtgctatcggtttggaaagaacatgtggaaagctaatctcggatcttgcttccttcagacccaaaggaccttgaacagcaaaatctaaggtttcaacattgcagacacacaagagtccagcatgcgccaacgctcctgcaggttagtccgagatggcccttcattttcctgtttcaatagataaaaaaactgaggtcgcattaaaaaactgaagtctattcaacaaatcaccaaccatgatttttctgaggcacatgggtacaatcagcacaaactccatttgccaagaaaaggttataatgcattcacaccaataaatgttcgtttcacaagacataagcaaagaacattgaggtcgcattatctaaccttttggtgattgcagttgatgcttcttccagtagtttgtgacagattgctcaaagaaaagcaagacagctcgccaatcctagaagtggaaaaaaacaacatagaataattagccagctacagggagtaaaccattaagagaagaaacatcgtaatgccatgtttccaaatgggcacaaagaaacttcaagcacctctagacggaagctgtctgcactgaagatcaggacacgaatatcgcgagctttatcaaggctcgccttgtgcggaaggtgtatttctgtgagatctccaagatgaagcattagggggtcaatcgccccagattttacatgtagctaacttagtagggcacccataatccataatttattctctgtagttgtagcagcgacctagaggtgttattctgtagcacattgtgtaacatgtaggagagagataaacacatatccccattctttctactgaaacaccagaaatagttgctcttgctccataattcattaatgtgaacttctgaagccatgccaaggtcttatattgatcctctgttgtcatattgataaaaatagggtatgtaaaaccttttctcataacagtttaacacatattttatatataagttatcgtaatattacatgtttcc

SEQ ID NO: 8480 - DNA, 1787 bp, Zea Mays
cgccgtcttgttgctccgctccggccgtgacacgagcgcaccagccaccgccagcccctcccccgtcgactcgagccacaggacaaggcatcccaaccgccgcccatctcctatcgtcatctgccgatccctcctcggttcctcacagtcacagagcctcacgtcacgtgtacctcccccaacccaacccagcccaacccagcccaaaacctagcgggcgaggggccggggaaccgaccgccggacgcggagatggaccacgcggcggaggcgcagcggacggacctgatgacgatcacgcggcacgtgctcaacgagcagagccgccacccggagtcccgcggcgacttcaccatcctcctctcccacatcgtcctcggctgcaagttcgtcgccgccgcggtcaacaaggccggcctcgccaagctcatcggcctcgccggagagaccaacgtccaggagccaccccaaaaaaaaaatacagggcgaggagcaaaagaagctggatgtactgtccaacgaggtcttcgtgaaggcgctcgtcagcagcggccgcacctgtgtcctcgtgtctgaagagaacgaggaggccatcttcgtcgacccggccctccgcgggaagttcgtcaatcctttgctcctccatcccgacctcgtaaaagttccgcaacgccgtactgtcgctttccctgatcgcgtgttagttctctctctctctctgttcaggtactgcgtctgtttcgacccgctggatggctcctccaacatcgactgtggtgtctcaatcggaacgatctttgggatttacatggtcaaagacaaggacaacgtgaccttggaggatgtgctgcagcctggaacaaacatgcttgctgctggctactgcatgtacgggagttcatgcacgcttgtgctgagcactgggaacggagtcaatggcttcactctcgatccttcccttggagagttcattttgactcatccaaatatcaagataccaaggaaagggaagatctattcagtcaacgaagggaacgccaaaaactgggatgggcctacagccaaattcgtggagaaatgcaagtatcctgaggatggttcaccgcctagatccttgagatatatcggaagtatggttgctgatgtccatcgcaccttactatacgggggcatatttttgtacccagcagaccagaagagtccaaacgggaaactacgcgttctgtatgaagtcttcccgatgtcattcctgatggaacaagctggaggccaggctttcacaggcaaacaacgggcgcttgaacttgctcccgctaaacttcacgacagatccccagtgttcctcgggagctacgatgacgttgaggagatcaaagcactgtacgcttcaatgtcaaacagcggttgacctttctgcctgaggaaacgagcgagatcaaaagcaccgtacgcttcagagtcaactgcttgatctttatagattgtaataaaataataaaagagtttgtaaaaaaaaacaacaacactgcttgatctttctgcatgaggataaaaagcgcatagtttccccggttggatatatccatcagatatttattatgttgttgccttctacacaaatttaacgtgctttcgtgattccttaatgcaactttggattcatgtacggagggagtttatgtgaagacatattacttggtgcagtttatctccaacaaaatacaaaaaaaagaaccttgtgcagttatacttcagtcttaatgtcgtgttcatcggatttgtgacgc

SEQ ID NO: 8481 - DNA, 2006 bp, Zea Mays
gcgggaccggcgccgtcttgttgctccgctccggccgtgacacgagcgcaccagccaccgccagcccctcccccgtcgactcgagccacaggacaaggcatcccaaccgccgcccatctcctatcgtcatctgccgatccctcctcggttcctcacagtcacagagcctcacgtcacgtgtacctcccccaacccaacccagcccaacccagcccaaaacctagcgggcgaggggccggggaaccgaccgccggacgcggagatggaccacgcggcggaggcgcagcggacggacctgatgacgatcacgcggcacgtgctcaacgagcagagccgccacccggagtcccgcggcgacttcaccatcctcctctcccacatcgtcctcggctgcaagttcgtcgccgccgcggtcaacaaggccggcctcgccaagctcatcggcctcgccggagagaccaacgtccagggcgaggagcaaaagaagctggatgtactgtccaacgaggtcttcgtgaaggcgctcgtcagcagcggccgcacctgtgtcctcgtgtctgaagagaacgaggaggccatcttcgtcgacccggccctccgcgggaagttcgtcaatcctttgctcctccatcccgacctcgtaaaagttccgcaacgccgtactgtcgctttccctgatcgcgtgttagttctctctctctctctgttcaggtactgcgtctgtttcgacccgctggatggctcctccaacatcgactgtggtgtctcaatcggaacggtgtgtcactgtcactcccgatctttgggatttacatggtcaaagacaaggacaacgtgaccttggaggatgtgctgcagcctggaacaaacatgcttgctgctggctactgcatgtacgggagttcatgcacgataccaaggaaagggaagatctattcagtcaacgaagggaacgccaaaaactgggatgggcctacagccaagtacgacgagctagggggctcgtttctgtccaaaaactactactgtgatttcgtaacaagccaggctgaattttatgccgtttcagattcgtggagaaatgcaagtatcctgaggatggttcaccgcctagatccttgagatatatcggaaggtgatccattgctcgttctcgactgtgtataccggtgtctcacagtttgctttcttctgcggtcatgaattgaatgtgtctgaagttttattaagaataatagtgcttgctcaagctattggtatctactcgtttttttcttctttttttttgtttaactaaaacggttgaatctatgttgttgtggacttgtggtccttgtgaatggtttgcagtatggttgctgatgtccatcgcaccttactatacgggggcatatttttgtacccagcagaccagaagagtccaaacgggaaactacgcgttctgtatgaagtcttcccgatgtcattcctgatggaacaagctggaggccaggctttcacaggcaaacaacgggcgcttgaacttgctcccgctaaacttcacgacagatccccagtgttcctcgggagctacgatgacgttgaggagatcaaagcactgtacgcttcaatgtcaaacagcggttgacctttctgcctgaggaaacgagcgagatcaaaagcaccgtacgcttcagagtcaactgcttgatctttatagattgtaataaaataataaaagagtttgtaaaaaaaaacaacaacactgcttgatctttctgcatgaggataaaaagcgcatagtttccccggttggatatatccatcagatatttattatgttgttgccttctacacaaatttaacgtgctttcgtgattccttaatgcaactttggattcatgtacggagggagtttatgtgaagacatattacttggtgcagtttatctccaacaaaatacaaaaaaaagaaccttgtgcagttatacttcagtcttaatgtcgtgttcatcggatttgtgacgc

SEQ ID NO: 8482 - DNA, 7681 bp, Zea Mays
gttccattacagtctacaacaacaacaaccaagtcattctcgtgaccaaaaattgcttcacctgctcccgtatgcatgatactcgggagattttccgggcagaagaggaaatcctgacaagtagtgcgttccttgctcacaggccctcgttgtgtcatgtaactgcaaatggctcgccaaactagcgttacagaagctgacctggagttcatgctaattgatgaaaatgcaaagccgaagcccctgccttattcacttctcgaaaagatcacaaatggtttctccggggcacatattattgggtatggtggatctgcagatgtttatgagggattcatcgggaatcacaaaatcgctgtgaagaggttgcgcataccatatcagcacgagaaggaattcagtcaagagattgaatgcctgatgaaggtgaagcacataaatgtcgttaggtttataggatattgttccgacacgcaagggcaggcggaaaagtatgaagataatcatgtcatggcagacagccaagaacggttaatttgttttgaatttctaccagcatgtcttgataaatacatcaaagatccatcatgttcacttgaatggagacagcgctatcaaataatcaacggagtttgtcagggcttacatcaacttcatgagcatgaaattcttcacttggatctgaatccgagaaatatacttctagacgatgacatggtcccaaagatttctgattttggcatctccaagtgcttgaaaaaaaaccaaggccacttttatactgaaactataagtggaacaccgatatatatgtcaccggaacggggcaaacatggtccaatcacaacgaagtctgatttgtttagtcttggtgtcacagttatcgagataatgacagggaacaaggagaacattgatcaagccactgttgaagatgtatttgctagctgcatcaaaattttcaatgataaatcattgacagctgcacaagtgcggcagataatggtatgtgctgagatagggattaagtgccgcaacagtgaaccagacaagagaccatcaaatacaaaggaaataatcgataagcttgaagaggaagcaaggacagaggaatctcaagagtctggcaagctacttaaggtcctaccaaccctactcctgtttgatttgcatcccgggaaattgatcccatgctcactgcagctaacaaacgacacggatgaacacatggcatataagcttagtataacagagagtgtggactggtcaaagtacttcacgaccaagctgccgctatatggcattgtgcaggcgcgatccacttacactgtcattctgacagtgttgttggagtgtgatgctccgagctgtacactggcatatgagtacatctggaagttcaataacacacttgagtttgaggattttcttgaggttaagaaaacagagaatgcggtgaaggaagtgaaactgaaagcatttttgtgtgaggaaggacgatcaatttctaagcaaacgaggccgcgcgtcaagctcttgtccatagtgaaaccacaaacacctctgttgtcattggatgcacacccgaccaagccctgggtcataactggtcatgcctttggacatgttcgcatttggaaccatgagacacagaagctactgtattcgtttaaactatctctgggaccagtttattctgtcaaatttattgcacggaagcaatggttcgtctccagctctgcagaaggcctcatacatgtctacagtatggaaacaaaaatgcagaaggtcaagagttacagagctcatgacggcgtcagcatatcgctggccgtgcatccaaccctaccatatgtgctgtcatggccttgttcgggcccccacgagaagaagctatggaactgggaaaagggatgggactgcacacaaacatttgagagggagtacgttgcaaggaattttgtatgtcaagttgcttttgacccaaaggagaccaacagatttgctagcgcttcgaactatagggttaaggtttggagcgttgatcttcccaaatgtaactataatctgcctggtttttttaacgaagtgaacttcctggaattcttcacacgtgatgatcaacagtatttgattattactgtctctcatgataagactgcaaaaatatgggacatgcggaacaagaaatatgtttatgatagtatggaacaaaatttgatgtctcccgtgtcttctgtcttctcacatcccaatctgccgatactacttacacgttcaattgatggcacttctcatttctggagtcccaaagatttcagataaatagaagattgaagcgaaataggccgtaaacgtactgcattttggcttgttatgtggaaaccaaaaggtttgaggcagtccttgactgtcgttatggaggacatgtatggggcattgcatgtttgatgggatcaaaaagaaggtttgtaattggacaagaaactgcattaacaatcctggatgttggtgaccaagaatgccaggacatgagacaagaaggcacaagttctgaggtgataaccccagggtcaagcgagcttttgcttgacgtccacccgctgacactccactttcccttccatgcccacaagttgatcccgtgcacgctgcacctaacaaataaaacagatgaacatgtggcttttaatcttagtatagaagacggaatggagtcttggcagcagatctttgtaaggatgcccctaagtggaattgtgccaccaaaatccacttacactcttgttgtcacaatgagggagctgacgtatctaccaacacaaaactttaatttgaccctgcagtctaatatatgcgaagataggtacatctattcatttatgagcctatcagaatctgatcagttttttgaggatttaaaggagataaggaatgtggcgccgcctcaggtgaaactgaaagcagttttttctctgcaaggacagacaacgtttgagaacggatcgtcaactggagaaaacttagtccaacctttaattaacatatggactttgttcaaccctgccaaggatttttctagtatgctgatctctctagatgctgatccaacagagtcatgggttataacaggtcaccgccacggtgatgttgctttatggaagcacggcatgcagaaaatgatgtctttgattaacatatcgggagaagcaagccttcctcggaatagcttgaacacccaacatgatgtttattccgttaaattcattgcaaggaagcggtggtttgtagccgggacatgtgatggtttcatccatgtgtataagtatgaaacaagaataatggactgcataaagagattcagagcatactcatctgggatcatagactggggtatttgctcgtccagagcgcttatcgttcatccaacccagccatatttgctctctacctgtgaagaaatgaagctttgggactgggacgatgattggaagtgcatacaaaaatttggtagggaacacactgattccatacttcaagtggcatttagcccaaatgacagttttgccagtgtttcaagtgatcacacaataaagctttggtgcctgaaatctcccacatcagagtgtactctgcacggccattcggacaaagtgaattgcttggatttcgtcacacatgatggtcagcaatatttgattagtggatctcaagactgtactgccaaggcatgggccttgaaggaaaaggaatgcgtccagacaatggatgttttcatgtcgccagttgtttctgtcatttcccttccggacactccatatataactacaggttcagcagatggcactattcatttgtggagttctgctaatttcaggcttgagagaatacttagccttggtttatgtggccctgtttgggatctacgtttgattgggccaacgaggatcgtgattcaaccgaacaactatgaaatatcagtcatcatggatattgacacaggttctgaggctagctcgtcagctccctcaaatgagctgatccaggttgaccccaaagagttgcgcttcccggttgcccaagaggtgtcaagcacactagagatccgtaacgttacagatcaccatgtggcattctgtatgtggtcattgaaccatacagcaaattacattccagtgccgaacatagaagttctatcaccacagtcaatgcggcaagttgttataacaagaattgcacgacgagagcctgtgccagcagaccccgtcgacgacatagtctatgtgaagggcactaccgtggttcagggtacaacgagcgcagatgtcacttatgacatgttcgatggaacaaggacaggccaaattctgcaaccggccatggagctgaatgttgttctcgtagctgactccgagatcatacacaaagcaaggttaccatgggccttagatgtgcatccaacaatgccatggataatgatggctcaaggagattaccaaattcgtatatggaactataagacacggatagagaaacctattgctatcaaggggagagaagttacttcggctaaatttataatgcacaagcaatggattctggcgggctgttctagtggacttgtctatgtgtaccgttatgaaccagaaaagaaaaaatcagtagagaaaatccgagttctacaaggacactcaaatgctatcaattccttggctgttcattcaactaagccatgcgtgctgtcagcatccaaagatggcaaaattttgatctgggactatgaaaatgagtgggagttaatgaaaacatttgatgtcaaaagtcctgtgcagcatgttgcgtttagcccaaaggactccaatatgttcgccagtgcccaggacaaaacagtaaagatatgggattggcattctggtaactgcaagtctacattgtctgggcattcagatttggtgttatgtctggattacttcagtcagggtgatcagctatacttgatcactggttcacgagacaaaactgccaagatatgggattgcaagacgaggagttgtgttcggacattggaagggcatacagatgttgttaatgttgcatgttgccatccagatcttctaatactaattacaggttcattgaacgggtcagttcgtctgtgggatttgaatcgctcaactacgttccgatatgagctcatatttgaccttggagaagtatatgctatagcaagtttgaagggtacaaggattgtgattggacacgaaataggattagcactggtagacatagacctagagggcaagaaggatggatatgtgaagagcaatgtcgcaattatggattcaaaaaatgacacagatcaaaatatgaaagagttaagcccaacagcttcctcaagtgaggtgcaaaaggtgtcaagcattatagcattggagactctatacaaaatgaagtcatcagaatcgtctatagatgtccatccaacagagacatggatggtcattacatccgacaaatatgttcatatatgggactaccatacaagggaagtgaaacagatgatggatactaagggagcgaaagtcagattggctaaatttatagcccgcaagcaatgggttattgcgggtgctactagtggattcatcttcgtctatgattatgactcaaaaaaggaaataatacacgttttgtgtaaccacacagaacccatcaagtctttggctattcacggaactgagccccttgtgctgtcagcatccgtggatggcaaaattttgctgtgggactatgcaaatgactggcatttgattaaaacatttgatgcgagaagtcaacgtttggtgcaagtcgcgtttaatccaaaggacaccaatatgtttgctagtgctcagggcaaaacagtaaagatttgggatcgccagcatgatgaatgccaatacaaattagatgggcattcacatcagatcgagtgttttgattactttagtggtggtgattttgataagctatatatagtcaccggctctcaagataaaactgccaagatctgggactgcgagaatgcgggctgtgtccagacactggaaggacatgcaggtcccgttagagctgtctgttaccatcagaatctctcgttattaattacagggtgctctgacggatcaattcatctatggaactccactaccttcaggcttgagcataaactgaactttgctgacttcggattactgagttctgtagcttgtttgaaaggatcgaaaaggattgcaatcagaagcagggaaggattagcacttgtagacatagacatagaggacaagaaggatagcgatgtggagagcatcacgactactgcttccatgaacgacacaggtccaattacagaagagaacggagtggcagcagaccatatctctgatgaccacctggcgcagggcgtagtatatgtacatacagagattataggcaaagtcaattcagcatgcaccatagacgtccatccgacaaagccatggatggtcatcactcaagctaacaagtttgttcatgtttgggactaccatacaaaggtagtggaatggacgattcagattaagggagcgaaagttagttcagctaaatttatagccagccaggattggattgtggcgggtactacccgtggattcctccacgtgtacgattgcgaatcgaggaaggaaatacgccgtctttgtgaacacccgaaatctatcacgtcattggctgttgacgatgatgcccttgagctggtgctgtcagcgtccatcgatggcaagattttgatctggagctactggcactactatcacgcacgtagacgtagtacctggcatttggaaaaaacatttgacgcgggaagccagtgtctgaagcaagtcgcgtttattgctccaagtgtccatcgcagcagcagcactatcatcgctactgctcgagacggaacagtaaagatttgggatcccgatcgttctgacggatgccgtgagttcacattggctgcggattcaggtcagattgttgaatgtttcgattggtttagtcgtggtactgatatatacttggtcaccggttctcgagacaacactgccaagatctgggacatagaggatgggagttgtgtccgaacactggaaggacacgcagatcatgttaccgttgtctgttaccatccggatctttcaatgctcattacaggttcaagggacggctcgattcgtctgtggaactccactaccttcaggtttgagcatgagctgaactttgacctcgggtctctgagttctttagcttgtatcaagggatcaacaaggattgcaatcggatatgaaagaggtctagtactggcagacatttgcactcaggaacatagagcatgatctataaagcggcataataccttgagagcgacagaataaaatctaaacattgataaagcggcaaaaatccctggcaaacatttgctgatgcgatgggattgcatccaaacatttttcttggtaagctaatagactgcaataagtttttccatggacttgggaggtgtcgatctgcggatatgcttttgtatggtttaaacatatcatcggatagaaatttatactactatattaaaaatttaatatggacatctcgtgctactatgactttatccttc

SEQ ID NO: 8483 - DNA, 2484 bp, Zea Mays
aggtagaaaaatcaaaacttgatgagaaaagaaaactaggtgaacaagacatggttcgactgacgcaagaaaaagagaatgcagaaaatacaattgtttcccttcagcaagaaatacagatcttgagtaggatgcatgaacagtaccgtgagagaaaagaaacagaggccaggcagatggaggaacacttgtctattagacttaaggaggctgagcttcttttaacgcaatcaaaaaagaaagctgaagaaattgaatctgcttcccaactgaaatctcaactttggagcaggaaggcaaacattttctggagttttatggataatcaaaaattgtccattaaggacataaggatatcatctcagtctattaagcaagaaatgtttgcccttcaaatgaaatggagggatgaaatatctaacattggacatgatttgaaaggcttggttgatgctgctgacaattatcataaggttcttgctgaaaatcagaagctatttaatgaggtacaggaactaaaaggcaatatcagagtctattgccgtgtcagaccatttcttcctggtcaagatggaaaaacaaccgttattgattatattggtgaaaatggtgatattctcatcacaaatcccttcaagcaagggaaggatgcatgcagaatgttcaagtttaacaaagtttttaatacacgtgcttctcaagttgaagtattctctgatatccagcctctgatcagatcagttcttgatgggtttaatgtgtgcatttttgcctatggtcaaactggttcaggaaagacttacacaatgagtgggccaggcacatcaaaagaagattggggtgttaactatcgagctttaaatgacttgttttatatctctctaagtagaaggaatgctttctcatatgaggtgggagtgcagatggttgagatttacaacgaacaagtgcgggatcttttatcaaatgatattgcacaaaaaagttggaatttggagtacatctcagcctaacggacttgttgtccctgatgcaagtttacatccagtcaaatcaacattggatgtgctagagttgatggaaattgggcaaacaaatagagcagttggatcgacagctctgaatgaaaggagcagtcgatctcacagcattctaactgtgcatgttagaggggtggatttgaagaatggatctacttccagaggatgtctacatctgattgatcttgctgggagtgaaagagttgagcgatctgaagcaattggagatagattaaaagaagcacagtatattaacaaatccctctctgctctgggtgatgtgatttttgctttggcacagaaaaatgctcatgttccttatcgaaacagcaagctgactcaagttctacagagctctttaggcggacaagcaaagacattgatgtttgttcaaattaatccggatactgaatcatattcagaaacaataagcactttgaagtttgctgaaagggtttctggagttgagttaggtgctgcaagaagtaacaaagagggtaaagatataaaagagctgctagaacaggtttcatatctgaaagacacaatatcacggaaagatatggaaatcgatcaactcctgaaggacaaagccaagtcaccaagttcatcaacagatataaatgacagtagccaacagatccgacgactatcaggggctgctggatcaggcgaggccgaatgcgaagataacatgtctgatgatggctgctcagtggcaggaaccgagtgttctgtaggtggtgcttcagaggcgacagcagaacgaatgcagaaggccccatcaaggataggcaggctgtttctcacaaagaatgggcagcctgcaaattcgaagccaaaaccaagggagtctgccctgaaaccgtcaggtcgcacgacatctacaggaagccaggcgacaggaggaggatcttcagtgaaacccccgaagaggcggtagagaaataaagagcatctggggtttgtcatgttgatggctgatgcaatgcgtgggcgtttgtaaaccgactcggagattgcgctgctgaaacactacggtcaacgggttggtgcgatgcaagggtatgtcactgtaacggtttcacttgtaaacggtctgttgagtatgatggtgagcagccggcttttggtgggaaatgttgttgcgacagcgccgttgcgttttgagttcagccggctctgccgactgccgaagtgccgaggcctcagtcctgggccctgtctgccgaatctggccttggccgctaggcgctagcatcaggcgagaaacgaaaagctcgggatagcttcagatcaaacagcagcttcactctacagaaagcttgacaaaccagcttcgttttaaagaaagtttgccaaacggtaagctgagcttcacgaactctggatttgccgaaacaatagatctaaaacttcataataataataataataataataa

SEQ ID NO: 8484 - DNA, 1256 bp, Zea Mays
tttattattaccaaatttcgctgattcacacaaggattgtagctcaaagctttctgaggaatctggaggatgctggtgtgacatgcttcttcctattgttaaagaagcttggaggaactgcaagaaaggtgattcttctgttgccatcgcagaggcactctatgagatggttaagggttttgtgctgcagcatcaagttatactcttctgtcttggagaaactttcacagagctacctcctatttaccctctggttgatttgcctataaatactagggcaagcgctgcagattttggtggttcagttcctaaacctgggcttgaagtcaacttagtcgacgctgttccttgtcgaatagcatttgagaggggcaaagaacggcacttctgctttttagccatagctcatggaacttctggttggattcttcttctagaagaattacctctaaaacgggaacgaggaattgtccgtgtcatggcacctttggcaggatctgatccaagaatagatacaaagcatgggaagtggttacatctacgcattcgcccttcttcggtcccttttttggacactgagaagcataaagcgaagacaaagaagtatcttgttgatgggagatggacccttgcttttagggacgagcagtcctgtaaggttgcagagagtatggttattgaagagatgaaactccaacgaggtgctgttgcagagcaattgaagccattggttgaatttgacatgcctgaggatggaatgcagcacccccagacttcacatgaaaccccttctgatgatggatcatgactaaattttcatcaagtgcagtgttgagcttctcaattaaggagacatggcaacagatggccgcaaaagtgccgcattgaacatttcaagcatgctggcaggaaaacccaccatggcaagtcatcgacaattctgtacattacattgggagattagagatgtctccttgttaacacacaactgtagagtttcgggccgtcctgagttgaactagctggataggattctttgtacaatagtttgtttctctccttgcccgttgtaaccttatatatcacatcaaaacccattctttgttaagtttcagggcacagttgtgttgtgcacacgaaatgtttaaagaaatttgcagttagtcatacctgttgtcaaagcaagccttgcctatgtggtaataaaatgtcagatcgataatttttcttggaaatatgaatgttcatggactgtt

SEQ ID NO: 8485 - DNA, 3367 bp, Zea Mays
tcccgaatcgatatatagccgaacacgaaccggcagtcctcaaatacagttgctgcaccgcaaccccgcgccaaagccagcgcggccaaacgacgtgacgaccaaacgaagcaaccaggcgccgaaaaggatagccgaagtgcgaaacccaacagcaaggagaaggcgaggggaaaaaagaaagaaaaggcgcatcgaaaaggcaaagagcgagctccctctacccgcgatccccgcacaccggccgccggcgttcgtcgccgccgcggatgagatgcgctccccctccggcggcggcagcgtggtggcccgcgcacgttcgtgaggggccctccgccacgcgcccaggttactgtggctccgagtccgagttcgctccccgcgcccgcgctatcgccgcggggcggagcggatcccccaacatgtggcttttctggcgcactaggaatcgcttctcccttgaggagctccggtatctaacagatcagctacaaaaggttcatgttgtcaatgaagctaataaggaatttgtgattgaagcattgcgatcaattgcggaacttatgatatacggtgaccagcatgatgctttgttttttgaatattttatggagaaacagatcatgggtgagtttgctcgtgttctaaggatctcaaagctgtcaagagtgtcactccaattgctacagacaatgagtatcatgatccaaaatctgagaaatgaacattcaatttattacatttttagcaatgagcacatcaacttcttggttacgtacccattcgattttcgaattgatgagatgttatcgtactacatatcttttctgcgggcgataagtgggaagttgaacaagaatacaatttctttgctcgtgaagacgaaaaatgatgaggtcacttcctttcctctttatgttgaggccttaaagtttgcttttcacgaggatagcatgattcgagttgctatacgtaccttgacactcaatgtctatcacgttggagatgaatctgttaacagatttgtttcccgcacgcctttatcagattatttttcagacatggttcagcattttcagaagcagtgcattgacttggataagttggttgcacgctcctcacgaaagggaaattcttctgtgccaatatcttctattgaagatgcaattgtgcaaattgaagacacactgtattatttcagtgatgttatgtcttctggtattcctgatcttgaaaggttcatcactgaaaatatcttgcgagttctggtatttcgattcttactcccgtcactgcagaggcagagcacagatttggacttaagtgtcactacatccatgtatctactttgttgtatactacacatttttaagaataaggatatggcaagtactgtagctgctgccctttttcatcaacctgatggccctgatgataggaagcaaaggacacctaatggatatacatctgagcatgatagttgcaaatctgagaatcattgcaccactgcctctggtatcgagcaatcaagtgaggagccaaattctttgtcttctgttagttggaaacacttgcccaacaattcatcgcgaagtgattgctgccaaggaaacacaccaagggaacacttgctgtcctatatcacagaaggagatgattcacaagctttgggttcattgtgcttattcgctacattattgcagacgaaagaacttgatgaatcaatgctggatgcccttggaatcctccctcaaagaaagcagcataagaaacttctattacaagctttagtaggtgaagaccttgctgaaacacaattattttcgtcaagcagcagtctaactgatgacagcatttgtagtgattttgatatttatgtaaggaagcttcaggataaatatgggctacaatgtcaccatccacggcaaatgacttccaaagctcacagatatcaggtcaaaggtttctgcagatgttcgtttggttggtggctggcttttccggcaactgctgccccatggagaggaagagttcactgcttttcatctaagacgactaaaggattcacacaaggattgtagctcaaagctttctgaggaatctggaggatgctggtgtgacatgcttcttcctattgttaaagaagcttggaggaactgcaagaaagcaattgaggcatcttcgccaccaaaaggatccaaatctattattgtacccatggatttgtgttcatttgaaggtgattcttctgttgccatcgcagaggcactctatgagatggttaagggttttgtgctgcagcatcaagttatactcttctgtcttggagaaactttcacagagctacctcctatttaccctctggttgatttgcctataaatactagggcaagcgctgcagattttggtggttcagttcctaaacctgggcttgaagtcaacttagtcgacgctgttccttgtcgaatagcatttgagaggggcaaagaacggcacttctgctttttagccatagctcatggaacttctggttggattcttcttctagaagaattacctctaaaacgggaacgaggaattgtccgtgtcatggcacctttggcaggatctgatccaagaatagatacaaagcatgggaagtggttacatctacgcattcgcccttcttcggtcccttttttggacactgagaagcataaagcgaagacaaagaagtatcttgttgatgggagatggacccttgcttttagggacgagcagtcctgtaaggttgcagagagtatggttattgaagagatgaaactccaacgaggtgctgttgcagagcaattgaagccattggttgaatttgacatgcctgaggatggaatgcagcacccccagacttcacatgaaaccccttctgatgatggatcatgactaaattttcatcaagtgcagtgttgagcttctcaattaaggagacatggcaacagatggccgcaaaagtgccgcattgaacatttcaagcatgctggcaggaaaacccaccatggcaagtcatcgacaattctgtacattacattgggagattagagatgtctccttgttaacacacaactgtagagtttcgggccgtcctgagttgaactagctggataggattctttgtacaatagtttgtttctctccttgcccgttgtaaccttatatatcacatcaaaacccattctttgttaagtttcagggcacagttgtgttgtgcacacgaaatgtttaaagaaatttgcagttagtcatacctgttgtcaaagcaagccttgcctatgtggtaataaaatgtcagatcgataatttttcttggaaatatgaatgttcatggactgtt

SEQ ID NO: 8486 - DNA, 1422 bp, Zea Mays
cccccctgtccggtccggctatctctctctccctccctgctcggctttgacctcagctcgcaatgaactctctactgcggccgccgctgccggggccgacgcctagactgagcgcgaggcgtcgggtctcgtcgccagcgccggtgcgggtcggctcggcggtgctggccggcggcgagcgcagatgccaacgggggctagcagtggcgacgtcggtggctccgtcgtggatggaggaggccggggtggcggtgctggaggagggcgggcggaggaacccgtcagtgtcggactcgtaccgcgcggcggggctgccgcagcccaacgccacggtgctggatgcgcaggcgcgggtgtgcacagggcccgcacagacgcgcccgctcggggaggagcaggccatgcgcgtcctcgacactatcctccgctccgcaattggagaactcaaagaggagccagtctctagtgcacagttaggtgcattcttcgcaggcatgacaataagagctaactcgtttccagaggccacccaatggagtgagggcgagcgacgcgccatgagcatattttggccacgccttgtgcaggtccttcctcctgaggtgaagtttatagcagaccctgaaggcacgatcttgggtgcgaatggtttagcagagcctcggtatgttggccaaggaactggagagatgagactcgtcggtgctctgagggaagtgcttgctggtggccatttaggttatgaggaggttcaatgcgtactaaaggatatcctaccaattggatcgagttcagattcgacagtggttagtcaagcactgctagcggcatttttgattggacagcggatgaatagagaaactgatcgtgagctcaaagcgtattgcctagcctttgatgatgaactagcggttcgagcctgctatggtgaatcctgcctcctccacggtgttgaatggatgccacccaagggtggaataacagaaggacaaatgcttaaattcatgggtgcaaacatacacttatccccaacacaagccaagatattgttggaggatgaaactgctggttttgcatacttgaatcttcaggaagcttgtccaccattatattcgattattggactcagggagcatattaagaaacggccaccgttggctacctctgagaaagttcaacaatttgtgaggttatgcctatggatacctttaaagattgaaaactttaccttgaaagaattttcagagcctcctgatctttgaacaactaataaggtaaagatttagtaaatcactgtcacactttcttaataaattgccaggtggtttactagctttagctttcacctttcaaagtatctcttcactaggatattttacgcaaaaaaaatctcgtgggacttttttaaggtttaaggactgt

SEQ ID NO: 8487 - DNA, 1551 bp, Zea Mays
gtcccgtccgtcgcttggctgctgtagaggtcgcccgtcgccgtctcccccctgtccggtccggctatctctctctccctccctgctcggctttgacctcagctcgcaatgaactctctactgcggccgccgctgccggggccgacgcctagactgagcgcgaggcgtcgggtctcgtcgccagcgccggtgcgggtcggctcggcggtgctggccggcggcgagcgcagatgccaacgggggctagcagtggcgacgtcggtggctccgtcgtggatggaggaggccggggtggcggtgctggaggagggcgggcggaggaacccgtcagtgtcggactcgtaccgcgcggcggggctgccgcagcccaacgccacggtgctggatgcgcaggcgcgggtgtgcacagggcccgcacagacgcgcccgctcggggaggagcaggccatgcgcgtcctcgacactatcctccgctccgcaattggagaactcaaagaggagccagtctctagtgcacagttaggtgcattcttcgcaggcatgacaataagagctaactcgtttccagaggccacccaatggagtgagggcgagcgacgcgccatgagcatattttggccacgccttgtgcaggtccttcctcctgaggtgaagtttatagcagaccctgaaggcacgatcttgggtgcgaatggtttagcagagcctcggtatgttggccaaggaactggagagatgagactcgtcggtgctctgagggaagtgcttgctggtggccatttaggttatgaggaggttcaatgcgtactaaaggatatcctaccaattggatcgagttcagattcgacagtggttagtcaagcactgctagcggcatttttgattggacagcggatgaatagagaaactgatcgtgagctcaaagcgtattgcctagcctttgatgatgaactaggtcctcctccggttgctgacgtcaagtcgttgacacactatggtgaaccatatgatggcaatacacgtttttttaagagtactctatttgttgcagcggttcgagcctgctatggtgaatcctgcctcctccacggtgttgaatggatgccacccaagaaggacaaatgcttaaattcatgggtgcaaacatacacttatccccaacacaagccaagatattgttggaggatgaaactgctggttttgcatacttgaatcttcaggaagcttgtccaccattatattcgattattggactcagggagcatattaagaaacggccaccgttggctacctctgagaaagttcaacaatttgtgaggttatgcctatggatacctttaaagattgaaaactttaccttgaaagaattttcagagcctcctgatctttgaacaactaataaggtaaagatttagtaaatcactgtcacactttcttaataaattgccaggtggtttactagctttagctttcacctttcaaagtatctcttcactaggatattttacgcaaaaaaaatctcgtgggacttttttaaggtttaaggactgt

SEQ ID NO: 8488 - DNA, 1660 bp, Zea Mays
actgaaaatagcaatttaggttaggtaggctggaatagttccagaacgcgcccttggggaagctcggaaaagcgtcacctactcacctgactcgacacctaccgcgctctccgggtggtgcgagtgcgagtgccacgagccccacgaaagcaaaggaacagacgcacgcggaccgtagcgctgtcacgttgcgtcacgcggcactatctcagccagccgtccagcacagcggaccggtccatcgatcaccgatggcctcctcgctccgccatttcgcgggcctcggctgtttctccgccgcggcgtctagctctgcctccaccagcttcctgcccggctacgcccccgacttctgcgtattcgtggcgctccgtccgatcaagccgcccgccaccgccgtagcgaaccctcccgcctctccatctccgctggaggaggagcaccggcagcaggccgccgttccatggcacagcgacgacccgccagcaccatccgttcctgcgccgctgcgggtggggatcgtcgggttcggcaactttggacagttcatcgcgggcggcgtgcagcggcagggccacaccgtgctcgcggcctccagaaccgactactctgcctactgcgcccagcatggaattcgcttcttcaggagcgtcgacgcgctgtgcgaggagcagccggacgtgctgctcatctgcagctccatcctgtccacggagagcgtcgtccgagccatccccttccacaagctccgccccgacaccatcgtcgccgacgtgctctccgtcaaggagttcccccgcaatctcctcctcgagaatccgtcacttgatttcctctgaatttcctggtgatgacgaagacgtacgcttatgctggaccggccaactgcactgcactgcacttacaagggaatggtgcattgccgtgtctggaatccggaacgaggatcgttgatacactgatgaacacatcgccaatctgtcaggttctcccaccaggattcgggatcatctgcacacacccgatgttcgggccggagagtggcaaacacggctggggcaagcttcccttcgtcttcgacaaggtccgtgtcgcggacgacggggatcaggcggcaacgtgcgaccggttcttgagcatatttgagcaggaggatggtggagatgtcgtgtgccgagcatgatcgctacgccgcggggagccagttcatcacgcacacaattgggagggttctgtcacagctgaacctcagttcaaccccaatcaacaccaagggctacgagaccctgctgcaacttacccagaacaccgtaagcgacagtttcgacctgtactacgggctcttcatgtacaatatcaatgccacagagcagctcgacaggctggaaatggcatttgagaaggtgagacagatgttgtctggcaggctccacgacttcataagaaagcagattgtggagagggcggacccttcaggaaaattggcaaatggcaggtccagttctcctgcagcgcaccacttatcgacattaacagaagaaaataagacacgtgtatcccccgctcttactctagcctctcctacgctttagttaaacttgtataaatttgaccatgttttgttaataaaaaaatattgatatatacagatctaaatgaa

SEQ ID NO: 8489 - DNA, 7066 bp, Zea Mays
atttatgaggcccaaaactacagctcatggtggccagtagcagtctctttccttcggcagtgtttgggggtggggtaccgcttcctcctgtgttgaagcagcctttccctgtcttctctgcactacgctacgcccgcagtccccgcacccagcagcagagtacaatgtccacaggcaaatgcgataaggtgaggaagagagagcacgggatgggttgagaaacaagatggagggagaaagtgggcagcctgctggatcttggcatctcgccgccgctcatttccgctccacctgtgtgggctagttatctactagtagtatcttcgggccagttcaagacttagccgctgttctaagcgctgaggaagtaaaatatcatttatcggctagagtagtctctgttgctatccggcaccaatggcgactttggtccgtcatgattcaaggcagtactcgtggtggattagccatatcagccccaagaactcgaaatggctccaggaaaatgtcagcgacatggactcaaaggttaaagcaatgatcaaacttatcaatgaagatgctgattcttttgcaaagagagcagagatgtactacaagaaacgtccagagctaatgaatttggtggaggaattctatcgagcgtaccgtgcactggcagaaagatacgatcagtccactggggcacttcgccaggctcacagaacaatttctgaagcatttccaaatcagatgccatcaatgtcagacgagtcaccctctgctttcagccaagagatggagcctcatactccagatacgtctactctcacacgtgtggcatttgattacgatgatcttcagaaggatggagttggtgtgtcaccacaaagtttcacctccaagaggaatggtacacaccctgaggaaaccagtgcgctgtcatcgagtgttgaaaatgctcctcgtgctggttttgatggaaaggtatggaaaggactaacttttgaaggcccaaatgtcaaagggaaagatgatattagcaacgagatggcaaatttgcaacaagaagttgcaagactattagctgagagccaggatctgaaacagcagatgttttcagaatccgagcgggcaaacaaagctgaaaatgagatgcaaatgctcaaggcaacagtattgcaattaaatgctgaaaaagacacatcacttatgcaatataataattcctctgagcgaatatctacattggagtctgagctatcgaaggctcagtctgaccttgagaagttaactgatgaaatggctgcagatgtccagaagctaattaatgctgaaacactcaatattgctatacagtctgaggctgagggtttggatcagaagatgaagatgcagcaacaagcactagaacaaaagcttaaggaattggagagtttccgctcaagcttccaggaggagcatgaaaagcgcatgcaggctgaaagtgctctactttcccagaggaaggaacttgctcaatctcatgaagaagtgcagaggttggctatagaaataaagacagcgaatgaaaagttgaatgagttcaagcagaccaaggaggtccttgagtacactgtttgtgagctgaagaaggatgttgagcgccttacagaacaaaaccagtcctctgaggtgcttgtacagaaacttggtgaccagattaatacactcaaggattcaaataatgaacttcaaagtgaaatacaaagccttaagagcatcatttcacagctaaacactgagaagaatgcagctgtgcttcaacaccagcagtttgtggaactggtttcggtacttgaatctcagttgtcgaagctacagtcagagctagatgagactgagcagaaagtacagatgctgacacatgatcttgaaaagaagaaagaagaagcggacaatgtccatctcaagctgcaagatgaatgccataggcgtatgcaaattgaagcagctcttctcatgacagagggtctgcattcccagttgcaagaaaaaatgcaaatgttgacacaagattttgatggatcaacaaagaagctcagtgagttggaaaataataagttagacctggagagcacactgaaagaactgaataacaccattttaggtttgaactcggagaaggatgcagcactccttcaacaacagcagtctttacagaaagtatctaatttggagttagaactctcaatgatgcagttggaaatggacaagtctgaacaaaaaattctcttactggaacaagaaattgcacggaagaatggaagtgtcgacagcctggagataagtttgaaagatgaatgtgagaagaggctacaagcccaaaaaatgtattcccagtcacaggaagacgttagtaggttgtacatagagatagagaagcagaatggcaagttgaatgagttggagaacttgatatccgaacttaacaacaccatcctacttataaacactgagaaagatgccaccctccatgagaaccagcagtcctcagtgagaatatcagatcttgaatctgaactcatggccttgaaaaccgaactggaaaatgttgaagggaaagttcatgcggtagagcaagaactcatatataagaaagaagaagcagataacctccaaattagcctacaagatgaaattcaaaaacgagttgaaggtgaagaatctcttcttatgatgacaaatcttcactctgggtcacaaaatgaagtgagagggttggcattggaacttgagaagctgaatggtaatttaagacaggtggagaacagtaaggttgatcttgagaacattgtaaccaagcataccgaggaaattcatatccttcgtgaacggaatctttctactgaccttatgataaaggaccttcatcttgaattggacgcactgaaggatttgaacgtgaaacttcagacagaaatggggttacacataggtgaaaaagaagcacttcagagagaatttacttctcaaagggaagagaagaaaaatctagaggggatacaccacactctggttgatgagatgagtaccctaaaaaccactgcaacaatgaaccagaagctgattgaggaactgcaaattacaaactcaaaactgaaggaggtgtgtgcaaagagtgaggttgagaaggcacttctctcagaaaaactccaagaggtggagaagctatctgaagaatgttcactcttggagaactcactttcagatgcaaatgctgaaatggatgcattgagggataaaataaaggcacttgaggctttagaaagctctctcaaggatataatttcctgtcatgtttctgagaaggctgttcttgtatcagagctagagatccttggtaaaagattatctgatgcttcagagaagaattctatcatggatagctcattgtttgatatgaaaatggacctagaagacttgagaacaaagttgaaagattctgaagaatcctgtcaggctctccttgcaaataattcagctctttctggtgaagtggatgcattaagagagaagataaaagcactacaggactcagaaagctctctgaaggatgcaatttcctgttatgtttctgaaaaggctgttcttgcatcagagctagagatccttggtaaaagtttatctgaggtttcagagaagaactctattttggatatctcattatgtgatatgaaaactgagctagatgaattgagaacaaagctgaaagattctgaagaatcctgccaggctcacctaacaaataattcagctctttctgctgaaaagaacaatctgttctctcagttggagagcattacattggctatgaaagccctagaaggtatgcatgccaatctggaacagaagcactcctctgtatcaagagagaaggattttgcatatgatcaagtaagggaactgcaggatcaattgagaattaagaacgaggaatttgaagtgtcagcaaagtcacatcaacttcaagcaaacagctatgagaaacaaattttttctctacaagagaaaaaccattatatggaggaggtgcttcaacaggaacaacagaaaaacataaatgcttctattagtacagttattttggagaactgtttggtcgatgagcaagacaagaaggttgctcttttcactgaatgccaaaagtatgctgtggaaaatcattcagccaatatgttagtttcagagttaatggaggaagctagatatcatggggaggagagaaaaaaattgctagcgcacaatgaaaaactgagggaagggatttcaaatcaaatgaagtttctgaatatctgcaaagatctaggacctgctgatttagctgaggacgaagttctgttgcagactgtttcagatgaaactattaacattatgagacttaaggatgaaactgaagatgtgaataggctcatggacaccgagctctcagttctctcagtagttttgttgcaagtagggatggagcttagagacttgcatttacagaagtgtgcccttgagaaagaagtggagagtggagaaaaagagacgctttctttgcaaaatcaaaaccagcagatgttggaacagaatgaacaactaaggagtggattacaggaaagcagtgaaggggtggaggtgctgaaaactgaagtatttgtgatacaagagaaactatcttgcttgagagagtcctaccagacctcacaagatgaaatttccaacctgactaaaaaaaatgagtccttgtctaaggaataccagtccttgagtgagaagtacaatgccttggaagatgagaatgatactatttttgaagaatgcatgatgctcaagaacttgtgcctgttctttaggggacataataatgagattgcatctgcattggcttctcttaccgatgagatggctttgttgagtttggctaagggcgacctcgatctccaagttaatgagctgaacagaaggtcagtaatgcttgaatcagaaaattatcacttaaaggactatatcatctacttggtagagattctcaggactagattagtcctttcagagtttgatttggacaccaatcgaagtgtcttccaggagttagttgtggaacttgagaattgcatgacacagttggtgcagaaggatgatgagctaatggaagcagaagagaaggttcaactcttgcaagaaaagaaccgggaactctgtggagttgttgggtctcttcaggttgcaatggaaggtgctaaagtggtgaaaggagaactggagaagaaaatcacaatactgattgaacagtgttctagcaaggacgacaaaattttacttcttcaccaagacaatgaggcattgcaatcagagattgagcaatgtgagagggaatttgttgagctgatggatgatgccattactttttcagtgaattctgcggtctatgaagaaaaagcattcgagcttatgatgaatggtaaagctacagagaatagagcaatatcccaaaaggagttgctaatgaaggagatctcttctcgagatgctaatattgaggagttgcagaaaaggctggctggtattcaggatgaacatgcagaactaaaagctgagttgaacacacatctagctctcatagcatcattggttgatcatgtcagtgtgctggaagaagatgttcgttctctgtcaaaaccatgtagtacagaaggcaaagaggaaactgcaagggtacatcatgtgcaagagggcgacgatgggctggaatctcattgcttagtcaatggaactccaaagttacaagggttgattgcaagaatagaagcacttcaagtggttgtattaaatgctaaagatcgtcaagatcgtaaatcagccgagtctgcagctaaactggcggcagcaagtgcagaaattcaagagcttaaaacaagaggcggctcacgcatggaggcaaaagaaatatgttctgacaatgagaaacaagatgttgaggtctccaaagggaagcaagtccagatcatgaaggatattgagctggaccaaatatctacttgccctccatatggcgctggagctgccctctacccccatggaactggtgcaaatgctgaactagatgacgatatgcttcagctgtgggaggctgcggagaggagctgcaagaaccaaacggccaagtcctcgtcatctgagcacgacatacaggcggtcgaggatctggagagcgagtgcccttcgtctgagctagcgaggggaagagaccttggaaccaataagctagaagtgccaaagggagctgtagagcctcacgaggcgtggagcaagaacgtgcttgagaggctcacttctgatgcccagaggctgttgagcatccaagcgagcatcgaggaactgaagaagaaaatggaggggtcctcgaagggtacgaattctgagtacggcagtgtgagcgctcaggtgcatgagacggagggtcttgtcttggaacagatcaattccaacaacaagttgagcaggaaggctgagaactaccccgcattgtcagataatacgagcaccgagcgaggagggtattccagcaggaggaagatctcggagcaggtgcagagagggtcggaaaacgtggcaaggttggaactggagctccagaagatccagtacgtcttgctgaagcttgaggaggagcacgagtacacaaggctcaaagtctctgataagcgcactcgtgtgcttttgagggactacctgtatggaaggaaggaccgtggaggcgggcagaagggaaagaagaagcgggtcccgttctgtggttgtgttcgttcgaaatcaagaacagagccgtagcctttttgttctcgcacccctgcgcgttggaagaggtggtggtgtcctttaggatgaatcccctttgtaactgagtttagtatcctgatgaagaagcctatgtactagatttttggtttcctgtctagatgaggccgttcttctagccagtttaatctcaggtattactgtgatgtatcaaggactgctctttctatatatataataatagcttcatgtttgtatagcctat

SEQ ID NO: 8490 - DNA, 4807 bp, Zea Mays
cgccccgcgcggcgcctgctcactcccattttccattgacctcgcccctctcgtccgtctcctccctccctgtcccggagcttcgatttttcccttcgagaggagccacatgattcaccgtcggaaagaggcaaggcaacggaacccgagccgctccgcttgaggtgaggtggggtccccgtctgggtcgggggggcattaccttgccgcccccgcgcgaagggagattcccgccacctatagtcgtcctctcgtgggccattttctgccttggggagagcatagacgcagcgccgcgggaaagccgggcgccgcatggatcgagacatctggtgttcccgtctcaagagtcttggcgtagcggggcggaggaggaggacggggttccggagcgcagggccgcggcggcacgccgggatttcagaggcgccgcgctgttgagtgttgacgtcttctcgatcctgggaggagctgatttctctgctgagggcctggggtggctctcggttcagtccctctccctgtgcagtttatttgctttttttaggtagttgggggctacttgttggttgggagaggagctgaattattgcgagctgcattcttggagattcttgctgctcgaatctcagctgctcttcttcagagggaattgccaattgcgttctgcagtaagattgatttggacaaggttggagcgaattggctgctacggcggggagttccaaaaaaaacccgtgaggttttggccttgtcgacttcttggggcatctgggagtagctttggtgcagtgattcacttgagtctggaggaatggcgccgacgaagaggctggagaaacttaagctcagcacattgttgactttcatgcgttgtcacgggggctctagtgatgaccacttacggattgggacagtggggttctccagagtcgtgtacgtcaatgagcctgataggcttgaagaggagggattcagttacctgctgaatgaggtgtcgacgacaaagtacaatctggccaccttcctgcccaagtccctcttcgagcagttcaggagggtggccaatttctacttccttgtctctggtatccttgccttgactccacttgcaccatacacggcagtgagcgcgcttgcgccgctgtgtgtcgtgattgtagccaccatggcaaaagaaggggttgaggactggcggaggaaacaacaggatcacgagcttaacaatcggatagtcaaagtgcatagggggaatggtcattttgaagagtcaaaatggaagaatatcaaagttggagatgtaataaaggtggagaaggataatttcttccccgctgatatgattctgctttcatctaactatccggatggaatctgttatgtagagaccatgaacctcgatggtgaaacaaatttgaaaattaaacaagctctcaaggtgacattggatttacatgaggacataaagttcagggaagtcagacaaacaataaaatgcgaagacccaaatgcgaacctctactcctttgtcggttcaatggaatggagaggccagcagtatcccctgtcatccctacagcttcttcttcgagactcaaaactacggaacactgactacatatatggggctgtcatcttcacaggccatgatacaaaagtgatgcaaaatgcaactgatccaccatctaaaagaagtaaggttgagaagaaaatggatcaaattatttatcttctaatgtcttctctactcatgattgcattacttggttctgtcttctttgggatctggaccaaagaggacctaagagatggtgagctcaaacggtggtatcttcggccagatgctactaccatattctatgatccaaagagagcagctctggcatctttctttcatttgttgacgtccttgatgctgtacagctacttcatacccatttctttgtatatatccatcgagatggtcaagatcttgcaagctctattcatcaaccaggatattcgaatgtatcatgaagaatcagataagccaactcatgctcgtacttcaaatctaaatgaagaactgggtatggttgatacaattctatcggataagactggaacattgacgtgcaacatgatggagttcatcaagtgttcaattgctggaactgcctatggtcaaggcgtcactgaagttgagagagctatggctatgaggaaaggtgctaggttagatgatgacattgaaaatggagaccacaaagacaaaaaaaatgacaacagtccccatgttaaagggttcaatttcaaggatcaacgaataatggatgggaaatgggttcatgagcctaacagagttatgataagagattttttccggctcctagccatctgccacacatgcattgctgaaatagatgaaaatgagaaggtttcatatgaagctgagtcccctgatgaagctgcatttgttattgcagcaagagaactagggtttgagttttacaagaggtcgctagcaactataattgttcgtgaacggaatccaagtcagaatgttgttgagaaaagaaagtatgaactcctaaatatgttggagttcagtagctcaaggagtcggatgtctgtgatagtgaaggaaccagagggaagaatattacttctcagcaagggtgcagacagtgtgatgttcaaaaggcttgcaccaattggaagaaaatttgaagaagaaacaagaagtcacataaatcagtattctgactctggtctaagaacctttgttctggcataccgtgtcttagatgagaaagagtacaaggaattcaatgaaaaattgaacgctgccaaagcatctgtaagtgctgataaagatgaaaaaattgagcaggttgctgatagcattgaacgggacttgattcttcttggtgctaccgcagttgaagataaacttcaacaaggggtgcctgaatgcatagacaagcttgcacaagccggaattaagatgtgggtcctgacaggcgataagctggagacagctatcaatattgggtttgcttgtagccttcttagacaaggcatgacacagataatcgtcacactggaacaacctgatatcatcgcattggagaaaaatggtgacaaaccaaaaattgctaaggcatcaaagcaacgggttatgggtcagatagaggatggaatcaaacaaattccaccttcaactcaaattagcactgcatcattcgcgctaatcattgatggtaaatcactaacttatgctttggaagatgatgttaagtttaagttcttggatcttgctctcaagtgtgcatcagtgatatgttgccgatcttcaccaaaacagaaggcactgcaataggtgatggggcaaatgatgttggcatgcttcaagaagctgacataggggttggcatcagtggtgctgaaggaatgcaggctgtcatggctagtgatgttgctgttgcccaattccgcttcttggaacggctacttctggtgcatggacattggtgttaccggcgtatttcactgatgatatgctatttcttctacaagaatgttacttttggtgtaactatctttctgtacgaagcatttgcatctttctccgggaagccagcttataatgattggttcttgtcactatataatgttttcttcacctcccttcctgtcattgctctgggggtatttgaccaggatgtgtctgctaggctgtgcatacagtatccacagctataccaagaaggagtgcaaaatatattattcagttggcgtcggatacttggctggatgtttaatggtgttatgaatgctgtcttaatctttttcttctgcatcactgccttcgaggaccaggcattccgtcgcgacggtcaagttgcgggcttggatgctcttggtgtcgtcatgtacacttgtattgtatgggttgttaactgtcaaatggcgctctctgtgaactacttcaccataatccagcacatattcatatggggcagcattgcagtatggtacctcttcctcttggtttatggtgccataaacccgaggttctcaactacagcctacatggtcttcatcgaacagctggccccagccctctcattttggctggtgacactttttgttgtggtggcaacacttgtcccctactttagctatgccgccatccagatccgctttttcccgatgttccacaacaagattcagtggaaacggtacttggggaaggctgaagatccagaggtggcaaggcagttgtcatcaaaacaccgcacatcattgcagcacaggatggttggtatctctgctcgtcgtgacggcaaggctgtgcaaataacaaaggagacagagctacaagttcaggagtagcattgtcagtagattttgcgttttgtacagcttataggatcttgtctccagcaagatgacagctgaactgattgggacttgagatgttcctggattgctgcttctgtgatgcctgtcatgggagttgttccagttcagatgatagagcaagaccacagattgcttagataggtcgcaaggaggccaagagaatacctgctgcaaagttcaatttttagcagttcaaggattttgtgggttttttccctgcttctcttacacatgtaaatgcttgtaaccagattggtagaatttctcctttttaccccccttgcctgccctcgactgtttcaaacaataatggtaagacttctgatttgtgtgacttcatgcttttattatttggaaagaatcataaatgggtgtcttacaatctaaagttggtctcagt

SEQ ID NO: 8491 - DNA, 1491 bp, Zea Mays
cacgagcaggtttcctgcaacgcagcgcgtcgagcagaccagacccgcccggcctggttgtggtcgaggaggagactggaggaggacgggatagcagacgagaggagaggacgcgcacgccatgtcagtgcactttgcaggtccaccaccaaagccttgggagcgatctggaactgaaggaacttcaggtccagcacctttcaagcccccatctggtggaagcaccagtgatgttgttgaagcttctggtaccgctaaacccagcgaaaatgttactgcgatggaggggaatgccgctcctaatgtaaatagcactgtttcaaggcctatgccacagcggccttggcagcagacaggttatggaaacacctatggagggtatggtggatccaacatgtatagttcatatggtggatttggcaacacttatggtaccggtggactcggaaatagcatgtactcgagttacggaggaggttatggtggtggcatgtacggcggtggcatgtatggaggaggcatgtatggtgggatgggaggttatggtggttacggcatgggcggaatgggtggtatgggcatgggtccatacggtaatcaggatccaaattcgatgggccctcctgcatccccgccaggtttctgggtgtccttcctccgagtgtgccattacatttacaaaatgtcgaatcacctcactttttatttccagaaggacccaaatgcatggtgttgtcaatttcttcggacgaatctcattccttgttgaacagaacactcaggcatcctatttcttcatgacagcaatgctgcagctcttcgaccggtccggtatgctctacggtgagcttgcacggtttgtgctgcgtttgctaggagtgagaagaaagccaaagaaggggggcagcattcaggggccagaagcgctggcgttcgagggacctagccggcagtctaccgaggcaccgaaaacgaacaactgggacaacgtctggggaaactgagatcatgcctatgggtgcaacgagttgaatcatatagaagaagtgcaagggctatgacctatgggagtttgcttgccttttgattcatcaaaaagaagattgcggccagataccgcctttggtggcaacttaggggaagctgtgaagaagaaactgctgggcctctcttgcttttcccagctttgccttgatgtacctgcgagggccatggcccatgacactggtaggttttttttttcatcgcaactgtaaggtttggtgaagaacggtttcacagtgcactgatatatatgtagctgcttgctgctgttgtgatatcagtgtgggtatcgattgtttgtatatctctatctgggtaaatagtgtccgccttcgaaaagaatacatcaaatgtttgtgcaccctttacagcctcgtctaacttggttttgaatttggacttggacttgttgagagtccccaccccatgcaagtgtcgattctgttg

SEQ ID NO: 8492 - DNA, 2785 bp, Zea Mays
agaagagtagggaggcgcagcgcggggatggacggcggcctcgacgacgagtgggaagctagcttcctcgacgaggtgatacgcgcgacggatgaggctgaggctgtcgtctcccgcaaccctaaccccactcccacccccgcgcccgctcccatccccacgtattatcccttggccgccgcccccgtctcctacctcccagcctcttcggtctcctacatccctgccgcttcgcacctccgctccgcgatcagcttctcccctccacgggacctctcccagaggccgccgctcccgccgccgaccgctgccaccagcaccagggatgcgctggcgacgggggccgacgtcggtcgcgacttctctcctccgccccagctctcccagcgcccggcggctgatgagggcagcctcgtggccttcgcggcgtcgagctcagccagcgaccgccgcttcattagcacgggctgtggagaagcgggcgcgaagagggaagcgagggagatcgagaggctcaaaagagagctggaccgtgtctccaaggaaaggaatgaattgaaaaatgaatgcaccgcgctgaaaaaggacagaacaaagaaagatcttcaaatcaaagctaaagaagcggagattcaaaatctgaaaaaagctaatgttgcagggatgaacattgatcagtcctttcacgcccctgcaaatgaggctttgcatactggggtttcttctaggcgaacagacaagatgagtggcaaagataaggatgcccattcattgcgagacgatctctatctaaagcaagggcatcaaactgatttacttgaggctttagaactgaggcgtcgcaccatgattgataacggaatgagtacatctggagtagtgtctctggaggaggacacccattttgaaccaagaaacgctacatgcaaggaaattaaggcgataggagtccagacagataacacatctgacaatgaacatcttgactgcaagaaattattggttgagcgtatatctggtaacctacgtgcaatgtggggcatgtcacctaacagtttatcaagcaggaatttgatatcaaagatcaatgtttcttgttcagaagaaattttgtcacttctccagcatacgagattgtcagacaactgtgaaccctcttctcaagcaatctcctccatgaatgaagctatttcccaactgtatgacacgttcattaagatgaatagtgggaagatgtcaatacaaactttccttgaagcattgctaaatctatgtgcttttgatgatgctgctatagtcagtagaactttgagggtattcctcaaagttttacagcacttactgcaacatggagccaagtctagtgaaagtgtaccctcaggaacaatgtttctgttgaaccatatgttaacgtactcatggagaacaaccacaaagactgttcgaccttgttgagaccagtggatgcagaagattcattgagactgcataatatgtttcttccttttactttctggagttcacttttcactggcatgcttcaaattggggtcaagtactcacaagagacaattcgtactgatgcattatccataatgattctcattgtaaggacaacagatcccatagaggaacgccagaaattcggatttacttcagtaatgacgagattgcatctgctattgcagaaagagaacggattgcttgttaagaagcattctgtgcgtctacttttcttgcttctgaattgcccagtgatgttgaagttgctgtgtagtggaggcaaagacggctccaaacagatgggatcggaagcttgtgaaagtaatagatcacaagaagtcataagctcagttcttgtggatttatctgattgtttgacatgtggggaaacttgttctctggggattgagctttgcaggctcgtcatcattctgctagcttatatagcttccagtggcaaattgggatatgaggtgcttttagttccagtgagtgcccgtggtgccagttttttggagatgataatggaagtccttgcatcgcagatgcaatatgaaacacgagagttactaaaagaaagatgtttggtgatgagagaagctcttatcctgctaaaccggctggcatcacacgcaaactattcgaaaccaaccttggaagtgctgacgagaagcaagttatgcgcgacctggacgatcgatgttgcgaaccggctgccccatacgtggatggcaaatgatctcgcggagctggcccagaaattcaggtcgcgagtgtatgctttcatagaggagaaacccttgacaagcgacggtaccaatctgggcgcttctaataagagatgagatacccaggactggcgcagcctgaggtagcttgggtagtaatatggaaagcatattgctagcggctcgacaagtttagtttcttttttttcccttactgacactagggttttgtttaggagttagactggcttggctggggcgagtcgctagcttttgctggcggtgtacagaggcgaatgcttcctcgccatttttgagggggagggagaatgtagttgtactacggcaagtccttgggaacgtacatcataattgttgtttggacatcatctcatggctttggcattgaccatcgcagcttttttgaattgaaagttttagtttttttcttaccaggatgatctgactgtaagcaattgaggatattggatgggtttgttggttgtgaagtatgggtggatgcctgtttgaatgtactagttaatagatagttg

SEQ ID NO: 8493 - DNA, 3169 bp, Zea Mays
ttcgcagctgccgccgccagtgccggtgagaagagtagggaggcgcagcgcggggatggacggcggcctcgacgacgagtgggaagctagcttcctcgacgaggtgatacgcgcgacggatgaggctgaggctgtcgtctcccgcaaccctaaccccactcccacccccgcgcccgctcccatccccacgtattatcccttggccgccgcccccgtctcctacctcccagcctcttcggtctcctacatccctgccgcttcgcacctccgctccgcgatcagcttctcccctccacgggacctctcccagaggccgccgctcccgccgccgaccgctgccaccagcaccagggatgcgctggcgacgggggccgacgtcggtcgcgacttctctcctccgccccagctctcccagcgcccggcggctgatgagggcagcctcgtggccttcgcggcgtcgagctcagccagcgaccgccgcttcattagcacgggctgtggagaagcgggcgcgaagagggaagcgagggagatcgagaggctcaaagtgattactttctggctttttttcgtgtttggggcggagcggttttttgccttttgttcctaatgctctaatgctcttggtcttcacaaccgcagagagagctggaccgtgtctccaaggaaaggaatgaattgaaaaatgaatgcaccgcgctgaaaaaggacagaacaaagaaagatcttcaaatcaaagctaaagaagcggagattcaaaatctgaaaaaagctaatgtgtaagtactactggtttcatatgtactcattatttcagtcaccatgatgctgactgtgagctaacatactagtcatctatctgtatctgaagaatttgaacatgtcttgcttcttctgagcgaaggactgtgcgggggtgttttttttaaatattacttgagtcaccatatattgttttctgcatcagttccaaggctgttgacactgttttctgcttcaatttcttttttactcagcagctccatgaaagatgtttgcagtgcagggatgaacattgatcagtcctttcacgcccctgcaaatgaggctttgcatactggggtttcttctaggcgaacagacaagatgagtggcaaagataaggatgcccattcattgcgagacgatctctatctaaagcaagggcatcaaactgatttacttgaggctttagaactgaggcgtcgcaccatgattgataacggaatgagtacatctggagtagtgtctctggaggaggacacccattttgaaccaagaaacgctacatgcaaggaaattaaggcgataggagtccagacagataacacatctgacaatgaacatcttgactgcaagaaattattggttgagcgtatatctggtaacctacgtgcaatgtggggcatgtcacctaacagtttatcaagcaggaatttgatatcaaagatcaatgtttcttgttcagaagaaattttgtcacttctccagcatacgagattgtcagacaactgtgaaccctcttctcaagcaatctcctccatgaatgaagctatttcccaactgtatgacacgttcattaagatgaatagtgggaagatgtcaatacaaactttccttgaagcattgctaaatctatgtgcttttgatgatgctgctatagtcagtagaactttgagggtattcctcaaagttttacagcacttactgcaacatggagccaagtctagtgaaagtgtaccctcaggaacaatgtttctgttgaaccatatgttaacgtactcatggagaacaaccacaaagactgttcgaccttgttgagaccagtggatgcagaagattcattgagactgcataatatgtttcttccttttactttctggagttcacttttcactggcatgcttcaaattggggtcaagtactcacaagagacaattcgtactgatgcattatccataatgattctcattgtaaggacaacagatcccatagaggaacgccagaaattcggatttacttcagtaatgacgagattgcatctgctattgcagaaagagaacggattgcttgttaagaagcattctgtgcgtctacttttcttgcttctgaattgcccagtgatgttgaagttgctgtgtagtggaggcaaagacggctccaaacagatgggatcggaagcttgtgaaagtaatagatcacaagaagtcataagctcagttcttgtggatttatctgattgtttgacatgtggggaaacttgttctctggggattgagctttgcaggctcgtcatcattctgctagcttatatagcttccagtggcaaattgggatatgaggtgcttttagttccagtgagtgcccgtggtgccagttttttggagatgataatggaagtccttgcatcgcagatgcaatatgaaacacgagagttactaaaagaaagatgtttggtgatgagagaagctcttatcctgctaaaccggctggcatcacacgcaaactattcgaaaccaaccttggaagtgctgacgagaagcaagttatgcgcgacctggacgatcgatgttgcgaaccggctgccccatacgtggatggcaaatgatctcgcggagctggcccagaaattcaggtcgcgagtgtatgctttcatagaggagaaacccttgacaagcgacggtaccaatctgggcgcttctaataagagatgagatacccaggactggcgcagcctgaggtagcttgggtagtaatatggaaagcatattgctagcggctcgacaagtttagtttcttttttttcccttactgacactagggttttgtttaggagttagactggcttggctggggcgagtcgctagcttttgctggcggtgtacagaggcgaatgcttcctcgccatttttgagggggagggagaatgtagttgtactacggcaagtccttgggaacgtacatcataattgttgtttggacatcatctcatggctttggcattgaccatcgcagcttttttgaattgaaagttttagtttttttcttaccaggatgatctgactgtaagcaattgaggatattggatgggtttgttggttgtgaagtatgggtggatgcctgtttgaatgtactagttaatagatagttg

SEQ ID NO: 8494 - DNA, 3351 bp, Zea Mays
caacttccagatcgttctcatcccatcgtttcctcctctgctcaagcacggcagccagtccagccaccatttgggtgctcatctccctctgctcggcacccagccccagctcgcccgagctccctgcgccgacctcatcctccccatggtgcgtcaccttctactcctctccttcccacggcacagcagcgcccctgcagctccccttctccagatccatggcgcccaacaccttgagcgcccctgccgctgctcctccaccgggatctcctcctccactaggcgtccaggcttgtcccaccatggctgcccctcctccatctcctccctccccaccaggttacccagattccatggccgccgccgccccagccatctccctggtggccgacctcgcccctgccccagccacagctcccccttcggccctgctgctgcaagcactcagcccctcccatggcacacgccccatctgcaacaccgtcgacccccgacgaggtcctgttctcgccctgtcgttttagtactcggcgtcgattaagtagatgctaaccgtgtgtatattcgtgtgttcttgtgaggagaaatcccatgatttgggggaagacgaagtccaagcacaacccccgccaatcgctcgatgaaaaatctaaaccaaaaccctcagcgttttcatgggttccggagggattttatgttggtgttgtgcggtgtgatctccaattccctattgctgatgtcttactccatcatgaccttagggctttgatgattgctgtacaaggatgatatggcctcccgcccaaagctgtctggtattcagaagcaggttttggcgctgtacaggggattccttcggacagcacgccttaaggcccctgaagaacgccgcaggatcgagtctgttatcttggcagagttccgtgacaacgcaaggagtgttgaccgtaggaactttgtacacatagagtacttgttgaggagagggaagaagcagcttgagcagctcaagaatcctgatattactggactcgctacccttgtagtaaagaaatgagcaagagaagaaggaagacaagtcagacaaaacagaagacgagaagaggttcctaccataacacttaagcaaggaatcctgtacacttctctcctggtaaatagactggtagtagagtaatacatattgttgccatgataaaatgctaactgtgctgcataggcttgtactggtaattttaaaatggaactaaaacgtattatttaagtctttgtagtatatccatcctgagttacaaaagtcaatgacgcattggatttccagtatcatgagcaatatcgtatggaatgtagccagtctattctttaccccctatccttgatcaaagtaacttataggtgacttgtaaattggtaccaggggttgtgacttgtatattgtcaaggatcacttggatgtggtaaatgctatactggacactgatgatagctgcataaggattgtgcgaaaaaacgggaagacatccctacatactgctgcaaggattggataccatcgtattgtcaaggcactcatagagagggatccaggaattgttccgatcaaggataggaagggacaaactgcacttcacatggctgtgaaaggcaagaacacagatgtagtggaagagttactgatggctgatgtttccattctcaatgtgcgggacaagaagggaaatactgctttgcacatagctacatggaaatgggagaattttgggattatgaaacaccgcagacgtggcttcgacgaaacggaggcgtaggcgagggattcgacattatgaaaaaccagagaagatactacactctaaaatggacatgaatcctctattaccagggaaggatgatgtttattacactgaaacagacgctgtctcacatccgttacccgcactagacgcacccagtctttctacagagagaatcgcgccgttcttgaatctgccattcgctgaatctgccattcgctgctgttgtttctggacagtgaagcagtattccggacagtgaacaaaaatctgggaacacatttcattttcactgtcattggctaccagagtccgggaacaaaatctgggaacaaaatctgggaacacaaaaatctgggaacaaaatctgcctttggctaccagagtttattgctcccatatcattcgctgtccatttcactgtccattcgctgaacacaaaaagctgggaacaaactcattttcccagtgaacaggtagcacaatttagttcacaaaatctgggagcacaatttagttcacaaaatctgggagcaataaacaggttgaacaggtagaacaaaatctgggagcaataaactgccatcccagaacaaaattcgcagctcacatttcagttcacaagctagttcacaatttagttcccaggtaccacaatttagttcacaagctagttcacaagctcacatttcaatggagcaatacacaggtagcagtttgacaagctattacacaagctcacatttctgggagcaatacacaggtagcagtttcacaagctatcacacaagctcacatttctgggagcaaaaaacaggtggcgtagtagcagtcgtgtgttcatcttcatttgcagcaacgacaagttcacggcttggtgcttcatcttcatttccagctacaacaacgacaagccacctgctttggcgcggactagggttgtggtcgcagcgccgccgccacctgctttggcgcggggccgcgagcagcaagggagaagacgcggagtttggagagaaggaggtgcagcgccgccgccacctgctttggcgcgggaccacgggcagcagatctccgggcagcaggggaggagactagcaggggagggaaatggagattgaagaaaatgagatggaaggaagaggcttgacgggagagagaagaaccttgaagagagaagaacggctctggacggcagaagaaaacggcgcgtgggctgatagcgacggaagatcattattcgttctcctgaacgactaataacgatgggatctggaataacaggagcctgatggttgcatcagtagagttgaccacttctcagtattgcgagatgcatcttacatggtcaagaagataattcctattctgaactacttgctcgtgttgatcagttttgcctagtcccagtaccatacaaagatgttcaggtgaacctgaaaattcttctcaatttgacttgcaagctttctgatgcgagcactaaatagtgatttttttgcaattttgtatgagccttgtttgagtgaatctttcctttgggcagcatggatataaa

SEQ ID NO: 8495 - DNA, 517 bp, Zea Mays
ctcatggctcatgtggctgcggcgtgctcgaaaggctaaaggtcatgacagctgtttatttcctggaagtaagctgctgaacaacgccactggatccggcaacacgaacacatcttcgacacctacaagtgacgctgagggatctgcgatatggagactaagaactgggagggacaaagggctgttgctcttccttcggttggtacttagcattgcggtggctatcgtggtggattcgaacttttggacatgacaagaggttgctagctgtataataaactaaagccagaaattttgggtggtatgttagaggaggaaggaaggaggtgggcgggggattgggttatgcttagtgattctttattgttagataagcattaataaattgctcatttttcttcatctgatgaaatgtgtctataatttgttgaaatgtcccgatatttcaatctgctgggttcatgtccatacaatagttttttttatcaaattactgtaggattggcctacagttttt

SEQ ID NO: 8496 - DNA, 1046 bp, Zea Mays
ggaacactacctgaaccagtgtaaagtggtttccaagaagcagaatatctccaaggaatgacttgggacgaggtacctaagagatatgagtggaatatcttcaagatgttagctaaggataggtgcgctcggagactagcaattaacataaaaggccacctttgaggcgtggaaaggccgaccatcttatgttagttcaaaaggattgccagaactatgcaagggcttaatggattactggaacgagagctgcttgcaaacttgttgcccatgttcttgactttgctgggacttcagttaagccatccattacttcaaatgaaattgacgcagcagttcatgatatgatcattgaggctgctacctatccttctccacttggatatcgtggatttctatatgtacatcagtaaatgagtctgtcaagggatacctgattcagctcctcagatgcagaatggggatattataaatattgatgtaaatgtgttccagaatggataccatgggggtaccttcagaacatttgcatgtggacaggtgaatgattctatcaagcattttctcaatgtcatgacagctgtttatttcctggaagtaagctgctgaacaacgccactggatccggcaacacgaacacatcttcgacacctacaagtgacgctgagggatctgcgatatggagactaagaactgggagggacaaagggctgttgctcttccttcggttggtacttagcattgcggtggctatcgtggtggattcgaacttttggacatgacaagaggttgctagctgtataataaactaaagccagaaattttgggtggtatgttagaggaggaaggaaggaggtgggcgggggattgggttatgcttagtgattctttattgttagataagcattaataaattgctcatttttcttcatctgatgaaatgtgtctataatttgttgaaatgtcccgatatttcaatctgctgggttcatgtccatacaatagttttttttatcaaattactgtaggattggcctacagttttt

SEQ ID NO: 8497 - DNA, 1153 bp, Zea Mays
atttccaattgttccccattcttgcatccttcgtcgaaccccagcaatttcgatagaactgctcgagccctcctccctgttgccgccagacgcggcgctccgcgcgtgcatacagtcgccagccaccccgcgccgtgtgtccttgcggcatccgtcgggctctgcgtccttgcgttcttctggcccccacccgcgtcctcctgcatcctccgagcggcgggcgctgcctaggtcgacgacagccccgcgccggtgtcccgtgcatctgtcgggcactgcggcgatgtgctcctctggcccagcgctgcgtccctacgttcttccaaccgcgtcctctgcatcctccgagcggcgggcgctgcccatgtcgacgactgcccctcactggcgtcctcgtgcatctattgtgcactgcggtgatgtggtcctctggatcagacgacatcctctaaatcctctaggcggtgggcgtcgcacccatcgatttcgcttgctctaggtggactcgtcgataggcaaccgaggatgacactatcggcgacctcaagaagctggtggtagcgctgacggaaacagggccaaaaagatccccatccaggagctcccctgcatcggcacacctcctattgtctgctgatcagagctacggcctccctcgacctccctgaatttctctgtgatgaactatggttgcaagcattaaatttgtagatgtatgatcgaccgaatagatgtattctctattatatgccttgtgatgttgatctagatgaatggcaacttgtgtattcatttgtaggtgtatgatggacgaaagttgtcttggccttgtgatgttgtagtacaaagcagtgttcttggcatgggcaattgtaatagtttttttgatataaaaagatcatgaggttatacaaaagtgtggatataggtgcttcacaaatggacacatctctcactaagtccccgtaactttcaactataacatcaatgtttgagctatctttcttacatttccttattttttggctcaaaagtgtacaattagtcaccatactgttacaaactcacttcatgtgaagatgccccttatttgtatcatttactaatttatatggtttaaatgcctttccaagccagaaaaacaaaataaata

SEQ ID NO: 8498 - DNA, 1576 bp, Zea Mays
tgttgacctccactccaagcgagactgcgcgcgtccaaccggctggcggcagctcggcaggagcgcatggcgccggagtgcagccgccgcgacgctccccccagcgcgacgcttctgatcgtttgcgttgcactctacaccgtcgtcctcgccgttgcctccagtccgaaggcgttggcgtcctcttcggcgctgtcctctcgcgctcgcgcagcgccggaacagcagctgctcctgtccgctgatctcaccacggaggagagcgcaagaaggccgggggagacgcggagaccgccgagcgtggagcaggagctcgacgtggcgcgagctgcgatccggcgcacggcgcagcggcacggcgatgccggccgagcaggcgacggcaatgtcagctccgcgaacacctggttcgacgctggagtggagtatgctctcttggccagcgtctaccgcaatccggccgcgttccaccggagctacgcggagatggagaagctgttcagagtgtacgtgtacgaggaaggcgagccgccgatcctgcacgccggcccgtgcaagaacatctacaccatcgagggccgcttcatcgagcagctcgagctcatggcgccgtcgccagcctcgtcgtcgaggcggggaacccggcgtcggtctgccagtgacgtccggacgtcggaacccgcgcgagcccacgccttcttcctgccgttcagcgtctctcagatggtgcagttcgcgtaccggcccaacacctacgacaaaacccctctccgcgccatcgtcgccgactacgtccgcgtcgtcgcgtcccgacacccctactggaatcgctccgccggcgccgatcacttcatgctcgcctgccacgattggggtccggaggcgtcgacgggacacccggagctgcacgcgaacggcatccgcgcgctctgcaacgctaactcctccgagggcttccggccgtggcaggacgtgagcgtgccggacatcaacctctacgacggagacatgccgcggcagctcctggcgccggcgccaggggtgacttcgcgtccgttcctcgccttctttgccggcggccggcacgggcacatccgcgacctcctgctgcggcactggaagggccgtgacccggacttcttcccggtgtacgagcacaggcatgaggacggattcgactactactcgttcatgcggcgggcgcgcttctgcctctgcccgagcgggtaccaggtggcgagcccgcgcgtggtggagtccatccacgccgagtgcgtgccggtgatcctgtccgacgggtacgtgctgcccttcgctgacgtgctgcggtgggaggcgttttcggtggcggtgccggttgccgacatccccaggctgagggaggtgctggagcggataccggcgccggaggtggagaagctccagcaaggagtgcgcctggtgaagcgccacttcatgctgaaccagccgccacagaggctggacatgtttaacatgatcctgcattccgtatggctaaggaggcttaacctcaggctagatcactgatgtcacacaccaaaaatttctatttcag

SEQ ID NO: 8499 - DNA, 2156 bp, Zea Mays
ctccactgctgcgtgcgtgcgtgcgtacatcgtcaaaaacctccatcaagcaactgatcatgacgatggctagagctacgacctccacggtcgcagcactctgcttcctcctcagctgcgtctccgcgaccccttccacgctcgccgcgtcctccgccatcatccacgacatcatccgcggcctcgcggacaccacggcggcgcgcgtccgcacggacgccgaggccacggcgcgcgcgtccaccgacttcggcaccaacgcgaccgcggacgacgcggcccggccggcggccgtgttctacccgtcgtgcgccgccgacatcgccgcgctgctgcgggcgtccagcgcgagcgcctcgccgttcccggtctccgcgaggggccgcgggcactcgacccggggccaggccacggcccccggcggcgtcgtcgtcgacatggcgtcgctagcagtagctgcagggcgcgacgagaccgccaccaccaacgcctcctccacctccgcctccgcaaggctcgccgtgtcggtggacgggcgctacatcgacgccggcggcgagcagctgtgggtggacgtgctgcacgccgccctggcgcacggcctcacgcctcgctcctggacggactacctccgcctcaccgtcggcggcacgctctccaacgcaggcatcagcggccaggccttccgccacggcccgcagatatccaacgtcctagagctcgacgtcgtcacgggtgacatggtgacgtgctccaaggagaaggacgccgacctcttcgacgccgtgctgggagggctggggcagttcggcatcataacgcgcgcgcggatcccgctggcgccggcgccggcgagggcgcgctggctgcggctcctctacaccggcgccgccgacctcacggccgaccaggagcggctcatcgccgacgacgagcgccgcggcggcgcgctggccgggctcatggactacgtcgagggctccgtcgtcaccgacctccagcagggcctcatcggcagctggcgctcgcagccgccgccgtcctcctcgtccttctactcggctaccgacgccgcgcgcatcgcggcgctagccgaggaggccggcggcgtcctctacttcctcgagggcgcggtgtactacggcggcgccagcgacacgaccgccgcagacgttgacaagcgcgtggacgtgatgctgcgtgagctgcggtacgcgcgggggttcgcgtacgtgcaggacgtgtcgtacgagcagttcctggaccgcgtgagcgccggcgagcgcaggctccgcggcgagggcctctgggacgtgccgcacccgtggctcaacctcttcctcccgcgctcccgcatcctcgacttcgccgcgggcgtcttccacggcgtgctgctccccacgcgcacggctggcggcggcggcggcgggcccgtgctggtctaccccatgaaccggggcaagtgggacggcgcgacgtcggcggtgctcccctacgacgatggcgacggcgacggcgacgaggtgttctacacggtggggatcctgcggtcggccgtggcggacggcgacctgcgccgcatggaggagcagaacgccgaggtggcgcgcttctgcgaggccgccggcatcccctgcacgcagtacctgccctcctacgccacgcaggcggactgggcggcgcgccacttcggccccgccggcagcggcaggtgggacaccttcctccgccgcaagaggaaatacgaccccatggcgatcttgtcgcgcggccagaggattttctcgtccccgctacttgcctcatgatccgccggttccggtctctcgatcgtcgtgtgttgctgttgctggcatgggctagctgcatgaaataatagtgcaagcaagcaaaggcaaagcaagcttcaaggcatgactgttttgctttagcgttttactgatcagtagtcaagtgacacagttactacgtactacgatctgtctctgactctcttccagagggtcccaaatatatgatgctttttattaactttatttgaccgttattaaaaatatagtgatattgtttactttaaacgagttattttattgttacagaattttatcatttacataaaaatataaatttaaataaatgatcaaatacaataatat

SEQ ID NO: 8500 - DNA, 1222 bp, Zea Mays
gtgctctcaagttcaacagcttctgttatagccttcagggcccagaccatgagcttttcccagctcaggaagcggtgctgcacattcaaactcatattgtagaccttggcccagacatggataacattatcacaacaagactacttgtacctgcaagtgaaattgcttgctttgatggaagggaggggtcattatctgatatacagaggcagactagtgcaaacgtgcagatattacattgttggagagattaaagctgctcggaatgctctgatacaagtaacaacaaaattaaggagttttctataccgtgagatgcctgatcctattcaagttggcaatatcaatttacatggagccatttctccagtagcaggctcacctcgaggaccataccaaggaaatgatatcccaatgggtgcttatcaccaagcatcgcaactggcaacttcatggcattcaaaggatagtggaggcagtgcaagtggatcatttgagcaaggcagcaacattaatgatgatataaggcaaagtgctacaaaaagatttgccgttcctctagtgactagaagcacactagaaattgtcataccaaacagtgctgttgcaagcctcaccatgagagctggtagcaagcttgctcaaataagcgagatatctggtgctgcagtaacgctagccgaggatagatctgacatcttgcagaaagttgttcgaatatctggtacccctgagcaggctagcaaagctgagaatttgctgcagggatttatccttagcattccagatgacattccttcaggttaatcgaagatactctgcatgtcatagttgttaattcgtcaattttcttttatattttcgaggcagaatatgtcgagtcatgtgattatttgtttaattgagcagcatgttttcatgtgcggagacatgcatgccattttctttgtatctttgtagctgtgaccctaaatttcggttgtctccgaagacactctgcatgtcatagttgttaattcgtcaattttcttttatattttcgaggtagaatatgttgagtcatgtgattatttgtttaattgagcagcatgttttcatgtgtgtagacatgccattttctttgtatctttgtagctgtgaccctaaatttcggctgtctccgtttaactggccgatggggctgtaagattagcaagtgttttatagactgattggacattaa

SEQ ID NO: 8501 - DNA, 6630 bp, Zea Mays
cccaaatctctctctatctctctctactactagcttgctccatgaagtcaagagaggacggacagggaccagtcgctccccataccagaccaagattggcatgagccactgcaaccaggcttcacccacggcaccacatcctcctgttcctggtggtggtgattggtgacgacgaaagagcttgcttctaagcaccggcattgcggcgacacaatgccgacggcgccagcggcggtgctgccgcgcacttgcatggactccctcatcgccttcctccaccaccacctgcgcgcgctcctcgccgaccccgccgcgctccacgccacgcgccgccgctgtctcgctctgctcacgcccccacggcggcaccattgtcgtaaaaacctctccggagcgcaggaggaggaggagaacgaagacgacgccgtcctcgccgcgctccacggctccatcgacgcgctcctcccgtcccccgtcgacggcgcggcggccgtctgcctggcgggcgtcgaggaggcgctgcaggcccccgcgctgctgccggagcacggcgagacggcggggctggacaaccgccgcgtcgccgcgtgcgcctacttctacctcgcgctcgtgcggtgcgcccagggggacgcgtggcagatgtccatggacctcctgcaggccgtcgccgtgtgcccagccgcggtggccgctggccgcgaggacggcgcccgccgcgccgggctcgcgccacgcgcgctctgggaggggctgttcgacgacggcgtgctcgccagggccggcggcgccggcgaagaggacgcggcgcggcgcgcggccaggcgttacaaggactggctcatgtactacaaggtggtggccgccgcgccggagcaaaatggcgggtatcttcaggcaggaagatctggaagctctgtcatttcgagatggttgagttcttcggagagttgatctggcctccatttgagaactgaaggtgaatctggcatcgttgcaggatagaacgaaccattcggttgatcctgaaggaattaccacggtctctgcatcagaatttggtgcccatgacggtttcaccgagctgaaggatttcctcagcatcgcagatcaagatttccaggaagataccaaggggagctctgacagcaggtgcctccatgagatgctcgaggagtcgcagtctgattcgcctgtttccttttactcgcatcttgattctagtgaacaaagtgatagcgaggcagctccatatgacaaaggaaggtcagcaaagatcatgcccatagatgcagatttcttagcagctaaactccatgaaagatcaaaccacaacaagaatctgacgtggtgcacatctcctgaaaatgcaatgatatatgctccagaatcctcaatgtaccaggtcgatgaccgtgagacgaaaccaaactgcttgcaatcaaacagatctcatggatcactgaataatctatcaaattcggtcctggagctgaagaatgctgactcatactccacatccaactattccgccaaggatgccatgtttacgcagtgctcaccgaggcatgatctcagatgcttcaatgccttctcggccaaattcatcaagaaaagttccctgtccgatctagtctccagaggaagcatgagcaggaaattcaagacttccacagccagtgatgattggagtgatgtcagctcgcgctgggcgaaggacagccaggtagattttcttgagaggttcgagaaggcagtatcaaaactgctgatttcagatggactagaaagctgcctagatgctggctctgaggtcacaactatatggcaattactgaacaacacttgtgaggcgagacacatgtcgtcagtaaggcaagatatccttgatcggctgcttgacagcatttccacatcaaaaaaggacaaagtggtcagggcatcagtctatgtactactgctcatgatatctgaagatagaaatgtcatgagaggcatcaagaggaaggacttccatttatccaacttagccgttgcattgaagagagatgtacatgaagcagccattctgatatatctgttagatcctacacctttagagatcaaaaacttggatctgttgccctcgcttctacatgttgcttgtagctcaggcacccaaaaatggccttcaatgcttccactgacaccgacatcagcatcaatagctctcatcgagatcttagtgacagcattcgactatgtaacaaacaatgtccacttggcttccctcagctcccctcctattttgtccaagcttgtggatgttgcaaagaaccacaacttggaggaaggtgtggccctggcagctattctcatcagatgtgtacgtctcaatggtaactgcaagaagttcttgtcacaggctactccagtggacccattccttcaccttctgagacgaaaagagcaccgggccaagtgtgctgcacttgaatacttccatgagattctacagattcccaggtcctcagcaaactctctgcttgaagaaataagacggcaaggtggcattgcaattatgcacacactgatggagagatcagatggcaggagtgtgttccaagatgaagcgatggaagtcctgttggactctctatcatctcaagaaaacagtagagtacaggcattatcagcatgttttctttcaaacctcggagggacttattcctggtcaggagaatcgtacactgcagcatggctcacaaagaaagctggtctcacatcaacatcacaaagaaatacaatcaggaacatcgactggcttgattcttgcctgcaggatacagaaataagcacatggagcaataaatctgcacgagcgattattaaaataggagtaccgtttatcagcgctttagccaaaggaatgcaaagcaaagtgaagggaacctcacagaattgcctcttatgcactgcatggctcggaagcgagctggctgcccttggtgaaaatgccataagatattctgcttgtgagatcttgttgcatgacatagcaagtcaccttcatccaggaaatgagcttgacgaaagggttctagcatgcatgtgtctctataattacacctctggaaaaggtaaatagtacatcatcattatcttctatccagttacaattaaatgattttgttatttactaaaatccaatatgtattttgcacatcttaaagacttatacaattgaatggttttgttatttactaacatccaagctaaagctgaaggaaagctccaagcagtataatttatacaaagttgccatggtccaaaaaaaattataaaaagttaccattttttaacaacaggaaagcaaatgttgatgagcttgccagagggttcccgagaatctcttaggaggctttcatcgttcacatggatggctgaggagttacttcaagttacagattattttctttccagcaaaccagtgagtattgttggaattgagctcctaggggtggtaataggctctaaattttatactataaaatttaaggatcgggtcggatttggatcgagctctatttctatttatttttaaactaaaattatttaagggctcaaatgaattatgaagaaacatttggatcgtgatccattatcacacccctatgagctccttcacttcccttgttcgtttcatactacccctgttccagcaaacaaggcatgccatgctaagtaacagcaagaacagaccatcagcgtgtatcatgtgtacatacacaaattctcgaaattggtcaaccaggcaatggtgcagcaactgctatagcattcttcagagggcagctttttgctggttattctaatggcaccatcagggcatgggacataaaaggccagagggcagtaatcatcagggaggtaaaagagcacaagaaggcagtgacatgtttttcactatcagaaactggggagaacctcctgagtggatcagcagacaaatctattcgggtatgggaaatggcacagcgcaagctagagtgcgtggagatgattcagacaagagaggctgtacaaaaacttgatatttgtggtgacaaaattcttgtacttacacagaacagcgttctcaagttctcttgtgcatcaagaagcacccaaacattttacaggagcaagcatgtcaaatctctagctgtataccagggaaaagcttaccttggatgcaaagacgcaagtatacaggaactagacgtgtcagttgaatccaacagtgcgatgataaggatacctagaggaggctggatggttaggaaacaatccattagctccattgttgtatacagagattggatgtactgtgccggtgctcaggtcgaagggtcagccttaaaggattggaagaaacgatgcaaacctaatatgacaatgccaataccaaagggaacaagtgtagaggccatggcagtggttgaagacttcatctacttgaactgcagtagaagtcctagtatcattcagatatggttgagggagaagcagcagaaagtaggaaggctatccgcaggaagcaagataacgagcttgttcactgcaaacgacatggttttctgtggtacagaaactgggttaattaaggcatggataccgttgtgaagtgtagaagcaagaaggagcaggtggaaggcttaatcttgtaaatgtaaaggaaagctagagtgtacaggaaacatgaaaaagaggagcataccattgtacaagccctcaggacacaacacagcagccagcgcggttcgttcataaactccatggatcagcaagtttcttcgaaatggatgagtagtaggttcataatgtaaatactaactagtgtgtgcgtgtttgttttagttttgcgaagggatgagttgtggatgttaataaagggtagagtaaatttcttagatctacatatatacttgcctagaactggaaaattaagaggacactaccactataacaaaaaaaagccatgtcattttggacaatgagaagcctccaaagctttattcttttttttcccaccatttatttaattggaaaacgtgatcatgaaataattgttgaaacagataaatttaagcggcagtggccgtagaatcatgaggccaactacacccagtggcggagcgctcggtatggcgagctatggcgcttgccataccttactccgccatgaggaacaggtgcttcaggctcaggcggtagtgggcagagaacaccagggccgagagtgaggcggcgagggcgaggcaaagctgtcgatgatgaagcgtgtctcctcactctcccatggcgtcatccgctgcgctcctcctcatgcccttctagtcccgtcgatttactgccttgcgctcaaggtttgcacctgcttcctgtccaactcactccacctcccatccgtccacgccgctgtctcactcttcagctctgccacagacgcaccgcaagtctccatcgatggtcctgcactcacgctgctctgcagcctacacccatagcactcatgcctcgcgcgcagctctgcagccccacctaacgacgtgagcgctcctgcctcagcgccgtgcgcagctccgcagcccttcatgacggcgcctgcattacctagcgtctccactgccataccttgctttttgtttgactacactcatgtttaaatgcattagagctaatatagttaactattaaaattaaaattagatgcaggcatctagacagcctacctaatagttgagctattaactatttttagcaagtcagctaatagttagccaaccgggtctatcgtactataagatggtggaaattttcggggaatttcatgtggcaggccaagcaagtggaagtgcaggtagaaacgtagtgttagaacggaatctcaagaccaagaggagggcggggcgccattatggcatggcatgcgtagtaaacagactgaagacaagagaaggttcaagggacggcacaaacctgagccgagccccccccccagcgcgccgccgtagacaacggtcttggcgcatttggccgagcacctcgcgggcaccttccctgtctgtctgtgcagacgatgcctaaccttgccgcctaacattccaagagaagcacgagccgtaccgctgtacagcagctgatactgacagctcttgtcctgattccttgaatttcccccggcttggtgagtccgtgtggtgcgcagggtgccaggacgacccagcccatgtggaagtcaaagaatgtaccaccggcaacccaacagcaggactgcaggagcacgacgcaacgaaacggacggcgacgatgatgatgatgccgtgcgcggtgcgccctgctgaaaccgagactggctgctgtgtcgtcgcctggtttggcagattttaggcgcatcgttgcctgcaactgcgttggatcaaaaaaaaaaaactattccccatgcctgtcatgtgccggcatatgctcactccatccctgcctacatggtcatggagtggaacgatgggaggtgtatcgaactaagtgtcggtgctgctgccgagctgctgcgtcaaaagtacccaccgacgccctgctctgctggcagaatacattcgctattctgag

SEQ ID NO: 8502 - DNA, 3690 bp, Zea Mays
cttcctatcaagtacaaaccctgatggtatctgctacatagagacagcaaatcttgatggggaaacaaatctgaaaataaggaaggctttggagaaaacttgggactatgtaattcctgaaaaggcttctgagttcaaaggtgaagtgcagtgtgaacagccaaacaattccctttatacttttactggcaatcttatcatggacaagcaaactatacccctctcaccgaaccagttactcctaaggacaagcaacatatttggagttcctaagattggccgcattgcattcaccggcggctgctccaatacaccggcgccggctctccaggactccaccagcgttgtctccagaccagcaccggtgagcaatgacgaagaggacttgatgactggtgctggtcccttccttctcccccttttctatcttattatcagtatgtctacactctgcggcgcctggtcggtcctccgggacgaccagctggtcgctcgacttgaaatcagtggtggtaaaggttatgatgaattccatgaatgttccctcaaaaagaagtacattggaaaaaaagctagacaagcttatccttgctctttttgcaaccctctttacaatgtgtgttattggcgccattggaagtggcatatttattaatgaaaaatacttttatcttggattgcgtgggcatgtggaggatcagttcaatcctaaaaacagatttgtggtgaccattttaaccatgtttactctgataactctatactcaacgatcatccccatttccctttacgtgtccattgagtgcacacaattcattaataacgatcttcatatgtaccatgctgagagtaacacccctgctttggcacggacttctaatcttaatgaggagcttggacaggttgaatatatattttctgacaaaactggcacacttacaagaaatctgatggaattctttaaatgctcaattggtggagaaatgtatggaactggcatcacagagattgagaaaggaggagcagaacgggctggaattagaatcgatgatgatgagggcaaaagatctgctaacgcggtccatgaaaaaggattcaattttgatgacgctagaatcatgcgcggtgcatggagaaacgaacctaatcctgaggcttgcaaggaattctttagatgccttgcaatctgtcatacagttcttccagagggtgaggagactccggaaaagataagttaccaggctgcctcacctgatgaggctgcacttgtgtctgctgctaaaaattttggtttcttcttttataggcgtacacccacaactgttatggttcgtgagtcacatgttgaaaggatggggagtatacaagatgttccatatgaaattctgaatgttctagaattcaacagtacaagaaagcgacaatcggtggtttgccggttcacaaatggaagactagttctctattgcaagggtgctgataatgttgtatatgaacgattggctgatggaaatcatgatatgaaaaagatcagtagagagcatctagagcaatttggttctgctggcttacgtacactttgtcttgcctatcgggatcttagtagggagcaatacgaaagctggaacgagaagtttgtacaagcaaagtcatctttacgagatcgtgataagaagcttgatgaggtggctgaattgattgaaaaagaccttatattagttgggtgcacagctatagaggacaaactgcaagaaggggtgccaacctgcattgaaactctctctgcagcgggcataaaaatttgggtgttaactggagataagatggaaacagcgattaacattgcatatgcatgtagcttggtaaacaatgacaccaaacagttcatcattagttcagagacaggcgctattagggaggctgaagaccggggtgaccctgtggaaattgcacgtgttattaaagattcagtaaaacagaatctgaaaagatttcacgaggaagcccggcattctttaattagcacccctgaaaggaagttggctctcattattgatggtagatgcctaatgtacgcactggacccaactcttcgtgttgatcttcttggattgagtctaagttgccactctgttatatgctgccgagtttctccgctgcagaaggcacaggttacaagcttagttaggaagggtgctgagaaaataactctcagcattggtgacggtgctaatgatgtgagtatgattcaagctgctcatgttgggattggcatcagtggccaagaaggaatgcaagctgttatggctagtgactttgccattgcacagtttcgttttcttactgatttgcttcttgtacatggacgatggtcttacttgagactgtgcaaggttatcacatacttcttctacaagaatctgacatttacactaactcagttctggttcacttttcaaactggtttttctggccagcggttttatgatgactggtttcagtctctatataacgttatttttactgcgctacctgtaattatagttggattgtttgataaggatgttagcgcgtcactgtcaaaaaaatacccacagctttacaaggaaggcatcaggaattcattcttcaagtggagagtgattgcagtgtggggtttctttgccttctatcagtcaatagtgttcttctacttcactgcagctgcaagtcggcatggtcagggttcatctggcaagattcttggcctatgggatgttagcaccatggcatttacttgtgtcgtggtgactgtgaatctccgccttctcatggcatgcaactctataacgaggtggcattacataagtgtggcgggcagtatagtggcctggtttatgtttattttcatatactctgcaataatgacgtcatttgacagacaggaaaatgtgtattttgtgatttatgttctgatgagcacctttttcttctatctgacaatcgtacttgttccgatcatcgccctgtttggggatttcctatatctatcgatccaaaggtggctcttcccctacgactaccaaataatacaggagcaacacaaggatgagccacacgagtacagcagggtgccactaccagagaccagccacctaagcccagaggaagcgagaagctacatgatctcgatgctcccacgggagtcatcaaagcacactggctttgccttcgactccccaggatacgagtcgttcttcgcctcgcagcaaggcatcggcgtgccacacaagccgtgggatgtagcccggagagcgagcatgaaaccgcaacgagcaggaaaatcctagtcgggcgaacacctctccgctgtgtaaagtcttgtatatctggtttcttgaccacaggagtttttgtataggtagcagtactgtagcccttttttcgtgtttgtcacccatatgttgttttgggatgaaaagtaggcaacggtccgtttggctgttaaacaatcatgtagggatacttggtagataaaaccaaaggggtattggacatgcagttaggaattttagtttctggcgttcattgcgtgatgtagtcgagttgattggtcggcccgccatgcaacttaaatcatgttactattattggaggcctgtgcattgatcatatcccattttatttcaatataagaacacatcctactcc

SEQ ID NO: 8503 - DNA, 3379 bp, Zea Mays
cgggtccatatcctccgcctgtttcgctctctgcgctccaactcaacgcggcccccacccccaccgccgcggcgccgcttgcgccagtgccccctcctcgctttccgctttcatccgggccccactcgccgcttcggtctgagctcggccaaccatcggccatcgccagtgccgctgccgtatccgtcgagtaatgcagcctcccggcccgcctctggcgacgccgcagccgctgccgccggcggtggcggcggagctcgcgcagcttgagtcgaggctgggccaggtcgccggagagcccgcgcgccacgagctcgcggagctaggcgaagtcgccgcggttcgcgtgctacgtaggatcgcgaggtctcaagagcaggtccggacgctcactggctacatcgtctcggctgcggtgcaggagacgttcgcgctcaatgcgcaggccgtccccaccgccgagagccgcgcctgcaactcctccgctccttccctaagtgatggatctgtacaagggccgcagtgcgccagtgaacttcgaatggaagaagtaactgcgggcctctcaaactatcgcatggcaatatgcgagggtcaaggtcaggaggatcatgcagtgatgatggcaattgacaacccacctgactgcatccccccctggggttgggaccaagattgcattgaagttgataaccttgtgccaggaattgcttctcaggcaaaccagatgcctatgcagtatggcgaccgcgaccgtatccaagaactagtttctattgtaccacatggtgttcgtatgctggctgaaagtcttgaaaatggcagagcatctgagttgcagaactatgtacaaaatggcattcccgaacagtggatggttccagcagatcaaagaatggaatccacctcgagccgcctgcaacatgttttaaaatgtcttcagggagttggaccctttggacaccatctcggtccggaatgtgcaataatgataccaaagcctgagccaaatgttgttgtcgaaaatttgttcagggagatagcaagccctcatatcacagacaacaaattgaggaatacagcgagccctcagatgtgtgcgttggaggatttagagttcagcaagagatttttgatactctcttatctttgtcggaataacctggaagatgaagttgtactgactgtggactatattaaatcgttgaagtttctgtccatggttcattttgagtcccaaatttggaggaaatttggtcagaagaattttcaggcatccaatagagctgcaacagatagggcaaagaatttcgattcagacccaactacaacaaaattataccattgcaatatcgagataagaggggagtccatattctttgttttgaaggtttcatttgatactttccaaaactctaacactggatgttgatttatcgacaattgacgttatactgattgatgatgaaccttgtcgggacgagcatgggaacattgttatgctagatgggaagcgtttgatccatactgatgggactggcttcatatctgaaaatttggctaagaaatgccctagcagaataatcaaaggaaagaagtcaaaagtttatatgcatcaaggtgaaacaacgcctcttctcatgcaggtccgtcttttttataatggatatgctgtaaagggaactctgctagttgacaaaaggattagtaataatactattgtgatccgaccatcaatggtaaaagtaaaagctgacccaaagttgtgccggatgaagtctctgagttctttggaaatagtttccacaagttgcatatggatatgctaatatggaggattcaatgttagaacgcatgattcattctggaattccactagaagaaccatacttgctatctaggctgagttttatggccaaacaggaaatgaaagtattcagagaaggaaagctaccaattgatgaatgctattatttgatgggtacaacagatcctacaggaacgctgaaaccaaatgaagtttgtgtgatacttgacagcggacaatactctggagatgttcttgtgtttaaacatcctgggctacattttggcgatatacatatcttaactgcaaggcaaattgatggactagagaagaattttattggatattcaaaaaatgcaatactttttcctacttctggacaaagatcattggctgatgagatggccaatagtgattttgatggtgacgagttctgggtctcaagaaacaatatgttactaaagactttcgagaagcgaagtgagccatgggttgaactattaaaactgaaggagacccagcacaggcttagcaaacctggggatttaaatgaattgattctcgaaagagtgctatttaatgaatgcttgacgactatgtttatacccaattacacaaaaggtttagcgcctgactgttggttagcacatatggaccgattattaacagaaggagtcgatcaagatgagaagaagtcaatcgtggaaaacatgattaaattagttgacctttattatgcggctctggatgggcacaaggtagatgttgatcgccatctgagagtaaaagcatatccacacttcatggagaagaaaggatttgaatcctaccattcttcatctattttgggcagaatctacgatgagactgaggaaataatagcgcagcaatgtgacgaacagatccagataacgacactgccgtgcttcagtgaggtggaggcaaccccggaatgcacctccctatgggaacaccggtaccaggagtacttgacaaagagcaggggccttttcgatctgggcaaggaagaaaagaacgacgagttccagaaactctaccaacactacaaacatctgctatacgacgccgacgaactggaggagacctcgcgggacctctcagacgtgttcatggaggcctgcgcgatatacaggatcgtgtacgagcgagcatggtgtaccaggagcgtcagcaggtgccgtttcgtgtggaacgtggctggagcggcgctgtgccacctccacgcgaccaagtacgcggcgcagcgcggggagaaaaccgcgctctgcccgctctcagttatccgccagctttacatctgatatatatattttttttttggtaaagcagctgatttctgcctgtaaaatgaaacgggtgagctgatgcgtcttaagagaagtatatactggggctctcgatcaacttagtcaagagcttcacagttgctttgatttgatgaggttaatatagaattgctttcttgtacgtcaccagccttcaatcttaaagactcgttcgcatcttttgatacacagaagttgtgtaggtttgccgattttttttatctaa

SEQ ID NO: 8504 - DNA, 2029 bp, Zea Mays
tgtgcttacgctacgcggtcgccaaccgctccccaccgccagccggatctcctgagaggcgacgccgcgactgccggacggcaaccctgctcctccgccggtgccctcccgcacgatgagccgcagcgggcctcgccgcggcatcttcgatggcctccccatcccggccgacaaatcctacctcaaggaaagcctgtcgcggatcgacgagagctgggcggccgcgcggttcgactcgctgccgcacgtcgtgcacatcctcacctccaaggaccgcgagggcgagatccagttcctcaaagagcagagcgacctcatcgaggacgtcgtggacgaggtcgtgcacgcctaccaccacggcttcaacaaggccatccagaactactcccagatcctgcggctgttcagcgagtctgcagagagcattaccggactcaagggggagatggaggaggcgaagaagctgcttggcaggaagaataagcacctcggccagttgtggtaccgctccctcacactgcgccatgtgctatcccttttggatcaggtcgaggatgttgccaaggttcctgctcgaattgaaaacttaatggcagagaagcagctgtatgctgcagtgcaattgcaagtccaatcagttctgatactagaacgagaaggccttcaagcggtaggtgctcttcaagatgttcgttctgatctaacaaagctgcgaggagtactattttacaaaattttggaagagttacatgcccatttgtacaacaatggcgaatatagctctgcagttttaagtatggttgacagtgagcaagcaccgacttctacagctactgggcgattggtaaacagcatgcaacctctttcaaggagaactagatcaattaaaggtgacaaccacattggtgggccagtagatgggtttccaaaagttagttctgttgatggaggctcttcgtttgatggcccagatgataatagcttagatatgagtgaaagtgatggacacactcgaaaggattcgaaaagtttttctcatgaaatcccaatttttctttcctatgctacaccagatgagtttcttgaatcaatgataaaggcagatgctccccttaatgtgaagtacctgagaacattggtacaatgcttatccatgcttggaaaggttgcagctgcaggagctgtgatatgccaacgagtacgccctacaatccatgatgttatcacttcaaagattaaagcatgttctgaagacgcttcaaaatccagtatgggcaaagctgcaaaaacgaatgatgtgttgcattcaaatggacccactccccggtttcaaatgttcacacagaaaacaaagagtggcgcatctgtaatggcagcccaactagttgtcagtcccatttcgccgactatggcacccactggagatgctcagcgtgcagctactcaacttcttagatcaatatttgaatgtcttgtagagatacttgagaaccatattattgttggagagcttcttgaacaaaaatcaacatctgaggttgataatgtaaacacacctcatattgcaaatggggatgcaagctggaatccagactctgaatctttccaagctactggtggtttcagtgttgcattctctctatcagtcgtgcagagtgagtgccagcaacttctgtgtgaaattttgcgggcaactccagaagctgctactgctgacgcagctgtccagacagctaggcttgcaaataaggatccagtgaaggaaaagagggatggatcagaaggcctttcttttgccttccgcattactgatgcagcaaccccagcgtcaaatgaaggtcaaggatggcgaagaaattccaatgtgcctcaagaagggtatggaacagcaagtgtcatacctgaccaaggaattttcctagccgcgtctgtttaccgtcctgtttttgagtttatgaataaaatagggttgatgttgcctcagaagtactcacaacttggacagatgagatccacacaaatgaccaag

SEQ ID NO: 8505 - DNA, 3528 bp, Zea Mays
acactttcttagcaggtaactgcagacggtcactgacgtgtgggcattatctaggcttggtccctaatgtcagtgacggagcaggttccaaatatgaagcttcagtagtgtatcgtgagaacacgtcggtgccaggctgccagcagcaacgaagccgcaccaggccccgcactgcccatggacgcacgcctcccggggctctcgtgtccctgtccgtctcccgtttgccgcctccaccgcaacgcggcgcgcggggtggcggtgctctcgcgatcctcgtgtcgattccagcggcgggggtgccattccctcccctggccgttgcccgcgcctcgcggtcgcgcaccggaaccggagccccgccgcgaatctagggttgcctccgcctcgccccctcctcccgagactcctagcggcaggaattaggacgagggtaacaggcgacagaggctgcgaaggacgccccctcgtcgaatgcgccggcgaccgatccgtggaggagcagccggagcacgcaggagccgctgatccaacgcgcgcagccattgatccatcgccgccagacgccatcgcgcccagccgcccagacgcctgtgctccagccgccgtcgtgcgcgcccaggagctgccagccgccatcgcgcgcgcccaggagccgccagagccagacgccgtcggccgtcctccaccgccctccaggtacgccgccggccccctcctccctcctccctccaccgccacccccaaagccgccaccgccgccagctactgcctctcccgtaccgccgccgccatcgtacgagcaggccgtaggggtgggtggtggccgaagggaggaggatgacgacgagggcgccggggcggtgatacgggcacacctgctctctgacttcaaggccgcggtgcgtgcaggaaaagtactggtgtccgacccgtcgtctggaaaggtccccactcgcatcctcttctgattctatagcgaattttggttgagagttcggagttctgcacttcctacttgccctgcaagagtttagtgttgatatttcattgggatagttggtcatttttccattctttctagctgacttatgtatgtcctcattatttttctggttgtattcttgtattgactattgagacatggagataaaagttatgtagtgtataatttttttatatctgcagcgctggtggtttgtttggtaaatggggaatggacaatactctgttggttccctgttaagtgttacattttcaatgcggtcatggaaatggaattagatgttgctgttgtgaagagagatgaccttggaaatgctcatggtcttaatcttgatgagttcgatgatgttgaagggcaagctttgaaaatgtcatccactgtgccgaagtcatcaaatatcttctggcatgattgcctagttggcaagactgatcgccagaagctactcaaccagaaaggctgtgttgtctggatcacaggccttagtggctcaggtaaaagtaccttggcatgtacattaggccgggagctccacacaagagggaagcttgcatatgttcttgacggtgataacttaagacatggtctgaacaaggatcttggctttaaagctgaagatcgtgctgaaaatataaggagagttggtaagtgtctcaccaatatagataaaaaaggacagacctagtgctggtggggaaggaataagacaagccttaccctgcattgcatcgaacccgaacctttggctcagtggaaaggcttcccatcacttcgctaggcctgttcttctgtctcgccaatatagatgtctattatatttcaaggaactcccacgaaagtaaaagcatgataaacaagtcttgcttctgccattattttatctttccagcattctgcagttcacatttttccttgaatacacgggagagctgtgtatctttgtattaggagtgaaaaaagggggtccaatacagactacagaacttcgcctcctgttctggaccaagcagagaggactgccaaaacaaacacgactactgagactaactaatcagacaataactgtaggacctaagtacctaaccaacactgtgaaaactactaactagcccacccctcgaactggactcagttctttaagatgtttggccccggcaaaacaccaaagatggtgttctttagcaaaattgtgcagaggccttctgcatgttgggctgaacaacggcattcctatgctttcaaagagaccaagctcctagaatgatggccgagataactccttgctggaccagttttgagaggtgttcaatgctctccttcaatcagcaaaagaggattcagcttgacttggctcttgaggcaaagcccaagtttgaaagaattttaaaccagaattctctagtgaaaacacaagtggtaataatatgctggacattctcctcttcttggtcacaaacacacattattgagggcgggggaggcctttttttgctaaccggtcagccatccagcacctatttctaattgctagctaggatgatcttgcactttgctggagcacaggttttccaaatccgcctccatgcctcaaaggtcacagatccttggaagattttgcacttagcagttcacattttgtttcaactattttgaacaggtgaagtagcaaagttattttcagacgctggccttgtatgtattgcaagtttgatatctccatataggagagaccgtgaatcttgccgtgcactgttgtcggatggtagctttattgaagttttcttgaatatgtccttggaattatgtgaagcaagggacccaaagggcctctataagcttgctcgtgctgggaaaataaagggttttacaggaatagatgacccttatgaagcaccactgaattgtgagattgagatcaaggaaatagatggtgtatgcccttcgccttctgacatggcggggcaagtggttacttaccttgaggagaaaggcttcctgcacgagtaggctgacgctgaatcgaagctacatccggggaaggtttcaatcagacaagcgcagaataagtcaaaagcgctgccagttaccgtatggttacatagattgatctggatgcctagtatttttctttccgcgcttgctctaccacaagttccattcagtttcattcagatgagcctagatggttcctaatttctttgacctctggaatagattacctgtaatgcaattctgataacagcttggggcagtatcgatttgtcacgggaaggtacgcctaatgttgagagaaactgtattcttgtgctccactttctgcagtgccgacgtgtaccctttccgttttactaaattataattagcttcccttcatttataagtttatttattttttatacactattcttgttacatatctaagtatgtctggatatatagcaaaaaaaaaaaaaactaaaacggattaaattttgaaacttcgaaccgagatagtacagtttagacacgctggaacatgcggg

SEQ ID NO: 8506 - DNA, 1614 bp, Zea Mays
gcctgtcatttgtctctcgcccgccccactgcgcgtcggattcagcaaagccatccttctccttcagtgacaaaggatccagctcgtagtcgcagcccatccatgccccatgcggccatgcctatatatactatactggacgcactccggcccggcgtgctcgtgctcgtcctctcccagcaccgtaaccaccgacagagcacgcaccatgacgaggaccaccaccagcagcacgctgctgacagcggcgctgctctgcctcgcgctgccgctgctccccggggccacggccaataaggcggcgcggcggcggcagggcgacaacctggcgcgcctgcgcgggtcgccgtggccggccgagtcgtcggtgtcgctggcggtcgcggcgacggatgacagagcgtcccggcacgcggcgtcgccgcccgcggggcgcagcaaggaggacgaccgcgtggacaagctgcccgggcagccgtcgggcgtggacttcgagcagtacgccgggtacgtgacggtggacgccgcggccgggcgcgcgctcttctactacctgaccgaggccgtcggcggcggggcggcggccaagccactcctcctctggctcaacggaggccccgggtgctcgtcgctggggtacggcgccatggaggagctgggccctttccgggtgaagagcgacggcaagacgctgtaccgcaacccgtacgcgtggaacaacgcggcgaacgtgctgttcctggagagccccgccggcgtgggcttctcctactccaacaggacggaggactacagccggagcggcgacaacaagacggccgaggacgcgctcctgttcctgctcaactggatggagaagttccccgagtacaagggccgcgacttgtacctcgccggcgagagctacgccggccactacgtcccgcagctggcccacgccatcctccgccacgccgccgccgccgccggcaagccgtcgtcgcccatcaacctcagaggcatcatgatcgggaacgcggtgatcaacgactggacggacaccaagggcatgtacgacttcttctggacgcacgcgctcatctccgacgcgacggccgacgccatcggcaggcactgcaacttcagcgccgccgccgccgccgccgcgggctccaacgacaagtgcgacgaggcgacgtcggaggccgacgaggccctggaggacatcgacatctacaacatctacgcgcccaactgccagtccgccgacctcgtctcgccgcccatcaccccctcgatggacaactttgacccgtgctcggattattacgtggacgcctacctcaacgacccggacgtgcagcgggcgctccacgccaacgtcacccgcctcgaccacccctggtccgcctgcagcgatgtcttgagacgctggactgacagcgccgcgaccgtcctgccgattctcgcggagctcctcaagaacgacctcagggtgtgggtgtacagtggagacaccgacgggagagtgccggtgacttccagcaggtactccgtcaaccagctccagctccccgtggctgcaaaatggagggcatggttcagcagcactcaggatgtagagagaggccgacg

SEQ ID NO: 8507 - DNA, 3027 bp, Zea Mays
ataccagcaacccaagcaactccccacgttctctgtccttccaagacccaggctttcagttccagccccacctcgcctagcttctcccctccccttcccaaaccctacaccccgggccttcgccgtccccgactcaccgccgggcgccggccacccccatagcgcagcgccggcgccgaactgaactcttccgtgcggtcggccgcgcgtacggccacccccctcggcgccgcccgccgcctttgatgtctcccacctgcgacctcggcttcctctggccccggtcgcagaagagcccccaagaggtctcccgagcggccgcttccggagcccagcgattggcctccccacggcagccgaaatgagcggcggcgagaagtgagccagggtggttgaagtttgggggtgcgggcgagttgattggattaggggtttgtagtacctggcacgttgattcaatgctgctgcgcgtatgttgctgtttgggtcctttacagaggacgagactaagttgttccagggtcagcctctcaaaagtccaaataaaagcgtcagcaaagaatgtgaacggacggagatccagtttggcaccctgaacttttcagtgctgagtttagagaaggtatctacttccagtgttgttcttcctgcaaaatcagcaaacagcgagaccagtgccatcacaaaggagaatacatgcagtaatgaaaagaaagctgcaggatcaagccttccaaatggcagagccattctggctaatggatgcccccctgttaatgttcctgccaacaatgatttatttgagaatgtgaagaagacagaagctgttgtcccaccagttgtgcctgtaaaaagcatcagcaatccaacaccacaaatgacattggaggtgcataacgatggcaccgaacccactcaaagcagaaagttagacaaggaaagggaaattactgaaaatggtagcccaattgtcgatacacccattgctgcagctccagcagaagaggcagtcacaaacctaaataagaaaacctcacagaacatgcccttgattccacaaggcttgaggaacacaggaaatatctgctttctgaatgcaactttgcaggcattgctttcatgctcgccttttgtccaccttttacaggatctgaggaaccgtagtatacctaagtttggctacccaactctgcgtgcatttgttgagttgatctctcaattcgatgtgcttgacgagtcagttaacaagaaaaaagagaaggctactactgttgctgcaaagccacttaatcctgccatgtttgatgatgttctcagaaactttacaccagatgtgccggctggaataactgctcggccaaggcaggaagatgctcaagagtttttaagttttgccatggatagagtgcatgatgaactgctgaagcttaatggtaatggtttggattcaaaggagggtatggttgtttcttcttctgctgatgatgcttgggagacagttggaagaaagaacaaatctgcaatagttagaacacatagttttgttccctctgagctaagtgctatttttggagggcagctacagagcgttgtgaaagctgcaggtaacaaagcatcagctactgttcaaccctttctactgcttcatcttgatatattcccagatgctgttcagacacttaatgatgcacttcgtctgttctctacccctgaatctttggaaggatacagaaccactgctggaaaggctggtttggtgacagctagaaagtcattcaagatacacgcccttccaaagataatgatcctgcacttaaagaggttcagttatggaaataatgggagcactaaaatctacaagccactcggcttcacatctgaactggttcttagtcgtgatctgctgagctcaccatcacaagagggtagaaaatatgagcttgttgcaaccatcactcatcatgggagggacccttacagaggtcactacactgctcatgcaaagcatgccgacgggcaatggcttcgctttgacgatgacgctgttgtgcccgttggcgagaacgatgtcttgcatgaccaagcatatgttctcttctacaaacaagtctgaaagcactacgtagttgattagttgctctttcgtatcgccgttgcttaaacagccagatataccgtctaactatcgtcctattaatgtagtcaccgagtaacagcagcagagtattatgtgaagcaccctggtgctgcacgtgtttattatcatatgcttggtcatgatgtggcgagaggggggatttgtcttcagcccattttgaggttctgtaaaaattcaactgtcatcattgcaatgagcagcgaagtaatcatggtcagccctgtcgctggcagctgccgaaatgggttgtgtgcatgtggcatgccgtggttggcaattggttgttgagaagacattgccattagcttagccatgtgccgtgtctctgggagtgtcaagaggtgcagggcaatgttagctggtgtatgtgccttgcaagcatgactagcatgttataaaaagcttcgaattattcgttttgaaggtgtcatgtccctgtcaaggagtcgtcctgacgtctgtaaggaaggtgtgcggccgacatggacttctctttgtggctttctgaggaatggactgaagtggctgcgacttaggaaatctggtatagcgcaaatgttctggagcaaactgagctagtctggttgcaatctgttgctaaactaccatcggttatacctgctgacagacagtgcaactggcgtaggttgctttatgttacacctgttgtttggtggtaaaatcagtggtccatcagtgcttcctacggccttcgtttcaaggaccgattcttcttcagtggatgctgacagctagacatcccgaaagtcatctggagagtagctcggcacatgtagcatcctggagtcgttgacaactcagttccatctgaatcataggacaactgaagcaaagcgaggtagtaatgg

SEQ ID NO: 8508 - DNA, 3184 bp, Zea Mays
aaagccagctgttaatcgcaattagcaggcgctaatcaaaaccccccgcccgaccgttactttgccctcacatccatattccataccacaccacaccgcagcccgacttcgcctcacctcgccacgcttgggattcccgcagggatccaatttctggtgaatcttccgtacttctaattcctgaaatatgagaagattctttttctttgggtcctccgctgcaaatgctggcgacgaaaacgggacaccgggcagtgatagcgggactacgcataaaaagacactggtggcagatgtgggcaacgaaagttctggttcctgcagcacaaggttgtcaagatccagaagccgtggtcaaaagcggaataaggaggaaccagccaatccgaagcagctcaggaggtccatgtcattctcgtctccggccacaaacacttgcttagacgaacgatgctttagtttctctggtgatgttccatgcactttgtatgatggatttgatgcacctcagaatgtcaaagatgttgcccccaacatatggtcaccagaaggaaatccagttttgagagaatatgcaataaatatcccaaaagatcattcttccatggaaaacgattctcctcgttcaagatgttgttcatgctcggcagggcactctcctgttagctctcccattgctcttcgatgcaggtcaacaagactaagcaatctattaagcaagaatgaagtactagatcgatacattgatagagggcatgaagatgcaatggtaaatgagaaacagaggcagtatccctccgccgcatctatggtttctactttgggaaggccacctcgaccccaatcaacagtaccatccataccaaaatcaatgaaagggaatacagagtgctacccagatgtagacataaaagaagactgcctttggcaagttgctcaagagggtacaagagataactgcaagattacaactatgtgcgatgcaggtagaaaccacgtaagcatgccagatgcttttgagagagacagtgctacatctgttgtagatatttgtgaagatttgcaagaagtgagacctccaaatgttatttgcccctccgcttgtcctatttcaggggagcaagaaaccaatgacatgttgctgcaaagagctaaagaagttgagtcaaggttcattgttcattgtggagatgaatatgaattcaacattatcagagataagcgaatgagctcaaatgacatgtttcagttgatccagcagttgacagaagataggaaacagttaacgcatgaactgtcttcacatataagagcacacgttgcagaaagatctgctgccaaacagcaatacaaacaatcaaagaaagaactagataccagaactaggaggttggagaaggagaagagtgaaagacaaactacactggagagagagatggacagaaggtcacatgattggtctgtcaaactatcaagatttcaatctgaagaagagagactacatgaacgggtgagagaacttgcagagcagaatgtgtcatttcaaagagaagttgcctttcttgaagcaaataaggctgaagcttcaaccaaagttgctagtttggaattgcaaaacaacaaattaaatgacgatctagagaaacttagaaacgagcatgagaagctccataattcctcagtagataaggatgctcgttttgctgaggttgttgaggaaagggaccacaccagggaatacttgaaggacaaggagggagagaacaaagcattgcacaaagtgattgccagactacaaacaacatgtaatgaacaggaaagagcaatcacaagtctaagacagggatgcaaagctcaattagacaagaaatttgttgagtgtgacagtgataaaatgaggaaattgcgaatggaactgattagactgacaggggtggagcaaaagttgagatgtgaaattcgttcttgtcatcttgaagttgggtccctcagacaagagaacattgcactcttaaatcgtttacaagttgttggaaatggagcacccttctcaattcgccttgaccaagagcttcaggctagagtggacaacctgcaggtgcaaggcttgtcattgcttaataagaccagccaactttgcaccaaattgttggatttgatgaaacacaagaaacttgaaaatgagtctttcagtggcaatgatgtgttgatagtcagtaattacacttttgagtaccaaagcatcaaaggaggaattgaaagtttgaagcgaagtttgaagacaataaattctgtactgaatgaaaagcaaagtgtaaaagaaaaatctggtgagactgcagctagaggtagttcttccagggagcaaacggatgattttggactcaagctgaaagaagaggctatgctcagtagagtattaaaggaggcactcttgtcaaaggaacttgacaatgggcaattggagtctgatctgtcatcttcacttcgtatccaagatgttatgagaaatgagacccagagagttcaggatgaactttcttgcatcacccacaaggctaagcagttagagcttcaggtatccaagaaggatgaagcgatcaatgagctccaacaggacttgcaggaatctgccaaggagcttgcgtctctacgcggaacactgaaaacagtgactgaggagagggacctttcctggcaggaatccaagcagctcagacgaaacatcaacatcatgcagaacgaggtcgtgtcactgaagaagaagattgaagccttggacgaagacatactcctcaaggaagggcagataacaatactgcaggatagcatcgacaagccgttcgacatcatttgcagccctaggtccatgagagagtttgacatggagtgaagagtgcggcgaagaacattgtccttttcagatatgatgtgcatttcgtgaaagacagagaggtgcttgtgaatacgtcggcgttcatacgattccgcagtgtcttcgtgcggtatatcgtagtggcttgttttggaactcattgctcggtttacaccatttgtaaagcgtgcataacttgagatatgatatgggtagtccttgtccaattaccatcacttgccccaaaggttgtttcgtgtgctgtcatgttcttgatgaatgttggagcagtggatgcatgctgtcaag

SEQ ID NO: 8509 - DNA, 1913 bp, Zea Mays
aaagaaattagatgacttggaacaagaaaataaagctcttcaggtccatgagctcaagaaacaaaaaagtgatgaggcagcaaagcgtttacaagaagatattcagcatataaaatctcagaaggatcagcttcaacaaaaggccaagcaagagtctgaaaaatttatgtcttggaaggctgcccctgaaaaggaagtaatacagctcaagaaggaagggagacgaaatgaatatgacatgcacaagctcttggctttaaatcagaggcaaaaaatggtcttacagaggaaaactgaagaagcagcagctgctacaaaaagattcatggagttgctggaagcaaagaactcatcacttgagacatatggcagtggaaatgcttcggggatgcaggccttaatgcgagctgttgatgatgaactggaagtcactataagagcacatgaattacgctcgtattaccagcgacaaatgcaagagagagcagcaatatccaaggaaatagcaaagctggaggaggaaccaaagcacaagatgagtgattgtcctcaagctatgtctcctagtgctagaagttttaggatatcagcattagagaacatgtcctcatcatcaagcgctatggtgtctatggcttctcaactatcagaagcagaggagcgggagcgggtattcaatggtaaaggtagatggtatcatgtcaggtccctcccagaggcagagaacataatgaaccaccttttccagttagcatcatcttcaaggtgtaaagaaaaagaacacaccattatggaattgaaggaaaaggtggttgtgcttaatagtgaaatcaggcagttagaaacacaagcgacggatctaaggagcacaaataagaggacatatcctgtgcaatcactcattttggtgcaagcgtgcaatcaaactatccagagcatccaatctagatccaacggtttcatatggaaggggttaaaacttttcaatggattgaacaattcaaagaaatctgctaggtcgaatggcactggatttgctccacgtcagtgttcgaccttcccagcgttttggttatagcaaggacaacttcaattgggtggacgatatggacatttcagacagtgagcagttggatgagttagagggtatgcgtgatggatctgattcagactcggtacagtcgaccaggaaaggcagaaacacaccagtcaagagcgtgtagccattcaaatcctaacctggatcgtcaaaatacacacagacgatgcaaagccagagaagccctcagacgaaaaagtgcagtttgcccgaaactattccatcggacggctgttcctgctcaaaagcctcatcatgcaagaccaagaagtgccagtgcagaggctcaggttaaaaagtggcgcaattcagcagttcaacccgtccttggatctttacttccctccgagccagagacaccgaagctgcccctcggaacagcgccgacattcccctaaagctaccgagggccatggcaactcctgcggagagcaaccctaccctcacggaccgcaatgctgccaagcccgacaaatccgtcagcaccggcatcaaggatagcaccggagctgccgccacgaggccaccgtctcagctgcgtctgttgcgataatctgattgtgacattcagtatccgtgtcgcggaagtcttttgctgtacaatgggggaggctgcctcctgccttggcgtcctttggagcgaggcaggtagacgtagaccctggaaggctcgctctcggcgtgttcttttgcaacgacaatgccttgtactcgccttagctctgctttggtggaacgcaaccttataatggtgaggtaacatggtgcattaagttatactagtcggttacccgtgcgttgcgacgactcataa

SEQ ID NO: 8510 - DNA, 2597 bp, Zea Mays
ctcgcagcctcgcctaccgacctgcgtgccgctcgtgtccgacccgaaatttcgggtaaacccgaacgccatcccagccattcaccagtcccgaaacaagagaacggagacgcagaagcggtggagcctccagcccgtgccgaaggggagaagccctactatgcgctcccatggccgcctgcgtgctgggcctagcacctactctcgttagcatgtggcccctccggtgcgctaccgcttgctccgccgctacagaggcctccaccacggccgctcatgcgtcgcgtcgcggcgtgggcgcggtcagctcggctctgtccggtcttcgaggaaggcactccttatcttcggcgcaattcatggatggtcttagaagcaatcttcaagtggaaaggaacctgacactttccccaaagtcaccaatgtctcgtagtggtaccatatggagtgcatttcaaatatagttattttgttcgagaagaaatgagttcctcttctgatattatatggaggccaggtccagtatactccttatcaataccttcagatggccagaaaaagcaggttattattgtgaaagacctatggatgaaaaccagtctaccaggtcttcctactcctacatggggatcatggctgatggaagctgattctcttgaaggtgaactttttgatggtggaaataaccagaacattgtgaaagatcactctgtcagggatacacggaatcaaggcttatctgtaggtgatcatattatattgaagcttgggaatggcacaccattacatgcaaaactgttgtcggataatcaatctaccatcatgcacaactgtgtaactgaaataccaaatgccagttatataagccaatatggaaggcctcaagtcgtagaggagccatggattcttgaatcaattgtgtctgcaaagaaaccagttgcaaaagtcaaagataagaaagggcaaaagaagcttgtaaattataagcacactttgagtggagttagtaaaaacatgcatgaacagtatcagcctgttgaagagccatggttatttcaatctatattggaactaaatgaaactatagttcttgctgatggaaaagtagaagcaagggacattatcagaaaattaaggaaaatagaaaaacctttaacgcctttggatgagagtaaaccgactggtggtgaaccgtcatcaagagttatacttatgaattcctctgtctgcactatgcagagaattgcagtattagaagatggaaaactagttgaactcttgctggaacccatcaagaacaatgtacagtgtgatagtatttatctaggtgtagtaacaaagctcgttcctcatatgggaggagcatttgtagatattggaatttcaaggccttcacttatgagcataaagcaaaaccgagatccttttgtgtatcctcaagtttttaagaaccgaggaacagatcatgttggtgattattgtaatgaagagaaccttccagcttatgaaaacgatgatgatatgagtgacgacgaatttgcagatgaagaagctcatgatggttcatcatttccagttgagaatgttacagataacaatgtcgatgatgatgaagttgacagcatttctgtttatgacgtagacaaagatgaagaaaatgaccacatggaagatgaatatagtgagggcatactgcaaggatatcaatcagaaatttccaatgatctcaagactttatcttcaattcagcatgctttaagagaatctaatgatgacacaaatggaagcagatggtctcaagttcgcaagggcacaaaagtaatggttcaagttgtcaaagaaggattgggtacgaaaggtccaacacttagtccatttccatgcctgcgaagccgattttggatattggtttcccgtggcaacaaagttggggtatccaaaaagattactggaatagaacgcaccaggttaaagggcatcacaaaattactgcgacctcctggatttactttgacggctcgcacagtcgcagctggtcattcctgggaggaactgcagaaggaccttgatggcttgctatctacatggaaaggaataactgagcatgctcaatctgctgccttggctgctgatgagggtgtggaaggtgctgttcctgtaatgttgcacagagcgaagggtcaaactttatctgttgttcaagacgattttaatgaaaaggtcaagaggctggttgtggattctcctcgaacatatcatgaggttacaagctatcttgaagaagtcgcacctgagctctacagccgagttgagctttatgagaaaagaaaacctatatttgatgaatacaacatcgagaaggagatagacaacatcctttgtaaaaggtgctacttcattgtttctatattatttcatagttcctgttggtggattttttcattagtttttttctaaagcgcccaggagaactgcacatcaattatattaagaagatagaagaaaaatggtctaaaaatagaccaaaatacaagaacaaccacctttttttagaaacaaaaatacacaaaagaatccatctagaagtcagcctaaag

SEQ ID NO: 8511 - DNA, 2090 bp, Zea Mays
gcctcaccaccagcctactactacatattttataacctgcctcacgcccacctctgaagcccttcacactttgattcctcctgtctctctagccttctccatgctaatagccagatcaaacgcatcaagacctcatgttgtgtagtaccagcagggggggggggggggggggggggggaatattaatactacgtctcgcgtaaacgctagctagcttagctagctccgtcgtcgtcccaaaagtcctcctgctcttgggctataaatgcctggccaaaacacctgcatggttctctacgcgacacacacacaccatcactgcgctgcgctactctactccccaccaccgccgccacccaagagctttcctcgctgcacaagaaatggccacgaaccatctctcccaagggcagcaccagcacccgcaggcctggccctggggcgtggccatgtacaccaacctacactaccaccaccagcagcaccaccactacgagaaggagcacctgttcgagaagccgctgacgccgagcgacgtgggcaagctcaacaggctggtgatccccaagcagcacgccgagaggtacttccctctcagcagcagcggcgccggcgacaaaggcctcatcctgtgcttcgaggacgacgacgacgacgaggctgccgccgccaacaagccgtggcggttccgctactcgtactggaccagcagccagagctacgtgctcaccaagggctggagccgctacgtcaaggagaagcagcttgacgccggcgacgtcgtgcgcttccagaggatgcgtggtttcggcatgcccgaccgcctgttcatcagccacagccgccgcggcgagactactgctactgctgcaacaacagtgccccccgctgctgctgccgtgcgcgtagtagtggcacctgcacagagcgctggcgcagaccaccagcagcagcagcagccgtcgccttggagcccaatgtgctacagcacatcaggctcgtactcgtaccccaccagcagcccagccaattcccagcatgcctaccaccgccactcagctgaccatgaccacagcaacaacatgcaacatgcaggagaatctcagtccgacagagacaacaggagctgcagtgcagcttcggcaccgccgccaccgtcgcggcggctccggctgttcggcgtaaacctcgactgcggcccggggccggagccggagacaccaacggcgatgtacggctacatgcaccaaagcccctacgcttacaacaactgtccataccagcatgacgaggagatttaagattatgcctgcagaatccaaacagccaaagtagtagcagtagtagttgctagcagcagcagcagccgcctagtactacttgcacacgaagtgacaggattgaattgacctgtacacggggagaaaaaaaaaggaaggaaggaagtggagagagatcccttgtttcccgggcaatcttccttccatccccgcccccagaagaatgctgctgcctttttgctgttccgttttttttttttaatttttattttcttctccatggcttccagaaaaccctacttactgtaggggatctggtagcagggggccgggcatgcgtgggaggtttgcaggaagcatcaagctgccaaggagctggaacgagagacaacagacagagagagatgtgtgtgtatgtatgtgtgtgtcatctgtacctatatgtcttaatttgtgggtccgatagagaacaaactgtgaagttgatgtgtgtgcctgcctgcctcctgaagaaacaatgcaatatccccatggggattttgttccctcgctccagcatctccctgcttctactgttctatcctgcggttcatcagtggtggtgcaatgctttcacttcgtaaaagtaatgtacttgaccttttctccgcaaaaaaaagtggcaatcctgtttcggaagattatagggggaaaaaaatcagtcaattgtataagaatgttgtgagtgctgatcctttttatgctgtcaattgcgacggtctcccttgcacgcgcccgagattttgtaagcagtgaccttccatgcacacc

SEQ ID NO: 8512 - DNA, 1735 bp, Zea Mays
cccatctcccacctctccttccttaccggaagagaaaaaaagatgaaaaccaaacgaacatacacagatacaagcacagcagcaacgatatccaaagctagcagctcatcagataggcaaacaccaagaagctaagctagcgcgccatgcagacgccgaccatgtcgacgtccatggccaccacggcgccagcgaagccccccgcgccgccgcggcaatgctgcaggtacctcctcctcccctccaccggccaccgccggagcgtggcggcatggtctgccaaaaagaagaacccgtggctggacccgttcgacgatgggcccgacgaggagttcgattaccagggcatgttctccggcgggaagcaggaggaagacccgcggccgcccgaggaccctgagaacccgtacgggttcctgaggttcccgcagggctacaacccggagctggacagcctcgcctccaaggtccgcggcgacgtgcggcgcgcgtgctgcgtcgtgtcgggcggcgtgtacgaaaacgtgcttttcttccccgtcgtgcagatgctcaaggaccggtaccccggcgtgctggtggacgtggtggcgtcggccaggggcaagcaggtgtacgagatgtgcaagaacgtcaggtacgctaacgtctatgaccccgacgacgactggccggagcccgccgaatacacgcacatgctcggcgtcctaaagaataggtactatgatctgatcatctccacgaggctggcggggatcgggcacgcgctcttccttttcatgtcgtcggcgcgcgacaaggtcggctacgtttaccccaacgtcaacagcgtcggcgcgggcctcttcctcaacgagatgttcaaggcgccgactaacaacctcgccgacggcgggtaccacatgtataaagacatgctggagtggatcggccggccggcgaagaacgttccccagcagccgacacagccgctgcgggtgtccatctccaagaagctacgggcgtacgtggaggacaagtatagccgcgccggcgtggagaagggcaagtacgtcgtcatccacggcatcgcctctgactccgtcgccaacatgaagtccagaggcgacgacgactgccttcttcccctcgggcactgggctcagatagccaaggaaatcagggggctcaagcctctgttcgtgatccctcatgagaagcacagagatgaaatcgaggaggaggtgggggacgacacaagcatcctgttcatcaccaccccaggccagctcacctgcctcatcaacgactctgccggcgtcgtcgcgaccaataccgctgccgtgcagctcgccaacgcccgcgacaagccatgtgtggcgttgttctcgtcggcagagaaggcaaggctgttcctgccatacgtggagggcaagagcagctgcaccgtcatatcttcggcgacggggaacctgatcgacatcgacctcaacgcggtgaagaatgtggtgaaggacttggagcccgctcccagcttcgcattggcacagaagtagcagctgcgttccaacatcacccccattgctttgtacatagttcaaacagcagcaacgctagagagaatggtgcagtattacaaactacaaacagcacacatgccgtgtattccgatgttataaataacatctcatatcagctatgcaacgaataaaacttagaacaagaaaccaaaaacaagataacataaatgaattaa

SEQ ID NO: 8513 - DNA, 2276 bp, Zea Mays
gacttattcaattttgactctcgtcggctccggtatttcgacttccaaaatagccctaacatttaccgaagctcctcccgccggcgcgctgcgatccaactccgagatgctcgcaccgcttccgcgcctgacgagcgcgctccgcggccactacgacgctgatcaggcctacctcctccgcaagagcgccctccaggctctcaccctccccaggccgcatgacgagtggaagttcgctcggaaaatcgtgcctggctgggacgatgcttccagcgaagtgcgtcaggcgtataaacaatttatcggggccgttgtggagttgttgagcggagaggcagtgtctgaagaactctaccaagttgcgcagactgtatatactctatttggtggcgatgacacggagtatgttggtgctaaaaaagtcctttccaaaaggaatgagttggagagccttgtgggctacactgtacaagactcagttttgaaaaagctagctcagttagctcagaagctcgattcccttcaacgagcaagtgcctatgaatctgtacacagaatagcggatgatgtaaatgaaaatgatagaattgaatttggagcagacttcgatttcaagccacttgcccgtttcattgttgatgtttctcttgacgcacccttagaaagtgctgaattgggcagtggtccatttgaaaaatggcagtatgatgcttggagcacatccacaactagtcattcaactgctgttaggggttctatagctggtgaacttttggacctggttggcgacaccgcttttgaaatagttcaagatcttcttttgcataggaaagagctagtggatgcaattcaacatggattgtcgatactgaaatctgagaaaatgacctcaggtaatcaaccaaagatgccaacttatggtacacaggtaactgtacaaacagagtctgaacgccagcttgataagattaggaggaaagaggaaagacgtagcaagcgcagtgcagacagtggcaataatgatattggtgttgatgatttttcatcccttcttttggcaagtgaacggaaggaggcatttgatgacgtgattggtagtggagaagggtcagacagttttacagtaacttcccttcctcaaggaaccacaaggaaacacatgaagggttatgaagaagtgaagattccaccaactccaacagcatcactgaaacccaatgagaagctgattgaaataaaagaattagatgagtttgcccaagctgccttccagggatacaagtcactcaatcgtgtgcagagtcgtattttccaagctacatactacaccaatgagaatattttagtttgtgccccaacaggtgctgggaaaacaaatattgcaatgattgcagttcttcatgaggttaaacagcacttcagggatggtattttacataaaaacgagtttaagatagtctatgttgctccaatgaaggccttggccgcagaggtaacagcaacattcagtcgccgattatctccattgaacctggttgttagagaacttacaggagatatgcagttgaccaaaaatgagattgaagaaactcaggcttttcatgttctttatcacactgataacaatgtactcttgggagctccaactgggagtggcaaaacaatttcggcagaacttgcaatgctccatcttttcagtacacaaccagacatgaaggtagtttacattgctcctctaaaggcaatagtacgagaaagaatgaatgattggagaaaacgtcttgtaattcagcttgggaagaagatggttgagatgactggtgacttcactccagatttgatggccctattgtcagctgacatcatcatttctacccctgaaaaatgggatgggattagtcgaaattggcatagcagaagttacgttatgaaggtcgggctcatgatattggatgagatacatcttctgggagctgaccgtggacccatccttgaggtcattgtatcaagaatgcgatacatatcatcacaaacagaacgttcaattcggtttgttggtttatcaacggcattagcaaatgctcgtgatttagctgattggttgggcgttacagatgacggtctattcaatttcaagcctagtgtgagacctgtacctcttgaagtgcatatccagggatatcctgggaaattctattgtccaagaatgaatagcatgaacaaaccagcttatgcagccatatgcactcattcacccaataaaccagttctcattt

SEQ ID NO: 8514 - DNA, 2297 bp, Zea Mays
cgcgagccactgcacccatccactcgtacgccgcggtgcgccgcagcccgcagcccgcagcccgcagcccgcagcccgcgactccaggcatccacaaaaaaccatctcccccgcggccccggcaccgcacgctcccgacccggcgagtcccactcccacctaagctgagcggccatggcgcggcacctcgcgccttcgtctggaagcctccaccgtctcctcgcgtcctgccactacccgcccacctcccaggcgccgcctccccgtccgctcctcctcccgaagacccgatcggcggctatgcagctcccgcgacgcgggcggcgcgacgtcgtcgccgctgcagctgcctccgcaccgtccccctcttctccgggtaccgaggtggcagtctggggtaaggtctccgccgtgctcttcgatatggatggcgttctctgcaacagcgaggagccctcgcgacaggccggcgtcgacgtcttcgctgagatgggagtcgaggtcgccgtggatgactttgtccccttcatgggcactggtgaggccaatttccttggaggtgtcgcaagagctaaaggagtgaaagatttcaatcctgaaagtgccaagaagagattttttgagatatatcttgacaagtacgcaaagccaaattctggcatcggattccctggggctctggagctcatcttggagtgcaaaaattctggtcttaaggttgccgttgcatccagtgccgacaggattaaggtggatgccaatctggctgctgctggtttgtccgtgtttctatttgatgctattgtttctgctgatgcgtttgaaaaattgaagcccgctccggatatattcctggcagcatcaaagagcttaggtgtcgacacaaatgagtgcattgtgatagaagacgcgcttgctggtgttcaagctgctaatgctgcagaaatgagatgtatcgctgtgacaactactctagaggaaatagcgttacgacaaggcagtccctcgttcatacgaaagaatattggagacatttcaattaacgacattttgtatggtggttctaatgctcgccacaatgaaggggcaggaagtactgagaatagtagttcggtagggaatgctttgtctgagagtctaaacggagcaactgctgctggacattctgacacaaaaggttttccaatctcaaaaaataaagggctgttgggttctcgacgcgaaatattgagatatggaagtctgggaatagccttgtcctgcctttttgttgcagtcagaaattggaaggcaatgcagttcgcatctcccaaaggcctactgaattttctcatgggtggaaatagttcagtttttgccagaaatgaaggtaagaaatccagatgcaggaggatttttacaggtttcattgttgcaatccaatcgagtgtcagttaattctaaaggatccgttcagatggaattttgatgttatttctaacaataaaatcacgatcctaaaacaatgtcgctcttcaatatatcaggtacacagtgcacctaggcatcaccatcctgtcttgcacctcttgcaccaatggtacctggccacccacttcgggctgccactttttaaacacagcacaatgctgttgggtaattggaaattccatcaggcataatgcatgttgatggtgccattgttggctttaggctgggcctgcaaagtaaccgtagtgacaaattctttttagcatgcctagagagattgaaacctagctaggaaacatttggatctgaagctattttgaagattggtctccagttgttatgtgtgtcttgcaggagaatctctgtcatcaagagttcaacaaataaagaagtatctagctgagtttgaatctgggggttctgccacatatgttcctgagtttccaagaaagcttgactggttgaatacagccccacttcagtttggaagagtaatttagaactcatcttaggttattatcgtagctgcaactttgctacagtattaattgcatgccctttgttctggatttaaactagaagatcttgcatgcatctctatcaccctattctatggggcagccagattgtaattaacatgatccaaaagtttcagtcttctagcatctgcaaagaaatttcagttactgttggtgcttttgtggtccggaagctccattcttgatgttaaacttctgatgcatatacatttttcatgaatatatacatgtaaatctactgatgatcccttctaaaacatcatattccctactgttcctgcatgcaaa

SEQ ID NO: 8515 - DNA, 2537 bp, Zea Mays
cgcgagccactgcacccatccactcgtacgccgcggtgcgccgcagcccgcagcccgcagcccgcagcccgcagcccgcgactccaggcatccacaaaaaaccatctcccccgcggccccggcaccgcacgctcccgacccggcgagtcccactcccacctaagctgagcggccatggcgcggcacctcgcgccttcgtctggaagcctccaccgtctcctcgcgtcctgccactacccgcccacctcccaggcgccgcctccccgtccgctcctcctcccgaagacccgatcggcggctatgcagctcccgcgacgcgggcggcgcgacgtcgtcgccgctgcagctgcctccgcaccgtccccctcttctccgggtaccgaggtggcagtctggggtaaggtctccgccgtgctcttcgatatggatggcgttctctgcaacagcgaggagccctcgcgacaggccggcgtcgacgtcttcgctgagatgggagtcgaggtcgccgtggatgactttgtccccttcatgggcactggtgaggccaatttccttggaggtgtcgcaagagctaaaggagtgaaagatttcaatcctgaaagtgccaagaagagattttttgagatatatcttgacaagtacgcaaagccaaattctggcatcggattccctggggctctggagctcatcttggagtgcaaaaattctggtcttaaggttgccgttgcatccagtgccgacaggattaaggtggatgccaatctggctgctgctggtttgtccgtgtttctatttgatgctattgtttctgctgatgcgtttgaaaaattgaagcccgctccggatatattcctggcagcatcaaagagcttaggtgtcgacacaaatgagtgcattgtgatagaagacgcgcttgctggtgttcaagctgctaatgctgcagaaatgagatgtatcgctgtgacaactactctagaggaaatagcgttacgacaaggcagtccctcgttcatacgaaagaatattggagacatttcaattaacgacattttgtatggtggttctaatgctcgccacaatgaaggggcaggaagtactgagaatagtagttcggtagggaatgctttgtctgagagtctaaacggagcaactgctgctggacattctgacacaaaaggttttccaatctcaaaaaataaagggctgttgggttctcgacgcgaaatattgagatatggaagtctgggaatagccttgtcctgcctttttgttgcagtcagaaattggaaggcaatgcagttcgcatctcccaaaggcctactgaattttctcatgggtggaaatagttcagtttttgccagaaatgaaggggttctgccacatatgttcctgagtttccaagaaagcttgactggttgaatacagccccacttcagtttggaagagatttgaaaggaagagtggtgctgctggatttttggacatattgctgcattaactgcatgcatgttttgccagacctggattttgtagagaagaagtataaagaaaaacctttcactgttgttggtgtgcactctgccaaattcgataatgaaaaggaccttgaagctatacgtaatgctgttctgcgctacaacattactcacccggttgtaaatgatggtgacatgtacttgtggagagaactgggggtgaactcttggcctacatttgttcttattggacccaacggaaaggttctagcacagatatcaggtgaaggtcatagaaaggatctggatgaagtaattggtgcagcactggaattttatgaagagaagaaactattacaaaatgacccccttcccttggcattggaaaaagacaaggatagtcgtttactaacttcgcctctcaaatttcctgggaaacttgctgttgatgtgcaaaacaatcgattattcatatcagacagtaatcataatcgaattgtggtgaccaacttggaagggcagttcatataccaagttgggagttctgaggaaggattgcttgatggcccatttgatgctgccctatttaaccgccctcaaggtattgcttacaattcaaaaaggaatatcttatacgttgcagacactgagaaccacgctctgcgagaaattaattttgtggacgagactgtgagaacactagctggaaatgggacgaaaggatctgattacagaggaggaggacaaggaacaaaccaggtcctaaattcaccatgggatgtatgctacgatcccgcagaggaggccgtgtatattgcaatggctgggcaacaccagatctggaagcacaatttacatgatggaataaccaaagttattagcggtgatggctatgagaggaatctgaatggctcaagcgccaccagcacatcgtttgcacagccttctgggatttcattagcttttgaaatgcatgagttacttgttgctgatagtgaaagtagttccattcgagttgttaatctgaagacaggaggctcaagattgctggctggaggagat

SEQ ID NO: 8516 - DNA, 2626 bp, Zea Mays
ctgacaaccgcgagccactgcacccatccactcgtacgccgcggtgcgccgcagcccgcagcccgcagcccgcagcccgcagcccgcgactccaggcatccacaaaaaaccatctcccccgcggccccggcaccgcacgctcccgacccggcgagtcccactcccacctaagctgagcggccatggcgcggcacctcgcgccttcgtctggaagcctccaccgtctcctcgcgtcctgccactacccgcccacctcccaggcgccgcctccccgtccgctcctcctcccgaagacccgatcggcggctatgcagctcccgcgacgcgggcggcgcgacgtcgtcgccgctgcagctgcctccgcaccgtccccctcttctccgggtaccgaggtggcagtctggggtaaggtctccgccgtgctcttcgatatggatggcgttctctgcaacagcgaggagccctcgcgacaggccggcgtcgacgtcttcgctgagatgggagtcgaggtcgccgtggatgactttgtccccttcatgggcactggtgaggccaatttccttggaggtgtcgcaagagctaaaggagtgaaagatttcaatcctgaaagtgccaagaagagattttttgagatatatcttgacaagtacgcaaagccaaattctggcatcggattccctggggctctggagctcatcttggagtgcaaaaattctggtcttaaggttgccgttgcatccagtgccgacaggattaaggtggatgccaatctggctgctgctggtttgtccgtgtttctatttgatgctattgtttctgctgatgcgtttgaaaaattgaagcccgctccggatatattcctggcagcatcaaagagcttaggtgtcgacacaaatgagtgcattgtgatagaagacgcgcttgctggtgttcaagctgctaatgctgcagaaatgagatgtatcgctgtgacaactactctagaggaaatagcgttacgacaaggcagtccctcgttcatacgaaagaatattggagacatttcaattaacgacattttgtatggtggttctaatgctcgccacaatgaaggggcaggaagtactgagaatagtagttcggtagggaatgctttgtctgagagtctaaacggagcaactgctgctggacattctgacacaaaaggttttccaatctcaaaaaataaagggctgttgggttctcgacgcgaaatattgagatatggaagtctgggaatagccttgtcctgcctttttgttgcagtcagaaattggaaggcaatgcagttcgcatctcccaaaggcctactgaattttctcatgggtggaaatagttcagtttttgccagaaatgaagttgttatgtgtgtcttgcaggagaatctctgtcatcaagagttcaacaaataaagaagtatctagctgagtttgaatctgggggttctgccacatatgttcctgagtttccaagaaagcttgactggttgaatacagccccacttcagtttggaagagatttgaaaggaagagtggtgctgctggatttttggacatattgctgcattaactgcatgcatgttttgccagacctggattttgtagagaagaagtataaagaaaaacctttcactgttgttggtgtgcactctgccaaattcgataatgaaaaggaccttgaagctatacgtaatgctgttctgcgctacaacattactcacccggttgtaaatgatggtgacatgtacttgtggagagaactgggggtgaactcttggcctacatttgttcttattggacccaacggaaaggttctagcacagatatcaggtgaaggtcatagaaaggatctggatgaagtaattggtgcagcactggaattttatgaagagaagaaactattacaaaatgacccccttcccttggcattggaaaaagacaaggatagtcgtttactaacttcgcctctcaaatttcctgggaaacttgctgttgatgtgcaaaacaatcgattattcatatcagacagtaatcataatcgaattgtggtgaccaacttggaagggcagttcatataccaagttgggagttctgaggaaggattgcttgatggcccatttgatgctgccctatttaaccgccctcaaggtattgcttacaattcaaaaaggaatatcttatacgttgcagacactgagaaccacgctctgcgagaaattaattttgtggacgagactgtgagaacactagctggaaatgggacgaaaggatctgattacagaggaggaggacaaggaacaaaccaggtcctaaattcaccatgggatgtatgctacgatcccgcagaggaggccgtgtatattgcaatggctgggcaacaccagatctggaagcacaatttacatgatggaataaccaaagttattagcggtgatggctatgagaggaatctgaatggctcaagcgccaccagcacatcgtttgcacagccttctgggatttcattagcttttgaaatgcatgagttacttgttgctgatagtgaaagtagttccattcgagttgttaatctgaagacaggaggctcaagattgctggctggaggagat

SEQ ID NO: 8517 - DNA, 2714 bp, Zea Mays
cgcgagccactgcacccatccactcgtacgccgcggtgcgccgcagcccgcagcccgcagcccgcagcccgcagcccgcgactccaggcatccacaaaaaaccatctcccccgcggccccggcaccgcacgctcccgacccggcgagtcccactcccacctaagctgagcggccatggcgcggcacctcgcgccttcgtctggaagcctccaccgtctcctcgcgtcctgccactacccgcccacctcccaggcgccgcctccccgtccgctcctcctcccgaagacccgatcggcggctatgcagctcccgcgacgcgggcggcgcgacgtcgtcgccgctgcagctgcctccgcaccgtccccctcttctccgggtaccgaggtggcagtctggggtaaggtctccgccgtgctcttcgatatggatggcgttctctgcaacagcgaggagccctcgcgacaggccggcgtcgacgtcttcgctgagatgggagtcgaggtcgccgtggatgactttgtccccttcatgggcactggtgaggccaatttccttggaggtgtcgcaagagctaaaggagtgaaagatttcaatcctgaaagtgccaagaagagattttttgagatatatcttgacaagtacgcaaagccaaattctggcatcggattccctggggctctggagctcatcttggagtgcaaaaattctggtcttaaggttgccgttgcatccagtgccgacaggattaaggtggatgccaatctggctgctgctggtttgtccgtgtttctatttgatgctattgtttctgctgatgcgtttgaaaaattgaagcccgctccggatatattcctggcagcatcaaagagcttaggtgtcgacacaaatgagtgcattgtgatagaagacgcgcttgctggtgttcaagctgctaatgctgcagaaatgagatgtatcgctgtgacaactactctagaggaaatagcgttacgacaaggcagtccctcgttcatacgaaagaatattggagacatttcaattaacgacattttgtatggtggttctaatgctcgccacaatgaaggggcaggaagtactgagaatagtagttcggtagggaatgctttgtctgagagtctaaacggagcaactgctgctggacattctgacacaaaaggttttccaatctcaaaaaataaagggctgttgggttctcgacgcgaaatattgagatatggaagtctgggaatagccttgtcctgcctttttgttgcagtcagaaattggaaggcaatgcagttcgcatctcccaaaggcctactgaattttctcatgggtggaaatagttcagtttttgccagaaatgaaggtaagaaatccagatgcaggaggatttttacaggtttcattgttgcaatccaatcgagtgtcagttaattctaaaggatccgttcagatggaattttgatgttatttctaacaataaaatcacgatcctaaaacaatgtcgctcttcaatatatcaggtacacagtgcacctaggcatcaccatcctgtcttgcacctcttgcaccaatggtacctggccacccacttcgggctgccactttttaaacacagcacaatgctgttgggtaattggaaattccatcaggcataatgcatgttgatggtgccattgttggctttaggctgggcctgcaaagtaaccgtagtgacaaattctttttagcatgcctagagagattgaaacctagctaggaaacatttggatctgaagctattttgaagattggtctccagttgttatgtgtgtcttgcaggagaatctctgtcatcaagagttcaacaaataaagaagtatctagctgagtttgaatctgggggttctgccacatatgttcctgagtttccaagaaagcttgactggttgaatacagccccacttcagtttggaagagtaatttagaactcatcttaggatttgaaaggaagagtggtgctgctggatttttggacatattgctgcattaactgcatgcatgttttgccagacctggattttgtagagaagaagtataaagaaaaacctttcactgttgttggtgtgcactctgccaaattcgataatgaaaaggaccttgaagctatacgtaatgctgttctgcgctacaacattactcacccggttgtaaatgatggtgacatgtacttgtggagagaactgggggtgaactcttggcctacatttgttcttattggacccaacggaaaggttctagcacagatatcaggtgaaggtcatagaaaggatctggatgaagtaattggtgcagcactggaattttatgaagagaagaaactattacaaaatgacccccttcccttggcattggaaaaagacaaggatagtcgtttactaacttcgcctctcaaatttcctgggaaacttgctgttgatgtgcaaaacaatcgattattcatatcagacagtaatcataatcgaattgtggtgaccaacttggaagggcagttcatataccaagttgggagttctgaggaaggattgcttgatggcccatttgatgctgccctatttaaccgccctcaaggtattgcttacaattcaaaaaggaatatcttatacgttgcagacactgagaaccacgctctgcgttttaccagtgtaccggaaccaacataaaactaaaaa

SEQ ID NO: 8518 - DNA, 4280 bp, Zea Mays
aagagctctcttactctccgcatcctttcttatggacgaaacaatgagccaaaacagggcttacctgattcaacacatgttgattcacttccaatcccagagggtggaatggagaaagggaagagcatagttgacacatcagatgtcaaagcaatgtctgaagtagagcacttgttaatgcgaaagacatttactaaggttgagtttgatcgtcttacagacttattgcgtgcaagaaccattgagtctgatccacctaaaccaattgtttctcgtgaggaaaagaatgaagaaagtatcaaagttgatggaattagaggctcagcgttacgtcatatggacctagatgattctcctgctgttaaatgctgctgctccctctctgctggttacacaccctatctgtggccctcttctgcgaccacccttcctgaaggggtacataatcatggtgctagttctcctgcagaactcgcgaaacaatatatgagctctcgttatttgagggaaccccaatccagtagtctgcggagccgattgtttcttgagaataaaggtgaagcaagcaacactgtcaatgataggaggtctgtaccaccaattgttcagacaccacttgaacttcggaatgaaaaccctggtctccctgtaaatggctatgtgacttcgggattacgtgggcgttcagcgatatatagaatgtctcgctctccatattttaagggtcagaactattccagtgatttgaacacgtcttcattgtcccaacgatcacaaagcttgcatgttggtggcaggcaggtcttgaaacgaagcggggctgaattagagaatgaacttggatctataggccccattcgtagaattcggcagaaatcaaatatgatgtcttcatttagagattctcgtgcaaatcctaaaggaaaccttcttactagccatataagtagtactgatttcactgaagacggtgcatccattcagtctccgagctcaaaaaaattattggttgggagtagtcaatctctgcgacccttagaatcccaaaagaatgagggagatggtaaatctagtgatagcattccacccataccagctcaatcaaacaagatggctgaaaagatatttgagcagcttaatataatagctccatcgccaaaacaacaacagtctgttactctgaatgctagtaactctatgtcaaagaaacctgtttttcaagatgctgggtcaagcagtatgtataaccaatctagttccctgaagtttcaagatttggatggtgcaaatggaccccatgatacaaacttgaatggttccctgctgaagaaagacaagctaaatataataaaagacggatcgccaaaagctgccttttctgatagacctgcccttttggggaactcggtttctgcttctaaatcatggacgccagcctttaaaatggctgtgatagaggacttaccagagttggatgatgatctggaggtccttattcaatcaagtaagatagaggttgaaacaactgagcagaaaattgattcaaatagaaaagaacagaaggttgaacaaaatatattagagcaaagggttgaaccgaacttgaagaacattgctggttctacgattagtgaacagcctgtagcatcactgtctaaaactgtcacttcatctggtggtttatttttatcaaatgatcctgggaaggcagttcccaaagcttctgtggacaataataccgaatttgcattctcaaatgggcctcctggcacccgccctgcaactggtgtatcagcaatgccacttgcttcagttaataacgataaacagactggtgcttcaaatttcattttcggcatcaagcagccaattacgtcagattttgaaacatcaactgcaaaaaacaaatcaacactcgggcagagtgtcaccaagcccacaacattagccagcactagttcagagagaggtgataaaacagaaaaagcagaagatgtagccaacccatctgagaaggtgttgccttcagctgcatcaacaacactgaatgcacctctccattttacatctgtggcatctacttcgagcctgagcaatggcttgtcatactcaccaccaaagctcacaactcctccacctactgataaacctgctatcagctcagctgtttccacttccatatttgccgtatccagtagcagtccagctatttcatcgtctcctgcatttacgggatttagtttttcttccagtgctccggttggattgtcattggtaacatcagctaaatctgatggcacaactgctgaaaataaggcagctagcaccttatcatttggtatagggggtacaaaagctgaagtgaaatctgttgcaccagatgcaagcagcaaggcatcatcggaactttttatttcacctgtgtcatcaagtattgcaagcttttcaagttcccccgccacatctacgcctactttcaccgcagttgcaccttcaagtgatgctgctggaatatctgtggctgcaccatctagtacttccactgcaccaggtttacagtctgcttcaaccccttcatttacatttccgagctctggaaacaacctttttgggttcagctccccagcccaatctactggcctcagtacatcgtcacttgctggtagtacctctcaaccaccagctgctagcacactctttggtagtaagccgacgcagtcagacggaacaatacaacaaacatcccagagttcaaaaccacaatctggctcaccattcccggtcatgactcctggagttggagcatcctcgtctggacctgggacgctatcttttggacttggagcttcctcaactggttcaggcactgcatcttttggtgtcggagcttcatcttccgcacctggaactttatcaacttttggtgcagcagctcactcttctggacctggagttttctcttttggggcaggaacttcctcatcaggacctagcactgcctcttttggtgcagcaacttccacatcagggactggatttggcaattcaccatttggaactggagctacttttgcgaatccatttagctctagttcaagcactgggttcacattttcttcacctagctcttctgctggtgcatcaacagcggccagtacgagtgtatttgccagcacctctacagcttcttcagcctcagcttttagcaacccttttggctcaagttcatccccacccagcacatttacatttgggcaatcaggttcttcaggcaacacttttgcatttggagcgcagccagctccaacgttcccatctcaaccatcacttttctcatttagttcagccaacactagcatgaattcgtctccacagcctgcatttggaatgataaataccaacacagccttcagcatggcttcccccggaaatgatcagatgaacgaagacagcatggcagatgacactagtcaggcagcacctgcgccagcgccagtatttggttcatcatttggacagcagaacaactcatctgctgccccggtatttggtgctcccgcggtccagccaggtggtgtttttcagttcgggggccaacaaggttcagcacagcagaacccgtccttcccagctgttggcagtctagagtttcagggtgggaacttttcgttgggcagcgggggtggtggcggtgacaagtcgaaccgaagagtgatcaaggtcaaaaggacaccaaagaagagataagggtgcgccctctgttggaatcttcctttgatggtgtcatttgtgattggatcgcactgcttgggaacgaagtcaagtacgacgaggttttatggccacgcagatttccctgcagcagggcgatagcgctatatatctcatggctggcttgtaaacgcatccaccaaggtcagtgtagtctcctgtgcactcaattcatttcctcatcggggccggcggcctgcatgttgtgtaatatgcctgtgctcatggggtgtaaaatagaacaaaaaagtgttgtaatttttgttttcttgcctccaaatgccgacttgatttcttatctgtggtttggctacggtatatttgtatcggagtgtaacgcactgttgtatttttgtttttgggtttattacattcaacaaggtcagaactgtatcgtagaatacctgtccatacttaatcctgcctacgcattgattgtttactcgtcgtccgtgagctgttgcgtgctcgtgccacgctgtgttgtccttgtcgcagcagaatatttc

SEQ ID NO: 8519 - DNA, 4647 bp, Zea Mays
caccgaaatagagacaggagaggctgcgcagcagcacacaggcctcgcgacgcgactcgcgggacggaagccctagtttttttccttgcgttattccacccccttccttcctaccccgcgcctccgccccatcctccaccctgcgcccccgcctccgccgcgccatgtacccaagcccgtacgacggttccggcgccggaggaaagatccggcgccgcccgcacctccgcgccgcctccacgccctacgaacggccccccgccgccgcggcggcgcaccgcctcgcggccgctgctgcagcggcttccgcatcctcggagcccggcggggagcgcggcggcgggggcggtggctgggtgtcccggctggtggacccggcctcccgcctcatcgcgggtggcgccgcgcgcctcttcggctcggtgttccgcaagcgcctcgccccgccgccggccccttctccgccgctgtcgtcgcctcctggacgaaacaatgagccaaaacagggcttacctgattcaacacatgttgattcacttccaatcccagagggtggaatggagaaagggaagagcatagttgacacatcagatgtcaaagcaatgtctgaagtagagcacttgttaatgcgaaagacatttactaaggttgagtttgatcgtcttacagacttattgcgtgcaagaaccattgagtctgatccacctaaaccaattgtttctcgtgaggaaaagaatgaagaaagtatcaaagttgatggaattagaggctcagcgttacgtcatatggacctagatgattctcctgctgttaaagtacataatcatggtgctagttctcctgcagaactcgcgaaacaatatatgagctctcgttatttgagggaaccccaatccagtagtctgcggagccgattgtttcttgagaataaaggtgaagcaagcaacactgtcaatgataggaggtctgtaccaccaattgttcagacaccacttgaacttcggaatgaaaaccctggtctccctgtaaatggctatgtgacttcgggattacgtgggcgttcagcgatatatagaatgtctcgctctccatattttaagggtcagaactattccagtgatttgaacacgtcttcattgtcccaacgatcacaaagcttgcatgttggtggcaggcaggtcttgaaacgaagcggggctgaattagagaatgaacttggatctataggccccattcgtagaattcggcagaaatcaaatatgatgtcttcatttagagattctcgtgcaaatcctaaaggaaaccttcttactagccatataagtagtactgatttcactgaagacggtgcatccattcagtctccgagctcaaaaaaattattggttgggagtagtcaatctctgcgacccttagaatcccaaaagaatgagggagatggtaaatctagtgatagcattccacccataccagctcaatcaaacaagatggctgaaaagatatttgagcagcttaatataatagctccatcgccaaaacaacaacagtctgttactctgaatgctagtaactctatgtcaaagaaacctgtttttcaagatgctgggtcaagcagtatgtataaccaatctagttccctgaagtttcaagatttggatggtgcaaatggaccccatgatacaaacttgaatggttccctgctgaagaaagacaagctaaatataataaaagacggatcgccaaaagctgccttttctgatagacctgcccttttggggaactcggtttctgcttctaaatcatggacgccagcctttaaaatggctgtgatagagagttggatgatgatctggaggtccttattcaatcaagtaagatagaggttgaaacaactgagcagaaaattgattcaaatagaaaagaacagaaggttgaacaaaatatattagagcaaagggttgaaccgaacttgaagaacattgctggttctacgattagtgaacagcctgtagcatcactgtctaaaactgtcacttcatctggtggtttatttttatcaaatgatcctgggaaggcagttcccaaagcttctgtggacaataataccgaatttgcattctcaaatgggcctcctggcacccgccctgcaactggtgtatcagcaatgccacttgcttcagttaataacgataaacagactggtgcttcaaatttcattttcggcatcaagcagccaattacgtcagattttgaaacatcaactgcaaaaaacaaatcaacactcgggcagagtgtcaccaagcccacaacattagccagcactagttcagagagaggtgataaaacagaaaaagcagaagatgtagccaacccatctgagaaggtgttgccttcagctgcatcaacaacactgaatgcacctctccattttacatctgtggcatctacttcgagcctgagcaatggcttgtcatactcaccaccaaagctcacaactcctccacctactgataaacctgctatcagctcagctgtttccacttccatatttgccgtatccagtagcagtccagctatttcatcgtctcctgcatttacgggatttagtttttcttccagtgctccggttggattgtcattggtaacatcagctaaatctgatggcacaactgctgaaaataaggcagctagcaccttatcatttggtatagggggtacaaaagctgaagtgaaatctgttgcaccagatgcaagcagcaaggcatcatcggaactttttatttcacctgtgtcatcaagtattgcaagcttttcaagttcccccgccacatctacgcctactttcaccgcagttgcaccttcaagtgatgctgctggaatatctgtggctgcaccatctagtacttccactgcaccaggtttacagtctgcttcaaccccttcatttacatttccgagctctggaaacaacctttttgggttcagctccccagcccaatctactggcctcagtacatcgtcacttgctggtagtacctctcaaccaccagctgctagcacactctttggtagtaagccgacgcagtcagacggaacaatacaacaaacatcccagagttcaaaaccacaatctggctcaccattcccggtcatgactcctggagttggagcatcctcgtctggacctgggacgctatcttttggacttggagcttcctcaactggttcaggcactgcatcttttggtgtcggagcttcatcttccgcacctggaactttatcaacttttggtgcagcagctcactcttctggacctggagttttctcttttggggcaggaacttcctcatcaggacctagcactgcctcttttggtgcagcaacttccacatcagggactggatttggcaattcaccatttggaactggagctacttttgcgaatccatttagctctagttcaagcactgggttcacattttcttcacctagctcttctgctggtgcatcaacagcggccagtacgagtgtatttgccagcacctctacagcttcttcagcctcagcttttagcaacccttttggctcaagttcatccccacccagcacatttacatttgggcaatcaggttcttcaggcaacacttttgcatttggagcgcagccagctccaacgttcccatctcaaccatcacttttctcatttagttcagccaacactagcatgaattcgtctccacagcctgcatttggaatgataaataccaacacagccttcagcatggcttcccccggaaatgatcagatgaacgaagacagcatggcagatgacactagtcaggcagcacctgcgccagcgccagtatttggttcatcatttggacagcagaacaactcatctgctgccccggtatttggtgctcccgcggtccagccaggtggtgtttttcagttcgggggccaacaaggttcagcacagcagaacccgtccttcccagctgttggcagtctagagtttcagggtgggaacttttcgttgggcagcgggggtggtggcggtgacaagtcgaaccgaagagtgatcaaggtcaaaaggacaccaaagaagagataagggtgcgccctctgttggaatcttcctttgatggtgtcatttgtgattggatcgcactgcttgggaacgaagtcaagtacgacgaggttttatggccacgcagatttccctgcagcagggcgatagcgctatatatctcatggctggcttgtaaacgcatccaccaaggtcagtgtagtctcctgtgcactcaattcatttcctcatcggggccggcggcctgcatgttgtgtaatatgcctgtgctcatggggtgtaaaatagaacaaaaaagtgttgtaatttttgttttcttgcctccaaatgccgacttgatttcttatctgtggtttggctacggtatatttgtatcggagtgtaacgcactgttgtatttttgtttttgggtttattacattcaacaaggtcagaactgtatcgtagaatacctgtccatacttaatcctgcctacgcattgattgtttactcgtcgtccgtgagctgttgcgtgctcgtgccacgctgtgttgtccttgtcgcagcagaatatttc

SEQ ID NO: 8520 - DNA, 4742 bp, Zea Mays
gacagtgcgacacacgggagcccaatgcccacgccccgcgcacgccaacacgccagagcaccgaaatagagacaggagaggctgcgcagcagcacacaggcctcgcgacgcgactcgcgggacggaagccctagtttttttccttgcgttattccacccccttccttcctaccccgcgcctccgccccatcctccaccctgcgcccccgcctccgccgcgccatgtacccaagcccgtacgacggttccggcgccggaggaaagatccggcgccgcccgcacctccgcgccgcctccacgccctacgaacggccccccgccgccgcggcggcgcaccgcctcgcggccgctgctgcagcggcttccgcatcctcggagcccggcggggagcgcggcggcgggggcggtggctgggtgtcccggctggtggacccggcctcccgcctcatcgcgggtggcgccgcgcgcctcttcggctcggtgttccgcaagcgcctcgccccgccgccggccccttctccgccgctgtcgtcgcctcctggacgaaacaatgagccaaaacagggcttacctgattcaacacatgttaccagaacatttcaaaactcaatgcaggattcacttccaatcccagagggtggaatggagaaagggaagagcatagttgacacatcagatgtcaaagcaatgtctgaagtagagcacttgttaatgcgaaagacatttactaaggttgagtttgatcgtcttacagacttattgcgtgcaagaaccattgagtctgatccacctaaaccaattgtttctcgtgaggaaaagaatgaagaaagtatcaaagttgatggaattagaggctcagcgttacgtcatatggacctagatgattctcctgctgttaaagtacataatcatggtgctagttctcctgcagaactcgcgaaacaatatatgagctctcgttatttgagggaaccccaatccagtagtctgcggagccgattgtttcttgagaataaaggtgaagcaagcaacactgtcaatgataggaggtctgtaccaccaattgttcagacaccacttgaacttcggaatgaaaaccctggtctccctgtaaatggctatgtgacttcgggattacgtgggcgttcagcgatatatagaatgtctcgctctccatattttaagggtcagaactattccagtgatttgaacacgtcttcattgtcccaacgatcacaaagcttgcatgttggtggcaggcaggtcttgaaacgaagcggggctgaattagagaatgaacttggatctataggccccattcgtagaattcggcagaaatcaaatatgatgtcttcatttagagattctcgtgcaaatcctaaaggaaaccttcttactagccatataagtagtactgatttcactgaagacggtgcatccattcagtctccgagctcaaaaaaattattggttgggagtagtcaatctctgcgacccttagaatcccaaaagaatgagggagatggtaaatctagtgatagcattccacccataccagctcaatcaaacaagatggctgaaaagatatttgagcagcttaatataatagctccatcgccaaaacaacaacagtctgttactctgaatgctagtaactctatgtcaaagaaacctgtttttcaagatgctgggtcaagcagtatgtataaccaatctagttccctgaagtttcaagatttggatggtgcaaatggaccccatgatacaaacttgaatggttccctgctgaagaaagacaagctaaatataataaaagacggatcgccaaaagctgccttttctgatagacctgcccttttggggaactcggtttctgcttctaaatcatggacgccagcctttaaaatggctgtgatagaggacttaccagagttggatgatgatctggaggtccttattcaatcaagtaagatagaggttgaaacaactgagcagaaaattgattcaaatagaaaagaacagaaggttgaacaaaatatattagagcaaagggttgaaccgaacttgaagaacattgctggttctacgattagtgaacagcctgtagcatcactgtctaaaactgtcacttcatctggtggtttatttttatcaaatgatcctgggaaggcagttcccaaagcttctgtggacaataataccgaatttgcattctcaaatgggcctcctggcacccgccctgcaactggtgtatcagcaatgccacttgcttcagttaataacgataaacagactggtgcttcaaatttcattttcggcatcaagcagccaattacgtcagattttgaaacatcaactgcaaaaaacaaatcaacactcgggcagagtgtcaccaagcccacaacattagccagcactagttcagagagaggtgataaaacagaaaaagcagaagatgtagccaacccatctgagaaggtgttgccttcagctgcatcaacaacactgaatgcacctctccattttacatctgtggcatctacttcgagcctgagcaatggcttgtcatactcaccaccaaagctcacaactcctccacctactgataaacctgctatcagctcagctgtttccacttccatatttgccgtatccagtagcagtccagctatttcatcgtctcctgcatttacgggatttagtttttcttccagtgctccggttggattgtcattggtaacatcagctaaatctgatggcacaactgctgaaaataaggcagctagcaccttatcatttggtatagggggtacaaaagctgaagtgaaatctgttgcaccagatgcaagcagcaaggcatcatcggaactttttatttcacctgtgtcatcaagtattgcaagcttttcaagttcccccgccacatctacgcctactttcaccgcagttgcaccttcaagtgatgctgctggaatatctgtggctgcaccatctagtacttccactgcaccaggtttacagtctgcttcaaccccttcatttacatttccgagctctggaaacaacctttttgggttcagctccccagcccaatctactggcctcagtacatcgtcacttgctggtagtacctctcaaccaccagctgctagcacactctttggtagtaagccgacgcagtcagacggaacaatacaacaaacatcccagagttcaaaaccacaatctggctcaccattcccggtcatgactcctggagttggagcatcctcgtctggacctgggacgctatcttttggacttggagcttcctcaactggttcaggcactgcatcttttggtgtcggagcttcatcttccgcacctggaactttatcaacttttggtgcagcagctcactcttctggacctggagttttctcttttggggcaggaacttcctcatcaggacctagcactgcctcttttggtgcagcaacttccacatcagggactggatttggcaattcaccatttggaactggagctacttttgcgaatccatttagctctagttcaagcactgggttcacattttcttcacctagctcttctgctggtgcatcaacagcggccagtacgagtgtatttgccagcacctctacagcttcttcagcctcagcttttagcaacccttttggctcaagttcatccccacccagcacatttacatttgggcaatcaggttcttcaggcaacacttttgcatttggagcgcagccagctccaacgttcccatctcaaccatcacttttctcatttagttcagccaacactagcatgaattcgtctccacagcctgcatttggaatgataaataccaacacagccttcagcatggcttcccccggaaatgatcagatgaacgaagacagcatggcagatgacactagtcaggcagcacctgcgccagcgccagtatttggttcatcatttggacagcagaacaactcatctgctgccccggtatttggtgctcccgcggtccagccaggtggtgtttttcagttcgggggccaacaaggttcagcacagcagaacccgtccttcccagctgttggcagtctagagtttcagggtgggaacttttcgttgggcagcgggggtggtggcggtgacaagtcgaaccgaagagtgatcaaggtcaaaaggacaccaaagaagagataagggtgcgccctctgttggaatcttcctttgatggtgtcatttgtgattggatcgcactgcttgggaacgaagtcaagtacgacgaggttttatggccacgcagatttccctgcagcagggcgatagcgctatatatctcatggctggcttgtaaacgcatccaccaaggtcagtgtagtctcctgtgcactcaattcatttcctcatcggggccggcggcctgcatgttgtgtaatatgcctgtgctcatggggtgtaaaatagaacaaaaaagtgttgtaatttttgttttcttgcctccaaatgccgacttgatttcttatctgtggtttggctacggtatatttgtatcggagtgtaacgcactgttgtatttttgtttttgggtttattacattcaacaaggtcagaactgtatcgtagaatacctgtccatacttaatcctgcctacgcattgattgtttactcgtcgtccgtgagctgttgcgtgctcgtgccacgctgtgttgtccttgtcgcagcagaatatttc

SEQ ID NO: 8521 - DNA, 4114 bp, Zea Mays
catctgatcctccgattcagttcttctccccctaccaaaaggccgagcccccctcaggcctcagctccgcctccgcgctgccaaccatactcgtcaagccgtcacactttgtctctctcgtgccccgatactctttttctttttttttcttttcttttttttttttttttgcttccgggagcagcaaccgtcgccgtggccccgccttggatattccatcagttttcgggttcttggataggagaaagcggggcgctcaattccccccctcctgatccttgttccttgatcgccgccatgagcaacacgctgcttcgagtctacccttccgacctgaagatgccattcgagctcaggaagcagaactcagcgtgtcttgagctcgtcaacaagaccgaccggtgggtggctttcaaggtcaagacgacgaaccctaggaagtactcggtgcgctctgcctccggtgtcgtgccgcccaggggatcctgtggcatcacaataacgatgcaagcgcccaaggagatgcccccggactaccactgcaaggacaagtttcttgttcagagcattgctgtggaggaggggacgacgcagaaggacattgtccctgacatgtaaagcaccaggtaagttagttgaggagttcaagctgagggtggtctatgtccctgccaatcctccctcaccagtgcctgaggaaacagaggaagaggatggatctcttgattcagatgtggaccatgaagtatccacgtccaactctgcaacaggacaagggaatacatgtagatcacaaacatcagatgatgaggatgattctacatccaagttggaactggaaagaagatatgcagaggaaaacaagaagattcagaaagagctggatctcctccggaaaacaaaggcgtctcctcggggcttctctgcgtttgtgctgcttgtcttcttgttatcctcacttcttggatacctgatgttcggaagcagagcttagcaagttagcagctaatggctgcacatcatttgcggcaccggcagcggcacggctcttttagtacagtcctttaattggcactcaaagttcaagatagcttgctgtagaccatcggctgcacagatgattgatgatgaggtcaactttggtaatatctttgatgcctcagaagaagttcaggttactgcaaagtttggtcccaagcaacggcccaaaacccgaaaaacagctctatcatccagatctgcagcgcctaatcctactgaagaaaccggagataggaaagtaggaaccttcagtcaagtcaattcttctaaagagcttaccagccaagaaaggacatccttgatgtgccctagtactgagtcagttgatattatcgctggttctcatagtattctcgatacaccattggaagatgcattgacagttccccagggttctctgtctggtgcttctgctgcagataggacttctcaatatggtgagcacaatgatgatccttctaagttagctacacaccaagaaaacttggtggtttcagatatcaacgtcccacctaacagttcatgtagcaaggctattgatgatatagttgaatttggggacatgtgtgatgtgcaaattgaagaggaaagagttacaaagttccaaccaaaggtgcaaacgaagctccttaaggaaatagccaaatctcggaagactaaccaaaaggtggaaacttccactgtagatgtggttacacaaaatggaaagggcaataatattcagacaaggctccatggcgatccggtacaggatcctaaaagtcatgaaagtgtgcagatcccagattctgaaggattattagcaactgataatagtaaaggttgcaatttagctaacctcaacaatctccttgaggagtcagtccaagaggaaacaatagctaagtttcgttctgatttgcaaccaaatctcgggaaggcttcatcccaggttgctgcgattaaaattaatgttgttgctgttgctccaatagttggagtttgtgacagcaacaatgacatgtacaaagaacctaaagatcaagaaaccatcactggtccagtggcttggtcaccacaggctgtgcatgctgatgttgatttagacaatcacaatgaaccaattaatcctcctattgatggtactcaatcaatgtttggcgaagtcccaggtacagcttttacaggaagagaaaagggaaaatcaaaatctgtatcttttgctctatcggatgtttctgggatagctagccctatagataccaattctgagatgggtaacatcggcgattcctgtagtgacaaattgactgatgaaaatttaagtaactcatctcgtcatatcgctgaaaagcattctattaccaaggaccaatattcaaatgagcaggaccatgagcgggagccactagatcatgctgttcaacagcaaccaaaatcggatgttggagaaagagcatcatctatgaaacgacgttgcaggaaaaaggtgcaaaaagttgggacacctaatcacactgttgatgattattttggtgaagactgtgtcgaaccttcattagctgaagaagataacgatactggtgatcattacactactggtaataagcataaggctaggaaaaagtcaaggggtggtgtagaagagtcacagcagcagaaagctcaaaaaaataaaagcaaggtgtcttcacggggccgcaaacggaccttgaaggatgaatcgacagagaagcctgagaagaagctaacccacagaatacgtcagaggataccaaaagaggttaaggctttactggaaacacctcgtgagcagataaaacccatgaagctttgtgcatcacatctcaggttgttacaagaagctagagagcgtgttgatccaaaagggattccatccgggccatcctctaatacaagaaactttcaactagatgatatggatgatttgggctacagagatgaggaagctaggttctttgacaacgatataacagaggagcatgtacaaaatgcaacaaaattgaactaccattcctacatgaacaaaccagcccggggaaaatggtcaaaatcagataccgacttgttttatgagggtcttcgacaatttggtagcgattttgcaatgatacaacaattattccctgataagactcgccatcaggtgcggcagaaatttaaatctgaggagagaaaaaatccattgctagtccatgatgctatagttcatcgctcaggagatagtttgtatttcaaaaaggtaattaagcagctgaacattgaagatgttgtgctgccagatattaaaagtacacaaaacaagatggtgcatcaagtgaaagaggccctggaaatgagaatgtactggatgatttaaacgaggaggaaaatagttcaaattggttgaacgaagagcatgacgtacagatggccgatgtggaagaagagcatggcgaacagatggatgatgtggaagaagagcgtgatcttggaaatgatggtggtgatgatgatcttggggatgtttttgattggtactagtttatgttaaacacggatgcgagcgtgaatatgagttggtctagctctgcataacaggggtagtttttaggaaaaaaattctttgcatccggaatgcaaagaatcccttttatgactgatttggtgactaggtatcacagagagattggagtggattgagagcctctaatctctccgtgatcctcttacagcctctaacatccaccacctcgtggtccatataagggcttattcggttattcttgtcccatgtggatttgatgagattggaaaaaatatgaaggattttaacttgttcgagatttaaatctatcaaatctcatcaaatccatatggattgagaggaaagcaaacaagccctaaatagaagaaaaacaaattactattggattaagttataaattttgatctgtttttgtggaccttcaagtggtgtatgtgagtggctgtaaaagagtgtgtttgcatctgggatatacagattttttaccctagtttttagatgttgccacagttgtacggttagaattgttcggctggactatcgctt

SEQ ID NO: 8522 - DNA, 5248 bp, Zea Mays
cccaaaccttcatcctttttatgccaaccaaaactccaccctcctctcgagcccgagcccatctgatcctccgattcagttcttctccccctaccaaaaggccgagcccccctcaggcctcagctccgcctccgcgctgccaaccatactcgtcaagccgtcacactttgtctctctcgtgccccgatactctttttctttttttttcttttcttttttttttttttttgcttccgggagcagcaaccgtcgccgtggccccgccttggatattccatcagttttcgggttcttggataggagaaagcggggcgctcaattccccccctcctgatccttgttccttgatcgccgccatgagcaacacgctgcttcgagtctacccttccgacctgaagatgccattcgagctcaggaagcagaactcagcgtgtcttgagctcgtcaacaagaccgaccggtgggtggctttcaaggtcaagacgacgaaccctaggaagtactcggtgcgctctgcctccggtgtcgtgccgcccaggggatcctgtggcatcacaataacgatgcaagcgcccaaggagatgcccccggactaccactgcaaggacaagtttcttgttcagagcattgctgtggaggaggggacgacgcagaaggacattgtccctgacatgttcagtaaagcaccaggtaagttagttgaggagttcaagctgagggtggtctatgtccctgccaatcctccctcaccagtgcctgaggaaacagaggaagaggatggatctcttgattcagatgtggaccatgaagtatccacgtccaactctgcaacaggacaagggaatacatgtagatcacaaacatcagatgatgaggtgtccctagttccacctaaatatcatttgtctttgtgttccctcagattcataaatatggatcttgtgctgatcacctgctgcatagcatattatcttaaaaggacggatttaacttcggtgttcatggaaatactgtgctctaaaaattcgcagtagtagcctaatttctttcctgctctgacgtcatcctcctctgggcgacacgggcggctccccatcgaccgcacccaccgccgccggtcttcacccccgccgtcgccggagcagctcgccggaagttcgacgagcagcgaggagggcggcggcgggactgctctctcactcatttccctcccttcttccacccactccactcctccctcttcctggaggtggccggcgacctgatccgccgctgggaaggccggatcggcgggctgactggccggatctaggggctggtcgccgtccgccgctcctccctgctggcatgggcaggtggccttgtggccgcaaccatggtggctcgtgcggctagcccgtggcggtagtgcccgcgctcgcgtggccatggccgtggctggccggcgacgttggcgcccacgcacgcggccggcccgctgcggcggcggcgtggctcgcttgtgcttgtagcgtggtgcttggatcgggggcgttggtggatctgcggctgccagcggtgccttctgcaggtggtgggtcatggtcgtggggctgggggccggatcttgagcctctccggctagatttatctctccgcctctcgtttcggcctgtggtgtgggcagggccggctggctccgtgcgttgcggcgtgtggtgggaggtcctgcgacgaaagccatgctcgcttgcaggcggacagcggtgacgcccgcgggcgccacccctaccctatcgagggtgccgtctttggacctctcgccccatgcgggaaccctcgccttggccttcttaggtctctcgctggtgctcgaccggcgttggggctctgagggttggggctggtgggttggtgcgtcggtggacggcagaaggtgacaacacgcgatggcttggcggggtgacatcggcgtggctgacctttcagctttcttcttggtgctggcgatctacactgctctgctaggtcttcagaggaaactttgcttggtttgtaccaggcgggcggcgacgacttttcgacgtcgtttctccttcttgaaggtgcggcccagaagacctgcagtttgtgtgttcgttcgtgttgtggaggctcttcgtcgctccgcttggctcaatggtgtccgtgttgtggaggctcttcgtcactccgcttggctcgatggtgtccgggcctttgtcgctttaggcgtctgctcgctcccggagttcgacgttgtggatctttgctcgtggtgaagaatcggagctgcctcgtgtgggtgtgttgaggcttggcaacgatggcgcgccgcggtcttattccttgcgtcggtgtctgaatgtaagcgtcgtcgagttgctttggcagtgtgcggctcgtcttgggaagtcggagctgctcgtctcttgtgtttgagtttggcaacgatgactctagatgtgtttgtgtgtggggactgtcattgtctaagttgtttgttaggtcgttcgccggtttttctactgtgcgttctgtgtaggttttaggcccgattttccaaaaaactgggtcaattccattcttcttaattgagaggcagagctcctaccatcacgttaaaaaaaatcgcggtagttctttcttcttttttgatgctattgattacactgaatagtttagttttcatgaaattttatcataatacctgcacccctcctcgctcaaccagaaaacacacacaaaaaagaggacagaaaaaacctatcattagaagaaacatgctcctggataactgtaatgtgaacacctttctctttacaagttattgtatcagaatgacatttgacaattgacagatttgattccttacattatttctaccatgattgtcggcaccattagcctaagacgttagaatttcaaatatttgtctatgtctgccctgaatgttatccttgacatgccactgattgttttgtgactcttcaggatgattctacatccaagttggaactggaaagaagatatgcagaggaaaacaagaagattcagaaagagctggatctcctccggaaaacaaaggcgtctcctcggggcttctctgcgtttgtgctgcttgtcttcttgttatcctcacttcttggatacctgatgttcggaagcagagcttagcaagttagcagctaatggctgcacatcatttgcggcaccggcagcggcacggctcttttagtacagtcctttaattggcactcaaagttcaagatagcttgctgtagaccatcggctgcacagatgattgatgatgaggtcaactttggtaatatctttgatgcctcagaagaagttcaggttactgcaaagtttggtcccaagcaacggcccaaaacccgaaaaacagctctatcatccagatctgcagcgcctaatcctactgaagaaaccggagataggaaagtaggaaccttcagtcaagtcaattcttctaaagagcttaccagccaagaaaggacatccttgatgtgccctagtactgagtcagttgatattatcgctggttctcatagtattctcgatacaccattggaagatgcattgacagttccccagggttctctgtctggtgcttctgctgcagataggacttctcaatatggtgagcacaatgatgatccttctaagttagctacacaccaagaaaacttggtggtttcagatatcaacgtcccacctaacagttcatgtagcaaggctattgatgatatagttgaatttggggacatgtgtgatgtgcaaattgaagaggaaagagttacaaagttccaaccaaaggtgcaaacgaagctccttaaggaaatagccaaatctcggaagactaaccaaaaggtggaaacttccactgtagatgtggttacacaaaatggaaagggcaataatattcagacaaggctccatggcgatccggtacaggatcctaaaagtcatgaaagtgtgcagatcccagattctgaaggattattagcaactgataatagtaaaggttgcaatttagctaacctcaacaatctccttgaggagtcagtccaagaggaaacaatagctaagtttcgttctgatttgcaaccaaatctcgggaaggcttcatcccaggttgctgcgattaaaattaatgttgttgctgttgctccaatagttggagtttgtgacagcaacaatgacatgtacaaagaacctaaagatcaagaaaccatcactggtccagtggcttggtcaccacaggctgtgcatgctgatgttgatttagacaatcacaatgaaccaattaatcctcctattgatggtactcaatcaatgtttggcgaagtcccaggaagagaaaagggaaaatcaaaatctgtatcttttgctctatcggatgtttctgggatagctagccctatagataccaattctgagatgggtaacatcggcgattcctgtagtgacaaattgactgatgaaaatttaagtaactcatctcgtcatatcgctgaaaagcattctattaccaaggaccaatattcaaatgagcaggaccatgagcgggagccactagatcatgctgttcaacagcaaccaaaatcggatgttggagaaagagcatcatctatgaaacgacgttgcaggaaaaaggtgcaaaaagttgggacacctaatcacactgttgatgattattttggtgaagactgtgtcgaaccttcattagctgaagaagataacgatactggtgatcattacactactggtaataagcataaggctaggaaaaagtcaaggggtggtgtagaagagtcacagcagcagaaagctcaaaaaaataaaagcaaggtgtcttcacggggccgcaaacggaccttgaaggatgaatcgacagagaagcctgagaagaagctaacccacagaatacgtcagaggataccaaaagataaaacccatgaagctttgtgcatcacatctcaggttgttacaagaagctagagagcgtgttgatccaaaagggattccatccgggccatcctctaatacaagaaactttcaactagatgatatggatgatttgggctacagagatgaggaagctaggttctttgacaacgatataacagaggagcatgtacaaaatgcaacaaaattgaactaccattcctacatgaacaaaccagcccggggaaaatggtcaaaatcagataccgacttgttttatgag

SEQ ID NO: 8523 - DNA, 3051 bp, Zea Mays
cactctcaaacaaacttccttttattttctgtcaaataaaaacaaagcttatataattcaggcacaccaacccgactccgtttgacgcggctccgatggtcacaaccggcgccctcgtcgccggcgccgcagtcaacacctgagacctcgtcctgcctgcctgggggcgtgagcttgccgctgccgcgatccgagtacgagcccccgcggatgcattatcagcatgccggtagccgcagccgcatgccgccgttcgcacgcggcggcggcgcctacagccgcggacagaaacagttctacccgccgccacctcctcccctcccggcggccgcgctgcctctgctgccgcagaacaagcatgaggtgctcatggaagccggccgcctcgctgccgagtacctggtggcgaagggcgtgctccctcctggctccttgcagcagcgcggcagcacagtcgtcgctggtgggtggggccagctaccgcctccacctccaccgccgctttcggtgacacaggaagccccagcataccatatcgccaggaatagccggcggcagatcgatgatgagcgtggtattcgtaacgcccgctcacggcggaaccgtggtggcgactacagtagcagcaacggtagtaactataatggaagggggaaaaggaaatttggggctgacaataagtattcagattggacaaaggatagggggaggaacaggcggtattctgatatccggagttatgatgatgaggatgatgatggggctcctcctgggttcaaaagggagcgccaaagcggtggtgggattgacgaggttggtagtagcatgtcgggggtagcttgggaggggccatcatcgaaggtggaggcgatgggggagtcggagctggaggatactgggtcaaaggctagttctaacagcaatatccagcagaaagctagtgctttgcaagaggtggaggatgaaaatgaggcaaacaaaatgcaggagaacagtgtggtgtctaattcagacgtagctgagcaagcattgaatggtgaggataatagcaacaatgattcttctgctggtgttgaagaggcagggacaaaacatttgccagtatcctcaggtgaaaaggtctcagatgggaggcttgaacatagcggtgttctgaatgacaaggttgaagatgacagtactttgcatgagaagtctgaagatgacacaatgtcggaagaggtctctgttatggagagcaatttgcctaatgacgctagaaatttgctaaactattgtagttttgcaagagttccaacaagaccacgaacagtgcttgcaaacaggaatgttggaccaggtcaaagagaaattactgtgtctgaacagctcaatttggttacttctgaagaaatatccaatatggcaatggatggagaagctaacactaattccataactagcatcgaggaaggcagtaaagttgagctggttggccaagaccaagaacatgctgaacaaagcgctatctgcaatcaagtggcagaatcagtggcattccatgaaaaggaaactcgaggtgaaactgaagaaaaggaagaacagaagaacatccctcaacattatgaagttgaggataataaggagacaaacgaactgtgtcctacatttgcttcttctcagaataaccaaagcgctatctgcaatcaagtggcagaatcagtggcatcccatgaaaaggaaacacaaggtgaaactgaagaaatggaagaacagaagaacatccctcaacattatgaagttgaggataataatgagacaaatgaactgtctcctacatttgcttctcagaataacttcaatttgcaagttgagaaaggaatacaaatctacaatttagatacaccgccacaagatgaattgttgatcgatccacccgataaagggaaaacagttgattcggagttattacctaacatcaaagcagaagatgctgttacagtggaagaggaaaagattggccagtctagctcatttaaaatacgtgatctcaacctggttggtagtccagaggttgttgacatgcgaggtgaccctcgtttaggccaaagctctactgctggatgtccagtagacctacaagataatcaacaagttgagtttgaaacagctcttggtaacaacccgaataatactgacacatgtgccccctttctgttgggaaataagtcagttcaagttattgatatcgaagatgacataccaattgaagccggtgcttgtgacacgtcaaaatcaaaaggtgagatggtatattctagcatggagagcatgatgaacccgcctccggtgaacaccgatgctctacatggtatccaagatgggtatagtcttgcaatttcagattaccttggtgctgatatgtcatgctaccaatcaatacaagcagaacttcaagatgggatggacctaaacggttcagagggcattactgtgatggatgatccaatatacagttctcttagtgacataggttttatggaggtttgggaccagcaacctcaagactatgaaaagttcttctgaggcaccaactcgtgttgctgaaactgttctggagttcgactgataaataccagttatacttgcataggcagaaataaagcagtagatcgtgcctaacaaatagaatcccgtgtactcgtgcgacagcagcacctcatgcacttgtatgttccaggccatacatatgtgttcagacatatgtattcagactccctgccttgcccgacagtggtgtaaaaagtagtcgtatagctgtcatgtaattcaagggaattgacctaagcacgatagagcattcatccgaaacaattcttcatttgtaataaacagctctatattccaaattaaaagtgtttatttaaaaaaaaatgaaaacgcggcacgaccgaggaggtgtgggcgagcagccggctgaggagacgcaggcacgagcgtgacctagaaacgtggccacaaagagaggcgccggaggagaaaatggtaggaagacgcgtacaggaacgaaga

SEQ ID NO: 8524 - DNA, 4062 bp, Zea Mays
cacggcccctcccctgccccttccgctcccgcaacgggtgtgcctccgttccggccccgcccgaccttctctcacctctccagcgctcgcctcccgatcctcctgcagtcccacctccttcgccgccttctcatcgcttccaaaatcgcaaagccggatcgcggggacatggacccggacgacgagtccgcggcgcagcggaaagccgccgacttgcacctgccgcgcgtcacggagcctgcctccgcgcccgcacgcaccttctgcgccgcgcagcgcgtgctcagctacggtgacggccctgtcgcctccgcctcggcgcagcgctgcgcgtcgttcccgcagcgccacgggcacgggcacggccacggcgaggcggcgctcgcccctgctgcgtccttcgccgcctgggtcgacggcggcccgacgccgccttcggcggtggcagcggcactggagcgggccatgtcgcagtacgacggcgcgggcgacgcgctgccggagttcgtcggcgccggcgggggcgagggcatcttccgcgtgccgctccgcgcggcggtgcacccggcccgcccgccgccgctcgaggtgcgtccccacccgctgcgggagacgcaggtgggcgccttcctgcggacgctggtgtgcgacccgcggcggcggaagctgtgggccggcgccgagtccggggtccgggtgtggtgcctcgacgaggtgttccgcgggtggtggccaggcgccgggccgcggcgccgcggcgacgaggaggccgcgcccttcagggactccgtgccggtcccgcccgcgctctgcgccgcggtcgacagcgccaacgggctggtgtggacgggacacagggagggcaggatcagggcgtggcgcgtggaccacgccgcgcccgccggaggagaccccaccggcagcgcggccatgttcaaggaggccttcgcgtggcaggcgttcagccgcacgccggtgctcgccatcgtcgtcacgccgtgaaatttggtcaggatcggaaggaggtgcgataaaggcatggccttgggaagcccttgctaagtgcctctcatctacaccagaagaaattcatgaggctgcctcgttggttgaaaaatcctatatcgaccttaggaaccatgctacagttggtaacatgtgctctttgcctactgctgatgtgaaacacatgctcgcagaccactgccgattgaaagtttggagtgtaactagcatgacatttgctctttgggatgctaagactagggagcttttaaaagtatttggcatcgatggccaagtcgacttagctcgtcctgaggccccagtaatgccggaacaattcatagaggaagagattaaagcaaaacccacaaaaaaggagaaactgcaaggttctttaagtttctttcggaaatctaggaatgccttgatgggcgcagctgatgctgtacgcagagttgcaacaaaagggacatttgtggaagataatcggcgaaccgaagcggtggctcaagcaatgaatgggactatttggtctggttgtacagatggttcaattattgtgtgggatggaaatgggaatagactgcaagaatttcattaccatagctcttctgttcaatgcatagaggcactcggagagaggatctgggtgggctatgcaagtggtactattcaagttatggatgttgaaggtaaccttcaggcaggatggattggtcatagctgcccagtcataagcatggcagtcggcgattcttacattttttctttggcacatcatggtggcattcgaggatggtctctaagttcccctagccctcttgatgatattctacgctatgaattggctagcagggagctgtcatacacaaggctagagaaccttaaaatactggttgggacttggaatgttgcacaagagaaagcttgtcctgaagcgctaaagtcatggttgggtggtgcatttttcgatgttgggttggtggtggttggtttgcaagaggtcgagatgggtgctggagttcttgccatggcagcagccaaagaaagtgtaggacttgagggcagtaccaatgggcaatggtggatagacagtattggcaaaacacttgatgaggggatatccttccacagggttggttcaaggcagttggcaggattacttattgctgcatgggcaaggaatgaccttaagccacatgttggtgatgttgatgctgctgcagtgccatgtggctttggacgtgctattggcaacaagggtggtgtaggattaagaataagagtctttgatcgcaggatatgttttgtaaacaatcattttgctgcacaccaagaaaatgttagccgccgtaatgctgattttgaccatatttatcggacaatgactttcaacaaaccccatggatctacagcttctgctacatctgtccaattgcataaagcagtgagtgctaatgaaaaccaagccgatgaagataggcctgagctggcagaagctgacatggttgtctttcttggtgatttcaactaccgacttgatggcatcacctatgatgaagcaagggatatggtctctcagaggagctttgactggcttagagaaagggaccaacttcgagcggaaatggaggcaggaaatgtgtttcaaggaatgcgtgaaggtcgaatcaaatttcctccgacctacaaattccaacgacaccagatgggtctctcagggtacgattcaggcgagaagaagagaatacctgcttggtgcgatagaatactatatcgtgatagccgttctgtatcaatgcctgaatgctcattagagtgtcctgttgtcgctgcaattacagcgtacgaagcttgcatggatgtcacagatagtgatcataaaccagtgagatgtacatttagcgttgatattgcgagagtagacgagctgataagaaggcaagagtatggaaaaatagtcgagtctaacaaaagggtacactctttgcttcgggagttgcattttgttccggacactatcgtcagcacaaacaacattatattggaaaaccaagaagatgtcatcctccgaataactaataactgcgaaactagtaaggctgcatttgaaatcctgtgtgaaggccaatcaatcagaaagcaagatggaactaaatctgagccagtcataagggcatcctttggctttccactttggcttgaggtccagccatcatccggcctcatcggaccaggagacacaacggaagtcgccgtgcaccacgaagacttcttcacgcaagaagagttcgtcgacggggtgcagcagagctggtggtgcgagaccaccagagacatagaggtcgtcctgtcggtgaacgtcacgggcgtcgcctcgaccgaggccgccacgcacaggatcaccgtccggcactgctgcccggcgcctccagccccgccgtccgctaacccacgcggccccattaccgactcacctagcgacgctgtgccaggtcccaagagtagccagtcgaatcacttgctgcgttctgacttcgcaaacttcggcagctccgaggtgcgcgacctgtgcggcgtgcggaagcggaacctgtagagacgagcagctcagttttgttttgcctggtgctgtggtttttttgctttctgtccgagtgtttagccggtggagtcttggatttcttgcctaagcttgggggtgggggtggggagagaagaagtggttctgctcttcatcttgttctgtacatatgcgtccctgacctctcacgtctcaccgtcctttgcatatcagatcaaaaagggaaaagaaaaaagtgtgtgtgtgcagttgttgcaaacatttttctttttacattcttacgttctagatgtggcattgaaattatgtggttagaaggtggagtacataattgtgtgtgtacttataatagaggtttacttcattgaatcaagctagtgtgaattatacacagaggcagtacatttaacttacagggcaattctcttggattaatgaggcagtgatcttttgtgcagaagaacctataccca

SEQ ID NO: 8525 - DNA, 2695 bp, Zea Mays
  misc_feature (2694)..(2695): n is a, c, g, or t
atggctggtcagcagcgcccctctctctccaactcctccttccctcccctctcctcctgggtgcgcgctgcatcccctggccgacgcgccgccgtgccccaccccctgccagccgccgccgaccctacctcccctgctggcgcgcccgccctggtaccaggagcgtgggggtcggttcccgtctcccccgcacttgggcccgcgtggggggctgcgcctagcgccaccagtggggaccccactgctgccggcgccgcctctgctcttgcggccgtggcggctgtggttccggcgggaactgccgatctggaggactccaacccgccaccgccaatccccccgtcgatggttgtcgatccgccgcctcctccaccgctcacccaccaggaagacactgtcgccgccctcaccgctgctcgtgcggagcacgctgctcgacaggcccgcttgcgggaagcggccctcgcgtgggagcgcgcgcgcgcggccgccgatgctatcgctgctcaaattgccgcggcggaacagcacctcgcttcgcctgcggcccacgacggcggggccacctccgctaacaccatgggcggcgtgtacggcgtcccgaccgtaccgacagtcgggaccgggccccggaccatccccgagattttgatactaggaaacctgagtgtttcaccgatctttgcagaatcagtctcaaagttccttaaactataccctgatctgggatttgaccctgaagcttctttgctggaaaatgtttggcaatcattggccattctagtcgtaatgcaactttacagttatgaacgaagacaaaacagtgacaagaactttggtgtatctgatgcttcagaatctggacttctggggttcctaagaaggtttctaatttggcacagcgacaagatattatcagtttgtgtgttttatgcttgcttatcatcaatcagtttatctggcctaatttacctgttagggcttattgtgttttctacgttaccaaaagtttctcgaattccttccaaggtttaccttgtctacactggtttgcttgctgcatctgaatatctatttcaaatggtgtgcaaacctgcacagatgtgtcctcatcagcacttctatggtttgtctgtgtttcttggtctgaaatactatgattctgggttttggggtatcgaatacaggcttaggggaaaagttttagtgattgtggcctgtaccattcagtataatgttttccattggctagatttgatgccaacatctctagtacataagggtaaatgggaagagccctgtcaactttttatctcttccaacccaccttatagtcctgtcagaagcaacgaagaaagtcattcatctaataggtttacttcattgttttctaaagttcaaggtcttataggtagtagttcaagttcaagctcatcagtgggtccaggcagcattcaccagaaattagagtatgttgataatgccatcgaaggctcagatgaggacaaaagacactcatttgcaaagatttggggattgtcaaaagaaagccacaagtgggacaagaaaagggttatttttctgagaagagaaagattcgaaacccagaagacaacattcaaatgttacatgaaattctggatagaaaatcttttcaaactgcgaggtctggaaattaacatgattgtgttactattagcaagctttacactgttgaatgttgtatcgatcttctatatcatgtgccttgtcctttgcattcttatgaacagagatctaatccagaaattgtggcccctttttgtgtttctgtttgcttctgtcttaatacttgaatatgttgctctttggaatgatgagataacctggtatcatggtaccaatgacattgaagtccattgccgtgagtgctggaagaattcaaggattttttttgactactgctcaaaatgctggcttgggataattgctgatgatcctcgaatgctgattagctactatgttgtgtttatattttcctcttttaagcttcggtctgatcacttttcgagcttctcagactcggacacatatcggcagatgatgtcccaaaggaaaaatgcagtagtatggagggacctctcactggaaacaaaaagcttttggacattccttgactatgtgcggctttatgcctattgccatttattggacatagttttggcactaattgcaattaccggtactctagagtatgatgttctgcaccttggttatctcggatttgctctggttttctttagaatgagacttgaaatcttgaagaagaagaataggattttcaagtttctacggatgtataattttggtctcattgttttgtcacttgcttatcaatctccttatgttgggcaatttagctctggcaagtgcgatcaaattgactacctatatgagataattggattatacaaatatgactatgggtttaagataacatcacggtcagcttttgttgagatagtaatcttcctattggtatctgttcaatcatacatctttagctctagtgagttcgattatgtgtcaagatatcttgaagcagagcaaattggtgccatggtccgtgagcaggaaaaaaaagctttaaagaaaactgagcagctgcatcatcttcgcaggtctgaggagcataaacgtcagcggaatatgcann

SEQ ID NO: 8526 - DNA, 978 bp, Zea Mays
gtccgctgttcttcagggataacactttcattgaaagccaggttcagggagctaatatttgcgagttcatccataaaaagaagagctcagacggttgaatatcgaccatcaacaaaggtacaagctcactttcaaggcatcagatggaactgcagaagctgaaatgtttgctttcgacactgttgcaaggacaattattgggaaaccatgtccaatggttgttgcatcattttccagatgcatcagctatcccacctgaaattacagcaatcgtttcacggaaatacacattcattgtagtgttcaacaaccaatcatacagatttctagaaaaagcattgctcataaaaggaattgtagcatcatatggaagaatgacatcactaccaagagttcaagaaaaacttgatgtgcaccttcctcccaatccagccaaaaacaaactgataacaacagctgctcaatctccctctacagtcatgtctagactttccacggcggactcaccaagtgtgagtcgaaagctaacctattctccagcaaaggataaacctgagacaaaccctcttgatgctgataaaaatagagctcctgcaacaacacttgaatcacctacaaaaaggatcaaacaagaccctaagaatcaacaagagtagacgttgtgtgcaacacagtaaggaatacttctgaacatcacgcccaaacttcaacaaacgaagcatattcctcactattttgtctataaatattatgtgtgccttcttctatgaagcaaaccttaccctcgatatgctatatataatatctatgtattgtcatgtaatataaccatctataaactcatcagttgctacaatatattctaagcaaaccttaccctcgatatgctatatataatatctatgtattgccatgtaatataaccatctataaactcatcagttgctacaacatattctcatgttatgcatataaaat

SEQ ID NO: 8527 - DNA, 1575 bp, Zea Mays
ccgcagtcatcggacgccatcggctccccaagtcccccaccgtccgctgttcttcagggataacactttcattgaaagccagtatttgcgagttcatccataaaaagaagagctcagacggttgaatatcgaccatcaacaaagtgatagcattctgaaaattactctatgggggaaacgtgcacaagaattttatttgaccaacacttatgacccacagaaacaaactcttgtcattgtcttatttgttggttgtttaccaaaagaattccaaggtgcgtaattataacttttctcatatcttttttggtcttatacttcttatcttcctttgttataaacatatataggggaagtacttttaagtggtggtgcagcctaccattggtacttcaacccatcaattgaagaagctactgctttttacaacaagattgaatctgagaagataaacatagaattacccagccttgacggacaagaaattacacctccacaacttccacaacgagaacatcatgaccttaaatacatattacctctaaacccacatgatgtaccggatgaaggatatgaatgcacagtaaccattacaagtattcctgaaggcaagacttggtattatattgcttgcaatacttgcccaaacaaaccaagcattgatcctatcatccgtcaatgctccacatgtggatcaacaaaatactgcttcaggtacaagctcactttcaaggcatcagatggaactgcagaagctgaaatgtttgctttcgacactgttgcaaggacaattattgggaaaccatgtccaatggttgttgcatcattttccagatgcatcagctatcccacctgaaattacagcaatcgtttcacggaaatacacattcattgtagtgttcaacaaccaatcatacagatttctagaaaaagcattgctcataaaaggaattgtagcatcatatggaagaatgacatcactaccaagagttcaagaaaaacttgatgtgcaccttcctcccaatccagccaaaaacaaactgataacaacagctgctcaatctccctctacagtcatgtctagactttccacggcggactcaccaagtgtgagtcgaaagctaacctattctccagcaaaggataaacctgagacaaaccctcttgatgctgataaaaatagagctcctgcaacaacacttgaatcacctacaaaaaggatcaaacaagaccctaagaatcaacaagagtagacgttgtgtgcaacacagtaaggaatacttctgaacatcacgcccaaacttcaacaaacgaagcatattcctcactattttgtctataaatattatgtgtgccttcttctatgaagcaaaccttaccctcgatatgctatatataatatctatgtattgtcatgtaatataaccatctataaactcatcagttgctacaatatattctaagcaaaccttaccctcgatatgctatatataatatctatgtattgccatgtaatataaccatctataaactcatcagttgctacaacatattctcatgttatgcatataaaat

SEQ ID NO: 8528 - DNA, 2094 bp, Zea Mays
tgatgagcctgaaggctactctgctccgatccttctttccagatccatacctcaacaccgatgctggaaccatgtcgccgttcgagcacggggaggttttcgttttggacgatggcggagaggtggacttggaccttggaaactacgaacgttttctggacatcaaattgacccgcgacaacaatataaccacgggaaagatcttccaggctgtcattaacaaggagaggagaggcgactacctagggaagaccgtccaggtagtgccgcacatcacggatgagatacaggactggatcgaacgcgtcgcggtggtcccagtggacggcaaggaagggcctcctgacgtctgcgtcatcgagctcgggggcactataggggacaaaatcttttcgccgcataacgacagtggcattcttgatgcaggggatatcgagtcaatgcctttcattgaagcgttaggtcaattctcgtaccgtgttggacctggaaacttctgtctcgttcatgtcagtcttgttccggttctaaatgtagtcggtgaacagaaaactaagcctacacagcacagtgttcgagggcttagagggcttgggttagcgccggatgttttagcatgtcgcagtactgagccattggaggaacatgtgaaggccaagctttcacagttttgccatgtcccggaccagaaggcccatgaagcgattctgaaggttttagacctccagtatgatggaaaggtgcctcgggaacctgagctaacaaagtggactaaaagagccaccaagtttgacaagttgaagactccggtcaagattgccatggttggaaaatacactggcctgtcggattcctacctgtctgtcataaaggctcttttgcatgcatcggttgctatggaaagaaaacttgtagtcgagtgggttccttcctgcgacctggaagattcttcagctaaagagacccctgaagcccataaaaaagcatggaaattgctgaagggcgcagatggcgtactcgtccctggagggtttggggacaggggagtccagggcaaaatcctcgccgcgaaatacgcacgcgagaacaacgttccttatcttggcatctgcctgggaatgcaaatcgcggtgatcgagtttgcccgctcggtgatgaagctacgaggtgccaatagcacggagttcgatccagctacgacgtcaccctgtgtcatcttcatgccagagggctcaaaaacccaaatgggagccacgatgaggcttgggtcgaggaggacctatttccatgtcagtggctgcaaatctgcgaagctgtacggcaacgccagctctgtagatgaaagacatcgccacagatacgaggtgaaccctgacatggtcccagactttgagaaggccgggcttcagttcgtgggcaaagatgagagtgggaaacgcatggggatcgttgagcttccctctcacaagttcttcatcggtgcacagttccatcctgaattcaagtcgagaccagggaagccatctccgcttttcttagggctgatagccgcggcgtctgggcagctagaaccattgcttcagcgcagcaatccgacaacgaaagcatgttcgatcagtaaagtcccgaaactgaaactgtaccccactgggcctgtgaataatccactgaacagcttggtgaacgggtactacccaaatgagaagagaaggctaagattcagcaagcccccagctccagcgacacatggttccgacatttttaacgaggaacgccttccagtccgttgaagcgagctagccatagggtggtgaggtctagtgtgatgttgttgttgtttttttctctttcctttttttttggcctggaactaaggcgcgaagtgttttgagtagcgctagtagagcctggaagaagttatctaaactatttgtacattatggaagaacttatctaaggactgaatacacaaatgcttggccatgattgctttgttgccacaatatgaacaaccacgctcagatgaagagtattggtgttgttaaaaaatgccagtgaaattgttgttgttaatgtttgtgcctgtgttgccct

SEQ ID NO: 8529 - DNA, 2363 bp, Zea Mays
cagcctcaaactcttgccctccccccggcaccacactagcctagtgagaagtgcagcagcagcaccagcggcagaagtgttacttagttgctcctcctacctgtgctgctgcgcaggagcagagcctgaaaggacgacggccgtcggcgtaaggggagcgagcgagcgagcggccatgaagtacgtgctggtgaccggaggggtggtgagcgggctcggcaagggcgtgacggccagcagcatcggcgtcgtgctcaaggcctgcggcctccgcgtcaccaccatcaagatcgatccatacctcaacaccgatgctggaaccatgtcgccgttcgagcacggggaggttttcgttttggacgatggcggagaggtggacttggaccttggaaactacgaacgttttctggacatcaaattgacccgcgacaacaatataaccacgggaaagatcttccaggctgtcattaacaaggagaggagaggcgactacctagggaagaccgtccaggtagtgccgcacatcacggatgagatacaggactggatcgaacgcgtcgcggtggtcccagtggacggcaaggaagggcctcctgacgtctgcgtcatcgagctcgggggcactataggggacaaaatcttttcgccgcataacgacagtggcattcttgatgcaggggatatcgagtcaatgcctttcattgaagcgttaggtcaattctcgtaccgtgttggacctggaaacttctgtctcgttcatgtcagtcttgttccggttctaaatgtagtcggtgaacagcctgttaaatttgtgtagaaaactaagcctacacagcacagtgttcgagggcttagagggcttgggttagcgccggatgttttagcatgtcgcagtactgagccattggaggaacatgtgaaggccaagctttcacagttttgccatgtcccggaccagaaggcccatgaagcgattctgaaggttttagacctccagtatgatggaaaggtgcctcgggaacctgagctaacaaagtggactaaaagagccaccaagtttgacaagttgaagactccggtcaagattgccatggttggaaaatacactggcctgtcggattcctacctgtctgtcataaaggctcttttgcatgcatcggttgctatggaaagaaaacttgtagtcgagtgggttccttcctgcgacctggaagattcttcagctaaagagacccctgaagcccataaaaaagcatggaaattgctgaagggcgcagatggcgtactcgtccctggagggtttggggacaggggagtccagggcaaaatcctcgccgcgaaatacgcacgcgagaacaacgttccttatcttggcatctgcctgggaatgcaaatcgcggtgatcgagtttgcccgctcggtgatgaagctacgaggtgccaatagcacggagttcgatccagctacgacgtcaccctgtgtcatcttcatgccagagggctcaaaaacccaaatgggagccacgatgaggcttgggtcgaggaggacctatttccatgtcagtggctgcaaatctgcgaagctgtacggcaacgccagctctgtagatgaaagacatcgccacagatacgaggtgaaccctgacatggtcccagactttgagaaggccgggcttcagttcgtgggcaaagatgagagtgggaaacgcatggggatcgttgagcttccctctcacaagttcttcatcggtgcacagttccatcctgaattcaagtcgagaccagggaagccatctccgcttttcttagggctgatagccgcggcgtctgggcagctagaaccattgcttcagcgcagcaatccgacaacgaaagcatgttcgatcagtaaagtcccgaaactgaaactgtaccccactgggcctgtgaataatccactgaacagcttggtgaacgggtactacccaaatgagaagagaaggctaagattcagcaagcccccagctccagcgacacatggttccgacatttttaacgaggaacgccttccagtccgttgaagcgagctagccatagggtggtgaggtctagtgtgatgttgttgttgtttttttctctttcctttttttttggcctggaactaaggcgcgaagtgttttgagtagcgctagtagagcctggaagaagttatctaaactatttgtacattatggaagaacttatctaaggactgaatacacaaatgcttggccatgattgctttgttgccacaatatgaacaaccacgctcagatgaagagtattggtgttgttaaaaaatgccagtgaaattgttgttgttaatgtttgtgcctgtgttgccct

SEQ ID NO: 8530 - DNA, 1334 bp, Zea Mays
aaaggaagttcgtcctctctctcacggtctcacctctcacgtccagagagagagagagaggatgccgtcgcgttcgccgcggcagtcggcccgaccccccctcccgaccgccgccgagccccctcccggcctcttcccggccagggaggacctcgtccgcttgctcgccgtcatattcatcgcagcggccgccgccgcggcctgtagcgtcctcaaccgccgccctgagcccttctgcgactctccccagtggcccgatgactacgccgacgattcgtgtcaaccttgccctccgaacgggcgatgtgtggacggcgagttggagtgcgtccaggggttcaagaggcacggcaaagcatgcatagaggatggactgctcattcaaagagctaacaagatttcacagcttctacagctaaggatctgcgatcagcatgctcgtgctttatgtggccattctgccgaaatcctgtttcaggagcatgaggtctcaaatgcaattgatgaactcttgtcaaagattcccgctggtctaactgaggatgggcttcaacttgtgaaaactagggtgctggagagtgccgggggcttcttcgatacaacatttacttccagcaagcagctcagtgatgatggaacccaagtttgcagcactgctttggatactgtggatcatttacaagaggcggacattatctaatagagctgagcaaatatacgagcagggatcacctgttggttcctcaagagagaaagaatgctttcctgtggaagaaggtcgaagaactcatacgagaagattctcgaatagatcaatatccaaaggtgattaaaggggagtcgaaagttgtttacgagtggcaagcaagtggctcgcttagtgcaaagattaaaaaggtgcaaggtgcaagggccaagtcaaggactggtgtaggtgtcataaaatttggggaagaaatgagtgcttcctccttgggtgaggtgagggagcagggctcgtgtgatttaacacgcgaagaaagaagtaaggacaaggtcacgtgcagtgattaggttatcaatcaatctatctacatgtatgcctctggtctttagaggaaccagcacgtgagcttggcaagagttactgatcttttgtaaattttgatgataggagccgagccgtcacagtgtgttgttgctgttacagttgagtttgttggcatgtcatgagattgtctggtacagtttcaacaactgatgaatgaacatggtcactggaagatgctgctgacggagcagtcgtcgtgcacacgccagatggtctcaccgaggaggttagcgacggagagcac

SEQ ID NO: 8531 - DNA, 1365 bp, Zea Mays
aaaggaagttcgtcctctctctcacggtctcacctctcacgtccagagagagagagagaggatgccgtcgcgttcgccgcggcagtcggcccgaccccccctcccgaccgccgccgagccccctcccggcctcttcccggccagggaggacctcgtccgcttgctcgccgtcatattcatcgcagcggccgccgccgcggcctgtagcgtcctcaaccgccgccctgagcccttctgcgactctccccagtggcccgatgactacgccgacgattcgtgtcaaccttgccctccgaacgggcgatgtgtggacggcgagttggagtgcgtccaggggttcaagaggcacggcaaagcatgcatagaggatggactgctcattcaaagagctaacaagattctaaggatctgcgatcagcatgctcgtgctttatgtggccattctgccgaaatcctgtttcaggagcatgaggtctcaaatgcaattgatgaactcttgtcaaagattcccgctggtctaactgaggatgggcttcaacttgtgaaaactagggtgctggagagtgccgggggcttcttcgatacaacatttacttccagcaaagtcaaagtatataaatgccctgagctggttgcggagcttcatatgccaatgggttgtcgagttcgccaatggatctttagaaataccacatctgtggcaatcttttgtatcctgtttgcagcactgctttggatactgtggatcatttacaagaggcggacattatctaatagagctgagcaaatatacgagcaggtatgtgaaatccttgaagataatgctgtaaacgccgagattgacaactccaattctgaggtttgggtggttacctcctggctcagggatcacctgttggttcctcaagagagaaagaatgctttcctgtggaagaaggtcgaagaactcatacgagaagattctcgaatagatcaatatccaaaggtgattaaaggggagtcgaaagttgtttacgagtggcaagcaagtggctcgcttagtgcaaagattaaaaaggtgcaaggtgcaagggccaagtcaaggactggtgtaggtgtcataaaatttggggaagaaatgagtgcttcctccttgggtgaggtgagggagcagggctcgtgtgatttaacacgcgaagaaagaagagccgagccgtcacagtgtgttgttgctgttacagttgagtttgttggcatgtcatgagattgtctggtacagtttcaacaactgatgaatgaacatggtcactggaagatgctgctgacggagcagtcgtcgtgcacacgccagatggtctcaccgaggaggttagcgacggagagcac

SEQ ID NO: 8532 - DNA, 1420 bp, Zea Mays
aaaggaagttcgtcctctctctcacggtctcacctctcacgtccagagagagagagagaggatgccgtcgcgttcgccgcggcagtcggcccgaccccccctcccgaccgccgccgagccccctcccggcctcttcccggccagggaggacctcgtccgcttgctcgccgtcatattcatcgcagcggccgccgccgcggcctgtagcgtcctcaaccgccgccctgagcccttctgcgactctccccagtggcccgatgactacgccgacgattcgtgtcaaccttgccctccgaacgggcgatgtgtggacggcgagttggagtgcgtccaggggttcaagaggcacggcaaagcatgcatagaggatggactgctcattcaaagagctaacaagatttcacagcttctacagctaaggatctgcgatcagcatgctcgtgctttatgtggccattctgccgaaatcctgtttcaggagcatgaggtctcaaatgcaattgatgaactcttgtcaaagattcccgctggtctaactgaggatgggcttcaacttgtgaaaactagggtgctggagagtgccgggggcttcttcgatacaacatttacttccagcaagcagctcagtgatgatggaacccaagtttgcagcactgctttggatactgtggatcatttacaagaggcggacattatctaatagagctgagcaaatatacgagcaggtatgtgaaatccttgaagataatgctgtaaacgccgagattgacaactccaattctgaggtttgggtggttacctcctggctcagggatcacctgttggttcctcaagagagaaagaatgctttcctgtggaagaaggtcgaagaactcatacgagaagattctcgaatagatcaatatccaaaggtgattaaaggggagtcgaaagttgtttacgagtggcaagcaagtggctcgcttagtgcaaagattaaaaaggtgcaaggtgcaagggccaagtcaaggactggtgtaggtgtcataaaatttggggaagaaatgagtgcttcctccttgggtgaggtgagggagcagggctcgtgtgatttaacacgcgaagaaagaagtaaggacaaggtcacgtgcagtgattaggttatcaatcaatctatctacatgtatgcctctggtctttagaggaaccagcacgtgagcttggcaagagttactgatcttttgtaaattttgatgataggagccgagccgtcacagtgtgttgttgctgttacagttgagtttgttggcatgtcatgagattgtctggtacagtttcaacaactgatgaatgaacatggtcactggaagatgctgctgacggagcagtcgtcgtgcacacgccagatggtctcaccgaggaggttagcgacggagagcac

SEQ ID NO: 8533 - DNA, 1431 bp, Zea Mays
aaaggaagttcgtcctctctctcacggtctcacctctcacgtccagagagagagagagaggatgccgtcgcgttcgccgcggcagtcggcccgaccccccctcccgaccgccgccgagccccctcccggcctcttcccggccagggaggacctcgtccgcttgctcgccgtcatattcatcgcagcggccgccgccgcggcctgtagcgtcctcaaccgccgccctgagcccttctgcgactctccccagtggcccgatgactacgccgacgattcgtgtcaaccttgccctccgaacgggcgatgtgtggacggcgagttggagtgcgtccaggggttcaagaggcacggcaaagcatgcatagaggatggactgctcattcaaagagctaacaagattgagcatgaggtctcaaatgcaattgatgaactcttgtcaaagattcccgctggtctaactgaggatgggcttcaacttgtgaaaactagggtgctggagagtgccgggggcttcttcgatacaacatttacttccagcaaagtcaaagtatataaatgccctgagctggttgcggagcttcatatgccaatgggttgtcgagttcgccaatggatctttagaaataccacatctgtggcaatcttttgtatcctgtttgcagcactgctttggatactgtggatcatttacaagaggcggacattatctaatagagctgagcaaatatacgagcaggtatgtgaaatccttgaagataatgctgtaaacgccgagattgacaactccaattctgaggtttgggtggttacctcctggctcagggatcacctgttggttcctcaagagagaaagaatgctttcctgtggaagaaggtcgaagaactcatacgagaagattctcgaatagatcaatatccaaaggtgattaaaggggagtcgaaagttgtttacgagtggcaagcaagtggctcgcttagtgcaaagattaaaaaggtgcaaggtgcaagggccaagtcaaggactggtgtaggtgtcataaaatttggggaagaaatgagtgcttcctccttgggtgaggtgagggagcagggctcgtgtgatttaacacgcgaagaaagaagtaaggacaaggtcacgtgcagtgattaggttatcaatcaatctatctacatgtatgcctctggtctttagaggaaccagcacgtgagcttggcaagagttactgatcttttgtaaattttgatgataggagccgagccgtcacagtgtgttgttgctgttacagttgagtttgttggcatgtcatgagattgtctggtacagtttcaacaactgatgaatgaacatggtcactggaagatgctgctgacggagcagtcgtcgtgcacacgccagatggtctcaccgaggaggttagcgacggagagcac

SEQ ID NO: 8534 - DNA, 1477 bp, Zea Mays
aaaggaagttcgtcctctctctcacggtctcacctctcacgtccagagagagagagagaggatgccgtcgcgttcgccgcggcagtcggcccgaccccccctcccgaccgccgccgagccccctcccggcctcttcccggccagggaggacctcgtccgcttgctcgccgtcatattcatcgcagcggccgccgccgcggcctgtagcgtcctcaaccgccgccctgagcccttctgcgactctccccagtggcccgatgactacgccgacgattcgtgtcaaccttgccctccgaacgggcgatgtgtggacggcgagttggagtgcgtccaggggttcaagaggcacggcaaagcatgcatagaggatggactgctcattcaaagagctaacaagatttcacagcttctacagctaaggatctgcgatcagcatgctcgtgctttatgtggccattctgccgaaatcctgtttcaggagcatgaggtctcaaatgcaattgatgaactcttgtcaaagattcccgctggtctaactgaggatgggcttcaacttgtgaaaactagggtgctggagagtgccgggggcttcttcgatacaacatttacttccagcaaagtcaaagtatataaatgccctgagctggttgcggagcttcatatgccaatgggttgtcgagttcgccaatggatctttagaaataccacatctgtggcaatcttttgtatcctgtttgcagcactgctttggatactgtggatcatttacaagaggcggacattatctaatagagctgagcaaatatacgagcagtttttcttttgcagtaactccttttggaccttctggcatttgtgcctttgtctgttgtcattcagtaggtatgtgaaatccttgaagataatgctgtaaacgccgagattgacaactccaattctgaggtttgggtggttacctcctggctcagggatcacctgttggttcctcaagagagaaagaatgctttcctgtggaagaaggtcgaagaactcatacgagaagattctcgaatagatcaatatccaaaggtgattaaaggggagtcgaaagttgtttacgagtggcaagcaagtggctcgcttagtgcaaagattaaaaaggtgcaaggtgcaagggccaagtcaaggactggtgtaggtgtcataaaatttggggaagaaatgagtgcttcctccttgggtgaggtgagggagcagggctcgtgtgatttaacacgcgaagaaagaagtaaggacaaggtcacgtgcagtgattaggagccgagccgtcacagtgtgttgttgctgttacagttgagtttgttggcatgtcatgagattgtctggtacagtttcaacaactgatgaatgaacatggtcactggaagatgctgctgacggagcagtcgtcgtgcacacgccagatggtctcaccgaggaggttagcgacggagagcac

SEQ ID NO: 8535 - DNA, 3619 bp, Zea Mays
tttgcaacccttgtgccactgttctttgcctcttagcccttttgggcatcaacaggaacaaattgggggcccagtccgaaacagattttccttgcagccatcggtccaagatttagttgattctccattgcccacaacagtaacaacaacaatgtcaaacaaagcttgcgcatgaggaggtagtttgaaggggaggccagcccaagggcgagatgcatccgtcttctgcaaccacaaccaacgaatacgcaaggccccactgaacagctccatgttaagtatacctaggcggctaggcctccaaacagcaaaggtcgttgaacacactcccaggaaacaagacagctacccccatttgctttttcctgccctttccacatgaacccacttcttttatcgatttatttgagcacccatttagggaggtgctagcatagagtacatagggatgaaagataaaaccactctcatcatcacagggcggcctgcttgactcatgagcgatgttttctagcccgacaatcggacaatttattggataccttatcgacaaggggctgcaactcggcatttgttggttttcgaattgacaggggaagtcccaggtaattacatggaaactcctttaactcacaaggcaacaactcagagataatgaccagctcttcatccccacactggataggtgtgactgaacttttggaaatgtttgtcttgaggcctgtagaatgccccgaaatatcaaggagccgagtgaccataaggagatcagattttagtggccggaggaacaatactacgccatccgcataaaaagaaatgcgatgtttggcctgctgatgagcaatgggctgcaagagatgctcttgagttgcaaaagtaaaaatggaattcaggacttccatgaccagaataaatagcatgggtgatagggggttcccttgatgaaggcctcgatggtgggagatgcaattcctaggttcaccattgattaaaattctggtagaggatgtgaacaacaacaaactgatcagattacaccatctgcgaccaaaaccaaggatgctggagatttttctcagcgccactgtcaccacggcgtactctggtgcgctgcgggccttcccgcgtgccgcaccagcgcctgcgacttgtgcggcttgtcttctatgatgtcctcgacagcttcctcgaccacagcaaccctacgcatggcacctcgacgacggctcgacgcccttgcacttagctacctcaacattatcggcacaaagggctatcatctgcatgggctactccagtagcagcattcgcaccggcattctgactatggggggatatctccattattctccagtctgtccgttcgttttgctaacgctacgagtgcggggggatgttagagtatattaggtatgttagagtatattaggcaactcctgatatggttggtttaggattgattgtaatctcgagataaccttccttatatctaggataacctttcttatctctagaatacgcttcttgccctccaagtcatgtactcctatatattctccctagaggctcaatgcaatacatcccacacattataccaattctctcattccttcaacaaggacagttgtactgatccaatatatcaacaaaataaaagatcacaagtatagcaataaatttggctcgaactaccctggacttgctccaatttttttgttaacaaaataaagaatcacaaacaaattgaccacctcctacactgcacatgaagctacaacacagaaaactacagcagcacatcagactgccatgaacccatgtccgaccactgaaacagaatgcaacgaatccgtagcaggcagagaactaacctgtagctccacagcgttgtgttaccccgaacgggacaatgggagcagaagcggtgtcttgactcacgtaccgatagctccaagatcttcaagaaacaatggaaatctgggtgaaaccctagcgtatcgagaaattactgttggggaagggaatgcaggcggaggaggattgacctccagagacggatggtgaagcgatgacagtggaggagcaaggtggcagtggtcggggtgagttgcctatgtgatttctagagatcgacatggagcagtggatttcgggagcaacgtgatcgccgagcgctgggagatgtgtcaccgaccgtcgggaaaggcgcgccgctagtcaccagccactgggtatgcgctgaccacaggatactagggtgacagcggcagcagccttgcgattcacaagctgcatgagcatgaacaagccgagcgctaggactaggagatgtgtcacctaccataggaaaaggtgcgccgctagtcaccagccactgggtatgcgctgaccacgggatactagggtgacagtggcagcagccttgcgactcacatgccgtgtgagcatgaacaagtcgacgggggttagggaagccctcccgcctcttgactcgcagttttcttccgcgtggaaaaggaatggaagcgagtttcgatccctgagtttgtgggcttccgtccaaatggcacaaaaaattggcccatgggagattggcaccgggtttcttggcccagggaatttgcgggccccccagggatctgggctcccaaagtagccctaaggcacatgcgtatctactaacgctgtaccggtcgtcttgtttcttcttctctacaaaattaagtcacagcttctacagctaaggatctgcgatcagcatgctcgtgctttatgtggccattctgccgaaatcctgtttcaggagcatgaggtctcaaatgcaattgatgaactcttgtcaaagattcccgctggtctaactgaggatgggcttcaacttgtgaaaactagggtgctggagagtgccgggggcttcttcgatacaacatttacttccagcaagcagctcagtgatgatggaacccaagtttgcagcactgctttggatactgtggatcatttacaagaggcggacattatctaatagagctgagcaaatatacgagcaggtatgtgaaatccttgaagataatgctgtaaacgccgagattgacaactccaattctgaggtttgggtggttacctcctggctcagggatcacctgttggttcctcaagagagaaagaatgctttcctgtggaagaaggtcgaagaactcatacgagaagattctcgaatagatcaatatccaaaggtgattaaaggggagtcgaaagttgtttacgagtggcaagcaagtggctcgcttagtgcaaagattaaaaaggtgcaaggtgcaagggccaagtcaaggactggtgtaggtgtcataaaatttggggaagaaatgagtgcttcctccttgggtgaggtgagggagcagggctcgtgtgatttaacacgcgaagaaagaagagccgagccgtcacagtgtgttgttgctgttacagttgagtttgttggcatgtcatgagattgtctggtacagtttcaacaactgatgaatgaacatggtcactggaagatgctgctgacggagcagtcgtcgtgcacacgccagatggtctcaccgaggaggttagcgacggagagcac

SEQ ID NO: 8536 - DNA, 2118 bp, Zea Mays
gttgagtgaccgtgcagtagcgcacaggtatagctgcagtggctattgtgcaattacgggagcatgagatacctccaggctcgaggcagttgaagtcgaaatactgttgcagtctgcaagcttttttaatgctgattgtcatcattcagtaatggaaggatatagatggtagtgcaattgtgcaaacatgggagacttcaaggcggctgttgaaagtgaagagcaaatttattccccagcatttggcaacattgaggtccaggatagtcgtggttgctgcagtggtttcacaggcagtgtaacgaagttgctgttcatctttcatctgcttgctttcattgccctcacagcattcctaggcgtccaggcctcttaccaccagaaccctgcctacaagcccttctccaacttcatccctctggtatcctctgtcatagtatccacaattgctgcatgcttctgggttatccttgctgtcacaaacccgccaaaagccatcaagacctctctctgggctgcccctgtttctgcacttgcttgtgatgtagtcatacttcttgttggcaatactgctgcacttggcattggagcgcttgtagttgtattcgcaattgcagcaggattatacagttgttgggccactggcccacgtctcaagcatgcctctgatatgctttccgtttctgtcatcggtgcacatttaccgcctgctacttcatgccttgttgtctatgtccttcttgcaacgtttgggtatatggccttctggacagttgccatcagctgcattgctgctgcagaagggcacttcatggactaccggatggcttatgtggcagcacttctagtgagcatggcctggacaatgcaggtactgagatatattgtctatgtggcagtggcaaaactggcacatggacgtctcacctatggaattcacgtcctgggcggtgctgtcgaagcattctgtgacacgatatttggaccagcctttggggacatatgcatgggtgcagtggctgtgccggtgaactcagcggtgcggggattggctcgagcaatgaaaacagcggctgggggcaacgacgagttcattttgtcaggacagggctgctgctttgctgtatcagagaagatgctgggacgtgctaaccgttggggttttgtgcacgtgggggcgcgggggaaggcattctgtgtggcttcacgggatgtgtggtcgctttttgttctccgtgggattgcagagcttgttgattcagacctcactggttcgttttgcttcctttcttccgttacatcaggcgcattggcctcattggtttctggatcatgggcactagccatggataaggatcagaagaaactagctttgcccatatccatctatgcattcctgatcggttattatatgtgccggatgatgatcgcatggccgcaagcatgtgtggctgcgtaccatgtcgcatatgcagagaacccgcagaaccctcagctgggcacgctgataccagaacatctgcgcgagctccaagcaatggctgcagatcaagatcgtcccagagttatccatttttctgatgacattgacaattcatagatccttccattctttcagtctttttcccccctgacccaagggggtagacacctcggcagcagacgtagacacgtcgttgcagtcttccagatgcatgatgatgggtgttgactgctcctgggctgcttgctggtgcagatgatagggtgtgctcagttctgtagatattgggcaagtggataactgagcaaaagaagtggttagatgtcgtataggtacagagtttagcaaagtaaacaaaaatgtagaattaaatacattgttttcagaatttcccggaggcgtgttcttgccctcgcactgacactgaacgctgttgcgattcctgtgccttttcatctgcttacgaggtggctctacgtggcaattgacatgcatcaggttcgaggatttttttttgccagtagaaatgtggaatgctcgtggctttgcttgcactaccaatttatcttttcctattcctaatcatgttggagttttttttggcagtaggatgctcgtgcccaattcattttccc

SEQ ID NO: 8537 - DNA, 3225 bp, Zea Mays
ccttttttcacataagccaaattcatacctatacaagttacatacatcaaagttgcaaaatatataaaaaacgcttttgtaggattagacctatgcagcacgagcatggatacgtgtatctgtatccagtggatacacatacatgtattggtatcaagtggatacagatacgcagatagcatttcccccaaatcacgatatgtcgatatgttttagtgttcttttaataactataaatagttgtgcatattaaaataatagaaccagtgttgcagtagcagacaaaaggaacatagaactacatttcttgctcaagtgtggcagggggaggcttggttcatgcaattcaagcttcttttcccttttctttgttctcttgcaatatcagcaggcctagcgctagtgctatgactacgcacgtttgttgctaccatctactcatggtggctggaaaaatcaagaactgaggagactatcggggagacaggtagagccgaaggggaacggagaagacctaggtcgagaacaggatgactagttcgagaatatgaagactaggttgggaatggaaagaccaaataagaataaactcacaggtggctgtggcgtggtgaagtcatcacggcttgcgggtatggtcatggtgcagtgggggagttttgtcgctatcaggggagtgggaacttgttgctaccatctactcatggtggctggaaaaatcaagaactgaggagactatcggggagacaggtagagccgaaggggaacggagaagacctaggtcgagaacaggatgactagttcgataatatgaagactaggttgggaatggaaagaccaaataagaataaactcacaggtggctgtggcgtggtgaagtcatcgcagcttgcgggtatggtcatggtgcagtgggggagttttgtcgctatcaggggagtgggaactcatcatggtctgtggggttgccagtggaggcttgtctccgcggtggtcgtggtggagtttcctcaccagtgtctcttcagcggctggagatgtttgcccatgtgggtggtgggctggcggcacgagattgatcggggttgtcgcatgcatgcagtagaacgtagggttaaaagggcagttattgggctggagcaaccagccagatacgtgttggccgacgtatcacatatttctgtatctatttttactgttatttctctgataagtatctatcacacatcggagccgtatctgtattaggtacatatctgatacgggatacagaccctgccacacgtatccatgcatcatagggttatactatgtctttccttgacactactgagcttgaattcttagaattgctctttgtctggaaatccatgcttaacttattttctaaaaggaaagcttactttatttggtgattacatgacaaatagttgtccaggtggatatttagttttggaaatgttagcttgaatgccaatctcattcttgaatgacattatgacttaggtactgttggttgatctgtgcttatggcagttagatgattcaatttaatgaactggactgatgttatcttttctacctttttttggtcactgggagacgatttatggattgttttgaatatgtcaactgtcactgaaacttaaaggtttcagaccatattcgaagggtcggggatgcattttgatgcttgccttgttattgtaaataaatattgatttgattaaaaatggaatatctatccttgcccctcccaatttatattagtcatcgtaaatgttgcaacttgcaagcagtttttggcaggcttggatgcctgcatccttactatgaactagtattggcatccgtagtccatttcttgtgtgagatcaacctgagttttgagttgcaatagcagtatgttcaccacctttatgtgacttgatcagggacacctcttacgcttgtgagttgatgtagattttggaactccttgtttaactcttttgatctcattcaaaaaatggattccaaaagatggataagattaaagattcaaataggcaagctaagcaattggaagatcttactgtgaaaatgaaggagtgcaagcgcttgatcaaagagtttgatcgcattctcaaagatgaggagtcaaataatccacctgagatcaacaagcagctaaatgacagaaaacagttcatgatcaaagagttgaattcctatgtcaccttgaggaaaacataccaaagtagccttggtaacaacaataagagggttgagctctttgatatgggtgctggaagtagtgagcctgctgctgaggacaatattcaaatggcatcagccatgacaaatcaacaactcattgatacgggaaggaaccaaatggaccaaacagatcaagctattgaacgttcaaaaatggttacttcccttactatacacccttgtcctgtttgccatggcaaaatttacaagacattcttgtaggtcgtagcacaaactgttgagactggagctcaaactgctgcgacattaacacagcaaacagagcaaatgaagagaattggtaatgagctagatactgtccacttctcactgaagaaagctagccaactagtgaaggagattggtcgccaggttgcgactgacaaatgtatcatggcattcctcttcctgatcgttttgggtgtgattgctatcattgttgtcaagatcgtccatccgaataacaaaaacattcgagacattccagggctggccccgcctgctcaaaactatcagattcacaacaggagattgttgtgggcagaagcttccataggcatgtgatggctctgaatgtaggcttcatgtggacgcactgcctgcgaagcagcagctatccatagggcgaaagatacatagtaacaattctttgtgcctgtatatctattttgtcttgttaactccgagccctaggtctgtattcctgcgtctggtgtttgtacaccgctggccgtttggctgtgtatatggtacagagatgagatcttaaaaccaaaccagtaattatgacaaatacttgaaagagctacagtaccgaaatactccagttggtactcgctgcacttcatgggcgaatatataaagggtgccggttgggccgtgtaacacattctgaattccgaagacccatgaaaagaatgtgaacgtttaaggctatctctagaaactctttttatatcatttcct

SEQ ID NO: 8538 - DNA, 1206 bp, Zea Mays
gtaggcgtaaagctcccgtccagtccagggcccggtcggctcggctgccgatccttcttcaatccctcgcctgcaactggctctctgtccccttctgctccccccacggttccccagagcccgagccaaatctaggggcttccttcatccgagcgtggtttcaattctaggggtagtcacctcacctgaattccgcccaaataaattcgtcgctgccttgtgatccttggggtttccttggttcttgagttgcgatcttctgctggttcgtgtcccccaatccgtaatcaatccggcgtctaggaaaccaattgctgctcagttctcttatttgctcctcgccttccttcctccagcctggttaaaatatcgaaaggggatttttttttaaaaatctgctcatcgaggaagcagggaagacaagaattgttgcatcggataaaggtcgggtgaaaatacaagcaaatcctgggaactcgcgtccctttgctaggtggttctttcctgatacaaagaacacaatgggcgatgtgtccttgaacggacccattaaggctgctgagccaggtgccggtggcattgccaagaggtctctgatcaaaattttgctgacgacgaggctgaagctgaaacagaatcaatgaaagcatacaagaaaaggagattaagcaggacaatgatcaactaaatttgcagggtcaattagcttagcctgttgcaggaattgagatgactgtcctaaaaggaggcagtaagatgatgggacatgtcttacgaaattttcagctgttgcctcttggtagccaaggcactttgaatccgaaggaaggtgttgaagggtagttgttagtgatcttgtgatgatataacgagctctggagcagttagcatcggcattttagtggattatgttcttgttatgtgtatctgtctatttttcagtcctcatcggtagtgctgcatagtacctcgctctctcgtcagaaggatattaggctaggtcactgttattaaatttttcaataacagtgaagtgtacatgtgtttgccaaatggtgagaatcattattgatttccaattcacaaactattctttatgcctcactccgtggatgtcgcggacatgtaacatggtcccggaaggaaggtacagcatacgacgtgcttgctgttgaacgatgatctttttaaaaaagaaaaaaaaaa

SEQ ID NO: 8539 - DNA, 7369 bp, Zea Mays
ggcttataatgaaaggcgacagtatggagatgaatggaaacatacttggtttaaagatggagagtaatggcatcagagttatagaaccatttgacatggtcgtgaaatattccaatgcgtctggaaagacaaatttgcatctactagtttctgaaatatatatgaatttttccttcagtattctcagactgtttttagcagttgaggaagaaatttcagcatttcttaggatgtcgtcaaagaaaatttcactggtgtgttaccagtttgacaaagttgcaactatgcaaggtaatgctaatgatcaagtgttatctttctggcgaccgcgtgctccatctggatatgccatttttggcgattatctcacaccaatgaacgagcctcctactaaaggagttcttgctctgaacacaaacattgttagggtcaaaaggcctttatcgtacaaactagtgtggcaatctggttctccaagaacaaacatttttcatcagaaggacttggaggataagatctctaatattgaccagctctgctctgtttggttacctgtggcacctgcgggttatgttgcaatgggttgtgttgcttcatctggaactgctgaaccacctttgtcttcagctttctgtttaactgcttctttggtttcatcatgtaatctaagggattgcattgcactgagggataacactaacatgatattctggcgagttgataatgcttttggttcctttttacctggagatcctgcaagcatgagtgtggatgggaatgcttatgatcttcgacatatgctgttcgacagtgcagactcatcttccaagactgtctctagaaggcaagatagtagaaatgatttctctcaactagagagatcagaattgacctcaggtcggctatttgatgctgtggcaagctttaaactaatttggtcaaatagtgggacctcttcaccaaaaaagctctcaatatggcgtccaatgttgtctgaaggaatgttttactttggtgacatagctgttaacgggtatgaaccaccaaattcaactgttgttcttcgtgatactggtgaagacacttttctcagagctcctgaaggttttgaccttgttggtcgaattaagaagcaccggggcactgagggtgtatcattttggtttcctaaagctccttcaggttttgtggcattaggatgtgttgcatctaaaagttctccaaccaaagaggacttcagtttgttaagatgtattagaaatgacatggtggctggaggtcaattttctgaggaaagtttatgggattcatctaatgctagaacatctgaaccttttagcttatggactgttgataatgatgctggtacgtttcttgtgagaagtggatatagaaaacctccaaagaggcttgcactgaagcttgcaggtccacctacatcaagcagttcagatagcatcattgttgatgccaaaattaaaacattttctgctgtttcctttgatgattatggcggaatgatggtgccattatttggggtgtcctttgacagtgttggactaagttatcatggaggtcctcatcatcttaatgcaactgtgagcttgtcttttgtggccagatcctataatgacaagtatagctcgtgggagccctttattgaaccaacagatgcatttcttaggtaccaattcgacatgaatacaccaggttctcctagacaactccgtattacctcaactcaagaccttaatttgaacatatctgtttccaatacaaacatgttatcgcaagcttatgctagctggaataatattagctgtggtgatgaattgtataagaaggaaaccttttcttctactgagcgaccagttcttgatgttcatcaaagaagaagttattatgttgtcccacaaaataaacttggacaagatatttatgtaagaactactgaaaatagaggttcacttgttactctgttgccctctggggatgataggtccataaaagttccggctttaagggatctatcagattctcatttaaatggaagatctgttaaaccatatcggttgatgataactgccattcttgcggatgcagaggtcaaggatgatgaaggattagaaactggtgaatatatgactgctgtgcggctcttttcagaaaaccattccatatctgttcaacaacagagtgcccgtacttgtgctgctattggagaacacttgtcacagaacaccagaaaggtgaactggaacgaaatgttctttttcaaagtcgaacgtgtgctatactctagagcttcttgtgcttgatgctggtaaaggtcaaccagttggtatatactctgctccattggagcaagttgtgcaaaagctccctcctacctctaatccggactctgtcaaatttgatttggctttaggagaccttatgtcaactaagacagtggaacaggaaactgttaaacctagtggaaaaataagatttgcggtacttgtttctggtagagctagtgtacaacaagggaacagagccagtcctgaaagcaagactggatatattcagattagcccttcaaaagaagggccatggacaagcatgaagttgaactatgctgtacctgcagcatgttggaggtttggtaattgtgtgattgctagtgaagcaacagtcaaggaaggcaacagatacgttagcatacgttcccttgtgtcagttactaatacaaccaatttcattgttgatttacgtctaaaaggaagaatttctcaaagtgcacgggcagatgaacagggagacagttttggtaaagaggatcaaatcctgattggaacgctggagcccaattctactattccagtcccactatcaggcctctcacatcctcttatgccctatatgttgcagttaaggccggcaaaacatcatgatcatgaaaattactcctggagtgatgtccaggagaggcgcagtcaaaccgagtttagaaaggaggagatcctagatttatgtatatcagatctgtatgaatcggaaaacttgctattctgctcacaggtagatggcacctcgaattcttgtcatggactgtggttttgcttgagcatagaaggcaaggaaataggcaaagatgtacagatggaaccaatatatgattggtgcatcattattaagtccccgttgtgtttgacatactatcttcccattgctgcacattatactgtcagttctagccacctcgataatgaagattcaagttgctcccttggcaccttaagtccgggtgaggctgtaaaggttcacaatgttgatccaagaaaccctttgtacttatccctggttccacatggaggatgggaactgatgcatgagcctgttgttatatcacatccaacccaagcaccttccaaatttatcaatctaagaagctctttatcaggaagattgcctacacttactctgcgtctcattgatatttctggaaggaaagagaagaggcgccttctttcacgttcacatctggaaaggggtgagaagcaactctatgatataaaacacgatgaattggttgagggatacactatagcgtctggattaaattttaagggattaggacttctatcatctgttggacatggtggacggtttggatctgtgaaagaattgtcgcctcttggcgatatggatggagcagttgatctttctgcctatgatgatgatggaaaatgcatgcatattcttctttgttcaaagccatcctcgtatcaagctgttccaacaaaggttatccatgtacgcccgtatataacattcacaaacagggccggacaagatttgtacttaaaacttagtattgaggatgagccaaaggtcttacatgcatatgactggagggtttcctttatgtactccaaggggactactgacaaactgcaggtccgactagtggatacagaatggtgccaacctctggagatagtaaaagaagacactattgttatagcaatgagaaagcagggtggtactcagaaatttgtaaaagctgagatacgtggttatgaggaaggttcaagattcttgattgtattccgtctgggcccagcatatggaccaatcaggattgagaaccggacgagtcataccacaatcagtacttgccagtctggtttaggggaggagagttggatccaagtgaagccacatgcaaccagaaaatattcttgggatgacccatatggacagaaagttattgatgttagcattgataaaggcgatgatacttgtgtcctatgtgttgacctggaaaatcctattggaagttccaccagttttagggaacatggcctcatgtttactgttgataccagtgacattaagatattgaagtttgctgattacataaggaaagaggaagtatatggattgcctggatctgaactgactgatcaccaaggatcgtcattgaaggaaaatgagacagagccaggtgctggacccttggagctcattgttgaacttggagttgttggaatatctttgattgatcataagccaagagagcttttatacttgcatctgcagaaggttttcgtttcatacttgactggttatgattttgggaccactagcaggtttaaattaatccttggcgagttgcaactagataatcagttgccactgtctacaatgcctgttgttttgtctaccgagagcaggcctgattcaaatcgttctgttttcaaagcaaacgttgctgttagcaatgtaacttctaatggcattcaagtttacccacatgtctatatccgggtaactgatcaaacatggagactaaacattcatgaacctattatttgggcactgtttgacttctacagcaatcttcgttttgtcaccaccatcaacagcacaactgtcacggaagtggatcctgagatacgaatagagctcattgatatttcagagataaggctaaaaatatctctggaaactgcgcctagtcaaagacctcgtggtgtcctaggcatatggagccccatcctatctgctgtgggtaatgcactcaagattcaggtgcatctgaggaaggtcatgcacagaagccggtttatgcggaagagctccatcatccctgctatcacgaaccgaatcaagagagatctgattcacaatccgctacatctaatcttttctgtggattttcttggagtaacaaaatcaactttatcatcacttagtaaaggatttgcagagctctctactgatgggcaatttcttcagctgagatcaaagcaggtttggtcaaggagaatcactggtgttggtgatgggctagttcaagggactgaagcatttgctcagggtttggctttcggggtttctggtgttttaagaaagccagttgagagtgccagacagtatggtgttataggtattgcacctggcattggccgtgcttttgtgggtttcattgtccaacctttaagtggggctctggattttttttcactgacggttgatggaatcagtgctagttttatgagatgtgttaacattttaagtaacaaatctgttccgcagaggataagagatcctcgtgctatacatcgtgatggtatagtaagagactatgacaaatttgaagctgctggccagatggccctttatctggcagaagctagcagatattttgcatgcacggatttatttcgagaaccttctaagtacgcatggtctgattactatgaagaccattttattttaccaagccagaggattgctttagtaactaataagcgggtgatgctgcttcagtgcttggatctagataaaatggacaagaaaccttctaaaatactttgggatgttccttgggaagaagtactttcattggagctagcaaaagctgggtatcagaggccttcacatgtaatcatacatctgaagaattttaggaggtcagagaactttgtaaggcttattaagtgcaacattgacaacgaacgggaacctcaggctctttcactttgctgttcaattcggaaaatgtggagatctcaccaagcagcaatgaaagttataccattgaaggttccatcaggccagcgtcatgtgtattttgtgtcagatgatgataaaaaggaatcccacagtttatctaggcctttgctaagctcgggaggaacctctactgatgttgagcaacagttcataaacaatacagttcactttcagaaaatgtggagcagtgaaccagaaattcagagccgatgcaaactagttgccaagcagattgcggatgacggaagggtgttcagcatatggaggcctctctgccctaatgggtatgtctcaattggtgatattgcgcatgttggcatccatccaccgcattttgctgctgtatacaagaatatcaatgggaactttgcactgcctcttggctatgacctggtttggagaaattgtgctgaggattacaagagccctgtatcaatatggcttccaaggccaccggggggatacgtagctcttgggtgtgttgctgtcccttcattcaaggagcccactcttgactgtgctttctgtgtggatgagagactcgcggaggatgccgcgtatgaggagcaaatcatatgggcctcatcggatgcttacccatggggatgctatatctaccaagttcagagcgcctcaatgcagttcatggcacttcgtgtcccaaaagaacaatctgagctaaggcccaagaagatattggagtcatttctgcagcaagcatcagagactcaaacgtcccgtgcatgaagaagctgcacatgatgcttgtgcgtgcaagagaactcggctgggacaaagggcaagtctcgtgcaagaaagctcgaagaatgccacttctttcggatcactccatttctccgttgtcaaagcatacacagaggacagagccttgcatgccaacactcgggttgacggaagtgttgtatactagaatagtaggttaaaggttgtaaatgtaaagttttgtaacgtttgatatagtttttgtccagctacatttgttaaggcccatgtggacgtgggccatattagttgtggctacatattctactaagaagttctcaggactaatcatactttctctaatttaaggttgttaaggcccatgtggacgtgggccatactagttgtggctatatattctactaagggcccgtttggtaaaacttcagctcctgcttctttagcttcagattctgatcctcgtgaggagctgatcctcctgattttcctagaaaatcagaatcatttttaaaaccgtttggcaagtaaactgattcttgtcttctgagggttggtggcc

SEQ ID NO: 8540 - DNA, 7454 bp, Zea Mays
gctcacgcggcacgccgagcaaggggaccgacaggcggagcgcttctcagcccctccgcaccttcgggtctcgcgttggtggcgccggcgggcgctgccgatcgccggcggcggccgagatgttggaggaccaggtcgccttcctgctgcagaagtacctcggcaactacgtccggggcctcagcaaggaggcgctaaagatcagcgtctggagaggtgatgtagagctcacaaacatgcaactgaagccagaagctctcaattcattgaaattacctgttagagtcaaagctggctttcttggttctgtgaagctcaaggttccatggagcaggttgggacaagagccagttttggtttatcttgatcgaatttttatactagctgaaccagcaacacaagttgaaggttgcagcgaggatgctgtccaggaagcaaaaagaagtcgagttagggaaatggagatcaaattgttggagcgccaacagcaactgaaatctgaactaagttcatcatggctagggtctttcattggcactgtaattggaaatatcaagttatccattggcaatattcatatcagatacgaagacgtagagagcaatcctggccacccttttgcagcaggtctggtactttcaaagctttcagcagttacagtggatgaccttggcaaggagacttttgccacaggtggtgatttggaccgagtgaaaaagtctgttgaacttgagagtctggcggtgtattttgactctgatagcagttcttggattgtggataaaccctgggaggatttacttccatcagagtggagtcaggtttttgagtttcaggagcaggatggttccagatctgcttcgaaaaagcatgcctacattttacagcctgtatctggcaaagcaaaatatacaaagatacaacttactgaggcaaagaaaacaggacaagcattgcaaaatactgcagtggatttggatgatgttactctgtcgttgtcgaaggatggctacagggacatgttaaagttggctgataatttctctacattcaatcaacggctgagatatgctcatctccgaccatcttcaccattaaaatcggatccacgagcttggtggaagtatgcatacaaggtggtgactcaggaaatgaagaaagcaagcgggaggctatcttgggagcaattattgagaaatgcaagacttcggaagacatatgtatctttatatgcatccctcttaaaatctgacatgagtcgactggttgttgatgaccatgaggagattaagaggctggaccgtgaacttgatatggaggttattctacagtggaggatgttagctcacaagtttgtagaacagtcggtggaaacataccagtatgctcaacaaaataagaagtcctggtggactggctcttcaaaggatgaggaagattcaaagagttttactgatgaagattgggaaagactaaatcggattattgggtacaaagaaaccaacgagtatgtcactgatcaacaggatatgaaactgatgcaatttgattttgaaatacgtatgaaacataatgcatcaaagcttaccattgatgattcggagtgccttgctgatctctcatgccaagatttctgctgcaacttgaaaatgtatccggaggcaaaaatatttgatctgaagctgggttcctacaggcttttatctccatatggcctgcttgctgagagtgcaagtgtcatcgattcttttgttggcctcttctcctacaaaccttttgatgagcaactggactggagtttgacagctaaagcttcgccttgttatataacttatttaaaggattcagttgatcaaattgttggcttcttcaagagtagccctaccattagccagaacctggcactagagactgctgctgctgtacagatgacactagatgaagtgaaacggactgctcaacagcaaatgactcgggtgctaaaagatcagtccaggttttcactgaacatggatattgctgctccaaaaattaccgttcctaccaagttccgaccagatgatgtacatgagactaagcttttgcttgaccttggaaatttagttcttcggacagaggaaatatgggatgcctatacttcagaagagcaggatatatatctaaactttaatttggtgcttagtgatgtctctgcatttctggtggatggtgattaccattggaatgaaacatctgatgaaaagaacttgttgccagtaattgacaaatgtgggattgctttgaaacttcagcagggtgttggaaaccgggaagctgtttggcaacacagatatttgcgtctagtgggtccatttctctatgtatttgaaaatttaatgtctacaacgtacaagcaatggttcagtttacgcgggaaacaagttcaccagattctggaagacactggtgctttaattttgttgtttgataatgatgagggacgaaagatatggcagaaccgtttacagggtgctatataccgtgcatcgggttctgcaatttctagctttcctggagttgctctcccatcagaggcccactcattcaaaggcaactttcttgatgttgctgacacagagaaattatttgttgcgggcattcttgatgaattaaagatatgtttttcatgtggctatgagagtaaccacaaactaaaaaaaattctactagctaaggagagcagcctgtttgaatttcgggcagttggtggccaggttgaactctcaatgaaaggtggcaatttactgataggaactattttggggtcactagaaattgaagaccagtattactatccagggagtcctgtgccaaggttcttggcaaggtcttttattaatagcatgcaaactcaagaactcccgtctcttagccgaaagaacagtgcaggacctagaaacaccccattgatgaaaaatgacagtgaggaaaactttttcgaagcatcagatgattttgatgaatttgaaacacctatgcatcaaaagaggactatatcagactattttagcacccagaaatttttgcctactagcgttccttccctacagccgccaacatttaagcgcattcctgatttgataccagatactgaacttcaaactggcaaattcacattggaaggtagtggcactttcaatagttttgtgaaagctcagatagtgatttatgatcaacattctccccagtacaacagcttggataacagggtagttgtaactgttgccactttatccttcttttgccatcggccaactgttattgcaatcatggaatttatgaatgccatcaaccttgcaaacgggtctgatactgataaagataaaagcacttatcctgctactgtagaagatagtgcaattgaggaatctaagtctgatctggaatcagagccatcaataaaacccttactggctaaaggtaaaagcagaatagtttttcatcttacatccagcatggcagaggcacagatattactgatgaatgaaaatggtgaccggcttgctactttatcacaaaataatctctcgactgatataaaggtgttcacatcatcattcagcataaaggctgcactcggaaaccttaaaataagtgatgatagccttcttagcagccacccttacttttgggtttgtgatatgcgaaatcctggaggtcgttcatttgtggagatcgactttagttcatacaatgttggtgatgaagactattgtggttatgactatagccttgtagggcagctttcagaagttagaattgtttacctcaaccgttttgttcaagagattatcagttattttatgggacttgtgccaaaaagttctgatgccgttgtaaagctgaaagacaataagactaactcagagaagtgggttagcaaaaccgatatggaaggatcacctgctctcaaattggatgtttcattcagcaggcctataattgttatgccccgtgaaactaatagtaatgactttttggagcttgatgttctatacataacagtccaaaatgaattccaatggataggtggtgataagaatgagatgagcactgttcacttagacattttaacagttacagtacgggacataaatttagttattggtatgaatatggtgcgtggtgaaaccataattcaagatgtagaaggtctctcctttgaacttcgtagatcattgcgtgatttgagacatcagttgccagtggtggaggcagcaattaaggtggatgttttgaaagcaacactatccaatcgagaatatgaaattatttctgaatgtgcattgtctaacttctctgagacaccacatcctgtgcctactctggatgatcctcgatatggcacttccactactccatcccatgtatcagcttcttcttcagaaagtattcatgtcttgtccgaaggtgcagaaacatggatagctaataaattttctgtctcaataaatctggttgagctttctctgcattcaggatcgacaagagattctcctctggcgagcgttcaggcgagtggagcatggcttttctataaatcaaacacacggggagaaaattttatgtatgctactctcaaaggattttctgtttttgatgatcgtgaaggaaccaaagatgagttaaggcttgccattgggaaatcagcatctgttcgggacacatcatctgttgatggctatgataatcctaatgaacttgattcaggtgaacgaagaatacaaaaggatctaggccttgagccaatcccctcgatgcttattcttgatgccatcttccgaaaatcttcgtcatccgtctctgtctgtgttcagcggcccaagtttcttgtggcacttgacttcttactagcagtaatcgaattctttgtgccatctgctcagagtcttctatccaatgatgaagacaaggaccttttacatatgatcactccagtagtattgaatgatcaaatttatttccaggagcattcaacatttagtctttcacctcagaagcccttgattgttgataatgaaagatttgatcacttcgtatatgatgggaagggtggaaagttatatttgctggatagtgaggggaaaattctctcaagcccttgtactgagagtttcattcatgtgcttgggtgtaagagattgcaatttcggaatgtcactatagtgaatggtgaatatttggattcctgtatctctctcggtgatgatagctgttattcagcatcaaggaatgaccatgtctacttagtaagagaagatgatgggtccttgtcaacccccagcaaggaaattagaggagacagtgttaaaaatgggagtgctgatatatcaaccgaatttattatggaactacaggctattggaccagagcttactttctatagtacatcaaggaatgctggtgaaaacttagcactgtcaacaaaggttattcatgcccacacagatgcattttgcaggcttataatgaaaggcgacagtatggagatgaatggaaacatacttggtttaaagatggagagtaatggcatcagagttatagaaccatttgacatggtcgtgaaatattccaatgcgtctggaaagacaaatttgcatctactagtttctgaaatatatatgaatttttccttcagtattctcagactgtttttagcagttgaggaagaaatttcagcatttcttaggatgtcgtcaaagaaaatttcactggtgtgttaccagtttgacaaagttgcaactatgcaaggtaatgctaatgatcaagtgttatctttctggcgaccgcgtgctccatctggatatgccatttttggcgattatctcacaccaatgaacgagcctcctactaaaggagttcttgctctgaacacaaacattgttagggtcaaaaggcctttatcgtacaaactagtgtggcaatctggttctccaagaacaaacatttttcatcagaaggacttggaggataagatctctaatattgaccagctctgctctgtttggttacctgtggcacctgcgggttatgttgcaatgggttgtgttgcttcatctggaactgctgaaccacctttgtcttcagctttctgtttaactgcttctttggtttcatcatgtaatctaagggattgcattgcactgagggataacactaacatgatattctggcgagttgataatgcttttggttcctttttacctggagatcctgcaagcatgagtgtggatgggaatgcttatgatcttcgacatatgctgttcgacagtgcagactcatcttccaagactgtctctagaaggcaagatagtagaaatgatttctctcaactagagagatcagaattgacctcaggtcggctatttgatgctgtggcaagctttaaactaatttggtcaaatagtgggacctcttcaccaaaaaagctctcaatatggcgtccaatgttgtctgaaggaatgttttactttggtgacatagctgttaacgggtatgaaccaccaaattcaactgttgttcttcgtgatactggtgaagacacttttctcagagctcctgaaggttttgaccttgttggtcgaattaagaagcaccggggcactgagggtgtatcattttggtttcctaaagctccttcaggttttgtggcattaggatgtgttgcatctaaaagttctccaaccaaagaggacttcagtttgttaagatgtattagaaatgacatggtggctggaggtcaattttctgaggaaagtttatgggattcatctaatgctagaacatctgaaccttttagcttatggactgttgataatgatgctggtacgtttcttgtgagaagtggatatagaaaacctccaaagaggcttgcactgaagcttgcaggtccacctacatcaagcagttcagatagcatcattgttgatgccaaaattaaaacattttctgctgtttcctttgatgattatggcggaatgatggtgccattatttggggtgtcctttgacagtgttggactaagttatcatggaggtcctcatcatcttaatgcaactatttctgcatgcctaggagatcatgaaaagcaattacgacacccatcatcacgtagtggagttctaggcaggcgaatgggtctaactaataatgctcaggagctgtggacgattgtctgggcggtgggcgctgggcggtctctgtgctgggggacatcttgggtgaaagcctcgacgatggtgacgctcgtggacgttgcttacccggatgaggttgtcgtgtcacattccccaacactatcttctatggacaaaagctcggtccatcgcggacaagcgaccatggcgtccacgacgtcactctccgaaggcttcgttgctgaagttcgtctcagccacgacgtcgccttcagttga

SEQ ID NO: 8541 - DNA, 13095 bp, Zea Mays
gctcacgcggcacgccgagcaaggggaccgacaggcggagcgcttctcagcccctccgcaccttcgggtctcgcgttggtggcgccggcgggcgctgccgatcgccggcggcggccgagatgttggaggaccaggtcgccttcctgctgcagaagtacctcggcaactacgtccggggcctcagcaaggaggcgctaaagatcagcgtctggagaggtgatgtagagctcacaaacatgcaactgaagccagaagctctcaattcattgaaattacctgttagagtcaaagctggctttcttggttctgtgaagctcaaggttccatggagcaggttgggacaagagccagttttggtttatcttgatcgaatttttatactagctgaaccagcaacacaagttgaaggttgcagcgaggatgctgtccaggaagcaaaaagaagtcgagttagggaaatggagatcaaattgttggagcgccaacagcaactgaaatctgaactaagttcatcatggctagggtctttcattggcactgtaattggaaatatcaagttatccattggcaatattcatatcagatacgaagacgtagagagcaatcctggccacccttttgcagcaggtctggtactttcaaagctttcagcagttacagtggatgaccttggcaaggagacttttgccacaggtggtgatttggaccgagtgaaaaagtctgttgaacttgagagtctggcggtgtattttgactctgatagcagttcttggattgtggataaaccctgggaggatttacttccatcagagtggagtcaggtttttgagtttcaggagcaggatggttccagatctgcttcgaaaaagcatgcctacattttacagcctgtatctggcaaagcaaaatatacaaagatacaacttactgaggcaaagaaaacaggacaagcattgcaaaatactgcagtggatttggatgatgttactctgtcgttgtcgaaggatggctacagggacatgttaaagttggctgataatttctctacattcaatcaacggctgagatatgctcatctccgaccatcttcaccattaaaatcggatccacgagcttggtggaagtatgcatacaaggtggtgactcaggaaatgaagaaagcaagcgggaggctatcttgggagcaattattgagaaatgcaagacttcggaagacatatgtatctttatatgcatccctcttaaaatctgacatgagtcgactggttgttgatgaccatgaggagattaagaggctggaccgtgaacttgatatggaggttattctacagtggaggatgttagctcacaagtttgtagaacagtcggtggaaacataccagtatgctcaacaaaataagaagtcctggtggtcatttggatggactggctcttcaaaggatgaggaagattcaaagagttttactgatgaagattgggaaagactaaatcggattattgggtacaaagaaaccaacgagtatgtcactgatcaacaggatatgaaactgatgcaatttgattttgaaatacgtatgaaacataatgcatcaaagcttaccattgatgattcggagtgccttgctgatctctcatgccaagatttctgctgcaacttgaaaatgtatccggaggcaaaaatatttgatctgaagctgggttcctacaggcttttatctccatatggcctgcttgctgagagtgcaagtgtcatcgattcttttgttggcctcttctcctacaaaccttttgatgagcaactggactggagtttgacagctaaagcttcgccttgttatataacttatttaaaggattcagttgatcaaattgttggcttcttcaagagtagccctaccattagccagaacctggcactagagactgctgctgctgtacagatgacactagatgaagtgaaacggactgctcaacagcaaatgactcgggtgctaaaagatcagtccaggttttcactgaacatggatattgctgctccaaaaattaccgttcctaccaagttccgaccagatgatgtacatgagactaagcttttgcttgaccttggaaatttagttcttcggacagaggaaatatgggatgcctatacttcagaagagcaggatatatatctaaactttaatttggtgcttagtgatgtctctgcatttctggtggatggtgattaccattggaatgaaacatctgatgaaaagaacttgttgccagtaattgacaaatgtgggattgctttgaaacttcagcagggtgttggaaaccgggaagctgtttggcaacacagatatttgcgtctagtgggtccatttctctatgtatttgaaaatttaatgtctacaacgtacaagcaatggttcagtttacgcgggaaacaagttcaccagattctggaagacactggtgctttaattttgttgtttgataatgatgagggacgaaagatatggcagaaccgtttacagggtgctatataccgtgcatcgggttctgcaatttctagctttcctggagttgctctcccatcagaggcccactcattcaaaggcaactttcttgatgttgctgacacagagaaattatttgttgcgggcattcttgatgaattaaagatatgtttttcatgtggctatgaggttgaactctcaatgaaaggtggcaatttactgataggaactattttggggtcactagaaattgaagaccagtattactatccagggagtcctgtgccaaggttcttggcaaggtcttttattaatagcatgcaaactcaagaactcccgtctcttagccgaaagaacagtgcaggacctagaaacaccccattgatgaaaaatgacagtgaggaaaactttttcgaagcatcagatgattttgatgaatttgaaacacctatgcatcaaaagaggactatatcagactattttagcacccagaaatttttgcctactagcgttccttccctacagccgccaacatttaagcgcattcctgatttgataccagatactgaacttcaaactggcaaattcacattggaaggtagtggcactttcaatagttttgtgaaagctcagatagtgatttatgatcaacattctccccagtacaacagcttggataacagggtagttgtaactgttgccactttatccttcttttgccatcggccaactgttattgcaatcatggaatttatgaatgccatcaaccttgcaaacgggtctgatactgataaagataaaagcacttatcctgctactgtagaagatagtgcaattgaggaatctaagtctgatctggaatcagagccatcaataaaacccttactggctaaaggtaaaagcagaatagtttttcatcttacatccagcatggcagaggcacagatattactgatgaatgaaaatggtgaccggcttgctactttatcacaaaataatctctcgactgatataaaggtgttcacatcatcattcagcataaaggctgcactcggaaaccttaaaataagtgatgatagccttcttagcagccacccttacttttgggtttgtgatatgcgaaatcctggaggtcgttcatttgtggagatcgactttagttcatacaatgttggtgatgaagactattgtggttatgactatagccttgtagggcagctttcagaagttagaattgtttacctcaaccgttttgttcaagagattatcagttattttatgggacttgtgccaaaaagttctgatgccgttgtaaagctgaaagacaataagactaactcagagaagtgggttagcaaaaccgatatggaaggatcacctgctctcaaattggatgtttcattcagcaggcctataattgttatgccccgtgaaactaatagtaatgactttttggagcttgatgttctatacataacagtccaaaatgaattccaatggataggtggtgataagaatgagatgagcactgttcacttagacattttaacagttacagtacgggacataaatttagttattggtatgaatatggtgcgtggtgaaaccataattcaagatgtagaaggtctctcctttgaacttcgtagatcattgcgtgatttgagacatcagttgccagtggtggaggcagcaattaaggtggatgttttgaaagcaacactatccaatcgagaatatgaaattatttctgaatgtgcattgtctaacttctctgagacaccacatcctgtgcctactctggatgatcctcgatatggcacttccactactccatcccatgtatcagcttcttcttcagaaagtattcatgtcttgtccgaaggtgcagaaacatggatagctaataaattttctgtctcaataaatctggttgagctttctctgcattcaggatcgacaagagattctcctctggcgagcgttcaggcgagtggagcatggcttttctataaatcaaacacacggggagaaaattttatgtatgctactctcaaaggattttctgtttttgatgatcgtgaaggaaccaaagatgagttaaggcttgccattgggaaatcagcatctgttcgggacacatcatctgttgatggctatgataatcctaatgaacttgattcaggtgaacgaagaatacaaaaggatctaggccttgagccaatcccctcgatgcttattcttgatgccatcttccgaaaatcttcgtcatccgtctctgtctgtgttcagcggcccaagtttcttgtggcacttgacttcttactagcagtaatcgaattctttgtgccatctgctcagagtcttctatccaatgatgaagacaaggaccttttacatatgatcactccagtagtattgaatgatcaaatttatttccaggagcattcaacatttagtctttcacctcagaagcccttgattgttgataatgaaagatttgatcacttcgtatatgatgggaagggtggaaagttatatttgctggatagtgaggggaaaattctctcaagcccttgtactgagagtttcattcatgtgcttgggtgtaagagattgcaatttcggaatgtcactatagtgaatggtgaatatttggattcctgtatctctctcggtgatgatagctgttattcagcatcaaggaatgaccatgtctacttagtaagagaagatgatgggtccttgtcaacccccagcaaggaaattagaggagacagtgttaaaaatgggagtgctgatatatcaaccgaatttattatggaactacaggctattggaccagagcttactttctatagtacatcaaggaatgctggtgaaaacttagcactgtcaacaaaggttattcatgcccacacagatgcattttgcaggctgcagatgcagcacgtccagggccagaaccagccaactcgtcgtaacactaagatgatgtgctatcaatggatggctttaaagatccggcacccgacaaacctcttaacaaatcttgtccaagtaactaatgaatcttatttgctaacaaacctgaacaagagccgcttccatggcaccgtgaggatggctctcgttttgtcctcccacgtctcctcccctctcgatgccccctccccacaccagcccacgtcagcgcccactccaaggccggtggccaccgcactagccgccgccgctgcagcttcccctaaccctggcgcgtcatgttccttcccctccttgtcccctcaatccgcgtccctcactgctgggggcgttccaagttcgagtggtgggtggcctcaggcctcagccctactgcctccgttggtgctgcctgcctcccagccttccttcagggatgtggtgtttgcgtcccttgtgccgacgtctgtggagagggcgaagatggttccacggccaacccacccactcgtggaaaaaccctggcgctccatgcagaacgagcctcctactaaaggagttcttgctctgaacacaaacattgttagggtcaaaaggcctttatcgtacaaactagtgtggcaatctggttctccaagaacaaacatttttcatcagaaggacttggaggataagatctctaatattgaccagctctgctctgtttggttacctgtggcacctgcgggttatgttgcaatgggttgtgttgcttcatctggaactgctgaaccacctttgtcttcagctttctgtttaactgcttctttggtttcatcatgtaatctaagggattgcattgcactgagggataacactaacatgatattctggcgagttgataatgcttttggttcctttttacctggagatcctgcaagcatgagtgtggatgggaatgcttatgatcttcgacatatgctgttcgacagtgcagactcatcttccaagactgtctctagaaggcaagatagtagaaatgatttctctcaactagagagatcagaattgacctcaggtcggctatttgatgctgtggcaagctttaaactaatttggtcaaatagtgggacctcttcaccaaaaaagctctcaatatggcgtccaatgttgtctgaaggaatgttttactttggtgacatagctgttaacgggtatgaaccaccaaattcaactgttgttcttcgtgatactggtgaagacacttttctcagagctcctgaaggttttgaccttgttggtcgaattaagaagcaccggggcactgagggtgtatcattttggtttcctaaagctccttcaggttttgtggcattaggatgtgttgcatctaaaagttctccaaccaaagaggacttcagtttgttaagatgtattagaaatgacatggtggctggaggtcaattttctgaggaaagtttatgggattcatctaatgctagaacatctgaaccttttagcttatggactgttgataatgatgctggtacgtttcttgtgagaagtggatatagaaaacctccaaagaggcttgcactgaagcttgcaggtccacctacatcaagcagttcagatagcatcattgttgatgccaaaattaaaacattttctgctgtttcctttgatgattatggcggaatgatggtgccattatttggggtgtcctttgacagtgttggactaagttatcatggaggtcctcatcatcttaatgcaactgtgagcttgtcttttgtggccagatcctataatgacaagtatagctcgtgggagccctttattgaaccaacagatgcatttcttaggtaccaattcgacatgaatacaccaggttctcctagacaactccgtattacctcaactcaagaccttaatttgaacatatctgtttccaatacaaacatgttatcgcaagcttatgctagctggaataatattagctgtggtgatgaattgtataagaaggaaaccttttcttctactgagcgaccagttcttgatgttcatcaaagaagaagttattatgttgtcccacaaaataaacttggacaagatatttatgtaagaactactgaaaatagaggttcacttgttactctgttgccctctggggatgataggtccataaaagttccggctttaagggatctatcagattctcatttaaatggaagatctgttaaaccatatcggttgatgataactgccattcttgcggatgcagaggtcaaggatgatgaaggattagaaactggtgaatatatgactgctgtgcggctcttttcagaaaaccattccatatctgttcaacaacagagtgcccgtacttgtgctgctattggagaacacttgtcacagaacaccagaaaggtgaactggaacgaaatgttctttttcaaagtcgaacgtgtggacagctatactctagagcttcttgtgcttgatgctggtaaaggtcaaccagttggtatatactctgctccattggagcaagttgtgcaaaagctccctcctacctctaatccggactctgtcaaatttgatttggctttaggagaccttatgtcaactaagacagtggaacaggaaactgttaaacctagtggaaaaataagatttgcggtacttgtttctggtagagctagtgtacaacaagggaacagagccagtcctgaaagcaagactggatatattcagattagcccttcaaaagaagggccatggacaagcatgaagttgaactatgctgtacctgcagcatgttggaggtttggtaattgtgtgattgctagtgaagcaacagtcaaggaaggcaacagatacgttagcatacgttcccttgtgtcagttactaatacaaccaatttcattgttgatttacgtctaaaaggaagaatttctcaaagtgcacgggcagatgaacagggagacagttttggtaaagaggatcaaatcctgattggaacgctggagcccaattctactattccagtcccactatcaggcctctcacatcctcttatgccctatatgttgcagttaaggccggcaaaacatcatgatcatgaaaattactcctggagtgatgtccaggagaggcgcagtcaaaccgagtttagaaaggaggagatcctagatttatgtatatcagatctgtatgaatcggaaaacttgctattctgctcacaggtagatggcacctcgaattcttgtcatggactgtggttttgcttgagcatagaaggcaaggaaataggcaaagatgtacagatggaaccaatatatgattggtgcatcattattaagtccccgttgtgtttgacatactatcttcccattgctgcacattatactgtcagttctagccacctcgataatgaagattcaagttgctcccttggcaccttaagtccgggtgaggctgtaaaggttcacaatgttgatccaagaaaccctttgtacttatccctggttccacatggaggatgggaactgatgcatgagcctgttgttatatcacatccaacccaagcaccttccaaatttatcaatctaagaagctctttatcaggaagggttgtacagattctgcttgaacaaagcagtgatagtgactatttgatggcaaggcttatcagaatatatgttccctattggatatctttttctagattgcctacacttactctgcgtctcattgatatttctggaaggaaagagaagaggcgccttctttcacgttcacatctggaaaggggtgagaagcaactctatgatataaaacacgatgaattggttgagggatacactatagcgtctggattaaattttaagggattaggacttctatcatctgttggacatggtggacggtttggatctgtgaaagaattgtcgcctcttggcgatatggatggagcagttgatctttctgcctatgatgatgatggaaaatgcatgcatattcttctttgttcaaagccatcctcgtatcaagctgttccaacaaaggttatccatgtacgcccgtatataacattcacaaacagggccggacaagatttgtacttaaaacttagtattgaggatgagccaaaggtcttacatgcatatgactggagggtttcctttatgtactccaaggggactactgacaaactgcaggtccgactagtggatacagaatggtgccaacctctggagatagtaaaagaagacactattgttatagcaatgagaaagcagggtggtactcagaaatttgtaaaagctgagatacgtggttatgaggaaggttcaagattcttgattgtattccgtctgggcccagcatatggaccaatcaggattgagaaccggacgagtcataccacaatcagtacttgccagtctggtttaggggaggagagttggatccaagtgaagccacatgcaaccagaaaatattcttgggatgacccatatggacagaaagttattgatgttagcattgataaaggcgatgatacttgtgtcctatgtgttgacctggaaaatcctattggaagttccaccagttttagggaacatggcctcatgtttactgttgataccagtgacattaagatattgaagtttgctgattacataaggaaagaggaagtatatggattgcctggatctgaactgactgatcaccaaggatcgtcattgaaggaaaatgagacagagccaggtgctggacccttggagctcattgttgaacttggagttgttggaatatctttgattgatcataagccaagagagcttttatacttgcatctgcagaaggttttcgtttcatacttgactggttatgattttgggaccactagcaggtttaaattaatccttggcgagttgcaactagataatcagttgccactgtctacaatgcctgttgttttgtctaccgagagcaggcctgattcaaatcgttctgttttcaaagcaaacgttgctgttagcaatgtaacttctaatggcattcaagtttacccacatgtctatatccgggtaactgatcaaacatggagactaaacattcatgaacctattatttgggcactgtttgacttctacagcaatcttcgttttgtcaccaccatcaacagcacaactgtcacggaagtggatcctgagatacgaatagagctcattgatatttcagagataaggctaaaaatatctctggaaactgcgcctagtcaaagacctcgtggtgtcctaggcatatggagccccatcctatctgctgtgggtaatgcactcaagattcaggtgcatctgaggaaggtcatgcacagaagccggtttatgcggaagagctccatcatccctgctatcacgaaccgaatcaagagagatctgattcacaatccgctacatctaatcttttctgtggattttcttggagtaacaaaatcaactttatcatcacttagtaaaggatttgcagagctctctactgatgggcaatttcttcagctgagatcaaagcaggtttggtcaaggagaatcactggtgttggtgatgggctagttcaagggactgaagcatttgctcagggtttggctttcggggtttctggtgttttaagaaagccagttgagagtgccagacagtatggtgttataggtattgcacctggcattggccgtgcttttgtgggtttcattgtccaacctttaagtggggctctggattttttttcactgacggttgatggaatcagtgctagttttatgagatgtgttaacattttaagtaacaaatctgttccgcagaggataagagatcctcgtgctatacatcgtgatggtatagtaagagactatgacaaatttgaagctgctggccagatggccctttatctggcagaagctagcagatattttgcatgcacggatttatttcgagaaccttctaagtacgcatggtctgattactatgaagaccattttattttaccaagccagaggattgctttagtaactaataagcgggtgatgctgcttcagtgcttggatctagataaaatggacaagaaaccttctaaaatactttgggatgttccttgggaagaagtactttcattggagctagcaaaagctgggtatcagaggccttcacatgtaatcatacatctgaagaattttaggaggtcagagaactttgtaaggcttattaagtgcaacattgacaacgaacgggaacctcaggctctttcactttgctgttcaattcggaaaatgtggagatctcaccaagcagcaatgaaagttataccattgaaggttccatcaggccagcgtcatgtgtattttgtgtcagatgatgataaaaaggaatcccacagtttatctaggcctttgctaagctcgggaggaacctctactgatgttgagcaacagttcataaacaatacagttcactttcagaaaatgtggagcagtgaaccagaaattcagagccgatgcaaactagttgccaagcagattgcggatgacggaagggtgttcagcatatggaggcctctctgccctaatgggtatgtctcaattggtgatattgcgcatgttggcatccatccaccgcattttgctgctgtatacaagaatatcaatgggaactttgcactgcctcttggctatgacctggtttggagaaattgtgctgaggattacaagagccctgtatcaatatggcttccaaggccaccggggggatacgtagctcttgggtgtgttgctgtcccttcattcaaggagcccactcttgactgtgctttctgtgtggatgagagactcgcggaggatgccgcgtatgaggagcaaatcatatgggcctcatcggatgcttacccatggggatgctatatctaccaagttcagagcgcctcaatgcagttcatggcacttcgtgtcccaaaagaacaatctgagctaaggcccaagaagatattggagtcatttctgcagcaagcatcagagactcaaacgtcccgtgcatgaagaagctgcacatgatgcttgtgcgtgcaagagaactcggctgggacaaagggcaagtctcgtgcaagaaagctcgaagaatgccacttctttcggatcactccatttctccgttgtcaaagcatacacagaggacagagccttgcatgccaacactcgggttgacggaagtgttgtatactagaatagtaggttaaaggttgtaaatgtaaagttttgtaacgtttgatatagtttttgtccagctacatttgttaaggcccatgtggacgtgggccatattagttgtggctacatattctactaagaagttctcaggactaatcatactttctctaatttaaggttgttaaggcccatgtggacgtgggccatactagttgtggctatatattctactaagggcccgtttggtaaaacttcagctcctgcttctttagcttcagattctgatcctcgtgaggagctgatcctcctgattttcctagaaaatcagaatcatttttaaaaccgtttggcaagtaaactgattcttgtcttctgagggttggtggcc

SEQ ID NO: 8542 - DNA, 13262 bp, Zea Mays
agcgagggcattcccggcaagtcgctccacctgcttgttctagcgatctcctccgcctccctggtccctggtccctactcccatttctcctcgactcgtccaagacaaggaaagtaggaaaccgcctgccctgcgtgtgggctgtctgctgtgttgctagcccagtactttctcttctcgctcacgcggcacgccgagcaaggggaccgacaggcggagcgcttctcagcccctccgcaccttcgggtctcgcgttggtggcgccggcgggcgctgccgatcgccggcggcggccgagatgttggaggaccaggtcgccttcctgctgcagaagtacctcggcaactacgtccggggcctcagcaaggaggcgctaaagatcagcgtctggagaggtgatgtagagctcacaaacatgcaactgaagccagaagctctcaattcattgaaattacctgttagagtcaaagctggctttcttggttctgtgaagctcaaggttccatggagcaggttgggacaagagccagttttggtttatcttgatcgaatttttatactagctgaaccagcaacacaagttgaaggttgcagcgaggatgctgtccaggaagcaaaaagaagtcgagttagggaaatggagatcaaattgttggagcgccaacagcaactgaaatctgaactaagttcatcatggctagggtctttcattggcactgtaattggaaatatcaagttatccattggcaatattcatatcagatacgaagacgtagagagcaatcctggccacccttttgcagcaggtctggtactttcaaagctttcagcagttacagtggatgaccttggcaaggagacttttgccacaggtggtgatttggaccgagtgaaaaagtctgttgaacttgagagtctggcggtgtattttgactctgatagcagttcttggattgtggataaaccctgggaggatttacttccatcagagtggagtcaggtttttgagtttcaggagcaggatggttccagatctgcttcgaaaaagcatgcctacattttacagcctgtatctggcaaagcaaaatatacaaagatacaacttactgaggcaaagaaaacaggacaagcattgcaaaatactgcagtggatttggatgatgttactctgtcgttgtcgaaggatggctacagggacatgttaaagttggctgataatttctctacattcaatcaacggctgagatatgctcatctccgaccatcttcaccattaaaatcggatccacgagcttggtggaagtatgcatacaaggtggtgactcaggaaatgaagaaagcaagcgggaggctatcttgggagcaattattgagaaatgcaagacttcggaagacatatgtatctttatatgcatccctcttaaaatctgacatgagtcgactggttgttgatgaccatgaggagattaagaggctggaccgtgaacttgatatggaggttattctacagtggaggatgttagctcacaagtttgtagaacagtcggtggaaacataccagtatgctcaacaaaataagaagtcctggtggtcatttggatggttgattcctggcctataaaaccctattgtttctatgtcgttaaatatgcagcaactaatttgtctttatgtaggactggctcttcaaaggatgaggaagattcaaagagttttactgatgaagattgggaaagactaaatcggattattgggtacaaagaaaccaacgagtatgtcactgatcaacaggatatgaaactgatgcaatttgattttgaaatacgtatgaaacataatgcatcaaagcttaccattgatgattcggagtgccttgctgatctctcatgccaagatttctgctgcaacttgaaaatgtatccggaggcaaaaatatttgatctgaagctgggttcctacaggcttttatctccatatggcctgcttgctgagagtgcaagtgtcatcgattcttttgttggcctcttctcctacaaaccttttgatgagcaactggactggagtttgacagctaaagcttcgccttgttatataacttatttaaaggattcagttgatcaaattgttggcttcttcaagagtagccctaccattagccagaacctggcactagagactgctgctgctgtacagatgacactagatgaagtgaaacggactgctcaacagcaaatgactcgggtgctaaaagatcagtccaggttttcactgaacatggatattgctgctccaaaaattaccgttcctaccaagttccgaccagatgatgtacatgagactaagcttttgcttgaccttggaaatttagttcttcggacagaggaaatatgggatgcctatacttcagaagagcaggatatatatctaaactttaatttggtgcttagtgatgtctctgcatttctggtggatggtgattaccattggaatgaaacatctgatgaaaagaacttgttgccagtaattgacaaatgtgggattgctttgaaacttcagcagttagaaagtcctctatatccttccacaagaatggcgatacgggtgccttccctaggatttcatttctctcctgcacgctatcatcgtttaatggaaattttaaaattttttcaagatggtgctagtgataatagcaattcagatcatgaacacttgtgggatcatgctgactttgaaggatggtcatctcttctcacatggaagggtgttggaaaccgggaagctgtttggcaacacagatatttgcgtctagtgggtccatttctctatgtatttgaaaatttaatgtctacaacgtacaagcaatggttcagtttacgcgggaaacaagttcaccagattctggaagacactggtgctttaattttgttgtttgataatgatgagggacgaaagatatggcagaaccgtttacagggtgctatataccgtgcatcgggttctgcaatttctagctttcctggagttgctctcccatcagaggcccactcattcaaaggcaactttcttgatgttgctgacacagagaaattatttgttgcgggcattcttgatgaattaaagatatgtttttcatgtggctatgagagtaaccacaaactaaaaaaaattctactagctaaggagagcagcctgtttgaatttcgggcagttggtggccaggttgaactctcaatgaaaggtggcaatttactgataggaactattttggggtcactagaaattgaagaccagtattactatccagggagtcctgtgccaaggttcttggcaaggtcttttattaatagcatgcaaactcaagaactcccgtctcttagccgaaagaacagtgcaggacctagaaacaccccattgatgaaaaatgacagtgaggaaaactttttcgaagcatcagatgattttgatgaatttgaaacacctatgcatcaaaagaggactatatcagactattttagcacccagaaatttttgcctactagcgttccttccctacagccgccaacatttaagcgcattcctgatttgataccagatactgaacttcaaactggcaaattcacattggaaggtagtggcactttcaatagttttgtgaaagctcagatagtgatttatgatcaacattctccccagtacaacagcttggataacagggtagttgtaactgttgccactttatccttcttttgccatcggccaactgttattgcaatcatggaatttatgaatgccatcaaccttgcaaacgggtctgatactgataaagataaaagcacttatcctgctactgtagaagatagtgcaattgaggaatctaagtctgatctggaatcagagccatcaataaaacccttactggctaaaggtaaaagcagaatagtttttcatcttacatccagcatggcagaggcacagatattactgatgaatgaaaatggtgaccggcttgctactttatcacaaaataatctctcgactgatataaaggtgttcacatcatcattcagcataaaggctgcactcggaaaccttaaaataagtgatgatagccttcttagcagccacccttacttttgggtttgtgatatgcgaaatcctggaggtcgttcatttgtggagatcgactttagttcatacaatgttggtgatgaagactattgtggttatgactatagccttgtagggcagctttcagaagttagaattgtttacctcaaccgttttgttcaagagattatcagttattttatgggacttgtgccaaaaagttctgatgccgttgtaaagctgaaagacaataagactaactcagagaagtgggttagcaaaaccgatatggaaggatcacctgctctcaaattggatgtttcattcagcaggcctataattgttatgccccgtgaaactaatagtaatgactttttggagcttgatgttctatacataacagtccaaaatgaattccaatggataggtggtgataagaatgagatgagcactgttcacttagacattttaacagttacagtacgggacataaatttagttattggtatgaatatggtgcgtggtgaaaccataattcaagatgtagaaggtctctcctttgaacttcgtagatcattgcgtgatttgagacatcagttgccagtggtggaggcagcaattaaggtggatgttttgaaagcaacactatccaatcgagaatatgaaattatttctgaatgtgcattgtctaacttctctgagacaccacatcctgtgcctactctggatgatcctcgatatggcacttccactactccatcccatgtatcagcttcttcttcagaaagtattcatgtcttgtccgaaggtgcagaaacatggatagctaataaattttctgtctcaataaatctggttgagctttctctgcattcaggatcgacaagagattctcctctggcgagcgttcaggcgagtggagcatggcttttctataaatcaaacacacggggagaaaattttatgtatgctactctcaaaggattttctgtttttgatgatcgtgaaggaaccaaagatgagttaaggcttgccattgggaaatcagcatctgttcgggacacatcatctgttgatggctatgataatcctaatgaacttgattcagagtcttctatccaatgatgaagacaaggaccttttacatatgatcactccagtagtattgaatgatcaaatttatttccaggagcattcaacatttagtctttcacctcagaagcccttgattgttgataatgaaagatttgatcacttcgtatatgatgggaagggtggaaagttatatttgctggatagtgaggggaaaattctctcaagcccttgtactgagagtttcattcatgtgcttgggtgtaagagattgcaatttcggaatgtcactatagtgaatggtgaatatttggattcctgtatctctctcggtgatgatagctgttattcagcatcaaggaatgaccatgtctacttagtaagagaagatgatgggtccttgtcaacccccagcaaggaaattagaggagacagtgttaaaaatgggagtgctgatatatcaaccgaatttattatggaactacaggctattggaccagagcttactttctatagtacatcaaggaatgctggtgaaaacttagcactgtcaacaaaggttattcatgcccacacagatgcattttgcaggcttataatgaaaggcgacagtatggagatgaatggaaacatacttggtttaaagatggagagtaatggcatcagagttatagaaccatttgacatggtcgtgaaatattccaatgcgtctggaaagacaaatttgcatctactagtttctgaaatatatatgaatttttccttcagtattctcagactgtttttagcagttgaggaagaaatttcagcatttcttaggatgtcgtcaaagaaaatttcactggtgtgttaccagtttgacaaagttgcaactatgcaaggtaatgctaatgatcaagtgttatctttctggcgaccgcgtgctccatctggatatgccatttttggcgattatctcacaccaatgaacgagcctcctactaaaggagttcttgctctgaacacaaacattgttagggtcaaaaggcctttatcgtacaaactagtgtggcaatctggttctccaagaacaaacatttttcatcagaaggacttggaggataagatctctaatattgaccagctctgctctgtttggttacctgtggcacctgcgggttatgttgcaatgggttgtgttgcttcatctggaactgctgaaccacctttgtcttcagctttctgtttaactgcttctttggtttcatcatgtaatctaagggattgcattgcactgagggataacactaacatgatattctggcgagttgataatgcttttggttcctttttacctggagatcctgcaagcatgagtgtggatgggaatgcttatgatcttcgacatatgctgttcgacagtgcagactcatcttccaagactgtctctagaaggcaagatagtagaaatgatttctctcaactagagagatcagaattgacctcaggtcggctatttgatgctgtggcaagctttaaactaatttggtcaaatagtgggacctcttcaccaaaaaagctctcaatatggcgtccaatgttgtctgaaggaatgttttactttggtgacatagctgttaacgggtatgaaccaccaaattcaactgttgttcttcgtgatactggtgaagacacttttctcagagctcctgaaggttttgaccttgttggtcgaattaagaagcaccggggcactgagggtgtatcattttggtttcctaaagctccttcaggttttgtggcattaggatgtgttgcatctaaaagttctccaaccaaagaggacttcagtttgttaagatgtattagaaatgacatggtggctggaggtcaattttctgaggaaagtttatgggattcatctaatgctagaacatctgaaccttttagcttatggactgttgataatgatgctggtacgtttcttgtgagaagtggatatagaaaacctccaaagaggcttgcactgaagcttgcaggtccacctacatcaagcagttcagatagcatcattgttgatgccaaaattaaaacattttctgctgtttcctttgatgattatggcggaatgtattctatgcagatggtgccattatttggggtgtcctttgacagtgttggactaagttatcatggaggtcctcatcatcttaatgcaactgtgagcttgtcttttgtggccagatcctataatgacaagtatagctcgtgggagccctttattgaaccaacagatgcatttcttaggtaccaattcgacatgaatacaccaggttctcctagacaactccgtattacctcaactcaagaccttaatttgaacatatctgtttccaatacaaacatgttatcgcaagcttatgctagctggaataatattagctgtggtgatgaattgtataagaaggaaaccttttcttctactgagcgaccagttcttgatgttcatcaaagaagaagttattatgttgtcccacaaaataaacttggacaagatatttatgtaagaactactgaaaatagaggttcacttgttactctgttgccctctggggatgataggtccataaaagttccggctttaagggatctatcagattctcatttaaatggaagatctgttaaaccatatcggttgatgataactgccattcttgcggatgcagagcttaagcttttgggttctctcaacagcttaagcttttgggttgaactggctagtgtgtccactctaacatggttcccatcccaggtcaaggatgatgaaggattagaaactggtgaatatatgactgctgtgcggctcttttcagaaaaccattccatatctgttcaacaacagagtgcccgtacttgtgctgctattggagaacacttgtcacagaacaccagaaaggtgaactggaacgaaatgttctttttcaaagtcgaacgtgtggacagctatactctagagcttcttgtgcttgatgctggtaaaggtcaaccagttggtatatactctgctccattggagcaagttgtgcaaaagctccctcctacctctaatccggactctgtcaaatttgatttggctttaggagaccttatgtcaactaagacagtggaacaggaaactgttaaacctagtggaaaaataagatttgcggtacttgtttctggtagagctagtgtacaacaagggaacagagccagtcctgaaagcaagactggatatattcagattagcccttcaaaagaagggccatggacaagcatgaagttgaactatgctgtacctgcagcatgttggaggtttggtaattgtgtgattgctagtgaagcaacagtcaaggaaggcaacagatacgttagcatacgttcccttgtgtcagttactaatacaaccaatttcattgttgatttacgtctaaaaggaagaatttctcaaagtgcacgggcagatgaacagggagacagttttggtaaagaggatcaaatcctgattggaacgctggagcccaattctactattccagtcccactatcaggcctctcacatcctcttatgccctatatgttgcagttaaggccggcaaaacatcatgatcatgaaaattactcctggagtgatgtccaggagaggcgcagtcaaaccgagtttagaaaggaggagatcctagatttatgtatatcagatctgtatgaatcggaaaacttgctattctgctcacaggtagatggcacctcgaattcttgtcatggactgtggttttgcttgagcatagaaggcaaggaaataggcaaagatgtacagatggaaccaatatatgattggtgcatcattattaagtccccgttgtgtttgacatactatcttcccattgctgcacattatactgtcagttctagccacctcgataatgaagattcaagttgctcccttggcaccttaagtccgggtgaggctgtaaaggttcacaatgttgatccaagaaaccctttgtacttatccctggttccacatggaggatgggaactgatgcatgagcctgttgttatatcacatccaacccaagcaccttccaaatttatcaatctaagaagctctttatcaggaagattgcctacacttactctgcgtctcattgatatttctggaaggaaagagaagaggcgccttctttcacgttcacatctggaaaggggtgagaagcaactctatgatataaaacacgatgaattggttgagggatacactatagcgtctggattaaattttaagggattaggacttctatcatctgttggacatggtggacggtttggatctgtgaaagaattgtcgcctcttggcgatatggatggagcagttgatctttctgcctatgatgatgatggaaaatgcatgcatattcttctttgttcaaagccatcctcgtatcaagctgttccaacaaaggttatccatgtacgcccgtatataacattcacaaacagggccggacaagatttgtacttaaaacttagtattgaggatgagccaaaggtcttacatgcatatgactggagggtttcctttatgtactccaaggggactactgacaaactgcaggtccgactagtggatacagaatggtgccaacctctggagatagtaaaagaagacactattgttatagcaatgagaaagcagggtggtactcagaaatttgtaaaagctgagatacgtggttatgaggaaggttcaagattcttgattgtattccgtctgggcccagcatatggaccaatcaggattgagaaccggacgagtcataccacaatcagtacttgccagtctggtttaggggaggagagttggatccaagtgaagccacatgcaaccagaaaatattcttgggatgacccatatggacagaaagttattgatgttagcattgataaaggcgatgatacttgtgtcctatgtgttgacctggaaaatcctattggaagttccaccagttttagggaacatggcctcatgtttactgttgataccagtgacattaagatattgaagtttgctgattacataaggaaagaggaagtatatggattgcctggatctgaactgactgatcaccaaggatcgtcattgaaggaaaatgagacagagccaggtgctggacccttggagctcattgttgaacttggagttgttggaatatctttgattgatcataagccaagagagcttttatacttgcatctgcagaaggttttcgtttcatacttgactggttatgattttgggaccactagcaggtttaaattaatccttggcgagttgcaactagataatcagttgccactgtctacaatgcctgttgttttgtctaccgagagcaggcctgattcaaatcgttctgttttcaaagcaaacgttgctgttagcaatgtaacttctaatggcattcaagtttacccacatgtctatatccgggtaactgatcaaacatggagactaaacattcatgaacctattatttgggcactgtttgacttctacagcaatcttcgttttgtcaccaccatcaacagcacaactgtcacggaagtggatcctgagatacgaatagagctcattgatatttcagagataaggctaaaaatatctctggaaactgcgcctagtcaaagacctcgtggtgtcctaggcatatggagccccatcctatctgctgtgggtaatgcactcaagattcaggtgcatctgaggaaggtcatgcacagaagccggtttatgcggaagagctccatcatccctgctatcacgaaccgaatcaagagagatctgattcacaatccgctacatctaatcttttctgtggattttcttggagtaacaaaatcaactttatcatcacttagtaaaggatttgcagagctctctactgatgggcaatttcttcagctgagatcaaagcaggtttggtcaaggagaatcactggtgttggtgatgggctagttcaagggactgaagcatttgctcagggtttggctttcggggtttctggtgttttaagaaagccagttgagagtgccagacagtatggtgttataggtattgcacctggcattggccgtgcttttgtgggtttcattgtccaacctttaagtggggctctggattttttttcactgacggttgatggaatcagtgctagttttatgagatgtgttaacattttaagtaacaaatctgttccgcagaggataagagatcctcgtgctatacatcgtgatggtatagtaagagactatgacaaatttgaagctgctggccagatggccctttatctggcagaagctagcagatattttgcatgcacggatttatttcgagaaccttctaagtacgcatggtctgattactatgaagaccattttattttaccaagccagaggattgctttagtaactaataagcgggtgatgctgcttcagtgcttggatctagataaaatggacaagaaaccttctaaaatactttgggatgttccttgggaagaagtactttcattggagctagcaaaagctgggtatcagaggccttcacatgtaatcatacatctgaagaattttaggaggtcagagaactttgtaaggcttattaagtgcaacattgacaacgaacgggaacctcaggctctttcactttgctgttcaattcggaaaatgtggagatctcaccaagcagcaatgaaagttataccattgaaggttccatcaggccagcgtcatgtgtattttgtgtcagatgatgataaaaaggaatcccacagtttatctaggcctttgctaagctcgggaggaacctctactgatgttgagcaacagttcataaacaatacagttcactttcagaaaatgtggagcagtgaaccagaaattcagagccgatgcaaactagttgccaagcagattgcggatgacggaagggtgttcagcatatggaggcctctctgccctaatgggtatgtctcaattggtgatattgcgcatgttggcatccatccaccgcattttgctgctgtatacaagaatatcaatgggaactttgcactgcctcttggctatgacctggtttggagaaattgtgctgaggattacaagagccctgtatcaatatggcttccaaggccaccggggggatacgtagctcttgggtgtgttgctgtcccttcattcaaggagcccactcttgactgtgctttctgtgtggatgagagactcgcggaggatgccgcgtatgaggagcaaatcatatgggcctcatcggatgcttacccatggggatgctatatctaccaagttcagagcgcctcaatgcagttcatggcacttcgtgtcccaaaagaacaatctgagctaaggcccaagaagatattggagtcatttctgcagcaagcatcagagactcaaacgtcccgtgcatgaagaagctgcacatgatgcttgtgcgtgcaagagaactcggctgggacaaagggcaagtctcgtgcaagaaagctcgaagaatgccacttctttcggatcactccatttctccgttgtcaaagcatacacagaggacagagccttgcatgccaacactcgggttgacggaagtgttgtatactagaatagtaggttaaaggttgtaaatgtaaagttttgtaacgtttgatatagtttttgtccagctacatttgttaaggcccatgtggacgtgggccatattagttgtggctacatattctactaagaagttctcaggactaatcatactttctctaatttaaggttgttaaggcccatgtggacgtgggccatactagttgtggctatatattctactaagggcccgtttggtaaaacttcagctcctgcttctttagcttcagattctgatcctcgtgaggagctgatcctcctgattttcctagaaaatcagaatcatttttaaaaccgtttggcaagtaaactgattcttgtcttctgagggttggtggcc

SEQ ID NO: 8543 - DNA, 769 bp, Zea Mays
tgtcgtcgtctctccgattgccataggttcattttttttccatcgtgtcccctaactgggaaaaaataagaaaaggtacaagccatcgcccatgttttattgaacaccatgtatatgtccacgcatatatgaccatgttctacaggttggtttacattgtatatgaccatgttatgttgcatggcagatatgtgaacaccaaaaggggatgcaactgcgaactgtgagaaattttccacatactacgctcacattgtctggggcaatgggatatcatactcatacagtaatactgctgcctgtcgatcttaacaaatttcattcaagaactagggcatgctaatgttcaaaagagttgtcagcgattcatgacacctggtagcactacaaccagcaatgtatggatgaattgaaggaagtaaagaaggcagacaatcttacagaaactttacagaaactctgcatcttgaaactgccatgattgacaaagaagctggatgcatcatgtgcattggtgtcttcttatcaccatgcattaatgtgaagcaagttcatttgttgactaagaatggatgaacacaaatcagtggagttcgttgcactagagatggaggttggagaggtgtggtaggtgtcaatatggctttgatacaattttgccctacaatctttgtacggaacaagaaaaatgacattgtacgtggatactatattgtaattcaataattttttctaaataataaatatatttgtttatagtttgtgtatg

SEQ ID NO: 8544 - DNA, 1996 bp, Zea Mays
ctttttaaacatatcaaatcaatctaatcaaatctgaccaggacaccaggcactgttcacgcgcgaccctgccgcgtggggccctggccgggctcccctgccataacaaacaggatgcgaggtttttcttcaattcgtcgcaagtgctcactgcgcgtgctcgagctcgccacacacacacacacggctacctcctccagctccgggtcgcgtcgcgcgccatggctcttcctaaacattcacagggggcgggggcagaggtggcggcggacggctccacctccacctccacttcgcccgtggaagacgatggcggcacattagatgatctgggacaggggcagcggcagggccatcacgaagaagacaacgacgacgaccatcacttctcctcgtcctcgtccaccgggaataagcataagcagacgagctgcctcctgccagcacgcagcctgagatcaacagatgaagcaagccatagccagcaagcagactgcggggtccgttcgctatccttctccaagatcttgagcttcagaatgtgggcgcccggcggctccagctcccccacctgcttggaggattacattgctggtcagcatcaactagagcacgatgatgatgaggccgacaagctgatgaagcaggtatgtcggtcgcagtccgtgccagctacgagcgtggccaggcggcgatccagcggcaccaccgcaaaagggaaagggtcgaggagagtggcagactccagctccctcaggcgcctcagagtggtgccactgcgtgttcctcttcctcctcctccacctctccaagatgaggccgcaaggggcaccgccgatgctattgctactaccgttaccaccggagaagaggaagaagatcaagacatcgcggctgaggaggcggtgtgccgcatctgcatggtagccctgtcggaggaggcggtgttcaagctggagtgctgctgcaagggcgagctggccttggcgcacagggcgtgcgccatcaagtggttcagcatcaagggcaacggcagctgcgacgtgtgcagccaagaggtgctcaaccttccagtcaccctgcgacgcctcccggaccatccgtccgtcattcaggcggcggcggctctggcacaggcacaggcgcaggcgcaggctcagggcactcaagctgacggtggtggtggcgatcctaccgcaaccaccaacaccaccagatacagggtgtggcacggcacgccaatcctcatcatcgtcagcatgctcgcctacttctgcttcctggaacagctgcttgtcggcgaccatggcacggcggctctggccatctccttgcccttcgcctgcgtccttggcctcttctcctccctatccacaacaaagatggtgtccaggagatacgtatggatctactctgcagcgcagttcctcttcatcgtgctcttcacgcacatcttctacagatacattctcagatggaggcgggcgagacacgctgtggcatcgcccacctcaaccgctagagctgccgacgacggaggcctccatggttccagtcccagggatccaccatcagcaccagtggcagtggcagtgacagtggcggaggtggaccttgagatggctctgcctcctacatatgcaccacctgcccatgcgtagagagagcgctccccttcactatcatccagccgacgagttcactccagctccagctatacatccagtctgtgtgtgtatatatatacagatccactgtttgttttctgagacctcgatgtatactgaaagaaaaagtaaagacagcaaaacagacgcataaaggaatagatttgattatatagctgatttcattcctctaagcacatggacccttgtactacggcctccagacgcccgaatcatcgtagggaaatgggtcttccggggccggtttggaagttgattattttcttttgagaatactgtagtatttaagatactgtggtattttttca

SEQ ID NO: 8545 - DNA, 1036 bp, Zea Mays
atttcttggtggtttatgccagttaatatagcgatcacgttcgtgatcggtggcactctgggctagatagcttgcaacatgttgaagccaccgtagcatttcaggggcttgatcatggccttctgctcagcatgaaacctcggaaacctgctcctgatcattgtcccggatgtatgcgatgaagacgggcctgtttggggatgattcaagcacttgccgctcacgcagtatctcctactcgtccttgtccatggctctaggtggcctcttcatatggacgcacacgtacagcctgatgcagaagtccggcaagctgtaccacaagatgcagtccaaaagcatctagtgcccagccaacagcgatgaggagcatgagcaagcgaaagaagatgggccagctggctacgctgacgaggaggcacctcttccgacgtcactcaagcctcgcgagcatgagcacgagcacggggaagaggaagaacaccaaatggaggcccctctcttgtcctgcgagagcgaggtcgctgacaaggggttctggacgaagccgaaagacgctatccaccagttcatcgaggagttgatggcaccacccaccatgtccgcaataattgggttcgttgttggcctgttcccatggctgaaatccttaatcgtcggtgacggagctcctttcaaagttatgcaggattccctccagctgatgagcgacgacatgatcccttgcatcacccttatcctaggcggaaacctgactcaagggcttcgaaagtcggggctgaagcgggcggtgatcgtcgcgatcctatgcgtccgcttcgtgctcctcccgctgatcggcatcgtcatcgtccgcgccgtgtacgggctcggcttcctgtcccgcgacccgctgtactgctatgtgctgatggtgtcaggatgacatgtcaggttgggatatcctggcgtactttattcaaacagccctcttgcttcaagcaagagaccaagtatcttaagagttaagacttatgttaaatatatttagaaacta

SEQ ID NO: 8546 - DNA, 5582 bp, Zea Mays
tcgccgcctccgaatccccacctctttgctcctccgccatcctcctccgcggccgatgtgtgtgccccgccggcccaaaaccctagaggttacgagcaggtaagggtttcgatcggagatggcggctgcggctgcggcgatggccgcacatagagccagcttcccgctgcgcctgcagcagatccttgctggcagccgcgccgtctcacctgcgatcaagatcgagtctgagccgcctgcaaacatcaaagcatttattgatcgagtagtcaatattccactacatgacattgccataccgctatcaggcttctgttgggagttcaataagggaaatttccaccattggaggcctttatttattcattttgacacctatttcaagacatacatttcttctcggaaggatcttcttttatctgatgatatgaccgaggctgaccctatgccaaagaatgccatcttgaaaatcttaagagttatgcagattattttggagaactgccagaatagaagttcttttactggtcttgcgcatcttaagcttctcctggcatcgtcagaccctgagatagttgtagcagctttggaaactcttgttgccttggtcaaaataaatccttcaaagttgcatatgaatggaaagctaattagctgcggacctataaacacccatcttctatcattggcccaaggatggggcagcaaggaggaaggtcttggcatatattcttgtgttgtggcaaatgaaggaaaccatcaggggggtttgtccttgttccctgtagacttggagaacaaatatggtggcacacaacatcgtcttggttcaactcttcattttgagtataatttgggtcctgcacagtatcctggccaaactagtgacaagggcaagtcatctaatttgtgtgtgatacatattccagacatgcatcttcagaaagaggatgacttgagcatactgaagcaatgtgtagacaagttcaatgtgcccccagagcacagagaatcttgttgagatggctttctctgatcgaaaccatgaaagtagctcctctcgtttggatgctatattccgcagcttgcgaagtggacgtaatggacaccgctttaatatgtggctagatgacggtccacaacgtaatggatctgctgcccctgcagtacctgaaggcattgaagaattgctgatctctcatctgagacggcccactcctcaacctgatggccagagaacacctgttggtggtgctcaagaaaatgaccagcccaaccatggatcagatgctgaggcaagggaagtagcaccagctcagcaaaatgagaacagtgaaagtacactgaatcctctagatctgtcagaatgtgctggccctgcacctcctgatagtgatgcacttcaaagagatgtgtccaatgcaagtgagcttgctacagagatgcagtatgaacgtagtgatgctataacacgtgacgttgaagcagtgagccaagcaagcagtggcagtggtgctactttaggggagagcctcagaagtttagaggttgaaataggaagtgttgaagggcatgatgatggtgaccggcatggaacttcaggcacctcagaacgtttacctttgggtgatattcaagcagctgctcgatcacggaggccatctggaaatgctgtgccagtaagcagtagagatatgtctctggagagtgttagtgaggttcctcaaaatccagaccaagaacctgatcagaatgctagtgaggggaatcaggagcctaccagagcggcaggtgctgactcaattgatcctacatttttggaggctcttcctgaggacttgcgagctgaagttctttcttcacgtcaaaatcaagtaactcagacttctaatgaccaacctcaggatgatggtgatattgatcctgaattccttgctgcacttccccctgatataagagaggaggtgctagctcagcaacgtactcaaaggatgcaacaacaatcacaagaattagaaggacaacctgttgaaatggatgctgtttcaattattgcaacattcccttcagaaatccgggaagaggtgcttttgacatctcctgacacactactagccacactcacgcctgcactagttgctgaggccaacatgttaagggagagatttgctcatcggtatcacagtagctccctttttggtatgaactccaggaacaggagaggtgagtcctcccgacgtgacataatggcagcaggacttgatagaaacacaggtgatccctccagatcaactagcaagccaattgagactgaaggtgctcctcttgtcgatgaagatggccttaaagctcttattcggttacttcgagttgttcagcctctatacaagggtcagctgcagaagctacttgtgaatctttgtactcatcggggtagcagacaggccttggttcaaattctagtggacatgcttatgcttgatctgcaggggttttcaaagaaatcaatagatgcacctgagccaccatttaggttgtatggttgccatgcaaatatcgcatattcacgccctcaatcttcggatggtcttcctccattagtctcacgtcgtgtgctcgaaacgctcacgaacttggcaagaagccatccaaatgttgctaaactcttgctctttcttgaattcccttgcccatcaagatgtttccccgaagcacatgatcataggcatggcaaggctgttctcctagatgatggtgaagaacagaaaacctttgcacttgttcttctgttaaatctgttggatcagccactttatatgagaagtgtagctcatcttgaacagttactaaaccttcttgacgttgtcatgcacaatgctgagaatgaaattaagcaagctaagctagaagcatcatctgagaagccatctgcacctgataatgcagtgcaagatggtaaaaataactccgacatttctgtatcatatggatcagagttgaatcctgaggatggcagcaaagcccctgctgttgacaacagaagtaacttgcaagctgttttgcgaagtcttcctcaaccagagcttagattgctatgttcattgcttgcgcatgatggattgtcggacagcgcttatctccttgtaggtgaagtgttgaaaaagattgtggctcttgcccctttcttctgttgccatttcataaatgagcttgcacgttcaatgcaaaacttgacacttcgtgcaatgaaggagcttcatttgtacgagaattctgaaaaggctcttcttagctcttcatcagccaatggtactgcagttcttagagtagtgcaggctttgagctctcttgtcaatactcttcaagagagaaaggatccagaacagcctgctgaaaaggaccattcggacgcagtttcccagatttctgaaattaacacagcattggattctctgtggttggaattgagcaactgcataagcaagatagaaagctcttcagagtatgcatcaaatctaagtcctgcttctgcaagtgcagctatgttaacaacaggagtagcacctccattgcctgcaggaactcaaaacttattaccatatatagaatcattttttgtgacatgtgagaagttgcgtcctgggcaacctgatgctgtacaagatgcttcaacttctgatatggaagatgcttcgacatctagtggtgggcagagatcatctgcttgtcaagctagtcttgatgaaaagcaaaatgcttttgtgaaattctcagagaagcacagaagattgctgaatgcattcatccgtcaaaactctggattgctggaaaagtcattctcgctgatgttgaaaattcctcgcctgattgattttgacaataaacgtgcatattttcggtctaaaatcaagcatcagtatgatcatcatcatcatagccctgttagaatttctgtgcgtcgtccatatattcttgaggactcctacaatcagcttaggatgcgatctcctcaggatttgaagggtaggctcactgtccaatttcaaggagaagaaggaattgatgctggtgggctgacaagggaatggtaccagtcgatatcacgagtcattgttgacaagagtgcccttctgtttacgacagtcgggaatgatttgacgtttcaaccgaatcctaattctgtgtatcaaactgagcacctctcatacttcaaatttgttggacgagtggttggcaaagctctcttcgatggtcagcttttagatgcccacttcactagatctttctacaaacacatacttggtgtcaaggttacataccatgacattgaagccatcgatccttcgtactacaaaaacttgaaatggatgcttgagaatgacataagtgatgttttggatctcacctttagcatggatgcagacgaagagaaactgatattgtacgagaaggcagaggtatttgctgtgcttgtgtcacaagaatttgtggttttgatcttttctatgttgtaagtcccaagttatctttgcaggtcactgattgtgagttgattcctggagggcgtaacatcagggttactgaggagaataagcatgaatatgtcgaccgggtagcagagcatagattgaccactgccatcaggcctcagattaatgccttcctggaagggtttaatgaactcattccacgggagctgatatctatcttcaacgacaaagagcttgagcttctgattagtggtcttccagatattgacttggacgatttgaaaacaaatacagaatattctggctacagcatagcctctccagtcgtccagtggttctgggaaatcgttcaggggttcagcaaggaagacaaagctcggttcctccagttcgtcactggcacttcaaaggtaccgttggaaggttttagtgaacttcaagggatctctgggccacaaaggtttcagatacacaaggcatacggcagcacgaaccatctgccttcagctcatacttgctttaaccaactagacttgcctgagtacacgtccaaagagcagctccaggagaggttactgttggcaatccacgaagcaaatgaaggtttcggatttggctaatcagtcatgctcgtttgtccgtgagagtctgtacagatactgagcattgcaatgggcgagcagcacgtgtgtgctgatccttaccacattctgaactccacgtgtttgatggccggggagaacatagaagaatctccgtgggagaggtactgatgagagagagcgactattttgtgttcataatattcattacctttttttagcttttttcggtcgttgccccgttcgtagtttttgccttacattggacttcgctccgattttttttctctgcttttccttcatagactggtgtaagatgtaaccgaacactatgtcaaatgcaaatcatcttagggccccttcgattattactgaatggaggcatggaataatttctagccgtactgtttctctactatattaaagcatcagttttagttacacgattgtcctgcatctataaaaaaactaaaattatacataattagct

SEQ ID NO: 8547 - DNA, 6302 bp, Zea Mays
tgaccaagtccatgaaagtccccttcgctttccctttcccgttctcgcgcaaagccacctttcacttttccttgctccgcctctcctgggtccctccctgcccccctttccaactagggtttatcactggccgggctcgtcactgcatagagttccacaagcttcgcggggcgatggtgtcgccgccggcctttgcggcggcggtcgcggtggtggccgtgctgctatgcgcctcggctgccgccaaccccgcaggcgggccccacatggcggacctgagcgtgctgttgcccccgcggatgacaaagcctgtcgagtaccgtctcatcggcggggatggatgcttctcctggtcatgggatcatcatgaccttatttcagttaaaccagagtataatgatagcagcagatgctcgactagtgctcgtttggcatcaattgccccatactctggccggagggagacttctgtctatgcgactgatatcatcagtggaatcacgatacactgcaaagtattcgtagacaagatctcccggatcagtattttccaccatgctgttaaaattgatctagatgaaattgctacattacgtatacatgccttcgatgatgaagaaaatgtgttctcgacattggtgggcttgcagtttttgtggcaccttaccccgaggttggttgataacagtagccatcatcttattcgtattccactgaaagaaacacatttgagtgactgtggtggcttctgcggtgatatgaatattcggtttgagctagaagacaagaatcttggttcagatttctctgtggtgaagggtattgagattggccaagaggttgttaaagctcagttgtttgagcctcagtttgaacatgtgattgacacaatcacattaactgttgctgaatccatgtcactagagccatcatcaccagttctcgtgactgttggtgttttggtgaagtttaaactcaaggtattccgacagaaagttgctcaagtggttaaattaccatcacaatatcatcgctggtatgcgacaaactcttctgtggcccaagtggattccttgggtatcttgcatgcattgagtctagggtttactaaggtggttgttgaagacacaagagtttctggtcatgaacaagtatcatctctacatgttgttattccacggacacttttcctttatctggtccctattatggatgattctgcccatcttcatgggattacaaacattccatcctcaaaagtatggtatgtttatcctggaagaaaatacatggtccttgccaaagcttttgcagagggatttgatgctagggaaatatatattacagaggaaaatgagcttaaactggagagtagtaccatggaattctggaacttatcgcaggtgccagacagttctacaagttcctatgaagtgcaaacttctagattgttaagtcctattttccaggggcaagggcatttagatgcttccttaacttacctaacgggggcatctggaccaacaaaggtgctcaagcttgtgcaagaagttaatgtttgtagtaaggtgaaggcattctgggatgaaggattggagaactccaacgttatttacctgccctgggttcctggagttcaccaggaagttgaaatgatggcaattggagggtgtggtaagacgctggatgactacaagttattttcctctgatgaggatgttgcttctgtgtctgattcccgtatcgtgcgtgcaaaaaagcctggtcaagctgtcatccgagtagtttctgctttcgatttcttgaattttgatgaggtaattgttgaagtttccattccttcagtactgtctatcttgccaatctttcctgtggaggtgcctgttggaacacgacttcattctgctgcagtgttaaaaacatctgctggacacccattctcacaatgtacccattttaatgcttttataaggtggagtctactatccgaggatgaggcctttcacattcttaacaccgctgaggcctcaagcatcgacgacataaaacataattctggttattggggacaaaatggcaatccttgtgcctgggtctctctgagtgcatttgctgctggcagatcaacaatagttgcaacatttgctgttgattcagattcagatattgagacatttggtggacccatttctctggaggcaacttcaaaaatttctgcatattatcctcttgtagttctccaaggggggaatggaaatcattttggtgggtactggtttgacttatctggaattcatagtaggattaagaacatggataacaactctcccaaggagctgtacttagttcctggatcaacaatggatgtccttatcttcggaggacctgagcgttgggaccaagttattgattttgttgaaacagttgatgttattgatccatccaaaaatcatattattagttctaccgctgtgaagaaactatctagtggactatatcgagtatcttgcctaagcaaagtgagctataaattgctgttttcacgtgggaacatggttggtaaagatcatcctgtgcctgcaatttccaaatcagagttcactgttatttgtgacttcccatcagaaataacattgatagcaaatgaaaatgaaaaccgacttgatatattggaagctgctaggaaagctgaccgtggtccagatagattgcaagcatcacccattgtaatctccaacggaagaaatatacgtctagctgctgcgagtatacatgtaaatggaagatttttcgctaattcatcttctcttcgcttgaaatgggaagccactggatgtgaagggcttgcttactttgaagaaaccaaatctgttgaaatgcttgatgagtcagcttgggagagatctcttgtcctacagaattctacaggagtgtgcactgtacgtgctacagttgatgacttttctaccaaatatgctggccaaactcatgaggaagaatacacattccatagtctcacagatgctattcagttgcagattgtttcttctttaagagtcacccctgaatatgtcttattagttttccatcctgaagcacaggttagagttgcaaatgttgactggattaagataacagcagaagagcaaatcagtcttatggaaggaagcacaaaagatttccaaatattagctggcacccaagatggacaaatatttggtgattctcagttcaaatatatggacattgagttgcatcttgacgatgagattctggagcttattggtccaagcgaatcaatggatggacccgaattttcaattaaagctgcaaaaatcggcattacatctctatatgtcagtactaaacaaagctctggacacagagttttaagtcaggttgtcaaggtggaagtgtatggaccattgcaaatacatcctgagtatatttacctcactccaggcgcctcttttgtgctttctgttaaaggtggtccaaaaactggagtttccattgaatactcaagtctgaacatgggaattgtagaagttcaaaataccactgggaaactatctgcaaaatctgtggggaactctactgtacgtgctgctgttttagcaaatggaggtatcttagtctgtgaagcttttggaagagttgaagtggatatcccagtggctatgacattgaatactcaaagtgaacgtctttgtattggctgtagcatgccagtttatccatctctgcctaagggagatctattttccttctatgaaacttgccaaagttacagttggatgatagcagatgagaaggttgtgacattccaatcagctaaatcctggcgatacagacttgaccaaggactatattcagatggaaaaaagagtccatggttttccaatggcagcagcaaattttttatcagtcatatgcttggaaggtctgctggcaaaaccaaaatttccatttcagttgtttgtgatttcttgctacctggcacctctggatctgttgtatcatacaatgcctccaagatcattcttgtggttccagatcctccccttgcacttgcgctaccgatgacttggttattcccacccttctataccactatgagccttttgcctagatcagcaaattcccttggggaaccaaactcacttgacctggagagctccgttgggtattctctgctaaggggcaatggtaggataattgatggaagtaaaattcagactggagaaagcaatacagttgattgtattcaagcaaaagatcactcagctgggagaacggaaatagcagcatgtctacgagttgctcaggttgcacaagtgcgggtagctgctgcagaatcatcaatccagattgtctatctatctgtaaacgataaagttgaattggatataaaatatgctgatgaattaggttatattttcaacgaagctcatggagtagtccctgtaaagattgagacaaattatccagatgttgtttcggttctcatgccaagagattttaatggtacatatgacacacgtgaacgttttgttcttcaggcgagaagtcatggaacagctcttgtaaggctccacacaaacaatgtccctaacaaagtggatttcataatggtatccgtaggagcacaaatatatcctagggatgtgatccttcattctggccagcacctgaacttcactgttatcggagacagtatggacatgtgtggacatggtcactggttaagtagcaatgggaagatcgtccacatcaatcgggtaactggtgaagcacaagcacgtagtgaaggtgtagcggaagtaatcttcaaaggttcaaattttaagctgcaaacaactatcactgttctcaaggtgaaccagatagttgttgatgctcctgcggagacactgactaatgcagctggcctgccggatggatacatgttttctgtgagatttagtgattcaattgagcacagtattggatcctctgcgagcccaattaatgtcccctttgaatgcaaggttgacccttcttttgttgggtttgttgagccatggactgagcatgccacaaagaaatcctactgcctgtttcatccatattcacctgcacaactgttgcccgtgaagttggaccctaatgaaggaactttacacattttagttcgtgcaaatctaaaggaagacccaaaggtgaccggatctgcacatgctctttttgtcaaagggttttacataaaagaacctgggaaattaaatctgactccaagttgcaatcatagtgtcattactatcgatggaaatactgatattgagttgttctggaatgctaaagatttactcagagtcagtcgtgttgacacaaatgagaacaatggtgttcttagtcgagttgtttaccgggttgaagcgctaaaaaggctatcgttctctgacaaggttactatcgttcttcctgccactggtcaaactgaagaagttgaagtcagctacgatacaggagaggaggcagagtcaccatcatcatggggcctaaccacaactgctgttatgctcacatgcatcattgtgacaatagtcactgttgcacttttcattaagttgctgcagagacctatcagacaggcaccatcagggagcatgacagcatccacaccagcacgagcaccagcagccgatcccgcagccatggctgatcctgcatccccggctaatggtcagttctctcctcgtacaccccagcctttcatggagtacgtgaggaggaccattgatgacacaccgtactataagcgtgatgccaggaggcgattcaacccgcagaacacctactgagcatgcgtggcagcgtgtagtgtggactggttggtctgttgtaacgttcctgatttaggtccgcagttggtttagaaccacagttgtagttcttgcacgagtatgcccttgctgtgagaatgctgtaaaatttgtggttctagcagcacgtgcggtgaggggtggacatctattttggtagaagcctgttgtttgccattttgccaacaggtataggacatctgttttgttagaagcatgttgtttgacatttcgccatagatataggacatcaattttgttagaaccctgtcgttaattcttggcatgtaattttaggtctgtacattggagtacgggacaaccaaacccttggtttagacaactgttttagctcaattgctgcagatacttgagttttgttggcctgatttagtttatttattctacaagcagtagtgagtggtcacagtcctagtt

SEQ ID NO: 8548 - DNA, 2034 bp, Zea Mays
ccggttttgtttgacgatagttgagtagacccctggcaatccacccttgcacggttcttttaggttttttgttcgtcatttgcagctgccattctgcctaaattgtttaagcgaacctcctccggggctctctttgttgaagttcgccacggtggcccatgtcagtgtgatgtaaggttggagttggagctgcaatgacataaaacatagaagccttgatgcatgattgaatacgaaaacaatgagcaggcgcaacagccgtaccatctatgtaggcaatctccctggggacatccgtgagagggaggttgaggatctcttctacaagtatggccgtattttggatattgacttgaaaatacctccgagacctcctggatacgcattcgttgagtttgaggatccacgtgatgctgatgatgcaatttatggccgtgatgggtataactttgatggctacaggttgagggttgaattagctcatggtggcagaggccagtcttattcttatgatcgttcaagcagctatagcagtgcatgccgtggaggtgtttctaggcgctctgatttccgtgttatggtcactggtttaccctcatcggcatcgtggcaagatctgaaggaccacatgcggcgcgctggtgatgtctgtttctctgatgtataccgtgaggctggagaaactattggaattgtggattatacaaattatgacgatatgaaatacgcgattaggaagcttgatgactcacagttcaggaatgcattttcaagagcatatatcagggtgagggagtatgatgctagatcacgaagcagaagccgtagccactcgtactctagaagccccagctacagcaggagcaggagtccaaaatctgtttctcagtcaccctcatctgtggatgaaaggtatgtgaatctatgtcatttagaaatgtacatttgtgaaactgagagtgctaatattgttcgaaggaacccgattgtcaaataaatggtgaaagcaatcagatcttgttgtgaatcatcattgatgtattctgcactacacctatggcgctaaaaatatttgaatatgacatgtcatcattttgtatacaagcttaaagcagggccatggtggatgtaacaactgataggagattgcacattaacttaattatttcctactatctgatacactttcgtcaaacaacgaaatgcctttccagagctgagactgccttatacaaacttctacaaatacagcttaagtttttaagtgtgtgctctaccctaaccttatagaacatgctgaaggtttggctcacaaacttctagataaatctttcaatgtcgtagcagggagtattagatccatcagaagcttgccaaattgagagggtatataaagaggtgttaccagaactttccttctttcaaaacaatagttttgtcgccttttcctgtcgtatcagtcgtctacatagcatgccaaaacccctctgtttctttttcctcatggaaaagcttcagtccccttcttatttatcaacttcatacaacattaacccatagttatcatggcagcgcgtaggcgctgactaggcatccaagcggtcggcagtggatgccatgcctcgtcgcctcgcctgaacccagttaggcgatggtaagacatctcctagaagcccacctagctgttgaactaggctttaatgggtctgccttgtgcactatacgcccagtttcctcttctttcctctgctgccaccaccgttagagccgctagatcgctcacgccggctgcctgccgcgtgcctgtgccgcgcgcccgcgtggcctacacagtgcaccgcccacaagtcgcctacaccagcgttgctcgtgcgtcgtgccgcctgagctcgaccatggatgcttgctacttgctggatttatatttatttgctagtttttcatatatcatgtgatatatgactatatgttgcatttttgctgctggagaaaagggcgtcttggcagcacctaggcggttgtctagaacctagg

SEQ ID NO: 8549 - DNA, 4171 bp, Zea Mays
gcggggcctttcttctctacgcacacacacagcggccgtagccggaggaatccgccggcacgagacgtaaactgaggcggagcccgcggcggctgatcggggaatacatcgctgtccgcctgtcccgcgtccggcggctggtcccagccgcgacgacctggggcctcatgttctccgcagctcgccgcctcctcacgtcccgcgcccgctcccgcgccctggcggcggccacgccctacccccactccgctgtggcgtccccgtcgtgccctcgctttccgacgcccaaggagatccgcaggggcttggacgagttcgtagttggccaggacaaggccaagaaggtgctctctgttgctgtgcacaatcactacaagaggatatacaacgagtcatcaaataagtgttctgtgaaaagctgggtgcgtggtggtgtcgctacgaacagtgatgatgtcattgagcttgaaaagagtaacatccttctgattgggccgacagggtcaggacaggtaaaacactgttagcaaaaacgttagctcggtatgtgaatgtgccattcgtgattgctgatgcaacagcaattacacaggctggatattctggtgaagatgtggaatctgtaatctacaaacttctagtggctgctgacttcaatattgaagctgcagagcatggtattgtgtacattgacgaagttgataagctcacaaagaaggctgactgccgcaaggatcgaagggatgtatctggagagggtgtgcagcaagcgttgctaaaaatatttgaaggaacaatcatcagcgtgccaggaaaaagaagtcgagaaaatataccccagggttatgttgaggtcgatacacgaaacatactttttatttgtggaggtgccttctttggcttggaaaagatagtttcagaaagacatcaattttatcctgttggatttggcataccaatatgccatgagctgcggaactgcagctggagaactgttcaggaatcttcctctattgatactgttgaaaatgatgatttgattgcctacggcctgatcccagaatttattggaaggttgccaataacagttggcctgaccaatcttagtgaagagcaattggttcaagtgctcatggagcccaaaaacgcaataggaaagcaatacaagaagctattcaaaatgaatgatgtcaagcttcatttcactgataatgctttgaggatgatagcaaagaaggcactcgcaaaagaaacaggagcccgaggactgcggtctataatggaggacattttgacagaagcaatgtttgagattcctgatggtagacacgggaaagagaaggttattgctgttcttgttgacgaagagtctgtaggaccactacactctcgagggtgtcgagcaaaaatttttcgggatgatggagccttggaactgtatgtttaccagaacaatatcaaactgcccgggctgattcagagcaaccccagacgcagacgcattttccggctctgccttctagtcgcattatcggcaacaaagctttggatttaccagacaattccttgtttttcatcgatatatgaatggattgcatggatactatgcaaggtctacaattttacacaataaaatatgatgaggttgattttcgtgttaaactgttcacacagcaaaagaatggctggaccccacgttctgctttcttcggtagcttgcaatgattttgcaacaacaattcgtatcatttacacgctactggtagcaaacagacagttgttttgatactgaacctgaacaaatggaaaatggtttccaatggttacacatcaaaattatgtttgtatgcatccactgcagtaacacaatgctgagccagaagcaagctaatttttggcattgcggaaatcactaatcgtgctcattatattgatatataaactgacaaacggtagcttatgacttgaatgtgatgagcaaattgtggacataattttttgtggtcatcacagatatccctgctgcacattgcctccatttctttccgttggattgccttgaagtgccccctctccatcgtctccactttctgttggattgccatgaagtgccccttctccatcgtctccactttctgttggattgtcttgaagtgccccttctccggctgttttaaggcctagcttactgagaaagccaccatccagggtgtttgcatcaggagcaggcgctcctccttcattctctgtcttccttttatgggctaggatagcttcaatggcagcggcactggctttagctgcggcttcatccttagcagcaatctctgctctcctcctctccctctcttctctggcaagagcctctgccctcgccttctcttctgcagcccgggcttccgcttcagccttttccctctccacatcctcatataacttggcgatgtcatttcccctcccatctccacgtaatgctccttctaaaagctccctcattccatagctgaacagaaccttctcattcaaaagaataccttttgcaacattgactgcatcatccaaccggtcagcagcaatatatgccttcagcaatgtctcgtagcttgagatgcttgggttaactcccttctccttcatctgattgaagtattcctgagccttgtcgaccatactgaaacccaccaggccatcaataagtttatgatatgcagttgcatcaggcttcagctccaattcgtccattttgtcaaagtaagagataccatcatcgatgcgatcaacactgaagcatgcttccgtgagcagtaaatatgtctccttatccgcaccaacaccactctcacacatctcattgtagagcacctccgccttatctatcagctggttaatctgcaggtgccgaatcaaattattataggatgccacatcaggcaccagcttccattcccccattcttctgaacactgcaactgcatcttcaaatctcccagcagcacaataggtatcaaccatcaccctgaagcttctcagatcaactgcaatccgcagtggcgggtcatgttcctcaagcattctgtcgaacagcttaagtgcatcctccaacctcccattctgcccaagcgcatcaaccacctcattgtagctctcggccccaaacctcaccgcagattcaacacacagcacctctttgtaacactccataaccttttcccccgttcccataaggaagtacgccttcatgagagtcccgtacacaatgccatccagaattggttcgcccccaaccttgtccttgagttcttggtacagctccaaggctttggctccatccccagcacccacgaacccagccatgagaaggctgtagaccttgggatccggcccgacgaatccagaggtgagcatctcatccttgagcttgacggcatccgcgagccggccgtggtctgcaacgaggcactcgacgacgacgcggtaggccgtcggggagggcggcacgggggagccggggcgggcgatgatgcggaggtggtggagcgcgtcgtcggcgaggcggcgcgcggcgagcgcggataggtagagcacgtgcgtggcggcggtgggcgggacggcggcttggagcgcgaagcggtgcagcgcgaagaagtcttcgaggcggcgcgtgcggaggagcgcggcgaggacggcggcgcaggtgaaggatgaggggcggcagttggagtggagcgcgtggcgggtgaggagcgccgcctcggggaggtcggcctggggccccgagaggagcgcgaggatccggttgtggaacgcgaggcgtgacggcgccagcgtggggagcggctccgcgaggcgcactgcccgcggggaaggcgcggggatcgggggcgtcgcgacgaacgtgtccttacggcgctcgcggcgggaagccgtggccgaggcggcgtccgcgtgcgcgagcgggaagagcgccggcacgaggcggcgtgccgagaccggcttcgacagcgacatcttccgcgggtgcgcttgggcgacggccaccgggcggcgacgagggtttggggtttggggcggggatcggccttccgggttggagcattgagaacaggagatatgttactctgtgtttcgccttggctgaagaaaaacgtactcgcaagtcgcaagatttatg

SEQ ID NO: 8550 - DNA, 4271 bp, Zea Mays
gagcaaagggtacaaaaatgacattaaaattttttagggtccaaacgtgattttttgtccgagaaagggtcaaactgcaaaaaattcggtgcgcccggccccggtgcggggcctttcttctctacgcacacacacagcggccgtagccggaggaatccgccggcacgagacgtaaactgaggcggagcccgcggcggctgatcggggaatacatcgctgtccgcctgtcccgcgtccggcggctggtcccagccgcgacgacctggggcctcatgttctccgcagctcgccgcctcctcacgtcccgcgcccgctcccgcgccctggcggcggccacgccctacccccactccgctgtggcgtccccgtcgtgccctcgctttccgacgcccaaggagatccgcaggggcttggacgagttcgtagttggccaggacaaggccaagaaggtgctctctgttgctgtgcacaatcactacaagaggatatacaacgagtcatcaaataagtgttctgtgaaaagctgggtgcgtggtggtgtcgctacgaacagtgatgatgtcattgagcttgaaaagagtaacatccttctgattgggccgacagggtcaggtaaaacactgttagcaaaaacgttagctcggtatgtgaatgtgccattcgtgattgctgatgcaacagcaattacacaggctggatattctggtgaagatgtggaatctgtaatctacaaacttctagtggctgctgacttcaatattgaagctgcagagcatggtattgtgtacattgacgaagttgataagctcacaaagaaggctgactgccgcaaggatcgaagggatgtatctggagagggtgtgcagcaagcgttgctaaaaatatttgaaggaacaatcatcagcgtgccaggaaaaagaagtcgagaaaatataccccagggttatgttgaggtcgatacacgaaacatactttttatttgtggaggtgccttctttggcttggaaaagatagtttcagaaagacatcaattttatcctgttggatttggcataccaatatgccatgagctgcggaactgcagctggagaactgttcaggaatcttcctctattgatactgttgaaaatgatgatttgattgcctacggcctgatcccagaatttattggaaggttgccaataacagttggcctgaccaatcttagtgaagagcaattggttcaagtgctcatggagcccaaaaacgcaataggaaagcaatacaagaagctattcaaaatgaatgatgtcaagcttcatttcactgataatgctttgaggatgatagcaaagaaggcactcgcaaaagaaacaggagcccgaggactgcggtctataatggaggacattttgacagaagcaatgtttgagattcctgatggtagacacgggaaagagaaggttattgctgttcttgttgacgaagagtctgtaggaccactacactctcgagggtgtcgagcaaaaatttttcgggatgatggagccttggaactgtatgtttaccagaacaatatcaaactgcccgggctgattcagagcaaccccagacgcagacgcattttccggctctgccttctagtcgcattatcggcaacaaagctttggatttaccagacaattccttgtttttcatcgatatatgaatggattgcatggatactatgcaaggtctacaattttacacaataaaatatgatgaggttgattttcgtgttaaactgttcacacagcaaaagaatggctggaccccacgttctgctttcttcggtagcttgcaatgattttgcaacaacaattcgtatcatttacacgctactggtagcaaacagacagttgttttgatactgaacctgaacaaatggaaaatggtttccaatggttacacatcaaaattatgtttgtatgcatccactgcagtaacacaatgctgagccagaagcaagctaatttttggcattgcggaaatcactaatcgtgctcattatattgatatataaactgacaaacggtagcttatgacttgaatgtgatgagcaaattgtggacataattttttgtggtcatcacagatatccctgctgcacattgcctccatttctttccgttggattgccttgaagtgccccctctccatcgtctccactttctgttggattgccatgaagtgccccttctccatcgtctccactttctgttggattgtcttgaagtgccccttctccggctgttttaaggcctagcttactgagaaagccaccatccagggtgtttgcatcaggagcaggcgctcctccttcattctctgtcttccttttatgggctaggatagcttcaatggcagcggcactggctttagctgcggcttcatccttagcagcaatctctgctctcctcctctccctctcttctctggcaagagcctctgccctcgccttctcttctgcagcccgggcttccgcttcagccttttccctctccacatcctcatataacttggcgatgtcatttcccctcccatctccacgtaatgctccttctaaaagctccctcattccatagctgaacagaaccttctcattcaaaagaataccttttgcaacattgactgcatcatccaaccggtcagcagcaatatatgccttcagcaatgtctcgtagcttgagatgcttgggttaactcccttctccttcatctgattgaagtattcctgagccttgtcgaccatactgaaacccaccaggccatcaataagtttatgatatgcagttgcatcaggcttcagctccaattcgtccattttgtcaaagtaagagataccatcatcgatgcgatcaacactgaagcatgcttccgtgagcagtaaatatgtctccttatccgcaccaacaccactctcacacatctcattgtagagcacctccgccttatctatcagctggttaatctgcaggtgccgaatcaaattattataggatgccacatcaggcaccagcttccattcccccattcttctgaacactgcaactgcatcttcaaatctcccagcagcacaataggtatcaaccatcaccctgaagcttctcagatcaactgcaatccgcagtggcgggtcatgttcctcaagcattctgtcgaacagcttaagtgcatcctccaacctcccattctgcccaagcgcatcaaccacctcattgtagctctcggccccaaacctcaccgcagattcaacacacagcacctctttgtaacactccataaccttttcccccgttcccataaggaagtacgccttcatgagagtcccgtacacaatgccatccagaattggttcgcccccaaccttgtccttgagttcttggtacagctccaaggctttggctccatccccagcacccacgaacccagccatgagaaggctgtagaccttgggatccggcccgacgaatccagaggtgagcatctcatccttgagcttgacggcatccgcgagccggccgtggtctgcaacgaggcactcgacgacgacgcggtaggccgtcggggagggcggcacgggggagccggggcgggcgatgatgcggaggtggtggagcgcgtcgtcggcgaggcggcgcgcggcgagcgcggataggtagagcacgtgcgtggcggcggtgggcgggacggcggcttggagcgcgaagcggtgcagcgcgaagaagtcttcgaggcggcgcgtgcggaggagcgcggcgaggacggcggcgcaggtgaaggatgaggggcggcagttggagtggagcgcgtggcgggtgaggagcgccgcctcggggaggtcggcctggggccccgagaggagcgcgaggatccggttgtggaacgcgaggcgtgacggcgccagcgtggggagcggctccgcgaggcgcactgcccgcggggaaggcgcggggatcgggggcgtcgcgacgaacgtgtccttacggcgctcgcggcgggaagccgtggccgaggcggcgtccgcgtgcgcgagcgggaagagcgccggcacgaggcggcgtgccgagaccggcttcgacagcgacatcttccgcgggtgcgcttgggcgacggccaccgggcggcgacgagggtttggggtttggggcggggatcggccttccgggttggagcattgagaacaggagatatgttactctgtgtttcgccttggctgaagaaaaacgtactcgcaagtcgcaagatttatg

SEQ ID NO: 8551 - DNA, 2323 bp, Zea Mays
cctgccccccttgcactttctaattaaatgtttttgactatggaatggatcttttccattccatgtggtttgggggacaattgatgtgctttgctttgaagacagttgtagtggtcatctgattgtgaatttgtggtgcacaagttggctatgtgttttttccaagaaaatattttcttaacatagtccagcactaggattctcgagtccccgatccccagcacaaacttgctgttgtttccacttttatcgtcaatagttgttagtacttactgattaaattcacattctttaatatatgaactttattgctttctgattgtgcattcagaggggcaacagtacatcattaatccatcaaatgttcaaaaatgtgcatccataggtgcaacattataacagggatacagtcactgctacgtacaataattttatggggctactgtaccacctgtacagtttttcatgatctgtttgagggaccttaacctaggtactaggcaaattttaccattgttgtgaactgactataaaactccttttaaggtggccttaaagtaaatttaagcatgtttgcttgaagccgctcagcctcagatcatcttaagaggttgtggatttattgagtccaacacaagtttggtgttcctttgtacagttttactatggagtaccagactacgagtcattgtttgtgccatgggtccttgacctttgtaactaattcaagtcagatgatatgtatctccttatgaaattcttttctcaactaccgtgatgatatttcaataattgatttcagtttcttctatgcattcaaagtagccaggctatcatgacggcattaagttcttgtatttaaccgttcgaccaaatttgtccaattgttataggtatctgtgaaaatccatgaacaacttatgtgttcatgtctctcattttatgtccttgcatgtcaataactataggtatctgtgtttatcacatatacaagctaacaatatacagttatgggtgagacaacgtcttagttcactgatcacacacatatttttgacagtcaatacttgcaataatgtgatatttgtaaactaatttttcctcaaaaattgtaacctgcatcaggcaaatatgagaaactagcatttgttgatgtttgaagtatatttatgtggatttgtgacttccttacatctcctctttcaaacaattggttcattattattattggtatggtggtgttatcgccccatttgcattaagctgctcactaagtcaaagtagtaaaaagccatggctgttgttacctagaagatgttgtgtatattcaaatcatagtgcttgtgttttgggctggagatagcacaaaataactactaaaactatctattatcaagtgatccatttgcagttttttcaatctgacactcacagactcactggttatatttcagagctgggaagaagctaacgatataccatacttagactcactggttaaggttatgagtgcattggtttgtaaaaaaaatatttcatggtcaccacagtaggagcaacatatccctgtttagcatattgggtaataactgtgctgatagtgtcacttaaacttggtaaacctgcaactgtaaatactgatacgtggactataagttttggccgtgcagttgctgtgtgataactattttgagttttcctaaacagtttcttacctagattgtcgtgaacttgcggtgtagtagcattgtacctattttaacttggccttgtttgtttgattttgtaagtgagggttttaatttagttgctagctcgatgaaagactatgattcgcaagactggatattttcctgcttatgaagaagcggtggcaaccaaattttcgaaaaagtcggggccattactcagatggtaaacaaacttgggccatgtaaatggtcgaccttgcctaaactatacctggacgtattggaaagcaatgctgggaaagctatgccatgaaagatatttgtagcagtgttacatgatggcatcaagtgctgggaaaatatttattaatttatggttttgtttctatggaatataggagtcatgattttgtgcatttgatcagagactacattaactagaggatactttctttttttcaaaattacaaaaacaatactaagtgtacctattattgtctactcgtctcatgatgattactatgtagataaattctctaagctatgaacagtgaccaatgaaatatattcatttgcatacagttctcaaactaatgtattcacgtcattatatattgtgccagctttgtcaa

SEQ ID NO: 8552 - DNA, 2200 bp, Zea Mays
gttttatcaaggtacgtccaattccttctatttagttgactgtgattcaatatgcttgttgttcggttttacttgcgacatgctgttggggcatgtgtttgggatggatgacgtttggactagatagtttcagtcagtagccatctaaacaagcccttacagtattcgctatttcatattgaattttcctcatattgtagagaaaatcgcagctaatctgttcactgtggatgagttgccccatggtttgttcttaatcagaagaatggacgtgtgcaccacagtttagtgctaaatcatatggatataggagagatgtgctctctcctgtcctaaaacagttcatgttctcgtttttctattctgacagttcataagcgccggtcttttagatgcccactgacctggacatgttggtagaaatactgggcaggtgggatcaactccgatatttggtcaatttctcaaccactttctgttaatacgcaatttttattgaaaaacataatgacgtgcaatgcaaccaccctattcaatattcgtatggttagcaaaccatacgatcaatagaagatctttttggtagcactaaactacctacatacttgcatgcatgcgtcctaatccttgagtttgagtcaaaattaaatcaaaaattgtcatgatcaatcaaacaggaaagaattgacattctatagtttgcgtaggaaagtgtctctgtgtgttttctttttgaaggatcaaggattgaaggattttcctgcttgacggattagcacttcagtaccagtagttaagttattaggagcagtagcaaaaaggggctatatttgtttagggcttgttcgttttcatctcaatccatgtggatcagaggggtttgagtagctttaaatctacaataggtcaaaagctctactaaaatttttcaatctcatcaaatccatatgtcatatgaccgaacaaggccttagcgggtagggcacatcatcttaacgccaaactgctgcctcgaaaacgagtgtatagggcacaacatttgaaccacatatatgatatcaatcttatcaatctattgtgttaattatgaatcctgcatcaatcaaccagggcccggggcacattttcccaagccattgacaaatgttggtagatgcaggattcatagttacagaaactatgtggttcaaattttgccagtatttgactcatcacatttttcttctctatttcagttcttctagcagttgaagtagtgttttcttggcagatgttcgcctttaggacattgctgcgaggggaatcggatatgccacaggctgcatgttgttggagtttctatgtatccccatatcaaatttgtttttccctaatcagggaactcaattgttgtactgctcatctctttcgagaagatcacactgtcgcatttctaatgtttggatctttttgcatagtgcgagtaatagcaggagctcttccgaaaggccttcacatgttaatcctatcgaagaataacatatcaattattgaacgcctcagagaattgacacgattgcgcttgttggatatcaactataataggatatctagaattggccatgatcatctgttaggattggcctcatgttcctctttgaaggagttgtatctggtcggtaacaagatcagtgaggtagatggtcttcaccgacttctgaagctcaaggtgcagaggatgctaggaaaatactcaataattatggtacatgtccaattctaagtatgaaagtcggggccattactcagatggtaaacaaacttgggccatgtaaatggtcgaccttgcctaaactatacctggacgtattggaaagcaatgctgggaaagctatgccatgaaagatatttgtagcagtgttacatgatggcatcaagtgctgggaaaatatttattaatttatggttttgtttctatggaatataggagtcatgattttgtgcatttgatcagagactacattaactagaggatactttctttttttcaaaattacaaaaacaatactaagtgtacctattattgtctactcgtctcatgatgattactatgtagataaattctctaagctatgaacagtgaccaatgaaatatattcatttgcatacagttctcaaactaatgtattcacgtcattatatattgtgccagctttgtcaa

SEQ ID NO: 8553 - DNA, 2201 bp, Zea Mays
ttcagtcagtagccatctaaacaagcccttacagtattcgctatttcatattgaattttcctcatattgtagagaaaatcgcagctaatctgttcactgtggatgagttgccccatggtttgttcttaatcagaagaatggacgtgtgcaccacagtttagtgctaaatcatatggatataggagagatgtgctctctcctgtcctaaaacagttcatgttctcgtttttctattctgacagttcataagcgccggtcttttagatgcccactgacctggacatgttggtagaaatactgggcaggtgggatcaactccgatatttggtcaatttctcaaccactttctgttaatacgcaatttttattgaaaaacataatgacgtgcaatgcaaccaccctattcaatattcgtatggttagcaaaccatacgatcaatagaagatctttttggtagcactaaactacctacatacttgcatgcatgcgtcctaatccttgagtttgagtcaaaattaaatcaaaaattgtcatgatcaatcaaacaggaaagaattgacattctatagtttgcgtaggaaagtgtctctgtgtgttttctttttgaaggatcaaggattgaaggattttcctgcttgacggattagcacttcagtaccagtagttaagttattaggagcagtagcaaaaaggggctatatttgtttagggcttgttcgttttcatctcaatccatgtggatcagaggggtttgagtagctttaaatctacaataggtcaaaagctctactaaaatttttcaatctcatcaaatccatatgtcatatgaccgaacaaggccttagcgggtagggcacatcatcttaacgccaaactgctgcctcgaaaacgagtgtatagggcacaacatttgaaccacatatatgatatcaatcttatcaatctattgtgttaattatgaatcctgcatcaatcaaccagggcccggggcacattttcccaagccattgacaaatgttggtagatgcaggattcatagttacagaaactatgtggttcaaattttgccagtatttgactcatcacatttttcttctctatttcagttcttctagcagttgaagtagtgttttcttggcagatgttcgcctttaggacattgctgcgaggggaatcggatatgccacaggctgcatgttgttggagtttctatgtatccccatatcaaatttgtttttccctaatcagggaactcaattgttgtactgctcatctctttcgagaagatcacactgtcgcatttctaatgtttggatctttttgcatagtgcgagtaatagcaggagctcttccgaaaggccttcacatgttaatcctatcgaagaataacatatcaattattgaacgcctcagagaattgacacgattgcgcttgttggatatcaactataataggatatctagaattggccatgatcatctgttaggattggcctcatgttcctctttgaaggagttgtatctggtcggtaacaagatcagtgaggtagatggtcttcaccgacttctgaagctcaaggttctggacttgtgccacattcagtcttctgtagccactatacttggggttggtgcagaggatgctaggaaaatactcaataattatgtgagggttttaatttagttgctagctcgatgaaagactatgattcgcaagactggatattttcctgcttatgaagaagcggtggcaaccaaattttcgaaaaagtcggggccattactcagatggtaaacaaacttgggccatgtaaatggtcgaccttgcctaaactatacctggacgtattggaaagcaatgctgggaaagctatgccatgaaagatatttgtagcagtgttacatgatggcatcaagtgctgggaaaatatttattaatttatggttttgtttctatggaatataggagtcatgattttgtgcatttgatcagagactacattaactagaggatactttctttttttcaaaattacaaaaacaatactaagtgtacctattattgtctactcgtctcatgatgattactatgtagataaattctctaagctatgaacagtgaccaatgaaatatattcatttgcatacagttctcaaactaatgtattcacgtcattatatattgtgccagctttgtcaa

SEQ ID NO: 8554 - DNA, 2157 bp, Zea Mays
atacatatacatagtgcacctcttctcattcccgaagaaagtaaaacaagaaaaacagagacagaaaagagagtaatattgtgctctcatctcatggtagttacaaaatgcaagacaacgaggaatgtacacctgacaagtacatttttcctaatacttgtgatcatttgttcagcctcaccgtcatgcaaaggccaagatcagccccaagcacgtcttccttgtccccctaggccaccgccaccacatagaccaccgccgtgtaatttgttagagatgtcacaccaccatcgtcataggtcgcctccatcttcacccctactggtgccatcatctccaccacgcagtttgttagagcagtcacaccatcatcaccacaagtcaccaccaatgccagcagtgccattgccaccaccatgtagtttgtctaagatgtcacaccattattcccataggtcgccatcattgccgccagtgtcgtcaccaccaccactggaactagtgtcgtcgtcaccaccacgtagcttgtttgagacatcacaccatcatcatcataggtcaccacaatcaccacaagtgttatcttcaccaccacatggtttatcagagatgtcacaacgtcatcactattggtcatcttccctaccattggtgcaatcatcatcactaccatgtagtttgtccgagactgtttccctaaagccaaagcccgagacgtgctacccctacaataacagattttgtctgactcatgattgcgagaacatgtgcaaggaaaatggctttaaacccaaaaaaagctattgtgttgagagagcggatgctaaatgggaatgttgttgcaaacattaagcaatgtaactaaagcatatatttgatgtgaactcaataagataagttttcttgttgcctacatgccactacattttgattggctactatacaaaaatataaggtgtaccaggcgacaagcctaaggcctcatttggccctgtttagcatggctccaactccatagatttctactaaactccataactccatgtggagcagactccgcgtggagttggagccaactaggaggaggtgtttggctagcagggtgtccctaactctagaaaataggattttgaggttgctttgatattcttgccctttgttccattttttagtcaaataatttatgtacaaataattttgccacacatatgaaataaaaagaccatcgaagacgttaaaatcacaaaacatgacatgtccattgtctacaaccaaatagttcatagtacgatatggtattcatttgtatctaattccatgctaaggcgacagaagtagccaaagtatcacgaaatgcatattgattctgatgttgatccatcagaggcatgttgcaacactacatactagttgtacttttctaggatagttggaacaaagtttggatctcaatcgaaattatcaaagttttcatccttgcttacatgcttgcgtatgaaatcatgaagagctatggtagcatcaactatcttattttgtgtcatcatggaaaaacatggcatcttatagataatctagcatttcatctttaataccccaaaccagcactatatgaaattttgaatagatgagtgaactctgttgaacttctcttttgaagtactaggttccatacctcgatgccactatggtaagtgatatcttttggatgggatctgaattagactaggttttaggagcactaatgagcctctgattcaggagcccattagggatgcctatatactgaggggtggaggtgtagcaagaatttaactctagtttgcccaccatcagtcgtgcactcctctccttgtctcatcgcagatcgcagactagtagcccggtgtgtaacgcttcttccctatacatgtggatacctcaaaggtgctgcatctaaagcactagggcgaaccgcacgaggacatgaaggacgtcagcaacacacgacactgctcgacatgttcgtctaaatcaagacggtttctgctgcatctgcgcgaagacatgaaggacatcagcaacatacgacactgctcgacgcgttcgtctacatcaagatggtttttgctgcatctaagtgtctactggactcgtcacttgaaggatggcataata

SEQ ID NO: 8555 - DNA, 2665 bp, Zea Mays
gcagagacagcaagggaacagggaagggagagagagaggaacagctccgagctctcgcctctgccctagctgccaagacagtggcggtagaagattgggtgcgggagcgcgacgtctcagctgggctatccaggaatccagaatttacttcggtggcgaggatgtctgtgagccatgcgcaggacattgaaatatcgctgtgcgacggcaactcggaggacgagcggcggcggcgcaagatcggctcgctgcggcggaaggccatccacgcgctcaagaagcgagggaggcgtcgcgtcgactcccgcttcccgccgccggccatttccatcgaggacgtccgcgacgcggaggaggagcgcgctgtcgcctccttccgggagcggctcgcggcgcacggcctcctccccgagaagcacgatgactaccacatgatgctaaggttcctcaaggccagaaagttcgaagccgagaaggcaatgcagatgtggtcagagatgctgaaatggaggaaagagttcggaactgacaccatccttgaggattttgattttgaggaactggatgatgtgctacgctactaccctcagggctaccatggtgttgaccgccaaggccggccggtgtacattgagaggctagggaaggtggatccgaacaaccttatgcagatcacgtcagtggatcgctacatcaagtaccatgtccaggagtttgagagggccttcagggagaggttccctgcctgcacattagctgctaagaggcacattgactccaccactaccatcttggacgtccagggtgtggggtttaagaatttctccaggactgctagagaacttgtaaaccgaatgcagaagattgatagcgattattatcctgagacactccaccaaatgtttgttgtgaacgctggcagtggattcaagtggatctggaacagtgtgaagggcttccttgacccaaaaacttcatccaagattcatgtgctcggttcgaactaccagagtaggcttcttgaagtaatagattcgagtgagttgccagaattccttggtggttcatgcacatgtagtgacaagggtggttgccttggatcgaacaaagggccatggaatgatccttatatattgaagctgatccacaatttggaagctggatgcatgagggaaaccaccaaacccgtttctgagggcggagaaagaagcagctcttcctttcggttggaacagatgaaatggcagggcatgttaagcgatacatcaaatgctgaatcaggatccgatgttgatgattttggtccatcatttgttcataaagtttcaggctatggttgcttgactccggttcgtgaggaggtaaagggcacagattgtgcaacatacttgagctgcgatgatcaaagtcacccggatatggttcctgaattttaccatggagtgcaacggactactgaaatggtgcagaaacaaatggctgatttcaggcaatattccaccaacagaaggcctcgtgaattagggaacggctctcttaatgccaatggtacagcagctgctcagaggggctgggaagacgtggcgaagctagtagtcacagccttgatcaagctcttctccttcatccggctgttcctttccagagccgccgagagtaggctagagaaggtccgtcgcactgccccaccaccagcagcagagaagccaaagccgccccgagccgtcagcgaagaagaggtgcgcgcctgcctgcagcgcctggacagtctcgagtcgctgtgcggccaccttgccaccaggcctgcgcagatcccggaggacaaagagcgcgttctgctgagctcgttcgagcggatccggtctgttgaggctgacctcgagaggaccaaaagagtgctgaacgcgaccgtggcgaagcagaaggcgctggtggaggaggtggctctggagtctgtgcaggagctgcctagagccaagagaggatgttctgttgataggacatggaggtcaacagcacgggaccccgaaccatgtcgtcgacattaaccgaccgaccaaccgaccgtgaagctgacgcgactctctgccaccagccagccggagccatttttgacctcgctgccgccgccgccgaagccgacgccgccgactctcacctaacaccgaaatggaagagaagaccggcggcgccccctgttggctgctgcttcccttttcatgccgccccttttttgtagtgcctccatttggccgtactctgctggcggggcccgggccgggtggcgcctttttgattggtgaatgctgcggcggtcgccaagcaccacccttgtttcttggccaggcgcgcgcgagagagagagagatagatggtgctggttggtgtccgaatggctggagtcgttctgtacgtacttgagtactgctgagtgctgaccccgtggctggaggtgggagacagacagtggcgagcttggtgccgtcgatgcacctgtacatgccatgccacaccggctgtgattctagtggcctgctaatatacagattgttgcgacagcccatgttactgttggccttctgtgctgggtgtgttggtggaatagtttgggccgccatgccgatttggcgagggcgacgacatggatgagccgatgccgagcgga

SEQ ID NO: 8556 - DNA, 3476 bp, Zea Mays
gttgagaaagctcatagtggagatgttcattgtgttgattggaatccccttgatgttaactatatcttaactgggtatgatggcattaaggctcgattcagcataatcgttgaaacaaatttgatctctatcagttccttatacgttcaatggtcacctgatagagcatctgtttttggaagttctgcagaagatggtttcttaaacgtgtgggatcatgagaagatccttggacaattgtcagtgtctctgatgatggcgagagcactggtggaggtggaacactgcaggtttattgatatggcagaatccttgtgtcagaaacgtgctttggaggctttccgtttggacccgacgaagtggggaggcttccaagtctgtcattcccttggaggaggcactggatctggaatgggcatgcttctcatttcaaagatcggagaggagtaccctgatcggatgatgctgacattttctgtctttccctcgcccaaggtgtcagacactgttgttgagccatacaatgcaaccatgtctgtccatcggctggttgagaacgctgatgaatgcatggttcttgacaacgaagcactttatgacatttgcttccgaactctgaagctgacgacccctagcttttgtttctggacagttggagacttgaaccacttgatcagtgcaacgatgagtggtgtcacttgctgcctctgcttcctaggacaactgaactctgacctgcacaagcttgtagtcaacctgatctcgttccctcggctctacttcttcatgatcggctttgcgccactcaccttgcgtggctcgcagcagtaccgtgcgctcaccgtctctgagctaacccagcagatgtgggatgccaagaacatgatgtgtgttgctgacccacgccatggtcgctgtctcacagcctctgccatgttccgtggcaagatgagcactaaggaggttgatgagcaaatgattaatgtccagaacaagaactcgtcctactttgtggagtggatccccaacaacgtcaagtttcaccccttcgtccccatcatccgggattcatccttcgacccctcccccccacggtccctccccctacccacaccaacgcgcacacggaccgggagtcgcagcggaaaccacaaaaccagcgtgaaggcgcccgaaccaccgcgagccccgcccaccactccacgaaacccaaacgcacctccgcagcgagggatatcccccatcaccccctaccagtttcaattttcaaaagggcgtggaggcgccgcaccaccgccgccgccaccactgacgagggaggaaacgccacctccccgagccagtccgatgttgtccgaccaggagctggcccagtacgtggagtccctcgtccagcacaccgctgcgcagggtggcaccgggatatcggcggatgccgtggtgcgccagctcggggcgcagctcggcgttgacctctcccccaaggcgcagctcatccgcagcgtcctcgtcgcgctcctcggccccgcggccgcgccggcgccggaccccacgggttcgcgtaaggatcccttcgaccccgcaaccgctgccgccgccggcgggccccgcgccgagactcctccacagcagatgcacttctctaccgccgccgcgtcgtcggcccccgccccttctccagccgttccccacttcttcccgcagcagcaccagcaccagatgcagtacttcctgtccgccccgcagcagtatcagcaccagcagcagcagcaacgcgccggcgcgtccccttcgccgtttgacatccccgcgtcgtaccgctacgggcaccagcccttgccgcaggccgaccaggcgcagctgcagaggctcgtccagctacagcaccagcagcagcaactggccgccgcggcgagagttgcagctgcagcggcaccgactccgggggagagtccccgtgcgccggagccgccaccggcgccggcgccggcagcctccaagaagaacagcagtgctagtgttggagcaaaacgaaaaggtggtcctggagggttaaacaaagtctgtggtgtgtctccagagctgcaagctatcgttggtgaaccagccatggctagaactgagattgttaagcagctttgggcatacattcgcaggaacaatttgcaggatcctaacaataagagaaagattatatgcaatgatgagctccgattagtttttgagactgatagcacggacatgttccagatgaataagcttctgtccaagcatatacgtcctctggagagtaaaaatgattcgaaaccagaagcaaagaaattgaagccacagggtgatgaaccaatttcttcagttgaaactgatgttaaccaacttccccttatggtttctgatgcgcttgctaccttttttggtaccggagaaagagaaatggtccattctgaggctgttaagcgtgtctgggatcacattaaaagcaatgatttagaggatccagagaatcctacggtgatactgtgtgactcgaagcttaaacaactctttggacgtgaaagtcttaccgctcatggtgtctcggaggttgctttcagaccacctttacacgcaatctaccaatatctgactggttagttaccggactttctcttggcaaacgtttcccttcctagtcgcgcttgttggagaatttcagtcgtctgccttttggccctgctttgccctctgttaaatctgccgcaatagtaaaaggagtcgaccgaccgcagtcaaattggtactgcaaagtttcggcctaaccgaatttagttgttctattcaatctgtagatttctgacctcactcagctgtgccagatgcgactgtttggcttgttggctgcaggcgatacgattttctggactcggctgggctaacatcctgggtagtaggcgctgatgaaaggacaagggatctgctcaaattaagtgttgtatttgtatcctccatattggtgaagactgatttacagtagtaagggaaaaggaaatggcagttgtgttgcatactatctagtcagacatagtagtctacgtgacttggaatgatgcggcgttaaactaaaaaggacagcgagagctgatgtaaattcggcagccgtataccgtaggcgcgtgcgttttctggtaagactctcttgcattgctagtgccctaagttgactcgaaacatctgtacctcgaaatgttgctgtgttaggtgatacctaaccttaatacagtttagatcgttatccttactcatccttttcctgaacccctgcatgtatcatcattgtgtgtgcatcgtatgcggcagcagctgtttacgaaaggaacagctagctactgcttttttctgttcctgcatgatgcaggccgtttacaagatcctgcctactgtacaaggctagatacttgctccttgccctcctggtggtgctgctggtggcgacggcg

SEQ ID NO: 8557 - DNA, 2219 bp, Zea Mays
cccaccccctgtagaaaaatgtgtatgaaatggaatatcactgttgaaactagtcaatgtagtggaatgcttgcccatttccccgtccttatattttattcccacatcaagcttgcttattcttcttcccctccctagtattattctcatcacgttcgtgtcttctttcctccaggttcctactcccaccacacacctcattccaatcctatgctggtggtgtagagacagacagagagagccgggagagaaaagagaagaggaccaaatctgagaggtggaagccatggcaaaggtgaaacagaaggtggcaacggaggatatccttgaaggagatgatgagagaacatcttcggagaacaactctgtaccacctgtgattctcgacctcaacgagggtttcggtgaggggaacgaggcaggggaagccagcgatgatggtgacgacaaccaggaggaggacggtgacgacggcggcagcacaagtgaagttgcaggcggcaggaattcaagcaacaacagcagcaccaaccacacttccatgagcaacaaggattatgacatgaatagcagcagtaatggtgagggccgcgaagagagagagctagcggtgaggcagtacaacagatccaagcttccccggctccggtggactccggacctgcatatggcatttgtccacgccgtggagaggctgggcgggcaagagagagcaacgccaaagctggtgcttcagacgatgaacgtgagggggatcaccattgctcatgtaaaaagtcacttgcagatgtacaggagcaagaagctggaccaagagtctgctggacacgagagagcagcaacctcctccgttttctcgcccatggacttccacatgatgaggacaggggaccatcatcgctaccatgacatgttcctccatcgacctgcagctggctcggccatctcttcgcggctgctccacggtggggagttcttcgggtcacgaaacgccgccgtctcgccggaggccagaaggctctacgagctcctccaacgccggcagcctaccatgcaaacgttcgacttcaagggctacagtagtggtagtggcctcagggatcaagagtggagtttcagccagcatgcggcggcggcggcggcaagggctggggccatcaatggccacggcccgacgaaagggctcatccacgatatgggtttgagaaagaacagcaggccgatgtcccatttgttcgacgtgcgggatcgggatgctatcgcttccaaccggacatcgtccgacgccacgggtgctgccagccatggcgtaacgatcaccagaagcgcagatcggaacggcaccagctcatcttggccccagcctaggacaatgtcggcagctgcgtccacggctcctgcgttgggcagtcaccacctgctgtctatgggaagaggctccgctaacttaacatcgtcgtcagatcaccccgtggtgacaaatgaagccctaggctcccggctccagctgcagacgttccaggagctaaacaaagtaaccggcgacatgtgcgctgggaccagaaagacgaagaggatgaagacgccaatggaggggaacagtggcacgccggacttgcacctaagcttgagccccaacgacgacgacatgggaggagctgccgacaagcagatcaagaagatgaagatccaaggtatcggattaagtgaacagcaggaggtggacggcgataagatgctgcctctctcgctctccctgtcactccggggtggcgaggatgccaggaggttagaggcagctacaggcggtagcagcggcaacaaggccgctctggggcggtgtactttggatctgaccatgtcgatcaaggcaactgagtgaggagataagtttcatggccgttctggggggtgagtactttggatctgaccatgtcgatcgatcaaggcattggagtgagatctttcaagtacttgtccccaaggccttccaaaacttgcacactgcaccatgcggttatattaagtaatatgagtgatagtttaagttaaccttgcatgcgtccagaccagaccacatataaatacatatctatatatatgttcaatgagatgcacttattgtttttctatgtgtacgcatagttgcatcatgctttcatgcaccagttattattgtttttttgtgtgtggaaaatcatggtgttattgcactgcaa

SEQ ID NO: 8558 - DNA, 490 bp, Zea Mays
accggcgatctgcgcaatcactcccatcgacccttcctaggatatggagaagggtaagaagtcaggctcgggcaggggctacatttcttggaatgatgatatggacaaggcacttcttgacacattcgtggagtactacaacagggtgacagatgccaaaatgggtggaagtctcatgtctacacggctgctatcaagaatgtccgagaaaagtgcaatgtggaaatcacaaaagacaacatcatgtcaaggaacaagacatttgacaagcaccacactatcatcaatggtatgctacaaacaagtggctttggttgggattggaacaagaacaagatatccgtcgatagtgattctgtatgggaggcttatgtggcggtaagtttcagttttttttatttttttattgttacaacttaatagactaaagagactacagaaattctcgattagcatagtcattttccagaaaaaaaacttcatgtttgat

SEQ ID NO: 8559 - DNA, 1919 bp, Zea Mays
ctttttacagccagcgcgcgtggaggcctcctctcctgagccagcgcgtggagctctcccagacggccgccctcctcagccagctgcccacaacagtcagccgaccggcacaggcacatcttgacagagacaaagatatgcagcttcaaactgtttgggcaaaacttaggcgtaatgaagtcaacaaagatgatttcttaagagttatcaggaatattgttggggatcaaatgctcaagcaggcagctcataaagtttttgtacagatgcaagcacaggcgcaaagaaatagccaggcaaattcaagtcagcagtctttattctctcaactttctgcacagcagatggcttccagtggttcagcacagttacatgatcagaaaattcggccacctggaccacccaaccaaggccagaaaaaccaggtgtcatcttcacctcaggcttttgcaccaccatcaggcacccaaccgcagaatagtgtacactatcttgctcatgataaccctaaccaaaaccctgatgcaaagggaacaaatgttgtaccaaatcaaccatctagaatgaacacatcagttccattgcaaacaaagaacaaacagcatcaaccaacacagttgcagcaggcctcacaacaaatatatggagcaagtaatcctggtgcccaggcttaccctcggtcaatcactggttctcttagatcaccgagtcttgttccagaaacacagccatccatgcatgctcctggaatggctcctgcaaaaatggttcctcctcctactcatccaatgatgcagcacaatgcaactgcatggcaaatgcatcaaaacagggaattgaaaactaacgctccccctccaaatgctaatatgaagcaaaattctgaatctgttggcaaagtacgcatggctggcacaggaaattcttcagctaaaggaaagcagggaactcctaactctacaccaaatgctagtggaggtacaaagagtagcaagaaatcgggtgggcagaagaaatcattggaagcagcaggctctatgcaaccttcaagcaaaaagcagaagacatctggaggctcccaggaacaaagtatcgatgaactaaatgatgtcacagccgctagtggtgttaatattagggctgatggcagtggtgctacagaattggaaaaagaaaaagaagaaagtcgcccaaagaacgtcaagcccaacaaggaagaagatgataaaatgagggcgaatgctgcaaacgtcgctgcccggcaagcagttggaggaagtgatatgctctcaaagtggcagttgatggctgagcaagccagacagaagcgagaaggcattgatgtgtctgctgcttcacagccaggcagagggccaggttccaggcaattatccaaatttgggaaaggtcctggtgagcacccagaaggttcaaagaggagccattcgatggcattcggaactggaggcatgaaaagacccggcaggacagcgtttgctggtccacagcgattgatctccgtgaaggatgtcatttgtgcccttgagagggagcctcagatgacaaaatcaaggctaatctaccggctgcacgagcgattgcctgtagattctaccgtagattagaccggaatagtcatatactttattgtgggcatgcccaattgcccttgcatggtattgaacagcgaagaagcatacccgccactcccatttgttgtgctttggagcggcactgtatattggtgtaaaatttgtatcgcaaaggcggcgaattaccagcaaaaaagggtttctgtacaaaattcactgtaagcggggtctggcatttgccttttctgcaaccacgtctgtgaggttatttctagcagactactcatctcaatatctatatttttaagggttaattagatttttgcc

SEQ ID NO: 8560 - DNA, 2565 bp, Zea Mays
acgacaccctcgccaagagcatttgtcaccacttcgtccgcccgcatctaaattagcggagcgcaaaaggaaatatagtggacctttttacagccagcgcgcgtggaggcctcctctcctgagccagcgcgtggagctctcccagacggccgccctcctcagccagctgcccacaacagtcagccgaccggcacagccagtgcgagtgtggtgtgcccgtcaagtgcggcaagtgcggcagggcgaccgtcgacgcgggcaccctacgcaagccttcttctccagggcgtcgtttgccagcgacgagcaccaccaggtgctttgtgctaggatagcagtgctatgtcaaaagctccagatgatcatttgcaagcaactgagcaggaaggaagtgtccattcaagtcaacaagcagggcaacaacatgtgaatacagcagaccagttctcaaaaacagaactaactgaaggttcaaaaattgaacagcctgtccaagtagagcaacagagttcccacctacaacaagcatatccagaaattcaactacagcaggctgaaacagatagcttccagttagctgaaaaagaaacagggtattttggtcaacagagttctgcaggcgccaaggtggatgtagcccagccttcagtagttcagcagaatgcaaagcaaactgttggtcaacaagcatcatctggtacccaggatacaaagaaaggaccatcgataccatttaatatgttaattccaatcctacaggcacatcttgacagagacaaagatatgcagcttcaaactgtttgggcaaaacttaggcgtaatgaagtcaacaaagatgatttcttaagagttatcaggaatattgttggggatcaaatgctcaagcaggcagctcataaagtttttgtacagatgcaagcacaggcgcaaagaaatagccaggcaaattcaagtcagcagtctttattctctcaactttctgcacagcagatggcttccagtggttcagcacagttacatgatcagaaaattcggccacctggaccacccaaccaaggccagaaaaaccaggtgtcatcttcacctcaggcttttgcaccaccatcaggcacccaaccgcagaatagtgtacactatcttgctcatgataaccctaaccaaaaccctgatgcaaagggaacaaatgttgtaccaaatcaaccatctagaatgaacacatcagttccattgcaaacaaagaacaaacagcatcaaccaacacagttgcagcaggcctcacaacaaatatatggagcaagtaatcctggtgcccaggcttaccctcggtcaatcactggttctcttagatcaccgagtcttgttccagaaacacagccatccatgcatgctcctggaatggctcctgcaaaaatggttcctcctcctactcatccaatgatgcagcacaatgcaactgcatggcaaatgcatcaaaacagggaattgaaaactaacgctccccctccaaatgctaatatgaagcaaaattctgaatctgttggcaaagtacgcatggctggcacaggaaattcttcagctaaaggaaagcagggaactcctaactctacaccaaatgctagtggaggtacaaagagtagcaagaaatcgggtgggcagaagaaatcattggaagcagcaggctctatgcaaccttcaagcaaaaagcagaagacatctggaggctcccaggaacaaagtatcgatgaactaaatgatgtcacagccgctagtggtgttaatattagggctgatggcagtggtgctacagaattggaaaaagaaaaagaagaaagtcgcccaaagaacgtcaagcccaacaaggaagaagatgataaaatgagggcgaatgctgcaaacgtcgctgcccggcaagcagttggaggaagtgatatgctctcaaagtggcagttgatggctgagcaagccagacagaagcgagaaggcattgatgtgtctgctgcttcacagccaggcagagggccaggttccaggcaattatccaaatttgggaaaggtcctggtgagcacccagaaggttcaaagaggagccattcgatggcattcggaactggaggcatgaaaagacccggcaggacagcgtttgctggtccacagcgattgatctccgtgaaggatgtcatttgtgcccttgagagggagcctcagatgacaaaatcaaggctaatctaccggctgcacgagcgattgcctgtagattctaccgtagattagaccggaatagtcatatactttattgtgggcatgcccaattgcccttgcatggtattgaacagcgaagaagcatacccgccactcccatttgttgtgctttggagcggcactgtatattggtgtaaaatttgtatcgcaaaggcggcgaattaccagcaaaaaagggtttctgtacaaaattcactgtaagcggggtctggcatttgccttttctgcaaccacgtctgtgaggttatttctagcagactactcatctcaatatctatatttttaagggttaattagatttttgcc

SEQ ID NO: 8561 - DNA, 1264 bp, Zea Mays
atgccagtgtggagaattcttcagcgaaaactgaagcgcatggctataaaaactcacatagatcaaaaggactacacctccaaggtgccttctctagagcacaaccaggtcaaaggagagagcttggatttgatcaagtacattgacagcaacttcgaaggtccactgttgccccaagttaagaagcgccttaggagaaatattcaagttattggcaatgaagagattgaaatgcatcccatttctgcttggaaagaagcaaagattttatggtgggtttgatggtgctgcaatgcagagaaggccattagtacatgtaattctccacatatttgcttaatcttgcaacccttcaggggattttgaaatgtatgatattgttttatataagaggagacatgttacctctgtcaaatgaactaaagacttgtttgggagcaagaataccagagaggattggaggggctacaatccccttgctatttagttttgaatagaaaagagattgtaaccccttcaatcctctctggtatccttgctcccaaacaagccctaaatggttgatgataccctggtgtgggtgaatatagaagaccacaaggaaggaaatactcttgctgcaacatagcgactccttgggacattccagtcacagagtttgaatatcccatgctagaagaagctggtggttgatagtaaggacttgagaagggaaagtgcacaggaaagtattgttggccatatccaatagtcgaaacaggacaatatgctccatatctcatttgggggttgtttgcatatccagcagaaagcatgagggactggtggtcattgtagattcccttctagaaaaaatatttagaaaaataatatcaagaaaacacaaagaaactcggttatccagcaacttatgggagatacggaatggagcccctccataattggatgttctttttttcatcttggtggtgtttttagctccttgcttgaagctacaagaacaggctgaaggttgttcccttctgcacaaacagcttttcagtattcctattggtacatggtctccacatacgcggaggtcaagtggcagacaactcagaactttgctactgagttctctaaatacccgcctagattttcagattgaaggtgcactgacatttcagatgcagcattcgtattgatactttcaactgattcttaggattataaatgacaatcatgaactatgcaatcaactctgcattgtctcggcacccgatag

SEQ ID NO: 8562 - DNA, 2230 bp, Zea Mays
aagcatggggccaatgctgatcttgtgaatgctctgaagctggtccaacctatcaaggacaagttttcaagtgttacctatgcagatctgtttcagcttgccagcgccacagctattgaggaagtaggtgtccctaaaatccctatgatctatggaagggttggcgttattgcccttgacaatgcgcgccaaagtgctaagattattgaccaatctcttaccccaggaaagatttatgatggagatgggttcaattacatcaaagaatcttttgaaaatggtactcttcaccttattgggttgttgagtgatggtggtgtacagttaagttacaagcgtaccacaagatttacttttatttgctctatccagttacttctgaaaggtgttagtgagagaggagcaaaaaaaattcgtgtgcacaaccttaccgatgggcgtgacgttttggatggaagcagggttggtttcgtggagaccctagagaatgatcttttggagcttcgaggcaagggtattgatgcacagattgcatctggtggtggaaggatgtatgttaccatggaccgttatgagaatgactgggatgtggttaaacgtgactgggatgctcaggtgctcgaagaagcaccctacaaattcaaaagtgcacttgaggctgtgaaaacactgagagcacaacccaaggctaatgatcaatacttgcccccatttgtgatagttgatgacagcggcaaagctgttggacctgtattagatggtgatgcagttgtcactatcaacttccgagccgatcgcatggttatgcttgcgaaagcactagagtatgcagattttaacaactttgaccgtgtacctgtccccgaaattcgatatgctgggatgcttcaatatgatggtgagttgaagcttccaaatcgctaccttgtttccacaccagagataaatagaacatctggggagtacttggtgaagaatggcatccgcacctttgcttgcaggcaaccagggaagacaacgcgttcatcctcccacgcgcttcctccgccctattttagtctgctcgacacgccaccggccactgacatcccatatcgccaagtccccttccctcgcctcgcgttagtagcctgcttccgacccgcacatctccctccggttctcgccatgggcgccggcgccaacaaccacgaggagtcgagccccctcatcccagctgcggtcgccgcccccgcgtacgagaagcccgtgtcggcccacgccttcggcggcgtcccgcgggagagctggaactccgggatcctctcctgcctcggccgcaacgacgagttctgcagcagcgacgtcgaagtgtgtcttcttggaacggtagcaccatgtgtgctctatggtagcaatgttgagaggcttgctgctggacaaggcacatttgcaaacagctgtttgccttacactgggctgtatttgcttgggaactctctctttgggtggaactgccttgccccatggttctctcatcccactcgtactgctattcgacaacgctacaatcttgagggtagctttgaggctttcaccaggcaatgtgggtgctgcggcgatctggtcgaggacgaggagaggcgtgagcacctagaggccgcctgtgaccttgcgacccactacctctgccacccctgcgccctctgccaggagggtcgcgagctgcgccgcagggttccccaccctggattcaacaatgggcactccgtctttgtcatgatgccgcccatggagcagaccatggggcgtggcatgtgagctattccaccaccttccctaccctagttttatctgtgcttcccgtggtttatcatctgctgctgttggccttgatgtgtgatgtgtcgccgtcagtaaatacgagtttgtgatatgaggtcgtgctgggaactttggattgtttgcttcttatcgactgcagtttggattctggacagtcacttatctcctgtgttactgtgtttgtacggtggtcctcgatgggcctgtcaatgtgaaatgcatttcgtcgtaccttattctgaatgtttttccctccaaaatatgagccccatacactaatatggcggtagctctcgtcacaaaccctcggatacagcagcgtttgtgcgtggaaagaaaaatcgggtgtcttaggtatgttcggttatgtctggattaaagtagattgagggtccgttcgttaaac

SEQ ID NO: 8563 - DNA, 4843 bp, Zea Mays
atgaaaaaacgcaacgaaaccaacgaagcacaaataataggattttcaaaaaggaaaaagattagcaggaggactggaggagcgcctccgcacgggcacgggccggcagcccggcacgaagcggaaaacttgaaaactagccgagcgaactgccgtctcaattcaaaatcccgtcaactctcacccccatatccctccccgtcttccttccccccatttctcccacagacttcggcctcccgaatctcgaaccctaacctcatcggcgacgaggggagccccgcctccgcctcctgcttctctgttatgaacaacttccatgtctacgaggccattggccgcggcaagcactcgacggtgtataaggggcggaagaagaagaccatcgagtacttcgctgttaagagcgttgacaagtcgcagcgctccaaggtcctcaacgaggttcgaatgctccattccttagaccatgccaatgtcctgaaattttactcttggtatgagacctccgcacatttctggttagtgttggagtattgcgttggtggagacctgaagggcttgcttgaacaggataagaagcttcctgaaaattctatacatgacctggcttacaatcttgtcaaagctcttcagttcttgcattcccaaggaattatatattgcgatctgaagccatcaaatattctgcttgatgaatttggatgcatgaaggtgccacaacccatgaggggaacaccatgctatatggctcctgagttatttcgagaggcaggagtccactcatatgcttctgatttctgggcacttgggtgtgttttgtatgaatgctatacaggaaggcccccttttgtaggcagagaatttacacagttggtcaaatctataattttggatcctacaccgcctttatctgataattcatcaaggtccttccaaaatctgattgattgtttactcatgaaagatccagcagaaagattacagtggtctgaattgtgtgaccacaacttctggaaaaccagtatcccaatgatttctttacctcctcagcctgcttttgacaacatgattgaactttctgctacaccatatctagctgagagaaatggtgacaaaccttccagacagctgacaccacccaagcaccgtgaatatagtggccttcggaggaaggatgaaaattctactaagccatccatgacacctgttaaaaatgtgcaaagtgtcaagaaaaattgtggaaaaccaaaagctgagggtttcaaaggtgtaaatatcctcagaatgtctcgcattgctaaattgaatttgcaaagggaaagggacaaggagaactacaggcgtcctcccacagaaacaactgagaatgagactgaagttaatatagataataatgacatggaacttgattttggtgaaaatccagaggctgatgcacctgatgacacatatggatcggataatcctggatctgcaggaaatgaaaagcctcaaagcactgatgctaatgaagagaattgtatggcaaatcaggttgatatgcttacagatgagggttcagttaagcctgatatcatggtgaaaactgagcagaattcttgttcagataacctggatgtggaggctactccacctagtagcacgcgaaaagcacaacgtgcaaaggtaactccatgtcctggaactggttctgagccatctaacatctttgaagcattctggcatccaacagatcttgcagttaaaccagttatgcctagtaggaaagcagataaagctgtggacatggtccccacacttccttttgaagcacttacagcaagtgattatattaagttaccactggaacagatgaatgcattcaacagtcagatacttcagagtttaagtggaacctatcaggtttcagaaaaacaaaatactatcagatacctggagatgttaagcatgaattcagatgctgcgaacaaaataactaatggaccaattatgctgctactaataaaaatgcttcgactgtcaaaaacttcagtcttgcgtgtccaaattgcctcacttatggggttgctgatacgatattccactgctcttgatgtggagctggcaagttcaggaatttttaatgcactatcagatgggttaagggataaacatgataaactcaggcgattctgtatggcaacactaggagagttattattctatatttctacccagtctgatcaagataccaaggaaataaatacccaagaataccctttgaaggataacaggtctgcaacatcttggcaggttcctagtgctgtaattgcactggtgtcatctatcttgcgaaagggagaagatgatctagctcagctatatgccttacggacagtcgataatatatgtagccaaggaactgaatggacatcccgttttgcatctcaggatgcgattggacatctgtgctacatctataaagcaactggaaagcaggagagtacgaggctcattgcaggatcttgtttggcccgtctctctcgcttcagtccatcatgcattcatttaatattggaaaagatatcattcaaggatatagcatgcacacttatcaagggaaatacacgtgaacagcagattagtcttaatattctcaattcggcattagttaatagtcacactgtgacaagcatgaaccggtatattctttcattatcagatgacaaacaattggtccccgggctcatttctctaatagaacagggaactgatgttctacgtgggaagacccttttgtttgttgctctgctttgcaagaatagtcgaaggtggcttcctcatttcttttgcaatgcaaaattaatctcagctgttgatagactgggaaaagagaaggagggttttattcatcaatgtacagaagcatttgtgcagttggttgcttccttggtccctggtattcttgacactgtctccagtgatatacaacaggttatggttggcaaacgccatggacctgttactgctttagctgggcgagctcatccaaagagcacaattcatctgttccctgttattcttcatcttctgggaagtgcatccttcaagcatagagttgtgacaggccatgtattgcttcagttggcaaatcttattaagattttggaggcaccgtttcaggctagggatgatttccaaatgacattgttgcgagttcttgaggctgctacagaggagccttctgttatacttaatgaacacacagtattcatgagtcgtatcattccaagcttatctgtcttatacaagggcaataaagatggtgatgccagatttctttgtttgaagatactcgcagatgttatgattgtgatcttcagtgattcttcattaacttctgacgaacaaacaataactgatctgaaatcaatctctcagaggcattttctaccactgtacccttcttttgcagaggatgaagatcccatacccatatatgcacaaaaactgctagtaatgctaatggaacatggttgtgtaaaagtctctgatattctgcacaaagcaacagtatcccagtgctttgaatttttgctaggagatctttcaaatgcaaatgtaagcaatgtcaagctttgctttgccctggtatctgcacctgagatggacacctatattctttctcagcttcaagttgttagaagaatagggaacctactcgagtttgttgctgcaaaagacatggacgattttcttgaaccaaccctggaactttgcagagcttttattattcgtggcactggcagcaacagaagtgtcgccctctccaaaaacccggcacttcttcttgacagtgccttcagcatgagtattgctgttgatcaacaaacttgtgtcatggatatatgtgacttcggtggcaacatgggtatttttcttgagctagttggcaattcagatccgcagataagtgatttagcatcagattgtgtagtgttgttgctcaaggcagcacctcgagaggctacagtgggcttgttgacaagtcttcctaaattaagcactgtcatggacttgctgaagcatgacagccaccgatgtctgattcgcttattatatggcctagccttctcatgcagacaatacttagcccagggaatgatcctgtcaatatcagtgccagctttgatgcgagttgaagcacttgtttcagttttcaagggctccaatgatagccttcttgctgatgctgcttcttatttgagcgccgaactgcagcgcttacctcgctgtggttgaaggtgcaacttggccaaggaggcaggttggctgctattgttcaaggatgcgcatgtattccttcatccttcgtgcaccatgtacatgatgagctgagcaagtgagcaggacgtcatcaagtgaaggtactttacatcagtggctgatctcagttgcctcaatggccaagtgacactttccgctcgtagatgtgcagggtgcgagggtgttttatgctatcatttatgtgcatttcggggctgctgtatatggcgcttttgaacaataccttgaaggtggctagaagcaaaagaacacttcgttcccccgccaattttggttggcaattacctcagtttcatgtaattctgtagtacctgtaattttattgagaatactgtagtccaatttcatgtgtacatttataaattcctgtgaagttccatgtagctgttaaagagttccccatagctcctgaatctttggtactattgtgtatttttttttactttttacaatagtgataacgtggcccatttcgaagcattttcctatcttattttgcgcaaattcgtggtaa

SEQ ID NO: 8564 - DNA, 7318 bp, Zea Mays
caagagtccatgatggatgcttctgctgctgcattgtagcctcatgaatttggttaaggtatataagaggaagtgttgctcgttgaatcagtaccttgtctgatgaacatctaactacgaaaagttcaataagtctcatccacataccttctgccccataacaaatctaacactctacttgaaaggactgtcttggaggaagcgttggggcctgtgcttctggcctcctttacttgaattataaaataattcaaggtgtaaagctggtatggatctaagcatggcaagtttgaacttgtcagaacctcgagactctagagaatcaacttcgcccgcaccatcaacatcatcttctatatcaagagaaaaaggtgacctggcagaagttgatgatcctgaaagtgcaatgtccactgttgctagattgttggaagacctccatgctagcatggtgtctccatcggggaaggaagctacaaccagaaggttacttgaactggctagagcgaaaaaggaggcaaggattttgataggtagccattctcaggcaatgccactactcatatctacccttagagttgggtcatctgcagcaaaagtaaatgctgcagctctacttagtgcactctgtaaggaagaggacttgcgtgtgagggtcctcttaggaggctgtataccacccttaatctctcttttgaagtctgagtctgctgaagcgaagaaggctgctgctgaagctatttatgaagtatcttctggtgggcttttggatgatcacataggcaggaaaatatttgtgactgaaggtgtggtgccaactctgtgggacttgcttaatcctaggtctcaccaagatagagtagttgagggctttgtgactggggctttaaggaatctttgtggggacaaagatggttattggaaggccacacttgaggctggaggtgttgaaattattactggtcttctttcatccaagaatactgcttcacagtcgaatgctgcttctctgttggcacggtttatctctgcttctggtgatagcattcccaaagttatagatgctggggctgttaaggctctccttcaccttctaaatcgagataatatcatttctgttcgtgaaagtgcggctgatgctttggaggccctgtcttccaagtccagtattgcaaagaaagctgtggtggatgcaggaggccttcctattctgattggagctgttgtagcgccctcaaaggaatgcatgcagggtgggacatgtcattctctgcaaagccatgctgtccgtgctttatcaaatatttgtgggggaacaacttctctgttgctttaccttggtgagctctgccaagcaccccggtcacctgttcccctcgctgatattcttggagcgcttgcttattccttgatggtttttgacggctctgatgataaatcatttgaccctgttgagattgaaattactttggttgcgctcctaaaatctcatgacagcaagcttgatcgtattcttgaggctttagcaagtctatatgggaatgattgtttctccgacaggcttgatcactcttattctaagaaggttcttgttgggctgattaccatagctcctgctgatgttcaagagcttcttgttcgtgccttaactagcttgtgttgcgatggtgttggaatatgggaggctcttggaaagagagaaggggttcagttgctaatatcattacttgggctttccagtgagcagcagcaggaatatgcagtttccttattggctatcttgagtgatgaagtagatgacagcaaatgggcaataacagctgctggaggtatccctccacttgtccagctactagaaacaggatctcaaaaagcaaaggaggatgcagcttacatcatgtggaacatgtgctctgacagtgatgatatcagggcatgtattgagagtgctggggctgttatggcgctaatttggcttctaaagagtggtagccctggtggacaggaggcatcagttaaagcactgaagaagttgatacgatcagcagattctgctatgatcaatcagttactagcattactgctcagtgactcattgagctcaaaggcccatgtcattactgttctcgggcatgtccttgtgctggcgcctcagagagctctaatccagagtggagctccagctaataaagttcttaggtcactggttcttgttcttgaatcatcaaatgaagaaacacaggagattgctgcaactgtgttggctgatattttcactatgcgtcaggatatttgtgatgtaatggcaattgatgaaattgtccagccatgcatgaagcttttgacaagtggaaaccaagtgattgccacacaatctgccagagctttaggagcactgtcatgttcagctagttccatgtcaaaaaacaaaatgtcttgcttaactgaaggtgatgtgcgacctcttatagagatggcaaagacatcatctattgatgttgctgaaacagcatttgctgcattagcaaatctcctatcagatgcacagattgctaaagaagcattagatgacaatattgtcttggctttgactagagtgctcaaggatgggagtttagaaggcaagattagtgcttcgcggtcacttcgtcagttggtcaaccagtttcccctcagtgaagttctcccagattacttgcagtgctgttttataattcatgcactgttggtatgtctatctggcatcagtttagaaaatgttacaagtttggaaccccttgatgttcttacattgatggctacaacaaaggagggttcgcattatagcccccctctatgcactggttttcttgaagttccagaaagcttagaacctttagttcgctgtattagtattgggcttccacctgttcaagataagtccattcaaatcctagcaagtctctgtcagggtcgaccttcgctacttggtgaatatttaaacagaagtcaaggatgcatcacttctcttgctactagagttatagagtcaaatgacatggaaataaggatcagcagtgcagtcatcctcatatctgcaatgagggacagcagagaacggtccatcgatgttctggaagcatcaaaagttctgaagaatctgatatctgcactcattgatatgctgaagcaacattcctctttaacatccctagacattgaaatctggaaaccttccacagaaaaaagttcgcttaattatgagcaggatgttttgagtgtgcctgaacttggaaaggtttctgaagaaactgttgcactatggttgctctcactgatttgttcttatcatggaaggagtaaatatactgttatggagctcaatggcgttgacacagtatctgatagacttgctagctatactgctaaccgacaggaacagtatgaagactcagaaaatatatggacttgtgcccttctgttggctactctgtttcaggattcagtggttgttcagtcttctgaaataacacgaaccataccttccttagcatccttgctaaaatctgatgatattatcaataaatactttgctgctcaggcactggctagccttgtttccactgggagcagaggtatacagcttgctattgcgaattctggtgcagttttgggtgctgtagcattgatcggacaggtagaatctgatatgccaaaccttgttacaatggctgaagaattcaagttgtcagacaatccatgtcaaataatgttgagaagcctttttgagcttgaagatgtctgcactggtgcttccgcccggaggtccatacccttgctagtggatctacttaaaccaatgccagataggccaggtgcacctctgattgctttgcaccttctgactcaactagcggaaggtagtgagtcaaataaaattgctatggcagaggctggagctttggatgccttgactaagtatctatctttaagccctcaagactcaactgaaactactataaccaatctgttggggattttatacactaatcctgatcttctttaccatgaatcatcacgtagcacttcaaatcagctggtagctgtcttgcgtttgggttcgagaagttctaggcttagtgcagtaaggacgttgcagaaactctttgattcagagaatataagggacaccgaagtggcccggcaagctattcaaccactacttgacatgcttgagtcaggaactgaaatagaacagcaggcagcacttggtgcgcttatcaagctttctgctgggaacatcgctaaggattctgctatgtttgatgtagaaggcaacacacttgaaaatctttacaaagttttatccttcagttcgtcattggagctgaagaaggatgctgctcaactctgctatattttatttgagaactcaactgtacgtgcatcaccaattgcaacagaatgtcttcaacccctgatatcactgatgacatcaggatctagtttggctattgaaccagcagtttgtgctctaaacagattactggatgaggactacaatgcagaaattgctgcaactagcgaagttattgatcttcttgtcagttttgttcctggtacaaactatcagttgtctgaagcatgtatcggtgctctcataaagttgggcaaggatcgtccaaactgcaagcttgacatggttaaagctggtatcattgagcatgcacttgatatgattcttgatgttcctgtatctgttagttcatccattgctgaattgcttcgcattttgacaaacaacagtggcattgctaaaagttctgctgctgcaaaaatggtggagccacttttcttgcttttacgtcgccctgatgttactatgtgggatcagcacagtgccttgcaagcactcgtaaatattttggagaaacctcagagtctagcagcattgaagttgactcccagtcaaataattgagcctttaatatcatttcttgagtctccctctcaagcaattcagcaacttggcactgaggtgctctcacatcttctagaacaggaacattttcaacaggatatcactacaaaaaatgcagttgttcctctggtgcagcttgctggtattggaatcttgagcttacaacaaactgcagttaaagcacttgaaaacatctcacagagttggcccaaggcagtagccgatgcaggtggaatttttgaactttcaaaggtaattgtccaggatgatcctcagccaagtcaagcattatgggaatctgcagcacttgtgttatgcaatgttctgcgttataattctgacaactatgtcaaagtctcaatggctgtacttgtgagattgctgaactccaccatggagagtaccgtcacgatagctctcagtgctctacttgttcaagagaaaagtagctcacgctgtgctgtggccatggctgaggctggggcagtacgggcactcttggagctcctgaagagccatcgatgtgaggaatctgcagcaagattgcttgaagccctgataaacaattcaagggtccgtgaaacaaaagttgccaagtatgctattgctccactggcacagtacctgttagatcctcaatctaagaaccagtcagcaaagtttctggttactcttgcactaggtgacattttccagcatgaagctcttgcaagggcaagtgactctgtgtctgcctgccgtgctcttgtaagcctacttgaggaccagcctacggatgacatgacaacagttgctatttgtgcactgcaaagcttagtgatgcacagcaggacaaataggcgtgctgttgctgaagctgggggcattttggttgtgcaagaattgcttctttcaccaaatgtggatatttcaggacaggctgcccttctaatgaagtacctattttcaaatcatacgctgcaagaatacgtgtcgaatgagcttattcgatctcttactgctgccttagagagagagctgctctctacgtcaactatcaatgaagttattctgaagaccatatatgtgatattcagcaacttcaaaaaggttcggttttctgaggccgcaaccttgtgcataccacacctggtttgtgctttgaaggatggaaatgaggctgcccaagagagcgtgcttgacaccctttgcttgcttaaagaatcttggccgcaaatgaatgaagacatcgctaaagcccagtccctgatttcagctgaagccatacctgtactacaaatgcttatgaagacatgtcctcccagttttcacgagagagccgatagtttgcttcattgcttgcctggttgcttgacagtgaccatcattcgtgggaataatctgaaacagacaatggggggtacaaatgcattttgttgcctgcaaataggaaatggtcctccaaggcaaactaaggtggtaaaccacagcatgtgcccagcttggaacgagggtttcacttggttatttgacgtggcccctaaagggcagaagctctacatcatatgcaaaagcaaaaatacgtttggaaagtcaacccttggaagagtgaccatccagatcgacaaggttgtcaccgagggtgtatacagcgggttcttcagcctcagccacgacggaggtaaggacggctcaaggaccctagagatagagatcgtatggtccaataggccatccaacgactgtatgtagcgtacggatgatttacctgacgccaattcttgtactcttggcttccatgtaaatcagccccccccccataatcatccgaattcatttatttgtacgtagaaagttaagacacttagataactcgcgccatcattcaattattgaggtcatttccgggattgtggccctgctgctgtaaactgattttgcacccgggtatttttttttgtacaggtgaatttatttcatgtagttatagcttagtgtagattggtggtgagtacggacaagccctagtgacagtaacattgggtgtgatgtgtggcgtgatatttgctcccgtgggtgtgtttccggcacttgtagcctcaggatacacatggctgagcttggcactgttctatttgtcaggcatgtttgtttacctgtttggttctggctacgcaaaactttttttttacatccaccttgccatagccgtaccagcggtacgaggaatctgaggtacctttttcttccatctcggcagaagtttgatgtttggcgaaactgtctcaggttacatggtaataacaatactatttgcaaaaccaaacacgccacataccagtactgcttgctggcagcctgaaccaatgttttaacggt

SEQ ID NO: 8565 - DNA, 7394 bp, Zea Mays
caacgcagttcctcacatctctcactctccctaacggacgcaccagcacacacacaccgccagcgcagtgggcgagcgagtgcagcgacagtgagacgaaccgccgccgtcgcccaccaccgtccacccgccaacgggtaagacttgccttggttattccttccacatacgccactcaggtgggatccgctagcaactgtatgtgtccttttttatgttagaatggtactaaaaatctacagaacactatggaagagtcaagagtccatgatggatgcttctgctgctgcattgtagcctcatgaatttgggaattataaaataattcaaggtgtaaagctggtatggatctaagcatggcaagtttgaacttgtcagaacctcgagactctagagaatcaacttcgcccgcaccatcaacatcatcttctatatcaagagaaaaaggtgacctggcagaagttgatgatcctgaaagtgcaatgtccactgttgctagattgttggaagacctccatgctagcatggtgtctccatcggggaaggaagctacaaccagaaggttacttgaactggctagagcgaaaaaggaggcaaggattttgataggtagccattctcaggcaatgccactactcatatctacccttagagttgggtcatctgcagcaaaagtaaatgctgcagctctacttagtgcactctgtaaggaagaggacttgcgtgtgagggtcctcttaggaggctgtataccacccttaatctctcttttgaagtctgagtctgctgaagcgaagaaggctgctgctgaagctatttatgaagtatcttctggtgggcttttggatgatcacataggcaggaaaatatttgtgactgaaggtgtggtgccaactctgtgggacttgcttaatcctaggtctcaccaagatagagtagttgagggctttgtgactggggctttaaggaatctttgtggggacaaagatggttattggaaggccacacttgaggctggaggtgttgaaattattactggtcttctttcatccaagaatactgcttcacagtcgaatgctgcttctctgttggcacggtttatctctgcttctggtgatagcattcccaaagttatagatgctggggctgttaaggctctccttcaccttctaaatcgagataatatcatttctgttcgtgaaagtgcggctgatgctttggaggccctgtcttccaagtccagtattgcaaagaaagctgtggtggatgcaggaggccttcctattctgattggagctgttgtagcgccctcaaaggaatgcatgcagggtgggacatgtcattctctgcaaagccatgctgtccgtgctttatcaaatatttgtgggggaacaacttctctgttgctttaccttggtgagctctgccaagcaccccggtcacctgttcccctcgctgatattcttggagcgcttgcttattccttgatggtttttgacggctctgatgataaatcatttgaccctgttgagattgaaattactttggttgcgctcctaaaatctcatgacagcaagcttgatcgtattcttgaggctttagcaagtctatatgggaatgattgtttctccgacaggcttgatcactcttattctaagaaggttcttgttgggctgattaccatagctcctgctgatgttcaagagcttcttgttcgtgccttaactagcttgtgttgcgatggtgttggaatatgggaggctcttggaaagagagaaggggttcagttgctaatatcattacttgggctttccagtgagcagcagcaggaatatgcagtttccttattggctatcttgagtgatgaagtagatgacagcaaatgggcaataacagctgctggaggtatccctccacttgtccagctactagaaacaggatctcaaaaagcaaaggaggatgcagcttacatcatgtggaacatgtgctctgacagtgatgatatcagggcatgtattgagagtgctggggctgttatggcgctaatttggcttctaaagagtggtagccctggtggacaggaggcatcagttaaagcactgaagaagttgatacgatcagcagattctgctatgatcaatcagttactagcattactgctcagtgactcattgagctcaaaggcccatgtcattactgttctcgggcatgtccttgtgctggcgcctcagagagctctaatccagagtggagctccagctaataaagttcttaggtcactggttcttgttcttgaatcatcaaatgaagaaacacaggagattgctgcaactgtgttggctgatattttcactatgcgtcaggatatttgtgatgtaatggcaattgatgaaattgtccagccatgcatgaagcttttgacaagtggaaaccaagtgattgccacacaatctgccagagctttaggagcactgtcatgttcagctagttccatgtcaaaaaacaaaatgtcttgcttaactgaaggtgatgtgcgacctcttatagagatggcaaagacatcatctattgatgttgctgaaacagcatttgctgcattagcaaatctcctatcagatgcacagattgctaaagaagcattagatgacaatattgtcttggctttgactagagtgctcaaggatgggagtttagaaggcaagattagtgcttcgcggtcacttcgtcagttggtcaaccagtttcccctcagtgaagttctcccagattacttgcagtgctgttttataattcatgcactgttggtatgtctatctggcatcagtttagaaaatgttacaagtttggaaccccttgatgttcttacattgatggctacaacaaaggagggttcgcattatagcccccctctatgcactggttttcttgaagttccagaaagcttagaacctttagttcgctgtattagtattgggcttccacctgttcaagataagtccattcaaatcctagcaagtctctgtcagggtcgaccttcgctacttggtgaatatttaaacagaagtcaaggatgcatcacttctcttgctactagagttatagagtcaaatgacatggaaataaggatcagcagtgcagtcatcctcatatctgcaatgagggacagcagagaacggtccatcgatgttctggaagcatcaaaagttctgaagaatctgatatctgcactcattgatatgctgaagcaacattcctctttaacatccctagacattgaaatctggaaaccttccacagaaaaaagttcgcttaattatgagcaggatgttttgagtgtgcctgaacttggaaaggtttctgaagaaactgttgcactatggttgctctcactgatttgttcttatcatggaaggagtaaatatactgttatggagctcaatggcgttgacacagtatctgatagacttgctagctatactgctaaccgacaggaacagtatgaagactcagaaaatatatggacttgtgcccttctgttggctactctgtttcaggattcagtggttgttcagtcttctgaaataacacgaaccataccttccttagcatccttgctaaaatctgatgatattatcaataaatactttgctgctcaggcactggctagccttgtttccactgggagcagaggtatacagcttgctattgcgaattctggtgcagttttgggtgctgtagcattgatcggacaggtagaatctgatatgccaaaccttgttacaatggctgaagaattcaagttgtcagacaatccatgtcaaataatgttgagaagcctttttgagcttgaagatgtctgcactggtgcttccgcccggaggtccatacccttgctagtggatctacttaaaccaatgccagataggccaggtgcacctctgattgctttgcaccttctgactcaactagcggaaggtagtgagtcaaataaaattgctatggcagaggctggagctttggatgccttgactaagtatctatctttaagccctcaagactcaactgaaactactataaccaatctgttggggattttatacactaatcctgatcttctttaccatgaatcatcacgtagcacttcaaatcagctggtagctgtcttgcgtttgggttcgagaagttctaggcttagtgcagtaaggacgttgcagaaactctttgattcagagaatataagggacaccgaagtggcccggcaagctattcaaccactacttgacatgcttgagtcaggaactgaaatagaacagcaggcagcacttggtgcgcttatcaagctttctgctgggaacatcgctaaggattctgctatgtttgatgtagaaggcaacacacttgaaaatctttacaaagttttatccttcagttcgtcattggagctgaagaaggatgctgctcaactctgctatattttatttgagaactcaactgtacgtgcatcaccaattgcaacagaatgtcttcaacccctgatatcactgatgacatcaggatctagtttggctattgaaccagcagtttgtgctctaaacagattactggatgaggactacaatgcagaaattgctgcaactagcgaagttattgatcttcttgtcagttttgttcctggtacaaactatcagttgtctgaagcatgtatcggtgctctcataaagttgggcaaggatcgtccaaactgcaagcttgacatggttaaagctggtatcattgagcatgcacttgatatgattcttgatgttcctgtatctgttagttcatccattgctgaattgcttcgcattttgacaaacaacagtggcattgctaaaagttctgctgctgcaaaaatggtggagccacttttcttgcttttacgtcgccctgatgttactatgtgggatcagcacagtgccttgcaagcactcgtaaatattttggagaaacctcagagtctagcagcattgaagttgactcccagtcaaataattgagcctttaatatcatttcttgagtctccctctcaagcaattcagcaacttggcactgaggtgctctcacatcttctagaacaggaacattttcaacaggatatcactacaaaaaatgcagttgttcctctggtgcagcttgctggtattggaatcttgagcttacaacaaactgcagttaaagcacttgaaaacatctcacagagttggcccaaggcagtagccgatgcaggtggaatttttgaactttcaaaggtaattgtccaggatgatcctcagccaagtcaagcattatgggaatctgcagcacttgtgttatgcaatgttctgcgttataattctgacaactatgtcaaagtctcaatggctgtacttgtgagattgctgaactccaccatggagagtaccgtcacgatagctctcagtgctctacttgttcaagagaaaagtagctcacgctgtgctgtggccatggctgaggctggggcagtacgggcactcttggagctcctgaagagccatcgatgtgaggaatctgcagcaagattgcttgaagccctgataaacaattcaagggtccgtgaaacaaaagttgccaagtatgctattgctccactggcacagtacctgttagatcctcaatctaagaaccagtcagcaaagtttctggttactcttgcactaggtgacattttccagcatgaagctcttgcaagggcaagtgactctgtgtctgcctgccgtgctcttgtaagcctacttgaggaccagcctacggatgacatgacaacagttgctatttgtgcactgcaaagcttagtgatgcacagcaggacaaataggcgtgctgttgctgaagctgggggcattttggttgtgcaagaattgcttctttcaccaaatgtggatatttcaggacaggctgcccttctaatgaagtacctattttcaaatcatacgctgcaagaatacgtgtcgaatgagcttattcgatctcttactgctgccttagagagagagctgctctctacgtcaactatcaatgaagttattctgaagaccatatatgtgatattcagcaacttcaaaaaggttcggttttctgaggccgcaaccttgtgcataccacacctggtttgtgctttgaaggatggaaatgaggctgcccaagagagcgtgcttgacaccctttgcttgcttaaagaatcttggccgcaaatgaatgaagacatcgctaaagcccagtccctgatttcagctgaagccatacctgtactacaaatgcttatgaagacatgtcctcccagttttcacgagagagccgatagtttgcttcattgcttgcctggttgcttgacagtgaccatcattcgtgggaataatctgaaacagacaatggggggtacaaatgcattttgttgcctgcaaataggaaatggtcctccaaggcaaactaaggtggtaaaccacagcatgtgcccagcttggaacgagggtttcacttggttatttgacgtggcccctaaagggcagaagctctacatcatatgcaaaagcaaaaatacgtttggaaagtcaacccttggaagagtgaccatccagatcgacaaggttgtcaccgagggtgtatacagcgggttcttcagcctcagccacgacggaggtaaggacggctcaaggaccctagagatagagatcgtatggtccaataggccatccaacgactgtatgtagcgtacggatgatttacctgacgccaattcttgtactcttggcttccatgtaaatcagccccccccccataatcatccgaattcatttatttgtacgtagaaagttaagacacttagataactcgcgccatcattcaattattgaggtcatttccgggattgtggccctgctgctgtaaactgattttgcacccgggtatttttttttgtacaggtgaatttatttcatgtagttatagcttagtgtagattggtggtgagtacggacaagccctagtgacagtaacattgggtgtgatgtgtggcgtgatatttgctcccgtgggtgtgtttccggcacttgtagcctcaggatacacatggctgagcttggcactgttctatttgtcaggcatgtttgtttacctgtttggttctggctacgcaaaactttttttttacatccaccttgccatagccgtaccagcggtacgaggaatctgaggtacctttttcttccatctcggcagaagtttgatgtttggcgaaactgtctcaggttacatggtaataacaatactatttgcaaaaccaaacacgccacataccagtactgcttgctggcagcctgaaccaatgttttaacggt

SEQ ID NO: 8566 - DNA, 1150 bp, Zea Mays
cagaagaccgcacccgcttcaaaaacgcgtgcgggtgcggcggcggcttctgccgacgcatcctgcaggtttgggaggcaagttggagaaacgggcaaaacccaccaaagccaaggacactgcaatttacacaaacaccccttgctcgccgcctatttgtattttccgcgcttctctccttcgctcttttcttttttctccaaaccatcgtcggctgcggcactcctgaagggaggaagccccaagcccttgccgccgcagctgccgcagccagcaacgaaccgtacataggcagggacgaagcgatggagggagccaatggagtcggtgggtcggagtccgagcggaagccgctgtcagaggtggtcggcgactgcgtccagcgctggttccaggacgcgtacaaggaggcgcgcaaaggagacatcgccaaccaggtgcttgtagcgcagatgttcttctcgggttatgggacccccaagaacgagtacaagggaaaacaatggatggatagagcatcaaggttcaggtcttccgctttgaaggttggcatgaaacgtccaggatacaatgcaagtgactcagactctgatgacgatgcaaatgatgacgccaaccaataacactcaattacaaattgagttattagttaggagattcacagggtactcccacgacgccagaaattaggagtcaaggagtgcccaggcggtgcagcatggacattcactcacagcatgacaatgacacgaagctgattttttttttttgttctgttaaaaaagtgtccagactgtcgaacagaggagtacctgatcctaacgcaacgcaacgcaacgcagcgcacgtaattctgcagccggagccttttgtttggattggatgggaaacgatgtgaaaattaatcaaaaaaggggatagggtgtcgccgtcgcccgagtctgaaaccgacgagaggatgcatatgcatgtatgaagaagtctgtacgcatgcttacttatcccggcatgttcgtgtttgccgaccagctctagcgatcgacagaggccacttgtttgacagtaaaaaaaaagaagtcgtgttctaagcgtcacatcacattgtaatgtcttttcgtggacggaagtttttttttaaattatattgact

SEQ ID NO: 8567 - DNA, 1936 bp, Zea Mays
ctcctcaatcaaatttggaaccagtacagggtctttacaagaaaacgaccgataccgtctccgcctttccttccttttgcgctagcttccacagcatcaccaccgccgccccagctcgcttccctccccgctacacggacacggccgctcagcgctcaccaccgcttccatgctcctcgcctcgtctcccgctcgcgagacgtagctccagatcctctcccccacccacggcagcaccgcattaccctcagatccacccccgcgagcctcatttcagatccacccatgcgcctcccggtccttttcgccctgcagctggtcgccttggcggcggcagcttcggcggccgaggccgcggcgacgttctcctcgaggatggtgcaccgtctgtccgacgaggcccggctggaagcgggcccgcgcatggggttgtggccgcagcgcggaagcgggggctactaccgcgcgctgctgaggagcgatctccagcggcagaagcggcggctcgcgggcaagaaccagctcctctcgctctcaaagggcggcagcaccttctcccccggcaacgacttaggctggttatactacgcttgggtggatgttgggacgcctactacctcctttttggttgcattggatactggaagtgacctgttctgggtaccctgtgactgtattcagtgtgcccctttgtctagctaccgtggaaatctggtgctccgtcgtaaatggagcatctattatgcaggatagagatcttggaatatacaagcctgccgaatcaacaacaagtcggcatcttccttgcagccacgagctatgtcaaccggggagggccatgcaccagtaaatgcttcagttattattggctgtggtcgaaagcaaagtggtgactatctggatggcattgcaccggatggactccttggccttggaatggcagacatttcagttcccagtttccttgcaagagctggactagttcggaattccttctcgatgtgcttcaaggaagatagttctgggagaattttctttggagatcaaggagtgtcctctcaacaatccacaccgtttgttcctctgtatggcaaacttcaaacttatgctgttaatgtcgacaaatcttgtattggacataaatgtcttgagggttctagcttccaggctttagtcgatagtggaacatcatttacttctcttcctcctgatgtttacaaggctttcacaacggagtttgacaaacaaattaatgcttcaagggtgccttacgaagacagtacctggaaatattgttacagtgctagtcctcttgagatgcctgatgtgccaaccataatcctggcattcgctgcaaacaagagcttccaggctgttaatcctatcttgccatttaatgacgaacagggagcgcttgccaggttctgcttagctgtactgccatcaacggaacctattggaattattggccagaatttcctggttggataccacgttgtcttcgacagagagagcatgaagttgggctggtaccgctctgaatgtcgcgacgttgacaacagcacgaccgtgccgctgggcccatcgcagcacggcagttcagaggacccgttgccgtcgaacgagcagcagacttccccgcccgtgacgcctgcaacgacaggcacggctcctccctccagtgcaacgacgaaccgacagatgctctttgctagctcttacccgttgctgtttctgacaatgtccactgtgttcttcatctcatgagcaactgataatctgatatgctggtaatcgatagccctctgtatattgtatgtgctttatatgtggtgccttttgctctatttttttttgaggaaacagtagggaactaaggccgatccctactgaaatagaattaaaccaaaacaaacaaaagtacagaacggtacag

SEQ ID NO: 8568 - DNA, 2176 bp, Zea Mays
aatttaacaaattcctctcccgtcccctttcccttcggggatggtattcgtcgtcttggcttcatcctctcgcccgccgtctcgactgtagcaagcggggctgctgtccgccgcattcaggagccatgcgtgaggggatgagggagagggacagaggcgggagcccggatgcgtcaggtcctccgcccttccgcggcccggcgtacaagacgaagctgtgcgcgctttggaggggcaggggcggctgcccccgccccaactgcggtttcgcccacggcgaggctgagctccgaaggccgccccctcgcgcctccttccagcctcgcccacgacctgttggcaatcggtcatttatgatacttgaatgcttaacctgcctcagaagaactgaacatggaagatattatacattttatcttctcgatgggattcatgctatggtcagtgagctttaacaatgctattagaagcttttgcaactaattgaaacatgccgtttgaatacactgcatcaagctatatctgtggctttattgttacctgcacttcaagtatcatcttggaacaagatttttggcagtcatatggataacatctgatcaaatgaaattaaatttatttggtgctattcgagttttggaagattttacgtcatggtgattggaacatgacatctaattaattttggtgattccatccaaatttacttcagggagaagggattacagagatcatgagtttagactcaggcctgatagaagacactcaccccatgggaggtattcccctgaaagagatatcaggcgtcgttcatttcatgataagagaccaagttctgaagataggggatctagtcattcaagatcacctattaggaagagtgagagaaaacatagtaaaagtcctgatggtggagaaaccgattcatccgtaagtgttcgaagtcctgataacgaagacagaggaaaagatgaaaggtacttaagcagtgatgagaaaaatggtcatgaagatcaactgaaacaaatgcatctggacatggaagcattgcgtgaagacaaatcaaagctggagatgatattagagaagaagactgatgaagagcacaaactttgtagcagagtagaagatcttgaattgcaattgaacaaagagaaagaagattgccaaaggatgtcctccaaaaccaaaaagctaatcaaagcacatgggcgttatataaaagcacaggaggatttaaagaggtctcaggctcgctttgagaggctagcagatttgcttgcttcagatattttgaagccttgtaccaaggagcagggttccatagggattactgccaatgaagatccatataatgctaatgaaatgagcccaagtgaccaaagacaaaaccatgtttcagcatcgagaaaaagacttatttccctcccaacaagtgaagaagcaaaaactggaaagagacagagagagaatggtgatgatatgatcccaacatcagagaactatagacctgaagatgccctagaacatctccaagatagcaagggaactgatctaccagaatcatttacagtgaagaagttaagggagggtgacaacgatgatgtaggaaacattgtctcttcaagcaatatttttgcggataggtacacgggcgatgatgaggaagttgatgttgattagtgagcggatgctgtcggtggttgataatgatttgagctgtaggaagctatctcaacagacgacatggatgccagcttctaaaactacttttatgccttttgcattgggtaataggggctggtatatctggtagagctatttatgtgcttagacttgagttgtgatgctgtcaaacatatctatacttctttttcttttgtgtctcctggggctcgaagaggatactaatctgtgctcgcctcatgtattattcttagccagtatgagtattatttgagacttttggattggttgtgttattccgcctcagcctcaggttacaaaccatgcatccatatccatctacctatcaggaaatgcatgcgtgatccttaaacttaccgaaggtcttctaagtctgtattctgatactagaggttcatagagtttgtggacttatgttcaaagtgcacaaaaaatgtttacaagtttgacttgtcaacatggaatctca

SEQ ID NO: 8569 - DNA, 2525 bp, Zea Mays
aatttaacaaattcctctcccgtcccctttcccttcggggatggtattcgtcgtcttggcttcatcctctcgcccgccgtctcgactgtagcaagcggggctgctgtccgccgcattcaggagccatgcgtgaggggatgagggagagggacagaggcgggagcccggatgcgtcaggtcctccgcccttccgcggcccggcgtacaagacgaagctgtgcgcgctttggaggggcaggggcggctgcccccgccccaactgcggtttcgcccacggcgaggctgagctccgaaggccgccccctcgcgcctccttccagcctcgcccacgacctgggctttgcatcaccttatcatcttcttctgggttttaccgtacccaaaatgttgtcgattccatgccaatttgtcggattaggttatttggatggtttcccgagcaagagacaccagtgcgctcttcttcaaagagatgcatattcggcctgtttattcatcgagttattgggatgattggttgatgactggagacacagcccaatgtttgaatgctagtggtgcagcaaacactgacagatagcaatgtgatctgaatcatatgatctcaggaggagagttagcgaacagggaagatagttgcaactgcaagaattatataatgttaacaatttgcaagtgcatcctttgaggatgtacaaatggggttgcagatgttaatggctgacaattctgggaggttttatagtttctacccgttgctgagaagactctacccttcaattgcataacagtatgatggtttggcacctgaatcttttctcagtttgtgttatatcttctcatcttatggtgcatatacaccatgattcctgtgtagtggtacttgaactgagtgcttgctgccgcagaacacaaaaatcatcaacaagcctgatttcattgcagataatcttggcattgctggttattattttgattttacaatagatatctcatggacagatttgttgagattgactgcttccagaggatggcacatcttatttccatcctggcctttgtttcagttggcaatcggtcatttatgatacttgaatgcttaacctgcctcagaagaactgaacatggaagatattatacattttatcttctcgatgggattcatgctatgggagaagggattacagagatcatgagtttagactcaggcctgatagaagacactcaccccatgggaggatctagtcattcaagatcacctattaggaagagtttatggcttgcttgtgaaattgcctatctttatgtttatgttctatggctgctcagtgagagaaaacatagtaaaagtcctgatggtggagaaaccgattcatccgtaagtgttcgaagtcctgataacgaagacagaggaaaagatgaaaggtacttaagcagtgatgagaaaaatggtcatgaagatcaactgaaacaaatgcatctggacatggaagcattgcgtgaagacaaatcaaagctggagatgatattagagaagaagactgatgaagagcacaaactttgtagcagagtagaagatcttgaattgcaattgaacaaagagaaagaagattgccaaaggtctcaggctcgctttgagaggctagcagatttgcttgcttcagatattttgaagccttgtaccaaggagcagggttccatagggattactgccaatgaagatccatataatgctaatgaaatgagcccaagtgaccaaagacaaaaccatgtttcagcatcgagaaaaagacttatttccctcccaacaagtgaagaagcaaaaactggaaagagacagagagagaatggtgatgatatgatcccaacatcagagaactatagacctgaagatgccctagaacatctccaagatagcaagggaactgatctaccagaatcatttacagtgaagaagttaagggagggtgacaacgatgatgtaggaaacattgtctcttcaagcaatatttttgcggataggggcttggacgtgggggtggatgaggatgtggcagttgtcaacagtttcattagctcgcgcatgattgataagcggccaataccgagctcaaactccttgaaggagctgtcaaactccttgaaggagctgccgcctgctggccatgcaactccgaaacagcagctggcatccttaggcggcgcttcaggacgagtgatattcaaccgtgggccgacagtggcacaattccggagcacactcaggggggcggtcctgaggagggtgcggtgcaaaggaggaactgacggtggaggtcgaaccagcaggaatggcagcacacgagatgagacaaacaggagagccacacatctttgtgttggaccactcaccctcgagaggtgtttggttgcctgggcaagcctctaggctatgctatccattgatcaatcttactgaactattgaataactgtggaggaacatatgtctatttttgtacaaatagagtggactaaatcttcatg

SEQ ID NO: 8570 - DNA, 3505 bp, Zea Mays
aatttaacaaattcctctcccgtcccctttcccttcggggatggtattcgtcgtcttggcttcatcctctcgcccgccgtctcgactgtagcaagcggggctgctgtccgccgcattcaggagccatgcgtgaggggatgagggagagggacagaggcgggagcccggatgcgtcaggtcctccgcccttccgcggcccggcgtacaagacgaagctgtgcgcgctttggaggggcaggggcggctgcccccgccccaactgcggtttcgcccacggcgaggctgagctccgaaggccgccccctcgcgcctccttccagcctcgcccacgacctggttatttggatggtttcccgagcaagagacaccagtgcgctcttcttcaaagagatgcatattcggcctgtttattcatcgagttattgggatgattggttgatgactggagacacagcccaatgtttgaatgctagtggtgcagcaaacactgacagatagcaatgtgatctgaatcatatgatctcaggaggagagttagcgaacagggaagatagttgcaactgcaagaattatataatgttaacaatttgcaagtgcatcctttgaggatgtacaaatggggttgcagatgttaatggctgacaattctgggaggttttatagtttctacccgttgctgagaagactctacccttcaattgcataacagtatgatggtttggcacctgaatcttttctcagtttgtgttatatcttctcatcttatggtgcatatacaccatgattcctgtgtagtggtacttgaactgagtgcttgctgccgcagaacacaaaaatcatcaacaagcctgatttcattgcagataatcttggcattgctggttattattttgattttacaatagatatctcatggacagatttgttgagattgactgcttccagaggatggcacatcttatttccatcctggcctttgtttcagttggcaatcggtcatttatgatacttgaatgcttaacctgcctcagaagaactgaacatggaagatattatacattttatcttctcgatgggattcatgctatggtcagtgagctttaacaatgctattagaagcttttgcaactaattgaaacatgccgtttgaatacactgcatcaagctatatctgtggctttattgttacctgcacttcaagtatcatcttggaacaagatttttggcagtcatatggataacatctgatcaaatgaaattaaatttatttggtgctattcgagttttggaagattttacgtcatggtgattggaacatgacatctaattaattttggtgattccatccaaatttacttcaggtgattcgtattagaagtactggatcaattctaagtggttaatcatgataatcatgtattggcatctactctttcattagttgtattggctcgtctgtgtttgtggtctatggtgtattggtgttattgtgggccctctaatttttgagctaattgaataaccatatggctcaaggttgtggtaagggagaagggattacagagatcatgagtttagactcaggcctgatagaagacactcaccccatgggaggtattcccctgaaagagatatcaggcgtcgttcatttcatgataagagaccaagttctgaagataggggtaatcactttttctgtgcacatttgtgccaataaaaatatttgccactgtccattgtatcttctaactactccctgagatttgatttgcaggatctagtcattcaagatcacctattaggaagaggtatgtaggaacgaataacaattattagggattcaagatctagtcattagaagtacttaaatttgtttattacatcgggctagtttatcttcatgtaccatcatgacttaatccctgctaatttattggtttcctaattttttatatgtgcgagctgcaatgttaagtttgtggtttatgagaccttttattctattgttcaaccatgatctaccatggagtctcattaccatccatttataactttggggtggggttgtagccgtgtagggtcatgaatgttggtatcaccaaggagggttttgatcttatgttaggcatgtgatctgtatacatgctttttttgcaagtttatggcttgcttgtgaaattgcctatctttatgtttatgttctatggctgctcagtgagagaaaacatagtaaaagtcctgatggtggagaaaccgattcatccgtaagtgttcgaagtcctgataacgaagacagaggaaaagatgaaaggtacttaagcagtgatgagaaaaatggtcatgaagatcaactgaaacaaatgcatctggacatggaagcattgcgtgaagacaaatcaaagctggagatgatattagagaagaagactgatgaagagcacaaactttgtagcagagtagaagatcttgaattgcaattgaacaaagagaaagaagattgccaaaggatgtcctccaaaaccaaaaagctaatcaaagcacatgggcgttatataaaagcacaggaggatttaaagaggtctcaggctcgctttgagaggctagcagatttgcttgcttcagatattttgaagccttgtaccaaggagcagggttccatagggattactgccaatgaagatccatataatgctaatgaaatgagcccaagtgaccaaagacaaaaccatgtttcagcatcgagaaaaagacttatttccctcccaacaagtgaagaagcaaaaactgagacagagagagaatggtgatgatatgatcccaacatcagagaactatagacctgaagatgccctagaacatctccaagatagcaagggaactgatctaccagaatcatttacagtgaagaagttaagggagggtgacaacgatgatgtaggaaacattgtctcttcaagcaatatttttgcggataggtacacgggcgatgatgaggaagttgatgttgattagtgagcggatgctgtcggtggttgataatgatttgagctgtaggaagctatctcaacagacgacatggatgccagcttctaaaactacttttatgccttttgcattgggtaataggggctggtatatctggtagagctatttatgtgcttagacttgagttgtgatgctgtcaaacatatctatacttctttttcttttgtgtctcctggggctcgaagaggatactaatctgtgctcgcctcatgtattattcttagccagtatgagtattatttgagacttttggattggttgtgttattccgcctcagcctcaggttacaaaccatgcatccatatccatctacctatcaggaaatgcatgcgtgatccttaaacttaccgaaggtcttctaagtctgtattctgatactagaggttcatagagtttgtggacttatgttcaaagtgcacaaaaaatgtttacaagtttgacttgtcaacatggaatctca

SEQ ID NO: 8571 - DNA, 3864 bp, Zea Mays
ctccactctccactgcccgctcgatacgggcgggcacgactggtgccaagttgttttcttcgccctccccccttccgcggcgcgttgtagaaagcgagcggggggtagtaggatccatcggtaggtcgtcccatcccgtcgcaccgcccgctacatacgccgcggcgggtaccttgcttccgttcatggcatgtttgtctcggacggtgggttagccatggacgccggaggccgtgcgggcgtgagcggccccgccgcggcgaacggctcgttcggactcgtccgcaccgtggtggggtactccacctcgcccctcttcttctggctcctcaccgtcgcgctcgtcgccgccatccacatcgtctccggctcgtcctccaagcctgccaggaacaatgagacggaggagaggaagaaggcgcgccgcgataggttcctcccggccgccgaggaacgggaggcgtcgggcaggggagatgaccgggttctggagatgatgcgcagtttcagcttcatgcaggcgaccgaggaggatttcatggagggcatgaccgcatacgagcacaacggcgttggcgacggcacagcgcacgggcctgtcgcgccggagccgcctgcgctgacggcgactagcctcagcttcaggtttcagcaccagatgcccgaagttccaacggagacggcgctggtttcgagagaattcactgcggcaagacaagagacggcggtagtttcgagagaactgacagcagcgagagacgatgatggacgacaacgagaggaagagaaggaaccacactttcctttggaaccattcgctccgttgcagacggcggcagacatgcaagaacaccggcacgacgaagcagaggaaacagagttcctggcggaggagccggcagaagagcggagcggagaggttgcgcaggaggaggcagcgccacccaagaccgtcgcggccacgcacaactatcagttcctgactgagcgcgacttccgggggttcgtcagggagccggaggccgtgacggtgcgcgtccaggaatctttcgtgccgtcgccgcctccggcgcaccagcccgaggagcgacgggtggtcgacgtctcctcccgcagcggccggttcctcacggcgagggacttccggccggcgaacgagcccgacgtgtgcgagagcgtggcgtcgtccgggaagtggacgccgccgcctccgaggccgaggccgaagccgaagccgaagcctgcgagctccccgtccgctgcttccatgggcggcggcggcggcttcacgtcggagttctccggtttcggcgactcggactccgagtccagcgccagcgacggctactcggtgaaggatctcgtcgtcgactccgacagcgattggttcctctcagagaaggagttcccggcgtctgcacttggctccggcaacctcaaaacttacaaggccaaggtgctcagggcgatcgaagccatggaggcggcgtccaacctggagccgtcttaccaggaggactcagcgacgacagtgtcgccgagctcggtccggcagcgctcaccggacaccgttcccgatggttctcccaagttccctgaggacgtgtggtctcgcagcccttcgccggacgtcgagtacaaagaggacgaggaggaggtaacgagagaagctgaagcacagtatgatgaggacatcgaacagcgaagcacgggggaagaggaggagggcaagggcatcgacatgagcgatgacgagcactcgtcgggcggcaaggaggtagaatccgcaccaatctatgatctggctcctgttgctgacgactgtatggatcattcagagaaggggatcatcactctaaatgatcattcaggaggtcaagctgcttctgatgctcaaagaagtccagaggcagtctctgccagacaattagctgccgtaccatcagatcaagttgctggcccagtcaagagaagtccggagccaccggagcaggaatttgttggtatggttgatcattcactcgagcacagttcttacgaccggaaacaaactgccagcgaaagcgatcagtcatatgaaatagtatttgatgacaaaagaaggccgcagcgtgcagagacaggatttcttgtttgggaagagatcgtcaccagaaacgatcaaccgcccctagggccccatgctgatgagcaaggcctggatacagcagaggaagagtatgtgggcacaggtgatcagccacatggtgcagtttctgatgagaagagcggtgcagagactccggagcaagaattcagccttaccgaccaccgaaacgtagcagttcctgacgccaggaacatctcggagaccagagaagatgaggaacaagccagtgcagatgatcattcggacaatgcagtcaccgggaaggcaaaggtatatgacgaagacggggaggaccgggaagcgaggtggaaggatctgacagacgaggaggaggacgagctggagtcgctgtgggagcaccaggatctggtagagcagctgaagctcgagctgaaaaaggttcggtcgtcggtcgggctgcccacgatcctcgaggagtcggacacaccaaaggctccggtggaggacctcaagccatggagtatggatgctaagttccttcgcgaggaccccatggacgagctgaacaagttctacaagagctacagggagaggatgaggaagttggacattttgtgctaccagaagatgtacgcaatagatttcctacagctcagagggtcccagcagtccaacaacaacaacaacaactctgtaaagtccttgtcgcctacggtggcgtccatcctgtcgcataacttccggtcatcgcgccggagatctcccgaggacccgtcggaacggttcctcagggagctccgctacgacctggagacggtgtacgtcgggcagatgtgcctgtcgtgggagttcctccggtggcagtacgagcaggcgcgcgacctcccggagtccgactcctaccacagccaccagtacaaccaggtggccggcgagttccagcagttccaggtcgtggtgcagaggttcgtggaggacgagtcgttcaaaggccctaggctgtcgaactacatcaacaaccgaggacagcctgaaggacaggatggaggaccagcgcaaggggaactacgtgataaccagcgaggagctggaggacgtcatggaagaggcgatgcacgtcctgtgggagttcatcaaggccgacagggccgagacgacgacgacggcggcggcggcatcggtgctcaagggcctgtcgagcagcaacgtcgagctccaggaccctctggatcatggcctcatggcgcacatccattccgcgttacagaagaaagagaagaggctcaaggacctgctcaggacgggcaactgcatcgcgaagaagtttaagaagcccaaggaggacaggtccaaccagaacctcttcttctcgcaggtggacatgaagctggtggcgcgggtgctgaggatgcccaggatcaccagcgagcagctgcagtggtgcagggccaagctcgacaagatcgtactggtagataggaagatccacagggaggcttcatttttgttgtttccctgctgagagagagagagagagagtacagcatatatgttttcttctttttctcttgttcccttttgctcgatgaaaccagtccacgagtatagggtttctttagccttttggcaatccagtcttttacgcatgtctgtccatagttaccctgaaattacatccaccgcaatgtacatgcatactccattgcctcttcagtagaatgaaccgtcttcttttctgtcgctgaacaccgccg

SEQ ID NO: 8572 - DNA, 3982 bp, Zea Mays
tttctcctctcgtctccactctccactgcccgctcgatacgggcgggcacgactggtgccaagttgttttcttcgccctccccccttccgcggcgcgttgtagaaagcgagcggggggtagtaggatccatcggtaggtcgtcccatcccgtcgcaccgcccgctacatacgccgcggcgggtaccttgcttccgttcatggcatgtttgtctcggacggtgggttagccatggacgccggaggccgtgcgggcgtgagcggccccgccgcggcgaacggctcgttcggactcgtccgcaccgtggtggggtactccacctcgcccctcttcttctggctcctcaccgtcgcgctcgtcgccgccatccacatcgtctccggctcgtcctccaagcctgccaggaacaatgagacggaggagaggaagaaggcgcgccgcgataggttcctcccggccgccgaggaacgggaggcgtcgggcaggggagatgaccgggttctggagatgatgcgcagtttcagcttcatgcaggcgaccgaggaggatttcatggagggcatgaccgcatacgagcacaacggcgttggcgacggcacagcgcacgggcctgtcgcgccggagccgcctgcgctgacggcgactagcctcagcttcaggtttcagcaccagatgcccgaagttccaacggagacggcgctggtttcgagagaattcactgcggcaagacaagagacggcggtagtttcgagagaactgacagcagcgagagacgatgatggacgacaacgagaggaagagaaggaaccacactttcctttggaaccattcgctccgttgcagacggcggcagacatgcaagaacaccggcacgacgaagcagaggaaacagagttcctggcggaggagccggcagaagagcggagcggagaggttgcgcaggaggaggcagcgccacccaagaccgtcgcggccacgcacaactatcagttcctgactgagcgcgacttccgggggttcgtcagggagccggaggccgtgacggtgcgcgtccaggaatctttcgtgccgtcgccgcctccggcgcaccagcccgaggagcgacgggtggtcgacgtctcctcccgcagcggccggttcctcacggcgagggacttccggccggcgaacgagcccgacgtgtgcgagagcgtggcgtcgtccgggaagtggacgccgccgcctccgaggccgaggccgaagccgaagccgaagcctgcgagctccccgtccgctgcttccatgggcggcggcggcggcttcacgtcggagttctccggtttcggcgactcggactccgagtccagcgccagcgacggctactcggtgaaggatctcgtcgtcgactccgacagcgattggttcctctcagagaaggagttcccggcgtctgcacttggctccggcaacctcaaaacttacaaggccaaggtgctcagggcgatcgaagccatggaggcggcgtccaacctggagccgtcttaccaggaggactcagcgacgacagtgtcgccgagctcggtccggcagcgctcaccggacaccgttcccgatggttctcccaagttccctgaggacgtgtggtctcgcagcccttcgccggacgtcgagtacaaagaggacgaggaggaggtaacgagagaagctgaagcacagtatgatgaggacatcgaacagcgaagcacgggggaagaggaggagggcaagggcatcgacatgagcgatgacgagcactcgtcgggcggcaaggaggtagaatccgcaccaatctatgatctggctcctgttgctgacgactgtatggatcattcagagaaggggatcatcactctaaatgatcattcaggaggtcaagctgcttctgatgctcaaagaagtccagaggcagtctctgccagacaattagctgccgtaccatcagatcaagttgctggcccagtcaagagaagtccggagccaccggagcaggaatttgttggtatggttgatcattcactcgagcacagttcttacgaccggaaacaaactgccagcgaaagcgatcagtcatatgaaatagtatttgatgacaaaagaaggccgcagcgtgcagagacaggatttcttggtacgagcagcccctcacatgaactcgtttctgaagtttgggaagagatcgtcaccagaaacgatcaaccgcccctagggccccatgctgatgagcaaggcctggatacagcagaggaagagtatgtgggcacaggtgatcagccacatggtgcagtttctgatgagaagagcggtgcagagactccggagcaagaattcagccttaccgaccaccgaaacgtagcagttcctgacgccaggaacatctcggagaccagagaagatgaggaacaagccagtgcagatgatcattcggacaatgcagtcaccgggaaggcaaaggtatatgacgaagacggggaggaccgggaagcgaggtggaaggatctgacagacgaggaggaggacgagctggagtcgctgtgggagcaccaggatctggtagagcagctgaagctcgagctgaaaaaggttcggtcgtcggtcgggctgcccacgatcctcgaggagtcggacacaccaaaggctccggtggaggacctcaagccatggagtatggatgctaagttccttcgcgaggaccccatggacgagctgaacaagttctacaagagctacagggagaggatgaggaagttggacattttgtgctaccagaagatgtacgcaatagacaccaattgttttaattttgactgcagatttcctacagctcagagggtcccagcagtccaacaacaacaacaacaactctgtaaagtccttgtcgcctacggtggcgtccatcctgtcgcataacttccggtcatcgcgccggagatctcccgaggacccgtcggaacggttcctcagggagctccgctacgacctggagacggtgtacgtcgggcagatgtgcctgtcgtgggagttcctccggtggcagtacgagcaggcgcgcgacctcccggagtccgactcctaccacagccaccagtacaaccaggtggccggcgagttccagcagttccaggtcgtggtgcagaggttcgtggaggacgagtcgttcaaaggccctaggctgtcgaactacatcaacaaccggtgcgtcctccgcaacctgctgcaggtgcccgtgatcaaagaggacagcctgaaggacaggatggaggaccagcgcaaggggaactacgtgataaccagcgaggagctggaggacgtcatggaagaggcgatgcacgtcctgtgggagttcatcaaggccgacagggccgagacgacgacgacggcggcggcggcatcggtgctcaagggcctgtcgagcagcaacgtcgagctccaggaccctctggatcatggcctcatggcgcacatccattccgcgttacagaagaaagagaagaggctcaaggacctgctcaggacgggcaactgcatcgcgaagaagtttaagaagcccaaggaggacaggtccaaccagaacctcttcttctcgcaggtggacatgaagctggtggcgcgggtgctgaggatgcccaggatcaccagcgagcagctgcagtggtgcagggccaagctcgacaagatcgtactggtagataggaagatccacagggaggcttcatttttgttgtttccctgctgagagagagagagagagagtacagcatatatgttttcttctttttctcttgttcccttttgctcgatgaaaccagtccacgagtatagggtttctttagccttttggcaatccagtcttttacgcatgtctgtccatagttaccctgaaattacatccaccgcaatgtacatgcatactccattgcctcttcagtagaatgaaccgtcttcttttctgtcgctgaacaccgccg

SEQ ID NO: 8573 - DNA, 1082 bp, Zea Mays
ccccgcccacctcttccgtcctcccgttcccgtcccgcacacagactctttctctctcctcccctctctcgtcctctctctctcgtccgatctgcatctgcttttctcccccttgtctgtctctctcctgtccgtggcgtgcgcaaagatttgattttttttttctcggggaggagccggagtccgagcaggagtggcggcgggagggaggagatcctgatctgttgtcgcagcggggaggggaggaccggaggaggaagatggctgcgcaggagcaggagcaggagcaggagaagcagcaggcgaagacgagcaccacgagctcgctcccctccagcagcgagcgctcctccagctccgctcgcaacaacctcacggaaggaggggcggagagcgacgaggagatacggcgggtgccggagatgggcggcgcgtcggcgtcggcctcgtcgggcgccggcgcggacgagcgcggccaggcggcccttcacggccctcagccaagaggaagctgacctcgccctcgcccgtgtcctgcaggagcaggagcgggcgtacatgttgcttcggatgaacgggggcggtggcgagggcagcaactacgggagctctgatgaagggagctacgaatatgacgaagagggagaggaggactacgaagataaactggagctctcgctggtctcagcgattggcgaacagtggaggtggagcacgaggaggatcatgcgaatgattcccatgagacatggcaagaggttgatccagatgaatactcttatgaggagctagtcgcattgggtgaagtagttggcacagaaaacagaggtctctctgccgatacacttgcttctttaccttcagtaacatacaagctgcaacatgttcaggatggcaacacggagcaatgcgtaatttgctgtgtggaattggaggatgaatctttatgcgatgttttatggacaacaattacacacaacataacagccaatgataattaatgttgacaattcgaatttattaattcaaaaattaataaatacacatttttgcacatcatttgtatagcgtgaattgggaag

SEQ ID NO: 8574 - DNA, 1612 bp, Zea Mays
ggccggcaagctagatgcactgaccacggtgacccatctcgatcgatcggcggcttcgctagctagctgggacacagcccccatataaatcatccactcctccgtagcaagcacatcctgaagctgcctttcttttccaataagctaagcagcaggtgcaaagggaattcgagatccagagagctagctgatcgatggatccgaaagttggcgttgctctgaccctctccctcgtcggcgggctaagcacctcccttggtgcactgttggctatcctcaaccatgcgccaaacaacagaacactcgggattctacagggctttgctactgggctcatgctcagcatgtctttctttgacttggcttacgatgctgtcaacgccatcggctttctgagagggaacctctggtttttcgctggagcgctgctgttctcaacaatcgcggacgttttccctgagccagactgcagtgcggcagatgaaaatgggaagcagcagggtggaaaggaactcatgatgagacatcgccgaagagttatatttagcgtcattgtcacagcaattgttgctggtgtgagtttacaaaacttccctgtgggcactgctgcatttcttggaacaacaaagggcttccgtgttggtttgaacttggctcttgctatagcactacactacattccagaggtaatttactctgcattggcttttgtgaagggtatttcagtagctctcccagcatactttgccactagcagcaaatggcaagccttcaaattagcaactctatctggttttgcagagccactgggtgtgattattgtggcatacctattcccaagcaatttgaaccctgaaatactggaaggtctacttggattaggacgcaaggatgctgttaaagcagtatttgttggtatggcctttatgtctatgagcttgtattttctagatgctagcctcccaaaggagatgagcgcttaacataatttgcgcctaaaccaattcatgtgatggtcaagagaatttcatcatgggtgctgcaacaaggtgttagtgggaaggacgtgcatccaactcgagatcatgagagatgagatgtttccagcaacagtacacaatacaacgactgacagatcaagcttttatcaatgtccatgggacatgtgaccaaaatggtttgcaacacaatcatatttatataaaaaagggaagtacaattgtacaaacaggcatatgctaacaacatatcatgtacattttaattagattcggtcatatcatgtacatagagggtaagattaattgtatatactgaataaagtaggcacaaaacactgatacgatgtaaaataatggaaataaacggttgcatacatgatgaatgattgaccgacgtatctgctgaacaaactttaaacgggctatacaagttatgaggcaaagagactttactcttttaaacatggttataataaattcaatttactcatgtttaatctggctataataagtttaatctacttgttgtgcatccattataagtttataactattggacctttactcatatatagagagagaggacaacactttttatctagtgtgatatc

SEQ ID NO: 8575 - DNA, 2167 bp, Zea Mays
ccgcgcgctcggagggcggcagcggcgggccgtgtggccaccgctacactccgagtccagagaaatacagcgcattggcgcatggcctcccggcggagttcgcccgcggcggcctctgtggccgcgcgctctcggcatgtgagcccatgaggcgcgtgagcaggagctcgtggctggcaccaaggtgcggcactgcggccgctgccacttaaatcgcctggctcgcgcgcggaagacgggagggagaggcctcctctcatatccaccgcaactagtccaccgtaaaagcatgagctcccgcgcggctcggccatggcgagccagcgcaacccgtgaacgcggcggccggcgcaagcacaggatggactgcgcgccctttgcggccatctgtgagcggcggcgcaagatccgcgtctggcgcagagaagaaaggcgcggcggcgctcgggaccctggctcgcgtgcgcagggccgcgatgtcatggcagcgcctcccatccgctgcggcctggcgaccccgacgtccatgacaatatcacgcgcgggagcggaggtcccagaagataagcggcggcgtgaggagcagagaatcgattaccaagatagggcaacccggaaagcaaataagggcctagaagttatatggcgtggctcaagacctgttggttcatcatcacagatcttcacgaatgtatttccagtccattatagcgcaccagttggcttcagcttcgaagttttggctgaaaatgtcatacccgttcaggatgacatgtcgctgtttgactacaatgtccaagaacgtgtagatgattttgttgctgcagccatagcacaggcaaacgttacacgtacaaaccacataatgtggaccatgggggatgattttaactaccagtatgctgaatcctggttccgaaatatggacaaacttatccagtatgtgaacaaggatggccgagtgcatgcattatattctactccgtccatctacacagatgctaaacatgcatcaaacgaatcttggccagtaaaatacgatgattatttcccctacgccgattcaacaaatgcatactggactgggtattttacaagccgtccaactttcaagcgatacattcgagtgtacagtggatactatctggctgcgcgtcaaatagaatttttgatgggtaggagctccttgggattgttcacttccagcttggaagatgcaatgggtattgcccagcatcatgatgcaatctcaggtactgcaaaacagcacacgactgatgactactcaaaacggattgctattggagcatcaaaggtcgaaaaaggtgtaaacgctgctctgacttgtctaaccaactctaacaaaacatgtgtatcctctgtaccaaaatttagtcagtgtccacttctcaatataagctactgcccttcgactgaggaagcaatttcagcaacaaagcatttagttgtagttgtttacaatcctcttggttggaaacgtagtgacttcataagggttcctgtcaatgatgaagacctggtggtcaaaagctctgatggaaatactgttgtgtcacaaatagttgtggttgataatgtgacaaacaacttaagaaagttatatgtgaaggcttatcttggagtcacagcaaacaaggcccctaagtattggctaacatttcaagcttctgtaccaccaatgggatggaattcttactttattttgaaatcaactggatctggatacaacaacactgaacatgtccccgtcgtggttcctccaagtaacaacacaattgaagctggacaagggcatttaaagatgtcattctcttcagcatctggacaactagagagaatattcaattctgcctcaggaggagacttaccaattcaacaaagctttctttggtatagatcaagtaaaggagatgccttggacccacaggcatctggagcttatatatttagaccagatggtaatacaccaactattgcctcatcatcggtgactcttaaagttatccgtggacctctatttgatgaagtccatcaacaattcagctcgtggatttatcagttttggtctctgggaccttctttcttcttaatttaatggtgcgcagttctcctgcgcattcgagaaaaaaaagaagatttataccag

SEQ ID NO: 8576 - DNA, 3193 bp, Zea Mays
gccatcatggcgccgacgcttctgctggtagcccttgtagcgctcgcggtggcagcagcaacgccgatggtgatggaggcatcggcgttcacggaggggtgcaacaataggagcacgccgggtggtggtggaggcaccgcggtggggaacaagctgaacgtgcacttggtgccgcactcgcacgacgacgtcgggtggctcatgaccatcgaccagtactacgtcggatccaacaactccatccagggcgcgtgtgtgatgaacacactcgactccgtggtggacgcgctcgccaaggatcctgctcgcaagttcatcgtcgtcgagcaggctttcttccaaaggtggtgggcacagaaaagcctgacagtccaggccacagtacacaaactggtcgattcgggtcagctagagttcataaatggtgggtggtgtatgcatgatgaagctgttgtgcattacattgacatgattgatcagaccacacttggccaccgggtgatcaagaaacaattcaaaaagattccgagagctggctggcaaatcgatcctttcggtcattctgcagttcaagcttatttgcttggagcagagaatcgattaccaagatagggcaacccggaaagcaaataagggcctagaagttatatggcgtggctcaagacctgttggttcatcatcacagatcttcacgaatgtatttccagtccattatagcgcaccagttggcttcagcttcgaagttttggctgaaaatgtcatacccgttcaggatgacatgtcgctgtttgactacaatgtccaagaacgtgtagatgattttgttgctgcagccatagcacaggcaaacgttacacgtacaaaccacataatgtggaccatgggggatgattttaactaccagtatgctgaatcctggttccgaaatatggacaaacttatccagtatgtgaacaaggatggccgagtgcatgcattatattctactccgtccatctacacagatgctaaacatgcatcaaacgaatcttggccagtaaaatacgatgattatttcccctacgccgattcaacaaatgcatactggactgggtattttacaagccgtccaactttcaagcgatacattcgagtgtacagtggatactatctggctgcgcgtcaaatagaatttttgatgggtaggagctccttgggattgttcacttccagcttggaagatgcaatgggtattgcccagcatcatgatgcaatctcaggtactgcaaaacagcacacgactgatgactactcaaaacggattgctattggagcatcaaaggtcgaaaaaggtgtaaacgctgctctgacttgtctaaccaactctaacaaaacatgtgtatcctctgtaccaaaatttagtcagtgtccacttctcaatataagctactgcccttcgactgaggaagcaatttcagcaacaaagcatttagttgtagttgtttacaatcctcttggttggaaacgtagtgacttcataagggttcctgtcaatgatgaagacctggtggtcaaaagctctgatggaaatactgttgtgtcacaaatagttgtggttgataatgtgacaaacaacttaagaaagttatatgtgaaggcttatcttggagtcacagcaaacaaggcccctaagtattggctaacatttcaagcttctgtaccaccaatgggatggaattcttactttattttgaaatcaactggatctggatacaacaacactgaacatgtccccgtcgtggttcctccaagtaacaacacaattgaagctggacaagggcatttaaagatgtcattctcttcagcatctggacaactagagagaatattcaattctgcctcaggaggagacttaccaattcaacaaagctttctttggtatagatcaagtaaaggagatgccttggacccacaggcatctggagcttatatatttagaccagatggtaatacaccaactattgcctcatcatcggtgactcttaaagttatccgtggacctctatttgatgaagtccatcaacaattcagctcgtggatttatcagattacacgactctacaagaacaaggagcatgctgaagttgaatacacgattgggccaatccctgttgacgatgacgtaggaaaggaggttatcacacagttgacagcaaatatgagtacaaacagtacattttatacagattccaatggaagggatttcctcaaaagggtgagaaactacagggaggattggaaccttcaagtgactcaaccagttgcaggaaattactacccggttaatctcggagtgtacatagtagatgagaaatatgaactatctgtccttgtggaccgtgctgccggagcatccagcattcaggatggtcagctagagattatgctacacaggcgtttgcttaaagatgatggcagaggtgtcgcggagccacttgatgaagtggtttgtgtggatcaagattgccaagggctaacggccaggggcacttactatatcaatgtcgagaagctaggccatggagctcattggcgccgtacatatggccagcaagtctactctccctttctccttgcttttactcatgaggatgcgacaagctcaaaaccctacagtgtggccaaagatagtatgatggatgggaattacagccttcctgacaacgttgcgattgtcactttgcagaatcttgatgatggtaccacactactccgcttggcccatcttttccaagctggcgaggacccgagatattcagaggtagcagaggttgatctgaaaaaggtctttggaaagagaactatcaaggaactgaccgagactaacctctccgcaaatcaaaagaagtcagagatgaagcagctcaactggagagttattgaggacgctgaaagtggtcctgccccggtaaaaggtggcccagttgattgtcgtgctctggtcgttgcgctgggacccatggagatacgcaccttcttgctgaaattttaatcgcatttaccgtgcttgtaattgtaaagaaaaaacaatgataaatggagaacttgctatcgttatttccttttgtaaaaaaaagatgaaatacccaaatagaacgttaaatttgcgcaaggtatgtacaatctacatcatgtgttttctattatatggttg

SEQ ID NO: 8577 - DNA, 3222 bp, Zea Mays
gccatcatggcgccgacgcttctgctggtagcccttgtagcgctcgcggtggcagcagcaacgccgatggtgatggaggcatcggcgttcacggaggggtgcaacaataggagcacgccgggtggtggtggaggcaccgcggtggggaacaagctgaacgtgcacttggtgccgcactcgcacgacgacgtcgggtggctcatgaccatcgaccagtactacgtcggatccaacaactccatccagggcgcgtgtgtgatgaacacactcgactccgtggtggacgcgctcgccaaggatcctgctcgcaagttcatcgtcgtcgagcaggctttcttccaaaggtggtgggcacagaaaagcctgacagtccaggccacagtacacaaactggtcgattcgggtcagctagagttcataaatggtgggtggtgtatgcatgatgaagctgttgtgcattacattgacatgattgatcagaccacacttggccaccgggtgatcaagaaacaattcaaaaagattccgagagctggctggcaaatcgatcctttcggtcattctgcagttcaagcttatttgcttggagcagagcttggtttcgattccgtgcattttgcaagaatcgattaccaagatagggcaacccggaaagcaaataagggcctagaagttatatggcgtggctcaagacctgttggttcatcatcacagatcttcacgaatgtatttccagtccattatagcgcaccagttggcttcagcttcgaagttttggctgaaaatgtcatacccgttcaggatgacatgtcgctgtttgactacaatgtccaagaacgtgtagatgattttgttgctgcagccatagcacaggcaaacgttacacgtacaaaccacataatgtggaccatgggggatgattttaactaccagtatgctgaatcctggttccgaaatatggacaaacttatccagtatgtgaacaaggatggccgagtgcatgcattatattctactccgtccatctacacagatgctaaacatgcatcaaacgaatcttggccagtaaaatacgatgattatttcccctacgccgattcaacaaatgcatactggactgggtattttacaagccgtccaactttcaagcgatacattcgagtgtacagtggatactatctggctgcgcgtcaaatagaatttttgatgggtaggagctccttgggattgttcacttccagcttggaagatgcaatgggtattgcccagcatcatgatgcaatctcaggtactgcaaaacagcacacgactgatgactactcaaaacggattgctattggagcatcaaaggtcgaaaaaggtgtaaacgctgctctgacttgtctaaccaactctaacaaaacatgtgtatcctctgtaccaaaatttagtcagtgtccacttctcaatataagctactgcccttcgactgaggaagcaatttcagcaacaaagcatttagttgtagttgtttacaatcctcttggttggaaacgtagtgacttcataagggttcctgtcaatgatgaagacctggtggtcaaaagctctgatggaaatactgttgtgtcacaaatagttgtggttgataatgtgacaaacaacttaagaaagttatatgtgaaggcttatcttggagtcacagcaaacaaggcccctaagtattggctaacatttcaagcttctgtaccaccaatgggatggaattcttactttattttgaaatcaactggatctggatacaacaacactgaacatgtccccgtcgtggttcctccaagtaacaacacaattgaagctggacaagggcatttaaagatgtcattctcttcagcatctggacaactagagagaatattcaattctgcctcaggaggagacttaccaattcaacaaagctttctttggtatagatcaagtaaaggagatgccttggacccacaggcatctggagcttatatatttagaccagatggtaatacaccaactattgcctcatcatcggtgactcttaaagttatccgtggacctctatttgatgaagtccatcaacaattcagctcgtggatttatcagattacacgactctacaagaacaaggagcatgctgaagttgaatacacgattgggccaatccctgttgacgatgacgtaggaaaggaggttatcacacagttgacagcaaatatgagtacaaacagtacattttatacagattccaatggaagggatttcctcaaaagggtgagaaactacagggaggattggaaccttcaagtgactcaaccagttgcaggaaattactacccggttaatctcggagtgtacatagtagatgagaaatatgaactatctgtccttgtggaccgtgctgccggagcatccagcattcaggatggtcagctagagattatgctacacaggcgtttgcttaaagatgatggcagaggtgtcgcggagccacttgatgaagtggtttgtgtggatcaagattgccaagggctaacggccaggggcacttactatatcaatgtcgagaagctaggccatggagctcattggcgccgtacatatggccagcaagtctactctccctttctccttgcttttactcatgaggatgcgacaagctcaaaaccctacagtgtggccaaagatagtatgatggatgggaattacagccttcctgacaacgttgcgattgtcactttgcagaatcttgatgatggtaccacactactccgcttggcccatcttttccaagctggcgaggacccgagatattcagaggtagcagaggttgatctgaaaaaggtctttggaaagagaactatcaaggaactgaccgagactaacctctccgcaaatcaaaagaagtcagagatgaagcagctcaactggagagttattgaggacgctgaaagtggtcctgccccggtaaaaggtggcccagttgattgtcgtgctctggtcgttgcgctgggacccatggagatacgcaccttcttgctgaaattttaatcgcatttaccgtgcttgtaattgtaaagaaaaaacaatgataaatggagaacttgctatcgttatttccttttgtaaaaaaaagatgaaatacccaaatagaacgttaaatttgcgcaagatggaatccgctcacctctgccacacctccatggcaatgac

SEQ ID NO: 8578 - DNA, 1081 bp, Zea Mays
ctggtctcctccctcttcacccgcagctgcactgcagcacacgcgccaccgaagcgctctgcccacctcgctcccctccagtggccgccagcgcggctcagcggtccatcctcctgacgccacctgcaacggcgtcaggcggtgatccattccaactcgcgctccgtcctggcaatcactttgggaaggtggtcagtggaatagctttgcttaaaaagcttgaagcagttggtagtgaaactggaaatccttcttatcaagtgaaaattgtagactgtggtgaagtttccaacacaaattctcaggatccgctaaagggagataaagtaagctcaaagacagataacagcagttcagacagtgaaaagggtggccatcgtaccaagcgttccttaccgaaaggaatgatccaggtggaagctccaggaacaatcccattcagtttgatgtaaatttaatgaaaccagtaaatgtagatggcaacattggtggtgataatgcagaggctagcatgtctagaactggtgaaggaaggcatctgccaagcaatgaacctttgtccaccaatggtaaagatttaggtgtgggttctgcagacaatgggcaacctcaacaaatcaggaaaggacgtggttttactcagaagtatgggtatgcacgccgatataggacgccatctcccgagcgtccctctgtttgaccccgctacgatggagggagagatgatagatggaacaatttcaataggtatgaaagaaatggtccttacagtagacgctcgccagtaaggagataccatggctcgccaagagccaatagcccatccagtactacccaagcctcaaccgttcaaagtgttgctcgaaggggatatgtacaggtgcccattctgcaaaacgcccaattatgctgtggagtatcgtggcatcaaaacaaaggagtaaaggagcatagagcagtttacagacaattgaaaaagagaattgatcttttttatgggcgaagtgttgaagatggctttggtgaaggaaatgtcttgttagcatcaagtaagtggcgacatcacaacccctacaagctt

SEQ ID NO: 8579 - DNA, 3013 bp, Zea Mays
atggcacagggaggtgggcaagatcaccgccgcggacagtggcggatgcacaggaaactaaaatggaaaaagaaagaaaaatatatctggactggacgagatgacgagtggacgctaaggcccatcacccatgacacagcagagagcacgccgctccttggtctggcccgtcgcgcgcagatccgtagcccaccgcgcgcgtcggaaactgagagtctgagagccgccctagtgccctgccgccgccacccttcaggacgctactcttattttaataagatcgtgtctcaaaaatggatattaagaatcataaaagctgttcggagcagctgccgtagttctatcttcactctcaaatcactgtaccgactagcgacaacgtcttgtagccaaaatcacgtcagcctgggctcgcactcgcacgcgcaaatcccactacatgtatacatacatatgatggaagcccaatctcgtgcagagattcgtcccattttcctgtcggaaacaaccctggccttaggaggccaggcgattctccgccgcctcgtctcgtctttgctatgcgccacgagcgcctccgccgctccaacgctccaacgccctgagcgcctccaacaccactccaacgccacgagcgcctccgccgctccaccgaacaactccaacgccactccagctcttgcagcagtagaactctactgcagccagggcatcgacgccgtgctcttcgtgccggatgacgccaaggccacgcagaccgccgacccgaacaggaagcctcccgccattgtcacccacaagaagaagatcaagctccggtgagcttcctagctctgtccacactcatacaaaaatcgcaacagattctaggttcatgccattttttcagaactgcattggtgcaatcgacggtacacatatacccatcaccatagcagaacatagggcccctccatatagaaacaggaaaggaactctttcacacaatgttatggtagcctgggacttcgacctcaatttcacatttgtttcatgtggatgggaggggtcagcctcagatgcaggggtgcctcgatctgctattagcaaaggatttagtgtgccagaaggaaagttttatctagtagatggtggttatgcaaatacgtcatccttcattgcaccgtatagaggggttcgataccatctcaacgagtttaggaggcgtcgttcatcacaaagtggttatgcgaactacagagagttgttcaaccaccgccatgcaattctccgtaaccatatagagagggccatcggtgttctaaagaaaaggttcccgattctaaaagtaggcacatttcatcccatagagaaccaaatcaagatcacagctgcaactgttgcatttcacaacataattagagggcaaaatggagacgaaagatggcttgacaaccaaccaaattacatctctccaagtcaatatgttgatgttccagagggagataccaactatctcaatgacacagaatcaagtgatggaagcgctctaagagatcagatcgctcttcagatgtgggcttcctacaatatatagatttttgaataaaggatgatttggaacaatgtgtacgagaaaggcttagtcgatgtgatgcatgatcacaaagataatccaaaattcaaaggtcaaaatggttggaatcgtgatggatggaatagtatcactaccaagttcaatgaaaagttccctctagctcatttctctaaacaacaactgcaagagaaggagagagagcttaaaggatactacaaggcaataagggattcaagaaaagaaagcggggttggttggaatgacaccctatgcatggtactagctgaaccagaagtttggccaaggctgattcgcgtatcaaagtttcgcaataggccattccctcttttttacagtttagaagggctatatgaaggtagtgtggctaccggagagttgaatttcacatcaaccgctgttgatcttcctccaccttcagctccatccaggagtgtgtctggacaaagtctcagtcctttgagtactaattcacttgatttggatggacaagaaaccacaagtgtgttcaatctatcttgtgatgctcaatctgtccgagtcaatactaatgaacccactgaagctcaatttgtcccatctaatcaagaatcaagccagagagaaggtggcagtgggagaaagcgtaagcaaagccatgttggattagctcttgaaagttatgtggagtttaaaaagatccaaaatacagaaacacttgaaactcttaaagaacataagaggcaagaggatcaattttctattagcaagtgtcaggctgaattgaaaggaatggatggattaacagcagtagacaaatcatatgctttggagcttttcgtatctgtgacaaaccgagaaattttcttaacaacaacagagcatgatgttagagaaatttggctcaagcgcaaaattaggttgcttcgtggtagtgatgcatggcctgaacaaatgatatgagcaaatttgacaactgcagttctgttatggtgaatggtgattgtagttcagtttcagctctaacctatggaaaattgaatggcagttgcactaatctgttggtggaatgattttcccagtaatttcctggacaagcagatcactgagaaccatttaccttatgagaaatgatgccctgtatggttcagtatagttcttgtattgctagtttaaattaattcttgtatggcagttgcactaaactgaatggcagctgaactttgagatatgcttctattgttggtttaaaaccatggtgatgactgttcttgtatgcattctgtatgcattcttgtttataacctggttgcttatgtatgcattcttgtatgccgtgtatgcatggtgactgttcttatatgtgttcgtgtatgcaatctgccccaaactgaatgtcatacggaaaaatgtcaccggtatgagttcgtgtatgtattt

SEQ ID NO: 8580 - DNA, 2976 bp, Zea Mays
ttctagctcacgggtttgaccctcaatcacaactgaaacaactaaatgtgaaacttccggagtacctacctcaacaaacctggaggagttgaaactggtaccagggagcacctataaattcagaactactgtatcaggccacctagttcatgcggcgtgagtacctgattgctttctcatgtggtgtgattacctgattgctttcctgcttactgggagcatggagggtggagcttccacttcaccgaatcaaggtgccctcacgacttccccttccgaccgcgcatcgctagctcccgcaacgacccgacctctgcgggtggatcatatcggccgccgttagccctccctcccccgatccgctacgattctttgaccagaccttggtccagaaacgaaaaggcggcggggtaaacagccgcagagtcgagcagtggccgcagaggcaagcagagaggccagtgggcagtggcgcctatggaggcgtggagcaggagagcgtcgggtggcggagaagcgagacgacgtggacctgacggagagtggccttggggaatgtctacgaagtgcaagggggaggggaaggatggaagggccaatggtccaaccgtgccgcctgtcgctcgcgcccgagcttgcctgcgcatcccgcggctcgctatcttagcccgccgccacgcaaaaccctctggccggcgcaacagaagcctcaaacgccagcgcactgccctcgctggcgctccatgccaaggccaaagatgtcgtgcacgcgtggttgccactcgcgacggcgattggacggacgcccaccgtggtgccgtaggttcacaacgcaacgaactaaacgctaccacctctctcgatcgtctcctctaccttcgacaatgcccatgcacgcctatcagagtgacgggtgagcgttgcccttggaaagtcgtttggttggggcttttttacccgtaataggttcacggcgcaaactggtccgactactttactttgtgtttggttgggccatctccagcacgcgtgtatatgagcgagcgtgtgttttgcactgtagattgcacagtttacagagtgaagtttgagatagtgagtaagatagaagtaagatagaggggcgactggagattgtcttatgtcttccttttatggatcacacgttgttaaaggatatgggcaagtaagcgctcgacatctaaggctatctacccccctcacataactacaagataagtccccgctcgaggaacaggcgtatggactgattaaatatccaatagatgatctgctagtaaggcccattgcagatgatccggctttatctaagagacctactctgctacagattttagagtaccaagatgttctgtgggagatctccttatggtatgggatttctgctcgtcttttgggagggttctgaatctgtccccatttccgctaacagatttggagaacacaatttgccacaaagaaagcaatgttcttcttgtggaaatacatgcagctatgaaggatgaaggtgactatttcactgttctgcagaacaagaaacggaagttaaaggtaagttcagtaacatgggctgagtatctatgtgatttcttggaaatgacaaaaaatgaagaacgttccacaaacattgcaacagtaataaggggttattatggtcttattgacactgatataaagcttaagatcctccgggaactagtggaagaagctattcaaacctctgccataaaggagatactaagtgaccgtgtggaccagaaacaagtcctcaatgcaacaaaaagagagaacaccagaaaggacaaacaagagaaaaatcttaacactgaaattgccatgaaaagtcaggagaatcagacagatgatgtgcaagttggtcatgggggtgtagatgagctggttaggagaaaagaagaaaatgacaagagcaatatttctcggagtagaacagaagggaaacgacacttgcaccttgagacggagattgagaaattatccatccgatccagcccacttggtaaagacaggcagtacaataggtactggtttttcaagcgtgaaggaaggctttttgttgaaactgcagattccagagaatggggttactacaacactaaggaagagctttgaaacggcaactagagaagttttacagtaagataagtaatgccctagagaaacgatcaaaagatatcgcaaacaggatgttacttgaagagggtgtactgcggcgttccacacgtgtccgggctcagccaaaggacatggcattcctcaagtacgtcaacaagtggaaggataactgaggtggcggtctgccagcggtggtggtggtctgccagcggtgggaggataacttgagccactgggtgacagggtttgcagtagatgtgtttggtttgaggttaaagtgggatgggacgggggcgacaccgtcctctcaattttttaattttttgggatcacgccgctacaaaaaaactactctggtgtttacctcgtccctacgtgactcccatttaaccactggagtaactgtgaccgtcccatttcatcctttcgtatacttggttaggtcgtcacagtggttcgccatactcgtcgcattagctaatgaaaactgtactagaacctagttttcttccctttgctactgaaatgaacactggttcacaaatgaaaagcttttgctactgaagtgaactgtgccactctttttccacctttgcgttccatgtgtttaacactggttcacaaatgaaaagcctttgctactgaactgagctgtgccaggcttctttacctttttagaacagtcaccactctttacatgtaacgatgtaaacgtgatgaggcaagacacttcgattttcaagggtgggcgtgggccgcgggccaatgttgctgttaccgtgctctttcgttgagtaaagcagctgccgacgatgactgctc

SEQ ID NO: 8581 - DNA, 1798 bp, Zea Mays
gcaagcggcttgaatgaatgaatgaatgtgagccagcaggatgatcggactgccacgtggcttccctttctgccgtccgcgcctcccgcccggattgcatgttgcaaggcccaaggagattgccccacatgatcagttattttaggttagggcttgtgctttgcacttggcatcatccaagtatatttccgagctcaacacagtcgcagataagtacccagagcccgagcaccatcctgtatcgtatcacacgcacgcccatctgcgccaagcttgggtaaaagaaggatcggagaatggctgcgcagacgacggtgcaatgcagggtgatcggtggcggtggcatgcggacggtggagtgcctgaggggaaggcttctcgcggagcgggtggcatccaaggctgcaaaggaggatgccgaccaactgaccaaaaggctggacgagctagagaagaagctcgccggcgaggtcagggtgaggaacagggcggagaggaggctcaggagggccatcaagaagctggagtccctcaagatcctggacgtcgagctctcggaaggctccattgggtcgctgtcctccaacggccgttcggatcaccaggcgccggaggccgaggagaggaacggccctggctcgttgaccactcgtgggtctgtgctggcatccggtccttccggagaccccgacgccgacgccgacagggaatcgtcagagggatcatgcacccaggtgaattcgtcctcccgggacgggagctggtgctccgttgcgtcagagcaatcccggcctggttcttgcatggatcttgccggaaacaccaccaactgcggctcagaggggagttgcggtgaccatgattcagagaggtataatatatgcgtgcagatcaactcaatgccaattggtagttagttctcttattactgtccttttttcctagactagaggaattgccttcttcaggacttccagcgagatttgtgacagcatccctcttaaatgtttgcttttttggagctcctggatgctacatctctcaccatgttaggtacagaggaaacaattagtgcttccctctgctttttagaacagaatgattgccttttagtatagcatgcctgcatatatatatggccgttggactgaagagtgaagcacaccaacttgataacttccttttatcacatcggtggatgctacatagcttcccaaacgggaacaccttgatgcatccagtggctgtggctcagcaaaatcggaagaagcgttctacgaaagcgacgacaggctagcgctatcgcggggtctcgttgaaccaccaccagcagctgcaggcgaaggtccaagaacgcaggataacgacacgcatgcaggagaggtccgtgccatggatcacgaggaagaagaggagaccaacaagcttgcgatcgttctagccgacccccagccacagtcgcaaggcgacgtgtagtccgttctcctggcgctgcggcgggtgaaggagcagctgcgctacaccatgaaccaggaactcgccgcgccaaccaggagctctacgcccaccgagcgagcgtgccacactaggaaaccgtgtggctcacttctactacggtgtccaacattcggttccgtgaattattcgtagtgctgtttaggggagtggagtatctgtacagaatggaataaggtcgctcatgtggatgtggagtcactattttattaaaaagattgaatctctaggtgctttgcttgcttctgtttactgactagtttatcgcgcgcaatgtgatacg

SEQ ID NO: 8582 - DNA, 932 bp, Zea Mays
atggctggcatcgggcatctccactcccactccaccggccccacctccgcgaggggcgacccgagaacaccaccacgcccgccatgtggcgccgcctccaaaccctagccccctcgctccgccgcgccgccgcatcgtcgtccccggcctccgcccgcgccgtgcccttgtccacggtgccggtggccgcgttccggcgcacttcgaccctcctctcctctcccggcgacaagccggcgcccagcaaggtcgaggatgtcatgccgatcgccacggggctggagcgcgaggagctcgaggcggagctccaggggaagaagcggtttgacatggatcctgccgtcggccccttcggtactaaggttggtttctcgagaagcaatgattgcattttttgtgggacggagagagtagtttcttcctcaagctgagtcctgttaggactgtgaagttagccgtgattgaatcctactataacaagagaatagttggctgccctggtgccgaaggagaggatgaacacgatgtcgtctggttttggttggaaaaggataaaccgcatgagtgcctagtctgctcacgctcaaggtcattggtgatgggggtgatccagatggccacgatgacgaggatgatcatcactgaggccttgtgtcgataatgataataagaactttgtgaaacatggttttgtcctatctttgcagcatcagactgccctatagagtattgtaattgataagtgtttgaccatgaaccaggtcgggtggtgttttacacctacgaattttgttcagatcttttcgaccatacggttgcttctgtttggaatatagatttttttttctggagtgcaacatcaaataaaggatgagtgcatcggtttcactctattgaccatctatttttgggttatattttgttcctgattg

SEQ ID NO: 8583 - DNA, 2085 bp, Zea Mays
atggctggcatcgggcatctccactcccactccaccggccccacctccgcgaggggcgacccgagaacaccaccacgcccgccatgtggcgccgcctccaaaccctagccccctcgctccgccgcgccgccgcatcgtcgtccccggcctccgcccgcgccgtgcccttgtccacggtgccggtggccgcgttccggcgcacttcgaccctcctctcctctcccggcgacaagccggcgcccagcaaggtcgaggatgtcatgccgatcgccacggggctggagcgcgaggagctcgaggcggagctccaggggaagaagcggtttgacatggatcctgccgtcggccccttcggtactaagattccgttttcttcgtcgtatttgtatttgctgcttcattgaatgtgcatgctgcttggttcccaataaaaactgaagcagtgcgtttgtttattctctctgcatggctgcatgctcctctcccaaacgttcaccttggcacaagagacgatgcataccggatagaaataactcattccttggtcactgtgctcgactactataagatggagattttagaaaggagggagtatgtctatattcaatggataatgaatttagacacatataaaacacatacatcaagtattgtatgaatctattaattttctaaaacgagttttaatttgggactgatggagtacctttttaagtgatgggcccaagatatctaacaaattatgagtcacttgtagtatctgttcctactgcttgatttattgacaggaactcttttgtgtatgttacgtggaaacttgaaagttttactgttgtatgacccatttatcaattgttgtgtgcagattaaacttgtgctaagcacaagtaatgacacaatatttcactccagtatggacatggctttaagtaaaaaagacccaccagatacatctcttgttactgatattaatatcgtaaactacaaagtatttgatatgtgcatgcttaagctgcattacctgaagcttgtttcaaatacaccagcagtcagccagccgtacatgaaattcgtagggtatgtttataactgccttgtcacttgggagcattgcgttaaatatcagtgtttgatgtatctggtgcttctattcttcaaccgtaggcatgccctcacatccatgctgagtactgacattgcctgtatttggtctagatatgtgttgaagttcttgaccactcacttcccttctgttttttttctttccagacttcctatgctgcaagatctcaattgttctggacaatataaagtactaccttaagaaaacaagtataataccaaaaaaacactaaacaacaggggcacacttttcacttgtttgtggttatgctattcctaaattttctaattttcaatcaattgatgcacccagcttctatgcataccctgtgctgactactgacattgtgtgcgcttttagtgaagagatgtaggatttcttgatcactctctccccttggttttgcataccactctttgtgctgcaagattgtccatttgttaattttgaatgtattgtctgcacgaggaatcagccgtgattgaatcctactataacaagagaatagttggctgccctggtgccgaaggagaggatgaacacgatgtcgtctggttttggttggaaaaggataaaccgcatgagtgcctagtctgctcacggtactttgtgctcaaggtcattggtgatgggggtgatccagatggccacgatgacgaggatgatcatcactgaggccttgtgtcgataatgataataagaactttgtgaaacatggttttgtcctatctttgcagcatcagactgccctatagagtattgtaattgataagtgtttgaccatgaaccaggtcgggtggtgttttacacctacgaattttgttcagatcttttcgaccatacggttgcttctgtttggaatatagatttttttttctggagtgcaacatcaaataaaggatgagtgcatcggtttcactctattgaccatctatttttgggttatattttgttcctgattg

SEQ ID NO: 8584 - DNA, 2178 bp, Zea Mays
atggctggcatcgggcatctccactcccactccaccggccccacctccgcgaggggcgacccgagaacaccaccacgcccgccatgtggcgccgcctccaaaccctagccccctcgctccgccgcgccgccgcatcgtcgtccccggcctccgcccgcgccgtgcccttgtccacggtgccggtggccgcgttccggcgcacttcgaccctcctctcctctcccggcgacaagccggcgcccagcaaggtcgaggatgtcatgccgatcgccacggggctggagcgcgaggagctcgaggcggagctccaggggaagaagcggtttgacatggatcctgccgtcggccccttcggtactaaggttggtttctcgagaagcaatgattgcattttttgtgggacggagagagtagtttcttcctcaagctgagtcctgttaggactgtgaagttagattccgttttcttcgtcgtatttgtatttgctgcttcattgaatgtgcatgctgcttggttcccaataaaaactgaagcagtgcgtttgtttattctctctgcatggctgcatgctcctctcccaaacgttcaccttggcacaagagacgatgcataccggatagaaataactcattccttggtcactgtgctcgactactataagatggagattttagaaaggagggagtatgtctatattcaatggataatgaatttagacacatataaaacacatacatcaagtattgtatgaatctattaattttctaaaacgagttttaatttgggactgatggagtacctttttaagtgatgggcccaagatatctaacaaattatgagtcacttgtagtatctgttcctactgcttgatttattgacaggaactcttttgtgtatgttacgtggaaacttgaaagttttactgttgtatgacccatttatcaattgttgtgtgcagattaaacttgtgctaagcacaagtaatgacacaatatttcactccagtatggacatggctttaagtaaaaaagacccaccagatacatctcttgttactgatattaatatcgtaaactacaaagtatttgatatgtgcatgcttaagctgcattacctgaagcttgtttcaaatacaccagcagtcagccagccgtacatgaaattcgtagggtatgtttataactgccttgtcacttgggagcattgcgttaaatatcagtgtttgatgtatctggtgcttctattcttcaaccgtaggcatgccctcacatccatgctgagtactgacattgcctgtatttggtctagatatgtgttgaagttcttgaccactcacttcccttctgttttttttctttccagacttcctatgctgcaagatctcaattgttctggacaatataaagtactaccttaagaaaacaagtataataccaaaaaaacactaaacaacaggggcacacttttcacttgtttgtggttatgctattcctaaattttctaattttcaatcaattgatgcacccagcttctatgcataccctgtgctgactactgacattgtgtgcgcttttagtgaagagatgtaggatttcttgatcactctctccccttggttttgcataccactctttgtgctgcaagattgtccatttgttaattttgaatgtattgtctgcacgaggaatcagccgtgattgaatcctactataacaagagaatagttggctgccctggtgccgaaggagaggatgaacacgatgtcgtctggttttggttggaaaaggataaaccgcatgagtgcctagtctgctcacggtactttgtgctcaaggtcattggtgatgggggtgatccagatggccacgatgacgaggatgatcatcactgaggccttgtgtcgataatgataataagaactttgtgaaacatggttttgtcctatctttgcagcatcagactgccctatagagtattgtaattgataagtgtttgaccatgaaccaggtcgggtggtgttttacacctacgaattttgttcagatcttttcgaccatacggttgcttctgtttggaatatagatttttttttctggagtgcaacatcaaataaaggatgagtgcatcggtttcactctattgaccatctatttttgggttatattttgttcctgattg

SEQ ID NO: 8585 - DNA, 2810 bp, Zea Mays
atggctggcatcgggcatctccactcccactccaccggccccacctccgcgaggggcgacccgagaacaccaccacgcccgccatgtggcgccgcctccaaaccctagccccctcgctccgccgcgccgccgcatcgtcgtccccggcctccgcccgcgccgtgcccttgtccacggtgccggtggccgcgttccggcgcacttcgaccctcctctcctctcccggcgacaagccggcgcccagcaaggtcgaggatgtcatgccgatcgccacggggctggagcgcgaggagctcgaggcggagctccaggggaagaagcggtttgacatggatcctgccgtcggccccttcggtactaaggtgaggtgcccctgcttttgcgacttagctcagagcctcggactctaggggatcacgtcaggtgtttggtgtcgtgcagagaaatttgcacaagtacttgctccgtcctagaaagaatgcaattatgggaaccgtcccagtgaaactagctcaagtttgaccaaattatagtaaataatattaacatgtatatctccaaataagtttatcatgaaaatatattttgtaattagttcagttatacttaatttgtaccataaatattattgtttttatataattttagtcaaatttcaaataggttggtttctcgagaagcaatgattgcattttttgtgggacggagagagtagtttcttcctcaagctgagtcctgttaggactgtgaagttaggtaattattggtactttttagaattaattatgtcaaaaaaaacttttgctgtgtccatggctattgttcacctgatctgctctgtggtctttggctagttgaacgtgttgtagtctagtttgttattaagacagccatttcgtggtacaaaatgtcatcatgttagaggccccagtgttcaatgtttaccagtctgctcattagttgtcatttacattgaagtctgtggcttcttttactccctctgtcctaaaatagtattcgttttagctctcggtttttactccctccgttccataatctgcctcgtctaagcaatttttttttgcagattccgttttcttcgtcgtatttgtatttgctgcttcattgaatgtgcatgctgcttggttcccaataaaaactgaagcagtgcgtttgtttattctctctgcatggctgcatgctcctctcccaaacgttcaccttggcacaagagacgatgcataccggatagaaataactcattccttggtcactgtgctcgactactataagatggagattttagaaaggagggagtatgtctatattcaatggataatgaatttagacacatataaaacacatacatcaagtattgtatgaatctattaattttctaaaacgagttttaatttgggactgatggagtacctttttaagtgatgggcccaagatatctaacaaattatgagtcacttgtagtatctgttcctactgcttgatttattgacaggaactcttttgtgtatgttacgtggaaacttgaaagttttactgttgtatgacccatttatcaattgttgtgtgcagattaaacttgtgctaagcacaagtaatgacacaatatttcactccagtatggacatggctttaagtaaaaaagacccaccagatacatctcttgttactgatattaatatcgtaaactacaaagtatttgatatgtgcatgcttaagctgcattacctgaagcttgtttcaaatacaccagcagtcagccagccgtacatgaaattcgtagggtatgtttataactgccttgtcacttgggagcattgcgttaaatatcagtgtttgatgtatctggtgcttctattcttcaaccgtaggcatgccctcacatccatgctgagtactgacattgcctgtatttggtctagatatgtgttgaagttcttgaccactcacttcccttctgttttttttctttccagacttcctatgctgcaagatctcaattgttctggacaatataaagtactaccttaagaaaacaagtataataccaaaaaaacactaaacaacaggggcacacttttcacttgtttgtggttatgctattcctaaattttctaattttcaatcaattgatgcacccagcttctatgcataccctgtgctgactactgacattgtgtgcgcttttagtgaagagatgtaggatttcttgatcactctctccccttggttttgcataccactctttgtgctgcaagattgtccatttgttaattttgaatgtattgtctgcacgaggaatcagccgtgattgaatcctactataacaagagaatagttggctgccctggtgccgaaggagaggatgaacacgatgtcgtctggttttggttggaaaaggataaaccgcatgagtgcctagtctgctcacggtactttgtgctcaaggtcattggtgatgggggtgatccagatggccacgatgacgaggatgatcatcactgaggccttgtgtcgataatgataataagaactttgtgaaacatggttttgtcctatctttgcagcatcagactgccctatagagtattgtaattgataagtgtttgaccatgaaccaggtcgggtggtgttttacacctacgaattttgttcagatcttttcgaccatacggttgcttctgtttggaatatagatttttttttctggagtgcaacatcaaataaaggatgagtgcatcggtttcactctattgaccatctatttttgggttatattttgttcctgattg

SEQ ID NO: 8586 - DNA, 1367 bp, Zea Mays
catcgtaatccaagaaccggggccactccaagcatagcaagaactaaaagacatctatatatattgtgtgcatatgcgcttcacgagcaaagtgtccgaagaataacaggaaattaaagcgatatcgtaatccaagaaccggggccatgcccggtcgtaatttcgcaacgacggcggtggccatagcggtcgtcgtcgtagccgcgctagcgtcggcgtcggcgggcgcggacgacgacgagcaagggcacctgcgccgggaagccgaccgcatcgtccggctgcccgggcagcccgacgacggcgtggacttcccgatgtactcagggtacgtgaccgtggacgagggcgcggggcgggcgctgttctactggctgcaggaggcggccgcggaggcgcagccggcgccgctggtgctgtggctgaacggcgggcccgggtgctcgtcggtggcgtacggcgcgtccgaggagctgggcgcgttccgcatccggcccgacggcgccacgctcttcctcaacgcgtaccgctggaacagagcggcgaacatcctgttcttggactcgcccgccggcgtcgggttctcctacaccaacaccacctccgacctctacgactccggcgacaggagaacagctcatgattcgtacaagtttctggcgaggtggttcgagaggttcccgcagtacaagtaccgcgacttctacatcgccggggagagctacgcagggcactacgttccccagctgtcccagatcgtgtaccgcaagaacaagggcgtggagaaaccgatcatgaacttgaaaggcttcatggtcgggaacgcggtgacggacgactaccacgaccaagtgggcacgttcgagtcgtggtggaaccacgggctcatctccgacgccacgtaccggctgctggacgccagctgcgtgcacgacagcggcgagcacccgtcgccgcggtgcaacgccgcctacgacaaggcgacggcggagcagggcgacatcgacccctacagcatctacacgcccacatgcaaccagacgtcgacgtcgtcgtcgtcgtctacgccgaggaggatgaggctcaagggccgctacccatggatgagggggtcttcttatgacccgtgcaccgaaaggcactccaccgtgtactacaaccgcccggaggtgcagcgggctctccacgccaacgtcaccgccggcgccggcggcgccatgaactacacgtgggcgacctgcagtgacaccatcaacaacaactggggagattcacccaagtccgtgctccacatctacaaggaactcattgcagccggactcagaatatgggtcttcaggaaatgagatgttcctcgatctcccacg

SEQ ID NO: 8587 - DNA, 2589 bp, Zea Mays
aatctgtaccccacccgttccacctcttcccggcgaaagtggcgccatggggggaaactggtctgggaaggagagtggtggccgtgcctgccctccccccgcccggccagcggcaaacccaaaatttgaacccgccgcttcgactgactactaccccaccatccaaaaccccactccggcctccgccgtcatttcctctccccgccaatccgccaccatttccagttccgaccgacctcgaaaccctagcccccagaccatcccactcgcaaccgccatgccggacctcccctgcgacggcgatggcgtctgtatggtctgccgcgtcgcatccccgccggaggtcgacctcctcacctgctccacctgcaccacgccctggcactctccgtgcctctccaagccccccgccctcgccgacgccgccagctggagctgccccgactgctcccccgactccgctgccgtcgccgctccctcgggccccgccaacaccctggtcgccgccatccgcgccatcgaggctgaccacacactctccgaccaggagaaggcgcgccgccgccaggccctcctcaccggcgacgcccccgacggcgcggacgacgatgacgacgaagcgtccgacgatgcccttgagatcgtcggcaagaacttcagctgcgttttctgcatgaagctccctgaacgacccgtcacgacaccctgtggccataacttctgcttgaaatgcttccagaagtggattcaaaatcagaagaggacgtgtgggaaatgtcgggcgcagatcccggccaaaatggctgagcagccaagaatcaactccgcactagtcgaagttatcaggatggctaagatttcaaagaatcctaactctgctggctcagcagttccatatcactatctacgaaatgatgataggcctgataaggcctttacaactgacagggctaagagggctggaaaagcaaacgcatcaagtggccagatctttgtgactattgcacctgatcattttggccccattcttgcagaaaatgacccccgcaggaatatgggtgttcgagtcggggaaacatgggaagaccgacttgagtgcaggcaatggggtgctcactttcctcatgtggctggcattgctggccagtctacgcatggtgctcaatcagtagccctctcaggagggtatgaagatgatgaagaccatggagagtggtttctttacaccggaagcggtgggagggatctaagtggtaacaagcggacaaacaaggaacagtcatctgatcagaaatttgagaagctgaatgctgctttacgcattagttgcttaaagggctaccctgttagggttgtacggtcgcacaaagagaagcggtcctcatatgctcctgaatctggtgtgaggtacgacggggtttacaggattgagaagtgctggaggaagattggtattcagggtaagttcaaggtctgcaggtatctctttgtacgctgtgacaatgaaccagctccttggaccagtgacgatcacggtgaccgtccaagaccattgccaaagataaaggagctgcaaggtgcaactgatataacagagaggaaagggcgcccttcatgggattatgatatggctggaaatgggtggtgcctccgccagtcagcaggaagcctgttctatctggggatcctgagaccgacaagcaaatccgtagagcaacaaagcgtgttcatttgtctgttgctgaaaggctgcttaaagaatttgcttgttcgatatgccgggcggtgattaaagaaccacttacgactccatgtgcccacaacttttgcaagacttgtttgcttggggcatatgatagccagtcttctataagggaaagaagccgtggtggtcggactctaagggcacagaagattgtgaagacgtgcccttcttgcccaactgacatctgtgattttttagagaatccccagatcaaccgagaaatgatggagctgattgagactttgcaacgcaaggctgttgaagaagccaagatgacttcagatgatgctgaggaatgtggtgatggtgattcggaggaaaatgatggtgatttggtgaagggagaggatgttagtggtttgaatgagggagagcaagacagtgcagacgctgatgctaatgttgaaggttctgtgaagattgtggttgaaatcaaggaggaaggaaaagatgataaaaggtcaaagatgggcgcgactgaagtggtggatgtgttagttgatgaagatgctgtgaagcagacgaaaaagcgcaaggttgatgctgaggctggcaccaacggtggcaagaggatgaagagcagtagtaccgtggaagaggttgctgtgtgcgtcactcctgtgaaacggagcaggaagagtggtgatatggatgatgagcgcaacggcagtcctgctgtgagcagcggccgctggtgactcgcacagtgtggatgacactggatctgctgatattccggcgaggaggactagaagcccgtgtcagagctgatgctggtcgctgaaggggtagaaggaaacggggaagcggaaaaccagccgagc

SEQ ID NO: 8588 - DNA, 2922 bp, Zea Mays
caaatactcaatgggaaacgagcaaacgaaacacatacgaaaacaaaccgtagcagttgccctgctccgtgcgatacgacgcgtgggcaaatgagtgatgggggagggcccatcccacggtgaccgaacaaacaagtaccacccaggcaggcaggcttcttcctgcgggattcgacgcggagcggaagccccagtggccagtgcccaccaccttcacgcctcctcgcgtcgtcgcaaccgcagatctggccaacggcccccgaccgatcgacccccctccccctcggcgcggcgaggcgcagcaattcaagtgtatcaccgttgttacttccataacgtgctaacagtcaaatttgtcaagctactgttgatgctccagatatagtagaaaaccatgggagaagttagtgatgataattccaacatgtcctttctaaaaagaatcgctacaagtgacgtgccactgttgaaagagtatggtgtgaatggagttgttgtcgccctgcttctggctgtagttactcctgtcctgctttccatgatgtttggcaagaagacaaagcaaagggcggtgcgagctgatgtgggtggagaggagggatttgcaatgcggaacaacaggttttcctccttagttgaagtcccatgggagggcgccacgacaatgtcagctctgttcgagatggccagcaaaaagtactctcgacagaggtgtcttggcacgaggaagctaattaagagggaatttatggaatcttctgatggtaggaagtttgagaaactgcaccttggtgaatatgaatgggatacctacactgaggcatttaatcgtgcatgtaatttttcttctggacttatcaagatgggccacgacctagatagtcatgctgctatcttctctgatacaagagctgagtggatcattgctgctcagggatgcttccgacaaaatttaacggttgtaacaatatatgcatctcttggtgaggatgcattggtgcattcactaaatgagacacaggtttcaactctgatatgtgattcgaagcaacttaagaagatacctgcaatcagctataaattgcagagtcttaggcgtattatctatattgaggatgaacctgtcgaggctgagacactgaaccaagtgaagcatttgacaacattgtctttcactgaagtagaggagcttggcaagacatctcatgttgatgcaaggttaccttcaggctctgatactgcagttatcatgtatacaagcggaagtactggtcttcccaagggtgtaatgatcacacatggcaacatggtggccacaactgcagcagtcatgacaatagtcccaaaccttggcatgaatgatgtttatctggcttatcttccattggctcatgtctttgaactagcaggggagactgtcatgttagcttctggcagtgccattggatatggttcagcattaactatgactgatacatcgaacaagattaaaaagggaacaaaaggagatgtttctgtactgaatcctactcttatgatttcagttcctgcaattttggatcgtatcaaagatgcagtatttaagaaagttggtgagaagggtggcctgacaaaaaagctgtcttgattttttcatataagcgaaatattgcagcaattgaagggagttggtttggatcttgggcaccagagaggatgttatgggatcacattatttataaaccaatacgggcaatgcttggaggacgtctaagatttgttctttgtggtggtgcacctctgtcaagtgacacacaaagatttatgaatatatgtctaggtgtcccagtgggtcaaggctatggattgactgaaacttgtgctggagcagctttcactgaatgggatgatacaagtgtgggtcgtgttggtccaccacttccttgttgctatgtgaagcttgtctcatgggaagaaggtggttacaagatttctgattctccaatgccgagaggagaggtcgcggttggtggacacagtataacaaaaggttatttcaacaatgaagcaaagacgaacgaagtatacaaggttgatgagaggggcatacgctggttctacactggtgatattggtcagttccatcctgatgggtgccttgagattattgacaggaaaaaagatatagtaaagcttcagcatggagaatatgtgtctcttggcaaggttgaatcggctctagcaacaagcaactatgtggagaacatcatggtttatgccgatccatttcataactactgtgttgccctggttgttccagcgcaccaggccttggagaagtgggctcagaattccgggatgaactatgaaggctttggagagctttgccaaaacgaccgagcaattaaggaggttcagcaatcgctatcaaaggccgcaaaagcagcgaggctcgagaaattcgaggtgccagcgaagatcgtgctgttgcctgaaccgtggacgccggagtccgggctggtgaccgcagcgcttaaactgaagagggagcaaataaaggccaaattcaaaggcgatctggacaagctctaccactgaagaagcgacagaggacggtttaatttgcacctactgcttccagacgcttgcggtgccaaaagctgcctggatggaacttttactgacctgcacgagtggtgtgtgtgtgtgtatcccagctgctgatacacaggagcttcgttcttctgtgactgtgactgagggaaaataaacccagtgttggaatgatcttgatttgtaatagcttcacgtcatgggattttaattttgtcatagcacagaggatgctcaatttcacgtccgttacgggtcagttatgacactaagcatattgtaaatgatgtttttttatatagacacaataaataggccctgggcacatca

SEQ ID NO: 8589 - DNA, 3831 bp, Zea Mays
tccactccactccactcccgttcccctcccaattcccaaaggccaaagccctcctctgctccgctctgttccgctctgctccgaccaaatgcgcgattagagccgcccgcgagatcgatccccgcgcggccaaggatcatcggccgccatggcgtcctcgcaaggggagtcggtacccccgtggctcaagtctctccctctggcgcccgagttccgccccaccgtggccgagttcgccgaccccatcgcctacctcctcaagatcgagcctgccgcggcgccattcggcatctgcaagatcgtgccaccgctcccgccgccgcccaagcggaccacgctcggtaacctctcccgctccttcgccgcgctccacccggacgatcccaccccgacattccccacccggcaccagcagctgggcatctgcccgcgccgcccccgccccgcgctcaagcccgtgtggctctctccccaccgctacacgctccccaagttcgaggccaaggccggcgcctcccggaaggcgctgctcgcgcgcctcaatgtccccgcctccaagcagctctcgccgctcgacgtcgaggcgctcttctggcgctcatcggccgaccgccccgtcgtcgtggagtacgccagcgacatgcctggctccgggttcgcgccctgcgccgcacgcctgacgcagctgcccccggcgaacgtgggcgagacggcgtggaacatgcgccgtgtggccaggagccccgcgtctctgctgcgcttcgtgcgggaggaggtgcccggggtcacgtcgccgatgctctacgtcggcatgatgttcagttggttcgcctggcacgtcgaggaccatgacctgcacagcctcaactacatgcattacggggctcccaagacgtggtacggggtgccgcgcgacgctgcactcgccttcgtggaggtggttcgcgtccatgggtatggcggggaggtgaactccttagaaaccttcgcgatgctgggtgataagacgacagtgatgtcccctgaagtgctcgtggattcagggattccctgctgcagattagttcagagtgcaggggagttcgtggttactttccccggagcatatcacagcgggttcagtcatgggttcaattgtggggaagcgtcaaatatagccactcctgaatggttgatagttgcgaaagaggcagcagtccggagagcttccatcaatcgtcctcccatggtttcacactgtcagttgctctatgaacttgcgttgtcattgtgcttgagggatccatcaaatgacgttatggaaccacgaagctgtagattgaaggagaagaagaaaagtgaaggggaccaattgatcaaaaagatttttgtgcaaaatgttattgaagacaataaactgcttggtcattttctgagtgatgggtctccttgcattattcttccagtcaattacaatgatggctctccactatcaactttgctctcaaaatttcagtcaacaactgattcaaggatatcgcatggccagtgcagtaaggcagaagctccaaaagactccagacgcttaccaatggatggggctgacaagaaccgggaattgtcatcatccaacaaaaattcattgtcagccttctcaggaaagacagtcccactcccacctagaatctgcatacatgaatgtgcaaatgtgactggggcatcacacgcacataatgcagaaaatgacaaggtggatatgaacagtgctgctgggcttttagaccagggtttattatcctgtgtcacctgtgggattttgagtttttcatgtgtggcagtgatcaaaccaagggagtgtgcagcaaaatggttgatggctgctgattctagtttgatcaacgatcggcttgctagttctggagaacatgatatagatgcattacaaggtgggaggacaactggtggaattttacaatatcccagaatagaagtagaagcaaaattgctggctggagaaatggatttcgagtatgattggaaggatattctttttaaagaggtcactatcaaggatagggagaagatacaggaagttgtgcgggatgaggaagcaataccaacaaatagtgattgggctgtaaaactgggcattaatctgtactatagtgctaatcttgctaagtctcctttatacagtaagcaagttccatacaatagagttatctatgaggcatttggctgcggttctcccaatgactcaccagtgaagctgaagacttattccagaaggcaatgcagggcgaagaaaatagtcttggctggcaggtggtgtggaaaagtatggatgtcaaaccaggttcatccatacctggctgacagaatcaaaaatcatgagccgaaagaaatcgatgaaacatttccttctgatcagaaatcccatgctgaacctgttgaaaattcaagtagagaggcagcctccacaagaaagagtagcagcagaacaattgaaggaaaaacaagcaagagggagaaagaacagttggagaaagctaatgccaagaagccaaaatttactgaagaggacaactccaaatcattggagggtactgctgaagcctccacacagaagataaagggcagatcagttctagaaaaaacaagcaagaaggagaaagcgtataccaagaagctaaagcatactgaaaaggtctcggaagcactaaaaggtccttcagaagcctccttccctgcaccagctgggatggtagtccgcagcagctctaggatcgccaataggaaaatcatgttgaaatcaaagatggaagaagaggataatggctcagctgaccgtccaaagtcaaaggtcgaagacgacaaagataatcctgctggccgttcaagagcaaaaccactaaggcaaaagactaaagtagacgcgaagaagaaaacgaaggaaactagagtagaaaagcgaaaggctcccagtccagcttctcagaaggacgaagaggagcaatcagatgatgtcgagggacgttctaccactaaacaacggctgtctttacgtaagaagggggctaaaacagaaggaaaacagcgaatggagaaacccagattcgggggaagtgctcctcccccaagctctccgaagcgcaaggaagagtacgtgtgcgacatcgaaggctgctccatgagtttcggcacagagcaggcgctgtccctgcacaagaacgacatctgcccggagaagggctgctgcaggaagttcttctcgcacaagtacctgcagcagcaccgcaaggtccacgccgacgaccggccgctgaagtgcccgtgggagggctgcggcatggcgttcaagtggccgtgggccaggacggagcacgtgagggtccacacgggggacaggccctacgtctgcctcgagcccgggtgcggccagacgttcaggttcgtctccgatttcagccgccacaagcgcaggacgggccatggcgcgtccaagaaggcgaaagcgaagaagcaaggcaaagcagcagtaacttagtactagtagtttagcacccaaaaccaatggcgcccttctgaaatgagtagccttggaagggacaggaggaaaacttgtagattccattagcagtttagcacccaaaaccaatggtggtctctgctcacagttccattaattgctagttgaacgggttcgttggagcccacaattaggttggttccctgtgagtaatttgggtaatcattaagacattctcgtacagtttgccttttgcctatcgttcgtttatcttttgctggatgatgtcttgcttatggtaagcacctgtctagctccttttg

SEQ ID NO: 8590 - DNA, 1455 bp, Zea Mays
gcacctccaagctgaaggtcaacacatgcttatagagagagggagagagagtaaacaagggaggagacatggaggaggaaggccatggcatcgtcattgtcggcggcggcatctgcggcctcgccactgctcttgcccttcaccgcttgcttgcagagatcgtgaacaaacttgctgcggcgtttcaggagtcgtggcgtgtggaaggtcacaaaaaagactacccaggcaccgatcgggaaggaattccggtgcttgagaaggaaggatctcatagagaccatggcgaagaacatacctgcaggatcgatccgcttcggctgccacgtggtcgcgatccagcaggatcctggtacccacggacccattcttactacagtcgacggcggcacgatcagggccaaggtgctgatcgggtgtgacggcgggagctcggcggtagccaggtacctcgggctgtcgccgccgaaagccatcccccgcacagtcttgcgtggcttcactgcgtatccgcatgggcatccgttcggggccgagttcctgcggattagaggaggcggggagttcgtcgtcggcaggttgcctgtcacccgcaacctagtccatttcttcgtaaccatgcctaatcctccaacaggaataatgctcgccaccaaagacgtgagcgccacgacgacgaaggatttcatgctggagaagctgcgagattgctgcgctcccgagatcgtccagatggtccaggactcggacccagagtccctcaacgtcgtgaacagcatccggtaccggtctccgtggcaggtcgcgctcgccgccttccacaggggcgccgtcacggtcgccggcgacgccatgcacgccatgggcccgttcatcggccagggcggctcggcggcgctcgaggacgccgtcgtgctcgcccgctcgatgtcacgggccaacgccgccggcggcggtcacggtgccgcggttcgggagtacgtccgggagaggaggcccagggtggcgctgctgtctctcgagagctttgtcgcggggacgctgctgcgcgctaggtcgctggtggggaagcttgcctgcgtggctgtcctggcgctccttggcaccaggtcgcttcggcatgccgacttcgactgcggtcgcctctagtcctcgacctcgaggatgcatttccttagcttgtggatcatggcatattggcttctgtgcgccggacaagaaaattgtgcgacgacaataattgtctccatccttcatcccggatgatgtgatgaaacgatgcatctgtttcttttttttccttttcatttttaacttttcatgttgagcactacgctgaaagcaaatgaacgaccctcattggtcagtttgtttccgagagaaaggagttagctatctctgcaccttacttattctcatctcttattttaaactagtgttgtctatgtatttctg

SEQ ID NO: 8591 - DNA, 2572 bp, Zea Mays
ttacgggttttttgcccagccctactagttcttccctcgcgttcactccccagcgtgggaaaatcccggaattttcttgtttgtccactggttttcttgcgccaaaaccaggtttctccccgttgccgtggcagaactctgttcttgcccagtctagaagatctgcaccgttccaaccaccgactccggccgccaagcatatagccagcgcggcgaagaattcccaacgcgaaagccaaaacctcttcacttcacttcacgtcgacacgtgcggggagaatatgcgcgcgacaatcccagccctgtcgctcctggtgacgccgcggctcccctcgctcgccgtgccgctggctggaggccgcctccgcgtgggcggtcgttctcggacccgcctccgcgtggcggcgccgacgtccgtcccaggggaagcggcggagcaggcggagccgagcacgtcggcgcccgagtccggcgagaagttctcgtggagggatcactggtacccggtctccctcgtcgaggacctcgaccccagccgccccaccccgttccagctcctcaaccgcgacctcgtcatctggaaggaacccaagtccggcgagtgggtcgcgctcgacgaccgctgcccccaccgccttgccccgctctcggagggcaggatcgatgagacggggtgcttgcagtgctcgtatcacggatggtcattcgatggctccggcgcctgcaccaagatcccccaggccatgcccgagggtcctgaggcccgtgcggtgcggtcaccgaaggcgtgcgcgatcaagttccccaccctcgtctcccaggggctgctcttcgtgtggcccgatgagaatgggtgggagaaagcggccgccaccaagcctccaatgttgccgaaagaatttgaggacccggccttctccacggtgacaatccagagggacttgttctatggttatgatacgttgatggagaacgtctctgatccgtcccatatagaatttgctcaccacaaggttactggacgaagagatagagccaggcctttgacattcaggatggaatcaagtggtgcctggggttactcaggagcaaattctggtaatcctcgcattactgcaacttttgaggccccttgttatgcattaaacaaaatagagatagacacaaagttacccatttttggcgaccagaaatgggtcatatggatttgctctttcaacattccaatggccccagggaagactcgttctattgtctgtagcgctcgaaactttttccagttcacaatgccaggaaaagcatggtggcagcttgttcctcgatggtatgaacattggacttcaaatttggtctatgatggcgatatgatcgttcttcaaggccaggagaagattttcctagctgcaaccaaggagtcttctacggatattaatcagcagtacacaaagatcacattcacgcccacacaagctgatcgatttgttttagcattccgcacgtggctaaggaaatttggcaatagccagccggagtggtttggaaatcctacacaagaagcattgccttccaccgtcctttcaaagcgcgaggtaaaagccatctgggtcaccaaaaaagtttcagtataatatttgcttcagacataaaatatctgaatatgacaacctttttggtggtcaaagatctgttttgcttacattcttaatactcgatgcattggtaagttattacagttatcctttttactcgatttttccctttctgagcagaacgtattatcacgtcttcattgtttgtacacttggtttctatgacacacaaatttttgttttacattatcagttgtcatatgaactaatgtatttacagcaacctgcttaagtgcttagtatcacaaagggacaaattcaatgaaatatttggaaagatagtagcgtcgaaccactctcactgctaggcatttgagaatagttacttaactgacagcgaagttcaccttctaccgactggatctggaaacagtatcttgaagtagtcacacatgctagacagatacgagcagcacacgttgaaatgctcgtcttgcaaaggagcatataatgctttccagaatctgcagaaggtattcatgggagcgacagtagtttgctgtgctgccgctggtattcctccagatgttcagctcaggctattgatcggtgcggctgctttggtcagtgccgctatagcatacgcattccatgagctccagaagaattttgtattcgtggattacgtgcatgctgacattgattgaaagattcgtgaggatctgttgtgtcgacatcactcgctcgcgagtcgtgtctgtagtctagggctctaggcgtctaggtagggaaagtaactttttgccgggtataggtcatattgctcacatatgtattttgtatagtgtatgcactcaactgtagccgatgcagtgcgaaaatatagtttttatgttattatctattggattaaaattgtctccagatccttttagcatgtaaaatgccatttttcaaatggaagttctcaattgcgcctatag

SEQ ID NO: 8592 - DNA, 2412 bp, Zea Mays
ctggccaggggagcctcctctcctctcgtctcgtctcgtcgcacgcgagcccatccccccgcccgccgcctgcgcttgacttgacccgcgctcctcctcggcgtcggggagaccgggctcggtccgcgttgtctcggcggacggaggaggaccgtagcgcgaccgcccgtccgccgccagagccctcgtcatcgtgccggctgctcctgccgctcgtcccgccgcgttgagcattggggatctcgcgggcccttcgtctgtacccgccgactcttcaaaccctagcctctgtggcccgccgacgccgacgggaggagctggagctggggctggggctggagggcgcggaagctggtggctgttgtttcgctgattgaaagtactccatggcttaatgatgaactggtaataaagaggtcaatcattgtcagctagctgtctgaggagggtttttggagttcttactaagaagagagttactcatgctagccagtgaaggacggacacagatcttgcttgctttactgaactgaagacatgcccaaaacacctcctgtcaatgcaagcaagaacactgaaccgcagaaacaatctgcacccaacttaacaataacaaatgggcacacaagtacaaaggtagtggttaaaaaagagcaccctatcaatgatgtgaaacacattagcacttgggtttgcaaaaatttggcctgtaaagctgttagaccagcagaagattccttctgcaagagatattggaaaaggcaattagtaatcgggaaagatgcccgccgagttgataatctatgccaacgcatttatttgagttacaggctattagagggaactgtccattttaaagaattgcatgagattattgaagatgcaaaagcaaaattggaaagtgaggttgggccacttgatggaatgtcggcaaagaatgcacatggtatcgtaagcaggttctcagctggtatcgctgtgcagaaactatgctctacagcaattcaaagagctgacgagtggttgagttctcctgacctgcatcttcgagattcattacctgttgcctgtagatttaaatttgtagacataacatcttcttccctcattgtcatcttgaaagaaacctcgtcttctgacactatcaaaggttataagctatggtactggaagagcagagagcaaccaaagttatatcattcacagatgatggggtacttggccattcagaatctagatgccgtactgaaagtagggagatatttgtcatgcgtgcaccaaagaatgcagtgggaggaggggctacacatgcgcaaaaaaaagacaggaaccagtcttgtaagtcaactgggttcaagatccgagatatttggaagaactttcaggaagctttagatgcagaaggctgttttgaaggattttctgaagatgtacatgaaggttcctgcagcagaagtgttacagagacagagttatctggagcttgtcgcaaacttcatttcaactcatcttctgtccccgacctaaacgccgaggttcctgtacccgtggactacactgagaaccattattattctaagaagggacttgtgaggtcaaatgacagtggtgactctgagacctgcgccgttggccagactgcagagccgcctgcagttgaatctcggcaagtaagcaaggtgaatagcgtaccagttaataaatgcgagcagaatggtgcttctgctatttgccatgaaaagatgctctccggatcgacgaggcaactggatggggattatgagcactgcgtaaaggtagtaaggcagttggaatgcgatgggcacatcgaaaatggtttcaggatgaagttcttgacatggtatagtctaagatccacagaccaggagcgcaaggccgtgagcacatttgtcagaacgttaagcaacgaaccaagcagcctggccgagcagctcgtcgattctttcggagaaatattaaacagcaagaaggccaaaaccggtttctgcagcaagctatggcattaggacaaaaaggactagatctcaagatactgctaactcactgattatccatatttttcactgaccggtgcagtgaaattctagtttattccatcaaatttgacagcgatgaaaagggggcatctgtgagaataggagattattttgggcagcaagtagcctgctctgaaataattcttttccatcaggaagtagtggaaacttgattttcattggattacctgggtcaatccagaaattattgtagaaggttgtctttttttcccctttgttgttgtggttcgctgagaaattctttggagatagcagtccgttggttattctgggttattatataaatcatggtaaatggaatgtgatggtacaaagtctctggtttacttgtgct

SEQ ID NO: 8593 - DNA, 2647 bp, Zea Mays
ctggccaggggagcctcctctcctctcgtctcgtctcgtcgcacgcgagcccatccccccgcccgccgcctgcgcttgacttgacccgcgctcctcctcggcgtcggggagaccgggctcggtccgcgttgtctcggcggacggaggaggaccgtagcgcgaccgcccgtccgccgccagagccctcgtcatcgtgccggctgctcctgccgctcgtcccgccgcgttgagcattggggatctcgcgggcccttcgtctgtacccgccgactcttcaaaccctagcctctgtggcccgccgacgccgacgggaggagctggagctggggctggggctggagggcgcggaagctggtggctgttgtttcgctgattgaaagtactccatggcttaatgatgaactggtaataaagaggtcaatcattgtcagctagctgtctgaggagggtttttggagttcttactaagaagagagttactcatgctagccagtgaaggacggacacagatcttgcttgctttactgaactgaagacatgcccaaaacacctcctgtcaatgcaagcaagaacactgaaccgcagaaacaatctgcacccaacttaacaataacaaatgggcacacaagtacaaaggtagtggttaaaaaagagcaccctatcaatgatgtgaaacacattagcacttgggtttgcaaaaatttggcctgtaaagctgttagaccagcagaagattccttctgcaagaggtgctcgtgttgtatttgccacaagtttgatgacaataaggatcctagtcaatggttagtttgttcatctgacaatgatagcaagaattgttgtggttcttcttgtcatattgaatgtgcattccgagagaagagggcaggatgctttgatctagagcaaattatacatcttgatgggagttattcctgtgcctcgtgtgggaagatttctggaatactaggatattggaaaaggcaattagtaatcgggaaagatgcccgccgagttgataatctatgccaacgcatttatttgagttacaggctattagagggaactgtccattttaaagaattgcatgagattattgaagatgcaaaagcaaaattggaaagtgaggttgggccacttgatggaatgtcggcaaagaatgcacatggtatcgtaagcaggttctcagctggtatcgctgtgcagaaactatgctctacagcaattcaaagagctgacgagtggttgagttctcctgacctgcatcttcgagaaacctcgtcttctgacactatcaaaggttataagctatggtactggaagagcagagagcaaccaagtatggaaaagcctgttattgtgtccaaagatgaaagaaaaatacttctttatgaccttaccccatgcacagaatattctttcagagttatatcattcacagatgatggggtacttggccattcagaatctagatgccgtactgaaagtagggagatatttgtcatgcgtgcaccaaagaatgcagtgggaggaggggctacacatgcgcaaaaaaaagacaggaaccagtcttgtaagtcaactgggttcaagatccgagatatttggaagaactttcaggaagctttagatgcagaaggctgttttgaaggattttctgaagatgtacatgaaggttcctgcagcagaagtgttacagagacagagttatctggagcttgtcgcaaacttcatttcaactcatcttctgtccccgacctaaacgccgaggttcctgtacccgtggactacactgagaaccattattattctaagaagggacttgtgaggtcaaatgacagtggtgactctgagacctgcgccgttggccagactgcagagccgcctgcagttgaatctcggcaagtaagcaaggtgaatagcgtaccagttaataaatgcgagcagaatggtgcttctgctatttgccatgaaaagatgctctccggatcgacgaggcaactggatggggattatgagcactgcgtaaaggtagtaaggcagttggaatgcgatgggcacatcgaaaatggtttcaggatgaagttcttgacatggtatagtctaagatccacagaccaggagcgcaaggccgtgagcacatttgtcagaacgttaagcaacgaaccaagcagcctggccgagcagctcgtcgattctttcggagaaatattaaacagcaagaaggccaaaaccggtttctgcagcaagctatggcattaggacaaaaaggactagatctcaagatactgctaactcactgattatccatatttttcactgaccggtgcagtgaaattctagtttattccatcaaatttgacagcgatgaaaagggggcatctgtgagaataggagattattttgggcagcaagtagcctgctctgaaataattcttttccatcaggaagtagtggaaacttgattttcattggattacctgggtcaatccagaaattattgtagaaggttgtctttttttcccctttgttgttgtggttcgctgagaaattctttggagatagcagtccgttggttattctgggttattatataaatcatggtaaatggaatgtgatggtacaaagtctctggtttacttgtgct

SEQ ID NO: 8594 - DNA, 3758 bp, Zea Mays
tgcagacctcccgacgccggccgtgccgcttccgtcctcgctttcctgtcaccgccgccgccgactgccacaacctctttcccatccctctcgtccccatcctctgccgccgcccccatcctcgccgcggctcggctggtgcggagcggacggacggagatccgccgacctcgggctccgctgcgtcatcgctacgccggctgaaggagtgaagatgatagacatggtgtctgctgttgaagagcttagtgggttaagctctaaagaacttaatgagatgctgaaggagtcagacaactttgttttgcagtccaaggcagaaggcggaggtccaaagcagacacttgtggacatggaaaaactcgtgtcctcgcttcctcttcatctcattgctgtatgtttggagcttcggcaaggccccgatttgacatatgtgcttcgtggcatgcgctttttgcatagtttgtctgacctagcatcccgccatactagactggagcaggttcttcttgatgatgtcaaattatctgaacaagtcatggatctgatattcttcttactttctattcttgctgaacagaagaaggtttcaatgggttaaaccaaaatgtttttattgattcatgtgtgctctgctttgaattgtcatctgatactaattctggtaacagctgttgttttaaattaggagaataatgttggcgcttctccgcttgtgcatgcgtcacttgtagcagctagtcttcatctgctaacaagttacttctcttcccagtggcatgaacttgtccatattctgcttgcacatccaaaggttgatatctttgtggatgtggcctttgatagtttgcatgaagatgtgaggctgttaaatatcagattatcatcaatggacttcggtatctttcctgttggttctttggaatctcgtcttgctcacttcatctgccaacagtgtgaagcatcattgcaatttctcttgttgttgtgccagcaaaagctgtttcgagatcggattttaagaaataaggaactctctagaaatggaggcatactgtcactttctcacactatactgaagttagctgtccctgaatgtttgaagcaatcaaccgatcttgttgcttctatttccaggctcaaggcaaagatactttctattctgctgcaactttgtgaggctgaaagtgtctcttacctcgatgaagttgccactaattcaaacagcatgcggctagggcaaaccttggctctagaggttcttaatttgctgaagattgcatttggaaagaaaaaatacattacttctgattctcatgataaggttaagatttaccccatgggatctatgcttatcagtgcattgcgtcttgttgacgtcttctctgatgattcaaacttcagatcatcctttttgactaacactgttccgtttttaacccagattctagcaactcctcacggtgaatttgtttctagttggtgctctgtcaacttaccagcaattgaggaagatgcaagtctagattatgatccttttgttgcatctgaggtggcactgttagcttctaataatgtgttgactgaagctaaagctgactattcatgcccttttcgccctagcctgccttcagtggcatatgcacagacaagaacatcatgcgtagtgaaaataatagcaaatttgcatgtttttattccaaacatatgtgaaggtggtacaaaatgatattccaccagaaagcatggaggacatgcacccaatgcagcagcccttgccaacacgggcaagcactccggactccaaaatgaataactttccaaaggatgtgcagaacatggaagtgtctgcaccaatacccccaataaatcgggaaggaaatgataaggatgagactccaaagaacacagtctctagaaatggtggtttcctacagaatgcagttggtcaagacctagtccatcttggcgttgcaagaacagccagtggtggctcttcggccgtcacttccgttgttagcactggacaccagcgcagcaaaatggatcttgatccagcttccggtagcgtggacaatttcaaaacaccagaactcacaaaagaaaatggtctccagggggatgacaaaggagaaagtagtgtgtatgatgagaggcaacctaagagaaggaagcggaacattatgaatagtgagcaaatagatgaattagagaaggctctagtagatgagcctgagatgcacaggaaccctgttctattgcagggttggtcagagaagctaagtctgcaggctgaacaatcggaaagctaagcttgctcgcattgcaaaagaaagagggacatttgagggagataatgctgataagccatctacccctcatcccggcgagtcttccgaaagtgctggggaggacaactatataccccctgcaagggtgatgactgctccatccaaaggcagactggtgagcccggacggcaatgagaaaacatcgcaggcagagctatcccccaacacgatgctgatccgcccattcacgagatccttctcactggagcccggtcggctcgtttcactagttgacagcgacgggaaggaggttggcaggggcaagatattccaagcgccagggaagagcccagccccagtggagagccgcatctgcacggttgatgtcaccgagctcaggaccgagaagtggagggagctcccacacccttctgaggcatctgggaggaccttccaggaggcggaggcgaggaatggtggaatcatgagggtctcttgggactccggcaggctgttgcctgtagtgtagcaaggcagaaacttttcgtcaggttgctgtataccgctaggcacaaggtgagcagagggagcctttggtttagggcgagagactggatcatgggattcttgggggcctaagtaacactgttaaaacctgtggttaactgtggtgtatccatcaactaattgtctcaagcaatgcaggtacggagtagttactaattttactgctggtgtttggtgtcacctgcaacgtgacgtggtaaaccaatgctgagcgatggagttgcatgtaaataattcagcactagaggaaaccaaaggggctgcataatgaactttagcttttattgtgggaaaaaaggtgatagcgttcttcatgttcgatcaattaaacagcaccagtaaattgatcatagggatgtggacttgctgaggcttgagtatatatggtgttcctcgagcttccttaaacaagcatgaagtttgtaggcacttcatcacttgttggtgagctacagtaatcttgagcccgaccctataaataacatggttcttaggctcgttaccaaaatgagcattacattacaaagcagcttttagacatatattggccaagaagatgttggagagaaatataagtctcaaatgttgagtgatatgttgcttcgtgaattattctcaaacatttaatgacgaggccacatacgaatttctccattgatttttttcactaaagacaccatacactgacaatgatgagatattggagagaaacaaaagtctcacataattttcattgtatatcatttgtgagattccgaactattgtttttatacaggtcaacatgctttagtttttgttaccatagtagttgtgagtaaattggttataacaagctaacgagcatcaaaggtcgcttcattcaagataattttatgttgctttaacaaacaaacaaacaa

SEQ ID NO: 8595 - DNA, 4115 bp, Zea Mays
tgcagacctcccgacgccggccgtgccgcttccgtcctcgctttcctgtcaccgccgccgccgactgccacaacctctttcccatccctctcgtccccatcctctgccgccgcccccatcctcgccgcggctcggctggtgcggagcggacggacggagatccgccgacctcgggctccgctgcgtcatcgctacgccggctgaaggagtgaagatgatagacatggtgtctgctgttgaagagcttagtgggttaagctctaaagaacttaatgagatgctgaaggagtcagacaactttgttttgcagtccaaggcagaaggcggaggtccaaagcagacacttgtggacatggaaaaactcgtgtcctcgcttcctcttcatctcattgctgtatgtttggagcttcggcaaggccccgatttgacatatgtgcttcgtggcatgcgctttttgcatagtttgtctgacctagcatcccgccatactagactggagcaggttcttcttgatgatgtcaaattatctgaacaagtcatggatctgatattcttcttactttctattcttgctgaacagaagaaggtttcaatgggttaaaccaaaatgtttttattgattcatgtgtgctctgctttgaattgtcatctgatactaattctggtaacagctgttgttttaaattaggagaataatgttggcgcttctccgcttgtgcatgcgtcacttgtagcagctagtcttcatctgctaacaagttacttctcttcccagtggcatgaacttgtccatattctgcttgcacatccaaaggttgatatctttatggatgtggcctttgatagtttgcacgaagatgcacatactaacatttaatgactcatggtcaggttgatatctttgtggatgtggcctttgatagtttgcatgaagatgtgaggctgttaaatatcagattatcatcaatggacttcggtatctttcctgttggttctttggaatctcgtcttgctcacttcatctgccaacagtgtgaagcatcattgcaatttctcttgttgttgtgccagcaaaagctgtttcgagatcggattttaagaaataaggaactctctagaaatggaggcatactgtcactttctcacactatactgaagttagctgtccctgaatgtttgaagcaatcaaccgatcttgttgcttctatttccaggctcaaggcaaagatactttctattctgctgcaactttgtgaggctgaaagtgtctcttacctcgatgaagttgccactaattcaaacagcatgcggctagggcaaaccttggctctagaggttcttaatttgctgaagattgcatttggaaagaaaaaatacattacttctgattctcatgataaggttaagatttaccccatgggatctatgcttatcagtgcattgcgtcttgttgacgtcttctctgatgattcaaacttcagatcatcctttttgactaacactgttccgtttttaacccagattctagcaactcctcacggtgaatttgtttctagttggtgctctgtcaacttaccagcaattgaggaagatgcaagtctagattatgatccttttgttgcatctgaggtggcactgttagcttctaataatgtgttgactgaagctaaagctgactattcatgcccttttcgccctagcctgccttcagtggcatatgcacagacaagaacatcatgcgtagtgaaaataatagcaaatttgcatgtttttattccaaacatatgtgaagagcaagaaagggatctttttcttcagaactttcaaaagtacttggtgtctgggagttctaaactgtcagcagaccagccagcttctagtgattttgatgccactaaagtctgtagaaacttaggatctttgtctgattatgctaaaacattggttcctaatttgttaaatggggaagacttgttgttattaagtgatttttctgataagctacaatcttggtgtaaatcacaagttgcagtaaaggtggtacaaaatgatattccaccagaaagcatggaggacatgcacccaatgcagcagcccttgccaacacgggcaagcactccggactccaaaatgaataactttccaaaggatgtgcagaacatggaagtgtctgcaccaatacccccaataaatcgggaaggaaatgataaggatgagactccaaagaacacagtctctagaaatggtggtttcctacagaatgcagttggtcaagacctagtccatcttggcgttgcaagaacagccagtggtggctcttcggccgtcacttccgttgttagcactggacaccagcgcagcaaaatggatcttgatccagcttccggtagcgtggacaatttcaaaacaccagaactcacaaaagaaaatggtctccagggggatgacaaaggagaaagtagtgtgtatgatgagaggcaacctaagagaaggaagcggaacattatgaatagtgagcaaatagatgaattagagaaggctctagtagatgagcctgagatgcacaggaaccctgttctattgcagggttggtcagagaagctaagtctgcagggcccagagatcacatcatcacaacttaaaaactggctgaacaatcggaaagctaagcttgctcgcattgcaaaagaaagagggacatttgagggagataatgctgataagccatctacccctcatcccggcgagtcttccgaaagtgctggggaggacaactatataccccctgcaagggtgatgactgctccatccaaaggcagactggtgagcccggacggcaatgagaaaacatcgcaggcagagctatcccccaacacgatgctgatccgcccattcacgagatccttctcactggagcccggtcggctcgtttcactagttgacagcgacgggaaggaggttggcaggggcaagatattccaagcgccagggaagagcccagccccagtggagagccgcatctgcacggttgatgtcaccgagctcaggaccgagaagtggagggagctcccacacccttctgaggcatctgggaggaccttccaggaggcggaggcgaggaatggtggaatcatgagggtctcttgggactccggcaggctgttgcctgtagtgtagcaaggcagaaacttttcgtcaggttgctgtataccgctaggcacaaggtgagcagagggagcctttggtttagggcgagagactggatcatgggattcttgggggcctaagtaacactgttaaaacctgtggttaactgtggtgtatccatcaactaattgtctcaagcaatgcaggtacggagtagttactaattttactgctggtgtttggtgtcacctgcaacgtgacgtggtaaaccaatgctgagcgatggagttgcatgtaaataattcagcactagaggaaaccaaaggggctgcataatgaactttagcttttattgtgggaaaaaaggtgatagcgttcttcatgttcgatcaattaaacagcaccagtaaattgatcatagggatgtggacttgctgaggcttgagtatatatggtgttcctcgagcttccttaaacaagcatgaagtttgtaggcacttcatcacttgttggtgagctacagtaatcttgagcccgaccctataaataacatggttcttaggctcgttaccaaaatgagcattacattacaaagcagcttttagacatatattggccaagaagatgttggagagaaatataagtctcaaatgttgagtgatatgttgcttcgtgaattattctcaaacatttaatgacgaggccacatacgaatttctccattgatttttttcactaaagacaccatacactgacaatgatgagatattggagagaaacaaaagtctcacataattttcattgtatatcatttgtgagattccgaactattgtttttatacaggtcaacatgctttagtttttgttaccatagtagttgtgagtaaattggttataacaagctaacgagcatcaaaggtcgcttcattcaagataattttatgttgctttaacaaacaaacaaacaa

SEQ ID NO: 8596 - DNA, 2140 bp, Zea Mays
  misc_feature (2139)..(2140): n is a, c, g, or t
atggtcgcgattgttggatttggtgatagatggcggctacggttgagccatgagattatattccaggcagtttggaatcttctctccattctccgcacaggtgatcgtgaagcctacagacaattctttctagatgctatggttgcggtagaagacacacctgggccttttagtgagctcccagccagttgccgacctaagaatggacctggcgtgctggttgatctgacaggcgatgcaagatggcgcccatttgccacttcgttgattaagctagttaacaaatgtcttacagacgggaccttgtatgtcgatgggctcgttaccatgccatttgtttctgctgcttgttctatcctctgctatggtgatggttctctgcacaaggtttgttttgatttcgcacgtattgttgccacggtaatgactcctgagattcttcctctagaaagcatcattcgttcaatcacatgcattttgagccaagaaattagcgaactctctgatatcagagatgcagattatgacttttcaatgggagcgtgcctttgtgcactgcattcttcatgtcctgactatattgttgaatctacagctgctgatattgttaatgttctcaaaagagcagtaaagaccagcaaaagtgcagaacttcaggttgcactgtacactgcatacaagagaataattgaactctgctctgtacaagtatggaaaccagaaatccttctgaagttgctcagcttgccaaaaccttgcagcaaactgatccaatgtattcgagcagttattggcaaatttggtcaaacctttttcactctggatgatggtaacagtcaaagcagtcctcaggcaagatctgaaaaaaatgagttgcaaaaagctggccataaaagaataccacagaacgaggaaagcaattctgccaaacgtcagaagataactgaatcaggattttctgctgccactggatttgaaaaagaagattatggctatgcttttctacagtctttaaattcactgattaattgcctgtcaccagacaatcatgagtcttatccattagaccctgatgttgctatagaaacagtccagagaaacctgtattcctttgatgcatcactgtattttgaagctcttcatacttcaatcttcctggacacacgaaactgcttgaagatgactatcagttgattggcgatggtacacattttgttaatccaatatatgctgacctcatcagcatgttgaaactgatatgggatgttggtcatgatgtcactgaaacaagttcaaactacaagatagagtatcttttgatgcaagtctttgctaagcttggcaatagactgaattctggatgtgatcttgaattctttgatttggctatctgtaatggaactgctgagattaaaaatgaagcaattatatcactacccataattgtgctgtattctggtcctaggattcttggagcgatgtttaagaaacttgagtcagtggatgctttaggactcgagaacgtggggaaacatattgccttttcacttggttttctatcttgcttaaatggaaccacttattacactgacaatgtggggaaggggaaccattgcaagctattcttggacaagcactatgaacaacctgtgtcaacattagatcttctcttgagaggtttctgttgtcctcaatgtgatatcaggaatagaactatccacaatgaagaacaaatttctatagtgaacattgcaccattacaagttgagaatgcggacttcaatattaacatctccaaggcccacactctccttttcaaatttctctacgcagggacttctgaggaatttatagtttctttggttgaagtattgccacggctattgaggcattctaacaggcgtcttctacttgagatgagaactcaatggaatcagtgttttgaatttctactgtgtcatgaaatgaaagctgtcagggaagcattttctggtgtagtctactgcttcttggaagacagtgttatggatattttgttttctggtggactgggaatgaatggagggtctaaagaacttcaattcatggataagataaaatgtgctttcactgaagctgaagatcctcagattcttttgnn

SEQ ID NO: 8597 - DNA, 2162 bp, Zea Mays
atggcgtgcgggtcactggacactgggtcagctgggctggaaaggcaaaacaaacagaatcatcagtgttacgtaataatccttggattttgcgctgtttaccatggtgttcccaaaaggcccctggcctttcttatagcccaagctacccccttcttcctcctctcatctctctcgggactttccccaatccactccactccaatccacttccctcctctgtcaaccctagccgcgccgccggcagtctgctcgggtggcgcatacatgacccacccttcctcgccgtcgtcctctgcgccgccaccgccgcccgccgcggcggcggcggcggcggcggccgaggccacctccctcgcgccgggtttccgcttccaccccaccgacgaggagctcgtgtcgtactacctcaagcgcaaggttctcggccgcccgctcaaggtcgacgccatcgccgaggtcgacctgtacaagctcgagccctgggacctgcccccgcgctcccgcctccgctcccgcgactcccagtggtacttcttcagccgcctcgaccgcaagcacgccaaccgcgctcgcaccaaccgcgccacgtcgggagggtactggaagaccaccggcaaggacagggaggtgcgccatgggcccagggtcgtcgggatgaagaagacgctcgtattccacgccgggcgcgcccccaagggcgagcgcaccaactgggtcatgcacgagtaccgcctcgagggcgacgccgccgtggagataccgcaggactcgtttgtggtgtgccggatattccagaaagctggcccaggtcctcagaatggggcacagtatggagcgccgttcgttgaggaggaatgggaggaggacgatgcagatgtcggtttgcttccagtggagggtgatgctgctgtcgaccctgaggttccccctggccctgtggagatccctggtgctttggagagaggctatcttcaaatgagtgatctcattcagggtttgggtgatcgaaatggaaatggtacacctagtttaccagtttctgatacttcacataacagcaaccattctgaagatgtagatggaaattctggggacattttaagtgacccaaaccttggctctaattttattcagtgtgttgaacctggggagcaaaatagcttaatgcttaatggaaatatcatatctaatgcaaatgctggagatttttttaataattccagccccagtgatgggttcctagagctgaaggattttgcagatgctgcagatctggatttccctttgggcaatggatcaaccatatggccttcagatggttgggcatggaaaacacctgactcagcggaagctgtaaatggagctaacgatgagattcctccactccctgatgaccagattttccagccagatgaactggaacaactgttgcagtcaatacaagaagattcccatttgggctcaactatcattgaccccatgcattcttccatgacaaattcagttctgcctgaggacgattatttgatgttctatgatgcacccttcgattccactatgtgtgatgggtatggacagaatggaattcttggctccgcagcagccaatctatctggcattggcatgatggaggatggtatggcatactttgatgcaatggatgataattcatttaatgatactctgggctccatacagcagtcagctggtagcagttcccatgcttttaatggcccagtccttacccaagagatggtcaggctaagagtagtactattggaaagggatttgtaaagattttggactcaatctccgctcccccagcttttgctggagaattcccagctatccaccgcaaatctttggctcatatttctggggggcgccccaacacactccatgtttctgctgaagtgatccgcgtaggaagtttagctgttccttctggcgcagataagtgggcgctgcataaagatcaagacatggagctggtcttttctgcagattttgagcctgatacccgtcttcactgtgctgcaatagccattaccgcgatgctgcgaggtgaattcaggccttttcttagtttcggcaacaatgctcaaagtgaggtatggggtggggaatgtaacctaagatatgtacaaggccgtctcgga

SEQ ID NO: 8598 - DNA, 3557 bp, Zea Mays
ggactactgaggatctgaaacgtgcagaagcacaacaggacactgtaaaacagtagaaggtttggtacaagtggagtggcccatatgttgtgcggaggagcactggtgaagcctaagaacccttatgtcgatgggcgtggtctcaagggaggtgttgtcagcatgcgagaggctctgcttcatttgcccgtcactgcggacgaggtcccgccatccggtcaagcgctacaagaaattgcttgcagaaatcttccctcggacacaggatgaagaaccaaatgatcgcaagatagggaaactgtgcgaatatatttcaaggaatcctatgcgtgttccaaagattacattttacttagagcaaaagtgctacaaggaattaagggctgagcgctatggttcagtgaaagttgttattgcaatctatcgaaaggtgatatgttcttgtcaggagcaattgccactttttgccaacagcttgctaacaattgtagagacattattggagcaaaatagacaggatgacttgcggaaattggcatgtcaaacactttttgactttataaataatcagaaaaccagattcctaaactatgtcatctggcccaagagatgggtgaaaaggagaagatatgcattcttcatgcagctgggctacaagctctttcatctatgatttggtttatgggtgagcattcccatatgtctgcagagcttgataatgttgtttctgcagttctggaaaattatgagagcccatatgcaaatgctgataatgatgccgctattgaggatagacgaattcagtgggtggatgaagtgctcaaagctgaaggtcatgaacctcctgctgttaccattttgacaagggttccttcatggaaagttattagaactgttcacggtgaattaagtttgacaatagaagaatcaacaagtccaaatttttggtcagggatttgtctacataaccttgctagaatatccagggaagcaacaacagtgcgacgagttctggaagttatatttcgttattttgataataacaatctgtggtcaccttctaaaggatttgcactgtgtgtcctactggatatgcagattgtcatggagaaatctgaatgctcatatattgttgtctatgttagtcaagcatcttgaacacaagaatgtattgaaacaaccagatatgaatctagatatcattgaagttacttcacgccttgctgggcactccaaagctcagtcttctacagcactaatggcttcaataagtgatatggtcaggcatatgggtaaaagcatgcaatccttggccagcgatgcaggtcctggagacaacatggtcaaatggaatagcagatatgggaaagctgtagatgaatgtcttgttcaattgtctagaaaggtcggtgatgctggacctatccttgatacattagctgtagtgctggaaaacatttcaagttctatgattgttgcacggtctactatctttgcagcatatcgtactgctcaaatagttgcatcattgccaaacttgtcacatcagagcaaagcatttcctgaggcattgtttcaccaactgcttttagcaatggtctatccggactgtgggacacatttaggagcacatcggattttctctgttgttcttgttccctctgctgtcgctccgtgctcattttcagacacttcacggacaaggaagattgatctccgaaggacattatctagaacaacatcagtgttttcatcttctgctgctttgtttgggaaacttaaaagagacatgctttcatttcgtgaaagtccgctccatgataatacaaagctactacccatcagtgaggatgcagatgagatcagcgcaaatgatgcaaaactattcaagtcacagactattcaaaggatggctagtacaaaagatatttctcttccctcttccacagatgcaagtactttgagtgaacaaactccaaatcaggaaaaggatgctgtcacccttatgctcagtgttcgtcaggcaaatcttcttctttcctcgttatggactcaggcactgtcacctgaaaatgttccacggaattatgaagcaatttctcatacttacagcttgatgctattgttttctagagccaaggtgccgacgttttggttggtagctttcagcttgctttttcattaagaagtgtttcgttacaagcaggttttcttccaccttcacgcaggcgctctctttttactttggcaacttcaatgcttgtgtttttctcgaaagctttcaacgttccagcgctcattccagttgtgaagcatgtgttgacagaaagttgatccatttctttgtttaatagaagactgtagattgcaggctcttgatagtgctgctcagtcttgcaaactctatggttcaaaagaagatgacgatcaagctctgaaatcactctcgaacattgacatgaatgaacatcagtcaaaagaaacatcagtgtctcttatacttgatagcttggaagatctgtcagagatgacatttgtctgggatctcattttactgaaacaccttcgaaatctgcagcacaaaatggaaaactgcaccacaaatctatggaggttattccattcggatttgtttttgaagatgatactctcgttgaagcatctgacagcttagtagaacctcacttgcgacatctgccatgtaacagcgttcttgatgttgaccggcttcttaattcggttttggaaacatctcagcatgttggaaggatgtcagtttcaacagaccaggatttgcctttcaaggaggtagccaaccaatgtgaagcacttctgattgggaagcagcaaaagctatctatctgcatgagtgttcgtgaaaaaaaggatggtgaatcatccatcgagaagtcatctcagcaggatcctcaagcatatacgtttctctgcacagctgatgaacaatggcacctcaattcctgtaagctgccagtgctgtgtccctatgaccggttccttgcaacgtctgggtgctaagatgatctcttctggtacgcggacctttataactatgaatgtgttcagtggactcctaaaaattggcggttccagctcatgcatgccaaaataggtgccctacaaactgatgtccgtcgggccaacccagatgagcccatgtgtgcgtgccagatggcatcatttccatcatatgtaaattgttccctcgtttgtaaaggctagttgagagctaaaatatcagagggggttggaggagttaaaatccatttcttattcaaaattgaataaggagattttagcccctttaacccctccggttttgtggctctcaaactaaccttaaatggttcgtctaccatgggaaatacatggttgattctggcatttttgaggccggagcgaaagttactattgaagccccttctatatccatgagtgtgtatatatgtctatatgtataatatatatacttttatatggaaacttataaacacataattattgatctcaaatagtttttcagtaaatttagttttaaa

SEQ ID NO: 8599 - DNA, 2618 bp, Zea Mays
atgccttctctcatcggcaccgctgcctcccaggagagggcttggcgatgggtctgttgggatgctccagtctctcactgtctactactacttgtaccaaatatctactggactctggatgggcatcgaattttatgctataaacaccgattcccaagcccttattaattcacaagcgcaatatcctctgcaaattggagagcagttgacccacgacttaggtaccggtggaaatccaaatttgggagagcaggctgctgaggaatcaagagaaaccatagccactgccctgagggattcagatcttgttttcataacagctgggatgggagggggtgctgctccaattgttgcccagatatcaaaggaagctggttatcttactgttggtgttgtcacctatccattcaatttcgagggccgtaagcgctctttacaggatctcccatgtgacagatggcttggcaagattatactagagacttgtatttctcagatccatatttggcttagaggcacatcggctgaatcgcatcgacgaccgatcataaagccgcacagctttggattccctagaaagctggagttctgaaatgtaccaaattgaccaccggttggaataggcccctctaggtcattgttagaaacgttgaatgtggaaaggaagtgcagattctcgaatgcaactggaattttacccgtgagatcattgctggataaatctagcatccagcaggtttgtgagattgcagatagatgtggggatcggtccggttaagctgttggagctgatatcaagtgaaaggaggccttttaactgaccaatctctgggagaatcagaactgtgaatatgttgctgcttagatttagaattttaggaaaagcaatcggtatccggtacggtttcttcaaagaaattgatgccaagaagaagcgtggtcaggttcttagagctcctcagtatctgaagcgtgtttgttatatttgaaaggctgttgtttgggcaaggcgaatcaggcaagagttgatgacgagcggctaaactaatccaagagttgatgacgaccggcttgttctttcacttgcaacgacttagagtcgggcgacctgcaagatcaaggtgcatggtcgtcgaaggatggcgacggcgtatcctcgttcaggcaaggcgaatcaggcaagcatctatttggaggttggttagttatcccatgtcatcagacatcacgcaggaatcaagtcatccatcaggaagcagccaactctgcctggactaacccagggcaaaggcaaacagcaaactttccaggataagtctctgacttcgttatactttcctgtgtgcaggaggtcttgaagatctggaactgcaggtgcagaatgctattgcagcagttgcagctccacccaaggaaagcaatagtgtcagcagcaacgatcctggtagctcgtcctctgtgatttttccgtctggtccagctgatcaagtccctgttcctgctacctctccagaaattgagccccgttttgcaaaccaaatccctgctgcttcttcggaggttaaggcaccatgcatggcaggtctgttgtttgtaagcgacaggaacgagaggaactttaggttgcctagcccttctgataattgtccatggaacttattcgaatctagccgtagcgcagtcagctttctacaggagtatatgctttccggaatcgtgccactgaagttattcagcatgagatctatggttcttagactgggcatattgctgaataactatagttggtagatggtctcgctacagtagacaggaaaggcaccatgcctggcactggcaggtctgcagcgaacaccgttgtatgtgtatgtatagtatgcacgtgtgcaattcatattagcttaacagcctgtgtaacaaaaacaattacccaacttcccaagatagttaatgcactatatatccaaaacctgatacatgcatcaatttgtcttaaaaagtacattcataaaaatataaatgtataaagagttcatttgtattttaacaaaagtctttggtcaaagccatattctggagaccgtgtcagtgtcctagaccacaaataacattggagggagtaaattatatctcatgtctatcaacgaagttttactttttaggttctattaatgtctaattcttgtaacccctcttttttggtatctcaattgttgcagttaggaaaccttccattacggccttatttctgcagaagtatgacaccaactttcatctattctctaccaccaaagagatggaaaagcaggtcaaagggccatacttcatagctttttgctcctcattgttttaagtgaaagggcgccaactattcaaaatttactctaggtagataattttcattgtcgagttttattttggtatatgtaactttttgtaattgggcctaagcgtattggagcactctaagttaacaggtgcttgaagctgatgatgaaattatacagcttggatgaataaacctttgttgtagtgacataaggagtttcgaaattacaaggaattttaaatttgaatatttttcagtgagatgttgaggttgataattttaatctttg

SEQ ID NO: 8600 - DNA, 4236 bp, Zea Mays
gcaaggttctgcctggttccccgccatcaacgcccggatccccaccctccttcccaccgccgccgcaatcaacgcgctcctcccccacgtggatccctccaccctcctccccaccgccgccgctcgaccgcggtttcgtcgcactccttccttcgaaagcgctcctttccatcctcgattcctccttccttccatgtcgctccttccttcgacggccagcctcatccggtcattcctcctcgctgtgccccctcccccgtattcaaccacctcttcctcctgcggatccaccaccgccgtcctcgcccaacgtctccttgacgcatatgcccgcagcggctccctcgcgtccccaatgttgagtctggcctgtatggaaggagtgcgggcgtgggtggagtgtgtagagaaatccaagcgaaaccccgtgagagcgaggtgacggcagacggaggcgagtgggtgagctgcgggcgagagacgaggtagcgggctagcggatggcgtcgctggttgtagtggccgcagcgctgctggtggcggcgctggtggcattctgcggcacggacccgctctggacggggttcgagtcccacctcgtcgaccttcccggggttcgagtcccacctcgtcgacctccccgatcccgccgagatgtcgacgcacgcggacgaacgggagtggctccgcggagccgaggtgcaacccctccaaaccggcgttcaaggacggcgccgctcaccagttgtatctggttgtgaagaactaggggtgggagcgcctgtatggcgggcttatgccttctctcatcggcaccgctgcctcccaggagagggcttggcgatgggtctgttgggatgctccagtctctcactgtctactactacttgtaccaaatatctactggactctggatgggcatcgaattttatgctataaacaccgattcccaagcccttattaattcacaagcgcaatatcctctgcaaattggagagcagttgacccacgacttaggtaccggtggaaatccaaatttgggagagcaggctgctgaggaatcaagagaaaccatagccactgccctgagggattcagatcttgttttcataacagctgggatgggagggggtgctgctccaattgttgcccagatatcaaaggaagctggttatcttactgttggtgttgtcacctatccattcaatttcgagggccgtaagcgctctttacaggcaagtatctgagccccccttcactcctgaattagaattcaaactgtcatatctcgttttgcgactttcttttgctccatggaagcattagtttgtagtcataacaatgacatccaaccacatttattgttgatcatgtatacaatggtcggtcaaataaaggtagcatattgcgagggcggtcctcgtcgctcccatgtgcaggatctcccatgtgacagatggcttggcaagattatactagagacttgtatttctcagatccatatttggcttaggtatgattcttgtgtcaatgctacatatatttttcctaattattgtaggtacttccatttagccttgcgacaataaatattttgtgcgaaacacatcatctcttcacggttcaatacgatcatcggctatatatcctggctgatcatcgtcaagagcattagtagttgctactgatatatataggtcagctctttgctcttttcacatctatatcaattgcttgccccacaaatgatcagccagggtcaggtaaaccatattgtgtaaccatcactataacactgcaatcattttctaaatagtacttttataaatcacaaatcgaaggtataaatacaaaagtgtagaaaattataatgagaacattacctatataaacaagaaaggaaaaccaatgatgttttccttgttgaagttatttgtggcttttacaatgtcagagaacgtgagcttgttttcatttacttttccttgtggcaccatgatcactccaaatgcaattgcaagaatggccttcttatttcttcctcctgtggataccagaggcacatcggctgaatcgcatcgacgaccgatcataaagccgcacagctttggattccctagaaagctggagttctgaaatgtaccaaattgaccaccggttggaataggcccctctaggtcattgttagaaacgttgaatgtggaaaggaagtgcagattctcgaatgcaactggaattttacccgtgagatcattgctggataaatctagcatccagcaggtttgtgagattgcagatagatgtggggatcggtccggttaagctgttggagctgatatcaagtgaaaggaggccttttaactgaccaatctctgggagaatcagaactgtgaatatgttgctgcttagatttagaattttaggaaaagcaatcggtatccggtacggtttcttcaaagaaattgatgccaagaagaagcgtggtcaggttcttagagctcctcagtatctgaagcgtgtttgttatatttgaaaggctgttgtttgggcaaggcgaatcaggcaagagttgatgacgagcggctaaactaatccaagagttgatgacgaccggcttgttctttcacttgcaacgacttagagtcgggcgacctgcaagatcaaggtgcatggtcgtcgaaggatggcgacggcgtatcctcgttcaggcaaggcgaatcaggaggtcttgaagatctggaactgcaggtgcagaatgctattgcagcagttgcagctccacccaaggaaagcaatagtgtcagcagcaacgatcctggtagctcgtcctctgtgatttttccgtctggtccagctgatcaagtccctgttcctgctacctctccagaaattgagccccgttttgcaaaccaaatccctgctgcttcttcggaggttaaggcaccatgcatggcaggtctgttgtttgtaagcgacaggaacgagaggaactttaggttgcctagcccttctgataattgtccatggaacttattcgaatctagccgtagcgcagtcagctttctacaggagtatatgctttccggaatcgtgccactgaagttattcagcatgagatctatggttcttagactgggcatattgctgaataactatagttggtagatggtctcgctacagtagacaggaaaggcaccatgcctggcactggcaggtctgcagcgaacaccgttgtatgtgtatgtatagtatgcacgtgtgcaattcatattagcttaacagcctgtgtaacaaaaacaattacccaacttcccaagatagttaatgcactatatatccaaaacctgatacatgcatcaatttgtcttaaaaagtacattcataaaaatataaatgtataaagagttcatttgtattttaacaaaagtctttggtcaaagccatattctggagaccgtgtcagtgtcctagaccacaaataacattggagggagtaaattatatctcatgtctatcaacgaagttttactttttaggttctattaatgtctaattcttgtaacccctcttttttggtatctcaattgttgcagttaggaaaccttccattacggccttatttctgcagaagtatgacaccaactttcatctattctctaccaccaaagagatggaaaagcaggttgcccccacccccatagctttctgttttgtccctataacaggtttacctatgttatatatagacaccgtagcaatgcacgtgtaatggtagattttctgattggttagtttggaagtgaagtaggtgccaatgttgtgcatgagcagaagaaatattattcccttcaatattagtagaggtagagatatttacttttatcagtatttgtgttgtgatagctatttttagcctaatgtttcaggtcaaagggccatacttcatagctttttgctcctcattgttttaagtgaaagggcgccaactattcaaaatttactctaggtagataattttcattgtcgagttttattttggtatatgtaactttttgtaattgggcctaagcgtattggagcactctaagttaacaggtgcttgaagctgatgatgaaattatacagcttggatgaataaacctttgttgtagtgacataaggagtttcgaaattacaaggaattttaaatttgaatatttttcagtgagatgttgaggttgataattttaatctttg

SEQ ID NO: 8601 - DNA, 2880 bp, Zea Mays
gttagcatccagcacaagcaaccgccggttcttgccgcagtttctgcgcgctcgctttttgtccgcaagaccgaggagagcgagagcggagaggttcctgtgtggaattcttcagcgatgaggcccggcgcccgtctggactcggtggtcttccagctcactcccacccggaccaggttcgacttggtcctcatagcgaatggccggaaggagaagtttgcatctggtttgttgaaacccttcctggctcacctgaaggccgcccaggatcagattgcgaagggagggtactcgatcacacttgaaccaatctcagagttcgacgtgtcattgttcacgagaggcgccgtggagaggtttgtgcgtttcgtgagtactacggaggtccttgagcgagtcacaacactggagtctgagatcctgcagctcgaggatgccattgctatccagaggaacgatagtcttagattaaaatgtgtggaccggcaaattatgatcctaattcagccacggcaattgttgtttacaagcctgggtcaaattcaattccaccaatgcagaatgaaacaacagcacaggaggagaattcaaagaaggcatgttcacatttcatcgaactatggaagcagaagcatgaaactggacaatggattgaagttgaacctgaagcaatttctacacgctctgaatttcctccatttaatgcatctggcattgtgttgatgggagacaacatgaagcaaaacctggaatcagggtctattaatggagagccaaatggcgaggatggagctaaagctgatcagaagtccagccagcagatggggtctcatgctgcatatcctccatgggcaatgcatcctgcatctggtgcagttctttacccaccttatcctatgcaaggaatgcctttctatcctggggtgaatccctactaccctccatatcctccagtggatgatcccagttcaggtggaggaaattctcatggtcacaagtcacatagaaaggggaagaggtctggaaagaagcctagtgtagttgttatcaagaatgtgaatgtaacatctaagaagtgtggctcatcagagagtgaatcacaatcaagttctgaagttgagtctgctgacagtgacaactcacactccaaatcaagagaaagaaagcataaaagctcatgttcaaaggagggtaggagaactacttttgatccgggagatgagtataacaaggatgaaacatcgaatggccatggtgttgagcaaggcaactggagtgcattccaaaatttcttgttgagagcagaagaaaaaacaagatctagtgatgcagacctgtttgctggtgagaaagaacccccatcacggagaaaacagaatgtaaacacagcagatcctattattttagttgagagagatggtggcaacgtctgtgagcagaacaaaataggttttgattcagccaatgggaggactagagttatccgggtcatgtccaatgatgaacttgttatgtctggagaagggagaatctatatggattgtgaaatgaaggagattgaagctggtggaggaaggtacaggagagggacaggtgacgactacatggtttatggtcagggatgtcagatagacagacattgtttgttggatcctcttgcagaggcccagtacaagaatcctgttcagcaggacaataataggaatggtgttacggatgagtcctttatgattcctcttaggtccagctcacaggataatatcggagcagagagcagaactactatggacatagatgttgagcttccttctagcattcataaagcatcagataaaaaggctgggcatcagcttttttacgaacctgatgaactgagtactgtgaaggttgaagatgcaaaaccagaggatgtcttgccggtcactgacggtgtacagaaggtagagaaagagaagctaaagaacgcaagggatggttcagataaaagaacgaaggattccctattgaggagactatcggcgccaaggaccccactgaatgatgcacaaaaacgtgcacagaacctgcgtgcatataaagcagaccttcagaaactgaagaaagagcaggaagaagagcaaataaagcgattggagaggcttaaattggataggcaaaagtggatcgccgcaagaggtaatggaaagggtccagggaacgatgctcctagagcgaacggtatgaatggacttagtaaatcagttccaaccttcactgggatgaaaagggttgaaaacggaacgactgaatcactcagcggtcgactgaagaggctttctgaacccaaaagcattgttggggcagagcattcgttgaacccaaagtcagctggtgcaggccgttcacgaagaagtatggcatgagttgatgtgagatggagaactgaatagcttgagtccatcgtgccactcgctagcccggtaacttacttactagaaacgtgaaaggcatctcaaaaggctttttgtacaggaaaaaaggaaatggctggctctgtagcattgtctgcttccaagatttgtgatggaaaatcgagctatctttcaatggcatggcgttggactttcaattttaacataattatttcattcttttgattcagggtggcttgtgatagctgtaaacctggtttttttcccaatgtggagctatattgtgggtgtatttatggaatggattgatctgtgtttgagatatattgtggtatttatatagtgtataaatgtccgactttggattggacgagatgggccaattcaatttgtacggcagtagtatgacacgctgaagttggatgtccaagtattcacaacctctgcatcgaaggcacaaagagcagat

SEQ ID NO: 8602 - DNA, 3101 bp, Zea Mays
agcgcgctcactgttcttgtgccgaggaattgattgccacgtgccaccacaccgagattcatacttgtccttttcccccagtggggaaggttagcatccagcacaagcaaccgccggttcttgccgcagtttctgcgcgctcgctttttgtccgcaagaccgaggagagcgagagcggagaggttcctgtgtggaattcttcagcgatgaggcccggcgcccgtctggactcggtggtcttccagctcactcccacccggaccaggttcgacttggtcctcatagcgaatggccggaaggagaagtttgcatctggtttgttgaaacccttcctggctcacctgaaggccgcccaggatcagattgcgaagggagggtactcgatcacacttgaaccaatctcagagttcgacgtgtcattgttcacgagaggcgccgtggagaggtttgtgcgtttcgtgagtactacggaggtccttgagcgagtcacaacactggagtctgagatcctgcagctcgaggatgccattgctatccagaggaacgatagtcttagattaaaatgtgtggaccggcaaattatgatcctaattcagccacggcaattgttgtttacaagcctgggtcaaattcaattccaccaatgcagaatgaaacaacagcacaggaggagaattcaaaagttcaaaactgtgttaagaaaagagcaagctatggctttcactcgtgctgtggctgctgggtttgacattgacaacctgggttactttacttgattgcgtttgcagagcgctttggtgcttcacgtatgatgaaggcatgttcacatttcatcgaactatggaagcagaagcatgaaactggacaatggattgaagttgaacctgaagcaatttctacacgctctgaatttcctccatttaatgcatctggcattgtgttgatgggagacaacatgaagcaaaacctggaatcagggtctattaatggagagccaaatggcgaggatggagctaaagctgatcagaagtccagccagcagatggggtctcatgctgcatatcctccatgggcaatgcatcctgcatctggtgcagttctttacccaccttatcctatgcaaggaatgcctttctatcctggggtgaatccctactaccctccatatcctccagtggatgatcccagttcaggtggaggaaattctcatggtcacaagtcacatagaaaggggaagaggtctggaaagaagcctagtgtagttgttatcaagaatgtgaatgtaacatctaagaagtgtggctcatcagagagtgaatcacaatcaagttctgaagttgagtctgctgacagtgacaactcacactccaaatcaagagaaagaaagcataaaagctcatgttcaaaggagggtaggagaactacttttgatccgggagatgagtataacaaggatgaaacatcgaatggccatggtgttgagcaaggcaactggagtgcattccaaaatttcttgttgagagcagaagaaaaaacaagatctagtgatgcagacctgtttgctggtgagaaagaacccccatcacggagaaaacagaatgtaaacacagcagatcctattattttagttgagagagatggtggcaacgtctgtgagcagaacaaaataggttttgattcagccaatgggaggactagagttatccgggtcatgtccaatgatgaacttgttatgtctggagaagggagaatctatatggattgtgaaatgaaggagattgaagctggtggaggaaggtacaggagagggacaggtgacgactacatggtttatggtcagggatgtcagatagacagacattgtttgttggatcctcttgcagaggcccagtacaagaatcctgttcagcaggacaataataggaatggtgttacggatgagtcctttatgattcctcttaggtccagctcacaggataatatcggagcagagagcagaactactatggacatagatgttgagcttccttctagcattcataaagcatcagataaaaaggctgggcatcagcttttttacgaacctgatgaactgagtactgtgaaggttgaagatgcaaaaccagaggatgtcttgccggtcactgacggtgtacagaaggtagagaaagagaagctaaagaacgcaagggatggttcagataaaagaacgaaggattccctattgaggagactatcggcgccaaggaccccactgaatgatgcacaaaaacgtgcacagaacctgcgtgcatataaagcagaccttcagaaactgaagaaagagcaggaagaagagcaaataaagcgattggagaggcttaaattggataggcaaaagtggatcgccgcaagaggtaatggaaagggtccagggaacgatgctcctagagcgaacggtatgaatggacttagtaaatcagttccaaccttcactgggatgaaaagggttgaaaacggaacgactgaatcactcagcggtcgactgaagaggctttctgaacccaaaagcattgttggggcagagcattcgttgaacccaaagtcagctggtgcaggccgttcacgaagaagtatggcatgagttgatgtgagatggagaactgaatagcttgagtccatcgtgccactcgctagcccggtaacttacttactagaaacgtgaaaggcatctcaaaaggctttttgtacaggaaaaaaggaaatggctggctctgtagcattgtctgcttccaagatttgtgatggaaaatcgagctatctttcaatggcatggcgttggactttcaattttaacataattatttcattcttttgattcagggtggcttgtgatagctgtaaacctggtttttttcccaatgtggagctatattgtgggtgtatttatggaatggattgatctgtgtttgagatatattgtggtatttatatagtgtataaatgtccgactttggattggacgagatgggccaattcaatttgtacggcagtagtatgacacgctgaagttggatgtccaagtattcacaacctctgcatcgaaggcacaaagagcagat

SEQ ID NO: 8603 - DNA, 5525 bp, Zea Mays
atggcagacgttggacggctggagcacttggagcagagacgtcggcaaaaaccagagaggacagaggagagaattagggtttactggcggctgggagggtttctggcgggtttgtggttagccattcatgtcatgacacaaattgaacatcgtgggcttcaaaagcagtggacttgggaaccaatgatgggagaaagtttgatcttggcgctagtcgataataatgatgatgtgcggcaagttggaagagctctcttggaacatgtatctcaagcacggggtttgacttctgggcttcaatttctgtgctcgagtgcatcttcactcactgctgtttttctgggtctaagatatgtagttcaactggtgggaacaagatcagttttggcagattttagtagttttcatcacttgttttttgtcatatgcaaactacttaaggaggttgtcgttcaaagaccccaaattgcacagccagcgaaacctccagaagggggtttcttgcgacaaccctattcaagtgtcctagctagtccaccagaacatgctgtggatgttagtaactgggagaagttctgcactttgctttctgcaactctctggcctttcatttccacatgcctaagagaaggaaaggagctaataggtctcaaacagtgtcagatatcttgcgtccgtttgcttgagttgcttcctctggtctatgagagggtcaactcaaattgccgcaccctatcttgcagtacgacgacagtgtttcagaatcctatggatatttcatggtttattcatttggttcactggggaaaatcatctctccttgtgattatcagacattggaaacaatgcatgctctctttattgaaagaactaaaatgttcacatagcggtaccattcaatgctacattgaagatcttgacaatatcatttcacatgatgcagtaaatatcaatgaacttgaagagagagtttcaaatcttgaacttgtactgtccaaggaggttgccacaaaaattgaaaggagagggttagctgacttaccaatgtttaaagaaccaattgttagtgttccctctccagttcatgagagacattctggcatggacagttttgtggatgttgaaagcacaaagtcctcccatccaccagatgttcatgaaataattctcctttcagacagtgaggataatttactggcacctgacgtgtccagtgaggaggttttgtcatcagttatggagaatgatgcatccactgcttccaatatgttgaaagatgctacacctctagaacaaagtacgctgaacgacaatagacactcacctttagaaccacagatatgtcatcctgttagtaatattagtgcctcttctaaacctgtatcaacagatagtagggacaacattgctgccacaaaaggattacttcgaatgaaaaaaccgagaccgccaatgaacacaaataataattccacttcacccaaaatggttaaatcatctgttactggcacttctcaacaactgcatcctaaattgttgtcagatacagaaaaatttaaatccatcttcagggatatatctgatgatgaagatgatcctttagaccatgcacttgataattaccggaggccacaggttctttcaagaaagccttgtatattagttcccaagagacaagttgttcagcttccagtgcctgttggaagaaaaccaggttctggcagtagggttacaagtactcgacgacttcaaccacctaaactgggtagctggtttagaaacatattggaaatggactacttcgctgttgttgggttatcttctcctgagatagtaagaaaacctgctttaaaagaagttccgttgaaagagttgatgatttccttattgtccgtgcccgtcctgagcatagccagtcgatcaaattcagaggttgcacagagaatgatttagtactactcaccaaagatccactgaagaaccaaggacaacaagtccatgtgcttgggaaggtggagcggcgtgagagtgataaaaataaggcattgatttttgtgatgaagttctttctttctagtgacaatgcacgcctaaataaagtgaaacggtttcttgtggaaagcattagagtcatcatacaatgatagccagctccaagctctaagcattgccattggaccaacaagctctaaagcaaattttgatctgtcccttattcagggacctccaggtacaggtaaaacaagaacaatcgtagcaattgtaagtgcattgctatctttacatgcaggtgacccttacaagtcacagagaaatgagtacgtcggtagtactgattttacaaagccaagagcaaagattagccaatctgctgcagtaattagagcttggcaggatgcagcccttgctaaacaactggaaaaggattctcagaaagaatgtcctcgaacaacagagcggtttgtgaagggaagggctttagtttgtgcgcagtcaaatgctgcagttgatgagcttgtgtcaaggctcagtgagggattgtacagtgctgatggaaagctgtataagccttacatagtgagggttggtaatgcaaagacggtccattctaattcgttgcctttcttcattgacacacttgttgagcaaagattatcagatcagttgaacattaataatgatggcaaaaaatcatctgatgctgaatcctctagttcacttaggtctaaattggagaagattgtggacagaattagatattatgagtcaaggcaaaaactaattgagtctgataaaagtgaagatggttcttctgtacctggtgaaggtgaggcagatgaagtttccgatgaagcacttggtggaaagcttaactttttgtatgcacagaaaagggtagtttctgcagaactggccactgctcatgcccgtgaaaaagaaaatagctgatgaaaacaagtttctgaagcacaaggtacggaagtcgattcttggagaggcagaaataatcgtgactacacttagtgggtgtggaggtgacatttatggagtttgctcggaaactgcttcatctaataaatatggtactttttcggagcatgcactgtttgatgttgttattattgatgaagctgcacaggccctggagccagcgaccctaattccccttcagattctgaaatcgagaggaactaaatgtataatggttggtgatccaaagcaactacctgccactgtgatgtctggattggctagcaagtttctttatgagtgcagcatgtttgaacgactacaaagagctggttacccagtgattatgctcactaaacagtatcgcatgcatccagagattagcaggtttccatctttacatttctacgaaaataaactgcttgatggtgtggaggtggctgataaatcagcttcatttcattttcatgagtgtcttggtccatacatgttttttgatattgctgacggacgtgaacattgtggaagaaatgctgctacacagtcactctgtaatgattttgaagctgatgcagctcttgaaatactgtcatttctaaataacagatatccattggagttcacctctaggaaaataggaatcattactccatacagaagccaactctctatactccgttcaaagttcacttcctcttttgggcctgagattgttgccgagatggaaataaacactgttgatggatttcaaggtcgtgaagttgatatcttgctgttgtcaactgttagagcctcaaattcttcagatgatagccatcgcactggtgaagcacgcagcattgggtttgttgcagatgttagacgtatgaatgtcgcactaacacgtgccaggctttctctatggattgttggaaatgcaagaactttgcggattaattcacactggaattccttagtatgtgacgctgaagaacggaatctgtttgtctcaattaaacggccatatggtttgatgtttgaaaagggccaacctcattccagaaatactcataggtacactagtcatcttaagcagaaggataacaaaaaagctgctttgatgagctcaaagagagttggtgttaaattccaggagcaaccaacacatgctataaggaatgtagaaaaagaaagtctatcaaaagaacaatcaaaatggacatcattatgggaccaaaagattcctggaactcaagagtccgttatgagatctagtgaagacaagtcacagaagcatagtggtaatatgagagtcaccaagtgttcactgcaagaaaacatggatcaggattttgttatcagaaaacaaatggatgataaaaaattggctgtacataatgataaacatctggggctttctaaaggcttggttaaacgaggtgatgatggctctattgtcacaatgaagacagaattgaatatgactgtggagcagaatctttgtaaggaaactaataaagcttcaactgaccaagagttgtttcagaattcaaaggtgaggacatgtaataaaaagagtgccagcgaaaacagcaagaaaaatgatgtttctccaccggcagttcctggtcagcagaagttgatacaaaagtcaaaagcaccaaggacggtttctgagaagcctagatgtgataatttaaatcatgaaaattatgatccagcgaataagaatgatggtgcttatccaccaacagaccctgatatgaagaaagctaataaggctagaggagctaggaagttttctgagcaaccaagacctgggaatttaactcaagtggatcttgcacgtccatctcattttgatgaagcaagtagccatgtgccagaactcaagaaaagccgatccagcaagttaactagtcaaaaagatttggttgcagaaagaaaacgacaacgcgaggatattgacactctgctttcgtcatctcttatatcatctacgaaaccttcctcaagtcgtaatactaagaaacagaaatgagaagactccagcaaagcttttgtgaagcaattttggtagcaatggtgcttggatcacgagtttccatcttccgaagcaagtagaggaaagctaactgcctgtaatctgggagctgtatgtgcagcaactgacaaacatccagtggacccaaggagccctccctccatacggttgcaaaagtgctggaattttttggacggctgttaatggtttattacgtcattttatttcccattttcatccgtttggatgcgagcaaaatgagaccatacagacaaatagagcaatcatactgcttgttgaggcgcaagccaattttgcagtgtacataactccaaattacagccgaagctctttggccctcacgtctgtctccatggggttcagttgcttctgttggtgaatgatgatgactttggacgtgacgacgcgtgaggttctcattgggatcatcgataacacgagaaagttggagagaagagaggaaaaaaaaactgttgaatttgtgttacctacgtgttataagccaaatttg

SEQ ID NO: 8604 - DNA, 5527 bp, Zea Mays
atggcagacgttggacggctggagcacttggagcagagacgtcggcaaaaaccagagaggacagaggagagaattagggtttactggcggctgggagggtttctggcgggtttgtggttagccattcatgtcatgacacaaattgaacatcgtgggcttcaaaagcagtggacttgggaaccaatgatgggagaaagtttgatcttggcgctagtcgataataatgatgatgtgcggcaagttggaagagctctcttggaacatgtatctcaagcacggggtttgacttctgggcttcaatttctgtgctcgagtgcatcttcactcactgctgtttttctgggtctaagatatgtagttcaactggtgggaacaagatcagttttggcagattttagtagttttcatcacttgttttttgtcatatgcaaactacttaaggaggttgtcgttcaaagaccccaaattgcacagccagcgaaacctccagaagggggtttcttgcgacaaccctattcaagtgtcctagctagtccaccagaacatgctgtggatgttagtaactgggagaagttctgcactttgctttctgcaactctctggcctttcatttccacatgcctaagagaaggaaaggagctaataggtctcaaacagtgtcagatatcttgcgtccgtttgcttgagttgcttcctctggtctatgagagggtcaactcaaattgccgcaccctatcttgcagtacgacgacagtgtttcagaatcctatggatatttcatggtttattcatttggttcactggggaaaatcatctctccttgtgattatcagacattggaaacaatgcatgctctctttattgaaagaactaaaatgttcacatagcggtaccattcaatgctacattgaagatcttgacaatatcatttcacatgatgcagtaaatatcaatgaacttgaagagagagtttcaaatcttgaacttgtactgtccaaggaggttgccacaaaaattgaaaggagagggttagctgacttaccaatgtttaaagaaccaattgttagtgttccctctccagttcatgagagacattctggcatggacagttttgtggatgttgaaagcacaaagtcctcccatccaccagatgttcatgaaataattctcctttcagacagtgaggataatttactggcacctgacgtgtccagtgaggaggttttgtcatcagttatggagaatgatgcatccactgcttccaatatgttgaaagatgctacacctctagaacaaagtacgctgaacgacaatagacactcacctttagaaccacagatatgtcatcctgttagtaatattagtgcctcttctaaacctgtatcaacagatagtagggacaacattgctgccacaaaaggattacttcgaatgaaaaaaccgagaccgccaatgaacacaaataataattccacttcacccaaaatggttaaatcatctgttactggcacttctcaacaactgcatcctaaattgttgtcagatacagaaaaatttaaatccatcttcagggatatatctgatgatgaagatgatcctttagaccatgcacttgataattaccggaggccacaggttctttcaagaaagccttgtatattagttcccaagagacaagttgttcagcttccagtgcctgttggaagaaaaccaggttctggcagtagggttacaagtactcgacgacttcaaccacctaaactgggtagctggtttagaaacatattggaaatggactacttcgctgttgttgggttatcttctcctgagatagtaagaaaacctgctttaaaagaagttccgttgaaagagttgatgatttccttattgtccgtgcccgtcctgagcatagccagtcgatcaaattcagaggttgcacagagaatgatttagtactactcaccaaagatccactgaagaaccaaggacaacaagtccatgtgcttgggaaggtggagcggcgtgagagtgataaaaataaggcattgatttttgtgatgaagttctttctttctagtgacaatgcacgcctaaataaagtgaaacggtttcttgtggaaagaacattagagtcatcatacaatgatagccagctccaagctctaagcattgccattggaccaacaagctctaaagcaaattttgatctgtcccttattcagggacctccaggtacaggtaaaacaagaacaatcgtagcaattgtaagtgcattgctatctttacatgcaggtgacccttacaagtcacagagaaatgagtacgtcggtagtactgattttacaaagccaagagcaaagattagccaatctgctgcagtaattagagcttggcaggatgcagcccttgctaaacaactggaaaaggattctcagaaagaatgtcctcgaacaacagagcggtttgtgaagggaagggctttagtttgtgcgcagtcaaatgctgcagttgatgagcttgtgtcaaggctcagtgagggattgtacagtgctgatggaaagctgtataagccttacatagtgagggttggtaatgcaaagacggtccattctaattcgttgcctttcttcattgacacacttgttgagcaaagattatcagatcagttgaacattaataatgatggcaaaaaatcatctgatgctgaatcctctagttcacttaggtctaaattggagaagattgtggacagaattagatattatgagtcaaggcaaaaactaattgagtctgataaaagtgaagatggttcttctgtacctggtgaaggtgaggcagatgaagtttccgatgaagcacttggtggaaagcttaactttttgtatgcacagaaaagggtagtttctgcagaactggccactgctcatgcccgtgaaaaagaaaatagctgatgaaaacaagtttctgaagcacaaggtacggaagtcgattcttggagaggcagaaataatcgtgactacacttagtgggtgtggaggtgacatttatggagtttgctcggaaactgcttcatctaataaatatggtactttttcggagcatgcactgtttgatgttgttattattgatgaagctgcacaggccctggagccagcgaccctaattccccttcagattctgaaatcgagaggaactaaatgtataatggttggtgatccaaagcaactacctgccactgtgatgtctggattggctagcaagtttctttatgagtgcagcatgtttgaacgactacaaagagctggttacccagtgattatgctcactaaacagtatcgcatgcatccagagattagcaggtttccatctttacatttctacgaaaataaactgcttgatggtgtggaggtggctgataaatcagcttcatttcattttcatgagtgtcttggtccatacatgttttttgatattgctgacggacgtgaacattgtggaagaaatgctgctacacagtcactctgtaatgattttgaagctgatgcagctcttgaaatactgtcatttctaaataacagatatccattggagttcacctctaggaaaataggaatcattactccatacagaagccaactctctatactccgttcaaagttcacttcctcttttgggcctgagattgttgccgagatggaaataaacactgttgatggatttcaaggtcgtgaagttgatatcttgctgttgtcaactgttagagcctcaaattcttcagatgatagccatcgcactggtgaagcacgcagcattgggtttgttgcagatgttagacgtatgaatgtcgcactaacacgtgccaggctttctctatggattgttggaaatgcaagaactttgcggattaattcacactggaattccttagtatgtgacgctgaagaacggaatctgtttgtctcaattaaacggccatatggtttgatgtttgaaaagggccaacctcattccagaaatactcataggtacactagtcatcttaagcagaaggataacaaaaaagctgctttgatgagctcaaagagagttggtgttaaattccaggagcaaccaacacatgctataaggaatgtagaaaaagaaagtctatcaaaagaacaatcaaaatggacatcattatgggaccaaaagattcctggaactcaagagtccgttatgagatctagtgaagacaagtcacagaagcatagtggtaatatgagagtcaccaagtgttcactgcaagaaaacatggatcaggattttgttatcagaaaacaaatggatgataaaaaattggctgtacataatgataaacatctggggctttctaaaggcttggttaaacgaggtgatgatggctctattgtcacaatgaagacagaattgaatatgactgtggagcagaatctttgtaaggaaactaataaagcttcaactgaccaagagttgtttcagaattcaaaggtgaggacatgtaataaaaagagtgccagcgaaaacagcaagaaaaatgatgtttctccaccggcagttcctggtcagcagaagttgatacaaaagtcaaaagcaccaaggacggtttctgagaagcctagatgtgataatttaaatcatgaaaattatgatccagcgaataagaatgatggtgcttatccaccaacagaccctgatatgaagaaagctaataaggctagaggagctaggaagttttctgagcaaccaagacctgggaatttaactcaagtggatcttgcacgtccatctcattttgatgaagcaagtagccatgtgccagaactcaagaaaagccgatccagcaagttaactagtcaaaaagatttggttgcagaaagaaaacgacaacgcgaggatattgacactctgctttcgtcatctcttatatcatctacgaaaccttcctcaagtcgtaatactaagaaacagaaatgagaagactccagcaaagcttttgtgaagcaattttggtagcaatggtgcttggatcacgagtttccatcttccgaagcaagtagaggaaagctaactgcctgtaatctgggagctgtatgtgcagcaactgacaaacatccagtggacccaaggagccctccctccatacggttgcaaaagtgctggaattttttggacggctgttaatggtttattacgtcattttatttcccattttcatccgtttggatgcgagcaaaatgagaccatacagacaaatagagcaatcatactgcttgttgaggcgcaagccaattttgcagtgtacataactccaaattacagccgaagctctttggccctcacgtctgtctccatggggttcagttgcttctgttggtgaatgatgatgactttggacgtgacgacgcgtgaggttctcattgggatcatcgataacacgagaaagttggagagaagagaggaaaaaaaaactgttgaatttgtgttacctacgtgttataagccaaatttg

SEQ ID NO: 8605 - DNA, 5618 bp, Zea Mays
atggcagacgttggacggctggagcacttggagcagagacgtcggcaaaaaccagagaggacagaggagagaattagggtttactggcggctgggagggtttctggcgggtttgtggttagccattcatgtcatgacacaaattgaacatcgtgggcttcaaaagcagtggacttgggaaccaatgatgggagaaagtttgatcttggcgctagtcgataataatgatgatgtgcggcaagttggaagagctctcttggaacatgtatctcaagcacggggtttgacttctgggcttcaatttctgtgctcgagtgcatcttcactcactgctgtttttctgggtctaagatatgtagttcaactggtgggaacaagatcagttttggcagattttagtagttttcatcacttgttttttgtcatatgcaaactacttaaggaggttgtcgttcaaagaccccaaattgcacagccagcgaaacctccagaagggggtttcttgcgacaaccctattcaagtgtcctagctagtccaccagaacatgctgtggatgttagtaactgggagaagttctgcactttgctttctgcaactctctggcctttcatttccacatgcctaagagaaggaaaggagctaataggtctcaaacagtgtcagatatcttgcgtccgtttgcttgagttgcttcctctggtctatgagagggtcaactcaaattgccgcaccctatcttgcagtacgacgacagtgtttcagaatcctatggatatttcatggtttattcatttggttcactggggaaaatcatctctccttgtgattatcagacattggaaacaatgcatgctctctttattgaaagaactaaaatgttcacatagcggtaccattcaatgctacattgaagatcttgacaatatcatttcacatgatgcagtaaatatcaatgaacttgaagagagagtttcaaatcttgaacttgtactgtccaaggaggttgccacaaaaattgaaaggagagggttagctgacttaccaatgtttaaagaaccaattgttagtgttccctctccagttcatgagagacattctggcatggacagttttgtggatgttgaaagcacaaagtcctcccatccaccagatgttcatgaaataattctcctttcagacagtgaggataatttactggcacctgacgtgtccagtgaggaggttttgtcatcagttatggagaatgatgcatccactgcttccaatatgttgaaagatgctacacctctagaacaaagtacgctgaacgacaatagacactcacctttagaaccacagatatgtcatcctgttagtaatattagtgcctcttctaaacctgtatcaacagatagtagggacaacattgctgccacaaaaggattacttcgaatgaaaaaaccgagaccgccaatgaacacaaataataattccacttcacccaaaatggttaaatcatctgttactggcacttctcaacaactgcatcctaaattgttgtcagatacagaaaaatttaaatccatcttcagggatatatctgatgatgaagatgatcctttagaccatgcacttgataattaccggaggccacaggttctttcaagaaagccttgtatattagttcccaagagacaagttgttcagcttccagtgcctgttggaagaaaaccaggttctggcagtagggttacaagtactcgacgacttcaaccacctaaactgggtagctggtttagaaacatattggaaatggactacttcgctgttgttgggttatcttctcctgagatagtaagaaaacctgctttaaaagaagttccgttgaaagagttgatgatttccttattgtccgtgcccgtcctgagcatagccagtcgatcaaattcagaggttgcacagagaatgatttagtactactcaccaaagatccactgaagaaccaaggacaacaagtccatgtgcttgggaaggtggagcggcgtgagagtgataaaaataaggcattgatttttgtgatgaagttctttctttctagtgacaatgcacgcctaaataaagtgaaacggtttcttgtggaaagaacattagagtcatcatacaatgatagccagctccaagctctaagcattgccattggaccaacaagctctaaagcaaattttgatctgtcccttattcagggacctccaggtacaggtaaaacaagaacaatcgtagcaattgtaagtgcattgctatctttacatgcaggtgacccttacaagtcacagagaaatgagtacgtcggtagtactgattttacaaagccaagagcaaagattagccaatctgctgcagtaattagagcttggcaggatgcagcccttgctaaacaactggaaaaggattctcagaaagaatgtcctcgaacaacagagcggtttgtgaagggaagggctttagtttgtgcgcagtcaaatgctgcagttgatgagcttgtgtcaaggctcagtgagggattgtacagtgctgatggaaagctgtataagccttacatagtgagggttggtaatgcaaagacggtccattctaattcgttgcctttcttcattgacacacttgttgagcaaagattatcagatcagttgaacattaataatgatggcaaaaaatcatctgatgctgaatcctctagttcacttaggtctaaattggagaagattgtggacagaattagatattatgagtcaaggcaaaaactaattgagtctgataaaagtgaagatggttcttctgtacctggtgaaggtgaggcagatgaagtttccgatgaagcacttggtggaaagcttaactttttgtatgcacagaaaagggtagtttctgcagaactggccactgctcatgcccgtgaaaaagaaaatagctgatgaaaacaagtttctgaagcacaaggtacggaagtcgattcttggagaggcagaaataatcgtgactacacttagtgggtgtggaggtgacatttatggagtttgctcggaaactgcttcatctaataaatatggtactttttcggagcatgcactgtttgatgttgttattattgatgaagctgcacaggccctggagccagcgaccctaattccccttcagattctgaaatcgagaggaactaaatgtataatggttggtgatccaaagcaactacctgccactgtgatgtctggattggctagcaagtttctttatgagtgcagcatgtttgaacgactacaaagagctggttacccagtgattatgctcactaaacatatcgcatgcatccagagattagcaggtttccatctttacatttctacgaaaataaactgcttgatggtgtggaggtggctgataaatcagcttcatttcattttcatgagtgtcttggtccatacatgttttttgatattgctgacggacgtgaacattgtggaagaaatgctgctacacagtcactctgtaatgattttgaagctgatgcagctcttgaaatactgtcatttctaaataacagatatccattggagttcacctctaggaaaataggaatcattactccatacagaagccaactctctatactccgttcaaagttcacttcctcttttgggcctgagattgttgccgagatggaaataaacactgttgatggatttcaaggtcgtgaagttgatatcttgctgttgtcaactgttagagcctcaaattcttcagatgatagccatcgcactggtgaagcacgcagcattgggtttgttgcagatgttagacgtatgaatgtcgcactaacacgtgccaggctttctctatggattgttggaaatgcaagaactttgcggattaattcacactggaattccttagtatgtgacgctgaagaacggaatctgtttgtctcaattaaacggccatatggtttgatgtttgaaaagggccaacctcattccagaaatactcataggtacactagtcatcttaagcagaaggataacaaaaaagctgctttgatgagctcaaagagagttggtgttaaattccaggagcaaccaacacatgctataaggaatgtagaaaaagaaagtctatcaaaagaacaatcaaaatggacatcattatgggaccaaaagattcctggaactcaagagtccgttatgagatctagtgaagacaagtcacagaagcatagtggtaatatgagagtcaccaagtgttcactgcaagaaaacatggatcaggattttgttatcagaaaacaaatggatgataaaaaattggctgtacataatgataaacatctggggctttctaaaggcttggttaaacgaggtgatgatggctctattgtcacaatgaagacagaattgaatatgactgtggagcagaatctttgtaaggaaactaataaagcttcaactgaccaagagttgtttcagaattcaaaggtgaggacatgtaataaaaagagtgccagcgaaaacagcaagaaaaatgatgtttctccaccggcagttcctggtcagcagaagttgatacaaaagtcaaaagcaccaaggacggtttctgagaagcctagatgtgataatttaaatcatgaaaattatgatccagcgaataagaatgatggtgcttatccaccaacagaccctgatatgaagaaagctaataaggctagaggagctaggaagttttctgagcaaccaagacctgggaatttaactcaagtggatcttgcacgtccatctcattttgatgaagcaagtagccatgtgccagaactcaagaaaagccgatccagcaagttaactagtcaaaaagatttggttgcagaaagaaaacgacaacgcgaggatattgacactctgctttcgtcatctcttatatcatctacgaaaccttcctcaagtcgtaatactaagaaacagaaatgagaagactccagcaaagcttttgtgaagcaattttggtagcaatggtgcttggatcacgagtttccatcttccgaagcaagtagaggaaagctaactgcctgtaatctgggagctgtatgtgcagcaactgacaaacatccagtggacccaaggagccctccctccatacggttgcaaaagtgctggaattttttggacggctgttaatggtttattacgtcattttatttcccattttcatccgtttggatgcgagcaaaatgagaccatacagacaaatagagcaatcatactgcttgttgaggcgcaagccaattttgcagtgtacataactgtaagtagcacccttgtagcaagaaggcagattagcatttgaacatgcctggtggtgtccttaaaatgaaatgtagcatgtgtggtgtgcagccaaattacagccgaagctctttggccctcacgtctgtctccatggggttcagttgcttctgttggtgaatgatgatgactttggacgtgacgacgcgtgaggttctcattgggatcatcgataacacgagaaagttggagagaagagaggaaaaaaaaactgttgaatttgtgttacctacgtgttataagccaaatttg

SEQ ID NO: 8606 - DNA, 5644 bp, Zea Mays
atggcagacgttggacggctggagcacttggagcagagacgtcggcaaaaaccagagaggacagaggagagaattagggtttactggcggctgggagggtttctggcgggtttgtggttagccattcatgtcatgacacaaattgaacatcgtgggcttcaaaagcagtggacttgggaaccaatgatgggagaaagtttgatcttggcgctagtcgataataatgatgatgtgcggcaagttggaagagctctcttggaacatgtatctcaagcacggggtttgacttctgggcttcaatttctgtgctcgagtgcatcttcactcactgctgtttttctgggtctaagatatgtagttcaactggtgggaacaagatcagttttggcagattttagtagttttcatcacttgttttttgtcatatgcaaactacttaaggaggttgtcgttcaaagaccccaaattgcacagccagcgaaacctccagaagggggtttcttgcgacaaccctattcaagtgtcctagctagtccaccagaacatgctgtggatgttagtaactgggagaagttctgcactttgctttctgcaactctctggcctttcatttccacatgcctaagagaaggaaaggagctaataggtctcaaacagtgtcagatatcttgcgtccgtttgcttgagttgcttcctctggtctatgagagggtcaactcaaattgccgcaccctatcttgcagtacgacgacagtgtttcagaatcctatggatatttcatggtttattcatttggttcactggggaaaatcatctctccttgtgattatcagacattggaaacaatgcatgctctctttattgaaagaactaaaatgttcacatagcggtaccattcaatgctacattgaagatcttgacaatatcatttcacatgatgcagtaaatatcaatgaacttgaagagagagtttcaaatcttgaacttgtactgtccaaggaggttgccacaaaaattgaaaggagagggttagctgacttaccaatgtttaaagaaccaattgttagtgttccctctccagttcatgagagacattctggcatggacagttttgtggatgttgaaagcacaaagtcctcccatccaccagatgttcatgaaataattctcctttcagacagtgaggataatttactggcacctgacgtgtccagtgaggaggttttgtcatcagttatggagaatgatgcatccactgcttccaatatgttgaaagatgctacacctctagaacaaagtacgctgaacgacaatagacactcacctttagaaccacagatatgtcatcctgttagtaatattagtgcctcttctaaacctgtatcaacagatagtagggacaacattgctgccacaaaaggattacttcgaatgaaaaaaccgagaccgccaatgaacacaaataataattccacttcacccaaaatggttaaatcatctgttactggcacttctcaacaactgcatcctaaattgttgtcagatacagaaaaatttaaatccatcttcagggatatatctgatgatgaagatgatcctttagaccatgcacttgataattaccggaggccacaggttctttcaagaaagccttgtatattagttcccaagagacaagttgttcagcttccagtgcctgttggaagaaaaccaggttctggcagtagggttacaagtactcgacgacttcaaccacctaaactgggtagctggtttagaaacatattggaaatggactacttcgctgttgttgggttatcttctcctgagatagtaagaaaacctgctttaaaagaagttccgttgaaagagttgatgatttccttattgtccgtgcccgtcctgagcatagccagtcgatcaaattcagaggttgcacagagaatgatttagtactactcaccaaagatccactgaagaaccaaggacaacaagtccatgtgcttgggaaggtggagcggcgtgagagtgataaaaataaggcattgatttttgtgatgaagttctttctttctagtgacaatgcacgcctaaataaagtgaaacggtttcttgtggaaagaacattagagtcatcatacaatgatagccagctccaagctctaagcattgccattggaccaacaagctctaaagcaaattttgatctgtcccttattcagggacctccaggtacaggtaaaacaagaacaatcgtagcaattgtaagtgcattgctatctttacatgcaggtgacccttacaagtcacagagaaatgagtacgtcggtagtactgattttacaaagccaagagcaaagattagccaatctgctgcagtaattagagcttggcaggatgcagcccttgctaaacaactggaaaaggattctcagaaagaatgtcctcgaacaacagagcggtttgtgaagggaagggctttagtttgtgcgcagtcaaatgctgcagttgatgagcttgtgtcaaggctcagtgagggattgtacagtgctgatggaaagctgtataagccttacatagtgagggttggtaatgcaaagacggtccattctaattcgttgcctttcttcattgacacacttgttgagcaaagattatcagatcagttgaacattaataatgatggcaaaaaatcatctgatgctgaatcctctagttcacttaggtctaaattggagaagattgtggacagaattagatattatgagtcaaggcaaaaactaattgagtctgataaaagtgaagatggttcttctgtacctggtgaaggtgaggcagatgaagtttccgatgaagcacttggtggaaagcttaactttttgtatgcacagaaaagggtagtttctgcagaactggccactgctcatgcccgtgaaaaagaaaatagctgatgaaaacaagtttctgaagcacaaggtacggaagtcgattcttggagaggcagaaataatcgtgactacacttagtgggtgtggaggtgacatttatggagtttgctcggaaactgcttcatctaataaatatggtactttttcggagcatgcactgtttgatgttgttattattgatgaagctgcacaggccctggagccagcgaccctaattccccttcagattctgaaatcgagaggaactaaatgtataatggttggtgatccaaagcaactacctgccactgtgatgtctggattggctagcaagtttctttatgagtgcagcatgtttgaacgactacaaagagctggttacccagtgattatgctcactaaacagtatcgcatgcatccagagattagcaggtttccatctttacatttctacgaaaataaactgcttgatggtgtggaggtggctgataaatcagcttcatttcattttcatgagtgtcttggtccatacatgttttttgatattgctgacggacgtgaacattgtggaagaaatgctgctacacagtcactctgtaatgattttgaagctgatgcagctcttgaaatactgtcatttctaaataacagatatccattggagttcacctctaggaaaataggaatcattactccatacagaagccaactctctatactccgttcaaagttcacttcctcttttgggcctgagattgttgccgagatggaaataaacactgttgatggatttcaaggtcgtgaagttgatatcttgctgttgtcaactgttagagcctcaaattcttcagatgatagccatcgcactggtgaagcacgcagcattgggtttgttgcagatgttagacgtatgaatgtcgcactaacacgtgccaggctttctctatggattgttggaaatgcaagaactttgcggattaattcacactggaattccttagtatgtgacgctgaagaacggaatctgtttgtctcaattaaacggccatatggtttgatgtttgaaaagggccaacctcattccagaaatactcataggtacactagtcatcttaagcagaaggataacaaaaaagctgctttgatgagctcaaagagagttggtgttaaattccaggagcaaccaacacatgctataaggaatgtagaaaaagaaagtctatcaaaagaacaatcaaaatggacatcattatgggaccaaaagattcctggaactcaagagtccgttatgagatctagtgaagacaagtcacagaagcatagtggtaatatgagagtcaccaagtgttcactgcaagaaaacatggatcaggattttgttatcagaaaacaaatggatgataaaaaattggctgtacataatgataaacatctggggctttctaaaggcttggttaaacgaggtgatgatggctctattgtcacaatgaagacagaattgaatatgactgtggagcagaatctttgtaaggaaactaataaagcttcaactgaccaagagttgtttcagaattcaaaggtgaggacatgtaataaaaagagtgccagcgaaaacagcaagaaaaatgatgtttctccaccggcagttcctggtcagcagaagttgatacaaaagtcaaaagcaccaaggacggtttctgagaagcctagatgtgataatttaaatcatgaaaattatgatccagcgaataagaatgatggtgcttatccaccaacagaccctgatatgaagaaagctaataaggctagaggagctaggaagttttctgagcaaccaagacctgggaatttaactcaagtggatcttgcacgtccatctcattttgatgaagcaagtagccatgtgccagaactcaagaaaagccgatccagcaagttaactagtcaaaaagatttggttgcagaaagaaaacgacaacgcgaggatattgacactctgctttcgtcatctcttatatcatctacgaaaccttcctcaagtcgtaatactaagaaacagaaatgagaagactccagcaaaggtggctaatgtcatgggtatggcagcttttgtgaagcaattttggtagcaatggtgcttggatcacgagtttccatcttccgaagcaagtagaggaaagctaactgcctgtaatctgggagctgtatgtgcagcaactgacaaacatccagtggacccaaggagccctccctccatacggttgcaaaagtgctggaattttttggacggctgttaatggtttattacgtcattttatttcccattttcatccgtttggatgcgagcaaaatgagaccatacagacaaatagagcaatcatactgcttgttgaggcgcaagccaattttgcagtgtacataactgtaagtagcacccttgtagcaagaaggcagattagcatttgaacatgcctggtggtgtccttaaaatgaaatgtagcatgtgtggtgtgcagccaaattacagccgaagctctttggccctcacgtctgtctccatggggttcagttgcttctgttggtgaatgatgatgactttggacgtgacgacgcgtgaggttctcattgggatcatcgataacacgagaaagttggagagaagagaggaaaaaaaaactgttgaatttgtgttacctacgtgttataagccaaatttg

SEQ ID NO: 8607 - DNA, 1258 bp, Zea Mays
ttccacgatctaaccccaacgatcggtgttggaaagaaatattgcggaggacgcgatcaatattacataaactgaaggaacaaatcagtgacggtactccagttattcgagctggtgctggaacaggcatatctacaaagttcgaagaagttggtggtggggttgatcttatagtgctgtagctgtacaactctggacggtttcaaatggctggaaggggctcactagctgggctcttgccctttggtgatgcaaatgatattgtacttcagatggccaacgaagtgttgcctgtggttaaaggagttcctgttcttgctggggtatgtgctatagatccatttcgtcgaatggaatactttctgagacaactagaaaccattggattttgcggtgtgcaaaacttcccaaccgtaggtctgtttgatgggaattttagacataatttggaggaaactggaatgaggtacatcatggaagtggagatgatttcaatggctcatcgcatgggtttccttactactccatatgctttcaatccggatgaagttgctgccatggccaaggcaggatctcatatcgtagttgcacatatgggtctgacaactgcagggtctttcggggcaatgacagctaccactttagatgatagtgttttacgtgttcaggccattgcagatgcggcatttggggttaatcctgatataattgttttatgtcatgaaggtaacttggtgaaaattgtaattccacgatctaaccccaacgatgctcatgttgccggtgttggaaagttcctcatgtttcctagagagttgcaactctcaggggagtcagtcaagctaatgaagcttggggaagcagttgcaaagggaactattaataacgagacacttggttacttcacctgaagggtctatcttttcctaacatgcttgggaattgataaggatcggttgcactccagacaacatttacctaatgaaatggctcattatattgttgattgttgggtgctgagatagattactcctatgggtggatagagtgcgtgggtattactgatagatctgcatatgatttgataactcacagtgagaaaagtggtgtctcatggaagaatagaagaaaaaggattagattagtgtatagttgtcgatatatttgtccatcattaaaattttatgttgtctcttcagaaataatttgtgcagcattgataatgtttcttcgacatcagctcaatttatttaagcag

SEQ ID NO: 8608 - DNA, 2447 bp, Zea Mays
atgtggaagctgaaggtggcggcggagggcggcggcggccccttgctgcgctcgacgaaccgcttcgtcgggcggaccgtgtgggagttcgagcctgacctcggcacgccggagcagcgtgccgaggtggaaaaggcgcgccgggacttctccgaccaccgcttccagcgcaggcattctgccgacgtcctcatgcgcatgcagatgcagcagtattcaaaaggcacccctcttaagctggaccttcctgctgtcaagaagctgggggaggacgaagacgttacggaggaagctgtatcgacctctttgaaacgggctatcaaccgcgtctctgctctccaggcgcacgatggccactggcctggcgattgtagtggccctctcttccttttgccaggcttgattataacgctgtatgtgaccggagcattgaacgcggttctatcttcagaacaccagagggagatacgccgctatctctacaaccatcagaacgaagacggagggtgggggctgcacatggagggccacagcgcaatgctgggcacaaccctcaactacgttgctctgagactgatcggcgagggcccggacagtggtggagatgatggagcagccatggagagaggccgcaactggatcctacagcgcggtggggcaacctatacaacgtcgtggggcaagttctggctaacggtgctcggagtatacgattggtctggtaacaacccgctgccaccagaaatgtggctgttgccctatcacctgcctttccacccaggaagatttgtactatccacattcattccttcaggatgtcttatgggccactctccataagtttgttgaaccggttatgatgcattggcctgggatcaaatttagggagattgctttgcgcacagccatgcgccacattcactatgaagatgagagcactcgatacattaaccttggtcctgtaaacaaggtattgaatatgcttgcttgttggattgaagacccaaactcagaggcattcaagctccatgttcctcgaatttatgattatttgtggcttgctgaagatggtatgaaaatgaagggttataatggcagccaactatgggatgcaggtttaacagttctggcaattgtgaataccgatcttattgaagagtttggtccaactcttaaactagcacatgcctttgttaagaattcacagatcattgacaactgcctcgaagatttgaaccagtggtatcgccacatgtcaaaaggtggatggccattttctacagctgatcatggttggtgtgtatcagattgcactgcaacaggactagaggcaactctattgttatcaacgatttctcctcaaatagttggtgaggcgatggaagttggtagagtttatgatggtgtaaattgtctcatttctcttatgaacaataatggtggatttgcaacatttgaacttacaaggtcatatgcatggttggagcatattaatccttccgagacctttggaggcataatgatcgattacccgtatgttgaatgcacgtcgtcgtcaattcaagctctagctttgttcaagaaactctacccaaggcatcgtacggaagagatagacagttgtatcagcaagggtgcaaacttcatcgagagtatgcagagaaatgatggttcatggtacggctcttggggtgtttgtttcacctacgccacatggtttgcagtgtttggattggcttgtgctggtcggacattcgaggacagtcctgcaattaaaaaggcatgtgagtttctgttgtcaaaagagcttccttctggtggctggggagagagctacttgtcatgtcaggacaaggtttacacaaatctcgaaggcatgcgacctcacgcggtgaacactagttgggcaatgctggccctaattcgtgttggacaggctgaaagagatccagcaccattgcatcgggcagctagggttttgatcaacttacagtcagaggacggagaatttccacagcaagagatcattggagtgttcaaccaaaattgcatgatcggttactcccaatacagaaacatcttccctatatgggctctaggagagtatcgtaccaaggtccatgttccaaggaagaaatagccaatatgcttatgatatattcaacgtggtgcgaaaaatgccatgtactacacatcttgtgcactctcgttatctagctagtaccttaattttttttataaccgttgatctatcctttttgcattttctacaataaactcaacggttattcaagaatggtagtgctgtgaaccgttgatccaactcttttttcctctacaaaaaggtgcacaaaaactagtaccatgtacctgtaatattgcaataagatatgatttaatgtgctcattttttgttgtttatgccttcgcatgctagttctaaaaca

SEQ ID NO: 8609 - DNA, 1138 bp, Zea Mays
gggtatgcgaagttgctgcttttgctaaagttcgctcatttggaactgaaggtcgtaagaaggatggccaacagattcctgccagcgacaagatatatgagtacatactctttcgaggaagtgatataaaggatttgcaagtcaaatcatctccaccatctcagtcggcaactttacacaatgatcctgctattattcagcctgtaggagtttcctcatatgtccggtacaacagtagaggtcgcggaagaggaagaggccgtgggcaatcgcatcccataaccaagttcacagaggactttgatttcatggcaatgaatgagaagttcaacaaagatgaagtatggggccatcttggtaaaagaatagggcagttaaatgatgaaccaaatggttacgaagatgatgttatagaagatgatgagatatctcctagaaagccagaagctaaggctgtgtatgttaaagatgacttctttgattcactctcttgcaaccaaattgacaatggagggaggaacggaagagtgaaattctctgagcagaggaaaatagacactgagacctttggtgactcagcaaggcatcgaccaatgggcatccgaggtaggggcccccgtggcggcgctcgtggtcgtggctattatggtattagaggatatggatatacgggtagggggcgtggctactcttacccaaatcaccagccgtgatacctcggtgtctggaagcacactgaatggcaatggtaaattggccaatttgcgtggtaaaactgagatttatcgcagattacagtgctgctgttgtaagcgtcttattagtttgtttactgatgtggttggtaattcaagaatcaacgtctcttttattgatggcagattggtgtagaagctttcacatctatatcttgttagtgtcgatggtcatttatttccttttggaggtagaagctgttagcagattgctagatgatgtaacacagatctgtccaagatcaacggaaaaacaagcagcagtattgataatctgaaaaaaaaagggatggagttcagggtaggaaagtaacttatccaacaaagcaccatgagtacaaaactatactcgcaagatttatgtaatataagtgagacaagga

SEQ ID NO: 8610 - DNA, 1143 bp, Zea Mays
tccaaccttgttatcttgcactgtgtacgcgctagttcgctcatttggaactgaaggtcgtaagaaggatggccaacagattcctgccagcgacaagatatatgagtacatactctttcgaggaagtgatataaaggatttgcaagtcaaatcatctccaccatctcagtcggcaactttacacaatgatcctgctattattcagcctgtaggagtttcctcatatgtccggtacaacagtagaggtcgcggaagaggaagaggccgtgggcaatcgcatcccataaccaagttcacagaggactttgatttcatggcaatgaatgagaagttcaacaaagatgaagtatggggccatcttggtaaaagaatagggcagttaaatgatgaaccaaatggttacgaagatgatgttatagaagatgatgagatatctcctagaaagccagaagctaaggctgtgtatgttaaagatgacttctttgattcactctcttgcaaccaaattgacaatggagggaggaacggaagagtgaaattctctgagcagaggaaaatagacactgagacctttggtgactcagcaaggcatcgaccaatgggcatccgaggtaggggcccccgtggcggcgctcgtggtcgtggctattatggtattagaggatatggatatacgggtagggggcgtggctactcttacccaaatcaccagccgtgatacctcggtgtctggaagcacactgaatggcaatggtaaattggccaatttgcgtggtaaaactgagatttatcgcagattacagtgctgctgttgtaagcgtcttattagtttgtttactgatgtggttggtaattcaagaatcaacgtctcttttattgatggcagattggtgtagaagctttcacatctatatcttgttagtgtcgatggtcatttatttccttttggaggtagaagctgttagcagattgctagatgatgtaacacagatctgtccaagatcaacggaaaaacaagcagcagtattgataatctgaaaaaaaaagggatggagttcagggtaggaaagtaacttatccaacaaagcaccatgagtacaaaactatactcgcaagatttatgtaatataagtgagacaagga

SEQ ID NO: 8611 - DNA, 1769 bp, Zea Mays
cacggtcccacacacccgacgtcccgccctccgagcccacctcccaatgtcacctccctcgcatgtcgacccgacgcgtgaagtttggttgataacaccactaaacaatgatctatacatacacaagtgtcaccctgccagttgattaccttattaaataatgacctatgcctgcataagtattacccgttgcaacgcacggtcatatgcctaataaaaggcataaacctggcctcaccccaccgcgagccgaaccggagcgtcaagcaaacatccgtcgatcccgattccgaccactgcgctcgcgccatcgcgccatccacccggcattgtgcgcccgagccgggctcgttggatggcgtccggaggcgccgcccgcggtcgccttgctgaggagcgcaaggcgtggcgcaagagccatcccctcggctttgtggccaagccggcgatgctgccggatggttctgtcaatctcatgctctggaactgcgtcgtccccggcaaggaaggcaaaaagaacaattttagtctgttgtcccaaaacagaaacaagcagagcattataagattttcagaattcatgagtgggattctaagcagtgtccagcagcttgcgaatcagctcgcggatgcacattttgcgcgaccgcatcccactattcacacttccagcagatcgcaaatgccccaaaatgtgcagtcggccatgcggttgcgcgttctctcttttctgtgggagaggatgcacattcgcatccgcgagccgctggacacgggcgctttttccgttgcgcaaacgagggccgcgacgcgggagatgcgcttccgcatccgtccgccgttggacacaaacacaactatacttctgaaccttttgcttgaaacaaaaacaagggacatgttatattatggtaatcatacaattaagttgttctgctttcttgcgctggccgcaaagcgcgggctggtgggttcctcccctggtctgattaagttgttctgctttatttgtaaatattctccatttttactggttctcagttcattattttttgtcaaccataccactttttctattggtggatagtcttcatcgcactgtgttacaaaaaaattgtggctctactcattctcctcatcccaaactgccttgtcatataaccaaaaccgtgtgattgattcatctttatgcagactgattgggaaggtggatatttcccggtcactctccatttcactgaaaattacccaagtaaccccccaacctgcaagttcccacgaaggtttttccatgtcaatgtctatgattctggggatgtatgcctgtcaatacttggtgatgcatgggcgccttctatcacagtgcggcaaattctaataggcatccaggagctgctggagaacccaaacccagcctctcccgcacaggattttgcttacgatgtttttgcagagaatatgccagaatacaagagacgcgtccgtgagcaagccaagaggtatccgtcgctcgtgtagccgtggacctctgcaacacaattgctgctaaccaagtagtcactcactttggtgtagtggaacttgttcatgacgtgcttaactatggtgtctagttagccgtacgcttgttggaactgctaaagtgcagcttattggaactgctaaaatgcccttgactacgtcttattattatggtttatcagtatagtgttgtcaacatccaaaatttgttttggccctgtagaatactcaaattggtaacccctaac

SEQ ID NO: 8612 - DNA, 2013 bp, Zea Mays
atgggtgccaactgcctcgcgcagaccaacgcactcttcaggaagaatcttgtgatccagaggcgcaaccacaggtcgaactgctgcctcatctgcttcccgctcgtcgtatgcctgctgctcggaggggtgcagctgatcgtggcgatagcgtacgccagttcggcggcgcacaggccccgggtcgactgcggtggctgcaccgctagcaccaccagcagctccagcgcggacacggtcgtaggaggaccggtttgtccgacccagtgccccctgccgaccgcgccgaaatggccgccggtgctgcagctgccgccggcgccggaagacatggaggagatcggttcctcgacgtcgaccgatgatcttaccggcgcttcgaccgcacggccgaacccacccgcggcgacgttcctcgtcactggaacaaacaggtcgtttgcagaaggtgtcatgagtaacatgttctccaagcatgacgagttgagctctgcagccaacatctccgccgttgctgatttcgcactgggtacaaatgagatgcgcttcatctctaatggcgcagaggaacttggttcagattttgaccgccgcaaccaccttttctttcttcagacaagctgcactccgaacgcgacactttcttttccagtccaacaaggtcgcagcaacttcaccaaagatgcgggatgtatcgaaggattgtttctttggcgtgaggattcatcagccattaacagtgaatcatacagaggttattacaaagaagacaagcaagccaatcaaatcgcttcagcatatgatctcacaagctcagacctcagcaagtttaacttgattgtctcatacaactcaacatacaagggtgctattgaattgtcattatcggtagcttcattttcgttttcaccaatcttgcttcgagttccacgattactgaatctggtctcaaatgcataccttcaattgaggggcagtgatactaagatgcagtttgagtttattaaagacatgcctagagttgctcaacaagaatttcctattgatatatccttcttagtgggaaaattggttttcgtatggatgataatgctttactttcctgtcatcctgagcaatttagtctatgagaaggaacagaagctaagaactataatgaagatgcatggcctaggagatatggcatactggattatatcatactgctattttcttcttctatcgctactgtatatgctcttcttagtttcttttggctctattttcggtataaagttatttagattgagtgactacagggtacaattcgtggtttacttcgcctacataaacttgcaagtttcatttgcttttcttatggcaacattcttttcaaattgcagaactgctagtggaagctggagtacactcatggagttgttcccaccattttgtttgtaccgcataatctatgagttctctccacctccatcacctttgtatcgtacagacttttctggagtacactgggaagacttaagtgatcacaagaatggaatgttagacattctcatcataatggcagtcgagtgggccacattccttttgttaacattctttgtggatgaatttggtaccttccgaaacggaattagaaaaacggtttcaattttccgctcaaacacagatcagagctctcacacttgtcagatgcagactattcagcttgaagaattcctaccctcagttgaaacagacaggactgatgtttcgagagagagagaaacagttcaacaactcttacgagaatcagatagcaatttttcagtaatatgcgacaatcttaagaaagtgtaccatggaaaagatggaaatgcagagaaaattgctgtcgcagggttatcactttctgtgcaacgtgggcagtgttttggaattcttggtccgaatggtgctggaaaaacctctctcattagcatgctgacaggatttactaagcctacatctggcacagcttatattgatggaatggac

SEQ ID NO: 8613 - DNA, 2344 bp, Zea Mays
gtgaaaattgtgttttcggtatttgaaacctaggggatatcatgactatcgcaaccggccaacaggaaatttcagccgggcatccccaattcatcttccccacgccgcgtccgcgtccggaccggacaccggcggcacctcctcctgcctccacttcaccagttcatcgggcgccggaagtgggagccatccgccgccgccacatatctgtcctcttcggcgctgactggggctcagccgctcgaagctccatcccgcctcccgtcttcgccgccgctcgatccctcgacgcgacggtcgtgtcttgactctccaccacgcgactccacccagctcttctccacgcgactgcagagcgacgatcggaggcgccgccatcgcacaatccaccgtcgctgcctgctcctgatccgctgctacatccatttcttcttcttccacgttgctgggaggagacgggcgcaaggatttgtgcgagggagaaagaaagggaaggaaaggggataggacgggaggaggagcacgactgcttaccacttattcttcccagcccgatggattccacagctcttcaatatgaaaaccaaaaattggtgcaacaactggaggtacagaagtccgaaatgcatgcattggagcgcaagttcaaggagcttagtgatgatcaatgttcttatgacaagactctgatttctttgaataaactgtggaatcagctgattgatgatttggttctgcttggagtacgggctggtggggatttggataatttgcaagcacttgaccatgaagagttatcagaagaatctttggagtcgtgtccttccgaggagatatttctcttaaggctcttgaagacaaacaacatcagagataatagtgacactagcttgttgaaatttgttgaagaagctcttgcttttcggtcttcagcaactgttactttgatgaagtccctgcaagagactatttcttcgcagcaagctagaagtgagtctttgtctttagctttgaatggacaaaagtcaaatgaagatgttattgttgcccttcgaaatcataatgattgcttgaaagaggtggcagagaatgcgagtcaagccatctctattatcaacgagaagcacaaaaggtatcttgatgagattgaggcttttaaaagcaaccattcaagggagctacaggaaatcaagcgtatttcaggtgagctagaggaaagcattgcagagcttgaggaaagtcaaaggaagttggttgtgctccagttgcagaggcatggttctgtaatggatgcatctggggcaaatgctgtgaatggtggtatttctactcataaatcttcagataaaagtatgagctggcaagacctcaaagatgctgttgacgcagctaagaccctcgcaggaaaccgtctattagaactccatcagactcaagaggataatctgatactatccaaggagctgggagatcttgaggggcaattgaaagatgagaagtatgtcttggtatccaaaccgtacatgattcttaatgataaactacaacatttgaatgctgagatagagcgttatagagggttggttgaagttttacagaatgacaaggaccagctcatgcaaagggagaaagaaatttctgcaaaagcagaatcgctcgacagtgttaaacaaaccattatcacatatgagaaaaaaattgaagaactggaaactcaaattcagatactcttttctgaaaagaatgatctcgaaaccaaggttgaggagactttgcaagattcaggtaagaaagacttcaagaatgagattcatgttatggctgcagcactctccaatgaactgggtatgatggagaatcagttgagtcgatcaaaggatgcagcttctgaagcacttgcattgcgtgagcaagctgaatcattaagatcattggtagctaaaaagattgaggaacacaagaagatttcggataaatacaactcacaagtaattgagatcaagtccctcaaggcattggtatgttgtcctaataacttctgtctccttaaaggtggtgctaaactgctaatagcctgagaaatcgatacatatatttaccccttgggaaagttagtgtgtttccttggtctctcttcgtgttgtagagcttgtatcaaagacaccagtagcagctatatcatgtttttgtctttgtgctagcaaggacatttgactttgtagtggtgaagagctcgattggttagtacatcattttaataataggcttgattcctagcttctgtaaatacactagtatgttgtcaattaacatatcatttggtctttcaattttatgtatcaat

SEQ ID NO: 8614 - DNA, 3451 bp, Zea Mays
ctttactacccgtctcgcgcgagcggaacacattccgcttgtcctctctcgccgctgctccgacgagctcgccggcgccgactcccctcccgtcggaccagcccgccgaaagcggccggacgaacgagaggcttccctcccctcgcacttgcctgcctcgtcgccttcctgagcctctttctgcgcccggccacgggctcgcggccccacgcccgagcacgtgcagcaggcgccgaacccgcctcctgtgccaccccatcggagctcgccggccacgtggagggattccttttcctcgcagcattcctcgtcgccgacggcttcgtcgtgctccaggggttggattggcgtggagcggagagcagtgcaaacctgggattgaattctggtgtagatggattccacagctcttcaatatgaaaaccaaaaattggtgcaacaactggaggtacagaagtccgaaatgcatgcattggagcgcaagttcaaggagcttagtgatgatcaatgttcttatgacaagactctgatttctttgaataaactgtggaatcagctgattgatgatttggttctgcttggagtacgggctggtggggatttggataatttgcaagcacttgaccatgaagagttatcagaagaatctttggagtcgtgtccttccgaggagatatttctcttaaggctcttgaagacaaacaacatcagagataatagtgacactagcttgttgaaatttgttgaagaagctcttgcttttcggtcttcagcaactgttactttgatgaagtccctgcaagagactatttcttcgcagcaagctagaaatgttattgttgcccttcgaaatcataatgattgcttgaaagaggtggcagagaatgcgagtcaagccatctctattatcaacgagaagcacaaaaggtatcttgatgagattgaggcttttaaaagcaaccattcaagggagctacaggaaatcaagcgtatttcaggtgagctagaggaaagcattgcagagcttgaggaaagtcaaaggaagttggttgtgctccagttgcagaggcatggttctgtaatggatgcatctggggcaaatgctgtgaatggtggtatttctactcataaatcttcagataaaagtatgagctggcaagacctcaaagatgctgttgacgcagctaagaccctcgcaggaaaccgtctattagaactccatcagactcaagaggataatctgatactatccaaggagctgggagatcttgaggggcaattgaaagatgagaagtatgtcttggtatccaaaccgtacatgattcttaatgataaactacaacatttgaatgctgagatagagcgttatagagggttggttgaagttttacagaatgacaaggaccagctcatgcaaagggagaaagaaatttctgcaaaagcagaatcgctcgacagtgttaaacaaaccattatcacatatgagaaaaaaattgaagaactggaaactcaaattcagatactcttttctgaaaagaatgatctcgaaaccaaggttgaggagactttgcaagattcaggtaagaaagacttcaagaatgagattcatgttatggctgcagcactctccaatgaactgggtatgatggagaatcagttgagtcgatcaaaggatgcagcttctgaagcacttgcattgcgtgagcaagctgaatcattaagatcattggtagctaaaaagagttatctgtcgcgtacttctatatgctgcaatcctcttctgcagactttgcaaagagctaggaaaatgactagtacatatgatgaaatatgttgaattttcagattgaggaacacaagaagatttcggataaatacaactcacaagtaattgagatcaagtccctcaaggcattggttgaggagttggagcaggaaaagcaggagctggagtttattgcagatatgtacgtgaaagaaagttctgagtctaggacaattgctgatattgaagaatcagaaacccgagctcgcaatcaggctgaatatttgaggagcaatctagaggagcatagtcttgagcttcgggttaaagcagcaaatgaagctgaagctgcatgccagcaaaggctttcctttgctgaagtggaactagaagagttaaggaccaaagtagatgcatctgaaagagatgttgtggaacttaaggaggcaataagaattaaagaggctgaaggagacgcctatatttctgatatcgagacagttggtcaagcatatgaagacatgcaaacgcaaaatcagcatcttcttcaacagcttactgatagagatgactttaacataaagctagtatcagatagtgtgaagatgaaacaagcttgtagttcccttctctctgacaagcttatgctagagaagcaactccagcaagttaacacttcactggagtcatctaaactgaaaattgcccgtggcgaagagcagatgaagacttgtgtagcgcaagctataaaaacttcagctgaaaacagacatcttactattagcctggaaaggattgcgctggagttatccaacacagataaggaactcaagtggcttcggtcctccgttggatcctctgagaaagaatacgagcaaactcagcaaaagatatctgagctgagagcgttactggagcacgagaggagtgagaggcggcggcttgaagaacaatatgaagaggtgaaaaatgaagttatggagctgacctctgagactgaagagactactgtccggaaacttgaggatgaaataaaagaatgcaagggtattctcaagtgtggtgtatgctttgaccggcctaaagaggttgtgatcaccaaatgtttccacctattctgctcgctatgcatccagagaaacctcgagattcgccaccgaaaatgtcctggctgtggaaccccattcggacaaaacgacgttagggaggtgaagatatgaacctcaccaaagtgacagtgacaaaaccgacttgcgtgtgaacagcagcaacaaactcccttgtgaatatcgtctgttatgttggcgaacatctagatctaacttgctttattactgggattaaaattaggataagaactggaagaagtgaagttcctaatttatttgctatcgtgtgtgctatgtatgattacccttggcagcgagtggtgtatctgctgggtgtcaatatgctcgaattctagctcctccctgctagcgggtgcatgccagttttattaaggctattccatgtacatggtgtcacactctttaatacataccacataggatgaaaatctgatgtgacatgtgattgaaacatagggagacaccactcatgcaccagattatagacattgaaatctgaaccatctaaatgaactgtaactcatactcttatatatatctaacattttgtcttgtg

SEQ ID NO: 8615 - DNA, 398 bp, Zea Mays
ggagacggcactacagtagtacgaggtctttgcccacacgcaacctcaagaaggaacatgccgaaggcaaagacatctgtatgaggggacgccttccctgtgcgcagaagctcgggtgctaggtatccctttgttccaaccatatgtgttgtttgtgggtcagtgccgtgatcatacaaccttgcaaggccgaagtcgccgaggcggccgttcatttcaccatctaggagtacgttgcttgccttgatgtctctgtggatcactatcttctcccacttctcatggagatacagcaagacggtagcgatgtttctgatgactcgaaacctctgttcccagttcaaaatagcaccgtgctcttcacagtatagatatttatcaaggctaccattgggcat

SEQ ID NO: 8616 - DNA, 2421 bp, Zea Mays
ggttctttctccaccccgatgcccctccccctcccccgtgtgatcccctctccagatcgatgtctgccccggccgtaacccccgcggctcaccgcacgaaaccgccgcgagatcttggagctcagcctctgacgatggctacgactacctcgccaacctccgcgagctctgtccccctccctctcctccaccggcggcgggggatccttggccatgttcctcccgaggcgccggtccacgcgcttcggcctccgcgtggtcatcaagcctttctgatggctcggaacagaggtcagctatgcgatgtggcgtggcgaggttaccgcgggcgccgcggaggtggagggggaaggggaggacgagggcacgggcaagagagcgcatcgctgtggacggtctcgtgagagggaccttgggtgatccgggtgcttggtttcttggttctacggctttcgctgctgttggatttgccgagccggagccgacggagatgaccgtcgacgagctgaagctgcaggcaagggccagcggcggccacgacctaaggaccagttccccgtcggcatgcgcgtgctcgccgtcgacgacgacccgacctgcctcaaggtcctcgagaacctcttgttccgctgccagtaccatgtgacaacaatgggccaggcagccactgccctgagctgctgagggagaagaaggaccagtttgaccctgtgatcagcaacgtccacatgccggacatggacggcttcaagctcctcgagcttgtgggcctcgagatggaccttccggggattagtgaagcggcagaagaagagcttttacatacccttacaatgctgattttgatggagatgaaatgaatttgcatgtccctcggacggaggaagctcgcactgaagcgcttaattctcataggggttcaaaataatttatgtactcctaagaatgtgatgggggatacttcaatgcaataatgagcttcccacaaaattacccaaacagcccaccatcagtcagatttacctctgaaatgtggcatccaaatgtctaacctgatgggcgggtttgtatctctattcttcatccacccagtgaagatccaaacggttatgagctcgcaagtgagcgatggacacctgtgcacacagtatggcttcgtatactttgtttacatatcttttccccattgtaatgttactcatctcccttttatgtgtatactttttagagagaaaattaccttgtagtctcattgtttcagtttatggtccaatttacaatggcttcactgtaaatgggaaaacaactcggtaggaatgcttttttgaattataaattatttctatttcatacgatgcttataggtatgtgatgagtcctccaatctgagaagtagagcatggtaaagcactccaagctgctctttcatcgggaaatttataggtgacacttgtgtcatacattgaactatggagtcaaacaaattacatattatccttcaacatttttcaccagtgggaactgtagttattgcgtagaatagatggtatattaatcgttgagagccaatgtttacattaactgttatgcagaagacaatttatgttttattttatatctaactgtactttgttgcagcttgtaggtactgatcacagcacattcaactccacacagattgtccatgtttctttcagtcaccatgatttatcactaggtcattgtgtttgtggccaacgagtattgttctaacagttatgttcccatagctagctagattcattgttgtgttttgttcagggtactttcaccacttctggtatggttctgtctgtaatgtgccagggattattatattgtttttggtttggatttggaatggtttggggtccacaacgatgatgcgtcagagctgttccaaggattggatgatttccattcccctgctgccaattcgactaggctcgccgtctccgctctgcccaactggcaccaagcagccaatggaacttgagcagccaatggatgatttccattcccctgctgccaattctccgaactgctttgacccttcaactcaatccgcatgtacccagtaaatgttcaatctgaatttggatcattgctagcaggattctttgcttgctcttctacttctgaaaattcgcaaaatggatagataattccagttaattttaatccattacagcaaacagcgactgggtgcggaagccggaagggagaggcgcttggttgacccagaacggacgacaagacaccgccgggggttcgctgcaaccgcacgcgtggtggccggtgtgggaaggagcccactgctcaagcagcgacgacttccgtaacttctcaggccaagttgtagggagggagggcagcaaagaaagcaagcaagaaagaagccga

SEQ ID NO: 8617 - DNA, 3241 bp, Zea Mays
cagaagaagagcttttacatacccttacaatgctgattttgatggagatgaaatgaatttgcatgtccctcggacggaggaagctcgcactgaagcgcttaattctcataggggttcaaaataatttatgtactcctaagaatggtgagatactggttgcttccgcgcaagacttcttgacctcatctttcttagatatgttttcgaattagattgggatggaaattcacatttgttatcacattttctgttagcaagcacaaccattgtgacattattttgcatgcactcagcctctcaccatggctatgagaatgaaattcaacttatagatataccaaaatgttatagaatcaatataattagatatgtcaagatgacaacacatatttcattcaactactatggatttttcattgataaaatacatgcttgatggctgcttgtctaaaatttatttgtttaatattctttgtttgtaagcccaagaatttgtaaaccaggaaataattccaatgaaagatcggtgcggggcggaattttcttggctttttgtagtggctaccgtagtacatcaacttgggcacttggcgacatgtccggtgcccagctccatcacatatcaatctgaaattaaacatgtgtctgagttctgaatgaaaaaattcagctaacagctaacactacgcactactaacagacctcaagcataatactgttgatttgatgtccttatatttatcttgaagcattgcattcatgcagtcatgtaaatagtactttatttatcttctgaccaacacactaataaccaacctttgcagtgatgggggatacttcaatgcaataatgagcttcccacaaaattacccaaacagcccaccatcagtcagatttacctctgaaatgtggcatccaaatgtctaacctgatgggcgggtttgtatctctattcttcatccacccagtgaagatccaaacggttatgagctcgcaagtgagcgatggacacctgtgcacacacttgtaggtactgatcacagcacattcaactccacacagattgtccatgtttctttcagtcaccatgatttatcactaggtcattgtgtttgtggccaacgagtattgttctaacagttatgttcccatagctagctagattcattgttgtgttttgttcagggtactttcaccacttctggtatggttctgtctgtaatgtgccagggattattatattgtttttggtttggatttggaatggtttggggtccacaacgatgatgcgtcagagctgttccaaggattggatgatttccattcccctgctgccaattcgactaggctcgccgtctccgctctgcccaactggcaccaagcagccaatggaacttgagcagccaatggatgatttccattcccctgctgccaattctccgaactgctttgacccttcaactcaatccgcatgtacccagcctattgtggcagcaaacagcgactgggtgcggaagccggaagggagaggcgcttggttgacccagaacggacgacaagacaccgccgggggttcgctgcaaccgcacgcgtggtggccggtgtgggaaggagcccactgctcaagcagcgacgacttccgtaacttctcaggccaagggcatgatgaaatcagtgtttgctatttagcctccttcacaactaagatcatcctacataatagatttagacaacaaaaacttatggagtttgctgaaatgccctttcaggcatgctccatctgtgctacaaggttatgggcttcctgcttgctgccagcagtcttttggtgcttttatattgctattaatttgtttgaaatttattatggtgatgactgggaaggtctttttgaggctattactggttatggccttggtggctctttggccgtgttggtggtggtatttataccaaggctgctgatgttggtgccgaccttgtggggaaggtagaaagaaacattcctgaggacgatccaagaaacccagctgtcattgctgacaatgttggtgataatgttggagatattgttggaatgggatcatatctctttggctcatatgctgaatcgtcatgtgctgctcttgttgtggcctcgatctcgtcttttggaatcaaccatcaatttactccaatggtgtatccccttcttgtcagctctgttggtattatagcatgtctcataacaacgctgtttgcaactgatttcttcgagataaaggctgtgagtgaaatagagcctgctctcaagaaacaacttataatatccactgttgtgatgaccattggcattgcgctcatgttggcttggtcttccatacaccttcaccatttataactttggagcccagaagacagtgcaaagctggcaattgttcttgtgtgtggcggttggtctctgggctggcttagtcattggttttattactgagtactacacaagcaatgcctacagccctgtataagatgttgctgattcctgcagaactggagctgccactaatgtcatttttgggcttgctctgggttacaaatcagtcattatcccaatttttgctattgcgtttagtatcttccttagcttcagccttgctgccatgtatggtgttgttgtggctgctcttggaatgctgagtaccattgccacagaccttgctattgatgcctatggccctatcagtgataatgctggaagcttaagtctgtatgggtgcatcttatcatttatatgtatatctgaaagcttaagtatttttttaaatagaagatgtctggaaactttagtaacgacatgagtttcaggctttcagctatagcagtcttattcgcttttaagacagagaagatttttatttagagtttagaaagagtaggtgctatgggtgcatgttatcatttatgtggggaacatctctggtggaaattaatcagtaacgacatgagttaagacagagaagcttaagtattttttcagctatagcagtcttattcgcttttaagacagagaagcttaagtattttttgaatagaagatgtctggaaactttagtaacgacatgagttaatcagaagagatggaagggtagtttatcaacatgtatttggcacttcgccgaaaatgtcacttggactatcttgcaaactgaattttcagattggcttcttctgtctgaacattcagttcagtcttgcaggattt

SEQ ID NO: 8618 - DNA, 3296 bp, Zea Mays
ggttctttctccaccccgatgcccctccccctcccccgtgtgatcccctctccagatcgatgtctgccccggccgtaacccccgcggctcaccgcacgaaaccgccgcgagatcttggagctcagcctctgacgatggctacgactacctcgccaacctccgcgagctctgtccccctccctctcctccaccggcggcgggggatccttggccatgttcctcccgaggcgccggtccacgcgcttcggcctccgcgtggtcatcaaggtcctaccaccgcctcacctcctccttgccgccgtgcggttgagcgccgacgacgttcgggctccggcggttcctgcatggaccggaagagccatctcatactctttctctacagcctttctgatggctcggaacagagccggagccgacggagatgaccgtcgacgagctgaagctgcaggcaagggccagcggcggccacgacctaaggaccagttccccgtcggcatgcgcgtgctcgccgtcgacgacgacccgacctgcctcaaggtcctcgagaacctcttgttccgctgccagtaccatgtgacaacaatgggccaggcagccactgccctgagctgctgagggagaagaaggaccagtttgaccctgtgatcagcaacgtccacatgccggacatggacggcttcaagctcctcgagcttgtgggcctcgagatggaccttccggggattagtgaagcggcagaagaagagcttttacatacccttacaatgctgattttgatggagatgaaatgaatttgcatgtccctcggacggaggaagctcgcactgaagcgcttaattctcataggggttcaaaataatttatgtactcctaagaatgtgatgggggatacttcaatgcaataatgagcttcccacaaaattacccaaacagcccaccatcagtcagatttacctctgaaatgtggcatccaaatgtctaacctgatgggcgggtttgtatctctattcttcatccacccagtgaagatccaaacggttatgagctcgcaagtgagcgatggacacctgtgcacacacttgtaggtactgatcacagcacattcaactccacacagattgtccatgtttctttcagtcaccatgatttatcactaggtcattgtgtttgtggccaacgagtattgttctaacagttatgttcccatagctagctagattcattgttgtgttttgttcagggtactttcaccacttctggtatggttctgtctgtaatgtgccagggattattatattgtttttggtttggatttggaatggtttggggtccacaacgatgatgcgtcagagctgttccaaggattggatgatttccattcccctgctgccaattcgactaggctcgccgtctccgctctgcccaactggcaccaagcagccaatggaacttgagcagccaatggatgatttccattcccctgctgccaattctccgaactgctttgacccttcaactcaatccgcatgtacccagcctattgtggcagcaaacagcgactgggtgcggaagccggaagggagaggcgcttggttgacccagaacggacgacaagacaccgccgggggttcgctgcaaccgcacgcgtggtggccggtgtgggaaggagcccactgctcaagcagcgacgacttccgtaacttctcaggccaagggcatgatgaaatcagtgtttgctatttagcctccttcacaactaagatcatcctacataatagatttagacaacaaaaacttatggagtttgctgaaatgccctttcaggcatgctccatctgtgctacaaggttatgggcttcctgcttgctgccagcagtcttttggtgcttttatattgctattaatttgtttgaaatttattatggtgatgactgggaaggtctttttgaggctattactggttatggccttggtggctctttggccgtgttggtggtggtatttataccaaggctgctgatgttggtgccgaccttgtggggaaggtagaaagaaacattcctgaggacgatccaagaaacccagctgtcattgctgacaatgttggtgataatgttggagatattgttggaatgggatcatatctctttggctcatatgctgaatcgtcatgtgctgctcttgttgtggcctcgatctcgtcttttggaatcaaccatcaatttactccaatggtgtatccccttcttgtcagctctgttggtattatagcatgtctcataacaacgctgtttgcaactgatttcttcgagataaaggctgtgagtgaaatagagcctgctctcaagaaacaacttataatatccactgttgtgatgaccattggcattgcgctcatgttggcttggtcttccatacaccttcaccatttataactttggagcccagaagacagtgcaaagctggcaattgttcttgtgtgtggcggttggtctctgggctggcttagtcattggttttattactgagtactacacaagcaatgcctacagccctgtataagatgttgctgattcctgcagaactggagctgccactaatgtcatttttgggcttgctctgggttacaaatcagtcattatcccaatttttgctattgcgtttagtatcttccttagcttcagccttgctgccatgtatggtgttgttgtggctgctcttggaatgctgagtaccattgccacagaccttgctattgatgcctatggccctatcagtgataatgctggaagcttaagtctgtatgggtgcatcttatcatttatatgtatatctgaaagcttaagtatttttttaaatagaagatgtctggaaactttagtaacgacatgagtttcaggctttcagctatagcagtcttattcgcttttaagacagagaagatttttatttagagtttagaaagagtaggtgctatgggtgcatgttatcatttatgtggggaacatctctggtggaaattaatcagtaacgacatgagttaagacagagaagcttaagtattttttcagctatagcagtcttattcgcttttaagacagagaagcttaagtattttttgaatagaagatgtctggaaactttagtaacgacatgagttaatcagaagagatggaagggtagtttatcaacatgtatttggcacttcgccgaaaatgtcacttggactatcttgcaaactgaattttcagattggcttcttctgtctgaacattcagttcagtcttgcaggattt

SEQ ID NO: 8619 - DNA, 2458 bp, Zea Mays
tttctccattacgtgttcccagctgcatgccgcaagtgtcaaactccaattagtcaccagccttgcttgcttgcttgtcccagctaagccgaggacaggacacgcgaagaagaggaacgatcagtcaccagccttgtttgacatcctgagcagcttcatctcctcctcctggcaagtttcttggcaagctggtgctcaaacaatggcgtgttaattaggaataggatagaacaggatcgttgcatcacgcagccaaggagacatggctaggagcagagaggtggcgggctggggcacggtggccggaggaggcggcgcggcggccgtggagaaggcggtgcggtgcctcggcaggggcgtcgacatgacgggcgacctgaggctgaagcactgcaaggacgcggggggctgcctggtcgtccggagcgccgggaggaaggcggcggagaaggccgtcgtgccgggcttcggcgtcgtcgccgacctgcccgccgacgtcaggtgcggcaagggcgaccggatcaggttcaggtccgacgtgctcgagttcaacaagatgtcggaggcgttcaaccaccggaattcgctggcggggaagatcccgtcggggctcttcaactcctgcttcgacctggagagcggctcgtgggcggaggacgccgccgccaccaagtgcctcgccttcgacggctacttcatctcgctcctggacctccgcctcgactgccggccgctcgccctcgccgaccacgtcgtcggcgacgtgccggcggcatgggacccggcagccatagcaagtttcatcgagaggtacgggacccacatcgttgtcgggctgggcttgggtgggcaggacgtggtgtacgtgaagcaggacaggtcgtctccgctgtccccgtccgagatcaaggagcacctcgacaggctcggtgaccagctcttcaccgggacctgcaccctgcccccttccaaccgcaaactcagggaacacaaatctaaggtcagcgacaccagaccagagcagctcaacaccccccctctcctatgttactcaactggactgctggatgtggatcacaaacaggtccctgaggcgttcaatgtgttcgatgcccaagtgacacagcaagggctccaaggaataatggctactccagtgtcctgcaaagagaggggagggaacgcggcggcgagcgaccactcggagtggctgctcaccgtgcccgcgacgccggacgcgataagcttcaagctcgtgcccatcacgtccctcctcaagggcgtgagcggcgtcggcttcctctcccacgccatcaacctgtatctcagatacaaacctccgacaggcgagctgaggtacttcctggacttccagcaccacagactgtgggctccagtgctcggtgacctgccacttgggccctgctccaaccggcaggctcctagtccggccttgaacttcagcctcgtcggttccaagctctacgtcagctcgagcgaggtggttgttccaagactacccgtcaccgggatgagactacatctggagggcaagaaaaataaccggcatccacctgcagcatctgtccaacaccccagcgttcatcggcggaacaccggccaatgagcagccgccggcggcggtgtggcgcgggtcggagacgatctccgacgcgcggtactacgagccggtccagtggaggatgttcgcgcacgtgtgcacggtgccggtgaagtacgaccctcgctgggccggcgccggcgccggcccgccgtcggcgtacgtcgtctccggcgcgcagctccacgtcaaggcccacgactcgaccaacatcctgcacctcaggctcctgtacgcccggctgccgggccacgccgtggtgcagtccaggtgggcgcacggcgccgccaccaggctgtcatcgggcagagggagcttcttcctgtccaagtcgctggcctcgggctccggcggcgtcgacaaggagcagcagcacccggggagggttcacgtcgactccggcgtgttcgccggagggccgcccgtgcctgtcgggacccagaggctgctcaggtttgtggacacgtctcaggtcaccatggggccgcaggacagtcctgggtactggctggtcactggcgccaagctggacgttgagaaggggaagatctcactccgcgtcaagttctcgctgctcgctccagtttcttgacacgctagtcttctttctgctaggagaacaccgctgtgcagaaggccgaaattaggggggactccttgcgcagtgatgagtgattgtatcaaggtcatatttgattttacacagccttccgtacatatttttgctactactttcttgtacaatatattcttaaaatccttcagatttttcatgcaattatacacatttgcaaactaaataacttatatcacaaatcccaaaacattaaaatcata

SEQ ID NO: 8620 - DNA, 2870 bp, Zea Mays
ggcagccttcccgctcggcgctcccttcttctcacctctccgcaaaccccacgacgaaaaacttcttttccccctcccctgttaaacacgcgcagcgaagcaacgcagcagcaacaaaccttttcgctcgcagctgccaccacctcgtcgtctcgcctccccctcggcctccgcacgcgcgcgcgggatctcgccctcgcccgcctcgccgctcgcgcgcgcgcaccgaggaagggcgcacccacccgcaggcttcctggcgggccgatacggcggcgatggcgagccgggtcaaggaggacgagaggcacgagaagatccttcgcggcctgctcaagctgcccgccaacaagcgctgcatcaactgtaacaatttgggaccacaatatgcctgcacaaatttctggaccttcgtttgtaccaattgcagtggagcacatcgggagttcacgcatcgagtaaaatcggtttccatggccaaatttactgcacaagaagttactgcccttcaagaaggggggaatgagcgtgctagagaagtatttttcaaggagtgggatcctcaacgaaatggataccctgacagcagtaatgctgacaaattgagaaatttcattaagcatgtgtatgtggaacggagatacacaggagaaagaagtactgataagccaccaagggcaaaggatgacaaggatgagtatagtgaaaataggagatctgatggaaattggggtggttcaagaagtccgccagatggaagttactctgatcgtcggagttatagtggacggagtgatgacagaaattccagatattcctatggggaccgtagtcctggctatgaccaaaatgactataagaaaagtcctcgctactttgaggttgtcgatgatagatctggaaaaacaactccagttcaaaggtttgaagaccgttggtcttcggagcccagaaaaccagatagtggatctccagatttccagaaagaagctgatggttctagtcctgttgtacgaccagttagggatatattgggtgacaatactcctcaacttcgggttggtgaaccgtcaaagccagctactgaacctccaaagccaagcgtagtcagaccaattgatcctccaaagccgagtgtagtcagaccaattggtcctccaaagccaaatggaaccagggcaattgatcctccaccactgacaaagacaatatctagtgccagcagcattggttcttcagaaggcacatcagaacagacaaaggtggcaagtgctgtaagtttaattgattttagtgcagatcctgaacctgcgtccacagcaccaccacaacccacccctatgccacaacaacctccatttaacgcagcagcaccacagcctattcttgaacaagggaaaagtgatccttctgtcagtggtggtgactgggcatcttttgattcttttggccaacaacaaacaccacaaacaagcagcagtgtaaatcctcttgagtctgcacttgcacagctgtcattctctgaagcaccctctgcaccaaatgcgtcagcttatcctgtttctcttgatcccactttgaaagcaaatgatggaggacattcatctgtgctagaccagtcacattccttgtttgatgcgccctttggaatctcaggcaaccaggcctcaacagtaatgtccggccaaggatcatcagttcaacaatctcctctagctgccccaacagctggacctccatctcaagctactgcaaatccacaaggaaccagtggtattcaaggagcagcctcttctactgacagtaaattcagtagcaggaaagaacttccagtggatatctttactgcactatatccaccatcaactcaaatgatgcctggctggcagagagctccccattttggaatgggatacgccatgcaatatccacctggagtgggattgcaatcatatcttcacggagcatttcctcagcctacatatcagcaacctgtatattcacaacatgcatattcccacccccaacctgtgaaagcttcaaacccttttgatcttgggaatgagtcagctcatattcaagctcacatgcccccatctgggccacctggagcatcagcaggctcagctccccaaaccttaattggtaactctagttttggtgttcctccacagcagcctcaccagctctatcagtcagaagcgcatctaagccattttatgatgcagcaagttccgaacagcatgcccatgcctgaacaacaacctaatagcatgcttgcaacgcaacaaggtttgggttccttcaacatgggttttgatcaggaagctcctctcggatacccccaggcaaacacctcaccttcctacggctccgttggtggtggtagtaatccatttggctgaaagaagtgtggaaatacctgatcgttcatcactagacgaagggtctgcagcactcagggggacagacatgcatcgaagccctggagagattgtgtttcatacaacaagggcctaagctgatttcagcctcattccatgtacattgtgtctggcgttctgcttggattgcacagtatgtatattgtgtttcttcgttgttgtcatggacagtgtcagctcctgttttagtacaagttgtttctagtgcacttgattattcgatttaatgtggatgattagtacactatagatcagatgtagaatcgtgatcgatcaattttgtggtttctttttacttgctatcttagtaccacttaattttgtggtgatcttttgtaagggttattttcttgtggaactcattacttgttatctacattttgtaatgcaattcaaggtatgttcaacttaactaatttctccctc

SEQ ID NO: 8621 - DNA, 4622 bp, Zea Mays
cttcttctcacctctccgcaaaccccacgacgaaaaacttcttttccccctcccctgttaaacacgcgcagcgaagcaacgcagcagcaacaaaccttttcgctcgcagctgccaccacctcgtcgtctcgcctccccctcggcctccgcacgcgcgcgcgggatctcgccctcgcccgcctcgccgctcgcgcgcgcgcaccgaggaagggcgcacccacccgcaggcttcctggcgggccgatacggcggcgatggcgagccgggtcaaggaggacgagaggcacgagaagatccttcgcggcctgctcaagctgcccgccaacaagcgctgcatcaactgtaacaatttggtgagcctctcgtctcgagttctcttgctgaatctgccacaatgctctgttgccatgaatggcgcacacacggcatattgggagggaccacaatatgcctgcacaaatttctggaccttcgtttgtaccaattgcagtggagcacatcgggagttcacgcatcgagtaaaatcggtttccatggccaaatttactgcacaagaagttactgcccttcaagaaggggggaatgaggtaacatgtatctgtttttttttctacttttcccatcaatcccatgtcttctattcaacacggcattgattttgaaggagaatagaattggtgtaattgaatggatgtattgcaatattgcattgagcccttagtcagtttatgtagagtacaagacttgggagacaaggaacacatggatacatgtggcggtctacgatacacaatatctaaactaccaaatatactctaacaaccctccgcagtcgtagcgggaacatcgcagacgattggactggagaagaggagccaaaggctaacattctcctgaagtcgtagtgacattgcaatgcaaatgttgcaactagagtagaaaccaacaaggagcttatgtggttgtgccaatgcgaggtagccgagcataaggcacaattgatgtggttgaaggagtcgtgctgaagatagcgaggccgacatagttgtggtgaggttgctgtgttggtgtagttgcaagcgcataagaggtgtcaaggagatgatgaagacatgtctgggtagtcgtcgtggaaggaggctatactgaggttcatacagtcagggctgccaaagacgaaggtgaaaggagacgatgcaatcgaggcagatggggtgggaacatgagagttgatgccgatgtagatgcagtcaagttgcctgaaccgaggcttgggctggatttgccagactcagcaacgcgccagacacgaaagcaagtgtcgttgttgccaataccggacgtacaaggtagagggaccatcatagaagtagtagcgttgattgttgtagaacagtagggtagaaggtatggatgcagcacacagttaacggaatagacgaagtggtggggacaagacgaagatgctggtgatgttgtgttggacggagaagcagtgagggagtggatgcgttgaacccgaaggcaagcagtccgggctggcgatggatgggcagcggtgctttcgcgcacaaggcctcacgctcacatgtagtgctctaagtcgacgacaaaggcgatcaataggacaaaggccttgtgcagacggatggtgcaacagattgtgcagcacagtcatcgatgcacatgggatgatgatgtatatgcaaccaccaagcagaccttgatgatggtgtggctcgacgaggcgacacagcagcagccctgttgctcgaagaagacgtgcatagtaccctgcgatggacgtcacgggagccaggtggaccacacaatcaattgtagggagttgggaccaagtacgcgcgagatggagcgacgacggaagaggtcagcagaggtgtcttgaatcctgatctatgctggtgatgacaaactgacaatatagacatgcagacgggatggttgagaagcgacgtgggaatgcatccccacaacatcgcacgcttggccaagccgcacagtcgaagatgtagatgccggtgttggagtagcacgtgaggttggcaagcaacgggtgacttagtcccgattagtgatcatgcaaaccaaaaagggtgcaacagcagcagtgggatcttccctgtgcaactcaacgggtgcacctacaacttgatcgcagactaaacagtgacaacgagtgtccaacgcccggcatgaagaggtgggcgcctaaacagtggcgttgcccctggtggagataaatctctccccgggggtgcgtggtgcagaatctatcgctggctagggttagatctaaaccgaacccgggcaattgataccatggaggaaaataaaattgttgtaattggatggatgcattgcattgagtccttaggtggtttatatagagtacaggactaggaaacaaggcaacccatggatacatatgatagtctacgatacacaatatctaaactaccaaatataacagattttacttgacttgtagcgtgctagagaagtatttttcaaggagtgggatcctcaacgaaatggataccctgacagcagtaatgctgacaaattgagaaatttcattaagcatgtgtatgtggaacggagatacacaggagaaagaagtactgataagccaccaagggcaaaggatgacaaggatgagtatagtgaaaataggagatctgatggaaattggggtggttcaagaagtccgccagatggaagttactctgatcgtcggagttatagtggacggagtgatgacagaaattccagatattcctatggggaccgtagtcctggctatgaccaaaatgactataagaaaagtcctcgctactttgaggttgtcgatgatagatctggaaaaacaactccagttcaaaggtttgaagaccgttggtcttcggagcccagaaaaccagatagtggatctccagatttccagaaagaagctgatggttctagtcctgttgtacgaccagttagggatatattgggtgacaatactcctcaacttcgggttggtgaaccgtcaaagccagctactgaacctccaaagccaagcgtagtcagaccaattgatcctccaaagccgagtgtagtcagaccaattggtcctccaaagccaaatggaaccagggcaattgatcctccaccactgacaaagacaatatctagtgccagcagcattggttcttcagaaggcacatcagaacagacaaaggtggcaagtgctcaaatgatggaggacattcatctgtgctagaccagtcacattccttgtttgatgcgccctttggaatctcaggcaaccaggcctcaacagtaatgtccggccaaggatcatcagttcaacaatctcctctagctgccccaacagctggacctccatctcaagctactgcaaatccacaaggaaccagtggtattcaaggagcagcctcttctactgacagtaaattcagtagcaggaaagaacttccagtggatatctttactgcactatatccaccatcaactcaaatgatgcctggctggcagagagctccccattttggaatgggatacgccatgcaatatccacctggagtgggattgcaatcatatcttcacggagcatttcctcagcctacatatcagcaacctgtatattcacaacatgcatattcccacccccaacctgtgaaagcttcaaacccttttgatcttgggaatgagtcagctcatattcaagctcacatgcccccatctgggccacctggagcatcagcaggctcagctccccaaaccttaattggtaactctagttttggtgttcctccacagcagcctcaccagctctatcagtcagaagcgcatctaagccattttatgatgcagcaagttccgaacagcatgcccatgcctgaacaacaacctaatagcatgcttgcaacgcaacaaggtttgggttccttcaacatgggttttgatcaggaagctcctctcggatacccccaggcaaacacctcaccttcctacggctccgttggtggtggtagtaatccatttggctgaaagaagtgtggaaatacctgatcgttcatcactagacgaagggtctgcagcactcagggggacagacatgcatcgaagccctggagagattgtgtttcatacaacaaggtggtgtatcttgtcggccgtagtctgttgtacaacttgtttccaaaggcttaatgatcgaatataactctgttttggagggcctaagctgatttcagcctcattccatgtacattgtgtctggcgttctgcttggattgcacagtatgtatattgtgtttcttcgttgttgtcatggacagtgtcagctcctgttttagtacaagttgtttctagtgcacttgattattcgatttaatgtggatgattagtacactatagatcagatgtagaatcgtgatcgatcaattttgtggtttctttttacttgctatcttagtaccacttaattttgtggtgatcttttgtaagggttattttcttgtggaactcattacttgttatctacattttgtaatgcaattcaaggtatgttcaacttaactaatttctccctc

SEQ ID NO: 8622 - DNA, 1465 bp, Zea Mays
actgcttcccgtagtcctttgtcgcgagctgctgtgctgtgtcctgtgtgcccgcaccatcgcctgaggcctgagggtgcgtgctgcaggtatttattggacgcttcccggatcaaagcaatgtcgagtggcgacagtcggcggtgggcgcgcatgcagtgggtggcgacgcgaccgagtgcggtggtggtacggcgagcgagcgagcgacacgagctgagtgagtgccctgcaagcccaagctcgtgacagagataggacttcagctcgactcgcgcggtcgccttgcctgctgcacacgagccgtcgccaactcgatcctcaccgccatggcgcaagctgcttccggctccagcaagatcgacaccaaagctcccacctcagccgacgaggccgctcaacccaagagctacggcgacctggtatccactctcccggctagaggcgggtgggtatcgctcgtgcagtaccagaactactggctgaaccccggcaggctccagaacatcatccccgtgaaagagctctacaagcctcgcgccgacgacatcgtcctcgccacctacctgaaatgcgggaccacgtggctgaaggcgctggccttcgccatcacgacccgcggccgccaccaccaggccttcgccgccgccgaccaccccctgctcaccgtgcacccgcaggaggccgtgccgcacctggaggtgcacacgccagggcagggcctggcagacatcgagaggctgccgtcgccgaggctgctcgggacgcacctgcccctctccctgctcccgccggccgtggccacctccggctgccgcgtcgtgtacctgtgccggcagcccaaggacgtgttcgtctcgctctggcacttcgtgaagggcatgcgcgggggcaggtcccccgtggagctggacgccgcgctggccatgttctgcgagggggtacgaggagatggtggcggacccggtgcgtgccgtgaggacgctcgccggcttcttcgccgtcccgttcaccgacgaggaagaggggcgaggggtcccggaggagattgtgaggctgtgcagcttcgagatgctgagcggcttggaaagcaatcggaccggagatcttgattgcggagacaacacggtgatcggaaaatctaccttcttcaggaagggcaaggttggggactgggagaaccacttgacaaaagagatgggcaagaaggtcgacgccgttttcgaagacaagctccagggatctgtatttacgtaacgggatctttctatgctcaaaagacaaagatcaagggatctagccagccctatattttgattagccgtgtctttcgattgtgtgatgatgtttgtcaagaataatctttgtgtagtatttatgtaatgggatctttctactcgaaaaaattactctataactacgcttttatatatgttacttttaccataagaaatatggcgatcca

SEQ ID NO: 8623 - DNA, 1485 bp, Zea Mays
cttcgcatgtgaactgcccactgccgcactgcgacaccgctccacccaccccaacctaggcagtaggcagtaggcatcaagcgtcctgcgtggctgcgtccaagtccaagcgccgtccggccaccagcgcaggtaccgagccaccgaggtaggagccagccaccgggcagatcccaggctgccagccaccggcgtccagcactccggctgccagctaccggccacccgcagcgcaggccacaccaatgggtagcaaccgcatggcgccatggctgccgacgaacaccagcagcgagacggccagaccccagtaattcgatttattatatcttcgtcgaggatagtgacacgtcacgtcagtgtccggccatcgcttgagaggcgcgaatgtcttcgctgcgccgtcacgatccagagtccaacccaaggatggtttaggctactgaagggcaatgcactgattcttagactattgaagaatttacaggatgatgtgcaggagcagagcgtgggcagtaaatgcaaagaaaaaacacagttgcagaaattgctagcaatagactatacaagatagagccaaattgagcaaaaaaaaagaccattcccatttggatcaccattccctaaccacagcaaaatgaaggtggaaaattgagtagttgagtgccgtgtatgcacatgagcagggctaatactttataagaaatgtgctggttcttgatactcctccaaccagttgtagaagaattctggtttggctgaagtagttttacatccgaaagatggactttgtacagatatattctctgtcaacaatatgtatatccaggcggagatgaacttggagggaagcagatttacacaatttctgcaagtcgacccatcgtgttgaactaaaccatctctaatttcctacagcttcaactccaacaacaggatggccccacacacttaatgaaaacatctctaatttctagcaaattcgactccgaggacaataaaggtaccacaatggacttcttaagaagaataggaatcgtgtacataagcttttttgctctaataaaataagagtggttgttgcaacaatggcattcagaatgggtcttgataagagtgacgttgaaccgatatgaccatttgactagcatacaaagttcaaatgtgacagcctatagctttaagcaatgttacactgcttatcacctggactgattcaagcatttgttcttttaaaggtggttcattgtatcttgccagaaatcgtagaagaatacatacatgtatattccatgcagattccccccaccctcccattttcttctcttttctagacatcttactatgctctttctaggaaactggtcgtgctgattcaacaaaagtcaaagtcttttgcacaaatgaatcttatcgtcttgtcctttttttcttgtaatttacatttccaacctgctctaagtttcctacataatgacttcaatc

SEQ ID NO: 8624 - DNA, 1542 bp, Zea Mays
cttcgcatgtgaactgcccactgccgcactgcgacaccgctccacccaccccaacctaggcagtaggcagtaggcatcaagcgtcctgcgtggctgcgtccaagtccaagcgccgtccggccaccagcgcaggtaccgagccaccgaggtaggagccagccaccgggcagatcccaggctgccagccaccggcgtccagcactccggctgccagctaccggccacccgcagcgcaggccacaccaatgggtagcaaccgcatggcgccatggctgccgacgaacaccagcagcgagacggccagaccccagtaattcgatttattatatcttcgtcgaggatagtgacacgtcacgtcagtgtccggccatcgcttgagaggcgcgaatgtcttcgctgcgccgtcacgatccaggctcgcatccccttctgacgcgcacccattgcgggcagacgtttgggctttgtgtggatggatcatggacgtacataccacgtttgtttttctaactaaatcttcacttctttgaatcgcagagtccaacccaaggatggtttaggctactgaagggcaatgcactgattcttagactattgaagaatttacaggatgatgtgcaggagcagagcgtgggcagtaaatgcaaagaaaaaacacagttgcagaaattgctagcaatagactatacaagatagagccaaattgagcaaaaaaaaagaccattcccatttggatcaccattccctaaccacagcaaaatgaaggtggaaaattgagtagttgagtgccgtgtatgcacatgagcagggctaatactttataagaaatgtgctggttcttgatactcctccaaccagttgtagaagaattctggtttggctgaagtagttttacatccgaaagatggactttgtacagatatattctctgtcaacaatatgtatatccaggcggagatgaacttggagggaagcagatttacacaatttctgcaagtcgacccatcgtgttgaactaaaccatctctaatttcctacagcttcaactccaacaacagaggtaccacaatggacttcttaagaagaataggaatcgtgtacataagcttttttgctctaataaaataagagtggttgttgcaacaatggcattcagaatgggtcttgataagagtgacgttgaaccgatatgaccatttgactagcatacaaagttcaaatgtgacagcctatagctttaagcaatgttacactgcttatcacctggactgattcaagcatttgttcttttaaaggtggttcattgtatcttgccagaaatcgtagaagaatacatacatgtatattccatgcagattccccccaccctcccattttcttctcttttctagacatcttactatgctctttctaggaaactggtcgtgctgattcaacaaaagtcaaagtcttttgcacaaatgaatcttatcgtcttgtcctttttttcttgtaatttacatttccaacctgctctaagtttcctacataatgacttcaatc

SEQ ID NO: 8625 - DNA, 1706 bp, Zea Mays
cttcgcatgtgaactgcccactgccgcactgcgacaccgctccacccaccccaacctaggcagtaggcagtaggcatcaagcgtcctgcgtggctgcgtccaagtccaagcgccgtccggccaccagcgcaggtaccgagccaccgaggtaggagccagccaccgggcagatcccaggctgccagccaccggcgtccagcactccggctgccagctaccggccacccgcagcgcaggccacaccaatgggtagcaaccgcatggcgccatggctgccgacgaacaccagcagcgagacggccagaccccagtaattcgatttattatatcttcgtcgaggatagtgacacgtcacgtcagtgtccggccatcgcttgagaggcgcgaatgtcttcgctgcgccgtcacgatccaggctcgcatccccttctgacgcgcacccattgcgggcagacgtttgggctttgtgtggatggatcatggacgtacataccacgtttgtttttctaactaaatcttcacttctttgaatcgcagagtccaacccaaggatggtttaggctactgaagggcaatgcactgattcttagactattgaagaatttacaggatgatgtgcaggagcaggcagctactatgcaattttctatttattgtactcttgccacgaactgctcgtaattctctttcagtttgttgcagagcgtgggcagtaaatgcaaagaaaaaacacagttgcagaaattgctagcaatagactatacaagatagagccaaattgagcaaaaaaaaagaccattcccatttggatcaccattccctaaccacagcaaaatgaaggtggaaaattgagtagttgagtgccgtgtatgcacatgagcagggctaatactttataagaaatgtgctggttcttgatactcctccaaccagttgtagaagaattctggtttggctgaagtagttttacatccgaaagatggactttgtacagatatattctctgtcaacaatatgtatatccaggcggagatgaacttggagggaagcagatttacacaatttctgcaagtcgacccatcgtgttgaactaaaccatctctaatttcctacagcttcaactccaacaacagcctattttctaactgattctgtaggatggccccacacacttaatgaaaacatctctaatttctagcaaattcgactccgaggacaataaaggtaccacaatggacttcttaagaagaataggaatcgtgtacataagcttttttgctctaataaaataagagtggttgttgcaacaatggcattcagaatgggtcttgataagagtgacgttgaaccgatatgaccatttgactagcatacaaagttcaaatgtgacagcctatagctttaagcaatgttacactgcttatcacctggactgattcaagcatttgttcttttaaaggtggttcattgtatcttgccagaaatcgtagaagaatacatacatgtatattccatgcagattccccccaccctcccattttcttctcttttctagacatcttactatgctctttctaggaaactggtcgtgctgattcaacaaaagtcaaagtcttttgcacaaatgaatcttatcgtcttgtcctttttttcttgtaatttacatttccaacctgctctaagtttcctacataatgacttcaatc

SEQ ID NO: 8626 - DNA, 2277 bp, Zea Mays
ctcctggactcgggctcccaccctatttctttgctgcacctgcacctccgcttcccgtccatatcacgctttgatcgcttcttttttctctccatcatttctccccgtttcgtctcgcttcttttctgtcgcctcccgtttcgtctatctccggccggcctttctgctgcaaggaaaccaatattgtttgctggatctttcaaaaagggaaaccgaattcccgagagcgagcagcagggaatctctgctgaatccgtaggctccgaattggagctggaagtgtagtgatttcctgattggggacataaggtggggtttgtccctactccccagtgagctccacgcggtccctgctgttcttccagtcaaaattctgtacccttcggtgctggggtcaaggaactaggcgtgttgtcctgcgcaggaagaaggatattgtccctctccaaaactataaacatgggttggttgagtaaaatatttaaaggtccagtaaatagagtttcaagaggacactacaacgggaactcccatgaaggctattcagctcagcacactaaatcatatggtgtgcatggcaatgaggacgaagacatggatcatgctattgcattatccttatcagaggaagatcaaaggaagggaaagaccattgataccgggcatcatttagatgaagatgaacagattgcacaggctctgcaagaaaatattggtcataacctagctgaagacgaacagcttgcacgggctctgcaagaaagtatgaatgatggacctcctcgtcagcacattccagttgaagatgttaactcagaaagtactccagcaagcatcttgccctcaaatattttccgcacaagtggcttgagggtttgtgctggatgcagaagtccaattggccgcggtcggtttctcagttgtatggactctgtttggcatcccgagtgcttcaggtgttatgcttgtgatagaccaatatcagagtatgagtttgctgttcatgaaaaccatgcctaccacaggccctgctacaaggagcgtttccatcctaaatgtgatgtttgcagtagctttattcccacagataaaaatggcctcattgaataccgggcccatcctttttggatgcagaagtattgtccttcccatgaaaatgatggtacacctaggtgctgcagttgtgaacgaatggagccaaaggacagtcaatacataacattagatgatggccggagactctgcttggagtgtctgcatactgctattatggagaccaatgaatgccagccactgtacattgatattcaagaattttatgagggtatgaacatgaaagtagagcaacaagttcccttgcttttggttgagcgacaagctttaaatgaagccatggaagcagagaaatctgtgcaccaccttcctgaaacaagaggcctctgcctatctgaggagcagattgtcagaactatattgaaaggaccaattggaccaggcaacagaatcatagatatggtcacaggaccatacaaactcattagacggtgtgaagtgactgcaattcttatactgtacgggctgccaaggctgctaactggctcgattctggctcatgagatgatgcatgcttacctccgacttaaaggataccgaaccctgagtccagaggttgaagaaggcatctgtcaggttctagctcatctttggcttgagtcagaaatcacatcaggttctggtagcatgtcaaccacctcagatgcgtcatcgtcatcttcaacatcttcatcatcgaaaaagggcgcaaagacggaatttgaaaaaagactcggggagttcttcaagtaccaaattgaaacagattcttctgtcgcttatggagatgggtttcgagcaggcatgcgagccattgagcggtacggcttgagaagcacccttgatcatatcaagatgacggggtcttttccatgctgaagctggtttttttttacctcggcttggatatgggtatacatattttttttggagaacttttggttcaggttatacatacgaaaagccgaacttctgtgtcgagaagaggcataaggatttagctatactgtccattgcaggaaaaaaaactgtttcccttttcaattataaaatttcacagtgcagacatgaaggtatgtggtctttagcttggccaaccttgtggaatgctgtcacttgatgcaaaagaaatttcgaatacatatgctttgctgtgcttgaaatgcaatggttggatgctatgct

SEQ ID NO: 8627 - DNA, 2337 bp, Zea Mays
caagcaaagagctgatagtgaaggtgccatgtgtgtttggaacagggaagaaggatattgtccctctccaaaactataaacatgggttggttgagtaaaatatttaaaggtccagtaaatagagtttcaagaggacactacaacgggaactcccatgaaggctattcagctcagcacactaaatcatatgtactgctcagttgcagcttatcctcttaatctttatctttactggtgcaaattagttaatttaagtagaacctaatataaaaaatgaagaaaagaatcatagtgcactgaaatgtgcccccaatattatatactatgagttgcttagtgcacttgccgtatttgtttacttaatttgaaatgggtccttccctatttctaataaataatttttattaaagtatattgttggcatgcctgcctggaaaaatataagtagtgaacaacttaccaatctgtgcttgactaatgaggatccacagtattttttaatgtatatcaggactcacaacaggttgcatgttcctcagtcggagaggaaaggagtagcactggatgtgctttttgcatacttaaccgttccctgcttttttactgtataattaaaatttaatgtagggtgtgcatggcaatgaggacgaagacatggatcatgctattgcattatccttatcagaggaagatcaaaggaagggaaagaccattgataccgggcatcatttagatgaagatgaacagattgcacaggctctgcaagaaaatattggtcataacctagctgaagacgaacagcttgcacgggctctgcaagaaagtatgaatgatggacctcctcgtcagcacattccagttgaagatgttaactcagaaagtactccagcaagcatcttgccctcaaatattttccgcacaagtggcttgagggtttgtgctggatgcagaagtccaattggccgcggtcggtttctcagttgtatggactctgtttggcatcccgagtgcttcaggtgttatgcttgtgatagaccaatatcagagtatgagtttgctgttcatgaaaaccatgcctaccacaggccctgctacaaggagcgtttccatcctaaatgtgatgtttgcagtagctttattcccacagataaaaatggcctcattgaataccgggcccatcctttttggatgcagaagtattgtccttcccatgaaaatgatggtacacctaggtgctgcagttgtgaacgaatggagccaaaggacagtcaatacataacattagatgatggccggagactctgcttggagtgtctgcatactgctattatggagaccaatgaatgccagccactgtacattgatattcaagaattttatgagggtatgaacatgaaagtagagcaacaagttcccttgcttttggttgagcgacaagctttaaatgaagccatggaagcagagaaatctgtgcaccaccttcctgaaacaagaggcctctgcctatctgaggagcagattgtcagaactatattgaaaggaccaattggaccaggcaacagaatcatagatatggtcacaggaccatacaaactcattagacggtgtgaagtgactgcaattcttatactgtacgggctgccaaggctgctaactggctcgattctggctcatgagatgatgcatgcttacctccgacttaaaggataccgaaccctgagtccagaggttgaagaaggcatctgtcaggttctagctcatctttggcttgagtcagaaatcacatcaggttctggtagcatgtcaaccacctcagatgcgtcatcgtcatcttcaacatcttcatcatcgaaaaagggcgcaaagacggaatttgaaaaaagactcggggagttcttcaagtaccaaattgaaacagattcttctgtcgcttatggagatgggtttcgagcaggcatgcgagccattgagcggtacggcttgagaagcacccttgatcatatcaagatgacggggtcttttccatgctgaagctggtttttttttacctcggcttggatatgggtatacatattttttttggagaacttttggttcaggttatacatacgaaaagccgaacttctgtgtcgagaagaggcataaggatttagctatactgtccattgcaggaaaaaaaactgtttcccttttcaattataaaatttcacagtgcagacatgaaggtatgtggtctttagcttggccaaccttgtggaatgctgtcacttgatgcaaaagaaatttcgaatacatatgctttgctgtgcttgaaatgcaatggttggatgctatgct

SEQ ID NO: 8628 - DNA, 4101 bp, Zea Mays
ctcctggactcgggctcccaccctatttctttgctgcacctgcacctccgcttcccgtccatatcacgctttgatcgcttcttttttctctccatcatttctccccgtttcgtctcgcttcttttctgtcgcctcccgtttcgtctatctccggccggcctttctgctgcaaggaaaccaatattgtttgctggatctttcaaaaagggaaaccgaattcccgagagcgagcagcagggaatctctgctgaatccgtaggctccgaattggagctggaagtgtagtgatttcctgattggggacataaggtggggtttgtccctactccccagtgagctccacgcggtccctgctgttcttccagtcaaaattctgtacccttcggtgctggggtcaaggaactaggcgtgttgtcctgaactcttgattcctgcttcatggaaattgtatatgtttttctctgaattcaaaatcgtccctattctcccaaagctttctgaggtaaggataagataatgacgtcgtgacctgtttcaatttattttgtagtctctttctcttttgaaggcgcacttgcattctctctgctgcttcttttagtactggttaccgaaatttggactctactgtttggtgaccagtgatttccacagagtttgaaaaaacatttatagatacagggctgcatatatagttttggtttgtgaggttctcaaaggacaatttcatgtgtagtaaatctaagagacatgttaagccattttgttgaatttggatacttttgatttaaggactccagacgcggcatgcatatctgtgtaggtgatcaattgctggtctcttcattgtaacttacataacaagccactcgcctatcttactgttgttcaaatgcaactgcgaaatcttcagttatctttccattggtctggctgtcctttggggttacttgtgtgcattttgcattctgaatgccgtgcatacagaaccatcaatatttcatcattgtggtggcacaccagcctatttgtttttttatcgcaccactaaaagtaatgtagagtgcactagcgagagtggcacttttctacatagttgataatattcactttcaaagcaaagagcactctgtaaattgtttaagtattgacaaaattttaggactgattaatgctagaaacatgatggtgtttccaacagtctgcattgatgcttactgtgggaatctacattagaagagtaatatggagatagaatcgctacgcaattgcagaatataatttttaaggcatatggattaatttataacctatggatgtgcttgatcatcgaaaattcatgagccttcaccttcacccctgaggtctgtgcttgctattggaatatggcaacatgcattgcaaaagtagtaagaaaaacagagctgctatacatcaatcaatgaaatttttagagaccacatggaatttctagcttgttaatgtgcttgaagattcttccaccttcatcttttgcttagcatgtgtcactagtgcctcacatcatacattcagcaaagctcaatgcctgttttgctggatgtgcttatatttctaagcggtgaatgtttttagatttctctcatattgattccagtttcaaggccacatgggacataagggagaagcaagcaaagagctgatagtgaaggtgccatgtgtgtttggaacagggtaggaactaatagtggagagtgatttttatttgatgtagcactaacatttaagggtcaactactacataagaaatactagtgttttatatagacagaccctcaattgccttctttaagtgtgaagaactcatatgcactcattttctccaaatatggttctcaatgcatcttgttttgcagcgcaggaagaaggatattgtccctctccaaaactataaacatgggttggttgagtaaaatatttaaaggtccagtaaatagagtttcaagaggacactacaacgggaactcccatgaaggctattcagctcagcacactaaatcatatggtgtgcatggcaatgaggacgaagacatggatcatgctattgcattatccttatcagaggaagatcaaaggaagggaaagaccattgataccgggcatcatttagatgaagatgaacagattgcacaggctctgcaagaaagtatgaatgatggtcctcttcgaatattcattcagataattgttcattaatttcacgttatgactgcaaagtcaaataagcaaccaaaatttcatttcatctcttattgccaactaaataatgcttatgcatgccttgaccgcatatgcaaattcagggactaaatatggagttctcaagttcagggccaaacatagcacaactttattagacagggtgttcctgtaatattaaatttgattctttaatacttaccaaagaattgtaaataacagttcttgtctaacaaatgagtactgctagtcagaaccatgaactttaatgctttgtcttataataatgaaccagatattggtcataacctagctgaagacgaacagcttgcacgggctctgcaagaaagtatgaatgatggacctcctcgtcagcacattccagttgaagatgttaactcagaaagtactccagcaagcatcttgccctcaaatattttccgcacaagtggcttgagggtttgtgctggatgcagaagtccaattggccgcggtcggtttctcagttgtatggactctgtttggcatcccgagtgcttcaggtgttatgcttgtgatagaccaatatcagagtatgagtttgctgttcatgaaaaccatgcctaccacaggccctgctacaaggagcgtttccatcctaaatgtgatgtttgcagtagctttattcccacagataaaaatggcctcattgaataccgggcccatcctttttggatgcagaagtattgtccttcccatgaaaatgatggtacacctaggtgctgcagttgtgaacgaatggagccaaaggacagtcaatacataacattagatgatggccggagactctgcttggagtgtctgcatactgctattatggagaccaatgaatgccagccactgtacattgatattcaagaattttatgagggtatgaacatgaaagtagagcaacaagttcccttgcttttggttgagcgacaagctttaaatgaagccatggaagcagagaaatctgtgcaccaccttcctgaaacaagaggcctctgcctatctgaggagcagattgtcagaactatattgaaaggaccaattggaccaggcaacagaatcatagatatggtcacaggaccatacaaactcattagacggtgtgaagtgactgcaattcttatactgtacgggctgccaaggctgctaactggctcgattctggctcatgagatgatgcatgcttacctccgacttaaaggataccgaaccctgagtccagaggttgaagaaggcatctgtcaggttctagctcatctttggcttgagtcagaaatcacatcaggttctggtagcatgtcaaccacctcagatgcgtcatcgtcatcttcaacatcttcatcatcgaaaaagggcgcaaagacggaatttgaaaaaagactcggggagttcttcaagtaccaaattgaaacagattcttctgtcgcttatggagatgggtttcgagcaggcatgcgagccattgagcggtacggcttgagaagcacccttgatcatatcaagatgacggggtcttttccatgctgaagctggtttttttttacctcggcttggatatgggtatacatattttttttggagaacttttggttcaggttatacatacgaaaagccgaacttctgtgtcgagaagaggcataaggatttagctatactgtccattgcaggaaaaaaaactgtttcccttttcaattataaaatttcacagtgcagacatgaaggtatgtggtctttagcttggccaaccttgtggaatgctgtcacttgatgcaaaagaaatttcgaatacatatgctttgctgtgcttgaaatgcaatggttggatgctatgct

SEQ ID NO: 8629 - DNA, 543 bp, Zea Mays
ccggtatggtgtcgacgctggagcagctgctcatcgcggctgccttcctggtggtggcggcggcggcgtcgacagtgcccgtgtctcctgctgcggcagcgacacggccgtaccacggcggcggctgctacagccatttcttcgcgttcggcgactcgctcatcgacacgggcaacttcatccgctactccacggcgagaccttcttccaccgccccaccggccgctggtccgacggccgcctcatcgttgacttcattgttgagcggctggggtacccgcgctggccgccgtacctggacgggaagagcaaggacgacttccggcacggcgctaacttcgcggtggccagcggcacggcgctcaaccagctgctgttcaagaagcacggcctcaacgtcaacggcatcacgccctactccctcggcgtgcagatcggctggttcaagaaggtgctcgccatgctcgcctccaacgagcacgagcgtcgggagatcatggcgagctcgctgttcctggtgggcgagatcggcgccaacgacta

SEQ ID NO: 8630 - DNA, 1830 bp, Zea Mays
actaacgacacgagtagtactgatcagggtcagggaccgtccgtagtttcagtcccgctcccgcagtctggttcgtcttctcttctccccacctgtctccacaattccccataggaggagggggaggtagagaagcgcgaatggagagcaggaacgtagtggtgtgcgacaatggtaccgggtatgtgaagtgtggctttgctggtgagaacttccctacatctgtgttcccttgtgttgtcggacgaccgctacttcgctatgaggagtcacttcaggaacaagaattgacggatattgttgttggagcagcttgtgctgacttgagacatcaacttgatgtatcatatcctgttaccaatggcattgttcaaaattgggatgacatgggccatatctgggatcatgccttctacagtgagctcaaggttgatccatctgagtgtaaaatcctactgacagatccaccactcaatcccgtgaaaaaccgagaaaaaatgatcgagacaatgttcgagaaatataactttgctggggtcttcatccagatccaagcagttctttcactgtatgctcaaggcttgctaactggacttgtgatagattctggtgatggtgttactcatgtggtgcctgtagttgatggatactcttatccacatctgacaaagagaatgaatgtagctggaaggcatataacatcttatcttgttgacctactctcaaggagagggtatgctatgaataaatctgctgactttgagactgtcagagaaataaaagagaagctatgttatataagttatgattacaaacgagaataccagctaggacttgagaccacaatccttgtgaaaagttacactcttccagatggaagagttattaaagtaggcactgaacgatttcaagctcctgaagctcttttcactcctgaactgatagatgttgaaggtgatgggatggcggatatggcattccgttgcattcaggaaatggatattgacaacaggatgacgctctatcaacatattgtcttaagtggaggaagtaccatgtaccctggtctgccaagtcggttggagaaagaaattcttgaccgttatcttgatgtagttttgaagggaaacaaagatggcctaaagaaattacggctgaggatagaggatcctcctcggagaaagcacatggtgtatctgggaggtgcagtgcttgctgggatcatgaaggatgcacctgagttctggataaccaggcaggagtaccaggaagaaggtgtagcgtgcctaaggaagtgcgggcagtcataagtcttgccacatatcatccacagaagaaatggaggttgcatgtgtaaagaagagctctgttgttggtgttgtgtattgtagtgagctatagctgtcctgaacatgcttggggataaaccatgtttgtattggcctactcaatttgacctctgttattgatcatcctttttagatatggaacatgacggccacctttatttgtattttttttggttgccccgattgattccacgaacctgattgacggagtctattaggtggtcccaaatcagaaatttggcactgtgctgtagaatcacaagttttaaactgtgtgtgcaacaggagaagtggaggatctgatttggtaaatatatatttacttcatctgatctgatggtgaagcctttggtgcaggtttagattgctccgacaggtttctttatcatggtatgcaccgcataaaaaaagaagtcagaaaattcatttgtggtaatatggccctctttaagaatcttgagcaacagtaggtagtcatggg

SEQ ID NO: 8631 - DNA, 633 bp, Zea Mays
gacggcgaagccaaaggcggtcagtcacagacagctccaatgccacattttgtgtttatgactccgatattgctactggctacggtgttggtgctttcctgtttcttctctcaggccactcactgctcatgggtgttacaagatgcatgtgcttcggtgcaccacttgcaccaggtggaagcagagcatggtccatcatatacttcgcatcgtcatggatcacatttgcagttgctgaggcctgcctaattgccggagcaacaaagaacgcataccacaccaagtatagggatatggtatatgctggtaactggacctgccaaactctgcgcaaaggagtgtttattgccggagcagtcttcgtggtgttcaccatgattttggacgtctacttctacatgtactattctaaggccactagccaagctacaaaaaggatcagtaagacaactcccagcgttggcatgactggctatgcgtgagccacctaatgaaagtcccggtctgattagaaaaataactatttcttttttttgtgtcgtttttgtaccactgcaactatttctatgtttgttctattttcagtaacactgcagtgagtgatttgggatatgacttagtttcagttaaata

SEQ ID NO: 8632 - DNA, 1949 bp, Zea Mays
aatcagcccgtggcccaaatttactcggacttcacctctcccaatcctcctccatctccttcttaaattccacttcttcgatttgatccccacccgtcgccgctcttttttttctgcttatttttttttctgagccgaccagaaagaccagaaactcgagtttgttggctcctgatccaaactattctaatcgcacgaaagaggctgcaaatattgaattttgagtttctttgggagtggtttagtggataaatcggggaaaccataggggaattcctgaccgaaagtggtggaaagtttagtttggtgatggaggaggagaagcagcagatggagccgccggcgccggcgctggtgcgggaagcgggagccgagccaagggcgccacgacaaacgcaacagcagccgaatacggcggtccaggaagcctgtggttgaaatgaagagtggcaccccagcaaagaagaagaagcactgtaattgcaaaaactcacaatgtttaaagctgtattgtgagtgttttgcagcaggtgattactgtgacggttgcaattgtaaacaatgtggaaacactgttgagaacgaaaagggtaggcaggaggctattaacaacacaaagctaagaaatccaaacgcctttcaacctaagattgaaaatggtccaattccttctagtgtttggaaggatgctggagcactaccttcacatccaaagcataataaaggttgtcactgcaagaagtcaggttgtctaaagaaatactgtgaatgttttcaagcgaatatcctttgctccaagaattgtaaatgtatggattgcaagaactatgaagggagtgaggagctacgtagtacaactcaaggggataattcatgtgatcgaaataacattcaacaagcagctaatgttgctctgaatggtgccattggatcttcagggtatagattttctccagtacgtagaaaaaggcccccagaagatccccactgtcagacattaaatgttgaaggaagtatgatgcagacacagtttcgagagacaaacaatgtggatgtttcccaaatgacctcatctactggacgtgatggttccactgtaaatttccagggtacatctaaactggtatataggtctccactagcaaatactatccatattactgatgtcaacgacctagccaaccatttggtgattgcatgcagaaaggcagcagagaggttcactacaatagttgataacaaagtggagatggaaatagataaggaaatttgcacaaatactgaccaaaagtttgatgagaacaagaaaggagtccagaaagctgcacttagtcaacttggcaaagtgactgatatagatcaacaaattgttgatgactccagattgcattgctctgatacccaagacgatgctagacctgcctctccaggaacacaagcgctgttgtgtgatgagcaggatctcacatttggtacagttcatagaagttcaattccagtagcaatgcatgatcaggtcatttcagagctacacgctgcacaagaaagtgcagtgttgaaggagttaagaaacaacctccggctaattatcgcacgtggaaaactaaatgcagaaggaaaatccgcatcagggacacggatggaattggatgctctaaggcatcatgaatcaagcaccagtttagccccagtacgagctgaagagaaatccaacactacagatggccctgaaataacacacgaactaaaatagatttagctcagtttggatttttcatgtcaagataagatatgtattgtaccatagccaatctctgtgtacatacggatagtatagtccttgttgctagaaaaggcaaccggcaatgtagcattaatcattcacgaggtgtaaagtaggaaacagatcacgtatttattttttttatcaataatgagttttaattgag

SEQ ID NO: 8633 - DNA, 2006 bp, Zea Mays
ccgaacctccggcgttggccatgagcttcttctcccccttcccacaccacctccctcccaaatcagcccgtggcccaaatttactcggacttcacctctcccaatcctcctccatctccttcttaaattccacttcttcgatttgatccccacccgtcgccgctcttttttttctgcttatttttttttctgagccgaccagaaagaccagaaactcgagtttgttggctcctgatccaaactattctaatcgcacgaaagaggctgcaaatattgaattttgagtttctttgggagtggtttagtggataaatcggggaaaccataggggaattcctgaccgaaagtggtggaaagtttagtttggtgatggaggaggagaagcagcagatggagccgccggcgccggcgctggtgcgggaagcgggagccgagccaagggcgccacgacaaacgcaacagcagccgaatacggcggtccaggaagcctgtggttgaaatgaagagtggcaccccagcaaagaagaagaagcactgtaattgcaaaaactcacaatgtttaaagctgtattgtgagtgttttgcagcaggtgattactgtgacggttgcaattgtaaacaatgtggaaacactgttgagaacgaaaagggtaggcaggaggctattaacaacacaaagctaagaaatccaaacgcctttcaacctaagattgaaaatggtccaattccttctagtgtttggaaggatgctggagcactaccttcacatccaaagcataataaaggttgtcactgcaagaagtcaggttgtctaaagaaatactgtgaatgttttcaagcgaatatcctttgctccaagaattgtaaatgtatggattgcaagaactatgaagggagtgaggagctacgtagtacaactcaaggggataattcatgtgatcgaaataacattcaacaagcagctaatgttgctctgaatggtgccattggatcttcagggtatagattttctccagtacgtagaaaaaggcccccagaagatccccactgtcagacattaaatgttgaaggaagtatgatgcagacacagtttcgagagacaaacaatgtggatgtttcccaaatgacctcatctactggacgtgatggttccactgtaaatttccagggtacatctaaactggtatataggtctccactagcaaatactatccatattactgatgtcaacgacctagccaaccatttggtgattgcatgcagaaaggcagcagagaggttcactacaatagttgataacaaagtggagatggaaatagataaggaaatttgcacaaatactgaccaaaagtttgatgagaacaagaaaggagtccagaaagctgcacttagtcaacttggcaaagtgactgatatagatcaacaaattgttgatgactccagattgcattgctctgatacccaagacgatgctagacctgcctctccaggaacacaagcgctgttgtgtgatgagcaggatctcacatttggtacagttcatagaagttcaattccagtagcaatgcatgatcaggtcatttcagagctacacgctgcacaagaaagtgcagtgttgaaggagttaagaaacaacctccggctaattatcgcacgtggaaaactaaatgaaggaaaatccgcatcagggacacggatggaattggatgctctaaggcatcatgaatcaagcaccagtttagccccagtacgagctgaagagaaatccaacactacagatggccctgaaataacacacgaactaaaatagatttagctcagtttggatttttcatgtcaagataagatatgtattgtaccatagccaatctctgtgtacatacggatagtatagtccttgttgctagaaaaggcaaccggcaatgtagcattaatcattcacgaggtgtaaagtaggaaacagatcacgtatttattttttttatcaataatgagttttaattgag

SEQ ID NO: 8634 - DNA, 2488 bp, Zea Mays
atggaccgcgcagacggaccgacgcaaccaggcaccatccagtgcatgcgcacccgcggcccagccatggacatggggtttgtcgagagccagccggagttgacggccgcgccggcggcgggacccggcacgggaagcaggctgccgggcgggggcggcgggcgcaagcggaagcacctctcctccatcgccaaccacgtgctccggcaatgttctctgacactggacaggagcgtggacgatttggtggcagacttcgagctgggcttaaagactgcagcagtggacagctactcaagaaaactggtcgagttctgcagtctccaggcgctgcagatcatcacgtcacgcgatataggggagaagatcagcgagggctcgctaggtcggttcaccttcgatatgatgctggcctgggagaccccgactccgtcggaccaacagatcaccatggagagcgtagcgaaggagagggaagataggaaggagacccttggagaaggtgaagctgtgatgggtgatgagacgtcactgttctattcagacatcatgcctcttcttgtgaatgaagagccaactgttggggaagaagcgtacgtgtggtttggatctgtgttccctttggcttgtgacgtggtcaatgctcgattcacattcgaagctctcactgccaccacagctaacaggctgcactaccctgcctatgacaggttcctgaaagagatggataagtatgctgcctgctccatgattgcaccaacaattcttcatctgtcggcactatcgttagatgtccttcaagttcttccaagacttgccaactccgactggagttgaattcgctgaggatgagttcattttgcacatggagggcacggcagggacacagagagtggtgaggcacattggaaccactagctggccaggtcgagtgactctgacgaacaaggcactgtattttgaggcttccggaaaattttcatacgaatctgcaatcaaggttgatctctcagacaccggagtagaacaccaaatcagcacggcgtcaacaggccctttcggcgtgcctttgttcgacaaggccatcgtgttcgagtcactaccagagcctgtggtcttggagttcccggagatgaccagctcgacaaggcgcaacacgtggctcgctctgatcagggaagtgctgtccatccaccgtttcatctcagcgtacagcatagtgtcccccgtccacagatgggaggtgcactccagaaccatactaggagtggtacgtctccacgccgcgagggagatgctacggatgtcgccgccgccggcttccagcttcctagtgttctcgctgtacggcgacatgcccaagggcgacttcgtgctcgagcagctggcgagcaacctgaagcggacctccaccatcacccggctgagcgcgtcctacgtgttcaagggtctgagcaggtcttcttctgtcccacctctgagcgcggaggtggccgccgaaggccgtggcgcggacgacgacgccagtggccgcgagcacgagcggcccctggcgtccctggaggacaagatcggccgggtgcgagatgaggccagggaagtcaccgccgccaacgccgccgttgaagggatgaaggacgaaggcatctcggatagtcttctcgtgctggtggggttggtcggtcccgtcggcaagctgcggcccgcgatccagcggataacctcgtgggagcggccgcttgtcactggcagcatccttgccgcagcttcgctgatcatatacaatgaatggttcagttacgtgctagctgcgtccctggtgctggccgccggcgtgatggtctgggcgaggcagaggaagataggggagctatgctcggaggtgatcatcgatgcctcttcgtcgtcgtcgtcggacaagacaacgatggatagcatagtggaggcgcagcgaagcctgcagaaagtgcacaggtacatcgtgaccgcgaacgttgccatcctcaggctgtggtcgattgcgctagcaaggtcgccaaagcacacagagacggtgatctggatgctggccgtgtccgcggcggtggtagccgtggtcccgttcaggtacattctgatcgggctggtggcggggagcttcgcgttgaacacgagggtcgcgagggccgtgatgaacccgcagggcggccggcggtggagggagtggtgggagtccatacccgccgtccccgttcggacggtgcacagttgacaaaagtatattttcctctactacgtgaaatgatcgcagaaggaacccgttatagaagcctgtttgttcaggaagaataatgaagtcaataagaaactgtttgttcgcttgtgtctcttttcacctcagccagcaatttcaccttgtaatgaacaccgccatgcacccctgtttaattagtttcattcactaaattttagtttctgtcgcatcaaatgtttggattttagtttaaaa

SEQ ID NO: 8635 - DNA, 2565 bp, Zea Mays
atgctgtccacgggaatagtcaccacaaacggttgcaagtggaaaccaaaaccttgttcgtggacggcgcatatgacttcacaagctcagacctcaagcactacaacatggttctccaatacaatcctgatgaatcaaacgtgctccgggttccacgcttaatgaatctggcctcaagtgcataccttcggttgaggggtaatgatactaatatgcggtttgtgtttgttaaagacatgcctagagatggtcatcctatgaaggctcctgacatgtcttttatagttgggaagatggtttttgtatggattataatgctccttttcccggtcatcctgagcagtttagtgtatgagaaacaacagaagctaagggcaatgatgaagatgcatggtttaggggatatggcatattggactatatcttattgctacttccttgtcatatcattactttatatgttcttgctggttgtatttggcgccgtcgttgatataaagttatttgcagtgaacagctacgtgctacaattcttactatattttatctacatgaacttgcaaatttcatttgcgttcctcatgacaacgtacttttctacttccgcaacagctaccgtaacaggatacctctatgttattgggtctggcctcataggagaatatctgttcaggccttttgtcgaagacacctccgtctcaagaagcctgattacgctgatggagttcttcccaccaatgtctctgtaccgcataatctacgagctctctccacctccatcgccgtcggggcctttctcggacttctccggcgtacgcgtgggagacctgagcgaccctgagaacgggatcttggtcctcatggtcgtgatggttcttgagtggcctacgtttcttttcctgacattgtatctggatggatttggctggctccaaactagagttagaaagctgccgccggcggcggcggcatcttctcatcagacccttcagaagccgtccaccacacggcctcaagaacgacccgaagcttcgattgaaatagacgggacgacagatatcccgggagaggtagcgcgtgcatgcgcagagagagagatagtcgacaggttcttgcagcaaccggaccagagctacgcagtcatagtcgacaacgtcaggaaagtgtaccctccgagagacggaaacgcagaggtggtcgcagtgaacggcttctcgctctccatcaaacgcgggcagtgtttcggactccttggctcaaacggcgccggaaaaacctctctcattggcatggtatggtatggtatggtaatgctgactgggttcactaaacctacatccggcacggcttatattgatgggatggacatacgaacagacatgagcgagatctacacgagaataggcgtttgtccgcaattcaacttgctatgggaaacactgaccggccgtgagcatctgatgttctatggcagactaaagagactgaacggcgctgcattaactgaggctgcagaacaatctatgaaagtactgaagatattcgagggcggtgtcgccgacacgctggtttcacagtacagcggtggcatgaaacgccgcctcagcgtcgctatctctctgatcggggaccctaaggtggtgtacttggacgagccaagcacagggttggatccagcgtcaaggagcgccttgtgggacgctgtgaagcttgccaagaaggacaaagccatcattctcacaacgcattccatggaggaggctgaggctctgtgcgaccggatcggaataaccgcgcatggacgtctccgctgcaccggaacctccaaagagctgaaggccaagtacggcggcacgttcgtgttcacggtgacgacggcggcggcgggcgaggacgaggcggtggagcggctggtccgcggctccatctcgcctgacgccaagcggacgtaccacatcgccgggacgcagaagttcgagctgcccaagcagggggtcaggatcgccgaggtcttccgcgccatggagcaggcgaagcgctcgctgagcatcgccgcctggggccttgtcgacaccacgctcgaggacgtcttcatcaaggttgctgcttgctaaggagagagagagaccgagagagtgcgcgcggaatgccctggatgcgtcgtagtcgtcgtagagccgggatcgccaccaaaagcgtgcagcgcttgcggatacgcccatacgcttctgcaacccaactgaagattgctcccccctctccgttagtaggatatactaacaactctacaatcactatcggaatttggctctttgccgagtgccaaattctttgccgagtgttttttttcgggtactcggcaaagagctctttgccgagtaccacgtaaaaaacactcggtaaaagaaaacactcgtcgaataagctctttgccgagtgccacgtaaaaacactcggtaaaagaaaacactcgtcgaataagctctttaccgagtgtttttttgacactcgacaaaaagctctttgccaagtgtcagaaattgagaaatacaacactcggcaaag

SEQ ID NO: 8636 - DNA, 4000 bp, Zea Mays
cagcgtgcgcgtggcggctggcgagcaggagcatccgccgcgtgtttgatttccacgcgcgcgagctagctctgacagtagacgttgcagttgcagaagaaccccgccaaagacgcccaaccttctacagcgccaatggatccattttgatgcatcgagcctgtgctgtgctgtgctgcactgctgcgctgccagatctgaccttgttcgggcggtatctctgatctctctctaagctaggtcgctagctccttgcatcgatcatggcagcggcggccttccaatcccaggcggatgcgctgttcaggaaaaatctcgcgatccagaggcgcgcttacaagacgaactgctgcctgatcctgttcccggtgctcgtctgcggcctgctcggcggcctgcagacgttcatggacacgctgttcaacacggacgacggctacaagcccgactgcaagggctgcgccggcggcggcgtgcgcgtgcgcctcagcgaggacgccgtcgggggcctcgcgtgctcccagagctgcccgctgccggcggcccagcgatggcccgtcgcgctgctgcttcccgccggcggggcggtggacgtcctccctgacctctccgccctggctgggactgggatgaaggaaccgccgccgtgcgtcagccccgagtcgtgcacggcgccagccaaattcctcgtcaccggcggcaacaagtcattcgcagaaagtctcgcggccaacatgttcccgccacacgcatcgccgaagctgacggctgacatttccggcttggctgattatgcgctggcaatagagggatcaagttttggtactaatacttatggcgccgccttcgatatggcgggcctttattttcttcagagaaaatgcactccgaactcaatactttctttcccagttcagtacggtccaaaaatgggcatccaagaagcaagatgtactcaaggattgtttgaatggcgagagaattcagtatccatgaacaatgaactgtatagaggcttcagagctgacaaaaccaaagaaaggatagagaacaagaacgacattgtttcaggatgttgcaactgggggtatcgatacaaatgcagtaatctttgatcggtcatctggtcaaatcttgtgcacgcttactggtcactcaaagaaggatcttggaaatcagaaagtcttgctctcaggcatcaatctcgatgaggatgcaaaaccaagaggggacaactgtgaacagtggtcattgttcgtcggcactgctcaagcatcattgacgttggcgctggcctcctctgtacaaggccaggggtgtactgaccccaaggccggtgctgttgaccccaaggccgagaacaaggctatagagaagataaaatctgccaggaataaatcatcgcaaggaagcatatatgttgcaaattttaaggcggttatgttgctgttttgcactttgcccgcatatgacttcacaagctcagacctcaagcactacaacatggttctccaatacaatcctgatgaatcaaacgtgctccgggttccacgcttaatgaatctggcctcaagtgcataccttcggttgaggggtaatgatactaatatgcggtttgtgtttgttaaagacatgcctagagatggtcatcctatgaaggctcctgacatgtcttttatagttgggaagatggtttttgtatggattataatgctccttttcccggtcatcctgagcagtttagtgtatgagaaacaacagaagctaagggcaatgatgaagatgcatggtttaggggatatggcatattggactatatcttattgctacttccttgtcatatcattactttatatgttcttgctggttgtatttggcgccgtcgttgatataaagttatttgcagtgaacagctacgtgctacaattcttactatattttatctacatgaacttgcaaatttcatttgcgttcctcatgacaacgtacttttctacttccgcaacagctaccgaaaagatggctgcaggaacattctatctacctcgtgcagtaacaggatacctctatgttattgggtctggcctcataggagaatatctgttcaggccttttgtcgaagacacctccgtctcaagaagcctgattacgctgatggagttcttcccaccaatgtctctgtaccgcataatctacgagctctctccacctccatcgccgtcggggcctttctcggacttctccggcgtacgcgtgggagacctgagcgaccctgagaacgggatcttggtcctcatggtcgtgatggttcttgagtggcctacgtttcttttcctgacattgtatctggatggatttggctggctccaaactagagttagaaagctgccgccggcggcggcggcatcttctcatcagacccttcagaagccgtccaccacacggcctcaagaacgacccgaagcttcgattgaaatagacgggacgacagatatcccgggagaggtagcgcgtgcatgcgcagagagagagatagtcgacaggttcttgcagcaaccggaccagagctacgcagtcatagtcgacaacgtcaggaaagtgtaccctccgagagacggaaacgcagaggtggtcgcagtgaacggcttctcgctctccatcaaacgcgggcagtgtttcggactccttggctcaaacggcgccggaaaaacctctctcattggcatggtatggtatggtatggtaatgctgactgggttcactaaacctacatccggcacggcttatattgatgggatggacatacgaacagacatgagcgagatctacacgagaataggcgtttgtccgcaattcaacttgctatgggaaacactgaccggccgtgagcatctgatgttctatggcagactaaagagactgaacggcgctgcattaactgaggctgcagaacaatctatgaaagtactgaagatattcgagggcggtgtcgccgacacgctggtttcacagtacagcggtggcatgaaacgccgcctcagcgtcgctatctctctgatcggggaccctaaggtggtgtacttggacgagccaagcacagggttggatccagcgtcaaggagcgccttgtgggacgctgtgaagcttgccaagaaggacaaagccatcattctcacaacgcattccatggaggaggctgaggctctgtgcgaccggatcggaataaccgcgcatggacgtctccgctgcaccggaacctccaaagagctgaaggccaagtacggcggcacgttcgtgttcacggtgacgacggcggcggcgggcgaggacgaggcggtggagcggctggtccgcggctccatctcgcctgacgccaagcggacgtaccacatcgccgggacgcagaagttcgagctgcccaagcagggggtcaggatcgccgaggtcttccgcgccatggagcaggcgaagcgctcgctgagcatcgccgcctggggccttgtcgacaccacgctcgaggacgtcttcatcaaggttgctgcttgctaaggagagagagagaccgagagagtgcgcgcggaatgccctggatgcgtcgtagtcgtcgtagagccgggatcgccaccaaaagcgtgcagcgcttgcggatacgcccatacgcttctgcaacccaactgaagattgctcccccctctccgttagtaggatatactaacaactctacaatcactatcggaatttggctctttgccgagtgccaaattctttgccgagtgttttttttcgggtactcggcaaagagctctttgccgagtaccacgtaaaaaacactcggtaaaagaaaacactcgtcgaataagctctttgccgagtgccacgtaaaaacactcggtaaaagaaaacactcgtcgaataagctctttaccgagtgtttttttgacactcgacaaaaagctctttgccaagtgtcagaaattgagaaatacaacactcggcaaag

SEQ ID NO: 8637 - DNA, 3886 bp, Zea Mays
gtccataacagcttctgcattgccatcaaccatagaatgagaaagaccgtcttcctcatcaactacgcgccgacgcgcggacgctcccgtccccatcgcgacccgtgcgccgggtccacgctgaaccctttcaccggggcggcgaaagatatcagccgcgacgccgacgggctcgagcgccggtgagcgctcgcgcacccgggccaataaactggcaccggctcctcctctcgcgtcgcagagcctagcctcgggatgacgtggcgtaccacaacaccaccacacctcactcagccctgcgggtctccgaccaaccatttctagaagcctccaaaccctagcgcaggaggaagaggagttaggaggagctccagggatggcgaaggcgaggaagcagaagggtgacggtgccagtacgggaggaggcgccaccgtgctccaccagaagctctgcctctccatcgacatggagaaccagctgatctacgggtacactgagataaaagttctagctgaaaacaacagatttgctctacatgctgacaatatgacgattcagagcatttgatggatggtgcaactgttgagtttgactattcccctcattggaaaaatgaaagtgatcaaccgaattggtcttcagtatcatgtttgaagactgctgctgatgctgcatgttcaatgtatactttgtctctaaatcgagaagctacaccaaatcttattgtgtcatctgagagatcagtcaagtcaatgactgaacagcagttagatgaaaacagtgaaaagcatgaagaaaatagtggaaggcttgaagaacatggtggaaatcctgttcaaacttcctatgatcaaattgttaatggctgcagtggaagagggaatagaaaattctgcagtggaagaaggaaaggaaaaggaaaatgataaggaaaaagaagaggaaaatggaaatgagaagagcaaggaaactggaaatgagactgaatatgaaaaggtgaagaacataaaactggttcacatagattatattttggagaaggctgaaactggcgttcagttcgttggcaatgtcatgcgtagcagtagtcagacaaggcgggcacactgttggtttccttgtgttgatagtgccacagaacgctgtccatttgacctagaatttacagttagcatggatttcattgctgtcagcaatggtgacttgctttaccagctgttatgaagactatctttctgcaccatttcccttaggtttatacaatcacatttttcttccatctgaaatgacaatattaccagcaagcttaggagcctccacatgcatcctcagttctgatatcttgcatgatgagaaagttatatagatcagataattggcacaagaacgaaactggcttatgcccttgcaaagcaatggtttggaatatacacaagtgcagaggagtccagtgacgaatggcttttggatggtttggctggttttctaactgagttattatcaagcgttaccttgggaataacgaggcgcgttataggcgtttcaaggctaactgctcagtatgtgaatctgatgttagtggtgcaactgctttgagctctactgctgcttcaagtgatttatatggaactcaagcaatcggttcatatgggaaagttcgttcattgaaagctgtagctgttttcaaatgttggagaagcagatgggaccagactcatttcggaagattttgcaggtgatagtggctccaagtcgtgcataaaatctaggcatgagcttcctagcctctcttctcaagcaaattgatcggttcttgcaatttgacaactttatgcctggttataatggggtcttgactgtcagctgcattcgtacccttgtacgaatagcaaagaaggtgccatcttttgtatgccttgatcacatttttgaattggttgcccctttccgcaacatggacaaaccatggaaagttcgaattgaagctagcaggattcttattgatcttgagttacaccataaaggactcgatgcagctcttttgttgttcttgaaatatgtggacgaagaaaagtctttgcgaggttggattgctagagtactttttgatggttttgtatgctttgctatcttttgacatggaagctgttgaaggagcgacaaagttggctgttcatgtcttgcgtatatgtcaaacaagtattgttcctcacgccaatgatcaaataaattttggcaactctagttaggggtggtaacgggccatttaatttagcctagcaaatttacggatcgaatcaagttagggccggatcataaaacaatacaattttgaactaacaaaattaagggctttgttggtttgtgaagcaagtattagggtcatgatccattaccacccctaactctagttggtcttcttcatctgcttgctggcacaaaggcatacaataacatatttcttcgtcatcaagtgttctgcatattgcaagttgctgctggaaggtccccaacgttatttggtgttccaaaggtcctcacaccccctctggtggtcaactacatcttcagtgatcaacacactaaagatgattcctcaattcctcaaccatcatagtctcaggaaccttccactagcactcctagtgtccgggaggtcttaccgacctctggacccactcaagatgctgataattatcttactgcagtgaaagaaggaatgtggtcaaaattagggtgaagcttactgcatcttccagtaaagcatctgatgctgaccatagaggccattctgatggcgcaagaaatgaaaatgaaccgggtcaatgcagctcaatgtcaatggatgcccccatggctggagcagcaaatgaaccattaaatgtaagcaatcataacattgaggaacaaaactcatgtcacgaccttggatcaaggatgtcggcaagtgttagcaatgctaaactaatggacagacatgatatttccaaggagctacagtgcactgctgattccaggctggatactgttcccaaggatcagttctctcctgccattaatccgccggaagttttagacaaacctggcagtcagcttgaaggtgtctccaactatgatgtaaaccaagctccagagactgaacggagtggaaacagaagagagagaaaaaaacaagaaagataaaaagctgaaacgtgacgaaaaactagataaaaaaatatgacccagagtatctagagaaaagctccttaataagaaggaaaagaaagagttggccagaaagcagctagaaggtgaagagctacccctgaacagcggagagcagtgaacccttcaggttcacaggaagttttgccttcaaggccaccagctccagttctaagtgttgaaacacctgttcgaatctctgaaccccaggtatcaagcaaggaaacagctgtagatactgcacgtgcagcagccaaaccaaggataaagatcagagtcaagcccttggtaagaaaatctgaagggaattaaaaaagattgtagaattgtggccagtctgccatcatttgtaaggattactgtacagcaggaaaaatgcgggtttagttattttgtgaatggctgatgtatcctgtaaaaaaacattgctctgctctagtaatttctggggtaatcgaaatctgagttctagggtagtccatattttctgctgcagttgctttagtatctcagcgcttattatctcacaggttttaagtgtttgttcgatttgctgggcctaaaactaaaactgaaggatcgctgtgctcaatttgtagctgttgatgcattcatttcagatttgaggaggcttgacggaattaactgctgagcttgctcaaacatttttatgacgct

SEQ ID NO: 8638 - DNA, 4012 bp, Zea Mays
gccagcctaagtccataacagcttctgcattgccatcaaccatagaatgagaaagaccgtcttcctcatcaactacgcgccgacgcgcggacgctcccgtccccatcgcgacccgtgcgccgggtccacgctgaaccctttcaccggggcggcgaaagatatcagccgcgacgccgacgggctcgagcgccggtgagcgctcgcgcacccgggccaataaactggcaccggctcctcctctcgcgtcgcagagcctagcctcgggatgacgtggcgtaccacaacaccaccacacctcactcagccctgcgggtctccgaccaaccatttctagaagcctccaaaccctagcgcaggaggaagaggagttaggaggagctccagggatggcgaaggcgaggaagcagaagggtgacggtgccagtacgggaggaggcgccaccgtgctccaccagaagctctgcctctccatcgacatggagaaccagctgatctacgggtacactgagataaaagttctagctgaaaacaacagatttgctctacatgctgacaatatgacgattcagagcatttgatggatggtgcaactgttgagtttgactattcccctcattggaaaaatgaaagtgatcaaccgaattggtcttcagtatcatgtttgaagactgctgctgatgctgcatgttcaatgtatactttgtctctaaatcgagaagctacaccaaatcttattgtgtcatctgagagatcagtcaagtcaatgactgaacagcagttagatgaaaacagtgaaaagcatgaagaaaatagtggaaggcttgaagaacatggtggaaatcctgttcaaacttcctatgatcaaattgttaatggctgcagtggaagagggaatagaaaattctgcagtggaagaaggaaaggaaaaggaaaatgataaggaaaaagaagaggaaaatggaaatgagaagagcaaggaaactggaaatgagactgaatatgaaaaggtgaagaacataaaactggttcacatagattatattttggagaaggctgaaactggcgttcagttcgttggcaatgtcatgcgtagcagtagtcagacaaggcgggcacactgttggtttccttgtgttgatagtgccacagaacgctgtccatttgacctagaatttacagttagcatggatttcattgctgtcagcaatggtgacttgctttaccaggtctctagtaaggaagatccttcaaaaaaacttatgtgtataaattgaacactccagttagtccacagtggatatccttggttgttggcccacttgaagttcttcctgacagaatcacagaaatgacataaatgtctcacacatatgtttattccctgctttggcaaagcttcagaacactattgcatttttccacaatgcatacagctgttatgaagactatctttctgcaccatttcccttaggtttatacaatcacatttttcttccatctgaaatgacaatattaccagcaagcttaggagcctccacatgcatcctcagttctgatatcttgcatgatgagaaagttatatagatcagataattggcacaagaacgaaactggcttatgcccttgcaaagcaatggtttggaatatacacaagtgcagaggagtccagtgacggctaactgctcagtatgtgaatctgatgttagtggtgcaactgctttgagctctactgctgcttcaagtgatttatatggaactcaagcaatcggttcatatgggaaagttcgttcattgaaagctgtagctgttttcaaatgttggagaagcagatgggaccagactcatttcggaagattttgcaggtgatagtggctccaagtcgtgcataaaatctaggcatgagcttcctagcctctcttctcaagcaaattgatcggttcttgcaatttgacaactttatgcctggttataatggggtcttgactgtcagctgcattcgtacccttgtacgaatagcaaagaaggtgccatcttttgtatgccttgatcacatttttgaattggttgcccctttccgcaacatggacaaaccatggaaagttcgaattgaagctagcaggattcttattgatcttgagttacaccataaaggactcgatgcagctcttttgttgttcttgaaatatgtggacgaagaaaagtctttgcgaggttggattgctagagtactttttgatggttttgtatgctttgctatcttttgacatggaagctgttgaaggagcgacaaagttggctgttcatgtcttgcgtatatgtcaaacaagtattgttcctcacgccaatgatcaaataaattttggcaactctagttaggggtggtaacgggccatttaatttagcctagcaaatttacggatcgaatcaagttagggccggatcataaaacaatacaattttgaactaacaaaattaagggctttgttggtttgtgaagcaagtattagggtcatgatccattaccacccctaactctagttggtcttcttcatctgcttgctggcacaaaggcatacaataacatatttcttcgtcatcaagtgttctgcatattgcaagttgctgctggaaggtccccaacgttatttggtgttccaaaggtcctcacaccccctctggtggtcaactacatcttcagtgatcaacacactaaagatgattcctcaattcctcaaccatcatagtctcaggaaccttccactagcactcctagtgtccgggaggtcttaccgacctctggacccactcaagatgctgataattatcttactgcagtgaaagaaggaatgtggtcaaaattagggtgaagcttactgcatcttccagtaaagcatctgatgctgaccatagaggccattctgatggcgcaagaaatgaaaatgaaccgggtcaatgcagctcaatgtcaatggatgcccccatggctggagcagcaaatgaaccattaaatgtaagcaatcataacattgaggaacaaaactcatgtcacgaccttggatcaaggatgtcggcaagtgttagcaatgctaaactaatggacagacatgatatttccaaggagctacagtgcactgctgattccaggctggatactgttcccaaggatcagttctctcctgccattaatccgccggaagttttagacaaacctggcagtcagcttgaaggtgtctccaactatgatgtaaaccaagctccagagactgaacggagtggaaacagaagagagagaaaaaaacaagaaagataaaaagctgaaacgtgacgaaaaactagataaaaaaatatgacccagagtatctagagaaaagctccttaataagaaggaaaagaaagagttggccagaaagcagctagaaggtgaagagctacccctgaacagcggagagcagtgaacccttcaggttcacaggaagttttgccttcaaggccaccagctccagttctaagtgttgaaacacctgttcgaatctctgaaccccaggtatcaagcaaggaaacagctgtagatactgcacgtgcagcagccaaaccaaggataaagatcagagtcaagcccttggtaagaaaatctgaagggaattaaaaaagattgtagaattgtggccagtctgccatcatttgtaaggattactgtacagcaggaaaaatgcgggtttagttattttgtgaatggctgatgtatcctgtaaaaaaacattgctctgctctagtaatttctggggtaatcgaaatctgagttctagggtagtccatattttctgctgcagttgctttagtatctcagcgcttattatctcacaggttttaagtgtttgttcgatttgctgggcctaaaactaaaactgaaggatcgctgtgctcaatttgtagctgttgatgcattcatttcagatttgaggaggcttgacggaattaactgctgagcttgctcaaacatttttatgacgct

SEQ ID NO: 8639 - DNA, 4266 bp, Zea Mays
cgcggacgctcccgtccccatcgcgacccgtgcgccgggtccacgctgaaccctttcaccggggcggcgaaagatatcagccgcgacgccgacgggctcgagcgccggtgagcgctcgcgcacccgggccaataaactggcaccggctcctcctctcgcgtcgcagagcctagcctcgggatgacgtggcgtaccacaacaccaccacacctcactcagccctgcgggtctccgaccaaccatttctagaagcctccaaaccctagcgcaggaggaagaggagttaggaggagctccagggatggcgaaggcgaggaagcagaagggtgacggtgccagtacgggaggaggcgccaccgtgctccaccagaagctctgcctctccatcgacatggagaaccagctgatctacgggtacactgagataaaagttctagctgaaaacaacagatttgctctacatgctgacaatatgacgattcagagcatttgatggatggtgcaactgttgagtttgactattcccctcattggaaaaatgaaagtgatcaaccgaattggtcttcagtatcatgtttgaagactgctgctgatgctgcatgttcaatgtatactttgtctctaaatcgagaagctacaccaaatcttattgtgtcatctgagagatcagtcaagtcaatgactgaacagcagttagatgaaaacagtgaaaagcatgaagaaaatagtggaaggcttgaagaacatggtggaaatcctgttcaaacttcctatgatcaaattgttaatggctgcagtggaagagggaatagaaaattctgcagtggaagaaggaaaggaaaaggaaaatgataaggaaaaagaagaggaaaatggaaatgagaagagcaaggaaactggaaatgagactgaatatgaaaaggtgaagaacataaaactggttcacatagattatattttggagaaggctgaaactggcgttcagttcgttggcaatgtcatgcgtagcagtagtcagacaaggcgggcacactgttggtttccttgtgttgatagtgccacagaacgctgtccatttgacctagaatttacagttagcatggatttcattgctgtcagcaatggtgacttgctttaccaggtctctagtaaggaagatccttcaaaaaaacttatgtgtataaattgaacactccagttagtccacagtggatatccttggttgttggcccacttgaagttcttcctgacagaatcacagaaatgacataaatgtctcacacatatgtttattccctgctttggcaaagcttcagaacactattgcatttttccacaatgcatacagctgttatgaagactatctttctgcaccatttcccttaggtttatacaatcacatttttcttccatctgaaatgacaatattaccagcaagcttaggagcctccacatgcatcctcagttctgatatcttgcatgatgagaaagttatatagatcaggtgcgtttgtttctcttattttactaccctgtcccctctgatctagaccaatgatttgacaccatactttttaatgagatccgaatgcgtggctgctatagcatgtgcttatcaattgtgcttattctttattaaactatttttcatatcagctgttgttttgaagccctcctttcactgagagcatttagtgtcagtaagcaatccatgaatgcataatttctgctccagtatttgtgttttaactaagttagattctggtttagatgcctatatgacactacattcttgttaagttgatcatttaattagtttggtacctccagcaaatactgtaaatatgtttatggaatatgttaaatacttctgtatgtttgcttgccttatattttgtattttttctgtatagggctttgtaaacctgtcatcctttggataggagtgcatgaaaatctgcaatccatgtgtctgaatcatgacctgctattacttttactttatcttcctaagcattaaccttgcttctttgtatccccttaactggtggcttgataacactttgtattatgcattaaccttgcttctttgtatccccttaattagtggctcttggtaatgctttgtacacctgcattacattatagtcaagtattatgtttcataccttgcagtctgcactaacttgtaaaatagttcagataattggcacaagaacgaaactggcttatgcccttgcaaagcaatggtttggaatatacacaagtgcagaggagtccagtgacggctaactgctcagtatgtgaatctgatgttagtggtgcaactgctttgagctctactgctgcttcaagtgatttatatggaactcaagcaatcggttcatatgggaaagttcgttcattgaaagctgtagctgttttcaaatgttggagaagcagatgggaccagactcatttcggaagattttgcaggtgatagtggctccaagtcgtgcataaaatctaggcatgagcttcctagcctctcttctcaagcaaattgatcggttcttgcaatttgacaactttatgcctggttataatggggtcttgactgtcagctgcattcgtacccttgtacgaatagcaaagaaggtgccatcttttgtatgccttgatcacatttttgaattggttgcccctttccgcaacatggacaaaccatggaaagttcgaattgaagctagcaggattcttattgatcttgagttacaccataaaggactcgatgcagctcttttgttgttcttgaaatatgtggacgaagaaaagtctttgcgaggcatacaataacatatttcttcgtcatcaagtgttctgcatattgcaagttgctgctggaaggtccccaacgttatttggtgttccaaaggtcctcacaccccctctggtggtcaactacatcttcagtgatcaacacactaaagatgattcctcaattcctcaaccatcatagtctcaggaaccttccactagcactcctagtgtccgggaggtcttaccgacctctggacccactcaagatgctgataattatcttactgcagtgaaagaaggaatgtggtcaaaattagggtgaagcttactgcatcttccagtaaagcatctgatgctgaccatagaggccattctgatggcgcaagaaatgaaaatgaaccgggtcaatgcagctcaatgtcaatggatgcccccatggctggagcagcaaatgaaccattaaatgtaagcaatcataacattgaggaacaaaactcatgtcacgaccttggatcaaggatgtcggcaagtgttagcaatgctaaactaatggacagacatgatatttccaaggagctacagtgcactgctgattccaggctggatactgttcccaaggatcagttctctcctgccattaatccgccggaagttttagacaaacctggcagtcagcttgaaggtgtctccaactatgatgtaaaccaagctccagagactgaacggagtggaaacagaagagagagaaaaaaacaagaaagataaaaagctgaaacgtgacgaaaaactagataaaaaaatatgacccagagtatctagagaaaagctccttaataagaaggaaaagaaagagttggccagaaagcagctagaaggtgaagagctacccctgaacagcggagagcagtgaacccttcaggttcacaggaagttttgccttcaaggccaccagctccagttctaagtgttgaaacacctgttcgaatctctgaaccccaggtatcaagcaaggaaacagctgtagatactgcacgtgcagcagccaaaccaaggataaagatcagagtcaagcccttggtaagaaaatctgaagggaattaaaaaagattgtagaattgtggccagtctgccatcatttgtaaggattactgtacagcaggaaaaatgcgggtttagttattttgtgaatggctgatgtatcctgtaaaaaaacattgctctgctctagtaatttctggggtaatcgaaatctgagttctagggtagtccatattttctgctgcagttgctttagtatctcagcgcttattatctcacaggttttaagtgtttgttcgatttgctgggcctaaaactaaaactgaaggatcgctgtgctcaatttgtagctgttgatgcattcatttcagatttgaggaggcttgacggaattaactgctgagcttgctcaaacatttttatgacgct

SEQ ID NO: 8640 - DNA, 4877 bp, Zea Mays
cttccttgttggagccagcctaagtccataacagcttctgcattgccatcaaccatagaatgagaaagaccgtcttcctcatcaactacgcgccgacgcgcggacgctcccgtccccatcgcgacccgtgcgccgggtccacgctgaaccctttcaccggggcggcgaaagatatcagccgcgacgccgacgggctcgagcgccggtgagcgctcgcgcacccgggccaataaactggcaccggctcctcctctcgcgtcgcagagcctagcctcgggatgacgtggcgtaccacaacaccaccacacctcactcagccctgcgggtctccgaccaaccatttctagaagcctccaaaccctagcgcaggaggaagaggagttaggaggagctccagggatggcgaaggcgaggaagcagaagggtgacggtgccagtacgggaggaggcgccaccgtgctccaccagaagctctgcctctccatcgacatggagaaccagctgatctacgggtacactgagataaaagttctagctgaaaacaacagatttgctctacatgctgacaatatgacgattcagagcatttgatggatggtgcaactgttgagtttgactattcccctcattggaaaaatgaaagtgatcaaccgaattggtcttcagtatcatgtttgaagactgctgctgatgctgcatgttcaatgtatactttgtctctaaatcgagaagctacaccaaatcttattgtgtcatctgagagatcagtcaagtcaatgactgaacagcagttagatgaaaacagtgaaaagcatgaagaaaatagtggaaggcttgaagaacatggtggaaatcctgttcaaacttcctatgatcaaattgttaatggctgcagtggaagagggaatagaaaattctgcagtggaagaaggaaaggaaaaggaaaatgataaggaaaaagaagaggaaaatggaaatgagaagagcaaggaaactggaaatgagactgaatatgaaaaggtgaagaacataaaactggttcacatagattatattttggagaaggctgaaactggcgttcagttcgttggcaatgtcatgcgtagcagtagtcagacaaggcgggcacactgttggtttccttgtgttgatagtgccacagaacgctgtccatttgacctagaatttacagttagcatggatttcattgctgtcagcaatggtgacttgctttaccagctgttatgaagactatctttctgcaccatttcccttaggccccgtttgtttcctttcatttcgaggaattggaatcttactaacagaataggctaattttttagaatatgacattccaccactttccaaagttatcatataagcctatctcaaattcatgaggtgagagatggaaattgattctatagatttacatgctaattttccgatgtacaacttatagcacactcttctacctgcacctctataacataaatatactatataactaactctctcatatgatttaggataatatacaaatatattatatgtataaatatataaacttaattagttttgtctaaattataattattaaaatggaattcaattccaacgaaacaaacgggcccttaggtttatacaatcacatttttcttccatctgaaatgacaatattaccagcaagcttaggagcctccacatgcatcctcagttctgatatcttgcatgatgagaaagttatatagatcaggtgcgtttgtttctcttattttactaccctgtcccctctgatctagaccaatgatttgacaccatactttttaatgagatccgaatgcgtggctgctatagcatgtgcttatcaattgtgcttattctttattaaactatttttcatatcagctgttgttttgaagccctcctttcactgagagcatttagtgtcagtaagcaatccatgaatgcataatttctgctccagtatttgtgttttaactaagttagattctggtttagatgcctatatgacactacattcttgttaagttgatcatttaattagtttggtacctccagcaaatactgtaaatatgtttatggaatatgttaaatacttctgtatgtttgcttgccttatattttgtattttttctgtatagggctttgtaaacctgtcatcctttggataggagtgcatgaaaatctgcaatccatgtgtctgaatcatgacctgctattacttttactttatcttcctaagcattaaccttgcttctttgtatccccttaactggtggcttgataacactttgtattatgcattaaccttgcttctttgtatccccttaattagtggctcttggtaatgctttgtacacctgcattacattatagtcaagtattatgtttcataccttgcagtctgcactaacttgtaaaatagttcagataattggcacaagaacgaaactggcttatgcccttgcaaagcaatggtttggaatatacacaagtgcagaggagtccagtgacggctaactgctcagtatgtgaatctgatgttagtggtgcaactgctttgagctctactgctgcttcaagtgatttatatggaactcaagcaatcggttcatatgggaaagttcgttcattgaaagctgtagctgttttcaaatgttggagaagcagatgggaccagactcatttcggaagattttgcaggtgatagtggctccaagtcgtgcataaaatctaggcatgagcttcctagcctctcttctcaagcaaattgatcggttcttgcaatttgacaactttatgcctggttataatggggtcttgactgtcagctgcattcgtacccttgtacgaatagcaaagaaggtgccatcttttgtatgccttgatcacatttttgaattggttgcccctttccgcaacatggacaaaccatggaaagttcgaattgaagctagcaggattcttattgatcttgagttacaccataaaggactcgatgcagctcttttgttgttcttgaaatatgtggacgaagaaaagtctttgcgaggttggattgctagagtactttttgatggttttgtatgctttgctatcttttgacatggaagctgttgaaggagcgacaaagttggctgttcatgtcttgcgtatatgtcaaacaagtattgttcctcacgccaatgatcaaataaattttggcaactctagttaggggtggtaacgggccatttaatttagcctagcaaatttacggatcgaatcaagttagggccggatcataaaacaatacaattttgaactaacaaaattaagggctttgttggtttgtgaagcaagtattagggtcatgatccattaccacccctaactctagttggtcttcttcatctgcttgctggcacaaaggcatacaataacatatttcttcgtcatcaagtgttctgcatattgcaagttgctgctggaaggtccccaacgttatttggtgttccaaaggtcctcacaccccctctggtggtcaactacatcttcagtgatcaacacactaaagatgattcctcaattcctcaaccatcatagtctcaggaaccttccactagcactcctagtgtccgggaggtcttaccgacctctggacccactcaagatgctgataattatcttactgcagtgaaagaaggaatgtggtcaaaattagggtgaagcttactgcatcttccagtaaagcatctgatgctgaccatagaggccattctgatggcgcaagaaatgaaaatgaaccgggtcaatgcagctcaatgtcaatggatgcccccatggctggagcagcaaatgaaccattaaatgtaagcaatcataacattgaggaacaaaactcatgtcacgaccttggatcaaggatgtcggcaagtgttagcaatgctaaactaatggacagacatgatatttccaaggagctacagtgcactgctgattccaggctggatactgttcccaaggatcagttctctcctgccattaatccgccggaagttttagacaaacctggcagtcagcttgaaggtgtctccaactatgatgtaaaccaagctccagagactgaacggagtggaaacagaagagagagaaaaaaacaagaaagataaaaagctgaaacgtgacgaaaaactagataaaaaaatatgacccagagtatctagagaaaagctccttaataagaaggaaaagaaagagttggccagaaagcagctagaaggtgaagagctacccctgaacagcggagagcagtgaacccttcaggttcacaggaagttttgccttcaaggccaccagctccagttctaagtgttgaaacacctgttcgaatctctgaaccccaggtatcaagcaaggaaacagctgtagatactgcacgtgcagcagccaaaccaaggataaagatcagagtcaagcccttggtaagaaaatctgaagggaattaaaaaagattgtagaattgtggccagtctgccatcatttgtaaggattactgtacagcaggaaaaatgcgggtttagttattttgtgaatggctgatgtatcctgtaaaaaaacattgctctgctctagtaatttctggggtaatcgaaatctgagttctagggtagtccatattttctgctgcagttgctttagtatctcagcgcttattatctcacaggttttaagtgtttgttcgatttgctgggcctaaaactaaaactgaaggatcgctgtgctcaatttgtagctgttgatgcattcatttcagatttgaggaggcttgacggaattaactgctgagcttgctcaaacatttttatgacgct

SEQ ID NO: 8641 - DNA, 1232 bp, Zea Mays
gcctgcgccgtttgtgttggcccgatggggaagtacatgaggaagcgcaagcgcaacgtggggaggacgacgccggccgcggagcacggcgtgaggacgcgtgcccaatccgacgccgtcgcgagcacagcttctgcggcggcggcggcggcgcccaagaggccgaggaagcagacgacggcggcagtgactgggaacaccagcggggcagcggcgccagggtcctgctacctgcacctgcggaccaggaggctgcagttcctgcccgggggtgagggcgaggtgcagcgtccggtgccgccgttgcctgcggcggcggcacagcggtcgtcgtctgtagcttccggggagccggtggagggtgccgggagctcgaggtgctccagcacggcgtcgtcttcggtggacgtcgtcgtcctggcggtggcaccggctagcgagaggggcggcggtgaagcggaggaggcacgcaacgacgacgacgactactgcggcgacgtcgagagcgtcgtcagcgactcggccgagtgctgccgccgcgacaggagggagacgacgccgtcgagccaggcacgggtagatcgtccctgcagcgacgaggagtgcagccaggccgcagacggcccaacgcgccaccgtcggcgacggaaggctttggcggccaccgcgacagccgcggtcgcttgcagagcgagggcgacgccaccggcagaagagatcgagcagttcttcgcggccgcggagaaggcccaggccgagcgcttcgcagccaagtaagtacaatttcgacgtcgcacgcgggctgccgctcggcgccggccggtacgaatggaccccggtagccagcggttggtgacgacgcacgtgcgcgtgcgcgccggccggaaagctagcggcggtggcgcagaagaatgagtagctaggaggaaggagacgccactgggaaagtgggacgagcgtacagacgataaaaggactgaaggagagcagagacagagcattttcacagcagtagctgtagctccccccctgttttgttcagaattctgctggtgagtgtaactcctgcttctgcacagccggcattcaatatgtccagtacagttccacatcagctgacgccgccacgacagttttaccacaccgtcaccttgtttttgctgacaacgcctcggtacctcgcagtctttttgttgctttcctaccaactctctgtctctcaagcaaacgaa

SEQ ID NO: 8642 - DNA, 1762 bp, Zea Mays
atttcaaagaggtagactagagttaaaatccaacagaaatcataagttaggtagatttgttcatcgatttacttttttttcgcggccgtgcattagcatgattttccttaagagaaataagaatgtagtacaaacatccccacggtcaaatgattacaacgaacctagcccctaaagaagaagaacagaggcaattacacaggaaaaacatgcgactaatcaacagaccagaggactaatcaatttacttgtaaattgtaatgtactgtaattcgacatgataccattcactctcctcaaaccatacctttcaactttactaccagaaattttttattaaaccctaaatcacttgcaagttgcagctactgaccaagtgacctataactagggtggtataaacttatgaactaaggtggatcatgtgacgatttagtggatgaatgtcttctgcaattgggtttggttaacaattcattcaacgaccacaaaaattaagtgttttagcagtagaacagaaagacagcatggcggtagcgaattaagcaagaaacaggacaattgacaacagcaagtcctaaatagagataataataactacaacactatttttcaatgaataaaatcctatagtggtgggctggtggcttccctgctgtatttcccgttaaaaaacgactacaactactaagagaaagcagcaagcgagtgggcactgaccgttgaggaggcggcgcttggaagctggacgaaggcgccaccggatccgggccgcgcacgcgttcaccacttccagcatctctttgtacggccccgccgccgctgccatctccgcagcgaaagaacttaaaccgatcacggaggcatttcccccgtcctatatggaaatcaacggctgagatggatcaaagaacgagaaaacctcaagctaaccgtccgatctcctcagctgtgaatggggacaggggagcggggaattgcggcttcaactgctgctgcgagcctacgacctccgaggaggcggagcaatgctgcaatggagttatccatcccttgctagaactgcggtcatggccctcgtcagccccaacctcaaggtgagcgattccctcagtcggatgcttctctgcgtggttggggtgcaacttcaatgccaatttactcatagactgccatttgtagcttgttcaattggtctaaacacacaaccttcacaaagaaccaaccataatgattgtcgtttgcttcatgtgcagggtacagaaaacctgatgcagtcgttagtatctttcagtgacttctctgtttcagtgtgtactgaagagaatagtctgataaagctacaggtccatgtatctggcacaataacagattccatcttcaagaaagttttcacaaagaatgttgccgccgcacaaccccttcctggttttcgacgaatgaaaggaggagggcctgactgcatcaaagaatctgagtgttcagcatagctacgaagaacttgaagcagcatttgagccagggaaagaattatgctttggcgcgacagttcgtttagactaagcttgccactaggattgatcaccagcctcctccaatattgtgatctcattagtagttgttaagaaatgtttgtcacatgaagcagaattgtgtaaaatatcatgaggcacgagcgtaatgtatttgtgtggcagtaacccataaacacgatgatgctctcgtttatacaatggatcaatacaagtgacgaagcaaaagc

SEQ ID NO: 8643 - DNA, 3976 bp, Zea Mays
gtttgcctcgtttttggacaaacagaaggaatgaaggatgctttaagatgaatcccttactactggttttattgctgctaaccaaggagcagtgatggcggcaaaccaaactttggagagtattcactccttcctggtttgatcagccagcttcttgactcaagcatctgattagttagtcttattcagttttggagtgccctgtcatctcgtgcacggtacgaactgctaagacttgataaacagacccttattgagcatgctcgcaagaatttgtactgttcaaggtgcaacgggctgcttttggaaagtttcacacaaataatgatgtatgggaagtcactgcatcatgaaggttcgtgtgagccaaggattcaggaagttgaagcagaagttcaggacccttcagttcatccttggggaggcctttcgacaacaaaggatggcatcctaactcttcttgattgcttcataaatgcaaaatcacttcatgagatccagaatgtatttgacaatgcacgtgctagagaacgtgaacgtgaaatgctttaccctgatgcatgtggtggcggtggcagaggatggattagtccagtgatgcctaactatggcaggggccatggaacacgagatacttgtgctttgcatactgcacatctttcttgtgacactctagtggatttttggtcggcactgggtgatgaaactagatcatcacttttaaggatgaaggaagaggacttcattgaaagactcatgcacaggttcgacagcaaaagattctgcagagactgcagaaggaatgttattcgtgaattcaaggaactcaaggaactaaagcgcatgcgaagggaacctcgctgcactagttggttttgtgttgcagataccacatttaactgtgaggtgtttgaggatgctattcttgttgattggcatcaatccttattggagcaagatggaatttaccatcatttcgagtgggctattggaacggatgaaggaaaatctgatattctaaactttgaaaatgtgggcatgattgggcaagtccacaggaaaggccttgatcttgatcagtttgaagactattttgttacactgagagcatgtaggctggatggccgccgtacagaattctgtgtgaaggcccatgccttgaagggccaatcttgtgttcaccggaggctaatcgtgggggatggatttgtgacaattacaaaaggtgaaagtattagaagtttctttgagcatgctgaagaagctgaggaagaggatgaagatgatgtagtggacagagacagcaatgaccctgatggtgatatcgctcatccacaaaagcatgctaagagccctgaacttgcaagagaatttcttctggatgctgctgcagtgatcttcaaagaacaggtcgagaaggctttcagagaaggtacagcgcggcaaaatgcacatagtgtttttgtgtcccttgctctaaaactgttagaagaacgagttcatgttgcttgcaaggaaataattacattggaaaaacagaccaagctacttgaggaagaagagaaagaaaaacgtgaagaagaagagcgcagggataggaggagaacaaaagaaagagaaaagaagaatagaagaaaagagaggctgaaaggaaaagacaaagataaagaaaaaatattggttcggtcaaaaaaaccaggtctttcaacattttctccgagcagccaagcagcaccaagtagtaatgagtctcaggatgttctagacttgagatattcagatagcgaagaggaagacaatgttgtggtcagggaacactatcctgattcttcagctgatcaatcttcaagcaaggatactgatgaacgaagcaatgagcatgaatgcagtgcaacagcagaatttgttccctcagattgtgatggctcattcttatgtgatgagtctaattcatcaagaaacttgagatttagatgggacttcccagaaaaagatgtcagttattggtatgaagattgtcgtgttgattctggagatactcaattgcagtctagggagaggatcagaaataacactagaagttacaacactgtatttaatacaaataaccgaacaagagacaagtacaacccctgcagctgtggccatcaagaagacttcagatatttttccacagcaactagatcaagtagggagacaaagatttccaggaaaacagtggctgagaaacccaggttgcaataccgcaggtgctatcctccagaaagcttcgctgtgtcaaatggacgtgttggtggtacaccaaacaagaacacaggtccaaagcaagtatgggagccaatggatgcaagaaagaagatagggaatgggagaggatcagaaataacaccagaaactactggtgctgctgatggttcagatcaagtggaatgctcaaaggacattagtgaatgtgagaagcttgaggtagtgtgtgaaacacttgctgaaacttgttgtgagatatctgcagaagcctgtaagtcagatcaaccatgtagacaaggtgagaaaaatcagtctgcttgcagcgatggatctaaatgcgtagataagccaaattgctgcttgacaaaggacactgttaggacaacaaatttaaccagttcagacagcttttcgtgtctaagtgagggagatagagacagcagcatgagtagcatgacctcactgagtgctcagaatgtagaatcttcatctacatctgattcagatgagtattcagacaggaacgatagcagcccaggcgatccaccagtgaagaatgtttctcgttcattacttgagatgtgtgcaggaaatggtttcagggagtaccaaccgaaaggcttgaaccctcctaatggcaaccaatttggatttatggtggcacctttacaggaccagatgttgcaccaacagaagatccatgcaccgccgtactcgtcaccatttgtggggttccacaatcaccccttggcagttccaacaaatgggtacttgccatatcctcagccaggtcacttctaccctggccttatgacccctgttggatgtggagtcgctggcagccaatgcgttgactttccaatgcagtacagcaataacattcatccttactcgggccccgaatttggttttctgcctgcaaaaccagttcacaagaccccagtgagcttccatgctgtgccagtgccaccactggccccgctgtgtagaagcgaggtgccagtggtgataaatcaagagaggcagcagggctctgcaccccctaaattcaaacaggcagtgctggtccctgagaacggctgttcagcagaagacaacaccttcaaacagaaaggtgatgacacagacagcacacccttctccttgttccagttcaacctgcctattgcccctcccaccctggcaacatccaaagaagagcaaagtggagcgatgccgtcaatggcactgccaccagctcagataactcgagcccagctgtgctccagggaggagaccaatgtcaaggagtacaaccttttctctgggtgtaacggagtgatgtttcagctcaactagaggcgaagaaaagtgagcagctattcaatatacatacatggtgaacgatttgtattctagtaaaacagaataaagtaggtcgaggtttttactgtgttgccctcgaatatttatttcttttttaattttgatttgttgtgcttcccctccctgtttttttgtgtgtatggaaaactgaaaagacagtgagtggtatagattctgcagttttgacacgagtctagtgtcactttttaccccccggatggttgtcatcttccaactaggctcgttcggtgtagctctgtcaattcattttggactgactgaatctgtagcagtttttactacagatacagtaccaagccgtttgttttaattaagggtcctagacatctccggttgctccccc

SEQ ID NO: 8644 - DNA, 6344 bp, Zea Mays
caggcgcatcgcgaaaaagctcgcaaaatcgcagcacactagcacagaaccttggacgcgaaggcgtcataccccgatgccggcgtcgtcgtcgccggcgatggcgtcgcagcatgcgccgccgaggcgggagctcgacctcgacgctttcctcccgtcctctccgacatcctccggggcctcggacgccgacccggccgacgatgaccaccgccgcgccgtcgacgacctgctccgcctcctctcctcctcagactcggactccgattccgaggagtctagccgcatcccaagcaccagcatccagacgctatcccgagtccaagccccggcgcctgtcgctgagccctcgccgtcgccttccccatccgcgtccccgtccccgaggagatccgcatcggccttgccgtcggagaccctctcctccctcgtcgcgagaaccttctcgagcaacggcgcttcctcgtcgtcgaagcccctcccctcgctcttccggggcgtccgccccagccccaaacccggcgccgcgcttgccgctgctgccgcagcgtcccgcgcggtcctcaccccacacgccgctgccatcaagtcgcgccgatcagtatcggcgcccgtggagaaagttctggaggaagaggggagtggctccgaaggctccaaggagttccttcccactgggagcttggaagcagaggtagaagagaagggtgattcggaagcggttgctgatgcgaccaagcaaactgcaggtgggaatgtgggtgcggaactgggagaggataaacaggcagaagtgggaggtgaagagaatgctgaggctataaagctggtggaggcaagtcctctggatgctctagctgcggaggattccagtgggcatgagcaaggtaatgatgccaatttggcggaaactgaccaagttgggaatcagattgaggctgtctatgaggaaaatgaggatgaccaaactggaggtgataatcatgttcaatcaggtcagggtatggatcttattgcgattgctttagaggaaagttctgatgatgaacatgaatttgaaagatctgacagtatcttgcaagaacaagtggaatctgggagcttaattgataaagtgattgaagatagggtagagcagctggaggccagcaggaaggctgagaacacagagaagaagctgaaggtgtcaatgaaaccgttggagtgggcagaggagcttgagaagaggcaggcctcgtctggtcaacattgggaggaaggagcagctgcgcagcccatgcaactagagggaatcggaaagggcccaccagctatcggttacatgcaaattgagatggacaatccagtaacccgtgtcatgtcctcaccgtcatttaggtcagaccatggctctccccaggtgctggctgttcataggagctatatagcaatgggcacatctaaaggtgctgtcatcgtcattccaagcaaatactccattcatcaagctgatgatacagatgcaaagatgctgttcttttggaaccaaggcgagaagactcaatcaccagtgactgccatgtgctttaaccagcaaggggaccttctgctagtaggatatggtgatggtcatatgacaatttgggatgtacagaaatctgcagcagcaaaagttatatatggcgagcatacagcaccagtagtgcatgcttgttttatccgccaatctaaagccatcactggggattcaaaaggggtagttctattgcacacattttccattatccccgtaattaatcgtttaactgtcaagggaactcagcgtctttttgatgggaatactggaattgtgctctcagcctgtcctcttgtaatggatgaatcttttggttttagtaattcatctgcccagggaaatcagacaacttcctccagtggtggtcttggcagcatgatgggtggtgttgttggaggcgtggttggagtagattctggatggaagtttttcaacgaaggctcttctccaatggaggatggtgttgtagtcatgtttattatgcatcaacatgctcttgtggttagactccgtaccaatattgaccatgttgaccatattgagaccttctctagaccagatggagcacgtgagggctccatcgcgtatgctgcgtggaaatatacatcatatttgaatgaatcgtcatcagtagatgaagaacgagtgtcatggctagcacttgcatgggaccgtcaagtgcaagttgcaaagtttgttaaatcaaagatatttaaacacaaagagtggaagcttgatagttcagctgttggtgttgcctggttagacgaccagatgttagttgtccttaatttgagagggcaactctgtttattctctaaagatggcagtgagcttcgcagaactacctttgttcctgatggccttctttttgatgacaccatattgcaccatgcacatttttttaacaggtttggtaacccagagaggcattttaacagttcagtagcggtaagaggtgctacagtgtatattcttgggccatcttttctcacggtttcccgacttcttccatggaaagagcgaattgaagcactaaagagggctggcgattggatgggtgcactagacatggcaatgaggctttatgatggtcagacacagggtgttgttgatctcccaagaacggttgattctattagagatgccataatgccttacttagtagagttgctgctatcatatataagttatgtttttgaatatatttcaattgcgctgccaaatcatactggaaaagggggagaatcaggtgttctaatagaggcagatcgatccctgcttacacaaagagatgagcagtacgctcgtgtaggaggggttgcagttgagtattgtgtccacattggacggaatgatatccttttcgatacagtcttctctaagtttgctgctgcagaaagtggaggtatgtttctggaggtgctagagccttatatattgaaggatatgcttggttctctgccccctgagattatgcaagcactagtggagcattatagtggcaaagggtggttgcaacgagttgaacaatgcatccttcacatggatatttcttcattggactttaatcaggtagtcagactttgtcgtgaacatgggctatatggtgcactaatttatttatttaaccaaggcctgaatgatttccgtacaccactagaggaacttctatcagtcgttcagaacaccaacagtaaagatgatgcttctagtggatacaggatgcttgtttatctgaaatattgctttcagggtttggcatttcctccagggcatggaataattccccaatcccggcttcattcagtgagggaagaactccttcaatttctgcttgaagaatctaagccactcacttctgaagtatttaagggtttcaatgcttcttgtggaaagtgcctaaacatatgctatctgctatggttggatactgaagctactttggaagtcatcaaatgtgcttttgtacaggataactttgagtctagagatgaacttccgagtactgtcaatacatctgcttcagataatgaagatggtattgatgctggaagaccagagggccaaaatgctatggtacaaaatgtggttgatgccatcattgacatagttggtttggaaaatgatgtgattcggtctgttatgggtagaactgaatcagaattatggccttcggagaaggattttggctatttaatggagtttgtgtccttttttgtttctcacaaaagggctaatgcatctaagagggttgttatgcacattcttacttatctcatttcgtcatatgatgacacaagaacaaggattcagaaagaaaaagaagttcttcaactcttcaatgcggttccccgaaacgattggaattcggattttgtcttgaacctttgttcagatgctcatttttatcaggcctgtggtttgatatttacagccaggaatcagaatttggctgctttagatagttacatgaaggataaagaggaacctttccatgcttttatcttcattgataagaagttactagaattggttgacgatgaagctttgtcgtttcataccacagtaatatctcgctttcctgagctagtcaagctaagcagggaatgtgcatttgtcttggcgattgatcatttctgtgataagatacagcaaatattagcagagcttcgttctgaccgacacagcctctttcttttcttgaaaactgctattgaagtacacttgtctggaaaacttgacttcagtaagcttgaattaagaaacaaacaaactgttgaactccagtactcttctactgaagttgaagcttatcagcagaggctatcaaatctctccaagttatgccacaatcctgtttacatcgacgacgagttagttgagctttatctggagttacagattggaacggtgcttgcatctttgcctagattatggagttacagatgctgctgctttcttgcaagagagggttggtgatgttgggagtgcccttgaccttattctggctggacttgatgagaaaattagcttatttatctcttctgtggaaagtactttctctggcgtcgcatcaaaaagtatcgctgaaattaagcaaccagacatcgttctagaaatgagtgaggctcatccagtgcttgatgcattgcatgcctccattggattgtgccaaaggaattcacagcgcttggacccagaggaatctcagtccctttggttccaactccttgactccttctcagagccattaaaaaaactgtatgggatcaaggatgtaaatggaaaaggtgtcaagtccaattggagtgaagcatcaatggaacatctgaaggaaaaaggactatctcaacaaatgaggatttcaactaaacaaaagtgcctaaatgttctgcgaaaagtattttcacaatgtgttggagaaataatagaggccatggctgggtatattcccctaccggcaatcatggcaaaactgttatctgataatgggaatcaagagttcggtgatttcaaacttgtgatacacagaatgttatctatgtatctttacgaaaaaagaatactggaaacggctaagtcagtaattgaggatgactcattttacaccttgagcttattaaagagaggagtttgtcatgggtttgccccacagactttcgtatgctgcatatgcaactgttcactttctaaagaaggtgctatttcagccgtacgtttgttcagttgcgggcatgcaacacatcttcagtgtgagtctgagcagaccaggtcatccaatcaggaatccaaagagggatgccctgtttgtctctcaatgagtgatacgcaagctcgaagcaaatcacctatgtttgagaatgggctaatgaagtattctggggctgaacatgaagtgtcacatggcatgtatcagattcatgaagttgatcatgctgagagatctcgtgggcttcaacagatgtcacggtatgaaatactgaataatcttcagaaagcgcagaagtcctttcatatagaaaccgtacctccattgaaacttgcaccgccagctatataccatgagaagatacagaagaggaccacttcggttggtgaaactagcaaacattctgttagaagtcagaaaccccagaaaatttggcaaatgaaggagaaaaaatcaaaagaggctgggagtcatcatccacaaaagtcaagttttctacgttaatagaagaaaagattgctgatttgttaagtatgaaaccagatccaaactgattgttaatttgcttcatgccatcaccacgatcgaatcttcaagactacaaatttgtcagcgtgatggagcctgcccatcagtacatagcttttttttttgtcttggggatgcatcctgttggtgagatcctcttcccctgcaccatggtcagaggttctgtggagccaaggtgctttgggctagggaggaaattgtaacagtaaattttcatacagttcatcgtgattagttttgtgtacagagcagagcatacacgtggtgacatggtccctgtagagggacacattcgcagtaaagtataacacaggagcactggctgagtggcatgtatccttgcagttcatcgcgattaatctctgtacagagctgttatactgtcggttttgatatcagttgcaattacacatctgctacagttttgtagtatcagatatcagaacacgtcgggcccgcagaacgcctggaagctcgtagttgtcggcgccgagcatcctgtcgccattgggttgcgctgtactgtac

SEQ ID NO: 8645 - DNA, 6346 bp, Zea Mays
caggcgcatcgcgaaaaagctcgcaaaatcgcagcacactagcacagaaccttggacgcgaaggcgtcataccccgatgccggcgtcgtcgtcgccggcgatggcgtcgcagcatgcgccgccgaggcgggagctcgacctcgacgctttcctcccgtcctctccgacatcctccggggcctcggacgccgacccggccgacgatgaccaccgccgcgccgtcgacgacctgctccgcctcctctcctcctcagactcggactccgattccgaggagtctagccgcatcccaagcaccagcatccagacgctatcccgagtccaagccccggcgcctgtcgctgagccctcgccgtcgccttccccatccgcgtccccgtccccgaggagatccgcatcggccttgccgtcggagaccctctcctccctcgtcgcgagaaccttctcgagcaacggcgcttcctcgtcgtcgaagcccctcccctcgctcttccggggcgtccgccccagccccaaacccggcgccgcgcttgccgctgctgccgcagcgtcccgcgcggtcctcaccccacacgccgctgccatcaagtcgcgccgatcagtatcggcgcccgtggagaaagttctggaggaagaggggagtggctccgaaggctccaaggagttccttcccactgggagcttggaagcagaggtagaagagaagggtgattcggaagcggttgctgatgcgaccaagcaaactgcaggtgggaatgtgggtgcggaactgggagaggataaacaggcagaagtgggaggtgaagagaatgctgaggctataaagctggtggaggcaagtcctctggatgctctagctgcggaggattccagtgggcatgagcaaggtaatgatgccaatttggcggaaactgaccaagttgggaatcagattgaggctgtctatgaggaaaatgaggatgaccaaactggaggtgataatcatgttcaatcaggtcagggtatggatcttattgcgattgctttagaggaaagttctgatgatgaacatgaatttgaaagatctgacagtatcttgcaagaacaagtggaatctgggagcttaattgataaagtgattgaagatagggtagagcagctggaggccagcaggaaggctgagaacacagagaagaagctgaaggtgtcaatgaaaccgttggagtgggcagaggagcttgagaagaggcaggcctcgtctggtcaacattgggaggaaggagcagctgcgcagcccatgcaactagagggaatcggaaagggcccaccagctatcggttacatgcaaattgagatggacaatccagtaacccgtgtcatgtcctcaccgtcatttaggtcagaccatggctctccccaggtgctggctgttcataggagctatatagcaatgggcacatctaaaggtgctgtcatcgtcattccaagcaaatactccattcatcaagctgatgatacagatgcaaagatgctgttcttttggaaccaaggcgagaagactcaatcaccagtgactgccatgtgctttaaccagcaaggggaccttctgctagtaggatatggtgatggtcatatgacaatttgggatgtacagaaatctgcagcagcaaaagttatatatggcgagcatacagcaccagtagtgcatgcttgttttatccgccaatctaaagccatcactggggattcaaaaggggtagttctattgcacacattttccattatccccgtaattaatcgtttaactgtcaagggaactcagcgtctttttgatgggaatactggaattgtgctctcagcctgtcctcttgtaatggatgaatcttttggttttagtaattcatctgcccagggaaatcagacaacttcctccagtggtggtcttggcagcatgatgggtggtgttgttggaggcgtggttggagtagattctggatggaagtttttcaacgaaggctcttctccaatggaggatggtgttgtagtcatgtttattatgcatcaacatgctcttgtggttagactccgtaccaatattgaccatgttgaccatattgagaccttctctagaccagatggagcacgtgagggctccatcgcgtatgctgcgtggaaatatacatcatatttgaatgaatcgtcatcagtagatgaagaacgagtgtcatggctagcacttgcatgggaccgtcaagtgcaagttgcaaagtttgttaaatcaaagatatttaaacacaaagagtggaagcttgatagttcagctgttggtgttgcctggttagacgaccaggtttggtaacccagagaggcattttaacagttcagtagcggtaagaggtgctacagtgtatattcttgggccatcttttctcacggtttcccgacttcttccatggaaagagcgaattgaagcactaaagagggctggcgattggatgggtgcactagacatggcaatgaggctttatgatggtcagacacagggtgttgttgatctcccaagaacggttgattctattagagatgccataatgccttacttagtagagttgctgctatcatatataagttatgtttttgaatatatttcaattgcgctgccaaatcatactggaaaagggggagaatcaggtgttctaatagaggcagatcgatccctgcttacacaaagagatgagcagtacgctcgtgtaggaggggttgcagttgagtattgtgtccacattggacggaatgatatccttttcgatacagtcttctctaagtttgctgctgcagaaagtggaggtatgtttctggaggtgctagagccttatatattgaaggatatgcttggttctctgccccctgagattatgcaagcactagtggagcattatagtggcaaagggtggttgcaacgagttgaacaatgcatccttcacatggatatttcttcattggactttaatcaggtagtcagactttgtcgtgaacatgggctatatggtgcactaatttatttatttaaccaaggcctgaatgatttccgtacaccactagaggaacttctatcagtcgttcagaacaccaacagtaaagatgatgcttctagtggatacaggatgcttgtttatctgaaatattgctttcagggtttggcatttcctccagggcatggaataattccccaatcccggcttcattcagtgagggaagaactccttcaatttctgcttgaagaatctaagccactcacttctgaagtatttaagggtttcaatgcttcttgtggaaagtgcctaaacatatgctatctgctatggttggatactgaagctactttggaagtcatcaaatgtgcttttgtacaggataactttgagtctagagatgaacttccgagtactgtcaatacatctgcttcagataatgaagatggtattgatgctggaagaccagagggccaaaatgctatggtacaaaatgtggttgatgccatcattgacatagttggtttggaaaatgatgtgattcggtctgttatgggtagaactgaatcagaattatggccttcggagaaggattttggctatttaatggagtttgtgtccttttttgtttctcacaaaagggctaatgcatctaagagggttgttatgcacattcttacttatctcatttcgtcatatgatgacacaagaacaaggattcagaaagaaaaagaagttcttcaactcttcaatgcggttccccgaaacgattggaattcggattttgtcttgaacctttgttcagatgctcatttttatcaggcctgtggtttgatatttacagccaggaatcagaatttggctgctttagatagttacatgaaggataaagaggaacctttccatgcttttatcttcattgataagaagttactagaattggttgacgatgaagctttgtcgtttcataccacagtaatatctcgctttcctgagctagtcaagctaagcagggaatgtgcatttgtcttggcgattgatcatttctgtgataagatacagcaaatattagcagagcttcgttctgaccgacacagcctctttcttttcttgaaaactgctattgaagtacacttgtctggaaaacttgacttcagtaagcttgaattaagaaacaaacaaactgttgaactccagtactcttctactgaagttgaagcttatcagcagaggctatcaaatctctccaagttatgccacaatcctgtttacatcgacgacgagttagttgagctttatctggagcttttatgtcagtatgagcgaaggtcagttctgaagtttctggagacttttgacagttacagattggaacggtgcttgcatctttgcctagattatggagttacagatgctgctgctttcttgcaagagagggttggtgatgttgggagtgcccttgaccttattctggctggacttgatgagaaaattagcttatttatctcttctgtggaaagtactttctctggcgtcgcatcaaaaagtatcgctgaaattaagcaaccagacatcgttctagaaatgagtgaggctcatccagtgcttgatgcattgcatgcctccattggattgtgccaaaggaattcacagcgcttggacccagaggaatctcagtccctttggttccaactccttgactccttctcagagccattaaaaaaactgtatgggatcaaggatgtaaatggaaaaggtgtcaagtccaattggagtgaagcatcaatggaacatctgaaggaaaaaggactatctcaacaaatgaggatttcaactaaacaaaagtgcctaaatgttctgcgaaaagtattttcacaatgtgttggagaaataatagaggccatggctgggtatattcccctaccggcaatcatggcaaaactgttatctgataatgggaatcaagagttcggtgatttcaaacttgtgatacacagaatgttatctatgtatctttacgaaaaaagaatactggaaacggctaagtcagtaattgaggatgactcattttacaccttgagcttattaaagagaggagtttgtcatgggtttgccccacagactttcgtatgctgcatatgcaactgttcactttctaaagaaggtgctatttcagccgtacgtttgttcagttgcgggcatgcaacacatcttcagtgtgagtctgagcagaccaggtcatccaatcaggaatccaaagagggatgccctgtttgtctctcaatgagtgatacgcaagctcgaagcaaatcacctatgtttgagaatgggctaatgaagtattctggggctgaacatgaagtgtcacatggcatgtatcagattcatgaagttgatcatgctgagagatctcgtgggcttcaacagatgtcacggtatgaaatactgaataatcttcagaaagcgcagaagtcctttcatatagaaaccgtacctccattgaaacttgcaccgccagctatataccatgagaagatacagaagaggaccacttcggttggtgaaactagcaaacattctgttagaagtcagaaaccccagaaaatttggcaaatgaaggagaaaaaatcaaaagaggctgggagtcatcatccacaaaagtcaagttttctacgttaatagaagaaaagattgctgatttgttaagtatgaaaccagatccaaactgattgttaatttgcttcatgccatcaccacgatcgaatcttcaagactacaaatttgtcagcgtgatggagcctgcccatcagtacatagcttttttttttgtcttggggatgcatcctgttggtgagatcctcttcccctgcaccatggtcagaggttctgtggagccaaggtgctttgggctagggaggaaattgtaacagtaaattttcatacagttcatcgtgattagttttgtgtacagagcagagcatacacgtggtgacatggtccctgtagagggacacattcgcagtaaaggtgggatgcctcgattcatactcaacaatgtaaagtaaaggtgggatacctcaattcatgatcattgtaaaatacgtgcacagtataacacaggagcactggctgagtggcatgtatccttgcagttcatcgcgattaatctctgtacagagctgttatactgtcggttttgatatcagttgcaattacacatctgctacagttttgtagtatcagatatcagaacacgtcgggcccgcagaacgcctggaagctcgtagttgtcggcgccgagcatcctgtcgccattgggttgcgctgtactgtac

SEQ ID NO: 8646 - DNA, 6471 bp, Zea Mays
caggcgcatcgcgaaaaagctcgcaaaatcgcagcacactagcacagaaccttggacgcgaaggcgtcataccccgatgccggcgtcgtcgtcgccggcgatggcgtcgcagcatgcgccgccgaggcgggagctcgacctcgacgctttcctcccgtcctctccgacatcctccggggcctcggacgccgacccggccgacgatgaccaccgccgcgccgtcgacgacctgctccgcctcctctcctcctcagactcggactccgattccgaggagtctagccgcatcccaagcaccagcatccagacgctatcccgagtccaagccccggcgcctgtcgctgagccctcgccgtcgccttccccatccgcgtccccgtccccgaggagatccgcatcggccttgccgtcggagaccctctcctccctcgtcgcgagaaccttctcgagcaacggcgcttcctcgtcgtcgaagcccctcccctcgctcttccggggcgtccgccccagccccaaacccggcgccgcgcttgccgctgctgccgcagcgtcccgcgcggtcctcaccccacacgccgctgccatcaagtcgcgccgatcagtatcggcgcccgtggagaaagttctggaggaagaggggagtggctccgaaggctccaaggagttccttcccactgggagcttggaagcagaggtagaagagaagggtgattcggaagcggttgctgatgcgaccaagcaaactgcaggtgggaatgtgggtgcggaactgggagaggataaacaggcagaagtgggaggtgaagagaatgctgaggctataaagctggtggaggcaagtcctctggatgctctagctgcggaggattccagtgggcatgagcaaggtaatgatgccaatttggcggaaactgaccaagttgggaatcagattgaggctgtctatgaggaaaatgaggatgaccaaactggaggtgataatcatgttcaatcaggtcagggtatggatcttattgcgattgctttagaggaaagttctgatgatgaacatgaatttgaaagatctgacagtatcttgcaagaacaagtggaatctgggagcttaattgataaagtgattgaagatagggtagagcagctggaggccagcaggaaggctgagaacacagagaagaagctgaaggtgtcaatgaaaccgttggagtgggcagaggagcttgagaagaggcaggcctcgtctggtcaacattgggaggaaggagcagctgcgcagcccatgcaactagagggaatcggaaagggcccaccagctatcggttacatgcaaattgagatggacaatccagtaacccgtgtcatgtcctcaccgtcatttaggtcagaccatggctctccccaggtgctggctgttcataggagctatatagcaatgggcacatctaaaggtgctgtcatcgtcattccaagcaaatactccattcatcaagctgatgatacagatgcaaagatgctgttcttttggaaccaaggcgagaagactcaatcaccagtgactgccatgtgctttaaccagcaaggggaccttctgctagtaggatatggtgatggtcatatgacaatttgggatgtacagaaatctgcagcagcaaaagttatatatggcgagcatacagcaccagtagtgcatgcttgttttatccgccaatctaaagccatcactggggattcaaaaggggtagttctattgcacacattttccattatccccgtaattaatcgtttaactgtcaagggaactcagcgtctttttgatgggaatactggaattgtgctctcagcctgtcctcttgtaatggatgaatcttttggttttagtaattcatctgcccagggaaatcagacaacttcctccagtggtggtcttggcagcatgatgggtggtgttgttggaggcgtggttggagtagattctggatggaagtttttcaacgaaggctcttctccaatggaggatggtgttgtagtcatgtttattatgcatcaacatgctcttgtgactccgtaccaatattgaccatgttgaccatattgagaccttctctagaccagatggagcacgtgagggctccatcgcgtatgctgcgtggaaatatacatcatatttgaatgaatcgtcatcagtagatgaagaacgagtgtcatggctagcacttgcatgggaccgtcaagtgcaagttgcaaagtttgttaaatcaaagatatttaaacacaaagagtggaagcttgatagttcagctgttggtgttgcctggttagacgaccagatgttagttgtccttaatttgagagggcaactctgtttattctctaaagatggcagtgagcttcgcagaactacctttgttcctgatggccttctttttgatgacaccatattgcaccatgcacatttttttaacaggtttggtaacccagagaggcattttaacagttcagtagcggtaagaggtgctacagtgtatattcttgggccatcttttctcacggtttcccgacttcttccatggaaagagcgaattgaagcactaaagagggctggcgattggatgggtgcactagacatggcaatgaggctttatgatggtcagacacagggtgttgttgatctcccaagaacggttgattctattagagatgccataatgccttacttagtagagttgctgctatcatatataagttatgtttttgaatatatttcaattgcgctgccaaatcatactggaaaagggggagaatcaggtgttctaatagaggcagatcgatccctgcttacacaaagagatgagcagtacgctcgtgtaggaggggttgcagttgagtattgtgtccacattggacggaatgatatccttttcgatacagtcttctctaagtttgctgctgcagaaagtggaggtatgtttctggaggtgctagagccttatatattgaaggatatgcttggttctctgccccctgagattatgcaagcactagtggagcattatagtggcaaagggtggttgcaacgagttgaacaatgcatccttcacatggatatttcttcattggactttaatcaggtagtcagactttgtcgtgaacatgggctatatggtgcactaatttatttatttaaccaaggcctgaatgatttccgtacaccactagaggaacttctatcagtcgttcagaacaccaacagtaaagatgatgcttctagtggatacaggatgcttgtttatctgaaatattgctttcagggtttggcatttcctccagggcatggaataattccccaatcccggcttcattcagtgagggaagaactccttcaatttctgcttgaagaatctaagccactcacttctgaagtatttaagggtttcaatgcttcttgtggaaagtgcctaaacatatgctatctgctatggttggatactgaagctactttggaagtcatcaaatgtgcttttgtacaggataactttgagtctagagatgaacttccgagtactgtcaatacatctgcttcagataatgaagatggtattgatgctggaagaccagagggccaaaatgctatggtacaaaatgtggttgatgccatcattgacatagttggtttggaaaatgatgtgattcggtctgttatgggtagaactgaatcagaattatggccttcggagaaggattttggctatttaatggagtttgtgtccttttttgtttctcacaaaagggctaatgcatctaagagggttgttatgcacattcttacttatctcatttcgtcatatgatgacacaagaacaaggattcagaaagaaaaagaagttcttcaactcttcaatgcggttccccgaaacgattggaattcggattttgtcttgaacctttgttcagatgctcatttttatcaggcctgtggtttgatatttacagccaggaatcagaatttggctgctttagatagttacatgaaggataaagaggaacctttccatgcttttatcttcattgataagaagttactagaattggttgacgatgaagctttgtcgtttcataccacagtaatatctcgctttcctgagctagtcaagctaagcagggaatgtgcatttgtcttggcgattgatcatttctgtgataagatacagcaaatattagcagagcttcgttctgaccgacacagcctctttcttttcttgaaaactgctattgaagtacacttgtctggaaaacttgacttcagtaagcttgaattaagaaacaaacaaactgttgaactccagtactcttctactgaagttgaagcttatcagcagaggctatcaaatctctccaagttatgccacaatcctgtttacatcgacgacgagttagttgagctttatctggagcttttatgtcagtatgagcgaaggtcagttctgaagtttctggagacttttgacagttacagattggaacggtgcttgcatctttgcctagattatggagttacagatgctgctgctttcttgcaagagagggttggtgatgttgggagtgcccttgaccttattctggctggacttgatgagaaaattagcttatttatctcttctgtggaaagtactttctctggcgtcgcatcaaaaagtatcgctgaaattaagcaaccagacatcgttctagaaatgagtgaggctcatccagtgcttgatgcattgcatgcctccattggattgtgccaaaggaattcacagcgcttggacccagaggaatctcagtccctttggttccaactccttgactccttctcagagccattaaaaaaactgtatgggatcaaggatgtaaatggaaaaggtgtcaagtccaattggagtgaagcatcaatggaacatctgaaggaaaaaggactatctcaacaaatgaggatttcaactaaacaaaagtgcctaaatgttctgcgaaaagtattttcacaatgtgttggagaaataatagaggccatggctgggtatattcccctaccggcaatcatggcaaaactgttatctgataatgggaatcaagagttcggtgatttcaaacttgtgatacacagaatgttatctatgtatctttacgaaaaaagaatactggaaacggctaagtcagtaattgaggatgactcattttacaccttgagcttattaaagagaggagtttgtcatgggtttgccccacagactttcgtatgctgcatatgcaactgttcactttctaaagaaggtgctatttcagccgtacgtttgttcagttgcgggcatgcaacacatcttcagtgtgagtctgagcagaccaggtcatccaatcaggaatccaaagagggatgccctgtttgtctctcaatgagtgatacgcaagctcgaagcaaatcacctatgtttgagaatgggctaatgaagtattctggggctgaacatgaagtgtcacatggcatgtatcagattcatgaagttgatcatgctgagagatctcgtgggcttcaacagatgtcacggtatgaaatactgaataatcttcagaaagcgcagaagtcctttcatatagaaaccgtacctccattgaaacttgcaccgccagctatataccatgagaagatacagaagaggaccacttcggttggtgaaactagcaaacattctgttagaagtcagaaaccccagaaaatttggcaaatgaaggagaaaaaatcaaaagaggctgggagtcatcatccacaaaagtcaagttttctacgttaatagaagaaaagattgctgatttgttaagtatgaaaccagatccaaactgattgttaatttgcttcatgccatcaccacgatcgaatcttcaagactacaaatttgtcagcgtgatggagcctgcccatcagtacatagcttttttttttgtcttggggatgcatcctgttggtttatcatcttctgcttaattacaggttctgtggagccaaggtgctttgggctagggaggaaattgtaacagtaaattttcatacagttcatcgtgattagttttgtgtacagagcagagcatacacgtggtgacatggtccctgtagagggacacattcgcagtaaaggtgggatgcctcgattcatactcaacaatgtaaagtaaaggtgggatacctcaattcatgatcattgtaaaatacgtgcacagtataacacaggagcactggctgagtggcatgtatccttgcagttcatcgcgattaatctctgtacagagctgttatactgtcggttttgatatcagttgcaattacacatctgctacagttttgtagtatcagatatcagaacacgtcgggcccgcagaacgcctggaagctcgtagttgtcggcgccgagcatcctgtcgccattgggttgcgctgtactgtac

SEQ ID NO: 8647 - DNA, 6476 bp, Zea Mays
caggcgcatcgcgaaaaagctcgcaaaatcgcagcacactagcacagaaccttggacgcgaaggcgtcataccccgatgccggcgtcgtcgtcgccggcgatggcgtcgcagcatgcgccgccgaggcgggagctcgacctcgacgctttcctcccgtcctctccgacatcctccggggcctcggacgccgacccggccgacgatgaccaccgccgcgccgtcgacgacctgctccgcctcctctcctcctcagactcggactccgattccgaggagtctagccgcatcccaagcaccagcatccagacgctatcccgagtccaagccccggcgcctgtcgctgagccctcgccgtcgccttccccatccgcgtccccgtccccgaggagatccgcatcggccttgccgtcggagaccctctcctccctcgtcgcgagaaccttctcgagcaacggcgcttcctcgtcgtcgaagcccctcccctcgctcttccggggcgtccgccccagccccaaacccggcgccgcgcttgccgctgctgccgcagcgtcccgcgcggtcctcaccccacacgccgctgccatcaagtcgcgccgatcagtatcggcgcccgtggagaaagttctggaggaagaggggagtggctccgaaggctccaaggagttccttcccactgggagcttggaagcagaggtagaagagaagggtgattcggaagcggttgctgatgcgaccaagcaaactgcaggtgggaatgtgggtgcggaactgggagaggataaacaggcagaagtgggaggtgaagagaatgctgaggctataaagctggtggaggcaagtcctctggatgctctagctgcggaggattccagtgggcatgagcaaggtaatgatgccaatttggcggaaactgaccaagttgggaatcagattgaggctgtctatgaggaaaatgaggatgaccaaactggaggtgataatcatgttcaatcaggtcagggtatggatcttattgcgattgctttagaggaaagttctgatgatgaacatgaatttgaaagatctgacagtatcttgcaagaacaagtggaatctgggagcttaattgataaagtgattgaagatagggtagagcagctggaggccagcaggaaggctgagaacacagagaagaagctgaaggtgtcaatgaaaccgttggagtgggcagaggagcttgagaagaggcaggcctcgtctggtcaacattgggaggaaggagcagctgcgcagcccatgcaactagagggaatcggaaagggcccaccagctatcggttacatgcaaattgagatggacaatccagtaacccgtgtcatgtcctcaccgtcatttaggtcagaccatggctctccccaggtgctggctgttcataggagctatatagcaatgggcacatctaaaggtgctgtcatcgtcattccaagcaaatactccattcatcaagctgatgatacagatgcaaagatgctgttcttttggaaccaaggcgagaagactcaatcaccagtgactgccatgtgctttaaccagcaaggggaccttctgctagtaggatatggtgatggtcatatgacaatttgggatgtacagaaatctgcagcagcaaaagttatatatggcgagcatacagcaccagtagtgcatgcttgttttatccgccaatctaaagccatcactggggattcaaaaggggtagttctattgcacacattttccattatccccgtaattaatcgtttaactgtcaagggaactcagcgtctttttgatgggaatactggaattgtgctctcagcctgtcctcttgtaatggatgaatcttttggttttagtaattcatctgcccagggaaatcagacaacttcctccagtggtggtcttggcagcatgatgggtggtgttgttggaggcgtggttggagtagattctggatggaagtttttcaacgaaggctcttctccaatggaggatggtgttgtagtcatgtttattatgcatcaacatgctcttgtggttagactccgtaccaatattgaccatgttgaccatattgagaccttctctagaccagatggagcacgtgagggctccatcgcgtatgctgcgtggaaatatacatcatatttgaatgaatcgtcatcagtagatgaagaacgagtgtcatggctagcacttgcatgggaccgtcaagtgcaagttgcaaagtttgttaaatcaaagatatttaaacacaaagagtggaagcttgatagttcagctgttggtgttgcctggttagacgaccagatgttagttgtccttaatttgagagggcaactctgtttattctctaaagatggcagtgagcttcgcagaactacctttgttcctgatggccttctttttgatgacaccatattgcaccatgcacatttttttaacaggtttggtaacccagagaggcattttaacagttcagtagcggtaagaggtgctacagtgtatattcttgggccatcttttctcacggtttcccgacttcttccatggaaagagcgaattgaagcactaaagagggctggcgattggatgggtgcactagacatggcaatgaggctttatgatggtcagacacagggtgttgttgatctcccaagaacggttgattctattagagatgccataatgccttacttagtagagttgctgctatcatatataagttatgtttttgaatatatttcaattgcgctgccaaatcatactggaaaagggggagaatcaggtgttctaatagaggcagatcgatccctgcttacacaaagagatgagcagtacgctcgtgtaggaggggttgcagttgagtattgtgtccacattggacggaatgatatccttttcgatacagtcttctctaagtttgctgctgcagaaagtggaggtatgtttctggaggtgctagagccttatatattgaaggatatgcttggttctctgccccctgagattatgcaagcactagtggagcattatagtggcaaagggtggttgcaacgagttgaacaatgcatccttcacatggatatttcttcattggactttaatcaggtagtcagactttgtcgtgaacatgggctatatggtgcactaatttatttatttaaccaaggcctgaatgatttccgtacaccactagaggaacttctatcagtcgttcagaacaccaacagtaaagatgatgcttctagtggatacaggatgcttgtttatctgaaatattgctttcagggtttggcatttcctccagggcatggaataattccccaatcccggcttcattcagtgagggaagaactccttcaatttctgcttgaagaatctaagccactcacttctgaagtatttaagggtttcaatgcttcttgtggaaagtgcctaaacatatgctatctgctatggttggatactgaagctactttggaagtcatcaaatgtgcttttgtacaggataactttgagtctagagatgaacttccgagtactgtcaatacatctgcttcagataatgaagatggtattgatgctggaagaccagagggccaaaatgctatggtacaaaatgtggttgatgccatcattgacatagttggtttggaaaatgatgtgattcggtctgttatgggtagaactgaatcagaattatggccttcggagaaggattttggctatttaatggagtttgtgtccttttttgtttctcacaaaagggctaatgcatctaagagggttgttatgcacattcttacttatctcatttcgtcatatgatgacacaagaacaaggattcagaaagaaaaagaagttcttcaactcttcaatgcggttccccgaaacgattggaattcggattttgtcttgaacctttgttcagatgctcatttttatcaggcctgtggtttgatatttacagccaggaatcagaatttggctgctttagatagttacatgaaggataaagaggaacctttccatgcttttatcttcattgataagaagttactagaattggttgacgatgaagctttgtcgtttcataccacagtaatatctcgctttcctgagctagtcaagctaagcagggaatgtgcatttgtcttggcgattgatcatttctgtgataagatacagcaaatattagcagagcttcgttctgaccgacacagcctctttcttttcttgaaaactgctattgaagtacacttgtctggaaaacttgacttcagtaagcttgaattaagaaacaaacaaactgttgaactccagtactcttctactgaagttgaagcttatcagcagaggctatcaaatctctccaagttatgccacaatcctgtttacatcgacgacgagttagttgagctttatctggagcttttatgtcagtatgagcgaaggtcagttctgaagtttctggagacttttgacagttacagattggaacggtgcttgcatctttgcctagattatggagttacagatgctgctgctttcttgcaagagagggttggtgatgttgggagtgcccttgaccttattctggctggacttgatgagaaaattagcttatttatctcttctgtggaaagtactttctctggcgtcgcatcaaaaagtatcgctgaaattaagcaaccagacatcgttctagaaatgagtgaggctcatccagtgcttgatgcattgcatgcctccattggattgtgccaaaggaattcacagcgcttggacccagaggaatctcagtccctttggttccaactccttgactccttctcagagccattaaaaaaactgtatgggatcaaggatgtaaatggaaaaggtgtcaagtccaattggagtgaagcatcaatggaacatctgaaggaaaaaggactatctcaacaaatgaggatttcaactaaacaaaagtgcctaaatgttctgcgaaaagtattttcacaatgtgttggagaaataatagaggccatggctgggtatattcccctaccggcaatcatggcaaaactgttatctgataatgggaatcaagagttcggtgatttcaaacttgtgatacacagaatgttatctatgtatctttacgaaaaaagaatactggaaacggctaagtcagtaattgaggatgactcattttacaccttgagcttattaaagagaggagtttgtcatgggtttgccccacagactttcgtatgctgcatatgcaactgttcactttctaaagaaggtgctatttcagccgtacgtttgttcagttgcgggcatgcaacacatcttcagtgtgagtctgagcagaccaggtcatccaatcaggaatccaaagagggatgccctgtttgtctctcaatgagtgatacgcaagctcgaagcaaatcacctatgtttgagaatgggctaatgaagtattctggggctgaacatgaagtgtcacatggcatgtatcagattcatgaagttgatcatgctgagagatctcgtgggcttcaacagatgtcacggtatgaaatactgaataatcttcagaaagcgcagaagtcctttcatatagaaaccgtacctccattgaaacttgcaccgccagctatataccatgagaagatacagaagaggaccacttcggttggtgaaactagcaaacattctgttagaagtcagaaaccccagaaaatttggcaaatgaaggagaaaaaatcaaaagaggctgggagtcatcatccacaaaagtcaagttttctacgttaatagaagaaaagattgctgatttgttaagtatgaaaccagatccaaactgattgttaatttgcttcatgccatcaccacgatcgaatcttcaagactacaaatttgtcagcgtgatggagcctgcccatcagtacatagcttttttttttgtcttggggatgcatcctgttggtttatcatcttctgcttaattacaggttctgtggagccaaggtgctttgggctagggaggaaattgtaacagtaaattttcatacagttcatcgtgattagttttgtgtacagagcagagcatacacgtggtgacatggtccctgtagagggacacattcgcagtaaaggtgggatgcctcgattcatactcaacaatgtaaagtaaaggtgggatacctcaattcatgatcattgtaaaatacgtgcacagtataacacaggagcactggctgagtggcatgtatccttgcagttcatcgcgattaatctctgtacagagctgttatactgtcggttttgatatcagttgcaattacacatctgctacagttttgtagtatcagatatcagaacacgtcgggcccgcagaacgcctggaagctcgtagttgtcggcgccgagcatcctgtcgccattgggttgcgctgtactgtac

SEQ ID NO: 8648 - DNA, 6504 bp, Zea Mays
caggcgcatcgcgaaaaagctcgcaaaatcgcagcacactagcacagaaccttggacgcgaaggcgtcataccccgatgccggcgtcgtcgtcgccggcgatggcgtcgcagcatgcgccgccgaggcgggagctcgacctcgacgctttcctcccgtcctctccgacatcctccggggcctcggacgccgacccggccgacgatgaccaccgccgcgccgtcgacgacctgctccgcctcctctcctcctcagactcggactccgattccgaggagtctagccgcatcccaagcaccagcatccagacgctatcccgagtccaagccccggcgcctgtcgctgagccctcgccgtcgccttccccatccgcgtccccgtccccgaggagatccgcatcggccttgccgtcggagaccctctcctccctcgtcgcgagaaccttctcgagcaacggcgcttcctcgtcgtcgaagcccctcccctcgctcttccggggcgtccgccccagccccaaacccggcgccgcgcttgccgctgctgccgcagcgtcccgcgcggtcctcaccccacacgccgctgccatcaagtcgcgccgatcagtatcggcgcccgtggagaaagttctggaggaagaggggagtggctccgaaggctccaaggagttccttcccactgggagcttggaagcagaggtagaagagaagggtgattcggaagcggttgctgatgcgaccaagcaaactgcaggtgggaatgtgggtgcggaactgggagaggataaacaggcagaagtgggaggtgaagagaatgctgaggctataaagctggtggaggcaagtcctctggatgctctagctgcggaggattccagtgggcatgagcaaggtaatgatgccaatttggcggaaactgaccaagttgggaatcagattgaggctgtctatgaggaaaatgaggatgaccaaactggaggtgataatcatgttcaatcaggtcagggtatggatcttattgcgattgctttagaggaaagttctgatgatgaacatgaatttgaaagatctgacagtatcttgcaagaacaagtggaatctgggagcttaattgataaagtgattgaagatagggtagagcagctggaggccagcaggaaggctgagaacacagagaagaagctgaaggtgtcaatgaaaccgttggagtgggcagaggagcttgagaagaggcaggcctcgtctggtcaacattgggaggaaggagcagctgcgcagcccatgcaactagagggaatcggaaagggcccaccagctatcggttacatgcaaattgagatggacaatccagtaacccgtgtcatgtcctcaccgtcatttaggtcagaccatggctctccccaggtgctggctgttcataggagctatatagcaatgggcacatctaaaggtgctgtcatcgtcattccaagcaaatactccattcatcaagctgatgatacagatgcaaagatgctgttcttttggaaccaaggcgagaagactcaatcaccagtgactgccatgtgctttaaccagcaaggggaccttctgctagtaggatatggtgatggtcatatgacaatttgggatgtacagaaatctgcagcagcaaaagttatatatggcgagcatacagcaccagtagtgcatgcttgttttatccgccaatctaaagccatcactggggattcaaaaggggtagttctattgcacacattttccattatccccgtaattaatcgtttaactgtcaagggaactcagcgtctttttgatgggaatactggaattgtgctctcagcctgtcctcttgtaatggatgaatcttttggttttagtaattcatctgcccagggaaatcagacaacttcctccagtggtggtcttggcagcatgatgggtggtgttgttggaggcgtggttggagtagattctggatggaagtttttcaacgaaggctcttctccaatggaggatggtgttgtagtcatgtttattatgcatcaacatgctcttgtgactccgtaccaatattgaccatgttgaccatattgagaccttctctagaccagatggagcacgtgagggctccatcgcgtatgctgcgtggaaatatacatcatatttgaatgaatcgtcatcagtagatgaagaacgagtgtcatggctagcacttgcatgggaccgtcaagtgcaagttgcaaagtttgttaaatcaaagatatttaaacacaaagagtggaagcttgatagttcagctgttggtgttgcctggttagacgaccagatgttagttgtccttaatttgagagggcaactctgtttattctctaaagatggcagtgagcttcgcagaactacctttgttcctgatggccttctttttgatgacaccatattgcaccatgcacatttttttaacaggtttggtaacccagagaggcattttaacagttcagtagcggtaagaggtgctacagtgtatattcttgggccatcttttctcacggtttcccgacttcttccatggaaagagcgaattgaagcactaaagagggctggcgattggatgggtgcactagacatggcaatgaggctttatgatggtcagacacagggtgttgttgatctcccaagaacggttgattctattagagatgccataatgccttacttagtagagttgctgctatcatatataagttatgtttttgaatatatttcaattgcgctgccaaatcatactggaaaagggggagaatcaggtgttctaatagaggcagatcgatccctgcttacacaaagagatgagcagtacgctcgtgtaggaggggttgcagttgagtattgtgtccacattggacggaatgatatccttttcgatacagtcttctctaagtttgctgctgcagaaagtggaggtatgtttctggaggtgctagagccttatatattgaaggatatgcttggttctctgccccctgagattatgcaagcactagtggagcattatagtggcaaagggtggttgcaacgagttgaacaatgcatccttcacatggatatttcttcattggactttaatcaggtagtcagactttgtcgtgaacatgggctatatggtgcactaatttatttatttaaccaaggcctgaatgatttccgtacaccactagaggaacttctatcagtcgttcagaacaccaacagtaaagatgatgcttctagtggatacaggatgcttgtttatctgaaatattgctttcagggtttggcatttcctccagggcatggaataattccccaatcccggcttcattcagtgagggaagaactccttcaatttctgcttgaagaatctaagccactcacttctgaagtatttaagggtttcaatgcttcttgtggaaagtgcctaaacatatgctatctgctatggttggatactgaagctactttggaagtcatcaaatgtgcttttgtacaggataactttgagtctagagatgaacttccgagtactgtcaatacatctgcttcagataatgaagatggtattgatgctggaagaccagagggccaaaatgctatggtacaaaatgtggttgatgccatcattgacatagttggtttggaaaatgatgtgattcggtctgttatgggtagaactgaatcagaattatggccttcggagaaggattttggctatttaatggagtttgtgtccttttttgtttctcacaaaagggctaatgcatctaagagggttgttatgcacattcttacttatctcatttcgtcatatgatgacacaagaacaaggattcagaaagaaaaagaagttcttcaactcttcaatgcggttccccgaaacgattggaattcggattttgtcttgaacctttgttcagatgctcatttttatcaggcctgtggtttgatatttacagccaggaatcagaatttggctgctttagatagttacatgaaggataaagaggaacctttccatgcttttatcttcattgataagaagttactagaattggttgacgatgaagctttgtcgtttcataccacagtaatatctcgctttcctgagctagtcaagctaagcagggaatgtgcatttgtcttggcgattgatcatttctgtgataagatacagcaaatattagcagagcttcgttctgaccgacacagcctctttcttttcttgaaaactgctattgaagtacacttgtctggaaaacttgacttcagtaagcttgaattaagaaacaaacaaactgttgaactccagtactcttctactgaagttgaagcttatcagcagaggctatcaaatctctccaagttatgccacaatcctgtttacatcgacgacgagttagttgagctttatctggagcttttatgtcagtatgagcgaaggtcagttctgaagtttctggagacttttgacagttacagattggaacggtgcttgcatctttgcctagattatggagttacagatgctgctgctttcttgcaagagagggttggtgatgttgggagtgcccttgaccttattctggctggacttgatgagaaaattagcttatttatctcttctgtggaaagtactttctctggcgtcgcatcaaaaagtatcgctgaaattaagcaaccagacatcgttctagaaatgagtgaggctcatccagtgcttgatgcattgcatgcctccattggattgtgccaaaggaattcacagcgcttggacccagaggaatctcagtccctttggttccaactccttgactccttctcagagccattaaaaaaactgtatgggatcaaggatgtaaatggaaaaggtgtcaagtccaattggagtgaagcatcaatggaacatctgaaggaaaaaggactatctcaacaaatgaggatttcaactaaacaaaagtgcctaaatgttctgcgaaaagtattttcacaatgtgttggagaaataatagaggccatggctgggtatattcccctaccggcaatcatggcaaaactgttatctgataatgggaatcaagagttcggtgatttcaaacttgtgatacacagaatgttatctatgtatctttacgaaaaaagaatactggaaacggctaagtcagtaattgaggatgactcattttacaccttgagcttattaaagagaggagtttgtcatgggtttgccccacagactttcgtatgctgcatatgcaactgttcactttctaaagaaggtgctatttcagccgtacgtttgttcagttgcgggcatgcaacacatcttcagtgtgagtctgagcagaccaggtcatccaatcaggaatccaaagagggatgccctgtttgtctctcaatgagtgatacgcaagctcgaagcaaatcacctatgtttgagaatgggctaatgaagtattctggggctgaacatgaagtgtcacatggcatgtatcagattcatgaagttgatcatgctgagagatctcgtgggcttcaacagatgtcacggtatgaaatactgaataatcttcagaaagcgcagaagtcctttcatatagaaaccgtacctccattgaaacttgcaccgccagctatataccatgagaagatacagaagaggaccacttcggttggtgaaactagcaaacattctgttagaagtcagaaaccccagaaaatttggcaaatgaaggagaaaaaatcaaaagaggctgggagtcatcatccacaaaagtcaagttttctacgttaatagaagaaaagattgctgatttgttaagtatgaaaccagatccaaactgattgttaatttgcttcatgccatcaccacgatcgaatcttcaagactacaaatttgtcagcgtgatggagcctgcccatcagtacatagcttttttttttgtcttggggatgcatcctgttggtgagatcctcttcccctgcaccatggtcagaggtttatcatcttctgcttaattacaggttctgtggagccaaggtgctttgggctagggaggaaattgtaacagtaaattttcatacagttcatcgtgattagttttgtgtacagagcagagcatacacgtggtgacatggtccctgtagagggacacattcgcagtaaaggtgggatgcctcgattcatactcaacaatgtaaagtaaaggtgggatacctcaattcatgatcattgtaaaatacgtgcacagtataacacaggagcactggctgagtggcatgtatccttgcagttcatcgcgattaatctctgtacagagctgttatactgtcggttttgatatcagttgcaattacacatctgctacagttttgtagtatcagatatcagaacacgtcgggcccgcagaacgcctggaagctcgtagttgtcggcgccgagcatcctgtcgccattgggttgcgctgtactgtac

SEQ ID NO: 8649 - DNA, 6509 bp, Zea Mays
caggcgcatcgcgaaaaagctcgcaaaatcgcagcacactagcacagaaccttggacgcgaaggcgtcataccccgatgccggcgtcgtcgtcgccggcgatggcgtcgcagcatgcgccgccgaggcgggagctcgacctcgacgctttcctcccgtcctctccgacatcctccggggcctcggacgccgacccggccgacgatgaccaccgccgcgccgtcgacgacctgctccgcctcctctcctcctcagactcggactccgattccgaggagtctagccgcatcccaagcaccagcatccagacgctatcccgagtccaagccccggcgcctgtcgctgagccctcgccgtcgccttccccatccgcgtccccgtccccgaggagatccgcatcggccttgccgtcggagaccctctcctccctcgtcgcgagaaccttctcgagcaacggcgcttcctcgtcgtcgaagcccctcccctcgctcttccggggcgtccgccccagccccaaacccggcgccgcgcttgccgctgctgccgcagcgtcccgcgcggtcctcaccccacacgccgctgccatcaagtcgcgccgatcagtatcggcgcccgtggagaaagttctggaggaagaggggagtggctccgaaggctccaaggagttccttcccactgggagcttggaagcagaggtagaagagaagggtgattcggaagcggttgctgatgcgaccaagcaaactgcaggtgggaatgtgggtgcggaactgggagaggataaacaggcagaagtgggaggtgaagagaatgctgaggctataaagctggtggaggcaagtcctctggatgctctagctgcggaggattccagtgggcatgagcaaggtaatgatgccaatttggcggaaactgaccaagttgggaatcagattgaggctgtctatgaggaaaatgaggatgaccaaactggaggtgataatcatgttcaatcaggtcagggtatggatcttattgcgattgctttagaggaaagttctgatgatgaacatgaatttgaaagatctgacagtatcttgcaagaacaagtggaatctgggagcttaattgataaagtgattgaagatagggtagagcagctggaggccagcaggaaggctgagaacacagagaagaagctgaaggtgtcaatgaaaccgttggagtgggcagaggagcttgagaagaggcaggcctcgtctggtcaacattgggaggaaggagcagctgcgcagcccatgcaactagagggaatcggaaagggcccaccagctatcggttacatgcaaattgagatggacaatccagtaacccgtgtcatgtcctcaccgtcatttaggtcagaccatggctctccccaggtgctggctgttcataggagctatatagcaatgggcacatctaaaggtgctgtcatcgtcattccaagcaaatactccattcatcaagctgatgatacagatgcaaagatgctgttcttttggaaccaaggcgagaagactcaatcaccagtgactgccatgtgctttaaccagcaaggggaccttctgctagtaggatatggtgatggtcatatgacaatttgggatgtacagaaatctgcagcagcaaaagttatatatggcgagcatacagcaccagtagtgcatgcttgttttatccgccaatctaaagccatcactggggattcaaaaggggtagttctattgcacacattttccattatccccgtaattaatcgtttaactgtcaagggaactcagcgtctttttgatgggaatactggaattgtgctctcagcctgtcctcttgtaatggatgaatcttttggttttagtaattcatctgcccagggaaatcagacaacttcctccagtggtggtcttggcagcatgatgggtggtgttgttggaggcgtggttggagtagattctggatggaagtttttcaacgaaggctcttctccaatggaggatggtgttgtagtcatgtttattatgcatcaacatgctcttgtggttagactccgtaccaatattgaccatgttgaccatattgagaccttctctagaccagatggagcacgtgagggctccatcgcgtatgctgcgtggaaatatacatcatatttgaatgaatcgtcatcagtagatgaagaacgagtgtcatggctagcacttgcatgggaccgtcaagtgcaagttgcaaagtttgttaaatcaaagatatttaaacacaaagagtggaagcttgatagttcagctgttggtgttgcctggttagacgaccagatgttagttgtccttaatttgagagggcaactctgtttattctctaaagatggcagtgagcttcgcagaactacctttgttcctgatggccttctttttgatgacaccatattgcaccatgcacatttttttaacaggtttggtaacccagagaggcattttaacagttcagtagcggtaagaggtgctacagtgtatattcttgggccatcttttctcacggtttcccgacttcttccatggaaagagcgaattgaagcactaaagagggctggcgattggatgggtgcactagacatggcaatgaggctttatgatggtcagacacagggtgttgttgatctcccaagaacggttgattctattagagatgccataatgccttacttagtagagttgctgctatcatatataagttatgtttttgaatatatttcaattgcgctgccaaatcatactggaaaagggggagaatcaggtgttctaatagaggcagatcgatccctgcttacacaaagagatgagcagtacgctcgtgtaggaggggttgcagttgagtattgtgtccacattggacggaatgatatccttttcgatacagtcttctctaagtttgctgctgcagaaagtggaggtatgtttctggaggtgctagagccttatatattgaaggatatgcttggttctctgccccctgagattatgcaagcactagtggagcattatagtggcaaagggtggttgcaacgagttgaacaatgcatccttcacatggatatttcttcattggactttaatcaggtagtcagactttgtcgtgaacatgggctatatggtgcactaatttatttatttaaccaaggcctgaatgatttccgtacaccactagaggaacttctatcagtcgttcagaacaccaacagtaaagatgatgcttctagtggatacaggatgcttgtttatctgaaatattgctttcagggtttggcatttcctccagggcatggaataattccccaatcccggcttcattcagtgagggaagaactccttcaatttctgcttgaagaatctaagccactcacttctgaagtatttaagggtttcaatgcttcttgtggaaagtgcctaaacatatgctatctgctatggttggatactgaagctactttggaagtcatcaaatgtgcttttgtacaggataactttgagtctagagatgaacttccgagtactgtcaatacatctgcttcagataatgaagatggtattgatgctggaagaccagagggccaaaatgctatggtacaaaatgtggttgatgccatcattgacatagttggtttggaaaatgatgtgattcggtctgttatgggtagaactgaatcagaattatggccttcggagaaggattttggctatttaatggagtttgtgtccttttttgtttctcacaaaagggctaatgcatctaagagggttgttatgcacattcttacttatctcatttcgtcatatgatgacacaagaacaaggattcagaaagaaaaagaagttcttcaactcttcaatgcggttccccgaaacgattggaattcggattttgtcttgaacctttgttcagatgctcatttttatcaggcctgtggtttgatatttacagccaggaatcagaatttggctgctttagatagttacatgaaggataaagaggaacctttccatgcttttatcttcattgataagaagttactagaattggttgacgatgaagctttgtcgtttcataccacagtaatatctcgctttcctgagctagtcaagctaagcagggaatgtgcatttgtcttggcgattgatcatttctgtgataagatacagcaaatattagcagagcttcgttctgaccgacacagcctctttcttttcttgaaaactgctattgaagtacacttgtctggaaaacttgacttcagtaagcttgaattaagaaacaaacaaactgttgaactccagtactcttctactgaagttgaagcttatcagcagaggctatcaaatctctccaagttatgccacaatcctgtttacatcgacgacgagttagttgagctttatctggagcttttatgtcagtatgagcgaaggtcagttctgaagtttctggagacttttgacagttacagattggaacggtgcttgcatctttgcctagattatggagttacagatgctgctgctttcttgcaagagagggttggtgatgttgggagtgcccttgaccttattctggctggacttgatgagaaaattagcttatttatctcttctgtggaaagtactttctctggcgtcgcatcaaaaagtatcgctgaaattaagcaaccagacatcgttctagaaatgagtgaggctcatccagtgcttgatgcattgcatgcctccattggattgtgccaaaggaattcacagcgcttggacccagaggaatctcagtccctttggttccaactccttgactccttctcagagccattaaaaaaactgtatgggatcaaggatgtaaatggaaaaggtgtcaagtccaattggagtgaagcatcaatggaacatctgaaggaaaaaggactatctcaacaaatgaggatttcaactaaacaaaagtgcctaaatgttctgcgaaaagtattttcacaatgtgttggagaaataatagaggccatggctgggtatattcccctaccggcaatcatggcaaaactgttatctgataatgggaatcaagagttcggtgatttcaaacttgtgatacacagaatgttatctatgtatctttacgaaaaaagaatactggaaacggctaagtcagtaattgaggatgactcattttacaccttgagcttattaaagagaggagtttgtcatgggtttgccccacagactttcgtatgctgcatatgcaactgttcactttctaaagaaggtgctatttcagccgtacgtttgttcagttgcgggcatgcaacacatcttcagtgtgagtctgagcagaccaggtcatccaatcaggaatccaaagagggatgccctgtttgtctctcaatgagtgatacgcaagctcgaagcaaatcacctatgtttgagaatgggctaatgaagtattctggggctgaacatgaagtgtcacatggcatgtatcagattcatgaagttgatcatgctgagagatctcgtgggcttcaacagatgtcacggtatgaaatactgaataatcttcagaaagcgcagaagtcctttcatatagaaaccgtacctccattgaaacttgcaccgccagctatataccatgagaagatacagaagaggaccacttcggttggtgaaactagcaaacattctgttagaagtcagaaaccccagaaaatttggcaaatgaaggagaaaaaatcaaaagaggctgggagtcatcatccacaaaagtcaagttttctacgttaatagaagaaaagattgctgatttgttaagtatgaaaccagatccaaactgattgttaatttgcttcatgccatcaccacgatcgaatcttcaagactacaaatttgtcagcgtgatggagcctgcccatcagtacatagcttttttttttgtcttggggatgcatcctgttggtgagatcctcttcccctgcaccatggtcagaggtttatcatcttctgcttaattacaggttctgtggagccaaggtgctttgggctagggaggaaattgtaacagtaaattttcatacagttcatcgtgattagttttgtgtacagagcagagcatacacgtggtgacatggtccctgtagagggacacattcgcagtaaaggtgggatgcctcgattcatactcaacaatgtaaagtaaaggtgggatacctcaattcatgatcattgtaaaatacgtgcacagtataacacaggagcactggctgagtggcatgtatccttgcagttcatcgcgattaatctctgtacagagctgttatactgtcggttttgatatcagttgcaattacacatctgctacagttttgtagtatcagatatcagaacacgtcgggcccgcagaacgcctggaagctcgtagttgtcggcgccgagcatcctgtcgccattgggttgcgctgtactgtac

SEQ ID NO: 8650 - DNA, 6518 bp, Zea Mays
caggcgcatcgcgaaaaagctcgcaaaatcgcagcacactagcacagaaccttggacgcgaaggcgtcataccccgatgccggcgtcgtcgtcgccggcgatggcgtcgcagcatgcgccgccgaggcgggagctcgacctcgacgctttcctcccgtcctctccgacatcctccggggcctcggacgccgacccggccgacgatgaccaccgccgcgccgtcgacgacctgctccgcctcctctcctcctcagactcggactccgattccgaggagtctagccgcatcccaagcaccagcatccagacgctatcccgagtccaagccccggcgcctgtcgctgagccctcgccgtcgccttccccatccgcgtccccgtccccgaggagatccgcatcggccttgccgtcggagaccctctcctccctcgtcgcgagaaccttctcgagcaacggcgcttcctcgtcgtcgaagcccctcccctcgctcttccggggcgtccgccccagccccaaacccggcgccgcgcttgccgctgctgccgcagcgtcccgcgcggtcctcaccccacacgccgctgccatcaagtcgcgccgatcagtatcggcgcccgtggagaaagttctggaggaagaggggagtggctccgaaggctccaaggagttccttcccactgggagcttggaagcagaggtagaagagaagggtgattcggaagcggttgctgatgcgaccaagcaaactgcaggtgggaatgtgggtgcggaactgggagaggataaacaggcagaagtgggaggtgaagagaatgctgaggctataaagctggtggaggcaagtcctctggatgctctagctgcggaggattccagtgggcatgagcaaggtaatgatgccaatttggcggaaactgaccaagttgggaatcagattgaggctgtctatgaggaaaatgaggatgaccaaactggaggtgataatcatgttcaatcaggtcagggtatggatcttattgcgattgctttagaggaaagttctgatgatgaacatgaatttgaaagatctgacagtatcttgcaagaacaagtggaatctgggagcttaattgataaagtgattgaagatagggtagagcagctggaggccagcaggaaggctgagaacacagagaagaagctgaaggtgtcaatgaaaccgttggagtgggcagaggagcttgagaagaggcaggcctcgtctggtcaacattgggaggaaggagcagctgcgcagcccatgcaactagagggaatcggaaagggcccaccagctatcggttacatgcaaattgagatggacaatccagtaacccgtgtcatgtcctcaccgtcatttaggtcagaccatggctctccccaggtgctggctgttcataggagctatatagcaatgggcacatctaaaggtgctgtcatcgtcattccaagcaaatactccattcatcaagctgatgatacagatgcaaagatgctgttcttttggaaccaaggcgagaagactcaatcaccagtgactgccatgtgctttaaccagcaaggggaccttctgctagtaggatatggtgatggtcatatgacaatttgggatgtacagaaatctgcagcagcaaaagttatatatggcgagcatacagcaccagtagtgcatgcttgttttatccgccaatctaaagccatcactggggattcaaaaggggtagttctattgcacacattttccattatccccgtaattaatcgtttaactgtcaagggaactcagcgtctttttgatgggaatactggaattgtgctctcagcctgtcctcttgtaatggatgaatcttttggttttagtaattcatctgcccagggaaatcagacaacttcctccagtggtggtcttggcagcatgatgggtggtgttgttggaggcgtggttggagtagattctggatggaagtttttcaacgaaggctcttctccaatggaggatggtgttgtagtcatgtttattatgcatcaacatgctcttgtggttagactccgtaccaatattgaccatgttgaccatattgagaccttctctagaccagatggagcacgtgagggctccatcgcgtatgctgcgtggaaatatacatcatatttgaatgaatcgtcatcagtagatgaagaacgagtgtcatggctagcacttgcatgggaccgtcaagtgcaagttgcaaagtttgttaaatcaaagatatttaaacacaaagagtggaagcttgatagttcagctgttggtgttgcctggttagacgaccagatgttagttgtccttaatttgagagggcaactctgtttattctctaaagatggcagtgagcttcgcagaactacctttgttcctgatggccttctttttgatgacaccatattgcaccatgcacatttttttaacaggtttggtaacccagagaggcattttaacagttcagtagcggtaagaggtgctacagtgtatattcttgggccatcttttctcacggtttcccgacttcttccatggaaagagcgaattgaagcactaaagagggctggcgattggatgggtgcactagacatggcaatgaggctttatgatggtcagacacagggtgttgttgatctcccaagaacggttgattctattagagatgccataatgccttacttagtagagttgctgctatcatatataagttatgtttttgaatatatttcaattgcgctgccaaatcatactggaaaagggggagaatcaggtgttctaatagaggcagatcgatccctgcttacacaaagagatgagcagtacgctcgtgtaggaggggttgcagttgagtattgtgtccacattggacggaatgatatccttttcgatacagtcttctctaagtttgctgctgcagaaagtggaggtatgtttctggaggtgctagagccttatatattgaaggatatgcttggttctctgccccctgagattatgcaagcactagtggagcattatagtggcaaagggtggttgcaacgagttgaacaatgcatccttcacatggatatttcttcattggactttaatcaggtagtcagactttgtcgtgaacatgggctatatggtgcactaatttatttatttaaccaaggcctgaatgatttccgtacaccactagaggaacttctatcagtcgttcagaacaccaacagtaaagatgatgcttctagtggatacaggatgcttgtttatctgaaatattgctttcagggtttggcatttcctccagggcatggaataattccccaatcccggcttcattcagtgagggaagaactccttcaatttctgcttgaagaatctaagccactcacttctgaagtatttaagggtttcaatgcttcttgtggaaagtgcctaaacatatgctatctgctatggttggatactgaagctactttggaagtcatcaaatgtgcttttgtacaggataactttgagtctagagatgaacttccgagtactgtcaatacatctgcttcagataatgaagatggtattgatgctggaagaccagagggccaaaatgctatggtacaaaatgtggttgatgccatcattgacatagttggtttggaaaatgatgtgattcggtctgttatgggtagaactgaatcagaattatggccttcggagaaggattttggctatttaatggagtttgtgtccttttttgtttctcacaaaagggctaatgcatctaagagggttgttatgcacattcttacttatctcatttcgtcatatgatgacacaagaacaaggattcagaaagaaaaagaagttcttcaactcttcaatgcggttccccgaaacgattggaattcggattttgtcttgaacctttgttcagatgctcatttttatcaggcctgtggtttgatatttacagccaggaatcagaatttggctgctttagatagttacatgaaggataaagaggaacctttccatgcttttatcttcattgataagaagttactagaattggttgacgatgaagctttgtcgtttcataccacagtaatatctcgctttcctgagctagtcaagctaagcagggaatgtgcatttgtcttggcgattgatcatttctgtgataagatacagcaaatattagcagagcttcgttctgaccgacacagcctctttcttttcttgaaaactgctattgaagtacacttgtctggaaaacttgacttcagtaagcttgaattaagaaacaaacaaactgttgaactccagtactcttctactgaagttgaagcttatcagcagaggctatcaaatctctccaagttatgccacaatcctgtttacatcgacgacgagttagttgagctttatctggagcttttatgtcagtatgagcgaaggtcagttctgaagtttctggagacttttgacagttacagattggaacggtgcttgcatctttgcctagattatggagttacagatgctgctgctttcttgcaagagagggttggtgatgttgggagtgcccttgaccttattctggctggacttgatgagaaaattagcttatttatctcttctgtggaaagtactttctctggcgtcgcatcaaaaagtatcgctgaaattaagcaaccagacatcgttctagaaatgagctcatccagtgcttgatgcattgcatgcctccattggattgtgccaaaggaattcacagcgcttggacccagaggaatctcagtccctttggttccaactccttgactcgaaattattcaatagcgcatctagaaagacaatgcgagcctattgctcttctcagagccattaaaaaaactgtatgggatcaaggatgtaaatggaaaaggtgtcaagtccaattggagtgaagcatcaatggaacatctgaaggaaaaaggactatctcaacaaatgaggatttcaactaaacaaaagtgcctaaatgttctgcgaaaagtattttcacaatgtgttggagaaataatagaggccatggctgggtatattcccctaccggcaatcatggcaaaactgttatctgataatgggaatcaagagttcggtgatttcaaacttgtgatacacagaatgttatctatgtatctttacgaaaaaagaatactggaaacggctaagtcagtaattgaggatgactcattttacaccttgagcttattaaagagaggagtttgtcatgggtttgccccacagactttcgtatgctgcatatgcaactgttcactttctaaagaaggtgctatttcagccgtacgtttgttcagttgcgggcatgcaacacatcttcagtgtgagtctgagcagaccaggtcatccaatcaggaatccaaagagggatgccctgtttgtctctcaatgagtgatacgcaagctcgaagcaaatcacctatgtttgagaatgggctaatgaagtattctggggctgaacatgaagtgtcacatggcatgtatcagattcatgaagttgatcatgctgagagatctcgtgggcttcaacagatgtcacggtatgaaatactgaataatcttcagaaagcgcagaagtcctttcatatagaaaccgtacctccattgaaacttgcaccgccagctatataccatgagaagatacagaagaggaccacttcggttggtgaaactagcaaacattctgttagaagtcagaaaccccagaaaatttggcaaatgaaggagaaaaaatcaaaagaggctgggagtcatcatccacaaaagtcaagttttctacgttaatagaagaaaagattgctgatttgttaagtatgaaaccagatccaaactgattgttaatttgcttcatgccatcaccacgatcgaatcttcaagactacaaatttgtcagcgtgatggagcctgcccatcagtacatagcttttttttttgtcttggggatgcatcctgttggtttatcatcttctgcttaattacaggttctgtggagccaaggtgctttgggctagggaggaaattgtaacagtaaattttcatacagttcatcgtgattagttttgtgtacagagcagagcatacacgtggtgacatggtccctgtagagggacacattcgcagtaaaggtgggatgcctcgattcatactcaacaatgtaaagtaaaggtgggatacctcaattcatgatcattgtaaaatacgtgcacagtataacacaggagcactggctgagtggcatgtatccttgcagttcatcgcgattaatctctgtacagagctgttatactgtcggttttgatatcagttgcaattacacatctgctacagttttgtagtatcagatatcagaacacgtcgggcccgcagaacgcctggaagctcgtagttgtcggcgccgagcatcctgtcgccattgggttgcgctgtactgtac

SEQ ID NO: 8651 - DNA, 6523 bp, Zea Mays
caggcgcatcgcgaaaaagctcgcaaaatcgcagcacactagcacagaaccttggacgcgaaggcgtcataccccgatgccggcgtcgtcgtcgccggcgatggcgtcgcagcatgcgccgccgaggcgggagctcgacctcgacgctttcctcccgtcctctccgacatcctccggggcctcggacgccgacccggccgacgatgaccaccgccgcgccgtcgacgacctgctccgcctcctctcctcctcagactcggactccgattccgaggagtctagccgcatcccaagcaccagcatccagacgctatcccgagtccaagccccggcgcctgtcgctgagccctcgccgtcgccttccccatccgcgtccccgtccccgaggagatccgcatcggccttgccgtcggagaccctctcctccctcgtcgcgagaaccttctcgagcaacggcgcttcctcgtcgtcgaagcccctcccctcgctcttccggggcgtccgccccagccccaaacccggcgccgcgcttgccgctgctgccgcagcgtcccgcgcggtcctcaccccacacgccgctgccatcaagtcgcgccgatcagtatcggcgcccgtggagaaagttctggaggaagaggggagtggctccgaaggctccaaggagttccttcccactgggagcttggaagcagaggtagaagagaagggtgattcggaagcggttgctgatgcgaccaagcaaactgcaggtgggaatgtgggtgcggaactgggagaggataaacaggcagaagtgggaggtgaagagaatgctgaggctataaagctggtggaggcaagtcctctggatgctctagctgcggaggattccagtgggcatgagcaaggtaatgatgccaatttggcggaaactgaccaagttgggaatcagattgaggctgtctatgaggaaaatgaggatgaccaaactggaggtgataatcatgttcaatcaggtcagggtatggatcttattgcgattgctttagaggaaagttctgatgatgaacatgaatttgaaagatctgacagtatcttgcaagaacaagtggaatctgggagcttaattgataaagtgattgaagatagggtagagcagctggaggccagcaggaaggctgagaacacagagaagaagctgaaggtgtcaatgaaaccgttggagtgggcagaggagcttgagaagaggcaggcctcgtctggtcaacattgggaggaaggagcagctgcgcagcccatgcaactagagggaatcggaaagggcccaccagctatcggttacatgcaaattgagatggacaatccagtaacccgtgtcatgtcctcaccgtcatttaggtcagaccatggctctccccaggtgctggctgttcataggagctatatagcaatgggcacatctaaaggtgctgtcatcgtcattccaagcaaatactccattcatcaagctgatgatacagatgcaaagatgctgttcttttggaaccaaggcgagaagactcaatcaccagtgactgccatgtgctttaaccagcaaggggaccttctgctagtaggatatggtgatggtcatatgacaatttgggatgtacagaaatctgcagcagcaaaagttatatatggcgagcatacagcaccagtagtgcatgcttgttttatccgccaatctaaagccatcactggggattcaaaaggggtagttctattgcacacattttccattatccccgtaattaatcgtttaactgtcaagggaactcagcgtctttttgatgggaatactggaattgtgctctcagcctgtcctcttgtaatggatgaatcttttggttttagtaattcatctgcccagggaaatcagacaacttcctccagtggtggtcttggcagcatgatgggtggtgttgttggaggcgtggttggagtagattctggatggaagtttttcaacgaaggctcttctccaatggaggatggtgttgtagtcatgtttattatgcatcaacatgctcttgtggttagactccgtaccaatattgaccatgttgaccatattgagaccttctctagaccagatggagcacgtgagggctccatcgcgtatgctgcgtggaaatatacatcatatttgaatgaatcgtcatcagtagatgaagaacgagtgtcatggctagcacttgcatgggaccgtcaagtgcaagttgcaaagtttgttaaatcaaagatatttaaacacaaagagtggaagcttgatagttcagctgttggtgttgcctggttagacgaccagatgttagttgtccttaatttgagagggcaactctgtttattctctaaagatggcagtgagcttcgcagaactacctttgttcctgatggccttctttttgatgacaccatattgcaccatgcacatttttttaacaggtttggtaacccagagaggcattttaacagttcagtagcggtaagaggtgctacagtgtatattcttgggccatcttttctcacggtttcccgacttcttccatggaaagagcgaattgaagcactaaagagggctggcgattggatgggtgcactagacatggcaatgaggctttatgatggtcagacacagggtgttgttgatctcccaagaacggttgattctattagagatgccataatgccttacttagtagagttgctgctatcatatataagttatgtttttgaatatatttcaattgcgctgccaaatcatactggaaaagggggagaatcaggtgttctaatagaggcagatcgatccctgcttacacaaagagatgagcagtacgctcgtgtaggaggggttgcagttgagtattgtgtccacattggacggaatgatatccttttcgatacagtcttctctaagtttgctgctgcagaaagtggaggtatgtttctggaggtgctagagccttatatattgaaggatatgcttggttctctgccccctgagattatgcaagcactagtggagcattatagtggcaaagggtggttgcaacgagttgaacaatgcatccttcacatggatatttcttcattggactttaatcaggtagtcagactttgtcgtgaacatgggctatatggtgcactaatttatttatttaaccaaggcctgaatgatttccgtacaccactagaggaacttctatcagtcgttcagaacaccaacagtaaagatgatgcttctagtggatacaggatgcttgtttatctgaaatattgctttcagggtttggcatttcctccagggcatggaataattccccaatcccggcttcattcagtgagggaagaactccttcaatttctgcttgaagaatctaagccactcacttctgaagtatttaagggtttcaatgcttcttgtggaaagtgcctaaacatatgctatctgctatggttggatactgaagctactttggaagtcatcaaatgtgcttttgtacaggataactttgagtctagagatgaacttccgagtactgtcaatacatctgcttcagataatgaagatggtattgatgctggaagaccagagggccaaaatgctatggtacaaaatgtggttgatgccatcattgacatagttggtttggaaaatgatgtgattcggtctgttatgggtagaactgaatcagaattatggccttcggagaaggattttggctatttaatggagtttgtgtccttttttgtttctcacaaaagggctaatgcatctaagagggttgttatgcacattcttacttatctcatttcgtcatatgatgacacaagaacaaggattcagaaagaaaaagaagttcttcaactcttcaatgcggttccccgaaacgattggaattcggattttgtcttgaacctttgttcagatgctcatttttatcaggcctgtggtttgatatttacagccaggaatcagaatttggctgctttagatagttacatgaaggataaagaggaacctttccatgcttttatcttcattgataagaagttactagaattggttgacgatgaagctttgtcgtttcataccacagtaatatctcgctttcctgagctagtcaagctaagcagggaatgtgcatttgtcttggcgattgatcatttctgtgataagatacagcaaatattagcagagcttcgttctgaccgacacagcctctttcttttcttgaaaactgctattgaagtacacttgtctggaaaacttgacttcagtaagcttgaattaagaaacaaacaaactgttgaactccagtactcttctactgaagttgaagcttatcagcagaggctatcaaatctctccaagttatgccacaatcctgtttacatcgacgacgagttagttgagctttatctggagcttttatgtcagtatgagcgaaggtcagttctgaagtttctggagacttttgacagttacagattggaacggtgcttgcatctttgcctagattatggagttacagatgctgctgctttcttgcaagagagggttggtgatgttgggagtgcccttgaccttattctggctggacttgatgagaaaattagcttatttatctcttctgtggaaagtactttctctggcgtcgcatcaaaaagtatcgctgaaattaagcaaccagacatcgttctagaaatgagtgaggctcatccagtgcttgatgcattgcatgcctccattggattgtgccaaaggaattcacagcgcttggacccagaggaatctcagtccctttggttccaactccttgactcgaaattattcaatagcgcatctagaaagacaatgcgagcctattgctcttctcagagccattaaaaaaactgtatgggatcaaggatgtaaatggaaaaggtgtcaagtccaattggagtgaagcatcaatggaacatctgaaggaaaaaggactatctcaacaaatgaggatttcaactaaacaaaagtgcctaaatgttctgcgaaaagtattttcacaatgtgttggagaaataatagaggccatggctgggtatattcccctaccggcaatcatggcaaaactgttatctgataatgggaatcaagagttcggtgatttcaaacttgtgatacacagaatgttatctatgtatctttacgaaaaaagaatactggaaacggctaagtcagtaattgaggatgactcattttacaccttgagcttattaaagagaggagtttgtcatgggtttgccccacagactttcgtatgctgcatatgcaactgttcactttctaaagaaggtgctatttcagccgtacgtttgttcagttgcgggcatgcaacacatcttcagtgtgagtctgagcagaccaggtcatccaatcaggaatccaaagagggatgccctgtttgtctctcaatgagtgatacgcaagctcgaagcaaatcacctatgtttgagaatgggctaatgaagtattctggggctgaacatgaagtgtcacatggcatgtatcagattcatgaagttgatcatgctgagagatctcgtgggcttcaacagatgtcacggtatgaaatactgaataatcttcagaaagcgcagaagtcctttcatatagaaaccgtacctccattgaaacttgcaccgccagctatataccatgagaagatacagaagaggaccacttcggttggtgaaactagcaaacattctgttagaagtcagaaaccccagaaaatttggcaaatgaaggagaaaaaatcaaaagaggctgggagtcatcatccacaaaagtcaagttttctacgttaatagaagaaaagattgctgatttgttaagtatgaaaccagatccaaactgattgttaatttgcttcatgccatcaccacgatcgaatcttcaagactacaaatttgtcagcgtgatggagcctgcccatcagtacatagcttttttttttgtcttggggatgcatcctgttggtttatcatcttctgcttaattacaggttctgtggagccaaggtgctttgggctagggaggaaattgtaacagtaaattttcatacagttcatcgtgattagttttgtgtacagagcagagcatacacgtggtgacatggtccctgtagagggacacattcgcagtaaaggtgggatgcctcgattcatactcaacaatgtaaagtaaaggtgggatacctcaattcatgatcattgtaaaatacgtgcacagtataacacaggagcactggctgagtggcatgtatccttgcagttcatcgcgattaatctctgtacagagctgttatactgtcggttttgatatcagttgcaattacacatctgctacagttttgtagtatcagatatcagaacacgtcgggcccgcagaacgcctggaagctcgtagttgtcggcgccgagcatcctgtcgccattgggttgcgctgtactgtac

SEQ ID NO: 8652 - DNA, 6720 bp, Zea Mays
caggcgcatcgcgaaaaagctcgcaaaatcgcagcacactagcacagaaccttggacgcgaaggcgtcataccccgatgccggcgtcgtcgtcgccggcgatggcgtcgcagcatgcgccgccgaggcgggagctcgacctcgacgctttcctcccgtcctctccgacatcctccggggcctcggacgccgacccggccgacgatgaccaccgccgcgccgtcgacgacctgctccgcctcctctcctcctcagactcggactccgattccgaggagtctagccgcatcccaagcaccagcatccagacgctatcccgagtccaagccccggcgcctgtcgctgagccctcgccgtcgccttccccatccgcgtccccgtccccgaggagatccgcatcggccttgccgtcggagaccctctcctccctcgtcgcgagaaccttctcgagcaacggcgcttcctcgtcgtcgaagcccctcccctcgctcttccggggcgtccgccccagccccaaacccggcgccgcgcttgccgctgctgccgcagcgtcccgcgcggtcctcaccccacacgccgctgccatcaagtcgcgccgatcagtatcggcgcccgtggagaaagttctggaggaagaggggagtggctccgaaggctccaaggagttccttcccactgggagcttggaagcagaggtagaagagaagggtgattcggaagcggttgctgatgcgaccaagcaaactgcaggtgggaatgtgggtgcggaactgggagaggataaacaggcagaagtgggaggtgaagagaatgctgaggctataaagctggtggaggcaagtcctctggatgctctagctgcggaggattccagtgggcatgagcaaggtaatgatgccaatttggcggaaactgaccaagttgggaatcagattgaggctgtctatgaggaaaatgaggatgaccaaactggaggtgataatcatgttcaatcaggtcagggtatggatcttattgcgattgctttagaggaaagttctgatgatgaacatgaatttgaaagatctgacagtatcttgcaagaacaagtggaatctgggagcttaattgataaagtgattgaagatagggtagagcagctggaggccagcaggaaggctgagaacacagagaagaagctgaaggtgtcaatgaaaccgttggagtgggcagaggagcttgagaagaggcaggcctcgtctggtcaacattgggaggaaggagcagctgcgcagcccatgcaactagagggaatcggaaagggcccaccagctatcggttacatgcaaattgagatggacaatccagtaacccgtgtcatgtcctcaccgtcatttaggtcagaccatggctctccccaggtgctggctgttcataggagctatatagcaatgggcacatctaaaggtgctgtcatcgtcattccaagcaaatactccattcatcaagctgatgatacagatgcaaagatgctgttcttttggaaccaaggcgagaagactcaatcaccagtgactgccatgtgctttaaccagcaaggggaccttctgctagtaggatatggtgatggtcatatgacaatttgggatgtacagaaatctgcagcagcaaaagttatatatggcgagcatacagcaccagtagtgcatgcttgttttatccgccaatctaaagccatcactggggattcaaaaggggtagttctattgcacacattttccattatccccgtaattaatcgtttaactgtcaagggaactcagcgtctttttgatgggaatactggaattgtgctctcagcctgtcctcttgtaatggatgaatcttttggttttagtaattcatctgcccagggaaatcagacaacttcctccagtggtggtcttggcagcatgatgggtggtgttgttggaggcgtggttggagtagattctggatggaagtttttcaacgaaggctcttctccaatggaggatggtgttgtagtcatgtttattatgcatcaacatgctcttgtgactccgtaccaatattgaccatgttgaccatattgagaccttctctagaccagatggagcacgtgagggctccatcgcgtatgctgcgtggaaatatacatcatatttgaatgaatcgtcatcagtagatgaagaacgagtgtcatggctagcacttgcatgggaccgtcaagtgcaagttgcaaagtttgttaaatcaaagatatttaaacacaaagagtggaagcttgatagttcagctgttggtgttgcctggttagacgaccagatgttagttgtccttaatttgagagggcaactctgtttattctctaaagatggcagtgagcttcgcagaactacctttgttcctgatggccttctttttgatgacaccatattgcaccatgcacatttttttaacaggtttggtaacccagagaggcattttaacagttcagtagcggtaagaggtgctacagtgtatattcttgggccatcttttctcacggtttcccgacttcttccatggaaagagcgaattgaagcactaaagagggctggcgattggatgggtgcactagacatggcaatgaggctttatgatggtcagacacagggtgttgttgatctcccaagaacggttgattctattagagatgccataatgccttacttagtagagttgctgctatcatatataagttatgtttttgaatatatttcaattgcgctgccaaatcatactggaaaagggggagaatcaggtgttctaatagaggcagatcgatccctgcttacacaaagagatgagcagtacgctcgtgtaggaggggttgcagttgagtattgtgtccacattggacggaatgatatccttttcgatacagtcttctctaagtttgctgctgcagaaagtggaggtatgtttctggaggtgctagagccttatatattgaaggatatgcttggttctctgccccctgagattatgcaagcactagtggagcattatagtggcaaagggtggttgcaacgagttgaacaatgcatccttcacatggatatttcttcattggactttaatcaggtagtcagactttgtcgtgaacatgggctatatggtgcactaatttatttatttaaccaaggcctgaatgatttccgtacaccactagaggaacttctatcagtcgttcagaacaccaacagtaaagatgatgcttctagtggatacaggatgcttgtttatctgaaatattgctttcagggtttggcatttcctccagggcatggaataattccccaatcccggcttcattcagtgagggaagaactccttcaatttctgcttgaagaatctaagccactcacttctgaagtatttaagggtttcaatgcttcttgtggaaagtgcctaaacatatgctatctgctatggttggatactgaagctactttggaagtcatcaaatgtgcttttgtacaggataactttgagtctagagatgaacttccgagtactgtcaatacatctgcttcagataatgaagatggtattgatgctggaagaccagagggccaaaatgctatggtacaaaatgtggttgatgccatcattgacatagttggtttggaaaatgatgtgattcggtctgttatgggtagaactgaatcagaattatggccttcggagaaggattttggctatttaatggagtttgtgtccttttttgtttctcacaaaagggctaatgcatctaagagggttgttatgcacattcttacttatctcatttcgtcatatgatgacacaagaacaaggattcagaaagaaaaagaagttcttcaactcttcaatgcggttccccgaaacgattggaattcggattttgtcttgaacctttgttcagatgctcatttttatcaggcctgtggtttgatatttacagccaggaatcagaatttggctgctttagatagttacatgaaggataaagaggaacctttccatgcttttatcttcattgataagaagttactagaattggttgacgatgaagctttgtcgtttcataccacagtaatatctcgctttcctgagctagtcaagctaagcagggaatgtgcatttgtcttggcgattgatcatttctgtgataagatacagcaaatattagcagagcttcgttctgaccgacacagcctctttcttttcttgaaaactgctattgaagtacacttgtctggaaaacttgacttcagtaagcttgaattaagaaacaaacaaactgttgaactccagtactcttctactgaagttgaagcttatcagcagaggctatcaaatctctccaagttatgccacaatcctgtttacatcgacgacgagttagttgagctttatctggagcttttatgtcagtatgagcgaaggtcagttctgaagtttctggagacttttgacagttacagattggaacggtgcttgcatctttgcctagattatggagttacagatgctgctgctttcttgcaagagagggttggtgatgttgggagtgcccttgaccttattctggctggacttgatgagaaaattagcttatttatctcttctgtggaaagtactttctctggcgtcgcatcaaaaagtatcgctgaaattaagcaaccagacatcgttctagaaatgagtgaggctcatccagtgcttgatgcattgcatgcctccattggattgtgccaaaggaattcacagcgcttggacccagaggaatctcagtccctttggttccaactccttgactcgaaattattcaatagcgcatctagaaagacaatgcgagcctattgctgtaagcctgtgataatttgggggaagttttttccaaactgttctcaatttttgtcatgctcatagtttgctgaagacatatttaaggggtgtttgtttgagattataatatgtccagattatataatctaataaattttgaactaacactttcttcaaaatttattggattatataatctggacagattataatcccaaacaaacaccccattatatatttatattttgtactgatgtatactagtacttcttccaaattgttgggttattaattcagcttctcagagccattaaaaaaactgtatgggatcaaggatgtaaatggaaaaggtgtcaagtccaattggagtgaagcatcaatggaacatctgaaggaaaaaggactatctcaacaaatgaggatttcaactaaacaaaagtgcctaaatgttctgcgaaaagtattttcacaatgtgttggagaaataatagaggccatggctgggtatattcccctaccggcaatcatggcaaaactgttatctgataatgggaatcaagagttcggtgatttcaaacttgtgatacacagaatgttatctatgtatctttacgaaaaaagaatactggaaacggctaagtcagtaattgaggatgactcattttacaccttgagcttattaaagagaggagtttgtcatgggtttgccccacagactttcgtatgctgcatatgcaactgttcactttctaaagaaggtgctatttcagccgtacgtttgttcagttgcgggcatgcaacacatcttcagtgtgagtctgagcagaccaggtcatccaatcaggaatccaaagagggatgccctgtttgtctctcaatgagtgatacgcaagctcgaagcaaatcacctatgtttgagaatgggctaatgaagtattctggggctgaacatgaagtgtcacatggcatgtatcagattcatgaagttgatcatgctgagagatctcgtgggcttcaacagatgtcacggtatgaaatactgaataatcttcagaaagcgcagaagtcctttcatatagaaaccgtacctccattgaaacttgcaccgccagctatataccatgagaagatacagaagaggaccacttcggttggtgaaactagcaaacattctgttagaagtcagaaaccccagaaaatttggcaaatgaaggagaaaaaatcaaaagaggctgggagtcatcatccacaaaagtcaagttttctacgttaatagaagaaaagattgctgatttgttaagtatgaaaccagatccaaactgattgttaatttgcttcatgccatcaccacgatcgaatcttcaagactacaaatttgtcagcgtgatggagcctgcccatcagtacatagcttttttttttgtcttggggatgcatcctgttggtgagatcctcttcccctgcaccatggtcagaggttctgtggagccaaggtgctttgggctagggaggaaattgtaacagtaaattttcatacagttcatcgtgattagttttgtgtacagagcagagcatacacgtggtgacatggtccctgtagagggacacattcgcagtaaagtataacacaggagcactggctgagtggcatgtatccttgcagttcatcgcgattaatctctgtacagagctgttatactgtcggttttgatatcagttgcaattacacatctgctacagttttgtagtatcagatatcagaacacgtcgggcccgcagaacgcctggaagctcgtagttgtcggcgccgagcatcctgtcgccattgggttgcgctgtactgtac

SEQ ID NO: 8653 - DNA, 6725 bp, Zea Mays
caggcgcatcgcgaaaaagctcgcaaaatcgcagcacactagcacagaaccttggacgcgaaggcgtcataccccgatgccggcgtcgtcgtcgccggcgatggcgtcgcagcatgcgccgccgaggcgggagctcgacctcgacgctttcctcccgtcctctccgacatcctccggggcctcggacgccgacccggccgacgatgaccaccgccgcgccgtcgacgacctgctccgcctcctctcctcctcagactcggactccgattccgaggagtctagccgcatcccaagcaccagcatccagacgctatcccgagtccaagccccggcgcctgtcgctgagccctcgccgtcgccttccccatccgcgtccccgtccccgaggagatccgcatcggccttgccgtcggagaccctctcctccctcgtcgcgagaaccttctcgagcaacggcgcttcctcgtcgtcgaagcccctcccctcgctcttccggggcgtccgccccagccccaaacccggcgccgcgcttgccgctgctgccgcagcgtcccgcgcggtcctcaccccacacgccgctgccatcaagtcgcgccgatcagtatcggcgcccgtggagaaagttctggaggaagaggggagtggctccgaaggctccaaggagttccttcccactgggagcttggaagcagaggtagaagagaagggtgattcggaagcggttgctgatgcgaccaagcaaactgcaggtgggaatgtgggtgcggaactgggagaggataaacaggcagaagtgggaggtgaagagaatgctgaggctataaagctggtggaggcaagtcctctggatgctctagctgcggaggattccagtgggcatgagcaaggtaatgatgccaatttggcggaaactgaccaagttgggaatcagattgaggctgtctatgaggaaaatgaggatgaccaaactggaggtgataatcatgttcaatcaggtcagggtatggatcttattgcgattgctttagaggaaagttctgatgatgaacatgaatttgaaagatctgacagtatcttgcaagaacaagtggaatctgggagcttaattgataaagtgattgaagatagggtagagcagctggaggccagcaggaaggctgagaacacagagaagaagctgaaggtgtcaatgaaaccgttggagtgggcagaggagcttgagaagaggcaggcctcgtctggtcaacattgggaggaaggagcagctgcgcagcccatgcaactagagggaatcggaaagggcccaccagctatcggttacatgcaaattgagatggacaatccagtaacccgtgtcatgtcctcaccgtcatttaggtcagaccatggctctccccaggtgctggctgttcataggagctatatagcaatgggcacatctaaaggtgctgtcatcgtcattccaagcaaatactccattcatcaagctgatgatacagatgcaaagatgctgttcttttggaaccaaggcgagaagactcaatcaccagtgactgccatgtgctttaaccagcaaggggaccttctgctagtaggatatggtgatggtcatatgacaatttgggatgtacagaaatctgcagcagcaaaagttatatatggcgagcatacagcaccagtagtgcatgcttgttttatccgccaatctaaagccatcactggggattcaaaaggggtagttctattgcacacattttccattatccccgtaattaatcgtttaactgtcaagggaactcagcgtctttttgatgggaatactggaattgtgctctcagcctgtcctcttgtaatggatgaatcttttggttttagtaattcatctgcccagggaaatcagacaacttcctccagtggtggtcttggcagcatgatgggtggtgttgttggaggcgtggttggagtagattctggatggaagtttttcaacgaaggctcttctccaatggaggatggtgttgtagtcatgtttattatgcatcaacatgctcttgtggttagactccgtaccaatattgaccatgttgaccatattgagaccttctctagaccagatggagcacgtgagggctccatcgcgtatgctgcgtggaaatatacatcatatttgaatgaatcgtcatcagtagatgaagaacgagtgtcatggctagcacttgcatgggaccgtcaagtgcaagttgcaaagtttgttaaatcaaagatatttaaacacaaagagtggaagcttgatagttcagctgttggtgttgcctggttagacgaccagatgttagttgtccttaatttgagagggcaactctgtttattctctaaagatggcagtgagcttcgcagaactacctttgttcctgatggccttctttttgatgacaccatattgcaccatgcacatttttttaacaggtttggtaacccagagaggcattttaacagttcagtagcggtaagaggtgctacagtgtatattcttgggccatcttttctcacggtttcccgacttcttccatggaaagagcgaattgaagcactaaagagggctggcgattggatgggtgcactagacatggcaatgaggctttatgatggtcagacacagggtgttgttgatctcccaagaacggttgattctattagagatgccataatgccttacttagtagagttgctgctatcatatataagttatgtttttgaatatatttcaattgcgctgccaaatcatactggaaaagggggagaatcaggtgttctaatagaggcagatcgatccctgcttacacaaagagatgagcagtacgctcgtgtaggaggggttgcagttgagtattgtgtccacattggacggaatgatatccttttcgatacagtcttctctaagtttgctgctgcagaaagtggaggtatgtttctggaggtgctagagccttatatattgaaggatatgcttggttctctgccccctgagattatgcaagcactagtggagcattatagtggcaaagggtggttgcaacgagttgaacaatgcatccttcacatggatatttcttcattggactttaatcaggtagtcagactttgtcgtgaacatgggctatatggtgcactaatttatttatttaaccaaggcctgaatgatttccgtacaccactagaggaacttctatcagtcgttcagaacaccaacagtaaagatgatgcttctagtggatacaggatgcttgtttatctgaaatattgctttcagggtttggcatttcctccagggcatggaataattccccaatcccggcttcattcagtgagggaagaactccttcaatttctgcttgaagaatctaagccactcacttctgaagtatttaagggtttcaatgcttcttgtggaaagtgcctaaacatatgctatctgctatggttggatactgaagctactttggaagtcatcaaatgtgcttttgtacaggataactttgagtctagagatgaacttccgagtactgtcaatacatctgcttcagataatgaagatggtattgatgctggaagaccagagggccaaaatgctatggtacaaaatgtggttgatgccatcattgacatagttggtttggaaaatgatgtgattcggtctgttatgggtagaactgaatcagaattatggccttcggagaaggattttggctatttaatggagtttgtgtccttttttgtttctcacaaaagggctaatgcatctaagagggttgttatgcacattcttacttatctcatttcgtcatatgatgacacaagaacaaggattcagaaagaaaaagaagttcttcaactcttcaatgcggttccccgaaacgattggaattcggattttgtcttgaacctttgttcagatgctcatttttatcaggcctgtggtttgatatttacagccaggaatcagaatttggctgctttagatagttacatgaaggataaagaggaacctttccatgcttttatcttcattgataagaagttactagaattggttgacgatgaagctttgtcgtttcataccacagtaatatctcgctttcctgagctagtcaagctaagcagggaatgtgcatttgtcttggcgattgatcatttctgtgataagatacagcaaatattagcagagcttcgttctgaccgacacagcctctttcttttcttgaaaactgctattgaagtacacttgtctggaaaacttgacttcagtaagcttgaattaagaaacaaacaaactgttgaactccagtactcttctactgaagttgaagcttatcagcagaggctatcaaatctctccaagttatgccacaatcctgtttacatcgacgacgagttagttgagctttatctggagcttttatgtcagtatgagcgaaggtcagttctgaagtttctggagacttttgacagttacagattggaacggtgcttgcatctttgcctagattatggagttacagatgctgctgctttcttgcaagagagggttggtgatgttgggagtgcccttgaccttattctggctggacttgatgagaaaattagcttatttatctcttctgtggaaagtactttctctggcgtcgcatcaaaaagtatcgctgaaattaagcaaccagacatcgttctagaaatgagtgaggctcatccagtgcttgatgcattgcatgcctccattggattgtgccaaaggaattcacagcgcttggacccagaggaatctcagtccctttggttccaactccttgactcgaaattattcaatagcgcatctagaaagacaatgcgagcctattgctgtaagcctgtgataatttgggggaagttttttccaaactgttctcaatttttgtcatgctcatagtttgctgaagacatatttaaggggtgtttgtttgagattataatatgtccagattatataatctaataaattttgaactaacactttcttcaaaatttattggattatataatctggacagattataatcccaaacaaacaccccattatatatttatattttgtactgatgtatactagtacttcttccaaattgttgggttattaattcagcttctcagagccattaaaaaaactgtatgggatcaaggatgtaaatggaaaaggtgtcaagtccaattggagtgaagcatcaatggaacatctgaaggaaaaaggactatctcaacaaatgaggatttcaactaaacaaaagtgcctaaatgttctgcgaaaagtattttcacaatgtgttggagaaataatagaggccatggctgggtatattcccctaccggcaatcatggcaaaactgttatctgataatgggaatcaagagttcggtgatttcaaacttgtgatacacagaatgttatctatgtatctttacgaaaaaagaatactggaaacggctaagtcagtaattgaggatgactcattttacaccttgagcttattaaagagaggagtttgtcatgggtttgccccacagactttcgtatgctgcatatgcaactgttcactttctaaagaaggtgctatttcagccgtacgtttgttcagttgcgggcatgcaacacatcttcagtgtgagtctgagcagaccaggtcatccaatcaggaatccaaagagggatgccctgtttgtctctcaatgagtgatacgcaagctcgaagcaaatcacctatgtttgagaatgggctaatgaagtattctggggctgaacatgaagtgtcacatggcatgtatcagattcatgaagttgatcatgctgagagatctcgtgggcttcaacagatgtcacggtatgaaatactgaataatcttcagaaagcgcagaagtcctttcatatagaaaccgtacctccattgaaacttgcaccgccagctatataccatgagaagatacagaagaggaccacttcggttggtgaaactagcaaacattctgttagaagtcagaaaccccagaaaatttggcaaatgaaggagaaaaaatcaaaagaggctgggagtcatcatccacaaaagtcaagttttctacgttaatagaagaaaagattgctgatttgttaagtatgaaaccagatccaaactgattgttaatttgcttcatgccatcaccacgatcgaatcttcaagactacaaatttgtcagcgtgatggagcctgcccatcagtacatagcttttttttttgtcttggggatgcatcctgttggtgagatcctcttcccctgcaccatggtcagaggttctgtggagccaaggtgctttgggctagggaggaaattgtaacagtaaattttcatacagttcatcgtgattagttttgtgtacagagcagagcatacacgtggtgacatggtccctgtagagggacacattcgcagtaaagtataacacaggagcactggctgagtggcatgtatccttgcagttcatcgcgattaatctctgtacagagctgttatactgtcggttttgatatcagttgcaattacacatctgctacagttttgtagtatcagatatcagaacacgtcgggcccgcagaacgcctggaagctcgtagttgtcggcgccgagcatcctgtcgccattgggttgcgctgtactgtac

SEQ ID NO: 8654 - DNA, 1107 bp, Zea Mays
atcaacatcactaccccgctccctccctctctgcttgtcgtatgatgtcgtccgaggcgtcgaaggtggcggtgccggagtcggtgctccgcaagcggaagcgcgaggaacagtgggccaccgagaagaaggagaaggctctggtcaagaagaagaagtccatcgagagccgcaagctcatcttcacccgtgcaaagcagtacgccgaggaatatgatgcccaggagaaggaactggtgcagcttaagcgcgaggcccgtttgaagggtggtttctatgtcagtcctgaggcaaagctgctctttgtggtccgcatccggggtattaatgccatgcaccctaagaccaggaagatcttgcagcttctgcgattgaggcagatcttcaatggcgtgttcctcaaagtcaacaaggcgactattgacatgctacgcagggttgatccatatgatgcatatgggtacccaaacttgaacagtgtcagggagttgatctacaagaggggctatggaaatctgaacaagcagaggatccctctgtccaacaaccaagtcatcgaggagggcttggacaagcaaaaaatcatctgcgtcgaggatcttgttcacgagatcatgactgttggcccacacttcaaggaggcgaacaacttcctgtggccattcaagttgaaggcaccgctgggaggcctgaagaagaagaggaaccactatgtggagggcggtgatgccggtaaccgcgagaactacatcaatgagctcatcaaaaggatgaattaggttcacgatcaaggtcattgatagtaccctgtgctctaagtgacttcttgtgctatccttattttatattagaaagttggatcgtggatgaatatgcatgcagttttgatgtttcgaactagatgtgtatggaagaaatctgatcttctttccggaggtttgggattattatttaaagcatttcgtatcctaagatgttagcatcagtctgtccaatacgcctttcgtaagtactacggtctgttagcactcgcttgctcatccagctgaggattataccgagacgatcataacaccatgaaatagggaaatataaccaaaaaagaaa

SEQ ID NO: 8655 - DNA, 2500 bp, Zea Mays
aaaaatctcccgcacgggtgtactagcattttaacgccgcagctcatcgtctctctctccccgcccgccgcctatattcctttgaccgaccgccgctgcgcccactcctgttcgttcgttaagccctctgaccggccgaaaccccggcggcctcctggaggttccggggttgagttcggtctgagctgctgctgccggcggaggcattcccttgtcgtttcttggagtgtcctggtggtggtgaccggtggatatgaacactgtgtgtgaagtttgtggggatattggttacagacaacttctgctttgttgcagagactgcaagcgttgtgctgtgcaccaatactgtttggacaaagttgtctacgaggcatcattaataaaatggttctgttatgaatgcctacaaaggcgtggtgaagttactcgcatcagttctctagagaagttgtcaagtgaaagaccactaagtcaggtccattctcgttctccagtacagcagctaattaccaagagtgtagagtcagtaagggatgcagggccttattcacccaatggtggttgtgaggaatcattttcctgccctggcataaaaaacaccccaagtgttcgagaaagaagtgtagatcccattaatatttcaagtgattctcatgataccatagaagcatccgaaagcagtgaaagattcatggaatgccaaaaagctagcttgtgtcgtcgcaggaaaactgtgaagatggctatggtgtcctcatcatctgaggagtcaggagaagacactatctctgaaaacgtatctttggggtatgttttggcatgtagaagttctctatctaaagcacaaaagaagagagtaacgaagcttattcaggaaattcaacctgaattcacagtttttatatcaataatgcggatgagcaatgtgaaactcccaggtcctcttctggtaactccactactcatattgaatagtcaactcatttatatcaacattaactgtttgtaatgcctccattccaaattataagacattttgacttatagacacatagcttttgcaatgcacttatatatataccataataaaatcaatatatccagaaaaaccaaaacatcttataatttggaacgaagggagtagataatagtgccaatgtatgggaacctatcagattctggttgttatgaaatcttcttagcatcttgctccatttgctatcagggaattaccaaggaatatgcaattgcacatttcccagataaaaccacaaatgtcactcttgagacgcctggcaagagcaagaagtggcatcccaaattctacaaaagagatgaaagtagaaagaacttgcttatgggacaatggctagactttgtccgtgacaatcatgtgcaggagggagatatctgcctctttttaccgacaaaagatgagataagacacacatttatggtctatattcttcatgaaacaacccattctagatgtggggctggctttcaaagggttggcccatgccttggtggtgcatccagtgcaaagatggcttcagaagttcatattgaggatgaaccaaccgctggagaacatgtttcgtcggacagtgatatgccagaaaattctcatgaacctctggagagcggagactcggatgatccatttgaacctccatactttgtaccatgcaggagtcctctatctaaatcccaaaagagaatggttgagcagcgagtgcgagctatccgatctgaagttcccatttgtgtggcagtaatgaagaacaataacgttggcattgctcagcgttggatgctagaattatgttcacgatatgcttcggtatatctcccaactaaagggcaaaacatattgctccagtgcaaggggaagacgtgggaagccaaaatgatgtttcataatggcagaaggtggtttcttaatggaggttggcccgattttgctcgtggcaatggcctgcgcgtcggtgacatgtgtctattcgaactgaagaagaaaaagagtacgcttaccatggcagtccatatcattcgcaaggagcagttttaggttgggctggcatgtagttaatccatggttgtggctgatctctggatggattagagaccaatctcaatctgtaacgtttgttggtaggctggtagctatctgctgacaacatgttttagcatgatgtatatataacatcctttattatgccgaaatgtcgccttgcttttacttatgtgtacatgtagcacagttttgtttgcttttcaaaatttgattgtacggcagtaggttgaacatgcagcttgagtttcagccgcactaggtcgcctctccacagaaaacagaaagtgaagatggagaatatgcaatgtgtttggaagcaaaactaatttaggtaaacaaatgtaatgaaattctcaaagcggtttgcacaatcctctgtttcttatcttgatcttctctttgagtttgtcagctgcaataaaa

SEQ ID NO: 8656 - DNA, 2990 bp, Zea Mays
gcaaaagagagcgtcgcaaaaatctcccgcacgggtgtactagcattttaacgccgcagctcatcgtctctctctccccgcccgccgcctatattcctttgaccgaccgccgctgcgcccactcctgttcgttcgttaagccctctgaccggccgaaaccccggcggcctcctggaggttccggggttgagttcggtctgagctgctgctgccggcggaggcattcccttgtcgtttcttggagtgtcctggtggtggtgaccggtggatatgaacactgtgtgtgaagtttgtggggatattggttacagacaacttctgctttgttgcagagactgcaagcgttgtgctgtgcaccaatactgtttggacaaagttgtctacgaggcatcattaataaaatggttctgttatgaatgcctacaaaggcgtggtgaagttactcgcatcagttctctagagaagttgtcaagtgaaagaccactaagtcaggtccattctcgttctccagtacagcagctaattaccaagagtgtagagtcagtaagggatgcagggccttggagagatcggaaaaatgaatcaattgcgactaaatatccatctctcaacagaacatatccttcaattaagaagcacactaaaaagaagccgattgtgaaaccaatgggtaactgcacaaatagaaaagtgcgaatggctaaagttaccacccatacaagtgccgaagcgtcacgttcttgtgaaaccattgggacagaatcatctaagagcaaccatgggaagaaccagcaggtggaccatgcaaaccctgtcgcattgaacactgagcagtctttccctttgattgtgaatagcttgggtacattgggagataatcaccagtatcacctcttagaaacaacagaagggttggcttgcaaattcaagaaagttccacaatcactcgcagcaccattgaaaagattagagaagagagacaatgtggttttgggatcaaataatttagggtcatcttgtttcacagctgaccttggaagctcggttcttggaaaaagtggagacaaatcgaatagaatgaaggatattggtgcaaacttgtcttccaaacacaatgatcatggcaatcaggcaaatcaacacactttagttggctcgaagaacatggaaggcaagtctgtaaaggctaaacatactgtggttgatgcacataaaaacacgtcttggacagtggactcactgataaacgtcaaggacaagtctgaagtatatggtgatagtaatagggatatcttaaatgatgtcacagtccagctggatcatagggctagcaatgagttgctgccgagaagcacggccaccaatataccacagctagccactctggaaaacgatgttgtggacacagtcatgccatattcacccaatggtggttgtgaggaatcattttcctgccctggcataaaaaacaccccaagtgttcgagaaagaagtgtagatcccattaatatttcaagtgattctcatgataccatagaagcatccgaaagcagtgaaagattcatggaatgccaaaaagctagcttgtgtcgtcgcaggaaaactgtgaagatggctatggtgtcctcatcatctgaggagtcaggagaagacactatctctgaaaacgtatctttggggtatgttttggcatgtagaagttctctatctaaagcacaaaagaagagagtaacgaagcttattcaggaaattcaacctgaattcacagtttttatatcaataatgcggatgagcaatgtgaaactcccaggtcctcttctgggaattaccaaggaatatgcaattgcacatttcccagataaaaccacaaatgtcactcttgagacgcctggcaagagcaagaagtggcatcccaaattctacaaaagagatgaaagtagaaagaacttgcttatgggacaatggctagactttgtccgtgacaatcatgtgcaggagggagatatctgcctctttttaccgacaaaagatgagataagacacacatttatggtctatattcttcatgaaacaacccattctagatgtggggctggctttcaaagggttggcccatgccttggtggtgcatccagtgcaaagatggcttcagaagttcatattgaggatgaaccaaccgctggagtcctctatctaaatcccaaaagagaatggttgagcagcgagtgcgagctatccgatctgaagttcccatttgtgtggcagtaatgaagaacaataacgttggcattgctcagcgttggatgctagaattatgttcacgatatgcttcggtatatctcccaactaaagggcaaaacatattgctccagtgcaaggggaagacgtgggaagccaaaatgatgtttcataatggcagaaggtggtttcttaatggaggttggcccgattttgctcgtggcaatggcctgcgcgtcggtgacatgtgtctattcgaactgaagaagaaaaagagtacgcttaccatggcagtccatatcattcgcaaggagcagttttaggttgggctggcatgtagttaatccatggttgtggctgatctctggatggattagagaccaatctcaatctgtaacgtttgttggtaggctggtagctatctgctgacaacatgttttagcatgatgtatatataacatcctttattatgccgaaatgtcgccttgcttttacttatgtgtacatgtagcacagttttgtttgcttttcaaaatttgattgtacggcagtaggttgaacatgcagcttgagtttcagccgcactaggtcgcctctccacagaaaacagaaagtgaagatggagaatatgcaatgtgtttggaagcaaaactaatttaggtaaacaaatgtaatgaaattctcaaagcggtttgcacaatcctctgtttcttatcttgatcttctctttgagtttgtcagctgcaataaaa

SEQ ID NO: 8657 - DNA, 3044 bp, Zea Mays
taacgccgcagctcatcgtctctctctccccgcccgccgcctatattcctttgaccgaccgccgctgcgcccactcctgttcgttcgttaagccctctgaccggccgaaaccccggcggcctcctggaggttccggggttgagttcggtctgagctgctgctgccggcggaggcattcccttgtcgtttcttggagtgtcctggtggtggtgaccggtggatatgaacactgtgtgtgaagtttgtggggatattggttacagacaacttctgctttgttgcagagactgcaagcgttgtgctgtgcaccaatactgtttggacaaagttgtctacgaggcatcattaataaaatggttctgttatgaatgcctacaaaggcgtggtgaagttactcgcatcagttctctagagaagttgtcaagtgaaagaccactaagtcaggtccattctcgttctccagtacagcagctaattaccaagagtgtagagtcagtaagggatgcagggccttggagagatcggaaaaatgaatcaattgcgactaaatatccatctctcaacagaacatatccttcaattaagaagcacactaaaaagaagccgattgtgaaaccaatgggtaactgcacaaatagaaaagtgcgaatggctaaagttaccacccatacaagtgccgaagcgtcacgttcttgtgaaaccattgggacagaatcatctaagagcaaccatgggaagaaccagcaggtggaccatgcaaaccctgtcgcattgaacactgagcagtctttccctttgattgtgaatagcttgggtacattgggagataatcaccagtatcacctcttagaaacaacagaagggttggcttgcaaattcaagaaagttccacaatcactcgcagcaccattgaaaagattagagaagagagacaatgtggttttgggatcaaataatttagggtcatcttgtttcacagctgaccttggaagctcggttcttggaaaaagtggagacaaatcgaatagaatgaaggatattggtgcaaacttgtcttccaaacacaatgatcatggcaatcaggcaaatcaacacactttagttggctcgaagaacatggaaggcaagtctgtaaaggctaaacatactgtggttgatgcacataaaaacacgtcttggacagtggactcactgataaacgtcaaggacaagtctgaagtatatggtgatagtaatagggatatcttaaatgatgtcacagtccagctggatcatagggctagcaatgagttgctgccgagaagcacggccaccaatataccacagctagccactctggaaaacgatgttgtggacacagtcatgccatattcacccaatggtggttgtgaggaatcattttcctgccctggcataaaaaacaccccaagtgttcgagaaagaagtgtagatcccattaatatttcaagtgattctcatgataccatagaagcatccgaaagcagtgaaagattcatggaatgccaaaaagctagcttgtgtcgtcgcaggaaaactgtgaagatggctatggtgtcctcatcatctgaggagtcaggagaagacactatctctgaaaacgtatctttggggtatgttttggcatgtagaagttctctatctaaagcacaaaagaagagagtaacgaagcttattcaggaaattcaacctgaattcacagtttttatatcaataatgcggatgagcaatgtgaaactcccaggtcctcttctgggaattaccaaggaatatgcaattgcacatttcccagataaaaccacaaatgtcactcttgagacgcctggcaagagcaagaagtggcatcccaaattctacaaaagagatgaaagtagaaagaacttgcttatgggacaatggctagactttgtccgtgacaatcatgtgcaggagggagatatctgcctctttttaccgacaaaagatgagataagacacacatttatggtctatattcttcatgaaacaacccattctagatgtggggctggctttcaaagggttggcccatgccttggtggtgcatccagtgcaaagatggcttcagaagttcatattgaggatgaaccaaccgagaacatgtttcgtcggacagtgatatgccagaaaattctcatgaacctctggagagcggagactcggatgatccatttgaacctccatactttgtaccatgcaggagtcctctatctaaatcccaaaagagaatggttgagcagcgagtgcgagctatccgatctgaagttcccatttgtgtggcagtaatgaagaacaataacgttggcattgctcagcgttggatgctagaattatgttcacgatatgcttcggtatatctcccaactaaagggcaaaacatattgctccagtgcaaggggaagacgtgggaagccaaaatgatgtttcataatggcagaaggtggtttcttaatggaggttggcccgattttgctcgtggcaatggcctgcgcgtcggtgacatgtgtctattcgaactgaagaagaaaaagagtacgcttaccatggcagtccatatcattcgcaaggagcagttttaggttgggctggcatgtagttaatccatggttgtggctgatctctggatggattagagaccaatctcaatctgtaacgtttgttggtaggctggtagctatctgctgacaacatgttttagcatgatgtatatataacatcctttattatgccgaaatgtcgccttgcttttacttatgtgtacatgtagcacagttttgtttgcttttcaaaatttgattgtacggcagtaggttgaacatgcagcttgagtttcagccgcactaggtcgcctctccacagaaaacagaaagtgaagatggagaatatgcaatgtgtttggaagcaaaactaatttaggtaaacaaatgtaatgaaattctcaaagcggtttgcacaatcctctgtttcttatcttgatcttctctttgagtttgtcagctgcaataaaa

SEQ ID NO: 8658 - DNA, 760 bp, Zea Mays
ccggaggagaaacaaaagacgcaagaagagcaagcagtaacgcgggaagcgagggggggcgggcccacggacaaaacagtggatagatataaacaagagggcgagcgcatcagctcggacttccccgccccgtccaagagcagcgccgtctcgtcgccatgggtctgcaggtcgtcctggcatcttcagcctgaaagagagagccaaatgggatgcttggaaggctgttgaagggaaatccaaggacgaagcaatggccgactacatcaccaaggtgaagcagctgctggaggccgccgccgcatccacctcctaggctactcaagggaaaacaaaaaccatgatccgcagtcgcatatacgtatacatgttgtcatgatatacgctcgccaataaatcttatcattgttgtactgcttggtatggcttctgatgccatatatactcatcacccttcaaactaaggctgtaaactcttgcgaaaacaaactggatgtccctgtgatactagcatatgctgaaatgtttaggctgggtcccactaacatcggcgtcgacggatgacatggcagtcgttattgcccggttggtctaaatgtcaactggtctgcgctttcgaccagttgacccgatcgataaccggattgattggtatcgacctgcctgctagagaattggttgatgctgattttgatagagaattggttgatgtcgattttgatcgatcgataccaatcatttgttgctatacaacaatttc

SEQ ID NO: 8659 - DNA, 887 bp, Zea Mays
agcaaaacctgctgtgtggtttaatttgtgacctcgccgtcgccggccggttcggttgttgcttgcttggtggcaacaagctcagtctctctggattaggtgggatggtaccgcccagcgtcgtcgctgatgtatggatggagtccgtggttcaggttccatccagagccaacgagacggaggagttcgaggagcacgccgagaaggccaagaccctgcctgccaccacgacgaacgagagcaagctcgtcctctacggcctctacaagcaggccaccgtcggcgacgtcagcaccggtcgtcctggcatcttcagcctgaaagagagagccaaatgggatgcttggaaggctgttgaagggaaatccaaggacgaagcaatggccgactacatcaccaaggtgaagcagctgctggaggccgccgccgcatccacctcctaggctactcaagggaaaacaaaaaccatgatccgcagtcgcatatacgtatacatgttgtcatgatatacgctcgccaataaatcttatcattgttgtactgcttggtatggcttctgatgccatatatactcatcacccttcaaactaaggctgtaaactcttgcgaaaacaaactggatgtccctgtgatactagcatatgctgaaatgtttaggctgggtcccactaacatcggcgtcgacggatgacatggcagtcgttattgcccggttggtctaaatgtcaactggtctgcgctttcgaccagttgacccgatcgataaccggattgattggtatcgacctgcctgctagagaattggttgatgctgattttgatagagaattggttgatgtcgattttgatcgatcgataccaatcatttgttgctatacaacaatttc

SEQ ID NO: 8660 - DNA, 3162 bp, Zea Mays
gtcccctcctcttgagtcttgacgaaagagagacagggaaagagggagaggcaagagtcgcagcctcgcagctctagacccagaccgcctccgcctccgccggtgatcgagtcgcgtcggcgctacattcaagctagaagacaataagcttcggcattcggaagccatgttcggctccaccaatccatttgggcagtcatccacaagcccatttggtaacaacaactcgtttggaactccccagggatttggccagtcttccactgctgccaacaatccctttgccccaaaaccatttggcagcccgaccacgccttttggggcacagactggaagctcgctctttgcaactacatctactggtgccttcggtcagcagcaatccgctcccgcatttggcacaacatccactggtgcctttggtcagcagcaatccactcccacgtttggcaccccatcctcctctcagttcgggagctctacaccagccttcggtgcatcccccactcctgcctttggtgccacatcctctgggtctttgttcggacagaagccaagttttgggggttttggatcatctcctagccagtcaagtccttttggtagcacgttccagcaaacacaaccaacatttggaacgacgccggcatttggtaccatgactactcctgcatttggtacaagtacaccagcctttggcaccacaactgcaccagccttcggtgccacgactaccccagcatttggttcaacatcaacatctttattcggtgcttctagcaccccagtgtttggttctacagcctttggcacatctgctactggttttggaacttcagggactacagcattcggtgtgagtagtactactacaggttttggatcttcaagcacaccttcatttggcacatcagctagcgtgttcggttttggttcttcaccatcttttggacaaacaacagtttcttctggcagcactccctttggaacaactccttcaccctttggtgcaccagttcctgcatttggctcgcagacagcagcaccagcttttggacaacctcagtttgctaatcaagctggaggaaccagaataaaaccttattctcaaacaccagatgttgacagtgctactagtggtactcagcctgctgcaaaacttgattccatatcggcaatgcctgaatacaaagacaagagtcatgaagaattgaggtgggaagactaccagcgtggagataagggtggaccaaacacttctggaactcaagcagtggcacctagctttccgtcactaatacaacagaatgctccaaacccattttcgacaagcaatccattttcaacaaacaatccatttgctcctaagcctgctccaactattacttcaccattcaacacctcatttaacaatgcatcagttacaagttcgagcccattcacatcatcccctagtaccacaatgtttgggcaaacaggtgtttctacactttcagcaagtaattcgccatcattgtttggaaataccaatccagctcctgttacatcatcattatttgccacatcagtgacaaataatccaagtccattcggcactggctcattattcgctaacactcaatcagccccattatttccctcagcatttgctcaaccgacatcaagtacaccggctttctcctctggcagcctatttggctcaactaatccgggcagtctgtttagcagcagcggtccttcacttttttcaacaccaacatttcaaccatcggcccctgctcaaacttcgaacttattctccttccaacctccaattcaaccagcttctacaggtggattccctggtttttccaatactacaaaccaagccttgatgggacagccaactcctaccctgtccagtatggtcatgcagcctgctcctgtttcaaatccatttgggatgcttccagcaatgcctcacatgtccattggaaatggtggatcttcaccttcagttcaatatggaatatcaagtttgccggttgtggagaagcttcttccaagtagatcattgtccatggcgtttcctaggcatttggcacagagaaggataaaactgctgccgagaaaatataatccaatatctgatggcaagtttcttctgttattcatataggttccattctttgctgatgatgaagaatctccagcaacaccaaaggcagacgctttttttgtccctagagagaacccaaggaatctggtaattcgtccaattgagcagtggccttcgcggagagaaactgaccgacaattgactgtgaagaatgctactgatttgaacaaatatgaagatgcttccattgaaagtgagcgtggtaagtctgcctctgccatgtcaccaagcagcaggcctcctgcagtggaaaatgacaatcagcatgaggctagggccatggctcaacatgggaatgggaatgctacttcagtcgagaggttattgcctaagcttccacgtgcagattacttcacagagcctagtatagaggagcttgcggccaaagaacgtgcggaggcaggctactgcggtcgagtgagggactttgttgtggggcgacatggctacggcagcatcatttttcttggggagacggacgtgaggtgcctggatctggagtcaatagtggagtttaacaaccgggaggtggttgtttacaaggacgacagcaagaagccccctgtgggtgaggggctgaacaaggctgcggaggtgactctactgaacatcaagtgcgtaaataagaagactggggaggagtactgtgaggggacaagggtggagaggtacagggagatgctgatgaagaaggcggaggagcagggcgcggagtttgtgtcctttgatgctgccaagggagagtggaagttcagggtgaagcatttcagcgcctatgggctcccttgttgttaagtattctgtttgttttgatggagcagtgataactaagttgcacgctttacgctcttgtcaaatagtatcatgcttgattctgttgtgctgctttgtacaatgttgctgctgttaaaatgcttgcaaattgcactgctctgctgctgagaacgtattctaattataagacgttttagtttttctaaacacatgattttttccctaaacac

SEQ ID NO: 8661 - DNA, 2812 bp, Zea Mays
atgtacaacggcatcgggctgcagaccgcgcgggggtcgggcaccaacgggtacgtccagaccaacaagttcttcatcaagccccgctccacatccggcgggggcccgggcggaccccacaggccgccgctccccgacgccaccggcgcggatggcggcgggctcggcgggatgcgcaagcccaacaaggagatcctcgagcacgaccgcaagcgccaggtcgagctcaatctgctcgtgctcagggacgcgctcgaggagcagggctacaccgaagacgagatcgaggagcgcgtagaggaggcgcgcaaggctgctgaggcagaggcggccgcggtcgcggcagcggaggaagcagggagcgttagcggcgccggtcgaccgcctctacccggcagagggtttacagacacacagagccaccatgttgcagcacggaaggagaaacaacttgagactctaagggctgctttagggctgaacgtggaggatgcaaagaagggggatgtagaaagtgatgtagaatctggggagcttgttcctggtaagtactatgaggaactggttactgttggggaaaataatagtaaggattcaaagaatgcaaagaagagcaagaagaaaaaagagaatgacaaaaggcgtcaacccaaaagttcgagaaagagcaagtatgactcagacttggatcacgatcataacacaaaaacgaagaagagttctcaccatgattcagatgatgattcagagactgattatgatgagaaaaaggaaaagaaatacaacaagaaacatcgtcttggttctgatgatgattctgaaaatgatcgaaagaaggcaaagcgtggaaagaactctggttctgagtctgatacagatagtggccatggcaaaaagaaaactaaacatgtaaagagtgatcagggtgggagaaagaagatacaagtgaagaactctcatcacgattccgagtctgacacagatagtagctatggcaagaaaacagaacatgcaaggaatgataggggtgagagaaagaagataccggtaaataattctcgtcatgatttcaaatctgatatagatagtggatatggcaagaaaacagaagatgcaaagagtgaacactatgagagaaagaagttattggtgaagagctctcgtcatgattctgagtctgatacagacagtggttatggcaagaagaaaatggaacatataaagaatgaacgcgatgagagaaagaaggtgctggtgaagaactctcgtcatgattctgagtctgatacagatagtggctatggcaagaagaaaatggaacatgcaaaaattgaacgtgatgagagaaggaaggtaccggtgaagagttctcgttatgattctgagtctgatactgatagtggctatggcaagaagaaaatggagcaaacaaagaatgtacgtgatgagaaaaggaaggtaccattgaagagttctcatcatgattctgagtctgatgcagatattgactataggaagaagaaaatagaacatacagagggtattcgtgatgagagaaagaagataccagcgagaagctctcgccatgattctgactctggtgcagataataatgggaaaaacaagagaccattgcaaagctctcgtcatgatttggaggatgagaagcctagatcgagaaattataattatggctctcgggcttccgagcatgagaaacatatgttgaaaaaggatgtgcaagagaaaagaaaagtagctacctcaagtgatagttcagattacagcagcagcctcagcagtagtgattctgacacgagtgcagatagctatgaggaacagaaaaggagtcaagctggagggagaagaaatgagctgactacacaaaggcagaaagaggaggaaagaaaagagcttgaaaagcaacagaagagagaggtagagaagaaagagctggataagcaaaagcaaagggaggaagagaggatggagatggagaaggagaagaaaaggcagcgagagagggaggaagagagacagagggagagagagcaatacgaaaggaaaggtggaaatgatgtggagagggacaacaaaaggaaactgatagatgatcggtatgatccaaattcaagtagagatagagaagagggatacagagactctcagaacagagatgacaatagaaggcaggaagagcatggtcaacacaatagatatatggatagtcatgattccaagaggtcaaggcatgactcgcattaccattcaaggagggattttgaacaacgctattctagagacgaacatagagacagaaggcgtcactaaatgtaagcttggaagaatgccgctctaggtggacaacttattctcagctatcacccataagttccagtcccagatcttttctgcggcagcaagaccaacccatcagtacctccgctgcagcattaatatctgcttttgtttgtatcatactttggattttactatgcaaagagcgaagtctgcaatatgtaatatgttgtggaacagacatgaacggtaggattttttttgttggaatttgtggtgcgcatgttgctgatcataattatgataagttttcttaagcttatatttgatgagctccaggtttttcaaaatttggtgcgcatgttagggttcttttcatgtttcatgtgtactgctcaagcctttagataagccttgatgtttgcaggccactttagattagaaaaacagcaccaagtttaatacgtgctactctttcaagtggtaaccaagcataaaaaaacctgaaaaagag

SEQ ID NO: 8662 - DNA, 2797 bp, Zea Mays
cccagcaaacccggcccgcatcgactggcatacttgatgcccatgtttagtacacaaaagtccattattcgtgtagctagtacagtatcacacacaggctgcttgcaacaacaatggtccaagactgctgcttgttgctatatatacgcatgggagcagaaggacatgtgcactatcactcgtgcataacactagcagagagagaacataaatccaaagatgggctggagaccacacgttgtctctgtgtcatcttctgcactactagtgctgcttcagctcctcgtgctactgatgctgcccgctgatgcgtcgtcatcaagccaaaactcagacgacgacgacgacgatctacgtcgtgtacatgggcgagaagaagcacgacgacccttccctcgtcgtggcgtcgcaccacgccacgctggcctccgttcttgggagcaaggatgaagcactcagctccatagtctacagctacaagcacggattctccggtttcgcggcgaagctcacccagccccaagcggaggagcttaaaaaataccctggagttgtgagcgtgaagccaaacacgtaccaccacgtccacacgactcggagctgggattttcttggcatgagctacggccaacagcagtcgtcgtcgtggtcgtcgtcgtcgcggctccttaggaaggccaagtacggcgaagatgtcatcgtcggcgtcatagactcaggcatctggccggaatcccggagcttcgacgacagcgggtacggctacggccccgtgccgaaacggtggaaaggcgtgtgccagacaggccaggcgttcaacgcgagcaactgcaaccggaaggtcatcggcgcgcggtggtacgccgccgacgtcagcgaggaggacctcaagaacgaatacaggtcgccacgggacgccaacggccacggcacgcacaccgcctccacgatcgccggctcgcccgtgcggaacgcgagccaccacggcggcggcctggccgccggcatagcgcgcggcggggcgccgcgcgcgcggctggcaatatacaaggcctgccacgctgtcggcggcagcgcgagctgcggcgacgcctcgatcctcgcggccctcgatgccgccattggggacggcgtcgacctagtgtccctgtcgctgggaggcttaggcgagatctaccagtcgttgcacgccgtggcggccgggatcaccgtggtgctcgctgcagggaacgatggccccgtggagcagtccctcaacaatgccctgccgtggggcatcacggtggccgccgccaccatggaccgcaccttcccgacagtggtcacgctgggcgacggagagaagctggtggggcaatcactgtattaccacaaccgctcagcggcggcatcgacgagcgacgacgacgacttcgcttggcgccatttgatattattccctagctgcgacgagaagaatctggggtcggaaaacatcaccgggaaaatcgtcatatgccgtgcgccggtgttctggtccgactatcctcctccgcggcagcttagcagggccagccgagccgccatcgccggcggggccaagggcatcatcttcgagcagtacagtaccaacagccttgacacccaggtcgtctgccaaggccacctgccatgcgtcgtggtggacagagaatccatattcacgatccaaagtagcgacagtaccttgccgactgtgtatcctctgccagcaatgtggccaagatttcgccggcggcgaccatggtcggatcccaggtcgcctcgccgagaatcgcgacgttctcgtcgaggggccccagtgctgagtttccctccgtactcaagcccgacatagcagcccctggagtgagcatcttggcagccatgcgtgactcgtacgtgctcctgtccgggacatccatggcatgccctcacgtctccgccgtcgtcgccttgctcaagtcggtccacccggactggtcgcctgccatgatcaagtctgccattgtcaccacagcatcggtgaccgaccgattcggcctgccgatccaagccaactcggtgcagaggaagccggccgacgccttcgacatgggcggcggcctcatagcgccggacagggccatggaccccggcctggtgtacgacatccagccggaggagtacacaagattggacgaccgcgccgaccgcctcaacctcccgtccatcgccgtgtccgacctcaagaactccgtcacggtctcgcgcaccgtcaccaacgtcgggccggcggaggtggcgacgtaccgggccgtggtcgaggcgccggccggcgtcacgatggacgtggagcctccggtgatcgccttcgagagaggcggcgccaggaacgccacgttcagggtgacgttcgtggcgaagcagcgggtgcagggcggctacgcgttcgggagcctgacgtggctggacgacgccaagcggcactcggtgaggatccccgtcgccgttcggaccgtcgtccgggacctcgtcgccgatgtagcttgatggtcgagttcggtttctgggcacgcacatacatgtgttccgcgttgtttacgtgctgtgtttgtctcgcggcgccgattcgatcgggttcttgtaataagaaagatggcgtggaaggaaaaaaatttggtgcagcactgctgcaaactagagtggtttgcagctcctcacaaaaaagaggatagaccccacccgcagcaacaataatacaactaaaacgttatctgctggacctacaggtggggtctatcctcctttttgtgagggg

SEQ ID NO: 8663 - DNA, 3004 bp, Zea Mays
cttccatttccacaagacccttgcgtgctctctctctctcctcttggcgacgactgggtggcaggtgcccaggtcttcttgggacccttcgccggcgacaagcaccaccaggttcagtcatgagtgggcttctcatgagcttccctaagtgatgcttcatatgttttctaacatgtaacatctcccgatgttatccatgtactggatatatccttagaagtcagagatgcagaagtctgatcatcatgagcagaagctaacttcaccaagaggaaacaagcaactcatcaatattctcaaagcaaaaggatgttgatgatgccatcaaggattcagaaaagctgagcacacatactatcagaattgaagatgagaaatctgatttgctagggtctgaaatttattctggaaagcttacattagataacaaaacaaaaagttcatcaaatgaacagtctggatcaggatctagtagcaattgctttgatgctaggctcagcactgaagccctaatatggggttctaacatccttaagcttgaggatattgtatctgtatcatataattctggtctccggtatttcaccgtgcatgcttgtcctcttgaaaaaatatccagtggactatcctgctttatgaagcctagaagaacccaaacggacttgaagttcgtatcctcttctccgcacgaggcctttcggtgggttaatagttttgcggaccagcaatgttacgtaaacctgttgcctcaccccatggcatctagcaagaagcattcttctgaactcattcagtttgatgccatgtttgatccttatgttaaatgtcggtctccaccaaagatacttgtcatcttgaatcctcgatctggacatggtagatctagcaaagtttttcatggaaaagtggaacccatatttaagtatcttaggaactttggtattgtatgtgtgggtggtgatggaattgtaaatgaggtcctcaatggtcttctatgcagagatgatcaaaatatgtctgcctctgtaccaataggtataatacctgctgggtctgataactcacttatttggacagtcttgggtgtcaaggatccaatttctgcagcattgtcaattgtcaggggaggtcttacacctattgatgttttttctgttgaatggattcaaagtgggactatgcattatggtacaaccgtatcatattttggttttgttagcgatgttcttgagctctcagagaagtatcagaagcattttggtcctttacgatactttgtagctggttttctcaaattcctgtgtttgccaaagtacagttttgaattggaatatcttccagtatcagatgttaatggcgccgagcataaaattttggtaggacaagaaaaggttgacgcgtctgatctatatgatgatgtaattcggagatcaagagcagaatgtttaccacgcgcctcaagtttatctagcattgattcaataatgtctacaggcatcatgtctggggcagagctggaggtttgtagtcctcgtgcaaataatgaaccttctgaggttgttcgtggacttgatccgaaatcaaagcgcttatcgttaggaagagctagtacatttaaagaaccagaagaagtgctccatccccactcccatggtacatctactcccagctggcgtagatctaagtcaaaatcaaggactgaaaaggcaaagccaggcttgtctgctacacacgatgcaaaatcttctaaggttaatgcagacaaagaggacacatcatccacaatttctgatcctggacctgtggctgtatgggattcaggaccaaagtgggacgatgaacctaaatgggataatcaacctaactgggaacccgagacttcaattgagctccatagccctcgcgaggatattgagcttggtctgactaaggagctggtacctagtttagatgaaaggtggacagttaggaaaggacgctatcttggtgtactggtgtgcaaccattcatgcaagactgtgcagagtctgagctctcagtttggaaagcacatatctcttccaaatgtagaatatgtaaaggtgaaatctgtgaggctcaaagcaggcccaaatacacacgacggatgtggtatcgatggcgaactactccatgtcaaggggcaagttcgctgtagtttgttgcctcaacaatgtcaattgatgggcaggccagtgaaaaaccctgtacagtagctgtaaatacactatgcggactgtctgcagctctgaggtcagcccagaatcttgcacctgtggtgtgtacaagcggcgaaccatggattttcgtctgcatccacatgtcagtaattatattcagaagtgagaacatgaacatcctagctggcactcagctccagagatgtacatttgtggttgacgagcagaaggtgctgagtgggtgctgtttcatccatatgtaaagccaaagcctatctcggacagcagcttgttgcgcacctcttgcttttgcctttttctcgtccgatagaatgcatctactatacagccatcctgatgagtgtacttggttgctccagaacatagtgtccacctccaccagccgggtgtctttggaggttccctgatgccggccacttgatactcattgtagggacaacaccccagtgcccgtgtccttgatcagtctgttgtgtttgcgaagtgtgaataagatataggactgtttgattcccggtacagcgcagggtttcagcagaaagggctggatggatgatgttttgtggcgatgctgcctcgttgagtctttaaaacgggtgtaactcttcttcttttgtgagtcgtgatgatgtatgaaccgtgtactgatttgtaaaccttgcctggcaggcatacaactgtttctgaggtgtggtattctctgccggggaataagcagcgtagcttctcctttcgtacgctgccagcaaagcagcgctcgtgctagtatgaacaacttacaccag

SEQ ID NO: 8664 - DNA, 3044 bp, Zea Mays
cttccatttccacaagacccttgcgtgctctctctctctcctcttggcgacgactgggtggcaggtgcccaggtcttcttgggacccttcgccggcgacaagcaccaccaggttcagtcatgagtgggcttctcatgagcttccctaagtgatgcttcatatgttttctaacatgtaacatctcccgatgttatccatgtactggatatatccttagaagtcagagatgcagaagtctgatcatcatgagcagaagctaacttcaccaagagggttaatccataagatacttcgtcgtacaaatagcaggcgttctcccactgcagctgaccaacaaccttctcctgtatctccagaaacaagcaactcatcaatattctcaaagcaaaaggatgttgatgatgccatcaaggattcagaaaagctgagcacacatactatcagaattgaagatgagaaatctgatttgctagggtctgaaatttattctggaaagcttacattagataacaaaacaaaaagttcatcaaatgaacagtctggatcaggatctagtagcaattgctttgatgctaggctcagcactgaagccctaatatggggttctaacatccttaagcttgaggatattgtatctgtatcatataattctggtctccggtatttcaccgtgcatgcttgtcctcttgaaaaaatatccagtggactatcctgctttatgaagcctagaagaacccaaacggacttgaagttcgtatcctcttctccgcacgaggcctttcgcttgcaggtttcaagatggaagtggtaaaaactacacatgctgggcatgcaaaatctcttgtatcaactattgattttagtacctgtcctgatggtattgtatgtgtgggtggtgatggaattgtaaatgaggtcctcaatggtcttctatgcagagatgatcaaaatatgtctgcctctgtaccaataggtataatacctgctgggtctgataactcacttatttggacagtcttgggtgtcaaggatccaatttctgcagcattgtcaattgtcaggggaggtcttacacctattgatgttttttctgttgaatggattcaaagtgggactatgcattatggtacaaccgtatcatattttggttttgttagcgatgttcttgagctctcagagaagtatcagaagcattttggtcctttacgatactttgtagctggttttctcaaattcctgtgtttgccaaagtacagttttgaattggaatatcttccagtatcagatgttaatggcgccgagcataaaattttggtaggacaagaaaaggttgacgcgtctgatctatatgatgatgtaattcggagatcaagagcagaatgtttaccacgcgcctcaagtttatctagcattgattcaataatgtctacaggcatcatgtctggggcagagctggaggtttgtagtcctcgtgcaaataatgaaccttctgaggttgttcgtggacttgatccgaaatcaaagcgcttatcgttaggaagagctagtacatttaaagaaccagaagaagtgctccatccccactcccatggtacatctactcccagctggcgtagatctaagtcaaaatcaaggactgaaaaggcaaagccaggcttgtctgctacacacgatgcaaaatcttctaaggttaatgcagacaaagaggacacatcatccacaatttctgatcctggacctgtggctgtatgggattcaggaccaaagtgggacgatgaacctaaatgggataatcaacctaactgggaacccgagacttcaattgagctccatagccctcgcgaggatattgagcttggtctgactaaggagctggtacctagtttagatgaaaggtggacagttaggaaaggacgctatcttggtgtactggtgtgcaaccattcatgcaagactgtgcagagtctgagctctcaggttgttgctcccaaggctgaatatgatgacaattgtttggacctgctgttagttggtggaagtggaagactgagattactgaggtttttggtgcttttgcagtttggaaagcacatatctcttccaaatgtagaatatgtaaaggtgaaatctgtgaggctcaaagcaggcccaaatacacacgacggatgtggtatcgatggcgaactactccatgtcaaggggcaagttcgctgtagtttgttgcctcaacaatgtcaattgatgggcaggccagtgaaaaaccctgtacagtagctgtaaatacactatgcggactgtctgcagctctgaggtcagcccagaatcttgcacctgtggtgtgtacaagcggcgaaccatggattttcgtctgcatccacatgtcagtaattatattcagaagtgagaacatgaacatcctagctggcactcagctccagagatgtacatttgtggttgacgagcagaaggtgctgagtgggtgctgtttcatccatatgtaaagccaaagcctatctcggacagcagcttgttgcgcacctcttgcttttgcctttttctcgtccgatagaatgcatctactatacagccatcctgatgagtgtacttggttgctccagaacatagtgtccacctccaccagccgggtgtctttggaggttccctgatgccggccacttgatactcattgtagggacaacaccccagtgcccgtgtccttgatcagtctgttgtgtttgcgaagtgtgaataagatataggactgtttgattcccggtacagcgcagggtttcagcagaaagggctggatggatgatgttttgtggcgatgctgcctcgttgagtctttaaaacgggtgtaactcttcttcttttgtgagtcgtgatgatgtatgaaccgtgtactgatttgtaaaccttgcctggcaggcatacaactgtttctgaggtgtggtattctctgccggggaataagcagcgtagcttctcctttcgtacgctgccagcaaagcagcgctcgtgctagtatgaacaacttacaccag

SEQ ID NO: 8665 - DNA, 3843 bp, Zea Mays
atggcggtgacgatgacgctgatatctcttcgaacattctcgactctgatacctccaactccgacgcgccaatatcgtaccagatcgcggcgggcgacacctactaaatcatctccaccaccaagccgcagaacacgcagtaccagcatggagcgcgtgaaccccaaactggtgcccaccaacctcgacatcggcatcacggtcatgttccctatcttctgccagtgcccggccgccgccgacaacgccaccgcgctcatcaccaccaagcttcagcaatacacgtcactcgatgaccactgccatgagcggggcatccttcaccaggacatcaagggctccaatctgctgatcgactaccccgacatgctcggtgacttcggcctcaacaactacggcgctgggcaccgacaaccgctcaccagccgcgtcgtcacgctctggtaccgcacacctgtgctgctgctgaactccaccagctacggcgtcggcttcgacctctggagcgcgggttgcctcaacgagatcttcttcggcaagcccctcatgcccggcagtggcgagatgtaccagctactgaagatcttcaagctgtgcgggtcacctccggatatggtcgaactccaacagcacatcaacaatggtcacgcggttctaggtgcccaccgtgtgttcgaggaattgtcatcacatgttattgccacctgcaacaatggtgttggctcgacgatgcaagacctggcacatgctatcggtaatactgaagtgtggccaataccatggccatctttcagtttctctccaattggattggctccactattagcattggaatcaattgcagtggtaggtggaaggtgcgtgcttcagaagagtgcaaaattcaaaattatctataggctgagtagtgtgttggcttggtttgttggttctggtgaccaggaacttagatggttgtctagttatctattcatgcattatggtaattcctggaagttagttgtgtatgatggccaagggcacatattggtgacaatgttgagctcaatttctattcgagaagtgggttcctttagatgtgtgctgaaattcatatgggtcctattctggtcgtgggtgtcctagacttcatgatggtactatccatgagtctaaaacagtgtgatacaaaatcatctcgcagagtggagaaaagggagatttctaaaattacagatgcaacaatcatgcttttagaagaaatgaaggcacatggtattaagttgaaaggagaaacctaccattgtctactgaatgcacttgcaacaacaaggcaaactgatcaagcttatgtcgtatttagtggtacgagtgttgctgggcttgtgcacagagattctgttcaattcaggccaataccatggtttttcttcagattgtgtagtgaggttggttacaggtcctataattggactgagcgaatatctgaacccacagaacaactcatgatggtgttgtcatctctagcttggtcaggtactcagacagttaccacactaaaattacaagatcaaattcagcagcaagacattatggtgctcattgactctggatcttctcatacttttatcagtgacaaattgcgaccaatgttatcgggtgtggaacctctggttaacccaatcacagttcaactggctattagacaagttattccttgccattaccatttgcctttagccaagtggagtatgtcgggctgtcacttttcagcagacctgaagttcttgctaataccttcatttggtcaagttattacttgcaattatcaggtgccttcagctgagtggaccatgcctgttcgcagtttttcagtggatctcacgtttttactcttacccttgtttgatctggtcgtgggcatggacaggctgcaacgatatagtcctatgccagtgaactggtctaacaaatggatgatcattccctatcaaggagcaactaggtgtttacaaggtgttcacccttctgttcccacaggagcaatagtggagctgtggttactctcggccacctcccagcagaaccgtttccctgacagcaagatgccaacaatcaatactcaggtgcaggatattccttcccagtttttggatatttttgaggatccagttgggttgcctccaagcaggccgggtgatcacaatatccctctgttactcggtgcacatatgtttactgtgtgcctctatcagtacacaccggctctcaaagatcatgatacgcaagcacaagagttgttgactcaattggccatcgtctcagcatatcccaattcacctttcactatgcagttggtacatggtccaagtgatctggtcagggatggatgcttcgcatgcaacttgggaggacgccgaagcgcagaagaatcgcttcccatcagcgaccgcttggggacaagcggcgttcgaagaaggggggaatgtcagcatcagcccttcgatagagcaggtcttgccggttgtggcacaggagcagttgaacgctgagttggatgatgggccagaagagcaagctgatgatgggccgagaaggggcgttcgtcaaaggaaaatgaacccacgaatgcacaagcagagactggagtatatatatattaggaatgtgttgtggtagagggtatgaaatttttgtaggctagcagctgcgaccgtcttctcctattactatctgaagctctgaacttggaagataactctctcagccttagcggtctggtgctgaccgaaggttcttgcctcgtgagatgtccaaactgtctcgacattctcccagaaccgcacaacgttatagtctacaagtgcggcggatgtggcaccatccttcgtgctaaaatctgtgctagcaatggccaacacatggctgcaaaacaaggtcgccaagactctgacagttattcggtcgctacagctgtgagcaatggggcgcctcctcgaaataaagagcgaggctcagagagctccttcaatgttgatgctcctagcttcgagcatggcaacaataggacagggaagggtgaaaatggtgatgatgtgctggctaggcagaatgctatggtggttcaccatgctgagagcaaggaaaaccacactgtggaataacctacagagaatagggtgaaaatggtgataatgtgctggctaggcagaatgctatggtggttcaccatgctgagagcaaggaaaaccacactgtggaacaacctacagagaattcaaagaccttccgagtagtaagtggacgtgatgatatagaacaactctaataacaaaatggtttcttttgagaacagcaaagcagtcgcggccgtcagtatgcaagatcctgagcagaaggaagcaggcagagtcagagctgaacatgcaactaacaagaagggttatcttgtgagggtactatcttggtcctgtgatcttcaatagtcacgactcacgagactcgactgatttccattgtgcacggacttctctgcagccgaaaagttttagagccagtgagattgtatttgatttccatttgtcatgagactcgtcaaacaaaaggcaattgagattatatttgaaatattttgatgattataaggatttttgggttgaccggaagtagcctctactctctactcttataatacaccagttttcatcgtcgtagtgcgtcaggagatggatggtgcaggagattaacaacattttggttgttggtaaataatttgagttaggatcgatgataataaatctcttgtgtatttttatgtaatcgttgtatactcatattttataaaatattggtattgtttatttt

SEQ ID NO: 8666 - DNA, 3362 bp, Zea Mays
ctgcacgcggctggggcaagcgacactggtgagtggtgacttccaaagtttgacgccttccaacattggtgttgcccgaagcccacccgacccgactcctccctcccagttccaaatttccaatcctcctcgatcccaccagtagaaccctccgcttgtttcttgctcccggttcttggatcgcggaactgctccaaaccttttcttggatcgcggaaccactccaaacctgcaaaagtttgatctttgtcgactgcttcgggttctaggacctgccgagtggtatttaggcaaagaaggctctgtcggcagtagccgtccttgtgattggttccgggacttgggttttagctcccaaacgagacccccaggcgcgtctgcggcgagctggttgctaaagaaggtggacagatacctattactacaggtgcaaaaggggagatggagtgggctactatggtgacaggagctcaggatcaagtgggaacaaaagcataaagctggaaaggctgaagctaaagatacaagggaggagccatggtgaagaagaagctgaagaaactgtatggccgggatgctcgggagttctttaaccaggtcatggtggagcaacctttgctgcccttcctgatcccgcttggcctctttgcgtggttcatcgaacggtgggttgtgccattctcgaactgggttcccctcgctgctgccgtttgggcaaccattcagtatgggaggattaagaggaggacaactgtagaagatttgaacaaaagatggaagcatcttatactgaatacaacacccaccacaccaatcgagccttgcgaatggttgaacaaacttttgttagaagtttggcctaattacatggagccaaaactatcgaagaggtttcagtctaccgtcgagagacgtttaaagaatcgaaaaccaaaattaatagataaaatagaattacaggaattctcacttggttcttgtccacctaccttgggagatcagggcatgcgttggattacttctggtgaccagcaagtcatgtgcttgggatttgattggaatagccacgagatgagtgtaatgtttttggcgaaattagcgaagccactgattgggacttgtcgaattgttataaacagcattcacatcaagggagatcttctactatcacccatacttgatggggaagctatactctattcttttgaatcaaccccagaagtcaggattggggtagcatttggaagtggtggaagtcaagcaattcctggtatggagttaccaggtgtctcgacatggctggtgaagcttttgactgaaaccttagggaaaacaatggttgaacctcgccggctatgtttttctttgccatcagtagatctaaggaaacgagcagttggaggtgttctctcagttactgttgtatcagctagtaacctctgtaagagcacagctaatgatatagggaactgccaaagctcaaatggaggggccacgtatggaattgctgataacaaggtatcacagacatttgttgaggtagaagttggcaatttgatgagaaaaacaagtaccagtaagggtctaaatcctacatggaacagtacatttaacatggtacttcatggagagacaggcattgtcaagtttcttctgtatgaattggattctggcggtgtcaaattcaattacttgacaagctgtgagataaaggtaaagtatgttcatgatggttcaacaatattttgggctataggacataactctggtgttgttgcaaagcatactgagcattgtggacaagaagttggaatggttgttccatttgaggatataaatggcgagttaactgtaagccttgtgctaaaagaatggcagttctctgatggatcggttacattgagtaattctctgggcaatggacttcaaagctcatttgatggatcgacaaagcttcagtccacaacaggaaggaaagttagggtcagagttgttgagggcagggcacttacagctaatagtaaatctggaaaatgtgacccttatgtgaaactccagtatggaaaggctctataccgaacaaaaacactgacacatacggtccgaccagtttggaatcacaagtttgagtttgatgagatctctggtggtgaatatctgaagatcaaatgctataatgcagatatgtttggtgatgaaagcattggtagtgcgagagttaatttggagggacttttagagggtgctacccgtgatgtttgggtcccacttgaaaaagtagattcaggagagataaggcttgaaatagaggcaataaagaatgatcacaacaatagcttgcagagctcaagcagtaaagctggatctggttggattgagctagtcataatcgaagccagagatcttgttgctgcggatctgagaggcactagtgatccttatgtcagggtgcactatgggagcaagaagaaacgaaccaaggtcatttacaaaacactgtctccacagtggaaccagacattcgagttcctggaaaccggagaacccctgattttgcatgtgaaggaccacaacgccgtccttccaaccgccagtatcggccattgcaccgtcgagtacagcatgctgtctccaaaccaatccgctgagaaatggataccgctccaaggcgtaaaaagcggagagatccatgtaagggtggcactgaaggtatcagtaccaggttcggagaagaagaacatgctcggggcaggtccgttcggcaaggggcacaagatgtcgacacagatgagagacagcctgaagagattcacgggcttgatcgacgacggcggtgacccggaggcactggcactagccgtggcggagatggaaggcatccagggcgagcaggaagagtacgtcgaaaccctggagcgggagaaggcgatgctgttgcacaagataaatgagcttggttccgaaatcattaggacagcatctggtcctccaaggacgccgtactagttagatctgcaaatgcacacccccccactactgaatgaacacgcatttatttatcggcaggcgaagacctggttgtacgtagaactctatagtgtgcatgtacaagtgagcagtacagctcgtgtaagtaggccaggcgtgtaggaagcacaggtgtatcttgtagtgattgataaaaactgctcaagcatcaaccggctggaagcttacagaagttggtcgactttgtacacagttagggcatgtttgggaacaatgtttttttaaaaccacattttataataccacagtttactgaatgttagaacaagactatggtatatattttacatcacctgttttggaggaagtatttt

SEQ ID NO: 8667 - DNA, 3373 bp, Zea Mays
caaagtttgacgccttccaacattggtgttgcccgaagcccacccgacccgactcctccctcccagttccaaatttccaatcctcctcgatcccaccagtagaaccctccgcttgtttcttgctcccggttcttggatcgcggaactgctccaaaccttttcttggatcgcggaaccactccaaacctgcaaaagtttgatctttgtcgactgcttcgggttctaggacctgccgagtggtatttaggcaaagaaggctctgtcggcagtagccgtccttgtgattggttccgggacttgggttttagctcccaaacgagacccccaggcgcgtctgcggcgagctggttgctaaagaaggtaggtgtctcgggggctattacaggaatctacaacaccggcctcgcaccattggtggacagatacctattactacaggtgcaaaaggggagatggagtgggctactatggtgacaggagctcaggatcaagtgggaacaaaagcataaagctggaaaggctgaagctaaagatacaagggaggagccatggtgaagaagaagctgaagaaactgtatggccgggatgctcgggagttctttaaccaggtcatggtggagcaacctttgctgcccttcctgatcccgcttggcctctttgcgtggttcatcgaacggtgggttgtgccattctcgaactgggttcccctcgctgctgccgtttgggcaaccattcagtatgggaggattaagaggaggacaactgtagaagatttgaacaaaagatggaagcatcttatactgaatacaacacccaccacaccaatcgagccttgcgaatggttgaacaaacttttgttagaagtttggcctaattacatggagccaaaactatcgaagaggtttcagtctaccgtcgagagacgtttaaagaatcgaaaaccaaaattaatagataaaatagaattacaggaattctcacttggttcttgtccacctaccttgggagatcagggcatgcgttggattacttctggtgaccagcaagtcatgtgcttgggatttgattggaatagccacgagatgagtgtaatgtttttggcgaaattagcgaagccactgattgggacttgtcgaattgttataaacagcattcacatcaagggagatcttctactatcacccatacttgatggggaagctatactctattcttttgaatcaaccccagaagtcaggattggggtagcatttggaagtggtggaagtcaagcaattcctggtatggagttaccaggtgtctcgacatggctggtgaagcttttgactgaaaccttagggaaaacaatggttgaacctcgccggctatgtttttctttgccatcagtagatctaaggaaacgagcagttggaggtgttctctcagttactgttgtatcagctagtaacctctgtaagagcacagctaatgatatagggaactgccaaagctcaaatggaggggccacgtatggaattgctgataacaaggtatcacagacatttgttgaggtagaagttggcaatttgatgagaaaaacaagtaccagtaagggtctaaatcctacatggaacagtacatttaacatggtacttcatggagagacaggcattgtcaagtttcttctgtatgaattggattctggcggtgtcaaattcaattacttgacaagctgtgagataaaggtaaagtatgttcatgatggttcaacaatattttgggctataggacataactctggtgttgttgcaaagcatactgagcattgtggacaagaagttggaatggttgttccatttgaggatataaatggcgagttaactgtaagccttgtgctaaaagaatggcagttctctgatggatcggttacattgagtaattctctgggcaatggacttcaaagctcatttgatggatcgacaaagcttcagtccacaacaggaaggaaagttagggtcagagttgttgagggcagggcacttacagctaatagtaaatctggaaaatgtgacccttatgtgaaactccagtatggaaaggctctataccgaacaaaaacactgacacatacggtccgaccagtttggaatcacaagtttgagtttgatgagatctctggtggtgaatatctgaagatcaaatgctataatgcagatatgtttggtgatgaaagcattggtagtgcgagagttaatttggagggacttttagagggtgctacccgtgatgtttgggtcccacttgaaaaagtagattcaggagagataaggcttgaaatagaggcaataaagaatgatcacaacaatagcttgcagagctcaagcagtaaagctggatctggttggattgagctagtcataatcgaagccagagatcttgttgctgcggatctgagaggcactagtgatccttatgtcagggtgcactatgggagcaagaagaaacgaaccaaggtcatttacaaaacactgtctccacagtggaaccagacattcgagttcctggaaaccggagaacccctgattttgcatgtgaaggaccacaacgccgtccttccaaccgccagtatcggccattgcaccgtcgagtacagcatgctgtctccaaaccaatccgctgagaaatggataccgctccaaggcgtaaaaagcggagagatccatgtaagggtggcactgaaggtatcagtaccaggttcggagaagaagaacatgctcggggcaggtccgttcggcaaggggcacaagatgtcgacacagatgagagacagcctgaagagattcacgggcttgatcgacgacggcggtgacccggaggcactggcactagccgtggcggagatggaaggcatccagggcgagcaggaagagtacgtcgaaaccctggagcgggagaaggcgatgctgttgcacaagataaatgagcttggttccgaaatcattaggacagcatctggtcctccaaggacgccgtactagttagatctgcaaatgcacacccccccactactgaatgaacacgcatttatttatcggcaggcgaagacctggttgtacgtagaactctatagtgtgcatgtacaagtgagcagtacagctcgtgtaagtaggccaggcgtgtaggaagcacaggtgtatcttgtagtgattgataaaaactgctcaagcatcaaccggctggaagcttacagaagttggtcgactttgtacacagttagggcatgtttgggaacaatgtttttttaaaaccacattttataataccacagtttactgaatgttagaacaagactatggtatatattttacatcacctgttttggaggaagtatttt

SEQ ID NO: 8668 - DNA, 2882 bp, Zea Mays
atgccactctcggagccgtcggcgccggccgtgctcgcggcgctgccgcgggcgctctccctcgcggccgcggccgtcgcggccgcaaccgcgaccctcctcctcatctccgccgtcttctccaccccccaccacgcggcgtcctcctcgtcccctcagctttccccgtccgccagcgcctccaccgcggcgcctgtggccccggcgcccgcacacgcgcccgactccggcccaggccacccccaccccccgcctcccgttcccccgtgccctcccaacgccacccacgacgtcccctgccacgagcctccctcgcgcgagcgccactgccccccgcgcccgccgccgccgccgcctcttcttcctcacccgccaaaggacccgccgccgcaccctccgccgcactgccgcgtcccgccgccgcccaggtaccgcccgcccccgccgtggcccgcgcgccgcgaccgcgcgaggtacgccaacgtggacctcccgccgctgcccccggttaaggcggcggatggacagcagcaggaccccgttcacggtcgcggggagtggctgctgttcaccgacggggtgcagggttatgtcgagcggctggagcgcgtcgtgccgctccgcgacggcgtggtgcacacggcgctcgacatcggatgcggggtgtgttgtactcgcatcgcatgaaagcttgccgattcagaaactactcgttggaagtctctctgttcacgtgtcgatgtgtgtccctgacaggtcgcgagctttggggactatctgctcaactatggcgtactgaccatgtccattgctccgagggatagatttgaaccgcaggtgcagctcgccttggagcgtggactgcctgcaatgatcggagcgcttgttgcccacaggctaccgtatccatcgaggtccttcgacatggtgcactgtgcggactgccgtgtcccatggactgctcatgctgattccagatgggctctacatgctggaaatcgaccgtcttctccaacctggtggctattgggttttctctaagccacccgtcaactggaaatctacatacaacatttcgaatcaagggaccatagacaagcaggacaatcaagtagctatggatgacatgtcgaaaaggcttcgttggacgaaggtgtctgaagagggcacaatttctgtttggagaaagccttcttgtaatctccattgcgaccaagaagcaaatgcaaagcttgctggattgccaccactctgcacaggagaagacccagatagtgcctggtatgcaaatatttcaatgtgtatgacatgtattccaagagctgaaacttttaatggctgtgctggtggtgccatgaaaaaatggcctaaaagacttggtgcagtgccaccaaggatagccagtggggaaatcgagtggctgtccattcagagatatagatacgacactctggtttgggagaaaagggttaacttctatctcacgtatctaaattttttgtctaatggaacctacagaaatgtcatggacatgagtgccggttctggtggctttgccgctgctatgtccaagcatcctgtctgggtcatgaatgtggttcctgcaaatacgacagagaacgcccttggtgtcatctatgagcgtggtttgattggaacatacactgactggtgcgaggccttctctacttatccacgaacatacgatctgatacatggtaatggaatcttcagctcccatattcacaagtaagtgacccgctaacttggcgatgttaaaaagccactgaaagagaacaacaaaaggcatagactgcgatctgcgaagcaagtgaacaattcaagtgtgggattatcgacatcctggttgagatggatcgtattctccggccagggggtgccgtcatagttcgggacagagccgacgtcgttctcagagtcaagaaggacgccgaccgtctacgatggcatagccgagttgtcgacactgaaaatgggcctctggatccagagaagctcctcattgtggacaattccctgccactcccagggagctgaatagaagtgagagcactagcaagaacccgcaggatcagatcaggcttctaggtgacggtctgctcatgtttcgggaaagagccggtggtctggtctgcgaccttactacctgttacagtatgtcttttcggtttaagaagatctcactacatgtgcagcagaggtacagatgaagggtctacaggcgactgggatgtttattacatgtacagacaggtgttggagaaacaaaatgctacgtattacctttacagaggaagggttcaaggctattggctatcgtacagcgagagattcagaattgcatgcaggtgtacctacatatatgaccagtggtccaatatattggagtcagtgacgactccagtggatgccatttcttagctccaatatgatatgcagcctgatttctcatgctcgaacgactagctgtgcagttagaactatccggtctcgattctgtagagtatgtctacgttgagtgtacctttttttttggtaaatccattcatgtacatttgtataggttgttgtattgtagatcttgtgagctgtgttgtttggtcgctaagcaatctacggcgtattatactgcggcatagagtgtacaggggaggccagattacacctgtgtctgtgtgtgtctctgtccttccaactttcccggttcaggctgcggtgccgagagtgggattgtgttatttggggtgttgtacaagccaagtgaatgtgcagatcgagtatggacatgatttctttcttatacagtggccgttgtcataattttcacaatggcaggtcattattgccgcgtggaggtggtg

SEQ ID NO: 8669 - DNA, 4052 bp, Zea Mays
ctcacgtctcacaacaccaaagcatccgccagctactcctcctgctgcgatcaagccgctctcgaagcaagcagacgctcctccgatcctctctcttctccccgccgtgtcgtcaacaacctctctccctcctctcgctgcggtctcccccgctccgttactccgattccaccagcgacaggcgaactctgtgctgcatcgatctcaagtaacaccggcttgaggtcaggtcgcccgatcgaggatgggttctctcgccgatccgtacgcgctacgctgcgtctccgacctgcctccgccattccgctctatgttcagatacttcaattccttgcagagtgagtgcttccatgtatgtttcttctcggatgtgaacatggttatctcggcacctacggggagtgggaagaccgtactatttgaactctgcattctgaggctcctctcaaggttcctttcaccagattggaggttcaatttaaataaaggaactctgaaaacaatctacattgcaccgtcgaaggcgctggtacaggaaaagctgcgggactggaacatgaagctgggcccattagggatcaattgcttggagatgactggtgacggtgaattttgcaacactaaagccatccatgatgctgatttaatactcaccactcctgagaagttcgattctatgagtcgacatggtataaaaagtggtagattgggtttcttctgtgacattgctcttgtccttattgatgaagttcaccttctaaatgatccacgtggagctgcgttagaagcagttgtcagtaggataaaaatgctatcgcgacatgataacatgaaatcttttcctctggctaatgttcgattaatcgctgtttctgctactatccctaatattgaggacataggttatgctccagctaaaaatgactttctttttgagaggaaatataaatggaatatggattacagatatactgatgcaacattcaagggggaagtctgcacttattttctgttctacgagaaaagatgcaatcctgttccattttcagttggttttcataatggtggtctttgcttaaaagaccgaggtcttgttgaggggcttttcctcaagggtgatcttcaagttctatgcacaacaaatactttggcacatggcgtcaacttgcctgcacatacagttgtgataaagtcaacacagttcttcaacaaagagaagggcctatatgttgaatatgagagatccatggtgcttcagatgtgtgggagggctggacgtccaccattcgatgatactggaacaattataatcatgacaagaaaagaaacggttcatctatatgagaaccttctaaatggatgtgaaatggtggagtctcagttgctgtcatgtgcggtggagcatctaaatgcagaaatcgttcagttgacagtatctgacatcattctggcggttgagtggatcaagtgctcgtatttgtacatcagaataaggaagaatcctgagaactatggagttaagagggggactcctcaagatctccttgaaaagcaaattcaagatatatgtgtcgataagattcatgagttggtggagtatggactgatttggacagatgaaggagctttcgttttacaaccgctagaacctgggaggctgatggcaaaattctacctgaagtttgatacaatgaagcttatagtcaaagcttctggctattgcagtttggaagatttattgcatgtcatctgtcactctgcagagataacttggatccaactacgccgaaatgataagaagattctaaatgacataaacgctgacaaagatggtagacttctatttcatattgtcatgaagaatggaaaaaggaagaagcgtgttcagacaagagaagagaaaatattcttgctagcaaatgattgcttaactggagactctctaatccatgatttatccctcaaccaggaaacaaatgcaatatgctcaaatggatgtaggattgccaaatgcatgcgagaatattttatatacaaaaagaattacagatctgccattaattctatgatccttgcaaatagtctgcatcaaaagctttgggagagcagtccatttctgctgaaacaactgcctgggattggaattgtaacagcaaaggctctgaagactgctggagtttatagctttgagaccttggcaactgctgatgcaagaaagatagaattggccacagggcgcaattatccatttgggaatcatatcaaagaatcaatgtcatcattaccacccaaaattgacatacacatagaggaaactggaaacagacttgggaaatcgaccattactgtaacactaactcgtctatcacaggcagttaaatccagtaaacgcaactgtgctgacatggttgtggcctcagaggaagacaatgtgatcctctttcatgagaatataagcccatattctgtaaaagtttttgtgccatgcccccaaaatgcacgggtgactctgaaggttgatctaatatttgaagaatatgttggtcttgatgtccacaagaagcatgtagtaagcagggaagatggtttgtacgtgaccaaggagcatgggatagataaccttgaacctacgtacaatatcccttcagagatttgtttggttagctccaggacaactcgaacaagccgatctcaatctcacactgaacagaaccctctttccaaagaggtttatgtcatagaagatgatggcgctgctgtgagtgctgtcagtgctctcgagaaagctgatgatgcagtgggaaccataaaatttaacaacttggcttcactggaggtcccaagctttgatctactgcctgaagaagagtatggagctcctggaccagcagaggcagaatgcaaaggtgccacagacagcacgatttttgatcacatacgcaaaaagtccaaagacttccccactctgatgctatcaaaatccatggattgctcatatgaacctcttatactgaagaagatgaagatatcaagggaccagtttggagtaaagcatggttgtctgcatgcgggtgaggccaccacaatggattttgatcctgttgagcctagggtctctccaaccaatactgctgagaagttccgcgggatcctgggtagaagttcagaaaggagtcgcatgctgtttggaaaaatggatagcccgtttgagaagagcgagatgctgggcacgacgccagctgaaagttctcttcggttcgcgggtggaaaagacagctcactggagaagaacaagaccctgatcagaactccagctgaaaactctctccaaattgcagcacgtggaaaggagagcaaggtgagcaaggtgctgacaaatctagataaaagccctcttgggtttgcgggtggaaaggagagcaagatgagcaatgtaccgagcacttcagctgaaaactctctccagtttgcagctaggcgtgtcagatcatctgagaagagcaagatgctgacaactccatatgaaagctctcaagcgtttttgggcgaaaaggacagcccatcggagaaaagcaaaatccttattaatagtccagttgagtatcctttcaagaaaggaagtccaggtgaaaatcctttcaaaacatgtagtccagttgaaaactccctcaaatttgcagctcaacgtgacagcccatctgagaagaggaaatcctgcatcagcaatccccttccgcccttccagcaggctgttcaatgcacaaagcaagtaggagttgcaggtcaaccctttgatattaaggaatattgcaaggaaatattgaggagcagaaatgacagtcaaggaggcgatccttttgctggttacaagagtatcttttcttttctatgatctgctgaacagctagcaaatatgatcctgaacaatgtacattatgacactcaaataacagctagcaataatctttttcttgtcattgctgaccatcttctgcccaaagtaggaacataaaatgcatgtgatttggtcaaagtgtgtaaagagttgcccc

SEQ ID NO: 8670 - DNA, 3006 bp, Zea Mays
cttttccccacgagggcccacggaggcagtggcttggcgcgcgcggcggcgacgggcacgctccctcgcttccctgtccctgctcacctctgaacccaatctaaccgccgtccgccaccttcgcgcgcgaaaactccccccctcccattcgcgccgccgccgccgaccaccacccatcccggcgacaagggctccccatccggctgatccgtcaggaacctaatcttctcggcgcgagaaacgccgggcggggaacaaaggacaggaccccattccggtgcggcgggaccaatgggctccggcgaatagctcgagcacctcgagctcgccggaaacaaccgaggcggcgcggcgtctgttctccccggcgtgatggcgatgcaggggacaggcaacggatctccaagccgacccaacatttccgtgcccggtcgttgaacgcagcggtggtcccgtctcgtcctccaaggcattgggaacctgagaggcagaggctcggccagcgacggtgggtagcgaactggcgcctggttcccgggttgctattctccgggaggaggcgctcccgttgccatgggtgcgcggcggcggcttcgccagggctctggacggctccagctgctgttttccttcctcgtgctgctgctccaggcacaggccagcgtcggcgcggcttcgatcaacggtgaaggattggcgttgctggaactgaaggtgagggtggaagctgatccccatggcgtattccaggattgggaccccatggacagcagcccatgcagctggtctggcgtgcgatgctttgacgataaagtagagattctgaacttaacaggccggcaattggctggaactctcgcacccgagatcgggagcctccgaggtctaaaatcccttttacttccaaagaacaacttccgcgggcaaatccccagagaatttggagggctgtctgctctagaagtgctagatctgagcagcaacaacctggatggaacagttccagaagaactatgggctatgccactgctcaaacaactatcccttcatgataatcagctccaagaaggcgtccaagcaatagctgatgatcaggcaggatgcttgagcagaaaactagggtgctggtctttgctgtacaagtgggactttaaggattggatctctctcggtggtctccgagagaaagataacaccaatatttcagtgaggcagacgtaatgcataatttgcagtcatttgcaagtgtcatgcgccgcaggcttcttagtgaaaatgacaacctggctgctcttttgggaaatgatgacaaatcttctgatctgcaaaacctaaaagaaattcagagatctgttgacgtgaattctgtaggaagtggctcgttctctgcatttccgggaatatatggccaagctctggcacctttgcttcctgaagatattgatgctaccacagttcagcagctgtctacagatgtgacccagaccactaatgtagagatgtctggtacaacgtacagcaagtgggcatatattatcacaattcctgctgcaatattgctcattagtctcatagttctgattttggttttgcggaagcgagggcgtgcaccagtagccccttggaaaacagggctaagtggccctattcagaaggccctcgtaacaggtgcccaaaaactgaacagagctgaactcgaagttgcctgtgaagattttagcaacatcatcaatacttttcctacctgtactgtattcaagggcatattgtcaagcggggttgagattggtgttgtctccactaccatatcgtcgagcaaagactggtccaggagtgcggaatcatgcttcaagaaaaagatagatagactgtcaagggtcaaccacaagaacttcatcaacctccttggctattgcctagaaaatgagcctttcacgagaatgatggtgtttgagttcgctccacatggtagtctctcacagcaccttcacgtcaaagagtttgagcatctggactgggctgcgaggatgagggtcatcatgggcgtcgcatactgccttcaatacatgcaccatgagctcagtccacctatggcgatccacgacgtgcggtctgacacaaccttcatttcagatgattatgctgccaagattgcagatgttggtgtatggaacgagcttgctgccaaagcgaaggctggaaaggaggacggcagcagccgtgctgaagctcctccggatctcccaagcaacgcctactgcttcggcgcgctcatgatcgagaccatatccgggagggttcctgacccgtatgatcacaaacccatatgcagctgggcttctgagcatctgaaagacaagaactacggcaagctcgtggacgcgtcgctgaaggagcacaaggaaagcgagctggaggccgtctgcgaggtgatccaagagtgcatcgaccctgacccgacgcggcggccgtcgatgagagacgtcgtgggcaagctgcgagacgctctcggcatctcgcccgaggcggcggcgccgcggctgtcgccgctctggtgggcggagctggagctgctgtcggtgaagtcaacctagtgtggagaacgctgtgtatactgatactgtaccaacatgttccaacgctcctctagctgagctctaacaggattcgtataggggcttcaattcgtgctgctgatgctaccgacatttgtactggccgtaagcggtcgtaatttatgcagagagagagagagagagagagagagacgttgtgaaaaaatgcgattgatgatgtaactcatgtacatgctgatctttatcaaggaggggaaatacagtgacttgtataaatatctgtaatcccaaactcgtgtgactgtatagaaataaaacaaatagctggcgttcccagttgccactcacttaccatcagtgtttcctctgcgtgcgatggtagctcaagttgagccatatgttcagttcggcccatatggtgctggcaact

SEQ ID NO: 8671 - DNA, 2112 bp, Zea Mays
aagccctaaatccatggaccatggctcgcgaagcgacgaacgcgtggcctcggccgtcaccgtcagcgcggaaacgaagcaagggcaaacgagccgttctctcccccgcgccgccgacgcaagcagccgccacggagatggaggccgaggcgtccgtccccgccacggactacgtctacgacgcgctcccgggcctgcacctggccttctcaccggaggagacgctcgatgacgccgccgcggggcaggacgaggacgatgcgaccgcgacatacgccgtcttccgcaacgagataacggaggctggagatgtgctcgcggacatccctgctgcggacttcttctcactcgacgtctccacctctgcctccgtcgagcccgagcccgagcccgagccgccatccccggcgcccacagctgccgcggcaacgccctctatctcccgtgctttggaggaccagccgccgcagggctcggagcgcgcgtggttcaggggagggaggcggttcaggagccccatgcttcagctacacaaggagatcctggacttctgtgattttatctcaccttctactgaagagcaatcttcacgagcagctgctgtgcaagatgtctctgatgttgtcaaacatatatggccacagtgcaaggtggaagtttttggatctttcaggacaggtctctatctaccaacaagtgatatagatgttgtgatatttgaatccagagttaagactcctcaagttggtctatatgctcttgcaaaagcattatcccagaaaggtgttgctaaaaaaatacaggtaatagcaaaggcacgtgtgccaattgtgaagtttgtggaaagaaagagtggaatagcttttgacatcagctttgatatagatggtggcccacaggcagcagatttcatcaaggatgctgtgaagaagttgcctgctttaagacctttatgtatgattctgaaagtttttctgcatcagagagagctcaacgaggtctataccggtggaattggatcatatgctcttcttacgatgttgattacacatttacagtgtgttttttttgttcttagttggtctggggaggaaaagatattctcgggtatcatcggtccaaggagcacaatctgggaattcttttggtcaggttttttgatttttatggacgcaagttgaacaactgggatgtcggagtatcatgcaattcttcaaggacctttttcttgaagagtgataaagactttatgaatcatgaccggccacatcttttagcgattcaggatcctatggcaccagataatgatatcggaaagaattcctttaactactttaagattcagttctccttgaccggaaaggctggaacaatgaagatatgttagcggaaccctgggagccgatcacccaacagtttgacaccgagaatgatgcagtatacaattggcatgtgatagacgaggatgaaccattgcccagaaatagtcaatccacatccgaggacactagttcgtcaccatctaaaaaacggaagtccccaaaatcaagacggaaatcgcgaaagaagtcgaaggctactgcctcaggcagtagtgatgttgcaaatgggttcagaaaggatagatcatccaagcgggaagcgggaagcagcaaacggaggaaagggccaaaggagtacgacagattcacgaatacactcccaaagtacacacatgttagcaagtggtaacttatagcatttatagtctggtcgcaaaggtccagcaatttgacagtgagaagagtatcatgtcacattatggcatgcgatgtgaatgacggaagtcatcagcagcaccagaagcgccatcgcatggtttgcttgttggtctgtttaattgctgtactttacgtaacagagatcacactagattaaatgatgttttggttattttatttatgctgcagcagttttggcgactagcttgtattctttttgtaacggtatgggttggtgacgatgagattatgtacgttcaaacatatttaattgatggtctgatggccttaatcactgaacaatgtgttcaaaacattatttttcaatcaaaaatgtagaactctgaaaaat

SEQ ID NO: 8672 - DNA, 1426 bp, Zea Mays
aagaagagattatcgctcacagcatgcaaaacagaacaatctcctctccgaattcaatcatccctccgccgcaccactcttcctccgcctctgctccgcttctgcactcagcgtcctccggttgctgacggatccctcttcgccgccgccgccgcggacccaccggggagaggaggcgatgcgaggcgaggaggcgggagcgatggaggccgccgactacgggaagctcttcgtcggcggcatctcatgggagacgagcgaggaccgcctccgcgagtacttcggccgcttcggcgaggtcaccgaggctgccatcatgcgggaccgcagcacggggcgtgcccgcgggttcgggttcgtggtcttcaccgacgcagcggtcgccgagcgcgtcaccatggagaaacatatgatcgacggacgaatggtggaagcaaagaaggctgttcccagagacgaccacagtattgtgagcaagagcaatggcagaagcacagggtcacctggaccgggacgcactaggaagatctttgttggaggcctgccctcgagcatcacggaggctgacttcaggaggtattttgagcagttcggtgtcataactgatgtggtcaagaaggctgttccaaaggagcagtctcctggacctgttgcacgctcacccgtgggagtggggcagaactatgctgcgaacagggttcatagcttcctcaatggcttcaaccagggttacaatccaatccccatgggaggttacggcatgagggtggatggaaggtatggcttcctttcaggtgcacgaaatgggttctcttcttttggcccagggtatgggatgggtatgaatgttgaaggtgggatgagcggaacatttggtgcaacctctggtttcatcagcaactccaacgggaggcaaatgggttcgtacttcaatgcaagttcgaacagattgggtagccctattgggtaccttggtcttaatgatgttcctgggtcaatgttgggttccatgtctaggaatgtttggggtaatgggagtctaaactatccgagcaatcctgcaaacatgagtgcttttgcttcaccaggaaatgggggccaagtcagtcttacaggtgacaattggggaggtcttccttctgctcatgggataggcaacatttcaggccttggatcagggaaccttggtcgtggagctggagataataactttggtttgccttctggcagctatggaagaagcaactcaactggtacaattggtgagcctttttctgcagcaggcaatacatatgatgtaaacaatgcagatacatatgggagcagctctgtttatggtggcacagtctggaggttcacatcatctgaggttgacatgcattcttttggtcatgatattggaaatgttggtccgacaatcaaatga

SEQ ID NO: 8673 - DNA, 1684 bp, Zea Mays
aagaagagattatcgctcacagcatgcaaaacagaacaatctcctctccgaattcaatcatccctccgccgcaccactcttcctccgcctctgctccgcttctgcactcagcgtcctccggttgctgacggatccctcttcgccgccgccgccgcggacccaccgtgggagaggaggcgatgcgaggcgaggaggcgggagcgatggaggccgccgactacgggaagctcttcgtcggcggcatctcatgggagacgagcgaggaccgcctccgcgagtacttcggccgcttcggcgaggtcaccgaggctgccatcatgcgggaccgcagcacggggcgtgcccgcgggttcgggttcgtggtcttcaccgacgcagcggtcgccgagcgcgtcaccatggagaaacatatgatcgacggacgaatggtggaagcaaagaaggctgttcccagagacgaccacagtattgtgagcaagagcaatggcagaagcacagggtcacctggaccgggacgcactaggaagatctttgttggaggcctgccctcgagcatcacggaggctgacttcaggaggtattttgagcagttcggtgtcataactgatgtggtcaagaaggctgttccaaaggagcagtctcctggacctgttgcacgctcacccgtgggagtggggcagaactatgctgcgaacagggttcatagcttcctcaatggcttcaaccagggttacaatccaatccccatgggaggttacggcatgagggtggatggaaggtatggcttcctttcaggtgcacgaaatgggttctcttcttttggcccagggtatgggatgggtatgaatgttgaaggtgggatgagcggaacatttggtgcaacctctggtttcatcagcaactccaacgggaggcaaatgggttcgtacttcaatgcaagttcgaacagattgggtagccctattgggtaccttggtcttaatgatgttcctgggtcaatgttgggttccatgtctaggaatgtttggggtaatgggagtctaaactatccgagcaatcctgcaaacatgagtgcttttgcttcaccaggaaatgggggccaagtcagtcttacaggtgacaattggggaggtcttccttctgctcatgggataggcaacatttcaggccttggatcagggaaccttggtcgtggagctggagataataactttggtttgccttctggcagctatggaagaagcaactcaactggtacaattggtgagcctttttctgcagcaggcaatacatatgatgtaaacaatgcagatacatatgggagcagctctgtttatggtggcacagtctggaggttcacatcatctgaggttgacatgcattcttttggtcatgatattggaaatgttggtccgacaatcaaatgagacatgtcagcaagtcacatgggcaactaccctgttaacaacaatcagccaagcagagaatgctacctgccagtcatggccagttgacgctcacggaggggtgctccaggacgaacggtaattcaattttgacgtgggaccttggccgccagcaatctacaacagttgctggaaccaccgagcttgccttctacagcgggtggtttctcactgcacatcggcttgtgtctgtgtgattagccccctcttgattttgg

SEQ ID NO: 8674 - DNA, 1697 bp, Zea Mays
aagaagagattatcgctcacagcatgcaaaacagaacaatctcctctccgaattcaatcatccctccgccgcaccactcttcctccgcctctgctccgcttctgcactcagcgtcctccggttgctgacggatccctcttcgccgccgccgccgcggacccaccgtgggagaggaggcgatgcgaggcgaggaggcgggagcgatggaggccgccgactacgggaagctcttcgtcggcggcatctcatgggagacgagcgaggaccgcctccgcgagtacttcggccgcttcggcgaggtcaccgaggctgccatcatgcgggaccgcagcacggggcgtgcccgcgggttcgggttcgtggtcttcaccgacgcagcggtcgccgagcgcgtcaccatggagaaacatatgatcgacggacgaatggtggaagcaaagaaggctgttcccagagacgaccacagtattgtgagcaagagcaatggcagaagcacagggtcacctggaccgggacgcactaggaagatctttgttggaggcctgccctcgagcatcacggaggctgacttcaggaggtattttgagcagttcggtgtcataactgatgtggtcaagaaggctgttccaaaggagcagtctcctggacctgttgcacgctcacccgtgggagtggggcagaactatgctgcgaacagggttcatagcttcctcaatggcttcaaccagggttacaatccaatccccatgggaggttacggcatgagggtggatggaaggtatggcttcctttcaggtgcacgaaatgggttctcttcttttggcccagggtatgggatgggtatgaatgttgaaggtgggatgagcggaacatttggtgcaacctctggtttcatcagcaactccaacgggaggcaaatgggttcgtacttcaatgcaagttcgaacagattgggtagccctattgggtaccttggtcttaatgatgttcctgggtcaatgttgggttccatgtctaggaatgtttggggtaatgggagtctaaactatccgagcaatcctgcaaacatgagtgcttttgcttcaccaggaaatgggggccaagtcagtcttacaggtgacaattggggaggtcttccttctgctcatgggataggcaacatttcaggccttggatcagggaaccttggtcgtggagctggagataataactttggtttgccttctggcagctatggaagaagcaactcaactggtacaattggtgagcctttttctgcagcaggcaatacatatgatgtaaacaatgcagatacatatgggagcagctctgtttatggtggcacagtctggaggttcacatcatctgaggttgacatgcattcttttggtcatgatattggaaatgttggtccgacaatcaaatgagacatgtcagcaagtcacatgggcaactaccctgttaacaacaatcagccaagcagagagtgctcgtgcagaatgctacctgccagtcatggccagttgacgctcacggaggggtgctccaggacgaacggtaattcaattttgacgtgggaccttggccgccagcaatctacaacagttgctggaaccaccgagcttgccttctacagcgggtggtttctcactgcacatcggcttgtgtctgtgtgattagccccctcttgattttgg

SEQ ID NO: 8675 - DNA, 1816 bp, Zea Mays
cgaacctgatcctttcctcttcctcagctcctcacacgacgtggcgtggcgttgcctccccttcgcttcactccgatcccctatcgcggccatgacgggagccaagcaatctcgccgatgcaacctcctgacgtttttctccaccatattggccaccgttctgcttttgatcttccagcgattctcgccgacggcagctgcagtgccgcagtggagaaggggaggaactcaggaacatatcgacgttgcgcggggagccgaggcagtgggccacgggcaaggacgatgcgaagattctctccgaggcggaagctcgcgctggcggcggaggagagggtttgctgacggcggacgagggacgcgagttcgcctcgctctacagcatgctgcagtgggcaattgggaactctgatccggataagttgagagaaaaggctgcagaattggtgaaactatcggcagaggaattactcaagagacagatggagattaaggagttgatggagaagttcaaggcgccatcagatgctgagttgataaagattgctattgctgacttaaataattcctctctggaggaccgccaacgtgcactgcaagagctcttaattctcgttgagcccatcgacaatgctaatggaacttggcaatgcagacgaaggaataagaactacttcagcatgggtgctgggcaaagccagtcaggacaatgttcttgttcaaaaccagatcaatggatatggagctttggacagattagtgaagatgggttattccagttctggaccagaagctgcaaaggcattgtacactatatcctctttgattagggacaacgaacatggtcaggagttgttcctttcagaaaatggttatgcaatgttgcagcacatattgtcaaccacaaacactagtgttcggcttcagaaaaaggttgtgtctttactggcatatatagctgactttcagctaaatacagggaagtcacaagctcaatccttactcaaccactttttcatataatcagtagttgagatgatatcagcagtgcctgaccttgacctccaggagaaggctttgttagctgttaggaatctgctgcaccttacgtcagctgatgctacagatcttcagaagttttcaggcctggatgattccctgaatgcactgaaggtgcaattggatgagttgacatctcatgaggaacaaagagagtatgctccggaaattgaaattctccggagagaagtccacactgtcttccagcggaaaactgaccaggcaagggtggtgacaaatgaaggcaaatataatggttagaaacatttgctgtccatataagcgtttgttcggttcttccccaaaccaagagggttgggggatttaatagtcccccctcaattctctccaaccccttggtttcgggaggaaactaacaagctctaaaggtgatcacataacaattcctcaactgaatgacaagttgtcaatagaacgagttgcatgggatcatagatacttcacagagataggatgtcacaaaatggtgattgtctatcaagttacagaacgaagaagtgcagtggaacagagttctcattctcactgatttctgcttcgtgtgaaactgtttcatagtacacttgtagcccattgaatgtcgatgttgttcatacgcaaggactcaaagttgttactgggcctgaactaaggctacaatcgcaatagccctgattcagttgcttcctgttcaaatgaaatgttgctcgagttctttcatacgtaggcattttgcgcaacttccactggaagtaaa

SEQ ID NO: 8676 - DNA, 2380 bp, Zea Mays
ttttggacgggaccctccctccccggctgacccgatcgattcatcttcctatcctgttgaacactgcctatgctagctgcatgcatgcgcgcggatctaggcaggaacaaggcaggcccctcgtcccgcggctgaccacgcagagatcgcacgagtgtggcattggccgtcgtcgcgacgacacttgggtcatctatcatcctccgatccgtcgcctcgccgccggccggcgagcccgagagtacgaggccatgacgcttgcgagcacggacaaggtggtgctgggatgcgtcgcgttcagcatcttctgggtgctggccgtgttcccgtcggtgccgtttatgccggtggggcgcaccgcggggtccctcctgggcgccatgctcatggtgctgttccgcgtgatgacccccgacgaggcgtacaaggcgatcgacctcccgatcctgggcctcctcttcggcaccatggtggtgagcatcttcctggagcgcgccgacatgttcgagtacctcggcggcgcgctggcgtggcggagccggggcagcaaggacctgctcctccgcgtctgcctcgtgtccgccgtggccagcgcgctcttcaccaacgacacctgctgcgtggtgctcaccgagttcatcctcaagctggcgcgccagaacggcctgcccccgcagcccttcctgctggcgctcgcctccagctccaacatcggctccgccgccacgcccatcggcaacccgcagaacctggtcatcgccgtgcagagcggcatcaccttcggccagttcctcgtcggcgtcttcccggccatggccgtcggcgtcgccgccaacacctgcgtcctgctctgctacttctggaggtacctcgcggcgccggagaaggaccaggaggcggggcccgacgcggtcgtggccgacgaggaggtcacctcgcacaggttcacaccggcgcggatgtcgcacgcctcgtccatgaacggcggcttcgacggcgactgcgtcagcgagcccatgcgccggagcgagagcctgggcagggccgacgcgctgaggagccgcagctacaactcggagggcgacatccaggtctccatccggtccatgcgcgcctccagcctgtcgcaggagatggtggatgtgtccaccgtcggcgacgggcccaggaagatcaccaggagcaccagccagcagcgcagcgtcatcatcgaggacgcgccgcccgaggccgacgacgacgcccacaagggcaaggacggcgacgacgacgacgtcaaggtgaagaggtggaaggtggtcgtgtggaagagcgccgtgtacctcaccacgctgggcatgctcgtcgcgcttctcatgggcctcaacatgtcctggtccgccatcaccgctgctcttgtcctcctcgcgctcgacttcactgacgcgcaggcttgcctggagaaggtgtcctactctttgctcatcttcttctgtgggatgttcataacggtcgacggcttcaacaagaccggcatacccaacgcgctctgggagctggtcgagccgtattcgagaatcgacagcgccagaggcacggcgctcctcgcgcttgtcattctcgtcctttcgaacgtggcctccaatgtcccaactgtcctcctgctgggctccagagtggcagcgtcagcggctgccatctccccggagtcgcagaagaaagcctggctcatactagcgtgggtcagcacggtgtccggcaatctcaccctcctgggctccgccgccaacctgatcgtgtgcgagcaggcgcggcgggcgcagttcttcgggtacaacctcaccttctggagccacctccgcttcggcctgccgtcaaccatcatcgtcaccgccatcggcctgctcatcgtcgtcagctactgaatggcgtcgggttgcccatctgaatggcatcgatcgagcagtggccggcacaggtagcagggctcctctcaagtctcaatctggttctgtcggaggggcctgtggtcggagcctttctcggtgaagaaacaagttatgccgaggtgtggactttgcaactttaccctgcatttgcaggacgaaaatcgttacagaggcttgtgctctaccgacccagctagacgcgccaacgtggttgtgtattgagatctttctttgtggcaacaggccggtcactctagcactcatagcaaataatatatagctgttgagtatcatatttggcacctaagcatgttcggacggttcgcccatgtggcccggacggtccgcatctccacgaccagattaacacagatgagagtatttatcccatgcatgtgtatcctaacatatccgtgcaaatatattggttcacgcctaaaaataggtccaga

SEQ ID NO: 8677 - DNA, 2487 bp, Zea Mays
cgctgaccgatgtcatggtgtagctagctatatatctcaaggatgtccgcagcgccggccggacaagcaataaatacccgtcccaattcccaacctggaggaggagattagtaggagtagtatcgatcgatcagcgccagcaaacacagtcgaggcccccgcgacacgcgaggtgtaaaaccgcagacggcggccgtgaggatctaggcaggaacaaggcaggcccctcgtcccgcggctgaccacgcagagatcgcacgagtgtggcattggccgtcgtcgcgacgacacttgggtcatctatcatcctccgatccgtcgcctcgccgccggccggcgagcccgagagtacgaggccatgacgcttgcgagcacggacaaggtggtgctgggatgcgtcgcgttcagcatcttctgggtgctggccgtgttcccgtcggtgccgtttatgccggtggggcgcaccgcggggtccctcctgggcgccatgctcatggtgctgttccgcgtgatgacccccgacgaggcgtacaaggcgatcgacctcccgatcctgggcctcctcttcggcaccatggtggtgagcatcttcctggagcgcgccgacatgttcgagtacctcggcggcgcgctggcgtggcggagccggggcagcaaggacctgctcctccgcgtctgcctcgtgtccgccgtggccagcgcgctcttcaccaacgacacctgctgcgtggtgctcaccgagttcatcctcaagctggcgcgccagaacggcctgcccccgcagcccttcctgctggcgctcgcctccagctccaacatcggctccgccgccacgcccatcggcaacccgcagaacctggtcatcgccgtgcagagcggcatcaccttcggccagttcctcgtcggcgtcttcccggccatggccgtcggcgtcgccgccaacacctgcgtcctgctctgctacttctggaggtacctcgcggcgccggagaaggaccaggaggcggggcccgacgcggtcgtggccgacgaggaggtcacctcgcacaggttcacaccggcgcggatgtcgcacgcctcgtccatgaacggcggcttcgacggcgactgcgtcagcgagcccatgcgccggagcgagagcctgggcagggccgacgcgctgaggagccgcagctacaactcggagggcgacatccaggtctccatccggtccatgcgcgcctccagcctgtcgcaggagatggtggatgtgtccaccgtcggcgacgggcccaggaagatcaccaggagcaccagccagcagcgcagcgtcatcatcgaggacgcgccgcccgaggccgacgacgacgcccacaagggcaaggacggcgacgacgacgacgtcaaggtgaagaggtggaaggtggtcgtgtggaagagcgccgtgtacctcaccacgctgggcatgctcgtcgcgcttctcatgggcctcaacatgtcctggtccgccatcaccgctgctcttgtcctcctcgcgctcgacttcactgacgcgcaggcttgcctggagaaggtgtcctactctttgctcatcttcttctgtgggatgttcataacggtcgacggcttcaacaagaccggcatacccaacgcgctctgggagctggtcgagccgtattcgagaatcgacagcgccagaggcacggcgctcctcgcgcttgtcattctcgtcctttcgaacgtggcctccaatgtcccaactgtcctcctgctgggctccagagtggcagcgtcagcggctgccatctccccggagtcgcagaagaaagcctggctcatactagcgtgggtcagcacggtgtccggcaatctcaccctcctgggctccgccgccaacctgatcgtgtgcgagcaggcgcggcgggcgcagttcttcgggtacaacctcaccttctggagccacctccgcttcggcctgccgtcaaccatcatcgtcaccgccatcggcctgctcatcgtcgtcagctactgaatggcgtcgggttgcccatctgaatggcatcgatcgagcagtggccggcacaggtagcagggctcctctcaagtctcaatctggttctgtcggaggggcctgtggtcggagcctttctcggtgaagaaacaagttatgccgaggtgtggactttgcaactttaccctgcatttgcaggacgaaaatcgttacagaggcttgtgctctaccgacccagctagacgcgccaacgtggttgtgtattgagatctttctttgtggcaacaggccggtcactctagcactcatagcaaataatatatagctgttgagtatcatatttggcacctaagcatgttcggacggttcgcccatgtggcccggacggtccgcatctccacgaccagattaacacagatgagagtatttatcccatgcatgtgtatcctaacatatccgtgcaaatatattggttcacgcctaaaaataggtccaga

SEQ ID NO: 8678 - DNA, 896 bp, Zea Mays
atatggcgcacggttctgccttgcacccgcgagaccctccactccgcgcagcaccagccgccatccccgcccgccatctgcgcgcgtctggcgtctccctcgcccccgctctcctctctgctgtccacgccctctgctcgcgtgtcttccagccacccgcgagcagagccttcgcccccggatcccacgcccgcgagcagagctgctgtccatgccgtcggatccgctcctccctcggaaggagaatctccaaatctcgccaccatccccgcctaccatctgcgcgcgttggccgtctaccggctacgcgcatgtgactgtcgttggatcccaggtctcgcccaattccaagcgcccccgcttcgagcgtcgcccccaacaagacgtccggatctgcgctagccctagctcgcgaggtcgacgccgatggatccaaggacaccagcgtcgcccctctccgagctcccccaatggccgccgcggggatgttctgctggtccacaccaagtgcgccgtccacaccaagctcctcgccaacgacttcctcctcttttccatggccgcgagctccgctagacaccgctgtcttcgaccctgctgcgccaacaagtgttcgaagaagagggaaatcgagcgccagatggccacggccaagctattcgcggaggaacagctcgcagaggttgtcgccctcaagagaggcatcttcgtggggactggttgttttgctgagaaaaaaataccgatcatggaggccggaggaaggatatcaatattatcaaaaaagcatttataagctaccagctcctggcttcagcttcaaccatgcacatatctctgtccgcagaatttgactactcggttgggccaacaattatggctagaccatctggctt

SEQ ID NO: 8679 - DNA, 3449 bp, Zea Mays
gagttgctcttactattttgaactctattatacaaataatacaatctctagtataaataatattctgtaagaccacttagaacaccacttacacgaactgctggaccggagatggcctaaacatagggtttagaccgttgccgtccctactcccgcctagccgaccccactcgtcccagtcccagtcccagtccgccgcctggttccttcttgctcttccctccactctctacagacgcagattgacaaggaagagagagagaggccgaggggaggaggcgtcgtcgtcttcttctgaatgcctgaacttttatttggattccagatagtatggctgccaaaatggctggagctgtccaagtgctcaaggatgacactgttaaacgcacacccatggcacgacctagtaacggccgtgaaggaaagcccattaggttgctgtcgaaccacttctcagtgaagcttagaggagttgatgctgttttctaccaatacagtgtctgcatcaaatctgaggatgataaggtggttgatagcaagggtattggccgaaaggtcatagataaactattgcaaacatactgttctgagcttgatgggaaggattttgcatatgatggagagaaatgtctatttactgtgggacctcttccacagaataactttgagttcactgttatcttggaggaaacatcttcaagggctgctggtggaagtccagtgcatgaaagccctactcaagctaacaaaaagcgagtcaagcgatcacatctggcaaaaaagttcagtgtagacataagttatgccgcaaagattcctcttcagtcggttgctttggctcttcgaggaagcgagtcagaacatggtcaagatgttctgagagtccttgacgttgttttaaggcaacagcaggctaagagaggttgtctacttgttagacagtcatttttcagtgatgatagtcgaaaccttgttgatttaactggtggagttagtggttgtcgtggactccactctagtttccgtactacaattggtggtctttcactaaatatggatgtttcaaccactatggttgtaactcctggaccagttattgattttctcgtcacaaatcaaaatgtaagagacatcagagatattgactggcccagggccaagaaaatgcttaaaaatctcagagttaaagctaagcacaacaacatggagttcaagattattggccttagtgatcaaccatgctctagacagatgttcccaatgaaagttcgaaatggaaacatcgaaattaaatctgttgatatcactgttcaggattattttaaatccaagcaagttgagctaacaatgccttatctgccatgtcttgatgtgggaaaaccaaaacgccctaattatctcccaattgagttatgccacatggtatcacttcaacgttatacaaaggcactgtcttctcaacaaagggcaatgttggttgaaaagtcacgacagaaacctcaagaaagaatgcgagttgttacagatgctgtaaaaagtaatatgtatgatgatgatccaatcttatcttcatgtggtattgaaattgagaaacaacttactcgtgttgacgctcgtgttctctctgcaccagcgctagttgtgggcaacagtgaagattgcatcccaaacaggggtaggtggaactacaataataagaggctattcgatccagtcaagattgagcgttgggccattgttaatttctctgctcgttgtgacatgagccgaatctcaagagaactgataaactgtggacgcagcaaaggcattttcattgaatgtcctcacagtttggtggatgaggacagccagtctaggagatgttcacctgtggaaagggttgaaaagatgtttgaaaaagtcaaagcaagccttcctggtcctccagagtttctcctttgtcttttaccagagaggaagaattgtgatatttacgggccatggaagaagaaaaatcttcatgaaatgggtattgtcactcaatgcattgctccaagtaataagatgaatgatcaatatttcaccaatgttcttctaaaaattaatgctaagcttggtggaatgaactccaaactggcactggaacatcgtcaaatgataccagttgtgactcaaataccaacattaattcttggcatggatgtttcacatggttctccaggtcgagcagatataccatcaattgctgcggttgttggatctagatgctggccattgatatcacggtacagagcatctgtgcgcacccagtctccaaaggtagagatgattgattctctatttaagccactggatgatgggaaggatgatggcataatgagggaacttctactagacttctaccaaaccagtcaacaaagaaagcctaagcagataatcatcttcagggatggtgttagcgagtctcagtttagccaagtactgaacgtagaacttaatcaaattataaaggcatatcagagtatgggacagggggaccttccgaagttcacagtgatcattgctcaaaagaatcaccacacaaaactcttccaagctgattcaccagagaacgttccacctgggactgttgtggactccggcatagttcatccaagacagtatgatttctacatgtgtgctcatgccggaccaattggtacttcaaggccaacccattaccatgtgttgcttgatgagattggcttctctgcagataatctccagaagctagttctttcactttcatatgtgtaccagaggagcaccactgcgatttctgtggtggcacctatctgttatgcccacctcgcagcagctcagatgggccagttcatgaaatttgaagagtttgcagatacgtcgtcagggagtgtcaattcatcatcgccaccatcaataccagaattgccacggctgcatgctgatgtctgcagttccatgttcttctgttgacgtgattttagtttgaccgttgtggggtagggccaattctttgtgaaaggaaccttaccttatatgttggcacacagcaggctaaccgtttttgtgaagaaaccatgtaggtcgttagttgtcgtatatcgcacgcgtgcatctttttggagcggttttcggctccccccacccacaggtggcggttccgttaggtacagtttccagattttaacgatgctaatacagtaaaagcagtttgtacattctacgcagattttgcagggatacgtggttagatgatctttttgttatgcccagaaatacgtgtgcattggggggttatgaaagtgagctaaatttctgtgcctcgcatggcatccaattgtactcggagattgtgtttgtgctcgatacgcttcctgccactgaaatgcgaaaatgaccacttccactcgctactcgtgacaccacaggaaaatccttgcatcgac

SEQ ID NO: 8680 - DNA, 1994 bp, Zea Mays
atgggagagagcgtttccagtcgctgcgctgcgcgtcattctcctcccctccttccacccggcaaaaaccccgcgtcggccactctccggaggcgactagggtttcagcccctgggacacgccgccggtcgtggcacctccgccaccggatcccggtacccgagctacgccatcgccgccccgcccccggtcaccgccggtgcgcttccgccgacaccagacgcagctcgtccgccccgtcacgtgcacctctgcgtgggcgcgggattggatagggtttggggtttcggcggctggcgccaaatcccaccgctgctgctcgcgcaggaggtctcgagccctcggggttcccctactccgctccggctggagttctcgatgaaacttgttctacagtgttcttctgttgcatgactcagttgttttgagttatacttcataataacaatgcaaacacgaaaaaagggtgctgcaaaaaatgcagtggggtatcatgccaatcctaagacaagtaggccatccagaagggcaactcaatctacagttgctgaaaagaaagtatctgatctcatcacgtcttcttccaagaagcagagacctgttggtgtcacttccaagaagcattctaaaggaggaaggaagctgctagtttcatgtgatacaactgatgctggaaatgatgcacctcaggcccagcattctgatggtgttgcagatgatcgtcccaacgattccatattctctccaacataccatcatcacaaggaaggtggtgtgaataacctatccaaaggcttagaagaacaaacaacacatgttcatggtagtaaggaagctagcctaaaatctggttcaaaccttgcatgcaacactcatgatgggataaatgaccactctggcacactaaagttgcaatcagctgggcaaagcacattgcttgaagtggatgagtacagtgaactgggaaacctttcctcagaagtatcagcaatatatcttgctatgcagcagtctaagttggagtgcattgatgaacagagtcaagattctacctcaacagaaggttatggtgaagctgaggagactgaagagtatgatgattttgacccctactcctttatcaaagatttacctgatttatctatggtggtccccaagtttcgtcctgttctccttccaaagcagacccggagttgtcctacgatgactcttgtacttgatcttgatgagagcacacaatatatgttcgatgccgcccctatctcaaggaattcttggatagggttgccagcgtgtttgagacaattattttcactgctagtcaaagcatttatgcggagcaacttctcaatgttcttgatcccaaaagaaagttgttccgtcatcgtgtttatcgtgaatcttgtgtctatgtggagggaaactacatgaaggatctgacagtacttggacgtgacttaactcgcgtaatgattgttgacaattctccgcaggcctttgggttccagttggacaatggcattcctatagaaagctggtttgatgatcccaatgacatggagctgctgaaattgctcccgttcttagaaagcttggtcggcgttgaagatgtcaggccttatatagcaaggaagttcaacctaagggagaaggtagccaccgcatcttctcttacaatagacatgcagatgtgatccgtccaatgctgccaggtatttttcaggtgccaaaggtcgccgtgatgataaatgtaggaccggagctgatatagtggttcttgttgaatgtagcatgtcaggatctcctggctccttgcattattgtatgctctaccgaccgcaatgtacaattttcgctgcagttggcagttgtagacttcacttgcattttgttggcccagttgacatgggaagggcctacttgaacattttgtcgatcagttaatatcgtgttgattcatatattgtctgcgacatgtgtgaaagtcgaccgag

SEQ ID NO: 8681 - DNA, 2346 bp, Zea Mays
atgggagagagcgtttccagtcgctgcgctgcgcgtcattctcctcccctccttccacccggcaaaaaccccgcgtcggccactctccggaggcgactagggtttcagcccctgggacacgccgccggtcgtggcacctccgccaccggatcccggtacccgagctacgccatcgccgccccgcccccggtcaccgccggtgcgcttccgccgacaccagacgcagctcgtccgccccgtcacgtgcacctctgcgtgggcgcgggattggatagggtttggggtttcggcggctggcgccaaatcccaccgctgctgctcgcgcaggaggtctcgagccctcggggttcccctactccgctccggctggagttctcgatgaaacttgttctacagtgttcttctgttgcatgactcagttgttttgagttatacttcataataacaatgcaaacacgaaaaaagggtgctgcaaaaaatgcagtggggtatcatgccaatcctaagacaagtaggccatccagaagggcaactcaatctacagttgctgaaaagaaagtatctgatctcatcacgtcttcttccaagaagcagagacctgttggtgtcacttccaagaagcattctaaaggaggaaggaagctgctagtttcatgtgatacaactgatgctggaaatgatgcacctcaggtaccccctagcgtcttccctgatctgcaggcccagcattctgatggtgttgcagatgatcgtcccaacgattccatattctctccaacataccatcatcacaaggaaggtggtgtgaataacctatccaaaggcttagaagaacaaacaacacatgttcatggtagtaaggaagctagcctaaaatctggttcaaaccttgcatgcaacactcatgatgggataaatgaccactctggcacactaaagttgcaatcagctgggcaaagcacattgcttgaagtggatgagtacagtgaactgggaaacctttcctcagaagtatcagcaatatatcttgctatgcagcagtctaagttggagtgcattgatgaacagagtcaagattctacctcaacagaaggttatggtgaagctgaggagactgaagagtatgatgattttgacccctactcctttatcaaagatttacctgatttatctatggtggtccccaagtttcgtcctgttctccttccaaagcagacccggagttgtcctacgatgactcttgtacttgatcttgatggtatgaactattagctatatacacacttaaatagtcttcaatactgcatttaatagccttttatagccatttacacgagtatctgcaaccaaagctgcttattcatgttattcggttcaaaactgcagaatgtctgctgcctctacaatgcataagtttaaagcacgaatccatctatctaagactactaattagggaacaagcaagcactgatctaattttgttgtcttagtacaattttcttgcagctatgggctggtatgtgttataacaagataaactccagtgctccacatgttggctaaatctagcagaacagaaggcgatattatttttgcaggctgatgtatttgtacgatgaatatatcactatcatgttcattttaacttcagagagcacacaatatatgttcgatgccgcccctatctcaaggaattcttggatagggttgccagcgtgtttgagacaattattttcactgctagtcaaagcatttatgcggagcaacttctcaatgttcttgatcccaaaagaaagttgttccgtcatcgtgtttatcgtgaatcttgtgtctatgtggagggaaactacatgaaggatctgacagtacttggacgtgacttaactcgcgtaatgattgttgacaattctccgcaggcctttgggttccagttggacaatggcattcctatagaaagctggtttgatgatcccaatgacatggagctgctgaaattgctcccgttcttagaaagcttggtcggcgttgaagatgtcaggccttatatagcaaggaagttcaacctaagggagaaggtgccaaaggtcgccgtgatgataaatgtaggaccggagctgatatagtggttcttgttgaatgtagcatgtcaggatctcctggctccttgcattattgtatgctctaccgaccgcaatgtacaattttcgctgcagttggcagttgtagacttcacttgcattttgttggcccagttgacatgggaagggcctacttgaacattttgtcgatcagttaatatcgtgttgattcatatattgtctgcgacatgtgtgaaagtcgaccgag

SEQ ID NO: 8682 - DNA, 2651 bp, Zea Mays
atgggagagagcgtttccagtcgctgcgctgcgcgtcattctcctcccctccttccacccggcaaaaaccccgcgtcggccactctccggaggcgactagggtttcagcccctgggacacgccgccggtcgtggcacctccgccaccggatcccggtacccgagctacgccatcgccgccccgcccccggtcaccgccggtgcgcttccgccgacaccagacgcagctcgtccgccccgtcacgtgcacctctgcgtgggcgcgggattggatagggtttggggtttcggcggctggcgccaaatcccaccgctgctgctcgcgcaggaggtctcgagccctcggggttcccctactccgctccggctggagttctcgatgaaacttgttctacagtgttcttctgttgcatgactcagttgttttgagttatacttcataataacaatgcaaacacgaaaaaagggtgctgcaaaaaatgcagtggggtatcatgccaatcctaagacaagtaggccatccagaagggcaactcaatctacagttgctgaaaagaaagtatctgatctcatcacgtcttcttccaagaagcagagacctgttggtgtcacttccaagaagcattctaaaggaggaaggaagctgctagtttcatgtgatacaactgatgctggaaatgatgcacctcaggtaccccctagcgtcttccctgatctgcaggcccagcattctgatggtgttgcagatgatcgtcccaacgattccatattctctccaacataccatcatcacaaggaaggtggtgtgaataacctatccaaaggcttagaagaacaaacaacacatgttcatggtagtaaggaagctagcctaaaatctggttcaaaccttgcatgcaacactcatgatgggataaatgaccactctggcacactaaagttgcaatcagctgggcaaagcacattgcttgaagtggatgagtacagtgaactgggaaacctttcctcagaagtatcagcaatatatcttgctatgcagcagtctaagttggagtgcattgatgaacagagtcaagattctacctcaacagaaggttatggtgaagctgaggagactgaagagtatgatgattttgacccctactcctttatcaaagatttacctgatttatctatggtggtccccaagtttcgtcctgttctccttccaaagcagacccggagttgtcctacgatgactcttgtacttgatcttgatggtatgaactattagctatatacacacttaaatagtcttcaatactgcatttaatagccttttatagccatttacacgagtatctgcaaccaaagctgcttattcatgttattcggttcaaaactgcagaatgtctgctgcctctacaatgcataagtttaaagcacgaatccatctatctaagactactaattagggaacaagcaagcactgatctaattttgttgtcttagtacaattttcttgcagctatgggctggtatgtgttataacaagataaactccagtgctccacatgttggctaaatctagcagaacagaaggcgatattatttttgcaggctgatgtatttgtacgatgaatatatcactatcatggtatttcagaactcagattcatcatggatgtagatcttggttatttatgtaaactagattgtttgctgtatggtagtaatctagcacttagtagtaccgaaacttccctagaaccatgctttggtccacaatgttggatttatttctctttctcttgtctaggttctattactactgccagtttgatataagttttaaagtatcattcatttcttatattgatgttaatttcatgtttgtcttgctacaatgtagagacacttgtacattcaactcttgaacactgtgaggatgctgatttcacatttccagttcattttaacttcagagagcacacaatatatgttcgatgccgcccctatctcaaggaattcttggatagggttgccagcgtgtttgagacaattattttcactgctagtcaaagcatttatgcggagcaacttctcaatgttcttgatcccaaaagaaagttgttccgtcatcgtgtttatcgtgaatcttgtgtctatgtggagggaaactacatgaaggatctgacagtacttggacgtgacttaactcgcgtaatgattgttgacaattctccgcaggcctttgggttccagttggacaatggcattcctatagaaagctggtttgatgatcccaatgacatggagctgctgaaattgctcccgttcttagaaagcttggtcggcgttgaagatgtcaggccttatatagcaaggaagttcaacctaagggagaaggtagccaccgcatcttctcttacaatagacatgcagatgtgatccgtccaatgctgccagcatgtcaggatctcctggctccttgcattattgtatgctctaccgaccgcaatgtacaattttcgctgcagttggcagttgtagacttcacttgcattttgttggcccagttgacatgggaagggcctacttgaacattttgtcgatcagttaatatcgtgttgattcatatattgtctgcgacatgtgtgaaagtcgaccgag

SEQ ID NO: 8683 - DNA, 2245 bp, Zea Mays
cgaccggaaaaggacattgttcttttctgcgcccctactccacccgccgcctccgctcctcgccgccgcgcggcgcggcgacgtgcaatcttagggttcgtgagagggttcccgaatcctccttgccgtgcaccacaccgtccccctccaccgacgccgctgcttcccatgtcgctccgatccggcggccgccagctatctttcgagcttctcgcgggcgacctcaccgccgacgacccggacgacatctccccgcgctccctgcccgatacatcgtccgatgggcagcgccggcgcaggaggcggtctaagcgcaagcgtgggttccggagccccccgatccaggaggcggtttcggagggggagcagcagccgcgcgtggagggcggcggcaactcggccgcggcgttcagggtcctggatctgaagtcgactgcggagacggtgtgcgagagctcggacgcggaaaggtctgcggcgagctgcgtgacctatgttggcgtggagctgaggcagaggagcgtctccgggggcgggagggtggtggcagcgtccgcggatgatgggaccagcagctgcggaagcagcacgcgggagagcgccgcagctgctgcggctgtggcggatgtggcagccatggcgtggcggcctgaggcaaatggcggcatgaagaagaagctggagaaggagtcgtcgctggactgggagaagtacatgaaggacaataacaaaattctcggagaatttgagcgccttgacaaatcaccattcagatactttcttggggaactatatggtggcaattcactgagaagcacaattgcagtgggcaatgagaagaagcggcagcgggtgtacaacactatgtttcatgtcccatggagatgtgaacggctaattgtcgcaggattcttcgtctgcttggattcctttctgtcattgcttacaattatgcctgcacgaattgtcgttaccatctggcgggtgatgaagaccaggaagttccggcggccaaatgctgctgatttatcagattatggatgttttgtagttctagcccttggagttgcctctttgcaaatgatagatattagcttaatttaccatgtcattcgtggtcagggcacaatcaagctttatgtcgtatacaacgtactagagatctttgacaaactctgtcaatcattcggtgaggatgtgctgcaagttctgttcaactcagctgaggggttgtcagcatgctcgacagataatgtgacatttgaactgatgcggttcattttggatgaggctatagccgttgttgcatttgttgtccattcatttgtcttgttagctcaggcgatcaccctgtcaacatgcattattgcccacaataatgcattattggctctactggtatcaaacaattttgctgagattaaaagtaatgtatttaagcgtgttagcaaagagaatcttcataatttggtatactatgacatcattgagcgatttcacatcatggcctttctgctatttgttcttgctcaaaatatcttggaagcagagggcccatggtttgacagctttcttattccagttgcatattcagaatttttggaagatctttgcaagcagattttgaatgacaaacctgatgaccgtcagaaggacctaacattcatcccacttgccccagcttgtgttgtaattcgtgtattgaccccagtatatgctaccctccttcctgctggcccttttatctggagaatattctggattttactttggtcagttctgacctattttatgctcgccatattcaagataatcgtgggattgatactgcgctgccttgcaaattggtatgtaaatctacggctcacaagaaaacaacacgtggattgagtacatggcaccacaattctgctgctatcgttacatctgtgagtagaaattttgctgtggtgcatgaagtgcagcaagcactgcagctgctgagagttatatgacagaagtattcatagtatagtacagcgcagatgaatattatagtctcttcttccaagggttttgtcgattcgaggaacagattagtcaaattttgtggtgtttagacttctgacctccgtttgtgcatagctcagcttcatccaaaactatctgctgtcacctaaccaagatgttctggtctgtgatgtaagacatgtttatacattttttttaaaaaagaaacaaactgtactttcgtgttcagcagaag

SEQ ID NO: 8684 - DNA, 1868 bp, Zea Mays
gaatcgcattcgattaggcagctgcggggccgccggccgaaccgcctccgcagtccgcaccacacgtgccacccccgcgcgcctccctctcctcttcactccgccaccattcttctccccctccggcgagagcgtgcgcccaccccgccatgaagcagctgcaccggcagtccagcattagcaagcagcaccgcccgcaccaccaccgtacctccctctcccgcaccctcgcttcctacctcctccgcgagcagcgcctcctcttcgtcctcctcggcttcctcctagcctcgtccttcttcttcctctacccgcattccgccgccggatcctcctcggccaccaatatcaccgccgccttcgccagaaagaacccccgcagcagcggcgcctcctcctccgcgcgccgcctccccgtcggtgtccggaagccctccctgcgcatcgtcgtcaccggcggcgcgggttttgttggcagccacctcgtcgacaagctcctcgcccgcggggatagcgtcatcgtcgtcgacaacttcttcacgggccgcaaggacaacgtcgcgcaccacctcggcaacccgcgattcgagctcatccgccacgacgtcgtcgaacccattctcctagaggtcgaccagatctaccacctcgcctgccccgcatcccccgtgcactacaagttcaaccccatcaaaaccatcacaaatgtcatggggaccttgaatatgcttggactggctaagagggttggggctcggttcttgttgactagtaccagtgaagtgtatggtgatcctcttgagcatccacagaaggagagctactggggacatgtcaatcccataggtgttaggagctgttatgatgaggggaagagaacagctgaaactcttaccatggattaccaccgcggtgctggtgttgaggtgagaattgcacgcatatttaacacatatggccctcgaatgtgtttagatgatggccgagttgttagcaactttgttgcacaggctttgcggaaacaaccaatgacagtttatggcgatggaaaacagactagaagttttcagtatgtttcagatttggttgatgggttggtaactctaatggaaagcgaccatattggaccattcaacttggggaatcctggagaatttacaatgctggagcttgcacaggtggtaaaagaaacaatcgacccaggtgcatctgtcgagttcaaacccaatactgcggatgatccgcacatgagaaaacctgacatttcgaaggctaaatctcttctcaattgggagccccaagtttcactaaaacaaggcctgccgcgtatggtctcggacttccagaaacgcatcatggatgagaaatgatgaggagcagaggtttgtttcgaaaaggaaatgaggagcagacgccaccagtctcagaacactgtatcctactgacagatctcttttggtgccatgaaggctgaaggccttgacaaaggtcagatgaacgactaattgccaaaaaattcttcctcgctccagggcaatttttttttgtgacaggacatctgttctttggttctggtttcttcgatacataaacttcgccatagaattccatagttgcctttaagcgaacagtgagaggtcaacataaatttagtccctctttctctctttctgatgttattgaaacccatccacgtccattttacgtaggatgataccatattctcatgctacacatgtcctctatttcgtgtctgaatttttaggtgattttattactcttgtacaacaaacaaatagttattttatggttccttaaattgttacttttataatttgtgattttatgatttgtgatttgtttttgta

SEQ ID NO: 8685 - DNA, 1812 bp, Zea Mays
ggcggaaccaaagccggcccacgctgctcgcctgctccggcgaccgccctccgcctccgccctgagtgacatcccctgcgaccagccgctcgccggcggtgttcgcgcttcgccggcacgccggcgtgcgccctcgtgtgccgtggctgctgcgtgccttgtccaccgaggtgactggtgagatctcgctcttcctttatcctcgcctcctcggtccaagtaggagtcggcggctatggcgacgacggccgcggggtacggctgttgcttggcggggctaccgccctttccgttgttgcctgggatcctctcgacccgcctgcgccgggagccttctcctcctcgcgtggcccttgtggcctcctccccgaagctcagggcgccggcaccgcggttgagagtttcgtgcggtccaaggaggctcgcttcctcctctggcaaggccaattcggacgcggtgccgtcgccaacggaagccactattgatataaagcttcctagaagaagtttgcttgttcaatttacatgcaatgcatgtggtgaaaggaccaagcgcttgataaatagagtagcctatgaaagagggacaatttttcttcaggtccagagtcttatattgcgctgccttcagatgtacatggaccagaaagaagtggtcgatgccctctcccaccactcgaagatagagccctgcattactgaacttgtttggcgacaacttgagcatcaaaatcctctgtttttcaaggcgtactatatgagactaatgcttaagaatcaaataatggtcttcaacaagcttcttcaggatcagtttgaggttatcaataaagaattttcttcagggatcccttctatgtcgcttcctaatggctctaactccaacctattgaagcaaaatccatgctttttgccagagactgctcctggatctgcaatgccagatggtataatgcacaatggaagttcgcgtggtataataaatggcacaccatctggcgatcaattgctcaatgctagtaaagacttgcatggccttcataatggaatagatgcttcgactagtctgcagtcagaccagaacgcagctgctgtgctgtatggtgtagacaacgagacaagtgcaacgataaagaccgagtcttgctattcgagcaatgctgattttgctttctgtgggaatactttcctggaatcgtgccagtcaataggcgatgcatctggtggtggatccttcagtagctcagagctgaacgggcaaccactaaacgattcaattctggatatggaatcatcgtcatttagcttcttgaaccaaatgccccaaagcttcatctttccggacttgggagacgatttcaaccaaagtgcagagataacacaatttctcaccccggaaacaaatttctccgattcgacagggggagaccatacagcaggttgagcggggtcatgcacagcgcaccaaccatttgtacatacgctcatgggcagtcaaacctgcactgatgaagagcttgaggaccttttgatctagctgtttcttttttctactcttctcgtcttatattgtggtagtttatgggttggtcttctggtatgccctgcgatggcgtcgttatcgtgccttgtacattgccgtgcttgtgtaagaaacattaggagcggcgttgttcgcgtcagcattgatttggctaattcctccgcttggcttggcttgtacaacgaattttatcaaaatattaactggattctgaaatcgagattttcgaccatcggtttgtgctattgtgtatgctgcttccaactatc

SEQ ID NO: 8686 - DNA, 1085 bp, Zea Mays
aaacttccagcgccttcgtcctcgccaatccacatgcacagatgctcgacccgatgaaatgctgcagtgcatcctcgcgctccacgtgtccccagccgtcttgtcgtcgttgcgtcttctctggtgctccttctcacgctccgccttagcctgccaccattgtcgtctcgctcgctgctcgccaacgccctgccttgccgacggttgtaggctcctccgctcgctccaccgtctccaccacatcctcgcgatctggcaccgtgtcccttccggttccgatttcggctatgattcattatctcagtatcggtgtctccaagtgcctcttcatgatgttttgcatcgacgagtgtgacagatggctggaatggctagagtaggagatgttgttgttggagaattatggttttctttgctatatgacccaattattcacaattcgaacaaaatcattatgccagcttctactttacaactggtgtaagcgcttgaattatcgtctcaatttagtcgatagctgctgaaatacagtaagttgggtcttgcacttatgtatttatgtgctccataataactgctcttaatgtatatatgatcacttccaatgtatatatgatcgcgacacaatatctaattagacattgttggggaccttcggcttccgaaggtcctcaaaaacagaatttaacaatatttctggagtatgatgtgtgaacaggtatcttcggactcaagtcggcatcacagtagaccagaataatacgaaggttggtacagcgccgaaggtgtgagcaagaaagcttcggcgtggcagcgaaaagtgaaaccgacttaaagatgaaaaggctatttagacctcgacagattactatagaattattatcaagtgtaaagggcatgaatgtaattttgtatggattgtgtcccgtgcctataaataggtgaacagtacccccgtactgttcacgcggacttggcattcgctttttgcgtcacacttgtactatcatctcctttcagttgaaggtacacttgtaattcaacgacatttctgtttatgcctggtaataataaataattgttta

SEQ ID NO: 8687 - DNA, 3461 bp, Zea Mays
tcgacggcaaaggctaaccactagaatcgttggacttctggagacttcgatgagctccacgaagcaaacttccagcgccttcgtcctcgccaatccacatgcacagatgctcgacccgatgaaatgctgcagtgcatcctcgcgctccacgtgtccccagccgtcttgtcgtcgttgcgtcttctctggtgctccttctcacgctccgccttagcctgccaccattgtcgtctcgctcgctgctcgccaacgccctgccttgccgacggttgtaggctcctccgctcgctccaccgtctccaccacatcctcgcgatctggcaccgtgtcccttccggttccgatttcggctatgattcattatctcagtatcggtgtctccaagtgcctcttcatgatgttttgcatcgacgagtgtgacagatggctggaatggctagagtaggagatgttgttgttggagaattatggttttctttgctatatgacccaattattcacaattcgaacaaaatcattatgccagcttctacgtacgaatcacacagtatttgtcagtcttattcaattcaattttacagctggaacaataacaatgaacaatcttatgcagttatactcgatatgtactcttagaattttgacatagagactgaaaaggaatctgaaccaacctagttactcatttaatgagacttttcatcattatacgtatattatcttgcttaacaatgtgtaaatattttaaggtaatcactaagccgtatgtaaggtccttgagtcatgttacctgtggcatgtatttttccttgcgttccttttttttgctcccaagacctgctcttctctgatattgtgttgatagttacctagctcatctaatactccaataatatcatttttcaaataaagctagaattatagaatttcatcaccattacttcttgcagacctcccataaaatattaaaagttcacagttctcttttccatggacaattaagcaaccactactgctccaactaataacattacatgaacatcattttttcacaactattgcagaggaaaaacagttgtgatttccaaaaggcttacataattgcactgagacttggtaccatctcattatagttgtcacgttatctataggttacaaaacatcaaactccggctgatgcaacccacaacagttgatgaggaaattcaagtttgtcaatcgcctagcttcaaagacaagactgttgaagaactacttgatatagatccagacatattccctataaccactatgaaattctcttgtgttcgactaatttcatacatcaacaataagtttattctatttgcaatatcctttttttcttccactatacagccacaaggttacatatgcactatcactatctcactcctcgtacaagatagtggatggtggtttccatcttgcaccaagtgcaacaagtctttagctcagacctccactggataccgctacacaccatgcgactgggcagacattaaatttaggtagctctccacacaaacacttggtttatcatgcttcgtttggagaaaaaatatttttttatttcctacatacctaatcactgctataaagcactaacatttccaattcacagatacaaacttgacttcattggtaatgatggaacatccaaagcataattcttttgtttcgataatatagacaaacgaatactatgaaagccttatgaaacccttgttagaataacgaaagcctctcagggtcctctagtcgacctggccgccattgtattgcttaagtttacctttgcatttatcattaacatgtcagaattctctgtcacaaatagtcttttaagttctctctgtgttaacaaatcatggaagacaaagatcagtaccatctaccatgcttaattatccccaactagaattgctgacccaagacgacatatttggccttacaaccacacaggactctccaccgacatcgtttgctagactatccacttctaccaattaaaaaatgttgtaagaaattcctttttagtagcgtctgaaactacatgtgtagagcctgattccggtgcgcatcagagtacaaaggtaaatttggtataatagtgtatttaacttttgtaataatagcatatattataatctattcccccatatacatctttttgtaaaggaaaaatgagagaactactaaacttctactttaaaccagcaaaaatgatttgacagctcttatccacttaatcacagggtgatgagcaatatacaagtcagcttaaacaggacgaagtacatattacataggagattatttgggaaaaatacaaatagcaaatagcttgatattttatagctataacttatacttcataatgatgcaacaaagcacatacatgatatatacatgatcaaacctagccaacttcacaaactcctacccgcatatcccaaaaagaacaacggttagatcgtcatgaattgcatgaaggtatgacaccatctatgctccttaatcgcacagagcttatttacaatatagtttgcacattgtccttcgccctccattgtacccattacacaacaataaaataactgacacacactttaagtgcaacggatcttctctttttatttgtgtacaggtagctgtttttgcatacctatgaaggacatcgtcacttttgaatcaagaatgcttttgtatacatataacccaactgctgatgcctttctacctctgtatatgttcatgcgacccctctaattaactcttgacatacgctactttaatgctacttaatatgcattgtaatctcagtttacaactggtgtaagcgcttgaattatcgtctcaatttagtcgatagctgctgaaatacagtaagttgggtcttgcacttatgtatttatgtgctccataataactgctcttaatgtatatatgatcacttccaatgtatatatgatcgcgacacaatatctaattagacattgttggggaccttcggcttccgaaggtcctcaaaaacagaatttaacaatatttctggagtatgatgtgtgaacaggtatcttcggactcaagtcggcatcacagtagaccagaataatacgaaggttggtacagcgccgaaggtgtgagcaagaaagcttcggcgtggcagcgaaaagtgaaaccgacttaaagatgaaaaggctatttagacctcgacagattactatagaattattatcaagtgtaaagggcatgaatgtaattttgtatggattgtgtcccgtgcctataaataggtgaacagtacccccgtactgttcacgcggacttggcattcgctttttgcgtcacacttgtactatcatctcctttcagttgaaggtacacttgtaattcaacgacatttctgtttatgcctggtaataataaataattgttta

SEQ ID NO: 8688 - DNA, 2507 bp, Zea Mays
cacgcccaacggccgtttcccgcaccccctatccgggaaggaagaaagccagaactcacccctgcttcgtctggcggcgccgtttcccgcacgcgatgccgtcgacggcggaggatttcccggcgataaggaagctggggaagctcttccggcttaccgaagtgtacctctgggacgattcgtatggcgctggacctcacgatggacagaagaacgggcgctcggcggaggctgctctcgtggactctcatacagataaaacatgcaatgaagcatccaatagcactgacaaaggccatttctttgttgaagatttggaattggtcaatctcatgggttctttggggcttcctgtttcattcagcacaagtaaagtgaacaagaacacatgcaacaagggaaagaaaaaaggaagacaagcaccgctcaaagcagcaaacactcaaatcaatgatgctgtgaggatatgtatcaatactgaagatagagaaaattctgttgaatcattggatgctatggagcaaacgcactcatgcaatttatttgtgacaccactgggtcaaaatgaaccctcccgtgatgacactgacaagaggcttagggaagacagctcttgtgttgaagaacaagaagagtctggctgtagcaccatctactctgctggcaaagcccctggctgtgatgctaaaaatcatctcactgaacttggggcttttgagctttctgataacttggccaactcagcaaaagaagaatactcaattcaagaaaatcaagcttatgaaagtgtgttgctagattctgaagagatgtcaaggaatgactgtgttgatgatgaatctacacattcctgtgttggcatttatcaggatgaaagagtgtccacaaggggagatcaaacatctgaagaaactctatcagtaccccatgattacaatgatgttggcagagaagctagtctaagtttggcagagccatcatctattgatgagcatgcacaaagctctgccaacaacttttactatgactatggtgaatggagggttatctgggatccattctataatcggtattatttttacaacatccagacacaagagtccacatggtgtcctcctgaaggactggaggattttgcatcatattgtagcccagataccactaaagagctagctgaactgggatctcagtgttcaagcatggcaccacaagagaacaatctggctactcatgtcaatcatttagaagcacaggagcaagatcactgcattcatgatttatctgacattcctgttgaaaagccaatatatcaaagtatgataactacctctgacaaagcacagcacactgaaaataagtacagcgattcaacaactactgtgttagagatgaaccaggaagttgctagcaccaaaacgaaaaagagaatcattcatgccaagacatggcagggaacgtctctaatgacatcatcaagtactgggctcagcggagttggtggaaatgccatccaatttgccaaaaagtgcaagcatgtaattgcagttgatattgatccacaaaagattgattgcgcgcatcataatgcatccatttatggagtaaatgatcacatagatttcattgtaggtgattttatacatatagctcctcatctgaagggagaaactgctttcatgtcgcctccttggggtggccctgactatgccaaagttgatgtttatgatatgaaaagcatgcttattccttgtgatgggtactctctttttaaactcggaaccatgatagcttcaagagtagtgatgtttcttcctcgcaacattgacctaaaccaattggcggacatgtccttgtctgtggatcccccgtgggcagttgaggtcgagaagaacttcctcaacggaaagctgaaagccataacagcttactttgaagaacaggatcgttgaaccaagcatcggcgctggtgatacaaatcatcttgttagctatgactcacgacaaatttttgtggtgaccctaaacagaacctttgtgttcggagacagaaagaagcggtttatcatcttcaccgagcatagataatttatttgcagagatgagtcattggtatcatacaaaagcagctcagcttatctcaattcacagcaagtgaaactgtcgaaggaaaactacaaggctgacagtcgaacgcgtgggagttagcttaattttgccttatgataagcaagcatgcttcctggtttatttcatacagctactagtagtttcagctgcaacagttgtgcgttggtgtgcgtgtgattctcacatatctggtcctgcggatgtgagtgatgcaaatgtatgtgtcatcatcccatgtaagggtttgtttgtttgctctcaatctatgtagattgagtgggattaagtgagtttaaatctcagacaagtcaaaaaaaaatgttttcaatctcatccaatccacatatgatagtaatacccgagtaaggcttagatgtaat

SEQ ID NO: 8689 - DNA, 2639 bp, Zea Mays
cacgcccaacggccgtttcccgcaccccctatccgggaaggaagaaagccagaactcacccctgcttcgtctggcggcgccgtttcccgcacgcgatgccgtcgacggcggaggatttcccggcgataaggaagctggggaagctcttccggcttaccgaagtgtacctctgggacgattcgtatggcgctggacctcacgatggacagaagaacgggcgctcggcggaggctgctctcgtgataaaacatgcaatgaagcatccaatagcactgacaaaggccatttctttgttgaagatttggaattggtcaatctcatgggttctttggggcttcctgtttcattcagcacaaaacaagaacacatgcaacaagggaaagaaaaaaggaagacaagcaccgctcaaagcagcaaacactcaaatcaatgatgctgtgaggatatgtatcaatactgaagatagagaaaattctgttgaatcattggatgctatggagcaaacgcactcatgcaatttatttgtgacaccactgggtcaaaatgaaccctcccgtgatgacactgacaagaggcttagggaagacagctcttgtgttgaagaacaagaagagtctggctgtagcaccatctactctgctggcaaagcccctggctgtgatgctaaaaatcatctcactgaacttggggcttttgagctttctgataacttggccaactcagcaaaagaagaatactcaattcaagaaaatcaagcttatgaaagtgtgttgctagattctgaagagatgtcaaggaatgactgtgttgatgatgaatctacacattcctgtgttggcatttatcaggatgaaagagtgtccacaaggggagatcaaacatctgaagaaactctatcagtaccccatgattacaatgatgttggcagagaagctagtctaagtttggcagagccatcatctattgatgagcatgcacaaagctctgccaacaacttttactatgactatggtgaatggagggttatctgggatccattctataatcggtattatttttacaacatccagacacaagagtccacatggtgtcctcctgaaggactggaggattttgcatcatattgtagcccagataccactaaagagctagctgaactgggatctcagtgttcaagcatggcaccacaagagaacaatctggctactcatgtcaatcatttagaagcacaggagcaagatcactgcattcatgatttatctgacattcctgttgaaaagccaatatatcaaagtatgataactacctctgacaaagcacagcacactgaaaataagtacagcgattcaacaactactgtgttagagatgaaccaggaagttgctagcaccaaaacgaaaaagagagtaaggagatctcgatcgtatcattcatgccaagacatggcagggaacgtctctaatgacatcatcaagtactgggctcagcggtattcacttttctcactttttgatagtggtataaagatggatgaagtagggtggttttcagttacgccagagccaattgcaaagcatcatgcatctcgtgtgggtgcgggagtaatgattgattgtttcacaggagttggtggaaatgccatccaatttgccaaaaagtgcaagcatgtaattgcagttgatattgatccacaaaagattgattgcgcgcatcataatgcatccatttatggagtaaatgatcacatagatttcattgtaggtgattttatacatatagctcctcatctgaagggagaaactgctttcatgtcgcctccttggggtggccctgactatgccaaagttgatgtttatgatatgaaaagcatgcttattccttgtgatgggtactctctttttaaactcggaaccatgatagcttcaagagtagtgatgtttcttcctcgcaacattgacctaaaccaattggcggacatgtccttgtctgtggatcccccgtgggcagttgaggtcgagaagaacttcctcaacggaaagctgaaagccataacagcttactttgaagaacaggatcgttgaaccaagcatcggcgctggtgatacaaatcatcttgttagctatgactcacgacaaatttttgtggtgaccctaaacagaacctttgtgttcggagacagaaagaagcggtttatcatcttcaccgagcatagataatttatttgcagagatgagtcattggtatcatacaaaagcagctcagcttatctcaattcacagcaagtgaaactgtcgaaggaaaactacaaggctgacagtcgaacgcgtgggagttagcttaattttgccttatgataagcaagcatgcttcctggtttatttcatacagctactagtagtttcagctgcaacagttgtgcgttggtgtgcgtgtgattctcacatatctggtcctgcggatgtgagtgatgcaaatgtatgtgtcatcatcccatgtaagggtttgtttgtttgctctcaatctatgtagattgagtgggattaagtgagtttaaatctcagacaagtcaaaaaaaaatgttttcaatctcatccaatccacatatgatagtaatacccgagtaaggcttagatgtaat

SEQ ID NO: 8690 - DNA, 1354 bp, Zea Mays
gtgccctccgtcctcacagcttctcctccagtcatcccggtcccggccgcggccattttctatcccgtcaaccacatcagggcaacctgccaaacaccgcgattgcgcaatccgtccaaaccccgtcaacttcctgattccctctcccggagccatcgagatgctctcttcctccgttagttcagctaccgccgcgctgtctcgcgggtcgccgccgctccaagaagcatgccccgcctattgcttccatctccatcgcctcgcccctgtctgaacgactcggtgcgccgtccaccactctccaaatatcggttcttcctgcccaggactcggaggcggccaagtccgcggcttggcgtgcgaatggcagagatgaccaaggttgggagcgccggggaaccggccgaggttggggtttccatggagagtgacccgattgtgggaggggaggcgccgtcccgcccggggtgggaagcgagccggtgggcgcccgtggaggctgcgctgaatcggatgctatttggaagcgtgatgctgaaattatgtggtttttgctgggtgcggttggcaactctctgctttcgatggttcttaaaaagatgctaaaccatgaaagacccgcaccagctttgcggtctggccctgggatgccatcgtcccatgcacagtccatattctatgctgcgaccatcctggctctttcattgtactactggcttgggacaaattatctgaccatgattcttgggcctgcaactctgtcggtggctgcctatctgtcttggctacgggtgtctcggcgccttcatacactaaaccaggtcatggcgggagctgttgtaggatctgtcgtcggtgctctatggtttgtgctctggcattcgcttgtgcaggaggcttttgcttcttctctgctggtcaggattgcagtcgttcttggatcatcagcattttgtgttggctttgtcatctacatgattcgtcactggctcaaggatgagtaatgtacttcttagccgcaatgggagatcgactgataggcacggtgcgtttggatgagtgaatccgttccaattgttatcagaatcgcttgaaatggtgtcaaatgggttgtgagtggagcgattcacgagtgaaaccatttttaattaaaattcaatctagtagttaaatgatttcacgaagtgattctagttcgtgatcagaaacatttcaagaatttagatccaaaatgtttctatacccatcatggtgcaaagacctctaaacgcacatttgatttctgttgtgaattagacctttttatttaacactgaaggaaagttaaagcatggattcttgtggtaccgaataa

SEQ ID NO: 8691 - DNA, 2156 bp, Zea Mays
ttccaaccgttaggcccaggtttcaaccgttaggcccaggtaggcaccccctcaaccgtaaaccctaatcgtatccagccacggagccaccattccccttcaacaacaggtagccaccccctcgcccaccacatcttcaccgcaatccacgattgagtcggacgcactctgccatgacgaaacgggagaggaaggatccaggtcgcatgacaagcttgggatccctgaccaagcagccgaatctatcatgggttccgcccgggtaaagaagatgtcaaagaggcactactgcaggagcagaagcaagatggagaagaattgcatggccaatcagtattgggttagagacaaggtagtgccgatgcttagggaaaatcctaacctaggtgctggagctctggtgaaaaagctacaagagaaatatctcatccaggtttcatattgtgttgcatggaaaggaaaggagctagcacttgatgagctgatgggcaaatgggaagacagctttgaccatatctatgctttcaaggctgcaatagagaaggagtctcctggtagtgtagtggagatacaaacagagaaggttggggaaaagatcagattctgcaaaatgtttgttgcattcaaggcttgtattgatggttttttgcaagggtgcaggccctatttaggcattgactcaactgtgctcacaggtaggtggaaaggccaacttgcttctgcagttgcaatagatggccacaattggatgtttcctgtggcacttgggctgtttgaatctgaaagtaaggatagttggaaatggttcatggagaagttgcagacagctataggatcaccccatggtctagtaatatccacagatgcaggaaaaggcatagacagtgcattaaccaatgccttcaacaatggtgttgagcaccgagaatgtgtgagacatctatttaagaattttcagaaaaggtttcatggtgaagtgtttgaaagaaacctttggccagcagcaagagcatataggaggacagtccatgataagcactataatatcatgaaaatagcatcacctgcagccattaagtggttggaagacactcacaaacatttgtgggccagatgttatttttctacagcaagcaagtgtgactatgtaaccaataatattgctgaaacgtttaactgttggattaaagatgagaagtctttaccaccagtggagctaattgatagaatcaggcaaaagattttggagaagttttttgtgaggaagaaccttgcagataagttgactggcacaattttaccatctgtcatgaaacaacttcatgatgctggcagaggtttggttggttatgtggttcacaagggtcctgatcatacagctgaagtgtctggtgttcataaggatttgactccatggagacacactattgatctggtaaatagggagtgcagctgcaagaaatggcagctaactggtttgccttgcactcatgcattgagcgttataggttgtttcaggaacctgaaattggaagattatgttgactcctactactctgtggaaaaattcaagactgcttatgttgggaagatacctactttgacagataagactgagtgggagcaaccagaggtaggttacaaggtatggcctcccatactaaagagagctgctggtagccaaggacaagaaggttcattggagtagaatgagggtcggggaaaaagaggcacaaatgcaagagatgtggtcagtttggtcaccaaatgaggacatgtaatgaaccagtatatgactcagatgcaccaccaccaactgctccaaagcctaagagggtgagacagaagaaaaagaaggtggtggtggtagaagatgatcctctgtcattgcctgcaccatcaagtccagtgtagaagaaaaagaaccagaggggaaccaagagcaagtagtgttacttatgttactcattatactacgttctgtaatgtgccatgaagtggtactatgttctgttagtcatgtttcttatgtaagacatgtgcaatttgttttctgttgaacatgtgtaatgtgtcctctgttggacatgtgcaatatgtcattgaactacgttctataatatctaagtttcatggagtttcatctacttcgatca

SEQ ID NO: 8692 - DNA, 3088 bp, Zea Mays
ccaaccgttaggcccaggtttcaaccgttaggcccaggtaggcaccccctcaaccgtaaaccctaatcgtatccagccacggagccaccattccccttcaacaacaggtagccaccccctcgcccaccacatcttcaccgcaatccacgattgagtcggacgcactctgccatgacgaaacgggagaggaaggatccaggtcgcatgacaagcttgggatccctgaccaagcagccgaatctatcatgggttccgcccggcatggaccgtagctccgcttgcagaatcgctattcgggttggtgcttattgggagcaacatagatacgagtaccacatttctagagatgttttgctgattcgggacagggatttgatttgttttatggatctggtagctgatttgcgagcagagattgccttagaaactgcgcgaaagctatcactccattattgggacaagattgaagctagatacaaggaggtagattgcgatgcaacattacttcatgccctttccatgtattgggagtttaggagactcaagctagctgctactgtgttggacgagccatgcattgaaagtcaacatagtgcagtaacatatacacaacagaatgagatgccaatttcccttgtttctaatgctaatgagaatgaggtagcagttccttccagctctattcatgtagaaaaagaacaatttgctgctgggacctctgatcaggttgcttctaacctgattcatgctgcgaactcagaaggtgttgctaactcagaggatgttgctaactcagagggaggtaatgcatggggacaatatgatgaagatgagtatgttggcgcagacgatgagaaggcaacctacaaggagctattttctgatatagaagagagtggatcagagtacatccctgactctgatgatgaagaccacgatgattgtgttgtagatgacaatggagatcctctgtttgtcacaacaactgacttagagaaccctaatattgcagtaggtgttagatttgaggatgggcctactttcaaaaaggctattaggcagtgggctatcttacatgaggttgaaattggggctcactatagtgaatcttctaggtatagaggattctgcaaagcaaagaagtgcaattggaggatccatgcatcacaattgcctgatggtaaaacttggcaggtaaagaagatgtcaaagaggcactactgcaggagcagaagcaagatggagaagaattgcatggccaatcagtattgggttagagacaaggtagtgccgatgcttagggaaaatcctaacctaggtgctggagctctggtgaaaaagctacaagagaaatatctcatccaggtttcatattgtgttgcatggaaaggaaaggagctagcacttgatgagctgatgggcaaatgggaagacagctttgaccatatctatgctttcaaggctgcaatagagaaggagtctcctggtagtgtagtggagatacaaacagagaaggttggggaaaagatcagattctgcaaaatgtttgttgcattcaaggcttgtattgatggttttttgcaagggtgcaggccctatttaggcattgactcaactgtgctcacaggtaggtggaaaggccaacttgcttctgcagttgcaatagatggccacaattggatgtttcctgtggcacttgggctgtttgaatctgaaagtaaggatagttggaaatggttcatggagaagttgcagacagctataggatcaccccatggtctagtaatatccacagatgcaggaaaaggcatagacagtgcattaaccaatgccttcaacaatggtgttgagcaccgagaatgtgtgagacatctatttaagaattttcagaaaaggtttcatggtgaagtgtttgaaagaaacctttggccagcagcaagagcatataggaggacagtccatgataagcactataatatcatgaaaatagcatcacctgcagccattaagtggttggaagacactcacaaacatttgtgggccagatgttatttttctacagcaagcaagtgtgactatgtaaccaataatattgctgaaacgtttaactgttggattaaagatgagaagtctttaccaccagtggagctaattgatagaatcaggcaaaagattttggagaagttttttgtgaggaagaaccttgcagataagttgactggcacaattttaccatctgtcatgaaacaacttcatgatgctggcagaggtttggttggttatgtggttcacaagggtcctgatcatacagctgaagtgtctggtgttcataaggatttgactccatggagacacactattgatctggtaaatagggagtgcagctgcaagaaatggcagctaactggtttgccttgcactcatgcattgagcgttataggttgtttcaggaacctgaaattggaagattatgttgactcctactactctgtggaaaaattcaagactgcttatgttgggaagatacctactttgacagataagactgagtgggagcaaccagaggtaggttacaaggtatggcctcccatactaaagagagctgctggtagccaaggacaagaaggttcattggagtagaatgagggtcggggaaaaagaggcacaaatgcaagagatgtggtcagtttggtcaccaaatgaggacatgtaatgaaccagtatatgactcagatgcaccaccaccaactgctccaaagcctaagagggtgagacagaagaaaaagaaggtggtggtggtagaagatgatcctctgtcattgcctgcaccatcaagtccagtgtagaagaaaaagaaccagaggggaaccaagagcaagtagtgttacttatgttactcattatactacgttctgtaatgtgccatgaagtggtactatgttctgttagtcatgtttcttatgtaagacatgtgcaatttgttttctgttgaacatgtgtaatgtgtcctctgttggacatgtgcaatatgtcattgaactacgttctataatatctaagtttcatggagtttcatctacttcgatca

SEQ ID NO: 8693 - DNA, 1883 bp, Zea Mays
gctagctgctctgcctctgcttcaccaatcacctcgcggaggggaaggtttccccctttgacacagccgagctcccctccatcagcagccagctcctcgtcgcaaagcaagaagatgatgctcgcgtacatggaccgcgcgacggcggccgccgagccagaggacgccggccgcgagcccgccaccacggcgggcgggtgcgcggcggcggcggcgacggatttcggcgggctggcgagcgccatgcccgcggccgtggtccgcccggcgagcgcggacgacgtggccagcgccatccgcgcggcggcgctgacgccgcacctcaccgtggccgcccgcgggaacgggcactcggtggccggccaggccatggccgagggcgggctggtcctcgacatgcgctcgctcgcggcgccgtcccggcgcgcgcagatgcagctcgtcgtgcagtgccccgacggcggcggcggccgccgctgcttcgccgacgtccccggcggcgcgctctgggaggaggtgctccactgggccgtcgacaaccacgggctcgccccggcgtcctggacggactacctccgcctcaccgtgggcggcacgctctccaatggcggcgtcagcggccagtccttccgctacgggccccaggtgtccaacgtggccgagctcgaggtggtcaccggcgacggcgagcgccgcgtctgctcgccctcctcccacccggacctcttcttcgccgtgctcggcgggctcggccagttcggcgtcatcacgcgcgcccgcatcccgctccacagggcgccccaggcggtgcggtggacgcgcgtggtgtacgcgagcatcgcggactacacggcggacgcggagtggctggtgacgcggccccccgacgcggcgttcgactacgtggagggcttcgcgttcgtgaacagcgacgaccccgtgaacggctggccgtccgtgcccatccccggcggcgcccgcttcgacccgtccctcctccccgccggcgccggccccgtcctctactgcctggaggtggccctgtaccagtacgcgcaccggcccgacgacgtcgacgacgacgatgaggaggaccagggcatgtctgactcgcctcgtcgtgtatctcccgctggattcggtgacgggggggctgcgtcctgccaaaccaaaccaccctagactagacagacccccaggggcaggggtcgcgccattggccgcacgcggggaccggcgccagtgagtgcgccgcgccgcacggccgcgccccgatctcgctcgctcgctcgctggtgatcgaatcggcgcgtacaatgcggcatggccccgagccccacacccgcagtggccgtgacgcgattgcgctgcctccggtccggcccatgacccagcggatcgcgtcgcgtcttttggcaacgcccgcgtcatcatatcgcgctctttgtcgtccccacggagcacagcgcagcgcagcgcagcgcagccaaccttttctccgccacgcacgcttcggcggcattcattatttggattttgttcctaccggtcgatccgcgtccgtccgtgcactgcaggcggcggtgaccgtgagccggatgatggcgccgctcaagcacgtgcggggcctggagttcgcggcggacgtcgggtacgtggacttcctgtcccgcgtgaaccgggtggaggaggaggcccggcgcaacggcagctgggacgcgccgcacccgtggctcaacctcttcgtctccgcgcgcgacatcgccgacttcgaccgcgccgtcatcaagggcatgctcgccgacggcatcgacgggcccatgctcgtctaccctatgctcaagagcaatgtgcagttgccgtttgcggcccgccaagctagc

SEQ ID NO: 8694 - DNA, 2284 bp, Zea Mays
aaactaccacgagctcaagcctcaagcaagcagagcgccgtgacatcacgaaacatatagagctagctgctctgcctctgcttcaccaatcacctcgcggaggggaaggtttccccctttgacacagccgagctcccctccatcagcagccagctcctcgtcgcaaagcaagaagatgatgctcgcgtacatggaccgcgcgacggcggccgccgagccagaggacgccggccgcgagcccgccaccacggcgggcgggtgcgcggcggcggcggcgacggatttcggcgggctggcgagcgccatgcccgcggccgtggtccgcccggcgagcgcggacgacgtggccagcgccatccgcgcggcggcgctgacgccgcacctcaccgtggccgcccgcgggaacgggcactcggtggccggccaggccatggccgagggcgggctggtcctcgacatgcgctcgctcgcggcgccgtcccggcgcgcgcagatgcagctcgtcgtgcagtgccccgacggcggcggcggccgccgctgcttcgccgacgtccccggcggcgcgctctgggaggaggtgctccactgggccgtcgacaaccacgggctcgccccggcgtcctggacggactacctccgcctcaccgtgggcggcacgctctccaatggcggcgtcagcggccagtccttccgctacgggccccaggtgtccaacgtggccgagctcgaggtggtcaccggcgacggcgagcgccgcgtctgctcgccctcctcccacccggacctcttcttcgccgtgctcggcgggctcggccagttcggcgtcatcacgcgcgcccgcatcccgctccacagggcgccccaggcggtgcggtggacgcgcgtggtgtacgcgagcatcgcggactacacggcggacgcggagtggctggtgacgcggccccccgacgcggcgttcgactacgtggagggcttcgcgttcgtgaacagcgacgaccccgtgaacggctggccgtccgtgcccatccccggcggcgcccgcttcgacccgtccctcctccccgccggcgccggccccgtcctctactgcctggaggtggccctgtaccagtacgcgcaccggcccgacgacgtcgacgacgacgatgaggaggaccaggtgggaccccaacacgtcggtggcgctgccggagggcgaggtcttctacctggtggcgctgctgcggttctgccggagcggcgggccggcggtggacgagctggtggcgcagaacggcgccatcctccgcgcctgccgcgccaacggctacgactacaaggcctacttcccgagctaccgcggcgaggccgactgggcgcgccacttcggcgccgccaggtggaggcgcttcgtggaccgcaaggcccggtacgacccgctggcgatcctcgcgccgggccagaagatcttccctcgggtcccggcgtccgtcgccgtgtagagcaaggggggaggaccagccagctgccagccaagacaggaggaggaggaggaggggaggctgatggatcgccgctgctgttgccggacctgccctgccaggataccagccggagagctttcaggcgacaaaagccgcggcgaggggatcagcgaggatctgccgggccaccgccaccgccgccgccccgcgttttatactggagggtgggtgtgctccaagtggtgcctttctgacaacgcgatctaggctatgagtagtgtcgtccaagcgaccgtatccacaatccatcaaccttagcgatcttttgagttcaaaaaaagaaaaaaaaaaccttagcaatctttttttaagttccttccgataaataaaacaggagatcaaggaaagacagagacggccacgacggtatatttttttttggtgccgtgttcgattcataggatccaactgttttgcccacaaacgacaagggaccgcgctgccgccggtgagctccgcttggatggacgtcctgtcgctgcggcccggggtccggacggacgaaagaaatggacgcgagggggggtggcggccatgcactattgaagaggtcggatttgcaactgatgcatgctcctaagttgtatgtagctgtcctagatgattgtttattttcttatatatgtttgggtgagagcgacttgacagagaagcgtgttttgtttttcggttggtgtttgtgggcagcgttagtcacgactcaggacctaattgacaaaacaaatgtcattgacacggtggttaacacgctttcgcttgtg

SEQ ID NO: 8695 - DNA, 3610 bp, Zea Mays
cgtagcacgtgagcatagcttcagctggccactaaaccctcgtcttccccttccaagcgaatcccattccctacctttcgccgccgcctacgcaccatcgctcgaaaccctagccccattccccgtctcgctcggaatcccagctacctccagcgccgccgcgactgcaggataggaggccatggacgacgtgtgcgaggggaaggacttctccttcccggagcaggaggagggggtgatcgagctgtgggcgaagctcgacgccttccacgagcagctccggcgcacggagggcggcgaggagttcgtattctacgacggtccccccttcgccacgggcctgccccattacggccacatactcgccggtaccatcaaggacgtggtcacccggcaccagtcgatgcgaggccgccacgtctcgcgacggttcggatgggactgtcacggactccccgtcgagttcgagatcgataaggcgctcggcatcaccaaccggcagcaggtgttcgacctcggcatcggcaagtacaacgagacgtgccgcagcatcgtcaccaagtacgtctccgagtgggaggccatggttacacgcacggggaggtggattgacttcaagaacgactacaaaaccatggacctcaacttcatggagagcgtctggtgggtgtttgcccagctatgggagaaggacctcgtctataggggtttcaaggtcatgccttacagcacaggatgcaaaactgcactgtcaaactttgaggcagcactggactataggactgttcctgacccagcggtgatggtatccttccctattgttggcgatgcggacaatgcagctcttgttgcatggactacaacaccctggacacttccaagtaacctagcgctgtgtgtcaatgccaatcttacatatgcaaaggttaaagacaaatcaaatggagcagtatatgttattgcagaatccaggcttgggcagttaccagttaaggccaaagcttcaggaaagaagcaggcaccttcaaagggaagcaatattgaagctgttcaggatggtttggacaaggaatcatatgagctgttgtcaaagattcctggggtatccttggttggcttaaaatatactcctctatttgactttttcattgaacttcaagggactgcctttagagtgattgcggataactatgtcacggatgatagtggaacgggtgttgttcattgtgctcctgcttttggtgaagacgaccatcgtgtttgccttgctgctgggatatttgagactgctggacttgttgttgctgttgatgacgacggatgttttattgaaaaaatatctgattttaaagggcgatatgtcaaagaagccgacaaggatatcatcaatgctgttaaggataaaggaagactcattagtaaagggagtattgagcactcttatccattttgttggcgatcgggcactcctcttatttatcgggctgttccaagctggtttgtcaaggttgagaagattaaagaccagttgctggaatgtaacaaggagacttactgggtgcctgactatgttaaggaaaaaagatttcacaactggcttgaaggtgctcgtgattgggctgttagcagaagtagattctggggtactccacttccactgtggataagtcaagatggtgaagaaattgttgttatggattctatagagaagcttgaaaaattatctggagtcaaggtcactgatcttcaccgacactatgttgatgatattacaattccctctaagagaggacctgagtttggggtgctcaaacgtgttgatgatgttttcgactgctggttcgagagtgggtcaatgccatatgcctacattcactatccatttgagaatcgggaactatttgaaaagaactttcctggcaattttgtggcagagggtttagatcaaacccgtggatggttctatactctgatggttctctcaacagcactgtttgggaagcctgcatttaagaatcttatatgcaatgggcttgtcttggctgaggatggtaagaaaatgagcaagagtaaaaagaactatcctccacccaaggatctcattgatgagtttggagcggatgctctgcgactatatttggtaaactccccagttgtacgtgcagagtctctacgattcaaacgtactggtgtctttgctgttgtgaaagatgtcttcctcccatggtataacgcatatagattttttgtccaaaatgcaaagagactggaagttgagggtcttgcctcattttctccgatggaacaagtggtacttctgaagtcatccaatgtgttggatcactggataaactctgcaactgaaagtctagttagctttgttcaccaggagatggatgcatatcggctttacacggttgtgccgtatttggtaaaatacattgactatcttactaacatatatgtgcgtttgaaccgcaaacggttcaaagggcgtactggagaagaagactgcagaatttctctttcaacactctaccatgttcttgtaacaacttgcgtggtgatggctccatttacaccattctttactgaagttctttatcaaaatttgcggaaggtgtcaagtaattctgaggagagcatccacttttgcaagttcccttccacaactggcgagggaaatggtggttgtgcatccagacaatgacttccttgaagacatcactggcaaactaaaggagtatgtcatggaggaaatcaatgttaagaatgtcactccatgtaatgaccccttgatgtatgcttctctgcgagccgagcctaatttcagcgtgctaggaaaaagacttggaaaagacatgggaaaagtatcaaatgtggtgaagaagatgactcaggagcagatcttagcatttgaaaaaagtggagaggtttcattcttcggccattgcttgaagctagatgatatcaaggttgtccgacaattcaagcgtcctgaaaatgtgtcagagaaggagattgatgctgcaggagatggtgatgttttagtcattttggatctacgaaccgaccagtcattgtttgaagctggagtggctcgagaggttgtgaacaggatccagaaattacgaaagactgctcagcttgaacctgctgatccagttgatgtgtattacgaatctgtgggcaatgacaaaaacactctggaagagatattgaagtcacaggatcagtatattagagacgcacttggctcaccaatcgttccaaaggaaatggcaccaacagatgtcgtagtacttggcgaggaatcgcacaacgtacatgacatgtcatttgtcatatgcatcgcaaggtccaccccgattatttcaccagatcttctttctcatgcctcaggcaacagcaatcatgtcgaggcgttgagagtatatcttctgtcaaaatctctatccagattgaagaaccagttccaaagtggaaatggcgtgattacggtcgactgcatcgaaggttatccactaatcagtgatcaggcacctatggttcttgctcaagctttaacaccgcaaaaccagtggaggaaaatacacattttcgacattac

SEQ ID NO: 8696 - DNA, 3945 bp, Zea Mays
gtagcacgtgagcatagcttcagctggccactaaaccctcgtcttccccttccaagcgaatcccattccctacctttcgccgccgcctacgcaccatcgctcgaaaccctagccccattccccgtctcgctcggaatcccagctacctccagcgccgccgcgactgcaggataggaggccatggacgacgtgtgcgaggggaaggacttctccttcccggagcaggaggagggggtgatcgagctgtgggcgaagctcgacgccttccacgagcagctccggcgcacggagggcggcgaggagttcgtattctacgacggtccccccttcgccacgggcctgccccattacggccacatactcgccggtaccatcaaggacgtggtcacccggcaccagtcgatgcgaggccgccacgtctcgcgacggttcggatgggactgtcacggactccccgtcgagttcgagatcgataaggcgctcggcatcaccaaccggcagcaggtgttcgacctcggcatcggcaagtacaacgagacgtgccgcagcatcgtcaccaagtacgtctccgagtgggaggccatggttacacgcacggggaggtggattgacttcaagaacgactacaaaaccatggacctcaacttcatggagagcgtctggtgggtgtttgcccagctatgggagaaggacctcgtctataggggtttcaaggtcatgccttacagcacaggatgcaaaactgcactgtcaaactttgaggcagcactggactataggactgttcctgacccagcggtgatggtatccttccctattgttggcgatgcggacaatgcagctcttgttgcatggactacaacaccctggacacttccaagtaacctagcgctgtgtgtcaatgccaatcttacatatgcaaaggttaaagacaaatcaaatggagcagtatatgttattgcagaatccaggcttgggcagttaccagttaaggccaaagcttcaggaaagaagcaggcaccttcaaagggaagcaatattgaagctgttcaggatggtttggacaaggaatcatatgagctgttgtcaaagattcctggggtatccttggttggcttaaaggactgcctttagagtgattgcggataactatgtcacggatgatagtggaacgggtgttgttcattgtgctcctgcttttggtgaagacgaccatcgtgtttgccttgctgctgggatatttgagactgctggacttgttgttgctgttgatgacgacggatgttttattgaaaaaatatctgattttaaagggcgatatgtcaaagaagccgacaaggatatcatcaatgctgttaaggataaaggaagactcattagtaaagggagtattgagcactcttatccattttgttggcgatcgggcactcctcttatttatcgggctgttccaagctggtttgtcaaggttgagaagattaaagaccagttgctggaatgtaacaaggagacttactgggtgcctgactatgttaaggaaaaaagatttcacaactggcttgaaggtgctcgtgattgggctgttagcagaagtagattctggggtactccacttccactgtggataagtcaagatggtgaagaaattgttgttatggattctatagagaagcttgaaaaattatctggagtcaaggtcactgatcttcaccgacactatgttgatgatattacaattccctctaagagaggacctgagtttggggtgctcaaacgtgttgatgatgttttcgactgctggttcgagagtgggtcaatgccatatgcctacattcactatccatttgagaatcgggaactatttgaaaagaactttcctggcaattttgtggcagagggtttagatcaaacccgtggatggttctatactctgatggttctctcaacagcactgtttgggaagcctgcatttaagaatcttatatgcaatgggcttgtcttggctgaggatggtaagaaaatgagcaagagtaaaaagaactatcctccacccaaggatctcattgatgagtttggagcggatgctctgcgactatatttggtaaactccccagttgtacgtgcagagtctctacgattcaaacgtactggtgtctttgctgttgtgaaagatgtcttcctcccatggtataacgcatatagattttttgtccaaaatgcaaagagactggaagttgagggtcttgcctcattttctccgatggaacaagtggtacttctgaagtcatccaatgtgttggatcactggataaactctgcaactgaaagtctagttagctttgttcaccaggagatggatgcatatcggctttacacggttgtgccgtatttggtaaaatacattgactatcttactaacatatatgtgcgtttgaaccgcaaacggttcaaagggcgtactggagaagaagactgcagaatttctctttcaacactctaccatgttcttgtaacaacttgcgtggtgatggctccatttacaccattctttactgaagttctttatcaaaatttgcggaaggtgtcaagtaattctgaggagagcatccacttttgcaagttcccttccacaactggcgagggaaatggtggttgtgcatccagacaatgacttccttgaagacatcactggcaaactaaaggagtatgtcatggaggaaatcaatgttaagaatgtcactccatgtaatgaccccttgatgtatgcttctctgcgagccgagcctaatttcagcgtgctaggaaaaagacttggaaaagacatgggaaaagtatcaaatgtggtgaagaagatgactcaggagcagatcttagcatttgaaaaaagtggagaggtttcattcttcggccattgcttgaagctagatgatatcaaggttgtccgacaattcaagcgtcctgaaaatgtgtcagagaaggagattgatgctgcaggagatggtgatgttttagtcattttggatctacgaaccgaccagtcattgtttgaagctggagtggctcgagaggttgtgaacaggatccagaaattacgaaagactgctcagcttgaacctgctgatccagttgatgtgtattacgaatctgtgggcaatgacaaaaacactctggaagagatattgaagtcacaggatcagtatattagagacgcacttggctcaccaatcgttccaaaggaaatggcaccaacagatgtcgtagtacttggcgaggaatcgcacaacgtacatgacatgtcatttgtcatatgcatcgcaaggtccaccccgattatttcaccagatcttctttctcatgcctcaggcaacagcaatcatgtcgaggcgttgagagtatatcttctgtcaaaatctctatccagattgaagaaccagttccaaagtggaaatggcgtgattacggtcgactgcatcgaaggttatccactaatcaggttacagctaggaaagcatgtttttctaagtgcaggggatttttatctggctagtcgatcctaatttttgtgtgcagcatcccaattttgactgattcacccatcattttgccgcaatcggcttaaacagcttggttccatttatgcattcagattcacttgttaaaggtgaaaaatcccaatttatgatataccatggtactctccgttctttttttatttgtcgtgttttagttcaaaaatgaactagccggtgacaaatatttttttttattttgtcgtgttttagttcaaaaataattagccggtgacaaatattcgagtaagctataggttcccatacccctagtgaattatgagtagataacatgtatgtttgtaatctcttgggtgtttggtttttgaggattgatgtggtccatcagattttgatgaatgaatgcatttcattt

SEQ ID NO: 8697 - DNA, 7721 bp, Zea Mays
aaatcgttaaaagttattcgatatacattttcacagttccatctaaaagtcactaaaaacaggtctagtggtgctttcaattttgcactgcgagaaagtcagttttttgaaaaaagctgctttcttgatccagtcctttgatttagcttttgacttttaggggataaaagtcaaaaccaaaagtcaaaccaaacacactcttaatctttgtgagtacgaatgatctatatctatatgatataggtacgctcaggagtgacagacgagagactattttttttggtgtgtgtatgatatgcgatatagccggtggcggtggggttgccatctctatctcggcgtgcagtcagtcagtcacagactccagcgagcgagggaccaaaaccctagctgaaccctcccggcccgcgcagcaactgcgtccatggaggtggacccctcgccgtcgtcgcgctcgcccaggccgccgcctccgccgctggcggcgatgccgagctacttcgacccggagtcgtccggccgtcgggaggagtaccgccgctacaggaagaggttgtcttcttcaaatgtctctcctctgctgggaagatcactctccaagacctctggaccaaggctgttatatgatggagaaagcatcccaagacagcctaatgccggtttactccttgaagacataaagcaggaagctgccgattattccaacgtagaaagcttggatggattgagactgttcggttcgccgaaaaggacatctctcgatggcggttctgcatcaggcgcagcttacagttcgggcaggcaagcagtgaggcagacgctgaagccagtcaaactggaggacgatatgtatgtgccacatgaaggagaaacgccttctacaatgtttgcaactctccttgattctgggatccaaggtttgatgcacttccctgatgtaattcaacaatttgagaggacatgtcgaaatgcttcggagtcaatcagatctgctgcaactggaaagcttcgtgtggtggaagagaaacttatgcagcaaaatgctcaacttttactggacgaagctgcttcctggtcacttctttggcacatatatggcaaagaacatgaggagctttctggagagctgttggtgccgccaattacatctcatcaggaggcttgccgctttgttgcagcagacattacagcacaactgtgtctgcggatcatactttggcttgaaggtcttgcttctgaagctcttgatttggagaagaaggtgagaggacctcatgttggttcgtacctaccaagttctggtgtttggcaccgtacacagaggtacctaaaaaggaacaatgctgattctactatagtgaagcatgtggattttgatgctccaactcgtgaaggggcccaacttcttcctgatgacaagaagcaagatgaattgcttctagaagatatatggactcttttaagagcaggaagattagaagaggcatctgacttgtgccgttctgctggccaggcatggagagttgccactctttgtccttttggcggcataaatatgttcccttccctgaatgcattgcacaaaaatggaaagtacagaacactacaagccatggaattagaaagtggtgttgggcggcagtggcgtctttggaaatgggcatcatattgtgcttcagagaaaatcgctgagcaagatggaggccgttatgagatggctgtatatgctttacaatgcagtaacttaaagcgtgtcttgccaatctgtactgactgggagtcagcttgttgggcaatggcaagatcctggctagatgttcaagtggatctagaattatctcagtaccaaacaagtagaccagaaaagcaacttgatgacgacatgaatggagcccaaagttcagttggtccagaaagttggccataccatgttcttgatcagcaacctcatgatttaactgctcttctgcagaaactccactcaagtgaccttgttcatgaaactgtctctcgagcatgccgagagcagcatcgacaaattcagatgaatctcatgagtggaaatatatctcatcttcttgaccttctatggtcatggttatcacctgctgaagagaaccataataatactgcaaggccccttgatgaccctgagatgatacggttcggggcgcatattgttcttgtgctgaggcaccttttcagtgatgggatggatgatgagttagatgaaaaactggttactgtcggtgatctcatcatcaacatgtacgtgaggtatttgttctcagaggatcaagaggagttggttggaatatatgcctcacagcttcaacatgacctttgcattactttgtttgtagaaatgatggaactaaggttaaatagcagtttgcatactatgtacaagctcttcctttctgctgtggagtatctgccattctcatctgataatgtatccaaggcttgttttgaagagatcatcgagagggtgctttcaagatctcggcaaacaaaacccactaagtatgatggggatttctctgatgttgcgcatcaacatcacctgcaatcacttcaaaaggctatggttattcagtggctttgcttcacaccaccatcctcgattccagactttcaaatgatcagttggaagcttctgatacgggcattgacacatagcaatacactgttcagggagttttctctgatatcaatgaggagagtccctgagctaccagcagggccacacaagttgcttgccattttagctgaaccgttaaagcaaaaagaaaatttaatttcacgggaagatccggaggtatctgataacttgccggagtttgaagattggcatgaatattactcccttgacgcgacttaccgcagttggcttaaaattgagatgatgaatgccgctgtttctcctgagatgctttcggcagaggaaaagggtcaagctgttgctgcagctaaagaaacactgaacttggcatgttcgttactacgcacaaaatcaggggatggaagaccatggctgtatgctgtcgagagcagtccatttgaatcccccgatgttattttccttgagctgcatgcttctgcaatgctctgcctaccttctggagaatgtatgttaccagatgcaacatcatgcacagctttgacaagtgcactatattcaactgtcagtgaagatgatgtgctgcatcgcctgttgaaggtggatgtccaggtctcttctagagacccctgctgtattgaagtcgctcttcgctgcttagcagcagaaggtgatggatatgggcttcatgaagccaacgatggaggtcttcttgctgcagtcatggctgctggctttaaaggtgaactcagtcggttccaacctggagtttcgatggcaatttcacggcttgatgcttggtattctgaccggagtggttccgtggagagcaccgctgcttacataattcgagggctgtgtcggaggtgctgccttcctgaaacaattctaagatctatgcaggcatgtatcgcactctccgcggctggtgatgatctagattactctctagataaatgtgacgaacttgttgagttagttggttcagccgagtctggaatgatgcatttgttcagccagcagcagttgcaggagttcctgattttcgagagggaatatctcatatgtacaatggagtttgaggaggaccggttgccttgtgatggctaagctttttccccacttgctgactaatccatgagacatgaccggcatgtgcattttgtggcgccgtgacccaagaacctgctgtgatgtatcgctacaccatttcaaagcgaaaagatggaatttagtgcgtaacgtggttctgcccgtttgtgcacgagaattggcccgttttggagagtcaatataagattattcaagtcgaaatccaagatttttgttcatgataaaaacaatgttcggcaagcctttttgtcccgcccgtgctacgcgcactccgcctcggctgcttttgcatcgatccgatctgccgtccctggacacgctgcagctgacaagggtcaccggcagttccatcccaaaggctgcgaaggcgcacacaagccaagttctactcaacatcgttccctaatcatggtagtaagcacactctgcagccgcttgccacttctacccaacatcatcgtcctcctcttgttcacaaccatttccgactccacgaacagcaacagcgatctcaatgcactcttgtcattcaaatccctcataacaaaggacccaatgggtgcactgtcatcttgggatggggacgcttctaacaggagcgctcctcatttctgccggtggaacggcgtgacgtgcagcagcgaccagcacggcagccatgtcactgccttgcgcctgcgagccttcggtctggaaggcaacatctcccagtcgcttgggaatcttagccacctccaaaccctggatctgtcgaacaacaacctagagggcgagataccttccagtatcggtaacttgtttgctctccattttctcaacctaagtgttaaccacctgtccgggaacgttcctcagtccatcggccgtctttccgaactcgaaattctgaatttccgcgacaatgacatcgtaggaagcatcccttcttcagtgctgaaccttacaggactcacaatgcttagtgccaccgaaaactacatgacagggaggattccagattggttggggaacttgacagatctgacagatttgaacttggcatggaataacttcagtggacagatcccacaagctttaggtttgatgcacttccctgatgtaattcaacaatttgagaggacatgtcgaaatgcttcggagtcaatcagatctgctgcaactggaaagcttcgtgtggtggaagagaaacttatgcagcaaaatgctcaacttttactggacgaagctgcttcctggtcactttggcacatatatggcaaagaacatgaggagctttctggagagctgttggtgccgccaattacatctcatcaggaggcttgccgctttgttgcagcagacattacagcacaactgtgtctgcggatcatactttggcttgaaggtcttgcttctgaagctcttgatttggagaagaaggtgagaggacctcatgttggttcgtacctaccaagttctggtgtttggcaccgtacacagaggtacctaaaaaggaacaatgctgattctactatagtgaagcatgtggattttgatgctccaactcgtgaaggggcccaacttcttcctgatgacaagacgtgctcaccattgccgacgcattgggctgctgcgctttgtccttgcattgggagcggcgcactgcacagatggatgttcctgccgaacattgtgactggaaacgacgccatcaccgctggaatcctcctggacatcaagccggtacaggcggtgcaacacccccagcgatggtggaattgggtcagacagctcgttccccatgaggaacagcaacctcagccccgtgagtggcgaaagaagcaagatgaattgcttctagaagatatatggactcttttaagagcaggaagattagaagaggcatctgacttgtgccgttctgctggccaggcatggagagttgccactctttgtccttttggcggcataaatatgttcccttccctgaatgcattgcacaaaaatggaaagtacagaacactacaagccatggaattagaaagtggtgttgggcggcagtggcgtctttggaaatgggcatcatattgtgcttcagagaaaatcgctgagcaagatggaggccgttatgagatggctgtatatgctttacaatgcagtaacttaaagcgtgtcttgccaatctgtactgactgggagtcagcttgttgggcaatggcaagatcctggctagatgttcaagtggatctagaattatctcagtaccaaacaagtagaccagaaaagcaacttgatgacgacatgaatggagcccaaagttcagttggtccagaaagttggccataccatgttcttgatcagcaacctcatgatttaactgctcttctgcagaaactccactcaagtgaccttgttcatgaaactgtctctcgagcatgccgagagcagcatcgacaaattcagatgaatctcatgagtggaaatatatctcatcttcttgaccttctatggtcatggttatcacctgctgaagagaaccataataatactgcaaggccccttgatgaccctgagatgatacggttcggggcgcatattgttcttgtgctgaggcaccttttcagtgatgggatggatgatgagttagatgaaaaactggttactgtcggtgatctcatcatcaacatgtacgtgaggtatttgttctcagaggatcaagaggagttggttggaatatatgcctcacagcttcaacatgacctttgcattactttgtttgtagaaatgatggaactaaggttaaatagcagtttgcatactatgtacaagctcttcctttctgctgtggagtatctgccattctcatctgataatgtatccaaggcttgttttgaagagatcatcgagagggtgctttcaagatctcggcaaacaaaacccactaagtatgatggggatttctctgatgttgcgcatcaacatcacctgcaatcacttcaaaaggctatggttattcagtggctttgcttcacaccaccatcctcgattccagactttcaaatgatcagttggaagcttctgatacgggcattgacacatagcaatacactgttcagggagttttctctgatatcaatgaggagagtccctgagctaccagcagggccacacaagttgcttgccattttagctgaaccgttaaagcaaaaagaaaatttaatttcacgggaagatccggagcatgaatattactcccttgacgcgacttaccgcagttggcttaaaattgagatgatgaatgccgctgtttctcctgagatgctttcggcagaggaaaagggtcaagctgttgctgcagctaaagaaacactgaacttggcatgttcgttactacgcaatgcaacatcatgcacagctttgacaagtgcactatattcaactgtcagtgaagatgatgtgctgcatcgcctgttgaaggtggatgtccaggtctcttctagagacccctgctgtattgaagttgctcttcgctgcttagcagcagaaggtgatggatatgggcttcatgaagccaacgatggaggtcttcttgctgcagtcatggctgctggctttaaaggtgaactcagtcggttccaacctggagtttcgatggcaatttcacggcttgatgcttggtattctgaccggagtggttccgtggagagcaccgctgcttacataattcgagggctgtgtcggaggtgctgccttcctgaaacaattctaagatctatgcaggcatgtatcgcactctccgcggctggtgatgatctagattactctctagataaatgtgacgaacttgttgagttagttggttcagccgagtctggaatgatgcatttgttcagccagcagcagttgcaggagttcctgattttcgagagggaatatctcatatgtacaatggagtttgaggaggaccggttgccttgtgatggctaagctttttccccacttgctg

SEQ ID NO: 8698 - DNA, 5468 bp, Zea Mays
ctgccgtgtgcccgtgtggaagcgtcctcgcctcctcggccccctcgaatcacacgcgccccgcctcattcgtccattccccagccttccagagcccgccgccgccggccgctgctcccccgacgcgggggaagccaccggcggtagcgctcgcttcgccgcgccaaaaacctagcggctccgagctccccgccgcctccgtggcttatatggcgaacccgggcctagggcttggactcgcgccaccgggcgccgagccctccgccggagcgccgccctcttcacgtcgcgcgccgcgcttggccaaacggcgccacgcgcccgcctcctcccgctcccgcatgccgcagacctcagccggaatatggaacccgtttggtggtggcggaggtacggatagacagaccggaggctttgtgtttggtgctgcttcggcagtgagccaacagcctttggagccagcagtgtcagtagcttcacccactgaggcgcccttcgtgtttgggagcgtgagggagagcctgcctcggtttgacgagggatcgcccgcttcatcaaagctccctgataagatggagaagttgaacctgcgaacatcaagtgaggttgacgatggtctcggtcaggggagggatcgaaaggatggaagttcggtatttggtgctgatatatctggtttgttttctagtaacaaggaatctaatgtgctccaggagaagcttacacagttgaatttaggccacaaagaacccttgcaaagtaagaagagggatagtgctaatggtgtgccgcaagcatttgtgtttggaggtaatggagctgggagttttgctgactgtaagaacaaagccgcccctggtgcacattcagatgatcctagttcagttcatggcactgatgcaaaaggtatggctgggaagtcgatgcagttcaatataggcagtcaagcaccttccaggggtggggggattgatcgtactaatggagcaccagaagctttcacgtttcgaagtaccacattaagtggtcatgtggataatataaacaatgttgactctggtgccaataccagttcttccactgttgctaaatgtgtttgtgatgcagattttcctctggaaaagataacacggttgtgtataggaagtgacatgcccttgcatgagacgaaaagtggttatcaacccaaagtgtttacgtttggaagtggaggaatcccaggcgctgtttttgggaaggaaactggcagcacatcagataggagcagtgaattcctctctgcaaatagcaatacttctagttcaagcagtgattttttctctacagcaaatagcaacgtttctaattccgctaatggcacttattgtttgccaccagagaagacaccagatttgaatgcaggagacagagtcatgtcacagagcttggaaggtgataattctaattgtccaacagagacctttctatttgaaagaaatgaaacccgaagctctgtttcgcactctgcaagcatagccatggatgacggtgggaattttgtcaatgatgaaaatactgacacctgtagttcagctcacagtacagtggagtgtgcaggtgctctcccagagaagatgacaaagttaggtataggatgcagaattccacatcatagcaggaaagatgaaactgctaccgatccaccagaagtatatgtatttggatgtaatctttctagcttttcttctgcccagacttcaagtaaatcgaatgatcgcacgactcctgaattttgttttcaaagcaaaacaggggcaacttcaggatatggtgctgttccccaaaccaaagttcaggattcatacccatttacaattttgaataattcatgtactttctctacttttgagaatgcagttcctgctttcagttttgggacactgaatgcagaaacagaaacagctccagatgatcctttttctttttctgtcaaacatgatttgcctgggtattccagagagaccttatttggtttagacagtataaaatctgcatacaaggacaaaagggaagcatgtaaaggaaaaatgaaaaacaagaggccaactaggctaaagcaacatgctcagctccatcaggttatttctaaggaagcctgtaccagtggagaagcatcagatttagcaggtgactgttcaccaatggattgttcgccatatcctgcagaatctgaacatgtgccaacagaggcatatgtggcttctgatcagcccgttcacataggtgatactgttatctcgaacgggaacaccagttgtgctgaggatgatgtagtttctgcagccgagcacttggttactgatgcagacctactgatgtttggagatgaaggtagaggaccgaaactagatgcatctgagagcaattttggtagcagcgtttctagttttgaaggagatcaaagcaatgcatcacaacattctttcactaatattgggcaaaactgtaatgagaatacctacagaactccccatgattttgttgaggctgctgcttttcaatcaaactcatcaaatttcagtgggctgaactttagattcggtgtgtcatcctctccacaaatctctgctgcggcacaaagacgtagcacaagaaggaagttaagaacaaagggtagtctagcatcgaaaccttcaactatcgactctttagaacagccaaaatcttcacaagatactaagggcatgcagtttttctgtgaagcaagtaaaaatgaagactcagtgaaagcgcaacaatcaagagattcttctacttctgtggccttggagacttgtgaaacctggcgtactagaggattattatacccgtggaataaactctgttacccacaatggcgtttctggacaatgttcccgtgcattgatgctgtgttacagcaaccgtgcagctacaagaatgtcacttggcatgatgtgggaggcgcttcaggattgtttgactgctacatcaattgaccccacttttcttaaagctaaagttagagctgccaagtgccagcttgcattgggcgatcttgaagatgcatcaatgagttacatgtcctgtttgaacagtaacaccgagagctctgaccctaaaatatttgctgaggcttctgatggtttggaaggagtcaagagagtgaccgattgggtatctcagtgcaaggaatttcttgagagaagaacatctcctgaagcaacaaaagccttagaattgatctccaatgcattgcacatatgtccacattcggacagcgtcaaggagatgaaagcagaggcattgttgatgctacgaagatatgaagaagtgattcaactatgccaagagtctgtgaatctgactgaaagaaattcagttttattcaaagacaatggagaaccaaagaattccagagtctctgaacggatgcagttttctggaaggtattggcggccctacctcatttgcaagtcttatttcctttcaggcaagcttgatgaggctcttgaattgttaaagaaacatgagcaagtcacacctgtcaaagaaagtgaagtgaacacatatgaagaaaaattctcatcattgtcagcgactataagagaactactttctcttaaggctgctggaaatgaatcatttcaagctggtagatattcagatgctgtcaaacagtattcagcagctttggcatggaatagtgaatcacgcccattttcagctgtatgtttttgcaatcgtgcagcggcttatcaagcactcggtcaagttactgatgcaatatcagattgttcacttgccatggttcttgatacaaattatccaaaggcaatttcaagacgagccaccttatacaagatgataagggattatgaccaagctgctaatgatgtaaggaagctaatctctcttcttgaaaagaaagtcaatgtgtctggagtatcaccaaaagcttttaacaagcacaatgatctcaagcaagcacatgtgaggctttcatccatagaggatgaagcaaaaaatgacacccccctgaatttgtatttaatcttgggagtggagccatcctgctcttcagaagatattaagaaggcataccggaaagcagcattgagacatcacccagacaaggctactcaattattaataaggaacgagaacgcagaagatggattttggagggatgttgtcaaggaagtctatgcagacgctgatcatctgttcaaaacaattggggaggcatataatgttctttctgacccggccaagcgtgaagagtacaactttgaagaggatctaagaaatgccaggaggagagtatctagttctaggagcatgcataggtcacctgaacagaactacagcaacagaggctttaatccacgccagcggcagtcaagcagagcatcacgttcacgttggtacagcaattcagacgattactggtaaagaagccattacatatggagtgggcatgtggtgcgaagcaacttttgcatgtgtggagcaaaaggcctccttgcaccaagatggcacctgcctttctggggttttttaggtgccggtgctgacgcaccagccttcgcagtctcagctttcgtgtctgtttgctgtgtttcttttccagagggtgaaaatattaggattgatcaactggggatctgggatgattggttgacacttgattagcacagaaaatacgtgggattaggaagtggtacatcaaattatcttttgttggcctggtgatttctgaacactgactgcttgggagtggctggcatgatggtatccactcttgaggagttgaacactgagaacaacttcgaaggttaggagcaaggataaagatgttggttcctcgaatatctgcaggcactcttttgctggatgcatggctactgtttagcacgggcagtttgcagcagatcaactggaaggagacatgctcagatgctcctgtttggcgcgtgcagttctgttctgttgcttctgtttaatccaaacgacgtagcgctggaaacagagtggctacatattacaactggctaactgctcaatgtcggaactcggaatcacgattttttatttattcattgttattagaggttttagctagcccaatgttgagagtattttattcagatcaaggttccttcgaagaaaaaagaggctcgggttacggtgacattggccaattgcaggttctgtcatgttgcttatgatgaaatatttggaacgacttaaacccttggactgctgcatatgtttttttttgcgtgaacgtttcgttgataaacgggatatatacacatattcgaaggccttaaggcacaaagaaaaggagactaattaagggtgtgtttggttggagagtcaactaaaatgagcgaaatgagcggctgtattacagtttttgagaatgaatctattctattttatgtttggcaaacagaatttagccg

SEQ ID NO: 8699 - DNA, 5471 bp, Zea Mays
gccggccgctgctcccccgacgcgggggaagccaccggcggtagcgctcgcttcgccgcgccaaaaacctagcggctccgagctccccgccgcctccgtggcttatatggcgaacccgggcctagggcttggactcgcgccaccgggcgccgagccctccgccggagcgccgccctcttcacgtcgcgcgccgcgcttggccaaacggcgccacgcgcccgcctcctcccgctcccgcatgccgcagacctcagccggaatatggaacccgtttggtggtggcggaggtacggatagacagaccggaggctttgtgtttggtgctgcttcggcagtgagccaacagcctttggagccagcagtgtcagtagcttcacccactgaggcgcccttcgtgtttgggagcgtgagggagagcctgcctcggtttgacgagggatcgcccgcttcatcaaagctccctgataagatggagaagttgaacctgcgaacatcaagtgaggttgacgatggtctcggtcaggggagggatcgaaaggatggaagttcggtatttggtgctgatatatctggtttgttttctagtaacaaggaatctaatgtgctccaggagaagcttacacagttgaatttaggccacaaagaacccttgcaaagtaagaagagggatagtgctaatggtgtgccgcaagcatttgtgtttggaggtaatggagctgggagttttgctgactgtaagaacaaagccgcccctggtgcacattcagatgatcctagttcagttcatggcactgatgcaaaaggtatggctgggaagtcgatgcagttcaatataggcagtcaagcaccttccaggggtggggggattgatcgtactaatggagcaccagaagctttcacgtttcgaagtaccacattaagtggtcatgtggataatataaacaatgttgactctggtgccaataccagttcttccactgttgctaaatgtgtttgtgatgcagattttcctctggaaaagataacacggttgtgtataggaagtgacatgcccttgcatgagacgaaaagtggttatcaacccaaagtgtttacgtttggaagtggaggaatcccaggcgctgtttttgggaaggaaactggcagcacatcagataggagcagtgaattcctctctgcaaatagcaatacttctagttcaagcagtgattttttctctacagcaaatagcaacgtttctaattccgctaatggcacttattgtttgccaccagagaagacaccagatttgaatgcaggagacagagtcatgtcacagagcttggaaggtgataattctaattgtccaacagagacctttctatttgaaagaaatgaaacccgaagctctgtttcgcactctgcaagcatagccatggatgacggtgggaattttgtcaatgatgaaaatactgacacctgtagttcagctcacagtacagtggagtgtgcaggtgctctcccagagaagatgacaaagttaggtataggatgcagaattccacatcatagcaggaaagatgaaactgctaccgatccaccagaagtatatgtatttggatgtaatctttctagcttttcttctgcccagacttcaagtaaatcgaatgatcgcacgactcctgaattttgttttcaaagcaaaacaggggcaacttcaggatatggtgctgttccccaaaccaaagttcaggattcatacccatttacaattttgaataattcatgtactttctctacttttgagaatgcagttcctgctttcagttttgggacactgaatgcagaaacagaaacagctccagatgatcctttttctttttctgtcaaacatgatttgcctgggtattccagagagaccttatttggtttagacagtataaaatctgcatacaaggacaaaagggaagcatgtaaaggaaaaatgaaaaacaagaggccaactaggctaaagcaacatgctcagctccatcaggttatttctaaggaagcctgtaccagtggagaagcatcagatttagcaggtgactgttcaccaatggattgttcgccatatcctgcagaatctgaacatgtgccaacagaggcatatgtggcttctgatcagcccgttcacataggtgatactgttatctcgaacgggaacaccagttgtgctgaggatgatgtagtttctgcagccgagcacttggttactgatgcagacctactgatgtttggagatgaaggtagaggaccgaaactagatgcatctgagagcaattttggtagcagcgtttctagttttgaaggagatcaaagcaatgcatcacaacattctttcactaatattgggcaaaactgtaatgagaatacctacagaactccccatgattttgttgaggctgctgcttttcaatcaaactcatcaaatttcagtgggctgaactttagattcggtgtgtcatcctctccacaaatctctgctgcggcacaaagacgtagcacaagaaggaagttaagaacaaagggtagtctagcatcgaaaccttcaactatcgactctttagaacagccaaaatcttcacaagatactaagggcatgcagtttttctgtgaagcaagtaaaaatgaagactcagtgaaagcgcaacaatcaagagattcttctacttctgtggccttggagacttgtgaaacctggcgtactagtggaaataaagcctatgcaaatggacattttactgctgcagaggattattatacccgtggaataaactctgttacccacaatggcgtttctggacaatgttcccgtgcattgatgctgtgttacagcaaccgtgcagctacaagaatgtcacttggcatgatgtgggaggcgcttcaggattgtttgactgctacatcaattgaccccacttttcttaaagctaaagttagagctgccaagtgccagcttgcattgggcgatcttgaagatgcatcaatgagttacatgtcctgtttgaacagtaacaccgagagctctgaccctaaaatatttgctgaggcttctgatggtttggaaggagtcaagagagtgaccgattgggtatctcagtgcaaggaatttcttgagagaagaacatctcctgaagcaacaaaagccttagaattgatctccaatgcattgcacatatgtccacattcggacagcgtcaaggagatgaaagcagaggcattgttgatgctacgaagatatgaagaagtgattcaactatgccaagagtctgtgaatctgactgaaagaaattcagttttattcaaagacaatggagaaccaaagaattccagagtctctgaacggatgcagttttctggaaggtattggcggccctacctcatttgcaagtcttatttcctttcaggcaagcttgatgaggctcttgaattgttaaagaaacatgagcaagtcacacctgtcaaagaaaggtaaacttgtgaagtgaacacatatgaagaaaaattctcatcattgtcagcgactataagagaactactttctcttaaggctgctggaaatgaatcatttcaagctggtagatattcagatgctgtcaaacagtattcagcagctttggcatggaatagtgaatcacgcccattttcagctgtatgtttttgcaatcgtgcagcggcttatcaagcactcggtcaagttactgatgcaatatcagattgttcacttgccatggttcttgatacaaattatccaaaggcaatttcaagacgagccaccttatacaagatgataagggattatgaccaagctgctaatgatgtaaggaagctaatctctcttcttgaaaagaaagtcaatgtgtctggagtatcaccaaaagcttttaacaagcacaatgatctcaagcaagcacatgtgaggctttcatccatagaggatgaagcaaaaaatgacacccccctgaatttgtatttaatcttgggagtggagccatcctgctcttcagaagatattaagaaggcataccggaaagcagcattgagacatcacccagacaaggctactcaattattaataaggaacgagaacgcagaagatggattttggagggatgttgtcaaggaagtctatgcagacgctgatcatctgttcaaaacaattggggaggcatataatgttctttctgacccggccaagcgtgaagagtacaactttgaagaggatctaagaaatgccaggaggagagtatctagttctaggagcatgcataggtcacctgaacagaactacagcaacagaggctttaatccacgccagcggcagtcaagcagagcatcacgttcacgttggtacagcaattcagacgattactggtaaagaagccattacatatggagtgggcatgtggtgcgaagcaacttttgcatgtgtggagcaaaaggcctccttgcaccaagatggcacctgcctttctggggttttttaggtgccggtgctgacgcaccagccttcgcagtctcagctttcgtgtctgtttgctgtgtttcttttccagagggtcagccttcgcagtctcagctttcgtgtctgtttgctgtgtttcttttccagagggtgaaaatattaggattgatcaactggggatctgggatgattggttgacacttgattagcacagaaaatacgtgggattaggaagtggtacatcaaattatcttttgttggcctggtgatttctgaacactgactgcttgggagtggctggcatgatggtatccactcttgaggagttgaacactgagaacaacttcgaaggttaggagcaaggataaagatgttggttcctcgaatatctgcaggcactcttttgctggatgcatggctactgtttagcacgggcagtttgcagcagatcaactggaaggagacatgctcagatgctcctgtttggcgcgtgcagttctgttctgttgcttctgtttaatccaaacgacgtagcgctggaaacagagtggctacatattacaactggctaactgctcaatgtcggaactcggaatcacgattttttatttattcattgttattagaggttttagctagcccaatgttgagagtattttattcagatcaaggttccttcgaagaaaaaagaggctcgggttacggtgacattggccaattgcaggttctgtcatgttgcttatgatgaaatatttggaacgacttaaacccttggactgctgcatatgtttttttttgcgtgaacgtttcgttgataaacgggatatatacacatattcgaaggccttaaggcacaaagaaaaggagactaattaagggtgtgtttggttggagagtcaactaaaatgagcgaaatgagcggctgtattacagtttttgagaatgaatctattctattttatgtttggcaaacagaatttagccg

SEQ ID NO: 8700 - DNA, 5515 bp, Zea Mays
ctcgaatcacacgcgccccgcctcattcgtccattccccagccttccagagcccgccgccgccggccgctgctcccccgacgcgggggaagccaccggcggtagcgctcgcttcgccgcgccaaaaacctagcggctccgagctccccgccgcctccgtggcttatatggcgaacccgggcctagggcttggactcgcgccaccgggcgccgagccctccgccggagcgccgccctcttcacgtcgcgcgccgcgcttggccaaacggcgccacgcgcccgcctcctcccgctcccgcatgccgcagacctcagccggaatatggaacccgtttggtggtggcggaggtacggatagacagaccggaggctttgtgtttggtgctgcttcggcagtgagccaacagcctttggagccagcagtgtcagtagcttcacccactgaggcgcccttcgtgtttgggagcgtgagggagagcctgcctcggtttgacgagggatcgcccgcttcatcaaagctccctgataagatggagaagttgaacctgcgaacatcaagtgaggttgacgatggtctcggtcaggggagggatcgaaaggatggaagttcggtatttggtgctgatatatctggtttgttttctagtaacaaggaatctaatgtgctccaggagaagcttacacagttgaatttaggccacaaagaacccttgcaaagtaagaagagggatagtgctaatggtgtgccgcaagcatttgtgtttggaggtaatggagctgggagttttgctgactgtaagaacaaagccgcccctggtgcacattcagatgatcctagttcagttcatggcactgatgcaaaaggtatggctgggaagtcgatgcagttcaatataggcagtcaagcaccttccaggggtggggggattgatcgtactaatggagcaccagaagctttcacgtttcgaagtaccacattaagtggtcatgtggataatataaacaatgttgactctggtgccaataccagttcttccactgttgctaaatgtgtttgtgatgcagattttcctctggaaaagataacacggttgtgtataggaagtgacatgcccttgcatgagacgaaaagtggttatcaacccaaagtgtttacgtttggaagtggaggaatcccaggcgctgtttttgggaaggaaactggcagcacatcagataggagcagtgaattcctctctgcaaatagcaatacttctagttcaagcagtgattttttctctacagcaaatagcaacgtttctaattccgctaatggcacttattgtttgccaccagagaagacaccagatttgaatgcaggagacagagtcatgtcacagagcttggaaggtgataattctaattgtccaacagagacctttctatttgaaagaaatgaaacccgaagctctgtttcgcactctgcaagcatagccatggatgacggtgggaattttgtcaatgatgaaaatactgacacctgtagttcagctcacagtacagtggagtgtgcaggtgctctcccagagaagatgacaaagttaggtataggatgcagaattccacatcatagcaggaaagatgaaactgctaccgatccaccagaagtatatgtatttggatgtaatctttctagcttttcttctgcccagacttcaagtaaatcgaatgatcgcacgactcctgaattttgttttcaaagcaaaacaggggcaacttcaggatatggtgctgttccccaaaccaaagttcaggattcatacccatttacaattttgaataattcatgtactttctctacttttgagaatgcagttcctgctttcagttttgggacactgaatgcagaaacagaaacagctccagatgatcctttttctttttctgtcaaacatgatttgcctgggtattccagagagaccttatttggtttagacagtataaaatctgcatacaaggacaaaagggaagcatgtaaaggaaaaatgaaaaacaagaggccaactaggctaaagcaacatgctcagctccatcaggttatttctaaggaagcctgtaccagtggagaagcatcagatttagcaggtgactgttcaccaatggattgttcgccatatcctgcagaatctgaacatgtgccaacagaggcatatgtggcttctgatcagcccgttcacataggtgatactgttatctcgaacgggaacaccagttgtgctgaggatgatgtagtttctgcagccgagcacttggttactgatgcagacctactgatgtttggagatgaaggtagaggaccgaaactagatgcatctgagagcaattttggtagcagcgtttctagttttgaaggagatcaaagcaatgcatcacaacattctttcactaatattgggcaaaactgtaatgagaatacctacagaactccccatgattttgttgaggctgctgcttttcaatcaaactcatcaaatttcagtgggctgaactttagattcggtgtgtcatcctctccacaaatctctgctgcggcacaaagacgtagcacaagaaggaagttaagaacaaagggtagtctagcatcgaaaccttcaactatcgactctttagaacagccaaaatcttcacaagatactaagggcatgcagtttttctgtgaagcaagtaaaaatgaagactcagtgaaagcgcaacaatcaagagattcttctacttctgtggccttggagacttgtgaaacctggcgtactagtggaaataaagcctatgcaaatggacattttactgctgcagaggattattatacccgtggaataaactctgttacccacaatggcgtttctggacaatgttcccgtgcattgatgctgtgttacagcaaccgtgcagctacaagaatgtcacttggcatgatgtgggaggcgcttcaggattgtttgactgctacatcaattgaccccacttttcttaaagctaaagttagagctgccaacttgcattgggcgatcttgaagatgcatcaatgagttacatgtcctgtttgaacagtaacaccgagagctctgaccctaaaatatttgctgaggcttctgatggtttggaaggagtcaagagagtgaccgattgggtatctcagtgcaaggaatttcttgagagaagaacatctcctgaagcaacaaaagccttagaattgatctccaatgcattgcacatatgtccacattcggacagcgtcaaggagatgaaagcagaggcattgttgatgctacgaagatatgaagaagtgattcaactatgccaagagtctgtgaatctgactgaaagaaattcagttttattcaaagacaatggagaaccaaagaattccagagtctctgaacggatgcagttttctggaaggtattggcggccctacctcatttgcaagtcttatttcctttcaggcaagcttgatgaggctcttgaattgttaaagaaacatgagcaagtcacacctgtcaaagaaagtgaagtgaacacatatgaagaaaaattctcatcattgtcagcgactataagagaactactttctcttaaggctgctggaaatgaatcatttcaagctggtagatattcagatgctgtcaaacagtattcagcagctttggcatggaatagtgaatcacgcccattttcagctgtatgtttttgcaatcgtgcagcggcttatcaagcactcggtcaagttactgatgcaatatcagattgttcacttgccatggttcttgatacaaattatccaaaggcaatttcaagacgagccaccttatacaagatgataagggattatgaccaagctgctaatgatgtaaggaagctaatctctcttcttgaaaagaaagtcaatgtgtctggagtatcaccaaaagcttttaacaagcacaatgatctcaagcaagcacatgtgaggctttcatccatagaggatgaagcaaaaaatgacacccccctgaatttgtatttaatcttgggagtggagccatcctgctcttcagaagatattaagaaggcataccggaaagcagcattgagacatcacccagacaaggctactcaattattaataaggaacgagaacgcagaagatggattttggagggatgttgtcaaggaagtctatgcagacgctgatcatctgttcaaaacaattggggaggcatataatgttctttctgacccggccaagcgtgaagagtacaactttgaagaggatctaagaaatgccaggaggagagtatctagttctaggagcatgcataggtcacctgaacagaactacagcaacagaggctttaatccacgccagcggcagtcaagcagagcatcacgttcacgttggtacagcaattcagacgattactggtaaagaagccattacatatggagtgggcatgtggtgcgaagcaacttttgcatgtgtggagcaaaaggcctccttgcaccaagatggcacctgcctttctggggttttttaggtgccggtgctgacgcaccagccttcgcagtctcagctttcgtgtctgtttgctgtgtttcttttccagagggtcagccttcgcagtctcagctttcgtgtctgtttgctgtgtttcttttccagagggtgaaaatattaggattgatcaactggggatctgggatgattggttgacacttgattagcacagaaaatacgtgggattaggaagtggtacatcaaattatcttttgttggcctggtgatttctgaacactgactgcttgggagtggctggcatgatggtatccactcttgaggagttgaacactgagaacaacttcgaaggttaggagcaaggataaagatgttggttcctcgaatatctgcaggcactcttttgctggatgcatggctactgtttagcacgggcagtttgcagcagatcaactggaaggagacatgctcagatgctcctgtttggcgcgtgcagttctgttctgttgcttctgtttaatccaaacgacgtagcgctggaaacagagtggctacatattacaactggctaactgctcaatgtcggaactcggaatcacgattttttatttattcattgttattagaggttttagctagcccaatgttgagagtattttattcagatcaaggttccttcgaagaaaaaagaggctcgggttacggtgacattggccaattgcaggttctgtcatgttgcttatgatgaaatatttggaacgacttaaacccttggactgctgcatatgtttttttttgcgtgaacgtttcgttgataaacgggatatatacacatattcgaaggccttaaggcacaaagaaaaggagactaattaagggtgtgtttggttggagagtcaactaaaatgagcgaaatgagcggctgtattacagtttttgagaatgaatctattctattttatgtttggcaaacagaatttagccg

SEQ ID NO: 8701 - DNA, 1993 bp, Zea Mays
atggcgtcggagatgagcaagaacgtgaaggccctcgacgagcaggaggtcacctcgcagcactcgcgcgcccagaccagcgccgccgccgaggagcaacagcagcagcaggcggtggatccgctggcgcgacagtcgtccatcatgtcgctgacgctggaggagctgcagaactcgctgtgcgagccgggccgcaacttcgggtccatgaacatggacgagttcatggccaacatatggaacaccgaggagttccaggccgccacggccggctgcaacaaggagggcgcgtatcgggagccggtgcccgtggcgacgacgacgggcacaactgtacacaaacaaaagcttgaggcctcgagaagcacccaccaattgggagacgacggtgcacgaaacgaaatacacgactacacgagccgagaagaagtgagacgagccagtaggaaagcgccaagcaagcagcgccactgcaccaggagctgcaacgcaagcgcatccactcatcatcgtccccctgcccggtcgctccactcccctccccccgcgcgcacaaacaacagcagcccgatgtccgccgccgcgtcctctgccaccgcctgcttcctctccccgctcccgccgcctcgccgcccgcgtcatttcctcaggcacctcgcgcgcgccgcggtcaccaagcccgagcccgcctccgcctcctcgctcgccctcccctcgccgtggctttgggcccggcggctctgcgagctggtccccgccgaagccgggggccggcttctgtcgtcggccgcgggctccctcatcgtcgcgctcgcctcagcgtcgcttgtcctaggtgacaccggcgccgcctccgcgttcgtcgtctccacgccgcggaagctgcaggcggacgagctcgccaccgtgcgcctcttccaggagaacacgccatccgtagtctacatcaccaacctcgccgtcaggcaggacgcgttcacgctcgacgtgctcgaggtgcctcagggatccgggtccgggtttgtctgggataagagcggccatatcgtcaccaatttccatgtcatccgtggcgcgtcagacctgagggtgacacttgctgatcagtcagtgtatgaagcgcaagttgttggatttgaccaggacaaggatgttgctgttttgggtatcaaagcaccaaagaataaactaagacctatacctgttggtgtgtcagcagacctactggttggtcagaaagtgtatgccattggaaacccagtcgggggcattgtggaccaactcataaaatttggcagggtgacaagacctattctgggaataaaatttgccccagatcaatccgtagagcagcttgggttgagtggagtgcttgtcttggatgctcctccaaacggaccagctggcaaagcgggtctgcaagcaaccaaacgagatccctatggccggcttatcctgggcgatataattacctctgtgaatggtacaaaggtgacaaacggaagcgacttgtataggatactggaccagtgcaaagttggagacacggtgaccgtggaggtcttgcgtggcgaccacaaagagaagatccctgtggtcctggaaccgaaggctgacgaatcctagtactagtaaacccagcttcttcttctgtaccatagcatcagtttctcgctttggtgcagaggcgcaaacacacaaggcgtcttagcattttcgccctccacggggttcattcgctgtacataattcatgcatgtagatgttgttaccatctcttgtctggtggaaaaggggtatccagactccattccaggttgccgtaatgccgtcgtgtattattaatacgatgctcatcagatgaccatccaggccggtcaagggacctgcaggccgacgattgaactcgctgatgtcacagatcaccaaacccgttttttgacgaaaaaaaaagattaattgtgtacgtaccactctgcttttacgaaattgg

SEQ ID NO: 8702 - DNA, 3122 bp, Zea Mays
ttcggtgtggacctccctccgtctcccgggcggaagcggaagtaagcgaacggggcatccacgtccgccatccatggctgccacagccgcgacggctcacagcggcggccaccgaagcctcctcctacaacctaccatctcgctcctcaccggaggcgccggagaccaggcagatacgcctggagacggagtcagcactggagtggggcggcgtgtgcgagcggctggcccacttcaccgccactgctgcgggccgcgccgcctgcgagggagggcgcgtccccgtcgggcggagccgggaggagagcgagaggctgatcgaccagacggcggcggcggtgctgcttccgacgccgctcgatttcggcggcgtcgaggacgtgtccgcgctcgtcgctgcggcggtcgcgggccgcgcgctggcggtgagggagctttgcgcagttgggcgcagcatccgtgccgtgcgggcagtgttccaccagttgaagaggcttgccgatgaaatgccggatggaaggtactcttctcttgtagatatactacaaggttgtgacttcttaactgagcttgttcaaaggatagagttttgccttgattccaccctttctcttgtcctggatcgggcaagcaaaaaactagagataatccgccgagaaaggaggaggaacatcgaaatgttagaatctctactaaaagatacagctgcaaagatttttctagcaggtgggattgataaccctctggtcaccaagcgccgttctaggatgtgtgttggtgtgaaagcttcacacaagcatttgatgcctggtggaatcgttctaagttccagtggctctggcgcaacatactttatggagccacaggatgctgttgagctcaacaacagggaagttaaactctcaggagaggagagagcagaggaactggtagtattgagcttgcttacctcaatgattgcagactcccaactgaagatcagaaatttgatggacaatgttttggaattggaccttgcttgtgctagagggtcgtatgccctatggacaaacagtgtcagaccaaccttcactgatagttataccattagccaatcagaccagtgcaatgactattcaatttatattgagggcattcgccatcctcttctacttgaacagtctcttatggcagaagaatcaactacagaagcatctgaaatgcctgttccattggacatgtgggtaaaaaagaatgcaaggatagttgtgatctctggacctaacactggaggcaaaactgccactatgaagaccttggggctgtcctcgcttatgtcaaaagctggtatattcttcccagccaaaggaaggcctaggattccatggttcgatcaggttcttgcagatattggtgatcaccagtcgctggagcacagcctctctacattcagtgggcacatatcacgtctgcgcaagattgtagaaatggtatcaaaagattctctagttctaattgatgagattggcagcggcactgatccagctgaaggtgtagctctttcaaccagcattttgaagtatcttgcaagtagagtgaatttagcaattgtgacaactcattatgctgatctaagtcggctccagtcagttgacaaccgattcgagaatgctgcaatggaattttgtgtagaaactctacaaccaacataccgaatcttatggggcagtactggtaattccaatgcacttagcattgcaaagtcaattggttttgatcaaaaagtgcttgatcgcgcacaagaatgggttgagaaactactgcctgataagcaaaaggagcggcaaggtttactttatgattctctcgttgatgaaaaagaacttttggaatcccaggcaaatgaagctgcatctgttctttcacaggttgaggggttgtacaatgagattcgcttggaagctgatgatctcgaaagcagagtagctgcattgagagcaagagagacccaaaaggtacaacaggaattgaaggttgtgaagtatcggatggacaccataatcaagaactttgaagctcagctaaagaattcaaaacttgaacaatacaattcgctaatgaggaaagcagaggctgccactgcttccgtggttgccgctcatcagccaagcgaaatagctttcgatgatgacgatgaaaaccggatctcgttcgtctcacaagttggagacaaagtgtatgttcaagggctgggaggagaaacgatggctaccgttgtcgaaactctcggagaagatgagagttgtatggttcaatacggaaagataaaggttcgagtcaagagaagcaggataaaactggttcaaagaggcacaaataacgaggcaacaacttcctcttctgtaaaagcaaagggccgaacaccgaagcagcgatcggcaacgacgacggacgtctccttcggccccgtggtgcagacgtccaagaacacggtggatctgcgcggtaagcgggtcagcgaggcggccttcgagctccgcatggccgtcgacgcgtgcaggccgtaccaggtgctgttcgtggtccatggcatgggcaccggggcggtgaaggactgcgccattgacgtcctccggaagcaccctcgcgtggccaggttcgaggacgagagccctctcaactacggctgcaccgtcgcctacatccagtgaacggactcacagttgcggaatgccagttgggtgagctttttgctagtagctgatctgcgggtggatcggataaatggccttggcagttgtgatcagttcggccggcgtcctatgcattggcatcgcaaaatcaccagcggaagcaaggtgtgcgtgcacatgcgcgcctcttctttccagcaggattttgtgtggcgagggctgatgtggccaggttcgagccacgagagacaaaatacttgtggctcgtcaactcgttctcgacttgttttagttttgtcacaagttaagctagtatcttggctcggtttgttacaagccagctcgagttaagcttgttagctcgaatgatctagcatttgtaagcaaaacaaaaggcattcacagatgaactaataagtgataaactgtattaattagatgttgtattca

SEQ ID NO: 8703 - DNA, 1846 bp, Zea Mays
tgtaacttgtcagctcctctgcatgtgtacttccgaggccaatatggaggcacactatactatagtagccaaagcatcaacttcggcaatcatggaccacagtgtgtactactgccttgtagctcttcttccacttgtttacttccttctcaagtcgtcgtggaagaaagctcccttcggatctggtagccgccatggactaaagctccctccaggcccatggcagctccctgtcatcggcagcatccaccatctccgcggctccctcgtgcaccacgctctgagggacctatcgctccgccatgggcctctcatgttcctcaagctgggcgaggtcccagtggtcgtagcatccacgccggaggctgcgaaagaggtgatgaagacccacgacgccatcttctcgaccaggccactgagctcaaccattaggacggtctccaaggatggcctgggcatcgtctgggctccgtacggcgaccactggcggcagctccgcaagatctgcaccatgcagctgctcggcgcgcggcgcgtccagtccctgcggcccgcgcgcgaggaggaggcgttccggctggtccgagccgtcatgtcctcgtccaccgcggcaggaggagctgcgccgccgccgctcgtggacctcggcaagctggccgccgtgtacgtcgccgaggcgtcgttgcgcgccatcttgggcagacggttcaaggtcgaggaccgggacacgctgctgcgctacgtggatgacggcgtccggctggccggcgggttcacgcccagagacctgttcccgtcgtcgtggctcgtccgcgccctgacccaccgggccgtgcgcgaggtggatgcctaccgagactccttgttcgccttcatggatgtagtggtaggtgagcgcttggatcgacgagaaggtcaactgaagaagaggaggaggagggagaggatctgattgacgttctcctccggagccacaaggaaggaaacctcccgttccctctcaccatgaggacaatcgaagcggtcatatttgatctgatcggagggggtatcgagacagcaacaacaacgctgcagtgggcgatggctgagctgatgaggaatccaggcatcatggccaaggcacaggccgaggtcaggggattgttcatgggccaaaccaaggtaaccgaagaccggctaggtgagctaccctacctgcagctggtcatcaaggagacgctgaggctgcatgtcccggggccgctgctgatcccaagggagtgccaggagcagtgccggatactgggctacgacgtgcccaggggagccatggtgctcgtgaacgcctgggccatcgctcggagcccggatcactgggaggagccagacgcgttcgtccctgagaggttcgtcggtgacgcgagggatttcaagggcaacgacttggagttcatcccgtttggcgccgggaggaggatctgccctgggatgtcgttcgggctggccagtggccaacgtcgagctcggtctcgccagcttgctcttctacttcgactggagtctcccggcgggcgtccttcctgctgagatggacatggccgagaccatggggatcactgctaggaggaaagcagacctcttcttgtctgctactctgcgtgtcaaactgccttaattttcatctgatctgatggtactctatgcctatgagatatgcagtgactgttacgggacgggctatctgtgctgcagcgtgtggagcagagtatttccagtttttctcccttagaccgtcttccacagttcaccgcctaaaacactattttacgttgtatatcccaattttcgtgatgtggagtatgaa

SEQ ID NO: 8704 - DNA, 2341 bp, Zea Mays
cgcttgttccatgtttgaacataccacaccacattgcacgcaggaggaccggccgccactctttctcgctctcttctcttctcttggctccagctccacccacctctagctgcctcccttcggcaatggaggaggcgccaccatcttcttctcccccctcccctcctgtgatgctactcttgctgctgctgcttatcgtctcctccccttgtagctctagcgccctcctctcccccaagggcgtcaaccctgaagtgcaagctctgatgacgatcaagaacacgctcaaggacccccacggcgtgctcaagaactgggaccaggactccgtggatccctgcagctggaccacagtcagctgctcgctagagaacttcgtcaccggactggaggtcccaggtcagaacctctctggcctgctctccccaagcatagggaacctgacgaatcttgagactattctcctgcagaacaacaacatcaccggcctaatcccagcagagatcggcaagcttacaaagctcaggacacttgatctctctagcaaccacctgtatggcgcaatccccacttctgtgggcaaccttgagagcctgcagtacttgaggctcaacaacaacaccctgtctggcccattcccttcagcatcagctaatttgtcccagcttgttttcctagacttgtcatataataatctgagtggtccagtgccgggatctttggcaagaacattcaacatagttgggaatcctctcatctgcggcaccaacaacgccgagagagattgctatgggactgccccaatgccgccatacaacctcaacagctcactgcctccggcaataatgtctaaaagccataagtttgcaattgcatttggtaccgcaattggctgcatcggcctcctcgtcctcgctgccgggtttctgttctggtggaggcatcgtagaaaccggcaggtcctttttgatgtcgatgatcaacacatggagaacgttagcctcgggaacgtgaagaggttccagttcagggagcttcagtctgcgacaggcaacttcagcagcaagaacatactgggaaaaggtggctttggatacgtctacagagggcagttccctgacggaactcttgtggccgtgaagcgactcaaggacggcaacgccgcgggcggcgaggcccagtttcaaaccgaggtcgagatgatcagcctggcactgcacagaaaccttctcaggctctatgggttctgcatgaccgccacagagaggttgctggtctatccatacatgtctaatggaagcgtcgcgtcgcgcctcaaagctagcagtaccacaagcatacgattcctatcctcactttattccacaatgatcgctacgcctacagggaagccacctctggactgggtgacgaggaagaggatagctctcggggcagggagggggctgctgtacctgcacgagcagtgcgaccccaagatcatacacagggacgtcaaggctgccaacatcctgctagacgactgctgcgaggccattgtcggtgacttcgggctcgctaaactcctcgaccatcgggactcccatgtcaccactgcggtgcggggcactgtcggccacatcgcgcccgagtacctctccactggccagtcgtcggagaagaccgacgtcttcgggttcggcatcctgctgctggagctcgtcaccggtcagacggcgctggagtttgggaagacggcaaaccagaagggagccatgctggactgggtgaagaagacgcaccaggagaagaagctggacgtgctggtggaccaggggctgaggggcggctacgacaagatggagctagaggagatggtgcgagtagcgctgctgtgcacgcagtaccttcccggccaccggccgaagatgtcggaggtggtccggatgctggaagcaggggaagggctcgcagagcggtgggaagcctcgcactcgcagtcgcagagcgcggactcgcacgagttcaaggccgtcgagctgtcgggcccgagatgatgatgacgacgacgccgccgccagtttgcactttgtacagcatgcatattaaggaccgagaatcctgtgtggactaccatactagaatagctagctatagatgtgtattagattaactgtacaaaaagaagagcgtgtgaggtttgtactgatttggatatttacagaattagtagtcgagacaataagaccaagtaaaaaagagcttttcattgttcatttcagagtgcaacaggttctgaaatagtgaaatctcatcagagtccttagctgattttgacataaatgaaacattctgccgagcc

SEQ ID NO: 8705 - DNA, 1070 bp, Zea Mays
ccacagtgcctcgcgtgccgccgcgcgaaatgacgcggctgccccccatgcaccaccgctcgctgcctcgcttgggtcgaggcggcgtggcggtcgcggccgggagcgatgatgggctggcggtgacggagcagcaggtggcgaagctgatggaggaggacatgggcaccgccatgcagtacctgcaagggaagggcctgtgcctcatgccggtctccctcgcctccgccatatcctccgcgacgtgccacatgcgacctccggtgggaggaccgggcctcggggtcgccgccgccgccgcgcaccacatggccgctatgcggttgccgccccacgccatgaacggcggcgccggagccggagccgacgccgtgccggcctcacccagcatgtccgtgctcacggcgcagtcggccatggcgcccaacggcgccgggggtgggactgatggcgagggctcgcactcgcagcagcagcagcggcatcatcccaaggacgccgcgtccgtgtcgaagccgtgatccgctcgtgaacgtgaaggcaacggccgccgtgacactaacggcgcaaccatgacatgacactcggagctgacaaagtgggctctttggcgggcccacccacgggctctcggcactgcagctggccctccgaccttcccccttttcgcattttattcccagtgtaaccattgtttttttttccttgtttaatattaatcccatgtattatcgattcgcaaatgcaaggctggttctcctctgcttgctttgcgccagctttaccctctcttttcccgccatccgcatcaacctttttctgttgctgccctcgctttggccacggcccgctgccagatttgtcctttgcggttggacggggaatttggtctcccagcttcggctgctgacccaattttattatgttttttatattctcccccgtgtatcttgctatatcttgtgtactctcggccccaccggtgaagaacaaaatgtgctggctgctgctggtattctagctcgctagggacttaagggatgcatcgatatatgatgcttggaatttta

SEQ ID NO: 8706 - DNA, 2608 bp, Zea Mays
ctggcgcctagtgtgtgtttgtgcgtcttctgccttctgaaggcacgcacgcaccattctgccctcctgctctctccccctcctccttcccactcctgtctctccccgtcctcctctgcttgagccttgagccattcagcaggtccagcaaaattttccagtcagtttcattcattcgcaaggtcggtgtctggagagaagaagagaaatggcggcgctagagaggagaggaggccaccacactgctgctttcatcagagcagcgaaggcctccagtcctcctcctcctccagcgaggcagaggcagaggcagaggcgctccaagagcggtgccggtttggacgacgacgacgacgacagagatgccagggccgcgccgcgttctccgcagaaggcgtccagacagaccaagctgcaagagcagaaacgcgaggccgagacggaagttcagcggcgcaggaggaggagcgaggcacacaactccctgaggaaagagattcagcagctggagacgcgcctcagggatcagcaggtggtgcgcggcgcactggagaaagcgctggggcctgagcctgagcctgagcccgacgacgacggcgctggtccacgtccactcactctccagaacgagagcccagcgctaaagctgataagggaggttgcgacactggagctggagatcaagcacttggagcactacctgctggcactctaccggaaagcattcgagcagcagcaagcacccaccaccaccaccgcgctgccgccttcagacgatcgccgggacgcggcgcgcaagctgtcggtgagctcacggcccgacgacgagacgcccagggcgagggcccccgtgatcaggggaggcggcggcaacgggaggaggaacggcggcacggccgacgactgctcgccgtcgtcgacgtgcccccggaggacggccgcggactcggacccggccggcctccggagccagtcggcgctgtcgttccgaggcgcgtggtcgtcgtcgtcgtcgacgtcgtccaggatatcgcccacggaggacagcctcgcgcgggcgctgcggtcctgccactcccagcccttctccttcctggagcaaggcgagacgacggcgccgtcaggaggagtggtgagcctggcggactacctcggcacgagcgtggcggaccacatcccggagacccccagcaacctgtcggaggagatggtgcgttgcatggccggggtgtactgcaggctggccgacccgccgctgctggcgcgccaccgcccgtcggcgtcgtcggcgtcggcgtcgctgtcctcggcggcgagcgcggtctccccaacacagtgcctcggcggcggcgacaacaacacgtggagcccgaccagcagcagcagctaccactgcggcaggagagacgccgcccggctagtcatcaacccgttccgcgtcgagggggtcaaggagttgttcagcgggccctacagcgccatggtcgaggtgccggcgatctcccgcgaccgccccaggctcagggaggccgaggacctgctccagacgtacaagctgattctctaccggctggagacggtggatctgaggcggatgacgggcggggagaagctcgcgttctggatcaacgtccacaacgcgctggtcatgcatgcgtacctcaagtatggagtcccgcagcagaaccagctgaagacgacgacatcactgcttgtcaaggcggagtgcaagatcgcggggcgcgccatcaacgcggcggccatccaggggctggttctcgggtgcacggcgcactgctcctccgggcattggctgcgggctttgctgcgctacccgaggacgacgacgaaggcgagccggcgggcgagcagagccgggggcgaggagtggcgagccttcgccgtccgccagccggagccccttctgcgttttgcgctctgctccgggagccactccgatcccgcggtacgggtgtacttcccgaagcggctggcgcagcagctggaggcggcgcgggaggagtacgtccgggccacggcgggggtgcggaaggacgaccgccgggtgctgctgcccaggctgctggacgcctacgcccgggacgccggcctcaccgcggaccgcctcctcgacgccgtgcagcggtgcctcccggagacgctgcggacggcggtgcagcgatgccgccgccgcggagacgggcccggtgccgcgaaggcagtcgtcgagtgggtgccccaccggcggagcttccggtacctgttggccagggacctcgccttcccgcacctcagcctcagctagctataagctgcacgtacgtcgtgaagatgattcctcgtacggtgactagttgaaagattggtagttgtggtggggtgtggatgacttgatagattttggttctagattaatgataatgatgatgattgcacatggtccattaggcacgggcattcttcatcttaatttgcgtgtgtgtgtgctgtaaacagatgacacatcgagcttagcttgtagatatagcaacaaatgaaagagataaactaagtttgtattattgcattgtacaccacaaaagtaatttcacgagatgatcaaatggct

SEQ ID NO: 8707 - DNA, 1164 bp, Zea Mays
cagcttcggcaattatgcaagatatcgggggtaaaggtctgctttgatactgaaaatgctcgtgattctttctacagagcagcagtgaactttgttttagatgattgcagcagcagcaaaagacatcggtgcagcaaaacttaatggtgaggatccaagggattttctcgccggccttgctagcaatattggattagacaagtttcgtgctgccactcttgtatgtgcatcagttgctactcgtacacggacatgcttcttgcaatgctgggctctagagattcaaggaaaacggccagaagcactggatgaactcgtgaagatttgtagaattcattacatatttcctccagaggacaattctgcagagatggaaatggtggctgctggactagaaaagaatttgcatgttgccgagagggttcaccttctatatctatacaggagcgtttgtactgctggtaacttaaaaacagctgcacaggctcttggtctgagtttgccaaatgagaatacagaaggatttgcaatgcccattcgtcaaccatagatgaaggctttgaagcccctgacgcagttttggtattcctactttcttaacatgcattatgcagtatgctaccaagacaagaatcaagcatactgcagattcccttctcaacagaatcttagggacagatctgcacgggccccccagacaaatgctgaatcaattgttccgttcatgtgcatttgatagaggggtgctctttaatatgtgcaatgtcatcaaaacctcgtatattcagatgatcgattctgctcaccaaacgcgcccaccgccatgcctaatatcgtggccgtattgggagtatcatggccgtattgggagttctcttctgcagctgtagttggttaggacatctacaacctgagtctttgaattgttattttaagagctacaaaaactgtgcgatgagaattggttttttaagagctaaaaaactgtatgatataatgagatgtcttcaatattaatcacataataaatatagttaatagacaatgtgtagtgtagagagactctttgcaaagagatctctcttatattttttatttaacccttatttctgaaaaggctgtattaaatgatattgtatatgtcattatttcgtggtcgtattg

SEQ ID NO: 8708 - DNA, 1230 bp, Zea Mays
tttggattggtgctgcaatttattccatatgcttgtcgacattgtgtaatcatgctttggtatgcagcttcggcaattatgcaagatatcgggggtaaaggtctgctttgatactgaaaatgctcgtgattctttctacagagcagcagtgaactttgttttagatgattgcagcagagcagcaaaagacatcggtgcagcaaaacttaatggtgaggatccaagggattttctcgccggccttgctagcaatattggattagacaagtttcgtgctgccactcttgtatgtgcatcagttgctactcgtacacggacatgcttcttgcaatgctgggctctagagattcaaggaaaacggccagaagcactggatgaactcgtgaagatttgtagaattcattacatatttcctccagaggacaattctgcagagatggaaatggtggctgctggactagaaaagaatttgcatgttgccgagagggttcaccttctatatctatacaggagcgtttgtactgctggtaacttaaaaacagctgcacaggctcttggtctgagtttgccaaatgagaatacagaaggatttgcaatgcccattcgtcaaccatagatgaaggctttgaagcccctgacgcagttttggtattcctactttcttaacatgcattatgcagtatgctaccaagacaagaatcaagcatactgcagattcccttctcaacagaatcttagggacagatctgcacgggccccccagacaaatgctgaatcaattgttccgttcatgtgcatttgatagaggggtgctctttaatatgtgcaatgtcatcaaaacctcgtatattcagatgatcgattctgctcaccaaacgcgcccaccgccatgcctaatatcgtggccgtattgggagtatcatggccgtattgggagttctcttctgcagctgtagttggttaggacatctacaacctgagtctttgaattgttattttaagagctacaaaaactgtgcgatgagaattggttttttaagagctaaaaaactgtatgatataatgagatgtcttcaatattaatcacataataaatatagttaatagacaatgtgtagtgtagagagactctttgcaaagagatctctcttatattttttatttaacccttatttctgaaaaggctgtattaaatgatattgtatatgtcattatttcgtggtcgtattg

SEQ ID NO: 8709 - DNA, 2077 bp, Zea Mays
cggaagcgaacttcggtagccctggcgctatgcacgtcagctttctgaagttatggcgagaagaggcatgaatcctactgttagtgatcaagcaatccgcctggatctcattgccaaatcgagaggcatcgctgctgccgagaagtactttttggacctcccagaaacatccaagactcatcttacatatggcgctcttctcaattcttactgcaaagagttgatgactgagaaggccgagtcccttatggagaaaatgaaggagctcaactttgctttcactgccatgtccttcaacagcttaatgacgatgtacaccaaagtcaaccaagctgagaaggtccccagtatcattcaggacatgaaggcagatgacgtattgccagatgtctttacttataatgtttggatgagggcgcttgcagctctcaaggacataccaggggttgagagggtgattgaagagatgaaacgggatggccgtgttgctcctgattggacaacatacagcaacctggcttccatatatgttgaggctggaatgtttgagaaggcagaggctgctcttaaggagcttgagaagcggaacaccagcaatgacatcgaagcctaccagttccttattacattgtatgggcgtacacagaacttagtggaagttcaccgtgtctggcgatcgctgaagcgggataaccctagaatggcaaacatgagctaccttaacatgattcaggttttggccaacttgaaggacctgtctgctgccgaagcctgttttaaggagtgggaagcccgacacatccatccacccaagaccaacacaaagggctcgggggcagataatacacctggtgcagatccaaaatctccaagtaacccgcctaataatcagtctggcaccaaggaaaccggggacgagacagcagaggacctccagccgaagcatccaaaatatgacatccgggtagcaaacgctatgatcaaggcgtacattaccgagggcatgcttgacaaagctgtcgccatgaagaagcgtgccaagatgcgcggcggaaggctgaacgccaagacatgggagatcttcatggagcattacctcaagacgggggatctcaagatggcccattggtgcgcggaccgcgcgatgaagaaggggcacagcagcggcaggatttgggtgccgccgcccgccgtgacggagaccctgatgagctacttcgaggagaacaaggacgtcgatggggccgagcggtacgtgggggctctgaagaaggtgcagaaggatctgggcgcaccggtgttcgagccgctggtgcggacgtacgctgccgccgggaagaagttccccgggatgcggcagcggctgaagatcgagaacgtggaggtcggggaggggacggcccagctgcttgactctatctgcgccgatcaataggtggttttcttttgtcctcgccgtttgtgtttgtctcaataacagcaggaccgtttcgagcgctcggctatttgctctgcaagcgctgtgatgcctgtatgtactctgaaatccggccaacgtttctgttcttttcgacatcatcagcccaagcacgtcctagaggcggtggcagcgttggtggcggctgctatgcgatgggggcaccacctccgttgatgtattgtctggtgcgggactgcgagtgacctctgaggcgggggcggagaataactggatctacctaacgtcggaatggagacctgcaggtccatttgaaattaaacagaaggttggtaagagtgtgatggtgctcattttgcgttttagaggatccatacttgcatgtagccaaagaaactattttagtaccttttttccttgtactttttttttgtcttattgctttgcctggagctacttgaaatgctccacagttatgtcctctttttaactgagatgtcgttggcctgaacaaaggatgcttgacgcttcgaagtcacacgcaatgataaattcagtttgcagcatcgcgatgcatttggacgctcattttactccttgaaagctgatactaagtgtcacgcgatacctattacgata

SEQ ID NO: 8710 - DNA, 3161 bp, Zea Mays
atggctgtaggtaataaggctgtggcggctgtggttatggtcgtgacgatcctgtcatcggcggccgccgtccatctggctccgcccacgcccacggcggtgatcagaaagcttctgcagcaggaggaggacgactgcttgccacccatgattattggcagttgctgcaccggatgcggtcttttcccttttcatggtcctgtaggacgctgctgtgatcctgataacaacgtctgcacgctggtgcccggcgatggcagcgatttcgaagcttgcgtgcctcgtgatattcttgtagtggctccagactttgggtacctctgtgacacaaacaaagatagtgttcacgcacaacgtatccgcaagacccagcaggcaccaattgctacctggacaaggagaatcagacacacattggaatgtctttctcctagagttggaggagcactcaagtcgcaccttgacgtcgccaccatactgtccaagtactgtgcgtacctggtggtctcagcaccaaagttgcttcctgggaaccactatgactctagccttgtgtttgatgcagtcgcagtggaggccgcgcagtttctgcggggagtggaagacgggtatgaagccttgagaagcttgcctgaatcaacagaaacagaattatccatcctccggaggggggtgaagctggcgaggcagctcgaggagatggagtgtgacaggtgttggaaggtgctcgcggatttctggtcagagatgttgctctacatcgcgccatcggagaatgtgaaggagcacatcgaggcactggcaaatggaggggagttcataacacactggtgggcgttgctcacccacgctggcattctagataggaatgtccacacaaaccgcggcgaggtagcagggatatggtggcttcagtcggcggcgatggttgggtcgtctgcaggagattacgacatggtcgatcgtctaaggtaagtactcccgttcgtgttgcaggcagttctgcgtcttcgtcagggcttcggccttggatcgcttccaaacagtggatcgtcgggctttgcgtggtcggggccccagacttgatcgtggtcgcggctcatggcgtggccgtggtgggcgctttggtgggcgctcgtttctggaatctgatagaagagtcatccgagacatgcctgaatcgagcagaggggtcgtgtcatccaatgcttttgatgaagatgctaaaaagagagcagcagacacagtagatgacggcgccctggctgatggcaagggcaagaaacgccgtgaggatctctgctgtgagatttgtgagggagaccatgtgccgcttgactgtcaggtatacaatggtcctaaaccccatgccattctttgcggttttgggagtggtgaatctgggttctttcaaattcccaactttggttcaaaggggttgatcccgctgaaagaaagttcaactgcttttatcactgccaaggaaggcaccattacggcagagttagtaaagtctgagttggctcgtctcattccggtgagatggacttgggctgtccaaagtcatgcgaatggtttcgttgtaccttttccgtccaaagtcgaattacaacggatggtggccatgaaatttgttcatgctgtagatggtaaaagcataatggtcattcaagaacttgagcagaaaatagagcccgttcaacatttggaaaaggcttgggtcaatatctacggagtgccgtatgaaattcgatcttttcttcctctttgggcggtgggcaccattataggtgctacccagaaagtcgatctaagatatacaaaacagatgggtgttgttcggctcttagttggtgtaacaaacgtcgacaagatcccagaatcggttgacatagtggtcggggaaggcttgtatgaaattttctttaaaattgataaggtttgcaaagatggagtttggtcagaatattattacccttctgataagaaagatgatgattttgaatccaaggatgaggattttgatgggctcgatgatatccagcctaagtttgatgataccaccagggacactgtgatgaaagatgtgtccggtagcaaagttgataattcttctaatgtccaacatgctactcagcagaattgtgatattcgtcaaaccgatgcgctagaaaaatgcttagttgctgttaataggtcttcagtttttagggagaatgttgcagcaccaactgctgttgcgcatggggtcgtttatgataataagtggacagaggctgaaggcacaattattctgaacgccaagcaaactgcacaaaagagaggtgaattttctaggaccggtgggccttcttcttacttggcttctatggttcaacttaatgaagtgagcaggactgttggtagagaggggcatgtagatgccgatgcatttaacctgaacaccatatgccatgaatctgggaaaaaggcagctgcaccttttgttgtagtgtgcacagctgatgcgagtgaggggtctgttgatgccaattcaatctgcctgaattcctttcctggtgttcctgcgagtgcagcagctgtttatccaatttcattggaagacatcaacacagacctcaacagtgtggcgattgaattttcgccagcaacaaatattcatgcagctattccaaatgtatcagttgagcagatacatgagcatgtccggggagctgagcactcggtggctcagctcacctctcccggtggtgcagatgggagtggggctcttgttgaaaatttctcactccaagacatggagactttaatatcgtgcatacatgcatggaccatggtggtggtaccttcaatatgataacttctttgtcagaggtaccgagagttactttacaacatttatgcaaacaatttaagattaaagctaatataaaaaatgatgaaatggtacaggcgctcaatcagttggcccagtcaaatgaccaaatcttgatttctcttcaagattattttaaatcaaaatctctttctcaaagaccaatggcccgagaagatcttactcaggtcttgggcaagcgggtggtttctgatgaggacactttaagcaaggctcagcgtcttgcggcaaagcgcaatttagaaatcaggcaacatactggctc

SEQ ID NO: 8711 - DNA, 6244 bp, Zea Mays
ccttctgagaggcaaccacaatccccaatcacaaaccctagggaagccggtaggcaggcaccggcggccgacaagcgcaacgctgcgacggtgcaaccgcgttgccatcgcccagcgcgaggctgcgacaagcggacggaggcgaatgcgcgccaccgcctagcgtgcgaactctgcagcgcgccaacggaagtagagcaggcgggcagcatccagcgtcccggcctcccggggccgagctcgagcgccgcgcacacacgtccgactgacggtgtgtagtagcggtggctgggaatactcaatcacccaaatcctggtctggcactattccactcatagaatcagtatgtccgacgctgagccacctcctgcaatggaggtggccacgctgacaaccccggatgttatgctaggcgaggactacaaggatattgaggctattgagggtcagaaggattacgagacttgttatggtggaggtggcagtgttatagtggcaaatgagctcgtggggatttctgaagaccccaaccaacccgatattgctactgctgacgagccagaggagggtgctgatgtagaggggcaaactaatgacattagtgctgccgtgtcaacctccaagctggtggatgatcccatggaggttggcatgcaaacagaggttagtgctgctgcagatgatctcatagaggtcggtgctgctctggtatcatctgcagaggattgcacagcggtggctgcttgcctggttaatgatgactgcaatataattttccctggaggtgtgcataggtccgatgaccaaactgatcaggagtttggtggcaattcccttgacgctgatgaggtcgctctcttggtaaatgacatacaagatgacagtgcaaggatggatatggatgtttcagcccatggtgatgtgcatgctcaggatcgggaaagctcacagttggatgtggctacagctctgttaaatgaggtgggaacagagcttgtggaagctggtgaccatgctgtacaggaatgcacaaatatggatatgcggattcaagccggagataacaatgaggcagaacgtgttggcactattgctgacactgccacaaatgaggagcacagacacatgggtgaagttaccatgaccagagatgatagtgagaaacatgatgtggcaggtggtgttgatgtgcctgatgagaggatacaaatgggtaggggtggactgcctggagatgataatgagcaaaaggaagttgcaacagctgatgaagatcgtgtggaagatgaaggcatgcaggtagatgcagtaaacattactggagacatggttgaggaaggcagaattgctgttgaatacattgcaggtgaagctgtaattggcgagggtggtattgatgtccctgaagaaaaggctgctcagatagacagggcgggtaatgacattcccgaagaagagggtctccaaatgggggaagctggcttgattggcagtgataatgggctgaaagaggctgtgattgctgatcatgatggagtggaagtaaatgccataccgacggaggcaactggcacaactaacgatgatgatgaaaacaacacaattgttggtgaagatgttgcagaggctgtcaatgacataactggtgatgatgtccctgacgaagaggctgcacatatggaagatgatgacgacgacgaacctcctcctttagtggaaaagaaaggtggagggcgtcgtaagagaggccgtccatcttccaaggtccagggtgtggtcaagccatctgtaaagaggaaggatgaggaggaggtttgcttcatttgctttgatggtggtgatcttgtgatttgtgatcgtaggggttgccctaaagcctaccatccttcttgtgttaaccgggatgatgacttcttcaagtcaaagggtcggtggaactgtgggtggcacatttgtagcaactgtcagaaacctgcccgccatatgtgctacacatgcaccttttcattatgcaaggcatgcatgaaagatgcaaagtttagctgtgtcagagaaaataagggcttctgtgatacatgcatgaacactgtgatgttgatagagaatagagaggaggctgcggacccaatggaggtggattttgatgacaaaggcagctggtggtatttgttcaaggactattggttaaatttgaagacaaacttgtcgttgacagttgaggaaatatcagcagccaaatctcgaaagagtggagagttacctgatactaatgatgaagttaattcagagagttcatcagggcgcaatctagaaagcaatacatcaaaaaagaggggaaggaagcgatctaaacaagctgccatcaatgagggttctgaaggaaaagcgagcactaggaaatctgccaaacgagacctgtcaggcattcatgatgttcagacctcgtcagggaaaaaggttagaaaactatccaggcgttctttgagcagccagcattcatcaaaagactctgaaagtgttgggacatctacatcctcagctgaagaggacagctgggcttctaaggagctcattaactttgtagctcatgtgagaaatggcgataaatctgtgatcagccgatatgacgttcaaccccttttacttgactatatcaaacgcaacaaactgcgtgatcctcgtcggaaaagccagataatttgtgattctttgctccaaagtctcttcgcgaaagaacgtgttgggcattttgagatgcttaagcttcttgaatcacattttttcatgagtgaggtttcaccaattgatgctgatgaaaatcatggtggtgtagtagatcctgatcctagtcaggatgctgatggtaacagtgaagcttcagttgttatgagttcagaaaaaagaagaaaatcacgcaagtatgacctgaggcaccagcctaatcttgatgattatgcggcaatagataaccataacattggcttgatgtacttacgtcgcaacctaatggaagaattgattggcgatgttgacacatttgatgagaaagttgttggatcatttgtgaggataaaaatacctggtacagggcaaaggcaagacatttatagacttgtacaaattgttgggactggaagatctgcagaaaaatataaatatgggaaaaggactactgatataactctagagatactaaacttagacaagcgggaggcagtaactattgacataatctcaaaccaagagttcactgaggaggaatgcaaacgcttgcgtcaaagcataaagtatggattcattccaaggctgactgtgggagaggttcaggagaaggcaagggttctccaaactctgaaagtcaatgactggattgaaagcgaaaagatgcgacttgggcatcttcgtgaccgcgcaatattcactcttagggaatgtgtagagaagcttagattgctaagcactcctgaggagcgtgctcgtaggctgaatgaagaacttgaaatacatgctgaccctgcgatggatccatattatgaatctccggaggaacaggagcaggaaattgaaaaaagtagcttcaacaagtccagaggttctttcttgaggaaagatggtaatcctgtgcctccaggtaaaggagatggtagaaatgctgcacagcgagattcaaaaactaattgggaatctaatcgaaatacatgggccgaatcgagttctcatatggaatcaccccttccacggaggtccacattttcttctcaaggtgaaagtgctggttatacaagtaaatcagagagcccaaacactggtgcacaaacagttaaactggaaggcaccacacgcagtgctccacaagggtcacctggtgcctcttctggaattttagctaataacatatgttcaggggcaaaaactgcacctcaatcagccattaacgagtctgagaagatctggctgtacatggatccttctaataaaatccaaggtcctttctcaatcatacagctgcggaaatggaacagcaatggctacttccctcctagtttgaaaatatggaaagctagtgagaagcaggacgattccattctattgactgatgctttggcagggaagtttgagaaagaccttcctccatgggaaccgccacatgttagtttgtttcaaattaacaaaacccctcttgagcaaagcacaatagctggtgaacaaactccaaaatcagtagttgcaaagtctttctcaagtagtaatcaaagacatggttatagttcaacaaaccttggaacaaccatgatccattctggcacacaaggttattatggaatgcaaaattcccatgcagcatacacaagccaacattctcttactggaagttggaatgccacgtcaagtcagtttggggttgcggtaaatcctgtgacacctactcagcctgccatggggagcttttcaggacaaaacatagtgtctgcagaaaatatgggtcatctaactcctggaacggctcctgcagctgcaaatgcagaaatggttaattcagatttgacctcccagaagcaaatatcgtatttaccgcaaacagacggcatattagctgatgacattgaatccaaatcaggagaagatgtttcacatggaaaagtgagctcttcagccaaagcaattggaccactgggtgcacagcttggacaaggacaactgaacactcagcaacatgaagatgatgtcaacaccatccgctgcatcagtacaaccttcattgtcaaccattgctggcagtgataatcaaagcagtgggtgggctgtacctacacaagtggtgaacacatctggccagtctcagataactggaaatctgacctggggaaatacacctcagggtgatgcaagcttaggttggggaatgatgggacagaacaatatgaatatgccttgggtagcatcagctcaaggtgcttcgggctacaacatgggtgcagccatgccaacccagccaaatgcagttccaaacatgggttggttaccaaatccaggaaacaccaacatgaacatgatctgggccgcaactcaaggccaggggattccaaatgcagctgctatgatgggaggtcagatgcaaggagtcgcagtggccccttggggtggtgttgcagcaggaaatgcaaattcttatcctgcctggggaaaccaacaagttggaaacatgaaccaaaacgttcgatggagtgctcctgtgcagggaaacccgagtcaggaaaataacaacatgaactggaatgcaccaaatggtaatcctaataattggaataatcagcagagagagaatgagggcaggcactctggacaccgtggtgcttttagtgctggcgactcaggcagaaagtcatggaagccacgctctggtgccgatggggggtcatgggggacatagaggagtctgctatacatttcttgaacgcggggactgctttaaagttgactgcaaattcgcccattcaacaaacacagagggatatccatccatccaggattcgggcaacgagatgcgatatgagaatcacaatgagagaaatgatcgacagtttgataggcagccttcggataatgaaaggcatcatgttaggcctgatgacaggcatggtggcagggatgacgataggcaggctgataggtctcagtcaagagagccgcgttagaactgatttctgtttcgtaccttccctttgttgtatgtgcagtagcaaactagcataatagcttccgtgcatgttttgaactttatgccctgtagcaagctgcaaacatgtgcaaatcgtgtacagcagttgtagtttaatgctgtgtgcgtcctagccccatatttaataatttacttgaataaatcgtagttgtctgatatctgatgtatagcaggggctacacacccaggtcctttatggtgatgactattgagtgttttcttataagcctcatgattgtaagtgaaggtgtttttggaaatcctatgacctaatgtccgatctgtgttcttcgttgtgcaatgatgccattgagcctccgtgatcaaatagtacttcattttgtttgactgttgtgggtggctgggtgctgtgtatgtgtatccacccagctggtttacctgttaagcatgtgcatcatctttcggctgatgtgtttaaaaaaaaaacaccttccacactccctcgtgctcagctgtattttaacttatttttgtaaaaaaaa

SEQ ID NO: 8712 - DNA, 6970 bp, Zea Mays
cttcctcctcctccctcctctctttctctcaccaagtcgttcgtcacgcagaggaccggacgctcgtgagaggcgagacgagcaatcgaaagccggaaggaagcctaacctctcttccaaagccaaaccgaaaagggaaaaaaagtattgtcgaagagaaaaggaaaaaaataataaaggaacacaagcagcccaccggcgcatcacaggggaagcaaacaggggagaaccctagtcaacagacgccgccgccctccctggctggatctggccgccgtctcctccgccgcccgacgatcgcctgatgcttgtcccgacagaaaggcaacaataacttccctccattgggtgccttaatattcccggaaattgctactggttccactagttgaaagattcaatctatatgcatctacacatgacatgggttctcgaggaaggatgttatttgaccttaacgaactcccagcagaagttgaagaagcagcagctgctgtcgtgccaaaagaatctgctgctgttgtgccaaaagaatctgctgctgtcgtaccacaagaagctgttgttgtggcgttacaagaagctgctgttgtcgtgtcacaacctcagaaatcccttcgtgttccgacgacatatgccccaaccttgtttcagcgaggggaaggatcacagtcgcaggggatattgaacaataatgcctttaagcatgcatccattggttctggatttcagccttttgtgaggaacagcaaagattcaaacaatacaaaggagccgatgaaggtggaagataatcataattctagtatagcatcactgtccatggtaaacaatcagatcaccgacagtgctgcttcaaaggttgagacttgcaataaggtgtcacaagccattgaaagagaagaaggagaatggtctgatgcagatggcatttctgaaaatgcagggagtagcaacaaagatgagttcactggtaccgcaagcactaatttgaagaaagaatcccaagagagcgagccccatcttattaaatctggtgatgtgactaaagatgatactgctgcggaatgtagtgatgctgaaaaggttgatgcatctgaagatcgggttcacgggtccacaggatcagataacatgcaaaattctgaatgtaaaggaaatcagcctggtgatgatctagatctttgcaacaggtcaagggatgttaaaggagtcgaagccaattatgctttgaggtttgcgagcaaccccgcaaagaggcccaagttaaatgaacacaaagaggccatgttaggcaaaaaacgagctaggcaaactgtcttcatcaatgtagaggatgcgaaacaagctggtacaatgaagacatcaacacccaggaggcagtcatcttttccagcaccgattgttacacgtacagtgaaggaagcttctcgtggtgctggtgaaaaggctgcagaaaaacaaagtcagcaagcaatcagggatcagagacaacctgaaatgatgggatcagagcgaagcaattctgcagatcctagtgaccaatacactgaatccaatggtgatgctgagttgggtacccagggccggtcaaagaaaatgaatgcagaagatccagcctcagatgggtatcagcagcctgtccaaagacaagcttcattcaagcaatccatggacttgaagcaaccaaaaagccgatcattctcttcccaaagaacatttctaacaggaacaaacaatgctgatcagaagccagccagcaaaaggtctattatttccaaaaagcaaacttttgtaaacaatgtacaggattcatctgttgagcgacttataagggaggtgacaaacgataagttctggcacaatccagaggaggcagaacttgagtgtgttcctggaagctttgaatctgctgaggagtacattagagtttttgagcctttgctttttgaggaatgcagagctcagctttatagttcgtatgaggagagtcttgaggctgtgggaagggatgcacatgtagcggtccgagtaaaaactgtcgatagacgtgaaagaggatggtacgatgttgtcgttctaccgatccatgaacaaaaatggaatttcaaagaaggcgatgttgctattctatcgtttccacggcctggttcagctgcacaatcaggccgatctagtaggagagctatgggttcaaatgaggatgctgtatcagaatgtggccggcttgttggtactgttaggcgccacatgcctattgatacacgtgatcctattggagctattatccatttttatcttggtgattcatttgattctaacagtgaggctaatgttctgaataaactccaacctcggagtacctggtatctaactggacttggttctcttgcaacaacacaacgagaatatgttgctttacacgctttccgccgtcttagtgtgcagagcatttcccgaagtatcaagagcaaccaccagtcatgccagactgcttcaccccaaatttcgctgaccatctccatcgtagcttcaatggtcctcaattgtcggcaattcattgggctgcaacacatacagctgctggcacaaacaatggtgtcctaaagaaacaagaaccatggcctttcacgttggtacaaggtcctcctgggacagggaaaactcatactgtgtgggggatgctaaatgttatccatcttgttcagtatcaacattactatgctgctttgcttaagaagcttgctcctgaaagttacaagcaagttagtggtagcactagtaccagctcagagactgttgcagcagggtcaattgatgaactattgcagagcatggaccagaatctatttcgcactcttcccaagctttgccctaagcctcggatgcttgtatgtgccccatcaaatgctgcaacagatgagcttcttgctcgtgttcttgaccgtggttttatagatggtgaaatgaaggtataccgccctgatgttgctcgtgttggagttgattcacagtctcgagctgcacaggctgtttcagttgaaagaaggacagatcagcttttaatgaagggccgtgaagaagtaattgggtggctacatcagctaaaagcccgtgagcagcagctatcacaggagattgcctatcttcaaagggaactcaatatagttgcagcggctggtagatcccagggttcagtaggggtagatcctgatgttcttgctcaaagggatcgtaaccgtgatattctgcttcagaaacttgctgcgtcagttgaaagcagggataaagtattggtggagatgtcacggctgctgatattagaaagcaggttcggtcttggcagcaacttcaatatggaagatgctagggctagtctggaagccagttttgccaatgaagctgagattgtttttacaactgtgtcaagtagcgggcgtaagttattttcccgcctgactcatggctttgatatggttgttattgatgaggctgctcaggctagcgaagtaggagtccttcctccattggctcttggtgcagctagatgtgtcctggttggtgatccacagcaactccctgctactgttattagcaaagcagctggaactttgctttacagtaggagtctattcgagaggtttcagcaggctggttgtcctaccattttattgtcagtgcaatacaggatgcatccccagatccgtgaatttccatcaaaatacttttatcaaggccgtcttacagatagtgagagtgttgttaaattacctgatgaagcctattacagagatgcacttatggcaccttatatcttctacgacttgtcacatggccgtgagtctcataggggtgggtcatcttcatatcagaatattcatgaagcgcagtttgcattgcgtttgtatgagcaccttcagaagttcttgaaagctaacggtgccaagaaggtttctgttggtataatcacaccatataagttgcagttgaagtgccttcagcgggaatttaaggatgttatgaatactgaggaagggaaggatatctacataaatacagttgatgctttccaaggacaggagcgtgacataattattatgtcatgtgtccgtgcatcaaaccatggtgtgggtttcgttgctgatatacggcgtatgaatgtagctctaactagagctaggagagctttatgggttgttggtaatgctaatgctctcatgcagtctgaggactgggcatcgctaatagcggatgcgaaggccaggaaatgttttatggacctggattgcattcccaaggacttcttaccaatgaaggttccatctaatactccaggtaggaattcttccaacaacatccggaacatgaggactggtggtggacctagaccaagacacttggacatgttctcagaaccgagaactggtatgaacatgaggcccgatgaagatgagcgtctgaattctgttccaagaaatggtagttacaggaatttggatgattttgtccgacctggtgatcgtcccagggataatctgcagtttggagttcccaggaggccaaattcttctaatggcaggagagaagtgtaaggagtgtgttgctatctacaactctggtacagcatggaacaatggtgaagagctctgggacggtccagattcagcaaggtgcagattcatgttcagaagattagttgcctctgcattagatcccttgcaccatgtggtggggctggtcacaagaaagcattgctatcagcagaggatgtgcgaatctaccatgatgtgacctccagtcagtggatcaagacgctttcatggtgggtgattataggctcatgatgtcaggttgaagaaaggctgctgtagccctcagtgttatggagttcgcaggagtttctttctcagaacaaggctgtctgatgtgttttgacattgctatccttgctttagccagctccatctttcggtagatacatacatgcatgggcatatccattttgaaacatgccaggagaaagctcactggctctagagcagggagtacaggcaccctgaaatctgaagtgcgccttggatcatctctactttggcgctggtggttttgtggatgtcctctcagtgccactcccagaataccaggccagttgaagtcctcaagcttctgcttggattctagtgtcactctcaactcttgttatcttttgagaagagatcccctgggcccatgacgaactccaggaatgcatggttgcctgcatgatagatgtagagatggcggtcatatagttaaattacacgttctgccgtatgtatatgattttattggagctaatggattttttatctgctttgtttggagaaaaacatagtttgcatctatctctacacgacttgcttttgtaccggaggcacgcagcagcagggttgtatatgtccaacctctgatgggtctgcggtctgccgttgaaagaggggctttggagatctgaaggtattccacgccaggtgctcctgtaatgtgctggacttctgttctgccactttggttacgcagagctgatccattacaaatggtacttgtgatgctttgttgttagcttgtgagttgtctgtttctgcgcttgtgattcagtggccggcaagcgtttttttttttgactcggccggattgttcatcgatctatttttggatcttttattgctctggtgaaaacagctgggccccattcacaaggagacgcgccacaacgctccaaaggccaaaccagagattatctccgggttgtttacacattgaacttgtctttcaccttgaccttgtttatacatgaacccgcctcggatccgtcaccaggacacgccccctaacaagccaccgtaccatattatgccatcacgcggcggtagcggcaacacgcagcggcaacaggatccaactgtggtggtggtagcctttgcgcagccgaggaggagaacgagacggcgacgcgccattatgccggtgaagagcagcgccagcttccgcatgaccgcgctgcctatggtggtgacggcgcagctgctggcggctgccgtgctcacgctcacgctcgtctgggtgctgcactttcgtggtggcgtctcgtggaagccgacatccaaccctctcttcgtctacacggcacaccctctgttcatggtgatcggctttatcatctgcaccggagaagcggtgatggcgtacaggatcgtgctgggcccgaggtcggccaagaaggcggtgcacctgctgctacatctcgtagccctcaccttcgctgccgtcggcctgtacgccgccttcaagtttcaccatgacgtcggccttcctgacatccgttccctgcattcttggctcgggattgccacgatagcgctctatggtcttcagtggttgatggcattcgtgtactttgtcttccccggggctgtgatgacgatgagggcggactacgctccatggcacatcttctttggcctcgccatctttctgatggccatttgcactgctgagaccggactggccaagttcgtctccgccttcatcgcttacccaggcgaagtgtttgtcgtcaacttcaccgggatcgccatcctcatgtttggcgttgccgtcgtcttggctgtcatccttccgtcaagatactagcaagtgcttaacgattataagtccttccgatccatgcttcttctcaagtcatattgttttatttggactgtgcatgcatgctgaaatgattttgatatattgtttcatttacagagctgcatgctgctggcggtataagtttgatatatatatgatgatactagtaatgccatctaattgtcgttttaccttttaggcccctttatatgcaaaggggatccttcttcatgtcctgaacaaattgatcaattttttcttggtgaaacgtggcgcttgtgcattgtaatatgaaaaaaac

SEQ ID NO: 8713 - DNA, 7005 bp, Zea Mays
ctgccctcacacccacccttcctcctcctccctcctctctttctctcaccaagtcgttcgtcacgcagaggaccggacgctcgtgagaggcgagacgagcaatcgaaagccggaaggaagcctaacctctcttccaaagccaaaccgaaaagggaaaaaaagtattgtcgaagagaaaaggaaaaaaataataaaggaacacaagcagcccaccggcgcatcacaggggaagcaaacaggggagaaccctagtcaacagacgccgccgccctccctggctggatctggccgccgtctcctccgccgcccgacgatcgcctgggtctgcgtggatgctgagatcctgtatcactagaatccaaattcttgagatgggtaggaagtggacaacaagaggaggaaatggtctgggtcagaacgtgaaaagaatccagcggagaatgatattcagatgcttgtcccgacagaaaggcaacaataacttccctccattgggtgccttaatattcccggaaattgctactggttccactagttgaaagattcaatctatatgcatctacacatgacatgggttctcgaggaaggatgttatttgaccttaacgaactcccagcagaagttgaagaagcagcagctgctgtcgtgccaaaagaatctgctgctgttgtgccaaaagaatctgctgctgtcgtaccacaagaagctgttgttgtggcgttacaagaagctgctgttgtcgtgtcacaacctcagaaatcccttcgtgttccgacgacatatgccccaaccttgtttcagcgaggggaaggatcacagtcgcaggggatattgaacaataatgcctttaagcatgcatccattggttctggatttcagccttttgtgaggaacagcaaagattcaaacaatacaaaggagccgatgaaggtggaagataatcataattctagtatagcatcactgtccatggtaaacaatcagatcaccgacagtgctgcttcaaaggttgagacttgcaataaggtgtcacaagccattgaaagagaagaaggagaatggtctgatgcagatggcatttctgaaaatgcagggagtagcaacaaagatgagttcactggtaccgcaagcactaatttgaagaaagaatcccaagagagcgagccccatcttattaaatctggtgatgtgactaaagatgatactgctgcggaatgtagtgatgctgaaaaggttgatgcatctgaagatcgggttcacgggtccacaggatcagataacatgcaaaattctgaatgtaaaggaaatcagcctggtgatgatctagatctttgcaacaggtcaagggatgttaaaggagtcgaagccaattatgctttgaggtttgcgagcaaccccgcaaagaggcccaagttaaatgaacacaaagaggccatgttaggcaaaaaacgagctaggcaaactgtcttcatcaatgtagaggatgcgaaacaagctggtacaatgaagacatcaacacccaggaggcagtcatcttttccagcaccgattgttacacgtacagtgaaggaagcttctcgtggtgctggtgaaaaggctgcagaaaaacaaagtcagcaagcaatcagggatcagagacaacctgaaatgatgggatcagagcgaagcaattctgcagatcctagtgaccaatacactgaatccaatggtgatgctgagttgggtacccagggccggtcaaagaaaatgaatgcagaagatccagcctcagatgggtatcagcagcctgtccaaagacaagcttcattcaagcaatccatggacttgaagcaaccaaaaagccgatcattctcttcccaaagaacatttctaacaggaacaaacaatgctgatcagaagccagccagcaaaaggtctattatttccaaaaagcaaacttttgtaaacaatgtacaggattcatctgttgagcgacttataagggaggtgacaaacgataagttctggcacaatccagaggaggcagaacttgagtgtgttcctggaagctttgaatctgctgaggagtacattagagtttttgagcctttgctttttgaggaatgcagagctcagctttatagttcgtatgaggagagtcttgaggctgtgggaagggatgcacatgtagcggtccgagtaaaaactgtcgatagacgtgaaagaggatggtacgatgttgtcgttctaccgatccatgaacaaaaatggaatttcaaagaaggcgatgttgctattctatcgtttccacggcctggttcagctgcacaatcaggccgatctagtaggagagctatgggttcaaatgaggatgctgtatcagaatgtggccggcttgttggtactgttaggcgccacatgcctattgatacacgtgatcctattggagctattatccatttttatcttggtgattcatttgattctaacagtgaggctaatgttctgaataaactccaacctcggagtacctggtatctaactggacttggttctcttgcaacaacacaacgagaatatgttgctttacacgctttccgccgtcttagtgtgcagatgcaaaatgcaatacttcaaccaagtccagagcatttcccgaagtatcaagagcaaccaccagtcatgccagactgcttcaccccaaatttcgctgaccatctccatcgtagcttcaatggtcctcaattgtcggcaattcattgggctgcaacacatacagctgctggcacaaacaatggtgtcctaaagaaacaagaaccatggcctttcacgttggtacaaggtcctcctgggacagggaaaactcatactgtgtgggggatgctaaatgttatccatcttgttcagtatcaacattactatgctgctttgcttaagaagcttgctcctgaaagttacaagcaagttagtggtagcactagtaccagctcagagactgttgcagcagggtcaattgatgaactattgcagagcatggaccagaatctatttcgcactcttcccaagctttgccctaagcctcggatgcttgtatgtgccccatcaaatgctgcaacagatgagcttcttgctcgtgttcttgaccgtggttttatagatggtgaaatgaaggtataccgccctgatgttgctcgtgttggagttgattcacagtctcgagctgcacaggctgtttcagttgaaagaaggacagatcagcttttaatgaagggccgtgaagaagtaattgggtggctacatcagctaaaagcccgtgagcagcagctatcacaggagattgcctatcttcaaagggaactcaatatagttgcagcggctggtagatcccagggttcagtaggggtagatcctgatgttcttgctcaaagggatcgtaaccgtgatattctgcttcagaaacttgctgcgtcagttgaaagcagggataaagtattggtggagatgtcacggctgctgatattagaaagcaggttcggtcttggcagcaacttcaatatggaagatgctagggctagtctggaagccagttttgccaatgaagctgagattgtttttacaactgtgtcaagtagcgggcgtaagttattttcccgcctgactcatggctttgatatggttgttattgatgaggctgctcaggctagcgaagtaggagtccttcctccattggctcttggtgcagctagatgtgtcctggttggtgatccacagcaactccctgctactgttattagcaaagcagctggaactttgctttacagtaggagtctattcgagaggtttcagcaggctggttgtcctaccattttattgtcagtgcaatacaggatgcatccccagatccgtgaatttccatcaaaatacttttatcaaggccgtcttacagatagtgagagtgttgttaaattacctgatgaagcctattacagagatgcacttatggcaccttatatcttctacgacttgtcacatggccgtgagtctcataggggtgggtcatcttcatatcagaatattcatgaagcgcagtttgcattgcgtttgtatgagcaccttcagaagttcttgaaagctaacggtgccaagaaggtttctgttggtataatcacaccatataagttgcagttgaagtgccttcagcgggaatttaaggatgttatgaatactgaggaagggaaggatatctacataaatacagttgatgctttccaaggacaggagcgtgacataattattatgtcatgtgtccgtgcatcaaaccatggtgtgggtttcgttgctgatatacggcgtatgaatgtagctctaactagagctaggagagctttatgggttgttggtaatgctaatgctctcatgcagtctgaggactgggcatcgctaatagcggatgcgaaggccaggaaatgttttatggacctggattgcattcccaaggacttcttaccaatgaaggttccatctaatactccaggtaggaattcttccaacaacatccggaacatgaggactggtggtggacctagaccaagacacttggacatgttctcagaaccgagaactggtatgaacatgaggcccgatgaagatgagcgtctgaattctgttccaagaaatggtagttacaggaatttggatgattttgtccgacctggtgatcgtcccagggataatctgcagtttggagttcccaggaggccaaattcttctaatggcaggagagaagtgtaaggagtgtgttgctatctacaactctggtacagcatggaacaatggtgaagagctctgggacggtccagattcagcaaggtgcagattcatgttcagaagattagttgcctctgcattagatcccttgcaccatgtggtggggctggtcacaagaaagcattgctatcagcagaggatgtgcgaatctaccatgatgtgacctccagtcagtggatcaagacgctttcatggtgggtgattataggctcatgatgtcaggttgaagaaaggctgctgtagccctcagtgttatggagttcgcaggagtttctttctcagaacaaggctgtctgatgtgttttgacattgctatccttgctttagccagctccatctttcggtagatacatacatgcatgggcatatccattttgaaacatgccaggagaaagctcactggctctagagcagggagtacaggcaccctgaaatctgaagtgcgccttggatcatctctactttggcgctggtggttttgtggatgtcctctcagtgccactcccagaataccaggccagttgaagtcctcaagcttctgcttggattctagtgtcactctcaactcttgttatcttttgagaagagatcccctgggcccatgacgaactccaggaatgcatggttgcctgcatgatagatgtagagatggcggtcatatagttaaattacacgttctgccgtatgtatatgattttattggagctaatggattttttatctgctttgtttggagaaaaacatagtttgcatctatctctacacgacttgcttttgtaccggaggcacgcagcagcagggttgtatatgtccaacctctgatgggtctgcggtctgccgttgaaagaggggctttggagatctgaaggtattccacgccaggtgctcctgtaatgtgctggacttctgttctgccactttggttacgcagagctgatccattacaaatgctgggccccattcacaaggagacgcgccacaacgctccaaaggccaaaccagagattatctccgggttgtttacacattgaacttgtctttcaccttgaccttgtttatacatgaacccgcctcggatccgtcaccaggacacgccccctaacaagccaccgtaccatattatgccatcacgcggcggtagcggcaacacgcagcggcaacaggatccaactgtggtggtggtagcctttgcgcagccgaggaggagaacgagacggcgacgcgccattatgccggtgaagagcagcgccagcttccgcatgaccgcgctgcctatggtggtgacggcgcagctgctggcggctgccgtgctcacgctcacgctcgtctgggtgctgcactttcgtggtggcgtctcgtggaagccgacatccaaccctctcttcgtctacacggcacaccctctgttcatggtgatcggctttatcatctgcaccggagaagcggtgatggcgtacaggatcgtgctgggcccgaggtcggccaagaaggcggtgcacctgctgctacatctcgtagccctcaccttcgctgccgtcggcctgtacgccgccttcaagtttcaccatgacgtcggccttcctgacatccgttccctgcattcttggctcgggattgccacgatagcgctctatggtcttcagtggttgatggcattcgtgtactttgtcttccccggggctgtgatgacgatgagggcggactacgctccatggcacatcttctttggcctcgccatctttctgatggccatttgcactgctgagaccggactggccaagttcgtctccgccttcatcgcttacccaggcgaagtgtttgtcgtcaacttcaccgggatcgccatcctcatgtttggcgttgccgtcgtcttggctgtcatccttccgtcaagatactagcaagtgcttaacgattataagtccttccgatccatgcttcttctcaagtcatattgttttatttggactgtgcatgcatgctgaaatgattttgatatattgtttcatttacagagctgcatgctgctggcggtataagtttgatatatatatgatgatactagtaatgccatctaattgtcgttttaccttttaggcccctttatatgcaaaggggatccttcttcatgtcctgaacaaattgatcaattttttcttggtgaaacgtggcgcttgtgcattgtaatatgaaaaaaac

SEQ ID NO: 8714 - DNA, 4844 bp, Zea Mays
ccaaacccgagccccgaccgcccacctcgccgtcgccgccgcaggcgatcagccgccgccgcactaatccctgccttgtccttatcataaaaccgcggcgctggagctctgatgcttcccaccccatggtcttccacatttccctcgcccgccactggcttcctccttctccttgccctcctccccgtcgcatcggggacctcagtccctaccctaggaggtttcgatcgtggagaggcggccggcgcggacgcatattcgatccttacgtttcacgactacacgccgcctccgccccccgttctgccgccgccaccggcggccccggcggcgacctgcgcgggggacctccacggcgtgggagaccttgacacccagtgcgtggtccatgagtcggtgaggctgggtggtggggtgttcatcagtggcaacggcagcctcctaatccttgatggcgtcgcggttacctgcgagcggcctgggtgcgtcgtctctgccaacctctccggcgatctcctcctcgggaacaggtcccgcgtcgtggccgggtgggtttccctcgcggcggccaacatcacactcggcgaggacgctgttattgacaccaccgcgcttggcggtgacccgccggaccagaccagtggtgtacccactgggacgtatggggatggcggtggacatggcggccgtggcgccagctgcttcgttaagaaggggcaagcacaagaggactcatggggtggtgattcctacgcttggtctgcactgaagaccccaaataactatggaagcaaagggggatccactaccgtcgagaaggactatggtggtgggggtggcggtgtcgtgtggttgttcgctgaagagattgtgatgaatggaacagttcttgctgatggtggagacggtggcaccaagggtgggggtggctctggggggagcatctatctgaaggcttcaacaatgcaaggaggtggcaaaataagtgcttgtggaggcaatggtttagctggtggaggtggaggacgtgtttccatcgatgttttcagtaggcatgacgacacacaaatttttgtccatggggggaagagttcaggatgcttggacaatgcgggagcagctggaacactttatgaagcagtacctaagagtattactgttagcaacaataacttgagcacacaaacggatacagtttttctagaccccccatatgagccactctggacaaatgtttttgtcagaaattgtgccaaagtttctcttcccttacggtggagccgtattcagaatttgagctgttggctgaggaacttcttatgagtgattccacaatcaaggtctttggcgctttacgaatgtcggtaaagatgctccttatgtggaactcaagaatgactattgatggtggccgagaactaggtgtgggaacttcattactagaaggtagcaatttgatagtgctgaaggaagcatctgtcatacattcaaatgctaatctagggattcatggtcaaggagttctaaatttatctggtcaaggagatacaatagaggcacaacgccttattttatcactgttttacaacattttggttggacctggagctgttctaaggggcccacttataaatggaagtcgtgatgagatggccccaaaactgaattgcgaagatgagagttgccctatggaaatctttcatccacctgaggattgcaacttgaactcttcattgccttttactttacagatatgccgtgttgaagatattgatgtttctggccttgttcaaggaactgtagttaattttaacagagcaagaagtgtcactgttcagacatctgggaccataagtgcaacaggattaggctgccgaggtggcattggaagaggaaaaatgttaagcagtgggtttagtggtgggggtgggcatggtggtaaaggcggtgatggcatttataatggtggtcatgtagagggtggatctgcgtatggtcatgctgatttaccatgtgaacttggcagtggcagcggtaatgtcagtggatcttcaactgctggtggtggtataatagtgatgggttctttggaacaatctctgccgaacctctccctttctggctcgattgaggcaaatggtggtaattttactggtttgatgtctcatgccacaattggaggacctggtggcggttctggtggtacaattcttctttttgtgcggacattactcttgaagaaggactctgtactttctagtgttgggggagttggtggcaatggcagtggtggaggtggagggggtcggattcacttccactggtttgatattcccactggagatgattatattccttttgcaaccattaaaggaacaatacttgcaagaggaggagtcagtgaagggcaaggtttctctggtgagaatggaaccatcacaggaaaggattgcccaaaaggtctttatggaacattttgcaaggaatgtccctcaggaacatacaagaatattactggatcatctaagtccatgtgctcaccatgccctccaaatgagctacctcgccgtgctgtatacataagcgtccgaggaggtgttgctgaacccccatgcccatacaaatgcgtgtctgatagatatagcatgcctcactgttttactgcccttgaagagctgatatacacgtttggtggaccttggttgtttggtctgcttctgtctggccttcttgttttattagctcttgttttgagtattgctcggatgaagtttgttggtactgatgagttgcctggaccagcaccaactcaacagagctcccaaattgatcactcttttcccttccttgaatcactgaatgaggtattggaaacaaacagggcagaagaatctcactgtcatgtgcacaggatgtatttcatgggcccaaacaccttcagtgaaccttggcatctcccacacaccccgccagagcagatttcagagattgtgtacgaagatgcatttaacaaatttgttgatgagatcaatgctcttgcagcctatcagtggtgggaaggttcagtttttagcatcctatgtatactttcatttcccctggcatggtcgtggcaacagtggcgcaggagaaagaaattacaaaaactacgtgaatttgttcgttctgaatatgatcattcatgtttacggtcctgccgttcgcgtgcactttacgaggggctaaaggtagctgctactccagatttaatgctgggttatttagatttcttccttggtggggatgagaaaaggactgatcttcctcctcggcttcatcaaaggtttccaatgtccctgatctttggaggtgatggaagctatatggctccattttcacttcatagcgacagagtggtcacaactcttataagtcaggctgtgccatcatctatatggcatcgtcttgtagctggattgaatgcccagttgcgtttggttcgccgtggaaatctaaacacatcacttctccctgtgctcaaatggctagaaagtcatgcaaatcctgaattgaacacgtaccgtgtgcgtgttgaccttgcatggtttcaaactacagcattaggttaccttcagtttggtcttgtccttcatgctgtcgggggagtggtggctgctgaactccaggatggctgtacaagtaaaaccgatcagcattcagtaaaccagaatacatgcactgactctcaaatgggccactcaaggaccaatgatgttctgcgtaaaaggataactggcaccattctcaatgttgacaacttaaggatgcttggtggcaggagaggtttcttttaccttctctctcttatcttgcacaatacaaaaccagttggacatcaggaccttgtcggcttagtcatctcaatactgcttcttgcagatttcagcttagtcttgcttactttcctccaactatattcatattctatggtcgatgttctgttagtcttgttcattcttcctcttgggatactagcaccatttccagctgggataaatgctctttttagtcatgaacagcggcggtcagctggtcttgctcgtgtctatgccttgtggaatattacatcactggttaatgttgttgtggcttttgtatgtggatttctgcattacaagtcatcaagcaaaaaacatccaagcatgcagccgtggagttttggtggggaggaaaccagctggtcgctattccctataggacttgttctatgcaagtgcattcaagcaaggcttgttgattggcatgtatctatcttggagatccaggatcgtgcagtttatagcaatgacccaacaatattttggcagtgaaagcatttcgatttacaggagttctcatgaggagagcttaatgcaactcaagtttttgtgggagttgataaaaggaaggctatggagttagtctgttctttgtccgcccagtcaggggaagcatgtacaaagtagatgctggtaattgcctgcctatatagacttaatgacttacagtgcatggtcaaccttttgtccagtcactcacccagctttgttttccttgtacataggaaacgggtttaattagttgaccgattcgttgtaggatttaggatttagacaccatagaattatagattacccaaggtaatctcaaagagatggtggaaaacatatatacttcttttgtttaaagctttgtcttttgcattgatgttgagctgggaaacgggtgaggcatcaaatagagcttttttcccctctgttaagattaagacaaatgttaacgtgctgatgttttattcaagatctggttgccatatgttcccgtga

SEQ ID NO: 8715 - DNA, 2532 bp, Zea Mays
cagttactgtggacgatgttcgtttgtgtttatcattttcttggtcttgttcggggcaacaacgacattgggaataagtgtacggcagacaaacagtaacatgggaaggaaaggctcagaaatgtcaccaagtaaaaggtatcccttgaggtctccacatagtagtggtagagttcttcgctctgccttagccaatgataataaggacagtgagcctctgaatgctgctgctgctacccaagccgctgtgaaaaaaagaagtggcagtcagttggatagtcctaatagcagtgtcaggttgtttcactctacatcaaaaaataagaacgaggcatgtagcgggcctctaaatgacaggatccctgataagccagctgcaaataaaagaaaacgtgccagtccttcacaggtgggaagttccagcaacagtgtcagggtgcttcgctctgcaataaaaaataaagatgaggcatgcagtaaatctctaagtgacaggaccgctggtgagccagctgcaaataaaagaaaaaacgtcaatcgctcaaagacggggagtctgagctgtggtgtcagggtgcttctatctgcttcaaaagctaaggatgagacatctaccaagcctttaaatgatagtgctgctgttgaaccagcttcaggtaaaaggaaaggcaccagtccgtcaaaggtgggaagtgccagcaatagtgtcagggtgcttcgatctacttcaaaatataagaatgagacatgtactgagcctttaaatgatagtggtgctgttgaaccagctgcaaataaaaggaaaggtgtcagtcgttcaaagaagagaagtctcaatagcagtgtcagggtgcttcgctctgcctcaaataataagattgaggtatctattaagcctctaggtaatagtactgctggccaaccagctgcgaaaagaagaaaaagcggcagttccttcgaggcaggaagccctgtgagcagtgccagggtgcttcgctctacctcagaaaggaagaatgaggcatctaagcctttaaatgaaagtactgctgctcaaccagctgcgaggaaaaaaaaagctggggtaatttcaaagaccgacaatccaaagattggtctcagggttcttcgctctgcctcaggaaagaagaatgaagcatgtattgggcatgtaaatgatagtacttctgctgaaccaactgtgacaaaaagaaaccgcaagccttcaatggatcgcagtcccaagaaggactacttaaaaatttgtcaaagagttagatatattttgaatcgaatgaactatcaacaaacctttattcaagcttatgcaagtgaaggttggaaaggccaaagtttggaaaaaataagacctgaaaaggagcttgaacgagccaaggcagaaatcctccaatgcaagttaagaatccgtgaagcttttcgaaatatggactctcttttatccaaggggaagcttgaagaatctttgtttgattccgcaggagaaatttcaagcgaagatatattttgtgctgtatgtggctcaaaggatgttactttacaaaatgacatcattctttgtgatggagcctgtgacagaggattccaccagaactgtttgaaccctcctttgctaactgaagatatacctccgggggatcaaagatggctttgccctgcatgtgtctgcaaagcagactctatagatgcactaaatgaacttcaaggaagcaagctctccattcatgactcatgggagaaagttttccctgaggcagcttcaattgccaacggttctaaacaagttgatacttctgatctgctgccagatcatataaagcacagtgacaaccctgcattggttgaagggctgatggtgaatgaagtcaggctttctgcagaggatgacagcaaaggggatggtgacttcgatccgtcaggtccagattctagtgaagaccaaaaagatggattgaactcagaagagtcagatttcacatctgactctgatgatttttgtgctgagattgccaaatcttgtggccaggatgaagtctcggcatctccattatcaaatgtgataaaccatacttatagaatgaaactcagggccagcaacaaccgctctaatgaagaaaaccatgatcatgtatttatggacatggagctagggcaagacatggtgctaccagtttcaagcaggcggcaggtggaacggttggattacaaaaaactatatgatgaggcatatgggaaagaatcatctaattcaagtgatgacaaagagtggtctggaaaagaactattagaaggcagtgaaacagattcacttagtgagcgacctcatcctgtaaaacggtgctctagaagagcacaagcagagcagcagaataatgaacatacaccacagagggagcgccttcatggttctgaaagtgagcagaaaactggaattcttcgatccaatggcagcagtagcacaggacggaagtttggtcctgtagctacccagttatgccattggcactatatctc

SEQ ID NO: 8716 - DNA, 5176 bp, Zea Mays
ccagagaccagacccgcgagctcaccgctcagactttaccgccaagccttttgttcaccgttactccgttcaccccgcgaggcgtgactcgtgagctctccgtgtcttggcgatgactgggcgaccgacgatgcagccgtaggccaggggccccaggtcttcctctggtccttctccggcgaagagcaccggtcagttactgtggacgatgttcgtttgtgtttatcattttcttggtcttgttcggggcaacaacgacattgggaataagtgtacggcagacaaacagtaacatgggaaggaaaggctcagaaatgtcaccaagtaaaaggtatcccttgaggtctccacatagtagtggtagagttcttcgctctgccttagccaatgataataaggacagtgagcctctgaatgctgctgctgctacccaagccgctgtgaaaaaaagaagtggcagtcagttggatagtcctaatagcagtgtcaggttgtttcactctacatcaaaaaataagaacgaggcatgtagcgggcctctaaatgacaggatccctgataagccagctgcaaataaaagaaaacgtgccagtccttcacaggtgggaagttccagcaacagtgtcagggtgcttcgctctgcaataaaaaataaagatgaggcatgcagtaaatctctaagtgacaggaccgctggtgagccagctgcaaataaaagaaaaaacgtcaatcgctcaaagacggggagtctgagctgtggtgtcagggtgcttctatctgcttcaaaagctaaggatgagacatctaccaagcctttaaatgatagtgctgctgttgaaccagcttcaggtaaaaggaaaggcaccagtccgtcaaaggtgggaagtgccagcaatagtgtcagggtgcttcgatctacttcaaaatataagaatgagacatgtactgagcctttaaatgatagtggtgctgttgaaccagctgcaaataaaaggaaaggtgtcagtcgttcaaagaagagaagtctcaatagcagtgtcagggtgcttcgctctgcctcaaataataagattgaggtatctattaagcctctaggtaatagtactgctggccaaccagctgcgaaaagaagaaaaagcggcagttccttcgaggcaggaagccctgtgagcagtgccagggtgcttcgctctacctcagaaaggaagaatgaggcatctaagcctttaaatgaaagtactgctgctcaaccagctgcgaggaaaaaaaaagctggggtaatttcaaagaccgacaatccaaagattggtctcagggttcttcgctctgcctcaggaaagaagaatgaagcatgtattgggcatgtaaatgatagtacttctgctgaaccaactgtgacaaaaagaaaccgcaagccttcaatggatcgcagtcccaagaaggactacttaaaaatttgtcaaagagttagatatattttgaatcgaatgaactatcaacaaacctttattcaagcttatgcaagtgaaggttggaaaggccaaagtttggaaaaaataagacctgaaaaggagcttgaacgagccaaggcagaaatcctccaatgcaagttaagaatccgtgaagcttttcgaaatatggactctcttttatccaaggggaagcttgaagaatctttgtttgattccgcaggagaaatttcaagcgaagatatattttgtgctgtatgtggctcaaaggatgttactttacaaaatgacatcattctttgtgatggagcctgtgacagaggattccaccagaactgtttgaaccctcctttgctaactgaagatatacctccgggggatcaaagatggctttgccctgcatgtgtctgcaaagcagactctatagatgcactaaatgaacttcaaggaagcaagctctccattcatgactcatgggagaaagttttccctgaggcagcttcaattgccaacggttctaaacaagttgatacttctgatctgctgccagatcatataaagcacagtgacaaccctgcattggttgaagggctgatggtgaatgaagtcaggctttctgcagaggatgacagcaaagcggatgaccttggcttgccttcggaggactcaggggatggtgacttcgatccgtcaggtccagattctagtgaagaccaaaaagatggattgaactcagaagagtcagatttcacatctgactctgatgatttttgtgctgagattgccaaatcttgtggccaggatgaagtctcggcatctccattatcaaatgtgataaaccatacttatagaatgaaactcagggccagcaacaaccgctctaatgaagaaaaccatgatcatgtatttatggacatggagctagggcaagacatggtgctaccagtttcaagcaggcggcaggtggaacggttggattacaaaaaactatatgatgaggcatatgggaaagaatcatctaattcaagtgatgacaaagagtggtctggaaaagaactattagaaggcagtgaaacagattcacttagtgagcgacctcatcctgtaaaacggtgctctagaagagcacaagcagagcagcagaataatgaacatacaccacagagggagcgccttcatggttctgaaagtgagcagaaaactggaattcttcgatccaatggcagcagtagcacaggacggaagtttggtcctgtagctacccagaaattgaaggtacattttgagaaagatccatatcctagccgtgaaacgaaagagaatatatcagaagaactaggcttgacatttaatcaggtctccagatggttctctagcactcgtcactattcaagggttgcttctgccagaaaagaaatgcatcctgacggccatactagcgagaataatgataccacgactgtagatagcatgcaagcaaggcaacccaacactgtggtgatggaaaagttgactgggaatagaaatgacattgtttctgagaaaccgatggtgcagaacaatcttaaccaaggggtggcagaaaagttgactagggatagaaatgacattgttcctgagaaacaggtggtgcagagcaatcttaaccaatgtaataatgaagatatcccgctttctggaacagaaattgagatggagtcttacgaacaagaatcatctgaaagcagtgatgaagagtggtccacacttagcacaccacgaaaaacaaaattacaaggcaacgaaaaagtatcacttactgaatcactacgttctgcaaaacggtgttctagaagagcaccagctagggagcagaataatgaacatactcagagtgagcagcttcatggttctgcaagtgagcagcaagctagagagcaacttcatggttctgtaagtaaacagcaaactgaagttcttcgctccaatgtcagcagtggcgatgcctcaaaatgtcattttggccctatagttactcagaagctgaaggaacattttgaaaaagatccatatccttgccgtgcaacaaaagagggtctggcacaagagctaggactgacatttaatcagatcagtaagtggttctctgccacccatcattattcaagagatgctgttgccaagaaccaaaaatacccaggagaaaatactactgagaataatagtagcacaatctttgatggtatacaagtaatagaacccaattttggtttgatagataaaccagatgcagatacaaatgacatgatttctgaaaagttgatggtacaaattaatcttaacgaaggcattgaagaggatatcccaccgagccaatatactaccaggtgtgaagagaaattaactatgactcaagctgccatctcaagggaagctggacctccaggttatggtcctggagaaaactttcttcaggtcagttcaaggattactagctgtgagcagagtgtgataatggctcctagcgctatcgcaagaggagttggtccaccaggatatacgcctggagaacaccagggcaatggggctccatggaatacaagctatgagcgaagaccgtttacgagtcctacgactagctcaagagaagtcggacctccaggatatgggcctgaagaaaaccaaggcagtggcatttcctgtaatacaagcagagagcaaatattgtttatgagccctacaaccatctcgagagaacttggtccaccaggatatttgcccagagaaaaccagcgcagtgacacttcatggaatacaagctgtgagtcgggactatttatgagtcctgcgaccacctcaatagaacatggtccaccaggatatgggcctggagaaaaccaggagaatgacagtacaagctgcgagttgagaatgtttacaagtcctacaatcgtctccagagaagttggcccaccaggataccagcagggagtgtttatgagtcctaaaaccatctcaagagaagtctgtcctccaggatttgggtctggagagaaccagggcaacgacactacatggtacaaacagagcgcgtttacaagtcctacaaccatctcgagagaagtcggtccgccagggtatggacaggaagatcagggcaatggtggttcttggaacacgagttgtgagcagggagtgtttacgagtcctactagaggcatctcaagagaagtcggtccgccaggatacgggcccggggaaagtcagggcaataccacttcgtggatttcgacctgccagcagagaatgcttgcaggaatccagagaactggtggctcaaggagtatggacttggaagcctttccaccgggatacggacctggtggtgcttcagggagtgtcataagcccccaagctcggtctgcagagaatgtagaattttcggacgaggctagaaaaaaggctatacagcgggagctgagacggcggcagaagttcaggtgaagacaatatatccagtcttgatggctgaatgagtgggcgaccttagttgccatcaagcaaaacccttgttgtatcagctgcttatcttccttttacagacttgcttggtttgtcaaggatttcttatgtgaaccctcttgaacctgaagtattcaatgcgctgtgaatttgtgcagttgcctttcttctgcatgatagtacatgttatctgggttgcacggcat

SEQ ID NO: 8717 - DNA, 5206 bp, Zea Mays
gagaccagacccgcgagctcaccgctcagactttaccgccaagccttttgttcaccgttactccgttcaccccgcgaggcgtgactcgtgagctctccgtgtcttggcgatgactgggcgaccgacgatgcagccgtaggccaggggccccaggtcttcctctggtccttctccggcgaagagcaccggtcaggtcctgacacatctattttgactggataacaacgaaggtttctctgatattctgatgttgtagcagttactgtggacgatgttcgtttgtgtttatcattttcttggtcttgttcggggcaacaacgacattgggaataagtgtacggcagacaaacagtaacatgggaaggaaaggctcagaaatgtcaccaagtaaaaggtatcccttgaggtctccacatagtagtggtagagttcttcgctctgccttagccaatgataataaggacagtgagcctctgaatgctgctgctgctacccaagccgctgtgaaaaaaagaagtggcagtcagttggatagtcctaatagcagtgtcaggttgtttcactctacatcaaaaaataagaacgaggcatgtagcgggcctctaaatgacaggatccctgataagccagctgcaaataaaagaaaacgtgccagtccttcacaggtgggaagttccagcaacagtgtcagggtgcttcgctctgcaataaaaaataaagatgaggcatgcagtaaatctctaagtgacaggaccgctggtgagccagctgcaaataaaagaaaaaacgtcaatcgctcaaagacggggagtctgagctgtggtgtcagggtgcttctatctgcttcaaaagctaaggatgagacatctaccaagcctttaaatgatagtgctgctgttgaaccagcttcaggtaaaaggaaaggcaccagtccgtcaaaggtgggaagtgccagcaatagtgtcagggtgcttcgatctacttcaaaatataagaatgagacatgtactgagcctttaaatgatagtggtgctgttgaaccagctgcaaataaaaggaaaggtgtcagtcgttcaaagaagagaagtctcaatagcagtgtcagggtgcttcgctctgcctcaaataataagattgaggtatctattaagcctctaggtaatagtactgctggccaaccagctgcgaaaagaagaaaaagcggcagttccttcgaggcaggaagccctgtgagcagtgccagggtgcttcgctctacctcagaaaggaagaatgaggcatctaagcctttaaatgaaagtactgctgctcaaccagctgcgaggaaaaaaaaagctggggtaatttcaaagaccgacaatccaaagattggtctcagggttcttcgctctgcctcaggaaagaagaatgaagcatgtattgggcatgtaaatgatagtacttctgctgaaccaactgtgacaaaaagaaaccgcaagccttcaatggatcgcagtcccaagaaggactacttaaaaatttgtcaaagagttagatatattttgaatcgaatgaactatcaacaaacctttattcaagcttatgcaagtgaaggttggaaaggccaaagtttggaaaaaataagacctgaaaaggagcttgaacgagccaaggcagaaatcctccaatgcaagttaagaatccgtgaagcttttcgaaatatggactctcttttatccaaggggaagcttgaagaatctttgtttgattccgcaggagaaatttcaagcgaagatatattttgtgctgtatgtggctcaaaggatgttactttacaaaatgacatcattctttgtgatggagcctgtgacagaggattccaccagaactgtttgaaccctcctttgctaactgaagatatacctccgggggatcaaagatggctttgccctgcatgtgtctgcaaagcagactctatagatgcactaaatgaacttcaaggaagcaagctctccattcatgactcatgggagaaagttttccctgaggcagcttcaattgccaacggttctaaacaagttgatacttctgatctgctgccagatcatataaagcacagtgacaaccctgcattggttgaagggctgatggtgaatgaagtcaggctttctgcagaggatgacagcaaaggggatggtgacttcgatccgtcaggtccagattctagtgaagaccaaaaagatggattgaactcagaagagtcagatttcacatctgactctgatgatttttgtgctgagattgccaaatcttgtggccaggatgaagtctcggcatctccattatcaaatgtgataaaccatacttatagaatgaaactcagggccagcaacaaccgctctaatgaagaaaaccatgatcatgtatttatggacatggagctagggcaagacatggtgctaccagtttcaagcaggcggcaggtggaacggttggattacaaaaaactatatgatgaggcatatgggaaagaatcatctaattcaagtgatgacaaagagtggtctggaaaagaactattagaaggcagtgaaacagattcacttagtgagcgacctcatcctgtaaaacggtgctctagaagagcacaagcagagcagcagaataatgaacatacaccacagagggagcgccttcatggttctgaaagtgagcagaaaactggaattcttcgatccaatggcagcagtagcacaggacggaagtttggtcctgtagctacccagaaattgaaggtacattttgagaaagatccatatcctagccgtgaaacgaaagagaatatatcagaagaactaggcttgacatttaatcaggtctccagatggttctctagcactcgtcactattcaagggttgcttctgccagaaaagaaatgcatcctgacggccatactagcgagaataatgataccacgactgtagatagcatgcaagcaaggcaacccaacactgtggtgatggaaaagttgactgggaatagaaatgacattgtttctgagaaaccgatggtgcagaacaatcttaaccaaggggtggcagaaaagttgactagggatagaaatgacattgttcctgagaaacaggtggtgcagagcaatcttaaccaatgtaataatgaagatatcccgctttctggaacagaaattgagatggagtcttacgaacaagaatcatctgaaagcagtgatgaagagtggtccacacttagcacaccacgaaaaacaaaattacaaggcaacgaaaaagtatcacttactgaatcactacgttctgcaaaacggtgttctagaagagcaccagctagggagcagaataatgaacatactcagagtgagcagcttcatggttctgcaagtgagcagcaagctagagagcaacttcatggttctgtaagtaaacagcaaactgaagttcttcgctccaatgtcagcagtggcgatgcctcaaaatgtcattttggccctatagttactcagaagctgaaggaacattttgaaaaagatccatatccttgccgtgcaacaaaagagggtctggcacaagagctaggactgacatttaatcagatcagtaagtggttctctgccacccatcattattcaagagatgctgttgccaagaaccaaaaatacccaggagaaaatactactgagaataatagtagcacaatctttgatggtatacaagtaatagaacccaattttggtttgatagataaaccagatgcagatacaaatgacatgatttctgaaaagttgatggtacaaattaatcttaacgaaggcattgaagaggatatcccaccgagccaatatactaccaggtgtgaagagaaattaactatgactcaagctgccatctcaagggaagctggacctccaggttatggtcctggagaaaactttcttcaggtcagttcaaggattactagctgtgagcagagtgtgataatggctcctagcgctatcgcaagaggagttggtccaccaggatatacgcctggagaacaccagggcaatggggctccatggaatacaagctatgagcgaagaccgtttacgagtcctacgactagctcaagagaagtcggacctccaggatatgggcctgaagaaaaccaaggcagtggcatttcctgtaatacaagcagagagcaaatattgtttatgagccctacaaccatctcgagagaacttggtccaccaggatatttgcccagagaaaaccagcgcagtgacacttcatggaatacaagctgtgagtcgggactatttatgagtcctgcgaccacctcaatagaacatggtccaccaggatatgggcctggagaaaaccaggagaatgacagtacaagctgcgagttgagaatgtttacaagtcctacaatcgtctccagagaagttggcccaccaggataccagcagggagtgtttatgagtcctaaaaccatctcaagagaagtctgtcctccaggatttgggtctggagagaaccagggcaacgacactacatggtacaaacagagcgcgtttacaagtcctacaaccatctcgagagaagtcggtccgccagggtatggacaggaagatcagggcaatggtggttcttggaacacgagttgtgagcagggagtgtttacgagtcctactagaggcatctcaagagaagtcggtccgccaggatacgggcccggggaaagtcagggcaataccacttcgtggatttcgacctgccagcagagaatgcttgcaggaatccagagaactggtggctcaaggagtatggacttggaagcctttccaccgggatacggacctggtggtgcttcagggagtgtcataagcccccaagctcggtctgcagagaatgtagaattttcggacgaggctagaaaaaaggctatacagcgggagctgagacggcggcagaagttcaggtgaagacaatatatccagtcttgatggctgaatgagtgggcgaccttagttgccatcaagcaaaacccttgttgtatcagctgcttatcttccttttacagacttgcttggtttgtcaaggatttcttatgtgaaccctcttgaacctgaagtattcaatgcgctgtgaatttgtgcagttgcctttcttctgcatgatagtacatgttatctgggttgcacggcat

SEQ ID NO: 8718 - DNA, 1267 bp, Zea Mays
ccacttcactgcctccatccgttgcaaatcactgcctccagcgcccactcgacccctccatctctgcaatggtggccggtggtgcggtgaaaggagatgacgatgtgcagcttccatgcgggcgcggggaagatgacgtggtgaagaccgccagcctctacaccgtctccagcaaatgtcgatgccctggccatggtgaacaaggtgatccttgggcaagcaaggtgtcttctactgaaggtaaaggacaacagaatgattcttggtcaagtaagatgacttctcgtggtgctgaggataccagaggtggctgggacagcaaggtgaaaggctcttcctgcaatgatgggggcattagcataaatcatatgaaggaagtagattcacatgcacccgtgaagcagaagctacaattatttccaataaatgaagctactcttaagccatttgagaaggttgatttattagacagccctattgccagactacctgacatagagaccacaacacttggagccacatatgttgctagcttagatgcaggagtttggaccaaggaacaagtatttgcaggttagcacaaggagaacgcgacaatctttcgcccaaaactggatgaggtgcacaagaagagggctgattcatggtacaagacggtttcaagatcattcgatttggctgacctttctctgtaaatgtttcttgtcggcattgatctatctgtttttggaagatgcaaatgaataaattggtctttgctggtactattcttaactacttgttatttacggtctttacaaaagcgagtacaagaatatcctcaaattttcggcaggaagtatttttctagaatatttatgtgtgcttccatagatttgaatggtttgcatagactatcccatcaacatagacaattggagaagctcaatttccgatctgcagctttgctagagaattttgcgtatgcattagttattgcatccgagaaaaaagacttagggtacataagccttgtactttgtcaatattaaaagtaggtcttggatgagcaatatgacagaagcaacatttgtgacctaattttcctgctcctgtttttgtcttgcatggacaacaagtttggctctttggactgacacaattagctcgagcagcccacgcaacacctccatcgggtcacttagagacacctccctcctctcgagttgcgttgccgctgtccctcccctccctcgttggcacctaatcttatcaaaataaaccatat

SEQ ID NO: 8719 - DNA, 3215 bp, Zea Mays
ttccacgagacccacacgtttctttaccctaaccttttcaatgctccagcgaaggaacagtcgccgccatttcttcccatctccatcttcctcgcagcttcgacgctccatcttccgctccctcccttacccgcggtcggcacgcaggcgacgccggcggcgctcaggctcgggctctcatctactgcgtcagcagcttcccctcccgcatctcgccagtcgcctcgcgctctcacctccggtcttccgcacactggccggtgaccctgccttataatattctgccacatcactctgggtgaagcaagattggtgctctttaaatttggaacttggaacatggagcatgtgctgattagtagaaggtttccaactgatcctgctctctaaatttggaacatggagcatgtgctgagtagtagaaggtttccaactgatcccaatgagtataagttatatgaggaaattggagatggtgttagtgccacagtataccgagctctttgtgtcccacttgacatcttggttgccatcaaagtgcttgaccttgagaaatgtaacaatgacctggatgggataagacgggaagtgcaaactatgagtttgattgatcacccaaatcttcttcgtgcatattgctcatttacaaatgggcaccagctttgggttgtcatgccttacatggctgctggatctgctctccacattatgaaaacttcttttccagaagggtttgatgagccagtcattgctactcttttgcgtgaagttttgaaagctcttgtctacctacattctcaaggacatattcacagagatgtcaaggctggaaacatcttaatagatacaaatggggctgttaagctaggagactttggtgtgtcagcctgtatgttcgatactggaaataggcaaagagcaagaaatacatttgtagggacgccttgctggatggctcctgaagtcatgcaacaactgcatggttatgattacaaagctgacatttggtcctttggaataacggcattagaactagcacatggtcatgctccattttcgaagtaccctccaatgaaggtgttgcttatgaccttgcaaaatgcaccaccaggtttagattatgagagggacaagcggttttcaaagtctttcaaggatttggttgctacatgcttagtcaaggatccacgcaagcgtccttcgtctgaaaagctgctgaagcattctttctttaagcatgctcgctcagctgaatatctggcacggagtattcttgatggcctccctccattgggtgaacgctttagggaactgaagagcaaagaggctgagttgcttctcaataacaaacttggtcaggagagcaaggagcagctatcacagaaagagtacataaggggcatcagtggctggaacttcaatctagaggacttgaaaaatgcagctgcccttatagacagttcaaatggcacttgttatttagatgtcagggagaacagagttaaggatgactcacaagaagcttacaatggtccagaacatatttaccaggaaaggctcaaccatgttgcttctagaaggcctgaagaggatgagatacaagaagttgaagccttgaatgatgctgtctcctcttcgttttcaagccgctcccttgaggcactaaaatcttgctttgatgtttgtggtgttgatgatccgagcccaactgctactgattcaagagcgcaaccaagtgtcggaactttacctttccagcagttgcaaaaatttgagcattgtaaaagtggcgactgcaatggtgaaagcttggaaagaagcgtttctgtacctacgaatctggtcactagtggataccacaagcattcaagtggttctcttatacctgagcaagttctttctccctacttgagcagtgatttggaaagggatggatttcgtcagaaaaacttaagcagcaggaactgtagtggccctttattgttccgccaaatgaaggattcacgcacacatcaatctgttgcgccagacgagtcgtcggaaggaaaaattatccgtcgaagggggcgcttccaggttacatcagatagtatttctgaaaaggtagctacatcatcctgcaacagcagcaggataaatctaccaattgatgcagcacgttcaagtcccaagttgtctgcaattcttccaactttgcaattcttgatgaagcagaatactatgcaaaaggaagtactcagtaggctgatttcttcaattgaggaaacatctgatgattctgaagcaaccggaagcagttcatatcagtcttctggagggcctgcccgagaaaaggaattgcatttgtatgttctccaattgcagcgaagtgtcaccgaacttgctgaggaagtgcaaagattaaagctccaaaacaataagcttgagcatcagatcaatatattgtcaagaaaagatgaaaggtcgtcaacgcaagataactgacaatgatgatatgccccttctaccacattgtaattcgattacccaattttgctttgttagaaagttatttttattccctgcagtcagagttgtatcattgtaagttgtaagtatttagcgaagtgtgaaatcatagtaattttgatctgtacagctttgtttggttaaccatgaagatatagttcttgtgttataagtaatgtgctgataatattgttttgcgtggaagtttgtgaaagtttatctgagcatggaacattgtgttgcgtgaagttggttggagtagtatttgcgctggcagtggtgttggatccgacatagggaacagctaaggatatggaattatgttttttttaggaaatggaaaagttcaggcctctgctcttacacgcaacgagtcttacaagtttgttgctcaattgctaatcaagaatagacgggaaatgaacataataaacgaaagtgaagctgtgatccttcgaggctgaggtatacaacaattgagaatgttgtggtagttggaggattttgtatagccattgtactgcgctgtcaaatagaatcttttgtctagtaactagcattcatgtttgtcgtctcttatctagacgccactaaaaagatatgttctgtatctgcggctaaaattgtggtagcccctaccaaaccgttgccgaagtttttttttgttaatcacctctgtatcaatactgctagtgctaggtttgggg

SEQ ID NO: 8720 - DNA, 882 bp, Zea Mays
ctacctctctagacaaccgaaacagccctccctaccgaaacagcttctcatgttgtacatgccctaaaactgattgcacatcggtcgttgaataaaagggcaatcatctcagcgcagagctcgagcccgcagcctgccatcacctaccaaatccggcgggcgtccagcggatctccatctggtcggcgtggatcggatcttcggtggtgtttctcgtcttcacggcgattagtggcggcgagccgaccacgtccccgcagcagcagtcagcggcggcttgacgcggtcggacgggtacctctagttggcatcagcgagtgggcgcggggcgccgcaagtctcaccgtccgctggtgtagaggccccgagtctcggcgctatggagtgtaggccgcgtgtctccgcttagggagggccaggggtcaacaaagggacttgtcaagtgacaacatcgcggccttcgggtgttggaggtgtccggcctgttggtgccgtaccacaggattggttcattatttgtgggagatctatatttgtcttaccattctgttcccgcttctagtccccaaatcttcacgggctttgccagatcgctggccatctccttggcagccgcttccgctgtcgccagccatcaccaacctgcgcctcatagtggagcccaggaaaggcggtgggactgagcgagggaagaggagatgactagcttgtcgatcacggtgatgacgctgaacctgcatgaaggcgaacagccgagcgagagccccaacagctgggagaagcgccgggacatctgcgtcagcgtcatcaccagctactctcccaccatcctttgcacccagcaagatctagcctgcaccaaatcgcttgggagcaagtgag

SEQ ID NO: 8721 - DNA, 1473 bp, Zea Mays
tccctctaagccaaaggtcttggatttgacgtagcctagtgcacactggtctgtccttttacaagtcagaaggtagcctagtgcacaacaaaggtgtttcacaatctgctggcttctggaggggatactgtaccttggctttgagccttctgtttctgcctcagtgagccccactcaatggcctcggctacagctttttgacgattgtatgcatccttatcttgcttagcgctaccggttagtgagggatctccaactttcatttggagtatagggccagatttgtgtttatagccagcaggcatttctgcaaggaatcccagggccacaacagcatcactcatgtaaggccggactgaggcttcctcttgtaggcacattgctgccacacctaccgcctggctcaagtctttttctgggtactcacctctaagatgagggtctactagctcattgtacctcttcctgtctctcagcatgggcttgacctgttgatctaggatttgttcacttgctggcctggaggtgtccactgctcttcttcctgtgatcaactctagtatgaaaaccccaaaactgtacacgtcagtcttgacagttagttggcctgttcttatgtattccggagcgcagtacccatatgttcccatcacccgagtggagatgtgtgtctttccctcgactggaccaagctttgcaagcccaaaatctgagagcttagggttgtacttctcatcaaggaggatgttgggggacttgagatcccggtaaatgacaggtgggttcgccttctcatggaggtattcaagccctttagcagttccatgagctatcttcatcctgagataccaactcagcggcacttgttcaggagtgctcaggtgatctgcaagtgagccaagtgccatgtactcgtacaccagaagcctttgatctccatctgcgcagtagccgaccaaattgactaggtttggatggtgcaatagactgagcataaggacctcaactaggaactctctgttgccttgatacccattcaggtctagttgcttgacagcaacaagctgttcatggaaatcgaaaacaagtcagccactgactactgtagatgaattagcaagtgtatgtacctacaattttggaatgcctttctgtgtggtgtgtacctgtccattttcaagcttgcccttgtataccctgccaaagcccccttctccaagaaggcagtcggaacggaagttctttgtggccgtggctagctcacggaatgtgaacgcttttgcggttttggcaacggaacagcttcctttaggaggctcaatgcttgctgccgtttcagatgatggcttgtgcttgtgctttgaagtgaccagtgatggcctgatggaccctgcaaagtttgaacagtgcaaaacatgctaattcctgggaggaacgtcttaccagattccctgggaggcgcttcattctggc

SEQ ID NO: 8722 - DNA, 3447 bp, Zea Mays
ccggacccgggcccggcccggaacaaccaggtgggtgcagcacaccggctgccttggggcggtcgtggtgggcaacgcgaggcggctgaaactgacacacacagacacactctctccctcttcctcccctcgctctcttgcagtcttgctcacacagcacatagcacacacacgacacgctgcgagaggggtaaagaacttagaagggcaggcaggagaagcgacacaggaaactgacgtcgccttcggcggcctgctacttaaataaatcccctcgcctcgcctccggctgcctcttccctttttccttccgcgcaaatcactcaggtgccagttgcgcggcggagatcgcgacgaattccggacggcagggaggtggtcgggggaactgggaagtgcatgtgagatccgatggcggcggctgcctgcgccggtgcggaagcaggacgcggatgcggagggaaggacgcgctgttcgtcgagctgtggaaggcctgcgcggggccgctgtcctgcgtgccgccgcttggggagaaggtctactacctcccgcagggccacatcgagcaggtggaggcatcgacgaaccagcttgccgagcagcagggcacgcccctctacaacctgccatggaagattccctgcaagctcatgaacatcgaactgaaggttgagccggatactgatgaggtgtacgcccagctcaccctgctccctgataagaagcaagatgagaatacatctacaacagtggaggaagaggaggtggtggtgcctcctgcgctaccagccacaaatgagggtcctcacatccattccttctgcaagacattgactgcctcagacacaagcacacatggtggtttctcagtgttgcgccggcatgcagatgagtgcctcccaccattggatatgagtcaacatcccccaaatcaagaattggtggccaaggacctgcatggggccgagtggcggttccgtcacatctttcgaggtcagccacggagacatctcctgcaaagtggttggagtgtttttgtgagcgccaagcgtcttgtcgcgggggatgccttcatatttctcagaggtgagaatggggagctccgtgttggagttcggcgtgcactgaggcaccaaaccactatcccatcttcagtcatatcaagccacaatatgcatcttggtgttcttgcaacagcatggcatgcagtgaacactgatagtatgttcactgtctactacaagccaaggactagtccagctgaatttgtggtttcgcgagataggtactatgaatcactgaaacgaaattattcaatagggatgagatttaagatgagatttgaaggtgaagaggcagcagagcaaagattcactggcacaatagttggaataggtgcttctgatccatctggttgggctgactcaaaatggcgttcccttaaggtgagatgggatgaaccttcttctatttctcgtcctgaaagagtttctccttggcaaatagaaccttctgttagcccatgtcatgtgaaccctcttccagttagattcaagaggtctcgatcaagcgttaatgctttgccatctgacgtgtctactgtaaccagagaagtcacttctaaagtcatggcagactcgcagcaaaatagtctcacaagagccttgcacaatcaaggaaggacacaattgacagttcgataccatgataacagtgatgtgaagactactcaggatcttaccgtgtggtcttcaggaactgagcaacagagaaacaatattgctgcccagacaaagctatgtctggagggttggacgccaactagaagtcctgaaggctacaatcagatattctcggcatttaaaccactgaaagatatacataacccacttggtccttttcctagtcaaatatctgggactcactcaaatagctgggacacagctgatgctcgttatccagtccaacaagctaattacagcatgttacctggcacatggtctttgaggcctcataacagtggttttaggatgaatcaacaaaattatctagtgatgcctgaaggtgcaaattttacggggaaatcagctttcacttcacttcaggaccatggcactgataaatgctccacaggctgctttggtcatattgagtcaagttcccacacagaccatgcatcctcaagtttgatcaggccccagcctttggtccttggaaatggtgttcagaaaagcaaaggcacttcatttaaattatttgggattccccttggcagcccagaaaaatctgaacctctggtatccccaccaagtgtcgcatatgacgggaaacttcaaacttctccatcagaaaaagggaatcagctagacgtagttgaagtggataattgttctcatccttctaagactgtgaagccacttgatggtcctcagtcagattctattacagagaataatcagccttctccagaagctacccttaatatccagaacaaagtgcaaagtagttccaccagaagctgcaagaaggttcataagcaaggtagtgccctcggcaggtcgattgatctaacaaagttcgcttgctatgatgagctgattgctgaactggatcagatgtttgacttcgatggtgagctgaagagtccatgcaaaagttggttagttgtctacactgacaatgaaggcgatataatgctggttggtgatgacccctggaatgaattctgcgatatggtccacaagatcttcatctacacgagagaggaagtcgaaaggatgaacccaggtgccctgaactcaaggtctgaagatagtctatctgactcgctgggaagaggggtagcttccagagatccccgaggaggcgggtctacttcggctctcgattccgagaactgctagtttgttcagtcagtgaggcctttggaagtgaagcagacaaaaggcgtgaatcttgcggtgtagagtgtagttggtacattgtgtgtatgcctccgggtaagccctgcggtacccagtttgtgtcctggcgccagtttaccatttaagctaagtttttgggtgtgccctgtgctggggtctgggctctagttattgtagcagagcaggcaatgcatgcaagaaactgatgatgcgcctgtttggccctctttcccttcccaagccatgtaaatagccttggctctgaagcgtagtattgtattgtcgacagccgtacttgagatagtactccaagaggcgcgcttgctcctgtcagttgggtgtgcgtatgtagatgtgcgtgtgaagccatgcaagcaagggtttgtggggttgatggcttttcatggtagcggatctgctttcatggtactgacgtgcaggtggcaggctggtgttggctgctatgttttgctgcacgatattggcagaaaacagtagtactaaggggtgtttggtttctag

SEQ ID NO: 8723 - DNA, 1626 bp, Zea Mays
caattagactgtggtcaatcttccccgctagtccttgttcaccttctccggcggcagcctccaaaccaccctcgcgctctaccactccggtcgtgtagctccccagcaggcaaccaccatcgcgcacccaccggccaccgcgtctacatttgccaatctctgcttgaagcgttctgcccactctttcaaccgagaagttcactattatcctgcgcatgttccctttccccctttcgtcgtggcacgcacgttaggagttcgaccgattgccggaacgtcttccgccgtcttctgcgccatcgaaagagcgatgaggtttgtggtgacgaaagtttgcagcggcggagggaaggcgcgggcgggtgcgctccatatagccggcgccggcattggcattgagacgccggcgctgctgctgtccactctatagaaggccctccagtgaagacaatatcagctattaggggtttgcacggtatgctgggtttacctgatcacattcttgtagcggcggcaagcgattctattgagagtctgccatcatgtgaagccaccaacaaatttggtgcctcctttgaaactccttcgggtcgtagactggtaaaaccatcagactatatggagttgatttcctgtatgaagcctaatatatgggccagtttggcggatgaggtaccagcttgggtgactgagaaacgaaacaaagtctctgttgacaggacattgcggtggcttgatgcatgtattgctttggatgtggcttctgggactaatagttttggtgtaattgtgggaggatctagcttagaacagcgaaagctatgtgccactgaagtgtcgaagcggaatgtttcaggcttttggattgcaggatttggctttggagagagtattgaagaacgttgcactttgctcaatgccacaacagattgcttgccacgggaaaaacctcggctcgtatctaggcttggtcttctagaggaggtcttggagggtgtggctgctggtatcgacctttttgactccacatacatttaccaacttactatgggtggtttcgcactgatcttccctgttgacatggttgaaagagaaatgcagaatggtgtactcaacactactgatggcgattcaacaaagattaacctgcgtgctacaacatatcggaaggatacgtcacggctagttgatagctgtaattgcttcacatgccaaaatcacacccgtgcgtacctcaatcatttgctcaatgtccatgagatgttggctcaaattcttctggagatacacaatacccatcattatcttcgtttcttccattccatacgggaggcgatcaaggttggagagtttgatcttttccgacaggagttcgttaagaagagacgcacccatttcgctgctgttgtggtctagacgtgaccaagagttcatctggctgtcctcacaagattaacttatcaattaatcagacttgtgtacacctgaatccttactagtcaactttcacgtctatgattgacaagtctgaaaagattcatacattaagtgatagaagttgtgtgctaaacaactgatgcattttcttcattggaaaattaattaccattccttgttacctgattt

SEQ ID NO: 8724 - DNA, 2646 bp, Zea Mays
cgggatctcatgaagaaattggtgcatctcaaatgaacaacggcccagaagacatgttgccaaagggtggaatgcgattttactctgagcaagatgcatacgccttttacaaagcttatgctggaaagattggtattagcattcgaaggaatgtccgtcattatacggggacttcttccacaataaagaccagaatgttctgttgcttccggtgaagatgctgaaggtcatttcttacatgttgcagagtgtggaaaaaccttgcaatgaaatggaaaaatgttttgaaggaaatggcaccgctgaggtccacaggcagattctttcaacgccatccttcagctatctgcttactgattttcctacttgtgttgtacaagtacttcttcggctggttcaccctcatcgtcaccacatcacctatcttcctaatcgctggcatctttcttggaatcgtcctggtgtacggtgaaccgaacaaccctgaaaaagatcatgtctacaaaaaaaatgataatactcggagtttgaatatccatgatagcagcaaatctattaggggtgtacctcttcctagaattccgtctggtgaagagagagcgccgaagcacaaaaacagtgttaagaaaattaggaagcagtctcgtggtgtagcctcttcttctgaaccaggatcaagtgaatcaggtggttcagatactgatattgctccaatgctccatgcatttcatcatcttaggtcgggcagcaattcgtcaaattcctctcaagatggtgactctgacagtagcaccgaagatacaacagagaatcaacagggcaacgacggcaggatatcccgcgaggggaaacaacatgttaaagttgttgcatggactgctgatgaccagaagaacataataaaaatcgggtgcttggagattgagcgtaaccaaaggttggagaccctaattgctaggcgtcgggcaaggaaatacgcagacaggaacttggcagagtttggcagcactgattccttacccactattgaagagctatcaaagttcaatgttcaaattcctgctgtttttgctcctaggaaaaatccttttgatcttccttacaatgaagataacttcccagattctgctccatctgcagtgttggaaacgagatacccatttgatctaccaagtgagcaagcaaacgagagcagctcttatggagccaactcaagccatgatgaacctattcccgtagcatgtcatttacagagtgcactgttgaggaggcatgagagcttcactgaaggagcaccattccttagtgactttttgcaagatacacagccttcccgattcagaccatacttcatgacggaaaaaatggctaacgaggaaatgacagatccagttcttgaaggagaaactagtgaaaagagcaactctaaggccagctctgctcaagactcggatagtacttcttcagttgctgaccaagaaagccagaaggatgttctagaggattgctcaaaccaaggacaacaatcttctttcagtcaaacagaggaacatgcacatatagctcggcatgcaagggaggtttctctttcccttgacatggaaccacctgtcttaattagtgattcctctgatgatgacatatcactgtctggtgaacatataaatgattgggaggaagcacaacagagtgaaaattttagtttgtcccagaatacatggcaagaggatcctaatgtcatgcaacaccatcaagaaatagatatcacaagcaatggattgaatcaaatgtcaccacattcgaatgatcttgagttgacgtcgtcatcaactgaaactactgatgatccttttgaagtgaatgacattgaaccaccagctaaggaagtggtggtcgttgatgatacccacgttgtggatcctgtatatgattcaagtccttcgggaagcgagaggcctgcacctactggtttagtaattgacggacctgtcctaaaagatggtcatgcttgtactcttgttgttgaagcaaccatcgaagaagggggttcatcatcaagaatggaggtttcttccagtgaggtagctggacctagtttgagttctgtggagcaaagcgaatccccagagaaagaagcctctgagataagagagcagtccatggttggccatgtcgaagcacatggaggttctgtcagccatgctgatccttcagtatctgatataagttctcagccgagtactgaaagttcaacaaatggtgattctggcagtggtgtaacaccatccttcacaaacgcagttctttagtttcttcataaaaaaaatgacagcggcaccgatcgagcatcatcaggttggtcgtcttcagcagtacttcgagctaggcgacttttgtgtggggcgagttcattgctgaggaaaccactgggagggtatatgtttgttgcaggaaatttcttagtgcttcaaagggactaggcaacattagcattattagcactgcactgtaaaaatggctagatatggttgttgcttaatttggccagcactctcgtttgtgaataccttgtggatccgacagtcaattttgtgccgtaaattaattgttaatttgctgcttcgagtaccttagtctatggattgc

SEQ ID NO: 8725 - DNA, 1351 bp, Zea Mays
gccactacttatgctacacagttcaaggaatggaagttgggataaccatggttataaagaacaagaatgggagtttggctctgtctgtttcacagtgtggttgttatgtgaaggacctagtgatatccctggatggtggagcatcttggttttatcaagggtttataaatgcttttgaagatcatattaaagctgcagttgagaaggcagtacctgaaaatatcattgaaggcgctgggaaactggactcctttctgcaaggtctccccaggaccatcagtttggacgacgtcgcggccttcaacttgactttcattaatgatccacactatggcaattcttcaattgagttcgatatcaatgggttgattacttcagcggttgctgagacagccaatctgcagaagcatccacaactttctttggcttgtggtggtgcatcaaaaatgcttttgctctcacttgatgaagatgtattcaattcagcactagaagttcattttaaggctggttcaatgcattgggttgttgacaaagtccctgatcaatctctactgaacacagctaattggaaatttatcattcctcgtttatactggaattacccaaatgacgatatactgctaaatatctcaatggcctcatccccggtgataagggttacatcagaaaaaattgaagctaccattaatggagacatgataattgatgttgtagataacaaggagatagttccagttgcatgcatctcagtgattgtcagtgcttcaggtgttgtggatgcatcaggcaataaagtatatggtagagttggattagataatttctcccttgcgttgaagtggagtaaaattggcaacttccatatgtctttgattcagggagtgattcgggttctcctgaacacagtatgcatgccgtatttgaactcacggcttgggaatggattgatcttgcccgtggtccatggtttcacacttcaagacgtctacgttttaacctctgctgagcagctgacgctttgttcggatgtcaccttcaacgcaagcagcatggcgagtttattatgatacagggaagtgcgtgtctggcgtatttcatttagcgttgaagtacaacactcgcacatatgtgtacattatattgtacatactacacaacatctcgttataaatattgtttacattcaattctaccaatccatgaattcaaacatctgtgtacaatatcttaggtaatcaaagttatccacagcacaaaatcctgtacagctctggaatgggggctggataagataaacagcttatattaatccttatgaaactaggagtaaaggaatcgtaaaaaaaag

SEQ ID NO: 8726 - DNA, 969 bp, Zea Mays
atgtcctctgtcccgtgccgtgcatactactcctctcccagactttccttggattttttgtttctttttaatttctcgttcgtccatctccgttatctctgaatttggaggcagaactgaagagagagctagaagcgggtgacccatggcttccagcaagcgcgaatacgaggacttcgtgcctccgcacaaaacggagcgcgagccggccacccacaccctcaccgtcaacctctccggccaagggttcaagaaggagcacgtcagggtgcagatggtccacagccaacggcgcctgatcgtgcgcggggagcgccccgtcgacggcaaccgctggagacgcttcggcctcgagctcctcgtccccgacggctgcgacgccaaggccatccacgccaggttcgaaaacggcgtcttccgcgtcaccatgcctgccgtcccgccggagcaagtcccggtcgtcgccagcgctgcgaagcaagacggtggtgaccgtgccgcgcgagggcgagaagacaacaagcacgagacgccgcggaagcaagaagcgaggcagcgcgtggtgagctcggccagagaccccggcggtagtagcagcaagaacgacggcgccggtggcggtagcagcgctcctccgtcgtcatgccaaggcttcctcagcaatccgaagatggccaccactgtgcttgccgtggtgctcgtcctcatcagcctcggcatctatgtcaagaacagcgtctggccgtaaactccgtcctggcgcgtgcatatgtgtggtatacgggatgtggtaacgattcctggacgcagttggtgaaagttcctcgcgtacggactgagaccaaccggatgcattggcaccaggtttgagtgaaccaaccgggttcattgaatcctttacttggaatcattctggttggaactgaaacgcattgtaccaaacgagccttagagcaggtctcgtgcttg

SEQ ID NO: 8727 - DNA, 1847 bp, Zea Mays
cgcatcgcacgtcccaggggcgtcgggcttgggtgccacctccgacggacgccgacgcttttgcagctactcattgctactacacaggacagtactggggcgtataggaggatagggatgaactgcgtggcgtgatgaactgctcgtgctccagaagaagacgtgcctcgcgtgcccctggaatagccgtgaacagtgacgtttccaagtgcattccatctgcccaactcgcagcaagccgccgccaggtcgtcaagaagctgctggtcgtcggggtcccagaatgctccataattccaattgagggtgccagatcgagtgagaagttgcgcgtgtgaagccatcacaccaattaaagatcgagatcatccatggctagttctctacttcagcagctgctgtctctgctgctgctcctgctgccctctcctcttcgtctccgggagcatctatcaggaaaccatgctgtcagcgccaacaacttccaccccatctttctggggtggttcggtctgtggaagaacagttcggagctgctgtctcgtgactacgtgcagtgcttcgaggagcagatgagcctcgtctacgaccctgccatcaacgagtaccggaacctcgccggcgtcgagacgcgagtgcccaacttcggctccacaagagccttcagccacaagaaccccctcaagtcagactggtgcctcggaaagctgagagccgcactggaagacatgggataccgagacggagacaccatgttcggagccccctacgacttccgctacgcgccgccgtcccccggccagacgtccgaggtgtactcccgctacttcaaggagctgatggagctggtcgaggccgcgagcgagaggacccggaagaaggccgtcatcctcggccacagcttcggcggcatggtcgcgctcgagttcgtccggaacactccgccggcgtggcggcgcgagcacatcgagcgcctcgtcctggtcgcgccgacgctccccggcgggttcctggagccggtgcgcaacttcgcgtccgggacggacatcctctacgtgccagcgacgacgccgctggccacgcgagccatgtggaggagcttcgagagcgccatcgtgaacttcccgtcgccggccgtgttcgggcgcctgcaggcgccgctcgtggtcaccagggagcggaactactccgcgtccgcgcacgacatggagcgcttcctcgccgccgtcggctccggcgaggccgcggagcccttcaggagacgggccgtccccaagatgggcagcttcgcggcgccgatggtgcccatgacgtacatcagcggggtcggcaacaggacgccgctgcggctggtgttctggggcgaagacttcgacgcggccccggaggtggcggcgtacggggacggagatggcaagatcaatttgatcagcgtcttggcgtttgagaaggagatgcgtcggcagccggagcagaagaagcagttcaaatccatcaagatcaataaggcccagcattctacgatcgtcacggatgattttgccctgcacagggtcattcaagaaattgttgaggccaataatcagaagattccatcctaaattattcatgtcatgtatgcattaccgagctgtgggggccaatagtgggttgggaagtgatggtttagacatcggtcgtggtgtggtcgcaattcaatcgattagttatttgttaacgtcaattgcttgcctcatgaacttgctgtgataaggaaagaccacaattattttccgcttgtcgtgtgcgttgtaccgtataatgttaataaaaacaagagtaaaatatagtagcagtcatcaaactta

SEQ ID NO: 8728 - DNA, 2688 bp, Zea Mays
ctacaaaccagcccgccgccgccggcgacagggcgcgtgtgcgcctcgtgcgtgcgtgtgcgccgatcaaattccctgcccggcccccagccgacgtggcatggcatccccagctggatcgcgcagaagtaaacgccgcatcccaaatccccatcccacctcgtcctcctctccactctctcttctccctccaataattttctcctctctgcttgctccagttccaagcaccaccgaatcagggcgagtgggagcagagggaatcccatgtctccgcccctcgctggagtagatcctcggggagccggcgtggagctgccgcggtagaaagccagctgagcctgcgagcgcctgatccagcccgatcgggatcgatgggtggggaggcgccggagccgcggcggctgacccgcgctctgagcatcggtggcggtggcggcggctgggttcccgatgagatgctgcaactggtgttggggtttgttgaggacccgcgcgaccgggaggccttgtcgctggtgtgtcgccggtggcaccgcatcgacgcgctctcgcggaagcacgtgacggtgcccttctgctacgccgtgtccccggcacgcctgctcgcgcggttcccgcggctcgagtcgctcgcggtgaaggggaagccccgcgcggccatgtacgggctcatacccgacgactggggcgcctacgcccgcccatgggtcaccgagctcgccgcgccattcgagtgcctcaaggcgctccacctgcgacgcatggtcgtcacagacgacgacctcgccgagctcatccgtgccagggggcacatgctgcaggagctgaagctcgacaagtgcaccggcttctccacggatggactccgcctcgtcgcccgctcatgcagaatgtcaaattaatgataaaggcagtgaatggatccgcgatcttgcagtcaactgtcctgttctggcaacattgaatttccacatgactgagcttgaagtgatgccagttgacctagagcttcttgcaaagagctgcaagtcactgatttccttgaagattggcgattgtgatctttcagatttgatagggttcttccaatctgccacatcactggaagaatttgctggagggacatttaatgggcaaggggaactcaccaagtatggggatgttaaatttccatcaagaatatgctccttgggacttactttcatgggtgcaaatgaaatgcctattatatttcctttttctgcgatactaaagaagctggatttgcagtacactttcctcaccaccgaagaccattgccagctcattgcaaaatgcccgaacttactagttctcgcggtgaggaatgtgattggggatagaggattaggagttgttgcagatacgtgcaagaagctccaaaggctcagaattgagcgaggagacgatgaaggaggtgtgcaagaagagcagggaggggtctctcaagtgggcttgacagctatagcggtaggctgtcgtgaactggaatacatagctgcctatgtgtctgatataaccaatggggccttggaatctatcgggacattctgcaaaaaactctatgacttccggcttgttctgctcgatagagaagagaggataacagatttgccactggacaatggtgtccgggctttgttgaggggctgcaccatgcttcggaggtttgctctgtacttgagaccaggagggctctcagatgcaggtctcggctacattggacagtgcagtggaaacattcaatacatgcttctcggtaacgttggggaaaccgatgatggattgatcagtttcgctctgggatgtgtaaacctgcgaaagcttgagctcaggagctgttgcttcagcgagcgagctctggccctcgcaatactaagtatgccttccctgaggtacgtatgggttcagggctacaaagcgtctcaaacaggccgagacctgatgctcatggcgaggcccttctggaacatagagtttacacctcccagttcccagaatgctggtcggttgatagaagatggggaaccttgcgtagatagtcatgctcagatactggcatacggctctcttgctggtaagaggttggactgcccacaatccgtggtcactttgtatcctgcgtgagtgtaaatagactgagggcccgtttggtgcccatggaaccgttgtctggaacaatttctggtaggattgcttgctgatttgtataggctttgatcagctggaaacaaatgaacaaggcctaagctcgtgtctttctctcacgtccttgctttcttagcctcatggtcaacaagaatggtgttgataacacgatatgtgcttattgtattgatctagatggctagctgctacgtactgcaatcagctactagtagttgagatgacctggattctggaataagcccttgctatcttcgcctgtactgctatctaatcctaggaagcatgtatatgtatactggtaaaagtaacgatggaagatgtgagtctgattgcccgccctgatttgtctcatgggaggtataagactatctccagcaacttacccatctctgtacttatattcaaactttattgagcgaacagtgcagtctatagtgcaggagtcggtcaaagattgtttttaagatattttacattgcatattgcatcgatcataaa

SEQ ID NO: 8729 - DNA, 2021 bp, Zea Mays
tgtcctttccgcaacagagcttgtgagcttgaccagcgagaggcgagtggctaggacctaggcctccgatccatgcaggtccctgtgggtttcctcggcaagctctggagcttcgtttccttcgtgcccttcttcgtcctcctcctgcttctgggatccatcaaagctgccctagtcggcccggtcacagcttccatcgtattcttcgggagctctgcggttattattggcctctggcctgctcatttcatctggacatactactgcgttcttaaaacagaaaggatcgggctgcagttgaagattcttactggactactgctgccattgccactgcttctcttgccagtacttgctagcatcgggagtctcctgggtggtactggatacggagtttgcgtacctctcatggcgaccttcgaggctgttggcgagggtgtcactgacaagctgacccattgtttcacgctgcaggatggaaccgtaagcgcgatggctggagcttgcacggttgtccgtgatgtcaccgatttctgcttccactcgtacttctctttcatggatgatcttattgacaaaatgggggacaatgaagaagcccctctcgacatcaagttgtcttatctaccacggagcatggtcgttgccttaatcgccgttccagtggatgtgctgctgataagcgcagtggctttgtggaaaagcccctgcatgttgttcaaaggatggcagaggttatgtgaggatctagttggaagggaagggccgttcttagaaactgtctgcgtgccttttgctggtttggccattgtgttatggccacttgcggtgattggggggttacttgcttcatttttcagcagcttcttcttcggttttcgcgcgggactggttgcttatcaggaggcttctttccaaatgggacttgcatacatgatttcagcagtagcaattttcgatgaatacaccaatgacttgctttacctaagagaaggatcatgccttccaaggcccaagtatcggagagcagatatcatgagggagtgtgaaactgagcctgcagagaggcaacaaactggccatcacaagcatagaaggacgttacctcgatcaaagacgttcatgcaaaccgtccagcgactacgaccgattcaaatatgggattggttcttccggtcctgtgagctcaatggaaggatactactgagcgagggcctgattactgcccaagacatggagcaatacatcaccaatggaaaatgcaagaagctggacactaaattaccctgctggtgtatcttccagtgcctattacgatctgcgaactctgattcagacggtttggtcatatctgatcatgtccaagtgacgaccctcaactggcccaaagacagagtccttgactggctgctcggaccactcctgctcatcaaggatcaaatgaagaaactggaggtcaccgaagacgaggagatgtgcctgaggaagctgatcatgacaagcaagaacgagaagccatctgactgggacgattcgggtttcccgtcagacgacaacataaagagaggccagctgcagtcgataatcagaaggttgcaagggattgtggcctacatgtcccgagtgccgagtttcaggaggcgcttcatcaacctggtcaaggccatgtatctagaggccatcgaagcaggggccatcgacggatcgcgcaaagttaaggcggatgtggctgacaggtgtgcggaagatattgccggttcatgttcatcaaccgacacgccagcgaacattcacatggtctgatgatgtttcaccagcatagcagagctcgacgagctgtgctgaattctgctatttcttctgtaaaaagaactgtgctgaattgttgtgctaaactgtgccaaggctgcaaacaaatacaatcgagcgaccatatcttctcattagcaatatggcatataatttttgtctaatggtcgtcagatggttaaaaaaatctgttaatacaaacaggaaactcc

SEQ ID NO: 8730 - DNA, 1612 bp, Zea Mays
atttttttttaaaacgccgcgtctccgagctaaggcgtccgcttttcgggtttggtttttgtcaggttctcgcgccaaaattccgctgcatttcgcgctctccttagatctctgtacttggtaactgggcctgggagaaaagatgaggaaagcgacggatgggcgtgaagagccgtcagattccgggcccacaacacctttaccgaacaaaaagttgttgctcttcatcctcgacaggctacagaagaaggatacgtatggtgtattttcagagcctgttgatcctgaagagctacctgactatcatgacattataaagcatccaatggatttttcgacaataagaaagaagctcgataaggaggcctatttcaacttggagcaatttgaggatgatgtgttcctgataacctccaacgcgatgtgttacaattcaccagatacaatatactatcgacaggcacgaggtattcaagagattgctaaaaaggattttgagaatcttaggcaagatagtgatgccagtgaaccagaaccggaaccagaacgagaacccaagccggagcccgaaccagaagaaccaaagccacagcctcgccggggcaggcctccaaacaagaataatgccaaacagaaagttgggaagccaccagcagaacgtgccactgcagacttttctggtgcaacacttgctactgcggcaaatattggacggcatgcacaggcagatgttgatctgtcacgaagagtaatggataaagcgatgattgcggatgtgttgagagcttcttttgccaacctaaggaatgagcacaactggtctggttatgggggtacatggtctgcaaaaacggggaagaggccgattctgatggaagatagtcgccggagcacatattatgagactcaaccatccagttcaatatatgagctgccggtatcgtcctcctacaatgggaccgagaagctgctagtaccagttggggttcagttaccgcagtcctattcccacagcctggcacgttttgctgcacaacttggccctgttggctgggaaattgcgtcaagacgacttgaacggagccttgctcctggaacaaagtttggtcgtggctgggtaggagatggtgaaacgccgccgaacccatttcagacacctgtactcgctgcattttcagaaacaatggcaccaccgagcagtatagcagcatcaggtgagcagccatctatgaacgcgccccccgccacagaggcctgtgctggcagcataagccatcgggtgggatctcagccatgtgcttctatcagcacagtgcagacgataaattccgaagcattagcaagccagcaatgcggatccgtaccacaggtttctataaaccgaggcgaacgtgctgttgagatgaagggcagcactaataatcttcacgggcacccggccatgccgcaaactatgaatggtttcaatgccgttccaggacgggtgctgttcccacctgcggctcaactggtggtaccacagtccacagtgtaggtaagaagtagaatcatgcggcaacaacatgaatgccctgttccaatctcgcgagataaactttagcagcttttttag

SEQ ID NO: 8731 - DNA, 2653 bp, Zea Mays
caaggaatggcttaaagagatcacaaataacttttattgaatcattttcatgtggataatcatcaccgagccggttacctagttcgttcgatatcaagccgtaactactacacaaaacacaagttacacaaccccggctcccgctggcgcacacgctcctcacgtgccgcacccgaaacgtcccaagaaaaaagggagaaaactcaccgaaaagtctacccacctgggccctggccacctcccccctgctcgctcacgacccccaacacgcgagtacgcgacgacgcccctcacaaaaacaggggccaaaaaggataaaaaaaagtggggaaaagaacgccgggaatgggcaagcagcagcaggcgccaccggcgcggcggtccccggcgatgtcggcgcctccgccgccgaagcgccggaagaagaagggccgcccgtccctgctcgacctccagaagcggagcctccgcctcgagcagcagcagctaccccaggggcgccgctccaaccgcaggagcgccggctccgcggacgaggacgacgatgggcccgcctccggctccggccgccgcgagaagaagctgcgcctcgtcatgggcctccacgacggatcagccaagggagaaaagatgaggaaagcgacggatgggcgtgaagagccgtcagattccgggcccacaacacctttaccgaacaaaaagttgttgctcttcatcctcgacaggctacagaagaaggatacgtatggtgtattttcagagcctgttgatcctgaagagctacctgactatcatgacattataaagcatccaatggatttttcgacaataagaaagaagctcgataaggaggcctatttcaacttggagcaatttgaggatgatgtgttcctgataacctccaacgcgatgtgttacaattcaccagatacaatatactatcgacaggcacgaggtattcaagagattgctaaaaaggattttgagaatcttaggcaagatagtgatgccagtgaaccagaaccggaaccagaacgagaacccaagccggagcccgaaccagaagaaccaaagccacagcctcgccggggcaggcctccaaacaagaataatgccaaacagaaagttgggaagccaccagcagaacgtgccactgcagacttttctggtgcaacacttgctactgcggcaaatattggacggcatgcacaggcagatgttgatctgtcacgaagagtaatggataaagcgatgattgcggatgtgttgagagcttcttttgccaacctaaggaatgagcacaactggtctggtgagcggaagtttgaaagacttgaagcttactcaggttatgggggtacatggtctgcaaaaacggggaagaggccgattctgatggaagatagtcgccggagcacatattatgagactcaaccatccagttcaatatatgagctgccggtatcgtcctcctacaatgggaccgagaagctgctagtaccagttggggttcagttaccgcagtcctattcccacagcctggcacgttttgctgcacaacttggccctgttggctgggaaattgcgtcaagacgacttgaacggagccttgctcctggaacaaagtttggtcgtggctgggtaggagatggtgaaacgccgccgaacccatttcagacacctgtactcgctgcattttcagaaacaatggcaccaccgagcagtatagcagcatcaggtgagcagccatctatgaacgcgccccccgccacagaggcctgtgctggcagcataagccatcgggtgggatctcagccatgtgcttctatcagcacagtgcagacgataaattccgaagcattagcaagccagcaatgcggatccgtaccacaggtttctataaaccgaggcgaacgtgctgttgagatgaagggcagcactaataatcttcacgggcacccggccatgccgcaaactatgaatggtttcaatgccgttccaggacgggtgctgttcccacctgcggctcaactggtggtgagtcagatgcagacacatacggctgattgagtaacaagtagccattggatcaacattgtcaacatggcaattgaacattgcccgcttccattcatcagtcgcggtcaccaagcgacgacggccttaagccgcaccctgccagtggcttggcgcccaccacattgggggtgtctggtcgctgttgaatcgtcgcgcctcaacctggcgctgcaactgtgaatctgttgtgtaattgcgtaagtaggaattaggatgataacgtgcatagatgtgttgggcggatggtgtaacagcggtgagttgcagtttggagatttagcgattctgaatgtgtagtagaaaaaccacaggggaaacgaaacaacatctgtatagactattcaggatcaggaggtttttttagcgtttcggcgactagcaacaggtgcgatcgagcatgaaatcgtgcgaaccagattgtctgttgccggtattgtttctatatacatcaatctgacggtgttctgggttgcaggtaccacagtccacagtgtaggtaagaagtagaatcatgcggcaacaacatgaatgccctgttccaatctcgcgagataaactttagcagcttttttag

SEQ ID NO: 8732 - DNA, 1269 bp, Zea Mays
  misc_feature (1268)..(1269): n is a, c, g, or t
cgcagcagtcaggtattcacgcgcgccgaggctgccgttccccatcgcgacccttgcaccgggtccacgctgaccctcttcacgggggcggcgaaagatctcagccgcgacgggttcgagcgccggcgagcgctcgcccacctgggcctataaactggccccggctcctcttctcgcgtcgcagagcccagcctcgggatgacgtggcgtatcgcgacaccgccacagctcactcaaccgcgcgggtctccaacgaaccccttgtagaagcttccaaaccctagcgcaggaggaagaggagcgtggaggagctccaggaatggcgaaggcgaggaagcagaagggtgacggtagcggtacgggcggaggcgccaccgttctccaccagaaactctgcctctccatcgacatggagaaccagctgatctacgggtacactgagataaaagctcttctagctgaaaacgacacatttgctctacatgctgacaatatgacgatcaggagcattctggtggatggtgaaactgttgagttcgactattcccctcattggaaaaatgaaactgatcaacctaattggtcttcaatatcatgtttgaacactgttgctgatgctgcatgttcaacatatacttcgtctctaaatcgagaagctacaccaaatcttattgtgtcatctgagagatcaatcaagtcaatgattgagcagcagttagatgaaaacagtgaaaaatatgaagaaaatagtggaaggcttgaaaaacatggtggaaagaccatccaaacttcctatgatcaaattgttaatggctgcaatggttctgcagtggaagagggaatagaaaattctgcagtggaagaagggaaaaaaaaggaaaaggaaaaagagaaggaagagaaaaatggaaatgagaagagcaaggaaaatggaaatgagactgaaaatgaaaaggtgaagaacataaaactggttcacatagattatattttggagaaggctgaaactggcattcactttgttggcaatgtcatgcatagcagtaatcagataaggcgggcacactgttggtttccttgtgttgatactgccacacaacgctgtccatttgacttagaatttacagtcagcacagatttcatcgctgtcagcaacggtgacttgctttaccagctgttatgaagactatcttgctgcaccgtttcccttaggtttatacaagcagatttttcttccatctgaaatgacagtattaccggcaagcttnn

SEQ ID NO: 8733 - DNA, 1431 bp, Zea Mays
  misc_feature (1430)..(1431): n is a, c, g, or t
gttccccatcgcgacccttgcaccgggtccacgctgaccctcttcacgggggcggcgaaagatctcagccgcgacgggttcgagcgccggcgagcgctcgcccacctgggcctataaactggccccggctcctcttctcgcgtcgcagagcccagcctcgggatgacgtggcgtatcgcgacaccgccacagctcactcaaccgcgcgggtctccaacgaaccccttgtagaagcttccaaaccctagcgcaggaggaagaggagcgtggaggagctccaggaatggcgaaggcgaggaagcagaagggtgacggtagcggtacgggcggaggcgccaccgttctccaccagaaactctgcctctccatcgacatggagaaccagctgatctacgggtacactgagataaaagctcttctagctgaaaacgacacatttgctctacatgctgacaatatgacgatcaggagcattctggtggatggtgaaactgttgagttcgactattcccctcattggaaaaatgaaactgatcaacctaattggtcttcaatatcatgtttgaacactgttgctgatgctgcatgttcaacatatacttcgtctctaaatcgagaagctacaccaaatcttattgtgtcatctgagagatcaatcaagtcaatgattgagcagcagttagatgaaaacagtgaaaaatatgaagaaaatagtggaaggcttgaaaaacatggtggaaagaccatccaaacttcctatgatcaaattgttaatggctgcaatggttctgcagtggaagagggaatagaaaattctgcagtggaagaagggaaaaaaaaggaaaaggaaaaagagaaggaagagaaaaatggaaatgagaagagcaaggaaaatggaaatgagactgaaaatgaaaaggtgaagaacataaaactggttcacatagattatattttggagaaggctgaaactggcattcactttgttggcaatgtcatgcatagcagtaatcagataaggcgggcacactgttggtttccttgtgttgatactgccacacaacgctgtccatttgacttagaatttacagtcagcacagatttcatcgctgtcagcaacggtgacttgctttaccaggtcttaagtaaggaagatccttcaaaaaaaacctatgtgtataaattgaacactccagttagtgcacagtggatatccttggttgttggtccacttgaaattctccttgacagaaatgacataaatgtgtcacacatctgtttatctcctgccttgtcaaagcttcagaacactattgcatttttccacgatgcatacctgttatgaagactatcttgctgcaccgtttcccttaggtttatacaagcagatttttcttccatctgaaatgacagtattaccggcaagcttnn

SEQ ID NO: 8734 - DNA, 3747 bp, Zea Mays
gttaagttggctggtctgatcactgagagatgtgcggggtctccattggcagcaaaagcaatagggtctgtactgcgtaacaagaccactgatggagaatgggaggatgtgttacaacgaagcaccatatgtaatgatgagactggaattttgcctatactcaagcttagttataatgacttgccaattgacatgaagcaatgttttgccttttgtgctctatatccaaaggattatcatattgatgtggacaaacttatccaactatggatggccaatggttttatctcggatcaagaaaatgaacctgctgaaaccataggtaaaaggattgtcaatgagttggtctcaaggtcctttttccaatatgaggagcaaactatgatcggatacaattctactacatttttgaagattcatgacctcatgcaggaggttgcactgtctgtttcggaaaaggagtgtgcttgtgtaacggataaattcattacaaatagtgagttgcttccaagtgctgcccgccacatacttattcaaacatggagtaacaaacggatacatggttatttatatggttttatgaggaaattgtctcgacctatccaaacattgatgtttgatgggtcttgtgaagatgccgttgtgcaacatttatcaagacatagttctttgcgagtactttccatgccaggattttggtttcgttttccaataaaaccaaagcatatgtgccaccttaggttccttgatgtcacgggtagtagaatcaaagaacttccatatgacataagcatcctttataatcttcagacactcaaactttctggatgcaggaatcttattagacttcctgagcaaatgaagcacatgagtgcccttcgtcatctctacacagatgggtgcacaaggttggagtgcatgcctccagatcttggacaaatcacctcgcttcgaacaattacatgggagaagaaatgcagaagcagccaaacttgagaataagaaggaactgagacaactgtcactagagtggacaagtggtaaggaggaggaacaacagtgtcatgaggtgctagagagccttgaagctcatgatggactgttggctctagaaatatattcctaccaaggcacccgttttccatcttggatgggtatgttgaaaaacatactcgagcttcggttgttcgattgctgtaaagtagagcagcttccaccactatgtcaactagcagaactgcaactccttcatttgaaaagattgggaaatttgcggtccctgtgtagcagatgtacatcctccacatttggaaagcttaaggatcttaagctagttgatcttcacgtttttgaaggattttgtaagacaatgcatggatctacagtagcattccctcagcttgagatattgcacatcgagcgctgtggaaatctagcagctctaacagaagcatcgcattgcggtggagattatacagtggcccgctcaacatttccagaactgaagaggctcatattggaagatttgtgtagctttgagagatgggtggctggcctgcttgaaattgaagaagaacatgcactattccctgtggttgagattgttgttattagtaaatgcccaaagttaacaactgtgcctagggcaccgaaggtcaaagaactagttttgcgtgatgtacatgaacatatctctctaggagggatcagatgtatgacgtcattgtccactttgcttttggacggcgtgaagcttgatgttaaggagagatgggaccatccatcgtccgtggtagatatgcaactgtggaggtgcagtttgttcttccaaccacgcgcactagtgatgtgggtttgctattggcagctgcaagatctgacaatttatagatgtgatgagcttgtgtcctggccggagaaagtattccaaagcttgatttctttgcggaggctatggattggcaattgcaagaacctaattggatatgcagcggcgaatgtccccgaccaggcaacttctggaaggagcgagcttttgccccatctagagtatctagagatatgggggtgccaaaatctggtagagttattcaactcctcccctgctctcaagagaatggaagttagagaatgttgtaagcttgagtccctatatggcaagcaattgttggatgaagctgctagtagtaccgatgacgtgacggcatccgcacatgttgaggagaagctatcaccatcatccctagaatctctaacaatattggactgtgacaggttgtcagaggttgtcaatcttccttcgtctctcagggtaatagatattcagggttgcttcaaactacggttcatgtcagggcagctggatgcactcaataccttagcaatcaccaactgcccggagttgcgatcactggaaacatgcatcgtagatctcacgtcactggaaatcctcgctctgtgtggttgcaaaagcttggcgtccttgcctagtgcgtgggcaggacgacaagaatattcatctctccgtcagcttacgattagggagtgcccaggtataaaatcgttgccttcaactctgcagcagcgactggacaacggcctcttggattttacgaacctagattcccgtcgtcgtgaagatcggcctccacgacggctgcttgggtgtctcttcctcctgcctttattttgtctggtctcaagggccaaatgttgctttgtctctgattaacattatgagcggcacgtcaccgggtgatatgcagtgcagcagcaggccacgctgaagctgaagctgaagctgaacctcatctgcaggggcacaggcaaggagcagatggcagtagtgtagtgacgctagctcatggaaaaaaggtagaacgatctgaagcaggagttacagacaatgaggaagatgcgcttgtttacagctccctaaaaaaaagagataaatgcgtcgataaggccaaccttgttcatcatttggtttggatttttcggggaaaaaggggaatcaagttggtgtaagctgtagttgctttgttctgacccttggctacctgaatgagtgggtcaaaattaaacaggcactgcgctaattaagtgctgaatcgtgtttggagtctgcacaggggtttgcaatttgggtttgcaattttctaagacaagagggagtagtcagctttcaggttcaggatcgattagtgaatagttagtgtttgtaaagatggagtacatgctagcaatgcagagatgatgattccacgcattgtcgctggtgctaataatctgcatagtattggagtaatacgacctgtacatgcatgcgtgtcgctagacctttagatttgcttgtacctgaaactgaaactcataggtgcgctcattccattgaggtgttcgatgtgggctgattgtgtcaggttcagatgcaaaccaatgtaatttcagagatagttaggataggactatgtatcagataaggtccgagaggaaaagatagtgttcagtttgttcttgtctttcataatccggtgcactcggtgttatatatagccgtgagtttgttgattatgtatctagattatatatatgccctgataagctatgatgtaaaacaatggcaaggattgatactgtgtgtaaaaaggatttttttcttttttgagttgctaacttgctattagaattgcataccatgaattagtacatgctgttatccacgcagcacttcacggaagcttcgta

SEQ ID NO: 8735 - DNA, 1898 bp, Zea Mays
taccaaggcaataccagtacagcaacagacgagcccctcaaatcccccttttcttttctctttccaccggtccccgagctgcagcacaagaagcgattccagctgttgtcttgcatctcccttgtgctatctcaccccatgttcgcacaggaaactgaagaagaggggtcagggcacagaccgcttcacgcagcagcccgcccgcggtcgcgcgtgcaaaaggagcgcacttgcgaaatgagctagaagatggcgatttagtggaggcgaaaagctgcgatggggctgggtcgtcgatggagaagtgctggcagcgtgccctagctctgggatttatcttacaacaagttgagcggatcaatacctgattccctgccaactttgccttccctacgagttctacgtgattttgatggctcagtatgcaacaaaccttcacccagcccgtcaagaaataaagtagctatcatagctatttcagtagtggttcctgtgttagtactaattgtactacttcttacatatttcatctggtggcagaaaagaaagcctattgtgcaaccagtacccacacatggctcaacaagagatccagaacctgataatgcttcaggaatcaaaaaaagttatggctacaacctgaatataactgagaatcgtcagttcacatacaaagagctggagaagttcactaataatttcaagaagttcataggacaaggaggttttgggcccgtctactatggccgtttggaagatgacactgaggttgctgtcaagatgcgttctgaatcatcgtcacatgggcttgatgaatttttagctgaggttcagagcttgacaaaggtgcatcacaggaatctagtgtctttgattggttactgctgggaggaagatcatttggcgctggtttatgagtacatgcctcagggcagtctttttgatcatctgagaggtaaaaatggtgtttctgaagccttgaattggaggaaacgtgtacaggtagtgcttgaagctgcacaaggtctggattatctgcacaagggttgcagtttgccaatagtccaccgtgatgtgaagaccaacaacattctcttgggtcaaaatctgcaagctaaaatagcagattttggactttccaagacatatctgagcgacacacaaactcacatatcagtcactccagctggcacagctggttacatggaccctgagtactaccagaccggaaggctcagtgagagcagcgacgtgttcagcttcggagttgttctgcttgaggtagccacaggcgagtccccgacattgccaggccaaggtcacatcaatcagcgcgttaaacagaagattgccactggcaacgttggctcgatcgctgattcgcgacttggaagcgcctacgacatcagctccatgtggaaggtaatcgacaccgctgtgatgtgcacggcggactctactgctcagaggccaacgatggccacagttgtgatacagctgaaggagagcctggcgttggaggaaactcgtgaaaagggaagtagcaacagggtgagccgagggagtgatgtagaagctatggcgtccacacttggtccattcgcaagatgaagctgtgcctgtacctggattcagttcatggttgacgctcgtgaactccttgtcatgtgaagacaactagtagcgtataattgtgggctgttttgaaccagcaattgcttgtgtgtgtatggactttgacaaaggtttggtgtgagcttgcagcttctccagaatccagatgtcatgctctgtatgtatctttgacaaagatttcccgtgtctatatataactgcatggtactaataacataaaggattgactttgtttgaagcgagggatcgagaaattgagcgtg

SEQ ID NO: 8736 - DNA, 3457 bp, Zea Mays
caccccaccacccgtgtctcgtatcgccattctacccaaccgcaacgaaaatgagcccaggcgataaaggctgagtccgtccgtcgaaaagcgagcgcagagtgggagagagaagggggtcgattcggagagatcgagaaagaggagggaggcggagggcgacgtggcggtgggtgctgaagcggagcctgcagcgcccgctcgagtactcgccggatcgcccgacctgccggtacagcgctgcagacagcctgatccggccgatccggcgggaatggcggcgcgaggagggatctagcggaggtggtggggtcgcgcggcaatggcggaggcagagccgcggcgccggtgggcggtgtgggcgctactgctgctgctccaccccgccgcgctcgtgctcgccaacaccgaaggtgatgccttgcatagcttacgtaccaacttaaatgatcctaataatgttctacaaagttgggatcccactctggtcaacccctgcacttggtttcatgttacctgcaataatgacaacagtgtcatcagagttgatcttggaaatgctgcactatcaggaactttggttccgcaacttggacagctctaaaacttgcagtacctggagctctacagtaataatatcagcggaattatacctagtggatttggaaaccttacaaacttggtcagtttggatttgtacctgaacaacttcactggtccaataccagattcattggggaagctattgaagctgcggttcttgtaagatatctgaagacatccacattgattttccctactatttacagtagagtaaaacctgttaagagtaggaatcacgcacactgaatctgtctgtcatcattggttgcttcatcccatcttttgtattgaccaagggagatcttctatgacattgagatttcactaggccacatacatggtagctgctttgttaaaatcatgattttgttcttatgaatgcagttactttgttaataaaaggttaaagaaaatagctgcctagcctcattgggtcccatacattggaagaggcgtcttaacaacaacagcctttctggttcaattccaaaatcattaactgctatcactgcactccaagttctggatctgtcaaataacaatttgtctggagaagttccatcaactggttccttttctttattcacccctatcagttttgcgaacaaccctaacttatgtggtcctggcaccacaaaaccttgtcctggtgctcctcccttttctccacctccatacaaccctacaccccctgtgcaatcaccaggaagtagctcttctagtactggagcaattgctggtggagtggctgctggcacagccttgctatttgctgttcctgcaattagttttgcctattggcagcgcaggaaaccacaagaacatttctttgaagtacctgccgaggaagatccagaggtgcatcttggccagcttaaaagattttcactacgagaattacaagttgcaacagatggcttctgcaataagaacattcttggaagaggtggatttggcaaagtctacaaaggacggctggcagatggatctttggttgctgttaagagactaaaggaggagcgcacgcctggtggggaattacagtttcaaacagaagttgagatgattagtatggctgtacacagaaatctattgcgtcttcgtggattctgtatgacaccaacagaaaggttgcttgtgtatccatacatggctaatggaagtgttgcatcacgtttaagagaccgggcaccagctgaacctccgctagattggcaaacaaggagaaggattgctttgggttctgctaggggcctgtcttatttacatgaccattgtgacccaaagattattcatcgtgatgtcaaagctgcaaatattttgttagatgaagacttcgaggctgtggtgggggattttggtttggccaaactaatggattacaaggatacccatgtaactactgctgttcgtggaacaattgggcacattgcacctgaatacctttcaacaggaaaatcctctgagaaaactgatgtatttggctatggaattacacttttagagcttattacaggacagcgggccttcgatctagcttgccttgctaatgatgatgatgtcatgcttcttgattgggtaattaactatgccatttcctctgttcaaattgcaacttaaatgttcatgccttttttgtggcttccatactgtgtaggggttggtggtcaatttttcctatgtaaccgttaaaaaacttgctaatcatttgatccaatgacaaagagcttttgataatgtctaaggaataaatattttaactgaattggtgcattgtgataggctgacagctgaacaagtagtgacatgctcctgtccctgaaagtcaagggattgctcaaggagaagaaactggagagtctggtcgaccaagatctagaacacaactacgtcgacgttgaggtggaatctctggtacaggtcgcactcctctgcactcagagcaaccccatggaacgccctaagatgtcagaggttgtgaggatgctcgaaggcgatggtctcgccgagagatgggaggagtggcagaaagcggaagtagtacggcaagaggtcgagctaggccctcatcgaacttcggaatggatcctcgacttgaccgacaacctccacgctgaacagctgtcagggccgaggtgaaggcagctttggactcactgattcttgtatcttgcaagggcaatagcgatgtgtatcaatcatcctagtcaagaatcccccatttgttcataccaatcgttgggtgaagcgaggagatgtggtcagccatgatgtgcattggatgtatgttgctgaggtgacatggctgagttcatatatgcgagggcagcagagctcgacaagctagtgtcgtgcgctgtcggtgcatgcactagtggtcctggatttgcgaaggttggaaggaactgacgcgaaccgttctgactcccctcctacaaaaggatcggatgatataggtgtgcctatggacctgttctgggtggcaaggttaatcagaagtttccgtgctgagtgttgtaattatgtctctagactgtactctgtagtggcgaacttaagagttagtttgatggacaggaaaatgaaggggattcctctcctatggatcttctctatttttctgtccaaactaaatcagccctaatgagggtgggacgttagggtggggatgtatagacgtcatgtaatggaggaggtgcatatttcttagggtacatctacacatcctaaactgaatatagcttcgcccccctatttatatcgatgatctcaattttcgtgcatgtcggttaaccagtcagtactccagatggtaccgtgcatctcgccccaacttggcgtaacttcattctag

SEQ ID NO: 8737 - DNA, 1657 bp, Zea Mays
tgaattaacgtatgatcattgtggtttatggttcacattggaatttatgtgttgttcgtgcttgatgaattttctccaaaggaacaagggagacaatgagaggcgatgttgaagctatcgatcccgggaataaagctgctgcggaaccggtgggagatgtagctgcgctatcgtcaaggctggctaggaggctactacatggatcatggtgccctcctcggtgccaggggatatgcttggatcagagtaggggtaggtgaggttaccttatgttgttttgatttgttggtcgctgctccttggagaacattcatgctatggacacaaactcaggtggacgtggtgttcgacaattcaaaacatacctattacatatattggaaaaggaaaccccaggcgtttcaaagttagagtttcacagcttgcagcgaatttggaacaagggagacaataagaggcgatgttgaagctgccgatcccgggaataaagctgctgcggaaccggtgggagatgtagctgctgcggaacacgaaagttttgcattatttaagttttaatcaaggaaatggtccaagggtgcatcactggaataagctcgagaccacaagtgtcatatctcctctaatctttactctctcagccatggctgtgctgaatttgcaatggtaggttccagttgaatatgttcattgctacaatgaagccgttttgttgtttgctgtccgccgccgtattcggggtcttcgcctgcctctatgggctcagggcggacaggggcctacaagatctcctcgggccaaggaatcgttcccctccggcgacctccctcctccctttcgtctcaggccttccactgtatctccatcaaagcgaaggatcagaggctactccgttaggaggagaggaaaggaattgtgagccttgtgttggagaagtcgaagactgagagtatatggtggctccattggtgtccatgttaatggctggcgtgttctagagcaactcggggttgtcgtagagcttagggagacttgccaaccttagggagacttgccaaccttgtcatcgcgtaccatgccaacagaatgcttagcttttacgcaccagcgcgtgacgccatgtgggagcaaagttgggaaaatggatattggcggtggtcgagaggtcactcttattggaagtctagaaatgccaaaggatgacatatggcttgtcacagctatcctatctggtctgattgaataatgtgcgaagatataagtcatatatttcttggcctcctatcttcgcctcaggcagctgggagtggttttatactcgctgatgacatcaagtcttaggtgcttccattgatcaataactcagggaaatatggagggatcatgatgtggttcaagtactatgatgatcaagatggctacaattcttgagtgaagagtgatgtttaggttgttgcctgtggtgtgtcacaatatctgtgtgttacttgtgtgtatgtgagaaattatgtgactctggagtctggatagtgcaataagtattactcaagtatatgattgaatcttctgtcatactattcaaattatgtcatattgtatcttttaaggtatgtaaacatccacttttagcgatgctaacaaaagaatagaacaacaa

SEQ ID NO: 8738 - DNA, 1718 bp, Zea Mays
tgatcattgtggtttatggttcacattggaatttatgtgttgttcgtgcttgatgaattttctccaaaggaacaagggagacaatgagaggcgatgttgaagctatcgatcccgggaataaagctgctgcggaaccggtgggagatgtagctgcgctatcgtcaaggctggctaggaggctactacatggatcatggtgccctcctcggtgccaggggatatgcttggatcagagtaggggtaggtgagggtgaggattgtccatttatcgcctacaatttcttcaataccattgatatttaagtcatctcatcgagcttctttatatattattccgcaacttaatctattttcttgtcccaaaaatcatcaccacatctagttaccttatgttgttttgatttgttggtcgctgctccttggagaacattcatgctatggacacaaactcaggtggacgtggtgttcgacaattcaaaacatacctattacatatattggaaaaggaaaccccaggcgtttcaaagttagagtttcacagcttgcagcgaatttgggttctttttaatttgttgctttagtattgaattaacgtatgatcattgtggtttatggttcgcattggaatttatgtgttgttcgtgcttgatgaattttctccaaaagaacaagggagacaataagaggcgatgttgaagctgccgatcccgggaataaagctgctgcggaaccggtgggagatgtagctgctgcggaacacgaaaggttccagttgaatatgttcattgctacaatgaagccgttttgttgtttgctgtccgccgccgtattcggggtcttcgcctgcctctatgggctcagggcggacaggggcctacaagatctcctcgggccaaggaatcgttcccctccggcgacctccctcctccctttcgtctcaggccttccactgtatctccatcaaagcgaaggatcagaggctactccgttaggaggagaggaaaggaattgtgagccttgtgttggagaagtcgaagactgagagtatatggtggctccattggtgtccatgttaatggctggcgtgttctagagcaactcggggttgtcgtagagcttagggagacttgccaaccttagggagacttgccaaccttgtcatcgcgtaccatgccaacagaatgcttagcttttacgcaccagcgcgtgacgccatgtgggagcaaagttgggaaaatggatattggcggtggtcgagaggtcactcttattggaagtctagaaatgccaaaggatgacatatggcttgtcacagctatcctatctggtctgattgaataatgtgcgaagatataagtcatctgggagtggttttatactcgctgatgacatcaagtcttaggtgcttccattgatcaataactcagggaaatatggagggatcatgatgtggttcaagtactatgatgatcaagatggctacaattcttgagtgaagagtgatgtttaggttgttgcctgtggtgtgtcacaatatctgtgtgttacttgtgtgtatgtgagaaattatgtgactctggagtctggatagtgcaataagtattactcaagtatatgattgaatcttctgtcatactattcaaattatgtcatattgtatcttttaaggtatgtaaacatccacttttagcgatgctaacaaaagaatagaacaacaa

SEQ ID NO: 8739 - DNA, 1733 bp, Zea Mays
ttgcatcgaccgcgtcgttcccttactaggaacaagggagacaatgagaggcgatgttgaagctatcgatcccgggaataaagctgctgcggaaccggtgggagatgtagctgcgctatcgtcaaggctggctaggaggctactacatggatcatggtgccctcctcggtgccaggggatatgcttggatcagagtaggggtaggtgaggttaccttatgttgttttgatttgttggtcgctgctccttggagaacattcatgctatggacacaaactcaggtggacgtggtgttcgacaattcaaaacatacctattacatatattggaaaaggaaaccccaggcgtttcaaagttagagtttcacagcttgcagcgaatttgggttctttttaatttgttgctttagtattgaattaacgtatgatcattgtggtttatggttcgcattggaatttatgtgttgttcgtgcttgatgaattttctccaaaagaacaagggagacaataagaggcgatgttgaagctgccgatcccgggaataaagctgctgcggaaccggtgggagatgtagctgctgcggaacacgaaaggaaatggtccaagggtgcatcactggaataagctcgagaccacaagtgtcatatctcctctaatctttactctctcagtctggtgtctatcagaagctactcctttctacttaaaaggtttcagccatggctgtgctgaatttgcaatggtaggttccagttgaatatgttcattgctacaatgaagccgttttgttgtttgctgtccgccgccgtattcggggtcttcgcctgcctctatgggctcagggcggacaggggcctacaagatctcctcgggccaaggaatcgttcccctccggcgacctccctcctccctttcgtctcaggccttccactgtatctccatcaaagcgaaggatcagaggctactccgttaggaggagaggaaaggaattgtgagccttgtgttggagaagtcgaagactgagagtatatggtggctccattggtgtccatgttaatggctggcgtgttctagagcaactcggggttgtcgtagagcttagggagacttgccaaccttagggagacttgccaaccttgtcatcgcgtaccatgccaacagaatgcttagcttttacgcaccagcgcgtgacgccatgtgggagcaaagttgggaaaatggatattggcggtggtcgagaggtcactcttattggaagtctagaaatgccaaaggatgacatatggcttgtcacagctatcctatctggtctgattgaataatgtgcgaagatataagtcatatatttcttggcctcctatcttcgcctcaggcagctgggagtggttttatactcgctgatgacatcaagtcttaggtgcttccattgatcaataactcagggaaatatggagggatcatgatgtggttcaagtactatgatgatcaagatggctacaattcttgagtgaagagtgatgtttaggttgttgcctgtggtgtgtcacaatatctgtgtgttacttgtgtgtatgtgagaaattatgtgactctggagtctggatagtgcaataagtattactcaagtatatgattgaatcttctgtcatactattcaaattatgtcatattgtatcttttaaggtatgtaaacatccacttttagcgatgctaacaaaagaatagaacaacaa

SEQ ID NO: 8740 - DNA, 1776 bp, Zea Mays
tgatcattgtggtttatggttcacattggaatttatgtgttgttcgtgcttgatgaattttctccaaaggaacaagggagacaatgagaggcgatgttgaagctatcgatcccgggaataaagctgctgcggaaccggtgggagatgtagctgcgctatcgtcaaggctggctaggaggctactacatggatcatggtgccctcctcggtgccaggggatatgcttggatcagagtaggggtaggtgagggtgaggattgtccatttatcgcctacaatttcttcaataccattgatatttaagtcatctcatcgagcttctttatatattattccgcaacttaatctattttcttgtcccaaaaatcatcaccacatctagttaccttatgttgttttgatttgttggtcgctgctccttggagaacattcatgctatggacacaaactcaggtggacgtggtgttcgacaattcaaaacatacctattacatatattggaaaaggaaaccccaggcgtttcaaagttagagtttcacagcttgcagcgaatttgggttctttttaatttgttgctttagtattgaattaacgtatgatcattgtggtttatggttcgcattggaatttatgtgttgttcgtgcttgatgaattttctccaaaagaacaagggagacaataagaggcgatgttgaagctgccgatcccgggaataaagctgctgcggaaccggtgggagatgtagctgctgcggaacacgaaaggttccagttgaatatgttcattgctacaatgaagccgttttgttgtttgctgtccgccgccgtattcggggtcttcgcctgcctctatgggctcagggcggacaggggcctacaagatctcctcgggccaaggaatcgttcccctccggcgacctccctcctccctttcgtctcaggccttccactgtatctccatcaaagcgaaggatcagaggctactccgttaggaggagaggaaaggaattgtgagccttgtgttggagaagtcgaagactgagagtatatggtggctccattggtgtccatgttaatggctggcgtgttctagagcaactcggggttgtcgtagagcttagggagacttgccaaccttagggagacttgccaaccttgtcatcgcgtaccatgccaacagaatgcttagcttttacgcaccagcgcgtgacgccatgtgggagcaaagttgggaaaatggatattggcggtggtcgagaggtcactcttattggaagtctagaaatgccaaaggatgacatatggcttgtcacagctatcctatctggtctgattgaataatgtgcgaagatataagtcattggctatcaatttttgtgaatcagatatttcttggcctcctatcttcgcctcaggcagctgggagtggttttatactcgctgatgacatcaagtcttaggtgcttccattgatcaataactcagggaaatatggagggatcatgatgtggttcaagtactatgatgatcaagatggctacaattcttgagtgaagagtgatgtttaggttgttgcctgtggtgtgtcacaatatctgtgtgttacttgtgtgtatgtgagaaattatgtgactctggagtctggatagtgcaataagtattactcaagtatatgattgaatcttctgtcatactattcaaattatgtcatattgtatcttttaaggtatgtaaacatccacttttagcgatgctaacaaaagaatagaacaacaa

SEQ ID NO: 8741 - DNA, 2892 bp, Zea Mays
cccggattcgccttttttttctgaacgtcttcacggctctccttccttcgccgccgcccgcccggccatggattccccgaggggtcccgcgagcttcgcaacgcaggccaacgccctcctccgcaagaacctctgcgttcagaaacggaacctcaagacaaacatcggcatcactttcttcccaatcctgatttgcgtgcttctcatcgtgctccagaacgtcatcaacagcgagcttgacaagcccaagtacaaatgcggttgcgtctgcctcgagaccagtgccaacggaaggtgcgtaaggaaagagtgtggcattcagtactcgacgctggatcaggtggggagctgtccgattcccagcccgccacagtggccagccctgattcagatcccccgtgctgatttccgggctgcaaggacgttctcccaaccgtttaatgatttgcctgatccattttgccgtgactcctggtcttgccctgcaactgtccttgtcactgggaaggacagagcggttgcagaagctatatcaagagggctgtttcctgtcctttctccgtctttgaatgcaacagatttactggatctcttctccaagatagtcgctggctcagatacacagccatggtacacacagttgctagagcctgcatttttctctggtcgtacattgtatgtgatccagcctgagtgcacacctgtcatgtcacagaccattacatataatactgggggcataccctttcagctcaatatacagtgtgttgaaggtgctccgttatggcgtgaaactgcatcaattatcaaccatgaatttttaaagggttatagacaacgaggaggacaaataaacgaatttattgcaggttatgacttcttgggcacaacacagtatggcctcggtgtaaatgtttggtacaactctacttacaatgataacaatgcatattcatttatctcaacattgcgggttccacgcttggtgaatgcagtatccaacgcttatctgaaattaatcaaagggactggggtagacatgctacttgagtttgtaaaagatatgcccaaagttgggacaagttttcagttggatctgtcttctcttctgagtgtcttattcttcacatggatcatcgaacttcttttcccatgattggctacatgtatgtatttggctctggcttacttggtgcatttcttttccgtttctttgttgaggacaaaacttttccctatggttggacattagtcatggagattgtcccaggattttccctctatcggggcctatatgaacttggtcagtatgcattctcgggaagcagtataggaactactggtatgacctggagaagtctgaaagatcccctcaatggaatgcgtgatgttatgatcgtaatgagtgtagaatgggcagtgctgctcatattagcattctatttagatcaaacctctttgctaggcggtggtgtcaggaaaaatccttttttctgcttcagatgtttacagaagaaatgtgcaacatcattgcatgaacctagctttgtccaacaggattccaaagtcattctcgatatggagaaatctgatgttgctctagaaagaaaagtagttgagcaatttttgatagatcccaatgcaaaccaagctatcatctgtgataacctcaggaaggtttatcatggaagggatggaaaccctgacaagctggctgttagaggtttatctcttgtccttcaaaagggccagtgctttggaatgcttggtccaaatggagccgggaaaacatctttcattaatatgatgattggactcattaaacctacatctggtactgcttatgtccacggaatggatataaatatggacatgggtgacatatatacaaatatgggagtgtgcccacaacagaacttgctttgggaaacactgactggaaaagaacatcttttcttttatggctgttgaccactctctgaagagtgtaaatctatctcatggtaatgttggtgataagcaagtgaagaaatacagcggaggcatgaaaagaaggctcagcgtggcaatctcattgattggggaccctaaagttgtcttcatggatgagccaagcacaggaatggacccagcatcaagaaataacctatggaatgttgtgaaggaggccaagaaaaaccgtgcaattattcttactactcactcaatggaagaggcagaggtattgtgtgaccggcttggcatctttgttgatggcgatttccaatgccttggaaaccctaaagagctaaaggctagatatggggggacatacatattcacagtgacaacacccccagaccaagagatggaggttgaacatctagtgcgtcagttctcgcccagcgcaaacaagatctaccatctatctggaactcagaaattcgagctgccgaagcaagaggtgaaaatagcccatgtttttgacatggtcgagaaggcgaagcgccggctctcaatacatgcctggggactggtcgacacgaccttagaggacgtcttcatcaaggtcgccagaggagcacaagtgttcaacgagtttgcgtagataacacctttaggactgccttcgtagcaagcacgggaccccaattattggatgggcggactgcatagagaatcttgtggttttgtaggtatttttcattagtgagtcattcttgtgtggaaaataggctccatatgcttggtttacgtggttgtacataaataaatacatttttgagactgcagttgcagaatagaataattgtccagttgtgtccatatatattttttctttttcatgtgtggtgctcatgttttacttactccgtatctttaatcagcttattcgattggccttaatttata

SEQ ID NO: 8742 - DNA, 3081 bp, Zea Mays
atctacacccggattcgccttttttttctgaacgtcttcacggctctccttccttcgccgccgcccgcccggccatggattccccgaggggtcccgcgagcttcgcaacgcaggccaacgccctcctccgcaagaacctctgcgttcagaaacggaacctcaagacaaacatcggcatcactttcttcccaatcctgatttgcgtgcttctcatcgtgctccagaacgtcatcaacagcgagcttgacaagcccaagtacaaatgcggttgcgtctgcctcgagaccagtgccaacggaaggtgcgtaaggaaagagtgtggcattcagtactcgacgctggatcaggtggggagctgtccgattcccagcccgccacagtggccagccctgattcagatcccccgtgctgatttccgggctgcaaggacgttctcccaaccgtttaatgatttgcctgatccattttgccgtgactcctggtcttgccctgcaactgtccttgtcactgggaaggacagagcggttgcagaagctatatcaagagggctgtttcctgtcctttctccgtctttgaatgcaacagatttactggatctcttctccaagatagtcgctatatacagtgtgttgaaggtgctccgttatggcgtgaaactgcatcaattatcaaccatgaatttttaaagggttatagacaacgaggaggacaaataaacgaatttattgcaggttatgacttcttgggcacaacacagtatggcctcggtgtaaatgtttggtacaactctacttacaatgataacaatgcatattcatttatctcaacattgcgggttccacgcttggtgaatgcagtatccaacgcttatctgaaattaatcaaagggactggggtagacatgctacttgagtttgtaaaagatatgcccaaagttgggacaagttttcagttggatctgtcttctcttctgagtgtcttattcttcacatggatcatcgaacttcttttcccagttatgttgacatatctggtgtatgagaagcagcagaagctaaggattatgatgaaaatgcacggtctgaaggatgggccttactggctgatatcttattcttatttccttgctctatcaatcgtctatatgttattctttatgatttttggctccttgattggtctcaattttttcagagtaaatgaatatagcatacaagctgtttttttcttcgtctgtataaatttgcagattgcacttgcattttttgtggcatctttctttttgtctgtcaagatggccacagtgattggctacatgtatgtatttggctctggcttacttggtgcatttcttttccgtttctttgttgaggacaaaacttttccctatggttggacattagtcatggagattgtcccaggattttccctctatcggggcctatatgaacttggtcagtatgcattctcgggaagcagtataggaactactggtatgacctggagaagtctgaaagatcccctcaatggaatgcgtgatgttatgatcgtaatgagtgtagaatgggcagtgctgctcatattagcattctatttagatcaaacctctttgctaggcggtggtgtcaggaaaaatccttttttctgcttcagatgtttacagaagaaatgtgcaacatcattgcatgaacctagctttgtccaacaggattccaaagtcattctcgatatggagaaatctgatgttgctctagaaagaaaagtagttgagcaatttttgatagatcccaatgcaaaccaagctatcatctgtgataacctcaggaaggtttatcatggaagggatggaaaccctgacaagctggctgttagaggtttatctcttgtccttcaaaagggccagtgctttggaatgcttggtccaaatggagccgggaaaacatctttcattaatatgatgattggactcattaaacctacatctggtactgcttatgtccacggaatggatataaatatggacatgggtgacatatatacaaatatgggagtgtgcccacaacagaacttgctttgggaaacactgactggaaaagaacatcttttcttttatggtaagttgaagaatcttaaaggttctgcattaatgaaggctgttgaccactctctgaagagtgtaaatctatctcatggtaatgttggtgataagcaagtgaagaaatacagcggaggcatgaaaagaaggctcagcgtggcaatctcattgattggggaccctaaagttgtcttcatggatgagccaagcacaggaatggacccagcatcaagaaataacctatggaatgttgtgaaggaggccaagaaaaaccgtgcaattattcttactactcactcaatggaagaggcagaggtattgtgtgaccggcttggcatctttgttgatggcgatttccaatgccttggaaaccctaaagagctaaaggctagatatggggggacatacatattcacagtgacaacacccccagaccaagagatggaggttgaacatctagtgcgtcagttctcgcccagcgcaaacaagatctaccatctatctggaactcagaaattcgagctgccgaagcaagaggtgaaaatagcccatgtttttgacatggtcgagaaggcgaagcgccggctctcaatacatgcctggggactggtcgacacgaccttagaggacgtcttcatcaaggtcgccagaggagcacaagtgttcaacgagtttgcgtagataacacctttaggactgccttcgtagcaagcacgggaccccaattattggatgggcggactgcatagagaatcttgtggttttgtaggtatttttcattagtgagtcattcttgtgtggaaaataggctccatatgcttggtttacgtggttgtacataaataaatacatttttgagactgcagttgcagaatagaataattgtccagttgtgtccatatatattttttctttttcatgtgtggtgctcatgttttacttactccgtatctttaatcagcttattcgattggccttaatttata

SEQ ID NO: 8743 - DNA, 3124 bp, Zea Mays
ctacacccggattcgccttttttttctgaacgtcttcacggctctccttccttcgccgccgcccgcccggccatggattccccgaggggtcccgcgagcttcgcaacgcaggccaacgccctcctccgcaagaacctctgcgttcagaaacggaacctcaagacaaacatcggcatcactttcttcccaatcctgatttgcgtgcttctcatcgtgctccagaacgtcatcaacagcgagcttgacaagcccaagtacaaatgcggttgcgtctgcctcgagaccagtgccaacggaaggtgcgtaaggaaagagtgtggcattcagtactcgacgctggatcaggtggggagctgtccgattcccagcccgccacagtggccagccctgattcagatcccccgtgctgatttccgggctgcaaggacgttctcccaaccgtttaatgatttgcctgatccattttgccgtgactcctggtcttgccctgcaactgtccttgtcactgggaaggacagagcggttgcagaagctatatcaagagggctgtttcctgtcctttctccgtctttgaatgcaacagatttactggatctcttctccaagatagtcgctatatacagtgtgttgaaggtgctccgttatggcgtgaaactgcatcaattatcaaccatgaatttttaaagggttatagacaacgaggaggacaaataaacgaatttattgcaggttatgacttcttgggcacaacacagtatggcctcggtgtaaatgtttggtacaactctacttacaatgataacaatgcatattcatttatctcaacattgcgggttccacgcttggtgaatgcagtatccaacgcttatctgaaattaatcaaagggactggggtagacatgctacttgagtttgtaaaagatatgcccaaagttgggacaagttttcagttggatctgtcttctcttctgagtgtcttattcttcacatggatcatcgaacttcttttcccagttatgttgacatatctggtgtatgagaagcagcagaagctaaggattatgatgaaaatgcacggtctgaaggatgggccttactggctgatatcttattcttatttccttgctctatcaatcgtctatatgttattctttatgatttttggctccttgattggtaattgtattacaacgttactcatgaatattctgttgtggcaaataaatcttcattgtcttgactagccttcttctgttcaggtctcaattttttcagagtaaatgaatatagcatacaagctgtttttttcttcgtctgtataaatttgcagattgcacttgcattttttgtggcatctttctttttgtctgtcaagatggccacagtgattggctacatgtatgtatttggctctggcttacttggtgcatttcttttccgtttctttgttgaggacaaaacttttccctatggttggacattagtcatggagattgtcccaggattttccctctatcggggcctatatgaacttggtcagtatgcattctcgggaagcagtataggaactactggtatgacctggagaagtctgaaagatcccctcaatggaatgcgtgatgttatgatcgtaatgagtgtagaatgggcagtgctgctcatattagcattctatttagatcaaacctctttgctaggcggtggtgtcaggaaaaatccttttttctgcttcagatgtttacagaagaaatgtgcaacatcattgcatgaacctagctttgtccaacaggattccaaagtcattctcgatatggagaaatctgatgttgctctagaaagaaaagtagttgagcaatttttgatagatcccaatgcaaaccaagctatcatctgtgataacctcaggaaggtttatcatggaagggatggaaaccctgacaagctggctgttagaggtttatctcttgtccttcaaaagggccagtgctttggaatgcttggtccaaatggagccgggaaaacatctttcattaatatgatgattggactcattaaacctacatctggtactgcttatgtccacggaatggatataaatatggacatgggtgacatatatacaaatatgggagtgtgcccacaacagaacttgctttgggaaacactgactggaaaagaacatcttttcttttatggctgttgaccactctctgaagagtgtaaatctatctcatggtaatgttggtgataagcaagtgaagaaatacagcggaggcatgaaaagaaggctcagcgtggcaatctcattgattggggaccctaaagttgtcttcatggatgagccaagcacaggaatggacccagcatcaagaaataacctatggaatgttgtgaaggaggccaagaaaaaccgtgcaattattcttactactcactcaatggaagaggcagaggtattgtgtgaccggcttggcatctttgttgatggcgatttccaatgccttggaaaccctaaagagctaaaggctagatatggggggacatacatattcacagtgacaacacccccagaccaagagatggaggttgaacatctagtgcgtcagttctcgcccagcgcaaacaagatctaccatctatctggaactcagaaattcgagctgccgaagcaagaggtgaaaatagcccatgtttttgacatggtcgagaaggcgaagcgccggctctcaatacatgcctggggactggtcgacacgaccttagaggacgtcttcatcaaggtcgccagaggagcacaagtgttcaacgagtttgcgtagataacacctttaggactgccttcgtagcaagcacgggaccccaattattggatgggcggactgcatagagaatcttgtggttttgtaggtatttttcattagtgagtcattcttgtgtggaaaataggctccatatgcttggtttacgtggttgtacataaataaatacatttttgagactgcagttgcagaatagaataattgtccagttgtgtccatatatattttttctttttcatgtgtggtgctcatgttttacttactccgtatctttaatcagcttattcgattggccttaatttata

SEQ ID NO: 8744 - DNA, 3345 bp, Zea Mays
acacccggattcgccttttttttctgaacgtcttcacggctctccttccttcgccgccgcccgcccggccatggattccccgaggggtcccgcgagcttcgcaacgcaggccaacgccctcctccgcaagaacctctgcgttcagaaacggaacctcaagacaaacatcggcatcactttcttcccaatcctgatttgcgtgcttctcatcgtgctccagaacgtcatcaacagcgagcttgacaagcccaagtacaaatgcggttgcgtctgcctcgagaccagtgccaacggaaggtgcgtaaggaaagagtgtggcattcagtactcgacgctggatcaggtggggagctgtccgattcccagcccgccacagtggccagccctgattcagatcccccgtgctgatttccgggctgcaaggacgttctcccaaccgtttaatgatttgcctgatccattttgccgtgactcctggtcttgccctgcaactgtccttgtcactgggaaggacagagcggttgcagaagctatatcaagagggctgtttcctgtcctttctccgtctttgaatgcaacagatttactggatctcttctccaagatagtcgctatacacagccatggtacacacagttgctagagcctgcatttttctctggtcgtacattgtatgtgatccagcctgagtgcacacctgtcatgtcacagaccattacatataatactgggggcataccctttcagctcaatatacagtgtgttgaaggtgctccgttatggcgtgaaactgcatcaattatcaaccatgaatttttaaagggttatagacaacgaggaggacaaataaacgaatttattgcaggttatgacttcttgggcacaacacagtatggcctcggtgtaaatgtttggtacaactctacttacaatgataacaatgcatattcatttatctcaacattgcgggttccacgcttggtgaatgcagtatccaacgcttatctgaaattaatcaaagggactggggtagacatgctacttgagtttgtaaaagatatgcccaaagttgggacaagttttcagttggatctgtcttctcttctgagtgtcttattcttcacatggatcatcgaacttcttttcccagttatgttgacatatctggtgtatgagaagcagcagaagctaaggattatgatgaaaatgcacggtctgaaggatgggccttactggctgatatcttattcttatttccttgctctatcaatcgtctatatgttattctttatgatttttggctccttgattggtaattgtattacaacgttactcatgaatattctgttgtggcaaataaatcttcattgtcttgactagccttcttctgttcaggtctcaattttttcagagtaaatgaatatagcatacaagctgtttttttcttcgtctgtataaatttgcagattgcacttgcattttttgtggcatctttctttttgtctgtcaagatggccacaggttaataactcaaaccttttaccttcaagtcagaactttattttttgaaagtgacagagggaatttcattttgctccttctgcagtgattggctacatgtatgtatttggctctggcttacttggtgcatttcttttccgtttctttgttgaggacaaaacttttccctatggttggacattagtcatggagattgtcccaggattttccctctatcggggcctatatgaacttggtcagtatgcattctcgggaagcagtataggaactactggtatgacctggagaagtctgaaagatcccctcaatggaatgcgtgatgttatgatcgtaatgagtgtagaatgggcagtgctgctcatattagcattctatttagatcaaacctctttgctaggcggtggtgtcaggaaaaatccttttttctgcttcagatgtttacagaagaaatgtgcaacatcattgcatgaacctagctttgtccaacaggattccaaagtcattctcgatatggagaaatctgatgttgctctagaaagaaaagtagttgagcaatttttgatagatcccaatgcaaaccaagctatcatctgtgataacctcaggaaggtttatcatggaagggatggaaaccctgacaagctggctgttagaggtttatctcttgtccttcaaaagggccagtgctttggaatgcttggtccaaatggagccgggaaaacatctttcattaatatgatgattggactcattaaacctacatctggtactgcttatgtccacggaatggatataaatatggacatgggtgacatatatacaaatatgggagtgtgcccacaacagaacttgctttgggaaacactgactggaaaagaacatcttttcttttatggctgttgaccactctctgaagagtgtaaatctatctcatggtaatgttggtgataagcaagtgaagaaatacagcggaggcatgaaaagaaggctcagcgtggcaatctcattgattggggaccctaaagttgtcttcatggatgagccaagcacaggaatggacccagcatcaagaaataacctatggaatgttgtgaaggaggccaagaaaaaccgtgcaattattcttactactcactcaatggaagaggcagaggtattgtgtgaccggcttggcatctttgttgatggcgatttccaatgccttggaaaccctaaagagctaaaggctagatatggggggacatacatattcacagtgacaacacccccagaccaagagatggaggttgaacatctagtgcgtcagttctcgcccagcgcaaacaagatctaccatctatctggaactcagaaattcgagctgccgaagcaagaggtgaaaatagcccatgtttttgacatggtcgagaaggcgaagcgccggctctcaatacatgcctggggactggtcgacacgaccttagaggacgtcttcatcaaggtcgccagaggagcacaagtgttcaacgagtttgcgtagataacacctttaggactgccttcgtagcaagcacgggaccccaattattggatgggcggactgcatagagaatcttgtggttttgtaggtatttttcattagtgagtcattcttgtgtggaaaataggctccatatgcttggtttacgtggttgtacataaataaatacatttttgagactgcagttgcagaatagaataattgtccagttgtgtccatatatattttttctttttcatgtgtggtgctcatgttttacttactccgtatctttaatcagcttattcgattggccttaatttata

SEQ ID NO: 8745 - DNA, 3398 bp, Zea Mays
tctacacccggattcgccttttttttctgaacgtcttcacggctctccttccttcgccgccgcccgcccggccatggattccccgaggggtcccgcgagcttcgcaacgcaggccaacgccctcctccgcaagaacctctgcgttcagaaacggaacctcaagacaaacatcggcatcactttcttcccaatcctgatttgcgtgcttctcatcgtgctccagaacgtcatcaacagcgagcttgacaagcccaagtacaaatgcggttgcgtctgcctcgagaccagtgccaacggaaggtgcgtaaggaaagagtgtggcattcagtactcgacgctggatcaggtggggagctgtccgattcccagcccgccacagtggccagccctgattcagatcccccgtgctgatttccgggctgcaaggacgttctcccaaccgtttaatgatttgcctgatccattttgccgtgactcctggtcttgccctgcaactgtccttgtcactgggaaggacagagcggttgcagaagctatatcaagagggctgtttcctgtcctttctccgtctttgaatgcaacagatttactggatctcttctccaagatagtcgctggctcagatacacagccatggtacacacagttgctagagcctgcatttttctctggtcgtacattgtatgtgatccagcctgagtgcacacctgtcatgtcacagaccattacatataatactgggggcataccctttcagctcaatatacagtgtgttgaaggtgctccgttatggcgtgaaactgcatcaattatcaaccatgaatttttaaagggttatagacaacgaggaggacaaataaacgaatttattgcaggttatgacttcttgggcacaacacagtatggcctcggtgtaaatgtttggtacaactctacttacaatgataacaatgcatattcatttatctcaacattgcgggttccacgcttggtgaatgcagtatccaacgcttatctgaaattaatcaaagggactggggtagacatgctacttgagtttgtaaaagatatgcccaaagttgggacaagttttcagttggatctgtcttctcttctgagtgtcttattcttcacatggatcatcgaacttcttttcccagttatgttgacatatctggtgtatgagaagcagcagaagctaaggattatgatgaaaatgcacggtctgaaggatgggccttactggctgatatcttattcttatttccttgctctatcaatcgtctatatgttattctttatgatttttggctccttgattggtaattgtattacaacgttactcatgaatattctgttgtggcaaataaatcttcattgtcttgactagccttcttctgttcaggtctcaattttttcagagtaaatgaatatagcatacaagctgtttttttcttcgtctgtataaatttgcagattgcacttgcattttttgtggcatctttctttttgtctgtcaagatggccacaggttaataactcaaaccttttaccttcaagtcagaactttattttttgaaagtgacagagggaatttcattttgctccttctgcagtgattggctacatgtatgtatttggctctggcttacttggtgcatttcttttccgtttctttgttgaggacaaaacttttccctatggttggacattagtcatggagattgtcccaggattttccctctatcggggcctatatgaacttggtcagtatgcattctcgggaagcagtataggaactactggtatgacctggagaagtctgaaagatcccctcaatggaatgcgtgatgttatgatcgtaatgagtgtagaatgggcagtgctgctcatattagcattctatttagatcaaacctctttgctaggcggtggtgtcaggaaaaatccttttttctgcttcagatgtttacagaagaaatgtgcaacatcattgcatgaacctagctttgtccaacaggattccaaagtcattctcgatatggagaaatctgatgttgctctagaaagaaaagtagttgagcaatttttgatagatcccaatgcaaaccaagctatcatctgtgataacctcaggaaggtttatcatggaagggatggaaaccctgacaagctggctgttagaggtttatctcttgtccttcaaaagggccagtgctttggaatgcttggtccaaatggagccgggaaaacatctttcattaatatggtatgatgattggactcattaaacctacatctggtactgcttatgtccacggaatggatataaatatggacatgggtgacatatatacaaatatgggagtgtgcccacaacagaacttgctttgggaaacactgactggaaaagaacatcttttcttttatggtaagttgaagaatcttaaaggttctgcattaatgaaggctgttgaccactctctgaagagtgtaaatctatctcatggtaatgttggtgataagcaagtgaagaaatacagcggaggcatgaaaagaaggctcagcgtggcaatctcattgattggggaccctaaagttgtcttcatggatgagccaagcacaggaatggacccagcatcaagaaataacctatggaatgttgtgaaggaggccaagaaaaaccgtgcaattattcttactactcactcaatggaagaggcagaggtattgtgtgaccggcttggcatctttgttgatggcgatttccaatgccttggaaaccctaaagagctaaaggctagatatggggggacatacatattcacagtgacaacacccccagaccaagagatggaggttgaacatctagtgcgtcagttctcgcccagcgcaaacaagatctaccatctatctggaactcagaaattcgagctgccgaagcaagaggtgaaaatagcccatgtttttgacatggtcgagaaggcgaagcgccggctctcaatacatgcctggggactggtcgacacgaccttagaggacgtcttcatcaaggtcgccagaggagcacaagtgttcaacgagtttgcgtagataacacctttaggactgccttcgtagcaagcacgggaccccaattattggatgggcggactgcatagagaatcttgtggttttgtaggtatttttcattagtgagtcattcttgtgtggaaaataggctccatatgcttggtttacgtggttgtacataaataaatacatttttgagactgcagttgcagaatagaataattgtccagttgtgtccatatatattttttctttttcatgtgtggtgctcatgttttacttactccgtatctttaatcagcttattcgattggccttaatttata

SEQ ID NO: 8746 - DNA, 2313 bp, Zea Mays
ctcaaccgttcggctggtccgggtgcatgagccgggtccactcgggaagtgaccgggacctcgcagcatctccctcgccccaccccaacctccacctccaccgccacccattgaaaagcagagcggcagactggcagaggcaggcgctctcggctctcctcgtggacaaaaccaccggctcccgatatccaaattggaacaggggattctgaacttggggtttgttccggggaccgattctggcatcggcagacgggatgtcagcccccctcgaccgacttgctaggccatgttttgaagggtttgtacataacgatgaaaggaaagagagcagatctgatgcagacaactcagaaggagataagaagactaagatcggatctttcaagaaaaaagcaattaacgcggggaacaaattcaggcattccctgagaaggagaagcaaaaagaagaccgaaaggggggattccatcaaggatataagggacattaaagaacttcaagatgttgagacatttcgacaatgcttaattgacgaggatttgctgccgccacagcatgacgattatcacatgatgttaagattcctaaaagcacggaaatttgatgttgagaaagctaagaatatgtggtcagacatgcttaaatggaggaaggaattcggggttgacaaaatagaggaatttgagtacgccgagttagatgaagttaaaaagtattacccacaattttatcatggggtagataaagagggaagacctgtctacatagaattaatagggaaagttgatgcgaacaagctagtacaagtgacaactctagatcggtatgtgaaataccatgtcaaggaatttgagaggtgcttccagatgagatttcctgcttgctccattgctgcaaaaaagcacatagattcgtcgacttctatttttgatgtgcaaggcgtgggtttcaagaacttctcaaaatctgccagggaattaatcacacgattacagaagatcgacaacgataactacccagagacattgtgccagatgtatataattaatgcgggccaaggcttcaagatgttatggagcacaataaaatcattccttgatccaaaaactgcttccaagattcatgttcttgggaataagtatcaacataagttgctcgaaataattgacgagtgtgaattgccagaatttcttggtggcaaatgcaagtgtattgaaggttgcgaaagatctgacaaaggtccttggaaggatcccaacataataaagagagtcctcaatggcgaggcgaactatggcaggcaaattgtgaccatatccagcactgatggaaggatagtcagttatgcttggccagtgcacccaaatagaaaaggcagtgatgcatctgccgagtctgggtctgaagtggaagacgtaacatctcctactgcatcaaggaacctgattacacatcctattttgacccctgttcacgaggagtcaaaattgtcggcacatggttcttcatctgttgttcatgcttctattggagaaaacattcctgttgtggacaagattgttgatgatggatggggtagtcccagatctagtccacaagctgcttcttcaggttctttgtccctgaggaatttgcatggcacatttgaaggactcagagctcaaactatcacatggctgacattcttgatgatgaccctttttgccatgctttgttctgtcccaagcaagatggctagaaggatctccaaccaatctggacaaggtgcaggtgcttgaaacgaagccgtctgagatgccgtttgaaaaggaagaattgctcaatgcagccgtccgccgtgtggatgcattggaagctgagctgatttccacaaagaaagccctttatgatgctttgatgcgacaggatgagctactcgcgtacattgataggcaggagctgatcaaatttcgtaaaaagaagttctgcttctaagatttgaccgtggagcagctgttcatgtccggagccgtttatgtgtatattggattgcggctaatatgtagtagaatgtaatgtgtccatctttagaagtgtgtaaagtatagtaggaaagaaaataggtgcgttgtggtgtgcgcctctcctccccgaggtgaatgtgtggtctagcacttgtgtgctaccctaaattgtaatcttggaagttggtgtatagctgattgcgtgctaatacgtagttgtaaatgaaatcgcatgtgctcgtgtttacatgaaaaactaaatatagcagcaccaaaaataaaaccggttatttggttagaatcatat

SEQ ID NO: 8747 - DNA, 3286 bp, Zea Mays
gtaacaccagagtcacatgcgtcggatttcgggctgagcagggcaggaggcgaagacaggaaaaaaagaagggagagacatgagagcgaggtccttcttgccttcttgttcgtttgctgctctccccgctgttcctgtggttatctcctccttttgccttcaatgctgccgcgttactactggatctgactgacagacacactgcgtccgccgccttgaagctaatcttggtgacttggtcccgggctcccggccggcctccccaagattctcttgttctttcggaattccgtcattcctttgcagcctctccttcgcagcagaatccgcgtggaacaagtgctgcgcgtgttgctggaggtgagttttcacctcctccgcgttcttcttcaccgccaaaggcccaagaggaatttcgattggttgaagcgcgaatccgcggggttggcaggtcgatcctcccttggattgcagcgtgtgccatggttctctcctccaatcccaccaacaaggcagcagctcagctgtcacagccggcactgtagtgctttctagcctgctgctgggctccaatggcgtcctcaccttcgccttccccgggcaccatcagggcccccttgccgccttccagcgcaaccccgtcaccggcaaccaccacgcccacgccggcctccccggccccggtgacgcagcccaatgctaccccggccgaccctccctcgtcgccggtcgcgcctccccccgtcccctccgcatccacgccaccgccacagctcacttctccaccgccctccttgcctccgcctcctccagacgccgtgccaccaccgccacttgttgcctctccgccacccgccccagcagccgtagtgcccccaccctcgccgccggcgccggttgcagtgcccccaccacctacacctgctgccccgccaaaggcgtcgcctatacatataaggccccctgcggccgcgtcgccacccccaaccattctgccaacgcccaacccgccggctgacccaacgccgccgacattagcgcagccacctccaccacggcgccggccaccaagaacgcctcagacagaacctccacccctggcaccaccaccttctggaattcctgtcaaaccctctacgagcagtccctcaccgacatccgcagatcctttgatccccactccctctagcccctcacctccagggacgacaacgccaggctctggtagcactccatcggtgccagccccagcaatggcagccgatccagttcgcccggtaacgactgggggttcaaacaagtcgtctagtccagcctcacagagcagcggctccccagtagacagtggcggaatgtcttcaggtgcaaaggcaggcattggtgcagtcgttgccattcttgtgcttattagcttcgttggagctgcattttggtacaggaagaaacggaggagagttcatggataccatgctggcttcttaatgccttcgcctgcctcgactactacacaagtgctagctaaaacgaatttcagtgctgggagtcctgaatcaaaagattcaatgccagagttcagcatgggcaattgtcggttcttcacttatgaagaattgtatcaggtcacaaatggtttctctgcacagaacctgcttggggaaggtgggttcgggtcagtgtataagggttgcttggctgatggagagtttgcggttaagaaactgaaagatggtggtgggcagggggaacgcgagttccatgctgaggtggatattatcagtcgtgtgcatcatcgccatctagtatctcttgtagggtattgcatttcagatgagcagagattgcttgtctatgattttgtgcccaacaacacgcttcactaccatcttcatggacttggagtaccagtcttggaatggccatctagggttaaaattgcggctggttcagcacgcggaatagcctatcttcatgaagattgtcaccccagaataatccacagagatataaagtcctctaatattttgctggataataacttcgaagcactggttgctgattttggtcttgcaaggatagctatggatgcttgcactcatgtaactacacgagtgatgggaacttttgggtaccttgctccggagtatgcctcaagtggcaagctgaccgagagatctgatgtattctcatttggtgttgttctcttggagcttattactggtagaaagcctgtcgacgcgtcgaagccattgggcgatgagagccttgttgagtgggtaagctatatcagtaatttgatccatgaaaaggtttccagttttctcacccttcagtagcaaatgaaaactagccatatctttaagttatttgcacatttcaaaatcttaagtagacttattcactgattacgtccaattcagtatgggatttaacagtgtatccagtccagccctacttcacgctatcgatatcttcaaatcccatctcgaagtgtggtttttctggaaaaaataatgctggggaacaatgtgggccagcaattttttttgtgacagcgtagtcatttgcaggctaggccattgctcacgcaagcgctcgagaccggcaatgctggggagctggtggatgcccggcttaataggaactacaatgaagtcgaaatgttccgtatgatcgaagctgctgcagcctgtattcgacattcagcatccaggaggcctcggatgagccaggttgtgcgggtgcttgatagtctcgccgacgtcgatctgactaacggcgttcagccgggcaagagcgagatgttcaatgtcgcgaacacggccgagatcaggatgtttcagcggatggcgttcggcagccaggatttcaggaccgatttcagccagtccagctggagcagccagagcagaggccttgacgcatctggttccaggccattgtaaccctcgtcgtcgtagattcctacatctaactagctagggtgtttcgtgatgggttttgtacgtcatgtaattctttttgattggatcaatcgtgtgattattcttttgccatccctgtcttgtacgactgacatagatcatgtgctgcgctgaggccctgcttgcctgtgcgaagacctgctaactgatgaagagagactgctgcgtttagtcccaattagtgaattgctgtatcgaatttcctgtaattagcagtgcttttgaaatcagcggtttttttacaaggaacgctcagttcgagctgaacttttggggaaagattactcagatgtgtgccttttaga

SEQ ID NO: 8748 - DNA, 1224 bp, Zea Mays
aaggcaacacttggccattggctaccaaactgacttgatcatggcatatgcatgtatcacttttgaacattgttgtttaattgaagaaatgttgcaaccatccatttttgttcaacttcagtattcactgtgtaatggtcaaaggataaaactcgatgaatgaagaatgtacaaagagcaaattatggctaattgaccttgctggaagtgaacaggggagctcttagcacatattagaacagtgaagatgtacagttgggagaaactattcactgaacgtttggtggaaagaagagaatcagaagtgaagcatctcgcggtatttacttgtgttgcactctttaacacactaatatcaccgctaaactcatttccatgggttattaatgggatgattgatgctgttatctctagcagacgactgagtaattatttatctactccagagcatcactcatccgagttaaatgcctctgctgaccttttaaaccaccactttaagagatattccaaagtaactcataatccaatggccatcatctttcagaatgtatcctgttcttggtctagcagctctgttgctgaactgaacatagttctcagagatatatctttgcagctacaaaagggctctttattgcaattgtaggttggttctggtaaatcatctttattgaacacaatcattggagagactcgtgtcatcagtgggttcaattgcctatgtaccacaggtaccatggattttatctggctttttacgagataatattttgcttggtaaagaatttgatccaaggagaggagatatgtcacatattggagagaaaggtaccaacttatctggtggacaaagagctcgtctagcattggcaagggctttgtaccacaattctgatgtatacttgtttgatgacatccttagcgcggttgactcccaagttgcttcgtgcatcctggaaaaggctattatgggggcaccaactaatgcagaaaacaagattactaagcacacacaatcttcagtaaaacgacagagttctgatggctctgttatgtccgatggccccgggcagccgtcggacataacacaatacgtctgacggctggcagagagactaattggtctactaaagtagctactctgacctgctcaatatgggagacagctatgacagattctgctcttctgaagaagctattttgatcgattttggctgcaac

SEQ ID NO: 8749 - DNA, 2666 bp, Zea Mays
aaaggagataaaaagtccccaaaccgaggcgggagaaaaggcgcgaggagcgaaacaaaccaaaaaaggccgctcacaggtcacgacatgctggccagtgggcccaccacgcactctgactgcccggcggaaaacctttctcgtcctcttctgtcgtctcacctctctctctctctctctctctcacacacacacacacacacagtctcccctcaccagcaaaaggacaagcagaccctcctccggtcctcccactcttccctgtccctctgccagctcaaccctctaccatggactaggaggccctagccttcgccgcgtgcatgtctgctcgggtgcagggacataggcatggaaccgcccgcccccgcagcgccacgaggggccgagcgcgccgaggctgtcgctgcggagccggcttccggggccggggccagagtcgaggtgcaacagacggggcccgagggctccgtgaaggcgagccgcggggggcgggaggtgccgctgcggctgcgcctcgggagggcccgtcggcgggcgggacctgtcacaccgacgccgtcgtggaagatggaggacgacggagtccgggaggggccgtccgcgcttgcgcctgcggccgcttccgccgcggcgaggaggagctcggcctcggcgcgccagctcggcgccagtctctgggagatccacgacgtggcgcgggaggtacgccggagcaggcgacggggtgggagggccatcgccgccggtcgggagcacggcggcggcggagaactggaccagagttcaggtggcattcgtaggcatgttgcagactcgtcgatgaaacatcataagttcgatcaagaaagaagccatagaatacaacctttttctcctgcaagttatacaagctcagttggggattccaatgtgaatctaactagaagtccgactcgttctttgggcatcatgggtagatctatgggggaaggctatagccttaaaacatcaacagaactattgaaggttctaaatcgaatttggagtcttgaagaacagcacactgctaacttgtcagtggttaatggattgaaactggagttacagcaggctcagacacatattcaagaactcctgcaagagagacggcagtacagacacgaagtttcatcactgatgcgacaactctctgaaaacaaacttgttagaaaaaacaaggatcacatgaaggttgacacagctgtgcgttccctgcaaggtgaactagaggatgagaagcgtctgaggaggcattctgaggacctactcaggaagttgggcatggagttgtctgaaataaagtcagcgtttctcaagtcagtcaaggaccttgagaaggagaagaaaggaaatcgcctcttagaagatctttgtgaccagtttgcaatgggcatcaggaattacgaagaggaactcagagtggtaaagcaaagaaatgtcaagaattatgagctcaaatttgataattcggtgctccatatgtcagaactatggcttgatgaacgaatgcaaatgcaaaatacagatgtcaatggggaattggctcataaaaccacaataacagaaaggctcagcggtgaaatacaggcctttcttctttctaaaaaagcaggtagctctatgaataatgaaaaacatatgaatgataatactagattacgacgtcaatcacttgagtctgtccatttgaatggagccaccagtgctccccagtttgctgaagatgatgacgactctattgctagtgatttgaattgctttgaactgaatatgcacgggcatatgggatcccgcagaagtggcacaggagccatgaatgtgcataaaagaagatcagagcatcctcatgttatatctgctgaaggtttatgcatgtccagtgtgccagtttatttacagaaaggcattgcaaggcccagtagcagcaaattgcagcctgccagtaaaataccagaaatcagctcacaaagcaatgccagaatcactccagcagaagagcagaatggaagcacaggcacccaaattattcaagggtccaacaatgggtcaacgatgaacaacccagatgcacatcatgttgattacctggggcaggaatcctttgatcatttctcccgaacaagtctcttttgtgaaggcactacttcgggggatctgggtaatgtcgggagccccacgcggcaactgaaataccaatccacatctttggaccccgagataacggaatgctcacctgaacagccagtaggtgtgatggagaacaccctgaaggcaaaattacttcaagcaaggctagaggggcgacatgcccgattaaaggcatcaggtggctcctcaactagtaggagaaagtgagagtgctgcagattccggggtttgactgtttgaagcccacacgaagaaatcaaaggtgtaatatagctgacttatctatggaacttcctttggccgtatcaattggttcagtatctgtgtacatggactttgtgccatctgaatacatgaatcctattttcatatgtgaatcatcttccatgtcaattatgctgttagttagatgccagcactctttaggctaatagttcagactcagaaggattttggttatggcacctcgtatcttgctacctccgtgatacttcact

SEQ ID NO: 8750 - DNA, 4245 bp, Zea Mays
gaaaattgcccaactcatagtgtcatactttcgatgagaagtcaattcggaaaatgctcgtcaaccagatgcttctctgttatggttccatatttgcatgtcaggaaaacactgtcaagataagcctcttgaacaatcttgaccagtgcctgaagtctgggaagaagtacctgtggtttaagtttctcattacaaatgcatgtgttgctctattgtcagggttaaaggaattcctcgctttacgtggtgctcaatcattgccaattgatatattaagtatgattcagtccattttcaaggccattttagtagagcctgaaatttctacagcacagcggcgagcagcgtgcgagggtctcggtttattagcacgagctgggaatgatatctttacagcaaggatggctcgctctcttctcggagagctggtaacaacaacagatctgagctatacaacttctgttgcattttcattgggttgcatccatcgaagtgctggaggaatggcattatctactctggttaccccaactgtgagctcactatctcatttgagtaaaagctctaatttcaatctgcagttgtggtcactgcatgctcttcttttaacaattgaagctgctggcttgtcttatgtctcgcaagttcaggggacacttttccttgctatggagattctcctcttggaagaaaatggatatgttgatcttcgacaaggaattggtcatcttattaatgcaatagttgctgttattggtccagagcttgctcctgatagcacattcttttcacgatgcaagtctgttattgcagagataagttcatcaaatgaaatggctacacttttagaatcggttagattctcccagcagcttgtgctttttgctcctcaagctgttcctgtgcacttgcacgttcaaggtcttatcccaatgctttactcaagacagccaagtcttagatatttagcagtgtcgacactgcaccatctgattgaaagggacccggctgcaatgattgacgagaatattgaagagaatctgttcagtatgcttgatgaggagaccgattcagaaacagcgatgttggttcgtgcaactattattcgcttattgtatacatcatgtccagttcttgctacgtcaattagaagaaacacaggtgaagttctgtcatgttttgggcataatcctcctgatagtacatctgagaatgatgtgtactatggagaagatgaagacaacatgatttccagctcaaagcagcagcaaatccgctgtgctggttctatatccagccagtttcctccaaggaataaacacctcagatatcgtaccagggtttttgctgcagaatgcgttagccatgtaccaattgcagttggagcagaacctgctcattttgacctcttgttggcaaggagcgcaatatctcaaggcacttatttgtcaaatgattggctagtgcttaaactacaggaactggtctcactttcataccagttcggcaaggcagtagatccggaatttcctggccatatcttgctggaacaatttcaggcccaacttgtttctgctgttagaatggctataagcactgcttctggtccacttcttttggaggctggacttgaactcgctacaagggttatgacgagcagcataattggtggggatagactagctcttagtcgcttgttttctctgataacacgcccgttaagtgacatagagggcctactatatccatcttttgctgactgggtagtgtgcaagataaaagttcgccttctaactgcccatgcagcagtcaagtgtaacacctatcaattcttgaggatgagggaaaatgctcctaatgaataccagcaattggcaccttcacttgtaaacagttcaactctattaggaaaatactggattcgagcactcaaggattatgtttctataagttttggtttgcactcaaaaatcaattacaagccattccttgatgggattcagtcattattagtcttgtccaaggtgcagaggtatcttgatgaagtttggttattaattcttaaagcaacagctcttgatgccgcgcctttggattttgatgagaataatcctaaaaatttactcgaacaaacatttatatctgggcattgtatggtcaaattggacagaactgaattccaatttctttgggggttatctatccttgtgctgttccattcctgccaatcaatgaagaataattctttgaagatcaaccttgactttaaacaagacaaaaactttggggaatttattgttcatggacttgatgacaaaagaccgtgtgatcaggtcttacgcgtgctttcgtccctcacaacagaagtctttttcagcaataattttatttcagtggatatttgccagcaactcctccaggcacttacatatgcagattgttcaagcgctcctatcatccacctattcacccagattctgccctgacaatttttttgaggttgaagcctttgtcttctctgcaatagagttattgtctcagtatctgggtctgatacttcaatgggatgggagttctcagaataattcaagtaacactttgatttctgagttgtctattgcaagcgagacgatggcttatcggatcaaaggagagtatttgtggaagctggtgatgttagtggtatctacttcacaccaatcatttcaacaagtttcaactaatttatgcttctcaaatattatatgcttcctccaaaatatcttccctttcatgaggaaaatttttagagcttcaggctgtgcgtacaggttattcaaggttcatttcgtagtaccaacatacaggtgcacatgctgggtctgcaagtactgagaagctatgcacagaaggagctaactgaaggttcagaaacaaagttggattcttttatgatgttgcttacggaattgttgggagacttgtttttggtgatggagactacattgaaggaatgttcaaacaaaaaatctgtcagtgtcgttgatgaatgtttgaaacttgttttcctcttccacacactagcacaatcaaagaaataccgacaagatgctacaactcttctgctggaggccttgctgatggttttctctctgtccagtgatactgtttcacaggagcttgctgaagtgaacaccatttccagaaagttgttctctcattttattcagattccgtctgtggctatacagatcaaagacataatgctttctgcaccagctgaaaggagactacagcttcaggacatggtccgagcttcagtcagtcaagggcagataacggtgccagtggctacgagtgcacactcagaacagaatattcaggatagttgcagtaaaaaccctgggtccacatctgaagcttctgattgtgttgcaactcacgggaataatgacaatgaagttgttgatgatgactgggatgacgattgggatgctttccaatctcttcctgcaattgcaaatgatggtgttgattctggagaaatctctcttacaactaggtacaatgaacagatccctcaagaaaatagcagttacggttcttgtaatgcggatattacagctcgtgctatggaagacataacttgtgtggacaaggaacttgaggagccctctgatttgcaattctcaagtactgaacaacagcctaaacatgatttaccagggtcatcccacgaaggttgtgctaaacttgaaagacatccatctgttgattgcaaagagcaattagctgatgatgagacagcagatgaactgcagcagcaggttcatgaagacactgatcatgtaaataaagatagcgaagttctctctgcagaaattcatggggttaaattggatatccttgatgaagatgttgaagatgattccccaatgaattcaaacaatctatcagatatcgcagaggaagagtcctagggttggtacaatgcaacgagggtggaccgcaagcttgtcgagatagtagagaagagctgtccggttcctctgatgctggcataccagattttagtatgtcaggacacgtgatgagcaagagcggaggaaatgagcaaaatgttattttgcctgtatcaatatatattgcacgagataaaaataatataaggttacaaccatgatttttattttgtgccttcctccgcccctccgcttctaaataaatagttacctttgaatgaatttcaagaaaacccaatcaaga

SEQ ID NO: 8751 - DNA, 4486 bp, Zea Mays
aacagaaaattgcccaactcatagtgtcatactttcgatgagaagtcaattcggaaaatgctcgtcaaccagatgcttctctgttatggttccatatttgcatgtcaggaaaacactgtcaagataagcctcttgaacaatcttgaccagtgcctgaagtctgggaagaagtacctgtggtttaagtttctcattacaaatgcatgtgttgctctattgtcagggttaaaggaattcctcgctttacgtggtgctcaatcattgccaattgatatattaagtatgattcagtccattttcaaggccattttagtagagcctgaaatttctacagcacagcggcgagcagcgtgcgagggtctcggtttattagcacgagctgggaatgatatctttacagcaaggatggctcgctctcttctcggagagctggtaacaacaacagatctgagctatacaacttctgttgcattttcattgggttgcatccatcgaagtgctggaggaatggcattatctactctggttaccccaactgtgagctcactatctcatttgagtaaaagctctaatttcaatctgcagttgtggtcactgcatgctcttcttttaacaattgaagctgctggcttgtcttatgtctcgcaagttcaggggacacttttccttgctatggagattctcctcttggaagaaaatggatatgttgatcttcgacaaggaattggtcatcttattaatgcaatagttgctgttattggtccagagcttgctcctgatagcacattcttttcacgatgcaagtctgttattgcagagataagttcatcaaatgaaatggctacacttttagaatcggttagattctcccagcagcttgtgctttttgctcctcaagctgttcctgtgcacttgcacgttcaaggtcttatcccaatgctttactcaagacagccaagtcttagatatttagcagtgtcgacactgcaccatctgattgaaagggacccggctgcaatgattgacgagaatattgaagagaatctgttcagtatgcttgatgaggagaccgattcagaaacagcgatgttggttcgtgcaactattattcgcttattgtatacatcatgtccagtatgtccatcacggtggctggcagttttacgaaatattgttcttgctacgtcaattagaagaaacacaggtgaagttctgtcatgttttgggcataatcctcctgatagtacatctgagaatgatgtgtactatggagaagatgaagacaacatgatttccagctcaaagcagcagcaaatccgctgtgctggttctatatccagccagtttcctccaaggaataaacacctcagatatcgtaccagggtttttgctgcagaatgcgttagccatgtaccaattgcagttggagcagaacctgctcattttgacctcttgttggcaaggagcgcaatatctcaaggcacttatttgtcaaatgattggctagtgcttaaactacaggaactggtctcactttcataccagattagtactgggcaatttgaaggaatgcaaccaataggtgtgaagcttttgtgtttgataatggacaagttcggcaaggcagtagatccggaatttcctggccatatcttgctggaacaatttcaggcccaacttgtttctgctgttagaatggctataagcactgcttctggtccacttcttttggaggctggacttgaactcgctacaagggttatgacgagcagcataattggtggggatagactagctcttagtcgcttgttttctctgataacacgcccgttaagtgacatagagggcctactatatccatcttttgctgactgggtagtgtgcaagataaaagttcgccttctaactgcccatgcagcagtcaagtgtaacacctatcaattcttgaggatgagggaaaatgctcctaatgaataccagcaattggcaccttcacttgtaaacagttcaactctattaggaaaatactggattcgagcactcaaggattatgtttctataagttttggtttgcactcaaaaatcaattacaagccattccttgatgggattcagtcattattagtcttgtccaaggtgcagagaactgaattccaatttctttgggggttatctatccttgtgctgttccattcctgccaatcaatgaagaataattctttgaagatcaaccttgactttaaacaagacaaaaactttggggaatttattgttcatggacttgatgacaaaagaccgtgtgatcaggtcttacgcgtgctttcgtccctcacaacagaagtctttttcagcaataattttatttcagtggatatttgccagcaactcctccaggcacttacatatgcagattgttcaagcgctcctatcatccacctattcacccagattatcagattctgccctgacaatttttttgaggttgaagcctttgtcttctctgcaatagagttattgtctcagtatctgggtctgatacttcaatgtagggatgggagttctcagaataattcaagtaacactttgatttctgagttgtctattgcaagcgagacgatggcttatcggatcaaaggagagtatttgtggaagctggtgatgttagtggtatctacttcacaccaatcatttcaacaagtttcaactaatttatgcttctcaaatattatatgcttcctccaaaatatcttccctttcatgaggaaaatttttagagaaagagtcgaatcagatggtgagtgcacaagtcctaaagttgtctttggtgctatggttggcctagtgggatacttctatgtagagtgtgataaaaagatctcattgctcgaaaacaagatttctgattcctacaagctgttgaataagatactacttttttgcttgggagaagccactgctcttgcaaaacttgttcctgagatcatttatcgaagtgaaaatgtaagtaacaatgatgtgctcctttggggcagcttcaggctgtgcgtacaggttattcaaggttcatttcgtagtaccaacatacaggtgcacatgctgggtctgcaagtactgagaagctatgcacagaaggagctaactgaaggttcagaaacaaagttggattcttttatgatgttgcttacggaattgttgggagacttgtttttggtgatggagactacattgaaggaatgttcaaacaaaaaatctgtcagtgtcgttgatgaatgtttgaaacttgttttcctcttccacacactagcacaatcaaagaaataccgacaagatgctacaactcttctgctggaggccttgctgatggttttctctctgtccagtgatactgtttcacaggagcttgctgaagtgaacaccatttccagaaagttgttctctcattttattcagattccgtctgtggctatacagatcaaagacataatgctttctgcaccagctgaaaggagactacagcttcaggacatggtccgagcttcagtcagtcaagggcagataacggtgccagtggctacgagtgcacactcagaacagaatattcaggatagttgcagtaaaaaccctgggtccacatctgaagcttctgattgtgttgcaactcacgggaataatgacaatgaagttgttgatgatgactgggatgacgattgggatgctttccaatctcttcctgcaattgcaaatgatggtgttgattctggagaaatctctcttacaactaggtacaatgaacagatccctcaagaaaatagcagttacggttcttgtaatgcggatattacagctcgtgctatggaagacataacttgtgtggacaaggaacttgaggagccctctgatttgcaattctcaagtactgaacaacagcctaaacatgatttaccagggtcatcccacgaaggttgtgctaaacttgaaagacatccatctgttgattgcaaagagcaattagctgatgatgagacagcagatgaactgcagcagcaggttcatgaagacactgatcatgtaaataaagatagcgaagttctctctgcagaaattcatggggttaaattggatatccttgatgaagatgttgaagatgattccccaatgaattcaaacaatctatcagatatcgcagaggaagagtcctagggttggtacaatgcaacgagggtggaccgcaagcttgtcgagatagtagagaagagctgtccggttcctctgatgctggcataccagattttagtatgtcaggacacgtgatgagcaagagcggaggaaatgagcaaaatgttattttgcctgtatcaatatatattgcacgagataaaaataatataaggttacaaccatgatttttattttgtgccttcctccgcccctccgcttctaaataaatagttacctttgaatgaatttcaagaaaacccaatcaaga

SEQ ID NO: 8752 - DNA, 4783 bp, Zea Mays
atggggagaatggcggcggtaggcgcggcgggagagagcgctgcccacacagggggggtgggaggtggctggctcaaggttgtccatgtggctgctattgcagagcgtgaagctggttggttgctattagcttctcttctagcatccatgccaaaagaggagctggaagaccaggtgtttgatgttcttttgctatgggcgggtccttttactggaaatcctgaatcttaccttcgtcatatacaggattgggcatcagaattgcgggttctgtcagttgcagttgaggcgcttactgccttcataagaagttttgtttatccatctatcacaactactgattgtggaatcttgcttaatcctgtacttgcctaccttggcggagctctatccctcatatcttcgttgagatctaaacaagtgcccaatgtaaggtctgcgctggacctactcacaactagaacattgatggcttattggtccctttcgaatccagtggtatataaaactgagcaccagcagatacttcagctatgctcaagtccgttcagtgatccttctggatgggaagaaagctcatgcttgaagtttttgttggataagagagatgcttcactgggcccatggatacctggaagggattcatttgaggatgaattacgtgcttttgatggtggtgctgatgggtttctaccgtgtgtgtgggatgatgaaatcagcaacttccctcagagtcaattcggaaaatgctcgtcaaccagatgcttctctgttatggttccatatttgcatgtcaggaaaacactgtcaagataagcctcttgaacaatcttgaccagtgcctgaagtctgggaagaagtacctgtggtttaagtttctcattacaaatgcatgtgttgctctattgtcagggttaaaggaattcctcgctttacgtggtgctcaatcattgccaattgatatattaagtatgattcagtccattttcaaggccattttagtagagcctgaaatttctacagcacagcggcgagcagcgtgcgagggtctcggtttattagcacgagctgggaatgatatctttacagcaaggatggctcgctctcttctcggagagctggtaacaacaacagatctgagctatacaacttctgttgcattttcattgggttgcatccatcgaagtgctggaggaatggcattatctactctggttaccccaactgtgagctcactatctcatttgagtaaaagctctaatttcaatctgcagttgtggtcactgcatgctcttcttttaacaattgaagctgctggcttgtcttatgtctcgcaagttcaggggacacttttccttgctatggagattctcctcttggaagaaaatggatatgttgatcttcgacaaggaattggtcatcttattaatgcaatagttgctgttattggtccagagcttgctcctgatagcacattcttttcacgatgcaagtctgttattgcagagataagttcatcaaatgaaatggctacacttttagaatcggttagattctcccagcagcttgtgctttttgctcctcaagctgttcctgtgcacttgcacgttcaaggtcttatcccaatgctttactcaagacagccaagtcttagatatttagcagtgtcgacactgcaccatctgattgaaagggacccggctgcaatgattgacgagaatattgaagagaatctgttcagtatgcttgatgaggagaccgattcagaaacagcgatgttggttcgtgcaactattattcgcttattgtatacatcatgtccagtatgtccatcacggtggctggcagttttacgaaatattgttcttgctacgtcaattagaagaaacacaggtgaagttctgtcatgttttgggcataatcctcctgatagtacatctgagaatgatgtgtactatggagaagatgaagacaacatgatttccagctcaaagcagcagcaaatccgctgtgctggttctatatccagccagtttcctccaaggaataaacacctcagatatcgtaccagggtttttgctgcagaatgcgttagccatgtaccaattgcagttggagcagaacctgctcattttgacctcttgttggcaaggagcgcaatatctcaaggcacttatttgtcaaatgattggctagtgcttaaactacaggaactggtctcactttcataccagattagtactgggcaatttgaaggaatgcaaccaataggtgtgaagcttttgtgtttgataatggacaagttcggcaaggcagtagatccggaatttcctggccatatcttgctggaacaatttcaggcccaacttgtttctgctgttagaatggctataagcactgcttctggtccacttcttttggaggctggacttgaactcgctacaagggttatgacgagcagcataattggtggggatagactagctcttagtcgcttgttttctctgataacacgcccgttaagtgacatagagggcctactatatccatcttttgctgactgggtagtgtgcaagataaaagttcgccttctaactgcccatgcagcagtcaagtgtaacacctatcaattcttgaggatgagggaaaatgctcctaatgaataccagcaattggcaccttcacttgtaaacagttcaactctattaggaaaatactggattcgagcactcaaggattatgtttctataagttttggtttgcactcaaaaatcaattacaagccattccttgatgggattcagtcattattagtcttgtccaaggtgcagagaactgaattccaatttctttgggggttatctatccttgtgctgttccattcctgccaatcaatgaagaataattctttgaagatcaaccttgactttaaacaagacaaaaactttggggaatttattgttcatggacttgatgacaaaagaccgtgtgatcaggtcttacgcgtgctttcgtccctcacaacagaagtctttttcagcaataattttatttcagtggatatttgccagcaactcctccaggcacttacatatgcagattgttcaagcgctcctatcatccacctattcacccagattatcagattctgccctgacaatttttttgaggttgaagcctttgtcttctctgcaatagagttattgtctcagtatctgggtctgatacttcaatgtagggatgggagttctcagaataattcaagtaacactttgatttctgagttgtctattgcaagcgagacgatggcttatcggatcaaaggagagcttcaggctgtgcgtacaggttattcaaggttcatttcgtagtaccaacatacaggtgcacatgctgggtctgcaagtactgagaagctatgcacagaaggagctaactgaaggttcagaaacaaagttggattcttttatgatgttgcttacggaattgttgggagacttgtttttggtgatggagactacattgaaggaatgttcaaacaaaaaatctgtcagtgtcgttgatgaatgtttgaaacttgttttcctcttccacacactagcacaatcaaagaaataccgacaagatgctacaactcttctgctggaggccttgctgatggttttctctctgtccagtgatactgtttcacaggagcttgctgaagtgaacaccatttccagaaagttgttctctcattttattcagattccgtctgtggctatacagatcaaagacataatgctttctgcaccagctgaaaggagactacagcttcaggacatggtccgagcttcagtcagtcaagggcagataacggtgccagtggctacgagtgcacactcagaacagaatattcaggatagttgcagtaaaaaccctgggtccacatctgaagcttctgattgtgttgcaactcacgggaataatgacaatgaagttgttgatgatgactgggatgacgattgggatgctttccaatctcttcctgcaattgcaaatgatggtgttgattctggagaaatctctcttacaactaggtacaatgaacagatccctcaagaaaatagcagttacggttcttgtaatgcggatattacagctcgtgctatggaagacataacttgtgtggacaaggaacttgaggagccctctgatttgcaattctcaagtactgaacaacagcctaaacatgatttaccagggtcatcccacgaaggttgtgctaaacttgaaagacatccatctgttgattgcaaagagcaattagctgatgatgagacagcagatgaactgcagcagcaggttcatgaagacactgatcatgtaaataaagatagcgaagttctctctgcagaaattcatggggttaaattggatatccttgatgaagatgttgaagatgattccccaatgaattcaaacaatctatcagatatcgcagaggaagagtcctagggttggtacaatgcaacgagggtggaccgcaagcttgtcgagatagtagagaagagctgtccggttcctctgatgctggcataccagattttagtatgtcaggacacgtgatgagcaagagcggaggaaatgagcaaaatgttattttgcctgtatcaatatatattgcacgagataaaaataatataaggttacaaccatgatttttattttgtgccttcctccgcccctccgcttctaaataaatagttacctttgaatgaatttcaagaaaacccaatcaaga

SEQ ID NO: 8753 - DNA, 5124 bp, Zea Mays
tgaagattgtgcctatatcgattgttctagttttgaggcaaataacatcccacggtctatccgttacctatccatttccatgcaagatcattgtgctcagaatttcgaggaacaaatgggaaaactgaaagaaaagatatacattaacaatttgcggagtttgatgatatttggaaaatacattatgttacatctgctcaatattttaagggacacatttaaggaaataagacgtcttcgtgttctatctatattcatatactcccatagttccttgccaaacaacttttcagagcttcttcatctccgctacttaaaacttttgtcaccttattactcagaaatgtcattgccaaacacggtctcaaggttttatcacctgaaatttctagatcttgaacaatggggaagtgatcgttctttgcctaaggacattagccgccttgaaaatctatgccattttgttgtttcggaaaagattgattccaatgttcctgaggtggggaaaatgatcttcttacaagaattgaaagaattccatgttaataaagagagtgttggatttgagctacaagaattgggtaaactagatgagcttggagggaagctcaatatatacgggcttgaaaatgtgagaaccaagaaagaagctaaagaggccaagctgatgtcaaagaggaatttagttgagttgggattaatttggaacatgaaacaagagtccaccgaagatgatatcctagatagtatccaaccacactctaatgttaggagtctttttattgtaaatcatggtggtaccctcggtcctagttggttgtgcagcagcgacaccatatacatgaaaaacttggagactctacatctagagagcgtatcgtgggctaaccttccacctattgggcagttctatcacttaagagagctaaggctgagtaaaattgttggcatatcacagattggacctggcttcttcgatagcacgacagaaaaaagtgtctcacacttgaaggcagttgagtttaatgatatgccagagcttgtcgagtgggttgggggagctaactggaatctgttctcaggaattgaaagaatcaagtgtactaattgtcctaggctgacagggttgctggtttcagattggtctatttcttctatataagacagcactgtatggttccctaatcttcatgacctttacatttatgaatgcccgaagttgtgccttccacccttgcctcacacttcaaaggtatcccgtattcatatgggagacttttcttatgaaggtcgtaccatgttgaaaattaataacccctctagatttgccttcgaaaatctgggtgacctagagacattggtagcttgggatgcactacccttgtcctttatggatcttaaaaagctacattccttgagacgtataaatgtcactagatgtgaggaaacatttttgagaggactggatgatggtgttgtgctacccacagtccaatctctctaccttggacgatttacacctaccaaaaattatttgtcaaaattattcaaatgttttccagcactttcttctttgcatgtgatggcatcaccatcagatgaggacaacgaggaagtggtactgcattttccaccctctagctcgctgagagatgtcaacttcacagggtgtaagaatctgatcctacccatggaggaaggagctggattctgtggcctctcgtcgctcgagtcagtgaccatacacaaatgtgacaggttattctctcgatggtccatcggaggacgagcaactcagactcagagcatcatcaaccctctcccaccctacctgaggaaactcttcctttcttatatggaaactctgcctcaggaagctctgctcatgaatttgacatctcttgagaaactcacactatgtaattgtcttggctgtgagcaaagcaccgagcgaatggctgtactcgcgaatctaacatctcttaccacgctatatttatataattgcagaaatatcacaatggatggattcaatcctcacatcacatccagcctcaagtatctatgcgtgtacaatgagagaaatgatggaactgatccgtattctgtagcagcagatctacttgtagcggtggtgaggaccaaaacaatgcccgacgtttccttcaaactggtgggactttatgtggacaacatctcgggagtgcttgttgctcccatctgcaagctgctctccgctaccctcgagacgttaaacttcagtaatgattggcggacagagaacttcacgaaagagcaggacgaggcgcttcagctcctcacgtctctccaattccttgagttttataactgcagggctctgcagtccctcccccaaggactgcaccgccttccttctctccacggaataactatctatgggcctcaaaacattagatcactgcctaaggagggcctccccgattcactacgaatactacgtataactaactgttgtgctgagatttatgaggcatgccagcaattgaagggaacaaggccagatataaatgtacttgcctccaaagctcgtgtgcaaaattgaatacctgcttctgcatgtcttcacagtcagctctgcttcaacatgcctttcactctacaggtaaatactgtgaaaacatcttcctatacgtgagatagttgatcttcatcgattctacagccaggatgatgtcttattggatgatgtgttggtcatggttggcacaaaattcagtagactatgcttcatcgtaatgttgcacagcgttcaaggcaataaacgagaacaagcatgggatgtggaaaattttagaaagtaaagacaagtgaattcttgacgacgttggcttggcaccttagtttgagtacataatgaaagaacaaccttttagcaaccctggagcatctagaaaatatcagtcatgtaactatcgttaatcatttgaaaaccactggaagacaggagatgtagcaccacaagccattcctttgatcatttgaaaaccattgcggctctttctgattatatcaaccagttgagtggatgaaagaccaaaaaatgctttggaagaagggctcacaattgtggataataaggcatccagtattatagaggaaacaaaggaaattcaaattagacggaaacctgctagtccaagttcttatatgccaaattcatcagtagatacacatacactctacaccctaatcttctttgttatgacatttattgtttttttcatgaactacgtacatcttaattttcaattcatctagaatactgaataggtgatgattcatcaccaaattgataagtgaatattaatacatctgaaacctaaaattaaatatatattatataagttgttgttaatgttcattccatttttgaacacttgcatgaattttagttctctgtttcttttgaaaaattctgtgttgcaaaaatataaatttatatgaaaatatattatatggtgatgagaagtttgagtttagtatatggtttcatattagctatacattgttggtactatcggcttgttctctttttgtttgaaaaaaatactatcggcttgttcttaaggacacataaaggactagttcggaagcaagagaattagaggagagatggctaaaatccccttcctaattaaataggaagggaatttgagcaccctcaatcccctctaattcccttgctttcaaactagcccaaagagtgtcactgcatcctctgaattatgatatattgaacatggtgttataattgtgaaccgatgagtataacttattttctccatattctgaacaacccattacttaaacagatttgcatcctactggagacattgctggcagaggaattgagactggcataggagaactcaatatatgcttgtgaataacgcatccagtgaaagatagtagattttcatcaattcactacccaggatgttgtcgcattggatgagaatgacatggaagacggcgaactagaggaagacaacaacctcatctaagctgaaaatgtgttgcctgtggttgaagaaaatctagcagatgaacaacactgccttccctgtcctctctagacctgaatctctctgatggtttggattcgtccatgattgatcctgtacgatgaaggatcagctcgtccaacgtttttcaaggaacgaactcaatctgaggaattaccttttcattggtcacctggggtactacgaggaatgacttcacgatagacgactcggttttgcgacgcaaaccaaacgccatggttaggctcagatgttggatcagatgattcctcgtggcttcgtgacgcaaaccaaacgacatggctaggctcagatgttggatcgtatgatttctcgtggcttcgtgacgcaaaccaaacagcctcatgctctagccaaaggcatgatcgtcatcgttctgaaacaaagaaaatgatgtgtattcctttcagtgagcggcctttgcatgctgcatgagatcaagcaagccgccgactggcaatgctccacctgccattcagttcgttggtgaggtattaatcaccagccatgttggcacttggcggcatgcagatggagcagaacatccaggtgaagcggacagatacatgatcgatcatgagttggcgcagacacaggccagacaaccagaggctatattccaattcatacattccatgataagcaaaggaagatccaagacaacacaaatatacaaatagttagttatacaagcaaaaatcctgttgttttgtgcctcccattttctagtccagaattaatatgacaatttttcactgaaactggttggatcagagaccaggaaaaaaagggaaatgacaactacagctgtgttttttttttcaaagaaggcagctgcccgtcgatgatgtgctcacttgaggatttcctctgccttttcagtgacactgcttcatccttttcagagtcaaatgaatctctacctcatttcactgcacatacttccaaactgatttgctgtaacatacttgagtttcggtatgacattaatttttaactcataagagaacaaaatcagaagaaaaaaaaacaacaa

SEQ ID NO: 8754 - DNA, 5139 bp, Zea Mays
ttgaagattgtgcctatatcgattgttctagttttgaggcaaataacatcccacggtctatccgttacctatccatttccatgcaagatcattgtgctcagaatttcgaggaacaaatgggaaaactgaaagaaaagatatacattaacaatttgcggagtttgatgatatttggaaaatacattatgttacatctgctcaatattttaagggacacatttaaggaaataagacgtcttcgtgttctatctatattcatatactcccatagttccttgccaaacaacttttcagagcttcttcatctccgctacttaaaacttttgtcaccttattactcagaaatgtcattgccaaacacggtctcaaggttttatcacctgaaatttctagatcttgaacaatggggaagtgatcgttctttgcctaaggacattagccgccttgaaaatctatgccattttgttgtttcggaaaagattgattccaatgttcctgaggtggggaaaatgatcttcttacaagaattgaaagaattccatgttaataaagagagtgttggatttgagctacaagaattgggtaaactagatgagcttggagggaagctcaatatatacgggcttgaaaatgtgagaaccaagaaagaagctaaagaggccaagctgatgtcaaagaggaatttagttgagttgggattaatttggaacatgaaacaagagtccaccgaagatgatatcctagatagtatccaaccacactctaatgttaggagtctttttattgtaaatcatggtggtaccctcggtcctagttggttgtgcagcagcgacaccatatacatgaaaaacttggagactctacatctagagagcgtatcgtgggctaaccttccacctattgggcagttctatcacttaagagagctaaggctgagtaaaattgttggcatatcacagattggacctggcttcttcgatagcacgacagaaaaaagtgtctcacacttgaaggcagttgagtttaatgatatgccagagcttgtcgagtgggttgggggagctaactggaatctgttctcaggaattgaaagaatcaagtgtactaattgtcctaggctgacagggttgctggtttcagattggtctatttcttctatataagacagcactgtatggttccctaatcttcatgacctttacatttatgaatgcccgaagttgtgccttccacccttgcctcacacttcaaaggtatcccgtattcatatgggagacttttcttatgaaggtcgtaccatgttgaaaattaataacccctctagatttgccttcgaaaatctgggtgacctagagacattggtagcttgggatgcactacccttgtcctttatggatcttaaaaagctacattccttgagacgtataaatgtcactagatgtgaggaaacatttttgagaggactggatgatggtgttgtgctacccacagtccaatctctctaccttggacgatttacacctaccaaaaattatttgtcaaaattattcaaatgttttccagcactttcttctttgcatgtgatggcatcaccatcagatgaggacaacgaggaagtggtactgcattttccaccctctagctcgctgagagatgtcaacttcacagggtgtaagaatctgatcctacccatggaggaaggagctggattctgtggcctctcgtcgctcgagtcagtgaccatacacaaatgtgacaggttattctctcgatggtccatcggaggacgagcaactcagactcagagcatcatcaaccctctcccaccctacctgaggaaactcttcctttcttatatggaaactctgcctcaggaagctctgctcatgaatttgacatctcttgagaaactcacactatgtaattgtcttggctgtgagcaaagcaccgagcgaatggctgtactcgcgaatctaacatctcttaccacgctatatttatataattgcagaaatatcacaatggatggattcaatcctcacatcacatccagcctcaagtatctatgcgtgtacaatgagagaaatgatggaactgatccgtattctgtagcagcagatctacttgtagcggtggtgaggaccaaaacaatgcccgacgtttccttcaaactggtgggactttatgtggacaacatctcgggagtgcttgttgctcccatctgcaagctgctctccgctaccctcgagacgttaaacttcagtaatgattggcggacagagaacttcacgaaagagcaggacgaggcgcttcagctcctcacgtctctccaattccttgagttttataactgcagggctctgcagtccctcccccaaggactgcaccgccttccttctctccacggaataactatctatgggcctcaaaacattagatcactgcctaaggagggcctccccgattcactacgaatactacgtataactaactgttgtgctgagatttatgaggcatgccagcaattgaagggaacaaggccagatataaatgtacttgcctccaaagctcgtgtgcaaaattgaatacctgcttctgcatgtcttcacagtcagctctgcttcaacatgcctttcactctacaggtaaatactgtgaaaacatcttcctatacgtgagatagttgatcttcatcgattctacagccaggatgatgtcttattggatgatgtgttggtcatggttggcacaaaattcacgttcaaggcaataaacgagaacaagcatgggatgtggaaaattttagaaagtaaagacaagtgaattcttgacgacgttggcttggcaccttagtttgagtacataatgaaagaacaaccttttagcaaccctggagcatctagaaaatatcagtcatgtaactatcgttaatcatttgaaaaccactggaagacaggagatgtagcaccacaagccattcctttgatcatttgaaaaccattgcggctctttctgattatatcaaccagttgagtggatgaaagaccaaaaaatgctttggaagaagggctcacaattgtggataataaggcatccagtattatagaggaaacaaaggaaattcaaattagacggaaacctgctagtccaagttcttatatgccaaattcatcagtagatacacatacactctacaccctaatcttctttgttatgacatttattgtttttttcatgaactacgtacatcttaattttcaattcatctagaatactgaataggtgatgattcatcaccaaattgataagtgaatattaatacatctgaaacctaaaattaaatatatattatataagttgttgttaatgttcattccatttttgaacacttgcatgaattttagttctctgtttcttttgaaaaattctgtgttgcaaaaatataaatttatatgaaaatatattatatggtgatgagaagtttgagtttagtatatggtttcatattagctatacattgttggtactatcggcttgttctctttttgtttgaaaaaaatactatcggcttgttcttaaggacacataaaggactagttcggaagcaagagaattagaggagagatggctaaaatccccttcctaattaaataggaagggaatttgagcaccctcaatcccctctaattcccttgctttcaaactagcccaaagagtgtcactgcatcctctgaattatgatatattgaacatggtgttataattgtgaaccgatgagtataacttattttctccatattctgaacaacccattacttaaacagatttgcatcctactggagacattgctggcagaggaattgagactggcataggagaactcaatatatgcttgtgaataacgcatccagtgaaagatagtagattttcatcaattcactacccaggatgttgtcgcattggatgagaatgacatggaagacggcgaactagaggaagacaacaacctcatctaagctgaaaatgtgttgcctgtggttgaagaaaatctagcagatgaacaacactgccttccctgtcctctctagacctgaatctctctgatggtttggattcgtccatgattgatcctgtacgatgaaggatcagctcgtccaacgtttttcaaggaacgaactcaatctgaggaattaccttttcattggtcacctggggtactacgaggaatgacttcacgatagacgactcggttttgcgacgcaaaccaaacgccatggttaggctcagatgttggatcagatgattcctcgtggcttcgtgacgcaaaccaaacgacatggctaggctcagatgttggatcgtatgatttctcgtggcttcgtgacgcaaaccaaacagcctgtaagtccgcacaccttatctatcatggtcattgttgagctgatcagtaattggagtcgtgtgataagcttaatggacctcctatttgtcgtgatcttcacagatcaacaagtgagcggcctttgcatgctgcatgagatcaagcaagccgccgactggcaatgctccacctgccattcagttcgttggtgaggtattaatcaccagccatgttggcacttggcggcatgcagatggagcagaacatccaggtgaagcggacagatacatgatcgatcatgagttggcgcagacacaggccagacaaccagaggctatattccaattcatacattccatgataagcaaaggaagatccaagacaacacaaatatacaaatagttagttatacaagcaaaaatcctgttgttttgtgcctcccattttctagtccagaattaatatgacaatttttcactgaaactggttggatcagagaccaggaaaaaaagggaaatgacaactacagctgtgttttttttttcaaagaaggcagctgcccgtcgatgatgtgctcacttgaggatttcctctgccttttcagtgacactgcttcatccttttcagagtcaaatgaatctctacctcatttcactgcacatacttccaaactgatttgctgtaacatacttgagtttcggtatgacattaatttttaactcataagagaacaaaatcagaagaaaaaaaaacaacaa

SEQ ID NO: 8755 - DNA, 1021 bp, Zea Mays
accactgtttctttctccatcggctagctgttcttcgcaccctgcacgagaaacccaagggaaggctcctccgtctctttctccgaggaccacaggatgaacaatcttctctcggattcctttgagagggatgagaagccagaaagcgagagggacatcgagatggggaatcgaaatcccaaggacaactccgactacggtctcaaagacttctttgaacaggtcaaggagattgaggtgctgttggataagatgtccaacatagttcacaaacttcaggaagctaatgaggaatccaagtcagtcaccaaggcttctgcaatgaaagtgataaaggagcgcatggagaaggacatcgatggagtactgaagatcgcacgcaacgtgaaagtgaagctggaacagatggacagaaacaatctcgagaacagacagaagccggggtgtgggaagggcaccagcgtagaccgatcaaggatgtccatgaccattgcattgaagaagaagctgaaagaaaggatgaacgatttccaggtgattgatcgtctcatcgagaccggaagcagcgagcagatctttgagagagcaatccaagggacaggtagaggacagatccttgacacggttgaagaaattcaggaacggcatgatgcagtcatggagatagagaaaaggctccttgaactgcagatgatttttgcagacatggcggcactcgttgatgcacaaagagaggatctagacaacatagagaacctggttcaaaatgctgtaaaccatgtggtgtctggtaccgaggcgctacgcaccgcgaagagcctgcagaagaagtcgagaaagtgcatgttgattgcgattatcattctgctggtaattgccgccatagtcgtgctttcgatcttaaagccttgggctaagtaaggaggagcaagggaaaacgaacactatcttctgttgcatgtattctaagctaattcttttggctacaccattcagcttataccttaagtttttttttttt

SEQ ID NO: 8756 - DNA, 1075 bp, Zea Mays
accactgtttctttctccatcggctagctgttcttcgcaccctgcacgagaaacccaagggaaggctcctccgtctctttctccgaggaccacaggatgaacaatcttctctcggattcctttgagagggatgagaagccagaaagcgagagggacatcgagatggggaatcgaaatcccaaggacaactccgactacggtctcaaagacttctttgaacaggtcaaggagattgaggtgctgttggataagatgtccaacatagttcacaaacttcaggaagctaatgaggaatccaagtcagtcaccaaggcttctgcaatgaaagtgataaaggagcgcatggagaaggacatcgatggagtactgaagatcgcacgcaacaatctcgagaacagacagaagccggggtgtgggaagggcaccagcgtagaccgatcaaggatgtccatgaccattgcattgaagaagaagctgaaagaaaggatgaacgatttccagaatctaagacaaactatacaagaggagtaccgagaagttgtagagaggaggatcttcacagtcacgggaacaaagccttctgaggaggtgattgatcgtctcatcgagaccggaagcagcgagcagatctttgagagagcaatccaagggacaggtagaggacagatccttgacacggttgaagaaattcaggaacggcatgatgcagtcatggagatagagaaaaggctccttgaactgcagatgatttttgcagacatggcggcactcgttgatgcacaaagagaggatctagacaacatagagaacctggttcaaaatgctgtaaaccatgtggtgtctggtaccgaggcgctacgcaccgcgaagagcctgcagaagaagtcgagaaagtgcatgttgattgcgattatcattctgctggtaattgccgccatagtcgtgctttcgatcttaaagccttgggctaagtaaggaggagcaagggaaaacgaacactatcttctgttgcatgtattctaagctaattcttttggctacaccattcagcttataccttaagtttttttttttt

SEQ ID NO: 8757 - DNA, 1204 bp, Zea Mays
ccggcgtcgccaagatcatccttccttgctcactatactagtttattaatactagttatcctcgccagaacggcctttccaaagtcctatgaatacaccactgtttctttctccatcggctagctgttcttcgcaccctgcacgagaaacccaagggaaggctcctccgtctctttctccgaggaccacaggatgaacaatcttctctcggattcctttgagagggatgagaagccagaaagcgagagggacatcgagatggggaatcgaaatcccaaggacaactccgactacggtctcaaagacttctttgaacaggtcaaggagattgaggtgctgttggataagatgtccaacatagttcacaaacttcaggaagctaatgaggaatccaagtcagtcaccaaggcttctgcaatgaaagtgataaaggagcgcatggagaaggacatcgatggagtactgaagatcgcacgcaacgtgaaagtgaagctggaacagatggacagaaacaatctcgagaacagacagaagccggggtgtgggaagggcaccagcgtagaccgatcaaggatgtccatgaccattgcattgaagaagaagctgaaagaaaggatgaacgatttccagaatctaagacaaactatacaagaggagtaccgagaagttgtagagaggaggatcttcacagtcacgggaacaaagccttctgaggaggtgattgatcgtctcatcgagaccggaagcagcgagcagatctttgagagagcaatccaagggacaggtagaggacagatccttgacacggttgaagaaattcaggaacggcatgatgcagtcatggagatagagaaaaggctccttgaactgcagatgatttttgcagacatggcggcactcgttgatgcacaaagagaggatctagacaacatagagaacctggttcaaaatgctgtaaaccatgtggtgtctggtaccgaggcgctacgcaccgcgaagagcctgcagaagaagtcgagaaagtgcatgttgattgcgattatcattctgctggtaattgccgccatagtcgtgctttcgatcttaaagccttgggctaagtaaggaggagcaagggaaaacgaacactatcttctgttgcatgtattctaagctaattcttttggctacaccattcagcttataccttaagtttttttttttt

SEQ ID NO: 8758 - DNA, 2752 bp, Zea Mays
gcaccgttaatttcccgcaaaagggaggggcctatatacaaaaagatcaccactactgtactacggcaccccttcctcccccgctcccccacctccgctcccgaaaccctcgccgccgccgccgccgccgccgacgccgaaatcctcgtcgcggcggcgatcactgctcccctctatgatagcggcgcgtgagggcggcggagcgcggcctgtcgctccccggtccgcgtgcccggggcggctctgagagcccagagctcgtctcggttccctgccaagcgcagccgagcaccgcgccggcgccgcgtggcagttcaggccgtagtctgggcgctgttctgctctgggtctactggagtgcgtttgggattttttcggttcctactacattcgggggcgctgccagggatggattctgttccagggaaggagaacaacggcattgcccctaacctcaatggggtcgtgtctccagcgaagcagcagctggaggggaaggaagcgatgcggtatgcaaacatcctccggtcgcgcaataagtttgctgacgcgatcaacctgtacaccattgttctcgagaaggatggcaccaatgtggaggcccttatcgggaaagggatttgcctccaggcgcagaacctaccaagacaggccattgagtgctttacagaagctgtcaaaatcgagccaggaaatgcgtctgctcttacacattgtgggatgatttacaaagatgagggtcacttggttgaagcagctgaggcatatcaaaaagctaggatggctgatccttcctacaaacctgcttcggaatttcttgctattgtgttgactgatcttggaactagcttgaagcttgcgggtaatacagaggaggggattcaaaaatattgtgaagctctggaagtagacaaccactatgcgccggcttactacaaccttggagttgtttattcggagatgatgcaatttgatatggctcttagttgttacgagaaagctgcactggagagaccattgtatgctgaggcctattgcaacatgggagttatctataagaatcggggagatctagatgcagcaattatctgctacgagaggtgcttgaccatttctcccaactttgagattgctaagaataatatggcaatagcactaactgacttgggaacaaaggtaaaaattgaaggtgacatcaatagaggtgtagcatattacaagaaagctctatactacaattggcactatgctgatgccatgtataatcttggcgttgcatatggtgaaatgttgaattttgagatggcaattgtcttttacgagcttgcgctgcacttcaatcctcgctgtgcggaagcatgcaacaatttaggagtcatatacaaagacagggataaccttgacaaagctgttgaatgttatcaaatggcactgtcaattaagccacttttcgctcagtcgctaaataaccttggagttgtctatactgttcaaggtaagatggattctgctgctagcatgattgagaaggctatacatgcaaatcccacatatgctgaagcatataataatctaggtgttctttacagagacgctggtagtattactttagcaattcatgcttacgagagatgccttcagatcgatcctgattcacgaaatgctggccagaaccgtttgcttgcaatgaactatattgacgagggctcagatgacaagctttatgaagctcacagggagtggggaaaacgctttatgaaattgtatccacaatatacaagttgggataactcaaaagttgctgaccgcccattgatcatcggttatttgtctcctgattactttactcattccgtgtcctacttcattgaagctccccttacacaccatgattccacagtttgcaaggtggttgtctactccggtgttgtgaaggcagatgccaagacacttagattcaaggataaggtgttgaaaaagggtgggttgtggagagatatatatggtattgatgaaaagagggttgctagcttggtaagggaggataaagtggacatacttgtggaacttactggtcacacagcaaataataagttagggacaatggcatgccgacctgctcctattcaggttacctggattggctaccccaacacaacaggtttgccaacaatagactaccgaatctcagactcattgactgatccacctatgacaaagcaaaagcatgttgaggagttggtgcgccttcctgaaagctttctttgttatactccttccccagaagctggtcctgtttgtccaacaccagcaatttcaaatggtttcgtcacttttgggagctttaacaatctagcaaagattacaccgaaagtgttgcaagtttgggccagaatattatgttcagtccctaactccaggcttgtggttaagtgcaagccattctgctgtgagaacataaggcagaaatttttggccacactggaggagttgggtttggagtcattacgggttgatctgttgccactcatccatctgaatcatgatcacatgcaggcgtattctttgatggacatcagcctggatacatttccctatgctggtactacgactacatgtgaatctttatacatgggggttccatgtgttacaatggctggtgctgttcatgctcataacgttggtgtcagcttgctcagcaaagtcgggttggggaggctggttgccaaaactgaggatgagtatggagcaa

SEQ ID NO: 8759 - DNA, 4842 bp, Zea Mays
tgctattgggcctctcaaaggcccgaaaaaacacaggtcaccgtcctctcctctagcgccgcccatccatccagccgtccaacgcctactaccgccgccacccgcctcccgcctctcctctagccccagccgttcagcgccgcccgcctccctcctctcctcctctcctccctcctccagtgccgccacgacgctcgccactagcgccgttcgcctcctccaacgcccgagcaccgcctccctcctccctcctccagcgccgactgcccctaacaccgccctctagctcctctagcagccagcgtcgcttacagccatcaagttccagggcaggagtcaagacagtgaatcacccagctgctctattcggccggctgtgctcgtttcgtcccttgtgcgggagctttgtttgagatttgagtcgttgcagctaaatcatggaagatagtaatgccctgattttgccctgcaaaaggaagaacaaggcgcaagtgaaagccaaggatggtaagaaagccaagaaggaagacccaaagatgagcaagacgaagctcaaaaagctgcaaaaattggaggaggaaaagaaaaagaagctgctacaagctaaaagcatcgaggaagcacaagatctcagaggatgcatattcactgcttcatgcttcagggactattggtcaagctgagactttgaaagaaaaacggaggcgtgctgtgcaattctcaaaggctggcctggatgttcctgaagaactctcactgttcaagaaaagcggtggtacgaaagttcctgaaaacagtgatgttggggagcaagtttccccattaaagtttgttgagccagcaccaattgtggattctggtagagaatgtaataacaaaatgaaggatctagtgaaagctattgaatgccaaccgattatgggttttggagctggcattccagagccagaaactgaagagcctagtgatgatgctcatatgttgacaaatcagaaaattcagttgtcaattccaagttgttctggagcagaattagatttgcagggtaaagaactaggacaagggcagcattctgtacaggagtgcataaatcctccaattgttgtacctgtgtcaagactgcatgaagttgagaaggcaaggagggatctcccaataataatgatggagcaagaaataatggaagctatctatgaaaattctgtagtaattctgtgcggagagactggctgcggtaaaactacccaggttccccagttcctatacgaagctggcttcggcactagtgaccgagctgatagaaaagggatgattggtatcacacaaccacggcgcgtagctgttcatgccacagctaagagggtttcctatgagttaggacttaagctgggaagagaagttggttttcaagttaggcatgatagaaaggtaggaagtgaatgctccatcaagttcatgacagatggtattttgctgcgagaaatccagggtgattttctgttgaagcgctattcagtgatcatattggatgaggcacacgaaaggagcttgaacacagatatacttattgggatgctttctagaattataaagattcgcaaggatttgtatgcaaagcagcaggaaaaattacggtctggatttaagatcaaaccagaggataagatcagtcagttaaaggtggtgctcatgagtgctactctgcagttaaaggactttatttcaaatagaaggttgtttggcgtgatcccaccagctgttaaggtacctgtgcggcagtttccagtatcagttcacttctcaaagaggacacatgatgattatttagggctagcttataaaaaggttatgtcaatccacaagaggcttccaccaggtggaatcctcgtatttgtcactggacaacgggaagtggagtacttgtgtaagaaactgcgaagagcatccaaggtgcaaactgctaagaatcctgggaaaactgatggtgaagacaatggtccatgcccaaaagtagatgaaaaggaaatttttgaagcatatgatattgacagagatgaacccgagcaccgatatgacatgttttcctcgtatgatgacgatggtatgtatgatgacgatggtatgaatgttgagacaaatattgattcttctgacaacgaaacggagagcgaaatggatactgaaaccgatgacgaagagtctgttactattgaaactacagaagaggatgttccagtattagcatttttgaaagatgctgagagctcatctgcgttgaaggcatcatttggagctttgtcgggaataccaaatgtgctggaaagtgtcgaggaattaagtgatgctaaatgtgaagaaaagaccagcacttcacttcgttgttttagtaaatgcacagaacataagcctgtttcacatggtagacttcgtgtcttgccactttatgcaaagttatcagcttcacaacagcttcaagtgtttgaagatgtcccagagggggaaagattagttgtggtggcaactaatgttgccgaaacctctctaacaattccaggcataaaatatgtagttgatactggaaaagaaaaggttaagaattatgatcatgctactgggatgtcaagttatgatgtccaatggataagcaaggcatcagcatcccagcgtgctggaagagcaggaagaacagggcctggccactgttaccgtctctactcagctgcagcatatggtaaagatgatttattccctgaattcgctgaacctcagattaagaaaattccagttgaaggtgttgtcctgatgctcaagttcatgtctattgataaggttgagaactttcctttcccaacaccaccaaacaaggaaagtttggttgaagctgagcgttgcttaaagacattggaagcacttcatagtgatggaaaacttacacctatgggcaaggcaatggcacagtaccccatgagcccaagacattctcgtcttcttcttacagtgattaagaatttgaagaataagcagcaaggctttgctagatctaacttcatattaggatatgctgctgctgctgcatcaggtttgaattttactaatccttttctcaagcaattggatgaatgtgacacttatggtgaatcagtagaaaacactaatctggaagctaatggtccatgggaaaggaagagacagaagaagctcaaggctgtggttagagaggcacgggaaaagttttctaaccctagcagtgatgctttaaccatcgctcgtgccctgcagttctttgagttgtcagaaaacccagtggaattctgcagagccaattcacttcatcttaaaaccatggaagagatgtcaaagttgagaaagcagcttctgcagttaatatttcgccatagcaaatggtgcgaggagtttgcttggaattcgggtgactctgctgaggttgaacgggcctggaggaacgagcccagtatattgcagttgaatgaagaggaacttcttgggcaaggaatttgcgctggatgggctgatagagttgcaaggaggattcacacctatttgaaaccatcagaagacgatcgaaaggttcgagccgttcgttatcagtcttgtgcacttgatgatacaatatatctgcaccgatcatcatctgtcgcccaagttgccccagagcttgtagtttactcggagctacttagtacaaagaggctatacatgcacggtgtaacgaccgtaaagccagggtggcttttgaagtatgctagttccctctgcaccttctctgcaccgttggaagatccgaagccgtactatgacccactgaacgaccaagtctactgctacgttagcccggtcttctctcgtcataactggcagcttccgttgcacagtttacctatcaaagacggtgcgagccggctgcaggtgtttgcatgcgcgttgcttaaaggggacgtcctgccatgtctacgggacgccaaggatttcctcgcgctgtcaccatccgctgtgttggggcctgccaggcaacggagagtgggagatcttcttagcaggatgaagatcggtccgaagttagtcgacagcagggcagcactgagaggcgtgtggaattttgatcctggttttctctatcctgagctcaagttgtggtaccaggatagattccatgaccagtttgacttggtgtgggagcagatgcaccaacaggttctccttgaggggcgcaagcttttcccaaagaggtccaagaaagttaaaggctaggccaaaatttttggtgcagttggttggctggcagaagcttttttgtgtgtgtggttttaaggaatagatacgagagatgcagtgagacatcatgcacaagcagttttgtctagacattttgccttgatctggatttgttccattgcatctccgtgttgaactgttgatgtacaccgttcctctgcaagcaaccttcaccctgccatctgtgtcagaaatgttttctgatccaaccatttgctcaaaaccttgaacctgaaaaatatcctgatatccaaccatcgccatggcccatggggattggagggaattggcttcgagtgagggccaggggtaggattcgccagaaacaaacaggggatggtcgtgcgcagattgattacatttctctcctttccgtctctcgctctatttgcttttagcatatgaagtgtccgattccaggggtaaaaacagcggtagagtcgatataaaaatgtagcactaaactatattaccctcagttcaagaaaacaaattacccctctggcatgcttgcatgaactttggtctgcatgtaaaattgaattccag

SEQ ID NO: 8760 - DNA, 4850 bp, Zea Mays
tgctattgggcctctcaaaggcccgaaaaaacacaggtcaccgtcctctcctctagcgccgcccatccatccagccgtccaacgcctactaccgccgccacccgcctcccgcctctcctctagccccagccgttcagcgccgcccgcctccctcctctcctcctctcctccctcctccagtgccgccacgacgctcgccactagcgccgttcgcctcctccaacgcccgagcaccgcctccctcctccctcctccagcgccgactgcccctaacaccgccctctagctcctctagcagccagcgtcgcttacagccatcaagttccagggcaggagtcaagacagtgaatcacccagctgctctattcggccggctgtgctcgtttcgtcccttgtgcgggagctttgtttgagatttgagtcgttgcagctaaatcatggaagatagtaatgccctgattttgccctgcaaaaggaagaacaaggcgcaagtgaaagccaaggatggtaagaaagccaagaaggaagacccaaagatgagcaagacgaagctcaaaaagctgcaaaaattggaggaggaaaagaaaaagaagctgctacaagctaaaagcatcgaggttttgcagaagcacaagatctcagaggatgcatattcactgcttcatgcttcagggactattggtcaagctgagactttgaaagaaaaacggaggcgtgctgtgcaattctcaaaggctggcctggatgttcctgaagaactctcactgttcaagaaaagcggtggtacgaaagttcctgaaaacagtgatgttggggagcaagtttccccattaaagtttgttgagccagcaccaattgtggattctggtagagaatgtaataacaaaatgaaggatctagtgaaagctattgaatgccaaccgattatgggttttggagctggcattccagagccagaaactgaagagcctagtgatgatgctcatatgttgacaaatcagaaaattcagttgtcaattccaagttgttctggagcagaattagatttgcagggtaaagaactaggacaagggcagcattctgtacaggagtgcataaatcctccaattgttgtacctgtgtcaagactgcatgaagttgagaaggcaaggagggatctcccaataataatgatggagcaagaaataatggaagctatctatgaaaattctgtagtaattctgtgcggagagactggctgcggtaaaactacccaggttccccagttcctatacgaagctggcttcggcactagtgaccgagctgatagaaaagggatgattggtatcacacaaccacggcgcgtagctgttcatgccacagctaagagggtttcctatgagttaggacttaagctgggaagagaagttggttttcaagttaggcatgatagaaaggtaggaagtgaatgctccatcaagttcatgacagatggtattttgctgcgagaaatccagggtgattttctgttgaagcgctattcagtgatcatattggatgaggcacacgaaaggagcttgaacacagatatacttattgggatgctttctagaattataaagattcgcaaggatttgtatgcaaagcagcaggaaaaattacggtctggatttaagatcaaaccagaggataagatcagtcagttaaaggtggtgctcatgagtgctactctgcagttaaaggactttatttcaaatagaaggttgtttggcgtgatcccaccagctgttaaggtacctgtgcggcagtttccagtatcagttcacttctcaaagaggacacatgatgattatttagggctagcttataaaaaggttatgtcaatccacaagaggcttccaccaggtggaatcctcgtatttgtcactggacaacgggaagtggagtacttgtgtaagaaactgcgaagagcatccaaggtgcaaactgctaagaatcctgggaaaactgatggtgaagacaatggtccatgcccaaaagtagatgaaaaggaaatttttgaagcatatgatattgacagagatgaacccgagcaccgatatgacatgttttcctcgtatgatgacgatggtatgtatgatgacgatggtatgaatgttgagacaaatattgattcttctgacaacgaaacggagagcgaaatggatactgaaaccgatgacgaagagtctgttactattgaaactacagaagaggatgttccagtattagcatttttgaaagatgctgagagctcatctgcgttgaaggcatcatttggagctttgtcgggaataccaaatgtgctggaaagtgtcgaggaattaagtgatgctaaatgtgaagaaaagaccagcacttcacttcgttgttttagtaaatgcacagaacataagcctgtttcacatggtagacttcgtgtcttgccactttatgcaaagttatcagcttcacaacagcttcaagtgtttgaagatgtcccagagggggaaagattagttgtggtggcaactaatgttgccgaaacctctctaacaattccaggcataaaatatgtagttgatactggaaaagaaaaggttaagaattatgatcatgctactgggatgtcaagttatgatgtccaatggataagcaaggcatcagcatcccagcgtgctggaagagcaggaagaacagggcctggccactgttaccgtctctactcagctgcagcatatggtaaagatgatttattccctgaattcgctgaacctcagattaagaaaattccagttgaaggtgttgtcctgatgctcaagttcatgtctattgataaggttgagaactttcctttcccaacaccaccaaacaaggaaagtttggttgaagctgagcgttgcttaaagacattggaagcacttcatagtgatggaaaacttacacctatgggcaaggcaatggcacagtaccccatgagcccaagacattctcgtcttcttcttacagtgattaagaatttgaagaataagcagcaaggctttgctagatctaacttcatattaggatatgctgctgctgctgcatcaggtttgaattttactaatccttttctcaagcaattggatgaatgtgacacttatggtgaatcagtagaaaacactaatctggaagctaatggtccatgggaaaggaagagacagaagaagctcaaggctgtggttagagaggcacgggaaaagttttctaaccctagcagtgatgctttaaccatcgctcgtgccctgcagttctttgagttgtcagaaaacccagtggaattctgcagagccaattcacttcatcttaaaaccatggaagagatgtcaaagttgagaaagcagcttctgcagttaatatttcgccatagcaaatggtgcgaggagtttgcttggaattcgggtgactctgctgaggttgaacgggcctggaggaacgagcccagtatattgcagttgaatgaagaggaacttcttgggcaaggaatttgcgctggatgggctgatagagttgcaaggaggattcacacctatttgaaaccatcagaagacgatcgaaaggttcgagccgttcgttatcagtcttgtgcacttgatgatacaatatatctgcaccgatcatcatctgtcgcccaagttgccccagagcttgtagtttactcggagctacttagtacaaagaggctatacatgcacggtgtaacgaccgtaaagccagggtggcttttgaagtatgctagttccctctgcaccttctctgcaccgttggaagatccgaagccgtactatgacccactgaacgaccaagtctactgctacgttagcccggtcttctctcgtcataactggcagcttccgttgcacagtttacctatcaaagacggtgcgagccggctgcaggtgtttgcatgcgcgttgcttaaaggggacgtcctgccatgtctacgggacgccaaggatttcctcgcgctgtcaccatccgctgtgttggggcctgccaggcaacggagagtgggagatcttcttagcaggatgaagatcggtccgaagttagtcgacagcagggcagcactgagaggcgtgtggaattttgatcctggttttctctatcctgagctcaagttgtggtaccaggatagattccatgaccagtttgacttggtgtgggagcagatgcaccaacaggttctccttgaggggcgcaagcttttcccaaagaggtccaagaaagttaaaggctaggccaaaatttttggtgcagttggttggctggcagaagcttttttgtgtgtgtggttttaaggaatagatacgagagatgcagtgagacatcatgcacaagcagttttgtctagacattttgccttgatctggatttgttccattgcatctccgtgttgaactgttgatgtacaccgttcctctgcaagcaaccttcaccctgccatctgtgtcagaaatgttttctgatccaaccatttgctcaaaaccttgaacctgaaaaatatcctgatatccaaccatcgccatggcccatggggattggagggaattggcttcgagtgagggccaggggtaggattcgccagaaacaaacaggggatggtcgtgcgcagattgattacatttctctcctttccgtctctcgctctatttgcttttagcatatgaagtgtccgattccaggggtaaaaacagcggtagagtcgatataaaaatgtagcactaaactatattaccctcagttcaagaaaacaaattacccctctggcatgcttgcatgaactttggtctgcatgtaaaattgaattccag

SEQ ID NO: 8761 - DNA, 4881 bp, Zea Mays
tgctattgggcctctcaaaggcccgaaaaaacacaggtcaccgtcctctcctctagcgccgcccatccatccagccgtccaacgcctactaccgccgccacccgcctcccgcctctcctctagccccagccgttcagcgccgcccgcctccctcctctcctcctctcctccctcctccagtgccgccacgacgctcgccactagcgccgttcgcctcctccaacgcccgagcaccgcctccctcctccctcctccagcgccgactgcccctaacaccgccctctagctcctctagcagccagcgtcgcttacagccatcaagttccagggcaggagtcaagacagtgaatcacccagctgctctattcggttcaaatcctgtgtcggccactgcccatatggtttcaggccggctgtgctcgtttcgtcccttgtgcgggagctttgtttgagatttgagtcgttgcagctaaatcatggaagatagtaatgccctgattttgccctgcaaaaggaagaacaaggcgcaagtgaaagccaaggatggtaagaaagccaagaaggaagacccaaagatgagcaagacgaagctcaaaaagctgcaaaaattggaggaggaaaagaaaaagaagctgctacaagctaaaagcatcgaggaagcacaagatctcagaggatgcatattcactgcttcatgcttcagggactattggtcaagctgagactttgaaagaaaaacggaggcgtgctgtgcaattctcaaaggctggcctggatgttcctgaagaactctcactgttcaagaaaagcggtggtacgaaagttcctgaaaacagtgatgttggggagcaagtttccccattaaagtttgttgagccagcaccaattgtggattctggtagagaatgtaataacaaaatgaaggatctagtgaaagctattgaatgccaaccgattatgggttttggagctggcattccagagccagaaactgaagagcctagtgatgatgctcatatgttgacaaatcagaaaattcagttgtcaattccaagttgttctggagcagaattagatttgcagggtaaagaactaggacaagggcagcattctgtacaggagtgcataaatcctccaattgttgtacctgtgtcaagactgcatgaagttgagaaggcaaggagggatctcccaataataatgatggagcaagaaataatggaagctatctatgaaaattctgtagtaattctgtgcggagagactggctgcggtaaaactacccaggttccccagttcctatacgaagctggcttcggcactagtgaccgagctgatagaaaagggatgattggtatcacacaaccacggcgcgtagctgttcatgccacagctaagagggtttcctatgagttaggacttaagctgggaagagaagttggttttcaagttaggcatgatagaaaggtaggaagtgaatgctccatcaagttcatgacagatggtattttgctgcgagaaatccagggtgattttctgttgaagcgctattcagtgatcatattggatgaggcacacgaaaggagcttgaacacagatatacttattgggatgctttctagaattataaagattcgcaaggatttgtatgcaaagcagcaggaaaaattacggtctggatttaagatcaaaccagaggataagatcagtcagttaaaggtggtgctcatgagtgctactctgcagttaaaggactttatttcaaatagaaggttgtttggcgtgatcccaccagctgttaaggtacctgtgcggcagtttccagtatcagttcacttctcaaagaggacacatgatgattatttagggctagcttataaaaaggttatgtcaatccacaagaggcttccaccaggtggaatcctcgtatttgtcactggacaacgggaagtggagtacttgtgtaagaaactgcgaagagcatccaaggtgcaaactgctaagaatcctgggaaaactgatggtgaagacaatggtccatgcccaaaagtagatgaaaaggaaatttttgaagcatatgatattgacagagatgaacccgagcaccgatatgacatgttttcctcgtatgatgacgatggtatgtatgatgacgatggtatgaatgttgagacaaatattgattcttctgacaacgaaacggagagcgaaatggatactgaaaccgatgacgaagagtctgttactattgaaactacagaagaggatgttccagtattagcatttttgaaagatgctgagagctcatctgcgttgaaggcatcatttggagctttgtcgggaataccaaatgtgctggaaagtgtcgaggaattaagtgatgctaaatgtgaagaaaagaccagcacttcacttcgttgttttagtaaatgcacagaacataagcctgtttcacatggtagacttcgtgtcttgccactttatgcaaagttatcagcttcacaacagcttcaagtgtttgaagatgtcccagagggggaaagattagttgtggtggcaactaatgttgccgaaacctctctaacaattccaggcataaaatatgtagttgatactggaaaagaaaaggttaagaattatgatcatgctactgggatgtcaagttatgatgtccaatggataagcaaggcatcagcatcccagcgtgctggaagagcaggaagaacagggcctggccactgttaccgtctctactcagctgcagcatatggtaaagatgatttattccctgaattcgctgaacctcagattaagaaaattccagttgaaggtgttgtcctgatgctcaagttcatgtctattgataaggttgagaactttcctttcccaacaccaccaaacaaggaaagtttggttgaagctgagcgttgcttaaagacattggaagcacttcatagtgatggaaaacttacacctatgggcaaggcaatggcacagtaccccatgagcccaagacattctcgtcttcttcttacagtgattaagaatttgaagaataagcagcaaggctttgctagatctaacttcatattaggatatgctgctgctgctgcatcaggtttgaattttactaatccttttctcaagcaattggatgaatgtgacacttatggtgaatcagtagaaaacactaatctggaagctaatggtccatgggaaaggaagagacagaagaagctcaaggctgtggttagagaggcacgggaaaagttttctaaccctagcagtgatgctttaaccatcgctcgtgccctgcagttctttgagttgtcagaaaacccagtggaattctgcagagccaattcacttcatcttaaaaccatggaagagatgtcaaagttgagaaagcagcttctgcagttaatatttcgccatagcaaatggtgcgaggagtttgcttggaattcgggtgactctgctgaggttgaacgggcctggaggaacgagcccagtatattgcagttgaatgaagaggaacttcttgggcaaggaatttgcgctggatgggctgatagagttgcaaggaggattcacacctatttgaaaccatcagaagacgatcgaaaggttcgagccgttcgttatcagtcttgtgcacttgatgatacaatatatctgcaccgatcatcatctgtcgcccaagttgccccagagcttgtagtttactcggagctacttagtacaaagaggctatacatgcacggtgtaacgaccgtaaagccagggtggcttttgaagtatgctagttccctctgcaccttctctgcaccgttggaagatccgaagccgtactatgacccactgaacgaccaagtctactgctacgttagcccggtcttctctcgtcataactggcagcttccgttgcacagtttacctatcaaagacggtgcgagccggctgcaggtgtttgcatgcgcgttgcttaaaggggacgtcctgccatgtctacgggacgccaaggatttcctcgcgctgtcaccatccgctgtgttggggcctgccaggcaacggagagtgggagatcttcttagcaggatgaagatcggtccgaagttagtcgacagcagggcagcactgagaggcgtgtggaattttgatcctggttttctctatcctgagctcaagttgtggtaccaggatagattccatgaccagtttgacttggtgtgggagcagatgcaccaacaggttctccttgaggggcgcaagcttttcccaaagaggtccaagaaagttaaaggctaggccaaaatttttggtgcagttggttggctggcagaagcttttttgtgtgtgtggttttaaggaatagatacgagagatgcagtgagacatcatgcacaagcagttttgtctagacattttgccttgatctggatttgttccattgcatctccgtgttgaactgttgatgtacaccgttcctctgcaagcaaccttcaccctgccatctgtgtcagaaatgttttctgatccaaccatttgctcaaaaccttgaacctgaaaaatatcctgatatccaaccatcgccatggcccatggggattggagggaattggcttcgagtgagggccaggggtaggattcgccagaaacaaacaggggatggtcgtgcgcagattgattacatttctctcctttccgtctctcgctctatttgcttttagcatatgaagtgtccgattccaggggtaaaaacagcggtagagtcgatataaaaatgtagcactaaactatattaccctcagttcaagaaaacaaattacccctctggcatgcttgcatgaactttggtctgcatgtaaaattgaattccag

SEQ ID NO: 8762 - DNA, 2731 bp, Zea Mays
cgacgattctatgtttatcacgcccaacaaagtagtgtagtttttcgacgccggcggatccctcgagccctagctaggaaagtagggttttcgatggattctctgagccggagggagcgggcacaccgcgccgtcgacgccatgaagcctctgggcttctcgaagaaggaggtcttcgccgtcctcaagaacctcctccagctgttcgataactcctgggagcccattgaggacgagtgctaccgcgccctcgccgatgctatcctcgaagcccgcgaccggccccagcaacagtacaagaggggttcggcttccgccggagggggagggctgccggccccggccttctacttcccgtgacatccacgacggtctggatggtgggaccgaggcccttcgcatcaagaggacgaggatcagcgctagttgctctatcgatccccagtctcccgtctccgctgcggaagcccttgatgaacctataggcgtttcgtctgagctaagccatccacaaatggggacctcaacccaatgtcagcggcccactgcatatggtggcgtgccttcacatgggaatactgcacacaagaagagggcaatacaaatgatggatgaagatttccaacataccgtcttcttgagggagcctaaacctgaacctgatactgatgatctacaatgcagtgcccctgcatccagctgtcagaatgcccaacttggccgcattgcttcccacccgctcaatgccagcaccttagatgctctacctgttcaggctccgttaaagatttcaggagctaatggcaggacagtccagcattatagaagtacagcgccttcttcctttgttgaacctataaatagcaagacgaagcaacctcaaagtctggaaaatgggttggaccatgcaactatgatgcacaatgctgggacaggatctgcagctggaaaaacacaggaagcaccttgtttacacactcttgtagcttcatccactatgggtgaggtcgagatgtcgatcaaatgctgcatagacccatcaaaattccacatgcctgatttagaagctgttttcaagatggttgaggaaaaatgccttcgctcacacaagagcctcccacctgatttttccatagccggtctcatcaagcagatatgccagtgtgtcgcacgactaggcagtgatcatgctgcagaacataataaacaatcagatgcttttggcaagatcagaagctcacaggataagccaacaacgagtagtgctccatccttggaaccaattgattgcatgaacagcagaagcggggaatataaagctgtagaagaatcattgattgtggaagcttcagagaatggcccaccaaattcaactacccatcagcaggcccatttggtacttcctcccaatgggtgtacccatgatttatctgacatatcaaagggaaaagaaaggactcctatgttaactctgttgaaacaattggcgacaaggactgttgttctgattgctctggcaactgcttgtatgcctctgaaccatgtgcctgtgcaagaaaaactggtggtgaatttgcctatacacgagacggattggttaggacaaagttccttgatgagtgcatctctatgaaccggtttccagaaaaacataatatgttcttctgtaaatcttgcccacttgagagtatcaggaacgagccttcaccagagctttgcaggggccatattattaggaattttatcaaggaatgcgggagtaaatgtggctgtaacgcgcaatgtggtaaccgtgtagttcaacgtggtataacttgcaatctgcaggtgttttcgacacgggaagggaaggggtgggggctacgcacacttgatgaacttccaaaaggagcttttgtctgtgaatatgttggagagttgctaacaaatacgaagctacatgaaatgactactcaaaacatgcacaatgctaggtactcagtgctcttagatgctggttggggtcctgatggggtgctgaaggatgaagaagctttattcctggatgcgacattttgtgggaatgttgggagattcatcaaccacagatgctatgatgcaaatttagttgagatccccgttgaaaaggagacgccagatcatcactattatcattttgcatttttcacaaccaagaaggtggaagcatttgaggagctcacatgggattatggtattgattttgatggtgataagcatcctgtcaaatcatttgaatgcctgtgcggaagcagatactgccgtggtagaaagcattcgaggacgcgaggcaaagctgcttcgaagtgaagtgttgactgaaagcagcggtgcatggttggtttgggaaagcgaacggactaatcagttttagaatgctttgttaacctaggtagctatgcattcataaagtgcccgctgtgcttgactgcagaacgtgaaattcaattagacagactgaaatgcaatgtacgtacgctactcctaaaccctaagccatctggccatgatctactgatgatgaggtgaatttgattactgttctgtgcatcattgacagacaaaaacagcacataatcatgcatgtgtcgttaacgaccagtttagcacatttgtttgccaagtagtagtaggggtgtagtgggatacggacggatattctatattgttttcatattttctcttcggattcgaatcgggtatgaatattatt

SEQ ID NO: 8763 - DNA, 2742 bp, Zea Mays
cgacgattctatgtttatcacgcccaacaaagtagtgtagtttttcgacgccggcggatccctcgagccctagctaggaaagtagggttttcgatggattctctgagccggagggagcgggcacaccgcgccgtcgacgccatgaagcctctgggcttctcgaagaaggaggtcttcgccgtcctcaagaacctcctccagctgttcgataactcctgggagcccattgaggacgagtgctaccgcgccctcgccgatgctatcctcgaagcccgcgaccggccccagatgcattgcagcaacagtacaagaggggttcggcttccgccggagggggagggctgccggccccggccttctacttcccgtgacatccacgacggtctggatggtgggaccgaggcccttcgcatcaagaggacgaggatcagcgctagttgctctatcgatccccagtctcccgtctccgctgcggaagcccttgatgaacctataggcgtttcgtctgagctaagccatccacaaatggggacctcaacccaatgtcagcggcccactgcatatggtggcgtgccttcacatgggaatactgcacacaagaagagggcaatacaaatgatggatgaagatttccaacataccgtcttcttgagggagcctaaacctgaacctgatactgatgatctacaatgcagtgcccctgcatccagctgtcagaatgcccaacttggccgcattgcttcccacccgctcaatgccagcaccttagatgctctacctgttcaggctccgttaaagatttcaggagctaatggcaggacagtccagcattatagaagtacagcgccttcttcctttgttgaacctataaatagcaagacgaagcaacctcaaagtctggaaaatgggttggaccatgcaactatgatgcacaatgctgggacaggatctgcagctggaaaaacacaggaagcaccttgtttacacactcttgtagcttcatccactatgggtgaggtcgagatgtcgatcaaatgctgcatagacccatcaaaattccacatgcctgatttagaagctgttttcaagatggttgaggaaaaatgccttcgctcacacaagagcctcccacctgatttttccatagccggtctcatcaagcagatatgccagtgtgtcgcacgactaggcagtgatcatgctgcagaacataataaacaatcagatgcttttggcaagatcagaagctcacaggataagccaacaacgagtagtgctccatccttggaaccaattgattgcatgaacagcagaagcggggaatataaagctgtagaagaatcattgattgtggaagcttcagagaatggcccaccaaattcaactacccatcagcaggcccatttggtacttcctcccaatgggtgtacccatgatttatctgacatatcaaagggaaaagaaaggactcctatgttaactctgttgaaacaattggcgacaaggactgttgttctgattgctctggcaactgcttgtatgcctctgaaccatgtgcctgtgcaagaaaaactggtggtgaatttgcctatacacgagacggattggttaggacaaagttccttgatgagtgcatctctatgaaccggtttccagaaaaacataatatgttcttctgtaaatcttgcccacttgagagtatcaggaacgagccttcaccagagctttgcaggggccatattattaggaattttatcaaggaatgcgggagtaaatgtggctgtaacgcgcaatgtggtaaccgtgtagttcaacgtggtataacttgcaatctgcaggtgttttcgacacgggaagggaaggggtgggggctacgcacacttgatgaacttccaaaaggagcttttgtctgtgaatatgttggagagttgctaacaaatacgaagctacatgaaatgactactcaaaacatgcacaatgctaggtactcagtgctcttagatgctggttggggtcctgatggggtgctgaaggatgaagaagctttattcctggatgcgacattttgtgggaatgttgggagattcatcaaccacagatgctatgatgcaaatttagttgagatccccgttgaaaaggagacgccagatcatcactattatcattttgcatttttcacaaccaagaaggtggaagcatttgaggagctcacatgggattatggtattgattttgatggtgataagcatcctgtcaaatcatttgaatgcctgtgcggaagcagatactgccgtggtagaaagcattcgaggacgcgaggcaaagctgcttcgaagtgaagtgttgactgaaagcagcggtgcatggttggtttgggaaagcgaacggactaatcagttttagaatgctttgttaacctaggtagctatgcattcataaagtgcccgctgtgcttgactgcagaacgtgaaattcaattagacagactgaaatgcaatgtacgtacgctactcctaaaccctaagccatctggccatgatctactgatgatgaggtgaatttgattactgttctgtgcatcattgacagacaaaaacagcacataatcatgcatgtgtcgttaacgaccagtttagcacatttgtttgccaagtagtagtaggggtgtagtgggatacggacggatattctatattgttttcatattttctcttcggattcgaatcgggtatgaatattatt

SEQ ID NO: 8764 - DNA, 3481 bp, Zea Mays
tgctgacacctcgatatcgagacgagggtgctccgcctcctacatctttgctatggacaggaagacttatgagctcgtgggaccagactatcccggtaatcgagccgaagatgttaaggatccttcacttggctggatgatcagtttcttgttcctcattgctctcgttgggccatttagcattgtcttgcttcgaaaggtaatggtgattgattacaagcttgcattccctggtggaacagctacagctttgatgatcaatagcttgcatgggaaaacggatggtgatcttgcagggtaaggcaacaggaaaaagctgcactgccttgtaaaatacatgggcattagttttgtttggagcttctttaaatggttctttagtggtgttggtgactcttgtggttttgacaatttcccaacatttgggcttgaagcttttaaaagcacgttttatttcgacttcagtcctagttatgtcgggtttggttttatttcccctcatattgtaaactgctcagttttccttggatctgtcatatcttggggctttctttggccatttattagtgcacaagctggtcattggtacccagataaccttggtaacagtgatttcagaggcctatatggttataaggtcttcatagccatttcgattatacttggagatggcctatacaacttggttaagatatttattgtcattgctagagaattatgcagcatgcaatcgaaacaacatgagctgcctgttcaagctctggaaggtaaacatgttacttcttagttgtagtgcaatgcgttggccacatgctgtgagattaattttgtggcttgtgagttgcgaacattagttgcacaatatatagctcatctaatatgccgtcttacgaaaagctgacatgcccatagtatttgtccaatgcatgtttcgtcatctcatctgcagatgacgggagttgtgaacaactagcagatgagaaactacaaacagagatattcctcaaagatagtatatctccttggtttgctgcttctggttacattgtcctggcagcaatatccaccgccagtgtgcccgccatatttccccagctcaagtggtaccttgtcctcctgtgctacttcttcgctcccgtggttgcgttctgcaactcctacggaatgggcctcaccaacctgaaccttgccccgacctacggcaagatcgccctcttcgcgttggcctcgctcgtcggcagtgatggcggtggagtcatcgccggccttgcagcctgtggcatcgtaatgtccgttgcctgttccacagccgatctaatgcaggacttgaagagcgggtacctgaccctctcgtcgccgcggtcgatgttcactgcccagctgatcggcatcgcgctcgggtgcgtcatagctccgctcacgctgtggctcttctggacagccttcgacatcggcgaccctgacggggagtacaaggccccctttgccatcatgttccgggagatggccatcctcgggatggagggcttctccgcgctgccactgcactgccttgacatctgctatgccgccttcttcctcgccttggccaccagtctcctcaaggacgtggcgcccgcaaacgtgtccaggttcatccccataccgatcgctatggctgcgccgttctacgttggcgcctactttggcgtggacatgttcataggcacggcgatcttgtacgcctggcagaagctgaaccgggagcaggctgatggttacgcggtggctgtggcgtccgggctgatctgtggagatgggatctggagcatcccttctgctcttctgtccatcctgggagctgttccacccatctgcatgtcgttcgaggcttcctctgctcccaggtgagagatgaacaatacgcagaagtttttattactggccatatgtttgcgccattgatgaaaccatatggattgtaacacaaaggaggtgttagttgttcgtaatttgtacctccgatgattttatatgaaacaaaaacacgtctttgcatgtaatgtaaatacatacattctctggtttgaaacttcgaatacacatcgtagatttttcattttaaacaactatacaacataagcatcaactgtaatgttgtgttctatacacgtgctctgttgtgatacatcgattgcctgtaatgatcactggctctaagacctgtatggagcattgcttcaacttgttttttttttacaaggcaatgacgaatggaccagcagaggccacctgccctgcttagaagctcacaggtagagctctgcatccccaggacaacactccacgtgccctgcagcctgtgacgtgtcaagctgtgaggacaccacgcagtcatgcttctccttcccgcgtctctcacatcatatggagcacaggggcgagcggcagcagcagaaggtcggcagcagccatggagatgctgagcatgctgaaggtggggtacaccatcctgcgcagcgagacgcccgcgacagacctcgtcaacaccttcatggactgggcggcgcgcagaggacgtcgcagggaaggttgtgctcatcaccggcgccgcctccggcatcggccaggccgtgaacttctggggcgcagttcatgcgacccactgcgctcttccccatctgaagaagagcggcggtgggaaggtcttcgtcaactcctcggctgcggcggcgctggcaatgccaggaatgagcctctacaatgccagcgaggctgctgttctcaacttcttcgagaccctgcgggtcgagctccgcgacgaggtcggcatcaccatcgcgacttccgggtggatcgtgtcggagatgaccggagggaagcagctgtccaaggaagggacggtggaggtcgccgtgcggtgcgccgaggccaccgtggacgccatctgccgcggccggcgccacctcaccgtcccgctgtggtaccgggcgctgttcctgtggcgggcgctcgcgcccgaggtggtggagttcagccagagactgttgtgccgacggaccgcgggcggccgcggtcatcaggcgaagggcaagaggttgcaggaggtcaccggcgccgtccagccggcgccgctgcacagctcggacatcaaacgggagtagtcgtaggcttcggtaaggcagctggcagtgacatggtgctagctgctgcttgtctgttcggtcaaatgtggacgagttgtaaatcagctgtcaccttcgttcgttgtgtgactttaaacttcgtgcatacagtatgttgttgtcccgatttttcttcgtgtgggcggagttattgcattgcatagatagattgctctaaaatccgtagtacgctaggccaatcactaggctaggtgcaacaaaacaaatatacgtgtgagctgctaaaagtcacttgtttttttagttttgctacaactctttttttttaaaaaaaagagacgacgagtatactaaaa

SEQ ID NO: 8765 - DNA, 3726 bp, Zea Mays
cacgatgctgacacctcgatatcgagacgagggtgctccgcctcctacatctttgctatggacaggaagacttatgagctcgtgggaccagactatcccggtaatcgagccgaagatgttaaggatccttcacttggctggatgatcagtttcttgttcctcattgctctcgttgggccatttagcattgtcttgcttcgaaaggtaatggtgattgattacaagcttgcattccctggtggaacagctacagctttgatgatcaatagcttgcatgggaaaacggatggtgatcttgcagggaaaaagctgcactgccttgtaaaatacatgggcattagttttgtttggagcttctttaaatggttctttagtggtgttggtgactcttgtggttttgacaatttcccaacatttgggcttgaagcttttaaaagcacgttttatttcgacttcagtcctagttatgtcgggtttggttttatttcccctcatattgtaaactgctcagttttccttggatctgtcatatcttggggctttctttggccatttattagtgcacaagctggtcattggtacccagataaccttggtaacagtgatttcagaggcctatatggttataaggtcttcatagccatttcgattatacttggagatggcctatacaacttggttaagatatttattgtcattgctagagaattatgcagcatgcaatcgaaacaacatgagctgcctgttcaagctctggaaggtaaacatgttacttcttagttgtagtgcaatgcgttggccacatgctgtgagattaattttgtggcttgtgagttgcgaacattagttgcacaatatatagctcatctaatatgccgtcttacgaaaagctgacatgcccatagtatttgtccaatgcatgtttcgtcatctcatctgcagatgacgggagttgtgaacaactagcagatgagaaactacaaacagagatattcctcaaagatagtatatctccttggtttgctgcttctggttacattgtcctggcagcaatatccaccgccagtgtgcccgccatatttccccagctcaagtggtaccttgtcctcctgtgctacttcttcgctcccgtggttgcgttctgcaactcctacggaatgggcctcaccaacctgaaccttgccccgacctacggcaagatcgccctcttcgcgttggcctcgctcgtcggcagtgatggcggtggagtcatcgccggccttgcagcctgtggcatcgtaatgtccgttgcctgttccacagccgatctaatgcaggacttgaagagcgggtacctgaccctctcgtcgccgcggtcgatgttcactgcccagctgatcggcatcgcgctcgggtgcgtcatagctccgctcacgctgtggctcttctggacagccttcgacatcggcgaccctgacggggagtacaaggccccctttgccatcatgttccgggagatggccatcctcgggatggagggcttctccgcgctgccactgcactgccttgacatctgctatgccgccttcttcctcgccttggccaccagtctcctcaaggacgtggcgcccgcaaacgtgtccaggttcatccccataccgatcgctatggctgcgccgttctacgttggcgcctactttggcgtggacatgttcataggcacggcgatcttgtacgcctggcagaagctgaaccgggagcaggctgatggttacgcggtggctgtggcgtccgggctgatctgtggagatgggatctggagcatcccttctgctcttctgtccatcctgggagctgttccacccatctgcatgtcgttcgaggcttcctctgctcccaggtgagagatgaacaatacgcagaagtttttattactggccatatgtttgcgccattgatgaaaccatatggattgtaacacaaaggaggtgttagttgttcgtaatttgtacctccgatgattttatatgaaacaaaaacacgtctttgcatgtaatgtaaatacatacattctctggtttgaaacttcgaatacacatcgtagatttttcattttaaacaactatacaacataagcatcaactgtaatgttgtgttctatacacgtgctctgttgtgatacatcgattgcctgtaatgatcactggctctaagacctgtatggagcattgcttcaacttgttttttttttacaaggcaatgacgaatggaccagcagaggccacctgccctgcttagaagctcacaggtagagctctgcatccccaggacaacactccacgtgccctgcagcctgtgacgtgtcaagctgtgaggacaccacgcagtcatgcttctccttcccgcgtctctcacatcatatggagcacaggggcgagcggcagcagcagaaggtcggcagcagccatggagatgctgagcatgctgaaggtggggtacaccatcctgcgcagcgagacgcccgcgacagacctcgtcaacaccttcatggactgggcggcgcgcagaggacgtcgcagggaaggttgtgctcatcaccggcgccgcctccggcatcggccaggtagcgagactggcgctagtggcgaggatggtgggaagcctgcatgatgtcgcggcgagagccagggatggcggctcgccagacgttctggttgttgccggggacgttgcgaaaccagaggattgccggaggtttgtgcaggccacagttgaacatttcggccgattggatcatcttgtgaacaacgctggtgtagcaaatgtctgctggtttgaggacgtaccggatgttgctgctttgaagcgagtcctggccgtgaacttctggggcgcagttcatgcgacccactgcgctcttccccatctgaagaagagcggcggtgggaaggtcttcgtcaactcctcggctgcggcggcgctggcaatgccaggaatgagcctctacaatgccagcgaggctgctgttctcaacttcttcgagaccctgcgggtcgagctccgcgacgaggtcggcatcaccatcgcgacttccgggtggatcgtgtcggagatgaccggagggaagcagctgtccaaggaagggacggtggaggtcgccgtgcggtgcgccgaggccaccgtggacgccatctgccgcggccggcgccacctcaccgtcccgctgtggtaccgggcgctgttcctgtggcgggcgctcgcgcccgaggtggtggagttcagccagagactgttgtgccgacggaccgcgggcggccgcggtcatcaggcgaagggcaagaggttgcaggaggtcaccggcgccgtccagccggcgccgctgcacagctcggacatcaaacgggagtagtcgtaggcttcggtaaggcagctggcagtgacatggtgctagctgctgcttgtctgttcggtcaaatgtggacgagttgtaaatcagctgtcaccttcgttcgttgtgtgactttaaacttcgtgcatacagtatgttgttgtcccgatttttcttcgtgtgggcggagttattgcattgcatagatagattgctctaaaatccgtagtacgctaggccaatcactaggctaggtgcaacaaaacaaatatacgtgtgagctgctaaaagtcacttgtttttttagttttgctacaactctttttttttaaaaaaaagagacgacgagtatactaaaa

SEQ ID NO: 8766 - DNA, 3734 bp, Zea Mays
ctgacacctcgatatcgagacgagggtgctccgcctcctacatctttgctatggacaggaagacttatgagctcgtgggaccagactatcccggtaatcgagccgaagatgttaaggatccttcacttggctggatgatcagtttcttgttcctcattgctctcgttgggccatttagcattgtcttgcttcgaaaggtaatggtgattgattacaagcttgcattccctggtggaacagctacagctttgatgatcaatagcttgcatgggaaaacggatggtgatcttgcagggtaaggcaacaggaaaaagctgcactgccttgtaaaatacatgggcattagttttgtttggagcttctttaaatggttctttagtggtgttggtgactcttgtggttttgacaatttcccaacatttgggcttgaagcttttaaaagcacgttttatttcgacttcagtcctagttatgtcgggtttggttttatttcccctcatattgtaaactgctcagttttccttggatctgtcatatcttggggctttctttggccatttattagtgcacaagctggtcattggtacccagataaccttggtaacagtgatttcagaggcctatatggttataagataatcccataaaacagatacgccttgtaactactatctgtaaacagtccagtgtttggcagtccaagcctaaatggaataaaatcatgtggggaacaatccccccctgttgagcttttaaaaaatgattaatgtgcatgggtttcttcaactgaattttgtttcaaggatctgggaaatgattttttttggcctgcaacactgaagataggtcatgctgtcatgcttgatttcctcataaaatgcgtattcatgcaggtcttcatagccatttcgattatacttggagatggcctatacaacttggttaagatatttattgtcattgctagagaattatgcagcatgcaatcgaaacaacatgagctgcctgttcaagctctggaagatgacgggagttgtgaacaactagcagatgagaaactacaaacagagatattcctcaaagatagtatatctccttggtttgctgcttctggttacattgtcctggcagcaatatccaccgccagtgtgcccgccatatttccccagctcaagtggtaccttgtcctcctgtgctacttcttcgctcccgtggttgcgttctgcaactcctacggaatgggcctcaccaacctgaaccttgccccgacctacggcaagatcgccctcttcgcgttggcctcgctcgtcggcagtgatggcggtggagtcatcgccggccttgcagcctgtggcatcgtaatgtccgttgcctgttccacagccgatctaatgcaggacttgaagagcgggtacctgaccctctcgtcgccgcggtcgatgttcactgcccagctgatcggcatcgcgctcgggtgcgtcatagctccgctcacgctgtggctcttctggacagccttcgacatcggcgaccctgacggggagtacaaggccccctttgccatcatgttccgggagatggccatcctcgggatggagggcttctccgcgctgccactgcactgccttgacatctgctatgccgccttcttcctcgccttggccaccagtctcctcaaggacgtggcgcccgcaaacgtgtccagaagctgaaccgggagcaggctgatggttacgcggtggctgtggcgtccgggctgatctgtggagatgggatctggagcatcccttctgctcttctgtccatcctgggagctgttccacccatctgcatgtcgttcgaggcttcctctgctcccaggtgagagatgaacaatacgcagaagtttttattactggccatatgtttgcgccattgatgaaaccatatggattgtaacacaaaggaggtgttagttgttcgtaatttgtacctccgatgattttatatgaaacaaaaacacgtctttgcatgtaatgtaaatacatacattctctggtttgaaacttcgaatacacatcgtagatttttcattttaaacaactatacaacataagcatcaactgtaatgttgtgttctatacacgtgctctgttgtgatacatcgattgcctgtaatgatcactggctctaagacctgtatggagcattgcttcaacttgttttttttttacaaggcaatgacgaatggaccagcagaggccacctgccctgcttagaagctcacaggtagagctctgcatccccaggacaacactccacgtgccctgcagcctgtgacgtgtcaagctgtgaggacaccacgcagtcatgcttctccttcccgcgtctctcacatcatatggagcacaggggcgagcggcagcagcagaaggtcggcagcagccatggagatgctgagcatgctgaaggtggggtacaccatcctgcgcagcgagacgcccgcgacagacctcgtcaacaccttcatggactgggcggcgcgcagaggacgtcgcagggaaggttgtgctcatcaccggcgccgcctccggcatcggccagcaaatagcttaccagtacgcaaagaaggtagcgagactggcgctagtggcgaggatggtgggaagcctgcatgatgtcgcggcgagagccagggatggcggctcgccagacgttctggttgttgccggggacgttgcgaaaccagaggattgccggaggtttgtgcaggccacagttgaacatttcggccgattggatcatcttgtgaacaacgctggtgtagcaaatgtctgctggtttgaggacgtaccggatgttgctgctttgaagcgagtcctggccgtgaacttctggggcgcagttcatgcgacccactgcgctcttccccatctgaagaagagcggcggtgggaaggtcttcgtcaactcctcggctgcggcggcgctggcaatgccaggaatgagcctctacaatgccagcgaggctgctgttctcaacttcttcgagaccctgcgggtcgagctccgcgacgaggtcggcatcaccatcgcgacttccgggtggatcgtgtcggagatgaccggagggaagcagctgtccaaggaagggacggtggaggtcgccgtgcggtgcgccgaggccaccgtggacgccatctgccgcggccggcgccacctcaccgtcccgctgtggtaccgggcgctgttcctgtggcgggcgctcgcgcccgaggtggtggagttcagccagagactgttgtgccgacggaccgcgggcggccgcggtcatcaggcgaagggcaagaggttgcaggaggtcaccggcgccgtccagccggcgccgctgcacagctcggacatcaaacgggagtagtcgtaggcttcggtaaggcagctggcagtgacatggtgctagctgctgcttgtctgttcggtcaaatgtggacgagttgtaaatcagctgtcaccttcgttcgttgtgtgactttaaacttcgtgcatacagtatgttgttgtcccgatttttcttcgtgtgggcggagttattgcattgcatagatagattgctctaaaatccgtagtacgctaggccaatcactaggctaggtgcaacaaaacaaatatacgtgtgagctgctaaaagtcacttgtttttttagttttgctacaactctttttttttaaaaaaaagagacgacgagtatactaaaa

SEQ ID NO: 8767 - DNA, 3468 bp, Zea Mays
acacgcttcctccacgccacctcgatctgtgcggcggcaaacccagagatccttgccccgtccgccggcgaaaggcgctcacctcccctcttcgctgtctgcgatgcagaggatactatcgagggccgctcgccggtgcacgaactcctcggcggcgttcaactcacctcacgcgcaggccaatgcagcaagtgttcactctgaagacgccccaacttgttcaaacatgattacagagaacgatgattttacatggaagactagttttgttagacccatgcaatcagaagtcgtcaatgccctccgtagaggtgaccggcagcgagcatcattgattctttcgaactttcatcacactaaggaatcactgaccaaggaagatttttcttatatattggagtattgtgcagaggcacctgatcctttgtttgttatggaaactttggaactcatggaggagaaggccattggcatgagtaaaagtatctacagatatgtcattagagctctgagcagagggggatatgcgaaggaggtacttcactggctggctcttctaggggagaaagaaagcactcatgccactacaccgatttttaatatctttctaaatgcctgtggtagagcaaatctgaaggacgccgaaaactgtctagagatactggaaaatctttttcttgggaagtctgaaataacatactgtgagcttttgaagcttgcagtgttacagggaaatttgcctgcagcttatgatatctggaaggagtgctctagcatatggtagcccttgctgcacaaagctgtgactatctgagggtgtcttctaaaagaagataccgatcatcgagactagacattcctgtacctgctttgaatgaatttgaagatctcaacctgccatcatgccaagggaagctggctaccggcgaacatttggttgatgctcaacctgagctatttgatgagaaaactcggccaggcaacaatctttcttataaggttgtagtagatgcgagtgttgcaaatacattgaagtctgcaccaagcacagtaaaacaaattttgagatgggcgttcaatgatgttttgcatgcatgtgtaccgttcaacaactgccagttagctgagcatttatttacagagatgcagaaacttggattgcaaccaacaagttatacatatgacggttttattaaaaccgtgatagctgggaaaggaattgcatatgccaacaaagtgattaacgccatggagagaaggggcattgaaccttacagtgatacacttgctgctctctcagagggtcatagcaatagtttacagttggatttggctgaggagtttttggaaagaatttcagagataaaaccaaagcatataggttcctttaatgctttgctttctggatgtgcgattatgaatgaaccagaaagagctgtccgcatactagctaaaatgaaacatgtgaacatgaagccaactctcaggacatatgaacttttgttttctctgtttggaaatgtaaatgttccttatgaacaaggagatgtgctctctcatgtcgatgtttccaaaaggataagtatcattgagatggacatgtttaacaatggaatccaacacagctttgtgtccatgaagaacttgatacgagcttttggagctgaggggatgatagaggaaatgctgaggtacctgaatatagcagaaaatactctgtggaacataaatcctcatcagaagagtgatctctacagcactgcgttgcatgctctggttgatgtgaaggaaactcacagagcagtaaagatgttcaaaatcatgagatcatgcagtcttccaactaatatttcaatttataataccatgatagagtgctgcaaatggctgccatgcttcaaatcagctagtgctttgctgtctttgatgcttcgagatggtttcaatcctacggttgtgacttttacatcactcctgaaggttgtattagaaaatgataattttgaaggggctctggatctgcttgatatatgcaagattgaaggacttcagcctggcatacagactttcaacacagtactcttacgtgcatatgctagaggtcaaattcatgtccttgaatatattttggagtgtatacatcgatcaaaaatccaacctgatccatcaacactttggtacacgttttgtgcctacgaggagcatgaactgtacaatactgcaattgagtcattgctagtcctcagcatgagaatgatatctgaggatgccggcattcctagtgagaaaagaattgtttttgaagatctaatcctcagtgaagaacctgatgctgaattcaggatcataagggcattccaagcaggcgaagaattccttgcgacagctttactgaacctaagatggtgtgccacaatgggtgccaccgtatcttggtcaccggaggagagtctttgggcaatgaggctggcagcctcgtatgatgctaacaagagaccacatataaacccctcggatgctcccaaatcttggggaaggaatccacttaaccgcccgtattgggaggctaacgggtgattggttgattggttggctacgcttccgttgatcacgcttggcacgtgtttggatggctgcagagcatctctaccgcctgctcccatgcatgcagcgttgattttttcccccactgggtagcctgcatgcgcggaaactcaactccccgtctccccctcgtttccagcggcccaggctggcacgatgctggtgcgagacgcccctacaaccaatcatgcgttaactgaggcagagctggagtctagcgtttcaaatctctctgttgagtatgatgacaatgttgtgttctgttttgctggaagccagtagatgttttgtttacctaactaacatgattgcagtacgatcgggcggcctccctacctgtcgtgaagcttgttccgcatgattgctccaaattggcctcgtaccgttttcaggcttctaggccaacagctctatgttccgattctttacattacttgataggttgctcactttatttacccagttgtaatttctgattatactggctgtcgggagcattagctttgcaaaactgtaggaatatatatgacaacgacgaagatcgagtcgcatggcagtgacagaagaataagaggtgttacgattacaatagctggaaaccaaaacttgctctggttattttgaaggtgtttagattttggaatgacgatgttacaattacactttattctggcaaaggtagattgtagaaggatggatagtgatgcactgttaccgcgtggtactgggttggtctttgtttgttgtacatcagttgttttctggcaggtcgttttgttgacttcgtagctgcccgaataacagaccaattattccatctcagttagagatcatttgtctacggcactcgacattcccttggtt

SEQ ID NO: 8768 - DNA, 3468 bp, Zea Mays
acttcacacgcttcctccacgccacctcgatctgtgcggcggcaaacccagagatccttgccccgtccgccggcgaaaggcgctcacctcccctcttcgctgtctgcgatgcagaggatactatcgagggccgctcgccggtgcacgaactcctcggcggcgttcaactcacctcacgcgcaggccaatgcagcaagtgttcactctgaagacgccccaacttgttcaaacatgattacagagaacgatgattttacatggaagactagttttgttagacccatgcaatcagaagtcgtcaatgccctccgtagaggtgaccggcagcgagcatcattgattctttcgaactttcatcacactaaggaatcactgaccaaggaagatttttcttatatattggagtattgtgcagaggcacctgatcctttgtttgttatggaaactttggaactcatggaggagaaggccattggcatgagtaaaagtatctacagatatgtcattagagctctgagcagagggggatatgcgaaggaggcacttcactggctggctcttctaggggagaaagaaagcactcatgccactacaccgatttttaatatctttctaaatgcctgtggtagagcaaatctgaaggacgccgaaaactgtctagagatactggaaaatctttttcttgggaagtctgaaataacatactgtgagcttttgaagcttgcagtgttacagggaaatttgcctgcagcttatgatatctggaaggagtgctctaggtattatagcccaagcattgtcacgcaaaggagatttataagggctttaactgcgctaggtgaccttcaatctgcgtatcacatattgcagcatatggtagcccttgctgcacaaagctgtgactatctgagggtgtcttctaaaagaagataccgatcatcgagactagacattcctgtacctgctttgaatgaatttgaagatctcaacctgccatcatgccaagggaagctggctaccggcgaacatttggttgatgctcaacctgagctatttgatgagaaaactcggccaggcaacaatctttcttataaggttgtagtagatgcgagtgttgcaaatacattgaagtctgcaccaagcacagtaaaacaaattttgagatgggcgttcaatgatgttttgcatgcatgtgtaccgttcaacaactgccagttagctgagcatttatttacagagattaacgccatggagagaaggggcattgaaccttacagtgatacacttgctgctctctcagagggtcatagcaatagtttacagttggatttggctgaggagtttttggaaagaatttcagagataaaaccaaagcatataggttcctttaatgctttgctttctggatgtgcgattatgaatgaaccagaaagagctgtccgcatactagctaaaatgaaacatgtgaacatgaagccaactctcaggacatatgaacttttgttttctctgtttggaaatgtaaatgttccttatgaacaaggagatgtgctctctcatgtcgatgtttccaaaaggataagtatcattgagatggacatgtttaacaatggaatccaacacagctttgtgtccatgaagaacttgatacgagcttttggagctgaggggatgatagaggaaatgctgaggtacctgaatatagcagaaaatactctgtggaacataaatcctcatcagaagagtgatctctacagcactgcgttgcatgctctggttgatgtgaaggaaactcacagagcagtaaagatgttcaaaatcatgagatcatgcagtcttccaactaatatttcaatttataataccatgatagagtgctgcaaatggctgccatgcttcaaatcagctagtgctttgctgtctttgatgcttcgagatggtttcaatcctacggttgtgacttttacatcactcctgaaggttgtattagaaaatgataattttgaaggggctctggatctgcttgatatatgcaagattgaaggacttcagcctggcatacagactttcaacacagtactcttacgtgcatatgctagaggtcaaattcatgtccttgaatatattttggagtgtatacatcgatcaaaaatccaacctgatccatcaacactttggtacacgttttgtgcctacgaggagcatgaactgtacaatactgcaattgagtcattgctagtcctcagcatgagaatgatatctgaggatgccggcattcctagtgagaaaagaattgtttttgaagatctaatcctcagtgaagaacctgatgctgaattcaggatcataagggcattccaagcaggcgaagaattccttgcgacagctttactgaacctaagatggtgtgccacaatgggtgccaccgtatcttggtcaccggaggagagtctttgggcaatgaggctggcagcctcgtatgatgctaacaagagaccacatataaacccctcggatgctcccaaatcttggggaaggaatccacttaaccgcccgtattgggaggctaacgggtgattggttgattggttggctacgcttccgttgatcacgcttggcacgtgtttggatggctgcagagcatctctaccgcctgctcccatgcatgcagcgttgattttttcccccactgggtagcctgcatgcgcggaaactcaactccccgtctccccctcgtttccagcggcccaggctggcacgatgctggtgcgagacgcccctacaaccaatcatgcgttaactgaggcagagctggagtctagcgtttcaaatctctctgttgagtatgatgacaatgttgtgttctgttttgctggaagccagtagatgttttgtttacctaactaacatgattgcagtacgatcgggcggcctccctacctgtcgtgaagcttgttccgcatgattgctccaaattggcctcgtaccgttttcaggcttctaggccaacagctctatgttccgattctttacattacttgataggttgctcactttatttacccagttgtaatttctgattatactggctgtcgggagcattagctttgcaaaactgtaggaatatatatgacaacgacgaagatcgagtcgcatggcagtgacagaagaataagaggtgttacgattacaatagctggaaaccaaaacttgctctggttattttgaaggtgtttagattttggaatgacgatgttacaattacactttattctggcaaaggtagattgtagaaggatggatagtgatgcactgttaccgcgtggtactgggttggtctttgtttgttgtacatcagttgttttctggcaggtcgttttgttgacttcgtagctgcccgaataacagaccaattattccatctcagttagagatcatttgtctacggcactcgacattcccttggtt

SEQ ID NO: 8769 - DNA, 3658 bp, Zea Mays
attcggcccgaggtccggtggcagcatcgctgaacccctcgtcgccggtgtcgctctcgtctgcttccattttgtaggctgcgcggtgtatactgcttccacttcacacgcttcctccacgccacctcgatctgtgcggcggcaaacccagagatccttgccccgtccgccggcgaaaggcgctcacctcccctcttcgctgtctgcgatgcagaggatactatcgagggccgctcgccggtgcacgaactcctcggcggcgttcaactcacctcacgcgcaggccaatgcagcaagtgttcactctgaagacgccccaacttgttcaaacatgattacagagaacgatgattttacatggaagactagttttgttagacccatgcaatcagaagtcgtcaatgccctccgtagaggtgaccggcagcgagcatcattgattctttcgaactttcatcacactaaggaatcactgaccaaggaagatttttcttatatattggagtattgtgcagaggcacctgatcctttgtttgttatggaaactttggaactcatggaggagaaggccattggcatgagtaaaagtatctacagatatgtcattagagctctgagcagagggggatatgcgaaggaggcacttcactggctggctcttctaggggagaaagaaagcactcatgccactacaccgatttttaatatctttctaaatgcctgtggtagagcaaatctgaaggacgccgaaaactgtctagagatactggaaaatctttttcttgggaagtctgaaataacatactgtgagcttttgaagcttgcagtgttacagggaaatttgcctgcagcttatgatatctggaaggagtgctctaggtattatagcccaagcattgtcacgcaaaggagatttataagggctttaactgcgctaggtgaccttcaatctgcgtatcacatattgcagcatatggtagcccttgctgcacaaagctgtgactatctgagggtgtcttctaaaagaagataccgatcatcgagactagacattcctgtacctgctttgaatgaatttgaagatctcaacctgccatcatgccaagggaagctggctaccggcgaacatttggttgatgctcaacctgagctatttgatgagaaaactcggccaggcaacaatctttcttataaggttgtagtagatgcgagtgttgcaaatacattgaagtctgcaccaagcacagtaaaacaaattttgagatgggcgttcaatgatgttttgcatgcatgtgtaccgttcaacaactgccagttagctgagcatttatttacagagaaacttggattgcaaccaacaagttatacatatgacggttttattaaaaccgtgatagctgggaaaggaattgcatatgccaacaaagtgattaacgccatggagagaaggggcattgaaccttacagtgatacacttgctgctctctcagagggtcatagcaatagtttacagttggatttggctgaggagtttttggaaagaatttcagagataaaaccaaagcatataggttcctttaatgctttgctttctggatgtgcgattatgaatgaaccagaaagagctgtccgcatactagctaaaatgaaacatgtgaacatgaagccaactctcaggacatatgaacttttgttttctctgtttggaaatgtaaatgttccttatgaacaaggagatgtgctctctcatgtcgatgtttccaaaaggataagtatcattgagatggacatgtttaacaatggaatccaacacagctttgtgtccatgaagaacttgatacgagcttttggagctgaggggatgatagaggaaatgctgaggtacctgaatatagcagaaaatactctgtggaacataaatcctcatcagaagagtgatctctacagcactgcgttgcatgctctggttgatgtgaaggaaactcacagagcagtaaagatgttcaaaatcatgagatcatgcagtcttccaactaatatttcaatttataataccatgatagagtgctgcaaatggctgccatgcttcaaatcagctagtgctttgctgtctttgatgcttcgagatggtttcaatcctacggttgtgacttttacatcactcctgaaggttgtattagaaaatgataattttgaaggggctctggatctgcttgatatatgcaagattgaaggacttcagcctggcatacagactttcaacacagtactcttacgtgcatatgctagaggtcaaattcatgtccttgaatatattttggagtgtatacatcgatcaaaaatccaacctgatccatcaacactttggtacacgttttgtgcctacgaggagcatgaactgtacaatactgcaattgagtcattgctagtcctcagcatgagaatgatatctgaggatgccggcattcctagtgagaaaagaattgtttttgaagatctaatcctcagtgaagaacctgatgctgaattcaggatcataagggcattccaagcaggcgaagaattccttgcgacagctttactgaacctaagatggtgtgccacaatgggtgccaccgtatcttggtcaccggaggagagtctttgggcaatgaggctggcagcctcgtatgatgctaacaagagaccacatataaacccctcggatgctcccaaatcttggggaaggaatccacttaaccgcccgtattgggaggctaacgggtgattggttgattggttggctacgcttccgttgatcacgcttggcacgtgtttggatggctgcagagcatctctaccgcctgctcccatgcatgcagcgttgattttttcccccactgggtagcctgcatgcgcggaaactcaactccccgtctccccctcgtttccagcggcccaggctggcacgatgctggtgcgagacgcccctacaaccaatcatgcgttaactgaggcagagctggagtctagcgtttcaaatctctctgttgagtatgatgacaatgttgtgttctgttttgctggaagccagtagatgttttgtttacctaactaacatgattgcagtacgatcgggcggcctccctacctgtcgtgaagcttgttccgcatgattgctccaaattggcctcgtaccgttttcaggcttctaggccaacagctctatgttccgattctttacattacttgataggttgctcactttatttacccagttgtaatttctgattatactggctgtcgggagcattagctttgcaaaactgtaggaatatatatgacaacgacgaagatcgagtcgcatggcagtgacagaagaataagaggtgttacgattacaatagctggaaaccaaaacttgctctggttattttgaaggtgtttagattttggaatgacgatgttacaattacactttattctggcaaaggtagattgtagaaggatggatagtgatgcactgttaccgcgtggtactgggttggtctttgtttgttgtacatcagttgttttctggcaggtcgttttgttgacttcgtagctgcccgaataacagaccaattattccatctcagttagagatcatttgtctacggcactcgacattcccttggtt

SEQ ID NO: 8770 - DNA, 3700 bp, Zea Mays
ggcgtctcgtcctttggatcacaacagacggccaggattcggcccgaggtccggtggcagcatcgctgaacccctcgtcgccggtgtcgctctcgtctgcttccattttgtaggctgcgcggtgtatactgcttccacttcacacgcttcctccacgccacctcgatctgtgcggcggcaaacccagagatccttgccccgtccgccggcgaaaggcgctcacctcccctcttcgctgtctgcgatgcagaggatactatcgagggccgctcgccggtgcacgaactcctcggcggcgttcaactcacctcacgcgcaggccaatgcagcaagtgttcactctgaagacgccccaacttgttcaaacatgattacagagaacgatgattttacatggaagactagttttgttagacccatgcaatcagaagtcgtcaatgccctccgtagaggtgaccggcagcgagcatcattgattctttcgaactttcatcacactaaggaatcactgaccaaggaagatttttcttatatattggagtattgtgcagaggcacctgatcctttgtttgttatggaaactttggaactcatggaggagaaggccattggcatgagtaaaagtatctacagatatgtcattagagctctgagcagagggggatatgcgaaggaggcacttcactggctggctcttctaggggagaaagaaagcactcatgccactacaccgatttttaatatctttctaaatgcctgtggtagagcaaatctgaaggacgccgaaaactgtctagagatactggaaaatctttttcttgggaagtctgaaataacatactgtgagcttttgaagcttgcagtgttacagggaaatttgcctgcagcttatgatatctggaaggagtgctctaggtattatagcccaagcattgtcacgcaaaggagatttataagggctttaactgcgctaggtgaccttcaatctgcgtatcacatattgcagcatatggtagcccttgctgcacaaagctgtgactatctgagggtgtcttctaaaagaagataccgatcatcgagactagacattcctgtacctgctttgaatgaatttgaagatctcaacctgccatcatgccaagggaagctggctaccggcgaacatttggttgatgctcaacctgagctatttgatgagaaaactcggccaggcaacaatctttcttataaggttgtagtagatgcgagtgttgcaaatacattgaagtctgcaccaagcacagtaaaacaaattttgagatgggcgttcaatgatgttttgcatgcatgtgtaccgttcaacaactgccagttagctgagcatttatttacagagatgcagaaacttggattgcaaccaacaagttatacatatgacggttttattaaaaccgtgatagctgggaaaggaattgcatatgccaacaaagtgattaacgccatggagagaaggggcattgaaccttacagtgatacacttgctgctctctcagagggtcatagcaatagtttacagttggatttggctgaggagtttttggaaagaatttcagagataaaaccaaagcatataggttcctttaatgctttgctttctggatgtgcgattatgaatgaaccagaaagagctgtccgcatactagctaaaatgaaacatgtgaacatgaagccaactctcaggacatatgaacttttgttttctctgtttggaaatgtaaatgttccttatgaacaaggagatgtgctctctcatgtcgatgtttccaaaaggataagtatcattgagatggacatgtttaacaatggaatccaacacagctttgtgtccatgaagaacttgatacgagcttttggagctgaggggatgatagaggaaatgctgaggtacctgaatatagcagaaaatactctgtggaacataaatcctcatcagaagagtgatctctacagcactgcgttgcatgctctggttgatgtgaaggaaactcacagagcagtaaagatgttcaaaatcatgagatcatgcagtcttccaactaatatttcaatttataataccatgatagagtgctgcaaatggctgccatgcttcaaatcagctagtgctttgctgtctttgatgcttcgagatggtttcaatcctacggttgtgacttttacatcactcctgaaggttgtattagaaaatgataattttgaaggggctctggatctgcttgatatatgcaagattgaaggacttcagcctggcatacagactttcaacacagtactcttacgtgcatatgctagaggtcaaattcatgtccttgaatatattttggagtgtatacatcgatcaaaaatccaacctgatccatcaacactttggtacacgttttgtgcctacgaggagcatgaactgtacaatactgcaattgagtcattgctagtcctcagcatgagaatgatatctgaggatgccggcattcctagtgagaaaagaattgtttttgaagatctaatcctcagtgaagaacctgatgctgaattcaggatcataagggcattccaagcaggcgaagaattccttgcgacagctttactgaacctaagatggtgtgccacaatgggtgccaccgtatcttggtcaccggaggagagtctttgggcaatgaggctggcagcctcgtatgatgctaacaagagaccacatataaacccctcggatgctcccaaatcttggggaaggaatccacttaaccgcccgtattgggaggctaacgggtgattggttgattggttggctacgcttccgttgatcacgcttggcacgtgtttggatggctgcagagcatctctaccgcctgctcccatgcatgcagcgttgattttttcccccactgggtagcctgcatgcgcggaaactcaactccccgtctccccctcgtttccagcggcccaggctggcacgatgctggtgcgagacgcccctacaaccaatcatgcgttaactgaggcagagctggagtctagcgtttcaaatctctctgttgagtatgatgacaatgttgtgttctgttttgctggaagccagtagatgttttgtttacctaactaacatgattgcagtacgatcgggcggcctccctacctgtcgtgaagcttgttccgcatgattgctccaaattggcctcgtaccgttttcaggcttctaggccaacagctctatgttccgattctttacattacttgataggttgctcactttatttacccagttgtaatttctgattatactggctgtcgggagcattagctttgcaaaactgtaggaatatatatgacaacgacgaagatcgagtcgcatggcagtgacagaagaataagaggtgttacgattacaatagctggaaaccaaaacttgctctggttattttgaaggtgtttagattttggaatgacgatgttacaattacactttattctggcaaaggtagattgtagaaggatggatagtgatgcactgttaccgcgtggtactgggttggtctttgtttgttgtacatcagttgttttctggcaggtcgttttgttgacttcgtagctgcccgaataacagaccaattattccatctcagttagagatcatttgtctacggcactcgacattcccttggtt

SEQ ID NO: 8771 - DNA, 3512 bp, Zea Mays
agcagacctgccgtttccatgtgcttgcttcacggagcacggcagctctgtaaacggcagactcgacgtagcttgcacgcacaggggttttcagctaaaaaatcctctagcgacagttcattggttgcccagttcaccgactgcctttataaacagggagctcgagctcgagtggtagcagcacaggcacaagtgcggtgccataagtgacagccacctcagtctctgtctgtggagctctctctcgcgcgcgttgccatctcgcaggcggcgacaggagatggacggggagcaggcggcgcggtgggcggcggcgcaggagggggttcccgtcggggcggaccttgtcgcggcggcgctgcggcagctgcgcttcctcgcggcggtggaccgccgccggtggctctacgacgagggcccgctgctcgaccgggccatacgcaggtacaaagcatgctggcttccgcttcttgacaagcacactaagggtgtggttgtagatggtccattggttgttcctcttgattgtgagtggatatggcactgccatcgccttaacccggttcagtacataagggactgcaagaaagtgtatggcagaatactgaacaataacaacgttgagtcgtccactcaaacaaagtcgacacttgagtcagaaaaagtttggaaagagctgtatcctgaggagcccttcgaattgttgttcacaagaacctttgacactgccgtggatgtcaaccctgcaggtgcagaggaggacattacctatgatctggtctcggctgttaagagacaatcctctttctattatcaggttggaacaccaacaatgcatgatccacggtttctccaagaagctctagctcgatacaaggcgtttctttacctgatcaagatgaatcaagaaaaaggattgcagcgcttccgtgtaccaacctatgatgtggatctgttgtggcacactcaccagctgcatcctattacctaccgcaacgacatggtgaagcttcttggaaaagttctggagcatgatgacaccgatgctgatcgatctgaagggaagaaactcgatgttggatttaccgagactactgaacagttcgagagtacctttggtgtaagatactggaaggctggatgtatgtaccgtggcaacgtgccatctcctgtgacatccactcctcagacattcagtgctgaggttggtactgggtcttacatctgcaaagcccagaaagatcttaatgcccttgatgtaacagttgtagagttatatttacaaattgtagacatcaagaatttaccatctgctgttcaaaaagaaaatgtgtatgtacggttcgccaagaatcaatcagatatgttcatcagtgacggcggcaggttggatatctcaacagttacagggaagaacaccggagtttgtttacagtgtgaacctaccggagaactcattcttgcagtaatggttgatcaattatcaaagaaaccagaaccgatagggaaggtttctttcccactgcacgatttgacagggcctgattctaagctctccttcgagaagtggtttgaactgaaagctcatggtgggcatgccgcttcacctcctgttagtcttcgtgttgcagcttctgctactgtcccaagcagcgctcagaaggtgttcaccatggtcaggatggagccattctctctcaagtcatgtcttttgccacattccatcaaggatcagaacacgggcagctggactcgtttcgtaaatgattgtggtaccgagcttatccgtctccagataagagagcacaaggcgaagaatagcatggccgtcgttcgagaattggttggagtattgaagtcaacaaaaaagcaaattcaacttgcagaattcaaggaaaacaagtggaccctaaaagactccaacttgccaataagtcatggcactgatggcagtctactcgatctcaaaggtgacaaccatctgatcaagctttatcggggaaggaaactggaatacgagcgcaaatgttgcagcgctcactctgaggacgtatcagctgttactgctgtaaagttctgtgctgaacatccatatggcaaagccgttgccttgctagacactgaagctcagcttatcatggtgaacgaggattggctcctacttccatggatctccatatcagtcctgtttatggacggcgatggcggtacgaaacttggcggcggtgccatggttcagaaaggtacagtgtttggatccgacactagcatggtgctagagacacagaccgtcggagcagggagcgtggcatccaatctagcacaatgtggcacttgcagcgccgtgttcggtggtgatgataaagaaatggcgaactgcaaggttgagcatgcgagctctggcgcttctcgcacggttgttgcaagtggtgagaatgggcacactgagactgctggctgtggaggcggctgtggtagcaattgtggacccatgatggctgaagaccccaaggccggcaatgccaagtccggaggctgtggttcggggtgtggtggtggctgcggtggcgcgggaggttgtgggaccatggccaacgaaggccaatccaggtccggaggtgttggcaccttgttgagctccaacgccatgggtggtgagggccagcaggcccattcagctggctgtggctccggctgtggtggtggctgcggcagcggcatggtcatcgaaggctccaaggttaacaacgttaacgccatgtccggcggctgtggctctggttgtggtggtggttgcggcagtggcatggtcatcgaaggctccaaggccaacaacgccatgtccggtggctgtggctctggttgcggtggtggatgcggcagcggcatgctcatcgaaggctccaaggccaacaacgccatgtccggcggctgtggctccggttgcggtggtggttgcggtgccctgttcaacgctagcactgctgccggagagggcctgcacaataagtcggctgggtgcggcggcggcgggtgcggctccgggtgcggcggtggcggcggctgtggtagcggcatggctatcgaaggcttcaaggccaaccacgccaagtctggtggctgcggctctggctgcggtggtggtggctgtggcactggcagcatggtcgctgaaggctccaacggcgggaacgccaagtccggcggctgtggcgggggttgcggcgccgtgttcaacgcatgatctcggtggagtggaggcatttgtgcagacatgcagtcgtcgtcgtctactgctagataccacatgctacagcatactgtgtattgctgtgcataatctactaaataaaaggaatgaataaacaatggatggatcggctgcctccgtggcgtttctgcaaacgaaaaatctcggtgttgttgggtgcagggatgaggatgaaaacgatttcaaacggtccgaaacgatatcgtctatttaacggttggttaagaaattacctgattta

SEQ ID NO: 8772 - DNA, 2739 bp, Zea Mays
atggcaaaagaatcgaaggcagacgcatacagcgctcgggttcacacagcagcagacaatgcattgcgtgcaactgctaatccaaactcttatttcggcaaaggctgccggagaagaaagctcgccgttctgattgagaggtccaccggtaaacggggcggccgactaatcgttgcacaagctcgcggcgcggcgcggcgccgccatgtcgtctccagcgccaacgtcgccggctacgccgtctccaccaccaccggctccggtaccgcccacgccgtccccgcagccgccgactccggcgccggtaccgcccacgccagcgccggtaccaccaactcccgcgccggtgccgcccacgccagcgccgattccgcctacccccgcgccggtgccgcccacgcctacgccgtcccctcctcctccgtctccgtcgccaccaccgccggtgacgccgtccccaccgccgccagcgaccgtaccgacgccatccccacctccaccggcatctcctccaccaccgaccgtgccaacgccatcaccaacgccaccagcatctcctccaccaccggcgaccgcgccaacgccaacacctcctccacctgtactacgcccgcctcctcccagtgctgtcccggcgtcaccaccacctcctgactccgtcccatcaccgcccccgtctcctaacggcgtcccggcgtcacccgcgtctccgccgtcacatcagttattggctccgcctccaccggcctcgtcgaccggaacatcatcaacgtcgtcatcgccctctaaatcatcaagcaacgccaccgtggtgggcataggcgtcgccgtcggggcggttgttctgatcggcctcgccgtcggcctcatttactgcttcgcgggaaggaaacgacgccggcggtcgccgctgccgtctcaggggtttccaggcgagttctacgacccgcggcggggtccaatgaccccgctgcacatgtcgcacgtgcaatcgacgacgccatcctcgacgccgccactgatgcactcgtggcagcagagcagccacggtctgtccgagtccccgctgccgccactgaacccttcgccggccatcacgggcggcacattcgcgtacgacgacctggcggcggcgacggacgggttctcggacgccaacctgctcgggcagggcgggttcgggcatgtgtaccgcggcacggtggccgggcaagaggtggccatcaagaagctgcgggcgggcagcgggcagggcgaccgcgagttccgcgccgaggtggagatcatcagccgtgtgcaccacaagaacctcgtctccctcgtcggctactgcctccatggtgaacaacggctgctcgtctacgagtatgtgcccaacaagaccctcgagttccagcttcacgggagtggcaggccaacattggactggccgaggcggtggaagatcgcggtcggctcggccaagggcctcgcctatctgcacgaagactgtcatcctaagatcatccatcgtgacattaaggcggcgaacatccttctggattataactacgagccaaaggttgcagattttgggttggccaaataccaagcagctgaagtaacctctgtttctacgcgtgtaatggggactttcggatacttggcgccagagtacgctgccacaggcaaagttaacgaccggtccgacgtcttctccttcggcgtgatgcttctggaactgatcactggaaggaaaccaatcatgacatcttcagagtatcagcctgagacattagtttcttgggctaggccattgctgacaagagctgtcgaggaggaaaactatgacgaactgatcgatcccaggctggagaccaactacgacgcgtacgacatggcgcggctggttgcgtgcgccgcggccgccgtgcgccagactgcgcggtcccgcccgcggatgagccaggtcgtccggtacctggagggcgagctgtcggtggaggacctaaacgccggcgtgatgccggggcagagtgcgatgcagcggtcgagcggcggcacgacggaccagatcaaccggctcaggcggatggcgttcgggccgggcgcaggagggagcaccgggaccggggcaatcacggagtacaccagcagcgagttcagcgatcccaccaccgagtacgggctgaacccatccagtgagtacacggccagcagcgcgggcgacacgggggaggtggccgcgggcgcgcaggggcagcagcagtggcacggcaggcgcgcgcccggcgacaccgagaggatgagccggcgcaccaccggcaggcgcacccagtcgtaaacacactggcacacggcattcatttttgcgctttgtcaggctatagtagattgtgatttcgttcgttcgtgtacatgcgcgtgacaaggctgtggtactgaattttgctgtctcttttttttttacttctctgtgtttcggattcatgcaatttttaggccgggtgagtggaggtttaagctgtaaattgtatatgcacgttattggcgctcctcggtaaacaaaagttaagctttgagtatgttagaactcaagttgtgtaatatttctagtaactggcaaggttcgcgagttcaagtttttatgatctgaagaactgacaacaaaggataggtgttaaatttcagaatgtgttcattgtccactttcagcatgtgttcaggttcaggttaactgcagcttctgtttgtttgtcg

SEQ ID NO: 8773 - DNA, 1843 bp, Zea Mays
ctggatagttttgcccctgaccaaaagtgtcgacgctcatctgctcgtgggtgaaatcacctggccctgtctctattttctcatcctctcgtccgactcatcttgtactgcggcggtggcgcccggcttccctcgacgaactccaccgacggcgaccggctccctcgtcctccaccggtcgcgcccggccctctacctccatcgatcgcgcccgaccctctgcctccaccgtcgtcgctcgctcagatgcatgcaaagggttagaaaatgcaataaagcttgttttccctcaggttgaccaaagagaatgatttaggcatctcatgcataattttgtgaaaaggtttggaggtgacatatcctctaagatgtaccctacacctagggcatataggccagaagtttcatagtactttttcaatcaagttgtagaagcctcccaagatgtaaagaaatggctagatgcttaccacaagctgaattggaggaggagtcagtttaaccctaccatcaagtgtgattatgtcaccaacaatctagctgaagtattcaacaactggattaaagattggaatgaccttcctgttgcggagcttgcagacaagtgtagcgagatgataatggtgttgtgggaaacggaggagacatgggggaaagcttactggcaagatcttacctgctgttttgcagcagttgaaagcaaggactagaggcctaggacatctataagtgacaaaggcagttgaggacagcacaaacattcataataggcatgtggtgaagtcatatttgcattagtgtacataccttgagtggcagcacactgacaaaccttgcccacatgcattggccttgattacagcagaaggattttgtgcatgaatactactcagtccaaaggttcaaaaaagtatacaagagaataattaaaccactaccaaataggtctcaatggccacaagtggaacaaccctatgtggttggtgcaccacttgacaagataggaagaggaaggtataaaaaaactaagaattaagagttgtttggaaggtgggaacaacaaaggaaaaaggtagctaaagaaaaaggcaaggaaactcacaaggatgcagtcctagaggctgacatggaggctacaaaccaatctaagaagggaaaaaagaagatgatgtgaggcaaaagaaagtgcaaaagatgtggagagttaaatcatagcgaaactagctacaagtgcccgttaaatggaacaaagaaaagaaagagaaggcctcacattaataaaacaaagtatggggagaataccaagatccccaaaagccgacttgaagaaggtgtccaaggtgaaggtgttatccaaggtgaagctgttgtctaagatcatggtgttgtccaaattgaagctgttgttcaagttggtccaagtggaagtttctcttccagtgcaaagcccaattatacgaacaagggagtctattttacaggacaacttgataagtcagcttgctatgctactaggagatggttagattgaaatccagtcacctcctaataatacaactcctaagaagtttctagtgaagaagctcacagcaagctgaagagaacgtgacaagattctaagaaactactgttttatgtgttacccaagatttaaataagctagtgttagaagtgaacattttatgctatcagatgaactatatttggatagagatagtagttattttgatgtgtgatgttatcttaaacaagtgtcaggtttggatgtgttttgttatctgaaacaaatgttcagaagctgaaaatgttgtctctattagtgtacacatgttaccagtttctg

SEQ ID NO: 8774 - DNA, 2679 bp, Zea Mays
gcctccctccctccctcctcgaataaaaacttgcgaggaaaatgtgaagaccccacgcgacccaacagcagacccacagggagtcagagatactgatcggaggcggtgtcttctacttctagccgcaaccgcaggccgcacgcagccccaccgctccgcccgtccatcctctccaactagtggcagcgcggtggcaaccgctcacccaccactcctcccccaaatttccccacaatcatagctctgcacgttagggagcgacgccgacgcaccaaaggaacgaggggaggccagggaacagcagatacgcaagcgccggaatgctgggctccaagacgaaatctggctccgccgaggcgaagagcaacggcaaaccggacaaggagaagaagggcggcggaggcggcacgccgccaacccccaaggacagcaagccgcgcaagccggccgagcagcacgcgcagcttgccgcgatccgagaagagctcgtgaaggccaaggagcagttggtggagaacgagaaggagaagtgcaaagtttttgctgagctggagcgtgccaagaaggtggctgatgaggccaatgccaagctgcaggatgcgcttgatgtgcaaaggagggctattgaggcgcaggaggcagacaaactccctgccagagagtcggagcaggcaagcatccatggccagcaggaggctgatgacgctgtgctgcggtcgacagtggagcagctggagaaggccaggtatgagctggccgacgcaatcgatgccaagaatgaagccctcagccaggtagatgatgccgttagggcttccgaggtgaaggcccaggaagttgagcatctcactgtagaggttacgcgcctcaaagggctggttgattccaaggtggatggcaacaggaagaagactgcagagaggattcagaatcttgaagaagagaactttgcattaaagcttgagcttgagaaaaaaaaggctgctgaagaaaaggcagttcgattggagcgcatgattgatgaacttaagagtgatgttgatgatgctaggaattttggttccaagtcaaagcagttagctgacgaatggcagaagaaggcacagcttctcgaggtcagattggaagaggctgatcagtctaatattttgaagggtgaatctttgaattcagcaatggaagaattggattcaacaagtagtttgcttcgtgacagagaatctgaagttgctgctcttcgtgacaaagtcaggttcttggaggatgagctgacaaagctcaagagtgatattgttgtgtccggccaacgggcagatgcagcagagaaagagacgacggatctatggacagagattgaagggcttaggctgaagctccatacagtggaagaagagaaaatggaggccttgaacagtgataagaatactagctcagaaattgagaccttgaatgaacagaagaaccagctggctgacgagcttgaggctagcaaagatgagcttgagaaaattaagaaggcaatggagggtctggcctcagccttacaggaaatgtcagctgaatccagagaggcgcaagaaaagtaccttctgaaacaagatgagatggagcgtgctcaggcacaggtagaggagcttaacttgagtctgaagaatattaaggagaactatgagctactgcttgatgaggcaaactatgagaaggtttgccttacgaaagcagttgaaagactggaagcagaagctaagagagcgcatgaggaatggcagtccaaagagctaagttttgtcagctctattaagaattcagaagaagagatagtcgctgtcagggttcaaatggacaggaccttggaggttgttaaggagaaagaaaatgaaaacacagagttgcaggagaagctgcagcagcttgaatctcagctaatggaagcgaacagaatcagagaggaaggcaacactgaaactatccgatggaaggagaacatattagaccaagagaatgaattacagaacataaaacaggagaatgacgacctgcaggcaaaggaatcagcagcttctgagaagattaaggaactctcttcccagcttactaatgcaaaagatggcacgataaatagtaacaccaaggatggagataatgagaaggggggcactgaagaggatgatgaacctgttgtagtagttgccaaaatgtgggagaacagcaagtttgctgactatgattcagctaaggaggagaatgatggcgactcacaggatgatgaacctgttgtggtagttgccaaaatgtgggagaacggcaagtttgctgactgtgattcatctaaggagaaggataatgatggtgactcgcaggttgatttggaatcaaacaagggggatgcaggtcttgacagcaatgggttgcactcaactaatgagagcagtggcagagcatcaactaaacagccgcaacagcataagaagcctttgctgaagagattcggtggtttgctgaagaagaaaagcgaaaagtagcataaaaccatctgatgatattctttgttctatcttttgacatatttctacatatttctttgattagctatctagttcctgagtcttcccccgatattatggtaaactgagtgatggatgcttcaaagaatacaaaatgtcgcctgtatttacatca

SEQ ID NO: 8775 - DNA, 1438 bp, Zea Mays
cctgtccggggcgctttcccttctcttcccgttgcttatccacgtggggttgccgtgaatccaccgtcttctccgcctacaatctctcagcaaaaccaccaaagccagctgctcatttgggggaagaccttctttgagtgaggtccaacccttgggggccatttcaaccttcgtcctccgcaataaaagttgggcaatcctatctgcaacaaaactaaccatggatggcactagctttgacctgacagagcacgaaggttcaaatttgtctccttttctactcaaactttttaatgagtgggatgatcgcaagacaaggggcttgtttcaccatgacatcagttcctgtgaaacaaaggtgctacctggagtacataattttgtggcaacattaattgaaggacgtgaccaaaagaagcggccaactgagttcacaatgaaccaagttctccagccatttgttagtgagaagttcaatttcacaaaagtcagcccgttggaggtgatctttagattcaatgacactgagaaagattctgcacaatattttgatggtgttcctgatactgtttcagcttcttctagtgccatcttgattaatgtgagcccaattggctactgccatgtgctattgactcccaagatccaggactgtttgccgcaaaggattgatcaagagagcttcttaatagccatgtatgttgcaagagaagcaaggactcccttcttcagagttggttataacagcctgggcggctttgcaactatcaaccaccttcacttccaggcatactacctgaaagtacagtatccagttgaaaaggcaatcacggagaagctcaagaccctagggaatagcgtgagcatttttcacctggtggattacccagtcaatggctttgtgttcgaaggtggtgcgagcctggaagatttgtcagatgtggtctccaaagtctgcatcttcctgcaagagaacaacagacctttcaatgtcctcatctctgaatctggcaagagaattttccttctaccacagtgctatgcggagaagcagctcctcggaaaggcgagccaagagttcctggacatgagaatcaatccagcaatctgggagctcagtggccatctggtactgaagcggaggaaggactacgaggaggcctctgaagcaaacatatgcaggtttttggttgaagcagctctttctgaaacagaatttcaggagctgaacctatgcgtgctcgacttcctgaccagctctcttggttgaaactcggatgtaggttcctatagatagtaacagttctgaggttccagttaaaacagttgtgctggtactgttactttatgatggtatatcatgtagtagtatttctgatttgactcgtcacctctgcgatgaaataatatgtcttctccggcttcaatttcgtaaaga

SEQ ID NO: 8776 - DNA, 849 bp, Zea Mays
ggccgcatcctctccccccgcggccgagctccacccccacccacccacacgcacacactttgccggcggcgagcaccaccaggacagcaggcgatgctcttgacgagcatgtgaacttactgctatctctgggcatagaacgctcgcatgagcctacaagtgcaaccaacaccttccctggaataagcatggtggacacaccaaaagtaaacaccttcaagtggatccaggtgcctcctgaacctgtgaaggaggttccgaaggaaccgaagctcagctgcccgatctgtatgaacgagataaccgaagcggcgtcgaccgtatgcggtcacattttctgccagccgtgcatcaaggctgccattaaggcccagaagaagtgccctacctgccggaggaagctcactccaagacagcaacaccgggtgtacctcccatcgccttagtagcccagtgcagagtcattttgctacaagttctgccgtgccgggggctgtatgttggaggcaactggggggggggggggggggagcatagaggtcctgtttggttcgttcatttagtgtcataatcagttaacagggtaatctattaccattgctttatgtttggttagactatactgtaaacgattgcagtgggatgcaataccagccaatacaaaattattgccgctgctttttgactgttagccaactccgatccgtctttttggatcccacgttgcaaccaaacatagactggtaaccgttcacagcaaaggatagcaggtgcaataagttccattctcattaccactacctgttgccgaaccaaatagcacgtcttagtgttacgggaaaaaattgc

SEQ ID NO: 8777 - DNA, 1287 bp, Zea Mays
ggccgcatcctctccccccgcggccgagctccacccccacccacccacacgcacacactttgccggcggcgagcaccaccaggacagcagccgtcggaattatgcttgtaatcattgctgaagtttttgtgaacatatattttttttcaatcgattttgctcgagccagtatcttttattgcaacaccatgaactcccatggtgctggttcgcattcacggcttttggacctcaactatccccctgctgaaggggctggtgagggggcttcacgtttcagcagtatccctgtctctcatagagagggttcaagcagcatgcctgtacaacacatccaggcttcgagtagtacaccaccggctactggtgagcctcgcattggtatgcgtagttgccccatcgatgtggaagccatcgatgatgatgccgttatctattcttcaagaccactgcctcgagcaagacagcagttgaccacgacagaaagtattactatcataatagatgatgattccgaaacaaacctagaaacagcaggcgatgctcttgacgagcatgtgaacttactgctatctctgggcatagaacgctcgcatgagcctacaagtgcaaccaacaccttccctggaataagcatggtggacacaccaaaagtaaacaccttcaaggtgcctcctgaacctgtgaaggaggttccgaaggaaccgaagctcagctgcccgatctgtatgaacgagataaccgaagcggcgtcgaccgtatgcggtcacattttctgccagccgtgcatcaaggctgccattaaggcccagaagaagtgccctacctgccggaggaagctcactccaagacagcaacaccgggtgtacctcccatcgccttagtagcccagtgcagagtcattttgctacaagttctgccgtgccgggggctgtatgttggaggcaactggggggggggggggggggagcatagaggtcctgtttggttcgttcatttagtgtcataatcagttaacagggtaatctattaccattgctttatgtttggttagactatactgtaaacgattgcagtgggatgcaataccagccaatacaaaattattgccgctgctttttgactgttagccaactccgatccgtctttttggatcccacgttgcaaccaaacatagactggtaaccgttcacagcaaaggatagcaggtgcaataagttccattctcattaccactacctgttgccgaaccaaatagcacgtcttagtgttacgggaaaaaattgc

SEQ ID NO: 8778 - DNA, 1707 bp, Zea Mays
ggaacagcaggggtggcacacgtgacacgacacgcgtaggcgcagcaacaggggcggcgcgcgaccgacgaaggggagcacacggcgtggtggaacccacaccacaccgttgcagaagagcccgaggatatgtgtcgttcgtgcaccgagcggagaaacaggggggtgagcgacgagctgcgccgacgcagaggagggagcggacgtggagcttgcgctgacgcagaggagcgcgatgagatgcactgcgtcagtcacggatgatgaggcggcggacgcggcggcctggatgaagcagtgcggtcgccggttggaaagccgctgagatgtgaacaaaaccgcagcgagcagaccggtgttgctgtcaaacattgtaaggagggcactgagagctctattttctggtcttctcttggtggaaagcagagttatacaagtagaaatgttgtacctgatgttgttcttagagaacctcatttgtataccttctctcttaggaatggttactgaaattttcaatttttcacaagatgatttgttgaccgaagacatgatgatacttgatacacactctgaggtttttgtctggatgggtcagtgcgtggagacaaaagaaaaacagaaagcatttgacattggccagtcaatgaagggaatgaaccttgcttcttcaggacattcttctcctgggatagcacacggtccctggttcatggaaactcttttgagaagaaactttcagttcttttcggaatgcgttcagagggtggcaataagagctcaggtgatggtggaccaactcaaagggcatcagccttggcagctctttcatccgcattgaatccatcgtcgcaaggaaaacagtcagatgagaggcccacaaaacccagcagcacacaggcgcagtctcattcaggccaagggtcacagagagccgctgctgttgcagcactttccaatgttttgactgcagagggatcgcacagcccccgccacagtaggtcgtccccaacagcagatgctgagaagactgaattagctcctgcttctcctcaccagttggaaacagggcctgcagaagatgtccggacagagcctgatgtctcacaggaacaaactgctaacgaaaacggaggccagaccacctttagctacgaccgcttggtatcaaagtctactgaccctgtcagtgggatagaccacaagcgcagagagacatatttggtggacaatgagttcgagaccgtgtttggcatgaccaaagaggagttctacgagcagccaaggtggaagcaagagttgcagaagaagaaagctgatcttttctgaactcacacacacggctagctacgaataaaagccctccccgttgcgcgaccctttctctctccacggctgtcgtccagcattctcaccatgctcgttccacggatgcgtgatcaccagcagctttatccgtgagttgtatactctttatctgcacacgttttgggcgcgttatatatattattattattcccctagcccctccattattctggagtccacgttctggaagttgacctttcacgtgtttctttttgtaatcattaaaaatcaatttgttcagatgtcattaccagtgagattttcgtatgtaatgatgcactggcaccaaggtgtatggaacattttttttttttttgctataagacttgagcttctatt

SEQ ID NO: 8779 - DNA, 2099 bp, Zea Mays
atggcgaggacgcgctccggaataccagatgagcgaagccactcgacggggataccacaatcccaaaaggctcgccaaaaccccctcggcggttacccttctctcccgatggcaaccgccgccgccgccgccgtggcggcacccgagcagccgcgtcgccggaagccggcgccggggcgtgggggcgtggccctccctgcgggactctcggaagaggaggccagggtgcgggccatcgccgagatcgtctcggcgatgggggagctctcgcggcgcggggaggatgtggaccttaactcgctcaagtctgccgcgtgccggagatacggtctggcgcgggcgcccaagctagtggagatgatcgccgccgtgcccgaggccgaccgtgccacgctgcttccgcggttgcgcgctaagcccgtgcgcacggcgtcgggtatcgccgtcgtcgccgtcatgtcgaagccgcaccgttgcccacacatcgccaccaccgggaacatctgtgtctactgccccggcggtcccgattccgacttcgagtacagcacgcaatcctacacgggatacgagcccaccagcatgcgtgccattcgggcaaggtataatccatatgtgcaagccaggagcaggatagatcagctcaagaggctagggcatagcgtggataaggtcgaattcatcttgatgggtgggactttcatgtccttaccagctgaatatcgtgattatttcatcagaaatcttcatgatgctttatcgggtcacacttctgcaaatgttgaggaggctatttgttattcggaacatagtgctgtcaaatgtattggtatgacgattgagacgagacctgattattgcttggggcctcatctgcgccagatgctatcttatggttgtacccgcttggaaattggtgtccagagtacatatgaggatgttgcccgtgacacaaacagaggacacacagtggctgctgttgctgattgcttctgtttggcaaaagatgctgggtttaaggtggttgcccacatgatgccagatttacctaatgttggagttgaaagagatttggaaagtttcagagaattttttggaagtccagcgttccgggctgatggtctgaagatttatccaacacttgtgattcgtggaactggtctttatgagctctggaaaactggcagaaattatccacctgagctgttggtggatattgtggcaagaattctgtctttggtaccaccttggacacgagtgtatcgggtccagagagatattcctatgcctcttgttacttctggtgtcgagaaaggtaaccttcgcgagcttgctttggctcgaatggaagatctgggcttaaaatgccgggacgtcagaacccgtgaggcagggattcaggatatccatcacaagatccggccagatgaagtagagcttgtcagacgtgactatgctgcaaatgagggttgggaaacattcctctcttatgaggatacacgacaggatatcctgatcgggctgttgcgcttgcgtaaatgtggccgtaatgttacatgccctgaacttgtagggaggtgttcaattgtgcgtgagcttcatgtctatggaactgcagtccctgtgcatggccgtgatgtggacaaactgcagcaccagggatacggaactctattaatggaagaagcagaaaggattgctcgaaaggagcaccgatcgaagaaattagctgtcatttcgggggttggtactcgccactactaccgcaagttgggttatgagctagaagggccttacatggttaaatgtttggcgtaatgctatttcattttccgtatcatatagagcagactagtgtttgtaatgtaatatgggtagtcttttttaaaaaaaatgatcgttataccattgttttctaatattgagtagtccagaactccagatgaaaatggagacaactttctatgtatactgaacgatagctaatttgtcgcttatcctcaactttgtgccgtgcagcaactgtgatatgtagtcaggttactccttatttggtgttcaaaacccgttatccatgaatgaaggaaacaatcaattca

SEQ ID NO: 8780 - DNA, 646 bp, Zea Mays
ctccgtccgcgcgccgttgtcttctgccgtctccttcccttctctctctcgccgatcttgcctcttgcctgggagatctccttgcctgaacctcagcgccggacgcaagcttcgtaccgaggccctgctggtacctagcgtgaagggaattgaccgagaagtgctgctgccaaaagatgggcaccaggaagtggctgaggtcgcgctgcagctggggaagtactgcatagatgaccccgtcaagtccccgccgggcggacggaggatggttattcgtactgccaaaagaatgggaggttgtgtactgctcggtgccaacctcgccgggcgggctctaccggacgcccttggccgcctggtattcaaaaccgacgagatggtccaggcggtggaagcgcctgacgtggtcaggaacaaggtgtcgttctccgtctttggcctagagggcgcagtgtcattgaaaggtaagctgaatgtgctggacagtaaatggattcaggtcgtgtttgaagcgccggaactgaaggtcggctccttggggtttcagtacggtggcgagagcgaagtcaagctggagaagggaaggagatgggagaagacaacagcgcgcggacggaggatagttattcgttctctcaacgattaa

SEQ ID NO: 8781 - DNA, 1443 bp, Zea Mays
atggaactatcaaggatttccacagaaaaatttgatgatgcagttaaatccatgactgatgctggtttcttgaaggaaactgttgaacaagcactgaaaaaactgataatattatatgaggaaaactgggagcatatagaagctgataattattcgactttggttgaagctttacttggtcattcagatcccaaagcagggcagaaaaagcgagctgagaagaatctcaatgtggattcagaccattataataagaagctgaagattaaaggtggtcagacgcctagatctagtatgcatggcagtgccaagaaagaggcatcaaaagacagtaccatgatgtcaatgatataacaagaggcgaagaatgtgtgagcattccaatagtctgtggagaggatggggttcttcctcctccatttcactacatatcacaaaataccaccttccaagatgcctgtatcaacctctcacttgctagaattggagatgaaaattgctgttctggttgttttggggattgtctagcggagccacttccttgcgcttgtgcaagagaaactggcggagactttgcttatacgagagatggcctgcttaaagaaggatttctagatgcgtgtgtctcaatgctccgggaaccacttaaacaaccgcacttctactgtaagggtgtctgtcctattgagcaaataatgaagggagtcagctcagcgaaacctgatgcttgtaaagggcaccttattaagaagtttatcaaggaatgctggataaaatgcggctgcaccagaaattgtggaaaccgtgtggttcagcgaggcattactcgcaaactgcaggtgtttttagcttctcggaaaaagggatggggcttgcgttctgctgaaaatcttcctcgtggtgcttttgtatgcgagtatgttggtgaaatattaacaaacactgaactacataagcgaaacactgagctatatggaaaaaataataaaaaggctggtaaagcaaggcatacataccctgtgaatctcgatgctgactggggcactgaaggtgttctaaatgacgaggaagccctttgcctagatggtaccttttatgggaacgtggcgaggtttatgaaccataggtgcattgatggtaacatcatcgcaattcctgttgaagttgagacgcctgaccaccactactatcatctggcattcttcacaacgagggaagtagaggcttttgaagaattgacatgggactatggaattgattttgatgatgtcaaccatcctgtaaaagcattcaaatgccattgtggaagcacattttgtcggggaagataaaagacctatctcaggaggatgtaaatctctggtgttgtcctgagaatattcaaggctcgtggcgggttcttttggaccatcctacttattgcaatgctttgcgtgctaaaag

SEQ ID NO: 8782 - DNA, 2393 bp, Zea Mays
ggctagtactagcaagcagtagtggtgtcgcatctgccgatctcctctgtccgagtcactcactcgtaggtggcttccacccatctccctcagcaccccgactgaggaggcggccggcgctccccaggcacgcacgagttgacgggtccagcagcggcctcgggatcttgccgccagctgcagcggcaatccggtccgtccgcccaggcttccgtggatatacatatactggtctgagttgtcaagtccttgacctgatcatatcagttttgcttataaggatgggggtttacctcagtactccaaaaactgacaagctatctgaaaatggagaaaatgatagacttaagtttggtctttcatctatgcaaggatggcgagcaaccatggaagatgctcattcagcattgctagatcttgatagcgagacagcattctttggtgtttttgatggtcatggaggaagagtcgttgccaaattctgtgcaaaatatctgcatggtcaagtcctcaaaagcgaagcctattcaactggtgacctaggcactgctgtccatagagctttcttcagaatggatgaaatgatgcaaggacagagaggttggcgagaactatctgcacttggagacaaaataaacaagtttagtggtatgatagaaggattgatttggtctccaaggggcagtgattcaaataatcaacaagatgattgggcttcagaggagggacctcactctgactttgctgggccaacatgtgggagtacagcgtgtgtagcattaataagaaacacccaacttgttgtggcaaatgctggtgattcccgatgtgttatttcaaggggtgggaaggcatacaatttatcgagggaccacaaaccagagcttgcagctgagagagaaaggataatgaaagcagggggcttcatccatatgggacgagtaaatggaagtttaaacttgtcaagggcaattggagacgtggaattgaaacagaacaaattcctgcctcccgagaagcaaattgtgacggccaatcctgatatcaatgtcgtggagctctgcgatgatgacgactttgttgttgtagcatgtgatggcatttgggactgcatgtcaagccaacagctggtggattttatccacgagcgtataaacacggagagcagcctgtctgccgtgtgcgagagagtgctggacagatgcctggctccatcaacgatcgctggagacgggtgcgacaacatgaccatgatcctggtgcagttcaaaaaacctgtcgatcggaacaagaaggccgaagcagcagggcaatctgccagcaatgtggacgaagccaagagtcgtgttgctgaggagtgaagcatggctggcactcaccagggcgcaaccatttgctttcataaggtaatagaatgaacatagagggcgctttctgtttgccgtgttccacaaggaagagagcaagttatagacctttccgagtgtacagtttatttggagggaagaaggataaagatgagaatggtgatgaggcgccatcgaaagcaggaatttttggaaatatgcaaaatctctatgaaactgttaagaaggcccaaatggttgtccaagttgaggctgtccgggtgcaaaaggagcttgcagcgactgagattgatggttattgtgaaggcgaactaatcaaggttacactttctggaaaccagcaacctattagagttgaaatcacagaagctgcgatggagttgggtgctgaaaaactttccgggttggtcaacgatgcttacaaggatgcacaccaacggagcgtccaggccatgaaagagaggatggctgacttggcgcagagcctgggaatgcctgcgggcctcggcgatggtctcaagtgatgccgcaattcgggaaagctttccaataatcctttttcctcaattttgtatgctagccgtgtgagtagtaagcataacccctccgcgacctctcataagaagtgtacttgtgagcacttgttttctttcagctttagctgccatttgctgttctgcgcacgcagatatttgcacattaacttcacgtctggtctacaaagttgcaagatgcgggccatgatcttttgggcatttttccaacaagttgttgggctggcccagttgtagcccttcgaagatgagacaaccaagcccatatatataacacacaccgaaagccttcagaatctgtcgtgtgtgaccaaggataaatcatggctttggtgaacagtgatttaacagcaaataaaacactaagtgggtgttcggtttgaggaatcactctatccaaaatgtggtggtgtatcatgggtcaattcctcaaatttggtgggatgacctattccttatattagtactaact

SEQ ID NO: 8783 - DNA, 2427 bp, Zea Mays
ggctagtactagcaagcagtagtggtgtcgcatctgccgatctcctctgtccgagtcactcactcgtaggtggcttccacccatctccctcagcaccccgactgaggaggcggccggcgctccccaggcacgcacgagttgacgggtccagcagcggcctcgggatcttgccgccagctgcagcggcaatccggtccgtccgcccaggcttccgtggatatacatatactggtctgagttgtcaagtccttgacctgatcatatcagttttgcttataaggatgggggtttacctcagtactccaaaaactgacaagctatctgaaaatggagaaaatgatagacttaagtttggtctttcatctatgcaaggatggcgagcaaccatggaagatgctcattcagcattgctagatcttgatagcgagacagcattctttggtgtttttgatggtcatggaggaagagtcgttgccaaattctgtgcaaaatatctgcatggtcaagtcctcaaaagcgaagcctattcaactggtgacctaggcactgctgtccatagagctttcttcagaatggatgaaatgatgcaaggacagagaggttggcgagaactatctgcacttggagacaaaataaacaagtttagtggtatgatagaaggattgatttggtctccaaggggcagtgattcaaataatcaacaagatgattgggcttcagaggagggacctcactctgactttgctgggccaacatgtgggagtacagcgtgtgtagcattaataagaaacacccaacttgttgtggcaaatgctggtgattcccgatgtgttatttcaaggggtgggaaggcatacaatttatcgagggaccacaaaccagagcttgcagctgagagagaaaggataatgaaagcagggggcttcatccatatgggacgagtaaatggaagtttaaacttgtcaagggcaattggagacgtggaattgaaacagaacaaattcctgcctcccgagaagcaaattgtgacggccaatcctgatatcaatgtcgtggagctctgcgatgatgacgactttgttgttgtagcatgtgatggcatttgggactgcatgtcaagccaacagctggtggattttatccacgagcgtataaacacggagagcagcctgtctgccgtgtgcgagagagtgctggacagatgcctggctccatcaacgatcgctggagacgggtgcgacaacatgaccatgatcctggtgcagttcaaaaaacctgtcgatcggaacaagaaggccgaagcagcagggcaatctgccagcaatgtggacgaagccaagagtcgtgttgctgaggagtgaagcatggctggcactcaccagggcgcaaccatttgctttcataaggcaggtgaaaaaaaggaacgaagaaacctgcagtgtaatagaatgaacatagagggcgctttctgtttgccgtgttccacaaggaagagagcaagttatagacctttccgagtgtacagtttatttggagggaagaaggataaagatgagaatggtgatgaggcgccatcgaaagcaggaatttttggaaatatgcaaaatctctatgaaactgttaagaaggcccaaatggttgtccaagttgaggctgtccgggtgcaaaaggagcttgcagcgactgagattgatggttattgtgaaggcgaactaatcaaggttacactttctggaaaccagcaacctattagagttgaaatcacagaagctgcgatggagttgggtgctgaaaaactttccgggttggtcaacgatgcttacaaggatgcacaccaacggagcgtccaggccatgaaagagaggatggctgacttggcgcagagcctgggaatgcctgcgggcctcggcgatggtctcaagtgatgccgcaattcgggaaagctttccaataatcctttttcctcaattttgtatgctagccgtgtgagtagtaagcataacccctccgcgacctctcataagaagtgtacttgtgagcacttgttttctttcagctttagctgccatttgctgttctgcgcacgcagatatttgcacattaacttcacgtctggtctacaaagttgcaagatgcgggccatgatcttttgggcatttttccaacaagttgttgggctggcccagttgtagcccttcgaagatgagacaaccaagcccatatatataacacacaccgaaagccttcagaatctgtcgtgtgtgaccaaggataaatcatggctttggtgaacagtgatttaacagcaaataaaacactaagtgggtgttcggtttgaggaatcactctatccaaaatgtggtggtgtatcatgggtcaattcctcaaatttggtgggatgacctattccttatattagtactaact

SEQ ID NO: 8784 - DNA, 2440 bp, Zea Mays
cgcgagcagtcgaggttgacggctagtactagcaagcagtagtggtgtcgcatctgccgatctcctctgtccgagtcactcactcgtaggtggcttccacccatctccctcagcagtcagtcagcaggactcagcagcactatctcccaccccccatccttcgctactctttcgttccttctgatcgccgctatcctcttcagccccgactgaggaggcggccggcgctccccaggcacgcacgagttgacgggtccagcagcggcctcgggatcttgccgccagctgcagcggcaatccggtccgtccgcccaggcttccgtggatatacatatactggtctgagttgtcaagtccttgacctgatcatatcagttttgcttataaggatgggggtttacctcagtactccaaaaactgacaagctatctgaaaatggagaaaatgatagacttaagtttggtctttcatctatgcaaggatggcgagcaaccatggaagatgctcattcagcattgctagatcttgatagcgagacagcattctttggtgtttttgatggtcatggaggaagagtcgttgccaaattctgtgcaaaatatctgcatggtcaagtcctcaaaagcgaagcctattcaactggtgacctaggcactgctgtccatagagctttcttcagaatggatgaaatgatgcaaggacagagaggttggcgagaactatctgcacttggagacaaaataaacaagtttagtggtatgatagaaggattgatttggtctccaaggggcagtgattcaaataatcaacaagatgattgggcttcagaggagggacctcactctgactttgctgggccaacatgtgggagtacagcgtgtgtagcattaataagaaacacccaacttgttgtggcaaatgctggtgattcccgatgtgttatttcaaggggtgggaaggcatacaatttatcgagggaccacaaaccagagcttgcagctgagagagaaaggataatgaaagcagggggcttcatccatatgggacgagtaaatggaagtttaaacttgtcaagggcaattggagacgtggaattgaaacagaacaaattcctgcctcccgagaagcaaattgtgacggccaatcctgatatcaatgtcgtggagctctgcgatgatgacgactttgttgttgtagcatgtgatggcatttgggactgcatgtcaagccaacagctggtggattttatccacgagcgtataaacacggagagcagcctgtctgccgtgtgcgagagagtgctggacagatgcctggctccatcaacgatcgctggagacgggtgcgacaacatgaccatgatcctggtgcagttcaaaaaacctgtcgatcggaacaagaaggccgaagcagcagggcaatctgccagcaatgtggacgaagccaagagtcggtaatagaatgaacatagagggcgctttctgtttgccgtgttccacaaggaagagagcaagttatagacctttccgagtgtacagtttatttggagggaagaaggataaagatgagaatggtgatgaggcgccatcgaaagcaggaatttttggaaatatgcaaaatctctatgaaactgttaagaaggcccaaatggttgtccaagttgaggctgtccgggtgcaaaaggagcttgcagcgactgagattgatggttattgtgaaggcgaactaatcaaggttacactttctggaaaccagcaacctattagagttgaaatcacagaagctgcgatggagttgggtgctgaaaaactttccgggttggtcaacgatgcttacaaggatgcacaccaacggagcgtccaggccatgaaagagaggatggctgacttggcgcagagcctgggaatgcctgcgggcctcggcgatggtctcaagtgatgccgcaattcgggaaagctttccaataatcctttttcctcaattttgtatgctagccgtgtgagtagtaagcataacccctccgcgacctctcataagaagtgtacttgtgagcacttgttttctttcagctttagctgccatttgctgttctgcgcacgcagatatttgcacattaacttcacgtctggtctacaaagttgcaagatgcgggccatgatcttttgggcatttttccaacaagttgttgggctggcccagttgtagcccttcgaagatgagacaaccaagcccatatatataacacacaccgaaagccttcagaatctgtcgtgtgtgaccaaggataaatcatggctttggtgaacagtgatttaacagcaaataaaacactaagtgggtgttcggtttgaggaatcactctatccaaaatgtggtggtgtatcatgggtcaattcctcaaatttggtgggatgacctattccttatattagtactaact

SEQ ID NO: 8785 - DNA, 1610 bp, Zea Mays
cgcggctgtctctttcatcggccacccacggcggcggagcatagcactgatagcagtaagcaagcagcggagacgccggagagcggtgaagaagcatggagatggagcagctctgctcgctgctccgcgacctcgacgcgctcaagcagcatcccgacgacctcacttccaccatcgatcggatgcgggagcggctagtggcgatgatgaatccggcagccggtgccgcttctcgatccaagattaaggacatgagtgcagaagtggtggacaacaatccctacagcagacttatggcgttgcaacggatgggcgtagtggagaattatgagcgcatcagggactactccgttgccatcgttggcataggtggcgttggtagtgttgctgcggagatgctcactagatgtggaattggacgactgttgttgtatgattacgacacggtcgagttggctaacatgaataggttgttctttcgcccagaacaggttggaatgaccaaaacagatgccgctgtacagacactttctggaataaatcctgatgttgtgttggagagctactcattgaatattactacagtcaaaggtttcgaaacatttttggcaagtttaaaagcacaaagttctcatgagcgtagcactggagttaatcttgtcttgagttgcgtcgataactatgaagctcgtatggttgtaaatcaggcatgcaatgagcttggtcagacgtggatggagtctggtgtctcagaagatgctgtttctggtcatatacaactgctggttcctggtgaaactgcatgttttgcatgtgctcctccattggttgtagcatctggagtggatgagcgtacacttaagagagaaggtgtttgtgctgcctctttgccaactacaatgggatataactcacttaaggattatttccctgcaatggaaatgaggccaaatccacaatgctcgaatccagcatgtgttctcagacagaaagaatatatggaatccaaacctgctagagatgcagcagcgaagactaagatggaagctgaagcatccacagaaaatgaatgtcctgtccacctagacaatgagtggaatattagtgttgttgatgatgaaactgagacatcaagcattcgaaacactccagatatcctaccagaaggtcttgtccgtgagcttccagacgctgattcatacgcaggaccagctgctccagtgagttccagcgctattgatgatgatgatgatctcgaggagctccagcgtcaacttgatgccctaaacgcatcttagccttaataagtaggctagttcatctgcgccttaattggcttctccccaatcccaacttggatggggaagatgatttacatactgtttttcggagttggtaaattcatagcaccgtggtaaaagaaaaaggagaaaatgatagctatactggttttgggagttttgacttacagttttggttgagatctgagaacatgtgcatgtctgagccagacagctcgtcggtaatggtactaatgtctgaatttttgttgctgttgatattcaaaggttttatctggaaccgtcatttcttattgagaggttccacta

SEQ ID NO: 8786 - DNA, 3177 bp, Zea Mays
cgtcttgccgttgccgaccattctgtctagtctctactctgccctaacgcacgcgaagcatccccatcccccccgcgccgtcctgccccaatcccctcaaagcgcaaccgccgcaacccggtctcctcctcgccctcgcagctcgccgctggcgaagacccccaatggagccctagcggcgtgtgccccacgtctcgatggttctcgtggaggccctgcgcgcgcggctgctggccgcgttgcggccgtggctggcggtggaccccgcggacctgcgtgtggagccaggcctcttcgctcgcgcccgcgtcgtcgcgcgcgggctaaagctcgacgtcgccgcgctcaacgccgccgccggggcgggggagtccccgtcctggcctgccacgttcgaccgcgcggccgccgccgaggtcgagctcgccgcctcgccatgggccgcccccgcgatcgacgccgtcgtgcgcggcgtggacgtcgcgctcaccctcagggagcctgcgccgaggaagcagcggccagactataaggagtgggtatctgaggagaagaagcgagtgcttgcatcattggaccctcagggtgagatgttgcatgagatgatcgaaagtgtagttcactccctggaagataagttcacttcagtgttttcgactctccttctgaactgtggtcagcactctgttcagaggactagttgggtctttaattccatccagaaagaagaataaattgtctgttaaatgcgctgaatttgaattcctgatgaaggagaatgattctgtagattgcagtgcatctttcactggcgtatctgcttcagtcagattggataatttgcaactttctgcctttggcattcatgttcccaaaacttgctggaaaatttcaccaaagtttgctccttctttgctggtgatattggatattgcaaaccaaaaggaagattatgcagttaggaacggcagagagctttggaaagctgctgcacaaaaggttgacaattcagtagtgtgccaaaggttttctttaagaaaagccgtaagctgtgctgctttctggcggagctatgtccatgcttatgtattgttgctgacattagcagggtatccctcagacaagattgtagtaaggaactgtggcagggtatcaaggaacaagaaatttttgggtactattagacatcaatggaaaactgttgttgatctggaggataagattcctgtagaagctattgctagagcacggcgtgctgcacgttcaaaactgattgtatcacagcaactgaaaaagcaggaatcatcaaaagcagttctggtttctttcttgttgaaaattcttatgcccttcttatgtttatggaggtttcttgtgttcatatggaggccagtgtgggcgatgatgggccctagaaacaaggcatcatatgcatatttttttcctggttctacttatgatgttgacatggagcttcatgtcagcgtacaccttggggaactgtctgtaaccttgttaccgttcgttgattgtttcactgatatgaaaggatcagacagaagaaacactcagaatgagttagcttcagtgcatcttgtaatgaagtcatcatgtttactttactcagctggttgcaccacacaatcattttatctagttctcggggaactgaagacatgcctttccagtgtcccaaagttggtacaagcagatagtaacaacagtccaaggaggagttcatcttttggaacatcagagttcatcaaggacactgactctaggataatcctctggtgtgactcagctagtatgagtccattctcccgacaacaagccgacagatctctttacttcaatgatgatttgtccactgcccttataaagagtgatatggatgagttatggtcaaattggatgataattagcaatgcatacaatgaatcgggtgtgattcatcatgaaaaaccttctattatttttgaattcaaatcttttctgattgatccttacataagtataagtggttaccaacaatgtagattcacaattgggagactaaaccttgatttggattatttatgtgtttcatcaacttatctgctgtacagacagttcatgcaccacaaacaggcaaaagaaccaactgaaagatcagctgatttttcgaacaatgatgatacccatctagactctacaagtggagttgctgacaaattgagatcatcaaatcatagaataaaggttgcaatgttggatgtgattccagaaaacactcttcgtattgtagcactggttactggtccaagtatacggttattttttgataaatataatatgttgcaaaatagcaaagacgtatacaagcccttgctttctcagatgaatagccggtcctgcatagttttcagtctagcatatgtggaatgtgctctttggccagcatcgctttcttcaactcctccaatagcaaattttcataccaaagaatcacataaaacatttgttagtgcgaaggagccccaagaacatcatcagctacaaatagaaagtagtgcaaggaatgtttatccagggcatgttatgcttgatgctcgcttcatctttgctggtttaactcttctgatagataatctagatgcaaaccagcagtctcacatttgcggaccgctgtcatgcagtttcctgatttcagctagcaggaactatgtctattccttcttcggggtgagaaacgtcatctcaactaacttagaaggaaagatcattggtttcctagctttcttctgcatggatgaactcttcatggtttgccaggtggaagtggaggatctgaagcattgagtttgatcaagttgagtcgattctgttctcttgtttgtgcttttgtgaagaagtttgcaacttgcatttctgagggcacatgttgaagaataacaattttctgttgacaatgagaccgagtaaagaaaacatcaacaccaatatgcttggtaagctcatgcttcacaggatcatttgcaatctgtatggcactagtgttatcacacataagaggtgtaggagtatcacaagagacacccagattagctaataaccatcttagccatataatctctacagtagtatgatcacgaagatgatatccccggtgatttggtaatgaatcagcaggctgtg

SEQ ID NO: 8787 - DNA, 2013 bp, Zea Mays
agattactacggcccattaactcaaatttacggcccaaaatggcgaggcaggcgaaacggtgacggagctggtagttccccaaatcccgagccgcgccaccggcagcagggagaaacgccgccgcccgctcgccccgtgcactgctcctccgccttagcccgtagccaccagatccttggcgcaccagccctccatcgcagtcctggttaggctaggggatgtcaaatctcgattccgcgacgccggcggctgcagtggcggagatagggacggcggagcgggactctaccaccgcttctgtttcagctttaaatgggacacatagatgcaagaagaagaagataaagaagaatacgactcgggagcagcaagagttacaacttgatttggattcaacattgacagcagaggcggagggacaagtagaggcaaagggaaacgaggtggaggagcaggatgccactgatgctgttgcttctgtgatggaggggacagcaaaatattatgaggaggactccaaggtgaaggtcagtctgatgcccgagaaggaagccaacaccactgttgtttcagatgtggtaggggcatcaggacatgctgatatcaatatggatcccataaatggtgatgatctaagtagtgctcagtcaaaggcaaatgatgctgatgttttactgaagaataaggatggaaacaagggggataagaattgcgctgagaacagcgtcttgttgcaggagagctctgcaagaagaaaaagacggaggggaaaaagaaagtggggttcagccggtggaggaccaggcttctcttctgataatggaggcgtggttgctgagcatagcctgcattcttcagcaaaccatggtcttagctgcatatgtgctccatgtttagttgaggcacatgaaaagaagatccaaaatatctactcaccaagaggatcactggtaaggtttcaaaggaagaaactcctgatcttggaccttaatggtctgctagcagatataaatcaagattaccataatgcacacttggcacatgcaaaggttcgaaccaaattagttttcagaagaccatactgtgacgattttctgagattctgcttccagaattttgagctaggaatatggtcatcaaggaaaagggaaaatgttgaatcggttgttgatatccttatgaggggtcttaagcaatgcctactattttgttgggacatgtcttactgcactgttacagggtgcaaaacaattgacaacaaggacaaaccattagtgctgaaggaactaaaaagggtttggaataaggatgagccagacctcccatgggggcagggagagttttcaccttcaaatacattactggtggatgattcgccctacaaggctctgtgcaacccgccaaacactgcaatcttccccgaaccctacaattacatgaaccagagggatgattattccttgggacctggtggagatcttcgggtttatctgcagagaattgctgctgcagacaatgttcaaaattttgttcgggataacccatttggtcagaagtccatcacagagagtgatccaaactggaatttctatgtgaaaatagtcgataagatggagaagcaaatagttgatcaagtggaaacgaaaatagttgatgaagtggagaggtccttaggttaataggaacaaaggttcaatcaagagaaagttctgtatttgtttgtgttgattagcaggtgttttgcattgcgccagtgctatcatgtgtaatctaatttagtaattgttgtttcatagacaaaacatgatttgaagaatcttgataggttttgttgttccaaccgagggatgaatcattgtttgtcctgtatcgagtgttacaggctttctggtttgctaacttagctatttctggaagtttggttgactatgctggaggatgattcagttcgatggaactgttatatactcgaattgttgtaaatcatctcagtttcatggtttcttgccttg

SEQ ID NO: 8788 - DNA, 3743 bp, Zea Mays
gaatgccgaaagggtttctccaaaaccctctccaacaaaatcgcaaccgccggcgaggatcggcgccgccatgtcccagatcctccgccaccgcctgtcggctcactaccacggagtctgcggccactgctgccgccgcctcagctccgccgtctacggcggcggcgggagtcgccgcgccgtcgccgcgccgccgcaggacggcgagggcagccgagcggtgagggtgtctgtgtggtgggacttcgagaactgccacatccccaacggcgtcaacgtccaccgcgttgccccgcgcgtttccgccgccctccgcgccgccggcatccgcgggccgctctccatcaccgccttcggggacgtgctgcagctcgcgcgctcctcccaggaggcgctcgccgccacgggcgtctccatctcccacgtcccaagcagtgggaagaatagttctgaccgctcttttatggctgatcttgtctactggattgctcagaatccgccaccagttcattttttccttatatctggcgatagagattttgcaaacatcttgcatcggttgagaatgagcaactacaatgtactgcttgcttgtcctagtagtgctaccagtgtactgtgcagtgcagcaacaatcatgtggccttgggaaggcttagttagaggagaggatttgtcaccaaaacgttttaacaacccgccggatggtttacatggatcttggtatggtcactaccgaggagcccttgacgacccccccctggagaaggaatcagaggaacccatcaaggtagcatctgttccgaagcagttttcagtaccatctaataccaagcactgcccagttcccaaacatgtaaaaaatgcaattctggaggtactacgttcatatcctgaaggggtgaacatctcactcctccgaaatcagcttgtaaagaacaaaattgatctgggtacaaatttctttggccacaagaaattctcttcctttcttgaatcaatgccacatgttgttaaattattaggttctcgattaggtgaaaacgaactatatgcaattgctgccaacaaaaaatttctgcagcctggtgatggggctcttgatgaccccttcctggagaagggagcagaggaacccatcaaggtatcatctgattcccagcattgttcagtaccatctgataccaagtctagttcaatccctaaatatgtaacagatgcaattctggaggcgctatgttcatatcctgaagggatcaacctttcactactccaggaagagcttgcgaagaaaaaaatttgtcttggtccagatttttttggccacaaggatttctcttgccttatacaatcaataccagatattgttgaattagtatgtcctcaaactggtggacaactatatgcaattgctgtcaacagaagatcactgcagcctggtgacggaagtactaagacccttagctcagctcaaggtaatgccagggagaataacccaactggaacagctcacagtaataagaagaatacactaagttctcttcgaagcatttacaagagcagaagcttcacagagacactaagtgaacatccacctacattttctgtcttaccttccccgtcaaatgggctatctgaggaccaaactgagtgcccagtggtggatgtgaatgggtcgacagagtcaccagcaaagcacagggaagttggtgaaatgactacccctggaactccctcttcctcaggggtggaaaatgctgctaatgaatatggcttctttaaaaggatctggacaatgtggaatggtcccaagaatgttaagtctgaggtttctcaaaattgtgaaagcacttctgctgaagtgattgatgatttgcaggtttctcagaattgtgaaagcacttttgctaaagtgattgatgatttgcgaactcctttggaagagtataatggtgatcaccgtataaagcttttgaggaggatacatgaaacctcttccaaaaatgatcgctcagatggtactgagggcatgttagcagtaagtgataatttatcgatttcattaggtgatgatcattctgaaaaaataaagagagatccatcaattcctgaaaacccagaaccatgcagaaaacctgctgctgtttccatgattaaatctggaaaaaaggatgatatttctgaaatgaataggggcatgtttaactgggcttcaaggtggtggccatttgggaaatcagatgcagatagtagtacaaccaacataaatgccactgatgaaccgaggactgactctattgaagaatttgaatcttcaaacgctccaactaatggaagtgcacaacaggtggttcatgaaatatttacaaagcctgacttgtggtctgttttggagcaacagttatcagaacctcttgggtctgaggttgttttgaaagcaaagacaaggcaggaattggcacacagattgcagaagttaaattgctggcctttgaaaggcctccttgataaagacctgcatcacctggtacatctgttaatttctgaaaagaaatggattgaagaaacttcttccagaattttccctttccgtcttaccctccctcgcaagagaagatgtgtcccatcaagttccagcaaatccaacggcctcagttacattttttcaagtgggaagccacaaaagggcagatacgttgacaataacagtaggaaaagcaggtccctcactagagaggagatactatcagattgtcacaagctggtgaaggagcttctttctgagcatgaatatggattcaacatcggaattttcaaacgccgtttttcccaggagtatggatacgagctcgaacaccggaagctcgggtatctggaccttgaaacgctgctgcatattatgcctgatgtaagggtgaaattcccaagggtcatgcgctcagaacacgggaacgggcaggctggcagcaagggagacggaaaccgaagcagcggcgatgacttgatctgggaggagcttggtcctgtatctgccacaactgaaaccgccgccgccgccgctgatgcaggggccgacaaggaaacatgctatcgtcctcccactccttcagacgacgagttctcggacagcgacagcataaaagaccggcagcctagaaggaacgccgagcagcagagctcgcttctccagatcattggagcttggaacagcagcaagggtggcgacgtctctagcaacaagcctcaggacatcgacgggttggtggactgttcgagaagcagcccgggcagtgctggcaccagcgcagcttcaggaaaggtgcagacgtcgtctccgaagctaccgcacaagcagtactccttcgtgtcggactccggagaggagagcgatccggataagctggtggagagcgtcttggacagcctgcagaaagcacggggcggctcgaagctgcacaactgagcgtctgctgccatcgaattattgtttttgcaacctaacgagtcgtgcttatggtggtggccatggctgactgtcaaggacagcggcgcctgcaagcatcagccggagagactggtgaataaagctcgtcttttacttggactaggccgtagtacaatcggaacagtccttggtaattgatgattaggacagtaatcaacggcggcctagttttccttcacctggccagtccacggagcacgaggccgcacgcaacgagtcctgggtgttggaatatcag

SEQ ID NO: 8789 - DNA, 3943 bp, Zea Mays
caaaatcgcaaccgccggcgaggatcggcgccgccatgtcccagatcctccgccaccgcctgtcggctcactaccacggagtctgcggccactgctgccgccgcctcagctccgccgtctacggcggcggcgggagtcgccgcgccgtcgccgcgccgccgcaggacggcgagggcagccgagcggtgagggtgtctgtgtggtgggacttcgagaactgccacatccccaacggcgtcaacgtccaccgcgttgccccgcgcgtttccgccgccctccgcgccgccggcatccgcgggccgctctccatcaccgccttcggggacgtgctgcagctcgcgcgctcctcccaggaggcgctcgccgccacgggcgtctccatctcccacgtcccaagcagtgggaagaatagttctgaccgctcttttatggctgatcttgtctactggattgctcagaatccgccaccagttcattttttccttatatctggcgatagagattttgcaaacatcttgcatcggttgagaatgagcaactacaatgtactgcttgcttgtcctagtagtgctaccagtgtactgtgcagtgcagcaacaatcatgtggccttgggaaggcttagttagaggagaggatttgtcaccaaaacgttttaacaacccgccggatggtttacatggatcttggtatggtcactaccgaggagcccttgacgacccccccctggagaaggaatcagaggaacccatcaaggtagcatctgttccgaagcagttttcagtaccatctaataccaagcactgcccagttcccaaacatgtaaaaaatgcaattctggaggtactacgttcatatcctgaaggggtgaacatctcactcctccgaaatcagcttgtaaagaacaaaattgatctgggtacaaatttctttggccacaagaaattctcttcctttcttgaatcaatgccacatgttgttaaattattaggttctcgattaggtgaaaacgaactatatgcaattgctgccaacaaaaaatttctgcagcctggtgatggggctcttgatgaccccttcctggagaagggagcagaggaacccatcaaggtatcatctgattcccagcattgttcagtaccatctgataccaagtctagttcaatccctaaatatgtaacagatgcaattctggaggcgctatgttcatatcctgaagggatcaacctttcactactccaggaagagcttgcgaagaaaaaaatttgtcttggtccagatttttttggccacaaggatttctcttgccttatacaatcaataccagatattgttgaattagtatgtcctcaaactggtggacaactatatgcaattgctgtcaacagaagatcactgcagcctggtgacggaagtactaagacccttagctcagctcaaggtaatgccagggagaataacccaactggaacagctcacagtaataagaagaatacactaagttctcttcgaagcatttacaagagcagaagcttcacagagacactaagtgaacatccacctacattttctgtcttaccttccccgtcaaatgggctatctgaggaccaaactgagtgcccagtggtggatgtgaatgggtcgacagagtcaccagcaaagcacagggaagttggtgaaatgactacccctggaactccctcttcctcaggggtggaaaatgctgctaatgaatatggcttctttaaaaggatctggacaatgtggaatggtcccaagaatgttaagtctgaggtttctcaaaattgtgaaagcacttctgctgaagtgattgatgatttgatacatgaaacctcttccaaaaatgatcgctcagatggtactgagggcatgttagcagtaagtgataatttatcgatttcattaggtgatgatcattctgaaaaaataaagagagatccatcaattcctgaaaacccagaaccatgcagaaaacctgctgctgtttccatgattaaatctggaaaaaaggatgatatttctgaaatgaataggggcatgtttaactgggcttcaaggtggtggccatttgggaaatcagatgcagatagtagtacaaccaacataaatgccactgatgaaccgaggactgactctattgaagaatttgaatcttcaaacgctccaactaatggaagtgcacaacaggtggttcatgaaatatttacaaagcctgacttgtggtctgttttggagcaacagttatcagaacctcttgggtctgaggttgttttgaaagcaaagacaaggaattggcacacagattgcagaagttaaattgctggcctttgaaaggcctccttgataaagacctgcatcacctggtacatctgttaatttctgaaaagaaatggattgaagaaacttcttccagaattttccctttccgtcttaccctccctcgcaagagaagatgtgtcccatcaagttccagcaaatccaacggcctcagttacattttttcaagtgggaagccacaaaagggcagatacgttgacaataacagtaggaaaagcaggtccctcactagagaggagatactatcagattgtcacaagctggtgaaggagcttctttctgagcatgaatatggattcaacatcggaattttcaaacgccgtttttcccaggagtatggatacgagctcgaacaccggaagctcgggtatctggaccttgaaacgctgctgcatattatgcctgatgtaagggtgaaattcccaagggtcatgcgctcagaacacgggaacgggcaggctggcagcaagggagacggaaaccgaagcagcggcgatgacttgatctgggaggagcttggtcctgtatctgccacaactgaaaccgccgccgccgccgctgatgcaggggccgacaaggaaacatgctatcgtcctcccactccttcagacgacgagttctcggacagcgacagcataaaagaccggcagcctagaaggaacgccgagcagcagagctcgcttctccagatcattggagcttggaacagcagcaagggtggcgacgtctctagcaacaagcctcaggacatcgacgggttggtggactgttcgagaagcagcccgggcagtgctggcaccagcgcagcttcaggaaaggtgcagacgtcgtctccgaagctaccgcacaagcagtactccttcgtgtcggactccggagaggagagcgatccggataagctggtggagagcgtcttggacagcctgcagaaagcacggggcggctcgaagctgcacaactgagcgtctgctgccatcgaattattgtttttgcaacctaacgagtcgtgcttatggtggtggccatggctgactgtcaaggacagcggcgcctgcaagcatcagccggagagactggtgaataaagctcgtcttttacttggactaggccgtagtacaatcggaacagtccttggtaattggtatgttaacattggctagagaccgcctcccatttctgtttcttgtttctttcttttcatgcaggatggttgtccgcccaatctacacgctcattttcttaacaaattggttaacacggcggggcttagacggtcgttcgtcaccagtgttggtattccaagcccaatcttttttttgcttgtagtatagtaaacataaaatgacatggcacatgctggtgtctagagtattgctgtttctggagtcccaagcattcatgtgatggcacattggaatgccagttgtactgcaatagtgccaatgaatcctatctaacactagacctggtcacgttggtcaactgttgatggttgtgcttttctgtctgttgagtgccatctagtctagatataacaaacaaggcatcctgacattgcagcagcacattcacaggaccaggtggat

SEQ ID NO: 8790 - DNA, 6007 bp, Zea Mays
cgatggcagcaacaccggcctgggactgggaggaatcgcttgtattcttcctgcagccgttcttcctccacggcgtgagcgccgcggcccaccttatcctggcgctcgccgtcgcgggacgcttgctctttcgccgcctctccgccagccggaccaaggacggggaggtgggcggaggagatgctagccgcggcgttggccggtttcggtactggtacggggtctctgtctgcaccacgtgggctatgggtgcgttcgaggtcctcctcgccgtctactcatggtacgcgaacggcggcgccgggtggtcgcgcgacgcggtcgttgaacaggtggacgcggccgcgcgcgcggtgtcgtggctgctgctcgccgcgtacctgcagttcgatttctggtggcgtcggcagcgccaggagcggttccccgtggcgctcaggctttggttggcgctcttcatgctgctctccgtagtcaccgtcggcgttcacgcggcgatgatcctcgacgggtcccttgtgcccggtcgatcgtgggcgctcgacgcagtctctgttactgcagcagcggttctactctcagtctcagctgggttcttcggaaggaaggagggagagggaggcggccatgcttccgaggcgcatgaacctctgctgaacggcgcgcacgaggggtccggtgacgacgacgagaacagcagcagcgccgccgacgcatccttgttcactggcgccggctttcttagcgtgctcaccttctcttggatgacgcccctgctcggcgtgggtcacaggaagaccctcgtcccggaggatgtcccgggcctcgaaccaggcgacagcgttgctggcgtcctcccgcccttcaaggccaaccttgaggcgctcaccggcgacggcggcaggtcgagccggaaggccgtcactgcgttcaagctcaccaaggccctgttgcgcaccctacggtggcacgtcgcggtgaccgcgttctacacgctggtctactgcgtcgccgtctacgtcgggccgtacctcatagactccctggtccagtacctgtacctcaacggcgacgagaggtacgcgagcaaggggcagctcctcgtactcgccttcgtcgtggccaaggtgctcgagtgcctgtcgcagcggcacttgttcttccggttgcagcaagcggggatacgagcgcggtcggcgctcgtcgcagtcctgtaccagaagagcctcgcgctttccagccagtcgaggcggagccacacgagcggagagatgatcaacatcgtcagcgtcgacgccgaccgcgtcggcatcttctcatggtacctgcacgaggtctggcaggtaccgctgcaagtagtcatggcgatgttcatcctgtactccaccctcggggtggcctcgctcgccgcgctcggtgccaccgtggccaccggcctcgccaccgtgcccctgggaagaatgcaggagcggttccaggagaagctgatggacagcaaggacgggaggatgaaggcgacgtcggagatcctgcacagcatgaggatcctgaagctgcaggggtgggagatgaggttcctgtccaagatcatcgagctgaggaagacagaggcgaactggctaaagagatacctctacacgtcggccaccatgaccttcatcttctggggcaccccaaccttcgtcgccgtggtgaccttcggagcctgcatgctcatggggatccccttggagacggggaagatgctgtcagcactggccacgttccgcgtgctggaggaacccatatacgaacttccgggcactatcgcgatggtgatcaagaccaaggtgtctcttgacaggatagcatcgttcctgtgcctcgacgagctacccagtgacgccgtgcagaggcttccacgtggaagctctgccgacttcgcagtcagcgtcggcaacgggtgcttctcatgggaagcctcgcctgatgctccaacactgaaggacctcaacttccaagctaggccaggcatgcgcgtcgcggtctgtgggacagttggctccggcaagtccagcctgctatcctgcattctcggcgagattccgaagttgtcgggagaggtccggacctgtgggacgacagcgtacgtcagccagtcggcgtggatacagagcggcaaaattcaggagaacatactgttcggtatggagatggacagagacaagtacgacagggtgctcgagtcgtgcgcgctcaagaaagacttggagaacctgccgtttggcgaccagacagtcatcggcgagcgaggcatcaacctcagtggaggccagaagcagaggatccagatagcacgcgctctgtatcaggacgccgacgtctatctgttcgacgatccgttcagcgcagtcgatgcgcatacaggatcccacattttcaaggaatgcttgcttgcggatttggcttcaaaaacagtggtttatgttactcatcagattgaattcctacctgccgccgatctcatccttgtgagaatttcttggtcatgaaagatgggaggatagcacaggcaggaagatacgacgaaatactgggttcaggcgaagagttcatggagctggtgggtgcccacgaggagtctctaacagcactggatgtggtcgatgccatgaacgagaacgaagccaacgtgtcatcctctcccagcagcaggatagagacgccgaacctgtccagatccctgtcgttagctgagaagaaacatggcgccaccaacgaggctgaaggggacgacgacgatgctcggagcgggcagctggtgcaggaggaagaaagggagaaaggcagggtggggttctgggtctactgggagtacctcacgcaagcctacaagggcgccctcgtgccgttggtgttgctggcgcagacgctctttcagatcatgcagattgccagtaactactggatggcttgggctactccggcgtcgaaggatgccgagcctccggtgagcgcgcccacgctgctcttcgtctacgtcgtgctggctctcggaagctcgctgtgcatcctcgtaagatcgctgctccttgcgacggctgcgtacaagacagcgactctgctgttcaacaagatgcacctgtccatattcagagctcccatgtctttcttcgattccactcccagcgggcgcatcttgaacagggcttcaactgatcaaagcgaggtggacaccaacatcgctgaccagatgggcaccgttgcattctccatcatccagctcgtcggaattactgcggtgatgtctcaggtcgcatggcaggtctttgtggttttcgtccctgtatttgctgcatgtgtctggtaccagcggtactacattgacacggcaagggagctgcaaaggctagtaggagtgtgcagagctccaatcatacagcacttcgcagagtcgatagcggggtcgagcaccatcagaagtttcggcaaggaagaccagttcgtgtcgactaacagccgtctaacagatgcctactcccggcccaagttctacaacgccggagcgagggagtggctttgctttcgcttggacgtgctgtcctctcttgcgttcgccttctccctgatctttctgatcaacctaccggccggtctcatcgatccaggcattgctggccttgcgatcacgtacgggcttactctgaacacgctgcaagcacaggttgtctggagcatgtgcactttggagaacaagatcatatcagtagagagaatcctacagtacatgggcgttcctgcagagcccccgcttgtcatgccagaaaacaagttggctcagagctggccatcgaatggagaaatccagcttcagaatctccatgtgaaatatgcgccgcagctgccgttcgttctgaagggccttacggtcgcttttccgggcggcgtgaagactggcattgtcggaagaacagggagcgggaaatcaaccctaatccagtccctcttccgcatcgtcgaccctgctgtcggccagatagtgatagacggcatcgacatccgcacggttgggctgcatgatctgaggtccaggctgagcatcattccacaggagccgacgatgttcgaaggaactgtcaggagcaaccttgaccctcttggggagtactccgacgatcagatctgggaggctttggattgctgtcagctaggggacgaagtcaggaagcaggagctgaagctcgactcaccagtggtagagaacggtgagaactggagcgtgggccagcgccagctcgtgtgccttggcagggtgatcctgaaacggagcaaggttcttgttctggacgaagccactgcctcggtggacactgcaaccgacggcttgatccagagaacgctgaggcggcagttcaaggagaccaccgtcatcacgatagcgcacaggatcacgtcggttcttgacagccacatggtgctgctccttgacaacggcgtggccgtcgagcacgacaggccggacaagttgctggaggacaagtcgtctctgttctcaaagctcgtagcagaatacaccatgcggtcggtgcttacatagcagaccacagaccagcatacaagagacgactgaagatggggtcataaatatatgatgacaccttttaagttttactagaaaccaaaaaggtctcgcgaaaggccttggacccattattacgcaatgtcatctcttcgtgggccaggggaggaatgtctgacaaaatggatcgacatgagatcggatcaactcaagctcgtgcgactcactaaattcaaacgttatccacagcagtgatacgattctcccgcgtagcgccctcaaacgtcggaactgaatgatgataagtcggcaggattatagaaagataagctcagtcggttcactattacttaggcgcacattgttatcatatccacatgtaacaccccacggtcaaatatataaggcttagggggcaccccatcaaacaactcactcattagccgtctacccagctctctagcatccctcgtactagagaactcccctctaaccaaccacataaaagatccacaccaggaagtagggtgttacgcctctctaagcggcccgaacctgtataaaattatccactatctctcgtgcatctagcacgaaccatcgagctacaatcggtaacaccgtcctactccaaaaagcacctcgagccctcgtggggcaacctcaggtgtgcggtcggacccaaaacaccgacagatggagagatagaatgtcagccattcagatctgaaatcaccaaaaacaagtgacaaaaccaacatacgtggaatgaacatgctatagactctgacctgcccccagttgaaagggaaatgtgccattgggacatttccaagtattttggtgattgagtgccaacacaagtgcttaagtgctaatctatgccaattgatggacaaagtgcaaatcaagaggaaaggtatgtttctaagacttagtacattgttttggagactaatgtattgtgtctaagtgctagaaacagggaaagaccaatttggaaaagacttggctaagcagccaagactctgcgcagtctgggtgcaccggacagtgtccggtacgccaggctgcgactgtcgactggctgctctcgggaagcgatcaacggcgtacggctataaatcaccggactgttcggtggtgcaccggactgtccggtgagccattcacaggcgaagtcgtcgctctcgggaagcaattaacggcgtacggctataattcaccggactatccggtgaggcaccggactgtccggtgagccaacggtcggccggaccaacggtcggccgcgtaatccgcgcgcgacgcgtggccgagccaacggtcagaagggggcaccggactgtccggtgtgcaccggactgtccggtgtgcacaggacagtgtccggtgcgccaatggctctggatcttcaacggtcggctgcgccacagaaggaaagaaatc

SEQ ID NO: 8791 - DNA, 2006 bp, Zea Mays
cgcacacagagccgcggcgtcgacccgcccatgtcccctcgatagcaccccctgttctttcccatctctccaactctccttgcccggctgccccacacctctgctcttccctctcgcctcccgccgttacagcttgcagctccagccccaacccccgtccctctctccctgagccgtcgccttcgccttcgctgcgaaatctagggtttacgccgcgcatcgggtaccgcgcacgcaccgaccgaccacccggcggtcggcgccgctacacgcgggctcgctctcaggtggttgagcgtggccggagaaggggaggggcgacactgctcgtgggtgggtcagccagtgtgccccacgaggaacggcaatcatgtcgcagacgaactgggaggcggataagatgctggatgtgtacatatatgactattttgtcaagagaaacctgcaggcaaccgcaaaggccttccaagcagaaggcaaggtctcatcagatccagttgctattgatgctcctggtggctttctctttgagtggtggtctgtattttgggatatattcatagcaagaacaaatgagaagcattcagatgttgcagcatcatatatcgagactcagctaattaaagcaagggaacaacaacaccagcagccacctcaacaacagcaacagcagcagcaaatacaaatgcaacaaatgctgttacatagagctgcacagcagcagcaacagcagcagcgtagagatggttctcttctcaatggtactgcaagtggattttctgggaatgatcctttaatccgacaaaatccagctaatgcgaattcgatggcagcaaaaatgtatgaagagaggttaaagctccctccccagcgggattctctggatgaggcgtcaataaagttgcagcaaagatatggagaaaatgtgggacaagtaattgatccgaaccaagcactattgaaagcagctgcagctggacaatcctctgggcaaattttgcatgggactgctagtggtttgtcaggtactccgcaacaagttcaggcaagaagcccacaacaaccacctacagcagaacagaatatcaggaccgagatcaatccagtgttgacaccaagagcagcaggcactgagggttcattgattggtatccaagcaggatctaatcaggctggaaacaatttaactctgaaaggctggccgctcacgcagaagccatttatgcaatctccacagcaatttcagcagctccagtttctgaccccacagcagcagcagcagcttttgctgcacgctcagcaaaatctgtcgtcctcgatgtcaagcgatgttgataccaggagattaaggatgcttcttaacaacaggaatgtggtccttggacaggatgggcagacaaatagcggcggtgatgttatcccaaatattggttcgccagggcaaagtggtggatcgcgtaatgatatagatatactaataaagcagcagcagcagcagcaaagtcatagccagcagcagcagcttcagcaacctgcgctctctggacagcaatctcaaagttcaaaccagcttctccatcagcatggaaaaccaggagttgggagcttgcctattgatggaaacttgccaaactcttttggatttcctgaacaaggatcaaagaagagaaagaaacctgtctcatcctctggtagagctaatagttcaggaacagcgaacactgctgggccatctcctagctctgcaccctcaacaccatctactcacacgccaggagatgcaatgtccattccacagctgcagtataatggtggcccttcaaaaccattgatgatgtttggctctgatggcactggaagcttgacttctccagcaaacccgctgggtgatgttgaacgtctgttggaagatggttccttggatgaaaatgtagaatcttttttatcgcaagatgacatggatcctcgagaaacaatgggacgctgcatggattctagtaaagcag

SEQ ID NO: 8792 - DNA, 2450 bp, Zea Mays
gaaggagatgtcatgttggcctgcaaattttgcatgggactgctagtggtttgtcaggtactccgcaacaagttcaggcaagaagcccacaacaaccacctacagcagaacagaatatcaggaccgagatcaatccagtgttgacaccaagagcagcaggcactgagggttcattgattggtatccaaggatctaatcaggctggaaacaatttaactctgaaaggctggccgctcacgcagaagccatttatgcaatctccacagcaatttcagcagctccagtttctgaccccacagcagcagcagcagcttttgctgcacgctcagcaaaatctgtcgtcctcgatgtcaagcgatgttgataccaggagattaaggatgcttcttaacaacaggaatgtggtccttggacaggatgggcagacaaatagcggcggtgatgttatcccaaatattggttcgccagggcaaagtggtggatcgcgtaatgatatagatatactaataaagaagaaatttgctcttctacagcagcagcagcagcagcaaagtcatagccagcagcagcagcttcagcaacctgcgctctctggacagcaatctcaaagttcaaaccagcttctccatcagcatggaaaaccaggagttgggagcttgcctattgatggaaacttgccaaactcttttggatttcctgaacaaggatcaaagaagagaaagaaacctgtctcatcctctggtagagctaatagttcaggaacagcgaacactgctgggccatctcctagctctgcaccctcaacaccatctactcacacgccaggagatgcaatgtccattccacagctgcagtataatggtggcccttcaaaaccattgatgatgtttggctctgatggcactggaagcttgacttctccagcaaacccgctgggtgatgttgaacgtctgttggaagatggttccttggatgaaaatgtagaatcttttttatcgcaagatgacatggatcctcgagaaacaatgggacgctgcatggattctagtaaagggttgggttttactgaggttgcaaaagcccgtgcgagtacaaacaaagttgtttgttgccatttctcattggatgggaaacttcttgccaccggagggcatgataaaaaggtgtggatgccaagatgaaacgaatttgcctttacgcgataaagaaatttcatgctacatgtttctttttcaggtcgttttatggtttacagatgtgctaaaacgtaaatccgcattagaagagcactcttccctaattacagatgtccgattcagccctggcatgacccgccttgccacatcttcctttgacaaaaccgtgcgggtttgggacgctgacaatccagattattcgctacgcacttttacaggtcattcagcatctgtcatgtcacttgattttcatccgaacaaagaagacatcgtttgttcgtgtgatagtgatggtgaagtgcggtgttggagcataaataatgggaggagctactcggttaagatttcaacctcgccagggtaaatatctggcagctgcctcagaaaagggaatatccatactggatgcggagacattacaagtttgtagaactcctttgcagggccacgtacagattattcagtcagtatgttgggatgccgcgggcaactatctggcgtctgtcagtgaagattctgtcagggtgtggtcatttacctcagggaactacatcgaatgcatacatgagctgatctgcagcgggaacaagttccattcgtgtgtttttcacccaaattacccgaatttgcttataatcggttgttatgagtccctagagctttgggacataagggagaagaacacggtgacaatcagcaacgctcatgacggcatggttgctgccctagccgcgtcaagtgcatcggggctggttgcatcagtgagtcatgatcagctcgttaagctctggaggtgacactgaacacagcaacgctcgtctgtgtcattctcatttccagtgtcgtggcaaaagcgaaagggcagctgatctgatctcctaggttgatttgcgactgtggcatgcgcaaactattcaaatagttgtcagtaatgtgcttcccttatttctttgtttgtttatccatgccgggtgatactatgttacaattttatctatttagagaactgctattataatttgacctcccacttaggcctatttggctactctagtatttattccaatccatgtgtattgaagtgggttagggtgtaaattagtttaatttatacacaattcaactcaatacatgtggatttagttgaatactagggattaatgtaaatactatagtatccaaataaagtaggcttatgttcatttcatcccctagtccacggggattgaaggagattggagtggactgatagtg

SEQ ID NO: 8793 - DNA, 3382 bp, Zea Mays
atgtatattactcaaccaaaaaaaaagcgcattgagtttgtcagtttcactgcccacggcatgggatcttggagacaaaaactgcctgggttaggcgagggctcaggctcaggctcacaggctgctgaggccggcggtggtgggagaggtttccgtggccgtggtggcttctaccatcaacagcagtccccacaaggtggtcgtggtcgtggaactggctactacagtggtggtggtggtggtagaggtggacgtggggcagtcccgtccgccatagctcccgagctgcgccaagcaatgcaaacttcaaatgaacctgataacatcccagcgccagaggcaggctcccagtcccaggatgcgccgtcaccaagcgaagaggctgtggatcagctgaaaggcttgtctgtacaggacattgtgcaggcgtttccagtgtcgagcaagttccctcaccgcccaggaaatggaagcgttggcaccaggtgtttggtgaaggcaaatcacttctttgctgaattattacctgccaagaaggatcttcatcagtatgatgtttcagttaccccggaagtgacatcgcgaattgtgaaccgttctgtcatggaggagctggtgaggctgcacaagctgtcatatttgggaggtcggcttccagcctatgatggtagaaagagcctgtacacggctggacccctgccattcacttcgaaagaatttcacatcactctactcgaggaagacgatggttctggagtagagaggcgtaagaagacatacaaggtagtgattaaatttgccgcaagggctgacctccggcgtctggagcagtttttagctggaaggcaggcagaggctcctcaagaagccttgcaagttcttgatattgttctgcgggagctgccgacaacaagatatgcaccgtttgggcgatcgtttttctctcctgacctggggaggaggcgttcccttggtgagggaatagaaagctggcgtgggttttaccagagcattcgccctactcaaatgggcttgtcattgaatattgatatgtctgcaactgctttctttgagccattacctgtcatagattttgttgcacagcttttaaacaccgacgacatctactcgaggcccctcttagacgctgaacgtgtcaagataaagaaggccttaagaggcgtgaaggtggaagttacgcaccgtggtaacatgcgacgcaagtatcgaatagctggtttaacatctcaggaaactcgggagctaacttttcctgttgatcaaggtggcacagtgaagtcagttgtacagtattttcaagagacctatggctttgccatccagcacacctacctgccctgtctgcaggttggcaaccagcagcacccaaattaccttccaatggaggtctgcaagatagtggagggacagaggtactctaagagattaaaccagagtcagataagagctcttttagaggagacatgccaacgcccacatgatcgtgagcgcgacattattcagatgatgaatcataactcttaccatgaggatccttatgctaaagagtttggcattaagatcagcgagcgtttggcttcgattgaggcacggattttacctgctcctcggctcaaatataatgaaaccggcagagagaaggactgtttgcctagagttgggcagtggaatatgatgaacaagaaaatggtaaacggtggcagagtgaggagctggacctgtgtgaattttgctcggaatgtgcaagagaatgttgctattggattctgccgtgaacttgctcggatgtgccaggcctcgggaatggacttcgcgctggagcctatccttccgcctatatacgcgcatcctgataaagtggagagagctctgaaagccaggttccatgacgcgatgaacttgctcggaccacagcgcagagaacaactcgacttgctgctcattggaatactccctgataacaacggttctctttatggtgatctgaagcgtatctgtgaaatcgaccttggattagtttcccagtgctgctgcgcaaagcaagtctttaagatgaacaagcagatactggcaaaccttgcgctgaagataaatgtcaaggtcggaggaaggaacacggtgctggctgatgcggtgtcaagacgcattcccttggtgactgacaggcctaccatcatattcggtgccgatgtgacccatcctcatcctggagaagatagcagcccttccattgctgctgttgtggcttcccaagactggcctgaggtgacaaagtatgctggtctagtttctgctcagtctcataggcaagagctgatagaggatctctacaacgtcacacacgatcctcagaaaggaaccgtttgtggtggcatggtcagggagcttcttatatccttcaaaaaatcaactggtcaaaagcctcagaggatactattctacagggatggtgtgagtgaagggcagttctaccaagttctactgcatgaactggatgctatccgaaaggcgtgtgcatcgctggaagcaaactaccaaccgcaggtgactttcatcgtcgtccagaaacgccaccataccaggctgttcgcgcacaaccacaacgaccagaattcggtcgacaggagcggcaacatacttcctggtgggaactgtcgtggactcgaagatctgccaccctacagagttcgacttcttcctgtgcagccatgctggcatcaagggcaccagccgtcctgctcactaccatgtcttgtgggacgagaacaacttcacagccgacgcactgcagaccctcaccaacaacctttgctacacctacgcgaggtgcacgcgctctgtgtccattgtcccgccggcgtactacgctcacctggccgcattccgcgcccggttctacatggagcctgacagctcagacagcgggtcgctggcgagtggcgcccgtggaggcggagcgccctccagctcgtcaacgtcccgcagcacccgcgccaccgccggcggagccgttagacccctccccgcgctcaaggacagcgtcaagaaggtcatgttctactgctgatgaaccggagcatgaagatagtaggcagccctgcctgaaatctgatccgcttggtgctgttgtttggtcagtaataatctgcttgctattgacaaagccgtgctcagaagacatttgcttggtgtttgtttgatgaagggtggctagagtggtggattcgcttcctgcttgtactgagggacgaccgtacgtgaaagaatctaggtctttatttgtgtttggacgattaatagtaaaacacaagagtattttgttaagataaattatgagtttgtgtggtatttatggtcttat

SEQ ID NO: 8794 - DNA, 2039 bp, Zea Mays
ctgcggcgtcgccctcctcctttcccactcccaccggttgaagactgtttctgtgagattgtcgcgagatgacagtctccggccatgccaagcactgctgtctcggtattcagaaactgttgtccctttgattcggaggttttgctcgacgcccattaaggttgaggaggtcgccaacatcgaagctgatggaaaggtctcatatctggatgccgctgctctgccctgcgacaactctgactgtcgtggtgagcccagtcatggcagcaggccatggacgaaacggttgaagcattatggaccttctcagaagggaaaccgtaaccatcatgaaacgaaactgccaggcagtggcagggatggatcttctaggaagggcagccaccctcagaagggtaaaacgaaactgccaggcagtgggagggatggatcttctcggaaaggtagccaccatgaaacaaaattggcagacagggatgaacttattcagaagggaagtcatcatgaaaaggaattggcagacacacccttcaaaccttttcttttccagattgtattggatacttctatgagttctcttatgcctgtacttgacggatgggtgaaaatcggtaatcgtctggaaagagataaagtcaatatggttttgttccatctgaggaagcagagaatgtataacaaggctctgaagtttgtggagtggatcgaaagaagaaaactattaaattttgaagaacgtgattatgctagccatctggatttgatagcacggaactatggtgttgaagctgcccaaaagtacatcgagagggtcccagaagccttcaggagtgaggtgctttatgaaactctgcttgttaactgtgtatgccgtgatgatgcccagaaggcagagcaagtcttcaatgaaataagggaactctctttgcctttaactatctctgcttgcaaccaaatgttattgctgtacaagagggtttctcgaaataagagaaagcagaagaggttatcaatgctatggaggtacatgtaaaggctaatcgtcatgccgtcaggtctcttcttgacctctatgctattcttggaaggccagttgatgtagagagagtatggaacttgtgcgctgaaccaaagttggaggactttttggctgcaattaaggcatggagtaaacttggacatatcgaaagagcggaagagatctttgacgtgttggtaaagacgtttccgaaactcacttccaagtactttaatgctatgttggaggtgtatgcggaaaataaacttctggacaaaagcaaaaagtttatagaaaggatgtgtttggatgggtgtacaatcggccctcttacctgggatgcagttgtcaagctttatgtgaatttaggcgagttgtcaaaggccgactcgtttctgatgaatgtcacagaagataatcctgacagacatccccttttcagctcatatgtaatcttactaaaggcatacgcagaaaagggcgatatccataacgcggagaagatatttgatagggtaaagcagaccaacttccctgcaagaactctgccctataatttgttacttgcagcttatgccagtgcccaggttacaccctatgggttcagagagaggatgaaagctgacaagttcagcccgggcaagagtcagatcgaacaactgaagcaactcgacagcttgtagaaagcaggcaaatccagattgattttcttccttttcaccccttcaccgtgaccacatggaacattttccttgcaaagcagttagactggaatagaagaatctaccaggatgcatttgttctttcagcatgaattctgtgcaccttggtatgcttgttttgcaggttgatcagagttttaggcgagttgctagccggaagtagacacttctgatggtatattatctgattagcttcgtactcctagctaataataaattgagggaaatggaaacaagtattttttgggtttatttatattactcaatcaggaagttaagatagtagtcattacaaaaga

SEQ ID NO: 8795 - DNA, 2029 bp, Zea Mays
aataaattgttgtcatttgttaagcatattgcaaatctattaggacaatcgcggtctgcgccgtcagcctgccaagctcagcggggcggaggcaggccaaaccaacccacctccaacacaagcgaataaaagtctcgcgtctatcttcttccttccttccttcctaccaacctcccctccctccccacgcccaccgccccgcatccaccccgaaaccctagtggatcgtcgccatggccgcagccgccctcattcgccgcctccccgctgcccgggcccaggccccggcattcatggcggcgcgaccgatctccgactccacggcagcgttcaccatcgagacatctgtccctttcacctcccacctcgtcgacccaccctcgcgtgatgtcaccaccacccccgctgagctcgtcaccttcttccgcgacatgtccctcatgcgccgcatggagatcgcggccgactccctctacaaagccaagcttatccgtgggttctgccacctctacgacggccaggaggccgtcgccgtcggcatggaggccgccatcacccgctccgattccatcatcaccgcctaccgcgaccactgtacctacctcgcccgcggaggggacctcgtctccgccttctccgagctgatgggccgcgaggctgggtgctcccgcgggaagggcggatccatgcatttctacaagaaggacgccaatttctacggtgggcacggcatcgtaggcgctcaggtgcccctcggatgcggcctggccttcgctcaaaagtacaagaaggaggacacggccacgttcgcgctctatggtgacggtgcggctaaccagggacagctctttgaggctctcaacatttcggccctctggaagctgcctgccatattggtctgcgagaacaaccattatgggatgggaacagcggagtggagggcagcaaagagccctgcctactacaagcgtggcgactatgtgcctggattgaaggttgatggaatggatgttcttgctgtgaagcaagcgtgcaaatttgcaaaagatcatgctgtcgcaaatggcccaattatccaacattggccctgtttgggaccgtggtctgtggccgcacggtgtggtaaccgagccgtggttccacagctgcggtatcggtaatccacagtgcaattaaaataacaatttgtgtctgctatctgctaatgagtggtccttgagatggatacctacagataccatggccactctatgtcagatccaggaagcacttaccgcaccagggatgagatttcaggtgtcaggcaggaacgggatccaattgaaagggttagaaagttgcttttgactcatgacctggcaaatgctgctgagctcaagaatatggagaaagaaatcaggaaacaagtagatgacgctattgctaaagcaaaggaaagttctatgcctgatacttctgaactcttcacaaatgtttataagaagggcttcggcgtggagtcatttgggccagacaggaaggagatgagagcttctcttccgtaggttggcagcatgatgaggcagtcctcattacatggtatgatagccaggaaaaataatttttgatgaaggcctcaggcattattggaatattttatcgggaaatgaacctgtatagagatgcgttgtctggaggatcagcttcgttgtttcgcccttttttcatttctacaattcagttttaactgctgctggctggcttcttattgaagctaatatcaccatccaagaaaaccgaagctagaggattataaatttgatcacacgtatcgtctagcactgcacggtgtttgcttgatcagtttctaactagcatggtacatgtaggacagtgcgtcattacacttccacctgtggattaatttttctacccagcgtggtgcatatgttgataaactgattttttttactagttgcacagtgatatttatttatgtagcatgcggcagtttaattgatgtagctgttcgggcctgcgagtccggagt

SEQ ID NO: 8796 - DNA, 992 bp, Zea Mays
cacccaactctttcacatctctgcagcaaacaaggccaagactctgcaagcatcaagcagtggaaggagcattacacagtaaacaagagtaagtgcaacgtccacgcacacaggtataggagagatggatgggagcagcaaatacagatcaaagggctatgcaatggccaatgccggcaggaagctcccctacgtcttcctgctgctggtggcccttgcagctggcgtgttgagcgtcgtcgtcctgcagaaggtgagggagcagcgcgtctttgctcggcgtctccaggaacgtgaccgccagcttgtcaccctgcggatccttctccagaaaaggcatttaacaaagagatgaagaggaaggtggaagaaatgaaagcaacaacatcttcacttagaactcagaagactgaccagaaaaccaaactcaagggactggaaacaacagttgcagatcttaagaagactcaaaaagatctggaagtagctctcgctgaaaaagataaccgcattaatctaatggaagaggcagccacaaaccttgagaaagtctaaaaaacaattggaggcgacactcacagagaaagacagacacatcaaacaaatggaagagaagaacaaaagcgctaccaacactcaaaaagaattggaagcagttctctccgagaaagaccgtcgcatcagacaaatggaagagaaagccaccggttcaaaccctgaccagatggcagctctgatggaaatcctgcaacggaaggaagccgaactcgaagagatcaagaccaggttccaagatttcaagaaaccagacagagtcgaggtgaataacaaaagcactcccatgcaaatgaacaatgcaagcgcaacaccagacgtcatgatagtcacaaaggctacaaactcgagcagtgtggctgttcccatcaagtctgaagaaaagcgtcctttccttttccacagcaatgggaaatgccaaaccgaagaaaaaacga

SEQ ID NO: 8797 - DNA, 1927 bp, Zea Mays
ggccgccacccttgcccgccattaaccgcctctccctcgctcctctcgctcgctcggctcactccctctccaaagcggcagcctcacgcagtcacgcgctccaccacgccacctccctctactcactcatgttgttttccgtccatccgcccaccggttcgtagcccgcgccgcaaaaccctagccccgggaggatcgcggggcgcctccgcggtgccagcgacgtggctcgtttgatccgattgctggtcgagccccgccctcgctgccgcgcttcgctccggctgtgcagcggcgtgagcaccgagcacactcgcgaatggggaactgctagggtgcttggatcaaggatgggagccctcaccctggggcctcaggatcctctaggaaaattgatttctggagctgattcttcgacatcaacaatccagcagtgctagatttttttttgccaaagatggcttcatggcaagcagatatctcagaagacagcacttcatttctcttaagttctaaggtgtggcgttcgttggggaagagcgaagacttgttgaaggctgaggctgccagtccttcatcgtcggagtcgaatgaagagcagtctgagtcccattctttgccaagatgagcctcgccttttgccttcctatagattttcttcttcttcttcccatgtctttcttccccctggtcattttcattatcgggacattgagcaataaaatgacatgtattaccgcatttgaagcaggagcgctttccccttgtcttattcttgttggggtattccttgcgtccttttagtgcgatcttgaagcgcttgatgataagcgccatctcatcttcgttgaggccagcggcctccacttgtgccaccttgcttggtagcgtctccctgctactggttgccttgagggcaacagtttgaggctcgtggacggggagtggaccgtttagagcgtcgtccacatatcgggcttccttcaccatcatgcgcccgcttacaaactttccaagaatctcctcgggcgtcatcttggtgtacctgggattctcacgaataaggttaacaagatgggggtcaattaccatgaatgaccttagcataagtcggacgacgtcgtggtccatccatcttgtgcttccatagctcctaatcttgttgactagggtcttgagcctgttgtatatttgtgttggctcctctcccctgatcatcgcgaaccttcccaactcgccttccatcaactccattttggtgatcatggtggcgtcgtttcgctcatgtgatatcttaagggtatcccaaatttgcttggcgttgtccaagccgctcaccttgttgtattcatccctgcacaagctagcaaaacagtagtagcttgtgcattcttatgaatttgctcattgataaacacagggttatccatactatcgaaatgcattccattttccactatctcccaaatactaggatggagagaaaataagtgactacgcattttgtgactccaaaaagagtagtcctctccatcaaagtgtggaggtttttcaagtggaattgaaagcaaatgagcattggaattgaacggaatacgagaataatcaaatgaataattttgattaactgttttcttctttgaagaggagtcgtcgtcgtcgtgtggtgaagaagacgaggcatcattgtcgtaatagatgatcttcttgatgcgcctcttcttctttccatctcttttcttatgactcgagcctgagtcggttggcttgtcatctctaggctcgttgaggaaagactccttctccttgtcgttgaccaccatcccctttcccttaggatccatctcttcgggcgattagtcccttacgtgaagagaacggctccgataccaattgagagcacctagagggggggtgaacaggtgat

SEQ ID NO: 8798 - DNA, 674 bp, Zea Mays
gaggcccaaagccccgtcggcccccatcgccacgccgccggccacgccccagacgaccccgcccgccgccgccgcctcccgctccctccgcgcgcagccctcgtccggccgcccgggtccgagcgcgctcgctcctcctccccacgtcggacagtttaagtgtggcttcattgcatgagtagttgcagttagcgtggcttttctccgtgcttgctcctggtcgtgctttgccttgcaaaggaaggaatcatgacatctgttgttcacagtgtttcaggtgaccacagggctgaggatcaaaatcaacagaagaagcaagctgaacctggggaccagcaagaagccccagttactagttcagatagccaaccaacagtaggcacaccatcaacagattatgtggcaccctatgcccctcatgacatgagccatgcaatgggtcaatacgcttatccaaatattgacccatactatggaagcctttatgcagcagcttacggtggacagccattgatgcatccaccgttagttggaatgcatccggctggcttacctttgcctaccgatgcaattgaagagcctgtgtatgtaaatgcaaagcaatacaatgccatattaagacggcgtcaatctcgggctaaagctgaatcagaacgaaagcttatcaaggggcg

SEQ ID NO: 8799 - DNA, 1451 bp, Zea Mays
ctctgatacaggtcaccagcggtgggccccaccacccagacgggtcctggttcctccccctccaagccggctcccaaatttgaggcccaaagccccgtcggcccccatcgccacgccgccggccacgccccagacgaccccgcccgccgccgccgcctcccgctccctccgcgcgcagccctcgtccggccgcccgggtccgagcgcgctcgctcctcctccccacgtcggacagtttaagtgtggcttcattgcatgagtagttgcagttagcgtggcttttctccgtgcttgctcctggtcgtgctttgccttgcaaaggaaggaatcatgacatctgttgttcacagtgtttcaggtgaccacagggctgaggatcaaaatcaacagaagaagcaagctgaacctggggaccagcaagaagccccagttactagttcagatagccaaccaacagtaggcacaccatcaacagattatgtggcaccctatgcccctcatgacatgagccatgcaatgggtcaatacgcttatccaaatattgacccatactatggaagcctttatgcagcagcttacggtggacagccattgatgcatccaccgttagttggaatgcatccggctggcttacctttgcctaccgatgcaattgaagagcctgtgtatgtaaatgcaaagcaatacaatgccatattaagacggcgtcaatctcgggctaaagctgaatcagaacgaaagcttatcaaggggcgtaagccctatctccatgagtcacgtcatcagcatgccttgaaaagggccaggggagctggaggtcggtttctcaactcaaagtcagatgacaaggaagagaactccgactcgagtcacaaagagaatcagaacggagttgcgccccacaggagcggccaaccgtcaacccctccgtctcccaacggtgcatcgtcagctaatcagggcaggcagtcgtgaatgatggatgattcaaaactcacagctgaagagatttcagcccctgagctagatatggcagcagttttgtacagaaaacgctagcaacatggtgtcggtcggtcggtcggttgttgtaggacatgttccatagaaaaagcatagacgagtctacaggttttggagccttggtttggtcctctgtgtattcacctttctgtacaatcttagtagcgttgtgtaccttcccctggaaggaaggatagcttcagttagcgcttcagaaagtcaagtgtgtagcatattggcttattgtttgctttgcttggacaatggagatttgggagtggagttcataaccctgctgaataaatactcttagctggctatgtgtatgttggacgacaatatgatccctaatgtagtacacgtgaccacctcaaactgaatctggctttgtttaaatgacaccctcacaattggtcacaggttcagag

SEQ ID NO: 8800 - DNA, 1676 bp, Zea Mays
aagctgccaaacttccaccaacggtcgatcctgtgaaacactaagacacccgttgccactggaaaggagagagcaaagtgatttgctgtctcctggcgatcgttgctcgtgaggcctagtgatggcagatgctagctcaaggactgacacctcaattgttttagacgacaacgacaagaatcatagggatctcactacgcattggcacctctgaaggtcttcgttggatatgaccaaactatttcaaccaattttgaacaagcttttcttcaattagtgctacccctagcctatcagatggagaatggaagtggtgcggttgtaccttctaattcttcagataggtccgacaggtctgataaacctttggaccaaaagacaatgcgacggcttgcccaaaatcgtgaggcagcaagaaaaagtcggctgaggaaaaaggcatatgtgcagcagctggagagcagtaagctgaaacttgcacaactggaacaggaactccagaaagctcgccagcagggaatcttcatttctagctctggagaccaaacccatgccatgagtggaaatggagctttgacttttgacatagaatatgctagatggctagaggaccaaaataagcagataaatgagttgaggactgcagtgaatgctcatgcatgtggaagacacctgctgaaaggtgcttcctatggcttgggggttttcgtccatctgagcttttaaagctcctagcgaatcacctcgagcctctaactgagcagcaaatgctgggtttgaccaacctccagcaatcttcccaacaagcagaggatgcgttgtcacagggcatggaagcactgcagcaatctttggcagagactttggctggatctctcggtccagcaggttcttcaggaaatgtggcaaactacatgggtcagatggccatggccatgggcaaactcgggacgctagagaattttcttcgccaagccgacaacctgcgacagcagacgttgcatcaaatgcaacgtatcctaacgatccgacaggcttctcgtgctcttcttgcaatccacgactatttttcacgattgcgcgctttaagttctctgtggcttgctaggccacgtgaataacgaagggccgtcagtattttgagttccctctgccttacggtgctgctgcgtcgttcgcagcgatgcatcacagatctttggtggtactgtttttgttgtacaattacttttggccgctgcttggtccaaattgtactcaggtgggtgtacaagtaggtcaatataatcctgtaagttatggtgatttatgggtgtgttagcaatgcaataataattagagagggcaggatcagggtttctgttgtttgtactggttagagatttagtcctaatgtaacttcctgggacatggggggcggaatgggaagagagtaacaagaatcttcctttggttactgtagtatatgttggtattgttgcatcccattttctcattttgctgttaggagaatgattattctgtccatttgtgtactttttgattaatgttgtttgtagccccaacatgattatggatatgactgctagttcattcccattcataccactgcagtagctggccttattattaatatcatcatccatacaagagcagtggttgaagttgaaggcggc

SEQ ID NO: 8801 - DNA, 1686 bp, Zea Mays
gggaatggaagtcaactcacatgcgaattcggaggtcatatgattgcaatgaatcctgacatggtactactgtcttggaaacaacttccaccaacggtcgatcctgtgaaacactaagacacccgttgccactggaaaggagagagcaaagtgatttgctgtctcctggcgatcgttgctcgtgaggcctagtgatggcagatgctagctcaaggactgacacctcaattgttttagacgacaacgacaagaatcatagggatctcactacgcattggcacctctgaaggtcttcgttggatatgaccaaactatttcaaccaattttgaacaagcttttcttcaattagtgctacccctagcctatcagatggagaatggaagtggtgcggttgtaccttctaattcttcagataggtccgacaggtctgataaacctttggaccaaaagacaatgcgacggcttgcccaaaatcgtgaggcagcaagaaaaagtcggctgaggaaaaaggcatatgtgcagcagctggagagcagtaagctgaaacttgcacaactggaacaggaactccagaaagctcgccagcagggaatcttcatttctagctctggagaccaaacccatgccatgagtggaaatggagctttgacttttgacatagaatatgctagatggctagaggaccaaaataagcagataaatgagttgaggactgcagtgaatgctcatgcatgtggaagacacctgctgaaaggtgcttcctatggcttgggggttttcgtccatctgagcttttaaagcaatcttcccaacaagcagaggatgcgttgtcacagggcatggaagcactgcagcaatctttggcagagactttggctggatctctcggtccagcaggttcttcaggaaatgtggcaaactacatgggtcagatggccatggccatgggcaaactcgggacgctagagaattttcttcgccaagccgacaacctgcgacagcagacgttgcatcaaatgcaacgtatcctaacgatccgacaggcttctcgtgctcttcttgcaatccacgactatttttcacgattgcgcgctttaagttctctgtggcttgctaggccacgtgaataacgaagggccgtcagtattttgagttccctctgccttacggtgctgctgcgtcgttcgcagcgatgcatcacagatctttggtggtactgtttttgttgtacaattacttttggccgctgcttggtccaaattgtactcaggtgggtgtacaagtaggtcaatataatcctgtaagttatggtgatttatgggtgtgttagcaatgcaataataattagagagggcaggatcagggtttctgttgtttgtactggttagagatttagtcctaatgtaacttcctgggacatggggggcggaatgggaagagagtaacaagaatcttcctttggttactgtagtatatgttggtattgttgcatcccattttctcattttgctgttaggagaatgattattctgtccatttgtgtactttttgattaatgttgtttgtagccccaacatgattatggatatgactgctagttcattcccattcataccactgcagtagctggccttattattaatatcatcatccatacaagagcagtggttgaagttgaaggcggc

SEQ ID NO: 8802 - DNA, 984 bp, Zea Mays
atgccgaatgcagcagcgcgtgtgtgtgtgtgtggggggggggggggggggggggggggcagacgagacgaggatggtgggtggccgcactggaaggaaagcgaaagcgaagaaacattcctgcacgagcacactacggacagtgcagcagccagcaggcagcggccccctttgcctttacagccagagcccggaggggcgctgctgcagccgacccatgacgcccgagtgctcaacgcccccaacgacctggattcgcttttccccgagcctcagcagcagcaacgcgtcgcgcgtgcatcacaacgagattcagagcccgagcccgagccccagccccagaccaacgacgagaaaggacaaactgcggcggacctacccgaagtcggaggcagggcaaaaggcccgatcccccctccccgccggttgccgcgctcgtgccacggtgcggtagccccgtcgacgccggcggacagcgtgcactatgggttgctcctcctccgtgccagttggtattgctgggagactcaggtgttgggaaaagttgcattgttcttcgttttgttcgtggtcagtttgatcctacttccaaggtaactgttggcgcatcttttttatcacaaacattggcattggaggattcaacaatagtgaagtttgaaatttgggatactgctgggcaagagaggtatgctgccttggcgccactttactacagaggagctgctgctgcaattgttgtctatgatataacaagtccggaatcatttagcaaagcacagtattgggtaaaggaacttcagaagcatggtagtcctggtattgtaatggttttggttggtaataaggctgatctacatgataatcgaagtgtatcctcgcaggatgcgcaggactacgcagagaagaacaatatgtttttcattgagacgtcggccaagacagctgataatataaaccaactgtttgagttcgcactcttta

SEQ ID NO: 8803 - DNA, 3532 bp, Zea Mays
gtaactccaaaacctccctgccttctctccttccatcaccgcaactccaaagcctcttatcgtcttcttccatcgccgaacgacgactgggcccgctgtcgctgccgccgccgccctacttcgccaccttcgccggcgacgggcaccaccagtgtggactgtaatgtttgatgatgatgatgatggagtggacccacaaattgaggatgtcaacagatactactttgaggatggtgaagagaaaccagtttgtttcagtatcttgcctttccagtttggaggtggtagcttggaagataaggcttgacagtgagcatcccaacatctatgtgctttctattgagcacaagtggataaagctgttgaaaccacgaaaatgctatggagacattgttcgatcaacattgattacggtgcaaatgctccacttttttgggagaggggagcaaagaagttcgaatcacctttgggatcaccttgatgaagtttttggtaaatacaatcctaaacccgtggaggatgacttgatgaagcaccataccctaatcaagttgtttgtagagaaagatcaaaccttgatgaagtcaaagattcttcaaaggctcattgagaatggctttaagagaactaaaaaggccttaggtatggaagcacaatccattgttagtgacgggtggcgtgctagaaaaaatgatgataacaattatggtaacaaagatgacagtggtgatgattgtgatggtgatggtagcagtgatgatggtgatggcagcagtgatgatgatgttaccgatcaaatatgtgcgctatgtgatgatggaggacatttgcttagctgtgacggtccatgcaagaggtctttccaccccacaaagaaagatggcagagaatctaaatgtgaaagtcttcattacacttcagcagaagtaaagagaattggtacttatctatgtgcaaactgcaaaaataagcaacaccaatgttttagatgtggagagcttgaaccatcccatgggccaaatgctaaggtctttcaatgcaatcaagcatcttgtggatatttttaccaccctaagtgcattgcacaattattggatcctaatgccactgatggtgagttggaaagaaggattatgtcgggaatgtcatttccgtgccccatacattggtgtttcaaatgtggccacatggagaacaaagctcaaagagcacttcagcttgcagtgtgtagacgctgtccaagagcatatcacagggaatgccttccaagggacttatcctttggaacaaaggacaaggatggtaaccaacgcgcttggaagctttccgacacaattttcatttactgcctagatcatgaaatagacaaggatactggcacaactagtaggaaccatataaaatttccagctacacctgaatacaccaaaacaaaagggcttggtaacagcaaaggaaggatgactggcaaaaggagaaagaacaaaaggagaaagaacactgaccaatcaacaaaacctacagatttgccaaacaggttgtgtggagcagaaagtgagcaagctgacaatgtaggtgcaaaaagcacattgccccagattgttgtagagcctcactgtgcagcaaagcacttgaagggtgatccacaaattgccaaacagggtgttgctgctcgtcaaaatggtgcagaaactatgaaagggcatgaaaatcaatttggcatttcattttgtgttgcaagtactgaaacagagaagagggtaacatgtttggcacaaaggggaacatgtttagggacacaatatgatgggccatcaaccaagggcatgtatgattgttctgttcaggacacccctatggacgacgatgttgagttggataatgtggcctgcataatcgcggtggataaatatgtcaatgggagggggaaaacacaagaggactacactagaaaagaagctgctcagcgcaaagactcgagtgaaaatcaagggcagaatgatgctctagagctagacaacctccggatggagatgcaagctgacgaacgtccgttagaaccaggaaacaagagggacaggaagtggcagaaaaatgtatatggactcggatcagcttcgggacagaaggaaaccttgtccaggagagaaaatccacggtcagatagagggatggtccacagtaacgacagcaaaacaatttattacaggaagggtgggacggaagtcgataatgttgatgaccaccctttagaaaagcaagaccaccaggatacatcaagtgacggatctaaaaagagaagccgaccagtggacaacgcatctggtggcaacagaccatacttggatgagaacaagaagcgtaatctcagagaagatggaagatatgctcattatgaagactggagaagtgaaaggaatacagcagcagacacgtctggatataaggcccaatcagaagagaagcctgtatggacaaacactcgaacaggatcaagggagcattcactggacaggcaaaggatagagtgcggtgacagctatcgtggaacctataacaatagacaaagacatgaatggctgcacccgcacgctagtggtaattcctcgagaattggttgggatgacaggaggcagtggagttcatctcggtcaccatttccttcggctgaatttggtggtgaccgttcctgttctcgtgcccatccgagaggttctaaatacagaaccggcgggaggcatgatcacccccagtacctgggactgggaacacctcaacatggtacaagtagaccgcaccacacaatgggctgggacagggacaccttccatgatcaccagcatggcagaagaccgccgcaccacacaatgggctgggacagggcccccttccgtgatcaccagcatggcgaatacgacgactccaggtatggtgaatatgatgcaactgacaatggtcctgacagcgcgcatcgaccctacacggctgctggcgtggctggacgttcagcaccgagttatcagcttgctggtggttatggagagggatcaagggcttggcggccagttacggacaagtacgccccatggcccttgccttgaccgcacaaactaatattagccaaggagccagagtgagctacaagaacaccgtttgctattgtcggaaatgctttcttcgaggactgtctcagtacggggaattgatgggtcggtgttgaaacccaaatgatatctgccttccagttgcttgctttgcctatcgtaatcactgcatgttatttcacataagcagctggattctcaagttatgtgggcggtgcatttgagttatactagatgacagcctgtgcatattgttactgaagtaaaatatcttttttattaggttccccttatctcgctgtgttgttggtcaatggttatggactatctagtttgtcaaccccattttttgaagaaatttttattttttaaagaaaaatcagttcattttaaaaaaatgagaatctctgagaaagttgataaacaag

SEQ ID NO: 8804 - DNA, 3010 bp, Zea Mays
tctttttttttttttttgcaaagcacctctcttgttccttcgtcctcgtgtctcgctcctcgcccattccgcgctctaaacaataggcctgccatcgctcgcggaagtctccattcctgcgcgcgaatctccctcccctcccaagcgatccccattgtcgaggcccgattcggatcacctaggttttctcttcgcgaccgggcaggcggtggcgaggatgcggcgctaggctcggctctgtggtgatgaacatcgtgcggggagtcgccgaccttctccgcaaggcgccgccacctccccccgcaccggacgctggtgcggcgcctaccgcctccttctccgccggtgacttcgacgacgcgcccaccccgcgcgtcgtcttcagtggtagtctggaggagggagctctgaatgcactctggaagaattacgagaatgcgcttgataaggtcgagaaggaaaaatctcttcaaatttttgtcttgcaatttgtagagacattcagagattgggatccaaacccaattgagcaattggttgatcaagaattgggaaacaatgaaacagttgtaggatgctcttgcgggcatccttctgaggtcattcttattttgattcaggagatttctctaattacatcaacttttactgaaagtggcaacagtcctgtatctcctacaaatcattattcagggcaacaaaataacctgggtttaagctcacaaatattgcaagttctggagtgtttggaaattctgactcgctccttgcataactgtagagtattcagctactatggtggtgtacagaagattacttctctactaaaagctgctgttgctcagctcaaaaacttgaactgtttgctggctgcagaagaccaatctgcagatgaagcagtgaaaaattctagggtgatgctaaatatacttgtatgcataatcaccataatttcaaacttcatgaagttggacataactgttggaaggattccccatattaccgataccacaaagcataccccatcatgcaaccatttggctgcagtcacgtctagctctcctgatagaaccatttctgatacacttcgacattggcagcagaaagcaactgttcttgtgatggaagccagatgtgtcaactggttagtagaactattacacaccgttcaaaggttgaatttgaaagagcaatgcattgacctctcactccattttattactttgtgcattctgcgatcgactgtttctggtactcgtgctcagaatcatctcagaagcattggtgggctggaaattctattggatggacttggacttccttctagtaaattttcagttccgaggcaatcttctatctcaaaaaatgaaagggatgaaatacttctgctccagatacagtatttgcaaactctgagtgaggcagtatttggcaacgtcaacaatttgcaaattttatttgaaaatggacgggtacacaaatttgcaaactgcatttgttggcctgcatttatgattcagatgttccattggcaaaatgacagtaccaaagcttcacttacactagattctgtctctggtccaacttattctcttgatagaactgaatggattgactactctataaaattgagcaatgccttttgttcttttgttcttccttcggaggatatcggatactgttccgatgaaatagctgtcagccaaattgtattatccatcccactggcatacctggagcaatctgtgagatggatcataaggattcttatgactgtctttctatgtatcagagcgtgtaccaaggaaactgagctgccacaccacatcaagatttttgcaaagaccctacaatattatgtgattcgtatgttcaaaagagttcttatttcaacaccagctctactcccagcttttcgagaggaaggtgtatgggacctgttattctcagggaattttttctactttggttcatctatagaagacacttgttttcatactgttacggatattcaaaatggtaatgttagcagtaaccgaatatctattcattctgaaagcttgtatcgtaccgatgttaaaattcttcaagtggaagctatttccttcttggagtttgctgcaacactccatgaaaacacatataacatgccagaatgctcagcactgctagatgcacttgagcattgcatttctgatcctttgctagtcagcactcttctcaaaagcttccgtgttattctacaactcgcgacagaacatactctagcttcatttgaatcattggatgtaattacaagagtccttaaggctgcttgccgtcaggcacaagagctacggaacttcagcaattttctttgttctaatgtcagcatcagtcaagatagttctcaatttaaaaatattgaaggcagaactgaggacactcttatatgtacagagttagctttgagcctctttatggaatatgtcactatatcgatagatggaaggattctcgttttacacaatgctgattgtattgattgtttatttgacttgttccatgaacagaacattcgagaacatgtgctggagcaagttcttgccttatttagggtatatctatgcttgtcttttgttctaaaaaagtttatgtttaccatatgctaaaatatggttccctgtaaccagttgccttcatcgtcagcagaagatcatacagcaaagttgcagttatgttcaaagtatttagagaacttagcacgggcaaatgaaaaagaaaaggtcaacacagagttattaattgatcttctggtcaacatgagagagatcataatgatggatcacatgtactatcaaaatctattccgcgacgaagggtgctttctgcatattatttcattattgaatggaaatttcaataaggtgactgatgagcggcttgtccttaacgtccttcagaccttaactttattacttgaagggaatgatgcatctaagggtgcctttagattactagttggtgcagg

SEQ ID NO: 8805 - DNA, 3148 bp, Zea Mays
tctttttttttttttttgcaaagcacctctcttgttccttcgtcctcgtgtctcgctcctcgcccattccgcgctctaaacaataggcctgccatcgctcgcggaagtctccattcctgcgcgcgaatctccctcccctcccaagcgatccccattgtcgaggcccgattcggatcacctaggttttctcttcgcgaccgggcaggcggtggcgaggatgcggcgctaggctcggctctgtggtgatgaacatcgtgcggggagtcgccgaccttctccgcaaggcgccgccacctccccccgcaccggacgctggtgcggcgcctaccgcctccttctccgccggtgacttcgacgacgcgcccaccccgcgcgtcgtcttcagtggtagtctggaggagggagctctgaatgcactctggaagaattacgagaatgcgcttgataaggtcgagaaggaaaaatctcttcaaatttttgtcttgcaatttgtagagacattcagagattgggatccaaacccaattgagcaattggttgatcaagaattgggaaacaatgaaacagttgtaggatgctcttgcgggcatccttctgaggtcattcttattttgattcaggagatttctctaattacatcaacttttactgaaagtggcaacagtcctgtatctcctacaaatcattattcagggcaacaaaataacctgggtttaagctcacaaatattgcaagttctggagtgtttggaaattctgactcgctccttgcataactgtagagtattcagctactatggtggtgtacagaagattacttctctactaaaagctgctgttgctcagctcaaaaacttgaactgtttgctggctgcagaagaccaatctgcagatgaagcagtgaaaaattctagggtgatgctaaatatacttgtatgcataatcaccataatttcaaacttcatgaagttggacataactgttggaaggattccccatattaccgataccacaaagcataccccatcatgcaaccatttggctgcagtcacgtctagctctcctgatagaaccatttctgatacacttcgacattggcagcagaaagcaactgttcttgtgatggaagccagatgtgtcaactggttaatgttccattggcaaaatgacagtaccaaagcttcacttacactagattctgtctctggtccaacttattctcttgatagaactgaatggattgactactctataaaattgagcaatgccttttgttcttttgttcttccttcggaggatatcggatactgttccgatgaaatagctgtcagccaaattgtattatccatcccactggcatacctggagcaatctgtgagatggatcataaggattcttatgactgtctttctatgtatcagagcgtgtaccaaggaaactgagctgccacaccacatcaagatttttgcaaagaccctacaatattatgtgattcgtatgttcaaaagagttcttatttcaacaccagctctactcccagcttttcgagaggaaggtgtatgggacctgttattctcagggaattttttctactttggttcatctatagaagacacttgttttcatactgttacggatattcaaaatggtaatgttagcagtaaccgaatatctattcattctgaaagcttgtatcgtaccgatgttaaaattcttcaagtggaagctatttccttcttggagtttgctgcaacactccatgaaaacacatataacatgccagaatgctcagcactgctagatgcacttgagcattgcatttctgatcctttgctagtcagcactcttctcaaaagcttccgtgttattctacaactcgcgacagaacatactctagcttcatttgaatcattggatgtaattacaagagtccttaaggctgcttgccgtcaggcacaagagctacggaacttcagcaattttctttgttctaatgtcagcatcagtcaagatagttctcaatttaaaaatattgaaggcagaactgaggacactcttatatgtacagagttagctttgagcctctttatggaatatgtcactatatcgatagatggaaggattctcgttttacacaatgctgattgtattgattgtttatttgacttgttccatgaacagaacattcgagaacatgtgctggagcaagttcttgccttatttaggttgccttcatcgtcagcagaagatcatacagcaaagttgcagttatgttcaaagtatttagagaacttagcacgggcaaatgaaaaagaaaaggtcaacacagagttattaattgatcttctggtcaacatgagagagatcataatgatggatcacatgtactatcaaaatctattccgcgacgaagggtgctttctgcatattatttcattattgaatggaaatttcaataaggtgactgatgagcggcttgtccttaacgtccttcagaccttaactttattacttgaagggaatgatgcatctaagaatgaagatgctgttgtattacttctaaatattttgcagaaggaaagggatgatacagttattgcaatcacagagttaatacaaatacttggtgcacacagtatatgtggcaaggacatcaggaaaatctttgcccttttgcgctgtgagaagattggtgccaaacacaagcacacatctttgcttctgacaagtctcagtcacatgctgaaggaaaaggggccagaagctttctttgagttcagtggccatgattctggtatagatataaaatcaccctttctatggccttacaatagagggatatctttttcttgctggttaagggttgaaaacttcccagacagtggtatgatgggccttttctccttttttaaagaagacgggaaggggtgctcagctgttcttaacagaagtgctttagtatatgagtctatctatcaaaaacatcagtgtgttctgttaccactcaagctcccaccaaagcaatggagattcctttctattactcatacaattgggagggctttctccggaggaagccagttgaggtgttatgtagatggggagctagtatcatccgagaagtgtgggtgagcaaattcatctatatt

SEQ ID NO: 8806 - DNA, 2991 bp, Zea Mays
cacggactgcagccagtccggcatcgccttcttcgtctccggatgtggcaaccgcctgctgctgctggctgctgccgtctccagatctcccaccgcctcgtcgtccttaccctgtccgttcccgcacgccactagcaaaagccacacccaacaaaaggtaaaccaccgcgtctccgcccgccgccgcccgcagatccatcccctcccggcctccctagcctttcccctcgagcacgtcagcgccctcgccctgctctgtcggccggccaagctcctcaccggcgccatgaacccgtatgatctccgcttcgctgacccctcatcctaccacgacaggcgcagcgacttgaccgtggctcctacgttcgctccgccggctcccgtggctgcggcgaacctgaacccttacgccgccgcctacccgctgcctgtgcccgttcccgtgcccgcggcccccgcgggcggcgactaccagcgctacgggcagggaggcagaggccgtggtggcggtggcagaggcggtggaggagggtacggaggtggcggcagaggaggaggtcgcgggagggacgggcttgactcgctcgccctccctaagccggactttcggagcctgataccgttcgagaaaaacttctacgtggagtgtccctccgtccaggcaatgtcggaggcggatgtggcgcagtaccgccgcctccgggatatcaccatcgagggccgggatgtgcccaagccggttagatacttccaggaagccaacttcccagattactgcatgcaagctattgccaaatctggatttgtggagccaacacctattcaatctcaaggttggcctatggctttgaagggtagggacctgattggtatcgctcaaacaggctcagggaaaacattatcttatctgttacctgggttggttcatgttggtgcccagcctcggctagaacaaggcgatggcccaattgtattaattctcgctcccacgagagaactggctgttcaaatacaggaagaatctacaaaatttggatcatattcaagaactagaagcacatgtgtctatggtggtgcacctaagggtccacaaatacgggaccttagaagaggagttgaaattgtcattgcaactcctggccggttgattgatatgctggaagctggtcacacaaacctacgtagagtgacataccttgtgttggatgaggcggaccggatgctagatatggggtttgagccccaaattcggaaaatagtagcacagatccgcccagacaggcaaaccttgtactggagtgccacatggcctagagaagttgaagccttagcaagacagtttctacaaaatccttacaaggtaatcataggctcacctgaacttaaagctaatcattccatacaacaaattgttgaagttatttcagatcatgagaagtatccaagactcagtaagctcttgtctgatctaatggatgggagccgtatcttgatattcttccaaacaaaaaaggattgcgataagatcacccggcagcttagaatggatgggtggccagcattatctatacatggtgataaagctcaagctgaacgggactatgttcttgcagagtttaagagcggcaagagccccataatggctgccacagatgtggcagcacgtggtcttggtatgatgatttatttgaatattaggattaggtagtagttccaagtgctcaagggtgataagtcggagggttgttgagctgcgattggttgagtgaactgaacttgtggattggtggtgtataccaaggtgccatcatgtcaaagcaccttacacattacagcctacgttggactggcatgtcctacagaattttgtttgggttatggatattgatgctgttacattattggataagtggttacccaggcatgccagttgcagtcttccaacattttttgataaggctgagaggttaatcaccatcaattccacatccagcagtgattgatgcctggttcagtttttcagctccttcgacttgtgttttagaattcaaaagtgcagcactgtggactttttggtgcttgtctagaccatgtaccttctatggggatcgacaatgttgatgttccagcgtggtccagcatggtattcaggacaacacatcaattttgattaagtactgataatatttgttgattttgcagatgtgaaggacataaagtgtgtgataaattatgattttccaacaactcttgaagattatattcacaggataggtcgaactggccgtgctggtgctagcggaactgcatttacttttttcacacacgcaaatgcaaagttctcaaggaatctagtgaagattctgcgagaagctggccaagttgtgaatcctgccttagaatccatgtccaggtcttcgaactcaacgggaggaggcaattttcggtcgagaggcagaggtgggtttggtaaccggggccatatgtctggatcaaatacctttcctttaggaggaagaaggccatattgatgtgtgcaaaagaactgtgggagtatgggactatttgtatactactcggcattaagtgcattctttgggaaatttctgagaaatttcccctactaccaggattgataacaccatcgattttcgctacagtacctggagcttcttatatgaaagaacaacacatcaactatctagcaacagcatatgcattccattcagatatttcttttggaaggaccctgtcttgttttagtggagtccctgtgatcgtttaaagtcgtctgtatacttgtactgaacttcttgtggtgttactgttaggatttatggttgctctctattggtgtgcggtgttactgaacaaatttagttaagaagttaggcatttccatatttaatctgattctgaaataaactagcaaatttatgatgtacactttataatagtagctaatatatatatgcaaactctatatgcaaa

SEQ ID NO: 8807 - DNA, 3059 bp, Zea Mays
cacggactgcagccagtccggcatcgccttcttcgtctccggatgtggcaaccgcctgctgctgctggctgctgccgtctccagatctcccaccgcctcgtcgtccttaccctgtccgttcccgcacgccactagcaaaagccacacccaacaaaaggtaaaccaccgcgtctccgcccgccgccgcccgcagatccatcccctcccggcctccctagcctttcccctcgagcacgtcagcgccctcgccctgctctgtcggccggccaagctcctcaccggcgccatgaacccgtatgatctccgcttcgctgacccctcatcctaccacgacaggcgcagcgacttgaccgtggctcctacgttcgctccgccggctcccgtggctgcggcgaacctgaacccttacgccgccgcctacccgctgcctgtgcccgttcccgtgcccgcggcccccgcgggcggcgactaccagcgctacgggcagggaggcagaggccgtggtggcggtggcagaggcggtggaggagggtacggaggtggcggcagaggaggaggtcgcgggagggacgggcttgactcgctcgccctccctaagccggactttcggagcctgataccgttcgagaaaaacttctacgtggagtgtccctccgtccaggcaatgtcggaggcggatgtggcgcagtaccgccgcctccgggatatcaccatcgagggccgggatgtgcccaagccggttagatacttccaggaagccaacttcccagattactgcatgcaagctattgccaaatctggatttgtggagccaacacctattcaatctcaaggttggcctatggctttgaagggtagggacctgattggtatcgctcaaacaggctcagggaaaacattatcttatctgttacctgggttggttcatgttggtgcccagcctcggctagaacaaggcgatggcccaattgtattaattctcgctcccacgagagaactggctgttcaaatacaggaagaatctacaaaatttggatcatattcaagaactagaagcacatgtgtctatggtggtgcacctaagggtccacaaatacgggaccttagaagaggagttgaaattgtcattgcaactcctggccggttgattgatatgctggaagctggtcacacaaacctacgtagagtgacataccttgtgttggatgaggcggaccggatgctagatatggggtttgagccccaaattcggaaaatagtagcacagatccgcccagacaggcaaaccttgtactggagtgccacatggcctagagaagttgaagccttagcaagacagtttctacaaaatccttacaaggtaatcataggctcacctgaacttaaagctaatcattccatacaacaaattgttgaagttatttcagatcatgagaagtatccaagactcagtaagctcttgtctgatctaatggatgggagccgtatcttgatattcttccaaacaaaaaaggattgcgataagatcacccggcagcttagaatggatgggtggccagcattatctatacatggtgataaagctcaagctgaacgggactatgttcttgcagagtttaagagcggcaagagccccataatggctgccacagatgtggcagcacgtggtcttggtatgatgatttatttgaatattaggattaggtagtagttccaagtgctcaagggtgataagtcggagggttgttgagctgcgattggttgagtgaactgaacttgtggattggtggtgtataccaaggtgccatcatgtcaaaggtagataatttccccccgtggtttacctcatttgagcgtgagcattggcagtgttacacaggcagttcaactttgagctatcatgcctacgttggactggcatgtcctacagaattttgtttgggttatggatattgatgctgttacattattggataagtggttacccaggcatgccagttgcagtcttccaacattttttgataaggctgagaggttaatcaccatcaattccacatccagcagtgattgatgcctggttcagtttttcagctccttcgacttgtgttttagaattcaaaagtgcagcactgtggactttttggtgcttgtctagaccatgtaccttctatggggatcgacaatgttgatgttccagcgtggtccagcatggtattcaggacaacacatcaattttgattaagtactgataatatttgttgattttgcagatgtgaaggacataaagtgtgtgataaattatgattttccaacaactcttgaagattatattcacaggataggtcgaactggccgtgctggtgctagcggaactgcatttacttttttcacacacgcaaatgcaaagttctcaaggaatctagtgaagattctgcgagaagctggccaagttgtgaatcctgccttagaatccatgtccaggtcttcgaactcaacgggaggaggcaattttcggtcgagaggcagaggtgggtttggtaaccggggccatatgtctggatcaaatacctttcctttaggaggaagaaggccatattgatgtgtgcaaaagaactgtgggagtatgggactatttgtatactactcggcattaagtgcattctttgggaaatttctgagaaatttcccctactaccaggattgataacaccatcgattttcgctacagtacctggagcttcttatatgaaagaacaacacatcaactatctagcaacagcatatgcattccattcagatatttcttttggaaggaccctgtcttgttttagtggagtccctgtgatcgtttaaagtcgtctgtatacttgtactgaacttcttgtggtgttactgttaggatttatggttgctctctattggtgtgcggtgttactgaacaaatttagttaagaagttaggcatttccatatttaatctgattctgaaataaactagcaaatttatgatgtacactttataatagtagctaatatatatatgcaaactctatatgcaaa

SEQ ID NO: 8808 - DNA, 3704 bp, Zea Mays
cacggactgcagccagtccggcatcgccttcttcgtctccggatgtggcaaccgcctgctgctgctggctgctgccgtctccagatctcccaccgcctcgtcgtccttaccctgtccgttcccgcacgccactagcaaaagccacacccaacaaaaggtaaaccaccgcgtctccgcccgccgccgcccgcagatccatcccctcccggcctccctagcctttcccctcgagcacgtcagcgccctcgccctgctctgtcggccggccaagctcctcaccggcgccatgaacccgtatgatctccgcttcgctgacccctcatcctaccacgacaggcgcagcgacttgaccgtggctcctacgttcgctccgccggctcccgtggctgcggcgaacctgaacccttacgccgccgcctacccgctgcctgtgcccgttcccgtgcccgcggcccccgcgggcggcgactaccagcgctacgggcagggaggcagaggccgtggtggcggtggcagaggcggtggaggagggtacggaggtggcggcagaggaggaggtcgcgggagggacgggcttgactcgctcgccctccctaagccggactttcggagcctgataccgttcgagaaaaacttctacgtggagtgtccctccgtccaggcaatgtcggaggcggatgtggcgcagtaccgccgcctccgggatatcaccatcgagggccgggatgtgcccaagccggttagatacttccaggaagccaacttcccagattactgcatgcaagctattgccaaatctggatttgtggagccaacacctattcaatctcaaggttggcctatggctttgaagggtagggacctgattggtatcgctcaaacaggctcagggaaaacattatcttatctgttacctgggttggttcatgttggtgcccagcctcggctagaacaaggcgatggcccaattgtattaattctcgctcccacgagagaactggctgttcaaatacaggaagaatctacaaaatttggatcatattcaagaactagaagcacatgtgtctatggtggtgcacctaagggtccacaaatacgggaccttagaagaggagttgaaattgtcattgcaactcctggccggttgattgatatgctggaagctggtcacacaaacctacgtagagtgacataccttgtgttggatgaggcggaccggatgctagatatggggtttgagccccaaattcggaaaatagtagcacagatccgcccagacaggcaaaccttgtactggagtgccacatggcctagagaagttgaagccttagcaagacagtttctacaaaatccttacaagcttatattgtaatgcaggtaatcataggctcacctgaacttaaagctaatcattccatacaacaaattgttgaagttatttcagatcatgagaagtatccaagactcagtaagctcttgtctgatctaatggatgggagccgtatcttgatattcttccaaacaaaaaaggattgcgataagatcacccggcagcttagaatggatgggtggccagcattatctatacatggtgataaagctcaagctgaacgggactatgttcttgcagagtttaagagcggcaagagccccataatggctgccacagatgtggcagcacgtggtcttggtatgatgatttatttgaatattaggattaggtagtagttccaagtgctcaagggtgataagtcggagggttgttgagctgcgattggttgagtgaactgaacttgtggattggtggtgtataccaaggtgccatcatgtcaaaggtagataatttccccccgtggtttacctcatttgagcgtgagcattggcagtgttacacaggcagttcaactttgagctatcatggtaatgttccctttccgaataagccttttagggagcctacatttggataaaatggaaatcctcaaaaagtagcatgcaaccgaatatgcatttcacactatagttgatttcttagcttgatttgaattccttgatccctgcatatctgaccattttggaacatttaggtattgtgttgctgccctcttcattcattctttgtccttgtaattgaattcttttcaatccaatagtctgcttttcttgcaagtatttttggcttacctttctacattttctttgtaaatccatgtttaatttgtttagaattaattggagcaataattcttttcagagatgtattgcaaaattttaggcataaaacatttgtatacaaatgacaatatcaatttcaaatatatttgtttgcacaaatgcacattcttcatgagtagcatgtccatggatctcctttgctttcccctagttttacatgaacctttagaaagtcgttctgctttctcaatcaagctcctcatcatcggtatcactgccaagtgtgaactggtcaaaaaggatggttgtaatcagcattcttttcagttgattcacgatagtgacctctgatgcagcaccttacacattacagcctacgttggactggcatgtcctacagaattttgtttgggttatggatattgatgctgttacattattggataagtggttacccaggcatgccagttgcagtcttccaacattttttgataaggctgagaggttaatcaccatcaattccacatccagcagtgattgatgcctggttcagtttttcagctccttcgacttgtgttttagaattcaaaagtgcagcactgtggactttttggtgcttgtctagaccatgtaccttctatggggatcgacaatgttgatgttccagcgtggtccagcatggtattcaggacaacacatcaattttgattaagtactgataatatttgttgattttgcagatgtgaaggacataaagtgtgtgataaattatgattttccaacaactcttgaagattatattcacaggataggtcgaactggccgtgctggtgctagcggaactgcatttacttttttcacacacgcaaatgcaaagttctcaaggaatctagtgaagattctgcgagaagctggccaagttgtgaatcctgccttagaatccatgtccaggtcttcgaactcaacgggaggaggcaattttcggtcgagaggcagaggtgggtttggtaaccggggccatatgtctggatcaaatacctttcctttaggaggaagaaggccatattgatgtgtgcaaaagaactgtgggagtatgggactatttgtatactactcggcattaagtgcattctttgggaaatttctgagaaatttcccctactaccaggattgataacaccatcgattttcgctacagtacctggagcttcttatatgaaagaacaacacatcaactatctagcaacagcatatgcattccattcagatatttcttttggaaggaccctgtcttgttttagtggagtccctgtgatcgtttaaagtcgtctgtatacttgtactgaacttcttgtggtgttactgttaggatttatggttgctctctattggtgtgcggtgttactgaacaaatttagttaagaagttaggcatttccatatttaatctgattctgaaataaactagcaaatttatgatgtacactttataatagtagctaatatatatatgcaaactctatatgcaaa

SEQ ID NO: 8809 - DNA, 1856 bp, Zea Mays
aatttatctagaggaaaaagtcaaaacaaacagcgctacgccatcggtcccctgcccctccccgacgcttccggctttccgtgcgaccgtgcccttttcctcctctcgcagctcgcaggcgcaacagattccacccgttccttcgggtggccggacggaacgaggaaggaggcaggatggcctccgatggccacccgccggagccggggaagaaggaggatgtcgccaccacggccgccgggcctggagcaaacgatctggacgacccgcaattcatgtgctgcgtatgtctggatcttctgtacaaaccagttgttatatcatgtggtcatatgtcatgtttctggtgtgtccacaaagctatgcatattttccgggaatcgcattgtgctgtgtgtaggcagccctatatacacttcccgagtatttgtcagctcttgcatcatttgcttctaaagcttgaaactaatgattacaaaagaagggaaaaagaagtactagaggaagagaagcgcatgcaaacatactctccccaaatcattgagttcttaaactacaagactaacgttggaagctataaggagaacagaaatgaagacagtaaagctagacctccacaagaagttccattgaatgacagcgttccagatgagcatttgaagaaaattaaattggaggatgtttcatgccctctctgtatggagatgctgtatcaacctgctgttcttaattgtggtcatgtgtattgtgtatcctgtttgtcatccttgaatgaggaaacgctgaagtgccatgtttgtggaagtcttcaccctggagatttccctaatgtttgcctggaccttgatcatttccttgaagaatattttccagcagaatatgaattgagagggcagaaagttcaatttaagaaggatcagtgcaatcgtgaaacatcatcttcaggcagaaaaggaagcactagggcactgcatgctgaagacccgtcaaatattcacattggagtaggatgcgactcatgtggggtatatccgatacgtggtaagagatacaaatgccaggactgcactgagttaataggctttgacctttgcgaagcctgctacaactccagttcaaagctcccaggacgctttaaccagcggcacacccctaatcacagaatggaagttgacaattcagcactcgtgcataggatactgagacaccatggcatacccgaggaaggccctgagggactgatgatggaagtggttggtcctgatgcaatggtgcagatactcattgataatcaaggaatggaggagggcaatgacgagggcccaggagaggcggccattgaagaaccagttggttctcttggctcaatgtcgcgtctgtcgcatctattcatgtataatccagaaatggaggatggcaatgacgaggactcaggagaggaggcggccattgaagaaccagttggttctcttggcgcaatggcgcctctattcatgtatgatcaagaaatggaggacaacgaggaggatcaggcacactagatgcagattgcaccagctgcagcgaagcctttgttttgtgttgctggggcggctctacttatgtaatgtggaatggagggattgcgcaagcttaaaagtatggctggatcggccttgttttttaactggttctctagttactgccatctaatagccaacatttttcccgcttttgtaaatccgtgcagttgtttgtttcaaaggaaaatgcaataaggatatgcagaactatattccttattttaaactctactcctttcgtcccgtgaagcaagtcattttaggctatccgcaaccattacctctaaatttttt

SEQ ID NO: 8810 - DNA, 1705 bp, Zea Mays
ctcaacctccacgcctctgttctaaaggctgacattctggctctccaacacagttgtcctcagggagataattgtacaaacttttggcatctcacatcaatttactccatccatgatgaatctgagcatgaatggtggtgccaaaaaacttgatgggaaatctatgacaatgctgtggagaaacagctacaatggcatgcaagccaagtttgctgcaaggcagatgccagatgattggcaggaaacaagtacacttttggctacattagagaagattgagtcttggatattttctcgcattgttgagacaatatggtggcaggtgatggagcagtgtgtagcccgtttgaatgttgccatgtttaatgccatccttcgtgaatcatcaagtgagataccaacagactctatatctgacccaattgttgacccaaaagtcctaccaattccagttggtgatctaagctttgggtcaggcgcgcagctgaagaactctattggaaacgggtctagatggctgacagataatcttggcatagatcatgatgactttgaggacataggagatgttgaagacgaaagaagagttgcagctgaaacgaaatcgtttcaacttctcaatgagctaagtgatcatctattttttagtttttcataattttcctttcatggcctccttacatgtttgatttcctatgatccatgagctgccaatcatgataacgcggtttcactatgcaggagatgaacaaggatgcagtcacaactgatgctatcggcagtatcagaacttgatggtgcttgtagactgttcatggtgcttgtagggatgatgtatgtctatggcttactgagctccaaccaactatggcaggagcgttagctaggacagcagtcagtctaacaattgtggacaaagttcagtctaccatacactgaagcgcacccttgttgctaaaggtgtgaacaactttgctcagcagaatggaggatcattgtcactagcagcaagacctcgagcccagtttctttccttctttctttgggccgagagagcaaagaaggatgatgcactttccaacctgtgtagcacgttgggacaactcaagaaatggcagtggatatggacatagaaattgacaggcaaaacaaagcgctggttcctttcagcgacgacatcactgaactgaattttagactgaaaggcgtgaatcagtgtggacaccagttgctgggcaagtgatatggagccagaattcgggcagttcggagactatcgccttgattgcagaatttaagaacattgttgttttacatgtttttttgcagtgaatcaggccacacatgttgtattagtgagagaatgatgatttattttatattattatggatttcatagattattttagttttccctgaactgcaattgtttcaataacataggaggggactaccttcaatgacatttaggtgaatttttaaggtatgtccattattccattatagagcacaaagcctacttcttacaactcactgtatgttttataattgtatcaaaagcactgaacaaacatagttagctatcacgttcactgttgtctaaatagattgaaataatgtggtgaagccgtcatggactcttaagtagcttagccactgcaaaggatacaattaattataaaacaccaatgaatcaataaaaaaa

SEQ ID NO: 8811 - DNA, 1936 bp, Zea Mays
ctccaagagctcaacctccacgcctctgttctaaaggctgacattctggctctccaacacagttgtcctcagggagataattgtacaaacttttggcatctcacatcaatttactccatccatgatgaatctgagcatgaatggtggtgccaaaaaacttgatgggaaatctatgacaatgctgtggagaaacagctacaatggcatgcaagccaagtttgctgcaaggcagatgccagatgattggcaggaaacaagtacacttttggctacattagagaagattgagtcttggatattttctcgcattgttgagacaatatggtggcaggcactaactcctcacatgcaaaaacgagtagaaggatcatcaactccaaaggctggtagagtgctatgtcctactttgggtgatcagcagtagggcaccttttctgttaacctgtggaaggctgcgtttcacgacgcattcaacagaatgtgccccctcagtgctggcggacatgagtgtggctgtttaccaatattagcaaaactggtgatggagcagtgtgtagcccgtttgaatgttgccatgtttaatgccatccttcgtgaatcatcaagtgagataccaacagactctatatctgacccaattgttgacccaaaagtcctaccaattccagttggtgatctaagctttgggtcaggcgcgcagctgaagaactctattggaaacgggtctagatggctgacagataatcttggcatagatcatgatgactttgaggacataggagatgttgaagacgaaagaagagttgcagctgaaacgaaatcgtttcaacttctcaatgagctaagtgatcatctattttttagtttttcataattttcctttcatggcctccttacatgtttgatttcctatgatccatgagctgccaatcatgataacgcggtttcactatgcaggagatgaacaaggatgcagtcacaactgatgctatcggcagtatcagaacttgatggtgcttgtagactgttcatggtgcttgtagggatgatgtatgtctatggcttactgagctccaaccaactatggcaggagcgttagctaggacagcagtcagtctaacaattgtggacaaagttcagtctaccatacactgaagcgcacccttgttgctaaaggtgtgaacaactttgctcagcagaatggaggatcattgtcactagcagcaagacctcgagcccaggcagttaaccatcagtttctttccttctttctttgggccgagagagcaaagaaggatgatgcactttccaacctgtgtagcacgttgggacaactcaagaaatggcagtggatatggacatagaaattgacaggcaaaacaaagcgctggttcctttcagcgacgacatcactgaactgaattttagactgaaaggcgtgaatcagtgtggacaccagttgctgggcaagtgatatggagccagaattcgggcagttcggagactatcgccttgattgcagaatttaagaacattgttgttttacatgtttttttgcagtgaatcaggccacacatgttgtattagtgagagaatgatgatttattttatattattatggatttcatagattattttagttttccctgaactgcaattgtttcaataacataggaggggactaccttcaatgacatttaggtgaatttttaaggtatgtccattattccattatagagcacaaagcctacttcttacaactcactgtatgttttataattgtatcaaaagcactgaacaaacatagttagctatcacgttcactgttgtctaaatagattgaaataatgtggtgaagccgtcatggactcttaagtagcttagccactgcaaaggatacaattaattataaaacaccaatgaatcaataaaaaaa

SEQ ID NO: 8812 - DNA, 2010 bp, Zea Mays
cgcatccgcgccgcaacccgcagccgccctgcaggcaaccgcccgcatccgcggcagcgccgcggctgcttccatccatggcgccgcggcttccatcaatcgccagcgcgtcctccgtactcctgtcatccgaggaaagccttccatccatggcgccgttgctgcaattccccccgcgatccacgctacctccattgcccacacgatccgcgctccctccattgctaccgcgatgccccttcccaggaacccttccatccatggcgtcgttgctgcaggtgccccgcaatcaactccattgccgccacgatccccttccaccgacgacactcaccttccatcgacaaaactgatcttcctccattccaccgacggcactcacctctcagatcccgtgctcatcaccatcgtgcccctcgctcgccgcccccacctcaccaagagccttagccgtccctagagaagacacggaggtgcagtgccagtgctttcctcaagtgcacctcggattttcggtaccggccagattgggacgaattcaacattcatcggctccaccaaaacactgccactatgatgtgtatgcttgcgtcaggacaggagacccaaaagtacttcatagatgaatgtgacattttccacaagaacgagatacgaaatggccaaggactgctgacgatgatgacgacatggccaccatcgctgccctcaggctgacattctggctctccaacacagttgtcctcagggagataattgtacaaacttttggcatctcacatcaatttactccatccatgatgaatctgagcatgaatggtggtgccaaaaaacttgatgggaaatctatgacaatgctgtggagaaacagctacaatggcatgcaagccaagtttgctgcaaggcagatgccagatgattggcaggaaacaagtacacttttggctacattagagaagattgagtcttggatattttctcgcattgttgagacaatatggtggcaggcactaactcctcacatgcaaaaacgagtagaaggatcatcaactccaaaggctggtagagtgctatgtcctactttgggtgatcagcagtagggcaccttttctgttaacctgtggaaggctgcgtttcacgacgcattcaacagaatgtgccccctcagtgctggcggacatgagtgtggctgtttaccaatattagcaaaactggtgatggagcagtgtgtagcccgtttgaatgttgccatgtttaatgccatccttcgtgaatcatcaagtgagataccaacagactctatatctgacccaattgttgacccaaaagtcctaccaattccagttggtgatctaagctttgggtcaggcgcgcagctgaagaactctattggaaacgggtctagatggctgacagataatcttggcatagatcatgatgactttgaggacataggagatgttgaagacgaaagaagagttgcagctgaaacgaaatcgtttcaacttctcaatgagctaagtgatcatctattttttagtttttcataattttcctttcatggcctccttacatgtttgatttcctatgatccatgagctgccaatcatgataacgcggtttcactatgcaggagatgaacaaggatgcagtcacaactgatgctatcggcagtatcagaacttgatggtgcttgtagactgttcatggtgcttgtagggatgatgtatgtctatggcttactgagctccaaccaactatggcaggagcgttagctaggacagcagtcagtctaacaattgtggacaaagttcagtctaccatacactgaagcgcacccttgttgctaaagctgcaggtgtgaacaactttgctcagcagaatggaggatcattgtcactagcagcaagacctcgagcccaggcagcacgttgggacaactcaagaaatggcagtggatatggacatagaaattgacagtttgatggaggtattttatctcgcttctag

SEQ ID NO: 8813 - DNA, 2528 bp, Zea Mays
gaacgttctgccgcccgcatccgcgccgcaacccgcagccgccctgcaggcaaccgcccgcatccgcggcagcgccgcggctgcttccatccatggcgccgcggcttccatcaatcgccagcgcgtcctccgtactcctgtcatccgaggaaagccttccatccatggcgccgttgctgcaattccccccgcgatccacgctacctccattgcccacacgatccgcgctccctccattgctaccgcgatgccccttcccaggaacccttccatccatggcgtcgttgctgcaggtgccccgcaatcaactccattgccgccacgatccccttccaccgacgacactcaccttccatcgacaaaactgatcttcctccattccaccgacggcactcacctctcagatcccgtgctcatcaccatcgtgcccctcgctcgccgcccccacctcaccaagagccttagccgtccctagagaagacacggaggtgcagtgccagtgctttcctcaagtgcacctcggattttcggtaccggccagattgggacgaattcaacattcatcggctccaccaaaacactgccactatgatgtgtatgcttgcgtcaggacaggagacccaaaagtacttcatagatgaatgtgacattttccacaagaacgagatacgaaatggccaaggactgctgacgatgatgacgacatggccaccatcgctgccctcaggctgacattctggctctccaacacagttgtcctcagggagataattgtacaaacttttggcatctcacatcaatttactccatccatgatgaatctgagcatgaatggtggtgccaaaaaacttgatgggaaatctatgacaatgctgtggagaaacagctacaatggcatgcaagccaagtttgctgcaaggcagatgccagatgattggcaggaaacaagtacacttttggctacattagagaagattgagtcttggatattttctcgcattgttgagacaatatggtggcaggtaaatgtctgtcttaggcactaactcctcacatgcaaaaacgagtagaaggatcatcaactccaaaggctggtagagtgctatgtcctactttgggtgatcagcagtagggcaccttttctgttaacctgtggaaggctgcgtttcacgacgcattcaacagaatgtgccccctcagtgctggcggacatgagtgtggctgtttaccaatattagcaaaactggtgatggagcagtgtgtagcccgtttgaatgttgccatgtttaatgccatccttcgtgaatcatcaagtgagataccaacagactctatatctgacccaattgttgacccaaaagtcctaccaattccagttggtgatctaagctttgggtcaggcgcgcagctgaagaactctattggaaacgggtctagatggctgacagataatcttggcatagatcatgatgactttgaggacataggagatgttgaagacgaaagaagagttgcagctgaaacgaaatcgtttcaacttctcaatgagctaagagatgaacaaggatgcagtcacaactgatgctatcggcagtatcagaacttgatggtgcttgtagactgttcatggtgcttgtagggatgatgtatgtctatggcttactgagctccaaccaactatggcaggagcgttagctaggacagcagtcagtctaacaattgtggacaaagttcagtctaccatacactgaagcgcacccttgttgctaaaggtgtgaacaactttgctcagcagaatggaggatcattgtcactagcagcaagacctcgagcccagttaaccatcagtttctttccttctttctttgggccgagagagcaaagaaggatgatgcactttccaacctgtgtagcacgttgggacaactcaagaaatggcagtggatatggacatagaaattgacaggcaaaacaaagcgctggttcctttcagcgacgacatcactgaactgaattttagactgaaaggcgtgaatcagtgtggacaccagttgctgggcaagtgatatggagccagaattcgggcagttcggagactatcgccttgattgcagaatttaagaacattgttgttttacatgtttttttgcagtgaatcaggccacacatgttgtattagtgagagaatgatgatttattttatattattatggatttcatagattattttagttttccctgaactgcaattgtttcaataacataggaggggactaccttcaatgacatttaggtgaatttttaaggtatgtccattattccattatagagcacaaagcctacttcttacaactcactgtatgttttataattgtatcaaaagcactgaacaaacatagttagctatcacgttcactgttgtctaaatagattgaaataatgtggtgaagccgtcatggactcttaagtagcttagccactgcaaaggatacaattaattataaaacaccaatgaatcaataaaaaaa

SEQ ID NO: 8814 - DNA, 2546 bp, Zea Mays
cgcatccgcgccgcaacccgcagccgccctgcaggcaaccgcccgcatccgcggcagcgccgcggctgcttccatccatggcgccgcggcttccatcaatcgccagcgcgtcctccgtactcctgtcatccgaggaaagccttccatccatggcgccgttgctgcaattccccccgcgatccacgctacctccattgcccacacgatccgcgctccctccattgctaccgcgatgccccttcccaggaacccttccatccatggcgtcgttgctgcaggtgccccgcaatcaactccattgccgccacgatccccttccaccgacgacactcaccttccatcgacaaaactgatcttcctccattccaccgacggcactcacctctcagatcccgtgctcatcaccatcgtgcccctcgctcgccgcccccacctcaccaagagccttagccgtccctagagaagacacggaggtgcagtgccagtgctttcctcaagtgcacctcggattttcggtaccggccagattgggacgaattcaacattcatcggctccaccaaaacactgccactatgatgtgtatgcttgcgtcaggacaggagacccaaaagtacttcatagatgaatgtgacattttccacaagaacgagatacgaaatggccaaggactgctgacgatgatgacgacatggccaccatcgctgccctcagttgtcctcagggagataattgtacaaacttttggcatctcacatcaatttactccatccatgatgaatctgagcatgaatggtggtgccaaaaaacttgatgggaaatctatgacaatgctgtggagaaacagctacaatggcatgcaagccaagtttgctgcaaggcagatgccagatgattggcaggaaacaagtacacttttggctacattagagaagattgagtcttggatattttctcgcattgttgagacaatatggtggcaggcactaactcctcacatgcaaaaacgagtagaaggatcatcaactccaaaggctggtagagtgctatgtcctactttgggtgatcagcagtagggcaccttttctgttaacctgtggaaggctgcgtttcacgacgcattcaacagaatgtgccccctcagtgctggcggacatgagtgtggctgtttaccaatattagcaaaactggtgatggagcagtgtgtagcccgtttgaatgttgccatgtttaatgccatccttcgtgaatcatcaagtgagataccaacagactctatatctgacccaattgttgacccaaaagtcctaccaattccagttggtgatctaagctttgggtcaggcgcgcagctgaagaactctattggaaacgggtctagatggctgacagataatcttggcatagatcatgatgactttgaggacataggagatgttgaagacgaaagaagagttgcagctgaaacgaaatcgtttcaacttctcaatgagctaagtgatcatctattttttagtttttcataattttcctttcatggcctccttacatgtttgatttcctatgatccatgagctgccaatcatgataacgcggtttcactatgcaggagatgaacaaggatgcagtcacaactgatgctatcggcagtatcagaacttgatggtgcttgtagactgttcatggtgcttgtagggatgatgtatgtctatggcttactgagctccaaccaactatggcaggagcgttagctaggacagcagtcagtctaacaattgtggacaaagttcagtctaccatacactgaagcgcacccttgttgctaaaggtgtgaacaactttgctcagcagaatggaggatcattgtcactagcagcaagacctcgagcccaggcagagcaaagaaggatgatgcactttccaacctgtgtagcacgttgggacaactcaagaaatggcagtggatatggacatagaaattgacaggcaaaacaaagcgctggttcctttcagcgacgacatcactgaactgaattttagactgaaaggcgtgaatcagtgtggacaccagttgctgggcaagtgatatggagccagaattcgggcagttcggagactatcgccttgattgcagaatttaagaacattgttgttttacatgtttttttgcagtgaatcaggccacacatgttgtattagtgagagaatgatgatttattttatattattatggatttcatagattattttagttttccctgaactgcaattgtttcaataacataggaggggactaccttcaatgacatttaggtgaatttttaaggtatgtccattattccattatagagcacaaagcctacttcttacaactcactgtatgttttataattgtatcaaaagcactgaacaaacatagttagctatcacgttcactgttgtctaaatagattgaaataatgtggtgaagccgtcatggactcttaagtagcttagccactgcaaaggatacaattaattataaaacaccaatgaatcaataaaaaaa

SEQ ID NO: 8815 - DNA, 2610 bp, Zea Mays
cccgcatccgcgccgcaacccgcagccgccctgcaggcaaccgcccgcatccgcggcagcgccgcggctgcttccatccatggcgccgcggcttccatcaatcgccagcgcgtcctccgtactcctgtcatccgaggaaagccttccatccatggcgccgttgctgcaattccccccgcgatccacgctacctccattgcccacacgatccgcgctccctccattgctaccgcgatgccccttcccaggaacccttccatccatggcgtcgttgctgcaggtgccccgcaatcaactccattgccgccacgatccccttccaccgacgacactcaccttccatcgacaaaactgatcttcctccattccaccgacggcactcacctctcagatcccgtgctcatcaccatcgtgcccctcgctcgccgcccccacctcaccaagagccttagccgtccctagagaagacacggaggtgcagtgccagtgctttcctcaagtgcacctcggattttcggtaccggccagattgggacgaattcaacattcatcggctccaccaaaacactgccactatgatgtgtatgcttgcgtcaggacaggagacccaaaagtacttcatagatgaatgtgacattttccacaagaacgagatacgaaatggccaaggactgctgacgatgatgacgacatggccaccatcgctgccctcaggctgacattctggctctccaacacagttgtcctcagggagataattgtacaaacttttggcatctcacatcaatttactccatccatgatgaatctgagcatgaatggtggtgccaaaaaacttgatgggaaatctatgacaatgctgtggagaaacagctacaatggcatgcaagccaagtttgctgcaaggcagatgccagatgattggcaggaaacaagtacacttttggctacattagagaagattgagtcttggatattttctcgcattgttgagacaatatggtggcaggcactaactcctcacatgcaaaaacgagtagaaggatcatcaactccaaaggctggtagagtgctatgtcctactttgggtgatcagcagtagggcaccttttctgttaacctgtggaaggctgcgtttcacgacgcattcaacagaatgtgccccctcagtgctggcggacatgagtgtggctgtttaccaatattagcaaaactggtgatggagcagtgtgtagcccgtttgaatgttgccatgtttaatgccatccttcgtgaatcatcaagtgagataccaacagactctatatctgacccaattgttgacccaaaagtcctaccaattccagttggtgatctaagctttgggtcaggcgcgcagctgaagaactctattggaaacgggtctagatggctgacagataatcttggcatagatcatgatgactttgaggacataggagatgttgaagacgaaagaagagttgcagctgaaacgaaatcgtttcaacttctcaatgagctaagtgatcatctattttttagtttttcataattttcctttcatggcctccttacatgtttgatttcctatgatccatgagctgccaatcatgataacgcggtttcactatgcaggagatgaacaaggatgcagtcacaactgatgctatcggcagtatcagaacttgatggtgcttgtagactgttcatggtgcttgtagggatgatgtatgtctatggcttactgagctccaaccaactatggcaggagcgttagctaggacagcagtcagtctaacaattgtggacaaagttcagtctaccatacactgaagcgcacccttgttgctaaaggtgtgaacaactttgctcagcagaatggaggatcattgtcactagcagcaagacctcgagcccagttaaccatcagtttctttccttctttctttgggccgagagagcaaagaaggatgatgcactttccaacctgtgtagcacgttgggacaactcaagaaatggcagtggatatggacatagaaattgacaggcaaaacaaagcgctggttcctttcagcgacgacatcactgaactgaattttagactgaaaggcgtgaatcagtgtggacaccagttgctgggcaagtgatatggagccagaattcgggcagttcggagactatcgccttgattgcagaatttaagaacattgttgttttacatgtttttttgcagtgaatcaggccacacatgttgtattagtgagagaatgatgatttattttatattattatggatttcatagattattttagttttccctgaactgcaattgtttcaataacataggaggggactaccttcaatgacatttaggtgaatttttaaggtatgtccattattccattatagagcacaaagcctacttcttacaactcactgtatgttttataattgtatcaaaagcactgaacaaacatagttagctatcacgttcactgttgtctaaatagattgaaataatgtggtgaagccgtcatggactcttaagtagcttagccactgcaaaggatacaattaattataaaacaccaatgaatcaataaaaaaa

SEQ ID NO: 8816 - DNA, 2410 bp, Zea Mays
aaattatggaccgttctgggccgactcatgtggtcctagtcctgagtcctagtcctgtcatcctgtgcagctgcccgtagccttatctgctttcgttcgaccaggtgtcgttcgctttgccttgccccggcaaagcaatggcgctccgtctctctgctccgttcctcacctcgcgctttacgccgtcgcaagcgttggccccgcgcaggcgcacccgggcccgctctttctctccgtcagccgatgcgcgagccgcgtgcttcaagagaccctacacgtccgttctaattatccccacgggcgtcggcgcggccgtcgggggcttcgccggcgacgcccttccggttgcgcgagccgtcgccggcgtcgctgactgtgtcatatcccacccaaacgtgctgaacgctgcgatgctatactggccgatgcccaatacactttacgtggaagggtacgcccttgacaggttcgcagaaggatcctgggctctccaacctgttcaccagaacaaggtaggtttggtgctggattctggaatcgaggaagacctccggctgcgccacttgcagattgcagatgccactagggcttctcttggcttgcctgtagtggagtacattgttacagatgctcctctggagatcaagacatggtttgatcccaggtgtgggaagtcaacagggagtgttggtaactctgattctcttctgagagcagttgacgcactagtgaaacattcagatgtgaatgctgtggctgtagttgcacgctttccagatgatgacccagaagattcagattgttaccgggaaggaaagggtgttgatctattggcaggagttgaagcaattatcagtcatttagttgtgaaagaattcaaaatcccttctgcacatgctcctgcagtgttacccccaccactcagcccattagtatgccctagatctgctgctgaagaggtatatgtctatcgttgtgtaacaacatcagggtacacgtacacagagtactagaaagagagaattaggagatagcatggcacaattcggtggtcatgttgaacctgatcacgagtgagagtcaacatgcggttagttagagaggtttaggctgcagtgtacgtccccttgcatcaattgatgagcacaaaggagaaaaaaattacaagctcaaacaccaggctaagggaggtctccgaggtgcggtggtcctatcttagtgggtcccgcgacaactttctgtactgggatcattgaatgcatcttagcagctgctgcaggtatgcacttcctcgggcgctgacaatgttcatgtggactcgtgcatatcttagttaagtaattatcaatttactagtgatatgtttcacaatcacactactattacaaggcttatattagactagtgctatgcgatcagttttaagttataatttttccgcctttttgcctctttggtcaatattttttctttttatttttaacctgattgcttattacttctgtatgttgtttgtttattcataatatgtctttaccaagtagattggacatacatttctgccttgtgtgcttgctgggttaagcaatgctccacaatatgtcatgaggagcggaaccttggaccatggttgcatagtggctggtgatgttgacagtgttattcttcccaaggactcctgtggaggagatggtacacttgcttttgctcgagctgcaagaaaggacaagcccttaatcattaccgtgcaggaaaatgagacagtgcttgatgatactccagacaagttcggcatagaagtgctgaatgtccgaaactactgggaagcaattggagtcatcgctgctcacaaagcaggtgtcaatccacatgctcttagaagacgagggattgatcatcttaagagccctcaacgatcatattctgcctactctgcaagtcctaaaccatctgcccgtcctccagtgcacgataaagtacagagacagcagctagttaggcaaatttagtactaaaaagagcactagcagcagtagaaattactttagatagtcgtgattaggaacttccaaaattttgaagcccagatacatatttttcagaccgtcctgaagtgtaggaccatagcatcacacgaattttgtcgtgttatccagtctggacttcgctgacatgagtctttctccactgccttacatttctccaatctctagtcggtttgtcaatcatttacatcattattttgccaaggtatacacagcgctggtaatcattttcgtccgacaatattttagtaagttgggtagaagcagtagtactgttttgtttcccactgaacatgaaagtttatgctgaaatgccaagctgttatggcctggtttaggtgccgttcgtttattcgggaatggag

SEQ ID NO: 8817 - DNA, 4975 bp, Zea Mays
gggagaggagagccgcccgcatccgcgcaccgcaccgcaccgcgccgcgccgttcagagagggagaggaggggacgcgaggaggaagaagaagcaggcaaacagcagcagaaggcagaagccccgtcccatccccggcagccccctccatccaagtgatttcaagtagccaccgagaagcggagaaggtgaccgcacctcacgcaatttgcccctgcccgtcgattccatcgcctcccgccgtcccttccctcctctagggttgtcttgtgggtgcccgtgcttcccaccctaggggcaggtccagggccgggccttctcttcgccccgcctccgctgctcttttctttgctgctagggttaggttagggttcgacgctgtggggaggggcatcctcctccctcgccgccgccgccgccgccaatgcctcccggcggtaggcgcggcgccaagcagcgctccaactggaccagggaaccccagctaggcgaccttgtcctcgccaagatcaagggatacccgtcctggccagctaagatcagcaagcccgaggactggaaacgtaagccaacgccaaaaaagttcttcgtctgcttctacggcaccggggagattgcctttgtacctctggcagatcttgaggaatttactgagaagaaaaagaacgatctgttagatcgagctcttaaagttcaaagaaaatatgttcaacaatttaatgttgctgtggagcagatctgcaaggcttataatgaattgccaaaaacatctgaagccgcaaatgtagcattgcctgatcagagtgaaaagactacagagcacctggtgaggtcacctgatattggtgggactccaggactgggacaaatggaagatgatccccctactgattgctcaagtacttcagggcaagggtcagggaccgaggaggatgtcaaagatggtggtcatgaaatagaacaggagcattcaccaacatctctgcgggcagaaaggcagattgaagaggtgaaaattgaagaagagagctgtcatctagaaggttttgttttggaacctaacttggaggtggtttgcgcccttgaagtgccaaagaattttaaatccaacaagctgttgaggaatgctgaaagtaaggaaaatgagcatgttggtgttggtagtcctactggaaggattgctgttgaggccgcatctgatgttgtattaaacatgagtgctgaagaagagagcagagaatttaagaagtcaaaaatcatgacaaaacaatcactgactactggttcagagaaaagggataataaaattgtccatggaaagcctgacaagcaattgactggaaaatcatctgcagggttttctctcaatcagaaatctctgacaggtagcgggcagcacaagatggacagtagtgctgatacacgtccggcaaagaaggcaagacttatggacagggctggtgaaacagataagacagttgccaagagtgagacgaagttaaacatcaattatgaaaatcataatgctgtgaaacatgagcaatctactgctgtggaaacatgtaaaaacacaattcttaagactggtatcggtgatgatagggcacggaagtcaggtggtgctgtatcacccatatcaaagcttcattctgagatcatggaaccagcatctggttcttctgtaactcagtctactgttgctgattctcttaaaaagggttccagcaggaaggaggatgtctcacgtgttgataggaaattggttaaacctaagagaagagcgtgtcgttttgatgatgacgaggatgaaggacagcaaacaccacttcatagaacttctgccaaatctctctctacgcatatagtcccaactgagaaaccaggtagtcggggaaattttgcttcgcatgttggcaacgcttctggaaaaaaaccaggccctgccagagaagagaaatcaagaagtgttaggatgtcacctgtgaagcatgagccagttttttcttcaccgagtcaggataaagtgcatgctagacaccagttaatggggagaaatctgatcacagggtcggttgagactcctgtcattggtaacaaaatgagcctggttgatggcaaatcctctgctcaagtaaaaatgccggcatgctctgaggtgaagaaacttcatagtacttctaaaccattgcaagtaacatctgggaaatcccattcccgaaactatcctgcttcagaaaagatcgccttggtgcccaagtcagaagaaacaaaggctaaatctaaaccagctacatctgttgagcataaggtggccaccactttgtcaactgaacggactgggaagcgggaccacctgaaagaggaaagatcaagttctgttgataaagcagcttattctgaacctaaccctgactcggccaagtcaataaaacatcttattgcagctgcccaagcaaggaggaaccttatggcttctgctcttgcaaaatttgatgggtcttcgactgataatagtgctattacctctacatcatatgcaattgctcgtgatgctttggagggaatgatagagactttatcaaggacaaaggatagtataggccgtgcaacacgccatgcaattgagtgctctaaatatggcattgctggagagaaattggagaacgagcataatttgcatcgcagaattgacctcctttttcttgtggattccataacacaatgttcccattctcatagaggagttgccggggcttcatatgttcccactgttcaagcggcattgcctcgtcttttcggtgctgctgctccacctggagctggtgctcgtgaaaaccggcgccagtgccttaaagttttaagattgtggcttgagagaaagattatgccagaagacatactccgaaagtacatgggtgacattgaggtgccaaatgatgatactagcactagtttaatgttaaagcgaccatcccgttctgaacgttctgtagatgatcctattagggagatggatgacatgcttgttgatgaatatggaagcaatgcaacttttgagctttctggaattttatcatcaaaagtgtttgaagatgatgaagacttccctcaaaacaatgggtcatcatcatttgtttcacggcctgttgaaggtggtgtcatacatgaaactgaagataatattgctccagcatctgttgaggaacacattattagagtagaacatgtagctactgatgctgctatggaagatgctttagagttacttggcaacaaccaacagactcatggagctgtcattattgaacatgactctagtcaaggtccaggttcagagcaggcattgatcgcccagaatgagcttccccctctacctgatggccctccaccacttccatcagattcaccaccacctccacctcctttgcctccttcaccaccacccgctacaccgccaccaccacctccactctctccagcttcaccacttccgccaccacctcccccactaccatctggaccacctcctcagcctgcaccaccacctctgccaacccaggacccacctcttccttctattccgctgcctgtttcttcatctccgttgtcattgggttatcagcctccagcgccagagtacttcatgacgcccaatggtaatcaattggcccagatgacagtaaacacatcaattcaagctattggaaatacaacaaccttcattcctggtggaccagttaatggacaagctgcagttaattttgttacttcaatgccggcagaatttggaaatactagcgtatttatggcgcaagcttctaatggtaattaccagtttcggccaactggtgtaccttttcagcaagggaatttcagtgcctttccatctgcacaaacacctccagttcatccccattctcgtatggcacacatgaatcccatgggccaacaagctgttgcacctccacacaatccttatgctgcacagtcctttccaaacagtcagagccattatccatctgaagaacattggcggatggcatctggtaacttcagtccagatgaccagcataattggatagcaagtggcagatcattaccttgctcagaagggccatttgtgcatgatggatattcaagatcaaacattgacagatcttcaatgaatcctatgaatcatcaacatactgttctgaatcatttgccatctggagcaccactaccaggccatatttctcagatgctaccagccaggtctgatatgcacactcttaattgctggaggccctcttgatagagttgtaaactgaacttcttgtttgtgattttgacatggaaagctcagggcattggaggcaatttgaattgagttcaacaactggtggctgttagtctgagatggagatgcacttgccagggtttaacgatgagatctgtcatagtatgtggaatggacattttacaatgtaactagtcctgacaacagtatccagcagacaatctctcttagtgtgagctcatcttttcacatgacgcaaatgtcctccagttttttagatgttgcttccagtatggatcaggacagcgaactgttcctatgctatggtagtaaatatcttgtgcagatacattaattataaatagaggtctggtagtaaataccaggaactggtatcatcaaggcattttgtcacggtgcctatgctatggttcgcttttttctcttaactgttgtgctcaatttgcgaaattcatttcaaatttcagttagctaatcacatatattctcaacaaccgtattttatgtttggtgtttagactagaattgtgcttagacaacatgtacatcactgagtttagatttaagagcggaagttagttttgattctgttaggacggcgaaatatgtgctgatatttaagagctctagtttattcttgtttccaaagactgctgatagcgttggttttctaagc

SEQ ID NO: 8818 - DNA, 1789 bp, Zea Mays
cacgtttcgtctccctgcaccgctcctcctcatcgtcgtctccccacctgacctgacccgaccgaaccgacccgaccactcctcccctgctcttccgccccaagcaagacccattaaaccccctcgccctctcctttcggggctcatctcgcctctcccccgtcccctgcctggaccctcccgatccgcctctcctcggattccgggtggttcccattccatcgacgtaccccctagtattcactgcttcggtgttgtgggctccgtagatcgacgtggcaccagaactatcatttggatttggggtgaagtactctgggtttctacatttaggccctcgcttcctactttgccgcacctgagatagtaaaagagttcaagaatcccccccaaatcacagtcagtcttgggtctggtttgggtggatttcattacgtttcctccaagttcaaacagccagcaggatttccgagttgagtctgaagatcttcgcttttccggtttccatcagaagttagagagaacccctattctgatttgccagattccatctgtgctgcagttcttgcgcagttcaagagactgccccaactttatccaaaaagtttcctccgtctcatttgtggtcaatctggaagcggtgtgtcaagatgcggccctcggtgcagaaggtccgcattttctgttctgatcctgatgctactgactcatctgatgatgaagatggccagatcatcgcagtgaagaaaatggttatggagatactagtcccagtgacaaactcgaagacatctaatagtctgaagacccttgtgccgtgtggagcaaaggacctggaggtttcagagaagaagggtaaatcaagcaggttccgtggcgtgcgcaggcgacgctggggtcgatgggcagccgagattcgtgatcctgtgagaaaaaccaggaagtggattggctcgtatgactctgaggaggctgctgctgcggcatatcaggcgtatgcaaaacagatccgtgaagagttgctagccatcaagaaccaacggtctgtatcagaacgtgcagctctatcaagttcatcctcggtttcttgcgtatcttcgtctcccccatgtgagcagacagggcatgaaccgcagactagagtgctcgtggagaaagatcctgagcctgtagatgaagtctttctgaacttctctctcacacccaaggggatttcaatggacgatttgttaggacggatagatgagattcctgtttgtgacgaccctgtcagcccaactgatgagcttccacttgacaatttcacgagcctggaagatgcattcccgatcagcgatttcatcggttcaagagatgagcatctgtatgagcactatattggcctggctgacattagccacctgcctcttccaatggatgatccagctttcaatctggatgcagagcttgattggagtgggtttgacttcgctgcgattgaaggtgaacttgatgtcctttgaggctgcaatcagtgatgtgttatactgaaacctgcacttgcttatgttgtattcagctgaaagctcctctctatgttttttatatttgtcagaatacaacaatgaatacggattcaggtttcagtccatctatgtcagaatacatgagcacagtttctttcattttgttcttagaaaaactgatgacatatgggtgcagtctatctctaacaaggagttcgcatttttaatacattttcagtagattttgtcttgcttccttgcagtctgcagcggcgtgggcaaat

SEQ ID NO: 8819 - DNA, 1276 bp, Zea Mays
gagtcctctccctgctcgccatggccctggtcctcgcatcgctgtgtgtagcggaagcatggtgagttttggtcgcgggcatggtcgtgcgacttgggatctgggcacgctgttgtggactccccatcgatgcccctcctgtcctaactcgaccatcctagcctgcgcatgtcgtcgaatcgtcggattccatcccccatggcgcttccatttcctcgccattccacgtcaccagcttcgttccaattcactggccatctttctctccacgtcatagttctattaagggaaacgatgttgcttgagtattggtcaggatgtgtgtagagatgagcttgaagatgggactgtggatagggaagatagtgaagttccgtatgtcactcatcagatgttcgacgaaaaccccaaaccaaaaatcatcggtgttcttgcaaatttgagccgagtatagttcgggagaagtctatggatgtcaattggtgaagaagtgaggcccatgtgcatcgcttatcaagtgctcggtcgaagacttcaatcgaaggtcgtcatcgttcgtgtgatgatcgagtcaaattgcaatatggtacgataattaatcacgtgatgcggaggatcataactgagtcgaccacaagatgctggaaagcgtgagccattcgcaagatgatgctgatgaacgaaactgaagatggacacacaaagcaagtatcggaacaaaagctgatcgccaagtggacgtcacctaacaaacactaatgtagtgtttattctaggcaagccccgatgcatttgccacctccttgctgttttaaaatttttatcaccttgaatgatgcattaggtaataggagttgtgtgattaaacaattgatgcatttccttccttgattaaacaaccctaatacctattttatgaaaatttagtgatgcttagccctgcttattaatttaggatggtttttaaaagatgatgtgtaacacgggatatgggagtttgtgaaataaaaggacttgtgatgatgaacccattgtcgccatgatggtttcatcattcaagtagggtatctctctcaggtatcaagttttgggaaataatatgtaatgtagaccagacgttgagcaagaaagtttgcccgtctgtgtctattaaggaccgttcgatgtaggcctgttgtggtggagactttgcaattatccacatgctccgataagcctgaacccggctattccatacgtgaaaagacaaccgcgcactgggcatgggagatggtgg

SEQ ID NO: 8820 - DNA, 2109 bp, Zea Mays
tctacttgtactgccgggaggccggccggagctggtggctgctcctgttgcattgcgatggcaagtggagtgagtgattgcgaatgtgaccgacgacgggctcatcttcttctcttttacactagagcatgatgcatgggcaggagctgtcctatgactcctatccctcctccttcctagccatggacgacatgcaccgccaactccaagcaccaccagcctgccaaagccacagcagcagcagcagcatcttctttttctttttcttagcagcggtcatcatctactgcgtcgtgatcatcagacgattgatcaaattccaagggaggaggagggtgaagaatgatcatgcagcagcagcagcagcaccaccaccaccaccaccaccgagaaggggtagccgctggtggtggtccgtcgtggagacgctggccttcctgtccgccaacagcagcggcaggggcttctaccacttcgtggaggctcgccaccgcaggtacggtcccggcccctgcttccgcacctcgctcttgggcgccacccacgtgttcgtctcgtcggccgacgccgccaggtcgctcctgggcgccgagccagccggcttctcgaagcgctacgtgcgcaccgtggcggagctcctcggcgagcacagcctgctgtgcgcctcccacgccacccaccgcgccctgcggcgcgccgtggcgcccctcttcaacgcgcaggccacggcgtccctggccgccaccttcgacggcctcacgcggaggctcatgaagcgcgactggagcagcagcactggggccgtggtggtgctcgacgccgcgctggacctaacattcgaggccatctgcgacatgctcatcgggaggacgctgcggcccgatgcgaggaggcggctgcagagcgacgtgctggccgtgacgcgggccatgctggcgttcccgctcagggctgccggggaccaggttccacgcgggcctccgggccaggaaaaggatcatggacgtgctcaggcaagagataggatcaagacagagacagatcatggacatggaggaggaggaggaggagcagcagcacggcgacgactttctgcagagccttcttcttctcaggagtaggaggaggaggcggagccagcagcaacaacaccttttaccatcgtcgtcagctcatcataacgacgacgacgacctcttcctcactgacgaccagattctcgataacatcttgacgctcatcattgccgggcaggtgacgacagcgagcgcaattacatggatggtcaagtacctggctgacaacaaagtcttccaagaaaccttgaggtcagttcagctggagctgaagcagcagcagcagcaggaggaggcagatcatgatctcctccaacatctcaacagcatggagcttgcatacatggtgtctacggttaaagaatcattgaggatggcgagcatagtttcctggtttccaagggtagcactcgaggactgccaggtcgcagggttccacatccacaaggggtggattgtgaacattgatgcgagggccctacactacgatgcgacgctctaccacaaccccaccatgtttgatccttcaagattcaaaggcgggcatagcatgcacacgaagcagccgtacagcttcctggtgtttggagcaggcgggagaacctgcctggggatgaacctcgccaaaatcatgatgctcatttttctgcaccaccttgttacaacatggagatgggagatggccgacgacgaccccagccttgagaagtgggcaatgtttcccaggctcagaaacggatgccccattcacctcgcacgcatatgatgattaagcatgcactagctaccagaggaaactagtatatatcttctgtaaccctaaaccacaatgcaaccacaaagcaccgatgtgatgtgtactttattttcaccaccttatgtatgtaattgtctcgcatgttatatcaagagaagtactctattcctctctctctcttatggagctcttgtcggtttaggctattaaagagcttaattgatagatttctctatttacaatgacttgacgaatcgtacattcatattgatttga

SEQ ID NO: 8821 - DNA, 1988 bp, Zea Mays
gttttggagtccctatttcagtttggaactgaactgggaatgacgtggccgaggacaaaagcaaattgacaccttctccgttcccgacgactcccgtgagcgtggagaggcgactaggcgaggccatggcctccggcatcggctccggccagcagcaacccccaggttcagcagttagattggatgccctagcagcgccggcggcagatgctgacccgggagccgtcggcgacaagctcgtcttcgaagcgccgcctcagcccgtgagggaggactacgtccagaacgccgtcaagtttctctcccaccccaaggtcaggggctcccccgtcgtctacaggcgatccttcctcgagaagaagggccttagcaccgaggagatcgacgaggccttccgaagggttcctgatcctcaacccagcactacggctaccacttctccgcagcagcaggtcaacagccagaatcaatccgtcggggtgcaagcttatgcgccagcacaacctgtgcacccagcaaacgctggccctgtcgtccttccaacgcagcccaggtttagctggtaccaagcattcctggctgcagggctcttgcttggttttggtgctagcgctgctgtctttatcaagaaactgttccttcctaggctcaagtcttggatccgcaatgttgtagcagaaggtaatggcactgaaggcaaccagcttaagcctaggattgatgatgaaacggctgatgctgtaaaggcttctgcttcggctgtttctgctattgccaaaacaaaccaacaactgcttgcttcaaaggatgaagcagaaaagaagatactagtgacgttgacacaagctctagattcccaagccaaggagttaaaatccttgaccgattcaatcggtcataccagggaacccataaatattaccagggatgataggttttctcagtaccgcccactggaagaccatgcccctactgttataaggaatggggcaattaacagttcatggagagcctctcagcaaactaacatgtatggtgtgtcaaatggcgactttggttccgcagtgaggtcttcatttgcgccagcacctgctgaacctacagctggatcattttcaagatcctatggcgagccgatgtccactgcacaacgaagcgataggtcttctggcagtaagccatgggagatgcattcgtattcacaacagaggcctggttatggatccaactcccagttgagtgatgatggatcatactctgatgcccaggacagctatgctccttcctatcaccagaatggaaaggcccctgattttcaagcggatgaacctaggcctttgacttacaacactggggttgaggaaagaccgccaccgcagcgccgctgggtgccccctcagcctccaggtgttgcgatgccagaagcagcagctgccatacgtcaaccaaaggcccttccaaagcagccctccagcgatgcctctgaggcagctggtgagatgcaggtgaatggttcaagtgcatcggatgctgtgactgaggttcctgttaatggtgctactgcaagcgatgctggacgcagtgagatccaagaacaatcagtggcggcctaagtgaaaccaagaccagctaagaactgggaagcaatctaagagagattcaggatctctagtacatctggggggtttgtcatacatctctgaataacgtctgtatcagaacagcggggcaaccacgccgatgggtacccgtaataatgcaataagtagcagatagtttctgcatttagattaatgctacttgtacacaggagaacatatcaataatatttttttggctgttcgattgagggtgcttaaaaagtgtgcttgtgaattgttgtattttgatcttgatcttgtgatgactagcaatcgcaatggaccaaatggagatggtcgtttgttttcttgttgctgtctcgctttattccattcaggtgttgtttt

SEQ ID NO: 8822 - DNA, 796 bp, Zea Mays
tgtgttcgtttaaagtttcacgtggcggagtcttttgtgttaaatttatagcgcagaagcaatggttcatttgcagctcaggagaaggtttcatacatgtgttcagttatgaaacccaagaaatacaaaatgtgaacaatttcagagcttatgacgacaatagtcgctggctccccatatcactggccgttcatccatcccggccctatgtgttgtcgtggtgtcgctacgatagtgagataataatgaagctttgggactgggacaaaggatgggagtgcgcacgcacattccgaagtggaggcattaatgtagatcatatcgctttcgatccaaaggagaccaaccgctttgttgctaccgattgcttggatggcaaagtgatgatttggagcctcgactctcccgaacctgaatatcatctgcctaagacggattttaagggtatcatgttcctggaattcttcacacgttatggtcggcagtgtttgattattgctcatgaagatcataaagcacacgtatgggactttcggttgcgcaaatttgtttctgagaagcgaaaattattatctcgtgaagcttctgtcttcttacgtcctaatgtatcgttactacttacaccttcatctaaaggcacttgccgtttctgggacgctaagaaattcagtttttatggagtcattgacaattctgctggaggagatgtgctgggtatcgcttgtttgatggggtctaaaacaagggtaaagatggtttcacaaatgtggcatacatgtgccaaagaggcccactt

SEQ ID NO: 8823 - DNA, 3781 bp, Zea Mays
cgatggccgcctgccatccggacgcctctgcagcccacaccgctatattacgcagcttcccagatagagactgatacacgctcagtcgcttacggctcacccaagaccaagaaccccgggcggacgaaaagatgggcgccgatgccgcacgcacgccggcgccgcacgcgctgctgctcccttacccagcgcagggccacgtgatcccgttcatggagctggccgaccgcctcctcgaccgcggcttcgccgtcaccttcgtcaacaccgagttcaaccaccgccgcgtcgtcgtggccgccggcggcggccgggcgcccgatggccggctgcggctcgtgggtgtcgctgacgggatgggcgacggcgaggaccgcgacaacttcgtccgcctcaacgcctgcatgaaggaggccatgccgctgcggctcgacgcgctcctcgacgccgacgacgagcgcctcggcagggtcacgtgcgtcgtggtcgacgtcggcatgtcgtgggcgctggacgcggtcaagcggcgtgggctcccggccgccgcactctggcccgcgtcggcggccgtgctcgccgtcctgttcggcgccaagaagctcatacgcgatggcgtcatcgatgacgacggagctccagtgaagcaggagaaccactcgttccggctggccgagtcgatgccccccatggacgccgtcttcctggcgtggaactacatgggcaaccgcgacgtcgagcgcatggtcttccactacctgaccaccaccgcgtgggccgccgtggctaaggcggacgtcgtcctctgcaacaccttcgaggacctcgagccggacatcttcggcgcccactccccggcggccgcctccatcctcccgatcggcccgctgcgcacctgccagcgccggacgagcgaggcgccggccgggcacttttggcgcgccgacgacgaggcctgcgcgtccttcctggacgcgcagccccgtgggtccgtgacgtacgtggcgttcgggagcctgacggtcatgagccccgcgcagctccaggagctcgcgctggccctgctggcctccgcccgccccttcctgtgggtgttccggccggggctggcggccgagctcccgcccgcgttcacggatctcctgccacgccatgcgaggggcaaggtggtggagtgggcgccgcaggagaaagtgctcgcgcaccctgctgtcggctgcttcctgacgcattgcgggtggaactcgacgctggagggcgtccgccatggcgtgcctttgctttgctggccctacttcaccgaccagttcacgaaccaggcatacatttgtgatatctggaaggtggggttaagggtggtgcccgacggcggtgatggcattgtcgccaaggaaaggatcatggagaggttgacgagcctaatgggtgacagtggtgtgaaggaaagggtgaaaagattgaaggaattggcagagaggagcatggggcctgagggcaaatctttgaagaacatcaacgccttcatggaatccatgacgaagcgatctccggtccttgcccctcgtcacctcgtggtgggtcattggatcactgcttcctgcaacctccaaccgggcgggcgcgggccactggaccagcgacacatccggggagaagaaagctcggaggatccgaacgacgctgacggcgaggccgtaaccgcagagcagcggttgttgggatctcctgctcctggtcctggatgctggcacttgaattccagcatgaggtcaaagaagatatttggtttatcaatttcccttgtactcatcaacctagcttctatattggaacgagctgatgagaatctcctcccagctgtttacaaggaagtgttcttgctcttcactatgaccgccctgcagtgcttgcgatagggactgcgttctgggctttgtcaacgggggctgttggtgtcagccagtattttgggcaggttgcattctggagagctattaatggtgttgggcttgccattgtaataccagctcttcaatccttcattgctgatagttacaaagatggcacacgtggagcgggatttggtttgctatcacttattggttcagtaggtgggataggaggtagtgttttggcaaccatcgtggctggaggggattattatggttttccaggatggcggcttgcatttatatctgttgcatttgtgagcttcttaattggacttcttgtatacctttacactgttgatcctaggaaattatctccaagccattttggcggtggtgaggacaatgagaggtatggtcttttgattttttttttagggaaaagctcttatcttgcctattcatattttaaaagataaattacactgagttttatgtggaaggcgtagtagtattactgcatattcttcttatcagctataaaagtttcatctgagtgaaagatttatgaaagtatgttttttattcctagttgatctcgtggatgactaccaatggaattgtatatttgcatatcattgtaataatacaatcttaaataaatggcaggttacatttggtcagcaatggtatccttcctccacattccatctggaaggattcgtggatagcggcgagatccgtaatgaaagttcggacctttcaaatcattgtgttgcaaggcattgttggctctttaccatgggctgctgtagttttcttcaccatgtggtttgaactcattggtttcgacaacagcagctcagcggcgctgaatagctttttcgctattgggtgcgccagtggatcatttctgggtggtgtgatagcagatgtcttatctagatactatccagattctgctcgcgtcatgtgcgctcagttcagcgccttcatgggcatccctttttcatggatcctcctcacagtcattccccagtctgttgattactggtctgcctatgccgtcacactctttttaatgggaattaccataagctggtgcgctacttgtgcaaacaaccccatgttcgcagaggtagtccctcccaagcaccgcacaatgatctacgcctttgaccgcgcatttgagggttcatttggctcgcttgctgcacctgctgttggattagtgaccgaaaagatctatggctacaatgcaaaggccgtcgatctatcacatggatcagtggatggagcttatgcactctctagaggtctattgactatgatgattgtcccttttgctctgtgcctcatgttttacaccccactgtatacagtgttcaagcgtgaccgagaaaatgctagattggccagcatcaaggagcaggaacttacttgaaaagctttctaacaaggagtactgatgtagtttggattactatagtctacaacaccgccaacctggaggttttgattgaagtactttggttgatgtctaggatactcaggttttatgtttcttcagtcggatatcatttaagagtacacattttgtacacaagcgatagattgtttgatctcgtcgtatgtaactggttcagtatacattcggacctcaacctggagagtggagagaggatgttgcagctttccattgaactttcagcatatagatacagttctttctcgttttgttactatttacggtctgtaatcttgttttgaactgcctgaaccatcacgtcattccaatgatgatgacatttgcagaactcttgtaccagtttcagtttatatcattataagatcaacgcttttctgacagtgtgcatgtgttcagcacagtgaag

SEQ ID NO: 8824 - DNA, 2480 bp, Zea Mays
gacagaccccacggcaccgcacctgctcggcacgtcccgctatataaccgcttgaagttcttccgccgccacgtgctcgctgccgtcgccgcgccgcattcgcatcaccgcatcgcgccgccgaggctgcttactagacggacgaggagtggactggagtaacttgcagcaaccctatcccggcaggccccatcgcgaaaccctagacttcgccgccggcggtcgccggagatggcctcctcgccgccgcgcgccccgcagctattccctttcgaccttaacgtcgcgcaggaggaggtagatgaggagccgattgaggttcttgaggaggatgtcgatgaggagggagccccgttggcgcagccccaggaggttgtcgtcgaggaggttgttgagaaattggtcgagcacgcggtgcctatcacggaggatgaacctgcggaagacgtgatcatggaggagccttcggaggaggtgatcatggaggacgaggagcctacgccgtcgccggcggaggaggtggttggggaggggaagaggaggaaaaagagggtggactatgaggtcttcgtgtccgggctgccgcaggacgccgctgaggaggacgtggcgcaggcgctggcggatgccggagatatcgaggaggtgcgcctcgtgcgggatccggcggaccagcggctcaacaagggattcgcttttgtccgcttcgcggctgcatggcaggcccggtgggcggccaacgacctccgcgaggctacgattaagggaaaagcttgtggaatatgcaagaacagtgaaactgaaacccttcatctccgaaatatatgctttgattggtcaaaggatgatttagctgaaaaactgaaacccttcaagttggaaaacttggatagaattaatctaattgagcacccagacagaaagggtaaaaacagaggctatgcgtttcttgacttcaggactcatgtagatgctgtggaggcttttgtgaaactacaaaaaatagatctgtatcttggtactgactctagagcaaacatatcattttcaaacactctttcacaagatgatgagatcatggaaaaggtgaaatctgttttcttggatggcgtaccacctcactgggatgaagacaaagtgagagaaattttcgggaaatttggtgaaattgatagcatacaacttgctagaaatatgttcacggcagcacgaaaagattttggtttcattggctttacagcaagacagtcagctttagactgcattaagatggtcaataaagatggtgttggtgaaggtagtggaaaggttcccataaaagctagtttacaaaggccaaggcatgctttcaagaagtattcccggcaaggctcaagttccttgctaggcgtcagaagaggatttgtagataaaagttctagtggtagaggacaccactcggacagatataggcattttagtcctgtaaggcgttcgtattcagataatcattctcgccgtcactctattgatgttgaagagaggcatacttctgtgcgaggatacagagcttactatagaagagactctccagtgcatgccccaagctataaatatggaaggacacatctggagaccagaatcagcgaagaatatactgagggaagatacactagtaaatatccaaaacacagacacacgatgcatggaaccatggagcgagatgcaaaccgcaggatcaagtatggacattcataccaggagagggcacatagaacttgcccaggttgtaagctgtgtggtcaaaattacaattaccccaatggtgaggaattttctgcaatcagcggttgtcaggaggcatactaccagacagaccatgatctgattccttcaacttctcaagtagcatctcattgcgagggttcttgctgcaagcttcttacaattgaaacctgcattcttcagaatcaagagtcaacacctagttcaagtgaccatgccagaacaagatctaatcttccagcgccgcctcatcattggcatgttaaacattctaatgagcatcggagggaaagccgaagctggtatctatcttccaaagatgctccaagtactcactccaggaagcaccataggccagcaagataagctgtaactgcaagatagagaaaatctagtagcagctcgcttctgatactgatggatagcatttgttaccggggccctgcttacgtggctgacaccctgttgcggggaggaatctgttccaaggacagcagtataccgtcccaatttataaccaaatactttgccttttctcggttctttgtattcgcgttcgatttctcgaaatgtggtgctgacaaatagggatgaaaacggaaactgtaatttttgaataacgggaattgtttttaaagtttaaccgaaatttaggtctaaacggaaatggaaacgattactgaaaatacggaaatagaatcggtagaagaactcag

SEQ ID NO: 8825 - DNA, 2552 bp, Zea Mays
tgggcctgggcgtatggccaaaatgaacggaaccctttgttttccggcgacagaccccacggcaccgcacctgctcggcacgtcccgctatataaccgcttgaagttcttccgccgccacgtgctcgctgccgtcgccgcgccgcattcgcatcaccgcatcgcgccgccgaggctgcttactagacggacgaggagtggactggagtaacttgcagcaaccctatcccggcaggccccatcgcgaaaccctagacttcgccgccggcggtcgccggagatggcctcctcgccgccgcgcgccccgcagctattccctttcgaccttaacgtcgcgcaggaggaggtagatgaggagccgattgaggttcttgaggaggatgtcgatgaggagggagccccgttggcgcagccccaggaggttgtcgtcgaggaggttgttgagaaattggtcgagcacgcggtgcctatcacggaggatgaacctgcggaagacgtgatcatggaggagccttcggaggaggtgatcatggaggacgaggagcctacgccgtcgccggcggaggaggtggttggggaggggaagaggaggaaaaagagggtggactatgaggtcttcgtgtccgggctgccgcaggacgccgctgaggaggacgtggcgcaggcgctggcggatgccggagatatcgaggaggtgcgcctcgtgcgggatccggcggaccagcggctcaacaagggattcgcttttgtccgcttcgcggctgcatggcaggcccggtgggcggccaacgacctccgcgaggctacgattaagggaaaagcttgtggaatatgcaagaacagtgaaactgaaacccttcatctccgaaatatatgctttgattggtcaaaggatgatttagctgaaaaactgaaacccttcaagttggaaaacttggatagaattaatctaattgagcacccagacagaaagggtaaaaacagaggctatgcgtttcttgacttcaggactcatgtagatgctgtggaggcttttgtgaaactacaaaaaatagatctgtatcttggtactgactctagagcaaacatatcattttcaaacactctttcacaagatgatgagatcatggaaaaggtgaaatctgttttcttggatggcgtaccacctcactgggatgaagacaaagtgagagaaattttcgggaaatttggtgaaattgatagcatacaacttgctagaaatatgttcacggcagcacgaaaagattttggtttcattggctttacagcaagacagtcagctttagactgcattaagatggtcaataaagatggtgttggtgaaggtagtggaaaggttcccataaaagctagtttacaaaggccaaggcatgctttcaagaagtattcccggcaaggctcaagttccttgctaggcgtcagaagaggatttgtagataaaagttctagtggtagaggacaccactcggacagatataggcattttagtcctgtaaggcgttcgtattcagataatcattctcgccgtcactctattgatgttgaagagaggcatacttctgtgcgaggatacagagcttactatagaagagactctccagtgcatgccccaagctataaatatggaaggacacatctggagaccagaatcagcgaagaatatactgagggaagatacactagtaaatatccaaaacacagacacacgatgcatggaaccatggagcgagatgcaaaccgcaggatcaagtatggacattcataccaggagagggcacatagaacttgcccaggttgtaagctgtgtggtcaaaattacaattaccccaatggtgaggaattttctgcaatcagcggttgtcaggaggcatactaccagacagaccatgatctgattccttcaacttctcaagtagcatctcattgcgagggttcttgctgcaagggccagcagttgaaaccgaaaagttattctgtgatgcgtgattatgactatatcaatcaagagtcaacacctagttcaagtgaccatgccagaacaagatctaatcttccagcgccgcctcatcattggcatgttaaacattctaatgagcatcggagggaaagccgaagctggtatctatcttccaaagatgctccaagtactcactccaggaagcaccataggccagcaagataagctgtaactgcaagatagagaaaatctagtagcagctcgcttctgatactgatggatagcatttgttaccggggccctgcttacgtggctgacaccctgttgcggggaggaatctgttccaaggacagcagtataccgtcccaatttataaccaaatactttgccttttctcggttctttgtattcgcgttcgatttctcgaaatgtggtgctgacaaatagggatgaaaacggaaactgtaatttttgaataacgggaattgtttttaaagtttaaccgaaatttaggtctaaacggaaatggaaacgattactgaaaatacggaaatagaatcggtagaagaactcag

SEQ ID NO: 8826 - DNA, 4522 bp, Zea Mays
acctcctgagaactccatgggtgggaaggtttccctttcaaatcctgcagatgctgagagcttggtttcacgtggtatgctaaagcgcagcacggctgcaacaaatgctaacagcaactcaagtcgatcacagtgcatcattactatacgtgcagacagtgaacatctacttagtagtgctgttctgaccatagcagaccttgctggcgcagaacgggaaaagagaactagaaatcaaggttcaaggctgttagaaagtaacttcatcaacaacacatccatggttttcagtctctgtttgaggtctctgttagaacatcagaaaaaccagaagaaacccttggaaaagcatttcaagaattccatgttgacaaggtacttaagagactacctagaaggaaggaagaaaatgactttgatcttgaatgtgaagccaggggatgatgattatttggatacatcatttttgcttagacaagcatctccttacatgaaaataaagtacactagtcttgatgattcttttgacctggcttcgcaaaagagaatcaatgtttccttgatttgccaagagaacaagaaaaaaaggaaggttcagaagcctgcagtccttgtggttgaacgaaaggaaaatgttgatacagatgatatttctaaagtttctgaaaaagatggcgtgcatcacgtgtctcttaacccagagatgccaagggagtccgagaatgctgttgaaagcatgaaagaattgattagagataaagatatcgaaatcatggagttgaaaaaggagctgaaggctgtaaggtattgttcatgcaagagttctccaataaatgaagatgactctgtggaccatgatgattcttcatcatttggtcaagctgctcagagtttagttaatatatcaaatcaagctgacctgggatctaatgatgcttcagaagataatttccatgtagagttacaagcgcttcataaggaatcagataaatctgaaagttttactgtgccaacacctgcacccactggtggtgcaatgcctgcatctagttattcagatcaaagcttcacagaagatgatgcacttctgtgcctgaacactgaacaaacatctaccgtagggcaaagtgatgaagaaacggaagagctgagtaagatcacactagagaataaggatattcagcttgatatcaatataagagaagagaagcaccatgaatcttgtagctcttcacagcaagtgaactttgacacagaaggtacccgctctagtgaggcttccttgcttggaacggttggttctgaaaagaagcttgaggaactgaagcagaaatctggaagatgtgtgtctgctgtagaaaaggctaacgtggaactggagcatggtatagacggtggtcaagctctagacgaaaagtgtgatcatgcctcagcgaaagctgcaaaggctcctccaagcaagggcagggaggcagacgaaactgcggatacagataaggaagcttttggttctaggacagagaaaaccaggaggaggttacagccagctgctgctatgttgctcagggaattcactggcgctgacattgatgcggataacgaaagggaagaaagaggcagatcatcgtccagcgtggcaaccgggagatcagatgcgcttgttcaacttctgatgaaaggccgtccggcgcacggcgacgagtcgcgccagctccagtcgctcatgcagctctgcgagatgcgctccatcggctccgaggacttgctcgccgccttcgtcccaatcctcgtcgggatgctcggccagcctgccaccgctggtgccagcccaggcgtcatgctgctcgctgcgcgggcactagccaacctcgtttatgtgctcccctcctgctccgcgatctctgaggagcacgcacccaaccgcctgtttgcgagctggaatctgccggccgatgcttctgagtttgtcatggaagctgtcccatcgctcacgaatctcctaaaccaccatgattccaaggtactagagcatgcttctgtttgtttgacagtgacacgcattgctgaagcttttgcctattaccccgacgaacttgatgaactctgcaatcatggattagttgctcaagctgctagcttgatagctcttggcaactcctctggccaggaaccactgagtacatctacatatacaggcttaatccgtcttctctcaacatgtgcaagtggatccctgctggcagttaaaacactactacttcttgggatcagcggtactcttaaagatttcctttctggccctgctttgatttctggaacattagtcccccgtgctgtaacaaggcctgccgatcagatatttgagattgtgatccttgctgataatttgcttccgcatatgcctgcgataatcattgagttaccaacatactaccatgcatataaagactcttcaacaaataaatctgcttccatcaaacaagagggggctggttctacaggaaacgaaaagtctggcaatgagaggctattgcgtgaccaacctaagctcctagaacagttcggtatggatttgttacccacaatgacacaggtgtatggttctagtgtaaatgcaccaatacatcgcaagtgtttatcgatcattgggaagttaatgtactacagctccgctgagacagtccagtctctccttggcacaacaaacatatccagcttccttgcaggcattcttgcatggaacgatcttcaagtgttgattcctgctcttcagatagcagaaataatgatggaaaagcttccagagacattttccaagttgtttgtgagggaaggctccaacacaatggctcgtcaggtgccacctcaggataaagaacaattagacaaaataatatctgaaatgctctctgagcttagcaaagttaatggtgtttccacatttgagttcattaggagtggtgttaccacagcattgcttgactatttgtcctgtggaacatttgggaaggaaaagtctagtaggattggtaatggagggtcccgtctgacttcaggtcttagtgctctggctcaacccttcaagcttcgtctgtccccagctcaaggtgaaaaaccacttcgggattattcatcaaatattgtgcttatcaatccatttgccagtttagcagctgttgaaggatttctttggcccagagttcaacacagtgaggttgcgtcaaagcctataattccatctggtaataattctgaatctgtggttcctggcaccatagctggtgcatcattagcaactgcaatggatcaatctggtcggcgtccaacaacaagatcaaagtcatctgctgcatggggtggtacatcaaagaaggattctcatgatgaaagcactactactgccaaaggaaaactaggtgattccaatgagtgtaacattggctcagccagttttagccaggtgcagccatcatctggttccggtgctagaaacacttctagcagaggacccgattctactgaatttcaaagtacgagcacattcgggtcatttgttgctgcgacgatggctgggctagcttctgttggtggtcgcagtgttataggtggttgagatcggtgtggtctgtcacttggaggaagcatgaatgaccacaataaacttgtatgtattcactgctggtggggagcagcttagcaaacatttgactgtatgtcaagctatccaacgtcgtcgacttatgcttgacgaggatgatgaagaagtgtttaatggatcttgtatacaaaacgatggaaaccactactgggatgatgttttcacaataacgtaccagaaggctgataaccaagggacttgcacctcattgaacataaaatcagattcttacagattcagtcagaattgtcccctgagcagcagcatgcgtttctgccagtttgtaaccggggtttccacttggtggattggctgcccttagtcccaagcttactgtagttaggaagcacccttcaagtgctgcgaatacttcaaattcaactggggcaacagagtctgctgctgctgctgctgctgatttgcctagtgtgatgacgtgcgccaattatgtgaagctgcccccgtactccacaaaagaaatcatgcgcgagaagctgctttatgcgatcctggaaggccgaggatcgtttcatttttcataagaatatccgaactaacttacaggtggccagttttatgctgttctttaacaggctcagcaaggtcggatgcaggtgctgctgtcgatttctcctttcttttgcatttgttcagctacaagtttctgtttccattgggcaggctaggccatagaggaagagcccccccccctcttccagtacatacatgtaaataaaatggatttttagaactggtgatgttgatccagaattgttaataaatgtggcccagtgtaccatttctacccttccgatacagaaacgcaacgctacatcagaatgaaaatcatgctttaaacaagta

SEQ ID NO: 8827 - DNA, 5347 bp, Zea Mays
cgggattcgaaatttgaagttcccttcccctcctcccgctagagtctggttgtgtgatccaggaaggggaagcgccgcccgctacgcttgatcaatagatccattcacccggggagattcccgaccgtgtgctcgtgtgtggagttgagttgtgatggaggccacctccccgcatcctcccaccaccatccgccggaacccaccccgccgcgcgaggcctcccccgaccccgctcgccggcgacaaatccaaaccctcccccctctcccgcctgctcgagggtgaagcagcgttcgccgcctccgttccctgtccaccgcaggaggagcgcctcaaggtgttcctccgcatccgccccctcccggaccgcgatcgaagccggccactccccgctgccaaggacccgcgccggaagcccaagcaggtcggagcccccggggagctctgcctcgcgcccgacggacccaactccgtcgtcctcaccgtcccgcggtctaagctagtcgaccccaagcgaggccgcaccgaggtcttcgacggcttctctgccgttttcccatccgactccacccagcatgatatcttcgcgcaagtcatgaacccactggtggatgacttcctgggcggaaagagtggccttctggttgcaatgggtcccacaggctctggaaagactcacaccatctttggttccccaaggaatcctggtatactacccctcacgctgaggagaatcttcaacgcacaaggcgaaagcaaggtttccaggaaaccaacgcggtcatttttcttctcgatgtttgagatattttctgagggaaaaggggaacgcattcttgacttactgtctgatactgtggagtgtgttcttcagcagtcagtgattaaaggtcttcaagaggtttccctttcaaatcctgcagatgctgagagcttggtttcacgtggtatgctaaagcgcagcacggctgcaacaaatgctaacagcaactcaagtcgatcacagtgcatcattactatacgtgcagacagtgaacatctacttagtagtgctgttctgaccatagcagaccttgctggcgcagaacgggaaaagagaactagaaatcaaggttcaaggctgttagaaagtaacttcatcaacaacacatccatggttttcagtctctgtttgaggtctctgttagaacatcagaaaaaccagaagaaacccttggaaaagcatttcaagaattccatgttgacaaggtacttaagagactacctagaaggaaggaagaaaatgactttgatcttgaatgtgaagccaggggatgatgattatttggatacatcatttttgcttagacaagcatctccttacatgaaaataaagtacactagtcttgatgattcttttgacctggcttcgcaaaagagaatcaatgtttccttgatttgccaagagaacaagaaaaaaaggaaggttcagaagcctgcagtccttgtggttgaacgaaaggaaaatgttgatacagatgatatttctaaagtttctgaaaaagatggcgtgcatcacgtgtctcttaacccagagatgccaagggagtccgagaatgctgttgaaagcatgaaagaattgattagagataaagatatcgaaatcatggagttgaaaaaggagctgaaggctgtaaggtattgttcatgcaagagttctccaataaatgaagatgactctgtggaccatgatgattcttcatcatttggtcaagctgctcagagtttagttaatatatcaaatcaagctgacctgggatctaatgatgcttcagaagataatttccatgtagagttacaagcgcttcataaggaatcagataaatctgaaagttttactgtgccaacacctgcacccactggtggtgcaatgcctgcatctagttattcagatcaaagcttcacagggcaaagtgatgaagaaacggaagagctgagtaagatcacactagagaataaggatattcagcttgatatcaatataagagaagagaagcaccatgaatcttgtagctcttcacagcaagtgaactttgacacagaaggtacccgctctagtgaggcttccttgcttggaacggttggttctgaaaagaagcttgaggaactgaagcagaaatctggaagatgtgtgtctgctgtagaaaaggctaacgtggaactggagcatggtatagacggtggtcaagctctagacgaaaagtgtgatcatgcctcagcgaaagctgcaaaggctcctccaagcaagggcagggaggcagacgaaactgcggatacagataaggaagcttttggttctaggacagagaaaaccaggaggaggttacagccagctgctgctatgttgctcagggaattcactggcgctgacattgatgcggataacgaaagggaagaaagaggcagatcatcgtccagcgtggcaaccgggagatcagatgcgcttgttcaacttctgatgaaaggccgtccggcgcacggcgacgagtcgcgccagctccagtcgctcatgcagctctgcgagatgcgctccatcggctccgaggacttgctcgccgccttcgtcccaatcctcgtcgggatgctcggccagcctgccaccgctggtgccagcccaggcgtcatgctgctcgctgcgcgggcactagccaacctcgtttatgtgctcccctcctgctccgcgatctctgaggagcacgcacccaaccgcctgtttgcgagctggaatctgccggccgatgcttctgagtttgtcatggaagctgtcccatcgctcacgaatctcctaaaccaccatgattccaaggtactagagcatgcttctgtttgtttgacagtgacacgcattgctgaagcttttgcctattaccccgacgaacttgatgaactctgcaatcatggattagttgctcaagctgctagcttgatagctcttggcaactcctctggccaggaaccactgagtacatctacatatacaggcttaatccgtcttctctcaacatgtgcaagtggatccctgctggcagttaaaacactactacttcttgggatcagcggtactcttaaagatttcctttctggccctgctttgatttctggaacattagtcccccgtgctgtaacaaggcctgccgatcagatatttgagattgtgatccttgctgataatttgcttccgcatatgcctgcgataatcattgagttaccaacatactaccatgcatataaagactcttcaacaaataaatctgcttccatcaaacaagagggggctggttctacaggaaacgaaaagtctggcaatgagaggctattgcgtgaccaacctaagctcctagaacagttcggtatggatttgttacccacaatgacacaggtgtatggttctagtgtaaatgcaccaatacatcgcaagtgtttatcgatcattgggaagttaatgtactacagctccgctgagacagtccagtctctccttggcacaacaaacatatccagcttccttgcaggcattcttgcatggaacgatcttcaagtgttgattcctgctcttcagatagcagaaataatgatggaaaagcttccagagacattttccaagttgtttgtgagggaaggctccaacacaatggctcgtcaggtgccacctcaggataaagaacaattagacaaaataatatctgaaatgctctctgagcttagcaaagttaatggtgtttccacatttgagttcattaggagtggtgttaccacagcattgcttgactatttgtcctgtggaacatttgggaaggaaaagtctagtaggattggtaatggagggtcccgtctgacttcaggtcttagtgctctggctcaacccttcaagcttcgtctgtccccagctcaaggtgaaaaaccacttcgggattattcatcaaatattgtgcttatcaatccatttgccagtttagcagctgttgaaggatttctttggcccagagttcaacacagtgaggttgcgtcaaagcctataattccatctggtaataattctgaatctgtggttcctggcaccatagctggtgcatcattagcaactgcaatggatcaatctggtcggcgtccaacaacaagatcaaagtcatctgctgcatggggtggtacatcaaagaaggattctcatgatgaaagcactactactgccaaaggaaaactaggtgattccaatgagtgtaacattggctcagccagttttagccaggtgcagccatcatctggttccggtgctagaaacacttctagcagaggacccgattctactgaatttcaaagtacgagcacattcgggtcatttgttgctgcgacgatggctgggctagcttctgttggtggtcgcagtgttataggtggttgagatcggtgtggtctgtcacttggaggaagcatgaatgaccacaataaacttgtatgtattcactgctggtggggagcagcttagcaaacatttgactgtatgtcaagctatccaacgtcgtcgacttatgcttgacgaggatgatgaagaagtgtttaatggatcttgtatacaaaacgatggaaaccactactgggatgatgttttcacaataacgtaccagaaggctgataaccaagggacttgcacctcattgaacataaaatcagattcttacagattcagtcagaattgtcccctgagcagcagcatgcgtttctgccagtttgtaaccggggtttccacttggtggattggctgcccttagtcccaagcttactgtagttaggaagcacccttcaagtgctgcgaatacttcaaattcaactggggcaacagagtctgctgctgctgctgctgctgatttgcctagtgtgatgacgtgcgccaattatgtgaagctgcccccgtactccacaaaagaaatcatgcgcgagaagctgctttatgcgatcctggaaggccgaggatcgtttcatttttcataagaatatccgaactaacttacaggtggccagttttatgctgttctttaacaggctcagcaaggtcggatgcaggtgctgctgtcgatttctcctttcttttgcatttgttcagctacaagtttctgtttccattgggcaggctaggccatagaggaagagcccccccccctcttccagtacatacatgtaaataaaatggatttttagaactggtgatgttgatccagaattgttaataaatgtggcccagtgtaccatttctacccttccgatacagaaacgcaacgctacatcagaatgaaaatcatgctttaaacaagta

SEQ ID NO: 8828 - DNA, 3457 bp, Zea Mays
caaaatgtacccaacaggtcgagtactctttcatggaaggcagggttttggatacagcagctaattattgagtcagttctattcaaatccccaatactatctcgtattatgtatttaaatcggttgaatcacagaatacagactaaaggatctgggtggagtcgaaccaccttccgtcaaaggctgtattggacagtccagtgagggcctcaccgtgttgagacaagatccacagttaggagacaaacagggctaatggcgtgtgtaaatttcaacgctgatcaaaatctaaaacaaattttaaattttgtttaatttttttttttgtagaattaggtcacacaaacaattttctacgcgccttggttaacagtactagttacaaatggcagcaatcagtggtcttcagaatgcaacaagactatctaataaccagtaaaaaatcgagttattgataattgacatataccttcgtagagcaaaatcgagttattgattgataatggatgtggtgaagcctccaaaaaaatttgcaaacaatggctgctcagaattaacaatccgacacgaatatacaaacaatagaacagcaagatcactgaacatcagtcgccagagactgcacatgtccaccgcagccatttaccatgacgaccaaataagggatttttacttctccacaaacatttctttatctacagtgtagatttaactacaagcataccaaaatctggaaagtcaaaacatctttaatttgaaaaggaggggaaaacatctggaaagtaaatacattttttgattttgagaagagggaaatttaaggaggcattaagaataaactcacccaaaggagaaagctcaaattaaggcctatgtttggaaccaagagctaatagttagccagctaacaaattgctaatagctagattaatccagttaacgagttaatgaactaattgttaaatagctgacaattgtgagtgtttaaaacctctatatctaattttagaggctaacgattagttctagaagaaccaaacaggaccagactatagcaaaaagtatcttatcctgcaaaataaagatgtagtcctccgtcccttcacacacgcatgcagtgcgcacgcaagacttcatgcaagcgccccctaaacacatgcgcgcaatgctgcattgctttgatcgcccggataaatgataatacacagctgaatgaacgccttatcatataaactaactacaataaaaatgactgcaaccatacgtctcgcattcgaagctacaacaaataatacacagctgaatctctctgtatgtacaatgtcttcacagacaagttcgcataaacagccgtaggacattagacgtatgcaggaacaactcaactagctaataattttgaatatgcgggaactactcaactagcgaatattttttagtacgcagtaaaagacttaggtcattgaacttagcaaataattatcatatttttattatctctcatgagaatccggaattgcatgcgactaatttcatttatacttgattcatatattccacatgatatctccagttaaatgttaagaatatgtggaaatttgaaatattgtatttaaagcatctataaccgtgctttaaatcagtaccctaccttaaaatatagagcaactcagtaaaaacagctccaacacagtgccctattttataaatttcggagtaaggctctatccttgttttctacatcattctaaacattttttctaataacataatttatttcctaagatacatgattaaagcttaaatgttgaagcacaatttgtttttggcgacctgaacactttaaatgtagtattttaaatttgagacatcattgagtcaccttgttagaaatgctcttaaacctaggggatatgcaaatacaatagcaatgcatgaacaactagtcatcaaatattaaaacgtcacagattgtagtgcaaaaaaaaaagagaatccctggttttcacatatacgaatccttaggagatacttgaaacctagcttcaactcaagagatcaataataggtaaatactcaaatgaactatagtgcaagttgaacaagctcttatctgagttatgtcttgtatctaattgtgagcttgagcagaatatttcttccctgtccggtgaccaagaaagaaagctttgaaggccatagccatttcatactgacgatgctgaatagtgaccttcacatcatacaaatactccgtccaccgtgtaggcactgcagttgatcttatatacaaacaccgtgatgaggcaggaggtcttcatatggcacagcagttaatcttcatgcggtgacaacgacgtatcatataaactaactacaataaaatgactgcaaccatgcgtctcgcaatcgaagctacagcaaataatacacagctgcatctctcttcaaatgtttttcttcaatggtcaatagaagacccccgtgcgagaagcgttgggtgaagaacaagaacgccttacagagtgaatgaacgcctttcgcatgtgctttatagccttacgggataagcgttgggtgaatgaactgcatatgcatggcgtagtataggcgtagaagtttgtggcgcgctgagttttgaacgattgatggtgatttcagtaacttgctaacttcgctgtaaattgaaaatgtttagatccggtttgtaccttgtgtgttgcgttgcgatgtagccccgttcaatttgcagcacgccgtgagacgagaaacgccgttcaatttgcagcagcaccggtgatgaagcgtaggacgagaagccaaacaacacgaagcagggcacagggacacaatgggcgggagaacccagggatgaaaaaaacaattccctgtgcgatctcccacccagcacacaaaaccaacatctttattacgatgcctgccatgcgagcgcacccaacatggcaaaggccttcaagatgtcacatctcacttctttttcatccacgctttagaagcccgtcaacgcctcgcaattgtccagtcagccaagatccagatcccccggaagccggaacgtcgcagctctgaaggtctgcagataacaaattgtagcatccagtttccttaaacacgctgatcagaaacctccaggcacaaaaaccatgcagcctcgtctcgcttcgaaccgatgcgtcaactcatcaatcaaacgaaactgatcggaacctgcacatcatcacaaaaacaaaaccatgcatttcgaacaatcaactaacagagcaagactcaccgtcgttgatcggaccaagcatctgatctggaagccacgcggaggctcagatctagacgagaagaggattgatttcatcaggcaagaggaacgcggcgacttttcaacaccaaggcaaaggcggggtggtgccggggtaggcaaaaggtgctggttggcgtgtac

SEQ ID NO: 8829 - DNA, 1068 bp, Zea Mays
cattctgttttccatcttcattcttcaatattggtgacagcaaagatgtattagatgaagcaacaacaatgaaactactggaaagttacggaagagtggatgagcttgtgtactttgccggtttgaaggagcagtatgaaattgtagttcatcattacattcagcaaggagaagcaagaaaagcattggaagtgcttccaacggcgcaatgttcctgtagaccttgtgtataaatttgctccagatttgatcatgttagatgcttatgagactgttgaatcatggatgatggcgagaaacaggttgaatccagggaaactcataccagcaatgatgcgttatgtgagcgaaccacatgcaaagaatgaaacacatgaagttatcaaatacttggaattttgtgtgaaagatttgaacaatgtggaccctggagtgcataatctgttgctatctctatatgccaagaaggaggatgaatcccagcttttgcaatttctcgacacaaaatttggtaaaggacaaacaaatggccctgacttcttttacgatccaaagtatgctctccgcctatgtcttcaagagaagagaatgcgtgcttgtgttcgtatttatagcatgatgtccatgcatgcggaagctgtggcacttgctttgaaggtattatgcctctgttggaaactgcgccggagagacaaccctgcaggttgccggcgagttcctacctcccagactttcataaggaaacaaactagctattacaaggtaataatccggactgctatcagtcctgatcttgctgattggatccgtccatataagactgatccactaccatactagctatttcctaaaacagaataaagtaaactagcaccaatcaaggattactttcctaacaatctcctcctaagccttgtggtgcaatttgtctacatccaccagtccgacccttagagcgcaactcttgaaatttggtcttcccaagcggtttcgtcaggaagtccccaagctgatcttcgctcctgatgaagcccactttgatctgcccattctcagcacactcccgaa

SEQ ID NO: 8830 - DNA, 894 bp, Zea Mays
atttgttgtggcctgttacgtcttcaccagttcatatattaaacttgaagaaccacgtggttgaagaaaagcctactgaaaatgagtaatacatcatcttcgtcaagtggtgagcgtgctatggagcgacagagggcaaggggtctatcttgggtagggcttgaaggcagtgccaatgggcagtggtggataagcagtattggcaaaacacttgatgaggggatatccttccacagagttggttcaaggcagtggcaggactacttattgctgcatgtgccatgtggcttggggcgcgctattggcaacaaggtaccagcattacatgaacttgatccggtgttcaaaaagttttctttctcagagagtgttgcaagcttgttctcttctttaggctacaagaggcctgcagtcattcaatctatgtacatatttaagcaaccaggtattggtggtgaggttgtgccgcaccaggataatacattcctttacacggaacctcgtacatgcacagggctgtggcttgcacttgaagatgcaacaatcaacaatggttgcctgtgggcaattctaggatcacataaaaagggtttggtgagacgtatggttagagatgaaaatggtacacattttgatcggccctccccagtctatgatcagaaagaatttgtaccgctggaagtaaaatctggtgctttggtggttatacatggagatcttatacatcagagttttgagaacctttctccagcgtcaagacatgcattcagcttacatgtagtggatactgaaggatgtaaatggtccgaagacaactggttagttcatattcataatggtattattgaagaattctttatttataatactattttgattttccattgtccgtag

SEQ ID NO: 8831 - DNA, 3007 bp, Zea Mays
ccaatctttatttgcggtcgctgctctatatgcaggatgcggccggcgacgacgtggctctgtgggcataataattaacaaatgcgcggacaccctctccctcgccctcttacaccgccgccgccgccaccgccgtgggtggcgggcatttcctgcagctgattgttgttggcatgttggcaaaagtggacagccaccaccaccccgaccgtgcaggcggtctcgcaaggcataaggccatgccgccgccatgtcgtgagaggacaaggtcaacggctggtttttagcgcgcttccagttcggtagaggggaccatgagggcgcgcacgctctccctcctccttcatctgctcgccgccgccgccagttccttcactccctcggcatccaccgacacaatttaccggaacacgaccctcaccggcaaccagacgctcgtctcggccggcggcatctacgcgctgggcttcttcagcccggccggcgccgacggcaggacgtacctcgggatctggtacgccagcatcccgggcccgacgaccgtggtgtgggtcgccaaccgcagggacccggtggccaacgccccggccgctctccagctctcggccggcggccggctcgtcatcctcgacggcaacaacgacaccgtgtggtccaccgcggcgcccaccgtcgggaacgtcaccgccgcgcagctcctggacagcggcaacctggtgctcagcgccgatggcggcgggcagagcgtggcgtggcagagcttcgactacccgacggacacgctgctcccgggcatgaagctcggggtggacatcagggccggcatcacccggaacatcacggcgtggcgcagcccgtccgacccgtcgccgggagacgtcacgttcaagctggtcatcggcgggctgccccagttcttcctcctccggggcgccacgagggtgtacacgagcgggccgtggaacggcgaaatactcaccggcgtgccgtacctcaaggcgcaggccttcaccttcgaggtggtgtacagccccgacgagacgtactacagctacttcatccgcgagccgtccctgctgtcgcggctggtcgtggacggcgcggccacgcagctgaagcgcttctcgctcaacaacggcgcgtggaacagcttctggtactacccgaccgaccagtgcgactactacgccaagtgcgggccgttcgggttctgcgacaccgaccgctccccgccgtgtagctgcctgccggggttcgtgccgcgctcgccggaccagtggggccggagggagtggtcgggcggctgtgtcaggagcacgagcctcagctgcgacggcggcgacggcttctgggtcgtgaaccggatgaagctgccgcaggccacggacgccacggtgtacgccggcatgacgctggaccagtgcaggcaggcgtgcctcggcaactgcagctgcggggcgtacgccgccgcgaacaacagcggcgggatcggcgtcggatgcgtcatctggaccgtcgacctgctggacatgcggcagtacccgatcgtcgttcaggacgtgtacatacggctcgcgcagtccgagattgacgccctcaaagctgcagcgacaggagaccaccagcatttacacaagagcaagctgatcgtcgtcattgtcgccactatttccgctgtactttttctgctagcggctgctgggtgctgctttttctggacgaagaagaagaaggcgagcaagaaaggtgaaggtgaggacatgacctccttgcctccgagtactgcagatttcgcgctcccgtacagggtgaggagccagccttcgttgagcccagtacgggatcacaaacagcttcttgacgcctcggaggaaacaagatacgccacggacaaagatgttgacctcccattgtttgagctggaggtgattctggccgccacggacaacttcgcgggccgcaaaaggatcggagcaggcggatttggcccagtttatatgggagttcttgaggatggacagcaagtagcagtgaagaggttgagccagggatcaactcaaggggtgagcgaattcatgaacgaggtgagactgatcgcgaagctgcagcacagaaaccttgtgcggctgctcggctgctgcatcgagaacgacgagaggatgcttgtgtacgagtacatgcacaaccagagcttggacacgttcatattcgacgaagggaagcgcaggctgctaagatggcagaagcggtttgagatcattctggggattgcacggggtctgcagtacctacatgaggactcgaggttcaggatcatccacagggacctgaaggctagcaacgtattgctggacaggaacatggtccccaagatctcggattttggcatcgcaagaatgttcggaggcgaccagaccaccgcgtacacccggaaggtcgtcgggacatatggctacatggctccagaatacgccatggacggccagatctcgataaaatccgacgtcttcagcttcggcgtgctggtgctggagatcatcaccggcaggaggaaccggggctcctatgaacccgacctcgacgtcaacctcctaggatatgcatggatgctgtggagagaagggcggagcatggagctactggacgaggcgttgggcggcagcttccaccacagcagggcgctgcgctgcatccagctcgcgctcctgtgcgtcgaagcgcagccgaggaaccgcccgctcatgtcgtcggtggtcaccatgctggccagcgacaacgccgtgctccccgagcccagcgagcccggggtcaacccagggatcatgagcgcgtcgtcggacacggagtcgtctcggacccggagcgccaccgccaactacgtcacggtcaccagattagaggcgaggtccaccacgtccactggccactcttccctgtaaattaagtttgcacaaagattacagattgtattattcctgctttcagttgactaatcgggccattaact

SEQ ID NO: 8832 - DNA, 2136 bp, Zea Mays
  misc_feature (2135)..(2136): n is a, c, g, or t
ccccgctgcgctccagcagaattctcgcgccgcaacgcgacgcaatgccccacccgcacggtcgcgccgcgcagcgcaggaacccccaccacgcggtcggcgtcggcgtcggcggcggtgctcccgcctccccgccgtcggcgtagctcccgcgcgcttcggccctgggcgccggtgtggtttctccatcacgctctctcgcgcttcctacctgcgtgcgccctgctgcccggtgatggccagccgtctcttcgtgctccgtcggcacacgaggtggtggcagcggcaggcgccacggcctcgctcgctttgcccgccgtctcacggtggggactcggcgtcttcccatgggacgctggagctgctcgcgcgtctgcgcagctcaccatcttatactttccacaaggttttcaaccgagatgctaggttcttcaggttgttgcagagttgtagcattcaagcctgccattgtatccatacgagtccatcagtcaatagcggaaatcaggctactgcagagcctcaacaacagaatccaggagtgcctgtaccggttgatggttctagtgaactaaaacccaagaggacaaagctgaaaggaaggagggcagtgacaaattttttgaaatccttgagatggaaaaagaaaaaggagtttcaaagaatgactgcagaggagaagattttgtacaaactgaagctagctcgaaagaaggaagagcggcttgttgtggcactgaagaaaattgaaccagaggatccatcagaacctacacatgatcccgaggtgcttacacctgaagagcacttctatttcctcaagatgggccaaaaatgtaaaaattatgtgcctgttggaagacgtggaatttaccagggagtgatcttgaacatgcacttgcattggaaaaagcatcaaactctccaggtaattgtgaagacatttacaccagaggaggtcaaggaaattgccatcgagttagccacactaagtggtgggattgtgcttgacattcaagatgggaacacaattattatgtacagagggaaaaactatgcacagccaccaccagagatcatgtctccaaaagtttccctctctagaaaaaaggcactggataaatccaaatatatggaaaagctcagagctcttaggcggtacattcccagacttgagcaggagcttgaagatcttcatgcacagatgaagttagctggagagcatcaaggacaaaatgcagggaaacatgttgcttcaatttcacataatacaaacagtatgccagtgagaaaagaaccttgtggttcaattcgcaacaaaacagtatctgatctcctatcagaaactgtagagggatccaagaggttagaggatgaaagttctgcgattgaagacgactcagcttcagagtctctgtcatttacagagtctgaggatctctctgacatttttgagacagaatcagaggagcaggaagaggacaacaaggatcgccccttatatctcgataggctggataagtttccctcaggaaaaaatgataatgaaccagatgattttgaggagcatctgcggaggatcgcttcactttcagataagactgattcaccttcaaaagaactgaaagtgtcagagctcgatgagattgataaaatctttctgagagcaagttcgttgttgaagaaaaggtgacgcaaaagttcagctgatgcaagaacgatctcactggtacgccagctgaagaacatttttaccaagtgaattcatctcatacatcaaactgacctcatttatcaggctgaaagcatggccctgccttttataattacatatgtgtccaacccaagatcaggaacgatgaagtagtcctcgtcgtcgtcgtcaggcacctccatccgtgacttcttgaacaggcgcgccccgttcgccttgtagaacccggcgttactcactggctgcggcgaggcgaagaactccgccatggcagttttagctggcgaatgggcgtggaacaggtcgatgtcctcgaaccactccagctccttgagcccaagagacgagtctttctgcaacagcaaacacaaaacagatggaaaaggaaaactgagataagaataagaacgtgaaaagcttnn

SEQ ID NO: 8833 - DNA, 2832 bp, Zea Mays
cctgagtccaccccccgtccctttccctctcctacctccacctccacgacaacaagcaaatccccatccagttccaaaccctaactcaaatgctcgctttgactgcctcagcctcatccgcttcgtcccatccttatcgccacgcctccgcgcacactcgtcgcccccgcctacgtgcggtcctcgcgatggcgggctccgacgacccccgtgcagcgcccgccagatcggtcgccgtcgtcggcgccggggtcagcgggctcgcggcggcgtacaggctcagacagagcggcgtgaacgtaacggtgttcgaagcggccgacagggcgggaggaaagatacggaccaattccgagggcgggtttgtctgggatgaaggagctaacaccatgacagaaggtgaatgggaggccagtagactgattgatgatcttggtctacaagacaaacagcagtatcctaactcccaacacaagcgttacattgtcaaagatggagcaccagcactgattccttcggatcccatttcgctaatgaaaagcagtgttctttcgacaaaatcaaaggtatgttcagccattgagtacaaactgccgagtgccgactaacaaaatgtcataacattgctagtatcaatgcctaccatcatcaattgaagtagtttgttagttactttaaggtaactacttgataaattcttatattcctccatttatttttccttcaagctatgtgtttatgatctgcggtgattatgtcattttattctaaaaaaaactcgacctgcggagggtaagacaacccctggacattatattaagaagaccttctcaagtgggttgagaaaaccctcaaacccctgctccacccatacacagcggcaccgtagcccatgtgagaatgacagcgattggggccatgcattagacctgtgctttggcgtgggacggacgaggggatttcccccgaacccctgccgtagcccatgtgagaatgaccgcaactagggccggacattagacttgtgctttagcgtggaacagatgaggagatttccccccgaacctctgccacacccatacacaacggcactgtagcccatatgagaatgaccgcgaccagagccggacattagacatgttctttggcgtgggacagacgagtggaatttttaaccttagattgaaattcactctcacagggagttgaactcaggacatgagggtgctactcagaccacgtaaccaactcagttagaggccttcgtatgtcattatgttttaactgaattatgttttatctgtggctctttgaagattgcgttattttttgaaccatttctctacaagaaagctaacacaagaaactctggaaaagtgtctgaggagcacttgagtgagagtgttgggagcttctgtgaacgccactttggaagagaagttgttgactattttgttgatccatttgtagctggaacaagtgcaggagatccagagtcactatctattcgtcatgcattcccagcattgtggaatttggaaagaaagtatggttcagttattgttggtgccatcttgtctaagctagcagctaaaggtgatccagtaaagacaagacatgattcatcagggaaaagaaggaatagacgagtgtcgttttcatttcatggtggaatgcagttggagatgataatgtgaagcttggtacagaagtgttgtcattggcatgtacatttgatggagttcctgcactaggcaggtggtcaatttctgttgattcgaaggatagcggtgacaaggaccttgctagtaaccaaacctttgatgctgttataatgacagctccattgtcaaatgtccggaggatgaagttcacaaaaggtggagctccggttgttcttgactttcttcctaagatggattatctaccactatctctcatggtgactgcttttaagaaggatgatgtcaagaaacctctggaaggatttggggtcttaataccttacaaggaacagcaaaaacatggtctgaaaacccttgggactctcttttcctcaatgatgttcccagatcgagctcctgatgaccaatatttatatacaacatttgttgggggtagccacaatagagatcttgctggagctccaacgtctattctgaaacaacttgtgacctctgaccttaaaaaactcttgggcgtagaggggcaaccaacttttgtcaagcatgtatactggggaaatgcttttcctttgtatggccatgattatagttctgtattggaagctatagaaaagatggagaaaaaccttccagggttcttctacgcaggaaataacaaggatgggcttgctgttggaagtgttatagcttcaggaagcaaggctgctgaccttgcaatctcatatcttgaatctcacaccaagcataataattcacattgaaagcgtctgacctatcctctagcagttgtcgacaaatttgtccagttcatgtacagtagaaaccgatgcgttgcagtctcagaacatcttcacttcagatattaacccttcgttgaacatccaccagaaaggtagtcacatgtgtaagtcggaaaatgaggttaaaaactattatggtggccgaaatgctcttttttgttttcctcacaagtggcctacgacacttgatgttggaaatacatttaaatttgttgaattgtttgagaacacatgcgtgacgtgtaatatttgcctattgtgattttagcagtagattctttgccagattatgctttacgcctttacagtgacctaggagtcaagggccccacatattatatttattt

SEQ ID NO: 8834 - DNA, 1521 bp, Zea Mays
ggaacatatttggttttctgcacttttgtctaaatgaagatggtccttcctgttgctgttgaagacgtaaagagagaagttaaaatcttaaaggcattacaagggcacgaaaatgttgtacacttttacaatgcattcgaagatgacaactatgtttatatagtcatggaattatgtgagggtggcgagctacttgatcggatattagccaagaaagatagtcgttacagcgagaaagatgctgcagtagttgtccgacagatgctcaaggttgcagctgagtgccacctgcatggtttggttcatcgggacatgaaacctgagaacttcctattcaaatcaaaaaaggaggactcgccccttaaggctacagattttggtctttcagacttcataaaaccagggaggcaattccgtgacattgttggaagtgcctactacgtagcaccagaagtactcaaacgcaggtcagggccagaatccgatgtttggagtataggtgttataacctatattttgctgtgtggaagacgaccattctgggacaaaacagaagatgggatatttaaagaggtcttaaaaaagaagccagatttccgccgcaagccttggtcaaacattacttcgagtgcaaaagattttgtacaaaaattactagttaaggatccccgtgcaagactaactgctgcacaggcattatcacatgattgggtgagagaaggaggaaaggcatctgaaatacccttggatatatcagtattacataatatgcgtcagtttgtgaaatacagtcgtttcaagcaatttgctttaagggcattagcatctacattaaactcagaagagatgtctgatcttcgtgatcaattcaatgccattgatgttgacaaaaatggaacgattagtcttgaggaactgaagcaggctcttgcaaaggatgttccatggagattaaagggtccacgtgttttagagatcattgaagcgcatacaggaatgaagggttctattgatcccctcctggaggaggctgacattgacaaagatggcaagataagcctagatgaatttcgccggctcttgaagactgcaagcatgagcgcacgcaatgtacaaactcctaggggtgttcgcaagtcatagttttctgttttttgtagttcacataactgaactagagagcagcagcacatgtgattggagaaaggcttttccatgtaaattagacaatcaataatacacatgaatggaggtaatccgtagttgttccttgaaaacgagcactgtattcttgctattgcaatactatgtttggtttgttcccagcaagttctgcagttgagctttccatgctcgaaatcgaatgttgtaaaaatgttgcactgctagttcagtttagattaggtttgagtcagttagagataagatgggactatgtagttcagaattaggtttgagtcaactaatgataggttatgccatttgggattgtatctacaaggtcctctattagattgctct

SEQ ID NO: 8835 - DNA, 5059 bp, Zea Mays
atggctacgtccacgatgccactcggcggggcgtctccgtcgggccgcgttctgggtccggcgctggaccggatcataaaaaacgccgcatggcggaagcactcagcgctcgtggccgcggcaaaggcggcactcgacctcctctcttcatcgccggcatacccgtcttcggaccctatctcgccgcaatcctcgctgctgctcggcctgccctccgccgccgccgacgcggccctccacgcgctgctgctcgctctcgagtcagcttcgcccaaggtcgtcgaccccgctctcgattgcgtcaccaaacttctttaccaccgcctcctctttggcgacctcggctgcgccggggacgatgcctcttcccccacctccaggctcttcaccgccgtccttacctgtggcgctctctctgatgatgcaatggagcttgccaccctccgtgttatcatcgccgccgcgcggtgccccactgtcgccatccgcggggagggcctcggccaggtgctcaagacctgctacaacatatacctcagcagcaacagtggggccaatcagctctgcgccaagcttgcgctggcgcaggtcctgctgattgtgtttgcacgcgtggaggtggattcgatggacgtgcgcattcggacggtgtcgatcacggagatgatggacgtgtctgatcgcaacctgaacgactccagcatcgtgcaggtggctcaggggtttataaacgagacaatggaggggagtgttgcaccagagccagggtcacatttggagccaaccgaggtggatggaaaggaggatactgggatgagcaagattagagaggatgggcttgcactcttgaagaacctgtgtaagctgtcaatgaagttctcgacgccagataaccctgaggatcagatgttgctgcgcggcaaggtgttgtcacttgagttgctgaaaatggttatcgacaatgctggccctttctggagaacaaatgaaaagtacattggagcaatcaagcagtatctttgtttgtccttattgaagaacagtgctttgtcagcaatgagtattttccagttgttgtgctccatatttgtgggcttactgtcaaggtttagatctggactgaaagaggaaattggaatattctttccaatgcttgttctaagggttcttgagaatgtccatcaacctagctttctacaaaaaatgacagttctaaacttgttggagaagatctgtaaagaatctcaggttcttattgatatctttgtgaactatgattgtgatgtagatgcaccaaatatttttgaaagggttgtcaatggacttctaaagactgctttaggtgttcctccaggatctacaacaacattaactatagcccaagaccaaacatttcgtattgagtcagtgaagtgccttgcaaccataatcaagtcaatgggttcatggatggaccaacagctgagaattggtgatttttcaccaaaaatatctgaagcttctttaagttctttaagttcaatagataaccccaacatccttattggagaagatggtagtggaattgattatgaactgcaatctgactctggtagcccagatgtatctggtgctccctcccttgagcagcgtcgtgcttttaaaatagaacttcagaaaggaatatccttgtttaaccgaaaaccttccaagggaattaattttctcgttaaaagcaagaagatagggcatacaccagaagatgttgcttgtttcttgagaaatactgctggtttaaatgcaacaatgattggagactatttgggtgaaagagatgaattccctatcaaagttatgcatgcatatgttgatgcactaaactttgaaggtatggacttcggtgaagctattaggtattatttgcgaggcttcaggttgcctggggaagcacagaaaattgatcggatcatggaaaagtttgctgaacgatactgcaaatgcaatccaaactcctttaccagtgcagatactgcatatgttcttgcttattctgtaatcatgctcaacactgatgctcacaatactatggtcaaggataagatgatggaaaggatttgccagaaacttatctgggtacactatatgaccaaattgtcaaaaatgagatcaaaatgagtgctggttcatcagttccacaaaacaagcaacctagtagtgtgatgaagctactaggattggacaatattattagctttgttaactggaaacaggctgatgacagggtagttggagcaaacgacctgctcatcaaaaccatacaagagaaatttaaactaaagagtggaaagtcggagtctgtgttttctgttatcactgatacaacaattttaagattcatgatggaggtttgttgggcccctatgatggctgcattcagtgtgacacttgatcagagtgatgataaggcggccacgtcgcagtgtttgcagggattcagatctgctgtgcatgttacctctgttatgtgcatggagacacagagagatgcctttgtgacatctgtagccaaattcacatatctgcattgtgctgctgacatgaaacaaaagaatgtggatgctgtgaaggctattatatccattgcaatcgaagatggtgattatttgcaggaagcttgggagcatgtactaacatgcctttcacggtttgagcatttacaccttcttggagagggggcacctactgatgcttcatttctcacagtaccactggttgactcagaagaaaaaacacagaagtctacctctatgtcatcaaagagaactaatgcacttcagaatccagctgtaatggctgctgttagaggaggttcttatgacagcacaacagcaaaaaataaagcatcaccgttggttactcctgaacagattaataatttcatatcaaacataaacctgctagaccagattggcatttttgagttaaatcacatatttgctcatagcccaagattaaatagtgatgctattgttgcttttgtgaaagctctttgcaaagtttcaatgacagagttgcagtctcctacagatcctcgtattttctgcctaacaaagattgttgagattgcgcattacaatatgaaccgcattcgtttggtttggtcccgtatttggaaagttctgtcagatttttttgtttctgttgggttgtcagagaacctttcagttgcaatatttgttatggactctttaaggcagctagctatgaagtttctggaaagagaagaactggcaaattataatttccaaaatgaattcctgcaaccttttgcggttgttatgcagaagagcaatgcttcagaagttcgtgaacttatagttcgatgtgtctcccaaatggttctgagtcgtgtcaacaatataaaatctggttggaaaagtgtttttacggtttttactgcagctgctgctgatgatcgaaaaaatattgttttgttggcatttgaaaccatggaaaagattgttcgggactatttcccttacataactgaaactgaaacaacaacgtttactgattgtgttaaatgccttatcacattcacaagtagtaaattcagcagtgatgccagtcttaatgccattgcatttcttcggttttgtgctgtcaaactcgctgaggaaggatttattagtcatgagaaggatactgaacagcaaccaagtaaaatagattcatcagatgggaacagcatggtgcataaggacgatcatgtttacttctgggttcctttgcttgctggtctagctagattgacaacggactcaagaccaactatcagaaaaggttctgcagaagtgctctttgacatcttggcagatcatgggcacctcttttctcagtccttctgggctaatatcttcgaatcagttatctatcctctttttagcagtgaaagttttgcaccaaatggccagatctcaagtgtaaatagtactgaggatgattcttggaattttgaaactaaaacggtggctctaaaatgtttagcagatttgtatattatgttttttgaagtgatgcgtccagaactttctagagttacttctgttattacgaatttcatcagaagcccttataaacaatcagctagcacgggtatatcagtttttcagcgtttaacagaaggactcgcgagcaagctctccaatgatgagtggggaacggtcctgttgtgcttcaaagaatcagcatcacatacatttgttgtgtttgacaaaatagttaaaatgatgaaagtcattgaaattccagatagaaatgaatcttactctgaagctgagcaatattcagatcatgacatatacaatgatgaagaagaggaagccaatatggaaacggcgtcttatgctattgtcagaatgaagaatcatatggctttgcaactcttaatcgttgagggcatcatcaaattgtatgaggttcacaggagctttcttggtgctgagcatatagtcataatgttggagattctatctgccattgcatcacatgcaagtgaagtgaactctgaatctaacttgcacaggaaactacataaagcatgctctattttggaggtacctgagccagcggttatccatttcgagagcgagtcctaccagagctacctcaaacttctccaagctcttcttcatgataacccatctttgtcagaaactatgaatgtggagtcacaaattatgctcgtctgtgagaaaatactgcgaatgtatctgacctgcgcagagcatgaactgtctaatggtgtttctggtaggggtccagctttacaacggatgcctctgggtacttctaaaaaggaggagctgggtgctagaactccatttgtccttcatgtgatggggttattgggcagtttagagaagaactgctttaggagaaacttgccccgctttttccccttattagctaatcttattcgctgcgagcataactctggagaagttcaagttgcactgtatgatatcttccaatcatcaataggccccataatatcagcatagcgtatattgtttcctcg

SEQ ID NO: 8836 - DNA, 5099 bp, Zea Mays
atggctacgtccacgatgccactcggcggggcgtctccgtcgggccgcgttctgggtccggcgctggaccggatcataaaaaacgccgcatggcggaagcactcagcgctcgtggccgcggcaaaggcggcactcgacctcctctcttcatcgccggcatacccgtcttcggaccctatctcgccgcaatcctcgctgctgctcggcctgccctccgccgccgccgacgcggccctccacgcgctgctgctcgctctcgagtcagcttcgcccaaggtcgtcgaccccgctctcgattgcgtcaccaaacttctttaccaccgcctcctctttggcgacctcggctgcgccggggacgatgcctcttcccccacctccaggctcttcaccgccgtccttacctgtggcgctctctctgatgatgcaatggagcttgccaccctccgtgttatcatcgccgccgcgcggtgccccactgtcgccatccgcggggagggcctcggccaggtgctcaagacctgctacaacatatacctcagcagcaacagtggggccaatcagctctgcgccaagcttgcgctggcgcaggtcctgctgattgtgtttgcacgcgtggaggtggattcgatggacgtgcgcattcggacggtgtcgatcacggagatgatggacgtgtctgatcgcaacctgaacgactccagcatcgtgcaggtggctcaggggtttataaacgagacaatggaggggagtgttgcaccagagccagggtcacatttggagccaaccgaggtggatggaaaggaggatactgggatgagcaagattagagaggatgggcttgcactcttgaagaacctgtgtaagctgtcaatgaagttctcgacgccagataaccctgaggatcagatgttgctgcgcggcaaggtgttgtcacttgagttgctgaaaatggttatcgacaatgctggccctttctggagaacaaatgaaaagtacattggagcaatcaagcagtatctttgtttgtccttattgaagaacagtgctttgtcagcaatgagtattttccagttgttgtgctccatatttgtgggcttactgtcaaggtttagatctggactgaaagaggaaattggaatattctttccaatgcttgttctaagggttcttgagaatgtccatcaacctagctttctacaaaaaatgacagttctaaacttgttggagaagatctgtaaagaatctcaggttcttattgatatctttgtgaactatgattgtgatgtagatgcaccaaatatttttgaaagggttgtcaatggacttctaaagactgctttaggtgttcctccaggatctacaacaacattaactatagcccaagaccaaacatttcgtattgagtcagtgaagtgccttgcaaccataatcaagtcaatgggttcatggatggaccaacagctgagaattggtgatttttcaccaaaaatatctgaagcttctttaagttctttaagttcaatagataaccccaacatccttattggagaagatggtagtggaattgattatgaactgcaatctgactctggtagcccagatgtatctggtgctccctcccttgagcagcgtcgtgcttttaaaatagaacttcagaaaggaatatccttgtttaaccgaaaaccttccaagggaattaattttctcgttaaaagcaagaagatagggcatacaccagaagatgttgcttgtttcttgagaaatactgctggtttaaatgcaacaatgattggagactatttgggtgaaagagatgaattccctatcaaagttatgcatgcatatgttgatgcactaaactttgaaggtatggacttcggtgaagctattaggtattatttgcgaggcttcaggttgcctggggaagcacagaaaattgatcggatcatggaaaagtttgctgaacgatactgcaaatgcaatccaaactcctttaccagtgcagatactgcatatgttcttgcttattctgtaatcatgctcaacactgatgctcacaatactatggtcaaggataagatgtctaaatctgacttcattcgcaataaccgaggaatagatgatggaaaggatttgccagaaacttatctgggtacactatatgaccaaattgtcaaaaatgagatcaaaatgagtgctggttcatcagttccacaaaacaagcaacctagtagtgtgatgaagctactaggattggacaatattattagctttgttaactggaaacaggctgatgacagggtagttggagcaaacgacctgctcatcaaaaccatacaagagaaatttaaactaaagagtggaaagtcggagtctgtgttttctgttatcactgatacaacaattttaagattcatgatggaggtttgttgggcccctatgatggctgcattcagtgtgacacttgatcagagtgatgataaggcggccacgtcgcagtgtttgcagggattcagatctgctgtgcatgttacctctgttatgtgcatggagacacagagagatgcctttgtgacatctgtagccaaattcacatatctgcattgtgctgctgacatgaaacaaaagaatgtggatgctgtgaaggcattacaatatgaaccgcattcgtttggtttggtcccgtatttggaaagttctgtcagatttttttgtttctgttgggttgtcagagaacctttcagttgcaatatttgttatggactctttaaggcagctagctatgaagtttctggaaagagaagaactggcaaattataatttccaaaatgaattcctgcaaccttttgcggttgttatgcagaagagcaatgcttcagaagttcgtgaacttatagttcgatgtgtctcccaaatggttctgagtcgtgtcaacaatataaaatctggttggaaaagtgtttttacggtttttactgcagctgctgctgatgatcgaaaaaatattgttttgttggcatttgaaaccatggaaaagattgttcgggactatttcccttacataactgaaactgaaacaacaacgtttactgattgtgttaaatgccttatcacattcacaagtagtaaattcagcagtgatgccagtcttaatgccattgcatttcttcggttttgtgctgtcaaactcgctgaggaaggatttattagtcatgagaaggatactgaacagcaaccaagtaaaatagattcatcagatgggaacagcatggtgcataaggacgatcatgtttacttctgggttcctttgcttgctggtctagctagattgacaacggactcaagaccaactatcagaaaaggttctgcagaagtgctctttgacatcttggcagatcatgggcacctcttttctcagtccttctgggctaatatcttcgaatcagttatctatcctctttttagcagtgaaagttttgcaccaaatggccagatctcaagtgtaaatagtactgaggatgattcttggaattttgaaactaaaacggtggctctaaaatgtttagcagatttgtatattatgttttttgaagtgatgcgtccagaactttctagagttacttctgttattacgaatttcatcagaagcccttataaacaatcagctagcacgggtatatcagtttttcagcgtttaacagaaggactcgcgagcaagctctccaatgatgagtggggaacggtcctgttgtgcttcaaagaatcagcatcacatacatttgttgtgtttgacaaaatagttaaaatgatgaaagtcattgaaattccagatagaaatgaatcttactctgaagctgagcaatattcagatcatgacatatacaatgatgaagaagaggaagccaatatggaaacggcgtcttatgctattgtcagaatgaagaatcatatggctttgcaactcttaatcgttgagggcatcatcaaattgtatgaggttcacaggagctttcttggtgctgagcatatagtcataatgttggagattctatctgccattgcatcacatgcaagtgaagtgaactctgaatctaacttgcacaggaaactacataaagcatgctctattttggaggtacctgagccagcggttatccatttcgagagcgagtcctaccagagctacctcaaacttctccaagctcttcttcatgataacccatctttgtcagaaactatgaatgtggagtcacaaattatgctcgtctgtgagaaaatactgcgaatgtatctgacctgcgcagagcatgaactgtctaatggtgtttctggtaggggtccagctttacaacggatgcctctgggtacttctaaaaaggaggagctgggtgctagaactccatttgtccttcatgtgatggggttattgggcagtttagagaagaactgctttaggagaaacttgccccgctttttccccttattagctaatcttattcgctgcgagcataactctggagaagttcaagttgcactgtatgatatcttccaatcatcaataggccccataatatcagcatagcgtatattgtttcctcgccagttgtacaattttgtcagattgtggtataagaaaagggtacagctttacagtactgtaaatgattcatggttgaggcatttctggtgttgaagctacatggaacatcgacccagatgtctaaacaaggtttttgctgcgcacatttgccattcttttttctaacattcactgggtaatcattgacacgttaaagaggatggacattggaataagtccctaattcctgttttggtgtcatttcccccctttcatcttggctctgtatagtgtcgtctcccgaacctcagctaccagtgaagagggacttctgtcatatgttactgttcaacatattcgtctgtcgaataccattttaacagtatctacattgtagttagtatatatatactttcattctaacagcaatggatatcccaatggatgtctattaaagaaaggtgagcaatatagttcaataccttttctcacgtcccattgccatcaggatcacgacttg

SEQ ID NO: 8837 - DNA, 3530 bp, Zea Mays
catttttaagagtagagaagaaaacactggaccgccttcaccctgcttttcgtcttcctttcaccccgcttgcgctctctctccctctccccacctctctcctgcgccaactgggcgaccgccgccgccggctgccgggccgccgcacgcctccaggtgcccaggtcttcgtaggtcccttagctcggccttcgtcagggttcggggtccttcgctggcgacgatcacccatcaggtctcctttgaaagaagaattaggcagcacatctttacgaatcgaggatgtcagtttctatgaaggacctggacccagctttccgtggctctggacaaaaggacggcttggaaatatggcgtattgagaatttcaagccgatccctgcccctgcatcttcgtatggaaagttcttcatgggtgattcttacattatcttgaagacaacagccttgaaaaatggttctcttcgccatgatatccattactggattggtaaagatactagtcaggacgaagctggaactgctgcgattttaacagtagagcttgatgctgctcttggcgggcgtgctgttcagtaccgagaaatacaaggcaatgaaacagaaaaattcctgtcctattttagaccatgcatcatgccacagccaggaggagtggcatctggattcaaccatgttgaggtcaatgagcaggattacaagacccacttatatgtctgccatgggaagcatgttgttcatgttaacgaggttccctttgctcgatcatcccttaatcatgatgacatatttattttggatacgaagtccaaaattttccagttcagtggctcaaactcatccattcaagagcgagcaaaagctcttgaagttgtgcagtacatcaaagatacatttcatgagggcaagtgtgaaattgcatctgttgaggatggtagaatgatggctgatgcggaagctggtgaattctggggtttttttggcggctttgcccctcttcctaggagggcacctgcagaaggcaatgagaaacatgatgaaactgctttcaaattgctatgttttgaccaaggaaagctggagcctgtcgactgccaatctttagcacatgaattacttgagacaaacaagtgttacttcttagactgtggtgctgaattgtatgtttggatgggtagaattacatccctgatggagagaaagggtgctagtgaagctgctgagaaattgctctctgattcaaaccgaacaagaacacatataatcaaagtgattgaagggtttgagactgttacgttcaagtcaaaatttaaggagtggccacagacacctgagttgaagttgtcatcggaggatggaagaggcaaagttgcaggttgctatttacaaattttctagctcttctcaaacgccagggcttaaatgttaagggtttgatgaaagctgctcctacacaagaagaacctcaatcctatattgattccactggcaatctgcaggtttggcgtgtaaatgataaagacaaggttcaactctcaccctctgaccaatccaaattttacaccggcgattgctacatatttcagtatacttatcctggagatgataaggaggaatgtcttattggaacctggtttgggaaaaagagtattgaggaggatagggtaatagcagtttcacttgcaagtaagatggttgaatctgctaagtttcaggctgtccaggcgcgcttttatgaggggaaagaaccgatccagttctttgtgatatttcaaagcttccaagtgtttaagggtggtcttagttctggatacaagagatttatcgctgaaaatggcatcgatgatgaaagttattctgaagatgggcttgcactctttcgtattcaaggttcaggaccagaaaacatgcaggcgattcaagttgaacctgtggcctcatcattgaattcatcatattgttacattctacataatggaaacactgtgttcacttgggctggaaatctgaccactgcattggaccaagagttaatggaaaggcagcttgatgttattaagccaaacacacagtctaggtcacaaaaggaagggtcagaaacggaccagttttggagtttactggggggcaaatctgagtactcaggccaaaaaatggtgcgagaactcgaaagtgacccccatcttttctcatgcatcctgtcgaaaggtcaaagaaatacaccactttactcaagatgatctaatgacagaagatgttttcattctggactgtcacacgagcatatttgtttgggttggtcagcaggtggatgttaaaggcaggttacaagctctggatgctggggagttttcaccgttatggaggggaatgagcctccctttttcactagattcttcacctgggactccgcaaaatcactgatgcatggcaattcataccagaggaagctcgccattgtaaaaggtggaggtgctccagcattggataaaccgaaacgacgaacaaccgtctattcaggaaggagtactacacaagataaatcccaacgctccagaagcatgtccttcagccctgaacgtgtgcgtgttaggggaagatctccagcattcactgcattggctgctaattttgaaagttcaagcaacagaaatctttccactcctccacctgtagttaagaaactttacccgaaatctgttacacctgatccgtcgaatactgcttctaagtcacctgcaattgctgctctggctggttctttggatcacccttctcaaactcctgctctagaattcatgaaaggtggctccgagtcagagaagccaaaacaggagggagatggtaaagaaggtgttgatactgtggccacaagagttgaatctctgactataaatgaagatgtaaaagaaaacgagccagaagatgacgagggccttccgatttacctgtatgaacgtctgaagaccacagctgctgatcctgttactgaaattgatgtcacgaggcgagagacctacttatcttcaactgagttcaaagagaagtttgggatgacaaaggaagcatttagcaagcttccgaagtggaagcagaacaggctaaaaattgctcttcaacttttttagcctgatcatcaacacttccaatgtaatcaccatctgcaatgccacatcaattttcacattgtcctggatcggtctcctttttcctagtttggatttgttttgctagctaagtagctctcttattcttccagttcataggtgtgctattccctttttcctttttttgtcaagtgctcttcattgattcaaggtcacacaggtttgattctgaggcttgatttttttgtgtatcaactctgcctgctgtgttctttttttgtttttgagatgagttgcggtttgagggagcgataagtatgtacagcagagtgccggcactgtaacatcacaataccgttatctttgatcaatataattattttttgtgtgtaacttaatattgtttttccagaggatttaagg

SEQ ID NO: 8838 - DNA, 1688 bp, Zea Mays
cacgggtccattctgatcctgccgctacccctccgcttccgccctctcgctttcgttgtcatgaggagcctcaccgtggcaagccgccacccgggcgccgctttctctacccgccgccgcccccttcttcaccccgccgcagccggaagggactcgaccttccagcggtgctggcgatgggaaaaaactcaggacagctccttcgggagctcactaaggaccagccgccttccaagaactgtgcacggagatattttgaagaatttgctcgcaccaactgctggtgctgtttcagttgagcaagctgaagctattgctgacctcccaaaaggtgaaatgtggtcggtgcacaagtttggtggcacatgcatggggacctctgagagaattcacaatgttgctgatatagtccttcgtgatccttctgagaggaaactggtagttgtatattgctgtactggatgaagtttttgataagcatatgacaacagcaaaggatttgcttgctggagaagaccttgcaagattcctgtctcagttacatgcagacatcagtaacctaaaagcaatgcttcgggccatatatatagctgggcatgcaacagagtctttctctgattttgttgttggtcatggagagttatggtctgctcaaatgttatcatatgcaatacagaagtctggaacaccatgcagttggatggatacaagggaagttctagttgtgaatccgtcaggagccaaccaggtagatcctgactatttggaatctgaaaaacgacttgaaaaatggttttctcgatgtccggctgagacaataattgctactgggtttattgcgagtacacctgaaaacatcccaacaaccttaaaaagagatggaagtgatttctctgcagccataattggttcccttgttaaggctcgccaggtgaccatctggactgatgttgatggggtatttagtgcagatcccagaaaagttagtgaggctgtaatcttaagcacattgtcgtatcaggaggcctgggaaatgtcatattttggggcaaatgtcttgcatccacgtactattatacctgtgatgaaatataatatccctattgttataaggaacatattcaatacttctgcccctggaactatgatctgtcaacagcctgctaatgaaaacggtgatttggaggcttgtgtcaaagcttttgcaactatagataaattggctttggttaatgtcgaagggactggaatggctggtgtcccaggtacagcaaatgccatatttggtgctgtgaaggatgttggagcaaatgttatcatgatatcacagcaagcgacatgggaagtggcagttggaagtggtcgtcccagggcgcttgcaggagatggagcagcagcactgccaggcgtggtggcaggactgcttggaccatctggggcggtcgagtgctgcactggtgggcgacacgtgaagacctggccgaaccgttgtggcacagacggggcgccgagcggtgctgatgcaggagtgccggggacaccaggagagtcattgggagaccctggtgaggtcggcgcgactggggtagaggaaccaggcaacactaggggcgtacgaacgtcgggtactgcaggcgcgtcgagagcagcgtttggagctgttggggcactgggggcagtggcgcctg

SEQ ID NO: 8839 - DNA, 1556 bp, Zea Mays
catcactgtgtcgcccccacccccctcgccgcatgatgcccgcaacgtccgtggccgtcgcgcccgcccctccccccacctcgagagcggcacccggcaaccaccccactgtcaagatcaccgtgtccatataaggatggatcccctcacccgagaaccactcacgtcgagactaacgcatcccaagccagataaggatggatcccctcacatctccgattatttcgccgtccaaacacatgatttcctggttcaccctcctcccctttggcgtcctccagatcttgccttcgcccgcatcgacgtaggcgacgggggcatgacaggtcggttggtggagcggggctagaggccatcgatggtggttgtggcgacgtgctgctgggaagacgaggcaactctctcctccagcacaccctgtggtggagacttgccatacatatgacgcagctgaagctgcagagggcgcgcctgtgccgacgacggaagcaaagaagctggcgtcctctgtcacgaggtccaagcaggagatcacagaggacttctcgtcgattggcgggacatggcccccacggccgcccaagaagagaccaggtgcaacgacaactcaatatcacaaagaagatccgaaaggcgagaggatttcatttcccggatcgacttacttctaccctccgaaggaagccccaattcctgtgctagatccaccatgccattcaatgttgcagatcatgacgaatcttgtgattggtttgtgtcaaagcaatggatacacatatattcgcattgcatcatttctatggtttgttgtctcatttgatcgattgacgacagtgattatacattaccagttcttttgatgtatcctatgatggaaagggaaaattaatggttgaatttcttaatatgagtaggaggtgaaggatgaggaagaaaaaggggaggagttgcctccagatgttgagactttgaccacaacaattgaataaacatgatgagtgattggaaaatgttcggattcttttgcaagatcaaagtttctatgcacttaatcagcttgtggatttcatcatcttggtcggcaagtttgtacgacaaaggcgacccggagtcaccgtcccttgaaagcgccccacttccggatgatgataggttgcgcattgccagcgagtttagaattgtgccacatggtgatgggggccattatctccttgtcgccctctgtgacaaagtgaaattgaaggattacatgtttcacatcttctttatgttgaaattgtcttgtatgttgtttagaccttttaaaggcaacatgccacacatatctttgttttggtgttcagagctacatatggtactcttcatggtttctgttgcgagtaacagggatatcaggtttttgtacttacctatatggtcatatctgaacctataaactgttgttaggatagatacaaggtgtgcatgatcttctttctattgattcatacttacatatgtagaccatattttatcaacttatctatactatactcaaagcaccagtttcaacggtc

SEQ ID NO: 8840 - DNA, 1755 bp, Zea Mays
catcactgtgtcgcccccacccccctcgccgcatgatgcccgcaacgtccgtggccgtcgcgcccgcccctccccccacctcgagagcggcacccggcaaccaccccactgtcaagatcaccgtgtccatataaggatggatcccctcacccgagaaccactcacgtcgagactaacgcatcccaagccagataaggatggatcccctcacatctccgattatttcgccgtccaaacacatgatttcctggttcaccctcctcccctttggcgtcctccagatcttgccttcgcccgcatcgacgtaggcgacgggggcatgacaggtcggttggtggagcggggctagaggccatcgatggtggttgtggcgacgtgctgctgggaagacgaggcaactctctcctccagcacaccctgtggtggagacttgccatacatatgacgcagctgaagctgcagagggcgcgcctgtgccgacgacggaagcaaagaagctggcgtcctctgtcacgaggtccaagcaggagatcacagaggacttctcgtcgattggcgggacatggcccccacggccgcccaagaagagaccaggtgcaacgacaactcaatgaggtgaaggatgaggaagaaaaaggggaggagttgcctccagatgttgagactttgaccacaacaattgaataaacatgtgattatcatgaactattatgtgtgctaccatttccttttgtgcttttctaattactagcgggaatgtttagcttctacaaaaataataggaatgagtttctgtacaccggtggctatgtttgaattgttaatagtgagactgagagagtggtatggttaggatgttagatttgtgcttccagtgattgattagtatcttttttggtagctggtatgtgttagttttaccataagctaaaagtttaagtagaatgaagtggatgtgttgtgccaaattaaatgaattttcatatgctcctacccaggctctgctttgtgtgttttgaactcctttgtgatgttgaacaattgtgcttattagttggtaatttactgatattccattgtcagtccattatattgttgtttaatagaatatttgtgtgtgtctcattggatattgagttattgacagatatgttttccataccaaaacaatgttcttaaacatgcatttcaggatgagtgattggaaaatgttcggattcttttgcaagatcaaagtttctatgcacttaatcagcttgtggatttcatcatcttggtcggcaagtttgtacgacaaaggcgacccggagtcaccgtcccttgaaagcgccccacttccggatgatgataggttgcgcattgccagcgagtttagaattgtgccacatggtgatgggggccattatctccttgtcgccctctgtgacaaagtgaaattgaaggattacatgtttcacatcttctttatgttgaaattgtcttgtatgttgtttagaccttttaaaggcaacatgccacacatatctttgttttggtgttcagagctacatatggtactcttcatggtttctgttgcgagtaacagggatatcaggtttttgtacttacctatatggtcatatctgaacctataaactgttgttaggatagatacaaggtgtgcatgatcttctttctattgattcatacttacatatgtagaccatattttatcaacttatctatactatactcaaagcaccagtttcaacggtc

SEQ ID NO: 8841 - DNA, 1926 bp, Zea Mays
catcactgtgtcgcccccacccccctcgccgcatgatgcccgcaacgtccgtggccgtcgcgcccgcccctccccccacctcgagagcggcacccggcaaccaccccactgtcaagatcaccgtgtccatataaggatggatcccctcacccgagaaccactcacgtcgagactaacgcatcccaagccagataaggatggatcccctcacatctccgattatttcgccgtccaaacacatgatttcctggttcaccctcctcccctttggcgtcctccagatcttgccttcgcccgcatcgacgtaggcgacgggggcatgacaggtcggttggtggagcggggctagaggccatcgatggtggttgtggcgacgtgctgctgggaagacgaggcaactctctcctccagcacaccctgtggtggagacttgccatacatatgacgcagctgaagctgcagagggcgcgcctgtgccgacgacggaagcaaagaagctggcgtcctctgtcacgaggtccaagcaggagatcacagaggacttctcgtcgattggcgggacatggcccccacggccgcccaagaagagaccaggtgcaacgacaactcaatatcacaaagaagatccgaaaggcgagaggatttcatttcccggatcgacttacttctaccctccggttgtttgtggacagtattttggtttttttaagaaggaagccccaattcctgtgctagatccaccatgccattcaatgttgcagatcatgacgaatcttgtgattggaggtgaaggatgaggaagaaaaaggggaggagttgcctccagatgttgagactttgaccacaacaattgaataaacatgtgattatcatgaactattatgtgtgctaccatttccttttgtgcttttctaattactagcgggaatgtttagcttctacaaaaataataggaatgagtttctgtacaccggtggctatgtttgaattgttaatagtgagactgagagagtggtatggttaggatgttagatttgtgcttccagtgattgattagtatcttttttggtagctggtatgtgttagttttaccataagctaaaagtttaagtagaatgaagtggatgtgttgtgccaaattaaatgaattttcatatgctcctacccaggctctgctttgtgtgttttgaactcctttgtgatgttgaacaattgtgcttattagttggtaatttactgatattccattgtcagtccattatattgttgtttaatagaatatttgtgtgtgtctcattggatattgagttattgacagatatgttttccataccaaaacaatgttcttaaacatgcatttcaggatgagtgattggaaaatgttcggattcttttgcaagatcaaagtttctatgcacttaatcagcttgtggatttcatcatcttggtcggcaagtttgtacgacaaaggcgacccggagtcaccgtcccttgaaagcgccccacttccggatgatgataggttgcgcattgccagcgagtttagaattgtgccacatggtgatgggggccattatctccttgtcgccctctgtgacaaagtgaaattgaaggattacatgtttcacatcttctttatgttgaaattgtcttgtatgttgtttagaccttttaaaggcaacatgccacacatatctttgttttggtgttcagagctacatatggtactcttcatggtttctgttgcgagtaacagggatatcaggtttttgtacttacctatatggtcatatctgaacctataaactgttgttaggatagatacaaggtgtgcatgatcttctttctattgattcatacttacatatgtagaccatattttatcaacttatctatactatactcaaagcaccagtttcaacggtc

SEQ ID NO: 8842 - DNA, 2494 bp, Zea Mays
tcacaacctttgatgatcgtaacaaggtcaagagctcttccaatgggcgaccccctcgccgccctccttcgcagcggcggcaatcctcactccgtacacggcgtggccatcaagcttggctgcattgtctccacctttctttgcaacaatcttctatatgcctacctgaggcgccaggtccccgcggacgcccgcaggctgttcgatgaaatgccccgccgcaacctggtgtcctggtccgtcgtcatatccggctccgcccaccatggcgtcctcgcggaagcgttcgcgttgttctcccacatgcttcacggcgcggggcacggaagctgggaccgcccggactcgttcacgctaggggccttggtcgccgggtgctcccgtgccagagatgtcgacgctggcatgcaggtgcacgcttgcgtggccaagttcggcgtcgacgaggatgatagcgtcgcggcggcgttggtggacatgtatgccaaatgcggttgggtggactcatcgtggcgggccttcacgctcgcaccacagcggagcgtcctaagctggacgagcatgattgcctgtctggtcaaccaaggtgtttgatacgcccgatttgctatccgttggaatgcaacttcatggctgcttgctgaagatgggaacggaggttgacactgctttggggactgccttgatgacgatgtatggcaggtgtggtggagttgatgagatacctaggttggcttgtcgtataaggcatgatgcgctttcgaggactgccctgcttggcgcttatgcacgtactggatacaatgcagaggcaattggtgttttcaaggagatgatcatgaaaaatatggcaattgaccagtcagctatgactggtatgctgcagatgtggtgatatcaatagtgctgaaactgtattttatctaatggaggaaaatgacatcatatcatggacggcattgttaacttgctacactcagaatggtcttgatgaagaggtactcttattctttaggaaaatgctccggaaagggttgggatctccagtattttgcatcactagtgtgctacgagccagttctagcatctcaaatcttgctgttgggttgcaaatccattcgaggactctgaagctaggtattgatgatgataattctgtacagaatgcactcgtaaccttgtatgctaattgtggaagtgttcaggttgcattgaagatatttaactcaatgagtaatagagacatcgtcacatggaatgcattactcacaagtttttcacagcatggcagtgaggtggcagccattcagctttttgatctgatgcaagaagaggggatctgcccagatgcttacacttttgttggcctgctatcatcttgcagcagaatgggccttgtaaaagaaggctgtgagtacttcaatgaaatgaaggaaaaatacaacttggaacccaagatggttcattatacctgcatggttgatctacttgctcgtgctggaagattttgtgatgcaatggacttcattgatgcaatgccttatgaaccagatcaaatattgtgggaagctttgctagcttcatgtaaggttcacggaaatttggggttaggaagaatagcagctaagaagattctggaaattacaccacatgattattctgcatacattatattatcaagcattcatgcttcagttgacatgtgggatgagaaatactggaatcgcactgtattcgacacccagcgtgcaagaaaggatactggaaggagttggattgatgcacaagaattatcagagaatatattcgatgcattacaaattggagtgacgtaatgttagttgataatgcttctatttcaaaacactaggggtgtgttactctccatggttgcagtgaagtgtagtggtctcaatcataaaacatcgacaagcggaacaaaagatgtccatggatgcaagcaaaccatggtctcagtgtcaagcatcgaatagaactgacccatgtcagatcatcaccgaagaacatatatgatatggtgcatagggcagatttttatcttttctatggtgtgggacacagttgcaacctttcagtgattatctttctttaaatttgtgatgctttacgatgctgccaatgttgtaagctgtacagagggtgctgcagttagaaagtatattggtattttctctattgtcagccaaagtttacagtgatgatggaaatacagagatatctcggtttaagttttttatgttcacctgctgtgggagcttagtatgacagtccaactctttatcagtatgctttgtgattcctaaattaactataattttctatgtttgggaccagatattcgtgcatactgttttgcacgtcaaatgacatggtagagacatggcataaatgagtgagagtgctgaaattgaggtcattctgtaatgccaatatgaccctttaccaggattctgtatatccttgcaattcttaa

SEQ ID NO: 8843 - DNA, 2535 bp, Zea Mays
atgccccgcccgccctgctctccgtcgcgcccttccagggatcctccatcgccgctcccgccatcatcgcgcccgcgctccatcgatggaaggtgtcgccccgccatcctcgcctcgctccccgcgacacgcggcgccagcttgtgtcgcatcttctatctattcaccagcaaggtacctggcacagaacccagccgaatcctagaacccagccggatcctagaaatttcccattggcatctggtgaccgtatccggtggttgggcgtcagacgcagcggggcggtaccggtgcttggagttggaccacccgtgcaaggcaccgtggtgcgacgggccgctcggcgcgctggagagcaacgggtgggtgtactcggcgcactgctccttcaagctctttgtggccgatgcgtcgtggtggtgccttgacgggaagtggctcttcttctggggcgactctaaccacgtcgacaccatccggaacctcctcaccttcgtcctcggcatcacggacacgtctgctgtgacacgccagtttgatgcagtgttcaccaatcccattggtggggcagggactctaaggatcacaagcatcttcaacggccactggaacatgagcatgaactatctcggcttgcattccctccggaacagaggtttccggcagctcatccggtcctacttcatgtccggtgatcgtgttccagacgtcatggtcctgaactctcgcctgcacgatggctgctactggaccagcgtccgcatctacgcgcaggctgcggatttcgcagcacagttctggtccggagtcatggacaaagtccgggctcgtgggcatgcagtgcccagggtgttctaccggacgcagatgcctcagggtggtatagatgcagggaaaaaccacgcgactcccttcacggaattgagagatgaagctggtgtcacatactcacatccgcagggatgggtcacgttgcagacacttcctaatgaagtccttgtagtgctgcgaaaggtaatcagattttgttagtagacaacacaaggaaggaagcacaaggaagtttaacctgtatagcacaaggaagcaagcagctcagcctccattttatttggaaaagtcttatacttatcagaaaaagaaaagctaaaactctaccctctgcgcccaccttcaagggtcgctccctatcttccttcactctccatcaaagctttgctcgcatcaaattaaatttcttttcgttacgaatttagcttcattatataatattttgctcagtgaattgatcaagtttggtgcacgagtgtcatgctcctaggttttgtactaattgaagaagtagcaaatgtagttcgtggtggtggtttaagtcatgtctgatgaaattgatgcttatatagaggggttctttgtgctttcgaaagaattctgcaggaaaatcgactgcatttgttgttcttgggtacacaatgaaagatgggaaggcatattttcccccacatgacagtatctatacatattgcagttgaaatggaaataattgaaatacaaggtatgtgcaggtgcagtctattatattggagttaagagagcgctagcttgcagtcacactcgatgaagtcctatagggctagattttaaaagtaagatccagtacaaggttacttcaattgcaattagcgattagccaaaactttcatcttcggtctcactaggcctcactaggcctttcatcttcaaaagaatttataaagatattatttttcagtctatctctacatccctctctccatcttgttatgcaattatgagttcattagatgtcattgatctaaattaatttctatccattatgaacttatttttaatgaaccatgctccttcttcgttgctcacaacagggtccatgtacttggcacatgatatacatatacgagatggacttaaaaattaacaaaggtcttcttttggtggtagataattttggttttcttatgattctctttatgaagtgggtgtggtacctctaaacaaatagatgatctgttgacttatggcagtcaggcattacatttttttgcatgaaatcgacatctgagaagtgataattttgttttgatcgcttctctattgcaagatttagatggctactatcctttgcaattgatcaagaatggtgagctattctaaggaagcttctgaacaatatacctgttgtcctggagtgtcacagatggcaaagatttgcgcttagagaaggaggaagaacggtcggtgctagagtcatctccaaagttcttagctgatcagtttccactttcttctctgtagtctggttgcaactgttgatgttttaagggtctgttcaatccctctccaagatattgtaggtgtatgaaatcttctaagcaaactgttaaatacattgcacccgatcagaagggatgctctataatgcagcctggtaaacctccctcctgggcccagctgtcctctgctttcagtgtgaaactactgatttgggtgtatatt

SEQ ID NO: 8844 - DNA, 2623 bp, Zea Mays
atggctgggaggaccgcgcccgccctccctcccctccttctccttcacgcccgactccctcgctgcccctttatcctgggatctcgtcatggatgctaccacgacccaacgattgatatcatgtccaagttcttcaagctgatggtgttctacaattaatgaatgatttgaaccgaagtgttcaagatgccgctatctcttgtattgaggttagttaattccatatttgatattgtctgtgtatgcctacttcagccgacattgtgttttttctagacccatggtgactggtatgatctctatttctattggacttgttcaatttcccaatagttacatcccatatttacaagctggagagattgagacattttttataacatcttatctattaaaactccatgtcgtttgctccaccaggggcttccagtgcgcttttttccctcgatctcgtgtgatctgagtgtgagaaggcttatagtgtgcttgaggttcttcgacctctctataattcccctaagatactggaacaaaaggtaactgttgcgatatatgtcaatcttcaatttcgttgtcgcttagcagttgttgggctttggtacccagtctgtaattttgctgatgcaccagcgacacatatttatcattgtttattttttaatcaataacaaagcacaggtacaatataatcttatatagcttttaaggtatgtaaacatccactttagtgatgctaacaaatgtataaaataattattattattttttcatagcaatatattttatcatattgcatcttagttcatgctacctggatgtaaatgtggtgcggtttagtttagtaagatcttcactaatcactacatagtgcagcactgggctgttaatattttttgtaccatgtgtcataagcatgagatgttgcctgtagagtaccaatgctttattgcagtcttcctcctcgtctgccccaatgtcggcaagtcagccctcttcaacaggatcattgcgtctctgcgagctaatcagttctgtgagcgtctccctagccccaatggcgagtcaattgttgattgccatcagatctcaaagatgccaaatcttgcattcaccatagcaaacaagattttcaccttaacaccagagcagtacatagtgaagttggagcaagcaggacaaactatctgcatcagtgggtttatggcatttgacgtaccgcctccttgtggtcctctctgctatgctaaacatatctgtactactcttaagtgtgcaatgagggcgtccaccgagggcatcaccgtgcccccgctcgcccctccacgcccgcgcctgtctgtgtccgcccccttcgtctccccgcaatggccgcgtccctacctcatgtctacgacgacaactagggtaaacatgaagaagtcatcgggctcgggctcggtgtcgttggcgcggagcatcccggagctgtacgaggagaggggagccagcagcctccgggagttcgggttccaggagctccgggccgccaccagcgacttcagccgcctgctcaaggtcggcgaggtggctttgggagcgtttacaagggcgtcgtctgccttcctggcaggcccgccggcggcacgaagttcaaggttatctcattctggcatatctcatttgcctgctgatgaagtgaagcctttggttaaatatgataatgatgaagatgcacactcacctagtggccgtggaaggggtcgtggtggtcgaggccgtgggcggggcaggggcagaggtggacgtggaaatgggttcaatgagtatgttgatgctggttgggaagacgatcacgcccctgcatatatgggcaatggatatgcccgtggaagaggtcgcagtttcaggggccgtggtaggagaggcgacgacgataactagcctgaataccaacaggtcggaggttatttcaagaagatccaattgaaccaaaaaccggaataaaatttccaacatttttggaagacgactccagtccatctgcagcggtccttgttgggataggtttcaaaggcatgagagtgatgagggtcaaaaatctgaacctctacgcttttggtttatatatgcaaccaacttctatccgtgagaagttgggtcctaagtatgcttcatttccaactaacaagctgatggagaaccctgatttctatagtgatcttctcaggaaatgggttcaatgagtatgctgatgctggttgggaagacgatcactcccctgcatatatgggcaatggatatgcccgtggaagaggtcgcggtttcaggggccgtggtaggagaggcggcgacaataaccagcctgaataccaacaggtcggaggttattacgaggaggcacctgttcatgctccagctttagattttcaccatttgtaatggaactgaaaccagcctctcatcgaagtggaaacctttttttagtcgtaaacatttacatggtttatccagtggtatgctgatgaaagatgctaagtttcgcttaatataatgtatatgaaggtcctgtgtacgtcaaattttgtccacattgaaccagtacgaatgacatcttccttgaaagttatagaaatgcttcaaagtt

SEQ ID NO: 8845 - DNA, 3680 bp, Zea Mays
atggaggccccaccctccgccctcccgtggtggctcgccaccactgcctgctccgcgccgccgacgcccgccgcgtcctccgtcgccggccgcctcgccttcctcttcctctccccctgcctgcagcgcgcgctgctcgccgcgatcgacctcctattcctcgtcgttgcgctcgccgtcatcctacgcgcccgcctcgcccggagcaacgatggcctgagcctcggcctcgaccaccgcgagcgggagcccctcctcgccaagccggccaccacggaccaggcgccgcctcccctccgccgtagctggagcttccagcacggcctagcgctcgcgacttccgcggtccaagcggcggccgcccttgtgcttctacttctcctcgcgttgctgcgccgcagcgggaggaccacggggctgcttgcggcggagtgcgcgttcctcgccgcgcacgccgtcgcgcacctcgcggccgcatgggttgtcgcggtggagaagaacacggcagggacgtcacccgcgcgactccacccactccacctcaggttcttctggctcgccacggccgctttcgccgcgctctacgccgggtgcgcggctgcgcggtacgccgccgccgagccgctcgtccccgatgacccgcttgcgttcgcgtggctggctctctcgctcccgctactctatttctcggccaccggctccaccggcctcgtcgtcgattccaatggtggtggtcgtgccgccgccgccacggaggagacgtacgccacggcgtcgtggttctcgctagccacgttcggatggatcaacccgctcatcgccaagggctccagagcgacgctcgcggccgaccaagtcccgcccgtggcgccgcccgacaccgccgaggcggcgtacgtgctcttcacctccaactggcccgcgccggcgccaggttcgtccaaggctcagcgcccggtgctcaccgcgctgctgcgctccttctggccgcagttccttctcaccgccgtgctcggcgtcgcgcacctctcggtcatgtacatcggcccgtcgcttgtggaccggttcgtcgaattcgtgcgacgcggcggggagttcacggaggggctgcagctcgtcgctgtcctcctcgttggcaaggcggccgagacgctggcgtcgcaccactacgagttccagggccagaagctgggcatgcgcatcaacgccgcgctgctcgccgctgtgtaccggaagtctctgcggctgtccacgggcgcgcgccgggcgcacggcgccggtgcgatcgtgaactacatggaggtggacgcccaagaggtggctgacgtcacgcaccagctccacaacctttggctcatgccactggagatcgccgtcgctcttgcccttctctacacccacctcggccccgccgtgctcactgcggtcgctgctatcgccgtggtcaccgtggtcgtggcctttgccaacaagctcaacatcgagtaccagttcaagttcctcgccaagcgcgacgagcgcatgaaggccatcaccgagctgcttaactacatcggcgtcatcaagctgcaggcgtgggaggagacgttcgggaacaagatccgcaagctccgggaagaagagctcgggtggctagccaagtccatgtacttcatgtgtgctaacaccgtcgtgctctggagcggccctctcgccatgaccgtgcttgtgttcggcacgtgcgtgttgactggcatccagctcgatgccgggaaggtcttcacggcgaccgcattcttccgaatgctggacggacctatgcagagcttccccgaggcgatcgctgctgtgacgcaggcaaccgtgtctgttggcaggcttgatagataccttcttgatgcagagcttgatgactcggcagtggagcaggtggacggcaccggcattgacactagcgcggtggtcgtggaggtgtgtgacggtgtttttgcgtgggacatgaggggaaacaagcagaggaaagaaagtgaggatggtgaaagcgaggaggagaaagatgtggaggggacaccggtactggagacggtgctgaaggggatcaatgttgaggtaaggaagggtgaacttgtggcagtggttgggatggtaggatctggcaagtcatcactgctttcttgcatcatgggggagatggagaagatctccggcacgagtatgtgggagcactgcatatgtttcacagactgcttggatccaaaatgggaccattcaagagaatatcttatttggacagccgatgtatgctgaaagatataaagaagtcattcattcttgctgcctggaaaaagattttgaaatgatggaatttggagaccagactgaaataggagagcgaggaatcaatctcagtggtgggcagaaacagcgtattcagctcgccagagcagtctaccaacattgtgatatatatcttcttgatgatgtctttagtgctgttgatgcacacactggttcaaatatctttaaggagtgtctaagggggacacttaaggggaagaccgtcatacttgttacacaccaaatggatttcttgcacaatgtggaaaacatatttgtcatgagagatggtatgattgcacaatcaggaaagtatgatgaattaatagaagcagattctgattttgccgatcttgttgctgctcatgacagttcaatggaactggtggagcaacgttgtcaagtagagaaacctgaacattttcagcctactacagtagttagaatcccttctctacgctctagatccattggaaagggtgagaaggtggttgttgcaccagaaatagaagcagccacttctaagattataaaagaagaggaaagggagagtggtcaagtaagttggcgagtgtacaagctgtatatgacagaggcctggggctggtggggagttatgggcatggtttcctttgcagtcgtgtggcagtgctctgatatggctagtgactattggctatcatatgaaacgtcaggcggcattcaatttaacccatcgttgttcattggagtgtatgtggccatagctgctttttcaatggtccttcaagtaatcaagactcttcttgagacagttttgggtcttcaaacagctcagatatttttcgagaagatgtttgacagcattctgcatgcccctatgtcatttttcgataccactccttcaggaaggattctcagtcgggcatcgtctgaccaaacgaccattgatgttgtgctggcatttttcattggtctgacaatttcaatgtacatttcagtattgagcaccattattgtcacttgtcaggttgcctggccatcagttgtagctgtaattccacttctattattgaacatttggtacaggaatctctatcttgcaacctcacgggagttaactcgacttgaaggagtgacaaaggcaccggttattgatcacttgtctgaaactgttcttggtgtcacaactataagatgtttcaaaaaggagaaagaatttttccatgagaatttagacaaaattaattcaagtttgcgcatgtacttccacaactatgccgcaaatgaatggcttggtttccgactggagctaattggaacacttctattgtcaataactgcatttctcatgatcagcctgcccagtaattttatcaagaaag

SEQ ID NO: 8846 - DNA, 3864 bp, Zea Mays
tcgccccgtccgcaccggcgttggcgttcacagtcgcagagtattccgcgccgccgcgttacgttccttgaccagtcgccgttcaccaacgctcactaggactagaacttcgccacggcctcccgcctcgtcgcacccaaacccaaatgtgaggtaccaccacgggccacttgccagtgatggaggccccaccctccgccctcccgtggtggctcgccaccactgcctgctccgcgccgccgacgcccgccgcgtcctccgtcgccggccgcctcgccttcctcttcctctccccctgcctgcagcgcgcgctgctcgccgcgatcgacctcctattcctcgtcgttgcgctcgccgtcatcctacgcgcccgcctcgcccggagcaacgatggcctgagcctcggcctcgaccaccgcgagcgggagcccctcctcgccaagccggccaccacggaccaggcgccgcctcccctccgccgtagctggagcttccagcacggcctagcgctcgcgacttccgcggtccaagcggcggccgcccttgtgcttctacttctcctcgcgttgctgcgccgcagcgggaggaccacggggctgcttgcggcggagtgcgcgttcctcgccgcgcacgccgtcgcgcacctcgcggccgcatgggttgtcgcggtggagaagaacacggcagggacgtcacccgcgcgactccacccactccacctcaggttcttctggctcgccacggccgctttcgccgcgctctacgccgggtgcgcggctgcgcggtacgccgccgccgagccgctcgtccccgatgacccgcttgcgttcgcgtggctggctctctcgctcccgctactctatttctcggccaccggctccaccggcctcgtcgtcgattccaatggtggtggtcgtgccgccgccgccacggaggagacgtacgccacggcgtcgtggttctcgctagccacgttcggatggatcaacccgctcatcgccaagggctccagagcgacgctcgcggccgaccaagtcccgcccgtggcgccgcccgacaccgccgaggcggcgtacgtgctcttcacctccaactggcccgcgccggcgccaggttcgtccaaggctcagcgcccggtgctcaccgcgctgctgcgctccttctggccgcagttccttctcaccgccgtgctcggcgtcgcgcacctctcggtcatgtacatcggcccgtcgcttgtggaccggttcgtcgaattcgtgcgacgcggcggggagttcacggaggggctgcagctcgtcgctgtcctcctcgttggcaaggcggccgagacgctggcgtcgcaccactacgagttccagggccagaagctgggcatgcgcatcaacgccgcgctgctcgccgctgtgtaccggaagtctctgcggctgtccacgggcgcgcgccgggcgcacggcgccggtgcgatcgtgaactacatggaggtggacgcccaagaggtggctgacgtcacgcaccagctccacaacctttggctcatgccactggagatcgccgtcgctcttgcccttctctacacccacctcggccccgccgtgctcactgcggtcgctgctatcgccgtggtcaccgtggtcgtggcctttgccaacaagctcaacatcgagtaccagttcaagttcctcgccaagcgcgacgagcgcatgaaggccatcaccgagctgcttaactacatcggcgtcatcaagctgcaggcgtgggaggagacgttcgggaacaagatccgcaagctccgggaagaagagctcgggtggctagccaagtccatgtacttcatgtgtgctaacaccgtcgtgctctggagcggccctctcgccatgaccgtgcttgtgttcggcacgtgcgtgttgactggcatccagctcgatgccgggaaggtcttcacggcgaccgcattcttccgaatgctggacggacctatgcagagcttccccgaggcgatcgctgctgtgacgcaggcaaccgtgtctgttggcaggcttgatagataccttcttgatgcagagcttgatgactcggcagtggagcaggtggacggcaccggcattgacactagcgcggtggtcgtggaggtgtgtgacggtgtttttgcgtgggacatgaggggaaacaagcagaggaaagaaagtgaggatggtgaaagcgaggaggagaaagatgtggaggggacaccggtactggagacggtgctgaaggggatcaatgttgaggtaaggaagggtgaacttgtggcagtggttgggatggtaggatctggcaagtcatcactgctttcttgcatcatgggggagatggagaagatctccggcacggttagagtatgtgggagcactgcatatgtttcacagactgcttggatccaaaatgggaccattcaagagaatatcttatttggacagccgatgtatgctgaaagatataaagaagtcattcattcttgctgcctggaaaaagattttgaaatgatggaatttggagaccagactgaaataggagagcgaggaatcaatctcagtggtgggcagaaacagcgtattcagctcgccagagcagtctaccaacattgtgatatatatcttcttgatgatgtctttagtgctgttgatgcacacactggttcaaatatctttaaggagtgtctaagggggacacttaaggggaagaccgtcatacttgttacacaccaaatggatttcttgcacaatgtggaaaacatatttgtcatgagagatggtatgattgcacaatcaggaaagtatgatgaattaatagaagcagattctgattttgccgatcttgttgctgctcatgacagttcaatggaactggtggagcaacgttgtcaagtagagaaacctgaacattttcagcctactacagtagttagaatcccttctctacgctctagatccattggaaagggtgagaaggtggttgttgcaccagaaatagaagcagccacttctaagattataaaagaagaggaaagggagagtggtcaagtaagttggcgagtgtacaagctgtatatgacagaggcctggggctggtggggagttatgggcatggtttcctttgcagtcgtgtggcagtgctctgatatggctagtgactattggctatcatatgaaacgtcaggcggcattcaatttaacccatcgttgttcattggagtgtatgtggccatagctgctttttcaatggtccttcaagtaatcaagactcttcttgagacagttttgggtcttcaaacagctcagatatttttcgagaagatgtttgacagcattctgcatgcccctatgtcatttttcgataccactccttcaggaaggattctcagtcgggcatcgtctgaccaaacgaccattgatgttgtgctggcatttttcattggtctgacaatttcaatgtacatttcagtattgagcaccattattgtcacttgtcaggttgcctggccatcagttgtagctgtaattccacttctattattgaacatttggtacaggaatctctatcttgcaacctcacgggagttaactcgacttgaaggagtgacaaaggcaccggttattgatcacttgtctgaaactgttcttggtgtcacaactataagatgtttcaaaaaggagaaagaatttttccatgagaatttagacaaaattaattcaagtttgcgcatgtacttccacaactatgccgcaaatgaatggcttggtttccgactggagctaattggaacacttctattgtcaataactgcatttctcatgatcagcctgcccagtaattttatcaagaaag

SEQ ID NO: 8847 - DNA, 4291 bp, Zea Mays
ccacaataacccatcacggagagaaacgctgccaagatgctttacacacatatggccgcgttatatatggcccacgcgcaacaccaagttggttaagatcctgtggatcgtagcgccatgagtggttggacaagagcagtggaatgggaaatcattttttttccaggaagaatccgcaccaagtccactgctttgacactcaccacacaccgattgattagttgaggctgaggctgaaacaggataagcgtcagggcagtttgtggcggggttcagtgggttggtttgctcgctcgctcactcctgctacccgcctctttttttgaccgtaaaccaaagccatcgtcttcctgcctgtgcctggtggggccaatcaggacgcagagggttggtgcaacaacccgacctcgcggcgatggcgcgacccgatcagcccagatttgcgaacgcccacgacgtgttcgccgaaatgccaggccaaagatactggggctggacatctgcgcggacaccatcgtcggcgaccagatgcagcgggggatctccggtggccagaagaagcgtgtcaccacaggagagatgattgttggcccgaccaaggtgctattcatggacgagatatcaactgggctggacagctccacgacattccaaatcgtcaaatgtctccagcagattgtccacttgggcgaggccaccatcctcatgtccctcctccagcctgcccccgagaccttcgacctattcgatgacatcatcctactgtcagaaggccagattgtttaccagggaccccgcgaacacgtccttgagttcttcgaatcttgcggattcagctgccccgagcgcaagggtactgcagactttcttcaggaggtaacatcaaggaaggatcaggagcagtactgggctgacaagcagaggccttacagatacatttcggtgccagaatttgcacagcggtttcaacggttccatgtcgggctgcagcttgagaaccacctctcacttccgtttgacaagagccgtagccatcaggctgcccttgtattctcaaagcattctgtgtcaacaacagaactcctcaaggcatcttttgacaaggagtggctcctcatcaagcgcaattcattcgtgtacatcttcaagaccttacagcttatcattgtagccctcgttgcttcaacggtgtttctgagaactcacatgcatacgaggaatctagatgatggctttgtctacattggagcactgctctttactctgattgtgaacatgttcaatggttttgctgagctctccttggccataacaaggttgccggtgttcttcaagcaccgggacctgctcttctatcctgcttgggtcttcacactaccgaacgtcattcttaggatcccattctccattattgaatctatagtctgggttcttgtcacatattataccatagggttttctccagaggctgacaggtttttcaagcacttgctgctcgtgttcttgatccagcagatggcaggtgggcttttcagagcaatcgctggactttgcaggtccatgatcattgctcacactggtggagcactatctcttcttctcttctttgttcttggaggctttctcctgccaaaagctttcatccctaaatggtggatttggggatactggatttcacctttaatgtatggatacaatgctctagcagtcaatgaattctattctcctcggtggatgaataagtttgtactggatcaaaatggtgttccaaaaagactggggatagctatgcttgaaggtgccaacatctttgttgacaaaaattggtactggattggagcagcagggctcttgggtttcaccatctttttcaatgttcttttcacattgtcactcatgtacctgaaccctcttggcaagccacaagctattatatcagaagaaactgcaaaagaagcggaagggaatgggcatgcaaaagggacaataagaaatggaagcacgaaatcgaaggacggtagccatgataaggaaatgaaggagatgagattgaatgcgcgtttgagcagcagttcatctaatggggtttcacgagtcatgtccattggcagcaatgaagccgctctgtcaagaggcatggttcttccattcaaccctcttgccatgtcttttgataatgtgaattactatgtcgacatgcctgcggaaatgaaacagcaaggagtgcaggatgaccgactccaattgttgcgtgaggttacgggatcattcaggcctggagtgctgacagcacttatgggtgtcagtggagctggaaagactactcttatggatgttttagctggaagaaagactgggggttatattgaaggagatatcagaattgcaggctatcccaagaaccaagcaacatttgcaaggatttctggatactgcgagcaaaatgatatccattctcctcaggtcacagttcgggagtctttgatatactctgcctttttgcgccttcctgaaaagattggagataaagaaataactgatgatataaagattcaatttgtggatgaagttatggaactagtggaactcaacaatctgagcgacgctatagttgggctaccaggaatcacagggctttcaacagagcaaagaaaaaggttgacaatagccgtggagcttgttgccaatccatcaatcatatttatggatgaaccaacatcaggacttgatgcaagagctgcggcaattgtcatgagaaccgtgcgaaacacagttgacaccggacggacagttgtttgcacaatccatcagccaagcattgacatctttgaggcttttgatgagttgctattgttaaaaagaggaggccaggtgatctactctgggaaattgggtcgcaactcccagaaaatggttgagtattttgaggcaattcctggagtgcctaaaattaaagataagtacaatcctgcaacgtggatgctggaggtcagttcagttgcagctgaagtgcgactaaagatggattttgctgagtactataaaacatcagatctcaacatgcaaaacaaggtactggtgaaccagctgagtcaaccagaaccaggaacatcagatctttatttccctacagagtactcacaatccacagtaggacagttcaaagcctgcctctggaagcaatggctgacctattggcgcagcccggattacaaccttgttagattttccttcactttgttagttgccttgctgctcggctccattttctggaggataggcaccaacatgggagattcaaccactctcaggatggttattggatcaatgtacactgctgtgatgtttgtcggcatcaacaattgttcaactgtgcagccaattgtttcaattgagaggacggtcttctacagagagagggctgctgggatgtactctgcaatgccatatgccattgctcaggttgtcatagagataccatatgtgtttgtccaaacaacgtattacaccctcatcgtatacgccatgatgagtttccaatggacagctgccaagttcttctggttcttcttcatttcctacttctccttcctctacttcacctactatggcatgatgactgtctcaatctccccaaaccatgaggttgcatccatcttcgccgcagctttctattctctgttcaacctcttctcaggctttttcattccaagaccgagaattcctagatggtggatctggtactactggatttgcccattggcatggacagtgtatgggctcatcgtgacacaatacggagacctgcaagaccccatcacagtccctggcgaaagcaaccagacgattagctactatataacacatcattttggataccatagggattttatgccagtcgttgcgccagttctcgtgctctttgcagtattcttcgctttcatgtacgcagtctgcatcaagaagttgaactttcagcaacgataggaacaagatatggcagaaaagctcttgagagtattttttctttttttggaaaatacttccttttctcctttcatttttgagtccctttaatatattgcaatgtatatagggtgtagcttcggtattccacacatcgtcaaatgtggcgaggtcttatacagatttctagccgtttaactgtggaacattgtaatttgtaagagcacatctatgagaaagttttgttcatgcccaattcatttcacatggaatctttcgtgaaaccaactattcaattggaaacgagtataaggttatgtaaaag

SEQ ID NO: 8848 - DNA, 719 bp, Zea Mays
tcacgccaccctctctgggctggagagccccggaaacggacgccgacgcgcggcagcccccctcgccgccttccggagccttccgcgtcttccgttaccagtccgggccatcataagggggcgagggcgagagggggggcgccccgtcgaaccctaaatccctcacccccattcctcaccgcgggcggcggcgcgcgcttgcggggcaaggctgctgctatgctcggcgaggatccactgaagtgaggttggactcagagagtccgaccttccggggatggaggtgcccaaggcggtggcgctcgtggccgccctggcgctcgtagcgctgggagcgctggccaccaggtggctgcagcgcatggaagcgcggaacgaggaggtacgccgcctcgcgttgctcgcggcggcggaagaggagaccatcgcgagggaggaggcctactactacgggcagtacggcgggtttgtgcgctcgtccgacttgccggaggcaccctcgctgtgggcggcgcaggaggtgcctcctgcgccgaaggaggtgatggctgaggcggcggcggcggcggcggcgacggtggcctcccctacggcggggaagggcgtctgtgcgatgtgctccaagccaacgacgctccggtgcaagcgatgcaagagtgtcaagtactgctagctagtgtaagagtaggccacattctagcaggcgatgtgtacgtgag

SEQ ID NO: 8849 - DNA, 2782 bp, Zea Mays
atctagtattaaaatacgatgtatattaattttcttcacctaaaatagtacacctttttattacaaagtttccttggcagatcttaaaaaaattactatacatatttgagcagacacctaataatattgcttgctgctacttattcttcattaattcagctacaatacttattatactgcatgttgttgtacatttctagcggagctgaagtagagagacacgaatagaggagccgctgcatttggaggtggttgaggacgtcctctattttaccggaccctttagcgcacgttgttggaggaaaaaagttgatcaccatgcgctaaatatagagtagaggagcatatagcgcaccttgctggagagagtctaggccctgcctctctggggtaaagtaaagtatccaaacatcttgtcacttcaagggaagcgttagaaaccgttgtgtcagcgttcactttgtcgtctcaacgggatcaattggaagtcttgagaaacataacagcaaacctaaccccatagacctaatacgttccaaatgctgcaatgccaactaccagaatgcttgaatcaattaggactgttccccatcaaaattggcaaaactgagctgcgtttctcggacagtagcctcagccttatggtaacaacagggaacctccgcaccagatgtgtctcccctcgagctatatagggttaggagaaaacaaaacatcagtcaagcactaacaaggatggaccagtaactactacaagggcatcatccatcacacacctcggaacaagtttcattggcaccatgacgagggcggtctcatggacacatgcacctcatgttcttcagggccaacacggtactttgggacaataatctccaggcctgtccccgtttcatcgcggtatgcttccagagtggcatcttcagggatccgggtaggcagtgggatttcccggacaaactctcctggtgggcaatgctcaggagaaggatccgccaacttgaaagtccgatcatgccttttcaataatggcatcctaccaacgctaatgcaagataccttaacaatcccattcgtaagagtattcttccatgaaaccttcaccttctgaaaatcagagaaaggcaggctaacaatgatcaagtagcccttgctgtcctcatatattgtttttgcggcagttactggtccagaagcatggcgcatcacacctgtgaagtcattcatccatgatggctcaaaggtgtggctcacatccatgtcttgggccttgtctgaattcgaattgctgcagtcctcttccgttgcagacggtgaggaatccttcctgcgcttgttacagatggttgcgatctccatggcatccccagaactgtgattggatggttgtgtcgataggttaaggccagaaccgttcagcaacctcttgtggtgcccatgtgagctactctttgtaggaaccacggctgctagcctctcgagctcaaattccgtgctcggcagattcctccaagactcgaaatcacttgcctcggctgggatcgagaaattggcatccctcccggtgagctccatccacctctttaaatcagactcaggtacacctgccaagtttggcgccctcacgatttcgatcccgtgaatacactgcgggttagagagcccacgataatgcttgcgctgcatccggtgtgagcgcacaaaccctttgtctgcgctgaaagggaactgtggatccccaaggcgcgagtgcccattcatgaagctcctcagctgcatcttccccagggcattctccgatcgctccttaaagatccacatgtacatgttctccatgtcgtgctgcaccaggaaagcgtccagagtggcactggcactattaccattcccgccggtggtggctgccttcgccttgccacccttgtcggtggacatgactggcttgaagtagtgggtgaagaagaaccacgctccccaaatgctatcattcctcttgacgcacttgcgcgccacgctggaaccggagcccttggtgtgggacacggcgatcacggtggccgcggctgctgctggggccaagacaggcccggcagcagcgggcgaatccgagtcgtagtgctgcgggccgccgaggccggcatctagcacgtcaacgttggcgtcgtgcgacgccggaggtggcggagacgggtcggcggtgagggggaggttgatgtcagggggggcgaccgccgcggcatgtaggcagcggcggaagggcccctgtggcgggaggaagaggtcgaagtggtcgtgggaggcggtgtccatggagaggaaggtgaaagggccctggtgtggatggtgggccgtggtggtgtccatggagagcgcggtgagcagcgactcgcccatggcggcggcggcggccgtcgtcctcctggcggctcgctcctcgtccgcctgctgctccccttccgtcgcttctctgcccaaatcttcggcgcttcctcctccaccgcctccgcacggcgcgctcctctcctccgaatcgctccacgagcatcagttagcgaccaggcttcacacctccctcgcgtccatccgccagccgagaggaaatggggggggtgcacgtacctacgcaggtccaagaaacccggagctctcaaatcgacgaaccgcctccaccatccagccgaacaacggtccaagaatccctccctcctcctgctgcggtacgttacaatcaaatcaaatgaaaaaaaatcaaacgtcgtcgaatcggcgggcgggggctcgc

SEQ ID NO: 8850 - DNA, 2169 bp, Zea Mays
ataaagatggactcagatcagacctcaccacatgtgcgccccaccgcgccttcttatacgcaacgcacctggaactcccctccgtccacaccccgtctcgcctatcgtcgttccgtcatggagtcctcctgcctgggaaagcgcaggctgaacggcgccgagagggcgccgcccgcgttcctcccgctggggtacgagtacggcgacgcggacgcggtggaccacatgccccatcgcttggagacgggcgagatggacttcttcaagagagagaagagggagaggaaagctgacgccgccgccccggacgacctcggcatcaaggaagaagacatcaccatcaacatgggtctgcaccacgtcggcagatggaagaacaggagcgaagagtccgtcgacgagggcgtctcctccaacgacggggatacgagggagatgaaaactgagctggcactgacaaaatccgagcttggacgcctgaacgaagagaacaagcagctcaagaacattctcaccaggctgaccagcagcaactccaaccccctccagatgcagatgcaggccctcacaacgatgcaacagctaaggaacaatatcatccatcgaggtcttcgcggagctccaagccatgagctgaacgtcgatccggagaagaagaaggaccaggaggggagccgcggcggcggccacctgctcccgcagcagttcatcgggctcagcacccccgcgttgtcgttcgacgacccgctgcgcttcgtggcctcagacgtgcaaggcggcgagagctcagcgtccaccagcaacgtggagccgccgccgacgacgacgaccatggaaatgatgccgctgcccgcgttcgagcacggccaccaccagcacctcgcccatgagaggggtagcagtagcagcccggacgagccaccgtcacaccacctggcggtgaatcagggttggctctcgaacaaggtggccaagttccttcccgtcaagggccccgagcccgccaccatgcggaaggcccgcgtctccgtccgagcccgctccgaggtactcatgatcagtgatgggtgtcaatggaggaaatacgggcagaagatggccaagggcaatccgtgcccccgctcgtactaccgctgcaccatggccgccggctgcccggtccgcaagcaggtccagagatgcgcggaggacacgacggtggtggtcacgacgtacgaggggaaccacaaccacccgctgccgccggcggcgatgccgatggcttcgacgacgacgacggcgtcgtccatgctgctgtccgggtcgatgccgagcgcggagggcagcagcctgatggcggggtccaacttcctggcgcgcgccgtgctgccgtgctcctccagcgtcgccaccatctcggcgtcggcgccgttccccaccgtggcgctggacctcacgcagccgctgccgccgcaggcgcaggcgcggagcacgacggagccttcccagctccaggccgcgctcgccgacgccgcgggccgaccgacgccgcagctgttcgggcagaagctgtacgacccttcctcctccaaggcccccgccgcctcgcagggagcggacgcggcgggcgacaccgtcagcgcggcggccgtgatcgcgtccgaccccaacttccctgcagtgctcgcggcggcgatcaagtcgtacataagcgggaacggcagcggcggtgggaacagtggcacgaccgtgctgccgccgccgccggcggcgagcagcgccgacgatagcagcagagatgacaaggccggggagcaggggggctgaggtgatcgtccgtttgcttgattgctcggtttcaatttccttccgtctgcgtagttgagttcccacaagactccagtctcctcagtttcgaagtaggagacggaaattttgctcttttcattattttactctaacgattttgttttggctagaatttgtagttacagaatcacgcagttccggtcggtgtgcaaccagttttattgaattcttggtagttgtcgagaaaactgaaattgctggatccaactcttcaccatgctggtccgacttgtacctttcttggttcatgaacgtatgtttgtcattggatattcaaatgtagacataatttaatctagaaaataacaaatgatttgtaac

SEQ ID NO: 8851 - DNA, 718 bp, Zea Mays
gttcaatcccaatatctctctccagctccagcatgcacctcaaacaaatctgggtggcatgaattcattgctccaaattgaaacatccccaacatttcctcttgtatccaaggtctcaactataatcttgggaatggatgtgtcccatggttctcttggacattgtgagagcttctgtccgcacccaatcacctaaaatggaaatgattgactcattgtttaagccacgagaagctaaagatgatggtctgatcagggagtgtctgattgacttctacaccagttctgggaagagaaagcctgaccaagtcatcatcttcagaaattccttctgtctcaaatggagacaatgacgagtggtcagaagtacagattttaaaactatgacttacgttcatcatcttaagtctatgctcctctctgtgcttgacctctcaagtacagattttaaagcctcatctgcttcagtttattgttcttgttctcagattttgatatgagaatatagctcagagttcaagtactgatcataatgttgaagaactgttggcgtaatgaagctcatttttaagagcagtaattttggatcacgtgttctgacgaatctgttagctgattgttgatgcttttattctgtaacctatggccataactcaagaacttatgcatgaatttatccatcccaattatgatttccgagcattcattttctgtttat

SEQ ID NO: 8852 - DNA, 2116 bp, Zea Mays
gcatccatcggcggagcgcaaacgccgacgatccgcgtgcgtacatcggtacatgcgcctttacgagccgagcacgcacgaagggcacgctatgccgagtgacgttagccctcgtccccaactgcgcgaactcccgcgacaaccgcgcatgtccccgtcagccccgacagcgcgtgcggctcgcgctcccgcctcggcgtcacgcgacggcgggggggcgcgctgctctatacacgttccgccaccgccaggcgcggccgcggcaacttggctatttagttcgagaattctccaggggagatggagcacggagtccctgagatcgatcttgctctcagcgtcggagagttagctgcacaccccccgatccccggccacgctccgatcgtacgaggctagctgctccatcatcgccctcttctgggaccctgcccctgccgtgagtggatcaatccatggacgccgcgcaggtgcccgcggcagtggtggtcgacgtcggggcgctcaccggaccgatagggagcgaggcccccgctgcgccgaagggcccagcatggaaaaggttcttgtaccacgttggaccagggtttatggtgtgtttggcctaccttgatcccggaaacttggggacagatttgcaagctggcgcagatcatagatatgagctcctctgggtgaccttgattggcctcatcttcgcgctaattattcagtcactatctgctaatcttggagtagtgacagggcggcatcttgccgagctatgcaagacggaatatccagcatgggtgagaatctgcctatggctgctagcagagttagctgtgattgctgcagatatcccagaagttatagggacagcttttgctttcaacatcttgttccacgtgcctttgtgggtgggggttcttatcactggctcaagcacacttcttctccttggactgcaaaaatatggggttaggaagctggaacttttggtcggcctattggtgttcgttatggcagcatgcttcttcatagagatgagcatagtgaagcctcctgcagaagaggtcatccacgggctattcatccccagtctgagtgggccgggcgccactggagacactatagcccttcttggggctcttgtgatgccgcacaatctattcttgcactctgccctggtactgtcaaggaacactccgtcatcagtaagaggaatcaatgatgcttgcaggttcttccttcttgaaagtggtgtagcgatgttcgtggcactaatcatcaacatatgcatcatctctgtctctggaactgtctgtaactccagcaacgtctcaccagatgactctgcaaaatgcagtgacatcaccttggactcctcgtccttcctcctgaggaatgtgctaggcaacagcagtgcggttgtgtatggtgtggctctcttggcttgtggaataagctcttccatcactggtacttacgctgggcaatacatcatgcagggtttcttggacatcaagatgagacagtggctgaggaacctgatgactcgcagcattgccattataccaagcttaatcgtcgccatcatcggcggatccagcggtgcgggccgcctcgtcatcattgcatcgatgatactgtcttttgagctgccatttgctctcatccctctcctcaagtttagcagtagtagcagcacgatgggccaacataaaaactctatatttattattgggttctcatggattctcggttttgttattattgggataaacatctacttcctcagctcaaaatttgttggctggatcctccacaattcactgcaaatctatgctaacattctcattggcattgtcgtgttccctcttatgctgatctacgtttgtgctgtgatctacctcacgttaaggaaggagaccatcaagttcgtggcttgcggtgagctgcagaccattgagaccgacaaatcaaagcttgccaatggcagcaacatggaggaaaagaaggatcagcttgtttagtcacatgacatgctttcaagaatgcttagggtgtagttggtttgatggcaagggtggatgatcataagtagatcttaggatatagatatctatgcaggctg

SEQ ID NO: 8853 - DNA, 2684 bp, Zea Mays
atggccctcacagaatcgcccgatcccagcccctccaccggcgacccattctgctcacttccatgcgggccccagcccgccacgaatccccgttcccagtcccgcctgctccgacctcgcctttctccatctagggtttctctctccatttccaccccatcggaccggagcttcgcatggagtcatcgcagtctcggaagcggacgcgccaagcgtatgactgcgccgccgcgctgccaccagagcgagaagtggtagcgaggggtggcgcgtcgcctccatggagggaggatgaccgcgacggacactacgtcttcgatctcggcgagaacttgacccgccgatataaaatcttgagcaaaatgggagaaggttcgggttttctgcaatctgtcgtctcctcttctggtgggtatcctcgttattattctaatgaagagggctacgagttgggttttcgtaggtacatttgggcgtgttttggaatgctgggaccgtgaaacacgtgaatatgttgccataaaagttgttcgcagtatccgcaagtaccgtgatgctgcaatgattgagatagatgtgctcaatcgccttgcagaaaatgagaaatacagatctctgtgagtatctcagaaacctgattatgtaaagtataaccctattctgtttctgactcgtcagttcctcttcaattaccagctgtgttcaaatacagagatggtttgactatcgtaatcatatatgcattgtaagtactagcttttggtcaattatactagtttctagaagtcagttaccaattctgagaatgcatttcatttttgtggatttgcggatgtgttgttgtttatattatttatcttactggccctcccaatacgccttgtatggaatgagagactcatctataaaaactatcacaactctcctgtagttagattggcttgacagtaaaatcattttgttcttcactcatgaaggttccctcatatggtcccaaatttaaaatatactttattcaatggatatcgatgattttgtcaggtttttgagaagcttgggccaagcttgtatgattttctaaagagaaatagataccgacctttccctgtggaacttgtgcgggagtttggacggcaactgttggaatctgtagcatgtgtgttagttattgcttgattctgcatatcaattattagctaatttggtagctgcagcttcactattattgctccaaaaggccagtgttgaccatcttcctttctttttgtaacagatatgcatgacttgaggcttatccacactgatctgaagccagaaaacatactacttgtgtcttctgagtatataaaagttccaagtacaaagaagaattcacaagatgagatgcatttcaagtgcttgccacagtccagtgccataaagctgatagattttggtagtaccgcctttgataatcaggaccataactcgattgtttctacgaggcattacagggcacctgaaataatcttaggtttaggctggagttttccatgtgatatttggagtgttggctgtattcttgttgaactatgctctggggaagcattgtttcagacacatgagaatctggaacacctagcaatgatggagagagttttgggacctctaccagagcatatgatacggaaatcaagaaatatttcaggagggcaacacgtttaaattggcctgaaggtgctgtttcaagagaaagcatcagagctgtgaagaaactggatcgactaaaggacttggtatcgaggaacgctggccattcgaaggcagagctggcagacttgctatacagtatcctccggttcgagccatcagaacgtctgacagcgcaagaagctctggagcatccattcttcaggaacccgacatgacttgttggacaggcttgactcgtgtaactctctgcttcaagaaggtatcgaggaagcaggcagagccgtccattgcaaagctgatgggtatcttgctcctcttttaccagagagtttgtgtaagcctgtcagtaaggcttcttgcggtggtgataaagctgatggctttggtcacccaatgtaatgtacactagcattttttttttacctagggagtttagtgcctgtatgttgttaaccgggacgcgctatgagctgcgtcccaatgccctggttccataatccaattgcagatgttgaaaatcaagcatgaagggatccctgcgcagctgtgctcccgtagctgcaatagtctgttggatgcaagtatcgtgatgtcacgagtttgggatttgttgcattccgactgcatgggtggtgtgaagaatgggcatgaaatgccgtgtcctgttgttgagacttgtgtgtagctggtgaagtgttgttgttgatggagtacaacttgtggaaagagagtgcgcataggctagaaagtacagtatcttcatactaggtaagggatgtttctgaagctcatgtgcaccgcgattgcatgttggcaccgaatcttatcgtacctcatggatccctcactcgtgctgtttcgtcctgacatggacacatgaggagaggagaggagaggagacgagccgtgccacaccgccatggcccgcgtcgctgttgcgtggttcgtcgtcacttgtctccacgggcggttgtcgtgtaaaagctcgtggt

SEQ ID NO: 8854 - DNA, 1205 bp, Zea Mays
ctcttcttctgtttgttcctttggtgtttccctttggctccatggcaggctcttcatcatacagcgttctccctgaccagaccatggacaacgatgatgcacaaattggagttgctaaaactcagggaaagtattggggcattttcatctgctggcttcttggaaatggatgtctatttgggttcaatgggatgcttactattgaagattactacgtgtacctcttcccgaagtaccatccaacaaggattattactctcacctatcagccctttgttctcgccacaaccgccatattcacatatcacgaggccaaggtcaatactagggtgcgcaacctggcaggatacacgttgttcttcttgagctcatttggagtgatcatcctggatgttttgtcttcaggaagtggtggaatcgccccattcgttggtatctgtaccattgctgctgcttttggcatagcagacggtcatgttcaaggcggaatgactggtgatctgtccctgatgtgcccagaattcgtccagtccttctttggcggcgttgctgcatcaggtgcaataaccgcggcgttaaggttcttcacaaaagcggtgtttgagaattccagagatggcctgcggaaaggagctatgctgttctcttcgatctcgtgcttctttgagcttctatgcgttctactttatgctctggtgttcccgaagttgccaatcgtgaaattctaccgttcaaaagctgcctctgaggggtctcagacagtcaccgctgaccttgctgctggaggcatcaaaagcctgccgaatccattggctgaggaagatggtgtggtcgaacggttgaacaacaagcagttgctgcatgagaacatggactacgctctggacatgttcctggtctatgtcctgacactgtcgattttcccagggtttttggcggaagacactggatcgcacagcttgggttcttggtacgtgcttgtgttgatcgcgagctttaacgtgtcggacctgatcggaagatacctgcctctggtcgagcaaatgaagctgacatccaggacggggctactaaccgcagccatctctaggttcctgctcgtcccggcgttctacttcacggcaaagtacggtgaccagggctggatgatcatgttaacgtcgctccttggactgagcaacggccatctcaccgtctccgtcctc

SEQ ID NO: 8855 - DNA, 1468 bp, Zea Mays
aggcccacgcacagaggaagcgcaatcccaccccacccggcacccgttgaccgctgttcgcctagcaatgagcgccatccactcacccgccgcgccgccggcgaggccgcctttccggcgcagcacgacgggagtagcgtctcccctccgggaaccctcacagccgcaaccgacgccaccggcgcctccgagcctcacctcccgccgcgccggtctcgtcgcactcctcgtggcagcggtggcgccggaacgccctgccgccgccgccgccttctcgctcggcattcctgggcccaaggagctgctgcgggagcagaagaagaagtcggcgtccttcctcctcgcgcccatcgccgcctcccgggacaccctcgtcaaagcccacgcgcttctggcttcgccgagtgcgtctactgaggacgccgaggaggtgaaggggcggatccttgcggcaggaagggactgcgtgccgcggcagaggaactcgattgtcgcgctccagtcgcggactggcgttgaggtgtgcacattcagcttgatactgaagaacgccgcgtcgctgctcgccaataaggattccctcaaggttgaagctgatactaggctcgaggagctcataaagtcattctctgaactgggaactctggtggagaacagtaattttgagctcgcagatgataggcgagtaatgccagcacacatatttttatttatttaaatcctggatatgagaaacatgtgtgacctattaatattctggcctcttactagtagcaacttgatgtttcctgtgacagcattttatgtctatctttttatttatgtaatgttgtcatcttttttttatctccagttaggatatttaaaattttgtatacggacagccaattctttctcttgttgattttgtaaataaaggagttgtatatcttatatcatcatctcaccataggagtttaaataaactgctgtaatattgtcggacctcatagtctggattgtcttctaacgtgaaatgaatggatctgtacaaattttattgaatgctctgtataagttcaaataaataagccttgtctttctatgatattgtttcaaaatatacgaatttagtaaatgctggcattgatcaattttgtcctgcagagagaagataaaagatggcttactgagcagtgtctctgccctggacaaatttgagcagagtgttaaagactgtttaggtgtttagacttttttgtgccagatcggatcacattttttcaaagcattttaaattgacttacttattgtttttatttttcttctatcgttgaggtaaggtttcatttgcctttgctcattagggacttctgttgtacaaatgatctgttcatttgatctgatatatgatatttatggtacaagaatgcttgtctgtaaacaaaaactagatttaaattgccagaagttcaaagcaaaaaagaaa

SEQ ID NO: 8856 - DNA, 2860 bp, Zea Mays
tcccaacagaacgacggtggaaccctggtctcctccctcttcacccgcacctgcactgcagcacacgcgccgccgaagcgctctgcccacctcgctcccctccagtggccgccggcgcggctcagcggtccatcctcctgacgccacctgcaacggcgccaggcggtgatccattccaactcgcggtcatctcaagtgggtgcggcaaccatgcccaaggttaagaatccccacgttttcatggacatatcaatcagtggaggcagcgccgagaggatcacatttgagctactcgcaaatgtagttccaaagacagcggagaacttcagagcactctgtactggtgaaagtggacttggggcatctacacagaaaccactctattataagggaacacatattcatcgcatagttaaagggtttgttgttcagggtggtgatttttcaagaggagatggaaaaggtggagagagcatttatggtggaaaatttccagatgaaaacttcagattactgcacaatcagcctggtgttctgtccatggcaaattccggcccagacaccaatgggtcacagttttttattacattcaaggctctacctcatcttgatgggtattgcttcttgttcttcagtcacctagctttattggattctcagttctctaaccacaaccaaacactaatactgtcataaaatttattaatgacatgtggcaagtaatgatcgttgcattaagtataaagttttagaaatacacgtttacaacatgtcacatcacacccctatatatcgtactgcactttctttgatactatagtatagtatttaatgctgttagtttctagttatctgtgatgtcttgtcttatatttcctgcctattctccatggcccagcaaccttaaatgaatttcaagctataatatttgtagcaaacatgtggtctttgggaaggtggtcagtggaatagctttgcttaaaaagcttgaagcagttggtagtgaaactggaaatccttcttatcaagtgaaaattgtagactgtggtgaagtttccaacacaaattctccggatctgctaaagggagagaaagaaaaaaaactaagaacggcagatggtaactccactgctgaagggagagccaaattaaaaaaaacatccggtgatcataagcaaaggaagaagagaaaacactattcgtctgattcatatagctcagatacttcagactcattgtcctattcttcagatagtggctctgattcagaatcagattcatcaatggatactagctcatccagtgatcataggcgtaagagaagaaaaggatctaagaaggataagcgcaagcccacaaagagaaagggtaaacatacaaggagtaagagaaagagtagaggatccaaaaggcgatctagacggagccatgggagttcaagtgatgattcagtaagctcaaagacagataacagcagttctgacagtgaaaagggtggccatcataccaagcgttccttgccgaaagataaagagagtaccaaaatgacaatttcagaacaaggaagaacttttcaagaagcggacaaagacgaacaaacagttactaccatcaatcgatcacaatcacatgatggaagtaaaccctcaaacaaagatggcaacagggctgatgaaagatctggaaattacaattcagaagataggaatggtccaggtggaagctccaggaacaatcccattcaggttgatgtaaatttaacgaaaccagtaaatgtagatggcaacactggtggtgataatgcagaggctggcatgtctagaactggtgaaggaaggcaccttccaagcaatgattctgtgtccaccaatggtaaagatttaggtgtgggttctgcagacaatgggcaacctcaacgaatcaggaaaggacgtggttttactcagaagtatgggtatgcacgccgatacaggacgccatctcccgagcgtccccctgttcgaccccgctacgatggagggagagatgatagatggaacaatttcaataggtatgaaagaaatggtccttacagtagacgctcgccagtaaggagataccatggctcgccaagagccaatagcccatccaggtacccaagaagagaacgaatgaggagtaggtcacgcagcccagtgaggcgccatgaccgtggagggtatcaccgccccagcccaagacgtagccgcagccctgcagaaccgagacagaatgtgaatgataggcctcgatcaggtcatggcggaggcgatcctgaccacagccctcctgccaacaggtccagatcgaagagccgggaccccttgggacccagatctcctgatgctgccccagccaagagggagagctccagatacaaccgcaggcgcagcagcagctcaaggtccagcagccctgatggaaacaaaggcctggtttcgtactgagaagtaacggcacaacagtttgcaggctccatggaccatgtttcttgctagtttagcatcatgtactcttttgtaatggattctgaacttgaactgctttcgatgcaggtgtagatttatatgttctgttagatttgaatgtttcttatgccagatatttatagaactactgagtagagcaggggaaaggctcgagcctcgtgaactggcttgagcttgctaaggcttggagaggctcgcgagtttgtaagcctgaatcgagactacttttatgactcgctcaaacgccgagccctgagcgaacttgagtcgactcgggagtctgcctaataatattgtgctacgttgttatattattatgtttttaatttattttcttattttttatggattca

SEQ ID NO: 8857 - DNA, 2853 bp, Zea Mays
atggcgacgattcttggcgcagatggcgggcgagagagacagcagagaggagagcagggtcggacctttcctggatgtgttgattctccttccatgatggcgagcgagagatcagaggctgagataggacagcgggggcgagtctgttggcgagacagcgtgagagaggagagcgggcgacggcacaagccagaaccacagttcggaaaaccacccatgcttccttcccgccatctccgcgccgccgcgcggcagcgaagccacaggcggccgcccgcccctgccgacgcttgcattacgggcaagcctgatatggaggtcatccggcgcaacagagccatcacggcgcacatgcgtgcgggccgcgttccagacgccgagcgcctattcgccgcgatgccccgccgttccacctccacctacaacaccatgctcgccgggtacgccgccaacggacgcctcccgcaggcgctctccttcttccgttccattccgcgccccgattccttctcctacaacacgctcctgcatgcgctgggggtgtcgtcatcgctcgccgacgtgcgtgctctgttcgacgaaatgcccgtgaaggattccgtgtcctacaacgtcatgatctcatctcacgctaaccatggtctggtctcgctcgcacggcactactttgatctcgccccagagaaggatgctgtctcgtggaatggcatgcttgctgcctatgtccggaacggacggatccaagaggcaagggagctgttcgattcaaggacagagtgggatgcaatttcttggaatgctttgatggctgggtatgtgcagcgcagtcagatagaagaagcgcagaaaatgtttaataaaatgccacagagagatgttgtttcctggaatactatggtgtccggttatgcgaggagaggagatatggctgaggcaagaaggttgtttgatgtggccccaattagagatgtgttcacctggacagctattgtctctggatacgcacaaaatgggatgctcgaagaggccaagagggtgtttgatgccatgccagataagaatgctgtgtcgtggaatgcaatgatggcagcatatgtccagcggaggatgatggaggaggcaaaggagttgtttgatgctatgccctgtaggaatgtggcttcgtggaacacaatgttgacagggtatgctcaggctgggatgctggacgaggcgagagcaatttttggcatgatgccccagaaggatgcagtctcatgggctgcaatgctggctgcgtattcacaaattggtttcagtgaggaaacactgcagttgttcaaagagatgggacgttgtggtgagtgggtgaataggtcagcatttgcttgtgttttgagcacatgtgctgacattgctgcacttgagtgtggaatgcagctgcatagtaggttgattaaggctggttatggggtgggctgctttgttggaaatgcacttctagctatgtacttcaaatgcggaagcatggaggaagctcacagtgcatttgaagagatggaggagagggatgttgtttcgtggaatactatgattgcaggctatgcacgtcatggttttggcaaggaagcacttgaggtttttgataccatgaggaagacatctaccaagccagacgatattactttggttggagtacttgcagcatgtagtcattctggcttggttgagaaagggatttcatacttctattcaatgcaccgggattttggtgtggcaacaaaacctgaacactacacttgtatgatagatcttcttggccgtgctgggcgattggatgaagcagttaatcttatgaaggacatgccttttgagcctgactctaccatgtggggtgcattacttggtgccagtaggatccaccgcaactctgaacttggcaggaatgcagctgagaaaatatttgagttggaacctgaaaatgcaggcatgtatgtcttgctttcaaatatatatgcatcatctggcaaatggcgtgatgtggacaagatgagacatataatgcatgagcgtggtgtgaagaaggttccaggattcagttggattgaggtgcagaacaaagtccacactttctcagtgggtgattctgtgcatcctgaaagagaggacatatatgctttcctggaagatcttgacatcaggatgaaaaaggctggatatgtatcagctacagatatggttttgcatgatgttgaggaggaagagaaagagcacatgctaaagtatcatagcgagaagcttgctgttgcttatggtattctaaaaattcctcctgggaggcccatccgggtgataaagaacctgagagtatgcagagactgtcacactgctttcaagtgtatctctgcgattgagggaagactgatcatactgcgggattccaaccggtttcaccattttagagatggttcttgttcatgtggtgattactggtgattatgactagatatttcatgcaaagaaattctgaatgaactgcactggacttcgaaatcatgataatgcaatgcatactaaggaccaaaaaagtaggcattctgatgtatggatctagccctgttagccactacccactagaccacctactttgctactggttcaaaaagaaattagcctggtgatctgccacattaaatggctttcagttcattgcttatgtacaagttaacaaatttcaattaaaatgaccatgccaggtagagggcgcactccatttagagatatatccaacaacaggatcatcacaaccgtaactgttgcccttgtgaacgtaaaatgcaatgggataagggtcgtctggtgctgaaatgactg

SEQ ID NO: 8858 - DNA, 2418 bp, Zea Mays
ccctcgttgacaccgaaccaaacacataaatctgaccggcgcggtggtcagcactcagcattagatatcgtggggcacctcgatccaaagataagcctggacggtacggaatggcacgtcagggcgggaccgccacggcgccaccgcttgaattgaaatcgtccagctgctagctcgagcggatagcagtatagcaccacgccgttgacccttggcgctttgcgagctgctgctaccgccagtccgtcagccacccaccgcgcgtgatcagattggaggcagcgagagcgagtccacgaccacgagcgaaccgagttgtccgcgcccggcgcctcgtcatctcccacctcctctgcggctctgcctcaggtcgggtcccggagcgtttctcgcctacttcgccttgccccctccccacgtcgcggaacgatcggtgcgacggtgccccggccgaacccattctgcctggcacctgcggggtatgatcctgggcggcctgtgccccgcccccgcatcaccttgcctggcgtcgcgctcgaccgcgcggcctcctcagccctgaacaccgcccgcccgcctgccgggtgtgagaggataggatcataggaggagtaaggagcggggcggcggcggcgacggcatgagggccgaggcgacgggctccgcggcgaagctgctggcgccgcggatggtggtgtccgcctccagccgcgtccaggagctggagaggttctcgcattacgtcggcagatcggctttgacgatgtgaaggaatgccctcacctgtgcacgctagcttacgattatctcaggaagaacaagggttacgaagagaacatttttgcgttctttcagaatagcatggatcccgagcccctgattgtgaagtttatcgaggagcttgacaaatgcatagttggctacttctccttccattggaaatatgccacttacataattacccaggttctcacggtagaaggtgcgactaaaagaaagttcaagaattttgtgttagaggccaccagggaacagagattcgagagagtgacaagaaacttgaaggttacaaggattttctccacactggtggaggaactgaaggccataggactatctagccgtgatgattctccacggaatgatgtgatggttccagtagcacactgcaaccgcagcccagttttactcctgatgggtggtgggatgggagctggcaagagcactgtacttaaagatatccttaaggaagcattttggtctggagcagcagcgaattcagtgatcgtggaggcagatgcattcaaggaaactgatgtaatctaccgagccattagctctagaggccaccacaatgacatgctgcagactgcagagctggtgcaccagtcatccttggacgcagcctcgtcgctcctcgtcactgcactcaacgaaggccgggacgtgatcatggatggcactctgtcctgggagccgttcgtgcagcagacgatagccatggccagggccgtgcaccggcagcggtaccgcatgggatgcggctacaagctcacagacgatgggacaataaccgaggagtactgggagccggttgaggactctaacactgacgaggaaaacgaagtaccggcaaggaagccctaccggatcgagctcgttggtgtggtctgtgacgcatatctagcggttgtcaggggaatcaggagagctgtagtcactgggagagcagtgagggtgaagtcgcagctgcagtctcacaagcgatttgctacggctttcaacagctactgcagcctcgtcgacaacgccaggctctacagcaccaacaccttgggtgttcctaagctgataggatggaaggatggcgagagcagcttactggtggatcccgaagaaatcggctgcttggacaggctacgaagcttgaacgaggaggccgactgcgtccatgagctatacgccgacggccaaccgacaggaggctcgtcgtcagcgtggcaggacctgctggtcatgtcgccgtccagggtgtcggcgcagcgggagctcaaggctgccatcgagaggaacgaggggcgcttcgtcaaaccggcatagccgtgtagctgctacgttcgttcgttagttcggttccaacttccaaaggaatcgttccctagccggattgttgatcagctggaacgatttctgaatagattccttcgtaaccgaacatgcccttatcaggcgcatcatccaaaaacggggaaagatgaagctaatgtgatgctttgattgtggaggtggcctatcttcttcttttgtttccaaacatacgaatttcgcaatgcattttgtatgatgcgatccaaaacgctttgcaccgcaaatttattgcttgagaaaactagtttgttagcatgaagtatcagtgca

SEQ ID NO: 8859 - DNA, 4315 bp, Zea Mays
accacggcatccaccattccagctccaggccaggagaaaacgttccgggactgggactgcgttcaccttgctttttcttcccacgctcaccccgcaccgcgtgccctctctggctctctccctctcgtggggacgactgggcgaccgccgccgccgccgccttacgccaggtgcccaggtcttagtcggccccttcgccggcgacgaggacctaccagctgtgaataaggttgtctggaacggccgtgggctctgcggatggcaggttctgtggtaacggatgattcagctgctagcacaactggaatgagggatgatgaaaacagtctctctggcgagtccttctctgagtggaggtcctgtgatagggcagacagcgataccccttcaacatccccacccttctgggatagcgatggtgatgatgatgatcctggcagagtgtggcatctgccagctggtgtgaaggaggatgagaaggtgcaggtggagacgtggaagaagggggatggtggtgatggcccaaagccttcagaattgtttggacatcacacttggaggattgaaaacttctcaaaggagaagaaaagagaaatgaaaagtgagccatttgaagctggtggttacaaatggtatattcttgtataccctcaaggatgtgatgtctctaatcatctttcattattcctttgcgttgctaatcatgacaaacttctcccaggatggagtcattttgcacagttcactatagctgtagccaatatagatcctaaaaagatgaagtactcaggtgagctgaacttggtttgttttcttcttggaaggttttggaagaaggaacatgattggggatggaaaaagtttatggagctgtcaaagattcaggatggttttcttgttgacgatgttcttgaaatcatagctcaagttcaggtcatcagggagaaagtggatagaccttttcgttgccttgatcgtccttatcggagagaattaatccgcatctatatgacaaatgtggaacaaatctaccgacgtttcgttgaggagcgaagaagtaaattaagcaagctcattgaggacaaaatgaaatggtccagtttccgtgctttctggtcagcaattgacccaaacaccaggcatcacatgtccagggaaaagactgagactatattgaaaattttagtgaagcaattctttgtagagaaagaagttacttccacattagtgatggactctttgtatacaagtctgaaggcacttgaataccggatgaagagcaagaaatgcaaaacaaaattagcagatttggaagaactacctgcgcctatggtccatgttgacatggacatgtttgttttggctgatgatgttatagctttgcttgagagggcagccttagaacccttgccttgtcaacctgtagcccccaaggatgacaaaacttcccaaagccgcatgaaggatggaagttctggcgaggtttacaaagtttctatggagcgtgaggaaagacgcctaactgagcttgctcagaagatactagagacatttgtgctatctcatatatttagcggaattgaagttgcataccaagaagctgttgctttgaaaaggcaagaagagcttattcgtgaagaggaggaggaggctggacttcttgaacatcagatgaaggggaagcgtggtggtggtgcaaatgaaaaggacaagcgtgccaagaaaaagcagaccaagcaaaagaagaacaaccgtaaggctaaagacaaggaaagagatgtgaaatgtgaggttaaaattctggaaaggcttcatgatgaaactgttattgataacagtgatggcttaccagctaaggtggaagtgatagccaaggttgatgccttggaagaaggttcttcagatgggtcagacatgccaaataggtggttcaggccgcaatagttctggctgctgcacagctccaaaactggatcaggatactgttctgcttaccttgagagataaacttcgtaagctagggcagcgtctgcaagagaaaaacattgaggggcagaaacttctcaaagctcattttgaagctagggacacaaaagtgaaggtagaagaatcttctgactcatctaattctttggataggccacctgatgttccagagagctcgatgcattcttcagaagatacagttgatcttaaagttaatggaacaccaaataaggatgcctctgtggtcaaccctgtcctggaggaatctgtttcaggcataccagtcactgcaaagaatgaatccttgccttctgccagaacaaaagaaggcccagtttcaaacaaagataacgcatcaagtttgaaaatgaaaaccatggcatcttgcttgaaattgcatccagctgatgtggataaagatgccccttttccttctaaatcaccacgaatcaatagggctgctccagttccctcgaagttaccttcggctgataaagctactccagttcttccaaaatcatctctgtcagtaaacaaagcagctctggtccgtcccaaatctccagcagttgacaaagcaactccagtttgtcctgaatctccagcagttgacaaagtaactccagttcgtcccagatctccagcagttgacaaagcaactccagttcgttctcaatctccagcagttgacaaagctactcatgtttgccctcaatctccatcagttgacaaggcaactccatccattgacaaagcaactccagttcgcccaaaatctccagccatagataaagtaactccaattcctcccaaatctccaccagttgacaaagcctctccagcaccaccaaaatcactatcaggtgctaaagatgtgcctgttccttcaaggtcgctgcaaattgataggttcattccagcccccccaagattatcgcaagttgataaagctgctctgccttcttcagaacagccacatatatctccagctactaattctgaagcccaaggggcaactacttctaggaaggtcacagccagctcagttttggaggttgctgcagcatcgaggccttcaagtgctcctgtgttacccacaccaagatcaactgcaccagttgcttcacatattcaaacttccacgttgctttcccgctcgatgagtgaggcagctgggagaaggtcagtaaatgatccttccttttctgccccatcttatactccccagacctaccgaaatgcaataattggtaagactggtctggctactacctctgcaaaccttgcatatcagtcctattctctgggtcaagatactgctccttcacagcctctatcagcatatgcatcaagcacagcagtcatgatgcctcctgctggaagatctgatcaatcatcagctaggcatggattcaagtctgggtctggtaagctagaagcacatgacagctggcagcagtggaaaggtgataataatgttgatatgcatctctggagggatcacactacctatcaacaaatgaccaggggtcaagcgtatgaccaatctcggagggacgatacttatcagcaaacatgcagcagaggaacagaaaagttcagcaggcacgcaggactgcaagctaggcagttccaaaccgagacacccgccagccatgtctggcaccaacaacaggggcaagtggcagaagagtttccacaccttgacatcataaacgatttgcttgaggaggaccagatcaacggcagtataccagagtcatttcatcaagattacaatgtgtttggcctgccattttcaccaagaggaaacgtgtcagatatgggaatggcttctgttagaagtcctgctcggttcaattcaaccaagtatgagtatgacggtggattctcgggggcttatgacataaatgcggtcaatgggttgagggaacggcagtttccctcgttggatagttactctaatggcctgtctgacgtgagtgcatcaaagccttggctgaatggctctcccagtccatcggtgatgagccttggggttaacacaaatggataccacccccaggttgcggactaccccagtctgggaaatggggtgaacggagtctccttgtggcgccgccatgctaacgggcgctggtaatgcgaggtgcctgtatacaatcatacagatggaataatgtttgttgtaacaaatggtttcgggcctgagctgatgtgccatgtaattaaaagttttaagttttaaaagggaaagaaagcgatacatgctgcaaaatctgccccgtgatttggttaatttgattgcttttctggttaaactctgttc

SEQ ID NO: 8860 - DNA, 2048 bp, Zea Mays
aatctttgggttgtatagcccagatagcgatgccaatttttgaaacccgaaaagaagagataataagtttcataactaaaaaaattcttgagtgcaacgatgatatggttcgaaattcttctaataaatctgaatggggtgatagcacagagaattgtttgctaaagatttatggcatcaaaacattggtgaagagctatctaccttgcaaagatgctcatgcacagccaggaatagagaagttaattgatattctgaagaatattcttacttacggtgacgtatctccaaatatggtctcaagtgctgctgataaggcccatttgaggcttgccgcagcaaaagctgttctccgcttatcaaaacaatgggaccataaagtgcctgttgatgtattttatttgactttgaggatttcacaggatgattttcctcaggtgaggaaattatttctttgtaaagttctgcaatatatcaaggaaagggccttggatgcaaaatatgcctgcaccttcatgtttggtgttaacgattatcatgccccgccgtacgaagagttcaagtacaatctgactgaagtggttcagatatgccaacaagttaagatgcgccaactttcagtccaagcagatatggatttgttgacggcttacccagaatacataatttcctttttggttcatgccctcgctcatgatccttcatccccggaaattgaagaacatgaaaacgtcaatgcatttggtccaatttactggcgactatatctgattctttcaatcctcctgggggaagaaggtttgcaacatagtgtcccaggcatgaaaaaggacagcttcactacaataatatctatattcaaaagtataaaatcttcacaggatgtggttgatggaagtaagaccaagactgtgtgtgctatatgtgatcttggtactcttattgcaaagaggttatgccaagaccaaacgagtttatcagaagctcaaacagttccattgcctgctcaactttacacgccgcttcatgataaccaaaatgaaaattctgtggagaataatgagcagatttggctgggatgtgagaaagtactggcccattttgaggctgtaaggactgcaaatatggataaggttgaatctcccaaacataagatgcttattgatgtgactgatgaatttggaaatgaagttcctcttggcaaaattgtcaaacttcttaaatcacgaggagaaaggaagattggggaaaagcagaaggcaccatctagtagttcagtaaatgcagagaacgatgatgttctgggtttagtaagagaaattaacttaaacaatcaagaagatttggaggaatcgcataaggacaagtctgagaagcgtcatacaaatgcaaaagatagtaaccagaaaccacttgatttttcttcacctaaacgcaaaagatcaatttctaagagtagaccacattcagcaaaaggtagtaaaagcagtgatgagcgtctactacatactcctaactcagagaggaccaatatctccttggaaactaagatgaaggagaaagacagagatgattcaactgatacagaactgttagtatctccaagcactagaacccctgtatctaaacaaaataagggtgctaagaaatccaatattaatattttgagcagtgttccaaagaagtctgctgatgcagacagtactaagagaactgttgaaccgagaagtctaaatgggtcactcaaaaggcaaaagtcaaaaccaatttctggtttactaaagtttattcctgaatgtggtgttgattttaagttttttgtcattagattttatgaaggtgccgtgcaatcatacgattcatccaagaaaaaacatagggtgctatacgatgacggagatgttgaagtgcttaacttggctaaagagaagtggatactgattgaaagtaatgactcatcagtgaagaggcaaaagaaggatcatcttgggacaaacccaggaagagcactggagataactagcagcagcaagtctcctcctagcctg

SEQ ID NO: 8861 - DNA, 2187 bp, Zea Mays
ggcttgtggatttgttggaagagaagaaagtgaatataccatctatcttgcaatctttgggttgtatagcccagatagcgatgccaatttttgaaacccgaaaagaagagataataagtttcataactaaaaaaattcttgagtgcaacgatgatatggttcgaaattcttctaataaatctgaatggggtgatagcacagagaattgtttgctaaagatttatggcatcaaaacattggtgaagagctatctaccttgcaaagatgctcatgcacagccaggaatagagaagttaattgatattctgaagaatattcttacttacggtgacgtatctccaaatatggtctcaagtgctgctgataaggcccatttgaggcttgccgcagcaaaagctgttctccgcttatcaaaacaatgggaccataaagtgcctgttgatgtattttatttgactttgaggatttcacaggatgattttcctcaggtgaggaaattatttctttgtaaagttctgcaatatatcaaggaaagggccttggatgcaaaatatgcctgcaccttcatgtttggtgttaacgattatcatgccccgccgtacgaagagttcaagtacaatctgactgaagtggttcagatatgccaacaagttaagatgcgccaactttcagtccaagcagatatggatttgttgacggcttacccagaatacataatttcctttttggttcatgccctcgctcatgatccttcatccccggaaattgaagaacatgaaaacgtcaatgcatttggtccaatttactggcgactatatctgattctttcaatcctcctgggggaagaaggtttgcaacatagtgtcccaggcatgaaaaaggacagcttcactacaataatatctatattcaaaagtataaaatcttcacaggatgtggttgatggaagtaagaccaagactgtgtgtgctatatgtgatcttggtactcttattgcaaagaggttatgccaagaccaaacgagtttatcagaagctcaaacagttccattgcctgctcaactttacacgccgcttcatgataaccaaaatgaaaattctgtggagaataatgagcagatttggctgggatgtgagaaagtactggcccattttgaggctgtaaggactgcaaatatggataaggttgaatctcccaaacataagatgcttattgatgtgactgatgaatttggaaatgaagttcctcttggcaaaattgtcaaacttcttaaatcacgaggagaaaggaagattggggaaaagcagaaggcaccatctagtagttcagtaaatgcagagaacgatgatgttctgggtttagtaagagaaattaacttaaacaatcaagaagatttggaggaatcgcataaggacaagtctgagaagcgtcatacaaatgcaaaagatagtaaccagaaaccacttgatttttcttcacctaaacgcaaaagatcaatttctaagagtagaccacattcagcaaaaggtagtaaaagcagtgatgagcgtctactacatactcctaactcagagaggaccaatatctccttggaaactaagatgaaggagaaagacagagatgattcaactgatacagaactgttagtatctccaagcactagaacccctgtatctaaacaaaataagggtgctaagaaatccaatattaatattttgagcagtgttccaaaggtgacttcttccatctctatggtatctatgtatcaataaaacttttgagttctagtttatgattgtttcaattcttattcaaccttttcagaagtctgctgatgcagacagtactaagagaactgttgaaccgagaagtctaaatgggtcactcaaaaggcaaaagtcaaaaccaatttctggtttactaaagtgctcaacacaagactcaagcagtacagacttggtaggacaccgaataaaagtttggtggcctttggataagagattttatgaaggtgccgtgcaatcatacgattcatccaagaaaaaacatagggtgctatacgatgacggagatgttgaagtgcttaacttggctaaagagaagtggatactgattgaaagtaatgactcatcagtgaagaggcaaaagaaggatcatcttgggacaaacccaggaagtcaccttgca

SEQ ID NO: 8862 - DNA, 4519 bp, Zea Mays
atggcggccgtggagcagttgaaggagctgggggagaagctgcaggcggtggcgccggcgcctgcggacgaactcgccaagcttctcgaaaaagctgtggagtgcttacatggaatagagcagtcaccagtatcatcagtgatggaagctattcaaccaagtctaaaggctgttaccagagaagaattgctgaagcatgaggatgacaatgtcaaagttctcttggcaacatgtttctgtgaaattacaagaataactgcacctgatgctccctacaacgatgacattttaagggatatattctatctgatcgtgggtacatttggcggactcaatgatgttaatagtcaatcctttggcaggaaggttgctattcttgaaacagttgctagataccgagcatgtgttgtgatgttagatcttgaatgtgatgatctcatcacaaacatgtttcaaacatttttagttgttgtcagtgagagtcatgaagaatacattgtaaagtcaatgcagacaataatgacccttattatagatgagagtgaagatgtacacgagagtcttctacgtgtactgttgtcagcattggggcagaaaaaaactggtgctgcaatgtctgcgcgtaaacttgcttgcagtgtcatcgagcattctgctacaaagcttgaaccttatctaaagaaatttctaatgtcatcatgggctgggaatgtcagttcttctaatgatcaaattgatcaccagggagttgtatttgatttatatcagtgtgctccgaaggttcttaaggtgatcgtgccatatattactggggaactactggcagatgaagtagataatcggtccaagtcagttgaattacttggggaaattttttccttacctggatcccctattgtggaatgcttcgagactcttttcacagagtttctcaagagactgaccgatagagttgttgaaattcgtatttctgtggttgagtatttgaagagatgtctaatatcaaatccttcccgagctgaagctcctgaaatcatcaaggcactttgtgacagactgttggattatgaagaaaatgtccggaagggagtggtagctgcactttgtgatgtagctacccattctcctgatgctattccaattgatacaattaaagtagtagctgagcgtgtccgtgataaatcgttggctgtgaagtgctataccatggagaggttggcagatatttacaagctatactgccagaggggttttgatagctcaacaaattctgatgattttgagtggatacctggaaaaatattaagatgtctttatgacaaagattttaggccagagtcaatcaactctattttgtgtggttcattgttcccaccagagtttccaatgaaaggaagagtgaaacattgggttacagctgcgacatactttgataaagttgagatgaaagctcttgaacaaattctcctgcagaagcaaagactgcaacaagaaatgatgaaatacatatcacttcggcaactaagccaggaagatgcccctgatctgcaaaaaagaatcatcggatgtttccggaacatatctcgcttatttagtgattctgcaaagtgtgaggagaacttgaacatgcttcatcagctaaaagatgctgatatctggaaaatattcactagcctgcttaattgttcaactacatttgagaaagcttggtctcttcgggcagatttgcttaagatatttggtgaaaaacatgtgctttataattttgttggcgcattagcaatgggatgttcatatttacttgtaaacaaggagtatgcaaaagagatcctttctgaagcttctgaacagaagacttctgggaatacaaaactcatctcatcatgcatgaatcttctaacggcaatatctagtttctttccgtctcttttgtctggacttgaagaagacattgttgaactcctgaaagaggataatgaagtgcttaaagagggtattgcacatgtgttatcgaaggctggtggcactattcgtgaacagttagcctcaacaagttcccttgatcttctattagagcgtttatgcttagagggtacacggaggcaggctaaatactctgttcatgcacttgctgccattacaaaagatgatggtcttatgtcactatctgttctttacaaggatatggttcgaaattcttctaataaatctgaatggggtgatagcacagagaattgtttgctaaagatttatggcatcaaaacattggtgaagagctatctaccttgcaaagatgctcatgcacagccaggaatagagaagttaattgatattctgaagaatattcttacttacggtgacgtatctccaaatatggtctcaagtgctgctgataaggcccatttgaggcttgccgcagcaaaagctgttctccgcttatcaaaacaatgggaccataaagtgcctgttgatgtattttatttgactttgaggatttcacaggatgattttcctcaggtgaggaaattatttctttgtaaagttctgcaatatatcaaggaaagggccttggatgcaaaatatgcctgcaccttcatgtttggtgttaacgattatcatgccccgccgtacgaagagttcaagtacaatctgactgaagtggttcagatatgccaacaagttaagatgcgccaactttcagtccaagcagatatggatttgttgacggcttacccagaatacataatttcctttttggttcatgccctcgctcatgatccttcatccccggaaattgaagaacatgaaaacgtcaatgcatttggtccaatttactggatatcatggattcagtgcattttactggtcagtaggccttttgatttgggaggccttggaattcccaatctcctcactatgaactgggctctgcaaattcattggctttggctccagaaaactgctccttccaaaccttggagtgggttggatctcaaaatctctccccaggtcagggctctattccaggctgcggtggctaccactattggcaacggttcgacaacctttttttggaaggataggtggattcatgggtgctgtgtcaaggatacagctcccctcattgttgctgcagtgccaaagaagtatagagatgaaaggactgttcaacaggcccttacagatttaacttgggtgcaagatattcagggaaatctctcgctgaccggtattgagcaatatcttcagttatggagtaagggccttcagaagggttggagtgtagagtgtgtcaggtgtgcgtatgggggtgagtctgtgtgcaaacactggcgactatatctgattctttcaatcctcctgggggaagaaggtttgcaacatagtgtcccaggcatgaaaaaggacagcttcactacaataatatctatattcaaaagtataaaatcttcacaggatgtggttgatggaagtaagaccaagactgtgtgtgctatatgtgatcttggtactcttattgcaaagaggttatgccaagaccaaacgagtttatcagaagctcaaacagttccattgcctgctcaactttacacgccgcttcatgataaccaaaatgaaaattctgtggagaataatgagcagatttggctgggatgtgagaaagtactggcccattttgaggctgtaaggactgcaaatatggataaggttgaatctcccaaacataagatgcttattgatgtgactgatgaatttggaaatgaagttcctcttggcaaaattgtcaaacttcttaaatcacgaggagaaaggaagattggggaaaagcagaaggcaccatctagtagttcagtaaatgcagagaacgatgatgttctgggtttagtaagagaaattaacttaaacaatcaagaagatttggaggaatcgcataaggacaagtctgagaagcgtcatacaaatgcaaaagatagtaaccagaaaccacttgatttttcttcacctaaacgcaaaagatcaatttctaagagtagaccacattcagcaaaaggtagtaaaagcagtgatgagcgtctactacatactcctaactcagagaggaccaatatctccttggaaactaagatgaaggagaaagacagagatgattcaactgatacagaactgttagtatctccaagcactagaacccctgtatctaaacaaaataagggtgctaagaaatccaatattaatattttgagcagtgttccaaagaagtctgctgatgcagacagtactaagagaactgttgaaccgagaagtctaaatgggtcactcaaaaggcaaaagtcaaaaccaatttctggtttactaaagtgctcaacacaagactcaagcagtacagacttggtaggacaccgaataaaagtttggtggcctttggataagagattttatgaaggtgccgtgcaatcatacgattcatccaagaaaaaacataggaaggcgtctcatctcgccttcccatgagtttgtt

SEQ ID NO: 8863 - DNA, 2228 bp, Zea Mays
cagaaaagggacgggaaggtgccaataaattgcgaggatgccgctttatctcttctcctctcccgccgccgccaagctcgccaccggcccacacgcgtccctgcaccggcggcgccagttcctcttccgagttccccaccgccccagccgccgcgccccactgctaacttcggcggctgagcgtccagcagggcgcaccatggctactgcggataccggagcgtccacggtgaccgattcgaggctccgaggagtgaagcaagcactgatatcattgtcagataaaacagacctggctaatcttggaaatggtcttcagcgtttggggttttctattatttccactggtggcacggcatcaagtttggaagcatctggtgttaatgttacaaaagttgaagaaattacacagtttcctgaaatgcttgatggaagagtaaaaacattgcaccccagtatacatggtggtattcttgcgcgaagagaccaggagcaccatctgaaagcactgaaagagcatggcattgggacatttgatgtggttgtagtgaatttgtatccattctatgataaggtcacctcaggtgcaatatcttttgaggatggcattgaaaatattgatattggtgggcctacattgatccgagctgctgccaagaatcataaggacgttcttgtcgttgttgatcataaagactatcctgctctactggaatatctagaagggaaacaagatgaccctgatttccgcaggacacttgcatggaaagcattccaacatgttgcttcctatgattctgctatctcggagtggttgtggaagcaatctaataaagcagattcatttcctcccagctttactgtgcccctcacaatgaagtctacacttcgctatggtgagaatcctcatcaaaaggctgccttttatggtgacaggagtctttctctagtaaatgctggcggtattgcaacagcaattcagcaccatggaaaggaaatgtcctacaacaactatctggacgcggacgctgcgtggaactgcgtctcggagtttgagagcccgacttgcgtcgtggttaagcacacaaatccgtgtggcgtagcgtctcggcacgacatcctggaagcgtacaggttggctgtgagggcagaccccgtgagcgcgttcggaggcatagtcgccttcaacacgacggtcgacgaggatctcgcgagggagatccgggagttcaggaggccgacggacggcgagacgaggatgttctacgagatcgtggtggcgcctgggtacacggcggagggcctggaggtgctgaaagggaagtcgaagacgctgaggatactggaggcgaagcggaggaggagcgggaagggcacgctgctgtcgctgcggcaggtcggcggcggctggctggcccaggagcccgacgacgtgaccccggaggacgtggccttcacgaacgtgtccgagagggctcccgacgcccgtgagctctcggacgccaagttcgcgtgcctctgcgtcaagcacgtgaagagcaacgccattgtgatcgccaagttgcatgctgggcatgggcagtggccagccgaaccggctggagagcctgaggatcgctttcaggaaggcaggggaggaggccaagggagctgctttggccagcgacgccttcttcccgttcgcttggaacgacgcggtggaggaggcgtgccagcgcggcgtggcggtgatcgcagagcccggcggcagcatccgggaccaggacgccgtggagtgctgcaacaagtacggggtggccctcgtcttcaccggcgtccggcacttcaggcactgatcgacggcgacggtggcagcggagaccgtgacgacggacgatgggagggacctctatatagctgcgtcgatctggccggtggctggaaggaaggatctggcgtttcatcccagcgctgatgccggctggcgtttcttggctactagggagactctgatggtgctgatacaaccaaatgtcgcctctcgagaggatgggtcggtgggtcccggtttgtatatatgacgtcgtcagcctggcaagaggttgattgagcttaatactaactcttgcggtggatggaaatcggaaacggtcgctgaccggtgggatcgcacagtctgctgctagaagcatgcaaaggctacatgccgtgttattattgttattaatatttattgctgtcacgttaca

SEQ ID NO: 8864 - DNA, 3021 bp, Zea Mays
cccctccctctcactgcccactgccgccgctgctctcccactcctctaccctcctctcctctgcttctctgccgcccagcccagcttgccttctcgaacagcgcgagcgcgcaggcgaggagcagcgtgtccgtccgtccttgcactctctgcagcctccctctctctctaccccgcccatctccctccccaggccttcaaatccgcggccgcgccacccgctgcgctgctgccccggtccttgcattgctcgactcgaggcgccccagcgctggtcgcctccgtgccttccgcggtgttcctgggcgcggctcctaggctcgctcattttacttctgctgctcctgtgctgcctcttggggggcgttcctttacggcccggagcagcgcctagctgcttccgccattgatccggcaaccccagctctaggtttgctttgctctcgtgtgtggtagcgattctggtgttgggggggtgccaccaacagttacaggttgtcgccacgccgagggtgtcgtcctgcgttccttttttttatcttctctccgtgatctctctagctgcatccttgcccccccttcgctccttgctttcttctctgcgctgcctttggtgtgttgccagatagctcccgggacttcaccggttcgctaaccggcaccggcccatagtctgcggacaaacaggggccagttcggcctatttcatttcacaaaagggggcaaagattaggcggcggaatcctgttctttcccgattccttttggacatactgctcgagaggaagtgaaagcgcgcaactttggaggttccgaggagggaggaacacatcccttgcagctgcatgaggaggcaggcattgatacaatgagagatgacggttcaagcaagaacaagctgtcctggtccaagacccttgttaggaagtggttcaacatcaaaacaaaggcgaaggacttccattcggattatgcagctgaggaagtcggagtgcagtggaggaccagcagcttctctgatagagatgcatgtaaatccaagaaaagtaggacagagaggttgcctaagaggaatgtggagcgagatggtagagtagggaacggatttgatggtgcctatattacaaacacacaggactacaggtttcaggaaattgttcccttgaatgctggtaatgttctattgactgaagacaatggtccagcgaggaaatgggtctctcttgttagaaaaactctgaataatcttgatcagcaaggctctggtgtctataattaccacaccccctcaccagctccggatccaatcgtggagctcaatgttgacttcgagcgatcgtcaagaagacaaaggaactcgtcgtttttccatcggcgttcgttccaatccttcaaccgtagctcaaggatcgacatgatggatccacactcgttagtggaccgtcgattcagtgtctgcgacaggattagcttcgggagcaggccgagtgatgttgacactagcatgaggtgtggtgggtcgtctgatgatgagaacattgacgaggaatcacctagcggtatattcttcccaccgatgccatgtgcatatggtgctccactgtgcactggttctaggtattgcttagttgccagcaagcaaatggttggaattttcctcatggtgtgggtgcgaagcgatataagggagcatgtgaagaacttgaaggtttcatgtgtcggtagaggtctgatgggctaccttgggaacaagggatccatatcaatcagtatgtctctgcatcagacaagcttctgcttcgtttgcacccacttaacgtcaggccaaaaggatggagatcaacttagacgaaatgcggatgtggtggaaatcctgaggaagaccagattcccgcatgtccatggagcaggcgacaggaagtcaccagagacgattctggatcatgatcgtattatttggctcggggacctgaactaccggatagctctttcgtatcgctcagtgaaggctttagttgagatgcacagctggaaacagttgctggagaaggaccagcttcgcatagagcagagatttggtcgggtctttgcaggctggaaagaaggaaggatttactttcctcccacctacaagtactcatacaactccgatagatacgctggcgacgacatgcacccgaacgagaagcgaaggactccggcatggtgtgaccggattctatggtacgggcgaggcctgtcccagctatgctacgtgcgcggcgagtctcggttctcggatcacaggcctgtgtacagcatattcacggcggaggttgagattccgagccagtcagctgctcacttcggcggcatcactcgttccgcgtctctcctggggctggacgagctgccaccgtaccagacttatccacgcagttacatggacataaacttctactgaccggtcatcgtctcgacggggaggacggggccagcagccagccaagttccatcggtcggaaatcggaatgtttggtagctagcagatgtgactcctttcgccatgcgtttctgtgcacctggcgcctggactcttgctgctgctgtcctgcatgccattgacgcccccaactcctacgccgtgccgtcttcagcgtgcagaatagatactcgaggagatcaatgctttccgagcgtgagattgttgctaggaacatttgcacagctagttttgttgaatcataaccatctgcgtgtcccgatttactacgggagaaagaagaaggagaagaaaaaaaggagtttggttcttgcttttggtgtcctgatgtaatgcaacgagggccgcgccatgggctcattcaaatgttttcttttttttgttttaatagtccgaggaatgaaatgatggcttgtacagcaaactgttccagtaaacccggcctctgttcatgctcgcggcgaaatgatcacctgaacagcatgcatgcaggggtgtcatctagttcctgaacgcttgtgcgcgaagcgaccgtgctg

SEQ ID NO: 8865 - DNA, 4218 bp, Zea Mays
cgcatagggaggggaggaacattagcctggaccctggaaagagcaagcaagtcggcgacgggcaacccgtttcggcggcggcgctagggcgcggacccccagcaagtagccaccgcaggcaagctcctcctcccgcccgcccattggaatgcggagagatccacccgggagtgggtggattggtttcttcctctgttggtaagtgattcctggccgggctttgcttggacggattccgtcctaggagcttttgtttctttgtcgccaggcgaactgaatcttgcttcttccccacacgttgtgctgtggataagcctgctgcttggtgtctatccgttcaggacctggtgaggttcttcttcctctcctccggtgcgcaagaatgaaattagatacttcaaatggactattatggactcagcttggtatctgaaaaagaaccagcatagctacactccctttgcaagactaatagactctaaagatgcctccctcaccatcacctaggagatctctgaaagaagtttgccacgcaagggggcatagttttgtcagtattctgcctgctaaatcgaaggatgatgaactcacgttgttcaaggatatgcagaaatatgagagggataacttcttactggaagcaacagaggattttgatgaatccatctcaaagttgagatattttcgagattcaaagattggtgtcaacattgctgcacgcggagaaaatcgtgatttacttaatactgatggtgaaagaaatgactatgattggctgttgactccaccagagaccccactttttcgttcattggatgatgaagatcaacacattggtatggctcataggggcagggcgcaggttaagccaatatcaatttcgaggtcttccacaatggaaaatactcaaagttttaacagaagaagtgcaagcccaagtaggcttagcccagcaccacgctcatgtagcagcactatgttgacaaggataagatcatcaaattcttcttcacgatgcagccctgcacttcatttgcaaccagcggcaccatcacgaaggtcttcgactcctccagcttctaggacatcaacacctccacaaaggtcaccaagtcctgcttcaaggaggttgagtactggctcaagtgacccaattttaaacagaaaaggaggaacttcgcctgttaaaaccagtaacaggccatcgtcaccaaaacttcaaggttggcaatcaagtgaccctggtttctcttttgacgcacctccgaatctacgcacatctctgtcagatcgtctagtatcccattcaaggggtggatctccttcatctttcagtggattggacatgaattggagaggtagaaggcaatctgtgtctcccactccatcaagaagagccagttcatcgcatagcaatgatcgattcagctcatacagcaaagcatctgcaacatcttctgctgaagacgacctagagtctatgcagtctgtgctgattagttactccagtagcccagctctaagaaagaacatgccagtaataaaatccagaactattgcatcacctaagaagccgtccaagagtttctcccctagttctggtccaaagaggtcctttgattctgcagtttggttaatggatcgtcgcaaagctcctcaagataagttcaggccacttctatcaagtgttccttgcaccacatttggtgttggcaaaggggataatgtacactcatctatgttgtctcataattcctcactcacaacaagcagtaatttaagctctgaccatggtgtcacttttagcccttgtatgggtaatgaacaaggaccaagtgatatagccggtgactgtgaagcaacacctacttacagtttgtctgctactcaaagtagcccaaaatctccaagcacagaaaaaaatgcggaaagtaacatggaagacctcaatatggaaagaagtagaatagtcgagacttcaggtaatgttgcaagtggttccaaggctgggctaactaaaatggcaacatgcactaggtgtgaaaagttatttaatgcgataaaagatgatggagaaattgatttgtgtgaagaatgtggtttagtagatgaggttctttttgtgaaccccaagatagagactttggaagaacatcaaaaagaccacaaaactagaatttctaaaccttgtgttgccttggaagctcctcacattactcccgatcatggtgaagataccaagaagtcatttcttgatagtcagctgttgaatgatgaacctccagctgattgtctgcaaaagtgtcctcagtctcagtcaacaatatatacaaccgacagaatgcttttaatgctgcatggagagaatgttaatgaaaatttaaggccagatgatgttggcaactcttcccaaggaagtagcctcgatatttcatcccatcaatgtaacataaataattatcaacaatcggaactagcatctgtagttgagtgtgataatttaagagatcaaactgccaaccaccagaatgaggtgttccaacgcctgccagggtcagtgtatcaaagcattgaatttgcctctaatacacttacctatgacagttgttgtaaacagggatcggctgggcattcaaatctaaaggttgaaaatacggagggtgctgggatttcagtactgctgcagaagtcaagcagtaacaaatggcctgttatagaagggcgacccttagctggtacaaatattatctgttcagaaccctactatacaagagatggtgttactatgctaaagcgtaccattggatgggatagttcatcagcgtcttccattgatcaagggtctacaaggcaatctggacatttggaacaccttaaaagtagtaatcgtcatgactttgagaagtctcaaataagtagtaccatgagttgtaaaagcattgcatccatgtcagacatgtcaagtagcaattgttcagtttcagtttgtcctcgggatgatgcaattgcagatactggcttcctaaccgacaattcagaaagcagtgctcctcgatccataatttgtactgaagaacttaatgagtcgtgtaagtacacactctcaagtgctatagagtgctggtctgctgcacaggctattgttaatgttggcattggttcaactgaagatgtagtgattcagaaactatgtacaggtaggatggttcacaaagattacacaagtgataactcatgttcatcagatactgaaacatgtagcaatatctcactctctctggctcctgaggaacgatgcatacagaaaattgaagaaggtacctcagttggcactccagaacacccagatggtgattgtggcatcagtaattatcaaatgcagcatgaaacaattcctgaggcagataggttggatgatggttgtgcgtctgttatctctgaggaggccaacataatggggcttcctggtaatgttgagggaccaagagaacaaactcaaagatgcttcaccttagaagaggctacggatacaattctcttctgcagctccattgcccatgacattgcatacagggctgcaacaattggactggagcatgaacagcattcagaacttgcttctgctcgtcgcccagcagttcccatggcaggacaatccattcccaggggtgatggttcacggaaaccaccccacagactagtgccaagacataggaaaagatcagaaggtgaaacagttacagaacctgacaagatggaagtggtcgctgaagatcctatacctgttcggccagttcctgaattttcaaggacatcaggcagcttcaagtctccaaaggtcgattcaaagtgcaactgtgcaattatgtagagttatgcatcaactcaagttggcaactatacttattatgatcactaaaatccatggttgcttgttattatttcagcgcatgtgagttaacaaatgaatctgcacccacctggttcagtaagcagcagcgacctacaattttttttggttgtggtgcatttgccctttatttctgggtcatagagtgctcaacgagccattcttttgtaaattcttgcttctccagtcagttctatggtttgtctatttttttttcctgagagtcaacatctcaagcttaagcatatttatataataaaataataacatttatgataccaaataagcatcattagatttttcgttaa

SEQ ID NO: 8866 - DNA, 1764 bp, Zea Mays
ctctctcacctgtctcattcctgcccacacgcttctctctctcaccagcgccaggctacgccgcctccgccccaccgcctacaggccgcgccgcctccgccccaccgctgcaggccgcgccgcctccgccccaccacctgcaggccgcgccgccgccccggctcggcaccgacagcaggccacgccgccgccgtgccaccgccccggctcgcgccaccgccctggctcggcaccaccgccccggctcggcaccgacagcgggtcgtgccgccgcccctgctcgccaaccccagcggttcaaacattagctcgttttcactgctactgcattgggttctgcatagttcttccttggttgtttgatgtaaaccacagctggggagcttagctgtatagaactgatttcacgagtttgttgacgagtttagctgcataggtaccgatgagtttgtcctgaacagaaattttatttggattcagttcggtgagctcttaattgtgtcctacccacatccctctgcatccctctgcagggtgcaagaactgtgctaacgtgtgttctaaggtcttccaaatcgaggatgatttcggacgggcaagagtttacgaccaatcaggcagcacagaactgattcaagaagctattgacagttggtatcagtcttgcttgcttggatcttttcaaactgtggaactaattgaaacatttatgaactatcagctccaaatacttgtcaagaacagaaatcactgcaataagttgtgagtagtaaaaaaaagggacaatgcttaagttgcatgaaaactagatgagtataggtgaagcaatgcatgtgttagatgctactagttgctatgctaacctattgaaatagatttcaatggggtcacctttttgggagtttctttttctttgtttgcctaaatacctagtagatataattctttatggttgactgtagcctcattgtttttgactagtagattaagatgtatgatccagcatgtttctgcatctaaacatttgtatcatttcaagtgattgaacaatcgtagctttattgcttatttcagtatgtggtgcttctctgatgatagcatcgaaatattgatgaggcaatcgcttcctgaagttgatatgttatatcatcaacacttcttccaaagtcaaaccagccacggctttctaacctcttgtaatatgttttctgccttctcaggcaagttcacgctgggagaaaagacaagccaaagtcctggagaaggtacatcccattactaaaggagacatttatgttcccacaaagcttgggcattttaggtggaaaacctggtacatcaacatacattgttggggtacaggatgatagggctctctacctagatccccatgaagttcagatggttgtgccattggagtccctgaacttggcagctgaagattcaggggagaaggataaagatgagaatggcgatgaagcgccatcgaaagtattggcaaatattaagtggcctgaaacactcgagactgattttatctacagtgctttatcatttgggacttcaattaatccacagttcattgcaagctttgcttctgctgctggtaaacgtcctcatcaagatttcgactctcaagaatctgatccagagtggggttggtggacagcaaaccatgagctgaagaagccatcaattagtctgttgtttccaacaatcatcctcctcagccgccgccatcaacagcagcagcagcgatgctaa

SEQ ID NO: 8867 - DNA, 1689 bp, Zea Mays
atggcagaatccaacaagcggcagagcgccccaaacaaaacccaactcatttttttttcccagctcgcggaacgggcggcctcgttgcaacttgcagagacccagtcctctcgctttctcaccgcgattcgcctcgcttccatccgattcgattcgggagctagaggagagagaggagaggagaggtatggtaatcgccttgagcgtgctctgcttcctgcctcttcggtcgcctccagctcgctgttcattcccgctccgcccgctgattcgccggatcgggccgtggcagtgatgccgctggctgagtcgcccccgtggcgccgcaaggccacagatttcttctccacgtccagtgtcaagctgaagcaggcaggccaatcggccggggataatatagttgatgttgctgggaaggttgggtccgtggtgaagagtcggtgggctgtcttccaagaggctaggcagcagcagcagcagcagcaacgtccgccgcatgagacagtgcaagagcgtatcatcactgctgctgcctccactggtttgcttttcaggaaaggcatttcagagacaaaggagaaggttgcagtgggaaaggtcaaagttgaagaggctgctaaaaaaactgcagataaaagcaagagtatcttgaacaatattgaacgctggcagaagggagtcgcaagcactgatgtgtttggtgttcctattgaagctactgtacaacgagagcaatctgatagagcggtgcccctggtgcttgtgagatgtgcggactacctggttatatcagactcgggtgcatctttacttgaaggtgtaaatcctattgatgtaggtgcactggtgaagtgctaccttgccagtatcccggagccacttactacattttcgctttatgatgagcttcgagctgcgagggttagcattcctgatcttaggaacatattgaagaagcttccaaatgtgaactacatgacgctagagtttgttacagcgttgctgctgcgagtcagccgtaaatcatcacttaacaagatggactcccgcagccttgctgtggaatttgcgcctttgatcatgtggcggcaaggtgacactggcacagatttgcgtaaccacctcaagtttaccctgaaaccgcctccaaaaattgtggatacaacatcaaatgctgccacatgggacctgttagatgaggatgacgaggatgcttcatcccagatccccttagacgatgcttcaccaccagactacagctccattgaggttatccagtgtctgatcgagcatcacaatgccatcttcaccgacgcaaatgaaaccgtgtggagatgatcggcatctcctctagatctctctggtgttagatcgtgctattgtacaagttccaggtaggaaggtgggaaggtggattagcgctcgctattgttagggataagcattttggccggaatatttttgaagtaggtttgtatatacactagtgttaactgttaattctccacgggactagaaccgggtcatgccatatcaataaaaatatatttggatggatgtaaacgaaatgtgttgtttccatcattgattgtattcagatcatataataataacaaagcctttgtccccagttgggctagactaaagttgaaatccaataaaagccacaaattatggtttagtcatata

SEQ ID NO: 8868 - DNA, 2862 bp, Zea Mays
atgccgaaaggcaaggcaaacgcaaatgccacaacccacctctcgactcgccgccgcagccgcatgacacccaccgtcggctggccatcccctcgggtcgccacccccttcggccgctgcctcacagctcgctgcatcgtcagtctcggcctccacaaccaccaagtcctcctatcccgctttgccgccgccttcaatgccctcgcgtccccgtcccgcaacgccgccgccgccagccggccatccgttgcgctcgccactctcctcgggcgctgctgcaccgtgcgctgcctcgcccagctccacgcccgcatcatcctactcggtctccacaaccaccacgccctcctcgcccgcttcaccaccgcctgcgatgccctcgaatgcccctccgtcgccgcctctttcatcgccgcgcttaccgactcccacgccgccccgctccgcctccgcaacgccgtgctcgcgtccctcgcccgccacgccccgctccacgccgcgctcacggagttcaacctcctccgacaggccgcgctcccggactctttttccttcccttgcctcctccgcgcgtgcgcccgcgtatcctgcctccccgctggacgagccctgcacgccgccgctatccgccttggcgtgcacgccgatctcttcatccgcactgcgctcatccagttctacggcaggtgcggcgtggccgacgcggcccgggcgctattttatcaaatcgacatccccagtgaggtttcctggaccgccattatcgttgcctacgtcaacaatggtggcatcatagacgctagagctctgtttgatacaatgcctcaaaggaacgtggtgcactggaatgtgatggtcgatggttacgtaaagtgtggggacttggagggcgcaaggaggctgtttgatgaaatgcctgagagaactgctacagcatgcacatctttgattggtgggtatgcaaaggcagggaacatggaagctgcgagattgttgtttgataagttagaggaccgtgatgtgttctcatggtcagcgatgatatcaggttatgcacagaatggttaccctggcgaggctttgaggacttttgatgagttccaagggcaaggcatacacccagacgaacttgttgtggttggcctgatgtctgcatgctcccaactaggtaacatcaggttggcaagttggattgaagattacatcacaaagtactctatagatatgaacaatgctcatgtgttggctggtcttgtgaacatgaatgcaaagtgtgggaacttggagagggctacttttttgtttgagtctatgccagttcgagatgtgttttcatattgttcactgatgcaaggttactgcctccatggttcagctgacaaggctgttaagcttttctctcggatgcttttggagggactcacccctgacaatgctgtgtttacaattgttttaacagcttgctgtcatgctggtctagtagaagaagggaagaagttctttgatataatgaagaatgtgtacttgatggtgccatctggtgagcattatgcttgccttgtcaatcttcttggacgttgtggtatgctagaagatgcatattggcttatcatgtcgatgcccgggaaacctcatcctggagcatggggtgcactgttgggtggatgcaagcttcactgtaatatagagcttggaaaaattgcagcaaaaaaactttttgaaattgaaccggataatgctggaaattatgtctccctgtcaaatatgtatgctaacattgacaggtggggagatgtttctgaagttagggctgagatgactggaaagagaataaccaaaatagcagggcgtaccctagttttgcagtgaagcagtgttgaccagaatggtgtatttatcttgtaccatgttactggcccccattgaaaacttgaggctgtgaataaacgtaaaatgagatatcatgctcaatgcatatggtggaagtcatcatatggtgatatagatttggtggtcaacaggctgagttcatacactggaaacctttttctcaaatacacaggggagctgcgtaccattggattgagaagaacacctaagtacaaaaacaaaaagaccaccacaccaacacagccgtaccaaatacacacacatacactcaaacccaacctcataggtggcatacatctggaccgagttaagacacttccattagcttagagttcacattgccagactcagctgggtggatgctttgatttttggtattgtgaaagatcagggtgcttctgtacaaatgttggaatatgggcctgattaagacacagagttttgacatttgctgttaaggtcaaatcaatgtctacctcgtgccctctaccgcacacctgatcgtgcttccctggccgctgtctccccttcttagcccccatggaggcagaaattgggctgacactgacagggcctgcaccagtctagaggctgctcagctcctgccgccaccatggaggggatctcatcaaaggagagctgagggacacagaaggggtagtgggcggaggttgagtgcgtatggagggaggtgcagcgaagaagctgaggctgagccatggacagaaaaagctgctcgctcagtcaccctgcgctttagaggaacatggtttgtcagtagaaattggagacatgctgggccattgtcaagttcatgggtgaagaattgaaaactgttagttcctgtaatcatagtgagatacaaaataatgttcacaatcttttctgattactgtcacgtttgaaaaatctgaaggcacacctagtattgttatctgtcaaggctaagaccaatgatgtggtagtttcagg

SEQ ID NO: 8869 - DNA, 1611 bp, Zea Mays
cctcgttctttaaaatccgtgttcaccattctccccctaataaatcacacaggtctccggcgaagtctcctcccgaccgccctccgcatctcgtcgacgacgaaaggaaaacctcacaaatcctctggatgcggggtctagccgcctccgccctgtagcaccagtcggatcgaagaagcacaagcgcttcgggtcggcgcgcacctctccctcatggtggcggcgcgaggggcccgatctgggggctcggttgcggcggcggcgctggtctcggttcttctcgtgggttgcctcgtcgcgggcggccagggggcggagatccgtcgccagaaaaacgtgcaggctgcgctccgggccaagtgggctggcacgccgctgctgctcgaagccagtgaattgctttcgacagaatggaaggatctattttgggattttattgacctctggaaggatctagagaaaggctctgaatgtttaacagcaaaatgctgtgcccagaagattgttgaggatgcccacatactactcaatgaaccgctctcttcaatttttgagttttctcttacccttcgatcagcatcaccaaaattagtgctttaccggcaacttgcaaaggagtcattatcttcgtttcctattgatgattcaccagagaacatttctggtcatggcactggaaaaacttttgatggggctgtggatcctggctcttctggaggaacttgctgctgggtagacactgggaatgttctattgttcaattcagccgatctgcatgaatggcttgggggattgggcaagctagctatggattctactgaacagcctgaactctttgaatttgaccatatatatcgtcgcacaaatattactgctccagttgctatattttatggggctgttgggacaaaatgcttcaaagagctgcatgttcaactagtagaagcatcaaagcagggaaaaatcaggtatgctctgcgtcctgtcctaccatctggatgtgagactacgtccaccttttgtggttcagttggtgctgtagatgcagtcaccttgagtggttatggggtggagcttgccctaaaaaacatggaatacaaagctatggatgacactgctataaagaagggtgttcctctagaagatcctaaaacagaggacctcagtcaagaagtcagagggtttatattttccaagattttggaacgcaagccagagctaaatgctgagataatggccttcagagattatctgttgtcatcggcagtgtctgatacacttgaagtctgggaactcaaagatctgggtcatcagacagcacagcgaatcgttcaagcatcagaccctttacagtcaatgcaggaaatcaatcaaaatttcccaagtatagtttcttcactatcacgaatgaagcttgacgattccatcaaagacgaaattattgcaaatcagcggatggttccacctggcaagtcattgatggctttgaatggtgctttgatcaatatcgaggatcttgatctttacctgttaatggatatggtccatggagaattatccctggctgatcagttcgtccggttaaaggactacagtacatcttatttataa

SEQ ID NO: 8870 - DNA, 5831 bp, Zea Mays
attctccccctaataaatcacacaggtctccggcgaagtctcctcccgaccgccctccgcatctcgtcgacgacgaaaggaaaacctcacaaatcctctggatgcggggtctagccgcctccgccctgtagcaccagtcggatcgaagaagcacaagcgcttcgggtcggcgcgcacctctccctcatggtggcggcgcgaggggcccgatctgggggctcggttgcggcggcggcgctggtctcggttcttctcgtgggttgcctcgtcgcgggcggccagggggcggagatccgtcgccagaaaaacgtgcaggctgcgctccgggccaagtgggctggcacgccgctgctgctcgaagccagctgtaggcaacgttggctgctagaggacctggcgggcgacgggccgacgtcattggcgaccgactctgaatgtgggagagcggagggggtgctcgggcactggaagagggaggcgggtgttggaggacaccgtcctggcggcgctggaggtggaggagggggtggaggagaggagggagaatggaaggatctattttgggattttattgacctctggaaggatctagagaaaggctctgaatgtttaacagcaaaatgctgtgcccagaagattgttgaggatgcccacatactactcaatgaaccgctctcttcaatttttgagttttctcttacccttcgatcagcatcaccaaaattagtgctttaccggcaacttgcaaaggagtcattatcttcgtttcctattgatgattcaccagagaacatttctggtcatggcactggaaaaacttttgatggggctgtggatcctggctcttctggaggaacttgctgctgggtagacactgggaatgttctattgttcaattcagccgatctgcatgaatggcttgggggattgggcaagctagctatggattctactgaacagcctgaactctttgaatttgaccatatatatcgtcgcacaaatattactgctccagttgctatattttatggggctgttgggacaaaatgcttcaaagagctgcatgttcaactagtagaagcatcaaagcagggaaaaatcaggtatgctctgcgtcctgtcctaccatctggatgtgagactacgtccaccttttgtggttcagttggtgctgtagatgcagtcaccttgagtggttatggggtggagcttgccctaaaaaacatggaatacaaagctatggatgacactgctataaagaagggtgttcctctagaagatcctaaaacagaggacctcagtcaagaagtcagagggtttatattttccaagattttggaacgcaagccagagctaaatgctgagataatggccttcagagattatctgttgtcatcggcagtgtctgatacacttgaagtctgggaactcaaagatctgggtcatcagacagcacagcgaatcgttcaagcatcagaccctttacagtcaatgcaggaaatcaatcaaaatttcccaagtatagtttcttcactatcacgaatgaagcttgacgattccatcaaagacgaaattattgcaaatcagcggatggttccacctggcaagtcattgatggctttgaatggtgctttgatcaatatcgaggatcttgatctttacctgttaatggatatggtccatggagaattatccctggctgatcagttcgtccggttaaagttgcctcaaagtgctgtcctcaagatcctgtcagctcctccaccagcagaatctaattctttccgtgtggacttccggtcttctcatgtgcattaccttaataacttggaggaagatgccatgtatagaagatggagaagcaacatccaggagctcttgatgccggtcttccctggtcagatgcggtacatccgtaaaaaatctgtttccactctgtttatgtgcttgatcctgcttcagcctgtggtgcagagaccattgacatgatggtatctctatatcaagatagtgtccctataaggtttggtatcataatgtattcttcaagattcatcaatgttgttgaaggaagtgatggcactcttacaaataatgatggagaagacacttccattttgataacaaggctttttcttgtacatcaaagaaacatactcaacacagttggcattccaatttctcggcaatatacataaatcaaggaatggtgaagatgactacaatgaagagcttgttgaggctcatcatgttgaaggggcatttgttgattcactattatcaactgctaaatctcatccacaagatgtgctgctaaagttgcaaaaagagaacatgtacaagcaggaagctgaagaaagctctcattttgttcacaagcttgggttgtatagactccagtgttgtctgttgatgaacggacttgtccatgaagcaagtgaggaagcgaccatgaatgctatgaatgatgaacttcctaggattcaagaacaagtttattatgggcatatccagtcccatacagatattttagagaagtttttgtcagaaaatagctacaagcggtacaacccatcaattactggcaagaatgcagagaagaaatttgtttcgctctttgcatcgtaccatcaggacagctttatatttaatgacatgaagtacttacagtctcctggaactacagatgatgcaaaacctgttactcatctacttgccattgatctttcatcaaaagttggaacaaaattgctttatgaggccatactttacctgatggacggatctgatagagctcgtgttggtctgctactttatgtccacactggtggttcatcacctattttacttctgaaagatattttcgatagaactatttcttctttcagctataaagaaaaggtattagtcttcctgcatgggctcttgaaattttatgatgcccaacctttgcccgcctcatctgttgctgatgattggactagaactatgatggaaaaggtctataccttagctgctgaaactgctttgcctgttgatgactataaagcgtggtttaaaagtttctctgctgatacagttctcaaagggatggataagttatctgacttcttatttgggcaattggggcttgtgtttggtagtaatgctgtgatcaccaatggacgggtttttattatgaatgaagggaaatcatttctagccaatgatttaggtctccttgagtctatggagtatgatttgagaacgaaatacatatttgaaataattgaagaggttgagtttgccagtgttgaccctgatgacctaacaaaccaattctacagcgacattgccatgttgatctcatcgtcgatgtctgttcgtgaaaggacatctgaaagagcccattttgagattttacatgcggaacatagtgctatcaaattgaataatgcaaattcaagtattcacattgatgctgtcattgatccgctaagtcccactgggcaaaaacttgccccacttctacgcatactctggaaacaaattcagccgagcatgaggattgtacttaatcctattagttccctcgcagatcttcctttaaaaaacttctacagatttgttcttccatccatggatgattttagcagtacagatcattctgtacacggacctaaagctttctttgcaaatatgccactgtcaaaaacacttacaatgaacatagatgttccagaaccatggcttgttgaatcagttattgccatccatgatttagacaacattcttttagagaatcttggcgatgtcagaactttgcaggcagtatttgaacttgaagctctcctcttgacaggtcattgcatggaaaaggaccgggaccctccccgtggtctgcagtttatccttggtactaaacaaagaccacacttagtagacacacttgtcatggccaacttgggttactggcagatgaaagtctcccctggtgtatggtacctacaattggctcctggtcgtagtgccgatctgtatgagctacctccgaaactcattgccattgatagcttgagaggcaaactaatgcatattgaagtgcaaaagaagaaaggcaaggagcatgaggacttgctaaatgctgccgatgactaccacttccaggaaaagacggataacaaaggctggaataagaaccttttgaaatgggcttctagtcttatcactggtgatgcttcatcaaaaagtaaagctgataaaaccactgaccgtaaggatgcaagacaaggggaaaccataaatatattctctgttgcttctgggcatctgtatgagcgtttcctcaaaataatgattttgagtgttctaaaaaagacacagaggccagtgaagttttggttcattaagaattatctatctccacagttcaaggatgtcataccgcacatggctcgggaatatgaattcgagtatgagctcgtcacatataaatggccaacatggttacacaagcagaaagagaagcaaaggattatatgggcatataagatcttatttctggatgtcatttttccactttcactgaggaaggtgatttttgttgatgctgatcaaattgtgagagcagacatgggagaattgtatgacatgaacctgaagggtcgcccgcttgcatatactccattctgtgataacaacaaggatatggatggttttcgattttggaagcaaggtttttggaaagatcatctgcgaggaagaccgtaccatatcagtgcgctttatgttgttgatttggccaaatttcggcaaactgcttctggggatactcttcgtgtcttctatgaacaactcagcaaggaccccaatagtctctccaatcttgatcaggatctcccgaattatgcccaacatacggtgcctatattctctcttcctcaagaatggctgtggtgtgaatcttggtgtggaaatgccacaaaagcaagagcaaagaccattgatctatgcaacaatccaatgacaaaggagccaaagcttcagggtgctagaagaatagttccggagtggactggtcttgacagtgaagcacggcagttcactgcacgaatcttgggtgatgatgtcgagcctgcagatgccacacctccgccatcggaggcaccgaagcctgaagatgatcaggatgtgaaagatgagctatgatcgcaagatgtttccaggcttggtcttactgaatgaaagtttggtgactcgacagtcatcagttcagaacacaggcacacagctagtggagcgcagagggatagtttaacgcaggtgcaaatttgtcaaaacactacacctggaatcctagactacgttgattcaggtatttcgtttacagtaaggccttgttcgtttgtgtcggattggtgggtcggaatgatttctagccgggttgcttttctaatttatataaactttaattagctggaataattccgggtgcaatccgatgtaaacgaacaaggtctaatagtttcaagacctttaaccaaatcatatggcggggaagctgcgtccagtaataggttaacaaggcagccagctggggtgtagaactctgtctgctctcagctgcatacacatagactgtaatggtcaacaatttaagatctccttgagacattgtaaaatttatcggctgccagtcgaaaggcaacagcgaagctggcagctgaaatgcccgagaattttgtagcactcagcaaacggattttttaaacactcagtaagtcaataatgcctgtcgcatgtaacagcaggctattgtgggcatggcagctaaccgttatactaaaaaaaaa

SEQ ID NO: 8871 - DNA, 1603 bp, Zea Mays
atacaagaatgatatgccactcatgacctgatcactcgagtcgaccgcagccggccattgctacctctgtggcttactcttctgcaagctttcctcttcctcctcggctttgaacaaccaagaagctcagctctagcacaccgtcgtcgacgttgcaacaaaccccaaccgctaccatgatcacgacgacgaccacgacgatgacagcagctcctgatctctccctccacatcagccctccgtcgccaccggagccgaggctgctgctggggttggaactcgacgacgacacggcggcggaggcggcggccgcgacgaagaaggcggacgacgcggcggcgatgcgggagtacaacaacctccaggtgcagcggcgccagctgcaccagccaagccagacggcgggccacgggttcaagaggggcacgtcgggcagcgccgccgccggcgccggcgggaggagaagttccagggcgccgcggatgcggtggaccaccgcgctgcacgcgcacttcgtgcacgccgtcgagctccttggcggccacgagagagcaacaccaaagtcggtgctggagctgatgaacgtgaaggatcttacactggcacatgtgaagagccacctgcagatgtacagaacagtgaagcagcagggcgcagacagaccatgtgtagcagttgcaggccatgggcatgccagagacatggtcgtccttctcacaaccggtgtcggtgaaggggatgctggctttgttgacgacgtttccaacagcaacagcaacagcaacaactcagtcgtcgtcaacaacaccgtccctgctgccttcaacaacaaccatactgataggacgccacagtctccaggcggacgggagcagcagcagcaaccggcgccggcggtggatcgtcgtcgagacgacgccgccgccgccgcagccgcttgtgcttgggtcgtcggacggcaggtccagcatcagcggagctgcagcgaaggagtgaccaagctgcagggactcaaggtaggagatgagcgcgtcgaccgtcatcacggggacgacgccatcgcggcccatcgtctcgtggaggacgaggctcgcgacgaccacgcaggaagcggcggcggcttccaacaacggcggccgtcgccgaacaacacgagcggcacggtctccagctcggagtggctcaatcagcagcactgtagcggcgtgatgagcgtcagggtgcttggactgccgcctgcgacgccaccgagcctggagatgagcctgggccgccagggctggcagatggatcagcagtgcggcggcgagttcgagttcgacttcgagccctccccgccgtcggcggccaaagagctaactctgctcaggtgcttgtgaaacgacagacgatgcagtggtgttgctttaatctgttgcttcttaatcagactctaatcaagacaacagttagccacaaagccccagacaactaagactgtcctacgtattccttcactttttagtttctccttcgaaaatcattttttttaaatgggagtaagcgggcatgtcctgtttttacaaggacgaccattgcgtgagagtggcttgatcctagggat

SEQ ID NO: 8872 - DNA, 874 bp, Zea Mays
ctcccagtttccgtttttttaatgctttgtttactcgcggggatcatggggtaatcgcgtgggccgtgcctggctgggtttatttatgccgacctgccaattggagcaaatcccctttcctgcccctccccctccgcctttcctctctctcgctctcctcctctcctctcctctccttccgcatcacacaccacgactcccaaccgccggttggctttgctgctccgagctcttccacacccgccctctctcttgtgggtcggcggccgagtgtctgcgtcgtccacggagatcagggatcggcggcggggtatggcgagggagcgtcgggagataaagaggatagagagcgcggcggcgcggcaggtcacgttctccaagcgccgccgcggcctcttcaagaaggctgaggagctctccgtgctgtgcgatgccgacgtcgcgctcatcgtcttctcctccacgggaaagctctcccagttcgccagctccagtatgaatgagatcattgacaagtacagcacacattctaaaaacctggggaaagcagaacagccttcacttgacttgaacttagaacatagcaaatatgcaaatttgaatgagcaacttgtggaagcaagccttcgactcaggcagatgagaggtgaagaacttgagggattgagtgttgaagaactccagcaattggagaagaatctggaatctggtctgcatagggtccttcaaacaaaggatcaacaattcttggaacagatcagcgacctcgaacaaaagggacttagggttcaaacatacatgttttgatagtgagagagttacaacagcaaaaagcactagctgctaagctacattctcaaacattattcctcca

SEQ ID NO: 8873 - DNA, 2943 bp, Zea Mays
ctcccagtttccgtttttttaatgctttgtttactcgcggggatcatggggtaatcgcgtgggccgtgcctggctgggtttatttatgccgacctgccaattggagcaaatcccctttcctgcccctccccctccgcctttcctctctctcgctctcctcctctcctctcctctccttccgcatcacacaccacgactcccaaccgccggttggctttgctgctccgagctcttccacacccgccctctctcttgtgggtcggcggccgagtgtctgcgtcgtccacggagatcagggatcggcggcggggtatggcgagggagcgtcgggagataaagaggatagagagcgcggcggcgcggcaggtcacgttctccaagcgccgccgcggcctcttcaagaaggctgaggagctctccgtgctgtgcgatgccgacgtcgcgctcatcgtcttctcctccacgggaaagctctcccagttcgccagctccaggaatggtagcgggattgttcctgtagatgcaagcttgttcctgtagatgcattgatcggtgatgcggttaacctctttttcaaacgagagactgatatttttacacacattgcagtgtcattttgtctgatctactagataaatggcattcctagctagtctttttttgcacaattgcagcgtcatgttttgttaatacttagaatcactttcctttgctaccgatgcttttgtcttaagtttttaagtttgcatcaattgattagcctgcatgctatgaccgtcccattgttcaggtatgagtgtggatatgatactttgctttgctagctgaattcggagccttcaagattttagacaagaatcaatagattagcatttgcatagtgatgtttagttaatgctgcaacatgctaaattgagatacgtttgttaaacaacaaattttaacttaaaataacttgacctgcggggatatataacctagggtattgtattaaggacaacttctcacgagaaaacttcccagcatatgtgaatattgaagcaggttgctttatatcattcatataaaatgtattattttgggttcaccttatggaagcaggtcctattgctgaatttgagtcctctctctatacctatatttaaaagagagaagggatgtgccgattgatgttcttgaggtgcaaaactataggagtttaacttgaaaataatatgcaaatagaagttgtttattgtgttgtcgcctgttttgcttgttgccccgctaacccatgataatatgctaactagctatttacccaccccactgaatagtgccttctttatctttcgtttgcctggtttgtcactattgaagggtgtgatcaaattgacttttttttcttcttagttaacatagggtttcattgaccctttagtctgaacctattactgactcttgttttagataatctcttcccattgacgctttctgaatatctcaactactgtgtcatactgctgtttacttctgacgagtgaatatcgccaacaatgaaaggagagatctttattgtgtatatagctaggaagatttacctactttaagttgtgcctttggagatctttattgtgtatatagctaggaagatttacctactttaagttgtgcctttgggggattatactatcagcctcgaattacaaacatggtttcattttagcatctaattccattttcgctttattgattggttatagcatgtcatggtactgacatttccttccctttgacagtatgaatgagatcattgacaagtacagcacacattctaaaaacctggggaaagcagaacagccttcacttgacttgaacttagaacatagcaaatatgcaaatttgaatgagcaacttgtggaagcaagccttcgactcaggcagatgagaggtgaagaacttgagggattgagtgttgaagaactccagcaattggagaagaatctggaatctggtctgcatagggtccttcaaacaaaggatcaacaattcttggaacagatcagcgacctcgaacaaaagctccccaaatcatgggtaccaggacgccgagccaggaccaaacctgcacatagacagaagagacgcacctgctcctccggggttgacagcaagggaatctgttttcttgcagagggcacactttagtttaaagcatgtactctctctattccaaattagtacacaactggcagaggagaacaggcaactgaggaatcaagtatcccacatacccccagttggcaagcaatcagttgctgatgctgaaaatgttatcgctgaagatgggcaatcctctgaatcagtcatgactgcgttgcattctgggagttcacaggataatgatgatggttcggatgtctctctaaaattagggctgccttgtgttgcatggaagtgaaaaaacaagatggtctgtgttgatctgggtggagctgcggcttcagcagataggcacttgtgttattgtcttatggacgacccccgactactgcaataatcttgcatcggaagcgagatcagttaacctgatttgtcatccttgtggcttcatgatgcgatgttgcgcttgtaccgtttgctaggatgttaactggactagaatcgtgtctacttttgtactgctcgtgaatcctatctactttgtgctatccaaagttatgacctaccacttgcatcggcatggcgcgccggccgtaagctgtgctcaagcatgcatgcttcgtgttatacgtgtgtacttattgggaagttgagtctgcatacaacctgagcgtagttgttgtcttacagagaccgtttagttttcagaaccgctttccccatgtctcgtttggatccttagaattgaatttcattatgataatagtaatttatacaaaaatcaattaaggtaatatgatt

SEQ ID NO: 8874 - DNA, 2441 bp, Zea Mays
accgaccaccgctgtggcatactaccttatatactatcgaagaaaaggggatcggaatcgaggagcttcctacactcctttagtcgaatcccaagaatgttctggatttgatattgaccagtgtggctttctccattccagcctgtctgcggtacttaggaccaactttatcttggcctatcaccaagcctgtctgcggtattgagaactttgtgccctgtccttgttgtctctcatgggcacctcaaaatgtttcttgtttatgaggatccttatcttgactaccatggctatatcagctgccatgaatgctacaatcattgggacactagtaactaagagggactacaagtttgctgagctcatgagactccctgacacatttcttatgttgtttgttctgctgtgctttgacttttcaatatatttgtcattcaagatattgtggtctgcaagaacttcagtagatcagaaaatatgttcacaggtcttgttggagagtggtcatggttacaaagttgggaacaaaaggaaccccctaacagatcatttacttggagagttagaggatactaccaaaacaacaggaattgggcgtgacccagttatggactctgaatgtgaaactaccttacaaaagcaagtcatggtcttcgatcagcaggatgaaacatttgacatcggagagacacccttgtccaagacatccaaggatcatttgggtcaaactgttggtaaagaaactccagtttctgaggccttacatgttgacactactgattcattgtcgttccatgattcacttttcctctctaagcatggatgtattgcaaggaatcccattcttccttatagacaagtttcaactcctaagttccattcagtcaagaatatgcttgacatgatagattatcttgctgttgaaggttttgctaatggagaagttgtaagggatgatgtttctgctgccttaagtcaacaagttgccgaattgatatccataagatgtaatgagataaacaacacagtgagattttgtaatgaatatgctagtagcatgaaatcgaaagttcaagtggtttttccttcacaccaccagtttgctgacattcttgatgacttctgggggaatttgtttgacctgcatggtaatttgacagaaaaaggaaatgccataaggttggaccttcttattgggctggatgttgaggagatcaaaagctgcccgtgctattttgatgtactacctgggggactatgtgatcctttgaagctaaatttaggtaacatggggctaccacctttgtttagaatcattaataacatgtgccctgaacatggaaattgcacattgcctgctgttgtggcattcagaaggcgcatcatggacacattcctcacggaggatcctagtctgttgaaggatgagaaggtatcatattttcctatggacaatgaagtacaatatgaagttcccatatacaaaaacttggacatggttgctcaatccattggcatgggaagtccattggaggagttgaacaaaatggaagttttggttcaaaaatgtccatcacagcaagtagctcatcaggcttccaagacaaatgtttatttctcctacaatgaattgaaagggctactcttgaattcttttcgggtttgtattctgaatatatcggaaattgagaaagctgattggctgtttcagaatagaggcgggtatgacgagaagctagtgggcttggctgctgaaatggtgatatttggagatatacatccaagcggggtattctgtccgaatgcagtagttggtcccgatggtaaaatattcaacctgtgcacctcaacccttggttgtggagatggatgtatgtggctacctactctccttattagctttggtgtttggtgcatttctagaatgcttgaagtgcttccttcggcaaagaaacctttgctttttgggaagtatagtagggttctcaatcgacttcagggcattctggatccagcattcttgaagcctgttcaacctgtctccatatgcccgtgcaccaagagcgtcccagtcgtgagactgcctgatggaagccaacgtatcagcgtggaagctgtgctggagatgctgatggaagttgaggccaccatctacggtgtgaggcacgctggagtctatggcagggagaagaaaagcctgaaatctgttctggaccgctataagctccggctctccgaggtggcatctcaggagtaggatttccttcatattagatcgacataataataataaaataaaaagctgaactctccagctatggtcacagatttctgtatgtctcttatctataagctatggtaataatgttatgctacatggtatgggcttgtgaaccgagactaataatttgacaattcctgaaattctccttgatgctcgt

SEQ ID NO: 8875 - DNA, 1078 bp, Zea Mays
ccatttatccgatcggtaatgggtgctaaatatttcttcataacaagtcaaggtttttatcagattctagtaaaaataaataaacatagaacatgtttctaatccgtttctatcgttaaattttaatagcgtaaaatttagagttcaccctactacccatcaatccgtgctgtcaaaccaaacactcctccaagcgcacgcgcgcacagtaagaccgtcggtgggccagggcccaccgtttccagttcctcttgcgtgctgggcctgcccacggcccacctctggctgctcccactgcgcagttccagttccagtgtgcgaaccgaggtcccccaatcccccaaacatttcccccaaacatttttttgtcgaatctgtcgtgagatcctccccgacgagatggcggggaagggagccaaggccacggccgccaagtcggcggacaaggacaaggggaagaaggccggcggccccgtctcgcgctcctcccgcgccgcacctcaggagaattcaactccgaagaaagatgtttatcaattgttcgctgagaaggttagggataacaaacagctggaatcaagatgggcaatcatgcaagaaacccgtgtggagtattttcgtggaaaagatttcaatgccttcatcaagaattatccagaagtcagggaaattttggggccagataaggatttagaagtggaagacattgttaacactttgttgaccaagaaccttgtgataaggtgtgaccgagttatgaaaactgtgaggcctggcaagaaaaagttatcatcatggcctgctcacttggagatacataatgaacaagtgtttactgaaaatgatgggttttatgcttggatgtttctgaaaaggcggaccttgtggcagacagttctttcatttgtttggcctctttttgcactggcagtctgcttatttccagtttacccataccaatgcaagattgttgtactgtactcatgtgctggagctctacttttcattgtctccattcttttgctaagagctgccatctttggcatcttatgggttctccttgggaaacgcggtggtg

SEQ ID NO: 8876 - DNA, 1179 bp, Zea Mays
aagcggccgcgcccgggccacgcgcagcaggcggcgccggcgtgctccgtgcagggctgcgacgccgacctgtcccagtgccgcgactaccaccgccgccacaaggtctgcgtggcgcactccaaggcgcccttcgtcaccgtcgccggccagcagcagcgcttctgccagcagtgcagcaggtttcatctgctcgaggagttcgacgaggtgaagcgaagctgcaggaagcgcctcgacggacacaaccggcgccgccgcaagccgcagccggaccctctcagccctgccggcttgtttggcgatcaccaccatggtaagaggagtgacaaggttcacatcgtacccacaccgcttcaccacatccatcgcaaagcccgaatggggggcggtcgtcaagacggagaccgacgcgttccaagaccagtactaccctgccgtccacctcaacggcgccggcgccggcgccctcttccacgacaaggaccggaagcacctcccattcctgaccaaccacaacaatggatgccagccattcaccgtcaccacgacggcttcctcagagagcagcagcaagcacagcaacggcaactgtgctctctctcttctgtcagacaacccgacaccagcacaggcacagacggccacgatccctaccgcgcagcccctcgtcgccacggcatcgcagtacggcaggctccctggcggcgacgacgacgacgtctccctcgccgggatgtcgtacatgagggtgggagacagccggcaggcttccaatctgacaacgtcctcacccggtcctgccactgcagctgcaacacagcagcacctgcagtaccaccatggctactactaccatgtgagcggtggcgagcagggcaacaacagcccagatggcgccgccattcaggccctccccttctcgtcgtggtagacgcgcgactttctgatgaagatcatgtgctaggataggcaggcagtcgctcttgttgttcaccaaacacatgggttgtaacactaggctcggtcatactgaaaaaccatgacaaaaaatgtccatttttcagcttgttctgataggtctaatctatggaaaattcttccctaagttactatgtgattcagaatcgtgtaaaaatgcccactttcagttgcccacacggatgagcttgtgcaggc

SEQ ID NO: 8877 - DNA, 1345 bp, Zea Mays
aagcggccgcgcccgggccacgcgcagcaggcggcgccggcgtgctccgtgcagggctgcgacgccgacctgtcccagtgccgcgactaccaccgccgccacaaggtctgcgtggcgcactccaaggcgcccttcgtcaccgtcgccggccagcagcagcgcttctgccagcagtgcagcaggtttcatctgctcgaggagttcgacgaggtgaagcgaagctgcaggaagcgcctcgacggacacaaccggcgccgccgcaagccgcagccggaccctctcagccctgccggcttgtttggcgatcaccaccatggtaagtaagttcgcttctcacgccagtcggtttcggtttcagggagaaggcaaggcatgtcaattagatctgaacatgcatgcatgcatgagaactcggagctgacaacacttgtggcaccattgctatgcaaccaaacatttcacatgttacaggtgctgccatccaatgaggagtgacaaggttcacatcgtacccacaccgcttcaccacatccatcgcaaagcccgaatggggggcggtcgtcaagacggagaccgacgcgttccaagaccagtactaccctgccgtccacctcaacggcgccggcgccggcgccctcttccacgacaaggaccggaagcacctcccattcctgaccaaccacaacaatggatgccagccattcaccgtcaccacgacggcttcctcagagagcagcagcaagcacagcaacggcaactgtgctctctctcttctgtcagacaacccgacaccagcacaggcacagacggccacgatccctaccgcgcagcccctcgtcgccacggcatcgcagtacggcaggctccctggcggcgacgacgacgacgtctccctcgccgggatgtcgtacatgagggtgggagacagccggcaggcttccaatctgacaacgtcctcacccggtcctgccactgcagctgcaacacagcagcacctgcagtaccaccatggctactactaccatgtgagcggtggcgagcagggcaacaacagcccagatggcgccgccattcaggccctccccttctcgtcgtggtagacgcgcgactttctgatgaagatcatgtgctaggataggcaggcagtcgctcttgttgttcaccaaacacatgggttgtaacactaggctcggtcatactgaaaaaccatgacaaaaaatgtccatttttcagcttgttctgataggtctaatctatggaaaattcttccctaagttactatgtgattcagaatcgtgtaaaaatgcccactttcagttgcccacacggatgagcttgtgcaggc

SEQ ID NO: 8878 - DNA, 1057 bp, Zea Mays
atgtcgaggcccttcccggccaacagatatcttttcccggagaacaatatttgctcgtggcgcatatatccccgtccctggcctcgcgtattgggagacgccgtgctgctttggaatgggcgaactgcgatcggtgtcgctctcgtgcaacttaccgtgaacgtcggcctcctatcgctcgcggcagtatttatacgcttcgtcccagctgcactcctccaccgccgcccatcgatccaagccggcggtcggcttggacggtggctggaaaatgcttcgcttttggaggacgcagaggagcaccacctcgtcgaacgcgttgtcggtcgtggagatgaacgtgcacatggactgcgacggctgcgagaagcgagtgaggaaggccatgtcccagctggaaggagtgagctcggtggagatcgacatggatcggcagaaggtgacagtgacagggtacgtggaccggcgggaggcgctgcgcgcggcgcggcggaccggcagggcggcggagttctggccgtggccgtacgacggcgagtactacccgttcgcgatccagtacctggaggacaacacgtacatggccaccaacaagtactaccgccacggctacaacgaccccacgatcggatcctacccctgccacgccttcacgcatgtcctcgacgacgacgcgctcgccgtcttccacgacgacaatgtccacgcctgcgccgtgatgtgatgtacgtgatgcgaagaagaagaagaagaagaagacagtatgcgcgtagtactcactgctggtatgtggtattcacatgtaaaacctgatttcactacgacctcgaagaaaggagagttaattccatcttctcgcaaaagagagagatcatgcatgttaaaaattatcagctctcgtcaggccgccgttaacaaattgctgctgtgaacaagcagctcaaataaagtcttgctctgaacaccgcacaaaaaattgggtgctgtgatttttttctttttacttgtgctgttgtgcaaaggttgtggccggtcccataatcccattcaacaagga

SEQ ID NO: 8879 - DNA, 3081 bp, Zea Mays
tcgggcatgcacgacgatgacacacactcatatctgcaagactttctttcgtcctgtgtccagaaacaccaaaacttttccgaggaagctgacaatatttcgtcgaaacctcccccgtatttccacgtcatgcaaccaccacaccaccctccacctcctccgcgtctgtgtacccaggcaaaagatcgcacgcacccaagttcaagttcgacccaaactgtttccacagcacagtgcaggccgggagggggaaaaaaaagaagggatcgagtcgagagacactggcctctgctttccgtgtgtgggggttctcctctctcttgatgctttttctccgccgcacttcctacgtccatgcaacaagtgcacgagctgacatatatacccccacggggccgtcgccgccgcagtcgcctcaacccgctcggtttctttgcctcctccgtggcaatcggagagcactcgccctcgcactcgcccaactcatggtggattgacggcatggagggaggcgaggctggaggcttgagattcctcctccggttcgacccggcaaggcccgggctcgaccgcgcgctgctcggcttctccttctccgccctcttcagccgcctcgtcgttggatggagcaagcatggccagacgggaggaggaggaggaggagggtttccggcgatcgcggcggagggtgagggtggggagggctccgggaacgccgccgtgtccgtggccgcgcttgccgccgccgccgccgccgcttctctctgcctcgcggcgatgtacgcgtccgatcagcggcggcctcgccatgctcgcgctcgacggctgccggcgctggcttcagctccgcggtcccgtgcgctgcatgctcctcatgatgggctcaggattctgtcgtcagacgacccaaacgacgaatctccggacaaggtgatccacggcgcgtcgatcggcgccggagacgacgagccggatatcgtcgcgcgagtggagatggacgctaccccgccggcagttcccgtgccaaatgccgacgacgacgacgacgacgacgaaaccgaaacggaagcagaggaggaggaagaagaagaggagcggcaggagctccagcggctgagggagctgtggctgtcgctggaggagcgggagcagaggctggagctccgcctgcaggagctggagggcctccggtcgcaggaggccgccgcgcgggagctcgaggcccgcgtcgccgccgccgacgcggaggtgcggatcctgcagctcagtgtctccgcgctgcaggaggagaacgggaggctcagggcgcgggcggaggacctggacgccgcccgcgctgagctggcgcgcgccaaggagaagctgcgcgcggtcaaggcgcgcgtgcagggcgagcaggaggcggcggcggcggcgctccggaggaaggtggaggagctcgagagcggcgggcgggagagggtcggcgcgctggtggcggaggtcgcggagctgcgcaaggcgaacgccgcgctggaggcggacaatatggagctcgccctcaggctgcaggacgcagagcagcaggctgcatccggcgcctctgctagtaatctggcccctgaggagggcatgattcaggagatgacgtacctgagggagagcaacgagcgactgacgaggcagatcgagcaactgcacaacgaccactgcgcgcacgtcgaggagctcgtctacctcaagtgggtcaacgcctgcctccgccatgagctccgtgaccatgacggccagcccaccgccgagcaacaaggccccagcgccggctccagagacctgtcggccctggagctgagcaagagcatgagcttccggtccagcgagagggccaagcagctcatgctgaggtacggtagccccggcctggaccgcttcgaccctgccctcttctccccgctgcacgagtcagtcgacggcgacggctacggctacgagcggtcgccggcgcacagctacgagcccgagcggagcccttgcgctaggcccgcgacggcgacggcctcgtcctcccccgccgcagcaccggggaagaaagcggggccgcgcaggctcaagcttctcggtaacatcaagaagctgctgccggcggtcggcaagagaagccactcaaaccacgggcacgggcacgccggccacgatggcaggaaggcgccggcgccggctccggctcggagggacgagtacctcgacaaggccatgcagtggctgtcggcccacgacgtgctcgacggcgaccactcgtacgtgagcacgccgctgtcgtcgtgcgagaggacgccgctgagcagcgccacgaccagcacgaccgcggactcacgcgcccgctgcggcgacggtggtggtggccgcagcgagcgcggggaggcgacgcggccggaggcggagccgaccttggcgagatcgaagagcgacgccggcggagcgtacgggcgggaggcgagcaggtaccacgcgctcagacctgaacacccgggcagagaggcggacgagcccgacgggttccgtgcgccggagaagcgggaggcaaggaggcagtcggcggaggagctgaggactccggcggtggcgtagtacttgatggccccattgcagttaacggattaattgacaggaacgactgttagtctgttatgcagtgatgcacaaggctgtttttttttttgtgtgtgtgtgtgtgaatatttgtactcatgtatggttaggggcagatctagctgtaggacggatggagcttgattagcccacccctactgcctctcaaacaaaagccctccttgaaccccctccgtagctttttattaggaagaagaaagaagaataatggagagaaagagagaggaaggaaggagtccctgctaggttcatgctctgcgtccgtacccatgtatgggtgaatcaagatacagagtttaattccctttgtattatcatcaagcttttcacaaatcctggtaattcaagagctcaggagacgatggcaaaagcatggacgcccctcaaactagagaacggcagcttaccaatgatgtgatggccagggacaaa

SEQ ID NO: 8880 - DNA, 2068 bp, Zea Mays
attaaatcgccgtccctacgcctgcctcaccaagccggagcgaggcccttgcgcctcggcatgcagcaaccggtgacggcggccgcttcgtgcggcttgcgcccgtcagtcatctgcctctgccccggaaacaacgcagtcgtggccgcggcagcttcacgaggcttcagctcgccactgctccgggcctcgccctccctcagctcggcaattttccctaaatctcaggagtaatttgatggagccatactgacctcacgtttccaatcccttgagaaggagaagggatagcatttgacatatctgtacatcttctttccaccaacaagtctccttcgttccccttcaaaatggcgcccgcttttccgacgaccctcctccaccaggcgtcgacctccttccgttttccagccggcgccgcagggtgcatccgccctcactgcttggccccactggcggcccccacaacgctctctttggcggccacgccagcggtacctcgccggctcctcctcccagtggcggccggcatttgggacctgatctccggcggagctggcgccgccgccgctgcgtccctcgccgtccggcgaggtatgcagcttttccggcagggagatgtagctggctcgttggcagaatttgacaaggcgatcgagatggacccgcgacagaagcaatatctttggcaacggggcctctcgctgtactacctagacaggtttgaagaaggtgcagagcagttcaggatagacgttgcagctaacccgaacgacaccgaggagtccatatggtgctttctgtgtgaagcgcagctgtacgggactgaagaagcaaggaagcggttcttggaggcaggttggtttggactcgagacctgtaatgcgtgaagcatatgcactgctcagaagtggtgcagatcctgaaaagttagttgcaaagttttcgagtggaactgatggtgaggtcttctattcttcactgtatgctggactatactatgaatctcagaaagatgcagatatggcaaaatctcacattgttgcagcatgcaagtcgccgtatggatcgaggtccggcgattacatggcttcccttgcacttgtccactgccagtgtcgcaactggaaagtagtttgaaagagatcaccaccatattcaagaggacccgacaattctgtttggaaattacttgcaatccttgatatatagactgcaaattacttgcaacaaggacatgggttttcagacaatgacggaccgagttaaggaaaatatgagaggctatcgagtttgggaaaaaaaaacttatcgaagatacctgttctgaagtctttttagtactggattcacatgatattcacgtcaaggagtcaatccacaatcttatctaatgtatggagtccattggcagtggtcgacaacgaaggaaaatattatattggctcgtgccgagggcgatgaaggatgagcgctaaaacttgattgagggatcagagaagtcggttgactagctatggtggctgatacctaaggaagactgataggtgtcatgacatgatagattagacgtgttgccgatgtggtcgaagaccaacatgacacatatctaggaagtgggggatgtgtatggatatgctagatgtggtcgaggaccgacatgacacatatctaggaagtgggggatgtgtatggatatgctatctgcggcggttcgggggttgaacccgaaaaaccagccagcgatgtttcatgggtttgaccttagaactcggagagcattttaaacgggaatcaaaggtgacacgtggagcgatcacggaggttacatcaaggcaaagcaaatatgtaaaaaggagtgtggccattagatcaacaaattcagagttagaccattatggcagtggctgatgagtttaaagcatattgtaagtctcaacacattgctaggcactgcactatacattatatgcctcaatagagtggtgtagctaagcgttggaacataactatcctctctaagacatgttgcatgttgtcttgttcatatttgaataggccttttttg

SEQ ID NO: 8881 - DNA, 1322 bp, Zea Mays
aggcgaggagaagggggagaaggaagacgaagaggaagcgagctgggcaagcaatcgacgcgagaagatcagaaggacccaataaggcaagaaaacggcaaagagcacaatagttctcatatgcctaattattcccttgattcatgattataactttgcctcctgatttaatgaccctttcctatcatttgagatatacaggtcaccctaaggtaagagaggtatttcctttattggagattacaattttgcctcctgttccattggaaagtaaagcgactacgaccttgaattctttttttgctgtcatcatatatttttagcaggcataaaagaagaaaggccatttcttgtggagatttatgcagatgacataaatccaactacaactataaaagggaagcactacatcggctctggtgtgcttaactatatctttgattcgcgaatatagttttgttattaaattagtgaaaattcaagctatatccttttgtgctctctgacattatgacatttgtttagcaagtactttagtgaaaagatttcaccatatgcatgtccatgtttatgacaaatcatagttatccgttacattacatcgatgtaatcttcacacaaagtctcaacaatatttggttgctcacttacaccccaccctagattaacatgttctgaattttctttgttcactgctgcaattgacacatgctaaatggcaatttctttataatgatccaattgagtttgtaattgcacatgtttttgccaagtttcatcaagtactgctccaacagaacaagcaatcatggaatattgagctaaggcactggagtctcaagaaaaggtctaggaatcctaagaatggatggataacgatgcttaaatatggatgacatcatttatgtcttgataaccatctacatgccggtgataatgttttttgacattcattcatggggctcacctttctaatgtgtaagaaagaaaactacgttgatcttaatctgagttgtgtgttgatggttgatgtagtaaagaaggggcacttagacattgttgttcatggatttatgtactgccaacaaaccttctcttctgattcttataggcggtgcctggctgtaatggcttgcatgtattttatgcattgactacatgataagaaccgtgcacgttgttgatggcccaattattacctctgaatcaaggtaatgtttacctttatcgtgttgtcttttgttctatagaatcattgtggatgactgtttgtaaaattgctatggcaaatatttactgttatcatcgtatataacatcaaa

SEQ ID NO: 8882 - DNA, 2958 bp, Zea Mays
ccaggctgtggcggttaaccggaggcgaggagaagggggagaaggaagacgaagaggaagcgagctgggcaagcaatcgacgcgagaagatcagaaggtgggggcaccagaaccgcactttatatgatttcttgtggtggtggagattttgacgactttcttgatgcgtttttttttggccttcgctcttttggtacggtaattagcaaatttattaggagatggttaaatgctattatatactagaagtagaaatgatttgtcttatgaatggtttgctgattgggagcttggaggctgtttagagttgtactggcagtgactaacaaccttcttctgcttgtgttgcttaattttgaagaaatggttccttgtggggttttttttccgaaaagatatgggcttagaggcggcaccgcagcgacgtgaagtgggcggccgtgacttacaaacggccacaagaaggttcctgaacgtgttgccgctcagacgctcagctgagcgtgacgccgtcattttccccctttttttccttcttcctattcttgttttttatgtgaaccataatttgttgcggtagaaataggcacagatataacatgactggattaatatgctttaataataaggaaatttgatttggagatggggccggaaatgatagagcaggatggatggtaggaaaaggaaggggaaattcagaaattctctcaggcgtatggctatggagtgcctgtgctctggtgagcagttgaaggcgtcagatgagaccatgcggtcatctgattctacgatcacaaaggatttctcggccagtgggtactcttcttggaatggagagattgagcagtaccttgataatggcaacatagaggaagccgagttgtcgctccgggagggcatttgcctaaattatgaggtaagttgttttcttttgtgaaacagattttgttatggcaccaagaacagctgaaatatatgctgaatgtgactaggaaatgccaccaattcagctagtatgattcctagttaagtcaatcttgggtttcttttgtcaattttacttccttgtgaagatttttgtacgtaactaaaatcaacctgcatgctgaatgtatttttttttctgcagttagttgaataaatatatggttattatctttttcttcactaaaattagttcactacctcctacctaggagtttatccaagctagccttttctgtaccagtataagtatttcaagggaaattctttcttatttcaagagaagacttaccatttttattactgccattctctttcttcgatttcgttagatgccagaatgtcatctgtttaagttctatatttcagcattacatttggacctagctgtttctagctcgactgacagcacatgctaaacaggaagcaagggcattgctaggaaggctagaatatcaacggggtcatgtagaggcagcactccgtgtctttgatgggatagacatctgcattagttcctaagatgaaaatctcaattgctagaaaaacaggccgtgggaagactcattcacagtgggattccccaccaatgcccttgcatgctgtcagccttctcatggaggccatatatcttaaagcaagagcacttcatgatcttgggaaagataaaggtaagcagcaccttgctatcatgttgcacacattaacagacttgcattgtgggttagtaattaattctaaaaaaacaatggactaagtacaaatttaactaaaatttgttttgttgttttgcatttgctttaggcctaatgaaaggcaaaacaattgtcgatgttgtgggaaagttcacctggtattttattttttgctcgagctaacattcaagcttcttctgtgtgtttatccttgatcctttctaatccttttagtgatgcatatgggaacgactaagtcaacaaatatgtgtgcaggacccaataaggcaagaaaacggcaaagagcacaatagttctcatatgcctaattattcccttgattcatgattataactttgcctcctgatttaatgaccctttcctatcatttgagatatacaggtcaccctaaggcataaaagaagaaaggccatttcttgtggagatttatgcagatgacataaatccaactacaactataaaagggaagcactacatcggctctggtgtgcttaactatatctttgattcgcgaatatagttttgttattaaattagtgaaaattcaagctatatccttttgtgctctctgacattatgacatttgtttagcaagtactttagtgaaaagatttcaccatatgcatgtccatgtttatgacaaatcatagttatccgttacattacatcgatgtaatcttcacacaaagtctcaacaatatttggttgctcacttacaccccaccctagattaacatgttctgaattttctttgttcactgctgcaattgacacatgctaaatggcaatttctttataatgatccaattgagtttgtaattgcacatgtttttgccaagtttcatcaagtactgctccaacagaacaagcaatcatggaatattgagctaaggcactggagtctcaagaaaaggtctaggaatcctaagaatggatggataacgatgcttaaatatggatgacatcatttatgtcttgataaccatctacatgccggtgataatgttttttgacattcattcatggggctcacctttctaatgtgcggtgcctggctgtaatggcttgcatgtattttatgcattgactacatgataagaaccgtgcacgttgttgatggcccaattattacctctgaatcaaggtaatgtttacctttatcgtgttgtcttttgttctatagaatcattgtggatgactgtttgtaaaattgctatggcaaatatttactgttatcatcgtatataacatcaaa

SEQ ID NO: 8883 - DNA, 1310 bp, Zea Mays
tctcccagggacaggctcgtaatttttccactggccatcgcacccattcataaaaccctaaacccaggacccaggtttatcggtgaggcgagccgcgagtggaactgtggaagcgttgagcttttttcttctttgtcttgctgcgcaagaagaagggaaacgagaggcgggcggcgatggcgaagaggctgctcccgtcgctgaaccgggtgctggtggagaagctggtgcagcccaagaagaccgccggcggcatcctcgtcccggaaacatccaagcagctcccacctcctgcattcgtgaagaacgactgaaccagccgccactcgcccgtccgactccggctccggccagctgcctctgtccctccgccgagctgcccgtccgccttcgtccctccggcccaggcgagcagaactccgcccccacccgccccgagccgagcagcagccagcagagccgcatcgccgccggggaacgctgagttgccggtccgccgccctgagaagatttccgtcccagcagcatagccgcagcgccgctgcccgtcgcctcaaggcaagtccgagcgccctgtcacaggccccagattaggttgatgtctttcctgagactgttgcctcaaaggctaccccaacttatcaggtggagcaagatgttgagactgtaatccacgttctccagccgggtccaataggaattgtggagcacaaattcacagacgcggagatcttagaggccagggctacagtgaaaagagcagtggataattggcgaagaaattggacccttgagagaaatgttagcagataaatggaaaaaatatacccctggtgtcttctatcaacagtaattgaaataaatagggtgccatggctggatgcagttgttgccattagttagatttgagcacgatctgcttatcgggagttatgttaactgttctaaatgatcagtctgtttctctttgtttcatggttcgactccgattcattccttgtttggaaatgatctttttttcatcatactactatatgggacattttttttttgttcattgcattgtcggtagccggctggcatattggatgtgatcctttcttttgatgcttcagtactttaactgtagtatctgaagagatacttgaagatcagtaacttcatgatccttgaccattgtgtcataatgccatactattttcactaactatcttcacctgctcatgtacaatcctggccctctgaatcggtttttgaagacaagaaggtttttgaagacaataaaaatctaaaagactgcatgatataat

SEQ ID NO: 8884 - DNA, 830 bp, Zea Mays
ccgcaaaccgcgtctgcaaccacgacgcacttccatccacggtccagggagggcacgatgatgaacctgtcgaatggctttgcgtaaaattcagatttttattactaaaatattactaaaattgcagattcagtctgttgcaagatatgtctatgcatggagtcagggtgtcaatcatggagccagggtgtcaagcatggttctggtaatactaaacagcagctataatacgtcataaccagcctgaagtttgggcattttgcttgggaaatggctatgctggattgaaggatgctcttggttcaaatgattctagacttcaaagtactctttcagttccaaattatatttcacatgcatgtcgccagccgggatgctacttcagtgagacattgaagcccatatcagaagagcaccagacaagagttggagaactaggagtcttcggctgtcgctacggccttcggattgctcctgtattcttcaatggacaatccttaacacggtcacataagcacaacaagaggagaaccctgaccacagttcctagtccaagggcgacgatggcggatttgcttttattgctgaacaatgggaaccctctgtgggttgtgaaactattcctggtcagcgagaggagctatagcgccactcagatagttggttccaacatcaaaagtattaagcttcggcagcaagctggagtcgatagcaatctcaccagagagcgagtagttcctcaagctgattaccctcagcagtggacaactttacagggaagcgggcaactcaccgtccagcctattggtggccaggtttacggactctag

SEQ ID NO: 8885 - DNA, 1234 bp, Zea Mays
cttccccgtcgcgccgcgcgatgctagccgtgattcccgcgtccgcccgcccgacgtctacaaacttgttctgcagatgcccctcccgcccatcgtcatccatcccctgcctctgccgcggacgaccttccttggccgccaccagggggcttctgcacgcgagcgcgcaggggggagctatggcccatggcgttcgacttcacgccccgtgcaacccctcctcaccgtgtcggcacgctgcccgtctttgtctcatctcgttggtgctcctccctccctcggggcctgcttcctccccatggtgtggatctagatcgtcgacgtctcaaaccacctcgattggcgacggcgacgccccctgccgtgtggatccgatcatggggcggccgccctgccactgcccgctccaacggcggcgcggacctcgccgtcttcgagcagttcgagcggacgattcagtctgttgcaagatatgtaagtatacacaatggtcttagtattgtctatgcatggagtcagggtgtcaatcatgctataatacgtcataaccagcctgaagtttgggcattttgcttgggaaatggctatgctggattgaaggatgctcttggttcaaatgattctagacttcaaagttccaaattatatttcacatgcatgtcgccagccgggatgctacttcagtgagacattgaagcccatatcagaagagcaccagacaagagttggagaactaggagtcttcggctgtcgctacggccttcggattgctcctgtattcttcaatggacaatccttaacacggtcacataagcacaacaagaggagaaccctgaccacagttcctagtccaagggcgacgatggcggatttgcttttattgctgaacaatgggaaccctctgtgggttgtgaaactattcctggtcagcgagaggtacgacagggatctcaactccttgaagctctccggtatccccccccacgagcttgttccttgtaagattcagtgtcctcaacttggtgcacacactgatgccaggagctatagcgccactcagatagttggttccaacatcaaaagtattaagcttcggcagcaagctggagtcgatagcaatctcaccagagagcgagtagttcctcaagctgattaccctcagcagtggacaactttacagggaagcgggcaactcaccgtccagcctattggtggccaggtttacggactctag

SEQ ID NO: 8886 - DNA, 2431 bp, Zea Mays
cgctctgcaccgcgcgcctccttctctgctgcggcaaccgggaactgcggctgcggcggcggcgacttaaaccctcgagctcgctccaaggccgtcgctggtcgatcgggcggaagaggcagaagccagccagccagccaatggcccccaaggccggccgtggcaagggcaggggcggcaaaggcgacaagaggaagaaggaagagaaagtggtgcccagcgtggtagacgtcacggtggtcacccccgacgagtcccaggtgacactcaaggggatatccacggaccgcgtgctggacgtgcggaagctgctggggtcgaacgtggaaacgtgtcacctgacaaactattcactctcccatgtggcgcgcgggcaccggctggaggacggcgcggaggtggtggcgctcaagccctgcgctctccggatcgtcgaagaggagtacgcgacggcggagcaggcggaggcgcacgtccgccggctgctggacatcctcgcctgcaccaccgcgttcgccaggccccgggacggcgccgccaagcacagggcgtccaggcacggccgccccgcgacaccgccctcctctcccacgcccgcctcgaccggggcccatggcgtcgccagcggcgaggccgcgccgccgatatcggaggcgcacgacatggccgccatccggccgccgcccaagctgggggagttctacgacttcttctccttcgcccatctcaccccgcccgtccactttatcaggaggaaggaggcgaatggcgcttctcaggaaggcgatcacttcgaaatcgaggtgaaggtttgcaacgggaagcttctgcacgttgttgcttcagtaaagggtttctacttgtcagggaagccacacaacgttagccactccctggtggacctgctgcaacagctcagcaatgcgtttgctaatgcatatgaggcgttgatgaaagctttcgtggatcacaacaagtttgggaatttgccttacggattccgtgcaaacacatggcttatccctccaatatatgttgactctgccacaaggtgcccagcactgccagtcgaggatgagaattggggtggaaatgggggtggctgtggacgtgatggaaagtatgatcgcagacggtggtcaaaagagttttctgttttggctagaatgccttgcaaaactgaggaagaacgggtgatcagagaccggaaagcttttcttttacacaatctgtttgtagatacagcaatttttagagctgcgtcaacaataaggcgactcattgatcagtctatgaactcagttggttcacatagtggtacacatggttcaaacgtatttgaggaacgtataggggacatgaatataactgtgaagaaggatggtgctgatgctagtttaaaggtggaggacaaggttgatggtgttgccttctgtcaaacgggtgctatggatattgcacaaaggaatcttctgaaaggtttaacctctgatgaaaatgttgttgctaaggattcttcaacactcggggtggtgattgtcaagcattgtggatatacggcaactgtgaaggtttctggacgtgcaaaggacagtaatgatgttaaacaaacaaatgacatctctggtaaatttgatggaatgctgaccattgatgtacatgaccatccagatggaggttctaatgccttgaatgttaacagtctaaggataccactcccgagagttatccatccagaaactgttgttggtaaccagcaccatagcccaaagtctcatgctagtaatcctgcaaagaaattggcacgtaaaatactcaaggacagcttggtaaagctggatagcatgcctagcataaattctagaattattagatgggaactggggtcctcctggctgcaacaattgcagaaaaaggatactccagcgtctgagaatggtaaggggaatgcgatgaagactgacaaagaaccagctgtcagaggtcttggaaagcattttgaacaattaaggaaacttaaaaagaaagaatgcaacaatgaaggttccagttctgagaaggaagaatgtagcaataactattcatcaatgaatggtacacaagtatcagatatgatagctgctgatgaagcaaataacggggctgatattagcaagttaatgtcagaggatgctttccttagcttaaagagtttgggagctggccttcatgaaaagtccctcgaagagctcacaaagatggcccataatttctatgatgatactgcactcccaaagctggtagctgattttgcgtcccttgagctttctcctgtggatggaagaaccatgacagatttcatgcatgcaaggggacttaatatgtcctctttaggcagggtggtggagctagcagagaagctcccacacatccagtctatatgcattcatga

SEQ ID NO: 8887 - DNA, 5836 bp, Zea Mays
cgctctgcaccgcgcgcctccttctctgctgcggcaaccgggaactgcggctgcggcggcggcgacttaaaccctcgagctcgctccaaggccgtcgctggtcgatcgggcggaagaggcagaagccagccagccagccaatggcccccaaggccggccgtggcaagggcaggggcggcaaaggcgacaagaggaagaaggaagagaaagtggtgcccagcgtggtagacgtcacggtggtcacccccgacgagtcccaggtgacactcaaggggatatccacggaccgcgtgctggacgtgcggaagctgctggggtcgaacgtggaaacgtgtcacctgacaaactattcactctcccatgtggcgcgcgggcaccggctggaggacggcgcggaggtggtggcgctcaagccctgcgctctccggatcgtcgaagaggagtacgcgacggcggagcaggcggaggcgcacgtccgccggctgctggacatcctcgcctgcaccaccgcgttcgccaggccccgggacggcgccgccaagcacagggcgtccaggcacggccgccccgcgacaccgccctcctctcccacgcccgcctcgaccggggcccatggcgtcgccagcggcgaggccgcgccgccgatatcggaggcgcacgacatggccgccatccggccgccgcccaagctgggggagttctacgacttcttctccttcgcccatctcaccccgcccgtccactttatcaggaggaaggaggcgaatggcgcttctcaggaaggcgatcacttcgaaatcgaggtgaaggtttgcaacgggaagcttctgcacgttgttgcttcagtaaagggtttctacttgtcagggaagccacacaacgttagccactccctggtggacctgctgcaacagctcagcaatgcgtttgctaatgcatatgaggcgttgatgaaagctttcgtggatcacaacaagtttgggaatttgccttacggattccgtgcaaacacatggcttatccctccaatatatgttgactctgccacaaggtgcccagcactgccagtcgaggatgagaattggggtggaaatgggggtggctgtggacgtgatggaaagtatgatcgcagacggtggtcaaaagagttttctgttttggctagaatgccttgcaaaactgaggaagaacgggtgatcagagaccggaaagcttttcttttacacaatctgtttgtagatacagcaatttttagagctgcgtcaacaataaggcgactcattgatcagtctatgaactcagttggttcacatagtggtacacatggttcaaacgtatttgaggaacgtataggggacatgaatataactgtgaagaaggatggtgctgatgctagtttaaaggtggaggacaaggttgatggtgttgccttctgtcaaacgggtgctatggatattgcacaaaggaatcttctgaaaggtttaacctctgatgaaaatgttgttgctaaggattcttcaacactcggggtggtgattgtcaagcattgtggatatacggcaactgtgaaggtttctggacgtgcaaaggacagtaatgatgttaaacaaacaaatgacatctctggtaaatttgatggaatgctgaccattgatgtacatgaccatccagatggaggttctaatgccttgaatgttaacagtctaaggataccactcccgagagttatccatccagaaactgttgttggtaaccagcaccatagcccaaagtctcatgctagtaatcctgcaaagaaattggcacgtaaaatactcaaggacagcttggtaaagctggatagcatgcctagcataaattctagaattattagatgggaactggggtcctcctggctgcaacaattgcagaaaaaggatactccagcgtctgagaatggtaaggggaatgcgatgaagactgacaaagaaccagctgtcagaggtcttggaaagcattttgaacaattaaggaaacttaaaaagaaagaatgcaacaatgaaggttccagttctgagaaggaagaatgtagcaataactattcatcaatgaatggtacacaagtatcagatatgatagctgctgatgaagcaaataacggggctgatattagcaagttaatgtcagaggatgctttccttagcttaaagagtttgggagctggccttcatgaaaagtccctcgaagagctcacaaagatggcccataatttctatgatgatactgcactcccaaagctggtagctgattttgcgtcccttgagctttctcctgtggatggaagaaccatgacagatttcatgcatgcaaggggacttaatatgtcctctttaggcagggtggtagagctagcagagaagctcccacacatccagtctatatgcattcatgaaatgctatagctgaaactctaaacatattactaggatctcccagacttgaaaatggtgctgacacggatgcccatattgacaataatttgcgactgaaatgggtagagagcttcctttcaaaaagattctgctggaaactgaaagatgaatttgcacatttacggaaatgtatcattctgagagggctttgcagcaaggttggactggagttagctgcaagagattatgatatgaatagccctaacccattcgacaaatctgacattgtcagcattgttcctgtgtgcaagcatgtggtctactcatctattgatggtcgaaacttgcttgaatcatcaaagatggcattggataaaggaaaattagatgatgctgtgagctatggaacaaagccttcttgctgtggtgctttatcatactggagattttaatcaggcaactatatatcaacagaaggcacttgatatcaatgaaagggagctgggtcttgatcatccggaaactatgaagagttatggggatttatctgtcttctactaccgccttcaacacattgaaatggctctaaagtatgtcaaccgtgcgctatatctgcttcagttttcatgtgggctttcacacccaaattcagctgccacctacataaacgtagctatgatggaagaaggcatgggaaatgttcatgttgctcttcgatacttgcatgaagccctgaagtgcaataagaggttgctaggagctgatcacatccagactgctgcaagctaccatgctatagccatagccctttcaatgatggatgcgtactccctaagtgtgcaacatgaacaaacaaccatgcagatacttcaggagaaactaggggaagatgacctccgaactcaggatgctgctgcatggctagaatattttgagtcaaaagcattagaacaacaagaggctgcccgaagaggcatgccaaaacctgattcatctattgcaagtaaaggacatcttagatcttcttgacttcataagcccagtccaggaaagaaaagaaagcaatgtgcaaaggaagtgtcggcgtgcaaagaataataccagagctcatcatggtgaatcagttgaagaaaaggagaatttccagcatgactcaggatctcttggagcaagtaaagacggttttgaagaagaaaaacctgatgtgcatcctcctgctgtattagaagaaaattatgctgcccatgaagagcagaagcaatgtgatgttttatcaccagaagaatattctgatgaagggtggcaagcagctaatatgagaggaaggtccgcaaatgactggtttacagcctcgaacaaaaggggagaaagatgattctgcaactgctcctagccagatttcatttggtagctttttaaaaactgacaagttgaatggggatcccagcattgctgaagataagtctttgaatggtactgctaaaccagaacaatttacaaatccaacaggaattaacaggccaaccagcattgcttccaagtttatatcatacaaagatgtggctgtttcgccccctggcacagtattgaaaccaattttggagaagaaggaagcaaaggagaagggtagtggacatgatatttatctaacactgtcatccgaggaagaagatccacagtttacagaaaatgagaaggaaaagccaagtgaggacagtagcaaagaggttctttcaagtcagcaagacttagagagtcatgtagaaacacctgacagcaacagtgatgaaaacccatctgcacctaagaaggcatctggaagcaaactgtcagcttcagcgcctccattcaatccaggatcactcttatcaatgtcccacccatacagcacggtggcaatatatgatgctagtgctgttattcaggcagtaccaaaccaagcaatggagattctccctcatgccattgacactagagtgcctcgtggccctcggtccaccttgtactatcgtactgggcattccttccaaaggaagcaaggttacacgcacagccagagcactattgtaaggggtagttactcccccacaaccatgaacccccatgctgctgaatttgtgcctggaaaaacttcgcagcaatctgatgtggctgacagagaacccagtcctgctaatcatgtggccaattctgatctggatgttgtatcacagaccacagatgaagtgaaggctgaaacacctgccactgaaaaggcaggtcaagttgagaaagtcgtttcaggtaaaggaaaggaaaacagagggaaagacatcgtgagaaactcatacaaaacagaacttgcaaggcaaattttgctcagtttcattgtgaagtcagtgcatgacagtttaggttccgcccaagctgaaccagagaggaagccaagtggatcagatgaagctagtaataaacagagcagcaacttagtcaagaatgcttctggtcgcaaagattcagataaacaagagaaatccatggaggttcccaagggcctgaaggatacagagggatttacagtcgtttcaaaacgtcgaaggcggccccagccattcatgaaccccataaacggcctctgttctcagccgtctatttgcacctctgtcagttaaggtctcattgcattttcaaagacctgcaatagtttggaagatggaccattgcttttgcttaggggttggtagaagaattttgccgtatccaagcgagcagcgagcatgtagtcaaactgtacaaaattttccaggataccctttgtaataataataaaaaaaaactgctgtaatctgcagtagctgtagcgctgaataaagtattcctttgtatgttagatatgacagaatcagaggaaatagcaagcagatgtttaggttaatccaatatcccagtagtgcttctcttatgccctagtgtttctgcagtttctcaagatgtcgtggggatttatcgttgcaatctgcaaatgctgtcagagcagaagaaactgaatctgctaggcgccaagagtttgttcatgaaggcatgtcttttattgcttctttcccctgtgcccagactgctcagtgtggtcattggatgccttgtcagaggacggagcagcgtttcaccgtgaagcaattgcagctgcagaccagatcaccagaccactgaggccaggcgtgaactgggccggcagttttaaagctgttggcagctacgtatactgtacgagtctaaggagtagcctgcagctaagcgtagctgcagagaccacacaaatgtgaatcaaatcagttcagttccaaactgtcattgctgggagccaacatccgagactgaaaaatatgttgtgcatacgtatttttcttttgcatttaaatttgaaaccggctcattgtgtccattgc

SEQ ID NO: 8888 - DNA, 4215 bp, Zea Mays
cgccgttctcgcgcacaacggatcagagattttcccggccgtgcgcccctctcgttgaatccccatccgccacactaagcccggccctacctgtgttgcgatgcgcggcgaggctggcaatgacggcggtggcggggatacccaactcctggacggcgccacacctcggttaggttctccttcgagtgatgacgacggaacacagagtgaggcgtatgattgggcgctgtacgacgaaacacagcctctggatggtgctgagacccagtttgtagaccaggtggaggaggagggtgtggctggcgattggacggagacacagttggagagtggcgacgaggatggtggcagtggcaatgaggatggcggcgatgacagtgaccaagtgaagacacaacaacaggtggaagatggggaacggggcaatgatggtggtggtggggatgataatgctggcaattggactaagacccagttggatgaagtatgcgaggtgtatggagcgaacaactttgttggagacatggttgaggcccagttggttgaggaatctgaggaggaggatgatgacaaggatggattaactgatgatggtgagcatgatcttggtgagtgggggaagacccagttggttgaagactctgatgaagacataggtgacgatgagttgagtgatggcactgttgtcctaagtgacaatgagagcttgtcagaagatgagaggggcacaaagtcaggaacggataaaagggatgcaaagttgggaatggaaggaagcatcgaggggttaaatggtgggattaagaagcatgatgataacaataattcggtagattctgatgcatcaacagatgaggagggtgacacaagttcaggtcaccttcagatgaaattaccttctgttcatgttgcatcagtaaggacatgtggaatttctgaacctcggaactctctgtctgtgaactgtatgaagcaatggaaacagaaggcctgggtcaacacaatacatcccctgccgaaaattgtagatgaatctacttcgtgtagcacctccgttggttgggttgataacgactcccatggttatgtacagaaccatgatcaagacggagcaaaaagcagagacaagtgctcaacagctaaaaaactttttgccgacacaacagtggaggatggtgaaaacaacagcagatgtattgctggattaagctatgtgggatcacaagagcctggtgatctgtcacaagcaaatgcttttgatgttgtggacagattgatttcaatcaatggtggattatcatctcaagaaacgaccccaaataaattggaaatagcaaagccatgtgtttcaagtaagaggggaactttaatgttggctgagaaggtcgaccttggtagaagttccaatgggaaagcagaaatatttaaatttgtggatagccttgaggatgagggaggaggtgactttttcagtaaaaacaaagacatcttgttgctgaaaccaattggtagaggaaaaccaaggagtcattttacaggagcaaagaaatcttccccaaaactttcacggggagaaaataaaacaggggaagcgttgaacaaaagaaattccaaactacctgggaggttggaaaactattcctttaacatattcaagactattcaaaagtgatgtagagagtaagcggccttctgaaaacaggactaagaaaaaccttttgaaggtcttagatgatctatcaaatgacaaatcattggaagaacaggaaaaggctgatgtagttttgaatgatgttggtccagatactcaaatggctgttgaagcaatggatgccctggtacaatgttcacctgctaaaagtttatcttctgaacatcaatctgtgctcaatagagatatgatagctgagaagtctagaatagctaaaagtcattcgaagaatggttctcctcagagagctagcaacatacaggaaggtgtcacaacacgttctaaaaaaggaaaagtaactgacttcagtgccaaacctcagaaagaaagactaagaggatctaagatgcaacaaagttctgagtctatagtaaaagtgaaacataagcaaacaaagtctgtgccagagaagagcaaagtttcaaagaaatttatcagtgaaaataagtaccatgagacacctgttgctcaccgaactaggcattgtggtaggaatgatccttctgcatttatcgagttatctaataaacacttgaggagaggtaagaaaatgacaggtgacaactccactattgggcaagtgcaaaataaccacattgcaaccgaatctggtttgagttattttgaaaaagaaagcacagagcagacttgtacaaataatgatcaagatcttcagcaacctaggtatggaagcacacaacggacaagtgtaaataatgttcgaaaccttgaagcacgcagagttgaatcaacaactgttgttacatgcagagattccccatcacatcccaaacggcaaagaacacctacaaaaatgatacagtcaactgctccagctgctgcaagtcatgaaataccatcagaattggcaagaccatgcaagaaaaggcggattttcataagaagtgtttctgacctgctaaagtatgcaaagagagaaccttcccatgggaaatcagcttctatgctatccagcatcatagaaaagtcattagctgcttatcctgtacttaattcttctataagagatgacaggaaaacttctgatgtcattagctctgcacagagactgaaggaatcctcccatattgagaatacaagcaaatcaccaaaaacgaatcctcaggttctggacagtgctatgaaaacaccgtcaaaagtggttaatgaattgtcacccacttttagtcctgtgaatccatcaaaaggctcaagtaggagcttgttaaaagcttctgttgcgagagaattgctgaagctagatcctgaaaatgtactatcaaatcagcagaaaaaagattccagaagagggaaggataaggccaatgccagtattttattcagccagcatttggatgacgatgttatcaagcgtcagaagaagatcttggcacgcttaggagtttgtgaagcattttcgatggccgatgcaacacactttgttgcagatagattttgccgcacaaagaatatgctacaagcaataactatgggcaagccagtagttacatcaatgtggcttgaaaattgtgcacaagcaggctgttttattgatgaaaggaaatatattatgagggacgaaaaaaaggaaaaggagataggtttcagcatgcttatatcactggcctcagcttgcaaacaccctcttcttctgggaaaaagagtctttgtaacatcaaatgttaaaccaagtcaagtagtgatgactagcttggttaagtcatcatcagggcagccgctagagagggtaggacgatccataatggagggaaagggagtgcctcctgacctgctggtaatctcgtgcgaagaagactacgaagcttgtgcgccactactcgagaaaggtgctagtgttttcagcgtggagcttctactgaacggcatagtcatccagaaactggagtacgagaggcaccgccttttcatggaccgagtcaaacagacccgctcgtcgcggtggttgaaggacaccgtgcaaggccggttcgtccctgtacccaagcgtccccgggcctaggcagctcaagaccaatgtatatgtaagccatgcgaagctgttcttgctcgccccttggcctctctccagctgtaggcctgtgtaaatgtatgtgccggccgcaggtgcatctgccctgctgccgctgtgctggttgcttgatgcgggcctgatctttctgtttctctcccctgtatgttgtgcattataggtgttcatatgtattgtagcctgtttcttttttctctctctctctctagctcttctgaacatacatatgtttacccgacacaactgaaccttagtggcgatgagattgtcacgacggtggtaactgaggattgatctccttgttaagccggatggcgggagacaacatgtacaggtttatgggccatgggtcgttataataagtgatagtgggctaattcctgtctggctatataatgccgattgctatataatgccgattgctgtaatgaactggatacgatgaatacagaag

SEQ ID NO: 8889 - DNA, 2636 bp, Zea Mays
caagtcccaactcctactccctgccgtgcaacgggggtgagatcttgtgttctcgtaggctatgccttccccgatggctcgcgtcctgcaccgccgtctcctcctcctcgccgccgtctccttcgccgtggtcgcttctctccttcgcccagctgctgcagtgcgcccgtttgttttggttctctccggtgaggacttcctcaaggattcggccgcgcacccgtccctcccctctgccgactccaccgacgacgacgggtgggacgacttcgccgacgattcaccagccgccgacccgctcctctccccgtcctcctgggtccctcttcttgacccagcaagccctcccctttctggcgatgagacggactcgtcggccgacgcgctcttcgtcgcgggcgcccgcgcgatgctctccgcagcgtccgatggggacgacgcggcgttcgccacggctgccgcgcagatcgaggccgcggcagaggcggggcacccgggcgcgcagtccgcgctcgcgttcctcaccggcgccgggatgacgcgcccggcatcccgatcgctcgcattcctgttgcacaagttcgccgccgacgcgggagatcttcagtcaaagatggccctcgcgtactcctacttccgccaggagatgtatgaagaagctgttatactatacgctgaacttgcagaagctgccctaactagctccttgatatcaaaggagccaccagtgattgaaccaatccgtcttcacagtgggactgaagaaaataaagaggccttgaggaagtcccgaggcgaggacgatgaagattttcaaatcacagagtaccaggcacagcgaggcaatgctgctaacatgtacaaattagggcttctgtattactatggactacgtgggctccgccgtgattatggaaaagcttttcattggttttctaaggctgttgagaaaggagagacacgagcattggaacttctgggtgagatctatgctagaggtgctggagtggaaaggaactatactgaagcatacaagtggttggcacttgctgcaaagcagcaacattactcagcttacaatggattgggttatctatatgttaaaggctatggggtggagaagaaaaacctgacaaaagcaaaggaactttttgaacttgcagccgagaataaggaagctgggggacattataaccttggtgtgttgtatcttaagggtattggtgtgaagagggatgtaattagagcatgcaatctcttgcttcatgcagttaatgctgggcaaccaaaagctatttatcaggtggcgaaactgttccagaaaggcattggtcttaagaggaacctccatatggcaacaatgttgtacaagtctgttgctgagaggggaccctggagttcattgtccagatgggctttggaatcttatttgaaaggcgatgtagggaaagcattgctcttgtattccagaatggccgatcttggatatgaggttgcacagagcaatgctgcctggattcttgataggtatggtgatcaaagtatttgcatgggagaatctagtttttgtacagatatggaaagacatcttcgtgcgcatgctttgtggtggcaagcatccgagcagggtaatgagcatgctgcattgttgattggcgatgcctactactatggtcggggcgtagcaagggactatgaacgtgcagcagaggcatatatgcatgctcggtcacagtctaatgctcaggctatttttaaccttgggtacatgcatgagcatggtcatggacttccccttgatttgcacttagcaaaaagatattatgatcaagccgttgaggtggattcagcagctaagctccctgtcatgcttgcactaacaagtttgtggctaaggaagaactacgcagacagttttttggttcgctttatcgattcacttccagaaatatatcctgttgttaacaaatgggtggaagatgttctcctggatgaagggaatgccacaattttgactctctttgcttgccttgtaactgtcctctacttgcgagagcgtcaaaggcgtcaagtggcagcagccaacccccaacaacctgatgatgtggtcatgtaaatgtctgttttcatgacatgtgcagccctgttgcttgagggtgttgaatgacggcgacagtcgcgcgcgcggagcagccgttgccgggttacagaagtgtgcatgatgaaccggccgatcttttgttcgatctagctccaccgacgtgcgacgaagaagatagaatgaaactacaacagctgcaatacatttgagctgcagagctagcttagtgcctgtttgggatcctggtctttcactgcctggtgtggtagatgaacggtggtgagcactcccttaagcctagtgtttgggaggaaaggggggctatacctagagagggaaaaccccacagataactaaatatcttatttaaatgtctttttaagccttgttcatattcacctcatttcatgtatattgaggtggattggaccattgaggtataacttagtttaatttacaccataattcacctcaatacacaggttgaggtgaatacgtgactatccaaacaaggtcttagggattactcgtcccg

SEQ ID NO: 8890 - DNA, 3064 bp, Zea Mays
cgctgaaccgtggcggtgaccggccgccggtggctgggcccagcgttagcattgggtcgggacggtagggccgcatgtgggccgcccagccgataaggccacactgctgcagcagagaggcccgtttggtccttttcttccggattttatttatttatagattcatctccaagcagaggtttggattctgcttatcccctcagattcttgaacagatctggagttagttcctaccacgaaaatatctagggcggtttcctatcctataaatatgcaacttggattctatggtgcccaccgtcagaggagcacatgtttgcggtgctagggttttgttttgtcatctgccacaagcgattgacatatcggaggattggtcatataaaaatcccttaaaagccttggggttggttgatgtgatccatatcaaaagtaggatctgcagttggaaggcaagaagaaaaacgatctgttcataccaagaccattcaaagtcttggagccttttcttttatacgatttatctacagcactgcagttgaaaggcaactagggaaaaaaagattgaactgcattctagaggtttgcaaaattgcaaccgcccccaccacatgtgcacgtcctcactaatcgttcccaccgcttgtcacttaacatcaaccgcctcgaggaactgtcgacggactacatggacgcggagagagacatcaagcccttcgtctcccctatcatggccaccaccatccagcataggcggagcctccatggccccaacgcttctcagccaactgcattggcatcggagcacgatggcactccagtgttaccgcaaactcagcctcaagcagcatgcgtcttgaacaaggccgcttcagaggtgtcaggtgacgtcagcgaccagtccattagtgcctacgagacactcgagggtacctcgactcgtcggccttgctctgcaccacgattgagcaggaaattctggggcgccggcgattatgacgcggcggcggggaggtccacgccacaacctctaagtctacagaatcgcatgtgcgtccaccccgaatttctccactctaatgcgacttcacataagtggccgtttggagccttggcagagttgttggacaatgcagtcgatgagatagaaactggtggtgctacaacaatattgttggacaaagtcaccgacaaacggaatggatcaccagctatactaattcaagatggaaatggttttaagactagcacaatgcggcttggggcagatgttattgttttcagtcgctgcactaagagcagtgggcctacacaatccattggtctcctctcttacactttcttggtggaaactggacatacagatgttgtagttcctgtggtggattataaatgcaatctaatgaaaggacaaactcaacgactggagcgtcatggttcggaacaattcttctcaaatttgtcagcattgttgaaatggtccccttttgcaacagaagaagagctgatgcagaatttctgtgacattggtccacatggcaccaagattatagtgttcaatctgtggtccaacgacgatggtaatttggagctcgactttgacacagatccggaggatattatgattagtggagcgccaaatccagaagaaattagaaattctgtaaaaagggctaatgagaaccatttggcaaatcgactacgctattctcttaggctaccagattactttaggatcatacttcgagggcaagaagttaagcgtcatcgcattgccgctgacctaatatatcctgaatgcatcagttataaaccacatagttgtggaataaaagaggctacggttcttacaaccattggattcttaaagggtgccccaactattagcgtgcacggatttaatatctatcataaaaatcgccttattttgccatttcatagagttctgaatacttcaagcagcaaaggtagaagcgtctctggggtgttggaggtagacttcatcaagcccactcatgacaaacaggactttgagaagtcacagctgttccagaagctgatcaaccgcctgaaggagatgactaacgagtactgggaactttacagtgacaagattggatacatgaaaaagccacgcgtgagtgcagctcctcttcctcctccagtaatgctgccgatagcaaatggcactgctgaaccatcagataggagcgcacctgctccgacgcaacccttgaggtcgcacagcaactacttgaatgcagttccaatcgcctcagcgccccctggttttcactcagcacctgtcaaagcagagagcgttgcaccaggagcgcatatgggctactccccgtcctcgctaaacgcgcagaccatgcaagtcaacgggataaaatcgccttccatggtgcctgccaccgattcggtagacacaagaaaaaggaggaacgacgacactactactatgacggtcgcgtttaaaaggaaggctacgcaggatttggctggcagcagctgtgctactgatgagacaaaacaggtatccgggtatatggggatgggagagcgagagacgaaggaattttgcttcctgaagatggaaaaccggatgctccgtgaagagtgctcggattttgttatggcagagaaggcactacgactcaaggaacagaatttacggctcgagattgagaaggcgcgggagcaattcaagagcctactgaacgaatacgtttcgttgtcagctacgccgacacagaaacggtaggcatcgtcccgaagccaccggccgtggccggcggcttgtgcactcgtgctagctcttcacgacatgtgggtatgttcagaatgccagagaaccgaatgctagcaaggaagcggtgatgcttctggacggctttgccggtggcggtgtagacatagcgcgaaaggcgtgtgtaccaagctctcagaaactcgactttggtttattctccagtgtcgagtgattagatactgtacatacttgtaaaacaagaggtcaccttttctgtgtgacgaaaaaatatatatatttcgaaaattg

SEQ ID NO: 8891 - DNA, 3082 bp, Zea Mays
cgctgaaccgtggcggtgaccggccgccggtggctgggcccagcgttagcattgggtcgggacggtagggccgcatgtgggccgcccagccgataaggccacactgctgcagcagagaggcccgtttggtccttttcttccggattttatttatttatagattcatctccaagcagaggtttggattctgcttatcccctcagattcttgaacagatctggagttagttcctaccacgaaaatatctagggcggtttcctatcctataaatatgcaacttggattctatggtgcccaccgtcagaggagcacatgtttgcggtgctagggttttgttttgtcatctgccacaagcgattgacatatcggaggattggtcatataaaaatcccttaaaagccttggggttggttgatgtgatccatatcaaaagtaggatctgcagttggaaggcaagaagaaaaacgatctgttcataccaagaccattcaaagtcttggagccttttcttttatacgatttatctacagcactgcagttgaaaggcaactagggaaaaaaagattgaactgcattctagaggtttgcaaaattgcaaccgcccccaccacatgtgcacgtcctcactaatcgttcccaccgcttgtcacttaacatcaaccgcctcgaggaactgtcgacggactacatggacgcggagagagacatcaagcccttcgtctcccctatcatggccaccaccatccagcataggcggagcctccatggccccaacgcttctcagccaactgcattggcatcggagcacgatggcactccagtgttaccgcaaactcagcctcaagcagcatgcgtcttgaacaaggccgcttcagaggtgtcaggtgacgtcagcgaccagtccattagtgcctacgagacactcgagggtacctcgactcgtcggccttgctctgcaccacgattgagcaggaaattctggggcgccggcgattatgacgcggcggcggggaggtccacgccacaacctctaagtctacagaatcgcatgtgcgtccaccccgaatttctccactctaatgcgacttcacataagtggccgtttggagccttggcagagttgttggacaatgcagtcgatgagatagaaactggtggtgctacaacaatattgttggacaaagtcaccgacaaacggaatggatcaccagctatactaattcaagatgatggtggaggcatggatcctgattctttgaggcggtgtatgagctttggattttcagagaaacaatcaggatcttcgattggacaatatggaaatggttttaagactagcacaatgcggcttggggcagatgttattgttttcagtcgctgcactaagagcagtgggcctacacaatccattggtctcctctcttacactttcttggtggaaactggacatacagatgttgtagttcctgtggtggattataaatgcaatctaatgaaaggacaaactcaacgactggagcgtcatggttcggaacaattcttctcaaatttgtcagcattgttgaaatggtccccttttgcaacagaagaagagctgatgcagaatttctgtgacattggtccacatggcaccaagattatagtgttcaatctgtggtccaacgacgatggtaatttggagctcgactttgacacagatccggaggatattatgattagtggagcgccaaatccagaagaaattagaaattctgtaaaaagggctaatgagaaccatttggcaaatcgactacgctattctcttagggtctatgcttctgtgttgtatctgcagctaccagattactttaggatcatacttcgagggcaagaagttaagcgtcatcgcattgccgctgacctaatatatcctgaatgcatcagttataaaccacatagttgtggaataaaagaggctacggttcttacaaccattggattcttaaagggtgccccaactattagcgtgcacggatttaatatctatcataaaaatcgccttattttgccatttcatagagttctgaatacttcaagcagcaaaggtagaagcgtctctggggtgttggaggtagacttcatcaagcccactcatgacaaacaggactttgagaagtcacagctgttccagaagctgatcaaccgcctgaaggagatgactaacgagtactgggaactttacagtgacaagattggatacatgaaaaagccacgcgtgagtgcagctcctcttcctcctccagtaatgctgccgatagcaaatggcactgctgaaccatcagataggagcgcacctgctccgacgcaacccttgaggtcgcacagcaactacttgaatgcagttccaatcgcctcagcgccccctggttttcactcagcacctgtcaaagcagagagcgttgcaccaggagcgcatatgggctactccccgtcctcgctaaacgcgcagaccatgcaagtcaacgggataaaatcgccttccatggtgcctgccaccgattcggtagacacaagaaaaaggaggaacgacgacactactactatgacggtcgcgtttaaaaggaaggctacgcaggatttggctggcagcagctgtgctactgatgagacaaaacaggtatccgggtatatggggatgggagagcgagagacgaaggaattttgcttcctgaagatggaaaaccggatgctccgtgaagagtgctcggattttgttatggcagagaaggcactacgactcaaggaacagaatttacggctcgagattgagaaggcgcgggagcaattcaagagcctactgaacgaatacgtttcgttgtcagctacgccgacacagaaacgggcgacactcccagcccaagatctgtgtttgcgcttcaatgacgactcctcgcatgacgatgaggggtattccctccccgtcgtccatggtggcgctcgacgacagggacatgttaacacactggagaaggtagaggggatttcgggaaggaagaagagaaaacaggggaaactggagacatgagggacgacctgttctctg

SEQ ID NO: 8892 - DNA, 3098 bp, Zea Mays
cgctgaaccgtggcggtgaccggccgccggtggctgggcccagcgttagcattgggtcgggacggtagggccgcatgtgggccgcccagccgataaggccacactgctgcagcagagaggcccgtttggtccttttcttccggattttatttatttatagattcatctccaagcagaggtttggattctgcttatcccctcagattcttgaacagatctggagttagttcctaccacgaaaatatctagggcggtttcctatcctataaatatgcaacttggattctatggtgcccaccgtcagaggagcacatgtttgcggtgctagggttttgttttgtcatctgccacaagcgattgacatatcggaggattggtcatataaaaatcccttaaaagccttggggttggttgatgtgatccatatcaaaagtaggatctgcagttggaaggcaagaagaaaaacgatctgttcataccaagaccattcaaagtcttggagccttttcttttatacgatttatctacagcactgcagttgaaaggcaactagggaaaaaaagattgaactgcattctagaggtttgcaaaattgcaaccgcccccaccacatgtgcacgtcctcactaatcgttcccaccgcttgtcacttaacatcaaccgcctcgaggaactgtcgacggactacatggacgcggagagagacatcaagcccttcgtctcccctatcatggccaccaccatccagcataggcggagcctccatggccccaacgcttctcagccaactgcattggcatcggagcacgatggcactccagtgttaccgcaaactcagcctcaagcagcatgcgtcttgaacaaggccgcttcagaggtgtcaggtgacgtcagcgaccagtccattagtgcctacgagacactcgagggtacctcgactcgtcggccttgctctgcaccacgattgagcaggaaattctggggcgccggcgattatgacgcggcggcggggaggtccacgccacaacctctaagtctacagaatcgcatgtgcgtccaccccgaatttctccactctaatgcgacttcacataagtggccgtttggagccttggcagagttgttggacaatgcagtcgatgagatagaaactggtggtgctacaacaatattgttggacaaagtcaccgacaaacggaatggatcaccagctatactaattcaagatgatggtggaggcatggatcctgattctttgaggcggtgtatgagctttggattttcagagaaacaatcaggatcttcgattggacaatatggaaatggttttaagactagcacaatgcggcttggggcagatgttattgttttcagtcgctgcactaagagcagtgggcctacacaatccattggtctcctctcttacactttcttggtggaaactggacatacagatgttgtagttcctgtggtggattataaatgcaatctaatgaaaggacaaactcaacgactggagcgtcatggttcggaacaattcttctcaaatttgtcagcattgttgaaatggtccccttttgcaacagaagaagagctgatgcagaatttctgtgacattggtccacatggcaccaagattatagtgttcaatctgtggtccaacgacgatggtaatttggagctcgactttgacacagatccggaggatattatgattagtggagcgccaaatccagaagaaattagaaattctgtaaaaagggctaatgagaaccatttggcaaatcgactacgctattctcttagggtctatgcttctgtgttgtatctgcagctaccagattactttaggatcatacttcgagggcaagaagttaagcgtcatcgcattgccgctgacctaatatatcctgaatgcatcagttataaaccacatagttgtggaataaaagaggctacggttcttacaaccattggattcttaaagggtgccccaactattagcgtgcacggatttaatatctatcataaaaatcgccttattttgccatttcatagagttctgaatacttcaagcagcaaaggtagaagcgtctctggggtgttggaggtagacttcatcaagcccactcatgacaaacaggactttgagaagtcacagctgttccagaagctgatcaaccgcctgaaggagatgactaacgagtactgggaactttacagtgacaagattggatacatgaaaaagccacgcgtgagtgcagctcctcttcctcctccagtaatgctgccgatagcaaatggcactgctgaaccatcagataggagcgcacctgctccgacgcaacccttgaggtcgcacagcaactacttgaatgcagttccaatcgcctcagcgccccctggttttcactcagcacctgtcaaagcagagagcgttgcaccaggagcgcatatgggctactccccgtcctcgctaaacgcgcagaccatgcaagtcaacgggataaaatcgccttccatggtgcctgccaccgattcggtagacacaagaaaaaggaggaacgacgacactactactatgacggtcgcgtttaaaaggaaggctacgcaggatttggctggcagcagctgtgctactgatgagacaaaacaggtgctcggattttgttatggcagagaaggcactacgactcaaggaacagaatttacggctcgagattgagaaggcgcgggagcaattcaagagcctactgaacgaatacgtttcgttgtcagctacgccgacacagaaacggtaggcatcgtcccgaagccaccggccgtggccggcggcttgtgcactcgtgctagctcttcacgacatgtgggtatgttcagaatgccagagaaccgaatgctagcaaggaagcggtgatgcttctggacggctttgccggtggcggtgtagacatagcgcgaaaggcgtgtgtaccaagctctcagaaactcgactttggtttattctccagtgtcgagtgattagatactgtacatacttgtaaaacaagaggtcaccttttctgtgtgacgaaaaaatatatatatttcgaaaattg

SEQ ID NO: 8893 - DNA, 3433 bp, Zea Mays
atgcccgcgtcccgcatccctttcaagcgctgcaccgccgccgtcccgggcgtggggaagcccggccccgctgccagcatgccgcccgccaagcgccgccgcgaccgcgtcgtcccgtcgcggtccagggactcgatgccgccgcccgcgccgcacgtggaggaaggtgacaacaggcacggggaggtgtacaacgtagagttgctcatggccgagcccaaagtcgactcatttggtcccgtggagaccgcgttgtggacgcaagcgcggacggcgcccacggatgccgacctgtaccgagcgtgtcgtaacataaacaagaggggcagctgtgggggagctgccagcggtagtgtgctcacgtctgtgagcaatgccgcctcggacgcttgtgctggtggcaatggcaccattgtccgagtgagcaatgctgccttggaaggtggtgctggtagcaatggtggtctggaggggagacctgcggtggtggagtgcaagcccaagagggagggcagcgacaagaaagaggatttctactggccggaggattttgtgcttggggatgtcgtgtgggcgaggtccggcaagaaatccccaatgtggcctgcactggtgattgaccccctgcagcatgcgccggaagtcgtgctcaactcctgtgttcctggcgctctctgcgtcatgttcttcggttattccgctaatgggcatggcagggactatggatgggttaagcaaggaatgatctttccctttgtggactacctagacaggtttcaaggacagcctctgtataagctcagaccaaccaaattccgtgcagcaatcgaggaggctttcctagctgaacgtggtttttttgatctcgacatggatggggcatgctcaccgcgaaagtttgtagataagcagtctgatcctaatggctttcaggaagaggccgcttcaaataacgagcaggagtgccaatctgagtctcaggttgttggcaaatcggcactgtgttgtgatagctgtggtaatcgcctaccatccaaggtttcaaagaaaaggaagcaagggggtgagcaggtgctttgtaggcactgtgaaaagcattactctgcagttattgcagtcgaaacaatactgtggcatatgcaagaaaatttggcaccacacagatggtgggaactgggtttgttgtgatgagtgccagatttgggttcacgtagaatgtgacctgacatgcaacaacatggagattatttttgtccggattgcaaatcaaaatgcaaaacagttccagcaactgaaaaaatgaatacttcccacagttcagaatgtgctagcacttcaaagggaaaatcaaccccaatgatagctgttttctgcaacggcgaggaggcattgtatgtacctgagaagcacatgatactatgtcaatgtaaggcttgcaaggaaaggatgatgagtctgaatgagtgggagaagcatactggctcaaggaaaaagaattggaagatgagtattagacagaagagcacaggggagccactcattaatttgctggatgatattccttgtgggacatcgaagtcttctaagccaggcattaagaaaggagagctgctacaattgcaagctaatgcttacagtcctgtctgtgctaaatggacaacggaacgctgtgctgtttgtcgatgggttgaggattgggactacaacaaaattataatttgcaacaggtgccaaatagctgttcaccaagagtgctatggagcacgagctgtacaagatcttacaatatggctttgtcgagcatgtgaattctcccaacagaaaagagaatgctgcctatgtcctgtcaaagggggtgctctcaagccaacagatgttgatggactgtgggttcatgttacatgtgcctggtttcagcctaaagtctcttttccggttgaggagaccatggagccagctatgggaataatgagcatccctgcagagtactttaagaagacttgcgtcatatgcaagcaaatgcatggtgcctgcacacaatgctacaagtgctctacgtattatcatgcaatgtgtgcatcaagagctggatatcgcatggagttgcaacactatgaacgaagtggcaggcacattacaaaaatggtttcctactgtgattttcacagtactcctgacccagacaatgtgttgatagtgaagacacctgaaggtgttttctctacgaaattttttgtccaaaatggtgagaaacagacagctgcaagactcgccaggaaggaaaattaccaggagaaagtgcttcctcctatagtttctgactgtctagtcgcaaagtgcctgacctatgaaatgttgaaatacaagaaagaaccaggagaggctattgcccaccggattatgggacctcgacaccactcccaggattttattgatggccttaacgcatacatgggtcataaggacgaccaatccttttcaacgtttaaagagcgacttgggtatttacagaaaactgaaaatttgagggtctcttgtggtcgatctggaattcatggatgggggctctttgctgcaaggaatattcaggaggggcaaatggttattgagtatcgtggtgaacaagttagacagcgtgttgctgatttgagggaagcacggtaccatagagaaaaaaaggattgctatttgttcaagataagtgaagatgttgtcatcgatgctaccggcaaaggaaacatagcgcgcctgattaatcactcgtgtatgccaagctgctatgctaggatcgtgaccgtcagtggtgacaggagccagatcattcttattgcgaagagagacgtctctgccggagaagagctgacgtagttcctcagccctgccagtataactacctgtttgaccctgacgagtccgaagactgcaaggttccatgcctgtgcaaagctcctaactgccgtggatacatgaactagggtgctgctagaagagtaaaaaccaatctaacaaacaaggactgaggctaactccttacagaagccaaaagccggccatttttttttcctggaattctttcggtagtttctcgttttcttatattactcaccagaagcttacaattcgtgggctgcacaaggtttggaccattttgttcagaaattgcgatttagggcagccgtaggcagtcatccatttgtatattcttccattgctgtgataagatggtaagaatgctcaaatttttttttggttaaatgaaaataagaaaaactcagtttgattctatctatttccaatggcatttcattgatcaaattaatgacttcatctcctatccaaggccatgcagctctatagaaagctatatatattgagtccaccaggacccggagctgcatccctttttcattttttagtgtattgaagatttcct

SEQ ID NO: 8894 - DNA, 3874 bp, Zea Mays
agccccccacgggccacggccccaccccacctggccgcgtcgcacactcgcaccccgtcgtcttccccaccacacctcctccgcagtccgccccctgcctcctccgaccaccgcattgcgttcgaaatattgaaaacaccacaattccccgtattccgaaactcgggggagggtccccaaattttcagccccgcgtcggcgcgttgcctccgcctccgccttccacccgcagccccgcatatctccaaatccccaaccccctgctcgcggccccgaactcccccactgagcttgcttaaaatcccgacgcggcgctcgcggaggaggcggaaccctaaggcctggatccctccccgtccccgcgcccgaattgcacgcccgattccaggttctagtgtttcccatgccctagccaccagcgcccgtggtgccggtgccatgcccgcgtcccgcatccctttcaagcgctgcaccgccgccgtcccgggcgtggggaagcccggccccgctgccagcatgccgcccgccaagcgccgccgcgaccgcgtcgtcccgtcgcggtccagggactcgatgccgccgcccgcgccgcacgtggaggaaggtgacaacaggcacggggaggtgtacaacgtagagttgctcatggccgagcccaaagtcgactcatttggtcccgtggagaccgcgttgtggacgcaagcgcggacggcgcccacggatgccgacctgtaccgagcgtgtcgtaacataaacaagaggggcagctgtgggggagctgccagcggtagtgtgctcacgtctgtgagcaatgccgcctcggacgcttgtgctggtggcaatggcaccattgtccgagtgagcaatgctgccttggaaggtggtgctggtagcaatggtggtctggaggggagacctgcggtggtggagtgcaagcccaagagggagggcagcgacaagaaagaggatttctactggccggaggattttgtgcttggggatgtcgtgtgggcgaggtccggcaagaaatccccaatgtggcctgcactggtgattgaccccctgcagcatgcgccggaagtcgtgctcaactcctgtgttcctggcgctctctgcgtcatgttcttcggttattccgctaatgggcatggcagggactatggatgggttaagcaaggaatgatctttccctttgtggactacctagacaggtttcaaggacagcctctgtataagctcagaccaaccaaattccgtgcagcaatcgaggaggctttcctagctgaacgtggtttttttgatctcgacatggatggggcatgctcaccgcgaaagtttgtagataagcagtctgatcctaatggctttcaggaagaggccgcttcaaataacgagcaggagtgccaatctgagtctcaggttgttggcaaatcggcactgtgttgtgatagctgtggtaatcgcctaccatccaaggtttcaaagaaaaggaagcaagggggtgagcaggtgctttgtaggcactgtgaaaagttattgcagtcgaaacaatactgtggcatatgcaagaaaatttggcaccacacagatggtgggaactgggtttgttgtgatgagtgccagatttgggttcacgtagaatgtgacctgacatgcaacaacatggaggatttggaaaatgcagattatttttgtccggattgcaaatcaaaatgcaaaacagttccagcaactgaaaaaatgaatacttcccacagttcagaatgtgctagcacttcaaagggaaaatcaaccccaatgatagctgttttctgcaacggcgaggaggcattgtatgtacctgagaagcacatgatactatgtcaatgtaaggcttgcaaggaaaggatgatgagtctgaatgagtgggagaagcatactggctcaaggaaaaagaattggaagatgagtattagacagaagagcacaggggagccactcattaatttgctggatgatattccttgtgggacatcgaagtcttctaagccaggcattaagaaaggagagctgctacaattgcaagctaatgcttacagtcctgtctgtgctaaatggacaacggaacgctgtgctgtttgtcgatgggttgaggattgggactacaacaaaattataatttgcaacaggtgccaaatagctgttcaccaagagtgctatggagcacgagctgtacaagatcttacaatatggctttgtcgagcatgtgaattctcccaacagaaaagagaatgctgcctatgtcctgtcaaagggggtgctctcaagccaacagatgttgatggactgtgggttcatgttacatgtgcctggtttcagcctaaagtctcttttccggttgaggagaccatggagccagctatgggaataatgagcatccctgcagagtactttaagaagacttgcgtcatatgcaagcaaatgcatggtgcctgcacacaatgctacaagtgctctacgtattatcatgcaatgtgtgcatcaagagctggatatcgcatggagttgcaacactatgaacgaagtggcaggcacattacaaaaatggtttcctactgtgattttcacagtactcctgacccagacaatgtgttgatagtgaagacacctgaaggtgttttctctacgaaattttttgtccaaaatggtgagaaacagacagctgcaagactcgccaggaaggaaaattaccaggagaaagtgcttcctcctatagtttctgactgtctagtcgcaaagtgcctgacctatgaaatgttgaaatacaagaaagaaccaggagaggctattgcccaccggattatgggacctcgacaccactcccaggattttattgatggccttaacgcatacatgggtcataaggacgaccaatccttttcaacgtttaaagagcgacttgggtatttacagaaaactgaaaatttgagggtctcttgtggtcgatctggaattcatggatgggggctctttgctgcaaggaatattcaggaggggcaaatggttattgagtatcgtggtgaacaagttagacagcgtgttgctgatttgagggaagcacggtaccatagagaaaaaaaggattgctatttgttcaagataagtgaagatgttgtcatcgatgctaccggcaaaggaaacatagcgcgcctgattaatcactcgtgtatgccaagctgctatgctaggatcgtgaccgtcagtggtgacaggagccagatcattcttattgcgaagagagacgtctctgccggagaagagctgacgtagttcctcagccctgccagtataactacctgtttgaccctgacgagtccgaagactgcaaggttccatgcctgtgcaaagctcctaactgccgtggatacatgaactagggtgctgctagaagagtaaaaaccaatctaacaaacaaggactgaggctaactccttacagaagccaaaagccggccatttttttttcctggaattctttcggtagtttctcgttttcttatattactcaccagaagcttacaattcgtgggctgcacaaggtttggaccattttgttcagaaattgcgatttagggcagccgtaggcagtcatccatttgtatattcttccattgctgtgataagatggtaagaatgctcaaatttttttttggttaaatgaaaataagaaaaactcagtttgattctatctatttccaatggcatttcattgatcaaattaatgacttcatctcctatccaaggccatgcagctctatagaaagctatatatattgagtccaccaggacccggagctgcatccctttttcattttttagtgtattgaagatttcct

SEQ ID NO: 8895 - DNA, 1828 bp, Zea Mays
atggcggcagcggtggtggataaggtgttcgtcgcgctgccggcggaggtgaaggcggggcagtccacgctggcgtgggctctcgaccgtttcggcggcggcggcggcggcagaaccacggttgtgatcgcacatgtgcatgtcccgccacagatgattccagtgatgggggtcaagttccactctagtaaactgagccccgagcaagtgaaactgttcagaaggattgagcatgagagggtggacaaacagctagacggttatgttcgccagtgctcaaaaatgaaggtcaaatgtgagaaactagtttttgagaaggacgacgttgtggccggtctggttgaactcgtcgtcttgcataaagtcactaggctagttattgcagctgctgcagacaggcaatattcaagatggatagacccaagtgtaggacagcaacagaaatcatgcagagagctgatccatcgtgcaagatctggtttgtttgcaagggacaactgatctgtaccaggggtgtggaagaggaggttgcgccatcagctacaccttttgtccctgatgatcttgatcaccaggctctgcagttagtagtgtctcaccagaaagaggacgaagctaagtcggagctggggttatacgatgagctgaaagaggcatgcatagcagctgagaacctgatgaagagagccctaaacgaatcttccaggcgccaaaaggcagatggagaagtggcctccgcgcttcagaaagcaaaggaataccaggagttgtactttgaggagacgaggaagcgtgaagagctcgaaggagctcttgcaagagcgcaccgagagatcgcgcggttaatgcaggcgaagcaggtgttcgtggtcgagcgaaacacggcagcggacgaactccaggaggccatgtcagagaggtcgtccctggaaggccacgacgtcgacgaggatgccgttttgcgaacagccggcggtcaagcgactgagcaacaggaggaggaggaggagcatgtccagacacaacacgatctgggcaccggtgaaagggacctggaactggaagcgcggctcaaccagagcaagctggccgcgttctcgccgtcgtccgtcatccagtcgccgtacgacgaagaccgcgtcccggcctgcttcctctgcccgatccttcaggagcccatgagggatccccacgtcgcggcagacgggttcacgtacgagggcgacgccatcagaggctggctggacggagggaacggcgcctcccccgtgaccggccagccgctcgcgcaccgggagctggcaccgaatctcgcgcttggcgccgtgatccaagattacacggtgatgaggcggcggcagtgccggttctgcgattcgcacgacggcgttgctgcgcttcaattttttccatcgcctgtgggctgccagcggtgagctgcgcttggcaggcccagatcacgccgcaccccatttgtgtttggttccaatggtaggactagacgggaggggaggatccattaggtacgattatttggttcagagttaagatttggatcagatcattctagcaccatctcctgttccgttagaattggagggacgaaggagacctcgtggacgtgactgttcccagctgtaatgtaaccaaacacatttgcagtctcgtatacaatttgtgtgtacaagcctacaagacgaggtacttgtatatcggtgattgaataagatgaagaacatgctaataatgcttgtttgaatgtagttgaattcaccttaattcatatatattgttggaggcttttctcttccgatggttctcaacaaca

SEQ ID NO: 8896 - DNA, 1886 bp, Zea Mays
cgacaaggaggagctcttctaaaccgaggctcttcacggcgaactctttgcgaagaagatggcggcagcggtggtggataaggtgttcgtcgcgctgccggcggaggtgaaggcggggcagtccacgctggcgtgggctctcgaccgtttcggcggcggcggcggcggcagaaccacggttgtgatcgcacatgtgcatgtcccgccacagatgattccatgggggtcaagttccactctagtaaactgagccccgagcaagtgaaactgttcagaaggattgagcatgagagggtggacaaacagctagacggttatgttcgccagtgctcaaaaatgaaggtcaaatgtgagaaactagtttttgagaaggacgacgttgtggccggtctggttgaactcgtcgtcttgcataaagtcactaggctagttattgcagctgctgcagacaggcaatattcaagaaagatggatagacccaagtgtaggacagcaacagaaatcatgcagagagctgatccatcgtgcaagatctggtttgtttgcaagggacaactgatctgtaccaggggtgtggaagaggaggttgcgccatcagctacaccttttgtccctgatgatcttgatcaccaggctctgcagttagtagtgtctcaccagaaagaggacgaagctaagtcggagctggggttatacgatgagctgaaagaggcatgcatagcagctgagaacctgatgaagagagccctaaacgaatcttccaggcgccaaaaggcagatggagaagtggcctccgcgcttcagaaagcaaaggaataccaggagttgtactttgaggagacgaggaagcgtgaagagctcgaaggagctcttgcaagagcgcaccgagagatcgcgcggttaatgcaggcgaagcaggtgttcgtggtcgagcgaaacacggcagcggacgaactccaggaggccatgtcagagaggtcgtccctggaaggccacgacgtcgacgaggatgccgttttgcgaacagccggcggtcaagcgactgagcaacaggaggaggaggaggagcatgtccagacacaacacgatctgggcaccggtgaaagggacctggaactggaagcgcggctcaaccagagcaagctggccgcgttctcgccgtcgtccgtcatccagtcgccgtacgacgaagaccgcgtcccggcctgcttcctctgcccgatccttcaggagcccatgagggatccccacgtcgcggcagacgggttcacgtacgagggcgacgccatcagaggctggctggacggagggaacggcgcctcccccgtgaccggccagccgctcgcgcaccgggagctggcaccgaatctcgcgcttggcgccgtgatccaagattacacggtgatgaggcggcggcagtgccggttctgcgattcgcacgacggcgttgctgcgcttcaattttttccatcgcctgtgggctgccagcggtgagctgcgcttggcaggcccagatcacgccgcaccccatttgtgtttggttccaatggtaggactagacgggaggggaggatccattaggtacgattatttggttcagagttaagatttggatcagatcattctagcaccatctcctgttccgttagaattggagggacgaaggagacctcgtggacgtgactgttcccagctgtaatgtaaccaaacacatttgcagtctcgtatacaatttgtgtgtacaagcctacaagacgaggtacttgtatatcggtgattgaataagatgaagaacatgctaataatgcttgtttgaatgtagttgaattcaccttaattcatatatattgttggaggcttttctcttccgatggttctcaacaaca

SEQ ID NO: 8897 - DNA, 3621 bp, Zea Mays
cttctttctattctctctatcgccgctgcctctctctccctccttccttttcctggtcgcgacagcgccgcgctaatcgatcccttttgcccacgccgccgttgcctccaactccaaccaggttggtttggtagccgccacctccttccggatccgttcaccacaatctttttggtttcgctccttccgcagccgtcgggtgtgatccatggagaacggcggtggcgtcggtgaagggcgctcggagaatcgggcgggcgagaacggcggagtcgccgaggcagccactgcggcggatgagggagattgtgatgtggtggtggagggcggagatgaaggggacatgccgcccggtgcggtggcggcgggcgatcaccagccaatggtgacgccgaacaccagagcggtgctggaaacaggacagcttgcggcagacaagtgggacgaggacgatactccccgtttcattgacgtggaggaaagctttgccgatgatgtgaatcaagatcacgtcgctgcacaatctgggagcgagtatgaagatgtaaaagatggtactttggtgtatcaaagcaaagagcagccagggacgagcacggaagatattgcttcctcacatagcaggccagggacagtcacacattctgcagctgagcctgctgttgccattgaggaattggatgactcaagctcctcagctgatgagaataccgccacctctgctcctcctgcacaattctcaagcggtagttctacacctgcgcaatccagcagtgctgcttctgctcgttctactaatggtccctctttgccatctcgtcctgctggccttggatcatcgtcttccctgtcacagcctcctgctcgttctgttcaacaggtccatgccaacaggccagccattgtggaaaggggaacccagggggctactgaggatgatggagacgagaatgatgaaatccatgaaaagcttcaaatgatccgggttaagtttcttcgccttgctaacaggtttgggcaaacatatcataatatggtcgtttcacaggttctgtaccggcttgggctggcagaacaacttagaagaactacttctaatgggtcatttagcattgaccgtgcaagagacatggcagaacgccttgaagctgctggaaatgcgccccttgatttttcatgcaccatcttggttcttggtaaaactggggtcggtaagagtgctaccattaattcagtttttgatgataccaggttggatacaaacgcttttgattctagtactaggaaggttcaagaagtagttggtatggttgagggaatcaaagtgaaagtgattgatacacctggactttcctgctcatctttagaacaacaccgcaaccagaaggttctcaactctgtcaagagacttattagcaaaaaccctccagatattgttctttattttgataggttggatatgcagagcagggacaattgtgacgtccctctgctgcaaaccatcacaaaagtgtttggagcatcggtttggtttaatgccattgtcgtgttaactcatgctgcatctgcgccaccagatgggcagaatggaattcctctgagctatgagatgtttgtcacccagagatctcatgtagtgcaacaagctataaggcaagctgctggtgatgtacgccttatgaatccagtatccctcgtggaaaaccactcagcatgcaggacaaatagggctggccagagggtattgccaaatggacaagtctggaagccacagttactgctgctttgttttgcttcaaaggtgttagcagaagccaatgtgctccttaagttgcaggatagtcccattggtaaactttctcgtacaaggattcctccactgcctttcctcctctcttcccttcttcagtctcgtgccccactgaagttaccagaggagcaatttggtggtgatgatgatgatcttgaagatgatttggcagatgattctgattcagatgatggttcagattatgatgatttacctccatttaagcgtctcacaaaagctcagcttgccaagctgaacagggagcagaggaaggcctatcttgaggagctagattacagagagaagttgttctatcaaaaacagctgaaagaggaaagaaaacgtcgtaaattgatgaagaaaatggcagcagaagccagtgctcgtgcaaatgatttcagcaacagcaacctagaagatgatgctactactccaactaatgtttcagtgcctatgcctgacatggtactgccctcatcttttgattctgactaccctagccatcgctatcgtttcctggatacaccaagtgaatggcttgtcagacctgtattggaaacacagggctgggaccatgatgttggttacgagggacttaatgttgaaagattgtttgccgtaaaaggtaaagttcctctatcagtgtctggccagcttacaaaagacaagaaggattgctccctgcaaatggaggttgcaagttcaattaagcatgctgaaggtaagactacttcacttgggcttgatttgcagtctgtcggcagggatatggcatacacaatccgtggcgaatcgagatttaagaacttcaggcgcaacaatacatctgctgggatatctgctacgcttcttggggattcagtatcagctggtatgaagattgaggacaaactgatagtgaacaagcagcttagggtcctggttagcagcggggccatgagtgggaggggagacatggcctatggaggccgccttgaagcaacgatgagagacaaagattacccgattgggcggatgctttccactgttgcattatctgttgtggattggcacggggatctggcaattggctgcaacatccagtctcagatccccgctggaagagctagcaacttggttggccacgctaatctaagcaacaaggggactggccaagtcgggattcgcctcaacagctcggagcatcttgagatcgcactcgtggccctcgtgccgatattccagaacatcatgaagctgttacagaattactcggaatctggctagtccctcgtgccgatgttccagaacatcatgaagctgttacagaattactgagaatccggctagtactttttttttcatgtaagcctgagaaaacagagcatcataggttaaaatctagcttaagctagaactttacttccaattattattttgttcttttgttgccaactttgtaactatgctctcctctgggcttttttttttttaagttggagtagcattcttagggctagtttgggagctacaaaaccgaataggattggagtgactaaaatccccttattcaaatttaaataagaagtggattttagcccctctaatccattttggttttgtagctcctagactagaccttataatgtaagattccccctgagctctttctgatgaagctggattggagaattcatcgtgtcagatttctgggcatgctactgagtttttctttctttcaaaagttagataattgtgattttacatcgatgcaaggcaagtggatattgtaacaaccgaaccagtcaaattgttggagcgcaacgtttcag

SEQ ID NO: 8898 - DNA, 2258 bp, Zea Mays
aatattttttccagttccagatttcccagtagcccccttcaaatctttgatcggggttgggtgcaaagcaacgttatttctgcttcattcatgaagagagaccaaagtatcaagtggaacaacagaattttagatttcattccaaacggggcataatcattgaagaccagttaaggggggcagtgagaagggatggcggtggagttggccaagcaattgcttgcggttattggaagctatacaccacctctctgggctaccctcatcgccggggtttttgttatcatctccgtctcgctgtccctgtacttgctgttcaatcatctgtcagcctacaaaaacccagaggaacagaagtttcttgtcggcgtcattctcatggtgccgtgctatgcagtcgagtcgtacatatcactggtaaatccatcaataagtgttgatatcgaaatcatgcgagatggctatgaggcatttgctatgtactgttttgggcgctatctagttgcttgcttaggtggtgaagataggacaattgaatttttgaatagggaaggtggttcaggttctgctgcaccacttttaggacaagcatctgaacaacgatacgtaaaccatccttttccaatgaactacgtgcttaaaccgtggccgctaggcgaatggttctacttggtcatcaaatttgggctagttcagtatatgataataaaatcaatatgtgctattcttgcggtgattcttgaatcctttggagtgtattgtgaaggagagtttaagttgaactgtgggtactcttacacggccgtggttctcaatttcagtcagtcatgggccttatactgtctcgtccagttctacaccgtgataaaggatgagttagctcatataaagcctcttgcgaagtttctgacattcaagtccattgtgttcttaacatggtggcaaggtatagcaatcgcattgctcttcaactggggtttgttgagaggtcctatcgctcaagaactgcagttcaagtcaagtatccaagacttcattatctgcatagagatgggtgttgctgccgttgcccacctgtatgtcttccctgcgaagccgtacgagctgatcggtgatcgtcttgttggagatgtttctgttcttggagactacgcttctgtcgactgccctctagatccagacgaggtcaaggatagcgagcgcccaaccaagttcaggcttccccagccagatgatcatgtccggtgttccactgccataaaagaaagcgttcgcgatgtcgtacttggaggcggtgaatatatcgtgaatgacttgaagttcactgtgaaccacgcggtggaacccatcaatgagaagctgcacatgatatccgagaacataaaaaagcgcgagaagggaaagaagaaaacaaatgacgatagctgcatcggttcacccacatccttgaccagggtcatcagtgggattgatgatcccctcctgaacgggagcctgagtgacaacagtggcccaaagaaagcgcgaaggcagcacaggaaatcaggctatgcaggcgcggagagcggcggagagagcagcgaccatggcctaggtgggtttgagatccgagggaacagatggattactagctagggagtgacaactaagagcaacctgtggagatgctatacaaatgtcacaggagttagcctagccagtgggttcaagtgtaggatgaggtatctggcatgatgttgtagcatgggcaaatcgagatgagtgagcaatcaggttgttgtctgttgattcttttagctgagcgcctgagctgctgaggccttgatcctgtatttaagatgtcaggccttgattctttcagcaagcgttggaaggaaggaagcaatgtgcctgttctgagctcccgtcagcatcacttgtaaagttcttataagtacagactagaactagtcatgcatacaagagaatagacagtcgatgtttctatctgtttttgtttcattctaaggcccttgtcacacgagcaccagaattttttttctttccttttggtaccatgatggtgatggacgtgagagttccttgagatgatcaaagcatctatctttccaattccatgtgtatcctgataactgaagatgatcgtttggttttccttttggtacgcaacatgccaagtgcaggatgaactctgccctgcaagaaaaaccacaggcaagtttgtccgattaacaactatctgcacaggtcataaaaag

SEQ ID NO: 8899 - DNA, 767 bp, Zea Mays
tcctatacccaagtggcacttttcgctaacgctacaccattgcagtggggtcgatcgcttccagcgacagtttgctcatctcgaggagaactacaggagaggagtagctagcaccccgccgcgaaggcagcccacatctctgccgagggagcgagtctgctcatcagaagatggccacagtcaggactctgacagcgaagagcagagagcagcatcctacgttgcccgaacaaccataagccctccaagatcacaagaggagggcggcaagctccagcctgcctaccagagcgccgccgccgccgcagactcctgcgccaagagctatctgaagggtgccgctagtatcagtggtgcttccaggcgtggcatcaagggggataatggccgaaaggagaaggaatctccgaggctgtgaaagaggtggcgcaggctcgtcacctgttaggcaaaagaggtagcaatggcgccaatgcgactgcaacgtgggatgtcttagtcatcatgcatccaacaacgcaggggggcagtacaagtatgcaggtcatcctagctaggtcgcccaaattaaagcagcctgcttggaggaattagatttgtgtactgttgttaagttttttttttttttttttttgaattcaactgctagattctggcagatctgtcaaccgcactctccttggtttcccaaaatttactggtttgaacaagtttattactgaatctcgctgtggtgcttcgtctagcattggactggactgctcgtg

SEQ ID NO: 8900 - DNA, 1934 bp, Zea Mays
atttctcttcccatttcactttccccttcctctacccactctctcgatctctagcgccgcttcgtcgttcgttgatactcttcactccgtcgttcgttgaacactggacatggacttcttcacggaatatggggaggcgagtcagtatcaaatccaagaggtcattggtaagggaagttatggagtagttgctgctgcaattgatagtcacactggggagcgggttgcgatcaagaagataaatgatatttttggtaatgtctcggatgctgctcgcattttgcgggaaatcaagcttcttcgtctgcttcgtcacccaaacatagtccagattaagcacattatgttgccccctacccgaagggagttcaaagatatctatgttgtttttgagctcatggagtctgacctgcatcaagtgatcaaagcaaatgataacctgactccagagcatcaccgctttttcctgtatcaacttattcgtgctctcaagtacatgcattcagcccatgtatttcatcgtgatttaaagcccaggaacatactggccaattcagacagcaaactaaagatctgcgactttggacttgcacgtgcatcatttaacgactctctttcagctatctattggacagattatgtcgcaacaaggtggtaccgggctcctgaattatgtggctcctttttctccagttacacccctgcaattgatatttggagtatagggtgcatttttgctgaagttctcaccggaacgccattgtttcctgggaggaatgttgtgcaccaattagacttaataacagatctccttggaacaccatcgtttagatccttatcccagattcacagtgataaggccagggaatatttgcttggcatgccgaggaagcgccctattccattttctcataagttccgtaatgccgatcctctggctctccggttgctagagcgtttacttgcatttgacccgaaagatcgacctactgctgaagaggctttagctgatccatacttcagtggcctttctaaattggaacttgagccttcagcacaaccaatttcgaaggttgactttgaattcgagggaaggaaactaacaaaggctggtgtgagagaaatgatatatcgggagattttggagtaccatccccagatgcttcaggagtacatcgaaggtggagatcagattcacttcctatacccaagtggggtcgatcgcttccagcgacagtttgctcatctcgaggagaactacaggagaggagtagctagcaccccgccgcgaaggcagcccacatctctgccgagggagcgagtctgctcatcagaagatggccacagtcaggactctgacagcgaagagcagagagcagcatcctacgttgcccgaacaaccataagccctccaagatcacaagaggagggcggcaagctccagcctgcctaccagagcgccgccgccgccgcagactcctgcgccaagagctatctgaagggtgccgctagtatcagtggtgcttccaggcgtggcatcaagggggataatggccgaaaggagaaggaatctccgaggctgtgaaagaggtggcgcaggctcgtcacctgttaggcaaaagaggtagcaatggcgccaatgcgactgcaacgtgggatgtcttagtcatcatgcatccaacaacgcaggggggcagtacaagtatgcaggtcatcctagctaggtcgcccaaattaaagcagcctgcttggaggaattagatttgtgtactgttgttaagttttttttttttttttttttgaattcaactgctagattctggcagatctgtcaaccgcactctccttggtttcccaaaatttactggtttgaacaagtttattactgaatctcgctgtggtgcttcgtctagcattggactggactgctcgtg

SEQ ID NO: 8901 - DNA, 2688 bp, Zea Mays
gccgctgtgcttcgcgtgggccgtgcaactcgccggagacggaagcgacgtcggcgagaaccgcgctgccgttgccgtcgaggcgatatggtcctaccctcgtcgacggagacacggagtccgcagccgcctccgcctccggggcgctcgtcgtggtcggcgccgcgtgatccgacgggggtctagaatccgggcctcgtcttcatcacccgccacccgccggcgtccgcaagatgcgcgagatggcaccgccgctacaagcctctcatccggattggattggttccggctgttgcttgctccaggaaggtgcgttttctcccatccttatgtggaactcgtgctcttttctcttttcatatcataccctttatcatcatcctcatcaagtcaacctttatttgatgctttactataacccctatccgtaccgtactagtttcactctgacttttgcttggattgtcccgtgctagcgcaggtgtccttgtccttctcatgctgttggctaattccaccgataagaaatggcctgccttgcaccaaggagccagttccttttaaatatttgataagtttgacttctcgtggagatcacattctctatttaggctggggcaggatgttaataagagaaacgatatatagctactggccttatgttgttttgctcgcttcactattttccggctgaatccatgagcatcctgtagactcttttaaagaaggcactatggttcgactagtttcctcgaaaagcctttgcagttttgcgtacctcatgtcggcttctccgtgtattgctcttgctgtatgattacttggtcggtgcagctcaaatctcctattacataacactggacatggacttcttcacggaatatggggaggcgagtcagtatcaaatccaagaggtcattggtaagggaagttatggagtagttgctgctgcaattgatagtcacactggggagcgggttgcgatcaagaagataaatgatatttttggtaatgtctcggatgctgctcgcattttgcgggaaatcaagcttcttcgtctgcttcgtcacccaaacatagtccagattaagcacattatgttgccccctacccgaagggagttcaaagatatctatgttgtttttgagctcatggagtctgacctgcatcaagtgatcaaagcaaatgataacctgactccagagcatcaccgctttttcctgtatcaacttattcgtgctctcaagtacatgcattcagcccatgtatttcatcgtgatttaaagcccaggaacatactggccaattcagacagcaaactaaagatctgcgactttggacttgcacgtgcatcatttaacgactctctttcagctatctattggacagattatgtcgcaacaaggtggtaccgggctcctgaattatgtggctcctttttctccagttacacccctgcaattgatatttggagtatagggtgcatttttgctgaagttctcaccggaacgccattgtttcctgggaggaatgttgtgcaccaattagacttaataacagatctccttggaacaccatcgtttagatccttatcccagattcacagtgataaggccagggaatatttgcttggcatgccgaggaagcgccctattccattttctcataagttccgtaatgccgatcctctggctctccggttgctagagcgtttacttgcatttgacccgaaagatcgacctactgctgaagaggctttagctgatccatacttcagtggcctttctaaattggaacttgagccttcagcacaaccaatttcgaaggttgactttgaattcgagggaaggaaactaacaaaggctggtgtgagagaaatgatatatcgggagattttggagtaccatccccagatgcttcaggagtacatcgaaggtggagatcagattcacttcctatacccaagtggggtcgatcgcttccagcgacagtttgctcatctcgaggagaactacaggagaggagtagctagcaccccgccgcgaaggcagcccacatctctgccgagggagcgagtctgctcatcagaagatggccacagtcaggactctgacagcgaagagcagagagcagcatcctacgttgcccgaacaaccataagccctccaagatcacaagaggagggcggcaagctccagcctgcctaccagagcgccgccgccgccgcagactcctgcgccaagagctatctgaagggtgccgctagtatcagtggtgcttccaggcgtggcatcaagggggataatggccgaaaggagaaggaatctccgaggctgtgaaagaggtggcgcaggctcgtcacctgttaggcaaaagaggtagcaatggcgccaatgcgactgcaacgtgggatgtcttagtcatcatgcatccaacaacgcaggggggcagtacaagtatgcaggtcatcctagctaggtcgcccaaattaaagcagcctgcttggaggaattagatttgtgtactgttgttaagttttttttttttttttttttgaattcaactgctagattctggcagatctgtcaaccgcactctccttggtttcccaaaatttactggtttgaacaagtttattactgaatctcgctgtggtgcttcgtctagcattggactggactgctcgtg

SEQ ID NO: 8902 - DNA, 2986 bp, Zea Mays
gtccactgcttttgcttctgggtctttcgttcgtagatataaaacggagggaacgcagagccgggcgcctgtctggattcattctgcgagagatctgctggggcattgattcgtcatcaggctcagctctgatcagcttcaaccatcatggggagtcaagagtcggagcaggccaaggtgctcccgggaaccgactgcccgcagcagccaccggcgagcaggacctggcagaggaggttcgacgatgaaggcaagaacgtcgccatgttcagcatgaccatgagcgacctggtggaacttgttgcggtctatgatcttctgaggaaatggatggacaactgctaccgtggcgtaccggtcggtgggataggttcaggaagcatagggaggagctacagagggtacttccagcagttccagatattccccgtgaccaacgaagagaaacctgtcctagcaaaccagttctcggcatttgtttcgcgcccgaacgggaacaagtactccacggtgctgtcggcgccaaccgctgaccttctcaagggagtcggcaaagccggcattggatcttgggactggaggttgaaggaggacaggtgcacttaccacgccctgttcccaaggtcatggacggtatatgatggtgaacctgaccctgagatcaagatcacctgccgtcagatatcgcccttcataccgcacaactacagagagagcagcttcccggctgcagttttcacattcacggtacagtccgttttgtctgttcttttcaaggcaggtgaacaactctgggagctcacctgcagatgtgacgctgctcttcacctgggcaggagcacgacggcgtccgtggcgttctcctccatcacaggacggcgggagggcagcctccggtgacgttcgcgatcgcgtcccgagagaccgacggtgtccgcgtcagcgtctgcccgtccttcacgatcgcgtcgggcggcccgtccagctccggcgagcccacggcggcggccatgtgggacgagatcaagaagcacggcgcgttcgggcacgccggcgccggcaacggcaacgcggcgagggcggcggcttccaaggccgggtcgtccgtgggcgcggcagtggcggcgtcgacggccgtgccggcgggggcgacgcgggtggtgtccttctcgctggcctgggcgtgccccgaagttaagttccccgccgggagcacgtactacaggaggtacaccaggttctacggcactgatgccgacgcagctgcagagcacctagctcatgatgcccttcttgagcatatgaactgggagtcccagatcgaggagtggcagaagccaatcttgcatgaccaaaggctgcctgaatggtatccagttgctctgttcaacgagctctactacctcaacgctggaggcaccatctggacagacgggcaggctccgaagagggccggcttcgcttcgtcgttgacggccaccgagccgttctccatcgacacgctcctcccagtcgcagcgggcggcagcgcggtggacggcgtcgtgcgcgcggtggcgtcggcgacggagcggtcccactccgcggcggcgttcggcgcggcgctactgcgcggcggcgaggacaacgtggggcagttcctgtacctggaaggcatggagtacaacatgtacaacacctacgacgtgcacttctacgcctccttcgcgctgctgtccctcttcccccggctggagctgagcctgcagcgggacttcgcgcgcgccgtgctcctccacgaccctcgcccccggcgcaccctggacggcaggaccgtggcgcgcaaggtgctgggcgccgtgccgcacgacgtcgggctcaacgacccatgggtggagctgaacgcgtacatgctgcacgacgcggcgcggtggaaggacctcaaccccaagttcgtcctgcaggtgtaccgcgacgccgtggccacgggcgacgccgcgttcgcggaggcggtgtggcccgccgtgtacgtggccatggcgtacatggaccagttcgaccgcgacggcgacgggatggtggagaacgagggggtgcccgaccagacgtacgacatgtggtcggtctccggtgtcagcgcctacacgggcggggtctgggtggcggcgctgcaggcggcggcgggcatggcgcgcgtcgtcggggaccgccccgccgaggcctacttccgcgcgaggcgggacagggcggcgcgcgtgtacgatgccgagctctggaccggcgcctacttccgctacgacaacagcggcggcggcggcgccagcgagtccatcatggcggaccaactggcggggcagtggtacgcgcgggcgtgcgggctggagccggtggtggaggacgccaaggcacggagcgcgctggcgaccgtgctggactacaacgtcatgcgggtcaagggcggcgccatcggggccgtgaacgggatgcgccccgacggcgccgtcgacgcatcgtccacgcagtccaaggaggtgtggcccggggtcacgtacgccgttgcggcggccatggtccacgagggcatgacggaggccgcgttccggacggccaagggcgcccacgacgccgcctggggcaacgacggcttcgggtacgcgttccagacgcccgaggcttggacggaggacggcggctatcggtcgctgcactacatgcggccgctcggcatctgggcgatgcagtgggcgctgtcgccacccgagctccacagggatctcaggacacccgaggcgcgatcctcggaggagccgtcgccggcggacgctgccctcgggcaggcgcagttcgacaaggtggcgagcatgttgaggctgccggaggagcagcagcccaagggatacctttgggccatctacaacctcgttaggcaaattgtgctccccgcatgaggattctcttgctccaagcagccgcactcatgaatgcaaattgagcccgttattatata

SEQ ID NO: 8903 - DNA, 3128 bp, Zea Mays
tgcatgacagcccctgtggctcttccaaatgatcgagcagcagtctcccattctgcaagggttgacttattccgagacactagttgcaacatagaaaaggaggtgttggccagtatgggaaatgaccaagattcgactgctgctggaacaaatcctggtttcagagttggggagatcaggtttggcaatggagatgtttattctggcacattgttggggaacacaccagagggttcaggccagtatcgctggtcagatggttgcacctatgacggtgagtggacgagagggatgaggcatgggcaaggaaagacgcaatggccatctggagccacctatgagggcgagtattctcgcggctatgtatacggtgaaggcacctatacgggtccagataaaatcatctacaagggacggtggaagttgaatcgcaagcatgggcttggatatcagacatatccaaatggagacacgtttgaaggttcgtggattcagggagaaatagtaggtcacgggaagtacacatgggcaaatgaggacacttacgttggcaacatgaaaagtggcaggatgtcagggaaaggaactcttacatggaaaaatggggactcatatgagggtaactggatagatggcatgatgcatgggtatggaatctatacatggaatgaatgcgggtattacattggaacatggacaaggggactgaaggatgggaaaggtaaattctatccggaaggttgcagagttcctgttaacgatgagctgtatatcaaaaatctaagaaaccgtggtgtactgcctgatattagaaggcagaatcatggctcacgcatacttcactcttcctcggttgacatggggaacatgaaggttggtataaccaggcaatcttcagatgttttgtacaaaaggaatccaactgagcagcctcctttgaagaatgtgtctttggaaagacggtggagccttgaggtggctattgaaaagtttattggccatgaatcgattgaaagttctggtcaagaaagcttggaaaacttgagtgattctcgtatgcccatactggaaagagaatacatgcaaggcgttctaatcagtgaggtggttcttgacaggagtttttcagactcctcaaagaagacaaaacgccgccagaagaaaatggtaagggacacaaaaaggcctggagaggcgataattaagggacacagaagctatgatttaatgctcagcctgcagattggaatcaggtacacagttgggaagattacaccaattcaaaaacgtgaagttcatgcttcagattttggaccaacagcaagtttctggatgaatttctcaaaagaaggatctcggcttactccttcacattcagcggaagattttaaatggaaagactactgtcccatggttttcaggaatttgagagagatgttcaagattgatgctgcagactatatgatctccatatgcggaaactctgctcttaggcaactatcttcccctggaaagagtggaagtgtctttttcttgtcacaagatgatagattcatgattaagactctccgagaatctgaagtgcaggttcttttacgaatgcttccaaagtattatgatcatgtccgtacctatgagaacaccctcataaccaagttttttggcctccacagggtgaaaccttctagtggccaaatgttccggtttgttgtaatgggaaacatgttttgcactgaattgagaattcaccggaggtttgatttgaaaggctcgtctttaggccgctctactgacaaaattgaaattgacgagaacacaactctgaaggatttggatcttaattattccttttatcttgaaccttcctggcgtgaggctctactgaaattgaaacagatagtgattttttgagaacacagcggataatggattacagcctactgcttggtgtccattatagagctccacagcacttgcggacacgtgcatcttatcaccggagcatggcagcagatagattgaccgttgtttctgaagaagatgctcaggaggaggatgcccttagccatccagaaggattagtcctggttcaaagcagtggcgagaacagtgttgttgttggtcctcacataagaggcagccgtttgcgtgcatcggcagctggatttggcgaggtagacctgctgctgcctggtaccgccaggcttcagatccagctaggagttaacatgcctgcaagggcagagcaaatctccaaggaagacggaagcaaatcatttcgcgaggtgtacgatgtcgtgctttacctgggcatcattgacatattgcaagagtacaacaagtcaaagaaaatcgagcacgctgtcaagtccatgcaatatgactctgtctccatctctgccgtcaacccccggttctactcggagcgtttcttgaagttcatccagaccgtcttccccgagaattcatagctcatgagtcaatacttgttcgaaacatgagacctgatgattcccacggcagtccctgtctccaaaattggaacttgcatgcatcagaaaagcattagtcccttctttgatgaactgtcaggaggaatgggaatggctgacaagatgaggttcgtgagggctattgtgcagaagcaaatagatctcatctttctttggttttgtccccagcccctgcgatcagccggcccggctggcttccctcttccctgagtaggccgtaggcgtggcatactgccccccacctgcgaaaagatttataaataaaagttaacggcaggaagatttggggtcggcactcggtggcttagctggctgttgggagtccgggaagggaaaactggcagcaccagatgagcatttctcggtggagagttgtttctaagaacaggtagcggtgttgttgagtttcttaacggtagtaatggcgtcagtactcggtcgcctgaaaatctacagaggagtcattttcctggctgctgcgaactggagtggtatagtagtcgtggtttcttgtaattacgtagctgttggctgaatcgatcatggaccttagtgcccaagaagacagaagcccaatttcagtaaactaagccggaggagaaaactcatcagcca

SEQ ID NO: 8904 - DNA, 3801 bp, Zea Mays
cgcccagaggccgcagcatccaccactcgaggacttgcagagtctgcagcagcagcttcagctggccagactccgtccgccgatcaacacacgggcacaacgcctcccgtttcctcgtttcgaggctgcaccgcgccgcctccaagacgccgggagcctcatcgcctcctctggcgaaaaaccgcttctctccggcgagctgcctccgtttccgggtgatcgagtctacgcgcgcatcgcctcttcccaaggcaggataggatcccttatcggcctgacgcgattcgtggatccgacggcgaggtctgcgccgtccacaggccacagcttacagcaccgctcctcccctctccttgtccttactctggcagcgcaaccctccctgcttcgactgtcctttttttccacatggagactcactagactactagagttgtccctccgctagccgcacggatcatctccgtcctcacctattctctctctctctctctctctctctctctctctctctctctctctctctctcgctcgctctgcaggtcttggaggtagtgccgtcgacgaggcatctccacccctccggcgagctccccttccaaaaagtggtgaggcagtgctttggatattagcttttgcattttagtggatcggtactcccaggggttatgcatgacagcccctgtggctcttccaaatgatcgagcagcagtctcccattctgcaagggttgacttattccgagacactagttgcaacatagaaaaggaggtgttggccagtatgggaaatgaccaagattcgactgctgctggaacaaatcctggtttcagagttggggagatcaggtttggcaatggagatgtttattctggcacattgttggggaacacaccagagggttcaggccagtatcgctggtcagatggttgcacctatgacggtgagtggacgagagggatgaggcatgggcaaggaaagacgcaatggccatctggagccacctatgagggcgagtattctcgcggctatgtatacggtgaaggcacctatacgggtccagataaaatcatctacaagggacggtggaagttgaatcgcaagcatgggcttggatatcagacatatccaaatggagacacgtttgaaggttcgtggattcagggagaaatagtaggtcacgggaagtacacatgggcaaatgaggacacttacgttggcaacatgaaaagtggcaggatgtcagggaaaggaactcttacatggaaaaatggggactcatatgagggtaactggatagatggcatgatgcatgggtatggaatctatacatggaatgaatgcgggtattacattggaacatggacaaggggactgaaggatgggaaaggtaaattctatccggaaggttgcagagttcctgttaacgatgagctgtatatcaaaaatctaagaaaccgtggtgtactgcctgatattagaaggcagaatcatggctcacgcatacttcactcttcctcggttgacatggggaacatgaaggttggtataaccaggcaatcttcagatgttttgtacaaaaggaatccaactgagcagcctcctttgaagaatgtgtctttggaaagacggtggagccttgaggtggctattgaaaagtttattggccatgaatcgattgaaagttctggtcaagaaagcttggaaaacttgagtgattctcgtatgcccatactggaaagagaatacatgcaaggcgttctaatcagtgaggtggttcttgacaggagtttttcagactcctcaaagaagacaaaacgccgccagaagaaaatggtaagggacacaaaaaggcctggagaggcgataattaagggacacagaagctatgatttaatgctcagcctgcagattggaatcaggtacacagttgggaagattacaccaattcaaaaacgtgaagttcatgcttcagattttggaccaacagcaagtttctggatgaatttctcaaaagaaggatctcggcttactccttcacattcagcggaagattttaaatggaaagactactgtcccatggttttcaggaatttgagagagatgttcaagattgatgctgcagactatatgatctccatatgcggaaactctgctcttaggcaactatcttcccctggaaagagtggaagtgtctttttcttgtcacaagatgatagattcatgattaagactctccgagaatctgaagtgcaggttcttttacgaatgcttccaaagtattatgatcatgtccgtacctatgagaacaccctcataaccaagttttttggcctccacagggtgaaaccttctagtggccaaatgttccggtttgttgtaatgggaaacatgttttgcactgaattgagaattcaccggaggtttgatttgaaaggctcgtctttaggccgctctactgacaaaattgaaattgacgagaacacaactctgaaggatttggatcttaattattccttttatcttgaaccttcctggcgtgaggctctactgaagcagattgaaacagatagtgattttttgagaacacagcggataatggattacagcctactgcttggtgtccattatagagctccacagcacttgcggacacgtgcatcttatcaccggagcatggcagcagatagattgaccgttgtttctgaagaagatgctcaggaggaggatgcccttagccatccagaaggattagtcctggttcaaagcagtggcgagaacagtgttgttgttggtcctcacataagaggcagccgtttgcgtgcatcggcagctggatttggcgaggtagacctgctgctgcctggtaccgccaggcttcagatccagctaggagttaacatgcctgcaagggcagagcaaatctccaaggaagacggaagcaaatcatttcgcgaggtgtacgatgtcgtgctttacctgggcatcattgacatattgcaagagtacaacaagtcaaagaaaatcgagcacgctgtcaagtccatgcaatatgactctgtctccatctctgccgtcaacccccggttctactcggagcgtttcttgaagttcatccagaccgtcttccccgagaattcatagctcatgagtcaatacttgttcgaaacatgagacctgatgattcccacggcagtccctgtctccaaaattggaacttgcatgcatcagaaaagcattagtcccttctttgatgaactgtcaggaggaatgggaatggctgacaagatgaggttcgtgagggctattgtgcagaagcaaatagatctcatctttctttggttttgtccccagcccctgcgatcagccggcccggctggcttccctcttccctgagtaggccgtaggcgtggcatactgccccccacctgcgaaaagatttataaataaaagttaacggcaggaagatttggggtcggcactcggtggcttagctggctgttgggagtccgggaagggaaaactggcagcaccagatgagcatttctcggtggagagttgtttctaagaacaggtagcggtgttgttgagtttcttaacggtagtaatggcgtcagtactcggtcgcctgaaaatctacagaggagtcattttcctggctgctgcgaactggagtggtatagtagtcgtggtttcttgtaattacgtagctgttggctgaatcgatcatggaccttagtgcccaagaagacagaagcccaatttcagtaaactaagccggaggagaaaactcatcagcca

SEQ ID NO: 8905 - DNA, 1136 bp, Zea Mays
aacacttccgactgcatgctcgctcactctcattcgtagagtactctttttattttcgccctcgatcctctctctagtggcaaaattaaaggtgttagagaggcaggcgttgcactggcactgctatagctagcctggctgatggatgcatggtcgctcatgtgcctaaacgtgcatgtgaagtgaccaaatatatagctgccggctggttcgtgttcttggagctgagactgggagctggccatggtgaggacgacggtggtcggcagggagaggagcggcggcgtgaggcagtacaacaggtccaaggtgcctcgcctcaggtggacgcccgatctgcaccactgcttcgtccacgccatccacaagctcggaggcccggacagggctacgccgaagcgagtgctgcagctgatgggggtgggaggactcaccatatctcatgtcaaaagccatctgcagatgtacaggaacatgagaaatgatcttggaatgcaagggacggaggatcaggagcacgtatacgtaggtggaggaggcatgcataccaatatacagcagcagcgggaccatgggtgtggcgatgccccctgctgcatctgctgccgccactcgccaaataagcctgcaaaggaggaggaggaggcgacgctgttccaacgccaactgaaaaggtcgaggacggagacgaggcgtgggcgtggccagcgggaggagatcgatgatgggagcgcgagccccaagaggcggctgctgctgctgcgaggagggcgaggccgcccaggaatatgtgagagcgacggctcaggctcacccagcagcggcacgctcgcaagtggctacgacaactacatgcgcatgatgcaagcggccatgggcgtggctgccgctgccggcgctgctgctgctgctgctcctcatcatcatcatcatcatcacgcggagacggtggagcccggtcgagggccgagaataaagcagcacttggcgcggcccggcgcagacggcggcgaacacgctcctcccagcagcaggcagctcttcacgttcttgggcttcgtggtggcgccggggccgccgcctcctccctgctgcagccgtgaccaccctttcgagatggtcggcacggctctcac

SEQ ID NO: 8906 - DNA, 9468 bp, Zea Mays
tcggcgaggaggcggcattctctctacttccctacgaagccgggcaatgtcggcgacgcagagcctggctctcaagctccgggcggctcccgcgccgggcaggccccgtggccggacgacggtgagggcagctggagcggcgcatgccggggcgctgctgcagcaccgccgctgcgtgtcgctggcgcagggcgggcggttcctccgcggcgcgccgctccccgccgcccagcggcgcccgcgggcattgccgtgggccgagcgcgccgcgcggcgccacggcggcggctcggtggtggcggcggccgcggcgggggtcaggtccatgtcgaagctaccgcagggcgacactgggctctacgacccgtccatggaccgcgattcctgcggcgtcggcttcatcgccgagctctccgccgagcccagccgcaaaaccatcgtcgacgccgtcgagatgcttgagagaatgtcccaccgtggcgcctgtggctgtgacaagaacaccggcgatggtgcgggcatccttgttgcactgccggatgcctttctcagagaggtcaccaaggacgccggctttgagcttccaccgcaaggtgagtacgccgtagggatgttcttcatgccccacgatgatgaccgacgtgagaagaccaagcttgtgttccatgagattgccgagtcattgggacatgtagtgcttgggtggcgtcgggttccaacagacaactcggacttgggcaaagcagcgcttgaaactgaaccaacgatcgaacaagtgtttgtgtctaagagcatgcactccaaggctgactttgagcaacagttgtacatcctacgtgggctctcaatcaagtccatccgtgaagctttatgtcttgagcacggaggaccaaatgatttctatacgtgctctctatcttcaaggactgttgtttacaagggtcagctgaagccaactcaacttaaagggtacttctttgcagacttaggtgaccaaaggttcaaaagttacatggctctggttcactcaagattctccacgaacaccttccccagctgggatcgggcacaaccaatgcgtgttttgggacataatggcgagatcaatacccttagagggaacaagaactggatgacagcacgtgaaggtcttctggagtgcaagggactcggtctatcaagggatgaaatgtcaaaacttctgcctatagtggatgttacctcttcagactcaggtgcatttgataatgtacttgagcttctcatccggtctggaaggagcttgccagaggctgtgatgatgatgatccctgaggcgtggcacaatgacgttaacatggacccagagaaaaaggctttgtatgaatacttttcggcccttatggagccttgggatggacctgccctagtgtcatttactgatggccgttatcttggtgctactctggatcgtaatggcttgcggcctggccgtttttatgtgacatacagtggccgcgtgatcatggctagcgaagttggtgtggttgatgtccctaatgacgatgtgatgagaaagggcaggctaaaccctggtatgatgcttttagttgattttgagaagcattgtattgtggatgatgatgcattgaagaaacaatactctggagctcgcccgtatggggagtggcttgagagacaaaagatacaacttgcagatattatagaatctgtatctgaaactgagagaattgctcctaggattggcatgcttccacaaaagagcgagaacaaggaagccttttgtattcatggaattttggctccgctgaaagcctttgggtacacggtagaaacactccaaatgttgctgctaccaatggccaaaaatggtgtagaagctctaggatccatgggaaacgatacccctctcgctgttatgtcaaacagagagaagctgccttttgattatttcaagcaaatgtttgctcaggttacaaacccaccaatcgacccaattagagaaaaaattgtcacatccatggagtgtatgattggtccagaaggtgacttatctgaaacaacagaacatcagtgtcatcgactgaaacttcaaggtcctttactgcatatagatgaaatggaggctattaaaaatatgaactttcgtggttggcgcagcaaggttcttgacataacttatcctaaagagtatggaagggaaggtttagaacaaactttggataaactctgtgatcaagctcgtgaagctattcatgagggatacaccattctagttctctctgatagaggtttctctccagatcgtgtagctgtcagttctctattggcagttggagctgtccatcagcatcttgtcttgaatcttgagaggacacgcatagggttgcttgttgattcagctgaacctcgtgaagtgcaccatttctgtagccttcttggatttggtgcagatgctatatgcccttatttggctattgaagccatatggcggttacagattgatgagaaaatacctcttcaagatgacggacagctgtatccaaaggaacttattgacaagtatttctatgcttctaacaatggaataatgaaggttcttgcaaagatggggatttccaccctggcgtcgtacaaaggtgcccagatatttgaggcccttggtcttgcttcagaagtggtcagtaagtgttttgaaggtacacctagtagagttgagggctcaacatttgaaatgcttgcacaagatgcacttcatctccatgagttggcattcccgtcaagaactttaccacctggaagtgcagaagcaaactctcttcccaacccgggagatcatcactggaggaaaaatggagaagtacaccttaatgatcctttttctattgcaaaattacaggaagcagctagactcgacagcagggaagcatacaaagaatattctagatacactcaggagctgaataagtcttgtactctgcgtggtatgctgaagtttagagaaactccagtcaggatttccttggatgaggttgaacctgcaagtgaaatagtcaagagattttgtactggagcaatgagttatggatccatttccttggaagctcatacaacgatggctaaggctcagaatataatgggagcaaaatctaatacaggtattttccaccatggacgataatgaccaccctaaccattcttatgaataccatatatgtttaggcaaaattgatgttcttaaatgccaatgaactagaaaaattcaacctaccggggtaagacatcccatgagtattttgttaagaagacctcacacaagttgagaaaccccctaaacccttgccccacacccatccatattgacatcgtagcccatgtaagaatggtcatggccttaggccggaccttaggcctgagctttgacatatgggagacgaaatgccaagtgaactatatgttgattactttattcttggcctttttctatgtcacatgccatttgaggcacagcaaacaggttgaagttgtttcataacccttgttcactgcattttgtatgttatgatgtttaaatttcttcttgcaaccatgtgccttattttatctatgatttgctcatcatagttattcgcttcaagtataattgctaattggttactataccctcccccccggaagggaggtgagaacattggcacataatatatcagaagaaaaatagttggccaagtttttatgaaaaaaagcagggcccaaaaaccgaacaactgaaaattggcccagttttcaagaaaaagaattgacccagcattgctgcataattgccaagtacagttggtaactagttccatttcatatgctaactgggatgcatatatatgatacgaaggcgagggaggagaacaatcgtctcgcatggagcctcttcctgatggttccatgaatccattgatgagtgcgatcaagcaggttgcaagtggaagattcggagtttctattgattatctgtcaaatgctattgagctgcagataaaaatggctcaggtatatttgactacactatacacctgcttgaagtacctaagcaccatggggaacctcttccctgaattgctcgaaagaacaacttggttctgcatcactatgtactatgcttgatttgttgtacctaatcctacaacatatgctggttatttgtcatgttgaagaaatttatatcttttacagggtgctaaacctggtgaagggggcgagctcccaagtcataaggtcatcggcgacattgcaattacaagacattctacagctggcgtaggactcatcagcccacctcctcaccatgatatatattctattgaggatctcgcacaacttatctatgaccttaagaatgcaaatcctggggctagaattagtgtgaaactagtctctgaggctggtgtgggagttgtcgcaagtggtgttgttaaaggacatgcagaccatattctcatctctgggcatgatggaggcacaggggcttctagatggacaggaattaaacatgctggacttccttgggagcttggattggctgagacacatcagactctagtggcaaatgggctccgtgcccgagttgtccttcagacagatggacaattgaaaattggtagagatgttgtcattgcttgtttacttggggcagaggaatttggatttagcacagctccactaatcgtacttggttgccttttgatgaggcaatgtcatactaatacctgtcctgttggtattgctacacaagatccaattctcagagaaaaatttgctggaaagccagagcatatcataaacttcttcttcatgcttgctgaggaggtacgagaaattatgtctcagcttggtttccgtactatcaatgaaatggttgggcgatcagatatgcttgaggttgattcagatgtactgaaaggcaacgagaaacttcagaacattgatctatcactgatcttgaaaccagctgctgagattagccccgaggctgttcaatattgcgttgagaaacaagaccatggccttgatatggcattagataacaaactcatagcatcctcaagagctgcccttgaaaaaagatttcgtgttttcattgaggcaccagtcaagaacactgatagagctgttggcactatgctcagccatgaagtgacaaaactgtttcgaatgcctggactgcctccagacaccatccgtgttaaactcaatggaagtgccggtcaaagttttggtgcctttctctgtcctggagtcactcttgagcttgaaggagacagcaatgattatgttggtaaaggattatctggtgggaagattattgtttaccctcccaaaaacagccgatttatcccgcaggacaatattgttattggtaatgtggctctatatggttctaccaaaggagaagcatattttaatggcatggcagctgaaaggttttgtgtccgcaattcaggtgcacaagcagttgttgaaggaattggcgatcatggatgtgaatacatgacaggaggcactgttgttattctgggaaaaactggtagaaactttgccgctggcatgagtggcggcattgcttatatttatgatgtggatgggatgttcagtacccgttgcaatcatgagttagttgacctgtatagtgtagatgaagaggatgacattacaacattaagggtgatgatagaacagcatcgactcaacacagaaagtgttttggccaaatatatactttctaatttcgaggatattcttccaaaatttgtaaaagtatttccaagagattacaggcgggttttggagaatatgaaggcagaaaaggttgccaaagaagcagagcaaaaaaggagaaaaaaggggtgggataagaaggcaggtgaaatgattaaagctccaaatggtgtttcagtaattacaaaggtaaacctggtttaaatagaaattatttcattatatgtattgtaacacctaaatttgctgttggaattggaagttaatttttccttctgaaaaatattgattgacttctgatcattttggtatgcaggaagtacagaacaaaaagtcatctagccgaccaacacaagttctcaatgctgaaaaacctcgaggttttgtaaaatatgagcgagaggggatctcttacagacatgaaaatgagcgtattaaggattgggatgaagttataaatgaattggtttgtgggccactgataaacacacaatctgctaggtgcatgggttgtggcacgcctttctgtcatcaggtgatacttaaaatttcaagttctgctctttttaatgaaatctattatatttcaagccttttgtttaggtctgtaaaattgtatggttttttcattgactttattattgatctaaaggagtccacatacatgtgcagtatacatgggttagctccgcattccgaatagaatttaataaatgtgctactctgaaaatataatgcagaaatgaagatattactaaaaccaacaaccaaagtgtgctgtctagggtttgtcacaggcatatttttcgatcattagcccagatagttatctattgttgctgtaaagcttgctttccattgtggtagcttaaattaattatcatatcctctttgctatcaaattttcagtattttaaagctgttatctatgctgacataaaaagaaccagtaatattgtcttggtaaatttacacaagtttgtgtacacattgacatcaaacagtcaagattcatgaagggggtgtttggtttgtgtaataaagtggtccaccatcatatcactctttagtttttttggttggtttctgggatagaatgagttgatacatcgccacctcattccccacaggttaataatcagtactagtacaaggaatatggtgtttccaccaaatttaaggaacagactcatgatgcaccacccctatctagaatgggttgatttctcaaaccaaacatcccataaatgtcttgccagtaattattacatatctaggtgactaggtctcaattaaccctaatacctaagctacaagttaattgcctaaccaaaccatttaattgcattgttcttcagtaaataatagtgatattgattcatatacttttcaaatttattacaatttgaatttcttatgcttgctggttggtatgaaaatattaatattttggttgtaattttcttgaatcaaaattctacaggaaaattttggtgctgggtgtcctcttggaaataagatccctgaattcaatgaattagtttatcagaacagatggcgtgaagcgttatatcgcctacttgagaccaacaattttcctgagttcactggacgagtttgcccagccccttgtgagggttcatgtgtgcttggcattatagagaatccagtatctataaaaagcatagagtgtgccatcatagacaagggcttcaaagagggctggatggtaccatgccctccccttcatagaacagggatgacagttgctataattggaagtggaccggctggtttagctgctgcagatcaactgaacaagatgggccattatgtagttgtgtttgaacgtgatgatcgtattggagggctgatgatgtatggggttccaaacatgaaggcagacaaagctacaatcgttcagcgccgtgttgatttaatggataaggagggagttaaattcattgtgaatgcccatgttggaactgatcctcggtactctattgagcggctccaagctgagaatgatgcagttattttggcttgtggtgctactaggccgagagatctctctatccctggacgtgaactgtcaggcatccattttgctatggattttcttcatgccaataccaaaagtttacttgacagcaatttagaggatggtaagtacatatctgctaaagggaaaaaggtagtcgtaattggtggtggtgacacaggtacagattgtattgggacagccatcagacatgattgcagcaaccttgtaaaccttgaacttctaccagaaccgtctaaagagagggcccctgacaatccgtggcctcagtggccgaggatattccgaatagactatgggcaccaagaagcagtcagcaagtttggaaaagacccaagaacttaccaaatcctcacgaaacgttttatcggagatgaaaatggaaaagtgagggcccttgaggtagtacgcgttgagtggagcaaagtggacggaagatttcagtccaaggagatagaaggttcacaagaaatcattgaggcagatctagtcctcttagctatggggttcctaggtcctgaggcggatattgccaagaaactgggtttagagcaagacagccgatcaaatttcaaagctgagttcggaaacttcgcgactaacgtggaaggtgtgtttgctgccggggactgcaggcgtgggcaatcactggttgtttgggcaattgcagaggggagggaagctgcagcagccgttgacaaatacctgaccagagaaaaaacgaatgctgatgaggacgttgccggcccaagttcaagtggatgcctggttcaacccgttgcggcataagcaaagaaagcatttctgtaataatagctctttggtaggtagattgttttacccctttttcatgctgaactctttgtagctctaaaaggattaaggaaagggctcatttagcagaaacagagagcccgtgtgttgcaggtaaagcagtaggaaaccttttttttttgggtgacacggttgttgttcttgttctcttcccgtgaagaaataccgggcttgtaggtttaggaaaatgtatagctgattcagatggaaagcttatgaccaattgtttataaaaaaactatactcgcttttgtcttcttttttttttcggtgcatgcgtgaacatgcccttgtacatgtgtggatctgttgtgctctgtattatagggcttctctaatgcttcagcttagcattagccccatcctttatgtctgcatctgatatccatatcacaccgtcagagactcagagtgtcttccagatgtaacaataacaagcgattcatctaacaaaaggctatatatcacatagatagactttattaaatgatataatttttcaaaaaaccataattccaattctcatgttatctcaccgtgaggcagctcagtgggcaccaaatcctagccgccgccgtccagccccgggccaaacttacattaatcaaaggaagaatgcgccggcagtggctgctgggggagtgggaggtgagtcgcacgcagcatggccggtgagggcgccaaagcccagaggctggagactgggcgtcgtgggcgaggcggcggcccggcgacggcgcgagatgccgagatccctggcgactggcggagtagcggtgggaagttggaaccgcggactgctg

SEQ ID NO: 8907 - DNA, 4842 bp, Zea Mays
atggcggtgaaggggaagggtaagcaggtggccgccgaatcccctggccctggcgctggcgctggcggtgcctccgggtccggcgggaagcggcggatggcctctagtgacgcgggggcggggccctcgtcgtcatccgctgcgaagcgccgccgccgcgccggggtcctccagttcgtcgacgacgtagctggcgtcgacgacgattatgaggaggacgagctcgagtccgaggatgacaccgatgatggtttctttactggtggggaacatgcacaaaatctgagtcacaaaagaactgaaaggtcacaccctcttccatttcttgtgaaggaagaggagcttagtggcgatgaacttgaggaattcatcaagaaccgatacagtaatcgtgtgaaatacgctgctgatcggagctattctagagaagacgatgacattttctccatggattgtgcactcaaagagccgactatttggagagttaaatgcatggttgggcgtgagcgccaaatggccttctgcttcatgcaaaaatttgttgaccttcgaaaaattggtaccaaagtgccaattattacagcatttgcacttgatcacataagagggtttgtttttgttgaagcggagaaggcctgtgatgttacagaggcatgcaaagggttttgtagtgtgtacacaagcagaatcacttctgttcctgcagctgaagttcctagcttgttatccagccgtacgaaaccatttgaaatctctcgtggtacatggatccgcatgaagaatggaaactataaaggtgatctggcacagggtggtgcagtttcactaaaaggagctgcagttcctgctccacggttgatcagctcccaagaactagagttcttcaggcctcatattgaaataaagcgcgaccgtcagactggtgaagtttttgaagtacttgatggtttgatgttcaaagatggatttctgtataagaaggttgcacttagttctttgatttattgggggatacaaccgacagaaacagagcttttgaagttctcttctagcccaagcaatagagcttctgctgatgacttggattggctctccggcatgtatggttctaagaaaaggaaccttccagaaaaacgagatatggaatcatcatcttctaaaataagatcctccaaagcatcagaccttaaagcgtcaacttctactgaaaattatgacgagaacgatgaattcaaccttcatgatcttgtactctatgggcgaaaagattttggtgtgattgttgctgttgagaaagatggttttaggatactaaagggtggtcctgaaggatctgcggtgaaagtgagaaagcaggatattaagaaaggctgcgtagataaaatgtttacagctgttgatcatcaaaagaagacaatatccattaacgacactgttaatgttgtggaagggccatttcagggtaagcaaggggtcgttaaacacttgtacttgggaatactgttcatttataatgaaagtgaaagtgagaactgtggatttttctgtgctcaaagcgggtcatgcgaaaagatacgaaagggtctgggaagctctactactgaaagttcggactttacaactcctatgtttcctgaacctgcttatgagcaaaatgggcatcgggacagccttacaggagcaccagagaacaacttttctctattgggcagatgctgcgcattagaaagggtcctttgaagggctacctctgtcgagtagttcggatatttcggaatgatgtgactgttaagctagattctctactgaaaattgttacagtacaagctgatcttctctcagtcccagctaacaggggggataacttgtctggtgccccagctagtaaatttggaagtcaagatacatccttctttggttcagaagcaggcaaaacttcatgggacaatgggttgccatcgtttggaagtgactcatggcaacccttttcgagttcaacactatcagttcagaatgcaggtggagaatcagaagctgatccatggtctaagaaaacttctgccaaagatgattctgatccatggggtaagaaaactgatggtgattctgatcgatggggtaagaaaactgatggtgattctgatccatggggcaaggaagcggtatctgctgctgatggtgattccaatccatggggtaaggaaacagtaccttccgctgctggtgattctgatccatggggtaagaaagtggtgtcttctgctgatggtgattctgattcatggggtaagaaagcaacatcatcagctgttgacactgaaaaggaaggttctggtggtactgcatgggacaaacaagctggagttggtggatctgatgctgctggcagctcctgggacagagcggttgtcaatgagagtgaaaagagtgacaactggggagaggcttgcagggttatggacatgggaactggagctgaagctgacactgacccttggggaagcaaggtcaaagcagtagatatggaaggaccaaataactgggaaaaggctacagtgcctccaaacaataagctggaggatgtcagtcaaggatggggccaacctaagggcaactcaactgaagaccaagcaatagacaacgtttctaaagacgtggacaacaacagggcttgtgacagttctttgcctgtcactgaagatggtacctggggcaagtcaaaagacaacagttgtggtggagcaggtggtgcgggaggttgggatgtttctgttggcaactggaataaatcatctgttgtggctgatgcacaggatgaaggttggggcaaaggaaactggtcatctgctgagtctgaagaaacaaacaatcaaagcggaaattggaacaaaactggagcttcggaccaagctggttacaacaattgggataaaccgaaatcctttggtggtaatggttggaacaagggtgatgatcagaatagcagttggaacaggcctgaaaattttggaggtggacgtggctttgggcgtggacaagggagaggtaggggtcaacaatctggatatttcaatggcagaaatgatcaaggaagctggaagaagtcatggggtagtgacaatgctgaaagaccctcttggaggtctgataatcaggtagacaatgaggctggagagtctggtggatataggggaaggggaagaggaggaagggggcaatatggaggacgaggtaaagacaatggttggagaaatgatgatagaagcaattctgggtttggaagggaaaataacagtggcgatggaccaaaatggggtggtggaggtaattggaacgctacaaatccaccaagtagcagtgtaggcaccaagtcatatggtcaaaatcagcctttcacttggaataattctgaggataacaaaccatctgtaggtgaacaaggtgatccttgggcaagcaaggtgtcttctactgaagatacagaacaacagaatgattcttggtcaagcaagatgatttctggtggtgctgaggataccagtggtggctgggacaccaaggtgaaagactcttcctgcaatgatgggggtgaaggactacaaaatgatccatgggcaaacaagattggttctaatgaaggtaaagaacaagaaactgatccttgggccagcaagatgtcttctactgtgtgtgctgatgacaagaaaggtagctggaacactacagcaaagggcattccatctaaggaaaaggctgatgatccatggaatagtaaggggggtaatgatgacagcaagaaaactgacacctggggtgctggctcgtcaggtggggatcaggaactttcttggagcaaacctaatttctctttgggggaccaggaatctacttggaacaacccaaggttcagtgacgatgacaatgcgaataatagaggtggatttggacgtggaaatcgaggcagagggagaggaaggaattttggggatggtggtgggtcatcatggaatggaggcaatagaaacgatgaatcaggtggcggaaggtctggagagccatggaacagaagggactttgatggtggcggaggaagaggcagaggtcgttttgggcgaggtgaccgtaaccagggcaacaacttcgggtcaggagatggtggcagctggggctctggcaggggaaatggtggccgcggtggttacaggaactggaacgataacaatgagcgatccttcggtgaaggtggtggctggtcccagtcccagtcttccgattggaatgccaacaaaggaaatggcgaaggaaatcaagctttctcgaaaagcaagcccagctgggaagcacaaaacacctctggtagagatggtcaggcaggaaagggtgatgcaaacaactcctggagtaagaacagatcatctccatctagcgcttggggcgctcccagtggaggagctggcggccgaggttcttggggaaagagcaacgaggatggctggaactcagcgggaggatcagccaaagagaagcctgcatggggtggtgggtcagaagcgtctaccaagaaagaggacaaaggtggtgaggggaacgggagccaaggaggaggtggtgtcagttcctgggataaaggggcagatgatgcatggaacggcaacacgggtagtgatattgggagtggtggatggtaagatttccgccaaaataatatgaactctgtcggtgcgtgtgtctagttcgtatccgttacttcgccatgtgtactctacactaaaaagaacatggcttgtgaccatttaaacattaccttagtggtggcagtaactagtaaaaaagataaataaa

SEQ ID NO: 8908 - DNA, 3471 bp, Zea Mays
  misc_feature (1)..(1): n is a, c, g, or t
ncccgtctccgtctccttctcctcctccccgtcgccgtctccgagtctccctctatttctctccgcccttgttcttctcctctctccctctatcttattacctcaagtagaagtagtatatattttttgtccgccttttcaatttttccttttatctccctgcgtctcttcgtcgtcctcctgctgtggcggccgccggcgatccccgatcggcgatactcagattctagttgtccattgtgctgcactgcagcagtagacaatcgtgtttttcggtgttttgtctgtctctccttgatcattcagatgcctgtacagctcaactgctatagctagctgtatatatctggttgaagaggactaatctagcaacaatgtcatcgcttcagttattgcaactaacagaacgggggcgcaaccttttgtcttcaagaaggagaacacttgcaattgtttctggtgcagtacttgctggtggagctttagcatatgcgcagtcaggtcgatggaaaaaacaccaggaagcaaattcttgcagtgatgcaaactcacatagcagtaataacggaagaactagtcagaacggcattgatggtaaattggttaaaacaaggaaaaagaaaagtggactgaagtccttgcattttttggctgctattttacttaagaagattggcccgaatggaacgaattaccttattggcttgatactaacagcagtcttgcgtacagctgttggccacagattggcaaaagtacaaggatatttattcagatctgcattccttcggcgtattccgacctttacacgtctcattattgaaaatcttcttctatgctttctccaatccacgttatatcagacatcaaagtacttaacagggtctttaggcctgcgcttcaagaaaatcttgacagatcttgtccatgctgattattttgagaacatggtgtactacaagatctcacatgttgatcatcggatcacaaacccagagcaaaggattgcaagtgacataccaaagttctgctcagaattaagtgaccttgtacaggatgatctggctgcaattgtagaagggttaatatacatctggcgcctctgctcttacgcgagtccaaaatatgtgttatggattctggcatatgttataggtgctggtggtacaattagaaaattttctcctgcttttggcaagctgaagtctacagaacaacagctagagggggaatatcgtcaactccattcacgattgagaacccatgctgagagtgtggcgttttatggtggtgagaacagagaagcatcacatattaagcagcggttccgggcacttgttaaacacttgaatgttgttcttcatgaaaactggtggtttggcatgattcaagattttcttctgaagtatcttggcgccactgtgggagttatcctaattattgaacctttctttgcggggaatcttaaacccgaatcatccaccttaggacgggcagagatgttgagcaatctccgataccacaccagcgtgataatatcactatttcaatctcttggaaccatttctattagttcaaggcgcttaaatattctcagtggctatgctaatcgtattcatgaattactggatgtctcgcgtgagctatctggtggccgtgatagattgattactcaaaattcttctgatggaaattatattagcgaggcaaattatatagagttttcagatgttaaggtggtgacaccttctgggaatgtcttggttgataatttgaaccttcatttggagtcgggctctaatctgttgatcactggtcccaatggtagtggaaaaagctcccttttccgtgttcttggtggtctgtggccaatggtatctggtcatattgtcaaacctggtgttggttccaatctcaacaaggaaatattttatgtgccccagagaccatatacagctgttggaacgcttcgcgaccagttaatctatccactcacagcagaccaagagactgaaccacttagctatggtggcatggtggatcttctaaagaatgttgatctggaatacttgctagaacgctatcctcttgataaggaagttaactggggtgacgaattgtctcttggtgagcagcaaagattaggaatggctagactgttctatcataagccaaagtttgctatcctggatgaatgcactagtgctgttacaactgatatggaagagcgcttctgcaaaagggttcgagcaatgggcacatcttgcataacaatatctcaccgtccagcattagttgcgtttcatgaaattgttttatccttagatggtgaaggagggtgggatattcaggacaacagaaatggttccttctctcccgaagttgagtttgatgtgctgaaggcatcagaaagtgatcgcaagtctgatgcacttaccgttcaaagggcttttatcaccagcacaaagggaaatgcgtcaatgaagcccaagaaacattcttattcaacagaggtcatagcatcttcccccagtatggagatagaacatacagtacaatcatctattgtcacacaattgcaatgctctccaagacctttgcctgtcagagttgctgcaatgtctcaaatactggttccaaagctatttgataagcaaggagggcagctgcttgcagtggtacttcttgtattctcccgcacttggatttcagaccgtatagcttcattgaatggaacaagtgtcaagtatgtcttggagcaggacaaagctgccttcattcgtttggctggcactagtgtgctgcaaagtgcagcaaattccatcgtgtcaccctcactgaggaaccttacttcaagaatcgcccttggatggcggattcgcatgaccaatcatttgcttcaatattatttgaaaagaaatgctttttacaaggtattcaacatttcaggtatgagtatggatgcagatcaaagaatgacacatgatgtagagaagttgaccaatgaccttgctggcttgcttactggtatggtgaagccattagttgatattatttggtttacatggagaatgaagcttttgtctgggcgaagaggggttgctatactgtatgcttacatgttcctaggtcttggttttctaagagctgtgtcccctgactttggggatcttgcaaaccaagaacaagaacttgaaggcacgttcaggttcatgcactcaagattgcggacacatgctgagtcaatagctttctttggtggtggatcaagggagaaagcttcttaaggttcattcaaaattccaaaaatcatcacaacaacaaagccttttagtcccaagcaagttggtgtagattagagttgaaacccaatagaaaccacaagtcaaggttcagatacatagatagttgtttccatgcactccttttatgactaaatctttgggtatattctatcctttcaagtctcat

SEQ ID NO: 8909 - DNA, 2505 bp, Zea Mays
caaaaaatcaccagaaataaaataaataaaaatcccacagaagaaaaaaaacaccccgaaaattctccctcgctctctctcagtctctctctccgtgagggaggaagttgggcttcgttctcgagtactcttcgttctcaggcggcccccggctgcttctgctggtcgccgcccagctccagtattagagaaataagggccagcctggttgcccgaggctgacccagcacctgcgatggaggagaaggctgtcacaaatggagcggcagctgctgatgttgctgctcctgataataaggataacaccaaggaagaggttagcaagagcaaggagccagtagcgaataaggatgctgaagagcagaacaaaggctcggaaaatggtgctgagggccattcaggtggagatgtcaatatggcagaggctgagatcactgaggaaggtggtggtggtgatgctggtgcggcaaagcaggtggattctggagatgtcaaaacggatgccgatacaaaggaagatgccaatgcgagaacagaagaaggtgaagatgccaagatgactgaggctgacgtaggaagtacagaggtcaaagataaagaagagaaggaagatgaagttgagaacacaaatgagcaggatgaatcgaaggagcaagagaaaggtgcttcggctgagcaagaggaaaacgaaggaaaagaaacggatgctgatgagaaccaagaagaagaggaagcagaagaaaagggttctgctgataagaaagatgaagctgaagctgaaggtgacaagaagacggaagagaataaggagactccgaagaacaagaaagcaaggagtgccagggatagaagccagggaaaagataaggagcaggatggatccaaatccaaggaagccaaaagtttgctgaacactccaagcccatatggtaccaatcgccctcaacgtgagaggaaaatagtggagaggttggttgaggtgattgataaagagccaaacaagaatttcgtggttgagaagggacaggggactcctctgaaggatataccaagtgtggcacacagaatatcaaggaagaagccttctgatcttaaatttcttcacagtattctttttgggaggaaaggcaaggctgtcgattttaaaggacatatactccaattctctggatttgtttggcatgagagtgatgaaaagcagagagccaaggcaaaagagaagcttgataagtgtgtaaaagacactctgctggacctctgttggacccttggtattccaactccgaaagcaaacattagaaaggaagatattgtgtcaaagctgttggacttcattgctgaacctcactctgcagctgaatcttggggctctgatgatcagggatcaaattctaaaaaacgcaagagaggaggtgaaagtgcaagtaagacgcctgatggcacacctagtaggtcgaggaagaaatttgtcgatgacggtacttctagtaaaaggcagaataaagcgctccagtatgatactgaggaggatgaatccatgaagtctgacagtgaggaaaacatagatgaagattcagatgaagctgctgacaaacaggaagttgactatggatctgggaaagaaaaggcagggaagaagttatcggaggtaaaagaatcttcaggtaaaaagaagtcaaacacagggagtggccacaaatcaggtcctccaaataaaattataaaaaatctggtaaaaaaagtatcatccaagattcacgaggaaaaagaaagccccaatggtagtgccaaggttttttcgagaaagaagaaacccacagcagaaaaggagatcaaagagaaaaagtcgtcaggaaaaaaggtgacaaaaggtaaaggagaatcagctgaagcagttcttcccagcaaggacgatctgaggaagaccattactgaaatcctcaagaaagttgacttcaacacggcaactttcagtgacattctgaagaagctcgacaatcactacaaaatggatctgaccccaaagaaagaagccatcaaagttatgatccaagacgagttgaccaagctatcagaggaggatgaagaaggagagggagacgaagacgccgggaagaaacagcagcagcctcaggcgcaggagatcgaggcatgagggatccgcggaaccccgtagctgtagtagccactgttaattatcctgtacttagtgcgtatgtgtcgcatgtacaggcatcctttgttgatttcagccaccaacttgagaacctcaccccctgattgtgtatgctaaaagacatgatgtgtaggcagcctccacaccttttagctgactgatcggagagttactcttaggcaacaacttgtgtttctagatttgcaaatggtgtctgaaagactgaaactctgcattcgctgtggcagggcgtgtacttaattgttcgtgataggtctgaataacacatggatggaccctagttgttcgtgttgccttgagcttttact

SEQ ID NO: 8910 - DNA, 1192 bp, Zea Mays
catgggcctactgatgggcacaaacacgggctggccttctggttgcggatgggcgtctgcagctgtgctgttcctttttcctctggtgagacttcgcgattcgtgaatgcgcctttccgttccaagagaaggaagagaagccgcagcctccgcgagggcgagacagctcggcggcgtggttcggggatgggcaagggcgccgaactgtgggacgactccgcgctggtggacgccttcgaccgcgccatgttcagcatgaaagaaatgcattgcaagagcaagcgagcaacgccaagcgaggatgggaagaccgaacttgctgctgctactgcagaagaggagccaattactgctggagcagcggatgtgtgcggagaggaagatgccaactgtgacagcacacactgtgatctgtcagagttacaacaacagccctatgaagacagacagacaattgagcatgctcctcttcaagaaactgatccaggcaaagagacacatgtttcagaggctaagacgctctccaccgatgcttctactaatgctggtggaaattggagctcaagccagcaaactgggcagtacaatgaattgctgagacaatactatgaacttgaggagaagagtcggaacattcttgagcaactccaacaaacaaactattcaaattatcaagcatcaggatatgcttctacggcccaacagcagcaagttcctgtctatagtgccacagtaccagatccttactcttccaccactcaatcctcatgctgcaattggaacgttcccctggtatctgtctcctgctgttcagcaggccaaccaagtggaggctctgcttgtacgccacctactgctggctgcagcgtatcattgacttgtgatcaatgcccaggtgcaactactgcataccctagtgtttcaaacttcatgcaggtcccaacgatggtatctaccaatgatgatcaagttgataaggctgcaatgatgactgctgaagctgcctttaattttatgagaagtacgatatctggacagcctagcacacaaggaagcaaatctgatactggaaaggaggaaagcacaaatatgggcatgaacccaaatcttgacagtgatcttgctgctctcttaaattcatggtatgctgctgggttctacacttgcagagctccaagaccataaagtccag

SEQ ID NO: 8911 - DNA, 2915 bp, Zea Mays
agttccttcagcatttgtgatttaggtcaatggaggagtcagtgccaatgtcagtaatcagcagtatttcaaacttccgcacgctgtctaccagcagtgtggtagaaactgagctagttaagagatactgccggaagatcaatgaaatcctgggtcttttgaagctggtcctggatgaagttatcccccagattagtctagatgataggatgcttgagggactagctgctactatcaatgatgcgataaagctagttggaagctgggatttgatgatgagcaaaatctatttcgttatgctggtggagtcccttattaccaagatgcaaaactatgtgcttgaagtgtgccaagttgtcaattctgaagtgacaccaccagaaaccaatcgtatttcagtgtacttggagaaaataaagcaatttcaatgtgacaaaattatgggtatcatcaaggaggcttccagggatattgccggaaaatttacaccaaagtcagagacattgacaaagatccaggtctctttgagcttatccacaaatcaagagttactgatggaggctgttgcccttgccaagattagaacaagagtcgatgctgaggatagttcagaactagatggtatcaaccatatctctgaattagtcaaccatatgcttgagaaacacgtggaagaaaaacagatgcatagtattaatggagtgccaatacctgctgatttttgttgccccctttcccttgaactaatgtcagatccagtgattgtggcttctggtcaaacatatgaacgggttttcatcagaaaatggcttgacttgggttacaatgtctgccccaagacacgtcaaactttgggacacagtaatttgattcctaactacactgtcaaacagttgattgaaaattggtctgaggtacatggtgtagtgctaccagaccctgtgaaactcttgagtttgaacttttcagtttccctcaagccgattaatggtagaacaagtgataaatctcctttctctgaaaactcttcaagggaaaataagtttggctcaccagatcatatatcatcagatgacagttgtcatcctaacttgctgcatgagaattttgattcagatgatcaaatctccaaggcttcatcttctgaagacacagatgattcagaaacgggtcctccgaagttactagttgcatctactgaagcaaacaaattgatgtgcaatgcatctattgatggttctgatgccattaagcaatcgagaaaggatggtttccatgcttctgatgttgagccacgtctccaaagaaacagtatcagcggtgatattggcacaagcgcttcttccagcagcaaccatctcgaagttgttgagaaggataaggaggaacaggtctcaagtaacagcattgcatcagagactacaagaaatggccgaacggtcacctgctcaaaaccaaattttcagccaaggttgggtggtgttcgttctcgaaatcatttagtctggcagcaacgatcagataaagctgtttcattggattcaagatctgattttgctattgttgataataaagttcgtaaacttattgaggatctaaaaaatgagcgtactgatcccgagagggcagcaataggagagctgctggtcctttcaaggcataacatggagagtagaatttccattgcaaaccacggtgctatacccttcttggtgaatcttctttactctgcagaccccagcatgcaggaaaatgctgtaacagtgatcctgaatttgtcgttagatgacaacaacaagatcaccatcgcaagcgcggacgccatcaagcctctcatccacgtccttgagacgggtaacccagaggcaagagcaaactcagctgcaactctcttcagcctttcagtaaacgaagagaacaaggccaaaatcggacgatctggagcaatcaaacccctggtcgacctgctgcgagatggcagtgcacaggggaagaaggatgcagcaacggctctcttcaacctatcgatatttcacgagaacaaggcccgggttgttgaggccggggctgtaaagcccctggtggagctgatggacccagcagctgggatggttgacaaggccgtcgccgttttggcaatccttgccacggtgcaggagggaaggaacggtattgctcaggcaggtggcatcccggtgctggtcgaggtcgttgagctgggctcggcacgggcgaaggagaacgctgctgctgctctgctgcagctctgcacgaacaacagcaggttctgcagcctggtgctccaggaaggcgccatgcctcctttggtggctctgtcgcaatcgggcacggcgcgtgcacgagagaaggcacaggtccttctgagctattttcgcaaccagcgtcaagtcggcaaggtcaccaggcgctaaattcagacactgttgtggccggggccgggtgtaaatgtagaatgcacaagcaattcagtagcagtagcatcatggtatgacgatgagagattgcatgctactttaattataggcaattcagtacaacaataggggcagttttgcaaagggtgttggtgtctttttacatctaatttaacatcgtcggtggttgttaacgtaatatgggtagacgccagctttggtttcaaaaaagaggtccgattttgcaaagtctggaaaagaggtttatttttacaattggcttgcaaaatgagggcagatttgcaatcgtccctactatttattaaagtgtcgaggccatatttaatagagatttatgtttggcaagtaggagaggccgggtgggagccatataactccacatgatcctaagggtttatttgaaacatcagctctagatagaaatcaactttgtatcaatttttttgagcagataaaaat

SEQ ID NO: 8912 - DNA, 2931 bp, Zea Mays
tgcgattacagggggggtgggagcttgatttggtgcgcaaggtcaatggaggagtcagtgccaatgtcagtaatcagcagtatttcaaacttccgcacgctgtctaccagcagtgtggtagaaactgagctagttaagagatactgccggaagatcaatgaaatcctgggtcttttgaagctggtcctggatgaagttatcccccagattagtctagatgataggatgcttgagggactagctgctactatcaatgatgcgataaagctagttggaagctgggatttgatgatgagcaaaatctatttcgttatgctggtggagtcccttattaccaagatgcaaaactatgtgcttgaagtgtgccaagttgtcaattctgaagtgacaccaccagaaaccaatcgtatttcagtgtacttggagaaaataaagcaatttcaatgtgacaaaattatgggtatcatcaaggaggcttccagggatattgccggaaaatttacaccaaagtcagagacattgacaaagatccaggtctctttgagcttatccacaaatcaagagttactgatggaggctgttgcccttgccaagattagaacaagagtcgatgctgaggatagttcagaactagatggtatcaaccatatctctgaattagtcaaccatatgcttgagaaacacgtggaagaaaaacagatgcatagtattaatggagtgccaatacctgctgatttttgttgccccctttcccttgaactaatgtcagatccagtgattgtggcttctggtcaaacatatgaacgggttttcatcagaaaatggcttgacttgggttacaatgtctgccccaagacacgtcaaactttgggacacagtaatttgattcctaactacactgtcaaacagttgattgaaaattggtctgaggtacatggtgtagtgctaccagaccctgtgaaactcttgagtttgaacttttcagtttccctcaagccgattaatggtagaacaagtgataaatctcctttctctgaaaactcttcaagggaaaataagtttggctcaccagatcatatatcatcagatgacagttgtcatcctaacttgctgcatgagaattttgattcagatgatcaaatctccaaggcttcatcttctgaagacacagatgattcagaaacgggtcctccgaagttactagttgcatctactgaagcaaacaaattgatgtgcaatgcatctattgatggttctgatgccattaagcaatcgagaaaggatggtttccatgcttctgatgttgagccacgtctccaaagaaacagtatcagcggtgatattggcacaagcgcttcttccagcagcaaccatctcgaagttgttgagaaggataaggaggaacaggtctcaagtaacagcattgcatcagagactacaagaaatggccgaacggtcacctgctcaaaaccaaattttcagccaaggttgggtggtgttcgttctcgaaatcatttagtctggcagcaacgatcagataaagctgtttcattggattcaagatctgattttgctattgttgataataaagttcgtaaacttattgaggatctaaaaaatgagcgtactgatcccgagagggcagcaataggagagctgctggtcctttcaaggcataacatggagagtagaatttccattgcaaaccacggtgctatacccttcttggtgaatcttctttactctgcagaccccagcatgcaggaaaatgctgtaacagtgatcctgaatttgtcgttagatgacaacaacaagatcaccatcgcaagcgcggacgccatcaagcctctcatccacgtccttgagacgggtaacccagaggcaagagcaaactcagctgcaactctcttcagcctttcagtaaacgaagagaacaaggccaaaatcggacgatctggagcaatcaaacccctggtcgacctgctgcgagatggcagtgcacaggggaagaaggatgcagcaacggctctcttcaacctatcgatatttcacgagaacaaggcccgggttgttgaggccggggctgtaaagcccctggtggagctgatggacccagcagctgggatggttgacaaggccgtcgccgttttggcaatccttgccacggtgcaggagggaaggaacggtattgctcaggcaggtggcatcccggtgctggtcgaggtcgttgagctgggctcggcacgggcgaaggagaacgctgctgctgctctgctgcagctctgcacgaacaacagcaggttctgcagcctggtgctccaggaaggcgccatgcctcctttggtggctctgtcgcaatcgggcacggcgcgtgcacgagagaaggcacaggtccttctgagctattttcgcaaccagcgtcaagtcggcaaggtcaccaggcgctaaattcagacactgttgtggccggggccgggtgtaaatgtagaatgcacaagcaattcagtagcagtagcatcatggtatgacgatgagagattgcatgctactttaattataggcaattcagtacaacaataggggcagttttgcaaagggtgttggtgtctttttacatctaatttaacatcgtcggtggttgttaacgtaatatgggtagacgccagctttggtttcaaaaaagaggtccgattttgcaaagtctggaaaagaggtttatttttacaattggcttgcaaaatgagggcagatttgcaatcgtccctactatttattaaagtgtcgaggccatatttaatagagatttatgtttggcaagtaggagaggccgggtgggagccatataactccacatgatcctaagggtttatttgaaacatcagctctagatagaaatcaactttgtatcaatttttttgagcagataaaaat

SEQ ID NO: 8913 - DNA, 1948 bp, Zea Mays
gtgcgttgcggcagcgcacttatattagcctggtcagtacacccaccgtagcctcacacttcgctggggagacgaagctgctagccgatcaggggagaattcttttgtaatggagctgctgcgaccacgcggcgatggttgttgcccgcgcgtgctctcggtttctctgctgctcctcgccgccctgctgtggaagcacgtctctgcggcggcgattaccaggggtgatttcccggaggggttcgtcttcggcgccggcgcatcggcttaccagatcgaaggcgcatgggcagaggacgggaagaagcccagcatctgggacacatacacgcacagtggatattcgattgaccgtgatactggagatgtggctgcggaccagtatcaccattacaaggttctcgattgcctggtcaaggcttattccagatgggcgtggagctgtgaacccaaaggggttggagtactacaacagcctcatagatgagctcctcagatatggaatacagccgcacgtgaccatctatcacttcgaccttccccaggctctccaggatgaatacaacggcctgctcagtccgagaatcatcgatgattttaccgcttacgcagacgtgtgcttccggagcttcggcgacagggtgaagcactggatcacggtgaacgagcccaacatcgagcccatcggcggctacgaccaaggctacctcccgccgcgccgctgctcctacccgtttggactgggcgtcacctgcacccacggcaactccacgacggagccgtacgccgtcgcccaccacctcctgctcgcgcatgcgtcggctgtgtccctctacagacgcaagtaccagggcgagcaaggaggacggattggactgacgttgctggcctggtggtatgagccagcgacgcagaagcccgaggatgtagaagcagctgccagagcaaatgacttctcgcttggatggttcatgcatcccctggtgtacggcgactatccgcccgtgatgaagaggaacgtgggggcaaggctgccgtcgctgacggcccgagactcggccatggtgcgcggctcgctcgatttcgttgggatcaaccagtacggcgcgatcctggtcgaagcagacctgggccagctcgatcgggacctcagagactactacggcgacatggctaccaacttcgtcacggtaccgtttgagagcacagtaacgaggaaccagcaggtgcctcgacttgggctgcggaaccatgaggcgccgtgggctctgagcaaattgctggaacacctgcagacgcactacgggaaccctccggtgatgatccacgagaacggagctgggcacgagcccgacccgtccggcgggttcctgtacgacgacgagttcagggcccatttcctgcgggtctacgtcgaggcggcgctcgcttccgtccggaacggctccgacctgcgcggctacttcgtctggtccttcatggacgtgttcgagtttctcttctcctacaggttccgcttcggtctctacggcgtggacttcgccgccgacaaccggacgaggtacgctcggcgctccgcgcgatggtacgccggcttcctccgcggcggcgcggcgacctcacgcccgcctctgtttcaacgcggacacacggctccacctattcggagtgaaaatcagccgcacgtgtctgtgttatagattcatcgcgagtgaacaagtacatgatggatgttcttcaccctcatccatgtctgtcgtatgcggcattttcccgtcagttgtgtatttgtttgcatttgaggaataaattcagttctgtagtaggctgtcggcagatcttggcgattaaaagtatctctaacaaaagtgatttaaaagtgccccaaaatttaaaacactacataataaaacattgagaacgatgtagaaaaataaagatatgtact

SEQ ID NO: 8914 - DNA, 1964 bp, Zea Mays
gtgcgttgcggcagcgcacttatattagcctggtcagtacacccaccgtagcctcacacttcgctggggagacgaagctgctagccgatcaggggagaattcttttgtaatggagctgctgcgaccacgcggcgatggttgttgcccgcgcgtgctctcggtttctctgctgctcctcgccgccctgctgtggaagcacgtctctgcggcggcgattaccaggggtgatttcccggaggggttcgtcttcggcgccggcgcatcggcttaccagatcgaaggcgcatgggcagaggacgggaagaagcccagcatctgggacacatacacgcacagtggtcagcgagcgagctagatattcgattgaccgtgatactggagatgtggctgcggaccagtatcaccattacaaggaagatgtgaagctaatgcatgacatgggcttggacgcgtacaggttctcgattgcctggtcaaggcttattccagatgggcgtggagctgtgaacccaaaggggttggagtactacaacagcctcatagatgagctcctcagatatggctctccaggatgaatacaacggcctgctcagtccgagaatcatcgatgattttaccgcttacgcagacgtgtgcttccggagcttcggcgacagggtgaagcactggatcacggtgaacgagcccaacatcgagcccatcggcggctacgaccaaggctacctcccgccgcgccgctgctcctacccgtttggactgggcgtcacctgcacccacggcaactccacgacggagccgtacgccgtcgcccaccacctcctgctcgcgcatgcgtcggctgtgtccctctacagacgcaagtaccagggcgagcaaggaggacggattggactgacgttgctggcctggtggtatgagccagcgacgcagaagcccgaggatgtagaagcagctgccagagcaaatgacttctcgcttggatggttcatgcatcccctggtgtacggcgactatccgcccgtgatgaagaggaacgtgggggcaaggctgccgtcgctgacggcccgagactcggccatggtgcgcggctcgctcgatttcgttgggatcaaccagtacggcgcgatcctggtcgaagcagacctgggccagctcgatcgggacctcagagactactacggcgacatggctaccaacttcgtcacggtaccgtttgagagcacagtaacgaggaaccagcaggtgcctcgacttgggctgcggaaccatgaggcgccgtgggctctgagcaaattgctggaacacctgcagacgcactacgggaaccctccggtgatgatccacgagaacggagctgggcacgagcccgacccgtccggcgggttcctgtacgacgacgagttcagggcccatttcctgcgggtctacgtcgaggcggcgctcgcttccgtccggaacggctccgacctgcgcggctacttcgtctggtccttcatggacgtgttcgagtttctcttctcctacaggttccgcttcggtctctacggcgtggacttcgccgccgacaaccggacgaggtacgctcggcgctccgcgcgatggtacgccggcttcctccgcggcggcgcggcgacctcacgcccgcctctgtttcaacgcggacacacggctccacctattcggagtgaaaatcagccgcacgtgtctgtgttatagattcatcgcgagtgaacaagtacatgatggatgttcttcaccctcatccatgtctgtcgtatgcggcattttcccgtcagttgtgtatttgtttgcatttgaggaataaattcagttctgtagtaggctgtcggcagatcttggcgattaaaagtatctctaacaaaagtgatttaaaagtgccccaaaatttaaaacactacataataaaacattgagaacgatgtagaaaaataaagatatgtact

SEQ ID NO: 8915 - DNA, 2126 bp, Zea Mays
gtgcgttgcggcagcgcacttatattagcctggtcagtacacccaccgtagcctcacacttcgctggggagacgaagctgctagccgatcaggggagaattcttttgtaatggagctgctgcgaccacgcggcgatggttgttgcccgcgcgtgctctcggtttctctgctgctcctcgccgccctgctgtggaagcacgtctctgcggcggcgattaccaggggtgatttcccggaggggttcgtcttcggcgccggcgcatcggcttaccagatcgaaggcgcatgggcagaggacgggaagaagcccagcatctgggacacatacacgcacagtggatattcgattgaccgtgatactggagatgtggctgcggaccagtatcaccattacaaggaagatgtgaagctaatgcatgacatgggcttggacgcgtacaggttctcgattgcctggtcaaggcttattccagatgggcgtggagctgtgaacccaaaggggttggagtactacaacagcctcatagatgagctcctcagatatggtcgtcatttggtacttcattaattgcaacgttaattaacggcgcctgattccgaatggttttatttccgcgcgtgtaattaacgtgtggcaggaatacagccgcacgtgaccatctatcacttcgaccttccccaggctctccaggatgaatacaacggcctgctcagtccgagaatcatcgatgattttaccgcttacgcagacgtgtgcttccggagcttcggcgacagggtgaagcactggatcacggtgaacgagcccaacatcgagcccatcggcggctacgaccaaggctacctcccgccgcgccgctgctcctacccgtttggactgggcgtcacctgcacccacggcaactccacgacggagccggcgagcaaggaggacggattggactgacgttgctggcctggtggtatgagccagcgacgcagaagcccgaggatgtagaagcagctgccagagcaaatgacttctcgcttggatggttcatgcatcccctggtgtacggcgactatccgcccgtgatgaagaggaacgtgggggcaaggctgccgtcgctgacggcccgagactcggccatggtgcgcggctcgctcgatttcgttgggatcaaccagtacggcgcgatcctggtcgaagcagacctgggccagctcgatcgggacctcagagactactacggcgacatggctaccaacttcgtcacggtaccgtttgagagcacagtaacgaggaaccagcaggtgcctcgacttgggctgcggaaccatgaggcgccgtgggctctgagcaaattgctggaacacctgcagacgcactacgggaaccctccggtgatgatccacgagaacggtgaggccggccaagcgcgcgcgctctctctctctcgtttcagctgccgcgcacatgcacggttcctttcatcccctgagctgatggttccaccaccaccaccaccaccaggagctgggcacgagcccgacccgtccggcgggttcctgtacgacgacgagttcagggcccatttcctgcgggtctacgtcgaggcggcgctcgcttccgtccggaacggctccgacctgcgcggctacttcgtctggtccttcatggacgtgttcgagtttctcttctcctacaggttccgcttcggtctctacggcgtggacttcgccgccgacaaccggacgaggtacgctcggcgctccgcgcgatggtacgccggcttcctccgcggcggcgcggcgacctcacgcccgcctctgtttcaacgcggacacacggctccacctattcggagtgaaaatcagccgcacgtgtctgtgttatagattcatcgcgagtgaacaagtacatgatggatgttcttcaccctcatccatgtctgtcgtatgcggcattttcccgtcagttgtgtatttgtttgcatttgaggaataaattcagttctgtagtaggctgtcggcagatcttggcgattaaaagtatctctaacaaaagtgatttaaaagtgccccaaaatttaaaacactacataataaaacattgagaacgatgtagaaaaataaagatatgtact

SEQ ID NO: 8916 - DNA, 2889 bp, Zea Mays
tactgtcgccctgcagagaagcagcaggcatcgggatccgagccgctgtaggttgtcgcgtttccaaacacttcgacgcctaggtgatgggtgcctctgaggactagggttttgagacgaggtactagcgttagtttttcctgcgaccccttagtcctatatataacgtcgtgtgtgtgggggctccaaccgtggttagtgtgggccctcccgatcaagggcccgattaaaggaacgatagttgggttaagcccaatccagtctctattgaccggctgtagaggacacacccaacagttagatctacacagcaaaaatataatttggtatgctttagtacaaaatttatgttcattatgtagaccttaacaatattggggtttctattttatgattttttaatgatttgttatggttttttaaatattgagcagaaataaataaataaagacgagtggatatttatgtctagttttatagttaagaaagaaaaagattgactttaacttttgcgatagttaagcgattgaaatagacattccttcgcacaacgacacaagcacaaccctcacttcgtagatcttgaactgtctccaacagctattctatttcatcatctatttcaaatttcactttgtaaacagtataatctacaatataaatcccctattttacatgatctgttgcggacagtcttttatgcttgagttttgggccttgcaatttcgaacttttggcctagttttcctagtacaaaattgaaagcccgaaccatggacgatgatctcactgtagtagcgtgctaaaaacttgtagtgtgaacatatccggtgtaaactaatctattagtggaaagaggaccgagccttagcttagttggtaggcctggttgtttggttctttggttcggtttagttggtaggcgtagggaaaataatccgaaaccaagaaatcgaaccgaaataactagaaccaaaaccgaactaaccgaaaccgatttgaccgttaacaaatttggttcctatttcgaaaaaaccaaaataaccagtcgaaaaccaaaataaccagtcaaaaatcgtccaaccagtcgccatagccagcccgacggcctttcgatttttccggtcggtcccttcctagtgtgtaatggacgcgcacgcgtgtgtacgcatatggtgtaatgtgtagcagtatgagtttgtggcgtccttgtaccctctcaaaaaaactattagtgaaaaccgtgtaaatcaacacaagaataagattctctttgataggacttttttaaaggcttctctaataactctttcaaataatctaccaaatgaagggctcacctgttggcttctccataacaatggaaaaaagagctgcccctaggaaccaagcgaagccaggagcccaaaaaagaggcttctttaactcttcctcttacgtgaaaataggagaggtgtttctaatcaagtatggtgatcctgctgagtctctttttacacataaagagggaactgttttattagaaaagttagagtcaaagctgaagctcttatgcaagaggtctaacaaaaaggaggtgagaggaatttttaaaaaatatcaatttccaaatcaactcttctaccttctatattctatatattaaaaaaattatgttattccaccaccttcatccttgtgtaacttgtagctaccgtcgtacaagttgtttccattttccagagacgcgatagccgctaggaagcctaggataccggatttccctggtccgggggttccgattcccggcgaaggaaacgaaacgaggcggcggaaggcccggcctcgaggaaaggcgcacgcatgcgatgcaacaagcacatgcgccgccgtggtccgggagcgggagggcggggagcagggctggcattttcagtttcaccacgcaaagcgattcgagccggtggcgatctggtcgggcgagggcgcgacccgcctgccttggacgccacgtccaagctaggcacccgatgcggtgccatcgtcctccgggcacgtctcatggtcaccgtcgtcgtcacacggccgtttatttggtgcggggtcggaacaggaagatgggtaaaacatgggcgctcatcacccacctccacgctctcgcagggccgagtctcactctgatataccctctgtacgcgtcgatctgcgcgatggagagcgcgaccagggtggacgacgagcagtggctggcctactggataatctactccttcatcaccctcttcgaaatggcggccgagcatgtcctctactggataccgctgcggtacgaggcgaagctgctgctggcggcgtggctggtcctgccgcacttcaggggcgcgtccttcatctacgacaggttcgtcagggagcagctgaggaagaacggggtgagtctgcgcggtcaccaccacggccacgccgccgaccacgtgccgcacgtcttccaggctgagcatcgtcatggcgtgcacagctgagagccccgagaatctacacgccgtggttcttccgagaagaaaactgaactgcgccaacgcggttcgttgtctgccgtcacctgaactgcgcaggacggccgcgcgatccgtttctcggtcgtaagctaccatctcgagagagcacttgacttggacatcgtcactccactaggctcgtcctaattcacatgggcctgattcttcagctggaggagttcctttgtaacgaataaatttcagcagagatgattgcgtaactgtgtattgcttattgctgaaacattccgaatattggattgcttgtgcactgacaggtgacaggctcgtatgtgtatatgcatggtttgtttggatatgatccccgcccagcggtaataaagaaagatgg

SEQ ID NO: 8917 - DNA, 2517 bp, Zea Mays
tttcatcgccgttcgcgcacgcgcacgcgcacgcgagccatccgaccttgggaccggaagcgaccaactgacggatcgacaggcccgtgatgccgtcgcggcggcgccgacgcggcgacctcgccgtcgcggtggcggtgctggcgacggtggccctagcggccggggccgacggcggcgcggagttcgactacaggaagctctcggggataatcatcccggggttcgcgtccacgcagctgcgcgcgtggtcggttctcgattgcccctactcgcccttcgacttcaaccccctcgactccgtctggctcgacaccgccaagcttttctctgcggtaaattgctggcttaaatgcatgctgcttgaaccctataatcagacagaccatcccgaatgcaagtcaaggcctgatagtggtctttctgcaattacagagctggaccctggttatataacaggtcctctctcttcagtatggaaagaatgggtcaaatggtgtgtagagtttggcattgaagctaatgcaattatcgctgttccgtatgattggagactgcccccatcaatgcttgaggagagagatctgtactttcacaaattaaagctaacatttgaaattgctttgaaactccgaggagggccatctttggtatttgcgcattcgatgggaaataacgtgtttcgctattttttggaatggttgaaactggaaattgctcccaagcactatatccagtggcttgatgagcatatacatgcatattttgcagttggcgctcctcttcttggatctactgaagcagttagaggcgctctttctggaacaacttttggtcttccagtcagtgagggcacagcacggttgatgtttaatgcatttggttcttctctatggcttatgccattctcaaaacactgcaaagctgataatatctactggaagcatttttttgagggaaaaggaggttgtcctcacaaacaacaatgtgatgaagatgaatatatttcagactacggcggatggcccacagaccttgttaatatcgaggttccttcagctcgagatatgggggcatacccatccatcacagatataaccgagaacataacatccattatggagtgtggaaagccaactctcctgtcattttctgccagagaggtttcagatggtactttgttcaaaacgatagaggattatgaccctcagagcaaggcacttgtttatcagcttgagaagtattatcagggtgatccagttctgaaccctctcacaccatgggagagacccccaataaagaacgtattttgcatttacgggattgattcaaagactgaggtaggatattactttgcaccaagtggcaaaccatatccagacaactggataataactgatattatttatgagcttgaaggttccctactttcaagatcaggtaattctgtttctgggaagcctaacaattccagtggtgatggaacagtatcatacaactccctctcatggtgcaagaattggcttggaccaaaagtgaacataacgagggctccacaggcagaacatgatggatctgatctgcaaacagccatgaatattgatcatcatcatggtgacgacatactaccaaacatgacgagggttccgcatgtgaagtacataacctactatgaggatgctgaaagtcttccaggatggagaacagcagtctgggagctcgataaagcaaaccacaggaatattgttaggacgccagtattaatgcgtgagttatggcttgaaatgtggcacgatttgcatcctgattcaaaatcgaaatttgtgacgaaagctttccgaggtccactaagaaacgaagactgtcgctgggactatggaaaggctcgatgtggctttccagaacactgtgaatacaggtatacatttggcgatgtccatctgggaatgagctgcagactgagaaatacgtccgctaaccttcttcaacagtatctctgaaatgtcgtgggccgagtaattttgtgttttgttgctcgcatggaaatggtatctgattccccattttgacctgccaatgaaattagccatcaacaaggtagatacagtatcaaccggaggccctcgaatgacagatggaggccaacgtccccaggagtgtcggcagagttttcctcttgtctgtagcactggcaccttcggcgtcctgaaggtgccatgagatcatacactgatgtacactgtagcatggttttgtaaatcaagccgtcacaaattgacttagtcttacaaaaacgataccctatagattggcagtgttaaaattctttacgactcccaattaaccaccttgattgtaatgtgcccttaaagagatgaaaggatgaactctgctcaatattagaccttgtttggttagggtgactagattttactaaaatacaaaagagggtgactaaggtttcctcctaaagtttagggtctgtttgattgtgtttgttgtggctgtgaaaaaaaa

SEQ ID NO: 8918 - DNA, 2572 bp, Zea Mays
cgaccttgggaccggaagcgaccaactgacggatcgacaggcccgtgatgccgtcgcggcggcgccgacgcggcgacctcgccgtcgcggtggcggtgctggcgacggtggccctagcggccggggccgacggcggcgcggagttcgactacaggaagctctcggggataatcatcccggggttcgcgtccacgcagctgcgcgcgtggtcggttctcgattgcccctactcgcccttcgacttcaaccccctcgactccgtctggctcgacaccgccaagcttttctctgcggtaaattgctggcttaaatgcatgctgcttgaaccctataatcagacagaccatcccgaatgcaagtcaaggcctgatagtggtctttctgcaattacagagctggaccctggttatataacaggtcctctctcttcagtatggaaagaatgggtcaaatggtgtgtagagtttggcattgaagctaatgcaattatcgctgttccgtatgattggagactgcccccatcaatgcttgaggagagagatctgtactttcacaaattaaagctaacatttgaaattgctttgaaactccgaggagggccatctttggtatttgcgcattcgatgggaaataacgtgtttcgctattttttggaatggttgaaactggaaattgctcccaagcactatatccagtggcttgatgagcatatacatgcatattttgcagttggcgctcctcttcttggatctactgaagcagttagaggcgctctttctggaacaacttttggtcttccagtcagtgagggcacagcacggttgatgtttaatgcatttggttcttctctatggcttatgccattctcaaaacactgcaaagctgataatatctactggaagcatttttttgagggaaaaggaggttgtcctcacaaacaacaatgtgatgaagatgaatatatttcagactacggcggatggcccacagaccttgttaatatcgaggttccttcagctcgagatatgggggcatacccatccatcacagatataaccgagaacataacatccattatggagtgtggaaagccaactctcctgtcattttctgccagagaggtttcagatggtactttgttcaaaacgatagaggattatgaccctcagagcaaggcacttgtttatcagcttgagaagtattatcagggtgatccagttctgaaccctctcacaccatgggagagacccccaataaagaacgtattttgcatttacgggattgattcaaagactgaggtaggatattactttgcaccaagtggcaaaccatatccagacaactggataataactgatattatttatgagcttgaaggttccctactttcaagatcaggtaattctgtttctgggaagcctaacaattccagtggtgatggaacagtatcatacaactccctctcatggtgcaagaattggcttggaccaaaagtgaacataacgagggctccacagaacatgatggatctgatctgcaaacagccatgaatattgatcatcatcatggtgacgacatactaccaaacatgacgagggttccgcatgtgaagtacataacctactatgaggatgctgaaagtcttccaggatggagaacagcagtctgggagctcgataaagcaaaccacaggaatattgttaggacgccagtattaatgcgtgagttatggcttgaaatgtggcacgatttgcatcctgattcaaaatcgaaatttgtgacgaaagctttccgaggtccactaagaaacgaagactgtcgctgggactatggaaaggctcgatgtggctttccagaacactgtgaatacaggtatacatttggcgatgtccatctgggaatgagctgcagactgagaaatacgtccgctaaccttcttcaacagtatctctgaaatgtcgtgggccgagtaattttgtgttttgttgctcgcatggaaatggtatctgattccccattttgacctgccaatgaaattagccatcaacaaggtagatacagtatcaaccggaggccctcgaatgacaggtcaactcttattcttgtcaccattttggcacacttaaatctttgaagtcgacatatgcaaagctgaaacaacacgttcgcatgacaaattttggttgaagatggaggccaacgtccccaggagtgtcggcagagttttcctcttgtctgtagcactggcaccttcggcgtcctgaaggtgccatgagatcatacactgatgtacactgtagcatggttttgtaaatcaagccgtcacaaattgacttagtcttacaaaaacgataccctatagattggcagtgttaaaattctttacgactcccaattaaccaccttgattgtaatgtgcccttaaagagatgaaaggatgaactctgctcaatattagaccttgtttggttagggtgactagattttactaaaatacaaaagagggtgactaaggtttcctcctaaagtttagggtctgtttgattgtgtttgttgtggctgtgaaaaaaaa

SEQ ID NO: 8919 - DNA, 1352 bp, Zea Mays
gctttgcgttctccaaaccgtaccagcagcgtgccctgatcgccgccgcttggagtcctgatctggtcctcgttcgtcgggacttaggaaatccaagtaacggatagttcccaccggcagaccgagccgcgcctccattcttgtacgaaaccatggctcgcaaaaaggcaaccgtggagcagctccggacgctgaacaaggttcgtgaattcaagcgaaggagaaacatgcacaaggcagcaggagcaggaccgggcaacaagggagaaaatgtttgtgcaatttgtgacgatggtggtaatctaacttgctgcgaaggttgttgtcagaggtctttccaccttgataacgaacataattgcatcaagacacttgggctgactatacaagaggcaaagaacataatcgagaaggaagattttatatgcaagaactgccagtacaagcaacatcagtgtttcatttgtggatcgttagggtcttctgatgacactgacacatcgtcacagcaggtattccaatgtgagcatgacgattgtgcacgcttttaccacccaaaatgtgttgctcaaatgctatatccagatagccaagaactgttcgagctccacgtggctgccggagagagcttcacttgtcctatgcatgaatgtattgtgtgcaaggaagtagataataagaaagataagagtatgcagtttgcagtatgcagacgctgcccaactgtttaccaccggaagtgcttgccaagagatatcattttcaaaccgaagaaaggtcgcaggggtcccatgcgaagggcgtggaagaacatgcttcccgatcgaattctgatattctgcatgaagcatgagatcgtaagagaactacaaactcctgcaaggaatcatatcgtttttcctgaatccaatgtgctgaaaacgtttcaagctctttatgctcaaagagaggcgcctgaccactcgtcatcgaagcaaacccactcgtcccctccaccggctgcaagagaccagaatcagtgctactgttctagccctttatgctcatttgctccaagttccgtgttcatgcgtccgcatccaggctcctctggttggctcgatgactgactaactaattaactatacggcccatctgtcccctgtagagagaaaccacctgttacaagtccttttgcaaataattggatgtagacaagctagtgttagccaaacgacaaaatcctatttttttttaatataacctgatttttttattgttacagttactagcaaacatgtttctacgaacgagagaaaaaatattaaacattcactataaatgataatggaatggcacatattgattatcca

SEQ ID NO: 8920 - DNA, 2828 bp, Zea Mays
gagggagagagccgagaaaggaaaacgaaaaaaaaaacggcctttccttccccccgcccaaaccaagaaagtgagagcgcgcagcgagcccctgccggcgactcggcagtccgcactgaggagtgaggacgattcgttcagcttgctcccaacaaattcgttggaggacaggggaggggcggggtcgtccgccgctggttctgtagtcagccaggtatcagcgtttgaggctaaaaaatggagcactgtacagcttttatatgtacttcagcacagtggcctcactcaataacgaccactcgacgagtggcataccatagatctgcaaattcaagtttctcagcaccccaaaggagaaggcggtcaacactctatgtcatgaatgccgcatcaaccagtgctccaatttcacctcaaaacataacccaacttccacggacgaacagcacagttatcaaaagtatatccagcgacaaacccagcagtgcaatggagcaacttgatattgaacgtggtgtctgtattccgttccgaaagtacactcctgaaatggtcaggaaaaaagtattggattcaagaggttccatactgtcccttgcgagccggggagtggagataatttggaaacttggattttactggtcatctcttgtgtatgactttttggttggacaggatgaagaaattgttccatatcgtgcccggcagctccgtaatcttttatgtgatctgggcccatctttcataaaagcaggacaggttctagccaacaggcctgacattattcgagaggattatatgaatgaactttgcatcttgcaagatgatgtccctccattccctaaccaggtggctttttccataatcgaggaggagcttggccagcctatagagagattgttcagcaaaatttcatcagagacaatagcagctgctagtttgggccaagtttaccgagccacacttagagaaactggcgaggatgtcgctattaaggttcagagaccagggattgaaccaataatataccgagatctattcttgttccgcactttggcttcatttttgaatgggattagtcttcagaaactagggtgcaatgcggagcttattgttgatgaatttggcgaaaaacttttggaagaacttgattacactcttgaagctacaaatattgaggacttcctagaaaattttaaggatgatccaactgtcaagatacctcaagtgtataagcagctttcaggttcccgtgttctggtgatggagtggatagatggaattagatgtacggacccacaggctataaaagaagctggaatcgatatggaaggttttctcacggttggagtgagtgctgctttgcgtcagttacttgaatttggtcttttccatggagatccacatcctggaaatatttttgcaatgcgtgatggtcgtattgcttatgtcgacttcggaaatgtggccgttcttagccagcaaaacaaacaaatcctaatagacgctgttgttcatgctgttaacgaagactatgctgaaatggcaaatgacttcacaaggttgggtttccttgctagtggaacagatgtagccccaattattccagctctggaatctatttggcaaaactcagcaggaaaaggcttggcggacttcaatttccggagtgtgactgttcaatcagcttgtctacaactttccaatccgtattccagaaaggttttctttggttattcgttcattgttgacacaagaaggaatctgctttacactaaagcctgattttaagtttcttgaggttgcctatccatatgtagcaaagcgtctgttgacagatccaaaccctgctcttcgtgaacgcctgattcaggtgctattcaaggatggggcattccagtggaaacgactagaaaaccttatagttcttgccaaggagaatgtgtccaagatgagtagcaaccccgcactgaaaaagaatagtttgcaagctgtaagaaatcgacagttggagagcaaacttgatctcactgaaacaataaaagatggagcacggatgttccttatcgatgctggtatcaggagacaacttatactggctttcaccgaagactccagattgcacgtagaagaggtactctgtccgacctttctgtaaatggtggatgttcctgtaaaatacatttgatttgagtgctcaacggatgactgcaattggtttcctctttcgcagcttattgatgtatacagactggttgaagatcaaatagatatgccttcagttgccgtcgaggttcttcaagatttaccatctgttgcgcgtgatttcatgctttcctggagtgattccatcctgtcagatcgccagtactaacgatcttttacaactagaagagaaagcaagcagagtgaatagggccctgcatggttatggtatctcgatataatctatacaagaaaaatggctagacaagaattcctcctcgctgtatacagtttctttttcctttgatttttgtatagcaaaatatgcaatgcgcagttaaattttttcgttttgccttgatcttgtcgatttctcagcacaagccatttgtttagtatagcgaatgggatcttttatgtaaatgagctcgtgattggaatgtaatagaaatagatgtatacagctagcattcaaatcaaatatatgcgcaagcatcaaaggcgtctgaagtgtgtttatcaatggcacatgattgtaccgaggaaatagttacttcttcggaacaaaacatttgtttaccttttctccactattgcattttatcaatggcactgtttttttc

SEQ ID NO: 8921 - DNA, 1382 bp, Zea Mays
ctcttctccccttctcccgacggcgccaccataccgcctccgccctcaaccctagccgtatcgcgccctcgccctgcctccagccccgcgcagtatgctgctcgctcgtcgttggctactcgcctgctcccatgctccctccggatctgctgctctcggggatttggcgcagcggctttgcgcctccacacttggtcgccggcctcctcacctccacaagcccacgtcatcgccgtctcctcttcgccatcgccccgctcgcctcctgtgccaacgacccgaccaacctcgccgccaagcagggccacaccggtgagctccccttctgttgatgttgtgggagcggatcgaaggcccggattcgtttggggtttgctttttatggacgggactgggtagaactctttgttgtcttcagctgataggctttactcttggcatcattcggctggcctaggctggaatttgtttgacatccggagcttcgaagttcaacttgttggcattgactgggtgggctgtagatggaatttttcgagttctgcaattcagttcacaaaggggaaatagaaatggttgcgggtgatcccaacctgctgacagttctaactgttttggtatgttttaagttgattcactgtcagctgatgaggttcctaccataacacttaagcaaggaatcctgtacacttctctcctggtgtgaggtgctatgagcatgtgactctaaatctactagtcctagaatggattacagttgtcaggaatttttgttgggactgtgatataaaaaagttgaaactttcatagcttacctgccgagaatgcattgttgaagttgcaaagatgaatcctacatggagtggaatttatctccgggttaattaaccttggttgccaaactagccctcaatgtgcgggacaagaagggaaatactgctttgcacatagctacacggaaatggaggccccagggatctggaataacaggagcctgatggttgcatcagtagagttgaccacttctcagtattgcgagatgcatcttacatggtcaagaagataattcctattctgagctacttgctcgtgtacaagtctccttatcatgtcctcctttcaagccagtctattctttgcttgattcatcacgggtgcacattattgtaattagaatcttcagagtactcgaaggatagttaaagctgtttagctagtccttcagattactgaaaatatagttaagaacatttgtattttgctatttcgatttccaacagtacaactattgagtacaactattggggatgattgtttatgtgatgtggatctatcattgtgcaatactaattaaatttgtatatctatgtgattatgtgtat

SEQ ID NO: 8922 - DNA, 2462 bp, Zea Mays
cctggactccggtccaggttatccatgcggcggagctctcttcgtctcccgttccccctaacgcgtgcgctccttcgccgactgggcgaccgccgccgccggcctcgcccaggtctccgtccggccctacgacaggttccatcgggcccttagccggcgacaagcaccaccagagactgattaggagttcgaggagcaaatcaattcgtaccaaatataaccaagcttacatggctaagccaagtgattcatcacatcatggagttgtggacaatagctccaatggatcccaggctaggcgtgaggaagctgggaaacttggtccatcgtggtatttcagtagaagggaaatagaggaaaactctccatccaggagggatggcatcgatttgaagaaagagtctagcattcggaagttatattgcaagtttctacaagagttgggcatggcgcttaaaatgccccaagtgacgattgccacagcaatggtattctgtcatcgtttttaccttcgtcaatcccttgcaaaaaatgatagacgaataatcgctactgtttgtatattcttggctggaaaagttgaagaaacacctaaacctttgaaggatgtcatcgtggtttcttacgggattattaataagaatgatcctaaggctagtcagagaatcaagcaacagaaggaaatctatgataaacaaaaagaacttattttacttggagagcgagttgtacttgtaacacttgggtttgaccttaatattaaccatgcctataagcccttggttgaagcaataaggagattcaatattgataaaagaagtccacttcctcaggttgcctggaattttgtaaatgatgggctgcgtacttcgctttgcctgcagtttgagcctcatcatattgcagctggtgctatctatttggctgctaaatttctcaaagtgaatctcccatctgatggtgataagatttggtggcaggattttgatgtcacgccacgacaacttgaaggttggtccttatttgcgaaaggttagcagtcaattgctggagttgtatgagcaaaaccgtacaacgcaggcacaatcatcacagggaagtgaagcggaggggagctctgctggtgtgtgtaatcaacgttcaactgtaaagtctgaagcgaactccaaggaaccatctgctcatggtcatcttcaggcatccagaccgccaaatttgcagcactcgtcctcaacaggtgcttcaggtcaccatgacgatgggcagtcaaattcagacaagcatatttctggccacaaaatgcttcaaaatgacaattttaaccatggtggtagcagagaaaagaacaaaagtggaaccaaaactggtactgttatggacaaattgcacaatgacaaaaagttctcgcctggacatcattattccaaggccagccatgagtctcataatccagtggaagaacatcaaccacatggatcagatgataattccaatgaaacaagagatggtgttggtggcaatgaagctcctgttgtgtcaacatccagaatggatgcgatgaataaaattgacaaggataaggtaaaagcagctttggagaagcgaaggaaatcgaaaggtggttttgccacgaaggtaaatgtgattgatgatgatgatctacttgagagagagctagaacaaggtgttgagttggctgttgagtttgagaagattaatcaagataagaagcagaactcgtccgatggtagcatgcatccaccagaccttgaaaacgctgacgaattaatggagaatggccaccatgtcaagcagagtctaccaacgacagctgaagacatgggctgtccgatggacagtaaagaacgacatcctccagcacttcataagcaaaatgatgtttctgagcacaagtcacagcagcttgatgacacattgaaacaccaaaagagctgtgatcatcctcaacctgtaggaagccctgagcaggatggaaaagactacaagaggcctaagcttgacggataggtttatatatatgattttggatgggttttctggaagctgacaagcaatttggtgccggattcattgtatgatgacgtatacatgttgatgagcacgtgtcttcttcgctggtgcctgaagaagtgaagatgccgcgccacaaaattgctgtgctgcggagagcaccaagatgatgcgccccacaactgattgcagcttacagtttgaggaaagtcgggcagcaattattgttaggttccaacaaacattggaatataatatatatatgaacgaaacatgctgtcgcgcttctggtatcagctgcattcgtttcttgtatgtaatgttctggttaaagcgatggaaaggttttatcaaggtcgcaaatattaatgcagctttccatttctgggtttacatattttccaaattaaacggcttccttttttatgtcc

SEQ ID NO: 8923 - DNA, 2491 bp, Zea Mays
gtgggatctcatccgaacaggcctggacctggactccggtccaggttatccatgcggcggagctctcttcgtctcccgttccccctaacgcgtgcgctccttcgccgactgggcgaccgccgccgccggcctcgcccaggtctccgtccggccctacgacaggttccatcgggcccttagccggcgacaagcaccaccaggtgcactttctctattcagagactgattaggagttcgaggagcaaatcaattcgtaccaaatataaccaagcttacatggctaagccaagtgattcatcacatcatggagttgtggacaatagctccaatggatcccaggctaggcgtgaggaagctgggaaacttggtccatcgtggtatttcagtagaagggaaatagaggaaaactctccatccaggagggatggcatcgatttgaagaaagagtctagcattcggaagttatattgcaagtttctacaagagttgggcatggcgcttaaaatataatcgctactgtttgtatattcttggctggaaaagttgaagaaacacctaaacctttgaaggatgtcatcgtggtttcttacgggattattaataagaatgatcctaaggctagtcagagaatcaagcaacagaaggaaatctatgataaacaaaaagaacttattttacttggagagcgagttgtacttgtaacacttgggtttgaccttaatattaaccatgcctataagcccttggttgaagcaataaggagattcaatattgataaaagaagtccacttcctcaggttgcctggaattttgtaaatgatgggtatgctagtgctaccctttctgtcttttgaaattacagttcacagttgtgtatctactacacttaatgttgtgcactgtacaggctgcgtacttcgctttgcctgcagtttgagcctcatcatattgcagctggtgctatctatttggctgctaaatttctcaaagtgaatctcccatctgatggtgataagatttggtggcaggattttgatgtcacgccacgacaacttgaagaggttagcagtcaattgctggagttgtatgagcaaaaccgtacaacgcaggcacaatcatcacagggaagtgaagcggaggggagctctgctggtgtgtgtaatcaacgttcaactgtaaagtctgaagcgaactccaaggaaccatctgctcatggtcatcttcaggcatccagaccgccaaatttgcagcactcgtcctcaacaggtgcttcaggtcaccatgacgatgggcagtcaaattcagacaagcatatttctggccacaaaatgcttcaaaatgacaattttaaccatggtggtagcagagaaaagaacaaaagtggaaccaaaactggtactgttatggacaaattgcacaatgacaaaaagttctcgcctggacatcattattccaaggccagccatgagtctcataatccagtggaagaacatcaaccacatggatcagatgataattccaatgaaacaagagatggtgttggtggcaatgaagctcctgttgtgtcaacatccagaatggatgcgatgaataaaattgacaaggataaggtaaaagcagctttggagaagcgaaggaaatcgaaaggtggttttgccacgaaggtaaatgtgattgatgatgatgatctacttgagagagagctagaacaaggtgttgagttggctgttgagtttgagaagattaatcaagataagaagcagaactcgtccgatggtagcatgcatccaccagaccttgaaaacgctgacgaattaatggagaatggccaccatgtcaagcagagtctaccaacgacagctgaagacatgggctgtccgatggacagtaaagaacgacatcctccagcacttcataagcaaaatgatgtttctgagcacaagtcacagcagcttgatgacacattgaaacaccaaaagagctgtgatcatcctcaacctgtaggaagccctgagcaggatggaaaagactacaagaggcctaagcttgacggataggtttatatatatgattttggatgggttttctggaagctgacaagcaatttggtgccggattcattgtatgatgacgtatacatgttgatgagcacgtgtcttcttcgctggtgcctgaagaagtgaagatgccgcgccacaaaattgctgtgctgcggagagcaccaagatgatgcgccccacaactgattgcagcttacagtttgaggaaagtcgggcagcaattattgttaggttccaacaaacattggaatataatatatatatgaacgaaacatgctgtcgcgcttctggtatcagctgcattcgtttcttgtatgtaatgttctggttaaagcgatggaaaggttttatcaaggtcgcaaatattaatgcagctttccatttctgggtttacatattttccaaattaaacggcttccttttttatgtcc

SEQ ID NO: 8924 - DNA, 3665 bp, Zea Mays
gcgagtagaggcggctgacgaggtgacgcgtgcgtgcgtggcgtccagcgtccccctcccccgtctctctccctttctctctgcagtctgcacgccaaaaaaaaaaaagtcttcagccatctcgacggctcgtcggctcgaccacttcgcctccccaccccgccggaaccctaaccccagccgcgagagctccacccgccgcgccgtgccgatgggacggtcgttgtgaattgaagtagcttggaagagcagtgttatgcacagcgatgggagacaatgtcctaaaactcagggtgggcttctcaggtggtgtttcgagttctagaactcgaagtggccttttaaggataaagagctttgtggattccagtgatggttcatgttcgaggtcacaaagtgaccatgtaagatgtagccctcctattgtcgaggctataataaatgacgaagcagtcttgaaggagtctcctgatggattgatgaaaaaagagatacctgttaggactcaaaatgagtttgttagacagaactctgctgacaaggctgtaaccaaggacgattcaggcatgcggacgcttcccaatgggagtttgagtgaagatatgccttctagaacacggagtgggctggtcaggagaagccctactgttaagactttaagcaaggatcaatcagtcattaatgggctggctgatgggtcactgaaagaagacatgcctcttggaacacggagtggccttgtcagaggaacccttgctgccaagtcctgatggatggatgaagaatgacaaggctgctggaacacggagtggtcttggtggtggaagattggtagccaagactgtaagcaaggacaaaagggctgttgagggtttgcctgatggatggcgaaaagaatacaggccaaggaagaatggttcatttctggatgtgtactacattgatccagtcagtggatatgaatttcgctcttttaaggatgtgcaccgttatcttgaaactggagatattagacagtgcgccgtgagaccaaagaagagtaccatctgcgaagttcatataatagaaagtcaaactcatgcaagtgcatcaccacaacacacgaggcctggtactgcggataagggtattcagtgtgaaatattaacttcggatggtatcatggtaccattgggggaactgattgctccatataatggaaatgatactgaacatactgtgttaccagagcctgagaacttgaaagcaattcaagggtctgacaacaagcttgagacttcggaacacgtgagtgttcaaccggtttctgcacgtaatggttcaaggcaaaccaaatctgttaaaaggaaagaacgaaatgcagaggtcaaatccaagaagcgcaaaaccagttctgctgtgactgctgttcgagcgtcgccccgcttagctgcattgaaggttcagcttgaagtgagcatcaaacatgaagatgccatggttagcataaatcatgtggaccaggtacagactatagaagagagcgccattgatcaggcacacaaaagccaatcgggctctgttgatgagatacatggtaatctggaaagcactttcagtcagttacagttgagccaagcagacactgctaatggaatgcaggctatgcaggaaaacactaccattcattcacaaccaagccaattggatactctgaatcctacacacagaagccaggagaatagtggcaatcagttacaatcggtgctcacagattcttcgattccaaaacgaaccacacaggaatgcactatagacgagccaagccagccaggcataaatcatatacacacagatcaggagttcactgggaatcaatttcggtcgaacctaccagatgacactgttatttcattaagggatattgaagaatgcacagcccactcaaagccaagcaataccgacagtactggacaaattcaggccaatgaggaaaacactgccaatcaagtacagtcgagcctaacagacacagttattccagtaccggttattcaggaatatgctactggttattcacagctgagcaaagctaacacctcaaataaaaaacaggccaatcaggaatacatagctgatcaagtacaatcgagcctaacagacactgtcattccagtacaagttattaaggaatacacaactggttatccacatattaataaagctgacatttcaaatcaaatgcaggccaatcaagaaaacactgatgatcacttatatttaagtcaagtaggctgtgtcactcaaatgcagataattgaggaaaatttgcccaagcaacctcagctgagccaatcaggcactgggggtagaatacaaattgatctggaaagcactaccaatcacttgctaccaaactatgatgaaaattctatgttgcaatgtggtttatcttgggctcctgaacagaacagcggagcccttagtacagatttctggaaaaatgttgaaactcaggcttcatcggtttccatgccaataaatggagcacctgttgcaagctttccagcaaatgttagattccacaatgcagcagcagcagcagaacctgctttaccgccacaggttgctccagctgaagcaggttctgatcagtcggggttggcctttcaatctgttttcggaaacatctggtcggatccttgcatcgagtttgcttttaagacccttacaggtgacattcctgttctggacgacacaacggctgtcacagactactttccggagcaacaagacttgaataaaggcccagcaccaaaccgtgcaggttctgttgataattccagaaaccacacacaagtcgatgtgaaccttccaccacctgctctggatgatttctacaatggcaattggttccctccccaatgaattcagtatgggaggaaacaaatgcaataacattttgtacctgtgaaaaacaaatcagagaaggctaatggccagattacaaagcaatggtcgtgcgctaatgatttctacaatgacagttggttccctcccccaatgaattccgtgtagggaggggaaaaatgcaatgacatttttttagctgcggaaaggcaaatcagagaaggctagcggccaaatcccaaagaatcaatcgtgcactctgaactgaatgtgtcatcccggaggacacattttgtaaaaaaaaaaaaacagtagctttatagccttattagactgttaaaacacactcgactgatctggttccatcaacaaggcttcacggagactgtcgagtacctgatctgggtcatgttttccatagtttgcttctgtgcagttgcctaataagcccattcgttgtaaactagctagttctaacttaagaaagctccctcagggcctatgcatgggtctctgattattgtgcagatgaactgttgttctggacattttgaacatgcaaatgtggaagcgtcactgtcagttgaattatgtttcagccgaattgagaagcgctaatccgctgtttgtgtagagtttgctgaatgttgatgcttgtgcttggttacttggatcagtgttttttagggggctcggcttgcagtaacgatgcaccttgttatatatccagaaaaccttggttgtcactgttttactttcatcacttacaacttgac

SEQ ID NO: 8925 - DNA, 566 bp, Zea Mays
aggatagcgtgcgtgaaagccgcccatggcgtccactgtccaccacaacagccaccaggcgctcctcctccggcctctccccactccgtctcgccacccccgcctctccttctcgccgcgcccagccggcctccgttccttcttcccggcttctggttgccgccttggcacgcatggcgttgcgcttgcagagccagagttcgttcccctacaggaggaggaggaggaggaggaggacgcccgattcgtcgtggtgaccttctacaaattcgtgcccctctttgacccccacgccgaggtcgccagacacctcaacttcctccagggacgcgacatacatggtcgcatttacttgaatgagaagggaatcaatgctcagtggccctcacaaagatgcagtggcatatgcagactgggttaagaaacatcatcagttttctgatatgcttgttcaaacctcaccagctgtaactgggcatgcctttcctagactgaaactacggtacaaaccatcacttgttcaggtgtacgatgattcctccggtacctttctacattcaagtcgc

SEQ ID NO: 8926 - DNA, 2318 bp, Zea Mays
gtgaaagccgcccatggcgtccactgtccaccacaacagccaccaggcgctcctcctccggcctctccccactccgtctcgccacccccgcctctccttctcgccgcgcccagccggcctccgttccttcttcccggcttctggttgccgccttggcacgcatggcgttgcgcttgcagagccagagttcgttcccctacaggaggaggaggaggaggaggaggacgcccgattcgtcgtggtgaccttctacaaattcgtgcccctctttgacccccacgccgaggtcgccagacacctcaacttcctccagggacgcgacatacatggtcgcatttacttgaatgagaagggaatcaatgctcagtacagtggccctcacaaagatgcagtggcatatgcagactgggttaagaaacatcatcagttttctgatatgcttgttcaaacctcaccagctgtaactgggcatgcctttcctagactgaaactacggtacaaaccatcacttgttcagagtggaaggaaagacttgaagctaggacatgccttgatgtgtcctcaggcgaaacatctggaagggggcttttgctgcttgatgtgaggaatgattatgaatgggatgttgggcactttgaaggtgctcagcggcctaatgtggactgcttcagaagcacttcctttggactttcgggagagacagatcctctaaatggtgtagacaaagagaggacagatatactaatgtactgcaccggggggataagatgtgatgtgtattcaacaattcttaggaagaagggctttcggaatctgtatacactggagggaggagtgtcgaactatctcaaggtggaggggccagcagggtgggtgggaaatctctttgtctttgatggccggctctcgttgccaccagcgacattcaatgaggaagaagatgaggaggaacagcaggagaacaagaggtgggtggggtgctgctacgtgtgcggatcagaggtggtggagctgcggcaccgcaactgcgccaacatagactgcaaccgcctttatctgtgctgcggttggtgtgcggaggagctgtgcggctgctgctgctccgactgcaaggtcgcccctcggctgcggccgctgctgccaggccaccagagatacttgaaatggcatgtctaccgcgacggacggacggacgatgaaaacaaactttatggttttgttgacgatgacagcagtggcctgtgaggttgagatagttcacgactgaaaatccaacatcccaggagggaatactttgtcttgtcgtgtgcctacctacttttatacttggacagatgagtgagtgagagttcagagttgagccggctatgtttagagtcacatgaagcgttcagatgcaacaaactttatggttttgttgggtttcttacaaattccattccactttagacctcttgtttctaaaccatatggtatttttctcgaaaacaaaagagaactgcgcatcattgtattaagaagagaaaaaggtctaaaccgacaagtagaaaccagaaatttggagggattttatcaaacacatagcggttccgatgattccataggatccaaaaccctaaaataattagagaattgagaccctctttggctacaccttgcagctggtcacttaatctctcccaccactgcatactgctagattcacctggttgggggctgaatccctgcaaattaacctgaccgagcaaacgaaaccagaaatgcctagcaaagacacatccaacctgtcctcaggctcttgcggacaactttctggatggataagacctctcttttggagtcgatccgctgtccaacatctcttaaaagcagccaaccattgaaaaaaaaattgcatttgggaggggcccaagaatgccaaattctctcccagtgcccaaaattagtagaaccaatgaaaagactttcgtatgcagctttggcagaatactttccatctgttgcaaatctgaatatatgtttatcttcctgattctgcagcaggttaatggagcttaaaatgtcccaaaggtccaggaaatcaactagcactccaactgaaactgcacctctaatatctgtcaaccatcttctatctgtcaaagcctcctggactgatctagtgttcaaatttctcttgggcacagcagcaaatagtctaggagccaaatcctttttccttgcagccagcgatccttccagaaaagggttgaagaaccatttccaatttccgttataacagccacagaaaagaaagccttcactgttccagggatctg

SEQ ID NO: 8927 - DNA, 2334 bp, Zea Mays
tccgaagaagagtagagcagagcagacagaggatagcgtgcgtgaaagccgcccatggcgtccactgtccaccacaacagccaccaggcgctcctcctccggcctctccccactccgtctcgccacccccgcctctccttctcgccgcgcccagccggcctccgttccttcttcccggcttctggttgccgccttggcacgcatggcgttgcgcttgcagagccagagttcgttcccctacaggaggaggaggaggaggaggaggacgcccgattcgtcgtggtgaccttctacaaattcgtgcccctctttgacccccacgccgaggtcgccagacacctcaacttcctccagggacgcgacatacatggtcgcatttacttgaatgagaagggaatcaatgctcagtacagtggccctcacaaagatgcagtggcatatgcagactgggttaagaaacatcatcagttttctgatatgcttgttcaaacctcaccagctgtaactgggcatgcctttcctagactgaaactacggtacaaaccatcacttgttcagttagaaggaggtagtttgcatcttccgttgctggaccctaacatgcgtgcgacaccattgactccatcagagtggaaggaaagacttgaagctaggacatgccttgatgtgtcctcaggcgaaacatctggaagggggcttttgctgcttgatgtgaggaatgattatgaatgggatgttgggcactttgaaggtgctcagcggcctaatgtggactgcttcagaagcacttcctttggactttcgggagaggaagaagggctttcggaatctgtatacactggagggaggagtgtcgaactatctcaaggtggaggggccagcagggtgggtgggaaatctctttgtctttgatggccggctctcgttgccaccagcgacattcaatgaggaagaagatgaggaggaacagcaggagaacaagaggtgggtggggtgctgctacgtgtgcggatcagaggtggtggagctgcggcaccgcaactgcgccaacatagactgcaaccgcctttatctgtgctgcggttggtgtgcggaggagctgtgcggctgctgctgctccgactgcaaggtcgcccctcggctgcggccgctgctgccaggccaccagagatacttgaaatggcatgtctaccgcgacggacggacggacgatgaaaacaaactttatggttttgttgacgatgacagcagtggcctgtgaggttgagatagttcacgactgaaaatccaacatcccaggagggaatactttgtcttgtcgtgtgcctacctacttttatacttggacagatgagtgagtgagagttcagagttgagccggctatgtttagagtcacatgaagcgttcagatgcaacaaactttatggttttgttgggtttcttacaaattccattccactttagacctcttgtttctaaaccatatggtatttttctcgaaaacaaaagagaactgcgcatcattgtattaagaagagaaaaaggtctaaaccgacaagtagaaaccagaaatttggagggattttatcaaacacatagcggttccgatgattccataggatccaaaaccctaaaataattagagaattgagaccctctttggctacaccttgcagctggtcacttaatctctcccaccactgcatactgctagattcacctggttgggggctgaatccctgcaaattaacctgaccgagcaaacgaaaccagaaatgcctagcaaagacacatccaacctgtcctcaggctcttgcggacaactttctggatggataagacctctcttttggagtcgatccgctgtccaacatctcttaaaagcagccaaccattgaaaaaaaaattgcatttgggaggggcccaagaatgccaaattctctcccagtgcccaaaattagtagaaccaatgaaaagactttcgtatgcagctttggcagaatactttccatctgttgcaaatctgaatatatgtttatcttcctgattctgcagcaggttaatggagcttaaaatgtcccaaaggtccaggaaatcaactagcactccaactgaaactgcacctctaatatctgtcaaccatcttctatctgtcaaagcctcctggactgatctagtgttcaaatttctcttgggcacagcagcaaatagtctaggagccaaatcctttttccttgcagccagcgatccttccagaaaagggttgaagaaccatttccaatttccgttataacagccacagaaaagaaagccttcactgttccagggatctg

SEQ ID NO: 8928 - DNA, 2385 bp, Zea Mays
gagcagagcagacagaggatagcgtgcgtgaaagccgcccatggcgtccactgtccaccacaacagccaccaggcgctcctcctccggcctctccccactccgtctcgccacccccgcctctccttctcgccgcgcccagccggcctccgttccttcttcccggcttctggttgccgccttggcacgcatggcgttgcgcttgcagagccagagttcgttcccctacaggaggaggaggaggaggaggaggacgcccgattcgtcgtggtgaccttctacaaattcgtgcccctctttgacccccacgccgaggtcgccagacacctcaacttcctccagggacgcgacatacatggtcgcatttacttgaatgagaagggaatcaatgctcagtacagtggccctcacaaagatgcagtggcatatgcagactgggttaagaaacatcatcagttttctgatatgcttgttcaaacctcaccagctgtaactgggcatgcctttcctagactgaaactacggtacaaaccatcacttgttcagttagaaggaggtagtttgcatcttccgttgctggaccctaacatgcgtgcgacaccattgactccatcagagtggaaggaaagacttgaagctaggacatgccttgatgtgtcctcaggcgaaacatctggaagggggcttttgctgcttgatgtgaggaatggtgctcagcggcctaatgtggactgcttcagaagcacttcctttggactttcgggagagacagatcctctaaatggtgtagacaaagagaggacagatatactaatgtactgcaccggggggataagatgtgatgtgtattcaacaattcttaggaagaagggctttcggaatctgtatacactggagggaggagtgtcgaactatctcaaggtggaggggccagcagggtgggtgggaaatctctttgtctttgatggccggctctcgttgccaccagcgacattcaatgaggaagaagatgaggaggaacagcaggagaacaagaggtgggtggggtgctgctacgtgtgcggatcagaggtggtggagctgcggcaccgcaactgcgccaacatagactgcaaccgcctttatctgtgctgcggttggtgtgcggaggagctgtgcggctgctgctgctccgactgcaaggtcgcccctcggctgcggccgctgctgccaggccaccagagatacttgaaatggcatgtctaccgcgacggacggacggacgatgaaaacaaactttatggttttgttgacgatgacagcagtggcctgtgaggttgagatagttcacgactgaaaatccaacatcccaggagggaatactttgtcttgtcgtgtgcctacctacttttatacttggacagatgagtgagtgagagttcagagttgagccggctatgtttagagtcacatgaagcgttcagatgcaacaaactttatggttttgttgggtttcttacaaattccattccactttagacctcttgtttctaaaccatatggtatttttctcgaaaacaaaagagaactgcgcatcattgtattaagaagagaaaaaggtctaaaccgacaagtagaaaccagaaatttggagggattttatcaaacacatagcggttccgatgattccataggatccaaaaccctaaaataattagagaattgagaccctctttggctacaccttgcagctggtcacttaatctctcccaccactgcatactgctagattcacctggttgggggctgaatccctgcaaattaacctgaccgagcaaacgaaaccagaaatgcctagcaaagacacatccaacctgtcctcaggctcttgcggacaactttctggatggataagacctctcttttggagtcgatccgctgtccaacatctcttaaaagcagccaaccattgaaaaaaaaattgcatttgggaggggcccaagaatgccaaattctctcccagtgcccaaaattagtagaaccaatgaaaagactttcgtatgcagctttggcagaatactttccatctgttgcaaatctgaatatatgtttatcttcctgattctgcagcaggttaatggagcttaaaatgtcccaaaggtccaggaaatcaactagcactccaactgaaactgcacctctaatatctgtcaaccatcttctatctgtcaaagcctcctggactgatctagtgttcaaatttctcttgggcacagcagcaaatagtctaggagccaaatcctttttccttgcagccagcgatccttccagaaaagggttgaagaaccatttccaatttccgttataacagccacagaaaagaaagccttcactgttccagggatctg

SEQ ID NO: 8929 - DNA, 2895 bp, Zea Mays
atggattcctcagccgcagatgaccctatggcagatgaagccagagtagaagatgccttcacacaggagatcaccgattattcgtacgtccctagataccatgtgttgagttggatggaaactgtggaggggatggtggccggtgtggcggcgcttccgccggtgtatttgatactgaacagagctcttcttcgttgcccatgccaagatcttcttgagacgggatggggatggaagaggctggtgccctacagacctggttatgttgagtggcatgtgttcaagaaataccttggggactatttcgaccataatcgtgaagcttttctttgtgccgagcagaagcctgatccatttggatggattattgctaaaaagagtgccctgattgctgcagccaaattgtgcctcaagatggagaaggcacttctcaggtactgtgctagctttctcactcctgacgacaaaaggttgatcctccggatcaaggaccaggcaaagcaaatgatccaatcagagggtgatcaatctttggttgtaactatatgcttggaggtgcttcaagcaatggttcaaatgggtgtccttgttcctactggagatatgactgttgtcagaagaaccgctcaatttttccttaatagctttcaagagtgcctaacagcacaaaggaaggagagagaaatggcaaccgcagaactgggtttcaaaaagcaattaactaaggaggagaagtttgaaaagaggaagcagagacttgctgcaatcggagaggatcttttggcgattgctgctgatcaaccatttcgcttccctgccacatttacatttgtggtcagagcattctcagttctagatggtactgggaaaggccttgatcctaggtttcatattacagagattgctaagccaaatgccaaggaattgctaagatttaatgacgctggtgttgaaatagttgtgaaggcaagtttcaacatttggtcaaagctgttaacctatctctatgatagcacatctcctaagggttagggcttgtttggctaggagcggattgaaggggattggaggagcctattaagcattgaacaatttacccatgcttgtttcctattctttggtcgtgataacgtttgcaaccatgaatagtacatattgcttttccaggtgtgtggagagacatgtgtattcctcctatgacgaattccttaggctccatgaaggtaagcctgtcttaatgggcttgattgttgaacctgacttagtacttttatccatgtcacggcattgaactagacagtcactcatgtccttaggatattaacggtatacatcaacaattcattctattttaattgcttgcaaaacttttttggcccttcaaatgagttccacgcatcaagaagtcaagattccaggaggcctaaaataggagaggagggcgcagcttgattcaatccatgtcaagtcagaggctgctgcgaggtttgcacatgcaagtagaatttagatgatctctgttaggcatctaactgaataaatgatctccattatggactggttatattattttctgtgcgatcggatgggttaaagaaaagacgtgaaatggtattttccagtatggactgtataaatgtaattatattcctatgctggtcctgcttcgctttcatgtggatttatcttgcaaatggtatgtggatccgttccagaggcaatgagccttgcagccagtttgcagtataaaaaacccaattatgtccactgttggttcgacgcagcgtgtgccgaggatttctactgccaagcataagaaagtatttgaaatcaagaacttgcattcattcaatcataatgtgtttcctatcaagcataagtgtgtgtgttttgtttgatatctgctttaataggagattgttcttgtcaccccaaaaatgttcccattctactttcgggcaggtgaattgcagataaatggtctgttcgcaactggtgctctcgggcgactccatcactgagcaacccttcgccccggtggctgcggtgtcgcactggctgacacctgctcgcagttgcattacaagttttactgactatgtattttcaggtttattcaatttcagttgtaatgcttctgacagcagttgtatcagtcctcttgttcagcttccatgtatccctcgcatccttccttggatccacataagtgttaatgataattttgttgcatctcctctgctgatcagagctttcaaactcatgacagaataatgtactaaacttcagtttggtgtctatctcagtgtacctacactcagttggaaaacttcaaccacactgcaacaaggtttataaaaggtttgctatgaggaaaaacaaatttatgggctcaaacaaagtgtgatagtgaaagtcattttgcttccagcttaagaaccaagccaagaaaacagatatcaactgtgacgccacactcaaaagcttgtttggtgagagggataaggttgggatgctggagatctctaagcttttgagccgtggcttcccgaaaatctccaagcttttgtggtccatggagccagggatggctctttggtaaaagacttcgttgtggatggcctcttttatggtccatgttaagtcccaagtcccactaggtggttaagcagaaaaatcttgtgatggcattaagactttcagactttgtttttgggtctgatgcatgtaaaaaggattcccagtgtttctgttgctcttgcgatcctgtgaggacacatatgagagaaatatttagtttgttgatggcaaatcttgtcttatgttcatgcctgtacctatctgatcaagcgttatgatatgatcccatgcgtggtactgtgttctttagagatg

SEQ ID NO: 8930 - DNA, 3333 bp, Zea Mays
actctaaaccctccaccagccgaagctactgccgcggccgcaacagaggtcgcgacgacgaacgctgaagaagcgccggcgagggagagtcctttactttttcctatgctgtagcaaaacaagcctatatcatcttccaaatatactcgttccgtgccggcggcctcccctcctacgcccctgccgattcttcaatcttcaccaacgtctgcgcgtagcaggctagcagtcggcacgacttcctcagatctgccggacgacttgctgttcgtcaccgactcaccagcaaccaacgtcagccatcagccggcagcaggggaagctgggcggagggtcattgcggcacggcgtccaggcgtacagcaggcaccagcaacagcccatggcaaacgccgcagatgaccctatggcagatgaagccagagtagaagatgccttcacacaggagatcaccgattattcgtacgtccctagataccatgtgttgagttggatggaaactgtggaggggatggtggccggtgtggcggcgcttccgccggtgtatttgatactgaacagagatcttcttgagacgggatggggatggaagaggctggtgccctacagacctggttatgttgagtggcatgtgttcaagaaataccttggggactatttcgaccataatcgtgaagcttttctttgtgccgagcagaagcctgatccatttggatggattattgctaaaaagagtgccctgattgctgcagccaaattgtgcctcaagatggagaaggcacttctcaggtactgtgctagctttctcactcctgacgacaaaaggttgatcctccggatcaaggaccaggcaaagcaaatgatccaatcagagggtgatcaatctttggttgtaactatatgcttggaggttgtcggtgccgagcgcgcggtcgtcgtgcagctcgtgggaccagtccgccgagcggctgctagaggcggacgcagccctcgtgcggaagaagtgcgccgagaagagcgcgccgaggccgaggacgccgccgggcagcaggtcctccagcgcggcgaggtcttggtcttggtcttggagcagggtcttggtcttggagcactgcacgaggagcacatcggcatggtgcttcaagcaatggttcaaatgggtgtccttgttcctactggagatatgactgttgtcagaagaaccgctcaatttttccttaatagctttcaagagtgcctaacagcacaaaggaaggagagagaaatggcaaccgcagaactgggtttcaaaaagcaattaactaaggaggagaagtttgaaaagaggaagcagagacttgctgcaatcggagaggatcttttggcgattgctgctgatcaaccatttcgcttccctgccacatttacatttgtggtcagagcattctcagttctagatggtactgggaaaggccttgatcctaggtttcatattacagagattgctaagccaaatgccaaggaattgctaagatttaatgacgctggtgttgaaatagttgtgaaggcaagtttcaacatttggtcaaagctgttaacctatctctatgatagcacatctcctaagggttagggcttgtttggctaggagcggattgaaggggattggaggagcctattaagcattgaacaatttacccatgcttgtttcctattctttggtcgtgataacgtttgcaaccatgaatagtacatattgcttttccaggtgtgtggagagacatgtgtattcctcctatgacgaattccttaggctccatgaaggtaagcctgtcttaatgggcttgattgttgaacctgacttagtacttttatccatgtcacggcattgaactagacagtcactcatgtccttaggatattaacggtatacatcaacaattcattctattttaattgcttgcaaaacttttttggcccttcaaatgagttccacgcatcaagaagtcaagattccaggaggcctaaaataggagaggagggcgcagcttgattcaatccatgtcaagtcagaggctgctgcgaggtttgcacatgcaagtagaatttagatgatctctgttaggcatctaactgaataaatgatctccattatggactggttatattattttctgtgcgatcggatgggttaaagaaaagacgtgaaatggtattttccagtatggactgtataaatgtaattatattcctatgctggtcctgcttcgctttcatgtggatttatcttgcaaatggtatgtggatccgttccagaggcaatgagccttgcagccagtttgcagtataaaaaacccaattatgtccactgttggttcgacgcagcgtgtgccgaggatttctactgccaagcataagaaagtgaattgcagataaatggtctgttcgcaactggtgctctcgggcgactccatcactgagcaacccttcgccccggtggctgcggtgtcgcactggctgacacctgctcgcagttgcattacaagttttactgactatgtattttcaggtttattcaatttcagttgtaatgcttctgacagcagttgtatcagtcctcttgttcagcttccatgtatccctcgcatccttccttggatccacataagtgttaatgataattttgttgcatctcctctgctgatcagagctttcaaactcatgacagaataatgtactaaacttcagtttggtgtctatctcagtgtacctacactcagttggaaaacttcaaccacactgcaacaaggtttataaaaggtttgctatgaggaaaaacaaatttatgggctcaaacaaagtgtgatagtgaaagtcattttgcttccagcttaagaaccaagccaagaaaacagatatcaactgtgacgccacactcaaaagcttgtttggtgagagggataaggttgggatgctggagatctctaagcttttgagccgtggcttcccgaaaatctccaagcttttgtggtccatggagccagggatggctctttggtaaaagacttcgttgtggatggcctcttttatggtccatgttaagtcccaagtcccactaggtggttaagcagaaaaatcttgtgatggcattaagactttcagactttgtttttgggtctgatgcatgtaaaaaggattcccagtgtttctgttgctcttgcgatcctgtgaggacacatatgagagaaatatttagtttgttgatggcaaatcttgtcttatgttcatgcctgtacctatctgatcaagcgttatgatatgatcccatgcgtggtactgtgttctttagagatg

SEQ ID NO: 8931 - DNA, 3526 bp, Zea Mays
cccacctccctctcctccttccgacctcgccgcctccctccctaaactctaaaccctccaccagccgaagctactgccgcggccgcaacagaggtcgcgacgacgaacgctgaagaagcgccggcgagggagagtcctttactttttcctatgctgtagcaaaacaagcctatatcatcttccaaatatactcgttccgtgccggcggcctcccctcctacgcccctgccgattcttcaatcttcaccaacgtctgcgcgtagcaggctagcagtcggcacgacttcctcagatctgccggacgacttgctgttcgtcaccgactcaccagcaaccaacgtcagccatcagccggcagcaggggaagctgggcggagggtcattgcggcacggcgtccaggcgtacagcaggcaccagcaacagcccatggcaaacgccgcagatgaccctatggcagatgaagccagagtagaagatgccttcacacaggagatcaccgattattcgtacgtccctagataccatgtgttgagttggatggaaactgtggaggggatggtggccggtgtggcggcgcttccgccggtgtatttgatactgaacagaggtgcgattttcttttatatttcttccagttcatgttctccttgtgtggctggtgctggattcaaccgatctagggaagagatgttagttgatttgctgtaaaaatcaatatgttaacagagatatatgatacatgctcctgcttgctcatgatgccggtttggtgccaaggctgtatgccccccttcctatctgtgttttttgttctataatttggaggtttcttagttttttactacagtatttgcctattacgtatcacgttgcatctaattagctcttcttcgttgcccatgccaagatcttcttgagacgggatggggatggaagaggctggtgccctacagacctggttatgttgagtggcatgtgttcaagaaataccttggggactatttcgaccataatcgtgaagcttttctttgtgccgagcagaagcctgatccatttggatggattattgctaaaaagagtgccctgattgctgcagccaaattgtgcctcaagatggagaaggcacttctcaggtactgtgctagctttctcactcctgacgacaaaaggttgatcctccggatcaaggaccaggcaaagcaaatgatccaatcagagggtgatcaatctttggttgtaactatatgcttggaggttgtcggtgccgagcgcgcggtcgtcgtgcagctcgtgggaccagtccgccgagcggctgctagaggcggacgcagccctcgtgcggaagaagtgcgccgagaagagcgcgccgaggccgaggacgccgccgggcagcaggtcctccagcgcggcgaggtcttggtcttggtcttggagcagggtcttggtcttggagcactgcacgaggagcacatcggcatggtgcttcaagcaatggttcaaatgggtgtccttgttcctactggagatatgactgttgtcagaagaaccgctcaatttttccttaatagctttcaagagtgcctaacagcacaaaggaaggagagagaaatggcaaccgcagaactgggtttcaaaaagcaattaactaaggaggagaagtttgaaaagaggaagcagagacttgctgcaatcggagaggatcttttggcgattgctgctgatcaaccatttcgcttccctgccacatttacatttgtggtcagagcattctcagttctagatggtactgggaaaggccttgatcctaggtttcatattacagagattgctaagccaaatgccaaggaattgctaagatttaatgacgctggtgttgaaatagttgtgaaggcaagtttcaacatttggtcaaagctgttaacctatctctatgatagcacatctcctaagggttagggcttgtttggctaggagcggattgaaggggattggaggagcctattaagcattgaacaatttacccatgcttgtttcctattctttggtcgtgataacgtttgcaaccatgaatagtacatattgcttttccaggtgtgtggagagacatgtgtattcctcctatgacgaattccttaggctccatgaaggtaagcctgtcttaatgggcttgattgttgaacctgacttagtacttttatccatgtcacggcattgaactagacagtcactcatgtccttaggatattaacggtatacatcaacaattcattctattttaattgcttgcaaaacttttttggcccttcaaatgagttccacgcatcaagaagtcaagattccaggaggcctaaaataggagaggagggcgcagcttgattcaatccatgtcaagtcagaggctgctgcgaggtttgcacatgcaagtagaatttagatggtcctgcttcgctttcatgtggatttatcttgcaaatggtatgtggatccgttccagaggcaatgagccttgcagccagtttgcagtataaaaaacccaattatgtccactgttggttcgacgcagcgtgtgccgaggatttctactgccaagcataagaaagtatttgaaatcaagaacttgcattcattcaatcataatgtgtttcctatcaagcataagtgaattgcagataaatggtctgttcgcaactggtgctctcgggcgactccatcactgagcaacccttcgccccggtggctgcggtgtcgcactggctgacacctgctcgcagttgcattacaagttttactgactatgtattttcaggtttattcaatttcagttgtaatgcttctgacagcagttgtatcagtcctcttgttcagcttccattgtacctacactcagttggaaaacttcaaccacactgcaacaaggtttataaaaggtactgttactattgttaaaattagtcattttagctatccgcttctatttcaccgtgcttgcaggtttgctatgaggaaaaacaaatttatgggctcaaacaaagtgtgatagtgaaagtcattttgcttccagcttaagaaccaagccaagaaaacagatatcaactgtgacgccacactcaaaagcttgtttggtgagagggataaggttgggatgctggagatctctaagcttttgagccgtggcttcccgaaaatctccaagcttttgtggtccatggagccagggatggctctttggtaaaagacttcgttgtggatggcctcttttatggtccatgttaagtcccaagtcccactaggtggttaagcagaaaaatcttgtgatggcattaagactttcagactttgtttttgggtctgatgcatgtaaaaaggattcccagtgtttctgttgctcttgcgatcctgtgaggacacatatgagagaaatatttagtttgttgatggcaaatcttgtcttatgttcatgcctgtacctatctgatcaagcgttatgatatgatcccatgcgtggtactgtgttctttagagatg

SEQ ID NO: 8932 - DNA, 2407 bp, Zea Mays
atgtttgctaaattctcaccaaggcgaagccacggtaaccgccaccgtcatggtgcccccgacggccactgcgatgcccgtcttcctctccgcggcgccccctcctttttccacccgccgtcggcgcagccgccttcctgccatttccgcatccctttcgccgtccccttcctcttcggaggagccgctgctggtgcgcgcggcgcggggcgaggacggcctcccacgcccacccgcgtggatgatgcgacaggcagggcggtacatggcggagtaccaggcgctggccaagcgccacccctcgttccgggagcgctccgagaacacggacctcatcgtcgagatcacgctgcagccgtggcgtgccttcgcgcctgacggcgtcatcctgttctcagacatactcacgcccctaccggccatcggggtaccgttcgatatctcggactccaaggggcccgtgatccaatcgccagtgcggtccgaagggcaggtgagggagctcgtccccatcgaccttgatatgctccagttcgtcggagagtcactaaagattctgcgaaatgagattgatggaaaagctgctttgctaggatttgtgggggccccatggacaattgcaacttacattgttgaaggggggatgaccaacacatacacaaatataaagaacatgtgccatacagctcccgatgtcttgaggtgtcttctatctcatcttgcagaagcgatatctgactatatcatttaccaagttaactccggggcccagtgtatacagatatttgattcatggggtggacaacttccacctcatgtgtgggagcagtggtcaaaaccatatatcaaaaaggtgacttccttttcttgctttcatgtattaccaacttcatgattggcggtgctgctatgtatctgcactgtcttatagaacaacattgatggctcccactaaatgctctaaaggtcagtatctcctaagaaatacccttgttcttataccgaaatgattctcatatgattaattgcattacccccctacaatttctggtaccgcattgcaagaattgttatggttatgaccacaagttccttataaccacgaaagtgaaatttagagagaaaaaaccaatctctcaaaataatcagtagctggtgcttacatcagcagcatgttctcagtgcacatggatttggaattttttatactgtatgttactataatttggtttgcatatcttcaagactgcaactagcacagtgtataaaactgctttacttggtcataatggtaacttccacaagtttggtgtatttagagagagtgcccagaatttcatcttgaccttgaaaaatgtgcaaaatatcatatagcttgtagactattatttagagctcaattaaaagatttcatgcaaggttttgatttactgattctgttcattaagcttttatatttcttcgacagattgtgaataggattaagaaagagtgccctcatgtaccccttgtgttgtatataaatggaaatggaggtttacttgagcgcatgaaggacacaagagttgatgttattgggcttgactggacagtggacatggctgatggaaggaagcgccttggtaatggaattagtgtacaagggaatgtggatccagcatttctgttctcaccattaccagtactgactgatgaaattcgtagggttgtgaaagcagctggtacaaaaggtcatatacttaacttgggccacggtgtacttcagaaaacacccgaagaagctgtagcacatttctttgatgtcacaaggagcttgagatatgacacccatttccaaggttctgttgctgaaggattgcagcctgttgcttgattcgtagtgttgtctgcattctacctttttaagacatactcattattgaagcctggatatgtcctgtggagatatcggcagcaaattaaatgtaattttattcattgtttatctgttagttttattcattgtttatctgttccattattcatgtgactgaagaagggatgcatgatgcatgcaacctggtttcgtaggagagccgggctacaggcacagtccgcttcagcggcgcctgtggctgttcaaatcagagctgctataattcctgtgaaaccgtccagtctcggtgccttctccgaggggagttcttctaggtgtttagttggttttactaactaaagttttgtatcgaatggttgaataataattataaggattactagttggatgcccgtacgttgctacggttccaactaatcatgcttaaacatttttgctcatgtttcttcttaatctcagtgtttccattttccatctggcatacttgaatctgccccttgtacttaaactggcgttagctgtatagcttta

SEQ ID NO: 8933 - DNA, 3906 bp, Zea Mays
gcgagaaagtgataaggttcgtgggtgcgtcgccactcgccaccctcacgtctcccgagtggactcccgcctccttccttccgtcccttcccggctcaccgcccttcgcctcaccccgcgcctcctccctgtcccccctccagaactgtcccccaccgcctcgagatgctcgcggcccccgccgcgctccacctcctcctcccggcgccgccgctgccgcccccgcactaccaccaccaccacgtcgccttccccgcgccgccgctccacgcctcgctcccgtgctcacgccgcccgcggaggaggccgcccaggcatggggtcgccagggcctccgccgcaatggcggaggaggccagcagctccggaccgaccaagttctccgtgaggatccccgtcggcgaccgcgagatattggtggaaacgggccacattgggaggcaagcgagcgcttctgtaatggtcactgatggcgaaacgattctctactgttctgtctgtctgtcggatactccaaacgacccttctgactttttccctttatcggttcactatcaagagcgcctttcagctgctggaagaactagtggcggtttcttcaaacgagaaggcaagacaaaagaccatgaggttttggtttgcagattgatagacaggcccctacgacctactatgcctaagggtttctactttgaaactcagattctatcctgggtcttcagttatgatggcattcactccccagactgcttggctatcacagctgctggtatagccgtggccctctctgaaattccaaataaacaaacaattgctggagtaagaattggcctaattaacaaccagtttattgttaacccaactactgaacagatggagaattcagagttagatttgatgatggctgggactgatagtgccattttgatgattgagggctactgtgattttctgactgaggagaagctgcttgaagctgtcgaagctgggcaggtggcaattagagaaatctgcaaagcaattgatgttcttgttcagagctgtgggaagaagaaaatggtcgatgctatcagcctaccgccgcctgaactctacaggcatgttgaagatatttctggagatgagttgatgaaggcattacaaataaaaggaaagattcccagaagaaaagctctttcagcattggaagagaaagttataagtatactttctgagcagggctatgtttccaaagatggcttatctggaggcactgaaagtttggctgatattgttgaggatgaggatgaggatgaaattgtagatgacggagaagtagatgaaggcgatgttcacatcaagccggtttcaaggaagccccttcagctatttgcagaagttgatgtgaagctagtcttcaaggaaatttcatctaaatatttacgaaagcgcattgtagagcgaggaaagcgaagtgatggacggagtccttgggaacttcggcccatcaattctcaatgtggcttacttccaagagctcatggtagtgctctgttcacgaggggagaaacacagtcactggctgtggtcactttaggtggctatcagatggcacaacgaattgacaaccttgttgatacggaggactcaaaaagcttctatcttcagtactcatttcctccatcatgtgttggcgaagttggtcgaattggagcacctagccggagagagattggacatgggatgcttgcagaaagggcactggagccaattttacctctggaagaggattttccgtacactattcgtgttgagagtactatcactgaaagtaatggttcatccagcatggcttctgtttgtggaggttgtttagcacttcaagatgctggggttcctataaagtttcctgttgctggaattgcaatgggcctggtccttgatacacaagaatttggtggagatggtagcccacttatactttctgatattactggagctgaagatgcctctggtgacatggatttgaagattgctggtaatgaaagtggcatatctgcatttcagatggacattaaggtagttgggataactctacctgtgatggagaaagcactccttcaagctagggaagggagacaacatattctaagtcaaacctaacaaggtgaatttaataattggttctggtggaaagacaataaaaagcataattgaggagactggggtagatgctattgatactggagatgatggcacggtaaaaattactgcaagagacctaacaagcttagagaagtcaaaaattataatagctaatcttaccatggttccaaaagtaggagaaatatacagggactgtgagatcaagtcaatagctccatatggtgcttttgttgaaattgctccagggcgtgagggtttatgtcatatcagtgagttaagttcgggctggttggccaaggctgaggatgcttttaaagttggagatcgcatagacgtcaagcttattgagataaacgataagggtcaacttcggctaagctctcgagctttgcttccagacgtggattccgaatccaacataggttcaacaaaagaaaaggtgccacaaaaagatgatgtcataaaaatgacaacaaaaagaccaaggcgcaagaaacagccagagccgtctggagctgaaaatgccacaacaaaggctcttgcgaaaagcgctgctgctccagctggttcaaagggcagtgaagcgtagtaggatgtggacagcttggtgccttaatcagacgattgactggccaagctagggatacatccttcaaccgactatatgatggtcatatggcatgagaaagagttcagacatgagggcacaactgtctaaacaggaatataatggagaagaattggttgatcgacctcgatgttagacaggtagagtgtctggttgatgcgttacacaaggcgtgcgcctatccagcagtaatggtgcccaggactggatcgtcgccatggttagcggaacagatcccgtaaccaccatggaaacttgattgtaatcgccagaagtgttgtatcgttctgtactaactacatattcttgccaatccggccaatgcaaactactgcatgaagtaattagccaaaaaaaatttggctcagcctgggaataaccggaacatggaacaaataatttgacagtcagaggcaatgcaactcctatctcacatttacaagccaaatccaactcctatcagttaactgtcccgaccggcaatacaaaatctaccaaaagagaaacagaaactaggatctggggtagctttccaccgacacatactagtttccatgctagcaaaatctaccaagaaggctgttctcaacactttaacgctcaagtctgagcagcgagatgtctttgtactctgtcaactgttccacgccaactcgttaccgttgagcagcccgctccccaccaattcattagcgatgagatgctccaggtcatcaaattcatggaagggcttggccttcaaagtcgcggcattgcctccagcaggagcagcagcaacagccagattgctgcttaccgacttgaaattgttacttctggctgtgctgttattgatcacactagtaggcccggtatagatggtggcagcaccatttacggccatgcgctgtccctgatctcctgtaccagcactgttggtgttagcacctcctgatgtgataccactgcttatgttagggatatctagaggtggttgctgtggcagtgtgtgccttttagcgttcttaacttcttgaatcagctgatttaaagcatgctgctgatactgtgggctcacgcccaggccccggtgattgttttgcaaccccaagccctggaggttgttgtgctggggcattgggtgctgaaatgac

SEQ ID NO: 8934 - DNA, 3972 bp, Zea Mays
gcgagaaagtgataaggttcgtgggtgcgtcgccactcgccaccctcacgtctcccgagtggactcccgcctccttccttccgtcccttcccggctcaccgcccttcgcctcaccccgcgcctcctccctgtcccccctccagaactgtcccccaccgcctcgagatgctcgcggcccccgccgcgctccacctcctcctcccggcgccgccgctgccgcccccgcactaccaccaccaccacgtcgccttccccgcgccgccgctccacgcctcgctcccgtgctcacgccgcccgcggaggaggccgcccaggcatggggtcgccagggcctccgccgcaatggcggaggaggccagcagctccggaccgaccaagttctccgtgaggatccccgtcggcgaccgcgagatattggtggaaacgggccacattgggaggcaagcgagcgcttctgtaatggtcactgatggcgaaacgattctctactgttctgtctgtctgtcggatactccaaacgacccttctgactttttccctttatcggttcactatcaagagcgcctttcagctgctggaagaactagtggcggtttcttcaaacgagaaggcaagacaaaagaccatgaggttttggtttgcagattgatagacaggcccctacgacctactatgcctaagggtttctactttgaaactcagattctatcctggttatgatggcattcactccccagactgcttggctatcacagctgctggtatagccgtggccctctctgaaattccaaataaacaaacaattgctggagtaagaattggcctaattaacaaccagtttattgttaacccaactactgaacagatggagaattcagagttagatttgatgatggctgggactgatagtgccattttgatgattgagggctactgtgattttctgactgaggagaagctgcttgaagctgtcgaagctgggcaggtggcaattagagaaatctgcaaagcaattgatgttcttgttcagagctgtgggaagaagaaaatggtcgatgctatcagcctaccgccgcctgaactctacaggcatgttgaagatatttctggagatgagttgatgaaggcattacaaataaaaggaaagattcccagaagaaaagctctttcagcattggaagagaaagttataagtatactttctgagcagggctatgtttccaaagatggcttatctggaggcactgaaagtttggctgatattgttgaggatgaggatgaggatgaaattgtagatgacggagaagtagatgaaggcgatgttcacatcaagccggtttcaaggaagccccttcagctatttgcagaagttgatgtgaagctagtcttcaaggaaatttcatctaaatatttacgaaagcgcattgtagagcgaggaaagcgaagtgatggacggagtccttgggaacttcggcccatcaattctcaatgtggcttacttccaagagctcatggtagtgctctgttcacgaggggagaaacacagtcactggctgtggtcactttaggtggctatcagatggcacaacgaattgacaaccttgttgatacggaggactcaaaaagcttctatcttcagtactcatttcctccatcatgtgttggcgaagttggtcgaattggagcacctagccggagagagattggacatgggatgcttgcagaaagggcactggagccaattttacctctggaagaggattttccgtacactattcgtgttgagagtactatcactgaaagtaatggttcatccagcatggcttctgtttgtggaggttgtttagcacttcaagatgctggggttcctataaagtttcctgttgctggaattgcaatgggcctggtccttgatacacaagaatttggtggagatggtagcccacttatactttctgatattactggagctgaagatgcctctggtgacatggatttgaagattgctggtaatgaaagtggcatatctgcatttcagatggacattaaggtagttgggataactctacctgtgatggagaaagcactccttcaagctagggaagggagacaacatattctaaatgaaatgttgaaatcttcacctccaccctcaaaagcactatctccacacgctccattaattcatgttatgaaggtcaaacctaacaaggtgaatttaataattggttctggtggaaagacaataaaaagcataattgaggagactggggtagatgctattgatactggagatgatggcacggtaaaaattactgcaagagacctaacaagcttagagaagtcaaaaattataatagctaatcttaccatggttccaaaagtaggagaaatatacagggactgtgagatcaagtcaatagctccatatggtgcttttgttgaaattgctccagggcgtgagggtttatgtcatatcagtgagttaagttcgggctggttggccaaggctgaggatgcttttaaagttggagatcgcatagacgtcaagcttattgagataaacgataagggtcaacttcggctaagctctcgagctttgcttccagacgtggattccgaatccaacataggttcaacaaaagaaaaggtgccacaaaaagatgatgtcataaaaatgacaacaaaaagaccaaggcgcaagaaacagccagagccgtctggagctgaaaatgccacaacaaaggctcttgcgaaaagcgctgctgctccagctggttcaaagggcagtgaagcgtagtaggatgtggacagcttggtgccttaatcagacgattgactggccaagctagggatacatccttcaaccgactatatgatggtcatatggcatgagaaagagttcagacatgagggcacaactgtctaaacaggaatataatggagaagaattggttgatcgacctcgatgttagacaggtagagtgtctggttgatgcgttacacaaggcgtgcgcctatccagcagtaatggtgcccaggactggatcgtcgccatggttagcggaacagatcccgtaaccaccatggaaacttgattgtaatcgccagaagtgttgtatcgttctgtactaactacatattcttgccaatccggccaatgcaaactactgcatgaagtaattagccaaaaaaaatttggctcagcctgggaataaccggaacatggaacaaataatttgacagtcagaggcaatgcaactcctatctcacatttacaagccaaatccaactcctatcagttaactgtcccgaccggcaatacaaaatctaccaaaagagaaacagaaactaggatctggggtagctttccaccgacacatactagtttccatgctagcaaaatctaccaagaaggctgttctcaacactttaacgctcaagtctgagcagcgagatgtctttgtactctgtcaactgttccacgccaactcgttaccgttgagcagcccgctccccaccaattcattagcgatgagatgctccaggtcatcaaattcatggaagggcttggccttcaaagtcgcggcattgcctccagcaggagcagcagcaacagccagattgctgcttaccgacttgaaattgttacttctggctgtgctgttattgatcacactagtaggcccggtatagatggtggcagcaccatttacggccatgcgctgtccctgatctcctgtaccagcactgttggtgttagcacctcctgatgtgataccactgcttatgttagggatatctagaggtggttgctgtggcagtgtgtgccttttagcgttcttaacttcttgaatcagctgatttaaagcatgctgctgatactgtgggctcacgcccaggccccggtgattgttttgcaaccccaagccctggaggttgttgtgctggggcattgggtgctgaaatgac

SEQ ID NO: 8935 - DNA, 3975 bp, Zea Mays
agagagcgagaaagtgataaggttcgtgggtgcgtcgccactcgccaccctcacgtctcccgagtggactcccgcctccttccttccgtcccttcccggctcaccgcccttcgcctcaccccgcgcctcctccctgtcccccctccagaactgtcccccaccgcctcgagatgctcgcggcccccgccgcgctccacctcctcctcccggcgccgccgctgccgcccccgcactaccaccaccaccacgtcgccttccccgcgccgccgctccacgcctcgctcccgtgctcacgccgcccgcggaggaggccgcccaggcatggggtcgccagggcctccgccgcaatggcggaggaggccagcagctccggaccgaccaagttctccgtgaggatccccgtcggcgaccgcgagatattggtggaaacgggccacattgggaggcaagcgagcgcttctgtaatggtcactgatggcgaaacgattctctactgttctgtctgtctgtcggatactccaaacgacccttctgactttttccctttatcggttcactatcaagagcgcctttcagctgctggaagaactagtggcggtttcttcaaacgagaaggcaagacaaaagaccatgaggttttggtttgcagattgatagacaggcccctacgacctactatgcctaagggtttctactttgaaactcagattctatcctgggtcttcagttatgatggcattcactccccagactgcttggctatcacagctgctgggccctctctgaaattccaaataaacaaacaattgctggagtaagaattggcctaattaacaaccagtttattgttaacccaactactgaacagatggagaattcagagttagatttgatgatggctgggactgatagtgccattttgatgattgagggctactgtgattttctgactgaggagaagctgcttgaagctgtcgaagctgggcaggtggcaattagagaaatctgcaaagcaattgatgttcttgttcagagctgtgggaagaagaaaatggtcgatgctatcagcctaccgccgcctgaactctacaggcatgttgaagatatttctggagatgagttgatgaaggcattacaaataaaaggaaagattcccagaagaaaagctctttcagcattggaagagaaagttataagtatactttctgagcagggctatgtttccaaagatggcttatctggaggcactgaaagtttggctgatattgttgaggatgaggatgaggatgaaattgtagatgacggagaagtagatgaaggcgatgttcacatcaagccggtttcaaggaagccccttcagctatttgcagaagttgatgtgaagctagtcttcaaggaaatttcatctaaatatttacgaaagcgcattgtagagcgaggaaagcgaagtgatggacggagtccttgggaacttcggcccatcaattctcaatgtggcttacttccaagagctcatggtagtgctctgttcacgaggggagaaacacagtcactggctgtggtcactttaggtggctatcagatggcacaacgaattgacaaccttgttgatacggaggactcaaaaagcttctatcttcagtactcatttcctccatcatgtgttggcgaagttggtcgaattggagcacctagccggagagagattggacatgggatgcttgcagaaagggcactggagccaattttacctctggaagaggattttccgtacactattcgtgttgagagtactatcactgaaagtaatggttcatccagcatggcttctgtttgtggaggttgtttagcacttcaagatgctggggttcctataaagtttcctgttgctggaattgcaatgggcctggtccttgatacacaagaatttggtggagatggtagcccacttatactttctgatattactggagctgaagatgcctctggtgacatggatttgaagattgctggtaatgaaagtggcatatctgcatttcagatggacattaaggtagttgggataactctacctgtgatggagaaagcactccttcaagctagggaagggagacaacatattctaaatgaaatgttgaaatcttcacctccaccctcaaaagcactatctccacacgctccattaattcatgttatgaaggtcaaacctaacaaggtgaatttaataattggttctggtggaaagacaataaaaagcataattgaggagactggggtagatgctattgatactggagatgatggcacggtaaaaattactgcaagagacctaacaagcttagagaagtcaaaaattataatagctaatcttaccatggttccaaaagtaggagaaatatacagggactgtgagatcaagtcaatagctccatatggtgcttttgttgaaattgctccagggcgtgagggtttatgtcatatcagtgagttaagttcgggctggttggccaaggctgaggatgcttttaaagttggagatcgcatagacgtcaagcttattgagataaacgataagggtcaacttcggctaagctctcgagctttgcttccagacgtggattccgaatccaacataggttcaacaaaagaaaaggtgccacaaaaagatgatgtcataaaaatgacaacaaaaagaccaaggcgcaagaaacagccagagccgtctggagctgaaaatgccacaacaaaggctcttgcgaaaagcgctgctgctccagctggttcaaagggcagtgaagcgtagtaggatgtggacagcttggtgccttaatcagacgattgactggccaagctagggatacatccttcaaccgactatatgatggtcatatggcatgagaaagagttcagacatgagggcacaactgtctaaacaggaatataatggagaagaattggttgatcgacctcgatgttagacaggtagagtgtctggttgatgcgttacacaaggcgtgcgcctatccagcagtaatggtgcccaggactggatcgtcgccatggttagcggaacagatcccgtaaccaccatggaaacttgattgtaatcgccagaagtgttgtatcgttctgtactaactacatattcttgccaatccggccaatgcaaactactgcatgaagtaattagccaaaaaaaatttggctcagcctgggaataaccggaacatggaacaaataatttgacagtcagaggcaatgcaactcctatctcacatttacaagccaaatccaactcctatcagttaactgtcccgaccggcaatacaaaatctaccaaaagagaaacagaaactaggatctggggtagctttccaccgacacatactagtttccatgctagcaaaatctaccaagaaggctgttctcaacactttaacgctcaagtctgagcagcgagatgtctttgtactctgtcaactgttccacgccaactcgttaccgttgagcagcccgctccccaccaattcattagcgatgagatgctccaggtcatcaaattcatggaagggcttggccttcaaagtcgcggcattgcctccagcaggagcagcagcaacagccagattgctgcttaccgacttgaaattgttacttctggctgtgctgttattgatcacactagtaggcccggtatagatggtggcagcaccatttacggccatgcgctgtccctgatctcctgtaccagcactgttggtgttagcacctcctgatgtgataccactgcttatgttagggatatctagaggtggttgctgtggcagtgtgtgccttttagcgttcttaacttcttgaatcagctgatttaaagcatgctgctgatactgtgggctcacgcccaggccccggtgattgttttgcaaccccaagccctggaggttgttgtgctggggcattgggtgctgaaatgac

SEQ ID NO: 8936 - DNA, 3985 bp, Zea Mays
gcgagaaagtgataaggttcgtgggtgcgtcgccactcgccaccctcacgtctcccgagtggactcccgcctccttccttccgtcccttcccggctcaccgcccttcgcctcaccccgcgcctcctccctgtcccccctccagaactgtcccccaccgcctcgagatgctcgcggcccccgccgcgctccacctcctcctcccggcgccgccgctgccgcccccgcactaccaccaccaccacgtcgccttccccgcgccgccgctccacgcctcgctcccgtgctcacgccgcccgcggaggaggccgcccaggcatggggtcgccagggcctccgccgcaatggcggaggaggccagcagctccggaccgaccaagttctccgtgaggatccccgtcggcgaccgcgagatattggtggaaacgggccacattgggaggcaagcgagcgcttctgtaatggtcactgatggcgaaacgattctctactgttctgtctgtctgtcggatactccaaacgacccttctgactttttccctttatcggttcactatcaagagcgcctttcagctgctggaagaactagtggcggtttcttcaaacgagaaggcaagacaaaagaccatgaggttttggtttgcagattgatagacaggcccctacgacctactatgcctaagggtttctactttgaaactcagattctatcctgggtcttcagttatgatggcattcactccccagactgcttggctatcacagctgctggtatagccgtggccctctctgaaattccaaataaacaaacaattgctggagtaagaattggcctaattaacaaccagtttattgttaacccaactactgaacagatggagaattcagagttagatttgatgatggctgggactgatagtgccattttgatgattgagggctactgtgattttctgactgaggagaagctgcttgaagctgtcgaagctgggcaggtggcaattagagaaatctgcaaagcaattgatgttcttgttcagagctgtgggaagaagaaaatggtcgatgctatcagcctaccgccgcctgaactctacaggcatgttgaagatatttctggagatgagttgatgaaggcattacaaataaaaggaaagattcccagaagaaaagctctttcagcattggaagagaaagttataagtatactttctgagcagggctatgtttccaaagatggcttatctggaggcactgaaagtttggctgatattgttgaggatgaggatgaggatgaaattgtagatgacggagaagtagatgaaggcgatgttcacatcaagccggtttcaaggaagccccttcagctatttgcagaagttgatgtgaagctagtcttcaaggaaatttcatctaaatatttacgaaagcgcattgtagagcgaggaaagcgaagtgatggacggagtccttgggaacttcggcccatcaattctcaatgtggcttacttccaagagctcatggtagtgctctgttcacgaggggagaaacacaggtaagtcactggctgtggtcactttaggtggctatcagatggcacaacgaattgacaaccttgttgatacggaggactcaaaaagcttctatcttcagtactcatttcctccatcatgtgttggcgaagttggtcgaattggagcacctagccggagagagattggacatgggatgcttgcagaaagggcactggagccaattttacctctggaagaggattttccgtacactattcgtgttgagagtactatcactgaaagtaatggttcatccagcatggcttctgtttgtggaggttgtttagcacttcaagatgctggggttcctataaagtttcctgttgctggaattgcaatgggcctggtccttgatacacaagaatttggtggagatggtagcccacttatactttctgatattactggagctgaagatgcctctggtgacatggatttgaagattgctggtaatgaaagtggcatatctgcatttcagatggacattaaggtagttgggataactctacctgtgatggagaaagcactccttcaagctagggaagggagacaacatattctaaatgaaatgttgaaatcttcacctccaccctcaaaagcactatctccacacgctccattaattcatgttatgaaggtcaaacctaacaaggtgaatttaataattggttctggtggaaagacaataaaaagcataattgaggagactggggtagatgctattgatactggagatgatggcacggtaaaaattactgcaagagacctaacaagcttagagaagtcaaaaattataatagctaatcttaccatggttccaaaagtaggagaaatatacagggactgtgagatcaagtcaatagctccatatggtgcttttgttgaaattgctccagggcgtgagggtttatgtcatatcagtgagttaagttcgggctggttggccaaggctgaggatgcttttaaagttggagatcgcatagacgtcaagcttattgagataaacgataagggtcaacttcggctaagctctcgagctttgcttccagacgtggattccgaatccaacataggttcaacaaaagaaaaggtgccacaaaaagatgatgtcataaaaatgacaacaaaaagaccaaggcgcaagaaacagccagagccgtctggagctgaaaatgccacaacaaaggctcttgcgaaaagcgctgctgctccagctggttcaaagggcagtgaagcgtagtaggatgtggacagcttggtgccttaatcagacgattgactggccaagctagggatacatccttcaaccgactatatgatggtcatatggcatgagaaagagttcagacatgagggcacaactgtctaaacaggaatataatggagaagaattggttgatcgacctcgatgttagacaggtagagtgtctggttgatgcgttacacaaggcgtgcgcctatccagcagtaatggtgcccaggactggatcgtcgccatggttagcggaacagatcccgtaaccaccatggaaacttgattgtaatcgccagaagtgttgtatcgttctgtactaactacatattcttgccaatccggccaatgcaaactactgcatgaagtaattagccaaaaaaaatttggctcagcctgggaataaccggaacatggaacaaataatttgacagtcagaggcaatgcaactcctatctcacatttacaagccaaatccaactcctatcagttaactgtcccgaccggcaatacaaaatctaccaaaagagaaacagaaactaggatctggggtagctttccaccgacacatactagtttccatgctagcaaaatctaccaagaaggctgttctcaacactttaacgctcaagtctgagcagcgagatgtctttgtactctgtcaactgttccacgccaactcgttaccgttgagcagcccgctccccaccaattcattagcgatgagatgctccaggtcatcaaattcatggaagggcttggccttcaaagtcgcggcattgcctccagcaggagcagcagcaacagccagattgctgcttaccgacttgaaattgttacttctggctgtgctgttattgatcacactagtaggcccggtatagatggtggcagcaccatttacggccatgcgctgtccctgatctcctgtaccagcactgttggtgttagcacctcctgatgtgataccactgcttatgttagggatatctagaggtggttgctgtggcagtgtgtgccttttagcgttcttaacttcttgaatcagctgatttaaagcatgctgctgatactgtgggctcacgcccaggccccggtgattgttttgcaaccccaagccctggaggttgttgtgctggggcattgggtgctgaaatgac

SEQ ID NO: 8937 - DNA, 1974 bp, Zea Mays
taaccaacccccaccgccaaagccaaaccattccccccgttcctgattccaattccaaccagcccatcccccttcgaccatacacacagagcggaggcgaaggcaagagcaaacagagtagccgccgccgccgccgtcgtcgtcgtgtgttgagcagggttttgtttttacggcttagctttgagcagcagagatgttgcgagcgctggcggcgaggtgctgcggccactggccgccgggcgccgcggcggcggacgggatgctgtggcaggcggagctgcggccgcacgcggcgggggagttctcgatggccgcggcgcaggccaacctggccatggaggaccaggcgcaggtgctggcgtccccggccgccacgctcgtcggcgtctacgacggccacggcggggccgacgcatcccggttccttcgctcccggctcttcctgcatgtccaacgcgtcgtgcaggagcaggggggcatgagcgccgaggcgattcggagcgcgttcggcgcggccgaggaggagttccataggcaggtgaggcaggagtggaggagccggccgcggctcgctgccgtgggctcctgctgcctgctcggggccatctccggggacacgctgtacgtggccaacgccggcgattcccgcgccgtgctcggccgtcgagtgcccggcggcggggcggccgtcgccgagcggctctccgccgagcacaacgcggcgtgcgaggaggtgcggcgcgagctcgccgcgctcaaccccgacgacgcgcagatcgttgtgcacgccaggggagcctggagggtcaaggggataattcaggtgtcgagatccattggcgatttttatctcaagaaaccggagtatagcctggaccccttgttccggcaagttggggcccctattgcgctgaagaggccagctctcagcgctgaaccatcagttcaagtacgcaagctgaaaccaaacgacctgttcctgatatttgcttcagatggcctttgggagcacctcagcgacgatgctgcggtgcagattgtcttcaagaatccgagaactccagcagactggtgaaggctgccttgaaggaagcgaccaggaagagggaggtcaggtaccgtgatctgaggacgatcgagagaggggtgaggcggcatttccacgacgacatcagcgtcgtcgtggtctacctcgatggccaccgcgagcgccgccacaccagggtcgttgactcgagcagcaactgcaccagtgcgcccgtcgacatccactcctccaactcccgctagtttccggagccccttgcaacgcgagctgaactctgggtgggaggtgaggtgggtgcagccgtagccatcggaatcggaacaagtcgatatgtacataggtaggagtgggtgcgtggcatcttgatgccggagaagatcatttggtctcgaaactacttagcacaagtggttaatgactgcatttttcttgtttctttttgtctgaaaccagcagcaagcccgtccattggatcggacttatttttaaggtaagaaatagttgatgacgaactggaggttggttaatggagaccaaagaatatatgctctgctcagtgctcaggatcatagaatttaggttccggcctgagaatatatactctttgcaacggatgagatgctcttatttcatttagcatcgtttttttttgtcggaaacttctttatgtatgcagtgccaagattaccactacctggaatcgttgaaactctgcatggttcgtgctgtggaacggattgctcaaatatcttttcgtactgtttagggaacggactgttcagattgttcgctgcgttattaccctttccgtttggataatgatgtataagacacgttcggttgagttttgatttctaaaaaaactgctacgagctttgagttgtgaatgaaaaagttagtgtagattgtggtttgtgaaaaaaaac

SEQ ID NO: 8938 - DNA, 2274 bp, Zea Mays
ctcgtctttaagccatcgcctctgcgtcaggccgtcgctgaccgcccccgcccgcgaccgctgaggcgctgacgcctacctgcaatggcgaagccctcgcgccagaacctgacccatgcctccgtcacatccctgcgccgcttcggcggacagtcgtcgctgccgccttcgggcgcgtcgccggcgttacggctcgcggcggcggcgctcctcctcgcggccgcagtggcgctgccctgcgccgtgctataccgcgccaccgtggagactatggagcccatccacgtcccgcgtgtgcacaggcccttattgcctgcgccgccgcttcctccggttcaggtccccgaggatgacagcgacttcgatcccttccccacaggcgatctggacagcgaagatctcaaactagaactggttctgcaggaggcttccatggacaataagaccataatattgacgaccctcaacgctgcatgggcttcaccgggctcagttatagatcttttcattgatagttttcggcgtggtgttggtactagttcactcttgaggcatcttgtgatagtagcatttgattttaaggcatatgaacactgtgtcaagatccatccctactgttatgctcttccaaccaaggatgttgatttttctgaagagaagaggtttcagacaactgggtatctggaaatgatgtggaaaaggcttgatttcttgcggctagtgcttgaaaaaggttacagctttgttttctcggatgctgatatcgtgtggttccgcaatccatttccccacttctatactgatggagactttcagattgcatgtgatcactacgtagggaatgcaactgacttgaggaacatagccaatggagggttcaactatgtgaagtcaaacgaccaaagcatagagttctacaagttttggtattcttcccgatttagatatcctgggtaccatgatcaggatgtatttaattttataaagcatgatcgttacactacggacattggtctgacaattaagttcttaagtactacctacttcggcggcatatgtgagccaagcagagatttaaacaaagtttgcaccatgcatgcaaactgttgtattggactgcagagcaaaattcatgacctaagaatcatgatggaagactggagtaactatatgtcgatgccaccgagcttaaaacaattcagggcactgtcgtggagagtaccacaaaattgcagtctttcgttactaagcctgtgaggattgtgaagtggctcatcaggacaagcaattcaatactgtaaaacatgtaaactttcgaacatatgcttttggaagaaacatttcaaaggaacagacatcaagtattaactctgccaattcgatggcattagctaatggtgccaattacgtgccattacctacctggatcagcaggggccactcacgcattgttgagaaggatttcaaggtttcagactggaggggatcaagggtgttagggaggaaccatctctgaggattttgtctgcacagctaggaaggatgaactgcagtgacgaggatgagaataggtgtgtcacaagaggcaagaatcagaccaccaggagtggatgcacagtgaagtcatcccaggcaaaaaggcccacccggaacttcaatatcaaagttgaccacacaatcggttggttcggtaaatctgtagaacacacttgatagaaaattcgtttgggtccacatcacctaagcgcacactttaaacacacagcaaaggaccaaccactcctagctagtaatgtcatcggcacccagtgtgtgctagttttacatagtgtgaataactgaatgtttccaggcatgatgaggaagacccacctcaggaatcttgcagtagtcccgtgcactgagctgtagcgacatgacgttgtcacgcagaatggagcaagcgagtgcagagtggccacttgacgtcgtcacgcagaagactgttgcagtcctctggagccattttccaggcgagcagagcagtggttttctcgtactgattgtctgagaaagaagtggatacgccaaaagcgcagttgctcaacttactcgaattactgaagtgggctaactaatcgacgtcggctatagaaagagaggggagggggggaggggaaagaaaggctaatcgacttccccagtcaggctttgtttagcggatcctgtgggttggagcctgaattgctatcacctttgttttcagcgcaggctgccctgccccgcccgtcccat

SEQ ID NO: 8939 - DNA, 3063 bp, Zea Mays
gcaccaccaccaccgtgccgcgagcgaagtgacgtcgcgttcacttccctcataaaatctcgccccccactctctctctacccgagcccagcagtaatttttttttggggaaggtgaagcgagaggagcaggaggagagaaaggggaacgaggccggccgcgaatcggaggggaattcggggggcggggctcggtccggccggaaattcgcgcgattcgggcgcgggcgccgcggatgtgaagatctggtgctcggcgggatgacttcttcggcggcggccgcggctgctgccgcccaggtggcgggaggaggtggaggcgtcgaccaaccaggtggctgagcagcacatgcaattttacgatctcccgtggaagatcctgtgtgaggtcatgaacgttgaattgaaggctgagccagacaatgatgaggtttatgcccagctcactctgctacctgaatcaaagcagccagaggagaatggctctagtgaggagatgcctgcttcacctcctgctgcacttgcaaggccacgcgtgcactccttctgcaagacattgacagcctctgataccagcactcatggtggattctcggtgctgcggcgccatgcagatgagtgtcttccgccactggatatgacccgtcaacctccaacacaagagcttgtagccaaggacctgcatggtgtggaatggcgctttcgccacatattcagaggtcaaccacgaaggcatcttttgcagagtggctggagtgtttttgttagtgccaaacgtcttgttgctggcgatgccttcatctttctaagaggtgatagtggggagcttcgtgtaggagtcaggcgtgccatgaggcagcaagcaaatgttccgtcttcagtaatatcaagccacagcatgcatcttggtgttcttgctacagcatggcatgctgttaacactgggaccatgtttactgtctactacaagcctaggacaagtccagctgagtttgttgttccctgtgatcgctatatggaatcactgaaacgaaattaccctatagggatgagatttaaaatgaggtttgaaggtgaagaggctccagaacaaaggttcactgggaccattgttggaaatgtggatcctgatcaagctggatgggctgaatctaaatggcgttacctcaaggtgaggtgggatgaagcttcctccattccacgtcctgaaagggtttctccctggcaaatagaacctgcagtcagccctccccctatcaacccacttccagtgcacagacccaagagacctcgctctaatgctgtagcttctctgcccgagtcttcagctccaacaaaagaagctgctccaaaggtcacattagagactcaacaacatgccctgcaaaggcccttgcagacccaggataatgtggccccgaaaagtgtttttggtgataacagtgaattggactctgctcataagtcctccctgcgaccgtcaggttttgatctggacaagagcaccattggcatgcagaggaagctgggttcagatatttggatgcgaatgaacagacctgatggttacagtgaaatgttatcgggatatcaaccacctaatgaaggtgcacggaattcgcagggtttctgttctttacctgatcagattgccgctggacgtcctaatttctggcacactgtaaacgctcattaccaagaccagcaaggcaatcacaatctgttccctggttcatggtccatgatgccttcaagtactggctttgggatgaacagacagagctatccaatgatccaggaagtcggtgggatgtctcagagttgtacaaacaccaagtttgggaatggagtttatgctgcactacctggccgaggcattgatcgatacccatctggatggtttgggcacacgacacccggtggtcgcgtggacgatgcccagccacgcgtgattaagcctcaacctttggtccttgctcacggcgaagctctgaaaatgaagggcaactcgtgcaagctttttggaatccatctcgacagcccagccaaatctgaacctttgaagtctccgccaagcgttgccacaccggcagctgagaagtggatggcagacggaatcgacgcagacaaaagccctgagccgcacaagacgccaaagcaactcggtgctacacaggtggatcctgtcccagagagatgcccacaagcttcaaggggcacacagtgcaaatcacaaggcgggtcgactaggagctgcaagaaggtccacaagcaaggaatggcgctgggcaggtccgtggaccttaccaagttcaacggctacacggagctggtggcggagctggacgagatgttcgacttcaacggcgagctgaaaggctgtagcaaggagtggatggtcgtgtacaccgactacgaaggcgacatgatgctggtcggggacgacccctggaatgagttctgcagcatggtgcacaagatcttcgtgtacacgagggaggaggtccagcgcatgaacccgggcgccctgaactcgaggccggaggacagcggcctcgccaattcgacggagaggggctccgcatctactgctgctgctagagaggcacccggctaccagtccgcctcgtcgcttaactccgacaactgctgatgccttggcagctagctggtcgtcccaagtagtagagaacaaggcaaatgtatccatagatctccttgtagcggagcttaatgcctttttttcccctttctaatatgcattggatgagcccgtagcgcaccgtagtagtatctaaagctggtgttctgagttggttggaccttcctgcagttttggtttctccttctgatgtggcaagttttagctggtcgcacctacctaatgtatgcttagcaaacgaagtcccactaagcgctgtacataactgcccctccctgcatcaactctaatatatcatctgcttaatcgtcacccctgggcccccgtgctggttgctcaagatcccagctgcttgttgtggcgcttggtttggttcgttgtcggccgtggctcatgtttgtt

SEQ ID NO: 8940 - DNA, 1749 bp, Zea Mays
cgagccagggcgtgcgagtgcgaactgcgaacgcagcagcagcagctcacgcgcgcacggcacaccagtgagtgacaccacctctcgcctcagcgccggcccccctataaataatggcgccactctcccctacccccgcctccgcctctgctcccgtgtcctcctcccctcgttccctcgtcccggacgcctccgccgcgccgatgcgccccgcctcgccgccgcaggagctccccgccgccgggggcgagatccaggcggcgctggcccctgccaatgcctccaccgcgggcgcccgcggaggcggaggctccttcacggcgctgctgggactccccacctcgcaggccatggagctgctcctcccccgcacgacgccccccgccctagccacagcgcccgcgccaaccttcccctccgacccgcacctcgtggaccgcgccgcgcgcttatccacgttcgcgcccccgtccccgtccccatcctccacgtccccggcccggcccctccccgccgccgctaacgccggcaagcgcaaggccgaccccgtcgaccgtgcctccaaggcggcgaagaaggggaagacggcggaggagaagctcgcgggcggcgacggcgacgacgagaagccggcgtacgtgcacgtgcgggccaggcggggccaggccacggacagccacagcctcgccgagcgggcgagacgcgagaagatcaatgcgaggatggagctgctcaaggagctggtccccggctgcagtaaggtatcaggaacagcattggtgctagatgagatcatcaatcatgttcagtctctccaaaggcaagttgagtacttgtcaatgaggctcgcagctgtaaacccaagggtcgattttggtgggctagacagctttctgaccacagagtgtggaaggatagcaggcttcaactgcaagaacggaatcgacttggagcaggtaacctggccagaaatgggtgttcatggagcaaggcagctgatgcaacttcaacagcagttctggcatggcgatttaacacatccacaccaagtggcttcacagtgggaaaagcgtggggatggccatcctcccgtctttagcaactccagtccctctctcttcggctatgatctaacaagctctggagcccagcaaaccccggcgagcaagctaaagacggagctttgagcgacgatggatggtagatagcattgtcaggagagcaggctgaacatatgcggtgggggcgcagcagcgacatgatttcagcaagttgaccaggtcaggctacaaacgggctgggaatgttgatgtgaagcgcatggagaccaacattttcagagacagagaggatgtacatatagcgatagagaatactattggtgttgagctgaagacgggaataccatagttgtattgtagagatgggcacgccctgctgctatcgctgaagagatgggagggcgagcgatactccggtctagttgctggtattcttggtgtatttcttactataatggcccaatcttaaggttatatgagcagcaatttttatgaaccaaaacccaaaaaaaaccatcatgggtcatcatatacccttctcgaatgcatttcaacaaaacatgaatgtagcacagtataactacatgtaacacacgtgcttgttacaatcctactgttccaagccattctaggttttctttaaggcatacggattttgttacatatttatatatggcttttgttatgt

SEQ ID NO: 8941 - DNA, 1352 bp, Zea Mays
ctgcttaccttttgttattacgggcatatatgattcatggaatgcttggcttatggtgacagtgttgccagagtacccagaggtttacaacatagtaaacaagctgagggtggagtcagtggttgctgttgaaggcgtgatccggccacgcccggtggatgccatcaatgcagatatgaggactgggactatagaggttgtggcacatcatgttctagtgctgaactcagtaactcggtcactgccgtttccagttacaacttctgatactgtaaaagagaagtttccagaagaaattagattgaggtttagagtgttggacttgcgtcgtccacaaatgcagtcaaacttgcggttgcgccataatgttgttaaactcatacgccgctacttggaggatgaacatgaatttgttgaggtagattgagactcctgttttgtccaagtctacacctgaaggtgctcgggactatcttgtaccatcgagagttcagccaggaacattctacgctctccctcaaagccctcagctgttcaagcaaatgttgatggtttctggttttgaaaaatattatcagattgcaaggtgcttccgagatgaagatctgcgtgcggacaggcaaccagagtttacacaacttgatatggaggttgcttttacatctatggaggatatgttgaagttgaatgaagatttaatgagacatgtttttcaagcggtaggagatatcaagctgccaaacccttttccaaggttaacatatgcagaggcaatggatcgctatgggacagataggcctgatctccggttcgattgggagctgaaagatgttagtgatgtatttttggggagtagcttcaaggtttttgctgatacattggaaagtggaggcgtaataaaggcactgtgtgttcctggtggtgccactgttttttcaaacactgacctgaagaaaggaactgtttacactgaagcttccaaagctggagccaagggcttgcctttcctcaaagttatggagaatggggagcttgaaggaatcggtccactgttatcgagtctgaaacctgaaaagaaagaccagctcatggaacttctggacacaaagacgggtgaccttatcctgtttgcactgggtgaacaatcatcagctaatcagattcttggacggttaagattatttattgctcataagctagaggtgatagacacgtctgcacattcagttctttgggtgacagattttccaatgtttcaatggaacagtgatgagcaaagatacgaggttcaagaaaacacgattaggcgtgcgattaagcgctgagcagagggtcagcgcaccgcttaccta

SEQ ID NO: 8942 - DNA, 1435 bp, Zea Mays
gccgcgcgcacgccgggctcaccttcgtcacccttcgagaccgctccggcatggtgcaggttgtggcacatcatgttctagtgctgaactcagtaactcggtcactgccgtttccagttacaacttctgatactgtaaaagagaagtttccagaagaaattagattgaggtttagagtgttggacttgcgtcgtccacaaatgcagtcaaacttgcggttgcgccataatgttgttaaactcatacgccgctacttggaggatgaacatgaatttgttgagattgagactcctgttttgtccaagtctacacctgaaggtgctcgggactatcttgtaccatcgagagttcagccaggaacattctacgctctccctcaaagccctcagctgttcaagcaaatgttgatggtttctggttttgaaaaatattatcagattgcaaggtgcttccgagatgaagatctgcgtgcggacaggcaaccagagtttacacaacttgatatggaggttgcttttacatctatggaggatatgttgaagttgaatgaagatttaatgagacatgtttttcaagcggtaggagatatcaagctgccaaacccttttccaaggttaacatatgcagaggcaatggatcgctatgggacagataggcctgatctccggttcgattgggagctgaaagatgttagtgatgtatttttggggagtagcttcaaggtttttgctgatacattggaaagtggaggcgtaataaaggcactgtgtgttcctggtggtgccactgttttttcaaacactgacctgaagaaaggaactgtttacactgaagcttccaaagctggagccaagggcttgcctttcctcaaagttatggagaatggggagcttgaaggaatcggtccactgttatcgagtctgaaacctgaaaagaaagaccagctcatggaacttctggacacaaagacgggtgaccttatcctgtttgcactgggtgaacaatcatcagctaatcagattcttggacggttaagattatttattgctcataagctagaggtgatagacacgtctgcacattcagttctttgggtgacagattttccaatgtttcaatggaacagtgatgagcaaagatacgagctttttcaccaccctagcgcgcgctcagcgcgtagcgctttcttgaaccttggtttatgatcacattgttttagagatgtttacacttgctatttttaatgactgctattttactgtgttgacactttgcattacaccataaacagaacttggaagagttgattatcacattcaaccaccagaatacccaatattattggatttagtattcggaatctgtaaatgatatgaaaatggaaactgtgtagctttgctagaaattagagggaaattatggccaatacactgag

SEQ ID NO: 8943 - DNA, 1509 bp, Zea Mays
gcgcgcacgccgggctcaccttcgtcacccttcgagaccgctccggcatggtgcaggtgacagtgttgccagagtacccagaggtttacaacatagtaaacaagctgagggtggagtcagtggttgctgttgaaggcgtgatccggccacgcccggtggatgccatcaatgcagatatgaggactgggactatagaggttgtggcacatcatgttctagtgctgaactcagtaactcggtcactgccgtttccagttacaacttctgatactgtaaaagagaagtttccagaagaaattagattgaggtttagagtgttggacttgcgtcgtccacaaatgcagtcaaacttgcggttgcgccataatgttgttaaactcatacgccgctacttggaggatgaacatgaatttgttgagattgagactcctgttttgtccaagtctacacctgaaggtgctcgggactatcttgtaccatcgagagttcagccaggaacattctacgctctccctcaaagccctcagctgttcaagcaaatgttgatggtttctggttttgaaaaatattatcagattgcaaggtgcttccgagatgaagatctgcgtgcggacaggcaaccagagtttacacaacttgatatggagattggagggggaagtttgagaatctacaaaagtgatgtacaacaaagaatttttgagatcattggtatctcgcctgaacaggcagaggagaaatttggctaccttttagaatgcttcgatatgggtgctcctccacatggaggcattgcctatggattggatcggttggtgatgcttttggcgggtgagagctcgatccgagatgtgattgctttccccaagaccacgactgctcagtgtgcactcaccaaagcaccatcagctgtagaaccacagcaactgaaggatctcgccttccccaaacctacttcgtgagacgctgttcaagtgttcatgacaaaaattccgtgctctcaaggacagctatagtttgcttctagttttcgagtgtattggcctattctatttttgcatagtatagaatgcgcagtttttggaccgtaataaatttatagaagatgtttaacacgccaaagttctggaagagcattgttttaattttgccgtagcgaaaatcataagtagtgctcagaagattgggaaggagtaggcccggtttatcttgttcattcatgattccccttgtggagtgaagtggaatgctaaagatagaaaagtgttccgtaggatctcgtcttagcccattgacaaaactagtccaagaaacccagattgctaagtctcgagtatgtcaatcaagccctaatgtttccattccgtcggaccaactagcctaactgcctaacctttcatagaatttatcatttatgcccaagggacaagaggttttgaactctctagtagttccaagaagtatgctcatttccttggatgtgtattcactaatgttgtgactggaagg

SEQ ID NO: 8944 - DNA, 1443 bp, Zea Mays
cagctgctctcaacctctctcgatttggtgggaggagcagtggagcatacgacctagcaggctacaggccagacggccaacgaggcggcgcggagcagccgcttccagcacgaccacgacgcttgcccggatgctagcgcagtccctccggccagtgacggtctcgactaggtgtgactttggcgtagccccgtctcccggcgaggctccgacgcgaacgcttccggcgtaggcgtggcacaacgatgacaagttcttggcgcatggatcacaacgcgcacacattggcagatcaaaaatactatatccaatttaaacataccgcataattgcgtagaggaaatcgaagcctgtcgcataggacagttcggctaggccgaagacatgccggcttgacggagagttgatgcagatctgatctcgcagtaacgtcgaggtagagcgtgctgataacgtgttaaccaaacaaaatcgcttgcatggactcatcctgattctaacgatactggctagactcataccggactggctagactcatactgcaaccaaacacatggatagagtacctacgtgtgtattgcttgatgtgaagttgtttttgattagtcataggtattgtagtgttcatgtctattataagattctagcatacgcgaaagagctagcatatgggtcgaggcactgaaatattttcctcgatcgccccaggccccagcagggcaacagctaagcccagaaaagtcctagtccgacccaccaacgcggctcttcccgcgccagcatgggcccaggaaaacaaccactacacataaaaccggcccacccatcgctagggttcgccccaccaaagcctccgcccccttcttccctgacaccctcgccgccgcgcacgcacgcacgcagggaaccagcgaagagagatgggcgtctacaccttcgtgtgccgcagcgccggcggcggcgagtggaccgccaagcagcactccggcgagatcgaggcgtccgccgccaccccctacgagctgcagcgccgcctcgtcgcctccgcctccgcggccgactccgcgtccggcgtccagtcgtccttctccatggtcacccccagctccgccgtcttccaggtgatcgtcggtggtggcgcgatgatggttagtggcggcggcggcggcggcgcgtccgccgccgcgtcgggtggtgctgcggccgaagctcccaaggaggagaagaaggaagaggagaaggaagagagcgacgacgacatgggattctccctgttcgactagagacagagttaagctgcgtgtgcatggttgctgttcggtcgtgtcgcgaaacgtgaagagctcaagcggcctttttgttccagtcccacatattctgagtcagctatcttgtatgctgctgctgtcctccagagcacagatggattggcagtagcggcc

SEQ ID NO: 8945 - DNA, 5014 bp, Zea Mays
ttagctgaaaatggccagaggtcggctgggtctcacctagtcacctgtcgcctgtcccgagccaattgtatatttaggactctaaatatagtgtttcgcaatattgctatccaaaagatttaattcgcaaaaaaaaagactataaatatgttataattgattatactaccatttactatataatcttccttttattacttctttccctgtattttgtacctaaggagaccaaattatcttgtgtgcgcgttctgtctccacgccgccatggacgactggccaccgtcttggccacgaccaccctataccctgtccaggccctcaggctcacccctgctgcactgtccgtcgggcttccatcgagctcggccctgtgcgcgctggccaaggccgcgccgaccgccactttaggcgagatcgcgttgggcgatgtaatgctggacagtggcgcctcgtccgcatcataagcccagcccagggacacgccggccatggaagttgtatcatcgtcccggtgtttcatgagtattacgtgaacattaagagttgtttgcatcctgcaagttacaaataccagctttttagttcctacgcatacaagctgcaacttgcaaatactagcttcctggtgttgcaattggcttcctgttggccagctgccagctgttgatcctatgagcgcggagagcgcagacgagtagtaagttcagttgtgccctataatttcatacgggtaaaaatagctaatcagggacaaaatacatgaaattagattagaaaagcaagacaatactctaaaatggtagtataattaagtagaagatgtttgtaatccttttttgcgacgtaaatctttcggatgacaatattgcaaagcgctatgtttagagtcccaaatatacatttatctcggctgtccctccgtcgcaattgcaatggcgccgtcgtaccccttctcgccgctcgcccacggcccactccacacacccgagtgtcccttcgccgagtgccgaccgagggtctccccgttgtcgccgatccagagagagagagagagagagagagagttgtagaggcggacaggcggcccacggccaagcctgggggaggacctccattgttgccgcattggcgtattgtgtctggttatcagactgagacgacagcgtgtgctttcatttatcaggctgacgcgaggcaccgagagtccgagaccgcgcgatggtggcgcaggcagacgcgggggagacgggtggcgtaggtgccgatggacgcggacgtcgtaacagggagagtgagcgtgggaaggagaggtggagtgtaccctgtgatgcgcgtgcggcggtgcgggtctcacgggggaggggttctaatttggggttggggcgaagatggggggatcttggttggttgcgcagtgtaccgcggcgtagaggcggaggcgcatcggacggatggacgctggagggctcggcttcctcgtcgcgggctcccggcgcgagttcgtcgtcctcaacgtcgacgatttctccaagcaaggatcttcacagggctgtccagactatatttgtcagatatgtggagatgacattgacatactccaggaagaaaatgagtatttcgtcgcatgtaatgattgtgcttttcctgtttgccgcacttgctatgagtacgagcgtcaggagggcacacaagtatgccctcggtgcaagacccggtacaaacgccacaaaggtagtcctcgagtccatggggatgaggaagaagaaggttctgatgacattgagagtgagtttgcttccagtatagctggacgatcaaatatagtgcatccataccgtgtctctgtggcagaaagctccatcaactcatgggacattgatagtgtcagtatcaccaacagtggagctagtgtccatttttatgaagagcatgttggaactccaacaaatcatcatgctcttgttgttcaccctaacaccggagaaattatgcgatataatcccttgcaaacaagaccaataaatcccaatagagacctagcattgtatggctatggatcagttgcctggaagaacagagttgagtggaaaacaaaacaacagaataaaatgcaaaaggtctcatctgatggtgaaggatctgatttaaatgattttgacagcgactgcgatattcccaggtgtgctgaaattatttgtgaaatttggttcgccttttcatggattttagaccaatttcccaagtggcacccaatacagagagaaacatacttagatcgattatcattaaggtacgagaaggaaggaaaaccaccagaacttgctcggatcgatgtatttgtcagtacagttgatccaatgaaggagcctcctttaattattgcaaacacagttttgtccatactggctgtggattatcctgttgataaagtttgctgctatgtgtcggatgatggtgctgcaatgcttacttttgaagcacttacagaaacatgtctatttgcacgaaaatgggttcccttctgtaagaaacacaaaatcgagcctcgggctcctgaatggtattttgctcagaaaattgactatctaagagaaaaggttcacccagagtttgttcgagaacgacgtgcaatgaagagagaatacgaagaatttaaggttcgcataaacacagtagttgctaattcatgcaaagttcccgagggaggatggtccctaccagaaggagctccatggcatggaaataatgttcgagaccatgccggaatggtccaggtcatcactggtaatgattgtgtcatggatgatgctggaaataagctgccttggttggtctatgtttcacgtgagaaaaggcctggacatgatcatcataaaaaagccggtgccttgaatgcattgctgcgaacttcagcaattctctccaacgcaccttttgtactgaatgtggattgtgaccactatatgaacaatagcaaagcgctacgggaggcaatgtgttttctgatggacccagtgttgggagagaagatttgttatgttcaatttccgcagagatttgatggcattgatcaacacgatagatattcaaaccacaatgttgtgttttttgatattaacatgaaaggtcttgatgggatccaaggaccaatatatgttgggactggttgtgttttcagaagacatgctttgtatggttatgatgccccaactgcaacaaaacctcctagcaagacatgtaactgctggccaaagtcatgctgcttgtgttgtggatcgaaaagaaaatgttccaaagctaagaaaaaacaagaacaccaaaagaaagtgaaatgcaggaatgcgtccaagcaagtgcatgctctcgaagtagctggaagagaaactgcacctcctgtgcctcgagaaaagtttgagaagagatttgggcagtcagatgcatttttggcttcaacattgcaagataatggtgaaggttgtcacttcgacatgctcaaaagccttgatgattgcatccatgtgctaagttgtgggtacgagaataagacacaatgggggaaagaggttggttggatttatggatctgtcactgaggatatcctcacgggcttcaagatgcactgccatggttggcgatctgtgtactgcatgcccaagagaccagcattcaaaggatctgcacctatcaatctcactgatcgtctccatcaagttctaagatgggcacttggctctgtggagatcttccttagcaagcactgcccaatatggtacgggtatcgatgtggtctgaaaccattggagaggttgtcatatatcaactgtgtcatctatccatggacatcaatcccgctgctaatctactgcgccctgccagcgttttgcctgttatcagggaagtttatggtgcctgagatgaatgtctattcgagcatattgttcatagctctatttgtctccatagcagctaccagcatcctagagatgcagtggggaggagtcggaatcgacgattggtggagaaacgagcagttctgggtcattggcggtgtctcctcgcacctctttgcgctgtgccaggggctcctcaaggttctcggtggcgtgagtaccaagttcagggtgactctgaagggaggcggcacggacgagttctcagagctgtacgagttcaagtggacctggctactggtccctccgatgacactgctcctgctaaacgtcgtcgcggtcttggccggcgtgtccaaggcggtgacggacgggtacgaagcctggggcccgctgctcggcaagctgttcttctccttctgggtcgtcctccacctccacccgttcctcaagggcgtgatcggcaggcaggacagggtgccgaccgttgtcgttgtgctgtcaatgctactggcatccatactctctctgttgtgggtccgggtgagccccttcgccaccaagttcgatggacctgttctggaggtctgtggcttggattgtgagtgagggaggtaggagaagatacagcttctttgcttagggaataggttttgagttaccccagtgctagagtagtgagagggttctattctttcgttagctattcaacgttttctatctgattagcgtaggttttagtgaagcggtgttttatgtttatgagcaggagggaaatagagaatggagaagatggtagtgctgctgctgactgttgtagatattgagacaggcacaatagagaatagagtgacacttggtatggccataaatcgctactttttccactagagcgaatagcattctccgtgtacatctgttgagagaactgtgctttttcacttgcaccatttcaaacttcgaatgtggccgtgcttcttcgatcgaaatttgggggaacttggtatcgatcttagtacattttgttttttgtgagggcagtcctagtgcttggggtcaagagtttcaagtataaagtgtcagcttggccgtctctagtttcttcatatgttgctgttgtg

SEQ ID NO: 8946 - DNA, 3508 bp, Zea Mays
caaacgtccaaaccttaaaactgacggaaagagaagacccaccacatcccgttcactctctcctcctcccctccgctccctcccagtcccagatcccgattcgccgccgcctccggcagatccagccagcagctcccgccgcagaaccgccgcgggcgccatggagaagccatgctctctcctggtccacttcgacaagggctcggcatcgatggcgaacgagatcaaggcggatctggagggcagcgatggccccgccaaggctgacgccatgcgccgcgccatctcgctcctcctcaacggagagaccctccctcagctcttcataaccatcgtccgctacgtgctcccctccgaggaccacaccgtgcagaagcttctcctcctctacctcgagatcatagaccgccgggatccggccggccgcgccctgccggagatgatcctcatctgccagaacctccgcaacaacctccagagccccaacgagtacatccgcggcgtcactctgcggttcctctgcaggctctccgagcccgaggtgctcgagccgctcgtgccgtccgtgcttgcgaacctggagcacaggcaccaattcatccggagacacgctgtctccgcggtttccgcgatctaccgcctcccgcatggtgaccagctcatccccgacgcgccggagctcgtcgagcggttcctcgcatctgagcaggacgcgtccgcgcggaggaacgcattccttatgctctgtgcctgcgcacaggaccgcgccgtcgcctacctgctctccaacgccgatcgagtcgctgagtggcccgatctgctgcagatggccgttgtggatcttatccgcaaggtctgccgatcacaaaaccgtgccaacaagggaaggtatatcaccatcattacgtcgctgctctccgcaaccagcactgcggttgtttatgaatgtgctggtgccctggtgtcactctcttcggcacccacggctgtgcgggccgctgccaacacctactgccagttgctctcgtcgcagagtgacaacaatgtgaagctcattcttctggatcgcctcaacgagctgcgaaccctgcaccgggatgtcatggtgggtgtggtgatggacgtgcttcgtgcactggccagccccaatttagatgtcaagagaaaggttctcgatttagttctcgatttgctcaccccgcgtaatgttgaggaggtggtgctttatctcaagaaggaggtggtcaagacgcaggctggagacctcgagaagggtggcgagtaccgccagatgctggtgcaggccatccatgcttgcgctgttgagtacccagaggtggctggatctgtagtgcacctcctcatggactttcttggtgataccaatgttgctgcagctgttgatgttgtgctgtttgtacgtgagatcattgagaccaatccgaagctgcgtgtttccatgatccagaggcttattgatacattctatcagattcgggcatcccgtgtctgctcatgtgctctctggatccttggggagtactccctctctctatcagaggttgaaagcaccattgctaccattaaacaatgtcttggtgatctgccattctacactgtctctgatgaaggggaggtaactgattccaccaattcagcccaggcggtggtgaacactgtcactgtatcttccaggaggcctgttgttcttgcggatggcacttatgccacacagagcgccgctaccgagaccatttcagccccatcagttgctcatgggtcattagcatctaccctgaacctcagatcactcattttgtcaggtgatttcttcctggctgctgttgttgcatgtaccctgaccaagcttgtgttgaggctggaagaagtgcagccatccaaggttgaatcaaacaaagcttgcactggagcattgctgatcatgacatcgattctgcagctgggccagtcttcttaccttccccacccgattgataatgattcatatgacagaattgtgctgtgtttgagattgctttgcaatactggtgatgatgtcaggaagatttggttgcattcatgcagacagagctttgcgaaaatgcttgctgagaagcagttcagggagacagaggagatgaaggcaaaggcacagatctctcatgcccagccagatgatcttattgatttttaccacctgaagagcaggaagggcatgagccagcttgagttggaagatgaggtgcacgatgatttgaaggctgcaactggtgggtttactaaggatgcagatgatgcaaacaagctcaaccgcattcttcagttgactgggttcagcgatcctgtgtatgctgaagcatttgtaacagttcaccattatgacattgtacttgatgttactgtcattaaccgcacaaaggagacacttcagaacttgtgcttggaattggctacaatgggagacctcaaacttgttgatcgccctcagaactacaccttggctcctgagtctagcaaacagatccgtgctaatatcaaggtttcatcaacagagacgggggttatatttggcaacatagtttacgagacttcaaatgtgatggaacgatcagtggttgtcctaaatgatattcacatcgacatcatggattacatctcacctgctacgtgtgcagatgttactttccggaacatgtgggcagaatttgaatgggaaaataaggtggctgtgaatactgtgattcaggatgagaaggaattcttgaatcacattatcaagtcaacgaacatgaaatgtctgacaccaccgtctgcactggatggggaatgtggtttccttgctgctaacctttatgcaaagagtgtgtttggcgaggacgctttggtgaacatcagcattgagaagcaacatgacggcaagctcagtggctacattcgaataaggagcaagacccagggaattgcactcagcttaggggacaagatcactctcaagcagaaaggatcgatcaaggagagagataagaggacagttatgaggaagtcacgaagttgtcggtcgaagatatatgttgctgtagtaacgaagctgttccaaacttccttgaaatagttgtgaagtttatgttgatttctcgacagttgtctggacttggaaacagaagcttggaggcggtgttgtcacgttatttttgtagagatgaattggagctcattttctgttgcatatagatttgccaattgtgttagggtacttttatggtgtttatttaagaaatgaggtagtccattatctttttactcagtttctttggtttgtggaataaattgacgatgagaccccctagaacttcttccctactactacattactagggcctaggcagtgatcatgatatggttgattgcgtggtgacgtctgacactgcatgcgtttattcaaaggaagcaggcggcaggcatgctgtgcaggcgcagccgccaaaaatataataagggagaaaaaggc

SEQ ID NO: 8947 - DNA, 2127 bp, Zea Mays
atcccatcccaccagttccccaattccatttctccatccatgacagctcgccatttccccacctgttcctacgctaccgccacctaaaaaaaattccaggcacctagtgcttcccattccaatcttgctcaaaggtcatttcatttcggccggtgcctattttaggccgattggagggaaggctggtctgtgttttattttcctgctgcgagcgctttcttgggcgagttgaatttgggcgcctcttgctccaggcagtattttatcgagctagagtctggtacccggtgattcttgcttggtccaggcgccaaggcgaggaattgggcctagctccagctcaaatctgtgccttgttgcagacagaaggatttctgcatgggcgagttgaatttgggcgcctcttgctccaggcagtattttatcgagctagagtctggtacccggtgattcttgcttggtccaggcgccaaggcgaggaattgggcctagctccagctcaaatctgtgccttgttgcagacagaaggatttctgcatgggcgaccataactaagatgtgagatttggtggcgtcagctcggctggtgggtgattctcggtgcgtacacagacacatccctggagcctggaggcttgagctgatttggcgaggaggacagtgcaggagagagatgtctttcaggagcctgattcaggacatgaaggacgagttcgggagcatctcgcggcatagcctgcggtcccggtctcaccgctccgccgggaacgcggcgcgggcggcggccgcgggaccgtcggaggcgatggatcagagctgctggtcgcagctgccccccgagctcctgcgggaggtgctggtgaggatcgaggcatcggagagctggtggccagcgcgcaagaacgtggtgtcaggcgccggcgtctgccggacctggaggggcatcatgaaggaggccgtgcgcgtcccggaggtgtcagggaagctcacgttccccatctcacttaagcagcctggcccaagggatggcactcttaaatgtttcatcaggagaaatcgaactactcagacatattatctgtatattggattgacagaagcattggctgatgatgggaagtttctacttgctgcacgcaagtgtcgtaagcccacctgcacagactacctaatttctcttgataaggtcgatatgtcaaagggaagcagcacctatattggcaagctaagatcaaatttccttggaacaaagttcactgtctatgatgctcatccaccatatgatggtgctgcggtctcaaagagtcgctctgcacgtgtggttggtttgaagcaggtctcccctagagttccggctggaaattatcccgtttcacatatttcttacgagctaaatgttctgggctccagaggtccaagaaggatgaactgtgttatggattccatccctgcatcagctgttaaggaaggagggaaaactcctacacagactgaatttccacttagcagccttgactctttcccatcatttccattcttcagatctaaatcagctcggatagacagttcaacgtcgcaatcatccagtcagagggaagataggttggtgcttaagaacaagtctcctaggtggcacgaacagctgcagtgttggtgcctgaatttccgtgggcgggtcactgttgcctcggttaaaaacttccagttggtggcttctgaggacaatggaccagagaaccaagagagtgacaaggtgattctccaattcggaaagatcggaaaagacttgttcaccatggactacggttatccaatatcggcatttcaagcttttgcaatttgtctgagcagttttgatacaaaaattgcctgcgaatgaggcaagaagctggatagcggtggcggatagcatgacagcaatagggggatagcatgacagcaataggaaaacggtcgcaaacgtatatttattcggtttgacttttttctttaattttgaataaataagatatataatgtgcaatacaaatttatatttttgtttttagcattgagtctgtaaaagttcataaaagataaatctcaaatttattatatatcttctcttcttaaataagattcggatac

SEQ ID NO: 8948 - DNA, 2385 bp, Zea Mays
ccctctcatcccatcccaccagttccccaattccatttctccatccatgacagctcgccatttccccacctgttcctacgctaccgccacctaaaaaaaattccaggcacctagtgcttcccattccaatcttgctcaaaggtcatttcatttcggccggtgcctattttaggccgattggagggaaggctggtctgtgttttattttcctgctgcgagcgctttcttgggcgagttgaatttgggcgcctcttgctccaggcagtattttatcgagctagagtctggtacccggtgattcttgcttggtccaggcgccaaggcgaggaattgggcctagctccagctcaaatctgtgccttgttgcagacagaaggatttctgcatgggcgagttgaatttgggcgcctcttgctccaggcagtattttatcgagctagagtctggtacccggtgattcttgcttggtccaggcgccaaggcgaggaattgggcctagctccagctcaaatctgtgccttgttgcagacagaaggatttctgcatgggcgaccataactaagatgtgagatttggtggcgtcagctcggctggtgggtgattctcggtgcgtacacagacacatccctggagcctggaggcttgagctgatttggcgaggaggacagtgcaggagagagatgtctttcaggagcctgattcaggacatgaaggacgagttcgggagcatctcgcggcatagcctgcggtcccggtctcaccgctccgccgggaacgcggcgcgggcggcggccgcgggaccgtcggaggcgatggatcagagctgctggtcgcagctgccccccgagctcctgcgggaggtgctggtgaggatcgaggcatcggagagctggtggccagcgcgcaagaacgtggtgtcaggcgccggcgtctgccggacctggaggggcatcatgaaggaggccgtgcgcgtcccggaggtgtcagggaagctcacgttccccatctcacttaagcagcctggcccaagggatggcactcttaaatgtttcatcaggagaaatcgaactactcagacatattatctgtatattggattgacagaagcattggctgatgatgggaagtttctacttgctgcacgcaagtgtcgtaagcccacctgcacagactacctaatttctcttgataaggtcgatatgtcaaagggaagcagcacctatattggcaagctaagatcaaatttccttggaacaaagttcactgtctatgatgctcatccaccatatgatggtgctgcggtctcaaagagtcgctctgcacgtgtggttggtttgaagcaggtctcccctagagttccggctggaaattatcccgtttcacatatttcttacgagctaaatgttctgggctccagaggtccaagaaggatgaactgtgttatggattccatccctgcatcagctgttaaggaaggagggaaaactcctacacagactgaatttccacttagcagccttgactctttcccatcatttccattcttcagatctaaatcagctcggatagacagttcaacgtcgcaatcatccagtcagagggaagataggttggtgcttaagaacaagtctcctaggtggcacgaacagctgcagtgttggtgcctgaatttccgtgggcgggtcactgttgcctcggttaaaaacttccagttggtggcttctgaggacaatggaccagagaaccaagagagtgacaaggtgattctccaattcggaaagatcggaaaagacttgttcaccatggactacggttatccaatatcggcatttcaagcttttgcaatttgtctgagcagttttgatacaaaaattgcctgcgaatgaggcaaggatggctggaaactaccgtaccgccagaagacgtcgtccaaaatgattatgagctgcagagctggggcgtaaatagctgcatctagttgttccctgcttgttctgccgcctagtttatttctctgaatttggatatacgcattgtttgccggtgttggccatcggtgagctgacgagattgtgagggttccggtgataatgtagcgtacgagatcttgagttttaatagtgtaattacgcaacacaaagaacaccgcatcgacaactagcacgaagaaaagatactataccaatagatcagtacatactagtcctagcagtacaatagtgtagcgtagtgatacacatacactcccgcccttggttcccaattgtcatcatctcacagcagctgcagctcaaatttatggtccaacctatactgagcatcttcagtagttttgtaaaaagcaaagttctctaaagatagatataagaagttactaaataatag

SEQ ID NO: 8949 - DNA, 3332 bp, Zea Mays
ctcgaatcccaactcatttcttcctcctcttctggattatcatctgggaggcaaaggggtgacttgtcgtagagcattttatgtcaaagatgccctgctttaccgacggagacagaaaattagtgaagacagagatatacaccatacaaccaccttcgatggacgcgggggatgacattgcttgacatggactgcgtggctgaggcaatcggcatacagtacttgcagcctgtactactatacatagacagttctgttttcctccaaagtgctttatccttagaccattctcttctgtcatatccactcccgctccactccatactgagcgtgcgttcttgatccatactgagctctgccgagtgctcgctccaatggctgaacttgcagccagcctggtggttgccccactgctgtccatgttgaaggagaaggtgtccagctctctcctcaaccagtacaacgtgatggagggcatggagaagcaccacaagaccctcatgcgctggctgcctgccatccaagaagttatcgctgacgccgagaggcagacgtctcgccgcggcgtggagaaatggctcgagcagctcaagacgacagcgtacgaggcgaatgaggtctttgacgacttcgagtacgaggcgctccgccgtcgagccaagaaaaatgggcacatcgccaagcttgccattatggcaagggtaaaacttttccctacccacaaccgtgttgcattccatatcaggatgagctacaggcttcgcaggattgttgacaccttcaaggaccttgtggaagaaatgaacacctttggattcaacaagcttgagcccgaggcaacaacgacatggaaggagtggcgtgagacagattctattatcgttgatcctgaaaatattgttgccaggtctagacatgatgagaggaagaaaattgttaacttattggtcaatggtcatgttaccgatggtgatcttatggtcgttcccattgttggaatgggaggactaggcaagaccacactcgctcagctcatctacaacgaccctcaggtcaaggagcacttccatctactaaagtgggattatcagattgatatggacaagcttatccaactatggatggccaatggttttatctcagatcaaaaaaaggtacctgctgaaaccgtaggtaaaaggattgtcaatgagctggtctcgaggtcatttttccagtatgaggagcgaagttggatggggtacaattctacaacttttttgaagattcatgacctcatgcatgatcttgcactgtctgtttcggaaaaggaatgtgtctgtataacaagggaattgattaaaaatagtgagttgcttccaagtgctgcccgccacatacttattcaaaattggataggtaaagagattcatggttatttatatggttctatgaggaaaatgtctcggcctatccaaacatttatgtttgatgggtctagtgaagctgccggtgtgcaacatttatcaagatatagttctttgcgagtactttctgtgccaggaattgggtttcatttaacaataaaaccaaagcatcagtgccaccttaggtttcttgatatcaaggacagtgtcatcaaagaacttccagatgacattagcgtcctttataatcttcagacacttttcgtcatctgtacacagatgggtgcacaagggaggaggagtgcaggagcagccaaccttaagaataagaaggaactgagacaactgtcactagagtggacaagtggtaaggaggagggactacagtgtcatgaggtgctagagggccttgaagctcatgatggactcctggctctaggaatacattactaccaaggcaccagttttccatcttggatgggtatgttgaaaaacatactcgatcgaccttcggttgtccgattgtagtaaagtagaccggcttccaccaatgtgtcagctagcagaactgcaagtccttcatttgaaaagattggaaaatttgcagttcctatgtagcaggtgtacatcctccacgtttggaaaactgaaggatcttaagctacttgatcttgacgtttttgaaggattttgtgaggcagtgcatggatgtgcagtagcatttcctcagcttgagttattggaaattgacagctgtaaaaatctagcagctctaccagaagcatcgatgctgggagaagcatattgtggtggagatcatacagtggcgcgctctgcatttccagaactgaatattctcgtattgcaaggtttgcgtagctttgagagatgggaggctgctgccctttaaactgaagaaagacatgcaatattccctcgggttaagaatggtcctgagcaggcaacatgaggaatgagccagccagttgcttttgccccatctagagtctctagagatatcggggtgtgaaagtctggtagaggaggtattcaactcctcccctgctatgctcttaagagtatggatgtgataggatgtcacgggttgttgtcatctctagaatctctaaggatacaacactgtcacgggttgtcaatcttccctcgtccctcagggtaatagatactacggttcatgtcagggcagctggatgcactcaatacctgtcatcactggaaatcctccgtctgtctcgttgcaaaaacctgtcgtgcttgcccagtgcgcgggcaggaggacgacaggaatactcatctcttcgtgagcttacaattacggtagcagggagacagagccgaacatcaaagcagaaagaaaaatgatccttattaattggttgtacaatacaatatgttatgtgatttggaatacctgctgccgacgacagttgcctccaattcctgcagcttctggcacctagagatgtctagctttccacagcttttcaagttatgtggagcgagcccaacaacgataccagcctagcaagttggtctcgttgtacccccggaacaacgacaacgtgatggtggtggcgatgcgcaacgccgcggagccggcgtggcgacagcggcatcgtttcatggggaccccgatgccagtgacagaaggaggtggatacagggtcagggagaaaatgtcacttgctcctctctatctttttgagggattgattgataggagctttcgagggattaagaaaaaatgtaggacaaatggttgagaaaaaaaaagtatatgtttggtttgtaaccatagattgtggcaaaatctttcgcttgctgtgctagggtctactgcccaacaagtctgtcacatgcttatacaatcaacaccatagctaagagaaaataaaagatgagcca

SEQ ID NO: 8950 - DNA, 3613 bp, Zea Mays
cccggccgcacagactcgatgccgcgcggtgctacggtggccctcttcgccggtccatcgaggaggcctgccgtggtgctctcggcggtctttgattccacgcaggaagagccccgggcggtgcgcgcggcgcggatttggcggcggcctcatggcatgaacgctctttggttattgagaattggtaacatcttttggacgcgggggatgactttgcagtttgcagcggcactcaaggcccctactttttctcgaatcccaactcatttcttcctcctcttctggattatcatctgggaggcaaaggggtgacttgtcgtagagcattttatgtcaaagatgccctgctttaccgacggagacagaaaattagtgaagacagagatatacaccatacaaccaccttcgatggacgcgggggatgacattgcttgacatggactgcgtggctgaggcaatcggcatacagtacttgcagcctgtactactatacatagacagttctgttttcctccaaagtgctttatccttagaccattctcttctgtcatatccactcccgctccactccatactgagcgtgcgttcttgatccatactgagctctgccgagtgctcgctccaatggctgaacttgcagccagcctggtggttgccccactgctgtccatgttgaaggagaaggtgtccagctctctcctcaaccagtacaacgtgatggagggcatggagaagcaccacaagaccctcatgcgctggctgcctgccatccaagaagttatcgctgacgccgagaggcagacgtctcgccgcggcgtggagaaatggctcgagcagctcaagacgacagcgtacgaggcgaatgaggtctttgacgacttcgagtacgaggcgctccgccgtcgagccaagaaaaatgggcacatcgccaagcttgccattatggcaagggtaaaacttttccctacccacaaccgtgttgcattccatatcaggatgagctacaggcttcgcaggattgttgacaccttcaaggaccttgtggaagaaatgaacacctttggattcaacaagcttgagcccgaggcaacaacgacatggaaggagtggcgtgagacagattctattatcgttgatcctgaaaatattgttgccaggtctagacatgatgagaggaagaaaattgttaacttattggtcaatggtcatgttaccgatggtgatcttatggtcgttcccattgttggaatgggaggactaggcaagaccacactcgctcagctcatctacaacgaccctcaggtcaaggagcacttccatctactaaagtgggattatcagattgatatggacaagcttatccaactatggatggccaatggttttatctcagatcaaaaaaaggtacctgctgaaaccgtaggtaaaaggattgtcaatgagctggtctcgaggtcatttttccagtatgaggagcgaagttggatggggtacaattctacaacttttttgaagattcatgacctcatgcatgatcttgcactgtctgtttcggaaaaggaatgtgtctgtataacaagggaattgattaaaaatagtgagttgcttccaagtgctgcccgccacatacttattcaaaattggataggtaaagagattcatggttatttatatggttctatgaggaaaatgtctcggcctatccaaacatttatgtttgatgggtctagtgaagctgccggtgtgcaacatttatcaagatatagttctttgcgagtactttctgtgccaggaattgggtttcatttaacaataaaaccaaagcatcagtgccaccttaggtttcttgatatcaaggacagtgtcatcaaagaacttccagatgacattagcgtcctttataatcttcagacacttttcgtcatctgtacacagatgggtgcacaagggaggaggagtgcaggagcagccaaccttaagaataagaaggaactgagacaactgtcactagagtggacaagtggtaaggaggagggactacagtgtcatgaggtgctagagggccttgaagctcatgatggactcctggctctaggaatacattactaccaaggcaccagttttccatcttggatgggattttgtgaggcagtgcatggatgtgcagtagcatttcctcagcttgagttattggaaattgacagctgtaaaaatctagcagctctaccagaagcatcgatgctgggagaagcatattgtggtggagatcatacagtggcgcgctctgcatttccagaactgaatattctcgtattgcaaggtttgcgtagctttgagagatgggaggctgctgccctttaaactgaagaaagacatgcaatattccctcgggttaagaatggtcctgagcaggcaacatgaggaatgagccagccagttgcttttgccccatctagagtctctagagatatcggggtgtgaaagtctggtagaggaggtattcaactcctcccctgctatgctcttaagagtatggatgtgataggatgtcacgggttgttgtcatctctagaatctctaaggatacaacactgtcacgggttgtcaatcttccctcgtccctcagggtaatagatactacggttcatgtcagggcagctggatgcactcaatacctgtcatcactggaaatcctccgtctgtctcgttgcaaaaacctgtcgtgcttgcccagtgcgcgggcaggaggacgacaggaatactcatctcttcgtgagcttacaattacggtagcagggagacagagccgaacatcaaagcagaaagaaaaatgatccttattaattggttgtacaatacaatatgttatgtgatttggaatacctgctgccgacgacagttgcctccaattcctgcagcttctggcacctagagatgtctagctttccacagcttttcaaggttggtaactatttgcagtttctgtttcgggcgacccattgctttaggttttggagacatttttcggagggttcaagaccaggaaacggatcgacgccgcgtctatgcaaatttttttttcttcttattttcattggagttttatgaacaggattgcgttttgaggtttatagcctgtctattgggtgtcgtgtttatttttatgcactctatgttgtgagtgctagtccatgcagttatgtggagcgagcccaacaacgataccagcctagcaagttggtctcgttgtacccccggaacaacgacaacgtgatggtggtggcgatgcgcaacgccgcggagccggcgtggcgacagcggcatcgtttcatggggaccccgatgccagtgacagaaggaggtggatacagggtcagggagaaaatgtcacttgctcctctctatctttttgagggattgattgataggagctttcgagggattaagaaaaaatgtaggacaaatggttgagaaaaaaaaagtatatgtttggtttgtaaccatagattgtggcaaaatctttcgcttgctgtgctagggtctactgcccaacaagtctgtcacatgcttatacaatcaacaccatagctaagagaaaataaaagatgagcca

SEQ ID NO: 8951 - DNA, 3163 bp, Zea Mays
cagtcctccttataattggagttgcacaagccgctcagcaaccttcttcttcatcttctccagtcctccctcccgccccgtccatcgacacagcagcttgcttgtcaccaagctagccaagcaggaggagtaagagtacagccagagagagagagagagagagagagagagagtgcaccaccctgattccacccaccgctgtcccttgcttatttacaggcgttcgtgatcaccaacagctactcgtcagctagagagagtgcaacgggccgggcagagctagagagagagagagagaaagcggccttctttttctgtgttcaccaagcaacaaccccagtccaagctctccgtgttggccgatcgtttccggcgaacagagcaagcaactcacagccccggaggcgactgactgactggcgcaactgtgttgctcgatccatcgaagcagacgcaggcggcggattcgcggaggagagatgatgagggagcagagcctcctggaggcgacgtgcggcgacctcttcgaccacatcgacgacctgctcgacttccccaaggaggactcggccgccgacgtgctcctgctggacgcgccggcgccggggagcccgctgtcgtcggcgcgcatcatcgacgtcggccgcgccggcagtgcgcccgctccccccgcgctggcgccgtcgcttcccgcgcagcaagacaccaccgccttcttcgccgccgcggggcccgacgtgttcgaccccagggacgtcggcgctcacctcggctcggtgggtgcctccttcctcgcattgcccgtgccagtcgtgcaaccgcgacgcgtttttcttcttcttttttccccccttttctctaaccctgctcgtgctgtgcgggcgattcctcgtggaatggagcggagttcaaaatagctggacgccaacgccgcgggcaccacgggacacgccacgcgcgtcggccacggccacgacctggtgcctgccttgcgtcgcgcgcgggacgtgatgacttgttgtcttgtccgtgcgctgcgcggcgcggtgcggtgcggttggtggttgctggttgggacaggaggaggagcgggcggtgtcggtggccggtgggagtcgtgaccggagttaccaccgcccggccgctgtttggtttgttggttggacttggatattacggccgggcccgtgttacgtcggtcggggggcccgtcgcttttcttgtgcaaacgtgggccccggcctggcacgtaatgtgtgcagtgactgaagtagtggggaaagacgatgacgtcattcatggcagatacacagtgcgacgacattgacatggacatggacatggcgcagctggagtggctgtcggggctcttcgacgacgcatccatcccgcacgagccggcgttccccggcgcggcgcccatcatcaagagctccgcgctggcggccggcgcgctgctgccgccggacaagatggaggacgcgctgctgttccgcagctccagccccatctcggtgctggagcacggcagcttcaacaacgccaacggcggtggcggcggctgctccgcgtcgtcggagtcgtcctcggcgtcctcgtcctcggagtctttctccggcagcgggagcgggagcggcgaaggccacgcgtggtcggcgcccgtgtcgccgccgcccgtgctcgtcataccggcgcgcgcgcggagcaagcgctcccgcccgtccgcgttcacgcgcgccggggcggaggcgcccaccatcctcgtgccgacgcccatgtactcgtccgggccgtcccactcggaccccgagagcatcgctgagtccagcccgcacccggcgccgcccatgaagaaaaagaagaaggccaagaagccgccggcgccgcccgcgcccgcctcttccgacgacaacgacggcgacgccgactacgaggaaggcggcgagcgcgcggagccgcagggcggcgccgtcaggaggtgcacgcactgccagatcgagaagacgccgcagtggcgcgcggggccgctggggcccaagacgctgtgcaacgcctgtggcgtgcgctacaagtccggccgcctgttcccggagtaccgtcccgcggcgagccccaccttcgtgccgtccatccactccaactcgcacaagaaggtggtggagatgcgccagaaggctgtccggagcggtgacccgtcgtgcgacctcctgcagttcatccgccgccgggattgacgtcccggcacggcgtcgccggactgtcggtcggtctcgtcccccttatagctagctatatagtatatgtatacatgctagtatgtatgcatgcatggttgcttcagcagtcgtcggtcgtcgtcgtcgtcgtccatcatggtcatcatcaccacttcaccggtcaccgccatggcatggatcccacccctcatcacatgcattggtttctgtcaacatccatccaatcccaatccatcgccgggcatcccggcgcgtttagttcattaggtcttctttctcatcgggggctagtgttattttacctttcttcttttctgtctattggttaattggttccccctgaatgtttttttgtttgtatagagagagaaagagagaggagggtgagaggagaggcaggagaaatagatgaatcagagtggttgctgcattgcagttgcagttgcttgcaggttaggtactaggtgagaaggagagctaaaccagcagcagagggagacagatctagagaggaaactttgcagctagtcagtcagtcagtcaatcaattagaagaaagcatggagagtgcttttaagcaaatgaaaggggaatttgttggtttgctaattagaagggaggttatgcagggcaggtcagtagtagctatcatcgtccatgatgattttaaaacttaagaagagggggacagccatcatccatcatagtctgtactctgtatccggagcttggtgtactgaactctgaaacttctttttgcagttcatctatgtttagggatttgataagtgttgtttggtttcttctatactagtagtgctacctcttagcgaataattaattatatatgcttttgctctcgttcttttctcctgccttgttgcctccatggctccccatccatacagaagctgtgagctgagggc

SEQ ID NO: 8952 - DNA, 982 bp, Zea Mays
atgaggtgtcagctggatttgataacggatcaatgcgtactgcaagacattgacccagaagagcttcacgcaaaattgcaagaccctagttttctcgaagaagctcaattgattgatgttcgggagcctgatgaagtggagaaagcttcacttccaggcttcaaggttactgccatattggaggatggtagaatatttgaagttgaccttttggttggtgccgatggaatatggtcaaaggtgaggaagacactattcgggcactcagatgccacctattcaggttacacctgctacactggaattgcagattttgtgctgcccgatatcgatacgaaaaccacagttgattttaagccatacattggtccaatctataatgcgatactaggacgtttggccaatcatgatcaggatcagtgcactctcatttatcatgcaaatttgtgttctcccaagaggtaaaaaaatgcgccatatcttgcatgagtttggtggtctctacttttggtgatggtcttgaaagagaattaccagcatgccttcccatactcgttgacaggatgggtaatgaaattacaagacttacagttgtcaagttattgcaaatttacctctacgtattgatctctcgtgtgtcctggatcatgttgtttctgaactcacagctttccttcgtaaggtacttgcatagttgcatggatctttgctgccttcatttgatttttattttctatgaaaagcatagcaaagagcaagataatgccttcgttttctctctcttatggaacaggccaacagagctcttaggcaggcgacgttgggaactctaaattctttggttgtcacatatggtttgcaatatgtcaatataactaaataacaacttgctaaggtgttcagtccttagtaggctgcatgtaaagcttttatttagccgtcctattttgttctctaggtatcaaatttgaatacatagaat

SEQ ID NO: 8953 - DNA, 1777 bp, Zea Mays
attagtcccagatctctctaatagtctagtcccccccaagccgactccgcccggctatcttcccgacgctgtttatccccctatgaactaggatccataacagatggtgtgtcacttcaaaaatagtcagatgtgatgattaatgagataatgctgcttgccccatgagagtggaaacaaaattagaccttactcaaacagtatggaaaagtattaggcctagatcctaaaaggattccacagaattgggcagccactcaatttgctgaagcattgggcagagcatgggccgagtataacaatgacagtgctgttgttttgatggttgtccaacctgaagaaagaaatatgtacgaccagtactgtcttgtcaatcatctgaaggaatcatatggtgtggcaactataaggaaaacattggcacaagtagaggctcaagggcaggttcttacagatggaacacttgtggtagatggtcggacagtggctgttgtgtatttcagagccgggtatgcaccaactgattacccttcggaagcggagtggagagcgaggcttctgatggaacaatcatctgcagtgaagtgcccttcgatagcctaccatttggtaggaacaaaaaagatccagcaagaactagcaaaacctaatgttcttgaaagatttcttgacaacaaggacgacattgccaaactacgcaagagtttcgcagggttgtggagcttggataatgaagagattgtgagatctgcaatacagaaacctaacctgtttgtcctgaagcctcagcgagaaggcggagggaacaacatatatggtcaggatttgcaggacacactgatcaaactccagaaggaacagggggaggcgcttgcggcgtacatactgatgcagaggatttttccaaaagcatctcttactcctctagtcaggggcggtgattgctttgaggaccttacaatctcggagctgggaatatacggagcctacctgcggaacagagacaaggtgatcttgaataaccagtctggctacttgatgcgcaccaaagtttcttcttcaaacgagggcggcgttgctgcagggtttgccgttttggacagcgttctcctgactgatgagtgagacagcagcgaggtggcagagctatgggtgacacctgacctgcattagtgacagtgcccacagtcaactcaaacgatgacaatatcaactgcaatcgtaggggaaactatgaaattgcttacagaattgcggacagtcggagaagatggcagtgttacgttatgatatagtttcatgtttgtatgctggttgaaaatgtagggaaactcttgttttcactagaaaggaacccctggaggggggagtaacggtgtagaaggtttatgttgtcacagttggcatgcattcatcatataggaatagctaggagatggcaccgttatgccaacacagttataacaaatatcaattgtaaattttatgattggttatcgactaagcaaaacaattttataagaaattgttgtgcggcaatatcgtttgactaaatcttagtcagatgctcgaatattgctatggtttgtaaatataatatatcatatttatagattttgttgtaataaaacataaaaatatgtgttctattagttatgtgggtgtggaagtagggttaacagctaagattagtctgcatttggaggattgtgtaaagtaggaggcatagaactgtagataatatattttttatatattaattgaaatatgatgtgat

SEQ ID NO: 8954 - DNA, 2788 bp, Zea Mays
cacgcgcgagccatgccgcaggtggccgcccctctccgcctcctcctccccctctcccaaaccctagcagcccccgcgcctctcctccaccactcgcgccgcctcctctcctcctgccctgcttcattaagccgcgccgctggcctccgcgccctcgcctaccgccgccgccggcacaccgaacctcgccgcgggaccagcacgctcgggaaggctcccgccaaggaggagatggacaaggaggtggctttcaacaggaagcgggccgaggggaaggacggagggaagcgcggcagcatggagctcaagacccgcaggctcaaccccgtcaacaccacatgctacgtgcagatacttggtacaggaatggacacacaggacacttcaccttctattctactattctttgacaaacaaaggtttatttttaatgcgggcgagggtcttcaacgtttctgtactgaacacaagataaaactatcaaagatcgaccatatcttcttgacccgcgtctgctcagaaactgcaggggggctcccaggcctggtgctaactctagcaggaattggagatgagggcatgtcggtgaacatatgggggccttctgatcttgactttttagctggggcaatgagatcttttatcccaaatagagcaatgcttcacacacatagctttggtgctgatcgaaatgcatcttcaccacaatctacagactccgttattgttcttgatgatgaagtagttcgggtatctgcaatgtttgtcaaaccaaaatacaataatggaactggtagttcaaacgatagtgacatgaagcctggtgatactgctatagtatatgcctgtgagttgccagaaattaagggaaagtttgacccatctaaggctgctgcccttggccttaggcctggtcccaagtaccgtgaacttcaacttgggaattctgtgcagtctgatcaatttgatgaaatgtaaaaacatggaaattcctatcttgaaaggtagtgcaaggatatcatcacacctcaattttgtatgccctcagcttttcccatcctctgggttttggtcggaacaaccttcaaatgatgtcatggaaaatgataagagtgtttcatcggaagcctgtggaagtgtgtctgcgcaaaacctcctaaagtttcatctgcgtccttatgctcaattgggtttggatagaacttctattccaaacttgttcacctacaaggattttgtagaagagcttgtatctgagatcccagcgattagagaagttcctgaacaggtttgcaaattctggcaaaataatgtgaatgataataatatactaacaccaactggcaatcatatgggtgaagaacaatggatcaataaaaaatcagataaggtagatgatggcactctttttcaagaaattgtcttgagaaagcatccaagggacaatcaggaaatcccttgttgtgtggaggatgcaacaagggaagatatggagatcacttttttgggcacaggttcatctcagccttcaaaataccggaacgtaagttccatatatattaacttatttgaacgaggaggtatacttctggattgcggcgaaggaactttaggacaactgaaaaggagatttggtgtaaatgatgctgatgaagctgtaaaaggtttgaggtgtatttggatttcccatattcatgctgatcaccacactgggttggccagaattcttgctctaaggtcgaaattgttaaagggggtgcctcataaacccttgcttgtgattggaccaagaccacttgagagattcctaaatgcatattctacactcgaacatcttgacatgcagttcttagactgcaggcatactttgaagtctagtgttgaggcctttctcagtgaaaatgatactgacccagccacacctcaactggagaccaccatgtttgcccctggaactagaatggagaactacaacaggaagcctgcaagtccaagggataccacagctcttgctaatttcaaagaagtcctacaggaatcaggtttagagattttgtacagcgtccctgtactacactgtccacaagcatttggagttgttttgaaggccatggaaaaagcgaacagcactggaaaggtaattccaggctggaaggttgtatattctggcgacacacgaccctgtccaggtcttatagacgcttccagagatgctacagtgctaatacatgaggcaacattcgaggacagtatgaaggacgaagcgattgcgaggaaccatagtacaaccaaggaagccatagaagtcggcacatcagctggagcgtaccggataattctgacccacttcagccagcgatacccaaaaatcccagttatcgatgaggttgatatggagaagacctgcatcgcctttgacctgatgagcgtaaacctcgcggatctgccggttgtgcccaaggttctaccgcacctgaaggtcctgttcaaggacgagctggtagttgatgaagccgaagaggtccaagaggctgctgtgtactgacatattgcatggataaaaatgatgtaaattaacttggatcgccttgtagcttagcgacattgtttttgacctgaactccagtccaattgaaggtctggatcatctgtctctgtgtctccctttaatggttgcatcgatttttacagttggttttgttgggtgagtgttgtgagttgagttgtgaaaataacaaagataattgtaattgttttgattgtgttggcgccgatctggacgctggtc

SEQ ID NO: 8955 - DNA, 3096 bp, Zea Mays
cccaaaccccgcccgccgccgccgaaataaaaccggcacacctctgtagcacgcgcgagccatgccgcaggtggccgcccctctccgcctcctcctccccctctcccaaaccctagcagcccccgcgcctctcctccaccactcgcgccgcctcctctcctcctgccctgcttcattaagccgcgccgctggcctccgcgccctcgcctaccgccgccgccggcacaccgaacctcgccgcgggaccagcacgctcgggaaggctcccgccaaggaggagatggacaaggaggtggctttcaacaggaagcgggccgaggggaaggacggagggaagcgcggcagcatggagctcaagacccgcaggctcaaccccgtcaacaccacatgctacgtgcagatacttggtacaggaatggacacacaggacacttcaccttctattctactattctttgacaaacaaaggtttatttttaatgcgggcgagggtcttcaacgtttctgtactgaacacaagataaaactatcaaagatcgaccatatcttcttgacccgcgtctgctcagaaactgcaggggggctcccaggcctggtgctaactctagcaggaattggagatgagggcatgtcggtgaacatatgggggccttctgatcttgactttttagctggggcaatgagatcttttatcccaaatagagcaatgcttcacacacatagctttggtgctgatcgaaatgcatcttcaccacaatctacagactccgttattgttcttgatgatgaagtagttcgggtatctgcaatgtttgtcaaaccaaaatacaataatggaactggtagttcaaacgatagtgacatgaagcctggtgatactgctatagtatatgcctgtgagttgccagaaattaagggaaagtttgacccatctaaggctgctgcccttggccttaggcctggtcccaagtaccgtgaacttcaacttgggaattctgtgcagtctgatcaatttgatgaaatggttcatccaagtgacgttcttggtccatcaattcctggaccaactgttcttctggtggattgccccacacagtatcatatgccagaacttttttcactgcacccccttagctgcttttatgaagattctccagaacaaagtggcaagaaagtaaattgcataatccacttaggtccatcacctgtgactagatctgttgactaccagaactggatgaaaaaatttggtgcaacgcaacatatcatggcaggacatgaaattaaaaacatggaaattcctatcttgaaaggtagtgcaaggatatcatcacacctcaattttgtatgccctcagcttttcccatcctctgggttttggtcggaacaaccttcaaatgatgtcatggaaaatgataagagtgtttcatcggaagcctgtggaagtgtgtctgcgcaaaacctcctaaagttcatctgcgtccttatgctcaattgggtttggatagaacttctattccaaacttgttcacctacaaggattttgtagaagagcttgtatctgagatcccagcgattagagaagttcctgaacaggtttgcaaattctggcaaaataatgtgaatgataataatatactaacaccaactggcaatcatatgggtgaagaacaatggatcaataaaaaatcagataaggtagatgatggcactctttttcaagaaattgtcttgagaaagcatccaagggacaatcaggaaatcccttgttgtgtggaggatgcaacaagggaagatatggagatcacttttttgggcacaggttcatctcagccttcaaaataccggaacgtaagttccatatatattaacttatttgaacgaggaggtatacttctggattgcggcgaaggaactttaggacaactgaaaaggagatttggtgtaaatgatgctgatgaagctgtaaaaggtttgaggtgtatttggatttcccatattcatgctgatcaccacactgggttggccagaattcttgctctaaggtcgaaattgttaaagggggtgcctcataaacccttgcttgtgattggaccaagaccacttgagagattcctaaatgcatattctacactcgaacatcttgacatgcagttcttagactgcaggcatactttgaagtctagtgttgaggcctttctcagtgaaaatgatactgacccagccacacctcaactggagaccaccatgtttgcccctggaactagaatggagaactacaacaggaagcctgcaagtccaagggataccacagctcttgctaatttcaaagaagtcctacaggaatcaggtttagagattttgtacagcgtccctgtactacactgtccacaagcatttggagttgttttgaaggccatggaaaaagcgaacagcactggaaaggtaattccaggctggaaggttgtatattctggcgacacacgaccctgtccaggtcttatagacgcttccagagatgctacagtgctaatacatgaggcaacattcgaggacagtatgaaggacgaagcgattgcgaggaaccatagtacaaccaaggaagccatagaagtcggcacatcagctggagcgtaccggataattctgacccacttcagccagcgatacccaaaaatcccagttatcgatgaggttgatatggagaagacctgcatcgcctttgacctgatgagcgtaaacctcgcggatctgccggttgtgcccaaggttctaccgcacctgaaggtcctgttcaaggacgagctggtagttgatgaagccgaagaggtccaagaggctgctgtgtactgacatattgcatggataaaaatgatgtaaattaacttggatcgccttgtagcttagcgacattgtttttgacctgaactccagtccaattgaaggtctggatcatctgtctctgtgtctccctttaatggttgcatcgatttttacagttggttttgttgggtgagtgttgtgagttgagttgtgaaaataacaaagataattgtaattgttttgattgtgttggcgccgatctggacgctggtc

SEQ ID NO: 8956 - DNA, 479 bp, Zea Mays
caacaattgactggaaagtgttcatgcaggtcctaaattcaccatgggatgtatgctacgatcccgcagaggaggccgtgtatattgcaatggctgggcaacaccagatctggaagcacaatttacatgatggagtaaccaaagttattagcggtgatggctatgagaggaatctgaatggctcaagcgccaccagcacatcgtttgcacagccttctgggatttcattagcttttgaaatgcatgagttacttgttgctgatagtgaaagtagttccattcgagttgttaatctgaagacaggaggctcaagattgctggcaggaggagatccagtatttccagaatatttgtttaggtttggagattatgacgggactggctcagatgtgctacttcaacatcccttgggtgttgtttatgccaatgacaatcaagtatatatagctgattcctacaaccgtaaggtagtaacctta

SEQ ID NO: 8957 - DNA, 3632 bp, Zea Mays
atagaggagtggtgacttaaaaatgaagaactccggcgaagcgaagcgtaggcacactgctctccggcgagcagccagccgccggcggatcggatccggatctcgaccagcactggcattgccgcgacggagatgccgaccccgaagcagcggctcccctgctcgaccttcggccgaggcggaggagggaggcgcgccgcctgcggctccgccgtgctgccacccgtggtggtcctcgtgttcctgttcgtggtcgcgccttcgctcttcttcgtcgtgcgcaatggcggtcgcggctacggccacggccacgtagccgtagcctccggtccgattcgcgttccctcctcgagagcacctgttgcttgtgccgacgcgaggtgttcaattctgcattgccttgttcgatgagcgccgagattgggtggagctcggtggaatctgtctaggttttgggattgatgcgctctccagccgtagtttgatgcgacttagttggataaggggatcatctgagtagtttcagagcggtttagggcttttatatttgttactggctgcgctgttgcttgatttcccgtttggatggaaccgtgtatgtggctctaaggaaatgaacctagtcaccctagggattgcagaaatcattatcccctggcactcagatattattggattacaggaattgttgtcccttatatgttgatgtttctaggttgtatatatatgatatataagtgggtagcgatgggttaatgttatggaaattgaagtgcatgcatacaatagtgactaacaaaactataatgaaactgtgtaataggtggtcataagcattaaaagcatgctgaacaataatacatggcatggccattgttggccgaaatgtagtatatctatataaaacaatgtattactcctccttttccaaaatgtattttgatttagtttgcttcttagtcaaagttctgtaaccttggcaaagtttatagaaaaacatcaaaatcgacgacattaaattagtttatttaatgtcctagatgttaatatatttttatctgaacttcgtcaaacttaaagatgtctgacttaggaccaaactaaaatgatatatattttggaacgaagggggtatattttttgtgaatttcaacattgcattatctgaatgcattgttttacacctgaaattggtaagcattgacatattttgtttgtctgcagatcccaacggtaagaatgatgatcaggaaccaacggcaatgaagaacctcaaatcttttttgcctaaggaggtgtttgatgctataactgctagacaacaagaatcagacactttgagtcttgatttttttaggaatcacgcatcgccctcttggaaaactaatgatctagtcactgagaagagcatggatgtcgatgacaaggctaaagctgaaatcagtttgccagaacatgatctaccaacaaatagatcacccaaagatccagatgaacatcaagctgacaatgcagcaaaagtagctcgaaggaaacttagggagacaaggcgcgagaagagagcaatggatttggttcataaagatgatgaagcacatgttaagcaggagaatgccgctattgagcgatcaaaagctgtcgattctgctgtgcttggaaaatacagcatatggcgaaaagagaacgagaattcagattctacagttaggctgatgagggaccaaattattatggctcgtgtctattctgcgcttgctaaatcaaagaacaagagtgatctatatcaaaaactgcagacccgaatcaaggaaagccagcgggctgttggagatgcttctgctgatgctggcctgcatcacagcgcacctgagaaaatcatagcgatgggtcaagttttatcaaaggctagagaagaagtttataattgtatggcaatcactcagaaactaagggctatgcttcagtcagcagatgaacaggtcaggtgcttgaagaagcagagtacatttcttagccaattggctgcaaagacaattccaaacagcattcactgcttgtctatgcgtttgacgattgattactatctcctcctccttgaggaacgaaaatttccaaggagtgaaaatttagaaaatccaaatctctatcactatgcacttttctcagataatgtcttggcagcttctgttgttgtgaactcaaccatcatgaatgctaagaaaccagagaaacatgttttccatcttgtgactgacaagttaaactttggagccatgaacatgtggtttctgctgaacccacctggcaaggctaccatccatgttgagaatgtggacgaatttaagtggttgaactcatcatactgtcctgtgttgcggcaacttgagtctgctgccatgaaagagtactatttcaaagctgatcggcccaccagtctctcagcaggttcttcaaacctaaagtatcggaaccccaagtacctctctatgctgaaccacttgaggttctatctcccagaggtctatccaaaggtggataagatactcttcctcgacgatgacatagttgtgcagaaagatttgacagggttgtgggatgttaatcttaatggaaaggtcaatggtgctgtggaaacctgtggggagagtttccaccgttttgacaagtatctcaatttttcaaatccacacattgctcggaactttgatccaaatgcatgtggctgggcttatgggatgaacatctttgatctgaaggagtggaagaagaaagatattactgggatctaccacaaatggcaaaatatgaatgaaggcagagttctttggaagcttgggacacttccgcctggcctcttgaccttctacaagttgacgcacccactggacaagtcatggcatgttcttggactaggatacaacccaagcgtagaccgttcagagatagacagtgctgctgttgttcattacaatgggaacatgaagccatggttggagctagcaatgaccaaataccgaccatattggaccaggtatatcaagtatgatcacccttacatccgtggatgcaacttgagggagtagtagatatagtcgtgctgaaacactgacagatgaggacgagcctgctggacagaagtgttccatgtccttgcggtgcgttgttttactgagcaaactggtactacctgaagctcttggttggacataacgacatagttgctcatgtgagagtagaccagacttagacacaatcacacaagaggattcactcacgtggaatacatttgccctacgttgaaattgatgctactttgaaaaccagtctgcaagaaattagattagtgaggagaagataaacctgcgcacggcggcgtaagaaaccagaaatgtccgctggtcgcccggcattctccgcgcgcaagcccaacagctcaaagccaggcacagcccatagtgcgacagcttactaccccgcaaatccagccacgcccacgcgtctcgactggagtggacctgcgtcgcgcggctggccagttcgttagacgcgtggggatcagcgattcagcgcgctgggccttggccgaggccgacggaagcggacgagcgagaaggatcgcaccgtccattcgt

SEQ ID NO: 8958 - DNA, 954 bp, Zea Mays
  misc_feature (953)..(954): n is a, c, g, or t
gaggagagagagagaacggtgcgcccgcctgctcctcctcctcccccttccgtcatttataagcgacggcaacacaggcgacgaagccggggagaggggggcgcacgaggcaatttatagcgaggagaagaggagcggccgggcccgagcagagcaggccgggccagccatctctcctctgcggcgtcggcgcccgggatgggggactctggcggctccgttgtgtcggtcgacgtcgagcgcatctccttcggcggcaaggaacaccatatacaaacgaatcatggacctgtatctgttgcagtgtatggtgaccatgacaagcctgcccttgttacttatcccgatattgctttaaaccatatgtcctgcttccaaggactattgttctgtcctgaagccgcttcactgctgcttcataatttttgtatttaccatatcagccccccagggcatgagatcaggttgtggatgtcctcgatttctttggattaggctctgttatgtgctttggtgtcactgcaggtgcctacattctaactctgtttgcgtcaaagtatagggagcgggtactaggtctcatccttgtttcacctctgtgtaaaggccccacttggactgagtggttatacagtaaggtgatatccaatctgctgtattactatggcatgtgtgggttggtgaaggagtgcctacttcagcggtacttcagcaaggaagtgcaaggattctctgaattgcccgagtcagacatagtgcaggcttgtagaagcttgctagatcagcggcagagcatgaatgtgtggcgctttgtacaaacaatgaatcagtacgtaaacatctcacacctgtatactaatgatgattgtgcggtggaaaaactcggaggtgaagttaccgcgtacttaatttgttttgaattaattttcaggagatatgacttgactgaacann

SEQ ID NO: 8959 - DNA, 2098 bp, Zea Mays
gatatctcaccccgtttgagtcacttagaaatatgacaagctgtttcaccactatctgtttgatagaaaaacctaaaaaagctgcttcaccacgatctatttgataaaaaaacataaaaaatgtgttgggacagaagttataccaaatttcgatttttaattaatagcactaatagaaaacgacactttctttctcataatgtgttggcaatcccctgtgcacgagtccctcccacgaatggtgggagctgcagtgctgcaccccacccgcggcagcaccaccggcgacgccggcacgcctaaatgcatcctcccctcgcctccgcggccctccgcctcctctccttcacctcccgtacccgcctcctctcgcactgcccatttttcctatcccgccgtgacgacgacggcggccgcgagggcccctcgtcgccgctgcccccgctctcgccttctggctcgactttctggccccgctcgctcctcttgtctgcgtcagatgccgcgggcctcttcagcctccgtggcgggtggcggagacgggctcttcctcccgcggcgtcacggccccccggcgccgtcactgacgcagctcccgtccggctcaccgtctcccgcaaatattctctgcgtgtggccaaggggaagaagaaggcgcattttgacgatgaacacagccatcgagcggttaacatggcactatggtgcaactttctcgtcttctctctaaagtttggagtgtggatttcaacttcaagtcatgttatgctagctgagctagtgcattccattgcagactttgctaaccaggctcttcttgcttatggtttgagcagctcaagacgtgctccagatgctctacacccctatggttattcgaaggaaagatttgtatggtctctcatatctgcagttggaatattttgcttgggttcaggtgctaccatagtgcatggagttcaaaatttatggaattgtcaacctccagagaatattcactgggctgcattagtgattggtgggtccttcctaattgaaggtgcttcactgcttgttgctataaacgctgttaggaaaggtgcagaagcagagggaatgggtatttgggactatatctggcgtggtcatgatccaacttctgttgctgttatgactgaagatggtgcggctgttacaggccttgctattgctgcaacatctttggtagctgttcaaatgacaggaaatgctatgtatgatccaattggttcaatcattgttggcaatttactagggctggttgctatttttctgattcagaggaataggcatgctttaattggccgggccattgatgatcatgacatgcagcgagtccttgaatttcttaagtctgatcaggtcgtagatgctctttatgattgcaaaagcgagatttcaatggagttgttctggtacaaaattatttggaaaggactggacgtgggacttgggcaaaacagttcagggaagctgcaatgtccaaggatgatacggaattactaagggtcatggctaactacggtgaggatgtagttgaagctctgggatatgaagtggatcggctggagtctgagatcaaaaagcttgtgcctgggattaaacatgttgacatcgaggcacacaatccagaaggacttactcttagagcagaagttttgtagattacctatgtacattgcatttgatttaaacaacttacacatagaacatctgtatactactaaacagaaaccacacaactagagagcatgcatgaacaacataagagagcggctacacaagttgcataaaatccacacgactttacatatacatatacatcacacaatcagtaaatatagagatgactggattgctcgacttgttggatagacatctcatgtaaaatagctatatgcctatatcaagaatgaacaagatgctgtcttgttacacacagaaaacattttgaagtactatgcttacatgaatactgttgggccttctttgtctgaaggtcatcaaaatattaacttaacaattactctttagtctgttttaagtgtaacatgacgattgccgaagaagaccttcggtt

SEQ ID NO: 8960 - DNA, 4889 bp, Zea Mays
ggtcgccttattccgtctcccctgctaatgcattactaatccaacgaatccttcggttttgtattcttcgcttcctttcgccttcctcttcgcctctctctcgtgttctggcgtcgccgtcgccgctggcgcgagatggtggagacgcggcgaagcgccgcggcgaagcgctcggcggcggtggtggaggaggagaagggctcgctggcatcgccagcgctggagcccgcggaggacgcgccggcgggtcttggagcgggtgacgatgtcgcgtcgtcgcagcccccgaagcgcgcgaaggttgggtgcacggagtcggataccgcgaagccgtcggtggcgccggctgccggcgctgttgcgggtccactgcccaacacggctgggctgcaggccaggaccggcgccatggacaagctggaggccttcttgaagtccaaggaggctcagtccaatccggccggtcataagcaggggactaatgataaagatttatcggcgaagatgaagagagtcatggatttgtcggaggatatatcggagaagataaagagaagcaaggataggttggctgtgttattgaataagccggctgcaggcaccagcaggcgtcaggagccctggtgcagactaatttcacaacattccatggctgtatttgatgcgacgtttggctgcatttgttgggacgtttggctgcatttgttgggaaacttcaatgttccatacttccattgttatcgcttttatgcatatgctactgtataaaagtaggatttaagcaccctaccctttctatttacggtgcgattttcacaattggtcatggagcgcatcatgatttcagactggatgaatcatccactgcctcatctgtttgtagactgaagcaagctaagcgaggtgcactccttgaaatctttgaatccaaagttgttcgtgtaaacgggaaatctttggacaaggctgccaaggttaccttaaatggaggagatgaaattatcttctgttcaccagtgaggcatgcttatatatttgagcaacttcatgaggagaaatcaagcacttcagtgttatcttccacttgcacttgcagtagtatccagctggggcaacactcacatttcaatgatattcaggatcatgtgtcatctaaagggcgcaaagcctcatcctttctctttggaagaggtctatcagcagacccacttaatatatgtaaaacgacggagggccggagccagtttatctctgaagataatatatcatctggtcggtgtcagctactaaaggaggatttgattaatgcaacggttgatgtgagtgacatctctgagtcatttgatagttgcccatattatctaagtgagcataccaaacatgctctaatgtcagcagcatttgtacatttacattgcaagaactacttcaagtttacaaaagatatatcttctcttagtcaacgagtgctgctatctggcccaacaggaactgatatgtatcaagaatatctggtgaaggcccttgcaaagtattttggtgctagattgctcactatagattcttccatgctgtttggtgggcaaacttccaaggaatcagaatcatacaaaaagggtgatagagtgaggtatattggctcaggcattatccttgatggacagagccctccagattttggttcacagggtgaaatatttcttccttttgaagaaaacagatcatcaaaggttggtgtaaggtttgataaaaaaattctgggaggaaacaatcttggaggcaattgtgaagttgatcatgttgattctttatgccccgacattccaggatgggaggttacgttcaaacatccatttgatgtgatagttgagtttatctctgaagaaattcggcatggccctttaatcctttttctgaaggacacagagaaaatttgtgggaataatgattcctatcatggtctgaagagcaagctaaaacattttccagctggcgcttttataattggatctcaaatccagcctgacaatcgcaaagagaaggcaaatgttagttctccttttctttcgaagttccggtacagccaagctatacttggcctcacattacaggacattgatgggggaaatgataataataaagaaacatcaaaggcaataatgaagcatttgatcaaacttttcccgaataaagtgacacttgaggcaccacaagctgaaatggagctttcacggtggaaccagatgttaaaccgagatattgaagtccttaaaggaaatgcaaacatttcaaaaatacgctcttttctaacaaggcttggattggaatgcactgaccctgaagcgatattggtcacggatcgcattcttacaaatgagtgtattgataaaataattggttttgctttgagccatcaacttaagaactgtacaaatccagacccccctttgggtagtgtgcagtttgctctatccagcggaagtcttaagcatggcgttgacatgttgaaaagtatccagtctggctcgaagagcagcaccaaaaggaaatcacttaaggatattgctactgaaaacgaatttgaaaagagccttcttgctgatgtcacccctccacatgaaattggtgttacctttgaggacattggagctttagaaagtgtcaaagatactctgaaggagttggtgatgcttcctttgcaaagacccgaacttttcaaccgaggacaacttatgaagccatgtaaaggaattttactttttggcccacctggtacggggaagacaaatgctggctaaggctgtggcaactgaggctggtgctaatttcataaacatatcgatgtcaagcatctcttcaaagtggcttggtgaaggagaaaaatttgtgaaagctgtgttttcactggcaagtaaaattgctccaagtgtaatttttgtggacgaggttgatggtgaatttgccagatgcatcaaataggagaaaaattcttagtgtaatactagccaaggaagatttggcagacgacgttgatctagaaactatagctaacctgacagaagggtactcaggcagtgatctcaagaatctgtgtgttactgctgcacaccgtcctattagggagattcttgaaaaggaaaagaaggaattgcaattgagtttcaagtggatttgctcacatgcaggagagagcttcagcagaagcagaaaatagatcattgcctccgtcacacactagcaatgatgtccgtgcattaagaacaagtgatttcatacatgcgcatgaacaggtgtgtgcaagtgttccctcggattccagtaacatgagcgagcttgtgcaatggaatgatctctatggagaaggcggatcaaggaaaaagacaacgctaagctacttcatgtagcttaggttataaatatattgggagaagtgccctggcacaaagcagcaatagttggaggcggtgcagttggaaaaaaaaagctatgctcatctgccagacatccatatcaaagagaattgatggttcaggtggagcggaatagaatggaatggaatagtatacatacacatggttgctgcctctgctctgggccatgcatcatgcatctggacaggacggctatcctggcttgcagttgccctatgcagttttgagtgcaatggtcaccatctgtgaagcacggataccacagagatcctggccccaaccactcttttcacaaatggagctgaggacctttggagttctaccaaaagtgatcttaaatctttgttctttgactttccgttttgtgaacggaaggccccactctgctagtatggattgttgatcctccgtttctctggtactgactgaactgctcatacaaaactcgttcaacaggcagaaatgctgcctggtggccttctagagtgcttctttgacgccgcagagagcacatcaaaaaaaatgtgtttgtttcgaacgatttgtgctgcattccattcacggcgatatcaggtgccgttgtttgtgtttggttccgcaatcaagggagtgaaagccattagcacatccaatcaaacaaatagcgatatctctttcactgtaccagttagcgctggtctcggatgctattaacattgctgttgtctgtctcggaaccaaacaccgcctaactcgtcggctgttaaatatttctgaactgaattactgcacttggttggggtttcatgcttatcaagttggcttatatagccaacaatactttgtgcagttctgcatcctctgcctgcttatgcgcgatctcattggctgagcggtacgaagataaaacggtagctaatccgaagcgatggcttctctttttctttctacggtattttgtctctatgaattacagttacagcagtcagaacagctgatttaaaaccgcagcgaaaaggctgattgccttgcccatttttgggtgggtggaggttaatacagatttctgtaatttttttactttaatattgtttgacatattgtgcaaggcaaatgatttcctaatgatttgttctacttgatattgtaatccatattgacctatatgctatgctcagttccttagagcatctccagtacttgatattgtaatccatattgacctaggggaaaaaaaggagaatttaacctgatgacactggtggactatgctatgctcagttccttggaacatctctagtagttttgtaaaaaaatctctctaaagacagatgtaaggagttgctacataataatagggagtaaaaatatctgtactctcatgtagtctttatttttagttaccaaatattataaattatgcctgctgaaactcctctccctcacgttatagaaagttttatgtttttccaatcaaac

SEQ ID NO: 8961 - DNA, 484 bp, Zea Mays
agaagagtttgtagatcaggaatatgtatttgtgtctggaccacacccagagggatcatcgtcttcaacaaatgcctctcaacagcttaacttaccggcaaaatatgataatttgtctgtttcaccaccgaagttaactttcttgagtgcaccaaagccgataaacggtttgccgattaatagacaacaatctgctgggactggtagcttcgacagccactattctcctgcatctgtcacttcacagggatctgcggatataagtgatgccatggatcagcccccaactgattatctgacgaggattagattgttggagcaatatgcatcagccatagcagggttggtcagggatgagaacgttgacaaatatgcagatcagctgaccaagaatgaattatcatcaccacccaaaaagatgaagcacacccaggttagcaaaggcatgccagattctacatgttccaagaatgacaacatttag

SEQ ID NO: 8962 - DNA, 3162 bp, Zea Mays
ggaatctactactactctataagggtgtaaggagggcgtccaccatgcccccgcccgacgcccccttgcccccgtccatctcgccgcaaggcacgcggcgcgcctcgcgatgccccctcgcccccgtttgtctcgccgtgatgcgtgcggcgcgcctcgcgatgccctctcgcccatgcccctgctcgcctcttctccgccccatccccctgtgtctagcgcgctacccgcccctcccaacgtcgtcctctccgtcccatcctcccatcgtgcgacaaccgatccacgcctcgaggcccaggccgtgccacgccggtggggaagcgaaactcacttacaggacgcggatctccttccaaactcgaaggcgacgatccggcacaggggcaaccttccatgctgcttgtggggtggggacaatgaggcagcaagactcaaggtccaggatgatgaacaacaacagcggcgtcgacgcaggaggccctggttcaggcatgggtctgggagtgccggatgtgccattgggattaagacaaaaggggtcacaatgacagcgctgttggctaaggcgacagcaacggctctgcttcagcatcctatggtgaacttgcagctgcagggatggaaagagcttcacatacaaaaatagtatcaacattgctatagcagtggccatagatggtgggttgattacatcggttcttcaagatgctggtaaggtcaaacactttaccgtgcacaatgaatgttgattttttatgatttatttaaatgagtggttacttgttggtttatgcgtcttgacatttattcattgtcaaggaaacagaaggagttagttgataaggcgctagcaaagcagttgcagccccatgagtacaactctgatatttttttgcctcatacacaaatatgaatatgtagcacattgttgtatatcttttctaatgctctgaataagatgtggtggtacagtgcagaataatatgttctgttttttattcaactattcaaatcttatttttattcggctattcaaatcatattttttttattagctgattgccggagagattgaaatcaaaggggttgagctgcaggagagttgtagtttgtcgttcttttccatggtaggcattttcattgggatcatacaattattctctgtcgatgtttacaagaaaatagtatctaaaaacaagatgcttctgttccatgagggtgtgattgagactgaaacggtgggtaccagagtgaaggagtcggaggcagttttagtagagaaagaggtcgaactgatcgatgagcctcagattcaagagagccctccagttcctgcattgttggatgatgagcaaccatattacttgaatcagctagcccatgttttgaaagttgtattggtacctcttctatggttagtggtggaatggcctgaacagtcctatgaaacagcaaaaactctgttacagtccactcaggtggaagaggttgtttgtagatgttttttgttttcatatctgaactgtaatagtaaggttacaataatttttcacatagctgatggaacttctgtttgtgtgaagccaacagatggtccctcctgctaattagaaaccaatttttttagactttttcagcctcctctactgctcatgttgctggcttgtaataggtgggctaggggttatctagagatgacaaggccctcaagttggctttccagcactggatcgaagcgatgagtacaaacgggcagtggggattgagcacgtgggagagcgccgcagctgctgcggctgtggcggatgtggcggccatggcgtggcgacctgtggcaaatggcggcatgaagaagaagctgatttgaggagtcgtcgctggactgggagaagtacatgaaggacaataacaaaattctcggagaatttgagtgccttgacaaatcaccatttagatactttcttggggaactatatggtggcaattcactgggaagcacaattgcagtgggcaatgagaagaagcggcagcgggtgtacaacactatgtttcatgtcccatggagatgtgaacggggaaattcagagtcgtgttcgcctcaattcctgcacccatctttgcagctctatattgttcaacaaaagatttgggaactgggatagctgaagatgcctctactgaagatgatgatttcagtggcgacctaccaccagagtttgaaaatatcatgatattcaatggtgttgaaaccgagagtgacattgctcctccagtgctcgaggaaaacaaggatgctgttgtatctgcaacaaaaactgcaaagtccctggatgggtttgccttaaaaacagggcaggaggaggagggtccggaagaggttgatgctactgaaaaagcaatggaagtggttgataatgttgtgaagtccctggatgaagaggtagaatcaaaggagatgcagaagcagcaaccgcatgattataatagcatgagcctaggggtggtaacgggtcatttaatttagcctagcaaatttacggatcgaatcaagttagggccggatcataaaataatacaattttgaactaataaaattaagggctttgttggttcgtgaagcaagtattagggccatgatccattaccactcctacatgagcctcaggaatcttaaagccacacacaagaaatatctcattgctgcaaaggaagaggaggtcaccgaagggaagaggcttcctctcgaggaggtggaagagaacgcatgcatcagccactgaacagaacaagcaggcgatttttttgtgtggatggcgtctgccacaaaaggattgaatcgaggagtgtgctctggttgtgaagtgataactaggctaccacatgttcattttcaaaagttttcgtgtgtgatcgtgatcaggggtgaaactgtggtttcagccaacaaacttgcagttcctattgcttctccccacttttttcctttatatatattttgtatcggttacagaacatggtttatccagtggtatgctgatgaaagatgctaagtttcgcttaatataatgtatatgaaggtcctgggtacctcaaattttgtccacattgaaccagtacgaatgacatcttccttgaaagttatagaaatgcttcaaagtt

SEQ ID NO: 8963 - DNA, 2484 bp, Zea Mays
caagccactgccgttgtctgtactaagcacccgcgggtttcgacaagaagcgtaagctagctatggcaacggggaggaggggaagcccgctgctgcggaggtgcaagcgcgaggggtacacgcacgggctgcgcccgccgcagatggaggcgctccgggccatgtgcggcgcgctcatcccgtccctacccgtggagggcctccacgtccagcctcagcccggccgtggcaaggacgacctcgaccggttcttccgcgcgtccgccgccgacggcgccatccctgacgaggtaaacgagaactcggacaacccgtcctggaaagcaataggatacagcgtgcccgtgccggcggcggcggcggacgtggacaggctacggccacgggaattaggtccagcggaggcagaggcgccgtcaccgcggccactggacagcggcgtcgtggagaccagatccctgaacgacgccacgctgctcaagtcactgacggagagaggagtggcggtgaaagcgggcgtgtcgggcgcgcaccacaccgtgcaatgcgacgtcgtcatcgtcgggtcaggctgcggaggcggcgtggccgccgccgtgctggcggcggcggggcgcaaggtcgtcgtcgttgagaagggggactacttcacagccgagagctacacctccgtggagggcccgtccatggagcgcctctacgagaaggggggcatcttctgcacgtccaacgtgacgaccatcatgttcgcgggcacgacggtcggcggcggctctgccatcaactggtccgccagtgtccgcacgccggagtgggtcacgcaggagtgggcgcgcgagcatgggctccccatgttcgggaggccggagtacgcgcacgccatggacgcggtttgcgccaggctcgccgtcaccggcgggtgccgggaggaagggttccagaacaaggtgctccgccgcggctgcgaggcgcttgggctgcgtggcgacgccgtgccgcgcaactcgtcggagggccacttctgcggtagctgccacctgggctgccccaccggcgacaagcgcggcaccgacacgacgtggctcgtcgacgccgtcgcgcgcggcgcggtcgtactcacaggttgcaaggccgagcgttttgtgctggagagcaacccaggcggcagggacggccggagcaacaggtgcgtgggcctggtggcgacgtgcatgagcgacggcatcaccaagaagctgcgcatcgaggccaaggtttccgtctcggcgtgtggcgcgctcatgacgccgcctctgctccgcaacagcgggctccagaacagccacgtcggccgcaaccttcacctgcacccggtgtctatggcgtggggctactttccggacagcacgccggaggcagagctcagtggcaagtgctacgagggtggcatcatcacgaccatgcgtcgcgtcaccgcgcgcaccatcatccagacgccggcgctggggccaggatgctgggcttcgctggtcccctgggagtcgggccgcgacatgaaggagcgcatgctccgctacgcgcgcaccgcgcacgccttcgccctggtccgtgaccgcggcgcggggcacgtcgacggcgagggccgcgtgcgctacaccccgagccgggaggacgtggacgagctccgcaacgggctgcgccagacgctgcgcatcctggtggccgccggagcggccgaggtcggcacccaccgcagcgacgggctccggctgcggtgcgacggcctccgcgacgaggacctggaggcgttcctgaagcaggtgaccgtagagaaaggtcccatggtcccggggcatgacaagtgggcgctccattgctcggcgcaccagatgggcagctgccggatggggtccagcccgaaacacggcgccgtggacggccgcggcgagagctgggaggcggaggggctgtacgtgtgcgatggcagcctgctgcccacggcggtgggcgtcaaccccatgatcaccatacagtccaccgcgtactgcgtctccaagggcatcgcggagtctctggcgcgtgacaataaatagtagcctggtttgagaccgtcggatcgtgctcgcgcgcaaatggttgttgcccctgccagtggctgtgtgtgtgcatgttggatgtgtcttcatccttgtaatttgttgcataaaaagcccatcggctcgtattttcatacatcattttttaacgcttttcctatatacttagttgaggtcattgaacttaaaaataatttcagaggacaatattgtaccattaactagcccaagtatagtttattatttgttttttgttataatatatcaagttgttgtctctatctgaccataaaaacaattatatattgttaattatttttataccatataaaccatatttttgccagatttatgatttattaaaatataacttttcttctcggtacttaaaattacagagtgtgcataa

SEQ ID NO: 8964 - DNA, 2583 bp, Zea Mays
ccaaacccccaacctattcgagcgacgaaactggaaaaaagcacgcgacgacgcgacggtgaaggggaagtgtgaagggaagcagaagcgagacaaatccccacccggctccaaaccctagccacctcccccgtcccccccttttcgtcccccagatctcgctggcgtctgctccgcctcgcttcgatgtgaccccaccctagggtttgagacggtgttgcggtgtgtgcgtgtgtcgcggcgattcgcgacgcgagtaggattcgaggtgtcggcggcggtgcgagcgcaaatgaaggacccggcgcaccgcacgaaggtggtgctccggcggctgccgccggcgatcgcgcagcaggccgtcgtggaccaggtcgatgcgcgcttcgctgggcggtacgactgggcctgcttccgtcccggcaatgccagccaaaagaatcataggtattctcgactttacctaaatttcaagcacccagaggatgttgttgagtttgctgaggtcttcaatggacacatatttgtgaatgaaaagggtgctcaatttaaagctttcgtggaatatgcaccatcacaacaggttcccaagtcaaatgtcaagaaggatggccgtgaagggactgttacgaaagctgctggaaaggaggcacctgttgtgacacctcttatgatgtatgtccgccagcaaagggcagctaagagtatggctcagagacctggaagtaggcttagcagaaaagttgcaggtgttgtaactagcagttccagtcctaaaaggtcttttgagaagcgcagatcctccacgtatgttgtacgagacagtattaaggagaaaccgacctatatcatggtgccaaagagagaggagcatacacaaagggaaaaaattgtttctggaaattcagatgccacaagtgggggggcatctggatctggtcagtcttctgacaaaattgtcattttgaaaggaagaggaagggttgattcgaacacacctgatggagcagctcaacagtcatcaacccctgtgaagaatataccaccatcgagttctagactagacaagcgatctgaagctaatggaagaattattaaaactgttctttcaaacaaggaagttcgcagttcaaatccatctcaacatgagcaggaaggtcaaatgtttaatactgagaaggataagcgtccaccacgggctctcaaccctcggactattgtgaaagatcaggtagttgaaaatgctgagagaagccattttgatgagaagaataattatctccacagctctgctccaattggtgagaaggttgaaaggcatgccagaaacagagatagacctgatcgcagtgtatgggcacctcgccgctatgacaaatctccgcctgggggtgtttcacatgccttgtcgtcagatttttctcaaatgcagtcacattctggagataatgtctcacaactaacagatggtcatggagacagaaagacagacacaaggggtcatggaggtagccgtggtgttcctgttgaaaatggacataggcatgccaaccgtcgtggtaccccatgtgatccaaaggaaaccaaaatatctgctagcgtgcctgatggaaagaattcaaagaggggctctgctagctatggtgctcatgagagacaagtatgggttcagaagtcaagttcaggctcgtgagtttgtccattgatgatactcccataaaaaacaggtattgaagtcgtggagaagtcttggattctgcagcgcattcttctttgttagctgttgatcctgtgaagtatggtaacgaaatgtccaatggtcaaatgctaccatgaagtgcaatctcagatctgtcagtcgaagtctcagctgaaaagagggctcggctgatttgattcacagaaatagtgaagtaacataacccggcatgtaggtagctctccgacaactttgggcaagatttgatttatgcccaatgttgatctttctggagcattggatggagattaggttggcatcactacctcattacctcgtgatagtggtcacatatttccaagacccctggaggttacacgcaccctcggcaattcgtcagagatggatgtaaatatctctagagaaagaagaggtctggttccgattgctgtttacaggttagaggtgcaacgtatttacaaagagagataagagttatcacttatcagattacctggtttgttaaataaaggtgaatttagctactagattatgagaccccgtgttttgacttctgcaatcgtggttcacgacagcagaaaggttacctaggagtgtaaaagtgacatctcattttgatgctatggttctgactcaatgggatgtgactttgtgatgtggttttgtcgcctggtgtgtgttttgctgccatgttcctccaaatgacccgggtgttctgtcgtgttagggatgatatgcttggtgtacagcatcaaaggtgcttaatgttttaaatcttaaaagtgatgttgcctggctttaatggttgatgatgtccgttctcctgtgcatttcgtcatgaaggttaaaaatatagatttgcc

SEQ ID NO: 8965 - DNA, 1953 bp, Zea Mays
atgcatggtggaaccctagagcttcacccctttttagcaccagcattccgccgcacgacctcactcaccacaggtgcggcggcgcacactgctgcacactgcactccctccgtcccgcgtccccgttcggcgctctcggcacgaccgccggtagcccgggacgcacgtcgcacggccccatccctcctagcggccggtgacggcaccggcggccctttgctcggctgtgcccaagctgcgagggcgagatctacccccgcgtccgtgcatcttcgtcaggcccttctccggacgagcactcacaggatgtgttctgaagttcatgttgagggagatgcaagtgtcggacagaagggttgcaaggatataaggcgttacaaatgtgaattttgcacagttgtcaggtcaaagaaatgcctaattcaagctcacatggttgcacatcataaggatgaacttgataaatcagaaatatacaactcagatggggaaaagattgttcatgagcaggaacataggtgccaagagtgtggccgttgtttccagaaaccagctcatctgaagcagcacatgcaaagtcactcacatgaagactctttatttgcccactggaagactgccccttcagctataaaagaaaagatcacttgaaccgacacatgcttaagcatgagggcaaattgtttagttgcaccctggatggttgtgatatgaggttcagtatgaaggcagatatgcaacggcatgttaaggaaatccatgatagtaagaacccccatcaatttgtttgtaaggaggacggctgtaacaaggttttcaggtattcatcaaagctgaagaaacatgaggaatctcatggtaggtcagcattaacctgataattaggaaattaataaatgcagagtgttcatattactcacatcatgttcatgtactagtacaagtttttcatttgtccagcatattggttctccaaatttgagtttgtttccttgcagttaaattggactatgtggaggtagtgtgctgtgagccaggttgcatgaagatgttcagaaatgttgaatatctgagggctcataaccaatcttgccatcagtatgttcagtgtgagatatgtggagaaaagcacctgaagaagaacatcaagcggcatctgcaatcacatgacaaggtgccctctgatggaaggatgaaatgcacttttgatggttgtgaacacttcttttccaacaaatcaaatctgaccaagcatgtcaaggcatgccatgaccagctgaaacctttcaagtgcggaatcgttgggtgtggcaaggcgttcacctacaagcatgtcagggataaccatgagacatctggtgctcatgtatacatggaaggagactttgaagagttggatgagcagttgcgtgcccggccaagaggtggtcggaagaggaaagcattgacggtggaaacactgacacgcaagagggtgaccatctccggcgaggcttcatccttggatgatggagtggagtatcttcgctggttgctatctggtggggatgattcaattgattgtcagtagccggcgtctttttgctatcaccgctgctttgtacatgggttagattatgtaatgtaagttgtttggtagactacgatggtgttcatgacgcgtttgatatattgtcagcagtatggtagtgcagggctctcatagtaaagcttgccatttttgttgtatctttaacccacgtgggtccagatgatgtgtttattcctatgtatttacttatctacatgtatccacatgtgcgactttggcgtttgtttgagattataatctgttaaaatatgttggattatataatttgggcagattataattccaaacaaacactgactaatgctctatttgtttaccctctagtttatataatctagcttaaataagttaaaagaaacaaa

SEQ ID NO: 8966 - DNA, 2022 bp, Zea Mays
caacagcccaatgcccccatgcatggtggaaccctagagcttcacccctttttagcaccagcattccgccgcacgacctcactcaccacaggtgcggcggcgcacactgctgcacactgcactccctccgtcccgcgtccccgttcggcgctctcggcacgaccgccggtagcccgggacgcacgtcgcacggccccatccctcctagcggccggtgacggcaccggcggccctttgctcggctgtgcccaagctgcgagggcgagatctacccccgcgtccgtgcatcttcgtcaggcccttctccggacgagcactcacaggttcatgttgagggagatgcaagtgtcggacagaagggttgcaaggatataaggcgttacaaatgtgaattttgcacagttgtcaggtcaaagaaatgcctaattcaagctcacatggttgcacatcataaggatgaacttgataaatcagaaatatacaactcagatggggaaaagattgttcatgagcaggaacataggtgccaagagtgtggccgttgtttccagaaaccagctcatctgaagcagcacatgcaaagtcactcacatgagggcatagatagttaacagcgtgaagcattggatcccatttaaagaactccaaaatgcgacgagagactctttatttgcccactggaagactgccccttcagctataaaagaaaagatcacttgaaccgacacatgcttaagcatgagggcaaattgtttagttgcaccctggatggttgtgatatgaggttcagtatgaaggcagatatgcaacggcatgttaaggaaatccatgatagtaagaacccccatcaatttgtttgtaaggaggacggctgtaacaaggttttcaggtattcatcaaagctgaagaaacatgaggaatctcatggtaggtcagcattaacctgataattaggaaattaataaatgcagagtgttcatattactcacatcatgttcatgtactagtacaagtttttcatttgtccagcatattggttctccaaatttgagtttgtttccttgcagttaaattggactatgtggaggtagtgtgctgtgagccaggttgcatgaagatgttcagaaatgttgaatatctgagggctcataaccaatcttgccatcagtatgttcagtgtgagatatgtggagaaaagcacctgaagaagaacatcaagcggcatctgcaatcacatgacaaggtgccctctgatggaaggatgaaatgcacttttgatggttgtgaacacttcttttccaacaaatcaaatctgaccaagcatgtcaaggcatgccatgaccagctgaaacctttcaagtgcggaatcgttgggtgtggcaaggcgttcacctacaagcatgtcagggataaccatgagacatctggtgctcatgtatacatggaaggagactttgaagagttggatgagcagttgcgtgcccggccaagaggtggtcggaagaggaaagcattgacggtggaaacactgacacgcaagagggtgaccatctccggcgaggcttcatccttggatgatggagtggagtatcttcgctggttgctatctggtggggatgattcaattgattgtcagtagccggcgtctttttgctatcaccgctgctttgtacatgggttagattatgtaatgtaagttgtttggtagactacgatggtgttcatgacgcgtttgatatattgtcagcagtatggtagtgcagggctctcatagtaaagcttgccatttttgttgtatctttaacccacgtgggtccagatgatgtgtttattcctatgtatttacttatctacatgtatccacatgtgcgactttggcgtttgtttgagattataatctgttaaaatatgttggattatataatttgggcagattataattccaaacaaacactgactaatgctctatttgtttaccctctagtttatataatctagcttaaataagttaaaagaaacaaa

SEQ ID NO: 8967 - DNA, 1419 bp, Zea Mays
cagttttcagagctgagggcgcgatcggcgtgaactacggcatgatcgccaacaacctgccggcgccggagcaggtcgtctccatgtacaaggccaagaatatcagctacgtgcgtctgttccacccggacacgaccgtgctgaacgcgctccgcggctccggcatcggtgtcatcctgggcacgctgaacgaggacctcccgcgcctggcgtccgacccgtccttcgccgcgtcgtgggtggccaccaacgtgcagcccttcgccggcgctgtccagttccggtacatcaacgcgggcaacgaggtcatcccgggggacccggcggcgcaggtgctcccggccatgaagaacctggagtcggcgctccggtccgcgggggtcgcgggcgtccccgtcacgacggccgtggccaccagcgtgctcggcgcgtcgtacccgccgtcccagggcgccttctccgaggcggccacgacggtgatggcgccgctcgtctcgtacctgtcgtccaggggcgcgccgctgctggtgaacgtgtacccgtacttcgcctactcgggcagcggcgggcaggtggcgctcgggtacgcgctgctgtcgggcgccggcgccggcgccgcgtcgacggtgacggacggcggggcggtgtacactaacatgttcgacgcgatcgtggacgcgacgcacgcggcggtggagaaggccggggtgcaggggctggagctggtggtgtcggagaccggctggccgtcggccggcggcgagggcgccagcgtggagaacgcggcggcgtacaacaacaacgtggtgcggcacgtcgacggcggcacccctcggcggcccgggaaggccctggagacctacctgttcgccatgttcaacgagaacggcaaggccgagggcgtggagcagcacttcggcctcttccagccggacatgagcgaggtctaccacgtcgacttcacggcgggatccccctagggaggctcacccgcttctgtgtttactttatttatgtagtaggaatgatcattcttcattcagagactgatcgacttcatcggagctgctcgatactcgagcggcgcggataggcttactgcgtactggtagtattgttggagacttggagtagcattactatcgacgtgattcattacagtgcatgtcgttacacggcgccatggatttatcttctctgttcagcactgtcgtcaagtggcgaaatcagggtactatgagatcgtagaatcaagaagagagtacatagacgatttatagagatcaaggctgtggaagcctaatactctataccttttttgacggatgaattgacgaagacgaagataaaaaagattgcacgcttagatgttgtatgatctagatgactgaaaagctcacctttttctttcgattgtgg

SEQ ID NO: 8968 - DNA, 1360 bp, Zea Mays
atggaggcagcggcggcgctgccgccggagagggatacgtcagcggactggggagatggcgtggtaccgctaggtttccgggtgaaggcatcctctcgcgagtcgccgtcacagaaggcggggaacgtgctggaggccgacctgcgctcccactgggccaccgccaccaacaccaaggaatggatcctccttgagctccaggaaccgtgcctcctctcccacatccgcatctacaacaaatccgtcctcgagtgggagctcactgccggactgcgatacaagcccgatgcattcgtcaagttgcgcccccgctgcgaggcccccaagcgcgacgtcgtctaccccgccaaccacaccccttgccgctaccttcgcatttcctgcctgcgcggcaaccccatcgccatcttcttcatccaactctttggcatccccgtgcctggcctcgaacctgagctccagccactgctcagctatttactcccgcaaatcacatcctccaaacaacccctttctcacaacatgcacctccagttgcttaaagatatctccaccaggctacctccatttcttccccaaattgagtccagcttctactccaacagtttcttcaaactttgaggcacaaccaaggagatcacggagtccatctgttcagcctgcttcatatttgctggcatttcgatctgaaacaactatgctcctcttaaggaaagcacataaagacaaaacccttggagttgtttgtgttcgagcatcgaaggtattgcaaaaactgttggagcctgagccatttttagacaaatcgatgtatactgatgtcatgctaccaaaccaagtctctgatgaaattcctaaaagcgatgctctcagcctagtacattctacagactactccagtatgtttggagaggaatttagcctgtcagagaatcagtttgatggttcattactgaatattttggatattgctgctgtggaagaaggcattcttcatgtactatatgcggctgcatcacagcctatgctatgtcgcaagcttgctgaaactacttcagacatttggtctgtcttaccacttgtccaagctctacttccagcacttcgtcctccaatcagttctggtcctattgaacatattgatgattcttttagccaatggaaccatccaaacattcagaatgctctctcccagattgttacaatgtcagtatcgtcatcagtttttcatcctcttctcagagcttgtgctggttatctttcatcctaccttccatcacatgtaaaaacggcttgtgttttgcttgacttgtgtcggggggcattgttatcatggataccaatgataacagcaaaggtc

SEQ ID NO: 8969 - DNA, 1611 bp, Zea Mays
gtcgtcttgctctactctagtcgttcggtcttcactcgacaaaaggtgagggagtgcagtccggggacgggagggagaccaatcggagctgatggaggcagcggcggcgctgccgccggagagggatacgtcagcggactggggagatggcgtggtaccgctaggtttccgggtgaaggcatcctctcgcgagtcgccgtcacagaaggcggggaacgtgctggaggccgacctgcgctcccactgggccaccgccaccaacaccaaggaatggatcctccttgagctccaggaaccgtgcctcctctcccacatccgcatctacaacaaatccgtcctcgagtgggagctcactgccggactgcgatacaagcccgatgcattcgtcaagttgcgcccccgctgcgaggcccccaagcgcgacgtcgtctaccccgccaaccacaccccttgccgctaccttcgcatttcctgcctgcgcggcaaccccatcgccatcttcttcatccaactctttggcatccccgtgcctggcctcgaacctgagctccagccactgctcagctatttactcccgcaaatcacatcctccaaacaacccctttctcacaacatgcacctccagttgcttaaagatatctccaccaggctacctccatttcttccccaaattgagttcaggctgaccttaatagtgtcgtggacaccccagaaagcagcgtgcggttcttggctctacttgctggtccattttatcctatccttcaccttataaatgaaagagatcctaccaaatctttgtttggttctgctgattcagatgccctcagaactagtccagcttctactccaacagtttcttcaaactttgaggcacaaccaaggagatcacggagtccatctgttcagcctgcttcatatttgctggcatttcgatctgaaacaactatgctcctcttaaggaaagcacataaagacaaaacccttggagttgtttgtgttcgagcatcgaaggtattgcaaaaactgttggagcctgagccatttttagacaaatcgatgtatactgatgtcatgctaccaaaccaagtctctgatgaaattcctaaaagcgatgctctcagcctagtacattctacagactactccagtatgtttggagaggaatttagcctgtcagagaatcagtttgatggttcattactgaatattttggatattgctgctgtggaagaaggcattcttcatgtactatatgcggctgcatcacagcctatgctatgtcgcaagcttgctgaaactacttcagacatttggtctgtcttaccacttgtccaagctctacttccagcacttcgtcctccaatcagttctggtcctattgaacatattgatgattcttttagccaatggaaccatccaaacattcagaatgctctctcccagattgttacaatgtcagtatcgtcatcagtttttcatcctcttctcagagcttgtgctggttatctttcatcctaccttccatcacatgtaaaaacggcttgtgttttgcttgacttgtgtcggggggcattgttatcatggataccaatgataacagcaaaggtc

SEQ ID NO: 8970 - DNA, 1633 bp, Zea Mays
cagagagtcgtcttgctctactctagtcgttcggtcttcactcgacaaaaggtgagggagtgcagtccggggacgggagggagaccaatcggagctgatggaggcagcggcggcgctgccgccggagagggatacgtcagcggactggggagatggcgtggtaccgctaggtttccgggtgaaggcatcctctcgcgagtcgccgtcacagaaggcggggaacgtgctggaggccgacctgcgctcccactgggccaccgccaccaacaccaaggaatggatcctccttgagctccaggaaccgtgcctcctctcccacatccgcatctacaacaaatccgtcctcgagtgggagctcactgccggactgcgatacaagcccgatgcattcgtcaagttgcgcccccgctgcgaggcccccaagcgcgacgtcgtctaccccgccaaccacaccccttgccgctaccttcgcatttcctgcctgcgcggcaaccccatcgccatcttcttcatccaactctttggcatccccgtgcctggcctcgaacctgagctccagccactgctcagctatttactcccgcaaatcacatcctccaaacaacccctttctcacaacatgcacctccagttgcttaaagatatctccaccaggctacctccatttcttccccaaattgaggctgctgtctgtttagttcaggctgaccttaatagtgtcgtggacaccccagaaagcagcgtgcggttcttggctctacttgctggtccattttatcctatccttcaccttataaatgaaagagatcctaccaaatctttgtttggttctgctgattcagatgccctcagaactagtccagcttctactccaacagtttcttcaaactttgaggcacaaccaaggagatcacggagtccatctgttcagcctgcttcatatttgctggcatttcgatctgaaacaactatgctcctcttaaggaaagcacataaagacaaaacccttggagttgtttgtgttcgagcatcgaaggtattgcaaaaactgttggagcctgagccatttttagacaaatcgatgtatactgatgtcatgctaccaaaccaagtctctgatgaaattcctaaaagcgatgctctcagcctagtacattctacagactactccagtatgtttggagaggaatttagcctgtcagagaatcagtttgatggttcattactgaatattttggatattgctgctgtggaagaaggcattcttcatgtactatatgcggctgcatcacagcctatgctatgtcgcaagcttgctgaaactacttcagacatttggtctgtcttaccacttgtccaagctctacttccagcacttcgtcctccaatcagttctggtcctattgaacatattgatgattcttttagccaatggaaccatccaaacattcagaatgctctctcccagattgttacaatgtcagtatcgtcatcagtttttcatcctcttctcagagcttgtgctggttatctttcatcctaccttccatcacatgtaaaaacggcttgtgttttgcttgacttgtgtcggggggcattgttatcatggataccaatgataacagcaaaggtc

SEQ ID NO: 8971 - DNA, 2379 bp, Zea Mays
aaacaaaacaaaagtcgcgagccgccggcaacagcagctgtccgtccgagtcttcgcttcgcttcgcttccatttcgtcgccgttgcacctcccatagtaatagtcccccattcaatccgctcggtccaaatccacgtcttttgtcgtggggtggtgtctggcattgcattattggaggatcgaaaccatcgccaccgcaccaatgatccccttctccgtcctcgccggcgccctcgtcttgctcgtcggcgtcgccgatgccctgcccggtgaaccttccatcatcacttccgccactgctattctctcgttccctcctgctgcgtaggtccctgaccgagttggctcgctcggctcgcgcgcagggtaccagataagctgcggcgcgacgtcggacaaggtcgcggggaacgtgacatgggtcgccgacggggcgttcatccacgccggcaaggtggcggagctggactccccgggcgtcatgccgatgctctcctcgctcaggtacttcccgccggacgcgtcgtccgccgccaagtactgctacgcggtcccggcggcgatgcacgccaggtacctggtccgcacgacgtactactacggcgggttcgacggcggcggggcgccgccggtgttcgaccagatcatcgacggcacgcggtggagcgcggtggacacggcggggggctacgcccgcgggctcgccacgtactacgaggccgtggtggaggccgcggggaaggagctcagcgtctgcctcgccaggagcgccgccaccgcgcccggccggagccccttcatctccgcgctcgaggtggtgccgctcgaggagtccgtgtacagcgccgtcaacttcaccgcctacgcgctgagcaccgtcgcgcgccacagcttcggccacaacggctccatcatcggctatccagacgatcggttcaaccgatactgggagccgtacagcgacgggggcatcccggtggtggagagccaggcgagcgtggcgacggaggcgttctggaacaagcctccggaggccgtgttccggcgaggcctgacggcgagcagagacaagagcctggagctccagtggccgccggcgccgctgccggccgcgagctactacctggcgctctacttccaggacaaccgggggccgagcgcgctcagctggagggtgttcgacgtcgcggtcaacggccagcccttcttcgccggcctcaacgtctccacggcggggtgcatggtgtacggcgtcgactggccgctatccgggcagacaaggatcacgctgacgccggcgctggagtcccccgtcgggccgctgatcaacgcggcggagctcatgatggtcgtcccgctcggtgggaggacgcatcccagagacgtaatcggcatgcaggagctggccagaggattcacgaacccgccgtcggactggagaggtgatccatgcttgccccaggggaactcgtggactggtgtcacctgcaaccaagatccactggcaagagtaactgggctcaacctcacaaatttcagagttggaggatcgatatctaacaacattgccaatctgactgcaatttccagcatttggcttgtcgggaacaatttgaccggcccgattccagatctgaaccacctcccaatttcgggtgcttcggaccattttccttcccttttttgaatcacgattttttgttgtacttcggaatgtatacttatctcttcccctggtggacgatgtggagccgctccccatcccattgaccgtgccagagacggagcccatgtcgcgggaggagctggaccgccggctcagctgcgacgtcgagatcgatgaatgcaagacggtctcatacgagtggacaggcaagtgccggagctgccaggggacgggactggtcagctacttcaggaagaagggcaaggagaccatttgcaagtgtgtgccatgcgccgggattggttatgtgaggaaaattacacttcgtgaggacattcaaaagatagacgagctagacaatgagaaactaccatagtttgaaaggtctcaagtcattcggcctctgcaattttgtaaatgctgccgaagagcttgtgctcgcaacctacacattgactaatggttctttccactgcacatttactgttcaggcacgatactagcttggaggggttattctttaagcactgtaaacttttgtgttcaaaaaaaaacattgcaaacttagcaatggtgtctagtaattgtaccccttttatcttggttatttgctgatagatatgataacgatcgatacagaaaagaaaataataattgtatcccttttgtaaattcttttagcacgttggtatggtccatctgtttctctcct

SEQ ID NO: 8972 - DNA, 2525 bp, Zea Mays
ccaaaacaaaacaaaagtcgcgagccgccggcaacagcagctgtccgtccgagtcttcgcttcgcttcgcttccatttcgtcgccgttgcacctcccatagtaatagtcccccattcaatccgctcggtccaaatccacgtcttttgtcgtggggtggtgtctggcattgcattattggaggatcgaaaccatcgccaccgcaccaatgatccccttctccgtcctcgccggcgccctcgtcttgctcgtcggcgtcgccgatgccctgcccgataagctgcggcgcgacgtcggacaaggtcgcggggaacgtgacatgggtcgccgacggggcgttcatccacgccggcaaggtggcggagctggactccccgggcgtcatgccgatgctctcctcgctcaggtacttcccgccggacgcgtcgtccgccgccaagtactgctacgcggtcccggcggcgatgcacgccaggtacctggtccgcacgacgtactactacggcgggttcgacggcggcggggcgccgccggtgttcgaccagatcatcgacggcacgcggtggagcgcggtggacacggcggggggctacgcccgcgggctcgccacgtactacgaggccgtggtggaggccgcggggaaggagctcagcgtctgcctcgccaggagcgccgccaccgcgcccggccggagccccttcatctccgcgctcgaggtggtgccgctcgaggagtccgtgtacagcgccgtcaacttcaccgcctacgcgctgagcaccgtcgcgcgccacagcttcggccacaacggctccatcatcggctatccagacgatcggttcaaccgatactgggagccgtacagcgacgggggcatcccggtggtggagagccaggcgagcgtggcgacggaggcgttctggaacaagcctccggaggccgtgttccggcgaggcctgacggcgagcagagacaagagcctggagctccagtggccgccggcgccgctgccggccgcgagctactacctggcgctctacttccaggacaaccgggggccgagcgcgctcagctggagggtgttcgacgtcgcggtcaacggccagcccttcttcgccggcctcaacgtctccacggcggggtgcatggtgtacggcgtcgactggccgctatccgggcagacaaggatcacgctgacgccggcgctggagtcccccgtcgggccgctgatcaacgcggcggagctcatgatggtcgtcccgctcggtgggaggacgcatcccagagacgtaatcggcatgcaggagctggccagaggattcacgaacccgccgtcggactggagaggtgatccatgcttgccccaggggaactcgtggactggtgtcacctgcaaccaagatccactggcaagagtaactgggctcaacctcacaaatttcagagttggaggatcgatatctaacaacattgccaatctgactgcaatttccagcatttggcttgtcgggaacaatttgaccggcccgattccagatctgaaccacctcctgcatgtagtctctttgcacctggaggacaacggactgacaggcccgctccctgaatcgctcggaaaccttacaagacttgaggaactgtccgtgcagaacaacagcctacaaggaacaattccaagcagcatcaggaacagagcggcggtggacccaaggtttaggttccagtacacacctgggaacaaccttagctaacaagtgcattacaggaaggcaaaaatatctgactgctgttccttacccaatttcgggtgcttcggaccattttccttcccttttttgaatcacgattttttgttgtacttcggaatgtatacttatctcttcccctggtggacgatgtggagccgctccccatcccattgaccgtgccagagacggagcccatgtcgcgggaggagctggaccgccggctcagctgcgacgtcgagatcgatgaatgcaagacggtctcatacgagtggacaggcaagtgccggagctgccaggggacgggactggtcagctacttcaggaagaagggcaaggagaccatttgcaagtgtgtgccatgcgccgggattggttatgtgaggaaaattacacttcgtgaggacattcaaaagatagacgagctagacaatgagaaactaccatagtttgaaaggtctcaagtcattcggcctctgcaattttgtaaatgctgccgaagagcttgtgctcgcaacctacacattgactaatggttctttccactgcacatttactgttcaggcacgatactagcttggaggggttattctttaagcactgtaaacttttgtgttcaaaaaaaaacattgcaaacttagcaatggtgtctagtaattgtaccccttttatcttggttatttgctgatagatatgataacgatcgatacagaaaagaaaataataattgtatcccttttgtaaattcttttagcacgttggtatggtccatctgtttctctcct

SEQ ID NO: 8973 - DNA, 2100 bp, Zea Mays
atgaagatggtaatctcagtcaaagcgcgggatgcatttcgcatctccttcggtccttccccagcccatccggtacggagccaaatctctggccgaacgaaaaagcgcggagatttccagggagaagcagtgttgcagacgcccggattcggggcgcgtcgttcctacatagaccgcgagtcgcctcctgcacctgcgggattcgccgcctgtcccagatccaagaaacgcataacgggcgtggagccagttgggccagggaagatttaaccagtcgggcccggaaggagcctaagggttggatctgatgctaccaggtcgctgagcatcgctactgaagggggcagcttctgattccggcagatggctcctgaaatgatggaggaggggcaatcagcttcctataccgtggatgacgctctcttgtcatcagtacagctagaatggaagcttacttctcatcaggaaagcatgattacaagtgttgtttttgttgggatgctgattggagcttactcgtggggtgtggtttcagacaactatggaaggaggcaggagaggctttctctttacagccattatgacaagtggagctggattttttagcgcttttgctccgaactatctatcattaatttccctgagattcttagttggtattggtttgggaggaggacctgttctgggatcttggttcttggaatttgttcctgctccaactagaggaacttggatggtggtattttctgcattttggactgttggaacaatcttggaggcatctcttgcatggacaattatgcccaagtttggttggaggtggttgttagcattatcagctgttccatcttttctcctgctgctattttatgccattacaccagagtcaccaaggtttctttgcatgaaaggccggactactgaggctgtggatatattggagaaaatggcaagactaaacaatgtacaactaccttctggtaggcttgtttctgacaaaaatattgagctagatgaagtttcaggatcttcagagtccacgacacttctggctggtgccgaagaaagtgacaacctaaatgaggatcagggttctgatttcggaggtattaagtccgtcggcaagctactcgcaccaaaactgatcagagcaaccctgcttctgtggatggccttctttggaaatgcgtttgcctattatggcattgttcttctgacatcagagctcagtaatggaaacaggatatgtgccaaagaggatgttgaatcagttcattcaaccaatgcaagcctatataagaatgttttcatatctagttttgcagagatcccagggtcatttctgtcggccatgatcgtggatagatttggtcggaagcgttccatggcgtcgatgctcttcactagctgcgttttcttactcccactagtgttctcccggacagatatactaaccagaatctccctgtttggtgcccggctctgtatatctgccagcttcaccatcgtatacatatatgctccagagatttacccgaccgcggtgaggacgacgggcatcggcatcgcgagctcagtgggcaggatcgggggcatcctctgcccactcgtcgctgtcgccctggtgcacagctgccagcagacgacggcgatcctcctcttcgagcttgtaatcttcctctccggcctggccgtctcgttcttccccttcgagacgaaggggtgtaggctcaacgacaccgacgtggacatgaactgatccggtggctgggtgtagtgtgactctcagagcaattttcctgtggcggttaccggaattgcatatggattggatatttttagcaacacgtatacgtgttagactacccgtctagggtttatgttattccccttgtaatgaccgttataccccctgtgtaatgggcctggcccagttactcactctattaatatcactcccaacccctgtttagggtatgggttcctattccaacatggtatcagctaggtttagtctcttctcctcttcccacgcagccacagccgctagggggctttcccctcccctgtagccgccgccgccttcctccaggggttctt

SEQ ID NO: 8974 - DNA, 2883 bp, Zea Mays
atgaagatggtaatctcagtcaaagcgcgggatgcatttcgcatctccttcggtccttccccagcccatccggtacggagccaaatctctggccgaacgaaaaagcgcggagatttccagggagaagcagtgttgcagacgcccggattcggggcgcgtcgttcctacatagaccgcgagtcgcctcctgcacctgcgggattcgccgcctgtcccagatccaagaaacgcataacgggcgtggagccagttgggccagggaagatttaaccagtcgggcccggaaggagcctaagggttggatctgatgctaccaggtcgctgagcatcgctactgaagggggcagcttctgattccggcagatggctcctgaaatgatggaggaggggcaatcagcttcctataccgtggatgacgctctcttgtcatcaggttttgggaggttccagatattgattctttcatatgctgggattggcttaattgccgaagcgatggaaatgatgctgctatcatttgttggtccatcagtacagctagaatggaagcttacttctcatcaggaaagcatgattacaagtgttgtttttgttgggatgctgattggagcttactcgtggggtgtggtttcagacaactatggaaggaggcaggtccaatcttttacttatgtcatgtaccattttgcacaaaattatgcaagtcaatttcctttttgctgatgattaacatgaagttaccaagcttgttactgatgtcatttctattgcacagttgcttcttcctacttcctagttatagctgattagtatcaatgtcatgtttgggatcagaatacgccatgtgtaaaaaactcggccggtagggaaaaggccgcccccaaggtattatattaagaagaagctcaatcggagccctgaccgaaaggtcatgaaaactggtccccgtgcaacatgagggttcgccccatataggctagatctttactccctcccaacccctacacgaggatccgacctctataggtcagccccatctcgtgtacatacaaccaggggaacaagctagtgacctttttttaaccttagcctgaaattcgttcccattgggattcgaactcaggacttaaggagtgctactcaaaccagctaacctattggctagaagatgtctctatgattgttcacatgaatgatcatgaattaatcaggaacaaagttcaatacatgttactttcgagaacgagcttcaaatcattctcaaagtttatagtcatgaatcaattgcttgtgtacatcatacaagtcctaacactctgttttatttggattctataggagaggctttctctttacagccattatgacaagtggagctggattttttagcgcttttgctccgaactatctatcattaatttccctgagattcttagttggtattggtttgggaggaggacctgttctgggatcttggttcttggaatttgttcctgctccaactagaggaacttggatggtggtattttctgcattttggactgttggaacaatcttggaggcatctcttgcatggacaattatgcccaagtttggttggaggtggttgttagcattatcagctgttccatcttttctcctgctgctattttatgccattacaccagagtcaccaaggtttctttgcatgaaaggccggactactgaggctgtggatatattggagaaaatggcaagactaaacaatgtacaactaccttctggtaggcttgtttctgacaaaaatattgagctagatgaagtttcaggatcttcagagtccacgacacttctggctggtgccgaagaaagtgacaacctaaatgaggatcagggttctgatttcggaggtattaagtccgtcggcaagctactcgcaccaaaactgatcagagcaaccctgcttctgtggatggccttctttggaaatgcgtttgcctattatggcattgttcttctgacatcagagctcagtaatggaaacaggatatgtgccaaagaggatgttgaatcagttcattcaaccaatgcaagcctatataagaatgttttcatatctagttttgcagagatcccagggtcatttctgtcggccatgatcgtggatagatttggtcggaagcgttccatggcgtcgatgctcttcactagctgcgttttcttactcccactagtgttctcccggacagatatactaaccagaatctccctgtttggtgcccggctctgtatatctgccagcttcaccatcgtatacatatatgctccagagatttacccgaccgcggtgaggacgacgggcatcggcatcgcgagctcagtgggcaggatcgggggcatcctctgcccactcgtcgctgtcgccctggtgcacagctgccagcagacgacggcgatcctcctcttcgagcttgtaatcttcctctccggcctggccgtctcgttcttccccttcgagacgaaggggtgtaggctcaacgacaccgacgtggacatgaactgatccggtggctgggtgtagtgtgactctcagagcaattttcctgtggcggttaccggaattgcatatggattggatatttttagcaacacgtatacgtgttagactacccgtctagggtttatgttattccccttgtaatgaccgttataccccctgtgtaatgggcctggcccagttactcactctattaatatcactcccaacccctgtttagggtatgggttcctattccaacatggtatcagctaggtttagtctcttctcctcttcccacgcagccacagccgctagggggctttcccctcccctgtagccgccgccgccttcctccaggggttctt

SEQ ID NO: 8975 - DNA, 1303 bp, Zea Mays
ctttgttcagttgttgaaaattcctttagactggagaattattgtatgctgatggttctgaaaatcagctcgaagtttgaactaagaaggttctgccgtactactggggctgttgcaattttgaaacttagccaacccaatgcggacgaactaggatacgcagattctgtttctgtagaagaaattggtggtactcgggttactgtcgtcaagaacgaagatggtggaaattcagtggctactgttgtcctgagaggcagtactgacagtatactagatgatcttgaaagagctgttgatgatggcgtcaatacatacaggtcaatgtgcagggacagtaggataattcctggtgctgctgcaacagaagttgagctggcaaagagattgaaggagttctctttgaaggaaacagggttggaccagtatgccattgcgaaatttgctgaaagctttgaaatggttccaagaaccctggcagaaaatgctggacttagcgcaatggagataatatcctctctttatgctgagcatgctagtggcaatgcgaaagttggcattgatctggaggaaggcgcctgcaaggacatctcgactttaaaaatatgggacctctatgtcacaaagttttttgccctaaaatactctgccgatgctgcttgcacggtgctgcgggttgaccagatcattatggcaaagccggcaggaggtccaagaagagatgcccagcctggtggcgggatggacgaggattagtttgattatagttgttttctttgtatcacgtatgtgaggtttcagagcagagatcatactttatcttggcttttggttctgtagaaggtttgggtgcctggagttcacttttggaaggtctgcacggttgcgcggatatcacataggcaatttgtatgttttttcctggtgtattgcggtgcggatgtatcaaatgattcattacaggggccgttccgtcagttcatcacaccaactgagctcttgtaatgtctcgtttggttgggttgagtactaaagattagtcatttcattttagtccttaaattgccttaaattgccaagcggagagactaaaataaggactaaactgtttgtcttagtctggagtaactaaaagagactaaacaatattaattccaccttttgtcatcttttcttttatgtcagttatattgatggcaagagaatgctaagggtattttagttctgttatgatttatttaatgagttttaaatacgtaggcactaaactttagttttttaattaaattttagtccctgtatt

SEQ ID NO: 8976 - DNA, 1534 bp, Zea Mays
cgtgagccactgacttgcaggccccacattctcccgccctcttcctcttcactacaccctttcctccgtgccgccccacttttctcctcccgcgcccctccgcgagctccctacccctcgcgctcacgccggcgacaagtttccgccagagttaggtagatcaggtgctgcgccggcagccgtggaagggatggaggacctcgcgagttcgcgtggcggcgggggatgcggtggtcttgatgcgcagatcgaacagctcatggagtgccgcccgctcccagagacggaggttaaaacactgtgtgagaaggccaaggagatattaatggaggaaagcaatgttcagcttttagttgcacttaaggtgcggtacccgcaacgcattacaattcttcgtggaaaccatgaaagtaggcagatcacacaggtgtatggcttctatgatgaatgcctacgaaaatatggcagtgcaaatgtctggaagatcttcactgatctttttgattattttccgttgacagcattggtggaatcagaaattttctgcctccatggtggtttatctccatccattgagaatcttgataacgttcgcagtttagaccgtgtccaagaggtccctcatgagggacctatgtgcgaccttctgtggtctgatccagacgatagatgtggctggggcatatctccacgtggtgctggatacacttttggccaagacatatcggagcagtttaatcacaccaacaatcttaaactcgtagctcgggctcaccagttggttatggagggatacaactgggcacatgaacaaaaggtggtgaccatattcagcgcacctaactactgttaccggtgcggcaacatggcgtccatcctcgaggtcgatgactgcaggaatcacacatttattcagtttgagccagctcctaggagaggtgaaccagacgtgacgcggaggacacctgattatttcctttgagttatctgccaggccatttttggattttgcccaatgttggaatagtgatgctggccagtaacaatttttgttggatctatatggtaacttaaccgaccagcaacagtaagaaaatgtggaacttaaccgaccagcaacagtaagaaaatgtggaagctgcatttgtcattgcaagaggtgctcgctaacttaaccccaagctgtcaaaagatccgcttgtctacccaacccacccagtggtgcctcccttgggctttgggacgtcgagtttacgctttcagcgtagagttgcctcagttctgtcttgtgtgtcagctagttttgtgtttgtgtcttgtgtggttgctcgttgtagcttctgtggtctcgagtgttgcaagaattggaattctgctagctcctcctctgtttggttgtccatgcccttggtacacgagtgttggccacccttctcatgtagcaccaaccacgttacagtcaagctgttcgcatcttatttttgtcatgttaatactcctgtcaattaaatgaacaatgtttgctccccatgta

SEQ ID NO: 8977 - DNA, 1686 bp, Zea Mays
cgtgagccactgacttgcaggccccacattctcccgccctcttcctcttcactacaccctttcctccgtgccgccccacttttctcctcccgcgcccctccgcgagctccctacccctcgcgctcacgccggcgacaagtttccgccagagttaggtagatcaggtgctgcgccggcagccgtggaagggatggaggacctcgcgagttcgcgtggcggcgggggatgcggtggtcttgatgcgcagatcgaacagctcatggagtgccgcccgctcccagagacggaggttaaaacactgtgtgagaaggccaaggagatattaatggaggaaagcaatgttcagttaaaagccctgtgacgatttgtggtgatattcatggccaattccatgatcttttagaacttttccggattggtgggaagtgtccagatacaaattatttgtttatgggtgattatgtggatcgtggctattactctgttgagacagtaacgcttttagttgcacttaaggtgcggtacccgcaacgcattacaattcttcgtggaaaccatgaaagtaggcagatcacacaggtgtatggcttctatgatgaatgcctacgaaaatatggcagtgcaaatgtctggaagatcttcactgatctttttgattattttccgttgacagcattggtggaatcagaaattttctgcctccatggtggtttatctccatccattgagaatcttgataacgttcgcagtttagaccgtgtccaagaggtccctcatgagggacctatgtgcgaccttctgtggtctgatccagacgatagatgtggctggggcatatctccacgtggtgctggatacacttttggccaagacatatcggagcagtttaatcacaccaacaatcttaaactcgtagctcgggctcaccagttggttatggagggatacaactgggcacatgaacaaaaggtggtgaccatattcagcgcacctaactactgttaccggtgcggcaacatggcgtccatcctcgaggtcgatgactgcaggaatcacacatttattcagtttgagccagctcctaggagaggtgaaccagacgtgacgcggaggacacctgattatttcctttgagttatctgccaggccatttttggattttgcccaatgttggaatagtgatgctggccagtaacaatttttgttggatctatatggtaacttaaccgaccagcaacagtaagaaaatgtggaacttaaccgaccagcaacagtaagaaaatgtggaagctgcatttgtcattgcaagaggtgctcgctaacttaaccccaagctgtcaaaagatccgcttgtctacccaacccacccagtggtgcctcccttgggctttgggacgtcgagtttacgctttcagcgtagagttgcctcagttctgtcttgtgtgtcagctagttttgtgtttgtgtcttgtgtggttgctcgttgtagcttctgtggtctcgagtgttgcaagaattggaattctgctagctcctcctctgtttggttgtccatgcccttggtacacgagtgttggccacccttctcatgtagcaccaaccacgttacagtcaagctgttcgcatcttatttttgtcatgttaatactcctgtcaattaaatgaacaatgtttgctccccatgta

SEQ ID NO: 8978 - DNA, 2152 bp, Zea Mays
tcgtgctgctgctagcctagcctagcctgctactcgaacttctcgtctcgtctcctcctcgctcaggcaggggaacccaacggaactcctcctccccagcagacagccgagagtacataggagacgagaagatcccatccactaccgcccggtcgcggtcctccgccctccgccctccccgccgctcgttcggtgcaggtcgccctcgcgtggatcggaatgggcgcctgcgtgtccaaggccgcctgctgctgccgccagccgcacaacggggttaccaacgagaggactgatactgtgacggaggacgaggaggcatacgacctgcctgcgttccaggagttcaccttcgagcagttgcggctagctacatcggggtttgcggtggagaacatcgtgtccgagcaaggtgagaaggcgcccaatgtggtatacaaggggaagctcgatgcccagcgccgcattgctgtcaagcgctttaaccgctctgcctggcccgacccgcgccagttcctggaagaagctagatcagttggcctgctccgaagcaaaaggttggcaaatttgcttggttgttgctgtgaaggcgatgagagattgcttgttgcagaatacatgcccaatgatacgctagcgaagcaccttttccattgggagtcacaatcaatgaaatggaccatgagattaagggttgttctctgtctcgctgaggctttagaatattgcactaacaggggccgtgctctctaccatgatctcaatgcctatagagctctgtttgatgatgactgtaaccctagactttcctgtttcggtctcatgaagaacagccgggatggaaaaagttacagtaccaatttggcatttacgcctccagaatacatgaggactggacgtattactcctgaaagtgtcatatacagctttggaaccttgctgattgatgttcttagtgggaagcatattcctccgagccatgcccttgacctgattcgggaccgaaacttcaatatgctcttagactcatgtttagagggtcaattttcaaatgaggaaggaacagaaatggtccgattagcttcaagatgccttcactatgaaccccgtgagcgacctaatgtcagatcacttgtgcaagtattgactcctctacagagggatgtcgagactccatcttatgtgctcatgggcattccgcgtggtggggcatcttctaccgaaccactgaatctttcccctcttgccgaagcttgttccagaaaggatctgacagcaatacatgaaattctagaaaagacaggctacaaggatgatgagggaactgcaaatgagctctcttttcagatgtggacgaatcagatgcaagatacgttgaactcaaaaaagaagggtgacaatgcttttcgacagaaggattttactgctgccattgattgctattcccaggaggcattgaatgatgcaatgaatgctttggtaatatctcccacatggtcaacagcattctatcttcaggcagcagcactattatcacaaggcatggagaatgaagcacaagaagcactcaaggatggttgtaacttagagcaaagtagcagcggtggacattgattgtgaacatatttgtagtccccaaaatgcacataatgtcaggtgcttgtttgaagagagagtaatattggctttggctatggaagcagcaggcgttggtaatttgtcaatttggctaggggtttgttaaccttattcagattttgtgcttgtggaacgtcgtccctcgtccatatcttcatgtaggaatgtacatatggaagaaagcgacaacagaggctctgaaagagaggacaaagacatccaagaggtgaataaggaaattattaatggggagaagaaagtgaaacttttttcttggtcctactgaaacaagagaaggaaaacataagaagaagaaaaaaaaagattgctgatgtacatgtctgtctttgctggtggcaggtgacctgtacagcaagcggttgtttttacgctgtcttaattcttcgtttcttatgcgttagctcccattggtatatttctggatatgatagtggaattcttttaaaaggccaaaaatgtcagcgttctggttgttcgagagttcaacgctttcacc

SEQ ID NO: 8979 - DNA, 3898 bp, Zea Mays
caggcatgtcggtacaaataaaccaggaaatattcccgtcgaaataaaaccaccactaggaaatactcctactcctcgtgctgctgctagcctagcctagcctgctactcgaacttctcgtctcgtctcctcctcgctcaggcaggggaacccaacggaactcctcctccccagcagacagccgagagtacataggagacgagaagatcccatccactaccgcccggtcgcggtcctccgccctccgccctccccgccgctcgttcggtgcaggtcgccctcgcgtggatcggaatgggcgcctgcgtgtccaaggccgcctgctgctgccgccagccgcacaacggggttaccaacgagaggactgatactgtgacggaggacgaggaggcatacgacctgcctgcgttccaggagttcaccttcgagcagttgcggctagctacatcggggtttgcggtggagaacatcgtgtccgagcaaggtgagaaggcgcccaatgtggtatacaaggggaagctcgatgcccagcgccgcattgctgtcaagcgctttaaccgctctgcctggcccgacccgcgccagttcctggaagaagctagatcagttggcctgctccgaagcaaaaggttggcaaatttgcttggttgttgctgtgaaggcgatgagagattgcttgttgcagaatacatgcccaatgatacgctagcgaagcaccttttccattgggagtcacaatcaatgaaatggaccatgagattaagggttgttctctgtctcgctgaggctttagaatattgcactaacaggggccgtgctctctaccatgatctcaatgcctatagagctctgtttgatgatgactgtaaccctagactttcctgtttcggtctcatgaagaacagccgggatggaaaaagttacagtaccaatttggcatttacgcctccagaatacatgaggactggacgtattactcctgaaagtgtcatatacagctttggaaccttgctgattgatgttcttagtgggaagcatattcctccgagccatgcccttgacctgattcgggaccgaaacttcaatatgctcttagactcatgtttagagggtcaattttcaaatgaggaaggaacagaaatggtccgattagcttcaagatgccttcactatgaaccccgtgagcgacctaatgtcagatcacttgtgcaagtattgactcctctacagagggatgtcgagactccatcttatgtgctcatgggcattccgcgtggtggggcatcttctaccgaaccactgaatctttcccctcttgccgaagcttgttccagaaaggatctgacagcaatacatgaaattctagaaaagacaggctacaaggatgatgagggaactgcaaatgagctctcttttcagatgtggacgaatcagatgcaagatacgttgaactcaaaaaagaagggtgacaatgcttttcgacagaaggattttactgctgccattgattgctattcccagtttattgaagttggtacaatggtttccccaaccatttatgctcgacgttgcctgtcatatctgatgaatggcatgccacaggaggcattgaatgatgcaatgaatgctttggtaatatctcccacatggtcaacagcattctatcttcaggcagcagcactattatcacaaggcatggagaatgaagcacaagaagcactcaaggatggttgtaacttagagcaaagtagcagcggtggacattgattgtgaacatatttgtagtccccaaaatgcacataatgtcaggtgcttgtttgaagagagagtaatattggctttggctatggaagcagcaggcgttggtaatttgtcaatttggctaggggtttgttaaccttattcagattttgtgcttgtggaacgtcgtccctcgtccatatcttcatgtaggaatgtacatatggaagaaagcgacaacagaggctctgaaagagaggacaaagacatccaagaggcagccaaatagacatttggacgaaatcaatgtattggcatgtaaatgggataatggtttacaggtacaccctaatctgactgacggaccctataaatgtcctcttccttctctcaaacgcaagcgcaaggcaggcaagctcctctctcaagtctcggcacctccaactacgcagcaaccaaccatgagcaccagcgatgccgccgcgaccgtgatccccatcgacgacgtgccccgccagcacggcaaggccccggccgtggacacggtcacggcggcgcctcctcctctcgctgcagcagcaccccccgctgcgacgacggcgcctcggaagacgcgggtcccgttcttccggcgcgccgaccgcggcagccggtgcgtggcgctccttgacttggtgctgagggtggcggccttcgggcccgccctcgccgccgccatcgccacgggcacctccgacgagacgctctccgtcttcacccagttcttccagttccacgcccgattcgacgacttcccggcgctcctgttcttcatggtggccaacgcgatcgcggcggggtacctggtgctgtccctccccttctccgccgtcgtcgtcctccgcccccaggccatcggcttgcgccacctcctgctcatctgcgacctgatcatagcggcgctgctgacggccgcggcggcggcggcggcggcgatcgtggacctggcgcactcggggaaccagcgcgctaactgggtgcccatctgcatgcagttccacggcttctgccagcgcaccagcggcgccgtcgtggcatccttcctcgccgtgctcgtcctcctgtttctcgtcatcttggccgccttcaccatcaggaaacgctgctgaactggatagtatgtgatgttgctgtttttgcgtcgtgcaattaataatgcaatgtggtttcagtttgtggtcactcgtgtgtaattgtaaagcgtggagtggaattgcctttgtattattcgtggacacctgcttgcggaattttaaattgggcttaacttctcggcctggtttcatgtccattaagcgctgcgggccaaacagggccttgggcctaagatagtgatgtctacccaccactaccgtcaccgattgaccggctttctctgcagaatgtatccgttggcttcgatctccgagatttgaaaaccgcttgacccgccgcactccagcgtcggaaatgtccggtgcgacgccgtcatggtttctccccgtgcagaagacgcccagcagtggcgatagcaatagtccattctcgcttactgtcaagagggcatcacagtcctctgccagatttcgagctttatgtacccaacagggactgggcagcagctaccgatatgattcgacactaatttctggtgggtcatggcctgaatgtgtcagcaatggcacacgatcagggttgacaaggataggcaatcctcctctgaagatgatgcatccagtgcttgaatgtcttgagattatgagtttgtccccaaggcccggggacgatgactatgatggaaatggcatgtctgcgccattgcctgagcttagcttctagtttgcaggacctccgatgcctttggaatccatagattttgacctcttttaagatgtctcctcgtgacatagaattgaaggcaaaggagacaagtttccaaaaatcggtcattgcagacactcggatctcttggtgagaggggctcgtcagcagaatgtttgatatcgatgatttggattgctgcaaatggctatctgatgacaaagattcgccagtgctttcgctcattgaagaggctttgacagatgataccaattctcagccaggtcattgttcttatctgcgtgagggtggtgaccaa

SEQ ID NO: 8980 - DNA, 2953 bp, Zea Mays
gaaatgcgtccccgtccccatccgtggttagcttggcgccgacagcttcctcgtctcctccttccacgcgcccaacaccgaggaggacggcaacaaggtctaggccttcctcgcggagatggagagcaccatcagggaccacccgctctgggccaacgccaccgactaggagatcgaccacgcgcttgagggcctggagaagtatgtcatgaccaaattgttcgaccgcacgtttgggacttccactgaggatgccgtttccgacatggacatcttagagaagattggtctcttgcagcagtttgttaagcctcatcacttggatatacccaaggtcctgcataacgaggcatcgtggctggtaactcattctgagcttgaagcatccacaatgcgatttcagtccttgatgtttgtcataagttctaaggatgggagtaattggtgcatttcacattttaatagcattgtgtgtttgatcaaaatgaagcccccaaaatagtattacttggatataaatttgctagcctcgatattcaaaagggtgtcaattgttaagcattcagctctattttccccctctgttatcaattatgctctgattgtactgtgtatattcaagaagttgctggttttaatcatgtaaaatccaaaattttaaattatccaaagttcccatgaaagaaatcgttccagtgatacagccaaagctcatactgactgagaccattctttctctgcacatgccacttcagcttgcagtgaaagagctgcagaagattaattcctttaaagcaccacgtgagaagcttctgtgcatcatgagctgttgtcaagtcatcaataacagctgtgagttgagaattacacataggaaggtggtatcttgttcctgatagccttggctcactagagttttgtagcattgtggtgccttgcattacttgtacttaggttgggggtcctttattcactaggatggatcttctgaaattagtgctgaaggaactgaaaattggcacacatgacatattgccttctaactggtacaatctgccaccagatgtctcacagttttggtgccgatcggcttcctgcaatggagaatgtgaaaatcgaacctggaatgtagggcagaaaaccactactgaggcaggtggggataaagatggagtcacataggctgggagtatgtgttggatcccaatgttctgtagttagtgttgaggcttgaggttttagagctgtagttttggggaaaatgtgagttgtgacactgatttttaacaactgatgtgctgctccagtgctccgggcaaattcagtcgggcgttatgctaatgaagattatgtcaaaggaaaatatgaccaagggtgaaaggagatttatgtagttcccttttagttacatattcgattttattttaaacaggtacggatgagggatatcccatggttaagtttgatgcttcaggaccaatatcgttgcgtgtcgatgctggtggtatctacattttcatagttacagaacaggcttctgatttgttgtttctgcagtagatgctactatagtcgatcatgatgattcaaaatgttcttttcactcatccgattttattttccaatttggttagtaaacacatggtgtagttttagtgcttgtagtgtcacatgaaccaacttgtatgatggttactatcgctcaaaaaactacagcactgtatgacattcctatgtggtaaatcctaggatagtgtagtgtcttacatcatgtaaactgttatttacgaaactatgtaatacataactggctaaagaactactaactaaacatacatgtgtagttgcaaaaatacagaactgcccaggaaacaaatatatattgggatggaaaaatcagatagataaatttgaaaaaactagctgaaaacaccatgcagcagctgttgttgcataatgcattagtcttgtttttccccctctccaatgcataatgtataagtcctgatatcagatttgcttcttcctttagacatatgaggtcaggcttgcttgtatagttaaacaattaccttatgagaaaagtatagagaactgaaactcatagcagtagcactggcattggcacactttaatcacttcacagttcacaatgtttatttttgctttgaaggtggtctgtttttttgccaagcgtgcatgcatgcgccttgttagttgtggttctaggcaggcaggcggacaatgcgttctgcaagaaattcatcttcttttgatctgcatgcagactgaaacagtcctttgcttgcgccgaaattcttccaggatccttgcccggaagtcagctcagaggtcgcgagtgaggaagttgcagtacatctccgagctcgagcgcagcgtcacaacactgcagaaatggtatgatacaactggagtccaccttcaccataggcaggcaacaattatccatgctgatgatctgccatattcttcaaagtcgtttgaaagggcgatgttttcccaacctgtgtctgattgaattctacaccagttcttggaagagaaagcctcaccaagtcatcatctccaggaacgatgttagcgaaagtcaatttaatctggtgctgaacattgagttgcaacaaatcatcgatagagactgagtcaccgcagctagaaaccactgtctcaaggtgctgaacattgagttgcaacaaatcatcgatggagaccgagtcaccgcagccagaaaaccattgtctcaatttgaggagattttccatctatgtttgttagaaggcataatgctatttatctcttgtattcgaacatttggcaattaagaaatagaagattacttccccaatatcccttcttcctaatctcacctttcacggcttctatggaacaatcacttactattactgactgacatgtccactcctcatatgtg

SEQ ID NO: 8981 - DNA, 2484 bp, Zea Mays
cgttcccctacctctgcgccggaaactgcagttgttcgccagaacctgccggggctgatgaagaagctgagggggctcaatgaggtggtctccgaggaggagatcgcggccttcctgtcggagtcgtaccctgatagcgatcacgagattgaattcgaatccttcctccgggagtatcttaatctgcaggctcaggtgagtgccaaggaaggtggtgccggcggtggcaggggtggcaagccgtcgtttctcaagtccagcatcactacgctgctgcacaatctcaaccaggcagagaaatcttcgtatgtcgcacacatcaatacttacctccgtgaagacccattcctgaagaagtacttgcccatcgaaccgtctggaaatcagctgttcgatctcatccgggatggggttctgctctgcaaactgatcaatgtagctgtacctgggaccattgatgagagagcgataaataagaaaagagttcttaacccatgggagagaaacgaaaaccacacactctgcctcaattctgccaaggccattggatgtactgttgtcaacattggcacacaggatttggtggagggaaggcctcatttagttcttggattgatatcacaaatcataaagattcaacttttagctgatctgaatctcaagaagacaccgcagctggtggagctatttgatgacagcaagatgaggttttgagcttgtcaccagaaaagatgctacttcggtggatgaaccatcatctgaaaaaagctggctacaagaaaactgttaacaatttctcttcagatgtcaaggatggtgaagcctatgcttaccttttgaaagctcttgctccagagcattcccctgaaactacattggacaccaaggatccgaacgaaagggcaaaactagtacttgaacaagcagagaagttggactgtaagagatacttgaccccaaaggatatcactgagggatctgccaatctaaatcttgcatttgttgcacaaatattccagcacaggaatggtctgaccagtgacaccaaacaagttaccctcacacagacagcaacacatgatgatgttctattatctagagaagaaagagcctttcgaatgtggatcaacagccttggggttgaatcatatgtgaacaatgtcttcgaagatgttcgcaacggatgggtacttcttgaagtgcttgacaaggtgtctcatggatctgtcaattggaagctggcatcaaaacctccaattaaattgccatttagaaaactggagaattgcaaccaagttgtaaaaattgggaagcagttaaagttttctttagtaaatctagctggaaacgatattgttcagggaaacaagaaattgattgttgcacttctgtggcaattgatgagattcaatatcctccagctgttaaacaaactgagattccactcccaagggtccgaaggaaaagaaatttctgatgccgatattctaaactgggccaactgcaaagtgaaggcatccggaagaacatctcgtatagaaagtttcaaggacaagagcttatcgaatggaatgttcttccttgatcttcttagcacagtacagccaagggttgtgaactggaaagttgttactaaaggggaaactgatgaggacaagaagctgaatgctacctacatcattagtgttgcaaggaagattggatgctctgtgtttctgttgccagaggacatcattgaggtgaatcagaagatgatcctaacacttactgctagcattatgtattggagcctacagaaacagccccagtcacagtctgaattgacagaacaatcagaaccatctagcatgacttctgacgcagcctctgaagttgcctcggaggatggtgcttcaacgacagcaccgtccgagtcagaagaggtgaactcgctgtctgatagcatatcgaatttgacaacggatgatgctacttcaaacgccccatctgctgaaaacggaaatggtgtggcagggtcctgatggttatgattatgcaaaccctgttctttttttccccatacagtgctgttacaggaaatagtgctttcatgatgcccaaagttgtcgctaccagaagcgatatttttaatacttctgcttcctgagcatggtagcttgatagatacaacagtcacagatagatatagatgccttttgttcattggatccgcttatactatagtgggggaagataatagtatgtgtcgctggctgggtattttctgtatttctggcatacacccatgcaaaatttactacctcctctgtatcttatcggtcaattcgttcatatgtttattggactagtcaaagcttgtaatgctgttgctgctctgaaccgtgcctgtacataacatatgcttaaaaaggttttgcattgtcctttagtttctgtttgtactgcttgtggatgcgttctttgcatgagatttgttatcatgag

SEQ ID NO: 8982 - DNA, 2706 bp, Zea Mays
ccaggacgccattgctcaccttttccgtccagcgcaaggaaaccgcgcgccagagagggtgagggattgccgtcaccaatccggaagccgcttcaggcgcgcgtggaatcgccccgtggccggcggggatgtccggattcgtcggggtcgtcgtgtccgacccttcgctgcaggggcagttcacgcaggtcgagctccgatcgctcaaggccaagttcgtgtctctgaagagagattccggccatgtcaccactaagaacctgccggggctgatgaagaagctgagggggctcaatgaggtggtctccgaggaggagatcgcggccttcctgtcggagtcgtaccctgatagcgatcacgagattgaattcgaatccttcctccgggagtatcttaatctgcaggctcaggtgagtgccaaggaaggtggtgccggcggtggcaggggtggcaagccgtcgtttctcaagtccagcatcactacgctgctgcacaatctcaaccaggcagagaaatcttcgtatgtcgcacacatcaatacttacctccgtgaagacccattcctgaagaagtacttgcccatcgaaccgtctggaaatcagctgttcgatctcatccgggatggggttctgctctgcaaactgatcaatgtagctgtacctgggaccattgatgagagagcgataaataagaaaagagttcttaacccatgggagagaaacgaaaaccacacactctgcctcaattctgccaaggccattggatgtactgttgtcaacattggcacacaggatttggtggagggaaggcctcatttagttcttggattgatatcacaaatcataaagattcaacttttagctgatctgaatctcaagaagacaccgcagctggtggagctatttgatgacagcaaggatatagatgaggttttgagcttgtcaccagaaaagatgctacttcggtggatgaaccatcatctgaaaaaagctggctacaagaaaactgttaacaatttctcttcagatgtcaaggatggtgaagcctatgcttaccttttgaaagctcttgctccagagcattcccctgaaactacattggacaccaaggatccgaacgaaagggcaaaactagtacttgaacaagcagagaagttggactgtaagagatacttgaccccaaaggatatcactgagggatctgccaatctaaatcttgcatttgttgcacaaatattccagcacaggaatggtctgaccagtgacaccaaacaagttaccctcacacagacagcaacacatgatgatgttctattatctagagaagaaagagcctttcgaatgtggatcaacagccttggggttgaatcatatgtgaacaatgtcttcgaagatgttcgcaacggatgggtacttcttgaagtgcttgacaaggtgtctcatggatctgtcaattggaagctggcatcaaaacctccaattaaattgccatttagaaaactggagaattgcaaccaagttgtaaaaattgggaagcagttaaagttttctttagtaaatctagctggaaacgatattgttcagggaaacaagaaattgattgttgcacttctgtggcaattgatgagattcaatatcctccagctgttaaacaaactgagattccactcccaagggtccgaaggaaaagaaatttctgatgccgatattctaaactgggccaactgcaaagtgaaggcatccggaagaacatctcgtatagaaagtttcaaggacaagagcttatcgaatggaatgttcttccttgatcttcttagcacagtacagccaagggttgtgaactggaaagttgttactaaaggggaaactgatgaggacaagaagctgaatgctacctacatcattagtgttgcaaggaagattggatgctctgtgtttctgttgccagaggacatcattgaggtgaatcagaagatgatcctaacacttactgctagcattatgtattggagcctacagaaacagccccagtcacagtctgaattgacagaacaatcagaaccatctagcatgacttctgacgcagcctctgaagttgcctcggaggatggtgcttcaacgacagcaccgtccgagtcagaagaggtgaactcgctgtctgatagcatatcgaatttgacaacggatgatgctacttcaaacgccccatctgctgaaaacggaaatggtgtggcagggtcctgatggttatgattatgcaaaccctgttctttttttccccatacagtgctgttacaggaaatagtgctttcatgatgcccaaagttgtcgctaccagaagcgatatttttaatacttctgcttcctgagcatggtagcttgatagatacaacagtcacagatagatatagatgccttttgttcattggatccgcttatactatagtgggggaagataatagtatgtgtcgctggctgggtattttctgtatttctggcatacacccatgcaaaatttactacctcctctgtatcttatcggtcaattcgttcatatgtttattggactagtcaaagcttgtaatgctgttgctgctctgaaccgtgcctgtacataacatatgcttaaaaaggttttgcattgtcctttagtttctgtttgtactgcttgtggatgcgttctttgcatgagatttgttatcatgag

SEQ ID NO: 8983 - DNA, 2225 bp, Zea Mays
ctcgtaccgtccaagacggggcaaagaatgcccggggaagccggcgagctggagcgtggcggcagcttggaaccggtcgtcctcctccctccccgtcgctcccgacctcttcctcctcctaatttaatcccacccggcctccccgttctccccgaccgcatccccccttaacctcccttcctcctcctcctcctgcggtcccaactcccatacttcggttcaggaggcaggcaggcaggaaggcaggttcgaggggggattggctccgctcctgctccattgcgcgcgatcgggctcgttcttgtgatctatctagccgtttcttgggtcagtgctggaaggtcaaactgttggtggaaacctcaccggggtgcttcaacgaacgcgaaggtgtcgctgtcatttagcgcgtcttgattggatttgacctgttggcctggtggcgtgttgtcgttgattgagctcgaggatgatgaaatgggggctcagcagcggcacgcccgcggattcctactacgaggtacggtcagattgcacggacggtgtgcccaagagcaagttcaagatcaaggctggcaaaacattaagtgctcggaaatggcaggctgcatttagtcccgatggctgtcttgatattgcctcagtcctaagccggatacaaagaggaggtgtccatccgacagtcagaggagaggtctgggaattcttacttggttgtttcgatcccagaagtacctttgatgaaagggaagagatcaggcaaatacggaggatacaatatgacagatggaaggaagattgtcgacagatggattcgcatgttggtagcggtaaagttatcacagcaccacttatcactgaggatggcagacctattaaggatcctctggttttacttgaggctactgccgacaaggacacttcagaagttgctccatctaccagtataaatggaaatgaaattgatgaatctgcagaacgcattaccgataaacaaattatcgagtggaagctgacattgcatcaaattgggcttgacgttttacgcactgatcgtaccatggtattttatgagaacaaagaaaatctttccaaattatgggatattctagccgtgtatgcatggattgacaaagatgttggttactgccaaggaatgagtgatttatgctcaccaatgatagttctactaaaggatgaagcagatgccttttggtgctttgagaaattgatgcgtagattgatcaatctgtgggagtatccaaccaacttcaacatcttgcatctattattcaggttcttgacccaaagctacatgaccacctagaaactcttggcggaggtgactacctttttgcgttccgaatgttcatggtgctatttaggcgtgaagtatcatttggagactccttatacctctgggagatgatgtgggctctagaatacgaccctgacattttcttcgcaacatgcgaagaacaaggtgcagtacataaaaataaagtttctaaatccaaactgaaaggactgcgccattttggcaagtgggataaggacaaggataaggaagatgataagaatggggctgaggacggtgaagatggtccggttccgatttcagtcttcatggttgcaagtgtcctcaaggagaagagagaaaagctgttacaagaagccagaggactggatgatcttatcaggatattgaacgatgtaaatgggaacttagatgctaagaaagcttgcgctggagcattgaaacttcacaaaaaatacctgaaaaaggtacaagcaaagaaaccttaaacgtgccatggaacacacgtccccaatggggctatcgttaccatttcaacatacacgaccattttctacacacaactttgagtgaagatttatcggacacaggtggtaatcgtctgacatgtcctgagatacacggagactgatggtgccaggctagtgggttgagtacaggatgagcgcaaccggtagtgtgtatatcacgttctttgtactcaagaattttgtacagacagaaggcggtgcggatagcatgccttgcatacataataatttcaatacaggttgaaaacttgaaatcaacacaccttgcgacagaattcagcttcaagaaagttcttctgcacatattgtaaagctgtaaaagtgtacgatctaatgttttcattaatgtacacataccaagagaactaataagatga

SEQ ID NO: 8984 - DNA, 705 bp, Zea Mays
atggcgaatatacaagcttccttgcgtaccatcacaagttcacaacaacagattgggaaaaataagaaaattacacggcgccaatggccgcacgggaggaaagcagtggaagcagttgctgccgctcctccgaagtccgaacccgtctcgctgaccagtgcaacatttgcgagtgcatcacaagggatattcacaagggaggtgcgcgtgtgttcccttgtcacaagggaggctataaaggatggggctgatgctgtgatcgctgttggaggtgatggtacgcttcatgaggtgcctatggtttcttttggaaaggaacattgtttcttctatacactggggtttgtttagtagtgaagtaccttgtcctctgacagctcattccacttggaactggctcagattttgcttggacatttggctggacaaatgatcctcgtgtcgcaattgatcgaattatcaaaggcattcacccagctttattagaaagctcaacaaagaccaatgatccagtgttggggaatccagcttacagatttcaagaagatcttagcaagcagcaagtctagtacatctactcctccttcagctacccagaaaacaaacgaacagtctggcaaagccactcaaaacatccgagtgctatcttaagctagctattggcattttatcgagcatatgtcccaccttgtacattgatttagg

SEQ ID NO: 8985 - DNA, 751 bp, Zea Mays
cagaccccagagtcacagtcggggatcgacataataagcgacaggagacggcatggctggctgcgctgcgccggcgacgccaaggtcgtcgctgatcctcccgcgtgcatcctcgcactcccagcccagcgctgtcggcctcacctccgattgcgtcgccgcctcccgtcgccggcgccgcgatttcgttttcgtcgtcaacccctcctgcgccaatggccgcacgggaggaaagcagtggaagcagttgctgccgctcctccgaagtccgaacccgtctcgctgaccagtgcaacatttgcgagtgcatcacaagggatattcacaagggaggtgcgcgtgtgttcccttgtcacaagggaggctataaaggatggggctgatgctgtgatcgctgttggaggtgatggtacgcttcatgagctcattccacttggaactggctcagattttgcttggacatttggctggacaaatgatcctcgtgtcgcaattgatcgaattatcaaaggcattcacccagctttattagaaagctcaacaaagaccaatgatccagtgttggggaatccagcttacagatttcaagaagatcttagcaagcagcaagtctagtacatctactcctccttcagctacccagaaaacaaacgaacagtctggcaaagccactcaaaacatccgagtgctatcttaagctagctattggcattttatcgagcatatgtcccaccttgtacattgatttagg

SEQ ID NO: 8986 - DNA, 893 bp, Zea Mays
atggacaagagccctggtgctgcttctcacttacgtctttcctcgttggtgaaccgcggaatatatgaggccttggagttgagggatggaggatctgattatcttggcaagggtgttcttaaggagatggcggtcacgatcacgtgggtgaagacgagacagatcttcatcagccgcggcaaccccaccgtcgaggtggacgtgggcctcagggatggcagctacgcgaggggggccgtacccagcggcgtatccactgttgaaaccaagagttgtctctcccaaggacgcatttcatcaccatcactaagcaacgcatgggcacatcaccagggcatcgaagaaaaaactctttctgtccaacctcctccgacgatcatcctcctgtctgttccgatctcgtgcgggctccaccattgtaatgcttgccaccggtacaggtattgctccgttctgcttgttcctgtggaacatgttctttaagaaacatgaccactacaaggtataagcaccttagctgtcagtggatgccatggcagtggatgagggtgacagagctattgattccaactcatctgcatttggaagcatcagatgaacctgatcaatgtgacatgtatgaagctgacagtaaatcatcctcaacgccgcagatgcatacaaactcaaaggcaagctctcagcgttacaagtcaagtagaacaaatgacgagtgaaattgaggagcccagggtacctaatttaatgtttgttctaagaaaattttgagtttcagaatacatatgtaaatcaggatatatgtgtatatgtgtgtgttcttgtgctttgagctaaccaactatgtttaagtacttctccccatgttctttattgtttataatttgttataccag

SEQ ID NO: 8987 - DNA, 1449 bp, Zea Mays
atggacaagagccctggtgctgcttctcacttacgtctttcctcgttggtgaaccgcggaatatatgaggccttggagttgagggatggaggatctgattatcttggcaagggtgttcttaaggagatggcggtcacgatcacgtgggtgaagacgagacagatcttcatcagccgcggcaaccccaccgtcgaggtggacgtgggcctcagggatggcagctacgcgaggggggccgtacccagcggcgtatccactgttgaaaccaagagttgtctctcccaaggacgcatttcatcaccatcactaagcaacgcatgggcacatcaccagggtataagcttttttttgctattctaccttttttctctcttaccctgtttgttttctgaaattcgtcagttggttagtttttagctttctgaaaggctgaaagcaagatccgatccagcaaagccttttgactttctccctttcacttctacgtgcctttgcataattgtccatttttttaaaaaaatactacagcaagtagtacacgtttatttaccaaaccataaagcttcctgtgctgcgaaacagtagtatctggggaaggttatgtgtatgtcacagtactaacacagtggatcagaactaagcacagcagatcagatcagattttcttttaaggctgcttgatttatcttattatcaagcgtaagtctgttgttcttgttcgaattacaattgagagccagacacttcatgagatgcttggcagtaatatttctcttgtttgtgtgatcaatcatgccattattttagtctaatagatggacatgttttaaattttgaggaggcattgaaacaatttgcatcatgaaggcgttcgagaagttccagtatgtagatgttcttattcctattgtttcttttcctctaaagtaccgctgcacgagcctgttgtcgatgccttcgtgggccacacctatagccacaacagcaaggctaggagcagcaaggccaggacgaactcttgccaccggtacaggtattgctccgttctgcttgttcctgtggaacatgttctttaagaaacatgaccactacaagtggatgagggtgacagagctattgattccaactcatctgcatttggaagcatcagatgaacctgatcaatgtgacatgtatgaagctgacagtaaatcatcctcaacgccgcagatgcatacaaactcaaaggcaagctctcagcgttacaagtcaagtagaacaaatgacgagtgaaattgaggagcccagggtacctaatttaatgtttgttctaagaaaattttgagtttcagaatacatatgtaaatcaggatatatgtgtatatgtgtgtgttcttgtgctttgagctaaccaactatgtttaagtacttctccccatgttctttattgtttataatttgttataccag

SEQ ID NO: 8988 - DNA, 2202 bp, Zea Mays
cggcattgagtagtgaccagcctaagtaaagccgagcctgcgtttgcatccagaagaaaagaacacatattataatagtattgacaaacttcatcgttctatcagtgaagttctcatttcaactggggatgtttatgagtcgccctaaatttagatgtgccttgtttccttcttatgccgcttcatgcacgcatttaatatccttatatgttgcaggtggaaattaacatacataggttcttttcgggatatacaacaggcagaactcatgctaggactcactggcctcagatgcttaagctaaaagactggcctccttctagttcctttgacaagcgattgccgcggcatggtgccgaatttattagcgcattgccatttcgtgagtatactgatccacgatatggcccgctaaatcttgcagccaagcttcctgctggtgtcttgaagccagatcttggacccaaaagttacattgcttatgggttctacaaagaattgggcaggggcgattctgtgaccaagcttcactgtgacatgtctgatgcagtatgttgtttttattaatgattatatgcattcttttgttgtccatgtggtttagcactgaacaaaaatatagcagcaaggctcctgccgaacctgctcattttctaatgctctcctagcagatgtatctcattgctatctacctgctcatttttttgacattttgatagttcttatttttcttatcaactactttggtttacccaaaaaaaaaactgcttgggtcttattagtcaaacctgtgtgatgtaaacaggtaaatatcttaacacacacagctgaagtcacttgtcagactgatattggcttaattgaaaaaatccaaaaagacatgagagagcaagatctgcaggaactatatgggggtctaaattcccgctctgagctcaagttgtcaccagctccaactgaatgcagggatgaatctgttgatgaaggattgaagacctcatatagtagagaaggcaattgtgtaaatagagacaattataatggtttggacatcaatgcattaccacctgatgacgatggagatattgcaaaggataaagaatcatctcctggatcagagtggcaaagtgaactaggtcagagttcagatcacaacaatggggtcaacacaactgatgagatgtacaatggagctcattacatttcacacaatcaaaaaagcactggcaggaaagttggcattaaacctcaagaagagaaatctgaaaaggctgattgcagtggcacatgtgcttatctaaaaggaagttctgaagataatccggaaatgcctattgtggagagctcagaggagcagagcaccggtggtgctctatgggatatcttccgcagacaggattctgataaattgcaagattatcttaggaagcattgctctgaattccggcatatttactgcaatccagtcaaaaaggtattgaaccctggacgtttgaacagaagcttggtgaagctgttttcattcctgctggatgtcctcaccaagtgagaaatttgaagtcctgcatcaaagttgcgcttgattttgtttccccagaaaatgttggtgagtgtgttaagctgacggaggagtttagacgacttccatctttccacaaggctaaagaagacaaactagagatcaagaagatggctgttcatgccctgaacgaagctgtaaacttcctggatcctcgttcctcagaagagttgaaaattggggttggtgagaacatctgtgaggatgaatctgtagatgagaaggagctgccgcctagaagaggagttgaagtgtcaggcgttgatgagaagcctaaatagaaggcgagggaggcatcaagtccaaaagtgaagctgctgatgaggtcgcccattttaggttctcggaatcgtggttaattgatttgtcaaagcccctgttcatgtatggtgatcgctggctgacaccgatggatgaagagaagcaggacacgtgtgtgctgctgatatgtcgtgtcggcgagtgacatgaatatcatccctatccctatggtattattggtcgtttatgtttatgtttgatcatttgtcttattcagttttttttacaaataataaaacaagaggttaaaagtaaatgacgtcatttatttaattttaagacggggcagatgcaaaactgaa

SEQ ID NO: 8989 - DNA, 728 bp, Zea Mays
ctgggctgatgcacatcagcagaggctgggctagccgctgaggtgggtgccactagtagattcccatgggtagctggctgctgcgtgggccagtttttagcagagctccaagagcaacttccagactgaatcactgaattcatgagaagctgtgccaaacagttttttttttactgtgaagtgattatttgctgatttattgaagtgattttctgaaatgaaccaggagactgggaaaacaattcttgtgattcactccgcacacagaattattagtaaatcatggagaatcaaataatcacttttcacaagagaatcaggttccacagaaaatctggagcgggaggggctctaccaaactggcccttaaatcactttcatcttctccatctccaactccaaagtgcataaggataagaacgttgtgacagtgttcagcgcgcctaactactgctaccgatgcggaaacatggctgccatcctcgaaattggcgagaacatggatcagaacttcctccaattcgacccagctccgaggcaaattgagccggacatgacgcgcaagacaccagactactttttgtagaaaaaacaggtgtggctaaaaaaaaaagagaagagacgaggggaagatgcaggaaatggacccgatgttctgttgtgtctgtattgtgatgccttgctagtcaccatgccgcgcccatgccaaccggtgctaatgccatgct

SEQ ID NO: 8990 - DNA, 835 bp, Zea Mays
ctccgctccgactcccttttcctctctctctctcgttctcatccatccagccaggcgagccaacaagcaagcaaaagtaaacggggcgaggagctgcggctgagcaggaggagggagccggagatggtgggtctcgtcggcggcagcacggcgcgggcggagcacgtcgtcgccaacgccggaggggaggcagagtacgtgcgccgcatgcaccgccacgcgccgaccgagcaccagtgcacctccaccctcgtcaagcacatcaaggcgcccgtccacctcgtgtgggagctggtgcggaggttcgaccagccgcagcggtacaagccattcgtcaggaactgcgtcgtgcgcggggaccagctcgaggtgggcagcctgcgcgacgtcaacgtcaatcccggccttgatatgcccgcgactgtagcttgtgaaatcaaggcacagcttgtccgcacagccgaggcggctaggcagctcgcgccaatgctcgaagtcgggaggccaagctaccaaggccgcagctcagtctaccaatcttcctcaaagatgatgtcggctatctccgtggctcatttggggtgcaaagacatggacgtcgtggacgtcggagtggtagggatggtggactcgcagagcctatcctcggcacttgagaaactctatttctgggagaggaagctgtatgctgaggtcaagattgtaggctgtggagtacggagttcacaaaatctaggagatgaacaacctcagggtaaccctctcattgtctcatgccagcagccgcacccacgtcctgttctgtctcgcacgctctcgccaacttgtggttgtc

SEQ ID NO: 8991 - DNA, 1925 bp, Zea Mays
gaaccgaatccatccatccatggccgacactgccaggtgggctatctcccgtcgcttccagccattgccgtcccctctctctctccataagccagccactccgctcgctgcctcgctctaccgaccaccgtgcgcgcgcggcttccactcgcgccggcctgcctgcctgcctgcggccgcaggcggcttccgttgccgccagggcaccgcccgtgacaccctgatctcccctcacctactcctggattcgatcccatccagcccgtcccgtccctctcccacccttttcagatctgcctgcgagcccccgccacgcacccccatgcccatgcccatgaccccccgacgcgaggccactactgccaatggctccctgccgtgaccgagcccatggaggacctcgccccgggggccctcgcgctcttcgccgccgtcgctgacttcatagacgactccgctcccgctgccgccggggccgggatgccaccgccggagcccgagtccgcgcccgggagtccctgctccgactgcagcagcgtcgccaccgccgacttcgagggcttcgccgacctcgcctccacgctcgtgctcgacgacctcgtctcccccgcctccgcctccgcctccgccagctcgctccccgcctccgggcccagggccgccaggagcgtcttcgcgctcgactgcgtgccgcgctggggactccactccgtgtgcggccgacggcccgagatggaggacgccgcccgcgtgctcccaaccttcttccacgtcccgctctggatgctcgccggcgacgcgcccgtcgacggcctcgaccgggcatccttccgcctccccgcgcacttcttcgccgtctacgacggccacggcggccttcaggtcgccaactactgccgggacagaatgcacgaggtactggccgaggggctcaccagggcagagcaggccgtgtccgacgctgacttgagtggccttgaccctagtactcacgagcactgggagaaggtctttgtggactgcttcagccgtgttgatgcagaggtgggaggagacgcggcgaccggaaccaagcctgtggctccagacacagtggggtcaacagcggtggttgcgctcgtctgctcatcgcatgtcatcgttgccaactgcggcgactcgagggcggtgctctgccggggcaagcagcccctgccgctgtccgtggaccataaaccaaacagggaagatgagtatgcgaggatcgaggcccaggggggcaaggtcatcaactggaacggctaccgagttctcggtgttcttgccatgtcccggtcaattggggacaggtacctgaagccatatataatcccagtccctgaggtcacaattgtcgcccgtgcaaaggatgatgagtgcctaattcttgcaagcgatggcctgtgggatgtaatgtcaaacgaggaggtatgtgatgctgctcgcaagcgcatactgctgtggcacaagaagaacggcgacgactcagcgtcagcccaaagaagcggtgattcggcagatgaagcagctcaagcagctgctgaatatttgtcgaagctggccctccagaaggggagcaaggacaacattaccgtcattgtagtcgacctcaagtcacatagaaagttcaagagcagaacataaccacggattcggctgccacgtttgatcagggtacagattcatacacagatgtaatctggttggagactgggctggctaggtaaggtggtcgattctagggtccaaatcttagaaataacatacatatgtagattccaacaagtagttcactgattgggtttggggcattgtttctgttattaacaggtaaaggtacaatagaaactgccacccctgaactacctaattgagcactgtatctgtgctactggtgttttgacgtt

SEQ ID NO: 8992 - DNA, 512 bp, Zea Mays
atggaggagagcacctcctcggcctggcgcgcgacccagcggctgaggaggcgcgactcccgcctctgcctgcgcaccgccgacgactcgacctcgccgtattcacgcagaggacgccctggatggtggatccgatgcattccatggcctgccctatggcgtcaaggcgacatgttgcgccgaggtggaggccgggttgaacgccgtgtaccggcgagagatgccgaggggctgtacctcgccagcgatttggacaagcggctattgatctacttccccttcatgcaagtggtcaagctacatttcgtgctattcaaaggccccaaggatgacgctaaaatgcatatttatgtaataaatgtcagcaatggcaatgactatctaccaatggacatcgtggagctatcttccgatcatttgatagagaataagcctttgctgctaaaggatgtcaagttccaaaacgtacacgggcttaccagtgcttattgacctttgtttgttcgggacac

SEQ ID NO: 8993 - DNA, 208 bp, Zea Mays
acagaatcaatcatgacaagaggacttcgaagattaaagaatttgaacattgatggagatggtgcagaagttgctcaggaggagcacgaaaatgtggcagataatgagaacaatgaaagtttacagtcccctcctgatgttgatggtttattagtccgcctgccacaccttcctcgaagtccaattaagatcatatggccaaatggag

SEQ ID NO: 8994 - DNA, 1016 bp, Zea Mays
gcccggtcgagtgagacacgtcctattcaaagacgactcgtcgccgtcgtcatcaccatctctctctagtctttacagcctatcggcctccgatccgataggccgggtagtcaatccaggctccgctgctcgagcaggcggagagagaaagaagaagggagctaacgatgcggcctggatcgacctccagaccttctccgcgccggtgcctctatgtctatggctccgcctccgcgctcccgaagctgctgctgctgcttctagctgcatcatcatccgcgcaagcccagcaagcggcgaggatgaagaccgatccagtcgaagcggcggcggtgaacgcggtgttcgccaagctccgccagacagcgtcgtcggaatggaacatcagcggcgacccctgcaccggcatcgccacggacggcaccgtcatcgaagacaacggcaacttcaacccgggcatcaagtgcgagtgctccgaccagaacaacatcaccgtctgccacgtcaccaagctgaagatatacgcgctcaatgccgttggccccataccacaggaactgcagaatcttacgcgcttgatcaatctggatttaagcaagaattacttaacaggttctttgccatctttcctcgggaatttgactgctatgcagtacatgactttgggcaccaatgcattgtctggatctgttccaaaggagcttgggaaccttgtgaatcttgtatctctaggctttggctcgaactacttaaatggcccccttccttgggagttgggaaacctggcaaaactggagcaattgtatattgatagtgccggcctaagtggtctcctaccatcatcgctttctaggctaacaagaatgaacatactgtgggcatcagataatgattttactgggcaaataccagattatattgggagctggactaatttgacagatctgcggtttcaaggcaattcgtttcaaggtccacttccagccagtttttctaatctcgttcaactaacaaac

SEQ ID NO: 8995 - DNA, 1691 bp, Zea Mays
ccccacctcacacgatactttccccctccactagggttccccgtccgttccccctcggccgcatcagctgtttgaggcggcaaccaagggccgcggaagcatctgtgtcgagccatggataaggggatcttcaccaacgatggctccttcatggagaggttcaagcagatgcagcaggaggcgcaggagaagaaggccgctgctgcctctgcctcatcggctcccaagcatgcgaaccccaagcaggggtttgctgttgcggcaaacaagaggccattcgagctgaagaacgctgctccggtagcctcagctggtaagctggcctttagtctcaagaaggccaaggtcgccgttgcacctgtgtttgcagccgacgaggaggatgaggatgctgtggatgttgagagggaggagcccgccaaacgccagaagtctgtgcaagctgatgctcctgcggcagctgccgcgtccggggctgttgtgagacaagtcgctgacaaactggcaagctttgttgccaaaaacgggagacagtttgagaatatcacacgacagaggaatcctggagatacaccattcaagtttctatttgacaaaaactgtccagactacaaatattatgagtttcagcttgctgaagaggaaagggctcttgctcagtcaaaggaggctgaagcatcgaaagctaactctggcactgcaagcttcaaggcaccaggtggtacttatagaagctcatttgaacagaagtctaactatcagacacctgcatcagctttgtacggggcatatgagggtagttcttcccaaggaagctcttctagttatggtgatcatacagctccaccatcagatcctgtagcattgatggaattctatgcaaagaaggctgcactggaagaacggaagaggccaccaaggcagtcgaaagatgaaatgccgccacctccttctcttcaaggtcctcctaagaagggacaccacatgggtgatttcattcctcaagaagaacttgaaaagtttatggcacggtgtaatgatgctgcagcacaaaaggctaccaaagaagccgctgagaaggctaagattcaggcggacaatattgggcacaaacttttatctaagatgggttggagggaaggtgagggtcttgggagcgagagaagaggccgtgcagatcccgttatggctggagatgtgaagaaggatcatcttggtgttggggcagtccagcctggtgaggtcacatctgaagatgacatctatgagcaatacaagaagcggatgatgcttggataccgctataggccaaaccctctgaacaatccaaggaaatcatactactgatgtgggggagttcgtctgaggggagataaatgtcaagaagttcgttattcagcatatttcttggaatgccacagatgcaaggcttccgggggttctacaaagctttgttctttgtgtagtgtgtttatctttgtgggtttaaatgtctgttcaaacgtgtatcatgtttcagactgttgtattgctttcttggatcacccttttttctgatctcatttcagttacaagttggaaccataaggtacaaaatttgtgttgggaggggttatattttagaatggagtgtgaataactatagctagcataaggctatctccagcagattagccatcctcacatctaac

SEQ ID NO: 8996 - DNA, 1571 bp, Zea Mays
gctgttcgttatatctggctgcgcacaaatgggatgtcacaaatccggaaggggtttagaaaggttgatccagacagatgggaatttgcaaatgagggttttctgagaggacaaaaacatctgctgaagactatcaacagaaggaaaccatccttgcagggtaacagccaaccacagcaacctcagttgcagaacgctcctgtgccttcgtgtgtagaggtgggtaagtttgggttggaggaagagattgaacggctgaaaagggacaagaatgttcttatgcaagagcttgtaaggctgagacagcaacagcaaacaactgaccatcagctccagactttgggcaagcgtcttcaagggatggagtcacggcagcaacagatgatgtctttcctggccaaagcaatgcaaagtcctggtttcctagcacagtttgtacagcgaaatgagaacagcaggaggagaatagtagctgcgaacaagaaaaggcggctgcccaagcaagatggtggactcgagtccgaaagttctgctgcttcgttagacggtcaaattatcaagtatcagccttcgatcaacgaagcagccaaagcaatgctaaggaagatcctaaacgtagattcttcgcataggtttgaatctatgggcaattcagataatagtaataataataatattctgctggaggattatatgccggccgcccaagcttttgagagctcttcgtcgacaagaaattctggggtcacccttgcagaggttccagcaaactcaggcttggcgtatgtcggcacgagctcggctatctgttctcctccagcggcccctgaaatgcagtgcccagtggtgctggataacaaggcgtacaagcaagtggccagcatgagtgctgtgcctcctgtttcaagtgacatgggtattattccggaattctcagatctggcagacttggtctctgtggatattcttggaggggcctttgagatgatgcctggtcctgagttccccctgccagaagaaggtgatgatgggaccaccatgtacaacaacaacgacgaggaggctcagagccttccaggcatcatcaactccatctgggagcagttcctggtaggcagccctctatctaccgataatgaggaagttgattcagcaggcggactatatgcgcaggaggatggatggagcaaagtggggaacatcgctaatcttacagaacagatgggacttgtatcatcaacaaatcaccgggactcagggaatgggctgtactagtatcttaattaatacagtagactgaggattctggtaataagtgttgcatgctcttttcttatttaattattttcccccttttcgccaactcaatatgggaggtgggggtgaggagattcaaaggcatgtttggctcgttacctaagttgacacactttgccaaacttacttttatgactaaggttagttatttaatttggacgactaactttagacaaagtgtgacacatttagccacaaaccaaacagaccctctgtctttcagccatgtatgatctatatgactacttgttctc

SEQ ID NO: 8997 - DNA, 664 bp, Zea Mays
tcgggctgatcgtcgactaatcgtaattagtcggctgatcacccttctggcgatcagaggctaatcgccgatctgaaaactttgctctgctggtgctgcaacggattcggaacctgctgctgcgatggatccgggacctggttgctgtaacgcattcagctcctgctgctcttaatggtttggctactgacgagggcgaggaggatcatgatttggatgtctcgttggtgaaaaatcggagctgtctcgaggcttggcaacaaatgcgcatcgcggtcttcctcctatttgtagtcgtcgtcgagtttcctttgatcttgtgatgcccgtcttagagagttggagttgctcgtctgttgtgttgagctcggcaacgatgactcagcatgagtattgtgtgtggggttgctgttatctgagttggcaccctgtgtaggttttagaactggttttccttaaaactggatcaatttctttattcttaattaagagattgtcattacgtttttttaaaaaagaaccaccttcccgtccacgttgtggttgagatgatcagaacctggagccaacaatgtgtgtccaacacaagttcttgaggatggaaggtaattagtacatgaaatgtttgtttcgatcagttttgtgatttctatatttgaggtca

SEQ ID NO: 8998 - DNA, 955 bp, Zea Mays
cgccagcgtgcaatcccgttcatctctacaggtgttaggatacttggattggagtcgagtgctaggctgctagtgctagtgttcaaagcctgaagccatgtccatgggcgtgtggttgttgcctgtttgtccaccggcagttcaaagcctgaagccatgtcctggcggccgcgaagaacctgcgcagtgcgcacggaggccgcctcgggagcgcagagcgattaatcgggctgatcgtcgactaatcgtaattagtcggctgatcgcccttctggcgatcagaggctaatcgccgatctgaaaactttgctctgctggtgctgcaacggattcggaacctgctgctgcgatggatccgggacctggttgctgtaacgcattcagctcctgctgctcttaatggtctgttcacaaattgcagctcagcatgcagccaattctaaccttgataaactatttattacaaaagtttggctactgacgagggcgaggaggatcatgatttggatgtctcgttggtgaaaaatcggagctgtctcgaggcttggcaacaaatgcgcatcgcggtcttcctcctatttgtagtcgtcgtcgagtttcctttgatcttgtgatgcccgtcttagagagttggagttgctcgtctgttgtgttgagctcggcaacgatgactcagcatgagtattgtgtgtggggttgctgttatctgagttggcaccctgtgtaggttttagaactggttttccttaaaactggatcaatttctttattcttaattaagagattgtcattacgtttttttaaaaaagaaccaccttcccgtccacgttgtggttgagatgatcagaacctggagccaacaatgtgtgtccaacacaagttcttgaggatggaaggtaattagtacatgaaatgtttgtttcgatcagttttgtgatttctatatttgaggtca

SEQ ID NO: 8999 - DNA, 3342 bp, Zea Mays
ccgaaactcgaccagcccatcgcagcccggcttacacttaagccgacgggtctgttcgtatgggcctgatccgaagcccagatctaccactaaaactgcagtgtccgtcccaatggcaatgacggactgaccagacgcctgaccacgacacgagccaaccatacgggtgctgtcatcttgtccaccccgtgcgactgcgagctcgttgctccgctagttcactcgccgcgacgcgatggttctgactctgctgctgcttctgcttctccccgcggcttcccgcgccagggacaccatcacgccgggccagccgctgcggggaaacgacacgctcgtatcgtccggcgccggcagcttcgtgctcggcttcttctccccgccgggctccaacagcacctacgtcgggatctggtacgccaaggtgcccgtccgcaccgtcgtctgggtggccaaccgcgccgcccccgtgcgcggcgcggcgagcgagagcgccggcgccacgctctccgtgtccagcgagtgcgcgctcgccgtggcggacgccaacgccacggtggtgtggcggtcgttgtcgtcgtcttccccgcggccgtgcgcggcgcggatccaggacgacggcaacctggtggtgtcggaccagcgcgggcgggtggtgtggcaggggttcgaccaccccaccgacacgctgctcccggggatgcggctcggggtggacttcgcggcgggggcgaacatgacgctgacggcgtgggcgagcccctccgacccgtcgccgagccccgtggtggcggccatggacacgtcgggcgacccggaggtgttcatctggaacgggccggccaaggtgtggcggtcggggccctgggacggcgtgcagttcacgggagtcccggacaccgtcacctacaagggcatgggcttcagcttccgcttcgtcaacgacgggcgcgaggccacctacagcttccaggtccgggacgcgggcatcgtctcgaggctggtgctcaacagcacgggcgtcggcggcgggctgatgcagaggtggacgtggctggatgtcgccggcgcgtgggccctctactggtacgcgcccaaggaccagtgcgacgccttgtccccgtgcgggcccaacggggtgtgcgacaccaacaaggtcccggcctgctcctgcctccccgggttcacgccgcggtccccggcgtcgtgggcgatgcgggacgggcgggacggctgcgtccgggccacgccgctggactgcgccaaccgcaccgacggcttcctggtgctgccgcacgccaaggtgcccgacgcgacgcgggcggtggtggacttcaactccagcctggagcagtgccggcagcggtgcctgaggaactgctcctgcacggcgtacgccagcgccaacctcaccgccgcgccggggcgccgcggctgcgtgatgtggaccggcggcctcgaggacctccgcgtgtacccctccttcggccaggaactctacttccggctcgccgccgcagacctcgcttcaaaaggcaagtcaaagaaggtcagtattgtggttgcaattgctgtcagcataactgctgccctggccgttcttctagcaatcacagggttttacatttggagagcaaataaaacaaaagcaagaaaatcaggatcatccatatgggcagctggttcacacaataaggatggcagtgaaggaaaggataatggggacgacctggaactgccagtatatgatttcgagacaatagcagcagccacggagggtttctcagctgagaacaagcttggtgaaggcggctttgggcctgtatacaagggtaagcttgaggatggacaagaagtagctgttaaaacactttcaagaacatcaagacaaggtcttgaggaattcaagaatgaggttttgttgatagctaaactccagcatcggaatcttgttcgactaattggatgcagcatttctggaccagaaaagatacttatatatgaatacatggaaaacaagagcttggacttctttatgtttgacacgaccaggagcaagctacttgactggcaaacacgatatcgtataatcgagggaattgcccgaggtttactgtatcttcaccaggactcgcgatatagaatcatacacagagatctcaagacaagcaacattcttctggataaggatatgactcccaaaatttcagacttcggcatggctagaatgtttggcagtgatgacgcagagatcaatactctcagagtagttggcacatatggttatatggctcccgagtacgcaatggatggggtgttctcggtgaaatcagatgtatttagctttggcgttatagtgctggaaatcattgctggtaaaaggaaccgaggtgtctacagatactctggccacctcaaccttctagcacatgcctggagcttattgaatgaggggaatggcttagatttagtcgacgagaatctgaatggctccttcaactcagatgaagtgctaaaatgcctcaaagtggggcttctttgcgtgcaagagaacccagacgaccgtcccctgatgtctcaggtgctgatgatgctggccagcactgacactgcctcgttgccgactcccaaacagccaggcttcgctgcaagaactgcggccgctgaagacacgtcgtggagcaagcctgactgcagcatcgtggacagcatgaccatcacaatggtcgaaggtcggtagaaagctactccctccgtctcgttttagttgtcgctggatagtgcaaaattgaactatccagcgacaactaaaaagaaacggagggagtatatcagagcacaagatgtatgtatactcatgatatcagtcagagcaaaagatgtatactgtagagtagtagagtggcatctcttcctttgttatcttatttgacaagtgtataaatgtttcctcgagaaaaatgaagaaatcagggaaactaaagttttgcgggttgtgatcgtttacttctgataacgaatataatgtgcaatcaatgctaatattgaaaagaacatatagattgtagagtaaaactgaaggcgttgtcagagtgaaacctcaactcatattgcattgcaggcggtgccaagagaccaataatccgctatctcctggattcagttccccgtctcatcaaccgatctacacaatgagaagctggcgaaattgcgaaacgacattgatattcgagcgaatcgggatacctcctgcgcatccccagaactgcatgatattcgagcgaatgagacgcgcacctcagctattcacctcctctcctcgcgcgtccgtctcctgcggtcctg

SEQ ID NO: 9000 - DNA, 3780 bp, Zea Mays
ggtggatgagactggagcctcggatgagagcaagtctcatgggggtattcttcgggaaaggtgcaatggccctggcaaatgagatggttgaaggatcagacagtgcctcaagggataatttaggtgaaccaggatcattcgtggcaaacgaatcttgtgaatgtacacggcagtctctgttcagaaagaattgtgcttcttccgttgatggtgcaaacattctgtcttgcagcaagaagtctgtattttataaagagttgaaaagactgaaactagttgaggagatagtctgtttgaagagcaacattacttgctgcagcggtgatgcaatctttttcacttcattagtgtcggctgctactgctgctggtgatgtacttatgaaattacaagggcttctcatggtggtgtcgacagaaagtataaatcttgaacttattggggatgaagcccccaaaaagaaagatgttgaaaagaccagtggaggttctcggaaaggaaagaagaagtctaacaccttgaaaaagctaacgacatctgctaagccatctaaggataatggatgcagtagttcagataatcgcaattgtagtcctttaccaaaccattgtgctccatctgttgaaggcactgctgctggacctccatctgaaaaaactccttacaaggaaattgtaccaacaacgaaggttgaacaaactgtctcgttggatggttgcaaaaatcaatgtaacaaaaagaagaacaagcggaaagggaaaacaaaactatcaaatccgatgaggcctgagagcccaagatctaccaaattaaaaacagttgttccccatagtgctgcagaggccttgcatgaagctgctaaagaggctgatgtctcacctcatcacccatcgtatgtccatccttccaagaacgagatctctgaagctgttagctgttctgacccttccattttatctaatggaacaaaggtaatatccaccagtaagggcacaaaacttgaagacacattgtattctcctagagttcactcatcacttgctacagaacgttttcagagtgcccatgatgatgccttcaaagtggctgtgcaggcctcatcgtaccttagccaaagtgaatccttggttcagtcatcctcttgtctaccttccagaagcaatgaggtctcttctactaatctgtatggaagttcagttgactccttggtaagatctgcacaggaaaaaactgaatgtgatgggaaacatgtggatcataaatctgaagtgacaaaggacagaattttaccttctgctattcctactgacatgcttcaaagtgctataagtaaaaatggtggagttatgaaaaatggtggtggtgaatgttatgtatacaataggaacctactgggaggaacgtcgtatgaatggcctagtgtaacaccatctcattttgtatctcctcaaatgcaacaacgtccagctgcagcagacaggttgcatcttgatgttggttacagatggccaactcaatttaaccaaccctttcttcctgccaaccatcaggtgaggaatccgccaattgatgctggacacaatcaaatgttaccttctctagcagttccactaagttttgactggcctccagtttttagaggttatggtaaaaatgcttctgtaagctatgatccattgtataccccacagatgcaatcttctgcttggtcagggttccctgctcaactagtgcaaagagggggtatttgcagtgacagtgatgttgcggatgatactgaaagctattggttttctgaagaagaatcagatagtcgtgcacattctggaagagatattaatcaatactttggtggaggtgtgatgtactggagtcctgcagaacatgcaggaactggtttttccaggccaccatctcttagttcagatgatagtgcctgggcttggcatgaggctgatgttatacgagttgttgatgatgtagctaatggtattccatctacatacacaaatggtgtatcatcaccaccctccactccatcttgttctcaaaatgaatctttggatccagctgctcacttgataacagggaatgagatcaataatgaagctctgacttctccatcttcggtgcaagatagtcctgaagataaaataatgcaagttgcaaaggctgtgtcttgtggcagtgaagtagttaaggcagatacattgccatatgccatgctgcggccgatagttgttcctagtatatcacgaaggtcatcacgatctgagattaagggtgctcatgatcacaggaggagcccatgtgtaccatcaacaaggagggacatacctattctaagaagacctccatcaccagtagtacttagtgttcctcgcgtacctaggccaccacctccttcacctgctggagagtcaagaaaacgagggttccctatcgttagatccggcagctcaagtcctcgacattgggggatgagaggtttattttctgaagacaaaatttttcatagggctcagttttgcttggatggtcctgaagttgtatggccttcatggggtaacaagggtacttctggtacattggtgcaaacaattgaggatactgttttgcaggaccaccttgttaagatttcacagctatcttgtgatcaacatccagatgtggcattgcctgtacagccactagatatgctaaatggttcgtctcacaaggcatccctctctttgatgcacaatgctctacatgaagaaatagatcaattctgtaagcaggttgctgctggtaatctggtgaggaggccctatataaactgggctgtcaaaagagtcacccgttgcctgcaggttctgtggcctcgctcccgtacaaatctatttggctcaaatgccactggtctggctcttccaactagtgatgttgatcttgtggttagtcttcctcctgtccgaaacctggaacctattaaagaagctggaattttggaaggccgtaatggcatcaaggaaacatgtctacagcatgcagcaaggtgtcttactaaccaggactgggttagaagtgattcccttaaaacagttgaaaacacagctatacctgtgatcatgcttgtagcggatgtaccctgtgacacgaatatgtccaatgagtattcttcagtactagatggctcacaagactattcagttaacatgcttggagaacaagggagtcctcctcggtctgacacctctagttcagaaggcagcaacatgctgatgtgctcaaaattgaataaggatgattgtgatattgtgcagtcaattcgtcttgatataagtttcaaatcgccatcccatacaggactgcagactactgagttggtacgtgagttgagccagcaatttcctgcagttatacctcttgccttgattctcaagaagtttttggctgaccggagtttggaccacccctattcaggtggtctgagctcttactgtttggtccgcagccacccttcgccgtgttgctgcagcaaccacaaacatctccatcctcttgcaaccatggtagggacctcatcgtatgttgaggagtgcgcccacgtcaaggaggtcgtggtctttcgcaagaagattgacgacatgctcgctgcgactcaggccggaaaaggaggctgccaacgcatgcgctcacatcaaggcagccactttctcctcgaacaggagaaaattgtcgtcgccctagagcagatggtcgtcgtcgcccgccagggtatgggcctataacacccca

SEQ ID NO: 9001 - DNA, 4509 bp, Zea Mays
tggagtactccgacgcaaaactctctccgctgctccgcaaaccaagcaagaccggaagagcgcccaggcccaccacagcggccactcctcccccattcccgagtcccgaccaaccaccggcaccgacgcggccgctccccagcatggcctccaccgccgccgcgccgcgcaccacgaaggagctcatggacgccctcaccgcgcacctctctctctaccacgccgccgcgaaccctagccccgccaccgctgctgcctctacctcctcctcgtcaccgcgcgctgcgatcctccggtggctcgcctccctctcccccgccgcgcgcgctgcggctgccacctccctcctctcccccgccgcggctgccgcgctgctctccatggtccgccggctccgcctccgcggccactcctccttcttcgtgctccactcctcgtccccgtccacctccgcgcgcggagccgaggagccaaccgtcctctcgcgcctctcccggggcctcctcgcccgcgccgccgccagctcccgggcgcaggcgctcctcttcgccaacaccctcctcttcccctcgtcgcccgcatcgtcgcggcgccccgacgtgatcaccgtcgccgaagccttcgtcgctgacctcgacggctttgtcgcagccatggatgagatctctggcgggaggttcctctgctgcggggagggggaagtggacctggccgcgctggcgtgtcaagatttcccggagctgccctggcttaatgccaaggggtactacgtgatcgaggagtttctggccaataggttggatatcgcactgcgaatgtcgtgggcagcggcagggggtgggtcagctggagggagaaaggcggtgagaattgggaagagtgcgaaggagaaggctgggcttgctgcaaacgcgttctggagggagaagggcattctgtcttgcagcaagaagtctgtattttataaagagttgaaaagactgaaactagttgaggagatagtctgtttgaagagcaacattacttgctgcagcggtgatgcaatctttttcacttcattagtgtcggctgctactgctgctggtgatgtacttatgaaattacaagggcttctcatggtggtgtcgacagaaagtataaatcttgaacttattggggatgaagcccccaaaaagaaagatgttgaaaagaccagtggaggttctcggaaaggaaagaagaagtctaacaccttgaaaaagctaacgacatctgctaagccatctaagttaacctttttccaggataatggatgcagtagttcagataatcgcaattgtagtcctttaccaaaccattgtgctccatctgttgaaggcactgctgctggacctccatctgaaaaaactccttacaaggaaattgtaccaacaacgaaggttgaacaaactgtctcgttggatggttgcaaaaatcaatgtaacaaaaagaagaacaagcggaaagggaaaacaaaactatcaaatccgatgaggcctgagagcccaagatctaccaaattaaaaacagttgttccccatagtgctgcagaggccttgcatgaagctgctaaagaggctgatgtctcacctcatcacccatcgtatgtccatccttccaagaacgagatctctgaagctgttagctgttctgacccttccattttatctaatggaacaaaggtaatatccaccagtaagggcacaaaacttgaagacacattgtattctcctagagttcactcatcacttgctacagaacgttttcagagtgcccatgatgatgccttcaaagtggctgtgcaggcctcatcgtaccttagccaaagtgaatccttggttcagtcatcctcttgtctaccttccagaagcaatgaggtctcttctactaatctgtatggaagttcagttgactccttggtaagatctgcacaggaaaaaactgaatgtgatgggaaacatgtggatcataaatctgaagtgacaaaggacagaattttaccttctgctattcctactgacatgcttcaaagtgctataagtaaaaatggtggagttatgaaaaatggtggtggtgaatgttatgtatacaataggaacctactgggaggaacgtcgtatgaatggcctagtgtaacaccatctcattttgtatctcctcaaatgcaacaacgtccagctgcagcagacaggttgcatcttgatgttggttacagatggccaactcaatttaaccaaccctttcttcctgccaaccatcaggtgaggaatccgccaattgatgctggacacaatcaaatgttaccttctctagcagttccactaagttttgactggcctccagtttttagaggttatggtaaaaatgcttctgtaagctatgatccattgtataccccacagatgcaatcttctgcttggtcagggttccctgctcaactagtgcaaagagggggtatttgcagtgacagtgatgttgcggatgatactgaaagctattggttttctgaagaagaatcagatagtcgtgcacattctggaagagatattaatcaatactttggtggaggtgtgatgtactggagtcctgcagaacatgcaggaactggtttttccaggccaccatctcttagttcagatgatagtgcctgggcttggcatgaggctgatgttatacgagttgttgatgatgtagctaatggtattccatctacatacacaaatggtgtatcatcaccaccctccactccatcttgttctcaaaatgaatctttggatccagctgctcacttgataacagggaatgagatcaataatgaagctctgacttctccatcttcggtgcaagatagtcctgaagataaaataatgcaagttgcaaaggctgtgtcttgtggcagtgaagtagttaaggcagatacattgccatatgccatgctgcggccgatagttgttcctagtatatcacgaaggtcatcacgatctgagattaagggtgctcatgatcacaggaggagcccatgtgtaccatcaacaaggagggacatacctattctaagaagacctccatcaccagtagtacttagtgttcctcgcgtacctaggccaccacctccttcacctgctggagagtcaagaaaacgagggttccctatcgttagatccggcagctcaagtcctcgacattgggggatgagaggtttattttctgaagacaaaatttttcatagggctcagttttgcttggatggtcctgaagttgtatggccttcatggggtaacaagggtacttctggtacattggtgcaaacaattgaggatactgttttgcaggaccaccttgttaagatttcacagctatcttgtgatcaacatccagatgtggcattgcctgtacagccactagatatgctaaatggttcgtctcacaaggcatccctctctttgatgcacaatgctctacatgaagaaatagatcaattctgtaagcaggttgctgctggtaatctggtgaggaggccctatataaactgggctgtcaaaagagtcacccgttgcctgcaggttctgtggcctcgctcccgtacaaatctatttggctcaaatgccactggtctggctcttccaactagtgatgttgatcttgtggttagtcttcctcctgtccgaaacctggaacctattaaagaagctggaattttggaaggccgtaatggcatcaaggaaacatgtctacagcatgcagcaaggtgtcttactaaccaggactgggttagaagtgattcccttaaaacagttgaaaacacagctatacctgtgatcatgcttgtagcggatgtaccctgtgacacgaatatgtccaatgagtattcttcagtactagatggctcacaagactattcagttaacatgcttggagaacaagggagtcctcctcggtctgacacctctagttcagaaggcagcaacatgctgatgtgctcaaaattgaataaggatgattgtgatattgtgcagtcaattcgtcttgatataagtttcaaatcgccatcccatacaggactgcagactactgagttggtacgtgagttgagccagcaatttcctgcagttatacctcttgccttgattctcaagaagtttttggctgaccggagtttggaccacccctattcaggtggtctgagctcttactgtttggtccgcagccacccttcgccgtgttgctgcagcaaccacaaacatctccatcctcttgcaaccatggtagggacctcatcgtatgttgaggagtgcgcccacgtcaaggaggtcgtggtctttcgcaagaagattgacgacatgctcgctgcgactcaggccggaaaaggaggctgccaacgcatgcgctcacatcaaggcagccactttctcctcgaacaggagaaaattgtcgtcgccctagagcagatggtcgtcgtcgcccgccagggtatgggcctataacacccca

SEQ ID NO: 9002 - DNA, 5089 bp, Zea Mays
aatggccctgcttgcaggcaaatgagatggttgaaggatcagacagtgcctcaagggataatttaggtgaaccaggatcattcgtggcaaacgaatcttgtgaatgtacacggcagtctctgttcagaaagaattgtgcttcttccgttgatggtgcaaacattctgtcttgcagcaagaagtctgtattttataaagagttgaaaagactgaaactagttgaggagatagtctgtttgaagagcaacattacttgctgcagcggtgatgcaatctttttcacttcattagtgtcggctgctactgctgctggtgatgtacttatgaaattacaagggcttctcatggtggtgtcgacagaaagtataaatcttgaacttattggggatgaagcccccaaaaagaaagatgttgaaaagaccagtggaggttctcggaaaggaaagaagaagtctaacaccttgaaaaagctaacgacatctgctaagccatctaaggataatggatgcagtagttcagataatcgcaattgtagtcctttaccaaaccattgtgctccatctgttgaaggcactgctgctggacctccatctgaaaaaactccttacaaggaaattgtaccaacaacgaaggttgaacaaactgtctcgttggatggttgcaaaaatcaatgtaacaaaaagaagaacaagcggaaagggaaaacaaaactatcaaatccgatgaggcctgagagcccaagatctaccaaattaaaaacagttgttccccatagtgctgcagaggccttgcatgaagctgctaaagaggctgatgtctcacctcatcacccatcgtatgtccatccttccaagaacgagatctctgaagctgttagctgttctgacccttccattttatctaatggaacaaaggtaatatccaccagtaagggcacaaaacttgaagacacattgtattctcctagagttcactcatcacttgctacagaacgttttcagagtgcccatgatgatgccttcaaagtggctgtgcaggcctcatcgtaccttagccaaagtgaatccttggttcagtcatcctcttgtctaccttccagaagcaatgaggtctcttctactaatctgtatggaagttcagttgactccttggtaagatctgcacaggaaaaaactgaatgtgatgggaaacatgtggatcataaatctgaagtgacaaaggacagaattttaccttctgctattcctactgacatgcttcaaagtgctataagtaaaaatggtggagttatgaaaaatggtggtggtgaatgttatgtatacaataggaacctactgggaggaacgtcgtatgaatggcctagtgtaacaccatctcattttgtatctcctcaaatgcaacaacgtccagctgcagcagacaggttgcatcttgatgttggttacagatggccaactcaatttaaccaaccctttcttcctgccaaccatcaggtgaggaatccgccaattgatgctggacacaatcaaatgttaccttctctagcagttccactaagttttgactggcctccagtttttagaggttatggtaaaaatgcttctgtaagctatgatccattgtataccccacagatgcaatcttctgcttggtcagggttccctgctcaactagtgcaaagagggggtatttgcagtgacagtgatgttgcggatgatactgaaagctattggttttctgaagaagaatcagatagtcgtgcacattctggaagagatattaatcaatactttggtggaggtgtgatgtactggagtcctgcagaacatgcaggaactggtttttccaggccaccatctcttagttcagatgatagtgcctgggcttggcatgaggctgatgttatacgagttgttgatgatgtagctaatggtattccatctacatacacaaatggtgtatcatcaccaccctccactccatcttgttctcaaaatgaatctttggatccagctgctcacttgataacagggaatgagatcaataatgaagctctgacttctccatcttcggtgcaagatagtcctgaagataaaataatgcaagttgcaaaggctgtgtcttgtggcagtgaagtagttaaggcagatacattgccatatgccatgctgcggccgatagttgttcctagtatatcacgaaggtcatcacgatctgagattaagggtgctcatgatcacaggaggagcccatgtgtaccatcaacaaggagggacatacctattctaagaagacctccatcaccagtagtacttagtgttcctcgcgtacctaggccaccacctccttcacctgctggagagtcaagaaaacgagggttccctatcgttagatccggcagctcaagtcctcgacattgggggatgagaggtttattttctgaagacaaaatttttcatagggctcagttttgcttggatggtcctgaagttgtatggccttcatggggtaacaagggtacttctggtacattggtgcaaacaattgaggatactgttttgcaggaccaccttgttaagatttcacagctatcttgtgatcaacatatgtggcattgcctgtacagccactagatatgctaaatggttcgtctcacaaggcatccctctctttgatgcacaatgctctacatgaagaaatagatcaattctgtaagcaggttgctgctggtaatctggtgaggaggccctatataaactgggctgtcaaaagagtcacccgttgcctgcaggttctgtggcctcgctcccgtacaaatctatttggctcaaatgccactggtctggctcttccaactagtgatgttgatcttgtggttagtcttcctcctgtccgaaacctggaacctattaaagaagctggaattttggaaggccgtaatggcatcaaggaaacatgtctacagcatgcagcaaggtgtcttactaaccaggactgggttagaagtgattcccttaaaacagttgaaaacacagctatacctgtgatcatgcttgtagcggatgtaccctgtgacacgaatatgtccaatgagtattcttcagtactagatggctcacaagactattcagttaacatgcttggagaacaagggagtcctcctcggtctgacacctctagttcagaaggcagcaacatgctgatgtgctcaaaattgaataaggatgattgtgatattgtgcagtcaattcgtcttgatataagtttcaaatcgccatcccatacaggactgcagactactgagttggtacgtgagttgagccagcaatttcctgcagttatacctcttgccttgattctcaagaagtttttggctgaccggagtttggaccacccctattcaggtggtctgagctcttactgtttggtgctgttaattgttcgttttctccagcatgagcatcatcttggtcgacctattaataaaaatctgggcagccttttgatggatttcttgtacttctttgggaacatatttgatccacgccatatgcgcatttctatccaaggaagtggaatttatttgaatcgagaaagagggcaaagcattgacccgattcacatagatgatccacattgccctgctaacaatgtgggcaggaattgtttccgcattcaccaatgtattaaggcatttgctgatgcgtttgctgttcttgagaatgagctactgcagttcagttcagaatgtagcatgcctgtatcttcattcaatatactaaagaaaataatcccaagtattgattctgatgagctgtagctataaaaaagaggtacgattccacagaatacaattgatgacagggtggaatgacctgtgctgccttctagacacactgatgtctatgcagctgctcagaagcctcagtgtggcaagtttgatacctctggaatagaccaaaaaatagaccggcaagatggcaatattcaaacgtgagctcttgtgtgttcatgcaatggcacatgatgccttgctccctgatcgagcttcttgatgttcagatctctgactgaggtaaattggcttactcaagaacaaggtggtgaattggctttctcatgaacaaggcgttgctgcacacagactactgacgtggctgttcttgcacctttctgaataagcccattcatgtaatgtttggtaaatgcaaaccgcatgattatccgcttgatactgtgattgatagatgcttcacctcgtgccaatattctgtgttccaatgccaagtcacatattctgagcagcaactggagatttgctcatgtaccgattcttcaaggtcctaggatcatttggggtgatgaagattgtgaaatacatgtggaggggtacttatatggagatgcatggtcttagtaattaagcggtcaagaacttatggtcacctgatgaaaacaaggatggttgtgaagagaacggagtagtggcatcagctatcagggaaagggaagtgctattgacatcatggctgacccctttcagattatcgcgctgagatcttcctggcgaggattgggagctacgagccagatatccttgacggaaatgtttgcttggacagcgtaaaccggaaagtaccggcgatgatattgatgatgataatcgcactgctctctattgtcatactgttgtctgcactcttcagcgacatgtcttgtgccttttcaacgtgcgaaatgtgagcaattgctcttgtaaagctgcactatttcactaaaacattattgtttgggttatttagatccatggtattactatttatctatttggaaacttacattacaattttccctggatgtacccgatccatgccatttcctacgcttctccactcggcagattgttgaatcgtatcccaaaatctctcccattgtcgtctccatgaattgctcatctcacctctctaccatggagggtttagggtttatatctttctatcaggttaaactggttggtgtatataacttaatatggtattagatgtctcgaatttaaatcctagttagtataattaaataaaaataaata

SEQ ID NO: 9003 - DNA, 5219 bp, Zea Mays
tcgagaggaataaaatggcataatctagtcttgcaatcttatttctaaggcaaatgagatggttgaaggatcagacagtgcctcaagggataatttaggtgaaccaggatcattcgtggcaaacgaatcttgtgaatgtacacggcagtctctgttcagaaagaattgtgcttcttccgttgatggtgcaaacattctgtcttgcagcaagaagtctgtattttataaagagttgaaaagactgaaactagttgaggagatagtctgtttgaagagcaacattacttgctgcagcggtgatgcaatctttttcacttcattagtgtcggctgctactgctgctggtgatgtacttatgaaattacaagggcttctcatggtggtgtcgacagaaagtataaatcttgaacttattggggatgaagcccccaaaaagaaagatgttgaaaagaccagtggaggttctcggaaaggaaagaagaagtctaacaccttgaaaaagctaacgacatctgctaagccatctaaggataatggatgcagtagttcagataatcgcaattgtagtcctttaccaaaccattgtgctccatctgttgaaggcactgctgctggacctccatctgaaaaaactccttacaaggaaattgtaccaacaacgaaggttgaacaaactgtctcgttggatggttgcaaaaatcaatgtaacaaaaagaagaacaagcggaaagggaaaacaaaactatcaaatccgatgaggcctgagagcccaagatctaccaaattaaaaacagttgttccccatagtgctgcagaggccttgcatgaagctgctaaagaggctgatgtctcacctcatcacccatcgtatgtccatccttccaagaacgagatctctgaagctgttagctgttctgacccttccattttatctaatggaacaaaggtaatatccaccagtaagggcacaaaacttgaagacacattgtattctcctagagttcactcatcacttgctacagaacgttttcagagtgcccatgatgatgccttcaaagtggctgtgcaggcctcatcgtaccttagccaaagtgaatccttggttcagtcatcctcttgtctaccttccagaagcaatgaggtctcttctactaatctgtatggaagttcagttgactccttggtaagatctgcacaggaaaaaactgaatgtgatgggaaacatgtggatcataaatctgaagtgacaaaggacagaattttaccttctgctattcctactgacatgcttcaaagtgctataagtaaaaatggtggagttatgaaaaatggtggtggtgaatgttatgtatacaataggaacctactgggaggaacgtcgtatgaatggcctagtgtaacaccatctcattttgtatctcctcaaatgcaacaacgtccagctgcagcagacaggttgcatcttgatgttggttacagatggccaactcaatttaaccaaccctttcttcctgccaaccatcaggtgaggaatccgccaattgatgctggacacaatcaaatgttaccttctctagcagttccactaagttttgactggcctccagtttttagaggttatggtaaaaatgcttctgtaagctatgatccattgtataccccacagatgcaatcttctgcttggtcagggttccctgctcaactagtgcaaagagggggtatttgcagtgacagtgatgttgcggatgatactgaaagctattggttttctgaagaagaatcagatagtcgtgcacattctggaagagatattaatcaatactttggtggaggtgtgatgtactggagtcctgcagaacatgcaggaactggtttttccaggccaccatctcttagttcagatgatagtgcctgggcttggcatgaggctgatgttatacgagttgttgatgatgtagctaatggtattccatctacatacacaaatggtgtatcatcaccaccctccactccatcttgttctcaaaatgaatctttggatccagctgctcacttgataacagggaatgagatcaataatgaagctctgacttctccatcttcggtgcaagatagtcctgaagataaaataatgcaagttgcaaaggctgtgtcttgtggcagtgaagtagttaaggcagatacattgccatatgccatgctgcggccgatagttgttcctagtatatcacgaaggtcatcacgatctgagattaagggtgctcatgatcacaggaggagcccatgtgtaccatcaacaaggagggacatacctattctaagaagacctccatcaccagtagtacttagtgttcctcgcgtacctaggccaccacctccttcacctgctggagagtcaagaaaacgagggttccctatcgttagatccggcagctcaagtcctcgacattgggggatgagaggtttattttctgaagacaaaatttttcatagggctcagttttgcttggatggtcctgaagttgtatggccttcatggggtaacaagggtacttctggtacattggtgcaaacaattgaggatactgttttgcaggaccaccttgttaagatttcacagctatcttgtgatcaacatccagatgtggcattgcctgtacagccactagatatgctaaatggttcgtctcacaaggcatccctctctttgatgcacaatgctctacatgaagaaatagatcaattctgtaagcaggttgctgctggtaatctggtgaggaggccctatataaactgggctgtcaaaagagtcacccgttgcctgcaggttctgtggcctcgctcccgtacaaatctatttggctcaaatgccactggtctggctcttccaactagtgatgttgatcttgtggttagtcttcctcctgtccgaaacctggaacctattaaagaagctggaattttggaaggccgtaatggcatcaaggaaacatgtctacagcatgcagcaaggtgtcttactaaccaggactgggttagaagtgattcccttaaaacagttgaaaacacagctatacctgtgatcatgcttgtagcggatgtaccctgtgacacgaatatgtccaatgagtattcttcagtactagatggctcacaagactattcagttaacatgcttggagaacaagggagtcctcctcggtctgacacctctagttcagaaggcagcaacatgctgatgtgctcaaaattgaataaggatgattgtgatattgtgcagtcaattcgtcttgatataagtttcaaatcgccatcccatacaggactgcagactactgagttggtacgtgagttgagccagcaatttcctgcagttatacctcttgccttgattctcaagaagtttttggctgaccggagtttggaccacccctattcaggtggtctgagctcttactgtttggtgctgttaattgttcgttttctccagcatgagcatcatcttggtcgacctattaataaaaatctgggcagccttttgatggatttcttgtacttctttgggaacatatttgatccacgccatatgcgcatttctatccaaggaagtggaatttatttgaatcgagaaagagggcaaagcattgacccgattcacatagatgatccacattgccctgctaacaatgtgggcaggaattgtttccgcattcaccaatgtattaaggttagttataattctcctgttgtgctcagacaaatatatgggcaacaaagtgcagttttgagaacccatacattatatcatatgtatatgacaggcatttgctgatgcgtttgctgttcttgagaatgagctactgcagttcagttcagaatgtagcatgcctgtatcttcattcaatatactaaagaaaataatcccaagtattgattctgatgagctgtagctataaaaaagaggtacgattccacagaatacaattgatgacagggtggaatgacctgtgctgccttctagacacactgatgtctatgcagctgctcagaagcctcagtgtggcaagtttgatacctctggaatagaccaaaaaatagaccggcaagatggcaatattcaaacgtgagctcttgtgtgttcatgcaatggcacatgatgccttgctccctgatcgagcttcttgatgttcagatctctgactgaggtaaattggcttactcaagaacaaggtggtgaattggctttctcatgaacaaggcgttgctgcacacagactactgacgtggctgttcttgcacctttctgaataagcccattcatgtaatgtttggtaaatgcaaaccgcatgattatccgcttgatactgtgattgatagatgcttcacctcgtgccaatattctgtgttccaatgccaagtcacatattctgagcagcaactggagatttgctcatgtaccgattcttcaaggtcctaggatcatttggggtgatgaagattgtgaaatacatgtggaggggtacttatatggagatgcatggtcttagtaattaagcggtcaagaacttatggtcacctgatgaaaacaaggatggttgtgaagagaacggagtagtggcatcagctatcagggaaagggaagtgctattgacatcatggctgacccctttcagattatcgcgctgagatcttcctggcgaggattgggagctacgagccagatatccttgacggaaatgtttgcttggacagcgtaaaccggaaagtaccggcgatgatattgatgatgataatcgcactgctctctattgtcatactgttgtctgcactcttcagcgacatgtcttgtgccttttcaacgtgcgaaatgtgagcaattgctcttgtaaagctgcactatttcactaaaacattattgtttgggttatttagatccatggtattactatttatctatttggaaacttacattacaattttccctggatgtacccgatccatgccatttcctacgcttctccactcggcagattgttgaatcgtatcccaaaatctctcccattgtcgtctccatgaattgctcatctcacctctctaccatggagggtttagggtttatatctttctatcaggttaaactggttggtgtatataacttaatatggtattagatgtctcgaatttaaatcctagttagtataattaaataaaaataaata

SEQ ID NO: 9004 - DNA, 5859 bp, Zea Mays
gatggagtactccgacgcaaaactctctccgctgctccgcaaaccaagcaagaccggaagagcgcccaggcccaccacagcggccactcctcccccattcccgagtcccgaccaaccaccggcaccgacgcggccgctccccagcatggcctccaccgccgccgcgccgcgcaccacgaaggagctcatggacgccctcaccgcgcacctctctctctaccacgccgccgcgaaccctagccccgccaccgctgctgcctctacctcctcctcgtcaccgcgcgctgcgatcctccggtggctcgcctccctctcccccgccgcgcgcgctgcggctgccacctccctcctctcccccgccgcggctgccgcgctgctctccatggtccgccggctccgcctccgcggccactcctccttcttcgtgctccactcctcgtccccgtccacctccgcgcgcggagccgaggagccaaccgtcctctcgcgcctctcccggggcctcctcgcccgcgccgccgccagctcccgggcgcaggcgctcctcttcgccaacaccctcctcttcccctcgtcgcccgcatcgtcgcggcgccccgacgtgatcaccgtcgccgaagccttcgtcgctgacctcgacggctttgtcgcagccatggatgagatctctggcgggaggttcctctgctgcggggagggggaagtggacctggccgcgctggcgtgtcaagatttcccggagctgccctggcttaatgccaaggggtactacgtgatcgaggagtttctggccaataggttggatatcgcactgcgaatgtcgtgggcagcggcagggggtgggtcagctggagggagaaaggcggtgagaattgggaagagtgcgaaggagaaggctgggcttgctgcaaacgcgttctggagggagaagggcattctgtcttgcagcaagaagtctgtattttataaagagttgaaaagactgaaactagttgaggagatagtctgtttgaagagcaacattacttgctgcagcggtgatgcaatctttttcacttcattagtgtcggctgctactgctgctggtgatgtacttatgaaattacaagggcttctcatggtggtgtcgacagaaagtataaatcttgaacttattggggatgaagcccccaaaaagaaagatgttgaaaagaccagtggaggttctcggaaaggaaagaagaagtctaacaccttgaaaaagctaacgacatctgctaagccatctaaggataatggatgcagtagttcagataatcgcaattgtagtcctttaccaaaccattgtgctccatctgttgaaggcactgctgctggacctccatctgaaaaaactccttacaaggaaattgtaccaacaacgaaggaacaaactgtctcgttggatggttgcaaaaatcaatgtaacaaaaagaagaacaagcggaaagggaaaacaaaactatcaaatccgatgaggcctgagagcccaagatctaccaaattaaaaacagttgttccccatagtgctgcagaggccttgcatgaagctgctaaagaggctgatgtctcacctcatcacccatcgtatgtccatccttccaagaacgagatctctgaagctgttagctgttctgacccttccattttatctaatggaacaaaggtaatatccaccagtaagggcacaaaacttgaagacacattgtattctcctagagttcactcatcacttgctacagaacgttttcagagtgcccatgatgatgccttcaaagtggctgtgcaggcctcatcgtaccttagccaaagtgaatccttggttcagtcatcctcttgtctaccttccagaagcaatgaggtctcttctactaatctgtatggaagttcagttgactccttggtaagatctgcacaggaaaaaactgaatgtgatgggaaacatgtggatcataaatctgaagtgacaaaggacagaattttaccttctgctattcctactgacatgcttcaaagtgctataagtaaaaatggtggagttatgaaaaatggtggtggtgaatgttatgtatacaataggaacctactgggaggaacgtcgtatgaatggcctagtgtaacaccatctcattttgtatctcctcaaatgcaacaacgtccagctgcagcagacaggttgcatcttgatgttggttacagatggccaactcaatttaaccaaccctttcttcctgccaaccatcaggtgaggaatccgccaattgatgctggacacaatcaaatgttaccttctctagcagttccactaagttttgactggcctccagtttttagaggttatggtaaaaatgcttctgtaagctatgatccattgtataccccacagatgcaatcttctgcttggtcagggttccctgctcaactagtgcaaagagggggtatttgcagtgacagtgatgttgcggatgatactgaaagctattggttttctgaagaagaatcagatagtcgtgcacattctggaagagatattaatcaatactttggtggaggtgtgatgtactggagtcctgcagaacatgcaggaactggtttttccaggccaccatctcttagttcagatgatagtgcctgggcttggcatgaggctgatgttatacgagttgttgatgatgtagctaatggtattccatctacatacacaaatggtgtatcatcaccaccctccactccatcttgttctcaaaatgaatctttggatccagctgctcacttgataacagggaatgagatcaataatgaagctctgacttctccatcttcggtgcaagatagtcctgaagataaaataatgcaagttgcaaaggctgtgtcttgtggcagtgaagtagttaaggcagatacattgccatatgccatgctgcggccgatagttgttcctagtatatcacgaaggtcatcacgatctgagattaagggtgctcatgatcacaggaggagcccatgtgtaccatcaacaaggagggacatacctattctaagaagacctccatcaccagtagtacttagtgttcctcgcgtacctaggccaccacctccttcacctgctggagagtcaagaaaacgagggttccctatcgttagatccggcagctcaagtcctcgacattgggggatgagaggtttattttctgaagacaaaatttttcatagggctcagttttgcttggatggtcctgaagttgtatggccttcatggggtaacaagggtacttctggtacattggtgcaaacaattgaggatactgttttgcaggaccaccttgttaagatttcacagctatcttgtgatcaacatatgtggcattgcctgtacagccactagatatgctaaatggttcgtctcacaaggcatccctctctttgatgcacaatgctctacatgaagaaatagatcaattctgtaagcaggttgctgctggtaatctggtgaggaggccctatataaactgggctgtcaaaagagtcacccgttgcctgcaggttctgtggcctcgctcccgtacaaatctatttggctcaaatgccactggtctggctcttccaactagtgatgttgatcttgtggttagtcttcctcctgtccgaaacctggaacctattaaagaagctggaattttggaaggccgtaatggcatcaaggaaacatgtctacagcatgcagcaaggtgtcttactaaccaggactgggttagaagtgattcccttaaaacagttgaaaacacagctatacctgtgatcatgcttgtagcggatgtaccctgtgacacgaatatgtccaatgagtattcttcagtactagatggctcacaagactattcagttaacatgcttggagaacaagggagtcctcctcggtctgacacctctagttcagaaggcagcaacatgctgatgtgctcaaaattgaataaggatgattgtgatattgtgcagtcaattcgtcttgatataagtttcaaatcgccatcccatacaggactgcagactactgagttggtacgtgagttgagccagcaatttcctgcagttatacctcttgccttgattctcaagaagtttttggctgaccggagtttggaccacccctattcaggtggtctgagctcttactgtttggtgctgttaattgttcgttttctccagcatgagcatcatcttggtcgacctattaataaaaatctgggcagccttttgatggatttcttgtacttctttgggaacatatttgatccacgccatatgcgcatttctatccaaggaagtggaatttatttgaatcgagaaagagggcaaagcattgacccgattcacatagatgatccacattgccctgctaacaatgtgggcaggaattgtttccgcattcaccaatgtattaaggcatttgctgatgcgtttgctgttcttgagaatgagctactgcagttcagttcagaatgtagcatgcctgtatcttcattcaatatactaaagaaaataatcccaagtattgattctgatgagctgtagctataaaaaagaggtacgattccacagaatacaattgatgacagggtggaatgacctgtgctgccttctagacacactgatgtctatgcagctgctcagaagcctcagtgtggcaagtttgatacctctggaatagaccaaaaaatagaccggcaagatggcaatattcaaacgtgagctcttgtgtgttcatgcaatggcacatgatgccttgctccctgatcgagcttcttgatgttcagatctctgactgaggtaaattggcttactcaagaacaaggtggtgaattggctttctcatgaacaaggcgttgctgcacacagactactgacgtggctgttcttgcacctttctgaataagcccattcatgtaatgtttggtaaatgcaaaccgcatgattatccgcttgatactgtgattgatagatgcttcacctcgtgccaatattctgtgttccaatgccaagtcacatattctgagcagcaactggagatttgctcatgtaccgattcttcaaggtcctaggatcatttggggtgatgaagattgtgaaatacatgtggaggggtacttatatggagatgcatggtcttagtaattaagcggtcaagaacttatggtcacctgatgaaaacaaggatggttgtgaagagaacggagtagtggcatcagctatcagggaaagggaagtgctattgacatcatggctgacccctttcagattatcgcgctgagatcttcctggcgaggattgggagctacgagccagatatccttgacggaaatgtttgcttggacagcgtaaaccggaaagtaccggcgatgatattgatgatgataatcgcactgctctctattgtcatactgttgtctgcactcttcagcgacatgtcttgtgccttttcaacgtgcgaaatgtgagcaattgctcttgtaaagctgcactatttcactaaaacattattgtttgggttatttagatccatggtattactatttatctatttggaaacttacattacaattttccctggatgtacccgatccatgccatttcctacgcttctccactcggcagattgttgaatcgtatcccaaaatctctcccattgtcgtctccatgaattgctcatctcacctctctaccatggagggtttagggtttatatctttctatcaggttaaactggttggtgtatataacttaatatggtattagatgtctcgaatttaaatcctagttagtataattaaataaaaataaata

SEQ ID NO: 9005 - DNA, 716 bp, Zea Mays
ccagcaaactgcaaaccaaccctaaagccaccgatccgacggcggggatcgaccgatcaaaccacaaaaccctacccctggccgccccttttttatataaaaggatcgccctccgcgcgccgccgctccttcgcaaaccctcctaccccattccgccgcccgccccgcgaccccgaggaggaggcaagatgaagacgatcctggcgtcggagacgatggacatcccggagggcgtcacagtgacggtggcggccaagctggtgacggtggagggcccccgcgggaagctcacccggaacttcaagcacctcaacctcgacttccagctgcaggagggcggccgcaagctcaaggtggacgcatggttcggcacccgccgcaccatggccgccatccgcaccgccatctcccacgtccagaacctcatcaagggggtcaccaagggctaccgctacaagatgaggtttgtctacgcccatttccccatcaacgcgtccatcaccaactccaacaccgccatcgagataaggaacttcctcggcgagaagaaggtcagaaaggtggacatgcttgacggcgtgaccatcctccgctccgagaaggtcaaggacgagcttattctcgatggcaacgacgtcgagttagtctctcgctccgccgccctcatcaaccaggcatatcacatttttaaggtgacatggcattatctagtgcgc

SEQ ID NO: 9006 - DNA, 7138 bp, Zea Mays
cacgcactgtcctttctcctttcccttccgtttcatccgggcgcatggacctgcgctgcgcggttcggctgcgctcccgtccgaatcgcgccccttccttaacctcagcgttgctttgctcgtgctgctctctgttccgccgctcgccacaaaacccctctcccctcacgctccccacccacctcctccccctcgaggcaatgccgagcgcccttaacctagcctgagttcgagctcaatccccattccgtcatggatcggccgccgcatctcgtcatcgacctcaacgaggccccgccgccgccgtcgagcgacaccccgccggcgcaggccccgtcgccgccgcaggagttggctccgcccgtccaagctcctcctcctcctcctcctccgccgccgccgccgcagtttcctcctctcctgccgccgcagctgcccctgggtgcgcccaaccaacaggtgcggctccagcaggaggccctcgacgtggtgcttcgggtccaccgccccctcgaactgaggaatacaccttttgggcccatagggaacgtgcccgccggcttgctccctggtctggggctgccgctgctccctctgcagccgccggcgcctcaccctggggaggcgggttggggcaacccgccggccccctgctcgtcctgcggtcgccaggagattctggggggaaccttggtctgcgacgcgtgtgacagggggttccatcccaactgcgtccgcgtctggccgcctctcttccccccgcccccgccacccggcccccctggcgcccggcggccccgtgccgccgccaacgaggactggatctgccctgcgtgtgagaggcgtggcgctcgctccacccgctggaagctaggtgcagttgagcttgacatcaacgctgctccgccagaggaccccgtcacagtcatcgccaatgacatccgcagacaaaatatcaccgatggaccccagttgacagttgccaacttgccacattttgaggggggtcacttgcagaatactactctttatgatggaatgcagtttatgccagcatttgatcttgcccagtgttttggcatgagacaaaattttacttccatggatcaagatttaattgctgatggaaacgtaccacaaagatcagctcatttacgcagaagaagagatcttccacaaacatcaacattacccaaggttgcagtgaaccatgagttaggaagtgctggcacgtctatggatccatcattttttaacaatacaatcaaacaaagtcctagtgaaaacagaagttccttaaagcctccaatatttcttatggagaacagtaatcatcagccacatcatcatacagttgcactacctgttcaatatagtgattttttcattaccagcttgggagaaattgacaatcggacaagttaccacaattcataccagatatggccagttgggtttacgtcttactggcatgatagagttactggttcactgtttgagtgtgaagtgcacgatggagggaattttggacctttgtttaagatgagaaggttaccgtgttcagcattccaacttccggatgcatcaaccacagtgtgcctaaatgttgttaggaacgctgatacaatagaaacgaaggaagatttctctgagacgaatcaagatttcttatcatgtctaggtaatgatttggagggtaaagaaagtttagggtgcagtaatgtagaaactaaggatatgacagtgccagatgtgctgtcagatcctggctctttcagttgggcaccgaccaatgatgcaaatatgtatgacaaaattggtgacttcagttatgaaggaacatcaccttcctcagtctggaggatgatttcttgtgctatgatggaagcctgtgaaaaaatgtacaaggagcatggccatttggtattattctgcactcacagtagtgaaaaatctccatttgactatgaaagtggacctcagcgcactgatggtcctttcaatctattggctaagttttgctcatcaaatgggcctaaggtaccacagtttatagaaaaggagaatgatgtgcagtcaacttgtgcattacttaaagaatggctgtatccagacagaatcgggtttgatttggaatttgttcaagaatttgtggaatctcttcctaaatccggggcttgttcacactatcagttcttgtgtaacaggactggaattaactcttcactgacgattgcaagtggcacactggtagctgttaataaaaatagtccaatgcatgcgagacatggatctgtagtgagtgggccgcaggatcatgctcagcctagctcttctagcatccgtgagcttcctccaggaaatcctattagccgcaagcttgcaccagaattggctggggatgttttccagatattggagtttcttggacgatttgctgaaatcatcggcctgaaagaacttccttcaattgagcaagtagaagatgaactcattgacccatggccaatgcatccaaataaaaatgacatccacaactacatggatcacaatccaccgatgaattcacctgctaatgtttcttcatcgtactcgaatggcgaatcagcacgagaagctgctcaaaataagttggctgcccagacacttgggagatgtagtggtttagtgctgcctgagatccacattgcactcttgaaggttcttttcaccgaacttgtatctagagtcgcaatttttgtggatccaagcattgatttaaaagaatcaaaatccagacgaggaagaaaaagggacactgatactctaacaagagagttaaagattgatatgctgactgctaacaatttgacttggccggagttggctagaagatatattttagctgtttcttccatgagtggctgcatggatttatctgatatttctagtcgagaaggagtgaaattgttccgctgcctacaaggtgatggaggtatcctgtgtggagctctacccggggttgttggcatggagaaggatgcatcgctacttgcagaggctgaaacattgatatgcaattcttcagcaaatgaagggaataccgtctttatgatggattacaaggatactgatattgtagattctcctgaggagcctgctagtgacactacgttgccagattgggtgaaatcattggagcctgtgagaaaattgccaactaatgtgggaacaagaataaggaagtgtgtttatgaagctttggagagaaaacctccagaatgggcaaggaaaattttggagcactcaatcagtaaagaggtctacaagggtaatgcatctggaccaaccaagaaagctgttttatccgtcttgacagaggcatgccgtacaaaagtaccccagaatacagaaaaaccaagaaaagagagaaatattatctccatctcagaggctgtcctgaaaaagtgccgtattgccctgcggcgtgctatttcctctgatgaatcaaagcagtttgctaatttgcttggaacaactctaacaaattccaatgagaatgaagatgagggcatccttggatttcctggtatggtatcccgccctttggatttccgcacaattgatataaggttggctaagggagcttatcgcggatcttgggaggcttttcttgatgatgtacaagaagtaatttgtaatctgcaaactgcatttgctgatcgacctgaagtgctgataatggttgttgcactgtctgagagttttgagtcattgtataagacagaggtacaagaccttgttgagaaatttgacagatatctaagcaatgaaaatgatagctcagaaatccaccaggagctacaagatgctctcacggcagcaaacaataaactgccgaaagcaccatgggaggatggtgtctgcaaagtctgtggaatcgaccgtgatgacgagagcgttcttctatgtgataattgtgactctgaataccacacttattgcctgaacccaccactggcacgcataccgcttggaaactggtattgtccatcatgtactgcccaaactcatgttgcagtgcaagaacaaaagaagtgccttggggaggaagctcatgtttttattgagaaactcaacaagttagctgttgcgatggatgagaaagagtactgggagctaaccgtagcagagagaatctatttgctaaaatttctatgtgacgaattgcacaacacagctctcatcagagaacatctagatcagtgttcagacaagtcaaatgatctccagcagaaattacgtcacctgaattatgaactgaaagagttaaggtatcgggtagaaataaaaaatccttatgccacacaaagtagatggatgaaaaatgaccaagtaagcaatagttcaggactcgtggagaatcagcagcgtgctatgcccacagcctcagagcatcttgaagaggctgaacaggttaatgttggagttaacctgaacaaccctgctgaaggggttcctgctgcactattggatgtgggtaaaccttgcagtactgacaatggcatatccagcacatctgttattgaaggaaataaatctttggggctttcagaacaaccatcaaagataattactgaccagactgatcgggactctattgccgaaggatccaatagttgcgagaaatcattagttggcaaaagtggtacttgtgatccgaatgtgggagagactcatgctgctacagttatcaatgcaccaaatggagatttacctgatgaaaatgctatgacattgtcccaagataatattgaaacatcgacatctaaactggttgaccatgatgctgatatgaacgaatcaaataatttattggagaggatttcacagttgcatggttcaattagcacagtagagtcacagcttagtatggcatccttgagaggagagtgcctgggtagggattctgttggtcgattgtactgggttacaggaagaccttgtaagcgtcctcgtcttgttgcagatggaagcatgatgatacccaaggacagagacattagcatggttacaagccattctcagtcaacattcgatagaggttggaattcggcatcacttgttatttatgaatctgatgaagaaatgaagtgtcttgttgactggctaagggacattgatccaagggagaaggatctgaaagactctatcttgcactggcaaaagtctatttatcgccaggctagtttccccatcactgatcctccagtgtccaagttttcaaagagtgagccacttatggagcttccaaacaccaatgcttttatagttttggagcaaaagtatggtctgcaaacggatcaggacactagtgagctatccaaaaggagaggaacgaagtcaaggtcgggttctgaagaaagagtatatcgctgcgactgtttagagcctatatggccttctcgacaccattgcttaaattgtcatgaaacttatctcacattgatggaatatgaagggcataatggtggaaaatgcaccagcagtaacgactgtcctaatgaaagtaaagaaattgatgagccgaaactgaagggcagcaagtctgatataaaggaaaaagatcctgtagttcataattgttccgttgaaccatctaacagtggaaaattggagtcatgcccttatgactttgaagaaatttgtagaaaatttaccacaaatgattcaatcaaggagacggtgaaggagattgggctgcttggctcaaatggaattccatcttgtgtaccttcacctgcatatttccttgacccgccagttctgctaaatgaaagtaaaagaaatgacgataaaccaaatgattggacttcctcattgcaggaatgccaagctgtgtctgccaaaatgtcagggcaagagggatctcaagttggccaagatttttctggcaatgcaggtgatgaggagttgccaaaatctaagaagcctgtcagggatagtacttcagccaaggaagcaccttcaacagacatatccacaagattgctaactgttaatgggggattggttccagagtcatcactgatgcctgtaataggcaggaattttcatatcctgaagcagctaaagattaacttgcttgacatagaagcagctttgcctgaggaagcattcagagcctcaaagtctcagcaaataagaagacgttcatggcgtgcttttgtgaaggatgcagaattaatatcatatgtggtattggcaatcaatttcttgcagagcatgataaaagccgagtttctgaagaaagattggtggtactggtcctccttcactgcagctatcaagacaacaactgtatcatcgcttgcgctcaggatttacaccctcgacgactgcatcatgtacacaaaggatccagctccaaacctgcagccagctgacaatgcaaggtctggaaacaaggggaagaggaagaaagacatagattcatgagcatcgtaaccacaatgctcctggcttcccctgtagattctatctatctgcatttagaggcttctcagttctctggcagcataacaacgcggtcaggtagattggagatatagatggtagtggtcaggtagattggagatatagatggtagtgatacaggtcgcaacctatgtgtgacctctttcttactgtacattccagtgtcacagcaagggtgcagccatgatttgcccgtttcagtcttgtcctacttactggcctgccattgcgcgatatctgctgttgctaaggctcaatctctgtaaattctactcgagggatggcaccgggcaagtgctggtgtttaatctgttgcccgatgtgttgatctgttctaggggattagaggaggaatgctaggtcggtaggatttaccccatttctaccctgcttcattttattttagtggtggcagtgggtagtcgtagttttttcttttcttttcttttcagagctgggattgtttgatggatgtcccctgcggcatctgactgctttagggaatttgatacatgacgagtgtaatattttttttgacatagaagttgtaactaaaccgaaactaataatgatgaatgaaaatgaatccctgttcctttccccgtttcttcatgttggctgg

SEQ ID NO: 9007 - DNA, 4474 bp, Zea Mays
atgtacaagctcagtggccgtggtggtgggcgcggcggcagcggcgcggcaaagcgcccgctgcccccccacggccgcggccggggcggcgcctcctctatcggcgggatggccgggccgccccgcggtcgcgccggcgccggcgctgcaacgcagccggcggggcgcgacgaggcgttccgcctcgagtccagcgggccgccagcctttgcggctataatacggctgacgcccgacctcgtcgacgagatccggcgggcggaggaggccggtggaggcgcccgcatcaagttcaaccctaacatgtacaactcgtcggagaaccaagtatgaccattacttctgaaacaacaaaggatacacatccattttgtcttgaacgtccagcctgaactgaaatcgtggaggctgagtgaaggatgctttaaagaatttcaaggttatagatgttagtggaaaagaattcaaattcacctgggcatctgaacgtggcgaattgtgtgatatttatgaagaacgtcagagtggagaggatggaaatgggttgcttctggagtgtggctctgcttggcgcaagatcaatcgtgctggaccctgccaatccatctgtcaagagtcaggccaagtcaatggctgcagcagctgtagaaggcaatccacggaggatgcactggaagcagaagaatgaattttttaagaagaataaagctgctgttatcaccccaaccaaatcagtttcgaaggtcaagttatctaacaatattcccaaagggaatatctcgagttcacctgcaccttctcctgaacaacctggagcaagcaatccttcatttcctgttggatcagatgcaaataatgaagtcacaacaccttttgatttgaacaaaggggaaaacagtaaacatgagaaatcgactgcaagtaagatgtctaacaaaggtataaatcgccgtgcaagttctcatgctgcaaatgtggataataatacaaaagaagtgcgaagctacttgatatctgtgctctcaaaaaatccaaaaggaatgggcctaaaggccttggagaaagttgctgcagatgcatttccaaatgcatcaaagaaaatagagagcatcgtcaagaatattgcaaattaccaagggcctgagaggtatgttctcaaaccagggttggaggtagaaagctctaaaaggcatgcatctgaaggagtaagatccatcagcgagaatattgaggaatctgctccaagcctaaagattgatgatcctgatatatgtgagaggattgacattgtgggctccccacttgctgtaacagatggaaaactcagtaatgatagtgaaggtaaggctggaacttccagtgacagtggaagtgacagcgatagtgatagtgacagcagtgacagtggaagtgatagtgagagccaaagcagaagtgctgcggaaactggtagtgggagtagcagtgatagtgacagtgatgcctcatcaagcagcaaggaaggatctgatgcaattgttgatattacaagtgatgatgacaaagcaaatacagcacacacaaaagtagtagatgaccttaatttgtcttcatcaccaagagatttgacaagacttaatgttgacgatgaacaaattgacattggaacaaatctggactacaggagtgcatcaccccatattgatctgaacaattttaatactggcaatgatgatgcagcagcagagggctttagttctggcaacctgaacaagccatctgaaatgccgggaagcaagaacatgacaaacaccagaatggattctatcggagttgataacaagcacaatgaaatgtctttcgtggacaaccttttcgatgattccatgagagcagccagtgagaactcacccaagggggaagctggtcaattgacagtgcagcatggcaataagagaaaatcaacatctaaggatgaatcaaaactcgtcccagtgaatattgccaaacccaaattaaaaaggtcttctggtagtgagaactccacagcaaagcctgagagtgccaaaaaggccaaacctgacgtaacatcaccaataggttctttatcagaacacaaaagaagtttaccccctgaaaagcataccaatgataggttgaacaaggagacggggaatgttagccgtgatgcttcacgagatagcagtcctgccatgaaaggaagaccttcagctcctggaaatttacagaggatagatcagagcccaaatttacctatcccaacaatgcattctgagggaacaaaaggaaatgctgttaaatcaagttcaaagaaaaaatcagataagatgcagaaaccatggcatggtattgatggtgactttggctcatgttattcacatggtgtagatcaccatgccaattttgatggctctgatgattcttccacaagaaaaaggagtagacatgagaatcctcttattgatgataaaatgcttaagcattcgaaggacactaatgctaatataaattccatgaatttaaccaaaagttccagagaaattgttgtgcctgatgaggtaactgcttttcctgaatctaatgaaagtaatggtgagccatcaaattcacaaagagataatgttgagaaatcaccttatggtaaaaaaaagctccagagagagctttctgatcttgagttgggtgaacttcgcgagacttctttggaaaatgatgatggaaggataaggaagcaatttgagagaaatagttcctccaagtcgcttgatgctaaactaactggtgtaaataacttctaccccagtataaatgacaggaagactcctgtaaccgtctttcatgataagaggaaaccttcacctcaagaatatggaaatagaggccatgtaaaccaggaagggtttcagaggaaggcagcagtgtacgcgtttgatgataataggcctcaacaaagagagaattttccagagagcctgcatttgccaaagattgataattcagattctgagaacataatgtatccagataggtcaggagaaaaaacaagcaaaagggaaactaggatggcacatagtggaatgctagagtatgctgatatgcagaagaagaaagcaacctcaaggcttccacagaacggtactaataatgtcatagtgtctcgaatgcagaaatcaatatccacatcagataatgaggaaagaagtagaaacaactctttgattgagacaaagacaggtagaaagagaagagacagttcttcagatgatgataatttatttttctccaagtatgataaagatgcaccagaactcaaaggtccaataaaagatttctcacaattcgaagattatgtgcaggagtacaatgagaagtatggagtctattcttacttgagcagtcagatagacaaaactaagtcagattttttaagggttcaggatgatctcaatgttgcgaaagaaagagacaaggaacagtattataacacggtggaaagactcagagacatgtatcatgaatcaggagcaaggcataaattgatgaagaaggtcttccttttgcttcatgaggaactgcagattattaagcaaagaattaaagatttttcagaggcctattgaaatgagtcactcataacatgtcacttgcaattgtgtttcggagactgtcgctcatcgtaaggctgataatgtctgggcatgagcattatgctttgcctttgtagaagtttgcttgtcttggaaagattcagtcaatggcgcatatcacaggaaacctgagagactccgtgatttctggaatcacatcgtgctgaatttgatagtaatcacggtgaagtggaggcaaggacagttcaaatatcaatggcgttgttggacacaggcaaggacagttcaaatatcaatgacgttgttggacacctccgcagccccgcacgggggagatagcagaagaaatgattcatcactcagggaagaggtaatgtcgggaagcgaggaggccttacctcagcagttttgcagctagtttggcactgaactgtaaccgggcggttctctttgtagatgttctgtatcttttacccccacccccagtgaagggcgcgatctctccttccctggcattgtacatcactttgtattagtgtgattcatgtcaaactgaagtaagttgctagctgtgtacatatatatagagccggtagagaagttttgaagcgaggagagacaaatctgggacaatttctttttaacgcgtacatcaattcttcgatgttgcagttcagtttctgaaatatgcatatgctctactgtatattggaccaagcctgaagaacaattccagagcatatgaaaatttggatctttaaactggctctcaaactatttagattctcaaaataggtaggtattcctcaacagatcctgtaaaccatgttctctgatttttatataaagatctgtagtttttaaaa

SEQ ID NO: 9008 - DNA, 3418 bp, Zea Mays
ggccggatccaatggcgggtgcctcgtgctgctagatctcgctccgtacgggcaatggcgtcgcggccaacgtcgcggcagcggaaggcgggacacgcatcggcggcggcggggccgaagggtctgcaccaccaccagcagctgccgccgcagtcgggctcgccgacgtcgaccgcgaccacgtcctcgtcgcgtctcacgccggagctctcgctcgacgggcccgcgtccccgctgttcgccgggttggacgaggacccggcgcccaaggagaatgtaaccgtcactgtccgcttccgcccgctcagcccgcgggagattcggcagggggaggaggtcgcgtggtatgcggatggtgacacggtcgttcggagtgagcagaaccccagcgtcgcctatgcttacgatcgagtttttgcaccaactactacgacccgacatgtatatgatgttgcagctcaacatgttgttagtggtgccatggagggagtaaatggtacaatatttgcatatggtgttacaagcagtgggaagacacacacgatgcatggagaccaaagatccccagggattatacctttgtctgtcaaagatgcatttagcattatacaagagacaccaaatcgcgagtttctccttcgcgtatcatacttggaaatttataatgaggttgtcaatgatctactaaatcctgctggtcagaatttgcgaattagagaggatcctcagggaacatttgttgaaggtatcaaggaggaagtagtattatctcctgcacatgccctgtctctcattgcagctggcgaagagcataggcatgttgggtctaccaacttcaatctattgagtagcagaagtcataccattttcacattgactatagagagcagcccttgtggtgagtctaatgaaggggaagctgtcactttctcacagctggttcagagagctcaagggcggaaacaactggagtacggcggaaagaaggatcttatatcaacaaaagcttgcttactcttggaacggtgatatcaaagctgactgatggaaaggctacacatattccatatcgagattcaaaattaacacgactacttcagtcatccctcagtggtcaaggacgtgtttcactgatttgcacattgacaccagcgtcaagtaattctgaagagacccataatacactaaaatttgcccaccgtgcgaagtgcattgagatccaagcatctcaaaacaaaattatagatgagaaatctctaataaagaagtatcaaactgagattcggagattaaaggaagagctagaacagctgaaaatgggtattattactggcacacccttgaaagataccgaggaagataatattatcctttggaagcaaaagctagaggatggtaacgtcaagctgcagtctcggctggaacaagaggaggaagctaaagctgctttgcttgcaaggatccagcgtttaacaaaacttatactggtttctactaaggcgaccccggcttctagattttctccacatcctggaccaagacgaagacattcttttggggaagaggagctggcataccttccgtatagaagacgagatataatgatagacaatgaaagcaatgaattacttcttcctgtcgaagggtttggtgtatcacttgaagattcttcaaaggaagaaaaaaagaataggaagggacttcttaactggttcaaacttcggaaacgtgatggagcttctattctgacaagttcagaaggtgataagtccagtttgactaaatcaaccgctccttcaacacctattggggaaagcgtcaactttcctgctgaaccaagaatatcaaattcattagctggtgagaatgtatcatctgatctgtttagcattggtcatggggaatttccttctggcagcattcacggcgaagaaactctttcggccagtggaaaaacgatggaccatgttgatttgttgagagaacagttgaaaattttgtcaggggaggttgcgtttaatacaagtgctcttaagcgcctcacagaggaagctggaagaagcccaaagaacgagaagattcagatggaaatgaagaagaagaccgatgaaattaaggggaagcagcaacagatagcatctttggagagagagatagctcatgcaacattaggaactcaaggaaaggtcgatacgttagagcattcaccgtcttatcatgaactacttgagcagctcaatgagaaatctttagaacttgaggtgaaggctgcagataatagagtgatacaagatcagctgaatgagaagataactgaatgcatggaattgcatgctgaagttactcatctcaaagaacagctgtcccaagctcttgaagctaaggatttggtgtcaaatagcatgatacataataatagagttaaccatgaagttgaacaccttgttgatcaagatgttccaagagagatctcttctgaaccacagcaaaaacagcagtccgttgaaatcaatgagctgaagcaaaaggtgtctgaactcatggaaatcaaagctcaacttgaggatcgcaatcaaaagctactggaggaaagtacatatgcaaaaggattggcttcagctgctggtgtcgaattgaaggcattgtcagaagaagtgaccaaactgatgaaccaaaatgagaagcttgcgaccgagttgtcatcgctgagaagtccaactccagctccacgcagattcaacaatggaccaagaggtactaggagggaaagcatgagtaggcgagaaccagctagcagacgagacacgaatgcaagccatgaaagggaaaaggctctagaggcattgcttatggagaaggagcaaaaggaagcagagctccaaaggaaagtcgaggagtcaaagcagaaggaagccttcctggaaagtgagcttgccaacatgtgggttctagtagcaaaactgaagaagtcccagggttatgaccatgaggatctggaggccaaacatgatggctcgtgacctcttcagtttagatatctatcggcttggcttgcgtgtgggttttctgtatgtaaggttttggtattcgttttttctcttagcatgaattagtgtctcattctgtatattctccgcgtgttaaatatgccagtagtgccttgcctgactgtgcctagagctttcgatggatgctagagcggcattttgggttcttcaggcacataatctggatttgaagaaacagtgagcaagtgtttggaaatctgacgggtttctgatgcccactcaaatatctaacatgtattagcctgcccatcctgctcaggataacaaatgtgaatatgccctgaagtgtgagctacattgtattagaacactttcgttttcaacatcttcaatactgcttattgtatgcc

SEQ ID NO: 9009 - DNA, 1440 bp, Zea Mays
tgctgggggtttgagtgggccagatttgtttgattcttggtgcacgcttccggtgtgcattgtgtgtgttgagataatgaggcagagctcgtgttccatgcaactgaccaataagactgaccattatgtagcattcaaggtcaaaacaaccaacccaaagcagtactgtgtgcgtcctaatattggtgttgtattacctggctcaacttgcaatgttacagtgacaatgcaagcacagaaggcttcaccacctgacatgcagtgcaaggacaagttcctagttcaaagcgttgtggccgagaatggtgtgacagctcaagatattaatgcagcaatgttcaataaggagccagggaaagttgtcgatgaattcaagctgcgtgtggtttatgtgccaacaactatgcccaacccaatccctgaagaatctgaactagggagttccactccctcattttcacaagaaaacgggatcgatcattccatgacgccactatctgtatctagatcgtctgctgaaacagcaaaggagaagccctctgaggcaacttctgtgatctccaagctaactgaggagaaaatgtctgctgttcagcagaaccagaaattacgccaagagctgcttctacggaaagagagcagcaaaaccggcggcggtttctccatcaccttcttgtttgtcgtgggcctcctgggcatcgtcgttggctacatcctcaagagaacatagtggaacggtgtctccagcagatctctactactcccattaaaggacacccacccaccccacaggtggggtggtatgcctctctctccccatgtgttttcgctcctaatcggagcgccctgttctaacgtgtaacaacagcagcactcctagaggctagaggccttcggtttgtgtacatcattatggtggtccatacttattttttttcttccagaattcatttcggagttggtagacttgttttaacgggaatgtttgaactgttgccagtctgatgaatttgccagatattttgcatcgtttcacctgaagtactcgaaccgagagatgcatgacgtgcgcgctatgtaatcaccgagcattcagagcaactagtaaaatagcatcaggttcgatcaactgctctgcaatcaagaagttaaggaatacagcatgcagtcagtcattcaggtcggcaccgtgcacgttgccatcggcgtgtcgtggcgcaccaggaagagcgctgcggcggccgcgccggcgagaaaccctagcagcaggtacccggacctcgccgcggcgagccttatcgttgaggatgggccgtccacgactcttcctccaccgccgcagtgacgctgctgcccacctccgtcacggcggaggcgctctggacgctgtcgtcgatcgctgcgtcctccattgacctcgtacgtaaattttttgacagt

SEQ ID NO: 9010 - DNA, 3127 bp, Zea Mays
cgcaacatacggcaccgctcaatctttgctgtgtgtggcgaccactgcagccgctgtccacatcgacgccggcgtggagaggagatggagctataaaatgcgatcacccatcatccccctccagtccaggcctccatgcagaaaggcaccgagaagaagagtccccggtcgctgctatagctacaagcctacgacacacgagagtgtcctccatggcgacggcggcgaggaaagggagcagcagcaggagtgccgcggcggcggccgcgactgtggccgtgttgttcctcacagtagtatcggccgccggcggtgctgcggctactccgcggcggctcctggtggacacggacatggacaccgacgacttgctcgggcttctctacctcctcaagcagaaccggtccgagatcgacgtcaaggccattaccatcagcgccaacgcgtggagcgacgccgggcacgccgtcaaccatctctacgacatgctctacatgatgggccgcgacgacatccccgtcggcgtgggcggcgacggcgggatatcctacgccggcgacgtgcaacgcgacgtcggtggctacctaccactgatcgaccagggcatgtcgacggacggcggctgccggtaccggcaggccatcccgctctcgggccggctggacgtcgacacgaactccggggtccggaagggcttcctcccgcggggctcccgggcgtaccggccgctccggcagcccacggcgcagcgggtgatggcggacgcgctgtccgccggcccgacctcggtgctcctcctgggcacgcacaccaacctcgcgctcctcctgatgtcgcgcccgcgcctgaggcggaacgtggagcgcgtctacgtctccggcggcgccgtgagggcggcgggcaacctgttcacggccgccgccgccaacccggtcgccgagttcaacgtcttcggcgaccccttcgccgcctacctggtgctccactccggcgtcccgatcactatgatccctctcgacgccaccaacaccatccccgtgacggaggcgttctactccgagttccagcggcgccagaggacgtacgaggcacagtactgtctcctgtcgctggacggggctctggcgcggcagaggaggcggtccgacagccatgacaacacgggcttctacttgtgggatcccttcgccgtcggggtggccatctccagcatgcgccatggcgatggcgaaaccagcaacgagtttgccgagcttgagtacatgaacgtcaccgtggtaacgtccaacaaaccttacggtgcgcgtgacgacggctctaacccctttttcgatggacgaactactcccaagtttgggctgcgagagggtggagttcacagcggccatgttgagaccgggataagagaccccttctgcctggtgcccggaagcaaccgaggcagatgccaagatgggtacactaaagaagtggccggtccagaagcagtgcagatgcttgtggcaacgagggcgaggccgaacaccaacaaaagtagcccactggacaagaaatttatggagaccttcctagaggttctaaatctcccccaaaacactggacgtttcaacataagcacacagtttccgtactatagagaggttctctacaagccggattccatcatgaacgtgacccgcaggggcgggaagccaaagccagtcgtttttgacatggacatgagccctggggacttcgtgtcgctcatatgcctcctgaaagaacccagacacgagatcgatctgaaggctgttttggtcaacgggaacggctgggctaacagcgctagcattgacatcgtgtacgacgtcctgcatatgatgggccgtgacgacatcccagtcggccttggcaatgccactgcgctgggcagcccgacgcttgggtgcaacaattcctacgcgatcccgcaagggagtggtgggtttgtagattcagacacgctgtatggactggctcggtcgttgccgaggagtcctcgaaggttcatctctgatgatctagaccatcccgagcgccggcacccgagcgctttcgatgtttggcggtcagttaggaagcagctcggtccaggccagaagatcacggctcttaccagcggacctctcaccaatctagccagcattatttcactgtctgacatggacgccggctctgtcatagagagagtttatgttgtcggtggagtggttagagatggaggtgatgacaggggaaacgtgttcaccgttccctccaacagatacgcggagttcaacatgttcctggatccgctggccgcaaagacggtgctagaatctggtctaaatatcacgctcattcctctcaacgtgcagcggaaggtttcttcatttgagggcgtcctcggagctctgaagcaacacacccagcatactcccgagtcaaagcttgtgcgccgtttgctgttgctgctccagcagctccagagggaacaacggaaattctatcaccacatggacatatttcttggagaagttcttggcgcagtttacatggtccaaggatctaacttggagccctctgtggaagtgaagtcaatatgcattgttgccaacacaaccgaaagcataaatgggcttattttggtcaagaagagcgcaaagccagtggatgtattgtatagtttgaatactggagcatattacgaccacctggcaaattctttggttaaccataagcaatctgctcctattggcagctttggagagcaaaaggcaatttggagcaggccacaaaaacatttagggacggacatagcaaaggatagaaaataagcaatctatttgtacaatattgctggaaaaggattagagattagattccaaaagaaaaacagtttacatcatacttcactatcttatagcgtagtacaaaattaaaggagatactcaacacagttacagttgtatgaaagggcttcagtaagcaataaaatttatcttgaatggatttcacatactctgctggacgtgaaacttttgttctacacttgtttcacatttctagtctattatttatgttcaagaaatatcagacaacatttgtattagaatataagttgtagctt

SEQ ID NO: 9011 - DNA, 1259 bp, Zea Mays
ccttatccttacggcgaaactgaagcagataagccgtacgccgtccccttgcacagcaaacatccatggcgactgcccgcttgccctctcgctccttcctgtccccggctcagcaatcctatccacggcttcccgcctccgtccgcctctgcctctctcatcacgagcaacctcccaccggccccaagcggcaccgacgcgccgccacttcgcatcctgccttttctgcagccgcgcggggtcgtgccaagaagattcccatcgcggacaccgatgagcccgccgccggagtccgcgtcaccgatcgcggcatctcttaccgcctcgatggcgcgccatttgagtttcagtatagctacactgaggccccacgcgcacgccccgtagcgctccgtgaggccccgttcatgccgttcgggcccgaggccacgccacgcccctggacgggaaggaagccgctgccaaagagccgcaaggagcttccggagtttgactcgttcgtgctgccagcaccggggaagaagggggtgaagcccgtgcagtcaccgggtccgttcctcgccggtatggagccgagataccaatcggtgtccagggaggacatactcggggagcccctaaccaaggaagaggtctccgaactcgtgaaagggagcctcaaatccaaacggcaactcaatatgggcagggatggtttgacacacaatatgttggagaacattcattcacattggaagaggaaaagagtttgcaagataaagtgcaaaggtgtctgtacaatagatatggataatatctgccatcagctagagatgcacacaaaaagaaggaaccgattgctacacaaaaggctaaatgacttagtctttgtatcatacaaccggaagatgcaaaataggttccaaaagaggagggagacaggtggcacaagttatgacccattagtgcttgacgattttgattgggacaatgagtgggtacactcatcggttgtacatgctggtagggatgatgatgagcataacttgacatgggaacaagttgatgaagccattggagcatctgagtcccttcgaggccgcaactttccaagacaagctcgtatgtattcaaacagctaccaaaggcgtagtacaatgagggcacatgaagatgaacaaggtgaggaggatgatggaaatgattcaaacaatgaagtggtggatccacaagatgactattggtatggtgatagttatgtgcttcgaggcggaagatga

SEQ ID NO: 9012 - DNA, 5625 bp, Zea Mays
atgggatccttgttcaactatttttctgttggcttttcggaaactacttcctgcacatcctcagcccctcctgatctgaatgggagcaaacatgaaaaggcctgccatggattacattattgcaagcccaatacagcttcctcacctcctatacaagagctgcaaaagcaggaagcaagagatgatttagttattggtggagaagcagacttaattggtaaatatgaggtgtgcacagattcacgcaaggtgttgctcagaactatgtcttccccaactcaacaaaagtgtgaaaatcaagaagaaacaaaaaacactatcagtgttaaccagactgacaccgcatacaaatatcctacaaccaagcccaagatcagtgttcaaattccagcttcctatactcccaacatggcaccaccccaatttatgcttccagtaccagggagatcaatgcctgtggcatttcaacagaaacaacctcaagtgcccattgaattcaggggcccaggttttcaaatgcactctattggctctgtatctagttccttgcccgtgaagatggctgtccctctgggtaatgcacctcacatacaaccgatgtttgttcatggtgctcagcctcatgcattccatcagcaatcctttattcaccatggacaaggctttggatgtgctcctccatctaattgttaccttcctcagtttggcaacatgagaaatgtgcaagaattatctcagcagtatcctagaagcggtgatgaacataagagaactatcaagataacacatccagagacacacgaagaactgatgctagatagacatgggcattcctttataaatgttcctgcttctgggcagatgcctttaaacaatataaaccagctacctcactctgttcaaacattttctccacttcagaaagtgtattatcctagaccaggaacgtacaattcagcacatgtctatcttcccaactccactgatgtccctcttgcaagtaggcaattttcctccaaaattcaaccttcgatgcatggttttgattccactaatagcaaccagccatttacttccatcagacctcctatgccgatatctcggcttgatgctacttccgggccattaacaaatttgcatactgcttccgaaatctcaaatttcaaagggatgtttccatcaagcctacctgctccagttcatgttgagctaaagccgcctattacactccctgctgaaatgaatagtgaatctaccatatcaaatcaacaaaattattgcaaaattgggctagaaatgtcccttgaacctgtaaatttagtttatgaaggaaataacaaagattctgttgcaacttgtgacataagttgtaatttaatacctcaaccagtttcaaccccgcagacacagactcggccaacttcagttgatcatgccacaccagttgtagaccctcaaactatcttaaccagtagcctgcctctggaatctactacatgttgtaaatcttcagttaaagcaaaacctattgaggtggaacaatcattagtggttccaacaactttatcatcccatacaaaactcgagtcatcgcatgcaactactagtgtcattttgactgcaacttcattagtttccaagattgatgggacgccaccgactaacaggaactatagatattatggcaatagcattttggggaaacctccgttaatttatgcacaagaaatattgccatcaaagtttgtggggtctaatacatcaccagaaggtcttggaaaggcaaaggtgaatccagttctcttccaagaaaagtttccttctgaacttaatggttcagttccattgcgaaagcatgacttcatgatagaagaacatgttccaaacgaaaaagggatgtgctcagagtcaaagaccgaacaagtagatgtgaccatgccaagtactgcctttggattggaggatgacactagtgttgctaaatctggaagatttcatgcatatcaccagccagttgatttgcatccttccatatacattggtgatatccagacatcagatgacagtcagcaaccttcaccagatttagaaatcataacatctcaatcagagaacaagcagaataacagtagagtagactctgcaagggatgtcaagaatgcagcccctatttctacttcagctatctcccaggggaaaacagaacaagagaggattggtttagaaatatctaatccttgctctataactgctgctttagtggcacaaccaaaaaaagttgttttggagtcaacaaaggccaaaagtaccaatggacgaagaaagaaacgaaaagagacacttcctaagggtagtggacacaagtattatgatcttgatagtgcacacagttctctcaatgagaatgtcgagagttttgttacttcagaggatgttcagtgttccttggcaactgatttaaagctgaattttacatgcgaggctgcaaaggacaattcaactggtgggaatgattgccagaacagaagtgacttgttcagctgggaaaatacaacggaaaactctgcggacaagttgaaactttttgggggtacccattctaaaagtggagcagaagtaaacaaggataaatctgagtttgaccataaaagacaatactcaacttaattcaaaccatgcaaggataaaagatcgaggttcccgaggtagtcgtcatatgactgtacaacatgttgggaacggatctgtaagaagtttatcacaaagtcagccattaagtcaatatagtggcgaggtgctctccggagctatgaaagtagtatctcggcgcagcatgtcacgtggatctgttgatgagagatggcaacatagaactaatgttcagggtatttcatcgccttctcaggtatctatgccaattatgcacaaagctgagaaaaaatatgaaataggtaaggggattgatgaggaagggtcaaaacaaaggcagttgaaagctattctgaataagttaaccccccaaaatttcgaaaaactttttgcgcagttcaaggagttgaatattgataacgtggtcacacttactggtgtcatatctcagatatttgacaaagctttgatggaacccactttttgtgagatgtatgctagtttctgtttccgattagctggtgacctaccaaactttgtcaaagatgatgagaaaatcactttcaaacgactgcttttaaataaatgccaagaagaatttgaaagaggagaaagagagcaggctgaagcaaataaagcagaagaagagggtggagctaaacaatctgaaggcgagagagaggaaaaacggattcgagcacggagacgcatgctaggaaatattcggttaattggtgaattgtacaaaaagaaaatgctgaccgagagaataatgcatgaatgcataaataaactgctaggtgagtatcaaaacccagatgaggaagacctagaggctttgtgcaaattaatgagcacgatcggggagatgatagatcatcccaggacaaaggtccatatggatttttattttggccttatacataagctatcagaaaatgtgaagttatcatcgcgtataagatttatgctagaagatgtgattgaccttagaaaaaacaagtggaggcagagaaggaaagtagaagggccaaaaaagatagaggaggtccgcagggatgcagtaaaacataagtttggccaatcaacaaggtttggctcttctcctaattataattcatctgttacttgcattagctctggattgagaccagggcctccagatgctagatatcagtcttcaaatagagtcttgcatgttccactccatcaaaggcgtgctcataaatccattcgccttggtcctcaaggtgacttaggaagaggaatctcgatttgtgggaagcaacacgtttcaaatgatattttgccagaagttactttgaatagtcatcatggtcaaacatcagaaaactcaagagacagttcatttacaggagtgacaagtaatccaacaggcttcaaagccggtaatacatcttggggaatggtggatctttcttcaccagtaccgtcaactataggtcaaacacatacatcctccacagtcagaaaggagatgtgtgctgaagcgcatacattccctgaagaggttcttcaagagaaatcgatactaaccataaaagaattttacagtgctaaggatgagaaggaggtcgctctgtgcatgaaagaactgaatgctcccggcttctatccttctcttgtgtcactttggatcactgactcgtttgaaagaaaagacctggaaagggaactcttggccaagcttttggtgtacttgtgcacagctcaagagcacttgctgagccagaggcagctactccaggggttccaacatgttctatctaccttggaggatgccgtgaccgatgcgccgaaagcgaccaagttcctgggccaaatatttgccagagtcgtactggaagacgggatctcgctgacggaggtaggagggctgctgcaggagtgggatggcagggaagagccagcaggacagcatgccctggaggacagcctcgcatccgaggttctagggagcatgctagagtccatcagagtagagaggggcgacaacgccgtggacgaaatccgcgcaaaatccaacctgcagaggcgtggggtgtgtgcctgacgcctgatgcaggaagcagggtgcttagattgcaattttgttaggttgtcgggatcctaaccttagaaataaaggttagataagattttgctggtcttttgttttccttgtgttaccactacttttgcagaagaacttgttgagttttctgtgctggttcgtggctggcttttaaacataactcatgatggtttcgaatctcatgatgatttgtaccatctttgttcctatgaagcatcagtttctctggtttccactgccgtccttttttttaaaaaaaagtttttatacttatttctaacctatcttgtggttcaagacttatcatgtttccatcgttttcacggcgagcgtcatgcaagaagcaagaagatccggattcttttgaatgggccaagaaatttctgttgtctggtgctctttctgctttcgttgagcccaacatggaaactgtccccatcaagattccctctaaatgtatgctccctcctagtcaggaattgcatgaggaacctcagtcccctttgcctgcagaagcggtcaacagaaagaaacagtcaatcttgatcgacactgaagtaaggagtgccaggctcaaggagaaggctagaggttttaagacttgctctggaataaggaagaattgctcgtgctgtgctaggacatcgccaccctctatctctcacaagattattaagaagctaggagctgaattctgcaaagttaatccctccaagttatgccctaatgcattaaacaactccaggtccttcagctctgccatccagaggccacgtgcttcatccagtagcagggccgagctacgagcaacgtccgaagatcagagggatgaatcagaagatgaagatgatgcggggtctcgcccctcggctgggatgtaa

SEQ ID NO: 9013 - DNA, 1553 bp, Zea Mays
cgtggtgcccatcccacatgcctgcttctcgccggcgcccgtctgtctgtacgagtacgactcgtccctcgtccgtgccaatggagaattggagccggccgaacagaaccaaatccgtgcccgtgcgaggaagatctcagcggctgctggcgcggggggtcgttggctcgttccaaactcgcctgactccgcccaccgtctcttggtcgccccacacgatctctccaccactccccacccggcgccggcgaggcgcgaggagggccagcaatgatggtctcctcccactcgcagtcgcaggcgggccgccggcggcgatggaggtgcttgctgccgctcctcgtaggcgccgccttcctcgccgagatcgccttcctcggccgcctcgacatggcgaagaacgccgaggtggtcgagagctggaccacctccttttaccgccgctcctcccattggggtgaatccgtgggccggggcgcggtcccgagggcagacggcgacggcgacggcgaggacgaagagatccggcggtgcgagcagcggctcgagagggaggacgccgtgccctacgaccgcgactttgacagggatcccgtgcttgtcggtggcgctgccaagtggacaaagtggacaccttgaagcgctacagattcagcttggcatttgagaattctaatgaggaggattacgtaacagaaaagttttttcagtcactggtagcaggttctattccagttgttgttggtgctccaaatattcaggagctttctcctggagaaggcgcaatattacacattaaggagcttgatgatgttgtttcagttgctaagacaatgaaaaatattgcttcaaatcctgacgccttcaatcaatctttgaggtggaagtatgatgggccatctgattctttcaaagctcttatcgacatggcagcggttcattcatcttgtcgtctttgtatacatattgctaccaagattcatttaaaggaggaaaggactccaaaatttacaaatcgtccttgtagctgttccagcaaaaaggggacagtttaccacttgtttatccgagagagagggcggtttaagtcagagagcatttatatgagatcgggccagttaacactgggagccttggaatctgcagtgctcggtaaatttaggtccctcaaccacgttcctgtatggaaggatgaaaggccaccgagtattagaggtggggatgacctgaaactatacagaatttacccagtcggtctaacgcaacgtcaggctttgtacggtttcagatttagagatgattctaaactcgagcaatacatcaaagaccatccctgtgcaaagcttgaagtgatttttgtgtaactatgctctaggcttacgttcgcccccgattcttactgaactccgtgtgcggagtttcagttatactgtaatgtatggtgtcttgtgtagcaaacaaactcatgctagtacagatcatctgccggatgaaaattttccttgacagcgaacatcagtgcattcagcaacaacagcaaaggaattgacacg

SEQ ID NO: 9014 - DNA, 1874 bp, Zea Mays
cgtggtgcccatcccacatgcctgcttctcgccggcgcccgtctgtctgtacgagtacgactcgtccctcgtccgtgccaatggagaattggagccggccgaacagaaccaaatccgtgcccgtgcgaggaagatctcagcggctgctggcgcggggggtcgttggctcgttccaaactcgcctgactccgcccaccgtctcttggtcgccccacacgatctctccaccactccccacccggcgccggcgaggcgcgaggagggccagcaatgatggtctcctcccactcgcagtcgcaggcgggccgccggcggcgatggaggtgcttgctgccgctcctcgtaggcgccgccttcctcgccgagatcgccttcctcggccgcctcgacatggcgaagaacgccgaggtggtcgagagctggaccacctccttttaccgccgctcctcccattggggtgaatccgtgggccggggcgcggtcccgagggcagacggcgacggcgacggcgaggacgaagagatccggcggtgcgagcagcggctcgagagggaggacgccgtgccctacgaccgcgactttgacagggatcccgtgcttgtcggtggcgctgccaagatccttctgtagagggtatcctgagatcaatggaatcatctcaatattattcagagaataatattgatgtggctcgagggagagggtacaagattgtgatgacaaccagcctttcttcagatgtcccagttggctacttttcatgggctgaatatgatatcatggcacctgtgcctccaaagactgaagaagctcttgctgtagcctttatttctaactgtggtgcacggaacttccgtttgcaagcccttgagatgcttgaaaatttggatgtcaaaatagattcatatggtagttgtcatcgtaaccgtgatggcaaagtggacaaagtggacaccttgaagcgctacagattcagcttggcatttgagaattctaatgaggaggattacgtaacagaaaagttttttcagtcactggtagcaggttctattccagttgttgttggtgctccaaatattcaggagctttctcctggagaaggcgcaatattacacattaaggagcttgatgatgttgtttcagttgctaagacaatgaaaaatattgcttcaaatcctgacgccttcaatcaatctttgaggtggaagtatgatgggccatctgattctttcaaagctcttatcgacatggcagcggttcattcatcttgtcgtctttgtatacatattgctaccaagattcatttaaaggaggaaaggactccaaaatttacaaatcgtccttgtagctgttccagcaaaaaggggacagtttaccacttgtttatccgagagagagggcggtttaagtcagagagcatttatatgagatcgggccagttaacactgggagccttggaatctgcagtgctcggtaaatttaggtccctcaaccacgttcctgtatggaaggatgaaaggccaccgagtattagaggtggggatgacctgaaactatacagaatttacccagtcggtctaacgcaacgtcaggctttgtacggtttcagatttagagatgattctaaactcgagcaatacatcaaagaccatccctgtgcaaagcttgaagtgatttttgtgtaactatgctctaggcttacgttcgcccccgattcttactgaactccgtgtgcggagtttcagttatactgtaatgtatggtgtcttgtgtagcaaacaaactcatgctagtacagatcatctgccggatgaaaattttccttgacagcgaacatcagtgcattcagcaacaacagcaaaggaattgacacg

SEQ ID NO: 9015 - DNA, 6537 bp, Zea Mays
atggcctccgacgacggcgacaaggacatcctcctcctcgtccaccaggtcccactcgacatggaggatgtgccagcgccccgcctggcgcacctcctcgccccgctccaccgcgcgcctccaccgcccccgcctccccccttccgctcgccgcccccgccccaggccgccgcttccgccgagcaccgcctctcattccgcggctggctcggcatcccccgccactgggacgactgggtcgccaagctccggcccctccacgcccgcctctggcgccgcctcggcatccacgacgccgtccttgcctccaccctccgcttcaagcgcgacgcctccgccatcctccatctcgcctccttctggtcccctgccaccgccaccttcgccttcccctggggggaggccactgtcaccctccaggacgtcgccctcctcgccggcttccccgccctcggcgccccggccacggccccgctcccgccccagtggcgccccgacgaggccgccctcaatggcgtgcgcctcggcttcaaccgcagcgcctgcaagaaggcgcaccactccgcctgggtaaaacacttcctcaccgacgataacgcggacacagtcttcgagcacgccgccttcctcgcgctctggctcacgcgcttcgtcctcccgggtcatccggagtccaccatgcgccaggccgtcttccccatcgccgtccgcctcgcgcgcggggaccgcgttgccctcgcgcccgccgtccttgcctcgatctaccgggacctccgcgagatcaaggccttcctcatcgccacgggcgccgccgccaccaccggcaacgccgatatgatctcctccttatccgtctactcgccactctacattcttcagctctggatgtgggagcgcttccctgccctcaggccagcaaaggtgaacccactcgttgatggcgatccgcttgccgctcggtggcatgatctgagcaggaagctgaacccggcgcagatacgtgaggccctcagcacaggatgcaactttgtgtggcagccttatgtcagctccatggagcacactgggtgggttcacagcagtgatctagccgaggatgatgaactggcatcgctcgcacaatttttgcacccctgtgagctcgtagggatggattgcattgagcagtacctcccgcaccgtgttgccagacagtttggactggaccaagatgtgcctgcagatgttcaccgtgccaaccaggattgggcgattgcttggcagacctaccagctggaaggtaagaatgtggctttcttcatccctcactctgagcctgggatcacaacacggtatgcacagtggtggaggcagcaacttctgccttctggcattgatgctgctacagcaagtgctccagtagagtggaagacttccaagcgcaaggtgaaaaagacaccagcggccatggaagctgaagctgagaaggagcgtaagatgaagaaggcccgggtctctcctacttatactgataaaaagcgcaaacttgaagagttgtatgatgctaagttgtcggattggcttccaactgcaaggaatgagattagtgacaccactagtgatatggaatcggaggaggccttattgcctaatgttggaactacaaatgatgatattgtgctactcatgccaaggaagcagacaacgactgcacctgtaagggcattgatggataatgacatgatcctggctctaggagagagaggaaactttatggttgatgagcctccagacatccaaagtgaacctgaagctgttgtccctgcaacgctggatgaggaaatagttaaaattcctgaggttatttctcttgatattccagataagccagaagaaggagccactgcagtaatggaggagcagaaggaagctactagtgtatctgatagatctgaagaagctagtgctctggtcataggagaggtagaagaaaaggttgccatagagggagctatttgtgttacagggatgaatccatcgggaaacaactcagcaactgtaatggaggcagatgaaagaaatgcagttccaaaagaatttggaagggctgccaaggaagtaattgaagctgtgccccagagccaacatgaagttaatgcaggtgttataaacaattctcatgatgtggtggctttacctgaggaggcccatccagttcagcccacaaataattctggtggatgtcccgtggtatcttgcataatggaagacagtaaagttgctggagattcgggcaaaattgattatgaatatttttgtgattttgttgaggaacagagggagattccttgtgtacaagagatttctggagaaaacagtcgaatgggtgagaaagagagagaagaaacctcccatgaatctcctcaactagagattgtagaatgtgtgcaagacatcgttcttagggaaacagactatgatgttaatcaaaagatagtttatccagcagtggaggatgtagcaacttccgatagtatgagtacatctcttctgggtgttcctgaaccagaaaatgcagaactcaataaacatccttatctagcaattaaagatgaggaagatatacccatggaagctgcacgaggagaagtagcagaaatggaacaaattagtacttctgcaaagggaggtgccgaggagcatggggacttttctgaacttgatcacatgggccgagcagatgctaaattgcatttacacttaaattctgaagtgcctgagaaaattgatgaaatagagtgtaaagaagtcgctggcactatgagactaactgggagatattctgatcagaagcttggagatgtgcctgaagttgggtacacagaagatgaaaacattagggggctggtagtgaacacaagtgataggaaaccttcagaagtctctcaagtcgagcctgcaaaactggaacattctaaggatctggtgaaagaggaaacagacaaatccgaaaatattcctggattagaatgtataggattggaggaaactcgtggagatttgatggaagagtgtgcaaataccaagtctgataatgttcccgaattagaaaatacaggattaggaggaactcatgggccaatagaggatactgatggtagactgaaggaaattcatgatgtcaatgcagaactggataaacacaatgtgcatgagagcgatattgatagatccgaggacatcatgcaaatcgatccactaacacaggataaagctacgtggctggcgaaggaagaaactgaagataaaactacaaaagttcaagaagtaaagtatgaacaattaagaaatgagccaccgattcaagaggattccaaggaaaagccctgtgctgatagcaaggatctatcagagaatgttgtagttcagtccaaagaggtagataaattgaaacaagcaggagagggttgccaggcgttaatggagaaagacatggagaatgctagtggtgcttttgtactagaacagacagaagatggacacagaaaatcattgatagagacaagtataaataacgatagtgaaattactctagtcgagcagttggatggacaaagtgagagtcttacgaggacaggtactgtggaaattcatggagaaaccattaaagcacaagacaatgagttctataaggatgtggtagaagattcaaatgactcaaccaatgaaaaggatgtggtagaagattcaaacgaatcaatcaatgctaagatgccatgtagttcagctactgtacagttaaaagaagataagatggaagtttttcatgaaggcaagatggaggagccatgtgctcaggatgctgaactgagtaatcagagggaaccatcatctgatgcaactgctatggagattgaggcagtggctctggaacaggacagcagaatcatatgcaaaaacatggaggcaacaacagtggaaggcagccacacactggatagtggactaagttccgatctagccaaggttaatgaaactcatgctgcacgggaaattaaaaaccaggaagttttggatgtggacatgaagtagcaatgagtgtttgtggtgaatatcaaattaactcaattggtatggaggatgtcaaatctaccaaaggatcacagaaccaagaatgtttggaccagaaagaagaccatataatggaggaaagagtggagtgtgaagtaagagaaggaagtggagtatcctatgaagaggcatgtgagctcggtggtggtagagtgaaagcctctggagttgcagtggatgttagtggtccagtgctaaacaaggaggcctgcaacacagaggaggcaagggaggataagaagcgtcatggagttgggcatgtgaatgagaagagggttttggaagaaactagtatgattgatactggtgaattgaaatctgattcgactgttatggagattagcatggctgggttaagacaaggaacactcaaccaatgtgcttcaagttcggagaaggaagaagcagtgcaggagaagcatgatcagggattggtagatgaaaacacaaacagaggttcagctgacaatgatgcacttgaatgtggtggagtgaatcctgatgtggccataacaatgtttcatgaaactattcttacaacagaagctgtcaatatagctgggtctaaaatttcgtctgagaaccagcaaaaggaagcaccctttgaagtacactctataacagaagtcgaaggttctgaatcaaatgaatcatcaagaaaggagcctgaaggagctcttgctcttccacaagagcctggcaacctggtaaaagttaaacaagaaagtttggagaatgaaaccgagatgtccatttttagggagaatgacaaagtttctggaaaagatcaggcatcagcagagtttataattgatccttcaaatacggatgaacggagggagaatgatattgggcggcccgatgaatcagcaaaaggctgtgaaaggttaacttctgattctataaacacagttcactccaaatttggcaagtctagtaatgaagaggataagagaacacagaacaccaggtctacggatccaaaagatataaaggaatcattgggtagaattcgtgccgaaccatcaaacagggtacacacaaccagtgttgggtattactctcagcatgcagctcatgatccgatttcatcttgtaaggagatcaaagtgcctttgcgagacggtgcaagggattctggaagggaccgtgcactggagttagtggttacaagtccacgagaagagactcctcgatggaggcaagaacagtacgcacttcagattttagaagacgttcaaaattcccgaattgctgagagatctaggatggagatggagatcagagtactgaaggcacaagtcagtagcatggagagacaagtgatgaacctggatcacttctctgaggtcaagtccagatctagtttgaaccaacaaatggtacatttgcacaaaccatacttctgaaactgtaatgggtttaaattttttgaaataaacacaaatccatgcaagttctctgtcccatcatcgactacctacctcctggaagtcggattgttttactcttaggttattccgaacctcctcccattatactgaatgattggatgcatgacggtgctagggcatgtctgggttatgcctgaatcctgatgacatgactaaactgcccaaggtgtcactagctcaaatcgatggtagttctgctgtctatcttttagattgacgataagctcggataatttggaacttctgtgcaccacatataaggaatcagttcatttcacagggaaatcggaaaaaaatatcagcattccaaaggggtctaggtcttggatggtcagccatttttattatgtacaaatgcagtagaagatgaggaacttcatagtatgtttatgaactcgcaactacttagaccgcatattagtgtgaagcgagtctcattttgtttctagaagtgaagttgaattccattagttgtcagcattcacctgttctataggagctgccgtccagactccaggacttgtgaaagaatataaggggtaagatcgtcaatgcacatggccatacaatggcagaagagcaatgaggacacaagattgaatttaaaatggggaactggcaacaaatcgaactactggccgtgtttttttatataaaaaactggctgttgagtgttgacggcaaacgggagaagcccaatgtttcgattggcagaacggcaaaattctggcctgctggctgatttcgacgcaccaaagccaacgttccttgcagtcttcctttcatgtagaaattctactctacctttttgaactaatctccttgtcctattttctttcttgaactctaaaaccatacattttagcctccaaattagggatggttcatgattttttattcagatgtaaaatttgtggtcttctttcttccattgtgaataaatatgatataaaagttgtcatgcaaatccata

SEQ ID NO: 9016 - DNA, 6567 bp, Zea Mays
cgacactcccgaaacccagcccaggccgccgccgccgccatggcctccgacgacggcgacaaggacatcctcctcctcgtccaccaggtcccactcgacatggaggatgtgccagcgccccgcctggcgcacctcctcgccccgctccaccgcgcgcctccaccgcccccgcctccccccttccgctcgccgcccccgccccaggccgccgcttccgccgagcaccgcctctcattccgcggctggctcggcatcccccgccactgggacgactgggtcgccaagctccggcccctccacgcccgcctctggcgccgcctcggcatccacgacgccgtccttgcctccaccctccgcttcaagcgcgacgcctccgccatcctccatctcgcctccttctggtcccctgccaccgccaccttcgccttcccctggggggaggccactgtcaccctccaggacgtcgccctcctcgccggcttccccgccctcggcgccccggccacggccccgctcccgccccagtggcgccccgacgaggccgccctcaatggcgtgcgcctcggcttcaaccgcagcgcctgcaagaaggcgcaccactccgcctgggtaaaacacttcctcaccgacgataacgcggacacagtcttcgagcacgccgccttcctcgcgctctggctcacgcgcttcgtcctcccgggtcatccggagtccaccatgcgccaggccgtcttccccatcgccgtccgcctcgcgcgcggggaccgcgttgccctcgcgcccgccgtccttgcctcgatctaccgggacctccgcgagatcaaggccttcctcatcgccacgggcgccgccgccaccaccggcaacgccgatatgatctcctccttatccgtctactcgccactctacattcttcagctctggatgtgggagcgcttccctgccctcaggccagcaaaggtgaacccactcgttgatggcgatccgcttgccgctcggtggcatgatctgagcaggaagctgaacccggcgcagatacgtgaggccctcagcacaggatgcaactttgtgtggcagccttatgtcagctccatggagcacactgggtgggttcacagcagtgatctagccgaggatgatgaactggcatcgctcgcacaatttttgcacccctgtgagctcgtagggatggattgcattgagcagtacctcccgcaccgtgttgccagacagtttggactggaccaagatgtgcctgcagatgttcaccgtgccaaccaggattgggcgattgcttggcagacctaccagctggaaggtaagaatgtggctttcttcatccctcactctgagcctgggatcacaacacggtatgcacagtggtggaggcagcaacttctgccttctggcattgatgctgctacagcaagtgctccagtagagtggaagacttccaagcgcaaggtgaaaaagacaccagcggccatggaagctgaagctgagaaggagcgtaagatgaagaaggcccgggtctctcctacttatactgataaaaagcgcaaacttgaagagttgtatgatgctaagttgtcggattggcttccaactgcaaggaatgagattagtgacaccactagtgatatggaatcggaggaggccttattgcctaatgttggaactacaaatgatgatattgtgctactcatgccaaggaagcagacaacgactgcacctgtaagggcattgatggataatgacatgatcctggctctaggagagagaggaaactttatggttgatgagcctccagacatccaaagtgaacctgaagctgttgtccctgcaacgctggatgaggaaatagttaaaattcctgaggttatttctcttgatattccagataagccagaagaaggagccactgcagtaatggaggagcagaaggaagctactagtgtatctgatagatctgaagaagctagtgctctggtcataggagaggtagaagaaaaggttgccatagagggagctatttgtgttacagggatgaatccatcgggaaacaactcagcaactgtaatggaggcagatgaaagaaatgcagttccaaaagaatttggaagggctgccaaggaagtaattgaagctgtgccccagagccaacatgaagttaatgcaggtgttataaacaattctcatgatgtggtggctttacctgaggaggcccatccagttcagcccacaaataattctggtggatgtcccgtggtatcttgcataatggaagacagtaaagttgctggagattcgggcaaaattgattatgaatatttttgtgattttgttgaggaacagagggagattccttgtgtacaagagatttctggagaaaacagtcgaatgggtgagaaagagagagaagaaacctcccatgaatctcctcaactagagattgtagaatgtgtgcaagacatcgttcttagggaaacagactatgatgttaatcaaaagatagtttatccagcagtggaggatgtagcaacttccgatagtatgagtacatctcttctgggtgttcctgaaccagaaaatgcagaactcaataaacatccttatctagcaattaaagatgaggaagatatacccatggaagctgcacgaggagaagtagcagaaatggaacaaattagtacttctgcaaagggaggtgccgaggagcatggggacttttctgaacttgatcacatgggccgagcagatgctaaattgcatttacacttaaattctgaagtgcctgagaaaattgatgaaatagagtgtaaagaagtcgctggcactatgagactaactgggagatattctgatcagaagcttggagatgtgcctgaagttgggtacacagaagatgaaaacattagggggctggtagtgaacacaagtgataggaaaccttcagaagtctctcaagtcgagcctgcaaaactggaacattctaaggatctggtgaaagaggaaacagacaaatccgaaaatattcctggattagaatgtataggattggaggaaactcgtggagatttgatggaagagtgtgcaaataccaagtctgataatgttcccgaattagaaaatacaggattaggaggaactcatgggccaatagaggatactgatggtagactgaaggaaattcatgatgtcaatgcagaactggataaacacaatgtgcatgagagcgatattgatagatccgaggacatcatgcaaatcgatccactaacacaggataaagctacgtggctggcgaaggaagaaactgaagataaaactacaaaagttcaagaagtaaagtatgaacaattaagaaatgagccaccgattcaagaggattccaaggaaaagccctgtgctgatagcaaggatctatcagagaatgttgtagttcagtccaaagaggtagataaattgaaacaagcaggagagggttgccaggcgttaatggagaaagacatggagaatgctagtggtgcttttgtactagaacagacagaagatggacacagaaaatcattgatagagacaagtataaataacgatagtgaaattactctagtcgagcagttggatggacaaagtgagagtcttacgaggacagaagattcaaatgactcaaccaatgaaaaggatgtggtagaagattcaaacgaatcaatcaatgctaagatgccatgtagttcagctactgtacagttaaaagaagataagatggaagtttttcatgaaggcaagatggaggagccatgtgctcaggatgctgaactgagtaatcagagggaaccatcatctgatgcaactgctatggagattgaggcagtggctctggaacaggacagcagaatcatatgcaaaaacatggaggcaacaacagtggaaggcagccacacactggatagtggactaagttccgatctagccaaggttaatgaaactcatgctgcacgggaaattaaaaaccaggaagttttggatgtggacatgaaagtagcaatgagtgtttgtggtgaatatcaaattaactcaattggtatggaggatgtcaaatctaccaaaggatcacagaaccaagaatgtttggaccagaaagaagaccatataatggaggaaagagtggagtgtgaagtaagagaaggaagtggagtatcctatgaagaggcatgtgagctcggtggtggtagagtgaaagcctctggagttgcagtggatgttagtggtccagtgctaaacaaggaggcctgcaacacagaggaggcaagggaggataagaagcgtcatggagttgggcatgtgaatgagaagagggttttggaagaaactagtatgattgatactggtgaattgaaatctgattcgactgttatggagattagcatggctgggttaagacaaggaacactcaaccaatgtgcttcaagttcggagaaggaagaagcagtgcaggagaagcatgatcagggattggtagatgaaaacacaaacagaggttcagctgacaatgatgcacttgaatgtggtggagtgaatcctgatgtggccataacaatgtttcatgaaactattcttacaacagaagctgtcaatatagctgggtctaaaatttcgtctgagaaccagcaaaaggaagcaccctttgaagtacactctataacagaagtcgaaggttctgaatcaaatgaatcatcaagaaaggagcctgaaggagctcttgctcttccacaagagcctggcaacctggtaaaagttaaacaagaaagtttggagaatgaaaccgagatgtccatttttagggagaatgacaaagtttctggaaaagatcaggcatcagcagagtttataattgatccttcaaatacggatgaacggagggagaatgatattgggcggcccgatgaatcagcaaaaggctgtgaaaggttaacttctgattctataaacacagttcactccaaatttggcaagtctagtaatgaagaggataagagaacacagaacaccaggtctacggatccaaaagatataaaggaatcattgggtagaattcgtgccgaaccatcaaacagggtacacacaaccagtgttgggtattactctcagcatgcagctcatgatccgatttcatcttgtaaggagatcaaagtgcctttgcgagacggtgcaagggattctggaagggaccgtgcactggagttagtggttacaagtccacgagaagagactcctcgatggaggcaagaacagtacgcacttcagattttagaagacgttcaaaattcccgaattgctgagagatctaggatggagatggagatcagagtactgaaggcacaagtcagtagcatggagagacaagtgatgaacctggatcacttctctgaggtcaagtccagatctagtttgaaccaacaaatggtacatttgcacaaaccatacttctgaaactgtaatgggtttaaattttttgaaataaacacaaatccatgcaagttctctgtcccatcatcgactacctacctcctggaagtcggattgttttactcttagcaatccagtaggaagacggcatttttggtgaatttctgatgcaaatttcagtacaggttattccgaacctcctcccattatactgaatgattggatgcatgacggtgctagggcatgtctgggttatgcctgaatcctgatgacatgactaaactgcccaaggtgtcactagctcaaatcgatggtagttctgctgtctatcttttagattgacgataagctcggataatttggaacttctgtgcaccacatataaggaatcagttcatttcacagggaaatcggaaaaaaatatcagcattccaaaggggtctaggtcttggatggtcagccatttttattatgtacaaatgcagtagaagatgaggaacttcatagtatgtttatgaactcgcaactacttagaccgcatattagtgtgaagcgagtctcattttgtttctagaagtgaagttgaattccattagttgtcagcattcacctgttctataggagctgccgtccagactccaggacttgtgaaagaatataaggggtaagatcgtcaatgcacatggccatacaatggcagaagagcaatgaggacacaagattgaatttaaaatggggaactggcaacaaatcgaactactggccgtgtttttttatataaaaaactggctgttgagtgttgacggcaaacgggagaagcccaatgtttcgattggcagaacggcaaaattctggcctgctggctgatttcgacgcaccaaagccaacgttccttgcagtcttcctttcatgtagaaattctactctacctttttgaactaatctccttgtcctattttctttcttgaactctaaaaccatacattttagcctccaaattagggatggttcatgattttttattcagatgtaaaatttgtggtcttctttcttccattgtgaataaatatgatataaaagttgtcatgcaaatccata

SEQ ID NO: 9017 - DNA, 6712 bp, Zea Mays
atggcctccgacgacggcgacaaggacatcctcctcctcgtccaccaggtcccactcgacatggaggatgtgccagcgccccgcctggcgcacctcctcgccccgctccaccgcgcgcctccaccgcccccgcctccccccttccgctcgccgcccccgccccaggccgccgcttccgccgagcaccgcctctcattccgcggctggctcggcatcccccgccactgggacgactgggtcgccaagctccggcccctccacgcccgcctctggcgccgcctcggcatccacgacgccgtccttgcctccaccctccgcttcaagcgcgacgcctccgccatcctccatctcgcctccttctggtcccctgccaccgccaccttcgccttcccctggggggaggccactgtcaccctccaggacgtcgccctcctcgccggcttccccgccctcggcgccccggccacggccccgctcccgccccagtggcgccccgacgaggccgccctcaatggcgtgcgcctcggcttcaaccgcagcgcctgcaagaaggcgcaccactccgcctgggtaaaacacttcctcaccgacgataacgcggacacagtcttcgagcacgccgccttcctcgcgctctggctcacgcgcttcgtcctcccgggtcatccggagtccaccatgcgccaggccgtcttccccatcgccgtccgcctcgcgcgcggggaccgcgttgccctcgcgcccgccgtccttgcctcgatctaccgggacctccgcgagatcaaggccttcctcatcgccacgggcgccgccgccaccaccggcaacgccgatatgatctcctccttatccgtctactcgccactctacattcttcagctctggatgtgggagcgcttccctgccctcaggccagcaaaggtgaacccactcgttgatggcgatccgcttgccgctcggtggcatgatctgagcaggaagctgaacccggcgcagatacgtgaggccctcagcacaggatgcaactttgtgtggcagccttatgtcagctccatggagcacactgggtgggttcacagcagtgatctagccgaggatgatgaactggcatcgctcgcacaatttttgcacccctgtgagctcgtagggatggattgcattgagcagtacctcccgcaccgtgttgccagacagtttggactggaccaagatgtgcctgcagatgttcaccgtgccaaccaggattgggcgattgcttggcagacctaccagctggaaggtaagaatgtggctttcttcatccctcactctgagcctgggatcacaacacggtatgcacagtggtggaggcagcaacttctgccttctggcattgatgctgctacagcaagtgctccagtagagtggaagacttccaagcgcaaggtgaaaaagacaccagcggccatggaagctgaagctgagaaggagcgtaagatgaagaaggcccgggtctctcctacttatactgataaaaagcgcaaacttgaagagttgtatgatgctaagttgtcggattggcttccaactgcaaggaatgagattagtgacaccactagtgatatggaatcggaggaggccttattgcctaatgttggaactacaaatgatgatattgtgctactcatgccaaggaagcagacaacgactgcacctgtaagggcattgatggataatgacatgatcctggctctaggagagagaggaaactttatggttgatgagcctccagacatccaaagtgaacctgaagctgttgtccctgcaacgctggatgaggaaatagttaaaattcctgaggttatttctcttgatattccagataagccagaagaaggagccactgcagtaatggaggagcagaaggaagctactagtgtatctgatagatctgaagaagctagtgctctggtcataggagaggtagaagaaaaggttgccatagagggagctatttgtgttacagggatgaatccatcgggaaacaactcagcaactgtaatggaggcagatgaaagaaatgcagttccaaaagaatttggaagggctgccaaggaagtaattgaagctgtgccccagagccaacatgaagttaatgcaggtgttataaacaattctcatgatgtggtggctttacctgaggaggcccatccagttcagcccacaaataattctggtggatgtcccgtggtatcttgcataatggaagacagtaaagttgctggagattcgggcaaaattgattatgaatatttttgtgattttgttgaggaacagagggagattccttgtgtacaagagatttctggagaaaacagtcgaatgggtgagaaagagagagaagaaacctcccatgaatctcctcaactagagattgtagaatgtgtgcaagacatcgttcttagggaaacagactatgatgttaatcaaaagatagtttatccagcagtggaggatgtagcaacttccgatagtatgagtacatctcttctgggtgttcctgaaccagaaaatgcagaactcaataaacatccttatctagcaattaaagatgaggaagatatacccatggaagctgcacgaggagaagtagcagaaatggaacaaattagtacttctgcaaagggaggtgccgaggagcatggggacttttctgaacttgatcacatgggccgagcagatgctaaattgcatttacacttaaattctgaagtgcctgagaaaattgatgaaatagagtgtaaagaagtcgctggcactatgagactaactgggagatattctgatcagaagcttggagatgtgcctgaagttgggtacacagaagatgaaaacattagggggctggtagtgaacacaagtgataggaaaccttcagaagtctctcaagtcgagcctgcaaaactggaacattctaaggatctggtgaaagaggaaacagacaaatccgaaaatattcctggattagaatgtataggattggaggaaactcgtggagatttgatggaagagtgtgcaaataccaagtctgataatgttcccgaattagaaaatacaggattaggaggaactcatgggccaatagaggatactgatggtagactgaaggaaattcatgatgtcaatgcagaactggataaacacaatgtgcatgagagcgatattgatagatccgaggacatcatgcaaatcgatccactaacacaggataaagctacgtggctggcgaaggaagaaactgaagataaaactacaaaagttcaagaagtaaagtatgaacaattaagaaatgagccaccgattcaagaggattccaaggaaaagccctgtgctgatagcaaggatctatcagagaatgttgtagttcagtccaaagaggtagataaattgaaacaagcaggagagggttgccaggcgttaatggagaaagacatggagaatgctagtggtgcttttgtactagaacagacagaagatggacacagaaaatcattgatagagacaagtataaataacgatagtgaaattactctagtcgagcagttggatggacaaagtgagagtcttacgaggacagaagattcaaatgactcaaccaatgaaaaggatgtggtagaagattcaaacgaatcaatcaatgctaagatgccatgtagttcagctactgtacagttaaaagaagataagatggaagtttttcatgaaggcaagatggaggagccatgtgctcaggatgctgaactgagtaatcagagggaaccatcatctgatgcaactgctatggagattgaggcagtggctctggaacaggacagcagaatcatatgcaaaaacatggaggcaacaacagtggaaggcagccacacactggatagtggactaagttccgatctagccaaggttaatgaaactcatgctgcacgggaaattaaaaaccaggaagttttggatgtggacatgaatatatgccttgatcaccttctctaattgctataaatttgttgagaccacagcttatcttgattatgatatttggttgtttgcagaaagtagcaatgagtgtttgtggtgaatatcaaattaactcaattggtatggaggatgtcaaatctaccaaaggatcacagaaccaagaatgtttggaccagaaagaagaccatataatggaggaaagagtggagtgtgaagtaagagaaggaagtggagtatcctatgaagaggcatgtgagctcggtggtggtagagtgaaagcctctggagttgcagtggatgttagtggtccagtgctaaacaaggaggcctgcaacacagaggaggcaagggaggataagaagcgtcatggagttgggcatgtgaatgagaagagggttttggaagaaactagtatgattgatactggtgaattgaaatctgattcgactgttatggagattagcatggctgggttaagacaaggaacactcaaccaatgtgcttcaagttcggagaagtcacaggaagaagcagtgcaggagaagcatgatcagggattggtagatgaaaacacaaacagaggttcagctgacaatgatgcacttgaatgtggtggagtgaatcctgatgtggccataacaatgtttcatgaaactattcttacaacagaagctgtcaatatagctgggtctaaaatttcgtctgagaaccagcaaaaggaagcaccctttgaagtacactctataacagaagtcgaaggttctgaatcaaatgaatcatcaagaaaggagcctgaaggagctcttgctcttccacaagagcctggcaacctggtaaaagttaaacaagaaagtttggagaatgaaaccgagatgtccatttttagggagaatgacaaagtttctggaaaagatcaggcatcagcagagtttataattgatccttcaaatacggatgaacggagggagaatgatattgggcggcccgatgaatcagcaaaaggctgtgaaaggttaacttctgattctataaacacagttcactccaaatttggcaagtctagtaatgaagaggataagagaacacagaacaccaggtctacggatccaaaagatataaaggaatcattgggtagaattcgtgccgaaccatcaaacagggtacacacaaccagtgttgggtattactctcagcatgcagctcatgatccgatttcatcttgtaaggagatcaaagtgcctttgcgagacggtgcaagggattctggaagggaccgtgcactggagttagtggttacaagtccacgagaagagactcctcgatggaggcaagaacagtacgcacttcagattttagaagacgttcaaaattcccgaattgctgagagatctaggatggagatggagatcagagtactgaaggcacaagtcagtagcatggagagacaagtgatgaacctggatcacttctctgaggtcaagtccagatctagtttgaaccaacaaatggtacatttgcacaaaccatacttctgaaactgtaatgggtttaaattttttgaaataaacacaaatccatgcaagttctctgtcccatcatcgactacctacctcctggaagtcggattgttttactcttaggtgagttccattttaaagtttaactctagcaaagaaaggtcctgcattctatcctaactcaaataatataagcgtcttgtttatgtgtaaagcaatccagtaggaagacggcatttttggtgaatttctgatgcaaatttcagtacaggttattccgaacctcctcccattatactgaatgattggatgcatgacggtgctagggcatgtctgggttatgcctgaatcctgatgacatgactaaactgcccaaggtgtcactagctcaaatcgatggtagttctgctgtctatcttttagattgacgataagctcggataatttggaacttctgtgcaccacatataaggaatcagttcatttcacagggaaatcggaaaaaaatatcagcattccaaaggggtctaggtcttggatggtcagccatttttattatgtacaaatgcagtagaagatgaggaacttcatagtatgtttatgaactcgcaactacttagaccgcatattagtgtgaagcgagtctcattttgtttctagaagtgaagttgaattccattagttgtcagcattcacctgttctataggagctgccgtccagactccaggacttgtgaaagaatataaggggtaagatcgtcaatgcacatggccatacaatggcagaagagcaatgaggacacaagattgaatttaaaatggggaactggcaacaaatcgaactactggccgtgtttttttatataaaaaactggctgttgagtgttgacggcaaacgggagaagcccaatgtttcgattggcagaacggcaaaattctggcctgctggctgatttcgacgcaccaaagccaacgttccttgcagtcttcctttcatgtagaaattctactctacctttttgaactaatctccttgtcctattttctttcttgaactctaaaaccatacattttagcctccaaattagggatggttcatgattttttattcagatgtaaaatttgtggtcttctttcttccattgtgaataaatatgatataaaagttgtcatgcaaatccata

SEQ ID NO: 9018 - DNA, 3139 bp, Zea Mays
cactgccaagcgcagttgtctctgatgtctggtcacgcctgacgacgccgctatcacgcgccaccctcctgccgacgaacgcggcctcctcctcattgctgagcgcagcccctcacttctctcctggctgcgccaccatgatgccgccacggaatgcgcagagccgccgaagagagcagagtcccagcgagaaacgcaggagctcttccttccacctctggcgaacctccaaggaaactcgacgcccagacctgctcgcgcacagggagcatctttgctccggcggctgctcgccggcctccctgtctcctccccagttcttcctctcacagccgtgcagcgccctcttctctacagtggccgctgctcctctctgaagctatgcgcaggagctctccaggacgccgcgcctcctccctgctacacgccccggtcgacgacgaacttcccgtggtctgggaggccgcgcccgcccagatccgccggaaggagcgaaaggagccccgccgccgctgtcatcacaggccgcacgggcttccggtggcctgctcaggcggcggctagggttttgaggggcgctcgggtcgcccagcgcggggacgaccgagcgccgtctgcttcaaacatttggagctcatcccctcgaaatacagaaggtgcatccacaaaggattaatctcttcgtctaattttcttgggcatacacagattcagagcatatggcgatcaagtagctatgcgttcagctgaggacattgcatatgctgtgttacggttttttgcaaagggtgggtcattggttaactactacatgtatcacggaggaacaaattttggaaggactggggcttcttatgtgctgactgggtactatgatgaagctcccatggatgaatatggtatgtacaaggagcccaaatttgggcatctcagggacttgcacaatgtaataaggtcatatcagaaagcattcctcttggggaagcattcgtctgagatattgggtcatgggtatgaggcacacatctttgagttgcctgaagaaaatctttgcctctctttcctttccaacaataacacgggcgaagatggaacagtaatcttccgaggggagaagcactacgtgcctagccgttcagtctccattcttgcagggtgcaagaacgtggtttacaataccaagagggtgtttgtacaacacaatgaaaggtcataccatacctcagaggtaacaagcaagaataaccaatgggagatgtactcagaaaaaatcccgaagtaccgtgatactaaagtcaggatgaaggaacccctggagcaatttaaccaaaccaaggacgctagtgattacttatggtacaccacaagctttcgcttggagtcagacgatttgccttttagaaatgacatccggcctgtgcttcaggtcaaaagtagtgcacactcaatgatgggatttgccaatgatgctttcgatgcgcacgcggaagcaagcaggtgaagggtttcatgtttgaaaaacccgttgatctgaaagtaggtgtgaaccatgttgtattgttgtcgtcaactatgggaatgaaggcgaaaaaaatatggctgtattgacgcaagctacaaacactttattttggaaaggtggacatatataaatatcataaatagaagggtggcccatgcgctctgctaatgcaataatccttcccatcagctctaaatttgcatgtttcactatcttctgcaggacagtggtggtgaacttgctgaagtaaagagtggcattcaggagtgcctaatccagggtctgaacactgggacgttggatttacaagtcaatggctggggccataaggctgcactggaaggtgaggacaaggagatctactcagaaaaaggtgtgggcaaagttcagtggaaacctgccgagaacggccgggcagccacttggtataaggtaagttgaaccaggaatacgagcactataggttttggaaacatcaaacatccatttcaattttggttgcaaccctggcccttggtgtcactatgttcactgccatgctagagatacttcgatgagccagatggagatgatcccgttgtacttgacatgagctcaatggacaaaggaatgatttttgtgaatggtgaaggcgtgggtagatactgggtctcataccgaactcttgctggaactccttctcaagcactataccatattccgcgtcctttcttgaaatccaaggacaaccttttggttgtcttcgaggaggagatgggcaagccggatggcatcctcgtgcagacggtgacgagagacgacatatgtctgttcatctcggagcacaacccgggacagataaagacgtgggatacggatggtgacaaaatcaaactcattgcagaggatcacagcaggcggggcaccttgatgtgcccccctgagaagacaatccaagaagtcgtctttgccagcttcggcaacccagagggcatgtgcggcaacttcactgtaggcacttgccacactcccaatgcaaagcagatcgttgagaaggaatgcctcggcaagccatcctgcatgctgccggtggatcacacggtgtacggcgcggacatcaactgccaatcaacgactgctacactgggggtgcaggtgagatgcggaggcggcaagaagggtgcctgagaataacaagatggatgctgctaattaatggacgtttcagcttgtttgtttgttcatcccttcggtttggcactgatgcttacattgttctgacattgcaattgaaatgtgattggaacattcttgatcgggaactaacatgaaatgagtggagggtagatgctgatcagaccaaagatgtgtatttcccccctctttccttctgtctcgtgttgtttcatgtaaccatcacaatatatatagatgttgaataatcatgaccagtagtatagatcttagagcatccctaacttttgaataaaagactcttggagattggagctggactaactgattgcttcttgcaacatgtatatgaacatttcattaaaaaacgagcgatgagcaaaacaatataccctactaattaagatgttgcaaatgagtttaatcctacagctttgatactgc

SEQ ID NO: 9019 - DNA, 913 bp, Zea Mays
ctcgacctcctcccccatgaccacgaccatgcgccgtttcaacctcggcacttctgcagaaccgtccacgccccgcatgcccgcatcctccacctcttcccgtccaactccgttcccacctggcctagaactgcagacggccaagactggcgatgcttctcagatccatgctcatcaccgctcgctcacctacctcccagtacctcctccttccgtaataacctggcgtgcagcgtggtgctcctcggcaccgccgccacctaccccaacagcgggcgctctgacaacggcgaccgtggcggtgcaggtgtaggggctggggagtttgtgccctgccggatccagttgatcgcagagccagcccagtcgacacgtctgcgctgatgcagcagaactcgcctcccaccttgtccaagtcgcccgtgccggagagggagaccatcccgccgcaagagacgctaggcggcggcgacgacaacatagatcccgtcgatccacgtgagagtgttacaggctccgaggaacccggcttgccagaagctgccgttatgaggaaggacatggcggcggtttccaacaaggatggcttgcccaccaggaaggatgacgacgaggatgcaacgtccgagcccaccaccaagccatgtgactggcataacaaatcaataacttgagatacatttcacaagcttagtcccataggttgtaacagataatgtgctaatgtccagcatgatgagtttctatgagcactagctgtgctgagttcatgtatgaggggcaccctcctcgagatcggcatgtcctactctagggcctccagtgtgcagctccttggaaaggtaggttactgactgcacttgtttgtgaatacttggagtgaccacaactaagtcacacaatgaaactttac

SEQ ID NO: 9020 - DNA, 2851 bp, Zea Mays
ctcgacctcctcccccatgaccacgaccatgcgccgtttcaacctcggcacttctgcagaaccgtccacgccccgcatgcccgcatcctccacctcttcccgtccaactccgttcccacctggcctagaactgcagacggccaagactggcgatgcttctcagatccatgctcatcaccgctcgctcacctacctcccagtacctcctccttccgtaataacctggcgtgcagcgtggtgctcctcggcaccgccgccacctaccccaacagcgggcgctctgacaacggcgaccgtggcggtgcaggtgtaggggctggggagtttgtgccctgccggatccagttgatcgcagaggtttccctcgctaagctcttcgcagacttcgccagcccagtcgacacgtctgcgctgatgcagcagaactcgcctcccaccttgtccaagtcgcccgtgccggagagggagaccatcccgccgcaagagacgctaggcggcggcgacgacaacatagatcccgtcgatccacgtgagagtgttacaggctccgaggaacccggcttgccagaagctgccgttatgaggaaggacatggcggcggtttccaacaaggatggcttgcccaccaggaaggatgacgacgaggatgcaacgtccgagcccaccaccaagccatgtgactggcataacaaatcaataacttgagatacatttcacaagcttagtcccataggttgtaacagataatgtgctaatgtccagcatgatgagtttctatgagcactagctgtgctgagttcatgtatgaggggcaccctcctcgagatcggcatgtcctactctagggcctccagtgtgcagctccttggaaaggaggaatccaatgggaagcggtgcagatcgaccaagcgcggtggcacgaaggacaacccgagaatggtggaaagaagcaggggaaggacaacgcaacgaagcccccctagctgcccaaggactacatccatgtctgggcaaggcgtggcgagcaaggcatggcgaggcgatggactgtcacaacctcgtggagaggaccttgcaatggcgaatcaagggatagttacacatcgaggcttttcgaaatgctactcttctggctccctcctggctaagcagttgaagaatgtgaatgaacacaaatgtcaaatctatggtgacactgtcgggttcttagcaacaggcgatatttttgttgcgtgcaacgaatgtgccttccctgtgtgtcggtcacgctatgagtatgagcgcaaagaggggaatcaatgttgtcctcaatgcaaaactagatacaagaggcacaaagcactggttgcactgtacctttaccctttcttgaacactgtctacaaaacaagagagtatgagttcttgaggcttaccagcctgggtgtgatcgatgctcttgtgaagccggttgttaggaagtgcaccgaaatgttgagtcgagcaatttgcatatctggcggcgatttttatgtacgcaggtttcataaggatggacctattgtttggaggttgttggctttatctccattccgacgtctgtcaaagatggatgaaaaagcaatcattttaccatatagggatacctcacttaactcagaggaacctatggctgagatctctagccaaaagattcagattgcagtcctggacatgatcgctgcaatatcttcgaacaagagaaatgttgttgcactagaaagcgtactaaagaagatgtgtactactcactaaaccaaagggaatctttacttcccgaccaagatctagccctggtatcagatcttttgccccctcaagtgtcttcgagagaatacctctttgtacagtatggaggtgagggtgtcaggtgtgatgtagacccctcatctgtttattatgtgttcagaaggatgcagggtgtgtgatcttgtgcgacctgaaaatcaggttcctaatactgtgtatttgtaatcttgctgagtttttttggtcatgctagcaccctgtgtcacacattgaatataatatcacctgctacaaagaatggtaaactttttcatacgtgttctcgcactgaaaatcatcaagcaaacatcaggactcatgatgacaatgaaggatgtgatgagtttgtgtctgttaaccatataaggttgcacgttaagcatgcccctgacttgccggacgagcagcaagactttgggacctagattggctaaggcactaagaatagaatagcttttcaagaaaagagagacaacaactaacactgtactatgtaggggtgaaatagctagattaagataataaaatttatatatagctaggatcataaatggattacgaaacatttttatcttaacaatataacacatgtttatatataagttattatagtattatatatttccgttgcaacgcacgggcactcacctagtaagcaaagaattcaggggtgtgatcatttttggccgtggggacactccgaagcagcatgtggacctgctgcaccagcagctgcttcctcactcaggtatttcattccgtccacaacagtacagcacagtgcatcgatcttgaaatcaaaatccaacagcgacacaaaccgaatataatcgacaccaccgctcgctcacgacgccagggtggtgctggggcagttgtcgacgccgcaggccagaacgtcgcggtagtcgcgggagatggtgaagtggtcgtgcacgctgccatcccggctcttcttgtactccaacagcagcctcgtgtggttgaacgccgtcagcttcacgaacccaaagtcgcggtcccgcacgtggctccatcgcgcccg

SEQ ID NO: 9021 - DNA, 2618 bp, Zea Mays
tcagacttcacacatcgatccccactcccccacggaagcgaagcgtacgctacgcgcactgccctccggcgaccgccccgccgctggcgggtcggattgggtccgatccggatctggatcagcaccggcatcgccgcgacggagatgccgaccccgaggcagcggcatacctccacctccggcgggggcggaggagggaggcgcgccgcctccgggtcggccatgctgccccccgtggtggtcctcgtgttcctcttcgtggtcgcgccttcgctcttcttcgtcgtgcgcaatgacggtcgcgcccacgcccacgtccacgtagcctccgatcgcaagggtaagaatggcaatcaggaagcagcagcaatgaagaacctcaaatctattttgcctaaggaggtgtttgatgctataactgctagtcaacaagaatcaggcacattgagtgttgatttttttaggaatcatgcatctccctcttggaaaactgatgatctagtcaccgagaagagcatggatgtcaatgacaatgctaaagctgaaaatagtttgctagaacattctgtgccaacaaatagatcacccaaagatccagatgaacatcaagttgacaaagcagcaaaagtagctcgaaggaaacttagggagaaaaggcgtgagaagagagcaatggatttggttcataaagatgatgaagcacgtattaagctggaaaatgctgccattgagcgatcaaaagctgtcgattctgctgtgcttggaaaatacagcatatggcgaaaagagaatgagaatgagaattcagactctacagttaggctgatgagggaccaaattattatggctcgtgtctattctacgcttgctaaatcaaagaacaagaacgatctatatcaaaaactgcagactcgaatcagagaaagccagcgggctgttggagaggctaatgctgatgctgacctgcatcacagcgcaccagaaaaaatcagagcaatgggtcaagttttatcaaaggctagagaagaactttatgattgtacggcaatcactcagagaataagggctatgcttcagtcagctgatgaacaggtcaggagcttgaagaagcagagtacatttcttagccagttggctgcaaagacaattccaaacagcattcactgcttgtctatgcgtttaacaattgattactatatcctgccccttgaggaacggaaattcccaaggagtgaaaatttagaaaacccaaatctctatcactatgcacttttctctgataatgttttggcagcctctgttgttgtgaactcaaccataatgaatgctaaggaaccagagaaacatgttttccatcttgtgactgacaagttaaactttggagccatgaacatgtggtttctgctgaacccacctggcaaggccaccatccatgttgagaatgtggacgaatttaagtggttgaactcatcatactgtcctgtgttgcggcaacttgagtctgctgccatgaaagagtactatttcaaagctgatcgtcccaccactctctcagcaggttcttcgaacctaaagtatcggaaccccaagtacctctctatgctgaaccacttgaggttctatctcccagaggtctatccaaagttggataagatactcttcctcgacgatgacatagttgtgcagaaagatttaacagggctgtgggatgttgatcttaatggaaaggtcaatggtgctgtggaaacctgtggggagagttttcaccgttttgacaaatatcttaatttttcaaatccacacattgctcggaactttgatccaaatgcatgtggctgggcttatgggatgaacatctttgatctgagggagtggaagaagaaagatattactgggatctaccacaaatggcaaaatatgaatgaagacagggtcctttggaagcttgggacacttccgcctggcctcttgaccttctataagttgacgcacccactggacaagtcatggcatgttcttggattaggatacaacccaagcattgaccgttcagagatagacaatgctgctgtggttcattacaatgggaacatgaagccatggctggagctagcaatgaccaagtaccgaccatattggaccaagtatatcaagtatgatcacccttacatccgtggatgcaacttgagtgagtagatagtcgtgctgaaaaactgacagatgaggaagagcttattggacagaagtgttccactaccatgtccttgcggagaaaaacttataaaatggatttgtggggctggtgtcgcgtgctgcttagaggtatgcctagagaatcgagtgttgccggaattggatcctttttttgtatcagacgataaagtgggagtacaagccaaagcggaaggcatgaatcgaatggattacaggtttaaccctgagtcctgaccaatgtgaaactattttacctacagtatcaagaaatgctggtgtccgttttatgataactgatctcgtagctaatcttgtgtttctcggtcacgtgttacatggtgctagcgcctgagagattggattagtcaatttatttcacaaactatgacattttcttctagcaa

SEQ ID NO: 9022 - DNA, 2250 bp, Zea Mays
gcatggctggaagttcaaaccgtttcccaccaaccgtggagtccgaaatttgacgggaaatctgacgagcccatttttttcataaaggtccggaacctacacaaaaaagttctgcgtcgtcccggtcctctcagaaaacgcgttgcatgagataaccaaaaccacatacagccggaaccgagggggtgatatggaataacagcgctaaaattgaactaaccatagttagctggggacgcctctcccgcggggctgacaccaaaccgtggttcctcggacgcaacgcgagcacaaccagaccacaacacctcgaggctcgagcatccctgcatccctcccccccttccccatcccacctcctgctacaaccgcttcgtttcctcccctcccaaatcccccaaccccaaatcgagctccgagtcgacggcccttgccgaaccgctctccagttcccaaatccccctcccccgaaattcaccgccggactggcccggccgatggagtgacccagctagggttccgaagccggcaatggaggcgcagtggctcgcggagtatccgcaccagggggccgacaagcggccgcgcaaacgggcccggctcgcctgggatgtcgcgcccacgctgttccagccccccaaggcaattccgatgctatattgtgggcaggaactaattaatggtaatttcacgactgcatttcttccaccaccatcaatttattacaccgggccgccacggaatatttcgcctccttggagaccagatgacaaggatggacactatgtttttgcggttggagagaatctcacaccaagatataggatacttaacaagatgggtgaagggacatttggtcaagttttggagtgctgggacttggaaaaccaagaagcagtggctatcaagattgtacgctcccttcagaaataccgagaggctgctatgatagaaattgatgtgctccagagacttgggaagcatgactttactggcagccgttgtgtgcaaatacggaactggtttgactatcgtaatcatatttgtatagtatttgagaagcttgggccaagcctatatgactttctgcgaaagaatagctaccgttcatttcctattgaccttgtccgagaatttgccagacaaatattagagtctgttgcatttatgcatgacttgcgacttattcacacggatctgaagccagaaaacattctccttgtttcatcagagtctatcagggtgcctgattataaggtttctatacgaccaccaaaggatggttctttctttaagaaccttccaaaatctagtgctatcaagctgattgattttgggagtacaactttcgagagccaagaccacaattatgtggtgtcgacaagacattatcgtgcaccagaagttatccttggtcttgggtggaactatccatgcgacttgtggagtgtgggttgcattttagttgagctttgttcgggggaagctctctttcaaacacatgaaaacttggagcatttggctatgatggagaaggtcttagggcctctcccaaagcatatgattgtcagagctgatcggcgtgctgaaaagtacttcaagcgcggagtaaggttggactggccagagggagcggcctcacgagagagcatgaaggcagtctggaaattgcctcgtctgcagaaccttgtgatgcaacatgttgatcattctgctggagatctaattgatcttcttcaaggacttcttcggtatgatcctaatgagcgcctgaaagcacatgaagctctacaacaccctttctttaccagatgcatcagaagatgtggtttctgaggctacactgagattgaaaatgtcaatgctgtatttcttcattttgatgtgtaagaactacaaaaaagtggagatgttctacgaaaaatgaaatatgctaacttgcattctgttcaatgatttgaaaggtaattggtgtatataagcagagttctctgacactcgatccattttaactggatgtcattttccaattgatacaaattcctgtcttccccattcgtatactaattttgccagactcttcagtactagcaggtagcatgcagaaatccctaaccaggtggtgtcaattgaggataaatgggattaagtggtttcatggaagattggaacactatttaatggtggcatacagtgatctcgggtcaacagcaaaagtgcacgacacaagcacggcacacgtatcttgca

SEQ ID NO: 9023 - DNA, 3639 bp, Zea Mays
tcgattgtttttgtggctgccagaacaaaaataaaaatcaagggttttagaagggtttggtattccttcgtttcctccctttcttcctctgcaagcaaaaacaccgcagggaaaaaaaggcccaaaacaatctgcgacttcgagaaccctagtatcaagcgcagaactccgtcatgctgcgtgcggcggcggctgccgccgccatattcccggcgcgggtcgccgctgcgccggctgctgcggcggcggaggaacttaggtatccgctgctcagggttattgggacgctgaggggcagccgcggctcggtgctgctggggaggagggtgcgtttctgctccaactcctccgcgagcgactccgaagtggcggcggcagatgcggaggcgaatgccgaggatgcgaccgttgcggaggaggaggcgggcagcaaggcgtcttccgccatcgtgccgaccagcaccaatatcgacgactgcctctctgttatagcgttacctcttccacatcggccactctttcctggattttacatgccgatctatgtaaaggaccaaaagctgttgcaagccctaatagaaaatcgcaaaagatcagctccgtatgctggtgcctttctcgtgaaagatgaagaaggtactgaccctaacattgtgactggttcagattcagagaaaagcattggtgatctcaaagggaaagacttgctgaagcgtcttcatgaagttgggacgcttgctcagattacaagcattcaaggggatcaggtagttctacttggtcacagacgtttacagataactgagatggtcgaagaggatccactcacagttaaagttgatcatctaaaggaaaagccctacaacaaggatgatgatgttataaaagctacctcattcgaagttatatcaactttaagggaagttctaaggacaagttccctttggaaggatcatgtgcaaacctacacacagcacattggtgacttcaactaccaacggctagcagattttggtgctgctatctctggtgccaacaagttgctttgccaggaggtgcttgaggaattagatgtatacaagcgtctgaagttcactcttgagttagtaaaaaaggagatggagattagtaagctacagcaatccatagcaaaagcaattgaagaaaagattagtggagatcagcgacgttatttgttgaatgaacaacttaaggcaatcaagaaggagctcggtttggagactgatgataaaacagcattatctgcaaaatttagggaacgtatagaatcaaagaaggacagatgtccttctcatgttttacaagtcattgaagaagagcttaccaagcttcagcttttagaagccagctctagtgagttcagtgtaactcgtaattatttggactggctgacagtattgccatggggaaattatagtgatgaaaactttgatgtccaccgtgctcagaaaattctcgatgaagaccattatggtttgagtgacgtgaaagagaggatactggaattcatagcagttgggaagttaagagggacttcacaagcctgactaggacgatggtaccccctggccagatgggctattggctgctctaggatggcccatggccatgtggcaagatcatatgtctttctgggccaccaggagttgggaaaactagtattggtcgttcaattgcacgtgcactgaaccgccagttctacaggttttctgttggaggtttggctgatgtggctgaaatcaagggccatcggcgcacgtatgttggtgcgatgccagggaagatggtgcagtgtcttaaatcagttggaacagcaaatcctctagtattgatagatgagattgacaagcttgggaagggtcattctggggatccagctagtgcattgttggaactccttgatcctgagcagaatgttaatttcttagatcactaccttgatgttcctattgacctatccaaggttctattcgtttgcacagcaaatgtaatagagacgataccaaatccgttattggataggatggagatcattgctatagctgggtatataactgatgagaagatgcatattgctcgggactatttagagaagaatacaagacaagcctgtggcattaagcctgaacaggttgaagttacagatgctgcccttcttgctcttattgaaaattattgtcgagaagctggagtgaggaaccttcaaaagcatattgagaaaatttaccgtaagattgctctccagcttgttcgccaaggagtatcgaatgagccagaccaggagtctctcggtgtcactgtaaatgaggaatctaatagtggtgatagcatcacagcaaaagatgagattgtgaaggatcctgctgtagaagatgcttcagtcgccaacaatgttacaaatcctgcctctgaggaagctaatgaagtaaatttgacaactgaagcaccaaaagaagacagcacatctaagggcaacaagaaaacagatggagtagcagaagatgcagcagacaaggcaactgagaaggttgtggtagattcatcaaaccttggtgattttgttgggaaacctgtgttccaggctgagcgtatatatgagcagactcctgttggagtggtcatgggtttagcttggactgctatgggtggttctactttgtacatcgaaacaacaaaagtggaggaaagggaagggaaaggtgaccttgtgctgacaggacagcttggagatgtaatgaaagagagtgctcagattgcgcacacagttggcagaactgtattactggagaaagagccagataatcatttttttgcaaactcgaaggtgcacttgcatgttccagcagggtccaccccaaaggatggccctagtgctggatgcaccatgataacgtctatgctgtcgttagctatgggaaagcctgtcaagaaggacctcgcaatgacgggtgaagtaacattaactggaagaatcctcccaattggcggggtgaaagagaagacgattgcggcaaggagaagtgcgataaagacgctcatatttccggcagcgaataaaagggactttgacgagcttgcttctaatgtgaaggaaggactggaagttcattttgttgacacatacagtgaaatatatgatttggctttccagagtgacgccgggactgagatgatttagctttacattacaggattgagattttttccccttctctagatctggttacaggctaaataccaaagaagtttgtcagcagaggcagaccattgtaaccaagatgagtggagttaattgatatttacgagaaagaaaaataatatttctttttttggccccaatataacatcattgaatctaagagatttatttggctaggctgtacgtaactagtgtgctaggtggtggtattggccttttatattgttgggacttgggagtgtgggaaaaacagtactggtgcaccatctgttatttattttaagtgttttccaaaggcagcaaggtcatatacctcatatcataatttagccacaaatggcctgaatattttgtattttggtcatttttttttcgaaaaaatcacatttagacccctaaaccacttaattctgtttttg

SEQ ID NO: 9024 - DNA, 1016 bp, Zea Mays
cagctatccgtcccatcctgctgcaccttttgttttgctgggcaatttcttcagtacctcttgtctatctattaagcacccttgctcttcaaggaactttggctgcaaaacctaaccacttgtgcattctctcaagacccccctggaagggaaggaaacatgcaatcgcagaggaagatggtggtgtcgaagaagaagctgatcaaggtcggcccatggggcggcgccgggggacacccgtgggacgacggcggctactccgggatccgcagcatcaccatgtcctacgaccggttcatggagtccatcagcgtggagtacgacagggacggcatgcccgtcactggggagcggcacggaggagccgccgccagccacacgacccagatcaagctgggctacccggacgagtacctgacaacggtgagcgggcactacgcgccgatcgcgcccggcggctcgccggtcatccgctcgctggcgttccggaccaaccagggggcgtacgggccgttcggcgtggcggagggcacgcccttcgagttcccggtggacggcggcgtcatcgtcggcttctgcgggaggagcgggtggcagctcgacgccgtcggcctctacgtcgcgccgctgcgcccggagaccgtgtacgacagggtgcacaagcttggcctcacggcttaccgcgcagtttggcagcggatcgggtcccagcagcagcagcaagaaccggtgaaactgctgaacggcaacgcgcagattactcacaagatgtaaccaactgccaggatgccaaccatgactatctatattctgcagtccgaatgtatccagctagcgtatggatctaatgtacctgtacctcatcctgatttgaacacttcagcgtatgaatctaaacatgcagcaaacagtcctgcgacgggacttggctgctggccacgtctaacagcaatagttggtattttcattcctaagccacaatgggcctgtcggttgtctccatttttaaataaatt

SEQ ID NO: 9025 - DNA, 2352 bp, Zea Mays
cgggtcacgtgagtgacgtggcacgcaagcagttcagctttcggttctcctgccggcggcgccgcgtcttttcccgcaccttcgcatcgtatgccacttcagacgccatggccgtggctccgcctctctcaacccacgtctcccgaactctaacctcaaacctgcacctctggccgcggacccacggtggcgtggctcatgcgcggacgcgggctctgatcccgacaccggctgcggcgtgcgccttccgtttcagtttccgtgttcgcgccaccgccagtggctcgaagctgccgccttatcctctacccgatgtcttcccctacattaccgccgagtgggaggccgtcgcgaagggttgggcgtgcgccgccgtcgccgtatactgcctctcccgcgcagtgcccgccgcggggcgcctgccgcgcgcgctcgccggcggcggcgggggagggggcgcggctgttgtggtggcagccaggggcggggtcgccctcgctgcgtttgcatcggcgcgtgccgccgctacatacgcgcagcaggcgtttctctgggaggcggcgctgcaggcggcggggcggctgcgggagcgcgccttcgagcgcctcctagagcgcgatctcgagttcttcgagggtaggggaggggtggctgcgggcgacatcgcgcacaggatcaccgacgaggcggacgatgtcgcggatgccttgttctccgtgctcaacgtcattccatgcatgtgcttcgccatagtcaatcttggtaaaaggcttcgtcaaatatccaaggaggcacatcttagcctcgccatgctcgcatcatatctcaacgatgtacttccatctatgctgactgtgaaggcaaacaatggggaacttaaggagatcatgagattccaaaagttagctcgtgctgatctaaagaataatttgagtaagaagaaaatgaaggctctcatacctcaagcggttcgagcaacatacattgggggcctgcttgtgctctgtgctgggtcgatagttgtttcaggctcatcctttgatgctgaagagtttctgtctttcctaacagcacttgctcttgttgtggagcctattcaggatgcagggaaggcatacaatgaatataagcaaggacagccagcattagaacgcatatttgatcttatgaggttcaaccctaaggtgactgataagccaagggcaattcatttacaaagtattaatggggacattaagttccatgatgttacatttagatatgttgatgacatgcctccagtagcagatgggtatatacttctggacaaccatgatattcaggacattcaatcgcaatgcctgagaacacatatcgcttttgtttcacaggacactatgctattttctgggacaattgctgaaaacattgcttatagagaccctgtgggagatattgacatgaatagggttgagtacgctgctaagattgccaatgctgaggagttcattaagatgttgccagaagggtacaattcaaatgtgggacagagaggttctagtttgagcggtggacagaagcaaaggtaaaatgctcactttccagtttccagactaccttgtatcacaaggttatctattgccagggcaatctatcaaaattcctccatattgataatggatgaagcaacttctgctttggatatcagatctgagctgctactgaaagaagcgcttagtaatctaattgcaaaacactcagtaactgttatcatcattgctcatcgacaggaaatggtcctaatggctgacaggattatttcactagagcgcggtgaattgcgagagatgtcgaaacaggcatttttgtctcaagatggtcacttcagcttaccaaggatcaggagtccaaattagggtgtccaaactagggtgagacttggcatgggtaatggtagtttctctcgtgaagatttgttcatatatttggccatggaagaaaacgattgatagaatcacatttcttgcctgagccctgctcagaactttggcttcttggaaccttgtttcatcccaacagcaacaaatctgtcaacattatcgaaggtcgtctgccggagagaatagcaggctcctcagcggcattggctcctacctgctgcaagattctcctcaagacctcaacaggaaggtcaaagcaaggtatagggttttaccaatttttgtacacatgaaaaagcacaggttccttacatcccccgcccccgcccctgcatacatgcaggatgcagtagttgagctgtatatatgccaaaataaagttattcgttttagatttttttattgccaaactccagattggtgcgtttcagaa

SEQ ID NO: 9026 - DNA, 3400 bp, Zea Mays
atggcgttttggaggccgaaaattcgatcttggcgctggtctcagtgtttcgaggcctcgaggggttgctgtgaagaaccagaggaagataaaaaggtggttttctcgccggttttccttggttttggggtactgaattctgagattgttctgaggcaggggtctgtcttgctggagaatgaagatgtggagagtttcatttgtttccgactcggcatcggcatctcgtataaaccgaggagacacggcaatttcaagggccttcgtttgggaccaacagaataacctgttcctgcctgcaattttttggttctgaagactcaaagattggattgagtgatctttgaaaccaaatcttccttcggtgttttttggcattttgggcactatctgtgaagtgtagcaggaccgcctctgcttttatgctcggtagacttctgtgatcaagtattcaagtactggtaaaagattataagcttgtctaaagcaagcccttagaaggaaagttatctgaccatgttctcagctatcatggcaaagaagaattacaaacagcattccaaatctgagaaaattcaggggggttgtatgtctgggctgattcgcatgcttgatttccgtcgcagtccaaaacttctttcagacgggagagtcaaaagagataaaaaaggtcttgacgatatccatggaaacatatctgctaataatggaaaggaccacagggttgaattgatttatgttggtaggtcaagtattagaactttgatggaagaagagatggccagcagcacacagcccttgaagcaagcacaaagcaatgtcgctgggatatgctctgaagatattgatctaaacttggctggaagtctcatggaaatctacagatctcatactgaaggccaagaaaccaggaggtcgattgagtcaggtcgcagttccatttcgactgacgaagagaagaatactgaccctcctgctcatcactatcagatcccatctagtatccagagagctctagaagatgttgctgaagcagttataagacatcaatctgcaaacaaaaaatacataaacagcggtgatgaaactaggtccagagaattcgttgatgccctacagctactgagctcaaacaaggaattgtttgtgatgcttatgcaagatccaagctctaggttgttagaatgtctccaaaacctttacatgtcactaggaagtaccaggttagactctgaagaatatgacgaaggaactgagttgcaaggtacgacagatagtctagagcagtcagcgacttctccaagtaaggtgaaaagaaggcataattctttcttgaaggaggatgggttggtcacgaggaagccaccaaagttaaatgatggttctcgtggccttagcagaatagtaatcttgaagcccagtcctgcaagaggtcatagcagtcttatctcaggtagcgcaacttcatcaccactatcaaatcatattgattggcaagttcaggaaggcagtgataaacatgattgccatttctcgcttagagagcttaaaaggaggctaagaattgccattagcaataatcagaaggatcaccagttaaactccacgagtagtgatattcatgaagctgaggctgattctggcaaactgcttccagtcacaagtatgtcggagacggagagtctggcaagtacagattcttctgacagggctaaggaaccatctattgttgacgagaaaatagtcccggaagatagtgaaagtgggatgagaaatgatgttgctcatggtgtcggagtcagctctttctcatatgaaaaagctaagatgtatataattgagagactaaatgatcaaggcgaagaaagttgtcaaattgtacagaaatctgaatcttttgagagattgatttcactgcccgagaatggtacattttctccaattgatttccctcaagaggagaaaattagcatagcgcatgaagctacaaaaccattgaacttgcatactgttgagcaagaggatggttcagcaagcccttactcaacaatgcagtacgaggagacagaatcagccgacactagcaacttaggtacagaaacgttgattgagcccacgatagatcatggtagttattcacaaaatgagggcgctatctcacaggagttggtccgtgaaggggttaagatcatgctagatataatggagaactcatcgctctgtgctgagactggaacttcgcaggaaggagtgggagtgaaaaatccagatgaatgttcattggaggaaccacaatccatgaatttgttgccagaaccggcactgtattctccagatgacttcgttaatgaacaagagaaccatagtccgtcagaaattgttgaattagtcaaaccatctgtattgacatttccttactcgccggaaaatactaatgacaaagaggagaaattgagtccacaatccgttcttgatcccattgcagaagttaccagtcctagacacaaaactccaaagcaagatgaattctccatgcctacttccagagtgctattcaaagaggttgacgccccttcagcatccccaactttgtggaatgggccacaggtagccattttggatgacagagccacaagggtgtccttcatcaaggccgtgctagaagcttcaggattgctgtctgaggaaaattcgcaaatttggtacacagaagagccactgcttgatgtatctgtattggctgaagtaggaaactcgtactgcctgacagacgatgcagtgctcttgtttgactacgtggaagaggttcttctcgagataagggacaagttctttggtagcgacccttgggttaattctctgaaacacaatgtacggccagctccagtaggaagacggctggttcgagaggtggctaagggaatcgattctcttgtaggtaaagaatttccacacactttagaacaggtaatgatgaaagacttggacagtgggtcgtggctggatcttggaggcgatactggaagtgttgtagttgagttgtgggatggtttacttgatgacttgctggaggaactggtttttgatttgtggctttgatactgtagtgctttgtagtaatacatgcagaggcatattcgactagtactgacatggggttaatagatacagaaaccttttgcgaaaggatagggaaaagtgagttcggcagactgccagatgttgtagagctaggcatttcatcaatatagttgatttccattttcttttgaatttgatttctttaagctccctttgttctctgtagaggcatggaaacataaaaaataagtgctcctgtatataaagtaccccagtatttatggtaaattttcattgtgaacataatattgtttccgtt

SEQ ID NO: 9027 - DNA, 1250 bp, Zea Mays
atctgttccgttgcgtgctcctctctcactccacggtccacgactgccaccagcgcttcccgctttcccagccacccgtcgcctccgcgtgtcgccccatccagccatcagttccaccccagctgcgaatccggcgcgctactaaccgccgggggaccgaaatttccccagccgcaagtttcgggaccggaacaacaatggcagcagcagccgtcgcctccagttccaccccgcggccgctccggttggcgcagcgcggggcggtctctgcgcacgcgtcccaccacgtcagcgccccgccccaccgctcccgcaggccgcggctctccgtctcggcctcagccggggtggaggggaccagcgggtcggagcggttctacttcaacttcaccgggttccccttcccgctcggcccgttcctcaaccgccgcaccatccgcaccgaggcggtgaagggcagcatatggctgttcgagcaggagcaggcgctgggcttcagcagcgtctccaccaacatccgcatgacggtcatcaagctcaagtccggtgggctctgggtgcacgcgcccatcgcgcccacgaaggagtgcatccagatgctcaaggagctggacgcgccggtggagcacatcgtgctgccgaccttcgcatacgagcacaaaatcttcgtcgggcccttctccaggaagttccccaaggctcagatatgggtggcgcccaggcagtggagctggccaatcaacctgccgctcgagttcttcgggatcttccgggccaagccgctcaaagatgaggatgacgccacgccctgggtcgccgaaatcgagcagaaggtgctcagctctccggaagttgggattgggccatatgtggaggtggcgttctaccataagccttcacggacactactggtgaccgatgctgtcatatttgttcctcaacagccaccggagtgtatcagcaaagaatctctgttggcatctgcgaagaatggactggcagtgaagctattgagcaaagggaaggaggttcccgatgaaccagttgttgacaataagctaaaccgtcagaaagggtgggagagaatggtacttcaaatactatttcttggtccgtcaaatctacttgagccaaatgcaagttttgctcaaatgtcgcaaaaattgatcgtctcacctattgtcaagacgctcgttttcagcaaagttccagagaaggtacaatgtgtttggttaacagggagcctgagc

SEQ ID NO: 9028 - DNA, 1914 bp, Zea Mays
atctgttccgttgcgtgctcctctctcactccacggtccacgactgccaccagcgcttcccgctttcccagccacccgtcgcctccgcgtgtcgccccatccagccatcagttccaccccagctgcgaatccggcgcgctactaaccgccgggggaccgaaatttccccagccgcaagtttcgggaccggaacaacaatggcagcagcagccgtcgcctccagttccaccccgcggccgctccggttggcgcagcgcggggcggtctctgcgcacgcgtcccaccacgtcagcgccccgccccaccgctcccgcaggccgcggctctccgtctcggcctcagccggggtggaggggaccagcgggtcggagcggttctacttcaacttcaccgggttccccttcccgctcggcccgttcctcaaccgccgcaccatccgcaccgaggagcaggcgctgggcttcagcagcgtctccaccaacatccgcatgacggtcatcaagctcaagtccggtgggctctgggtgcacgcgcccatcgcgcccacgaaggagtgcatccagatgctcaaggagctggacgcgccggtggagcacatcgtgctgccgaccttcgcatacgagcacaaaatcttcgtcgggcccttctccaggaagttccccaaggctcagatatgggtggcgcccaggcagtggagctggccaatcaacctgccgctcgagttcttcgggatcttccgggccaagccgctcaaagatgaggatgacgccacgccctgggtcgccgaaatcgagcagaaggtgctcagctctccggaagttgggattgggccatatgtggaggtggcgttctaccataagccttcacggacactactggtgaccgatgctgtcatatttgttcctcaacagccaccggagtgtatcagcaaagaatctctgttggcatctgcgaagaatggactggcagtgaagctattgagcaaagggaaggaggttcccgatgaaccagttgttgacaataagctaaaccgtcagaaagggtgggagagaatggtacttcaaatactatttcttggtccgtcaaatctacttgagccaaatgcaagttttgctcaaatgtcgcaaaaattgatcgtctcacctattgtcaagacgctcgttttcagcaaagttccagagaaggtgagggactgggttgacaggatcgctgccgactggcgattccgacggataatcccttgccacttcgcagccccaataaacgcgagccggtcagactttctggctgcctttgccttcctcgacgagttcctccccgaacgcgccgccgcggctcccggcctctcgctgctcctcgcctccttcatggggaaggcggccagctacttccctccggatgacatgaagacgctctcgtctctggacgagttcctggtctccgttggcgctgtcaagaaaaccgtctctgggaggaagaggtgacgccggtggattggatgtgcatgggtttttatatgaagggacagttgctgcagtgcgtgcttgaagcgtgggtacactgtcaaattttaatgtggttattagtggaggaaattactgtaggccctccctacagtacattcacttcaaaaaaaaaatagtgggggaaatggtacattaggctaaaatctaggagagcccatatgtcttgctgccttcaatagaaagccagatttttacagcatatggaatttaccagcttggagcataccggagtaggtatattctgtcgtgtttgaggctagtctggaagccacaaaactggagatgattgatgattgtaggggctaaaatctctgtcttattaaaaaattggataagaaagagattttagcacctccagtcccctccggttttgtggctatcaaactag

SEQ ID NO: 9029 - DNA, 2151 bp, Zea Mays
atctgttccgttgcgtgctcctctctcactccacggtccacgactgccaccagcgcttcccgctttcccagccacccgtcgcctccgcgtgtcgccccatccagccatcagttccaccccagctgcgaatccggcgcgctactaaccgccgggggaccgaaatttccccagccgcaagtttcgggaccggaacaacaatggcagcagcagccgtcgcctccagttccaccccgcggccgctccggttggcgcagcgcggggcggtctctgcgcacgcgtcccaccacgtcagcgccccgccccaccgctcccgcaggccgcggctctccgtctcggcctcagccggggtggaggggaccagcgggtcggagcggttctacttcaacttcaccgggttccccttcccgctcggcccgttcctcaaccgccgcaccatccgcaccgaggcggtgaagggcagcatatggctgttcgagcaggagcaggcgctgggcttcagcagcgtctccaccaacatccgcatgacggtcatcaagctcaagtccggtgggctctgggtgcacgcgcccatcgcgcccacgaaggagtgcatccagatgctcaaggagctggacgcgccggtggagcacatcgtgctgccgaccttcgcatacgagcacaaaatcttcgtcgggcccttctccaggaagttccccaaggctcagatatgggtggcgcccaggcagtggagctggccaatcaacctgccgctcgagttcttcgggatcttccgggccaagccgctcaaagatgaggatgacgccacgccctgggtcgccgaaatcgagcagaaggtgctcagctctccggaagttgggattgggccatatgtggaggtggcgttctaccataagccttcacggacactactggtgaccgatgctgtcatatttgttcctcaacagccaccggagtgtatcagcaaagaatctctgttggcatctgcgaagaatggactggcagtgaagctattgagcaaagggaaggaggttcccgatgaaccagttgttgacaataagctaaaccgtcagaaagggtgggagagaatggtacttcaaatactatttcttggtccgtcaaatctacttgagccaaatgcaagttttgctcaaatgtcgcaaaaattgatcgtctcacctattgtcaagacgctcgttttcagcaaagttccagagaaggttggttggatactgcagtaacttcagcagcaaattcacctcctgataacagaacgttggagctagagcatgtgaaccatgctaacagcgttttatatactaattacagtcaaaacacatgattctctagtacatgtgttttaagacattggccactgatgtataaaaaaattatattggctcctccctttcttgtcaattaaggtgagggactgggttgacaggatcgctgccgactggcgattccgacggataatcccttgccacttcgcagccccaataaacgcgagccggtcagactttctggctgcctttgccttcctcgacgagttcctccccgaacgcgccgccgcggctcccggcctctcgctgctcctcgcctccttcatggggaaggcggccagctacttccctccggatgacatgaagacgctctcgtctctggacgagttcctggtctccgttggcgctgtcaagaaaaccgtctctgggaggaagaggtgacgccggtggattggatgtgcatgggtttttatatgaagggacagttgctgcagtgcgtgcttgaagcgtgggtacactgtcaaattttaatgtggttattagtggaggaaattactgtaggccctccctacagtacattcacttcaaaaaaaaaatagtgggggaaatggtacattaggctaaaatctaggagagcccatatgtcttgctgccttcaatagaaagccagatttttacagcatatggaatttaccagcttggagcataccggagtaggtatattctgtcgtgtttgaggctagtctggaagccacaaaactggagatgattgatgattgtaggggctaaaatctctgtcttattaaaaaattggataagaaagagattttagcacctccagtcccctccggttttgtggctatcaaactag

SEQ ID NO: 9030 - DNA, 3621 bp, Zea Mays
gtgatcagggaccccaactccagcaacacactaaaaataatcctggaaaagggtcatgtgctctcgccgatgaggggtgcccggccaggtgtactacccatctacccccaggagcagtgcagacaagcaagaatttcatatcacggggaattcaaagttgaggtctgcttccagtataatgaaggggcacaaatcaggcataccttcaattttggccatttgcctattatgttgatgtcaaaactgtgtcatctgaggggtgctgatccccataaattagttttccatggtgaagaggcaactgagatgggggggtacttcatatgtggtgggatggagagacttgtgcgtattcttgttttacaaaagcgtaactatcccatgggattggtacgcaattcttttcttaaacgtggtgctggatacactgacaaagcagtggtcataagatgtgtccaacgtgaccagtccagtgtgacaataaagttgtattacatcctaaatggaagtgcaaggcttggattttggttgggtggcagagagtttctgcttcctgttgggattgttctcaaggcccttattgatgcaagtgaccgggaaatctttacaagcttgacttgctgctacagtgataaacatggaagaggaaagggagttgtcagtactcaactaattggtgaaagggcacaaatagttcttgacgaagttgctgaagcggttctaaaggactatatttttgtgcacttggaaaataaccatgataaatttaatctattgatatttatgctgcagaaactttatgctctggtagatcaaactgcttcacctgacaatcccgacgcgctacaataccaggaggctctattgcctgggcacttattcacagtttttctgaaggataggcttcaggagtggctaagaaagtctaagcgtttaatccttgaagaggctgcaaagaacaaaggttttgaccttggtaatgcgctggagataaggaaatttcttactaaatatacaacatctgtcggaagagctgttgagagtatgataaaggttgggaacgtgaattcacgatcaggattggatcttccacagagagaagggatgaccattcatgctgaacggctcaactttcatcgttatatctcacacttccgttctgttcataggggctctgcttttgctaaaatgcgtacaacatctgttagaaagttactcccggaatcatggggtttcctgtgtccagttcatacacctgacggagagccttgtggtttactgaatcacatgacttctacatgccgtgtttcatcattctacaactcagaaggggtgataaaaaattttggggaaatgaagaagttgctttctgctgagttggttcgtgttggaatgaacccagtgttaccgaagattgagcaaaccggtcccccagaagtactccatgtccatttggatgggtgcattcttggtactattgcttctgctatgattgagaaagcagttaattatcttcgtacattgaaacttctggcacactcagggattcctgaagatctggaagttggttatgtcccacctagttttaatggagcttttcctggcctgtacctttttaccaatccggctagatttgtccgacctgtcagaaatctttttattctatctgatggaaagcaaagtattgagctcattgggccattcgaacaggcatttatggagatacggtgtcctgatggtggggatggtgggagacaagaaccatttcctgcaactcatgaagagatccaccctacagctattctcagtgtagttgccaatctgacaccttggtctgatcacaaccaaagtcctaggaacatgtaccaatgccagatggcaaagcagaccatgggtttttgcggacaggccctaaaattccgtactgatgtaaaagcattccatctacagacccctcagacaccaattgttcggacaggtacatataccaaatattgtatggatgaatttccatctggaacgaatgctattgttgcagtgctatcatacacaggttatgacatggaggatgccatgattttgaacaaatcagctgttgagcgtggtatgttccgtggacatatttaccagactgaatgcattgacttatcaacaaaaagcagagataatgttccagaaacttttgcaaagagtatattaacaagggatacaagtaatgtgattgattcagatggccttcctcggcttggacaggctgtacatccaaacgagcaatactatagcgtccataatagccttacaaatgtgataaggcctgtcaaactaaaaggcacagagccagcatttattgactatgttgctgtcaacgggacaggttcaaaatgtggcctgcagaaggcgaacattcgtctgcgtcgtgtaagaaaccctataatcggtgacaagttcagcagtcgacatgggcagaagggtgtttgctctcagttgtggcctgacattgacatgccattctctgcaaatactggcatgagaccagatctgatcattaatcctcatgcatttccttcaagaatgacaatagcaatgcttttagagtctatggcagctaaggctggaagtctacatggaaagttcattgatgcaacaccttttgcaaactcactcaaaaaggacaaggactccgacaagcctaattcgattgtggacgaattgggtcccatgcttgcatcttatgggtttaattatcatggaaacgaagtcctttatagtggagtttttggcactgagatggactgtgagattttcatcggacctgtttattaccaacgtcttcgtcatatggtctcagacaaattccaggtccgcactaccggtcgtatagaccagataacaagacaacccataggaggaaggaagcatggtggagggatccgatttggtgagatggagcgtgatgccctcctcgcccatggttcgtcctacctcttgcatgacaggctccactcctgctcggattaccacatcgcagatgtgtgctccttctgtgggagcctgctgactgcgacaatgatcaaatccgatacccagaagaaagtcaagcacgagatgcttgggctccccactgtgagaccagcgaagaactttgcatgccaggcctgcaaaacaagcaaggggatggagaccgtggcaatgccgtatgtgttcaggtacctggctgctgagttggctgccatgaacataaagctggagctccggttgagcaacaaatcaggattgcctctcagctaagaatcataacaccagaattagcgcttgttcatcgcgggggctgcttcgcaggagaagcttaaatgtaaccattggtccggcgtgtagttgtttcatatgtcggtgtgatgtaccaatgtaacttgtaagaaaaacataaatgacaacacgagttattatagtttgaatggcggttctttttcattgtcatgtcttaactagtgtttgaatataccagaactgagcttagttagctgttaaaattagggagtgtttggtttttagagactattttttagttcctccattttattctattttagttattaaattgtcaaatatagtaactaaata

SEQ ID NO: 9031 - DNA, 3857 bp, Zea Mays
cctaaacccctccgccgcctcctcccctctctagggttttacccttcccgcccgaaacaagggccgccgctgccgcacaggaacccgttctgggatctcagccatctctccggccatgggcaaggctaataagtctccgtcgccggcggtggccaaggaaggcgactactcggcgttgcgggagctgttccggccgcacgtggaatcctttgattacttcctcgataaggggctcgacgagatgattgaatccatccgccccatgggtcatgtgctctcgccgatgaggggtgcccggccaggtgtactacccatctacccccaggagcagtgcagacaagcaagaatttcatatcacggggaattcaaagttgaggtctgcttccagtataatgaaggggcacaaatcaggcataccttcaattttggccatttgcctattatgttgatgtcaaaactgtgtcatctgaggggtgctgatccccataaattagttttccatggtgaagaggcaactgagatgggggggtacttcatatgtggtgggatggagagacttgtgcgtattcttgttttacaaaagcgtaactatcccatgggattggtacgcaattcttttcttaaacgtggtgctggatacactgacaaagcagtggtcataagatgtgtccaacgtgaccagtccagtgtgacaataaagttgtattacatcctaaatggaagtgcaaggcttggattttggttgggtggcagagagtttctgcttcctgttgggattgttctcaaggcccttattgatgcaagtgaccgggaaatctttacaagcttgacttgctgctacagtgataaacatggaagaggaaagggagttgtcagtactcaactaattggtgaaagggcacaaatagttcttgacgaagtcagaaatctgtccattctgactcgcacacagtgtttggtgcatattgggcaatacttccgatctgtgatggaaggatttgaaaatgatgactatataactgttgctgaagcggttctaaaggactatatttttgtgcacttggaaaataaccatgataaatttaatctattgatatttatgctgcagaaactttatgctctggtagatcaaactgcttcacctgacaatcccgacgcgctacaataccaggaggctctattgcctgggcacttattcacagtttttctgaaggataggcttcaggagtggctaagaaagtctaagcgtttaatccttgaagaggctgcaaagaacaaaggttttgaccttgcgctggagataaggaaatttcttactaaatatacaacatctgtcggaagagctgttgagagtatgataaaggttgggaacgtgaattcacgatcaggattggatcttccacagagagaagggatgaccattcatgctgaacggctcaactttcatcgttatatctcacacttccgttctgttcataggggctctgcttttgctaaaatgcgtacaacatctgttagaaagttactcccggaatcatggggtttcctgtgtccagttcatacacctgacggagagccttgtggtttactgaatcacatgacttctacatgccgtgtttcatcattctacaactcagaaggggtgataaaaaattttggggaaatgaagaagttgctttctgctgagttggttcgtgttggaatgaacccagtgttaccgaagattgagcaaaccggtcccccagaagtactccatgtccatttggatgggtgcattcttgattcctgaagatctggaagttggttatgtcccacctagttttaatggagcttttcctggcctgtacctttttaccaatccggctagatttgtccgacctgtcagaaatctttttattctatctgatggaaagcaaagtattgagctcattgggccattcgaacaggcatttatggagatacggtgtcctgatggtggggatggtgggagacaagaaccatttcctgcaactcatgaagagatccaccctacagctattctcagtgtagttgccaatctgacaccttggtctgatcacaaccaaagtcctaggaacatgtaccaatgccagatggcaaagcagaccatgggtttttgcggacaggccctaaaattccgtactgatgtaaaagcattccatctacagacccctcagacaccaattgttcggacaggtacatataccaaatattgtatggatgaatttccatctggaacgaatgctattgttgcagtgctatcatacacaggttatgacatggaggatgccatgattttgaacaaatcagctgttgagcgtggtatgttccgtggacatatttaccagactgaatgcattgacttatcaacaaaaagcagagataatgttccagaaacttttgcaaagagtatattaacaagggatacaagtaatgtgattgattcagatggccttcctcggcttggacaggctgtacatccaaacgagcaatactatagcgtccataatagccttacaaatgtgataaggcctgtcaaactaaaaggcacagagccagcatttattgactatgttgctgtcaacgggacaggttcaaaatgtggcctgcagaaggcgaacattcgtctgcgtcgtgtaagaaaccctataatcggtgacaagttcagcagtcgacatgggcagaagggtgtttgctctcagttgtggcctgacattgacatgccattctctgcaaatactggcatgagaccagatctgatcattaatcctcatgcatttccttcaagaatgacaatagcaatgcttttagagtctatggcagctaaggctggaagtctacatggaaagttcattgatgcaacaccttttgcaaactcactcaaaaaggacaaggactccgacaagcctaattcgattgtggacgaattgggtcccatgcttgcatcttatgggtttaattatcatggaaacgaagtcctttatagtggagtttttggcactgagatggactgtgagattttcatcggacctgtttattaccaacgtcttcgtcatatggtctcagacaaattccaggtccgcactaccggtcgtatagaccagataacaagacaacccataggaggaaggaagcatggtggagggatccgatttggtgagatggagcgtgatgccctcctcgcccatggttcgtcctacctcttgcatgacaggctccactcctgctcggattaccacatcgcagatgtgtgctccttctgtgggagcctgctgactgcgacaatgatcaaatccgatacccagaagaaagtcaagcacgagatgcttgggctccccactgtgagaccagcgaagaactttgcatgccaggcctgcaaaacaagcaaggggatggagaccgtggcaatgccgtatgtgttcaggtacctggctgctgagttggctgccatgaacataaagctggagctccggttgagcaacaaatcaggattgcctctcagctaagaatcataacaccagaattagcgcttgttcatcgcgggggctgcttcgcaggagaagcttaaatgtaaccattggtccggcgtgtagttgtttcatatgtcggtgtgatgtaccaatgtaacttgtaagaaaaacataaatgacaacacgagttattatagtttgaatggcggttctttttcattgtcatgtcttaactagtgtttgaatataccagaactgagcttagttagctgttaaaattagggagtgtttggtttttagagactattttttagttcctccattttattctattttagttattaaattgtcaaatatagtaactaaata

SEQ ID NO: 9032 - DNA, 1629 bp, Zea Mays
gttagggcctgtagatccctcaaatccctaaccgacccgcgaccccgacccgattgccgtacctccttccgtgtggcatataaatccgacgcgccgacgcctcgattcctcgcctccccgagagcccccgtttctgtcacaaatcgccactaaaaccctagccttccgccatggccacctcccctgccgcctcgtcctcctccgctccgaccgcctccgcggtggctgcggctacgatggctgttgaggccaccgacgggccggtgctcagcgtagtatcgaagcgtctccgcgcactgcggaagaagtacaaccgaatcacgcagatggaggagtcgctcgccgccggcaagacgctcaaccgagagcaggaggaggttctccgctccaagcccgtcgtcgccgctctgatcgacgagctcgagcgcctccgccctccgctcgcctccgccctcgcggaggagctctcctcccgccccgcccccgccccctccgccgcttcctcctccgactcagattcgtcagtccaggacttgcttgcgctcgtctacttcggctccctctttgacgtcaagcagcaaagcgacttcgtctctttggtttacacgcgcgaactcgagcggagcagctgcctcacttatgactacgtcggggatgatccggaggacagtctcgcggagaccgatctgaacgcggtttctgcccttgcctccctcgccgcgttgcgccctcctgctgcagccggagtctcgcaccgtgacgcccttcaggcttgtgctcatcacgcccgcctctggctctgccgtgcggatgaacccatccatcctgactccaccatcacatatgctggggtgagggcaaagctggataggatcatggcatcgggctacttcacagcgcagctagaaatgaggacaccattggatctggctgctgcagtggcaagttttggagctggaggtgtgcaggtgcaagagagcatggttgtgtcacctcaggcaccggaagcagtggaggagagccaggctgttgaaggacacaagaatgagaaggaagattctcaggctacagaaatctacaatgatcatcctgttgttgactctgaacatgtggaggatgaagtcctggtgcatccaactgatgaagttcctccagctgagacagagcaggagcaggagacatttgatgctgatgtgaaggatcaggagcaaaaggaccaacaattcatccagcggcggtcttaccagaaccagcgtggtggtggtcgtggtggcagcaggagaggctatcctaatggtcgtggaggacgtggtggccgaggtggcgggtaccagaatggccgtggtggataccagaatggtcgtggcggtgctggcgggtactactacgaatctggatactaccagccgaggaactacaacagaggccggggtggtcgctccggcggtggcaactcttactacaacagccatggtggaggtgcacaggggcatcatcctgggagtgttgagctgggcgcaaacgcctagcttcgctgactgttctgtttgataatgaggagcgacatttggaggtgattgttgacctgttcgttggcctcgaagtgtttttttttgttgcaacgcctac

SEQ ID NO: 9033 - DNA, 4905 bp, Zea Mays
gtcgtggccctagcgacaggcacaacaggcccctccgctcctggcctcctcctcggcgtcgcgtcaacgttgcgcctctccagagtcgccggccgccgagggcactctccacctcttccgtcggcgcccgggagaaggagatgggagttcacggtctgtgggaactactggctccggttgggcgacgcgtctcagtggagacccttgcgggcaagcgggtggcggtggacgcgagcatctggatggtgcagttcatgcgggcgatgcgggacgacagcggcgagatggtccgggacgcgcacctcctagggttcctccgtcgcatctgcaagctcctcttcctccgtgttcgccccgtattcgtcttcgatggcgccacgccggcgctcaagcgccgcaccctcgctgcccgccgcaggcaccgtgacgccgcgcaggccaaggtccgaaagaccgccgagaaactcctgctctcccatctcaaagctagaaagcttgaagaattggcagaacaaatcaggagtgacagagctaagcatgatgccaagggcaagcaagttgagagcagtaatggaggagaaactgagaaaacaagtcaaaaccaaatcggtgataccaacaacagtgagggaaatgttgcatcgatcaatcaggagaaagtggatggaatgctggccgcatcgcttgctgcagaggaagacacagatttcactgacgagggaacacaccatcttacaagtgctccattgccagaaggagatgaaattgatgaggatgaagatgatgatgaagggatgatcttccctatgacaactggtgacattgatcctgcagtattggcttcccttcctccatcgatgcagttagatcttcttgttcagatgagggagagagtgatggctgaaaacaggcagaagtaccagaaaataaaaaaggaacctgcaaagttttcagagcttcaaatacagtcctatctcaaaacagttgctttccgtcgagagatagaccaagttcagaagtcttcgtcagggaagggtagtggaggtgtccagacatcaaaaatagcatcagaagctaatagagagtttattttctcatcatcattcactggtgataaacagatgctggcacaaagaggtgaaaaggagcataatgttgaaaacactagatcaaaaaaggaaattcattcttctgtcttcgcatctaaccccacaagtagtttgggaacaatgaagcctcccaacagcaaaactttgagcgattttgggcctgatgttgagacctatcgtgatgagagaggacggattagagtaagcagggtcagagcaatgggaattcgtatgactcgtgacattcaaaggaatttagattttattaaagagaatgaacaggttaaaagtaagggacagacacagaccaattttcacaatggatcaacaggcaatgaagagcctccagattttccagaacatctttttgaaagtaacaagctccagagttcttgtagtcctgatgtggatctttctgaaactgacagagacaaccatcagacctcgtcacaaataggaacagatatcatttctgagagttcttgttatggaaacaaggaagcaatagagatatctttctcggttgatcaaactgaagtgaaggatggcgatgaagatatatttttgcaattagtgtccgggatggcacccaacaacatattttctggaaataattgtttggttaaaaagatggaagaatctgtagattctgagtgtatttgggaagatggtgttattgaagcaggaacttctcctgtgaaaattgacatgaaggatcataagtcatctctgccagagaattgcagcgatgatgagatggagtgggaggaaggtgatagctttgtacctggagttgcttctagtagtgaacataatccatgtaatgcaccaaagggggatctggaagaagcagctcttgtacaggaagcaataaggaggagtttagaggattttgagaagaaggcatctgagaatgtgagtactggagatatacaagcatctgttgaagatagatctttgcagttctccaacaatgttcctaagatatctgaatctcttggtgaaaatgattcacattctggagtacctgttgttgacgagataaacaatgaaacaagaacagaaatcaattatgataaggatgatatggtacaaggcactggactacttggaactgagagacaagaatctgaatcacaacccccactggtgaataatgattggcatgccgatatgcacagagctcatcctctggggtctgtgcctccatgtactacattcacgagtgatctggctgaaaaaccatctgtcagtgcagaaactaacggtgaagatgtaatgatatttacaacaaaaattcctggaacagctttaggcgattgtgataaaacttccaacctaaacattatgaattctgatcaatcaaaatgcagcaaagatattgcttcaactggagaatccttgtcacaccaaaagaaccttttaattgatgaactactagccgtcactgccgaacaaaaagaaaatgctacccaggtagatttgaagtttgccacatctgaggtagattatacacaaatttgtggcaacgatgacaaccatacaatatcagcgagttatgttgacgcggagctatctcgtcttagacaagaacagatatatcttggacatgaaaggcgaaaacttgaaagtcatgcagagtctgtaagcagtgagatgtttgccgaatgccaggagttgctccaaatgtttgggttgccatatattattgcaccaatggaagctgaagctcaatgtgcatacatggaaataaataacctcgttgatggagttgtcaccgatgattcagacgtatttctgtttggagcaaggaatgtttacaagaacatatttgatgataggaagtatgtagaaacatattttatgaaggacattgagtctgagcttgggttatcacgagaacagttaatccgcatggctctgcttcttggaagtgattacactgaaggtgttagtggtatcggcatcgtgaatgctattgaagttgtacatgcatttcctgaagaagatggactgcagaagtttaaagaatggattgaatcaccagatccatcaatatttggtaaactgcatatggaaataagtggtagatcgaagaaaagaaaactcgatgaaaatgattcagatggaaaggggaaaggcctggaacctgaatgcattcaaggttctgatgataaacaatcttctaatgaggatgaacatgtcaaggaaatatttatgagtaaacataggaatgtgagcaagaactggcatgtccctgcaacttttcctagtgagaaagttgtaaatgcatatatttctccacaagttgacagttcaacggagcctttttcctggggaagaccagatttaggcctactacgtagaatcagaactaaagaaaaaattccctcaggttatgttgggaaaggtttgggtggggcaaagagaaagctgatgaactgctgcttccagttttgagagagtataataaacacgagactcagctgcgcatggaggcattttattcattcaatgagagatttgcaaaaattcgcagcaaaaggattaagaaagccatcaagggcattacaggcaaaagctttcttgacgcagatgaatctgagcaggataatcccagtactagcaagacgatcaagaagaaagaggccagctcctcaagccatgccagaggtagagaaaaaaggaaaaacgattatggagtcatgggaagtcaagaagataatataattgacaataccaacagtttggcagagacagttgagaatactagagaaaataacaatactactaagataaaaagagggagttcctgtggtcgccccaaaggtagaggacgaagcaggacaactgcgggaagtgatgcaacaataaatcaggaggattatgaaatagaatattctacttcagcttcagatgaggattcatgtaaaaggcattccaacagttacggatcggaaggaagggcattgcgaaggtcaagtaggaaacggaaacaggtgacatacatggaagatggtcacgaagcatatggcaatgatgttccaatgcatcaaaacgatgaaaataacccaggccaacctgctgcagccgcagacgtggctggagaagacacaggatttaatatttaccatcaggatacaagtgaactaaacagcagtcagatgcatacaggtgcaggcattaccgaagatatcaatgaagattcccagcgttttgagttacgggaggacaatcaggtggattcaacaccgaaagactatttgttcaatggtggtggtttttgtatggagggcgagggcgatgaacaagaaccagcgtgtgatcaatctggtgcagaagtagaacctggaccaagtggtccatgtggcgccatggatgaagtttcagagagtgcaagcatatcgacggctatggagtgtaccgagaatgcaagaatggaggcacgcggtgcatcttcgtcgcagcaaagacgcaaggcaagccgaggtttgagtgccatgccgacgcttatcaagcgtaggagaaaatcgtgatttatttgcagtttcactgcatgtatagcacgccattacggcctctgtttggttcaagcgcttatgatttcgcatcagtctttggccaccagtgacgagcgctgtttcgcggacgcaaaatgcacgtctgtgctgtgatttagttccgtctttttttctcgtctgattggttgctcatcgtctcatcctgagcgcattgattttatctgagcttctgtttggttaagagcctgctgggttcgccttttacttaacacgcg

SEQ ID NO: 9034 - DNA, 3746 bp, Zea Mays
ctacaaaggcccacggcatcgccaaccagtgaaatcatcctaacatccgtaacgccatcctcgccgccgccgcagcctcctgcgctccgctccactggtggtggtagggagtgcagcggatccatcccgtgtcccgatccgatcccttcgctgctagtttaggattcatccttcgacgtttgggattggttcggttgggatggcgcgtcgcctgattagccccgcagcggcgtgccgaggctgcggtttggttaggaccgggtttctgcccgccatctcctccttccattatcgagccttgccatcgtgctcaccgaagaggacttcatcagtaaagaattgctttagcaacacttacaatataaggaaagagggttcacgttggatacaatccggtcctcccttgttgctaaatagggtaaagtttgttggcaagaggacatcctgttctgttgcaacagagccgccgcctgctgccactgaagaaccaggcatggatgtccccaaggagatattcttgaaagattacaaggcacctgattattattttgacacggtggatttacaatttcaacttggtgaagaaaagaccatagttacatctaaaatagttgtatctcctggagttgaaggcatctcagctccactagttcttcatgggcatgacctcaagctcatatcaatcaaagtcaatggcactgaattaaagggtgaagagtataaagtcaattctcgccatctgatgctttcaacacctcctgctgttgtattcaacttggaaattgtcacagaaatatatccccagctaaacacatcactggaggggctgtacaagtctactggtaacttctgcacccagtgtgaagcagaagggtttcggaagattacctactttcaggaccgcccagatgttatggcaaaatatacttgccgcattgaagctgataaaactttgtatccggttttattgtccaatgggaatcttattgagcagggagaccttgagggtggaaagcattacgcactgtgggaggatcccttcaagaaaccaagctacctgtttgctctagttgctggtcagctgggatgccgggaggattcatttgttacatgctctggccgcaacgtaacactaagaatttggactcctgcccaagatttaccaaaaacagcacatgctatgtattctcttaaagcagcaatgaaatgggatgaggaggtctttggtctggagtatgatcttgatttattcaacattgttgttgttcctgatttcaatatgggagcaatggaaaacaagagcttgaatatatttcaatctagacttgtgttggcatcaccggagactgccactgatggtgattatgctgctattttgggtgttgttggacatgagtatttccacaactggactgggaatagagtaacttgccgtgattggttccagctaaccctgaaagaaggactgaccgttttcagggatcaggagttctcttcagatcttggctgtcgtacggtaaaacgtattgctgatgtctccaaacttagaatctatcaattcccacaggacgccgggcctatggcacatcctatccgtccccattcttatatcaagatggacaacttctatactgatcaggtttacgagaagggtgctgaagttgtcagaatgtacaagaccatgtttggagcatcagggttccgaaagggcatggatctttattttaaaaggcatgatgggcaagctgtcacttgtgaagacttctatgcagccatgtgtgatgcaaataatgcacaactgccaaactttttacaatggtactctcaagcaggtacgcctatagtcaaggtggcatcttcatatgatcctagttctcagacattctctttgaaacttagccaagaagtaccacccactcctggccagccggttaaggagcctatgttcatacctgttgctgttggacttgttgactctactggaaaagatatgcccctcacttccgtttacagtgatggaagtctccaaacagtctctactgatggccagccagtcttcactactgtgcttcagtttaaaaagaaagaagaagagtttatgtttaaaaacattcctgagaggccagttccttctttgttaaggggatatagtgctcctgtccgtctagattctgatctgagtgagggtgacctatttttcttgcttgccagtgactcggatgaatttaacagatgggaagctggccaagttttggcacgtaagttgatgctcagtctcgtagctgatttccagcaacagaaaacactggttctaaatccgaaatttgttgatgggattagatcaattctgcgcaacacaagcttggataaggaattcattgcgaaagcaataactttgcctggtcaaggggagattatggatatgatggaagttgcagatcctgatgcagttcatgctgtccgtaactttattaagaaggagcttgccgtgcaacttaaagatgatcttcttgcggctgtgaaaagcaacaggagttctgaggcttacacatttaaccatgatagtatggctcgccgtgcattaaaaaatacatgccttgcataccttgcgtcattgaatgagccagatttcgttgagcttgcactgcatgagtacaagtctgcgactaacatgacagagcagtttgctgcattagcagcattatcccaaaatccaggccaagttcgtgatgatgccctcttggatttctataacaagtggcagcatgaatacttggttgtaagcaagtggtttgctcttcaagctacttcagagattcctggaaatgttgcaaatgttcagaagctgctgtctcaccctgctttcgacctgaggaatcccaacaaggtgtactcactaatcgggggattctgtggctcacctgtgaacttccacgcgaaagatggttctgggtacaagttcttgggtgagatcgttttgcagcttgacaagataaaccctcaggtggcctcccgcatggtttcagcattttctcggtggaggcggtacgacaagaccagacaagctcttgctaaggcccagctggagatgatcgtgtcggccaatgggctctccgaaaacgtgttcgagattgcttcaaaaagcttggcggattagcttgggcagttccgaggaattgcgagtgggagtgcttaactgaatctctcttttgttggtaaaatgacaagtagagataataaacaggcgggccgaatttgcatgaactgataaaatataagtgtgatgatgcccgctttgtggggggctttggagcatgcatgcgcgctcgtctgttggaatggaactgctgtttttttttttttacgttctccgctcagcggaccgctgtggggcagaaaacatctgaagcacgacggctgctctctgtctctgtttctctctcgaactcgcggtttggttatcagtcggtcctgtggaacccttggcttcgacaaagctggaaaagtttggagctttccagtcatgccaggttcttctagcacactccagcaagtaggagcaagtgttctttttggctggtttgttggcaccgtatttcttttggtttcttaagttttctaacaaaatatttattattggtagattttgttgaactgtagatgcacagagtcaggcatgtgaagtgaattgacagcattggttggggatcggagctacatgccgaaaccgattggacctctggtgg

SEQ ID NO: 9035 - DNA, 974 bp, Zea Mays
cgcgactgctcgtgatcttctgacatcgtcgacccagctgatcctggcgcgcgccaacaatcagtaagtctaatcagtacgcatcatctgatttgacttttatttcagttcttctgatttggtcatgatttacattcggaatttaatttggaatttgtctacttattcaacagaaacaccggcgcaggcgcaggcgcagggcaccactcatgtcgccggcactacgactacgaggacactccgcaacccgctcctcgtcgtcaacttcgtcctcatggtcgtgggctcagcgggcggcccgctgttcctccgcgcctacttcctccacggcggcgcccgcaagtggctctcggccttgctccagaccgccggcttcccgctcctgctcgtgccgctctgcgtctccttctcccggcgccgccgccggcgcgacgacggcgcgccggcgaaggcgccgttcttcctcatgacgccccgcctcctggcggcgtccgcggccatcggcctcatgaccggcctcgacgacctcctctacgcctacggcctggcctacctgccggtgtccacgtcctccatcctcatctccacgcagctggccttcacggccgccttcgcgctgctgctcgtgcggcagcggttcacggccttctcggtgaacgccgtggcgctgctcagcgccggcgccgccatgctcgggatgaacgccggcggggaccgccccgcgggcgtgtcgccggcgcagtacggcgccggcttcgccatgacgctcggcgccgccgcgctctacggcctcctgctccccgccatggagctcagccaggcccaggcgcgcgccggtactgccgcggctgtcacctacacgctcgtcatcgagatgcagctcgtcatcggcctcaccgccaccgtcttcagcgccgtcggcatgctcgccaaccatgatttgcactgatgcccttattgtccctgtattagag

SEQ ID NO: 9036 - DNA, 1509 bp, Zea Mays
cctttgcatgctcctttggttgaagattgctactttgcaaagaaggcatggaatgcacagaaagcaggagcagcagcaatccttgtcgctgatgacaaagatgaacctctaattacaatggacaaccctgaggagagtggcaacacagattatctagagaacatcactattccttcggcattaataaccaagagttttggggacaagctcaagaaagtaattgacaacggtgacatggttagtgtgaatttggattggagagaggccctgccccatcctgatgagcgtgttgagtatgaattttggaccaacagcaacgatgaatgtggcctgaagtgcgatagccagattgattttgtcaagagcttcaaaggagcagcacaagtacttgagaagaagggctatacagagttcactcctcattacattacctggtattgcccagaggccttcattctgagcaagcagtgcaagtctcagtgcatcaatcatgggagatactgtgcacctgacccggaacaggattttagcaaaggatatgatggtaaagatgtggtggtccagaacttgcgccaagtttgtgtctttaaggttgctaaggagcacaagaagccttggttatggtgggactatgttactgattttgcgattcggtgtccaatgaaggaaaagaagtacacaaaggagtgtgctgatggtgttatcaagtctcttggccttgatcataaagcaatagataaatgtattggtgatccagatgctgatgaagaaaaccctgttctgaaagctgaacaggatgcacagattggcaagggctctcgtggtgatgttaccatcttaccaactctggtaattaacaatagacaatacagaggtaagcttgacaaaggagcagttcttaaagcactttgtgctggttttaaggaaactactgagccagccgtttgcttgagtgaagatatacaaacaaatgagtgcctagagaacaatggtggctgttggcaagataaggctgctaacatcactgcatgcaaggatactttccgtggaagagtttgcgagtgtccaattgtgaaaggagtaaaatttgttggtgatggctatagtcattgtgaagcttccggatctgggcgatgtgaaattaacaatggaggatgctggaaagataccaagaatggtcggacatactctgcctgtaatgatgatggctgcaaatgcccagatggattcaagggtgacggtaggcacaaatgtgaaggcaaaagtggagcatcagaagcaggttggggcttcttgtgggtcatcttctttggccttgttgcagcaggagttgcaggatatgctgtgtacaagtacaggatccggaggtacatggactcagagatccgtgccatcatggctcagtacatgcccctggacaaccaaggagacgttcagagccattctcatcacattgagatgtgaggacaggaggatgcagacttgacgaaggggggggggggggggggg

SEQ ID NO: 9037 - DNA, 2266 bp, Zea Mays
cgcttccctcccttgttcgtccatccgtcacaatggtcacacggcggctcccaaaccctaaacagcggtggtgcccctacgcttcagcctcgactcagtattcccccttccccgcttcgacaagtctcgtcccccgcccccttattccattacaagcaactccgccggtgccaccgctgctggtgggacaggccgccgccgccgctgctggtgggacctaccgcctcgcgctccgcatccagcgccgcctcatcccgcccaaccaccccaggatacgggacttcgtctacaggtactgccttcgccgagccccgctgtcgtgcgtccgcgctcaggacgccgtcggtcactgccagccaaacaggatcagcgcgagcagccagtgcaggcacatctcctactcctacgccccgttcccgtcggtcactgccaggaggaagggtgtcttccgcgaggacattgcacagctgatgagtagtggatcaacattattcaaaattttgctcatgacgtctgatatgtggacagttgccattcaagttttactctatcatcaataggtgaagattcctgatccagaatacttgtgtaagattattaacatgttacccaataataatcttacataatttggcccaacccaaagatacgttaatttaaactccctagattattttgtggaatcccaacagagtttattcatttgcttgtactctatgaagtggaagttcttgagatgccaaaaagcagggaagtgcggacataacagtcaagatgagctacttaaaagtgaggataattcaaaggagcgtggtatcccgagaatatgaacactccagagatgcaatatttgagtggtacttccaaacagtggccactaaccatcatggtgaggatgcatcatcagtagcagtcagtatccatcttgcagtttttgactgaaaagaaagatttaacaattacattgatcaggaaccggattctcccattatattctttggatccttgcagcccatatttgatttcaatggctaattgggttattggtcagcttgcgatatgcctaccagaggacatgagttctagtatttatcagtccttaatgaaggcgttgaccatggagtatgtggaggacataacttgttatccggtttgtgcctctgcttctggtgctattgcagaactcatcgagaatagttatgttccacctgactggctcattcttctgcaagtggttctgaaaagaataagtactggagatgaaaatgagtctgctcttctgttcaagcttctgggcacaatagttgagggtggacaggaaaaagttgtttcatattcctgaaattgtatccaacattgcgagtactataatggagctcctgccccctgtcccagatccttggcctcaggttgttgaacagggtttcacagccctcgtagcaatggtgcaagcttgggagagctctgcaccagatgaaaacaagacacctaaaaagaggttctggcagtcaggccagtctgctattgcccaaacaatttcattactgttacaaaaagcttggttgtttcaagctgacaatatggagggctctgcattaccacctctgtcatgcgtaaacgatgcttctgtgttacttgagtttgtcatgagttctgtcacttgcatggaagaaactgaaagtctgaaggtctttgagctggtagctacatgggctaacgctgttgccaactgggactcctgggagatggaggatcagggtgttttcaacacaattaaagaagctgtcaatttccaccagagatttgacctcgacggtctcttcctgaaaacgcactttgtgagatgtcattccactagctaaaagtttgcagaaatggcaccatcaagatcggtctggagaccaacaagatcatggacttcatcaagtttgatgtcggcaacgtggtcatgatgaccggtgggaggaacaccaggcgtgtaggagtgatcaagaacagggagaagcacaagggcaacttcgagaccatccacgtgctgcttagagctttttgctatgtctagttttctcctatttgttgtataggaaaacatagaatggaattcaaatttggtggccgcaaaatatggagacttgaattcatataaagttaggcttaacattagtgcaaacaattgtattttagtttagatttagagtacacttatgtatgtgttgtttgacaatgcttatttatgatatattgaatggtacttatttatattata

SEQ ID NO: 9038 - DNA, 5035 bp, Zea Mays
taaaggttgctgaacaaggtcacaaaggatgggattgagaccactcgaggttccgagctcccgcaatcaccagtgaggactggggattcgctgatcagatgcggtgtgtggggccttgctcagcggcggggctgggaggtccgagcggaatagatgtcgatggcatggcggttgctccgcacaatccatttccggcatctgagcccaggtgtcaggcgagcatccaagattgtagaccaaggctttaccaataatgccccagagctgagtaccaacaaagggagtttgctgaggtgtagcagcatccgcttcggggagaagcggaactcaatttttgcttgcgctccagacaatttggagcagaaatctggacaaacgttcgaagctgatgcccattctgcgctaaaattgtgctctggtatcgggagtgtagttatagccaagtgttctcacatatttgagagaaatggggacacctttgatgggaactgcagtttgcaagatatcctcaagcctggtttatggctctcaccggagaccctccgccggttttggcgtgtctctgagctgaagcctaaggattttcttgacattttgaatggttttggactcagtgccgtaaaagtgagaaatgcaagatttctatggaatttgtacaggtggacatcgcggcagagcaaagagttccaacatctgccaaggtcaaatgagacaatggtatccatacttgcagatgctcatatgctcagtcaagcagaatcactactgctttcattgattgatcatatgactccagctgtttctagtgaactattcagtcagattatccaggtgtattcagaagcaggcaaccttgggaaatcagttgcactttatgattatgcaaggggcaagcatttgattccttcagcttcatgctatcaagtacttcttcattttctaaccagaaacagaaaggatgaattgattttgagagtatatctggacatgcttgaagttggatttggttcttgcaccgaaggaaatattcttgattctgttgtcatggctttaatcaggaaaggtaaacttttggaagctcttggtattcttcggcaattaaagagtttgggtcttaaattaagcaagggagccttgtcaaatatagttgaagaatttaacaagaaaaaggatattggggatctgatgaatttcttggaagattggaggtgtatacctgagttgcgtctttgcaacagaatccttgcgtctttgtgcacaaatcttggtacttgtcaggcatggttggtcttccaaagtttggaggccttagggtttgctccagatgctacgacttttggaattttcatttttcacagctgtagagaaatgaaactaaaatctgcacttgtatatttatcagagtgctttgctaggcatgttaaacctggagtgtgtgcctataatgctattttaggtggtgttttcagggaggggctatatagacatgcaaagtatatatttgaagacatgattgaaagagaagtaacacccaatctttcaacatataagataattcttgcagggtattgcaggtataggcggtttgatgatattgaacaagtcttgaggcacatgaaaaccaatggtgtaaatgttcttctctctggaaactgtgtgctctccaaggccttatcattcttggggctagatcacctaggggtgaaaatcaagagagataatgtcactggtttcccaaaagctgagttttttgattcagttggcaatggattgtatttggacactgattccaaaatgtttgaggtttcattgtcacaagttttggatagcgcacttctcccagatattaactcagagctaatcagggcatctcagcaaggcgatgttgcaagtgctcttcttgtgaaagacaaagcttttcaatggggatatgacatttcaccagatagctgctctgagctattcaaggccttatgtgtgagccctgcttatgttatagatgtcattgaccttatggaggagatgccagatatactttacaaacttgatgctcaaaatctagatttggttgcccaaacattgagtaggaatggaatgtctgctcatgcaaaactggttttagaaaaaatgttgagagaagacttgtcaatcagtcacaatacatatacttatttaatgataggtttatgcgaagaaaggaacatagcagggttttgggaatgttggaatcttgcaacaaagtgcagatggtcacctgatagcaaggatatgatgggcctcatcagttacttgtgcaaatggggagtgattgaggaagccctgaaacttatgaactctttatttgactgctaccatgatctgttttttagtgcatattgtgcacttctcaaagagttgtgcaggacaggtcataccagcattggatgcgcaatgttggaggctctcaaagaaaagggtgtggctgtggatcgatcattattcttttatgtgatggagggcttcctaaaggagcaaagaactgctgaatcaattggaatgcatgacatgtggcttagcaaaagcaaagaacttgatgtttttacttaccgatctgtgttgccttcattaccatggctggacacagatcgagccaagaacttggtagaatctatgctgaccgtgaaacttactgaattctcatatcgcggttgcattgtgaatgaattaatgcaaacaaggaatataaaatgggccattccagtcttgcaagaatcagctcctgggaagctcagtgccactttgttaaattccttacttcaagcctatggttggctaaaaaattggagaaagttagatgcagttctttgcaagatgctaaagatgcatgccaccctttctatatctagctaccgctttcttgtgtgcagaatgtgtgagcaaagtcgtttttctagcgcttcaagccttagagcacttttccaacatactgacaagtcaagagaactgattgcatgcaacattctaatattttatctttttcaaagaagaaacagctcacagattcatgatttattgaaggacattgaaggtaatggtatttctcttgacaaaaccacatatgatttccttgtctatggatttcacaaatctggggatatcaatgattcagttaatgcgcttgatgcctgcattgctcagggaataaaaccaagcaaccgcagtctcagaatagtgttaagtcattactgcaggctaggaaaccatgagaaatcactagcattatttcacttgattgagcgcaatggatggaagcatggtttaatcattaagaccaccctagcttcatgtctcctttcatttgggagacaattggaagcaaaatcatgtctgaacaacctgagcaaaggtgagtttatcggatgttcaagcaattttgatgatctcatcaaggaattctgcattctaggagatttgaaaatgactctttatctgctaaatacaatgttaaagaaaggcacactgcctaatgaagccagttacagttctgttatatataaactttgtacattgaaggagttcgatcaggcacttgattttcttgctgaaatgcagctggcaagtctaaaatcaagtgaaatctcctgtgatgcacttgtacatggcctttgtgccatgggaagaccttctgatgctagaaaggttttggaaatgctaaccaccttgggatctgcaccatcctatggcatgtttagagttgtttttgataactattgcagaagtagcaatctacagaaagctgcggcacttctgcatgacatgcaacaagcaggacaagtgcccaactttgagatgcattggtctgttataagcaatttaagcagtaccaatgagaaaactgaaggacatggagagtgcattttgccaaacctttttctttctgcaaattccccttaaaggtcataaggcgatatatggcttccagaaaatggtgaactgatgattgttctcaagttgaaccctagtggaactgataaaactcgtgaaaccaaggttatgcaactctggaactcaaacgttctactcgaggattgatggttcacataaatgtgggaacacgtaggaaaaactatgcatcttcgatttaggttgcaaaagagggagcttgaactcattacctgagccatcacaactttcttctctgcaacttggttacaggttatgcccttgctaaagggataatgcaaagatccctacaacaccaattagaattggggaagacgaacctcctcctcagtctcctagcttgttcgttgctctcacctgggatctgccctgggatcacctttgcaacatcagttgaactaaagatttggactggacatggttcagttgtttttgaacggtgatctgtgatatagtacgcaaatgccaggtttttcctgtttgggcacaaatggaaacaaaaaagttggactcagcctatcgtgaagctacgaaggaagagcactgtcccattattctgttttttcgaatatattattgttgcactctcaaatggtgggttgctaacttgctatgtcatgggagtttgggtgaaggccagaaggatgtgatagacgtcgattcgatgcaggtccatgggatgctctgtacaggggtgggaatatcctagcgttcgccttggtttcggtcttctctggcagcaagtgtgctcccagttttcaagctgtcaaagctgtccaactcagttccttggggaaggcctcgattcgctcatctcctcggacccggaggactacaacaatatgaagcagtatgagaagctgaccgtcgcgtcaatttactttcttgtgatgagtgttgagcatcatcatatgattcatacaattgatatgcaactagaacccagattttaatgtgtacggttatgatttatcttttctcgttaaataatgtgagatattgaggtgtatgataaattatatgttcatctctatgtaatcattatacactaacattttaataacgagagcatagaacgataaatagtgcttct

SEQ ID NO: 9039 - DNA, 1572 bp, Zea Mays
  misc_feature (1571)..(1572): n is a, c, g, or t
gtcggagaacctcccggctccccgcagtccccctggcctcgcagatccgcggcctgcttcgttgctgccttgccagcaagcagccgcgctcatcctcgcggacgccagcggcggggcagccccctctcctgtgatccactccggcgcccgtggccgcggttgctcccgtaggcttgacggcaaaaggaccctttcaatcaaagagaatttggtcgctgaggctggaaaaaatctggatgtgtttaacttttagggcttactatttttgagaggtggtctgacatagactatccacaattcagcgccaggtctcagggagcgacctaccccaaggtggggagttcgttccttttccagtaacgaggagggcaaactcatattccatcatgatggaagaggacatggaaaatggaaggtcgtatcaagaaagaccaaggactttttcaacagtacgaagcaagtcatctatcccgctggccttacgtttgttgatgaggataaatccccgtgccttgattattctttctcttttggtattcagtggtgtgctatatgtgggagccagtacatcaccaattgtggtctttgtgttctgtatatgtactctcagtctattcttctctctctaccttacaaagtgggttcttgctaaggacgaaggaccaccagaaatgtctgagatatctgatgccataagagatggtgctgaagggttttttaagacacaatatggaactatttctaaaatggcatttattctggcctttgtcatccttggcatttatctctttcgcactactaccccacagcaggaggcgtctggcttgggaagggcaacactagcctatattacagttgcttcttttcttcttggagcattatgttctggaatagctggctttgttggaatgtgggtgtctgtgcgtgcaaatgtacgagtttcaagtgctgctcggcgctctgcaagggaagcattgcagattgctgtccgtgctggtggtttctcagccatcgtagttgtttgcatggctgtatttggcgtggcaatattgtactcaacattttatgtttggcttggagtagattcacctgggtcaatgaaggttactgacttgcctcttctccttgtgggatatggttttggtgcctcttttgttgccctttttgctcagttgggtggtggaatatacaccaaagctgctgatgttggagctgatctggtcggaaaagttgagcagggaatacccgaagatgatcctcgtaacccagctgtcattgctgacttggttggtgacaatgttggagattgtgctgcccgaggcgctgatctttttgagagcatagcagcagaaattatcagtgcaatgatacttggaggaactatggcacaacgctgtaaaattgaagatccctctggctttattttgtttcctcttgtcgtccattcatttgatttggtggtgtcatcagttggaattctctcaatcagaggaacacgtgactctggactcatttctcctatcgaagatcccatggcaattatgcaaaaaggctactctgttactattatnn

SEQ ID NO: 9040 - DNA, 606 bp, Zea Mays
acgatgcagccacgttttccagtcgtagcgtgaaaggttttaagggcaaaagccctcggagcgtcactgggagaagagaaacgcccggcggcgcgaagcggagggtgagaatatcggagttcggcgatgtcgaagcggcagggaccgccgaaacaccagaaccgctacgcgtggaagccgaaccttggtcagaagatcaacgaaaccgagcccgggggcaggttccgacctctgtcagaaatcaccggcgtctgtcagcgctgccgggatcaaatcgactggaaacgcagatacggaaaatacaagcccattgttgagccagcaaaatgccagaagtgtaataagcgaaacgtccggcaagcataccataacgtatgcagagattgctccaaggacctcggcatatgtgctaagtgctgcacatgtgttaatgagcttgtcggaagggatgcgaatgaggaggaaagtgaacgcaagtcactagaagaggctgtcagaggtgctagggagagggaacgacgtacacttcttcgtattagctacactggaattcgagctagggtcctgttttggcaaggttccatccagtgaaaccttacgatacaa

SEQ ID NO: 9041 - DNA, 2419 bp, Zea Mays
caaaacccctgtctctctcctcactgatcactcttcttcttcagactcagagccatcgcgccgcggcatcctccctccgttcctgccccctctttctctagcgagctccttttctctctcctagagaggcttctcccttcctcctcgcttgcccccattgcctttgggctatatagagcgggattggattggaaacggagcccccggcgagtttgaaacccaaccaaaacccccacctttctcgcctcgtactcgcgcgctccccaccgcctgccaccgacgccgcgtctggtctagaaccaaatgccgtgagatctgcgcgcgtgacgccttcccccgccggagactccctccgagctccgggccacggagcgcttcgtcccggatccctctggtggctcagggcaagtagaaggaaaaggaaacaagcttgctgcgtgtgacctgcagaccccaagaggatggatcagtatgaggtgctggagcagattggaaaaggagcatttggttctgcgcttttggtgaggcacaaggtcgagaagaagaagtatgtgctcaagaagatacggctcgcacggcaaaccgaccgcacacgccggtctgcccaccaggagatgcagctcatcgcgactgtccggaatccattcattgtggagtacaaagattcatgggtggaaaagggctgctacgtttgcattgttattggctactgtgagggaggagacatggctgaggttatcaaaagagccaatggaaaccatttctctgaggagaaactttgcaagtggctcgtgcaacttctcatggctcttgattatctacatgcaaatcacattcttcatcgagacgtgaagtgctctaatatatttattgccagagatcaaagcatacgccttggtgactttggccttgcaaagatattgacatcagatgaccttgcctcatctgtggtagggactccaagttatatgtgcccagaacttcttgctgatataccatatggtactaaatccgatatttggtctctaggatgttgcatttatgaaatgactgctctcaggcctgcatttaaagcttttgacatgcaagctcttattagcaagatcacaaagtcgatagtatcaccattgcccacgagatattctggttccttattgttttactctaataaaaacatttcgcataactggcatatgcaggctgcagaactgctaaagcatgtgcaccttcagccttatgtgcttcaggtccagttgaagtccagtccctctcgcaacatgtctccaatctatcaagctctgacagacaaagttaagaagatgacatttcctagtgatataactgattccgccagaagagtggcaagaagaaactcgcttggaaatgagaggactgtaacattctgcaaaccctctcctgagcggaactctattagctctacacggagcatcaaagaatatacaactacccagagtgtcaaagagctatctgttgacagcagtcaaattgatgatgaggttacaagtaaagccattagaacaaagacaacaggcattctaaggacgcccaagagtaccccagccaagacattgactactagaaatcggttggatcctccaaaaacttcttacagcagaacaaaccatagtgagttgacctcaagaacacctctgaacaagagtgctgtgacagcaagaagagcatcgctcccgctgccgacatacagagcacccaacagccgtgccgccagcgtccttgaccaactggactccccagacgtgtccgtcaacgcgcctcggatcgacaggatcgcagaattccctctagcttcatccgaggaccccctggcgcccatgaagaagaacctgtcctcggcgcccggccacgacggctcatgctccacgcctcccttcatcaaccggtccatcacgaaggacaagtacacggtgcaggtgctgcacaggggcgacggggacaacgcgagcgactcgtcggggcgcaacgccaccgccgcgtcgagcggggggtccaacgactcgaggcagcagcggttcgacacctcgtcgtaccagcagcgcgccgaggccctggagggcctgctggagttcagcgcgcagctgctgcagcaggagcggtacgaggagctgggcatcctgctgaagccgttcggccccgagaaggcgtcgccgagagagactgccatctggctcaccaagagcttcaaggagacggcgtcatagcggagggagggagggagggagtcatagcggagggagggagggagggagtcatagcggagggagggagacgtagctgccagttttgtaacgtgcaatgtagttcaggtagtttaagctatgttaggaccccccaggtgtaggtgctggaaggaaggcaacaccagctcagtgttgcccta

SEQ ID NO: 9042 - DNA, 2612 bp, Zea Mays
aaaaaacagaaaaaagagagatactgagagaatacgatagaataaaaaggaccgattcgaccacatcacgtgggtcccgcaaaacccctgtctctctcctcactgatcactcttcttcttcagactcagagccatcgcgccgcggcatcctccctccgttcctgccccctctttctctagcgagctccttttctctctcctagagaggcttctcccttcctcctcgcttgcccccattgcctttgggctatatagagcgggattggattggaaacggagcccccggcgagtttgaaacccaaccaaaacccccacctttctcgcctcgtactcgcgcgctccccaccgcctgccaccgacgccgcgtctggtctagaaccaaatgccgtgagatctgcgcgcgtgacgccttcccccgccggagactccctccgagctccgggccacggagcgcttcgtcccggatccctctggtggctcagagtagttttttttcctcactgcaagtgtaccggaaccatggtttttaatggatgatgatgatgctgctgctgcttgcgtcctcagaatagtcttgactcttgagctagggcaagtagaaggaaaaggaaacaagcttgctgcgtgtgacctgcagaccccaagaggatggatcagtatgaggtgctggagcagattggaaaaggagcatttggttctgcgcttttggtgaggcacaaggtcgagaagaagaagtatgtgctcaagaagatacggctcgcacggcaaaccgaccgcacacgccggtctgcccaccaggagatgcagctcatcgcgactgtccggaatccattcattgtggagtacaaagattcatgggtggaaaagggctgctacgtttgcattgttattggctactgtgagggaggagacatggctgaggttatcaaaagagccaatggaaaccatttctctgaggagaaactttgcaagtggctcgtgcaacttctcatggctcttgattatctacatgcaaatcacattcttcatcgagacgtgaagtgctctaatatatttattgccagagatcaaagcatacgccttggtgactttggccttgcaaagatattgacatcagatgaccttgcctcatctgtggtagggactccaagttatatgtgcccagaacttcttgctgatataccatatggtactaaatccgatatttggtctctaggatgttgcatttatgaaatgactgctctcaggcctgcatttaaagcttttgacatgcaagctcttattagcaagatcacaaagtcgatagtatcaccattgcccacgagatattctggttcctttaggggacttatcaagagcatgctacggaaaagtccagaacaccgaccaagcgctgcagaactgctaaagcatgtgcaccttcagccttatgtgcttcaggtccagttgaagtccagtccctctcgcaacatgtctccaatctatcaagctctgacagacaaagttaagaagatgacatttcctagtgatataactgattccgccagaagagtggcaagaagaaactcgcttggaaatgagaggactgtaacattctgcaaaccctctcctgagcggaactctattagctctacacggagcatcaaagaatatacaactacccagagtgtcaaagagctatctgttgacagcagtcaaattgatgatgaggttacaagtaaagccattagaacaaagacaacaggcattctaaggacgcccaagagtaccccagccaagacattgactactagaaatcggttggatcctccaaaaacttcttacagcagaacaaaccatagtgagttgacctcaagaacacctctgaacaagagtgctgtgacagcaagaagagcatcgctcccgctgccgacatacagagcacccaacagccgtgccgccagcgtccttgaccaactggactccccagacgtgtccgtcaacgcgcctcggatcgacaggatcgcagaattccctctagcttcatccgaggaccccctggcgcccatgaagaagaacctgtcctcggcgcccggccacgacggctcatgctccacgcctcccttcatcaaccggtccatcacgaaggacaagtacacggtgcaggtgctgcacaggggcgacggggacaacgcgagcgactcgtcggggcgcaacgccaccgccgcgtcgagcggggggtccaacgactcgaggcagcagcggttcgacacctcgtcgtaccagcagcgcgccgaggccctggagggcctgctggagttcagcgcgcagctgctgcagcaggagcggtacgaggagctgggcatcctgctgaagccgttcggccccgagaaggcgtcgccgagagagactgccatctggctcaccaagagcttcaaggagacggcgtcatagcggagggagggagggagggagtcatagcggagggagggagggagggagtcatagcggagggagggagacgtagctgccagttttgtaacgtgcaatgtagttcaggtagtttaagctatgttaggaccccccaggtgtaggtgctggaaggaaggcaacaccagctcagtgttgcccta

SEQ ID NO: 9043 - DNA, 969 bp, Zea Mays
ttccagaggagctctttctcttccgtcaaagggttccaccgatggcgataaagatgaaggggatcttcaaagggctgaagataatttctcaaatgtttgcgcataaggagcaggagatggagattgggtaccctacagatgtaaagcatgtggctcacattggtctgggcaccagtgacacatctccaagctggatggctgaattcaagggaacagatgattcatcagcaggctctgtgagcacagctgcgcagtcaaggcagacttcttgggcctctgcagacttcgagcagccgagaagcatgctgcccatcgacatcttccaggacaagaggcccgggcaagagaacccggacgtgcagaggggggagagaaaggcgaggaggaagaagacgaagaagaacagagcgtcgtcgccgcccgcttcgtccgcaaggtcgtcttccgcgaggtccacagcctcgtttgcgacggcgtacgacgccttcagcgagtcccagagagggttcccggtcgcctgaatgaatggcgcgcgccggccggacggaaacaaaccaccatgcgtgcgtgaactgtaaatgctttcggattagggagacagacagcttggtttggattgtttgattctttgtttcttttttttctcggaatctttgcagtaatgtgtagatggagatggaaagggagatcgaatcaagttagtgctgagcatgcatgcgcttgtcttgtctacggtttttaaatctcttgttagtcgtaggctcgtaatagtgcagctgtacagatcaatctccggctgaccagatcaatctcttgttagcagccacgcacgcacagacagcttcttgtttcaagatttcttttttcttttgtgtgaagaaccgaagatataccgttgtcactaccacacctactttgctgagtgtctaaaaaacaatagacaaaatctctacatcagcaatgatttcc

SEQ ID NO: 9044 - DNA, 1642 bp, Zea Mays
cttcctgccagaaccgagcggagatcatctggagccgggtcccggcgattaccctgcgcggcgccaatggagcccgaggcggcggtgttggcacagctgcagctgcagctcctcgtcctcgtctctgagttccgccatctccgcgagcgggagcgcggcgcccgcgaggagctccgagacgccggccagaggtgggaggcggcggcggcggaacaacgtagggaggcccgggagctgcgcgtggaggtggcctcgcgggacgactcgctacggaggctcgaggccagggggttttagcttaggttctgaatcaaccttcaacctgtgcatggaagcaaactgacatttggctcacataccatttcggtagaaaaggaagttgctgctgtgaaacaagtactaggtgatgtgcattgtctagttggtgagaaggaaaatgtagttgctgacttgaaggataaagtccaaaggatttctgtgcttgagaaagattttgtagagaatcttaatttcttggaaagcaaaatcagtgcataccagcttgaactccgtagtagggcgaggatcatatatgagttaaaaaatcgccttcaggatgagaagcttaacagcagttttcagccccatctggaagaacttaataaaactttgttggtgaaggattacgctattgatagattaacttcagagaatcaggcaatgcgtttggaacttcataacatggaaattgctttacagaaatttcaagatttattcagtagtattgggcatgagggaatgaatagtttttcagcaatttctgaaaatcaggacgtacaggatgtgaataatgaacaacatgaaagggttccaggtacacaatgtggtctagcaaatgagcataccttggtaactgcagttgtcaaagaagccaccacacaaaatgtagatcaccagttggaaactgatccaggcagcatgcaagtacaaagcccagtgcacttcaagtctggtgcaatgccatctccggagctagtagctgcaaatacagaaaaagctgacagccttcttgaacccaatgtagacattggcatgggcagtttatctcctgcacgaccaacagattgtttgaatatggatcttgacacggagagtcagtcctgacaatgcaatttatatcccttcacacctggtattcggatacgtatatttaacaatctcgtagttggttgtggagcatattttattattttcttgtagttgatcaactgtcttgtgtgcgtagcctgtttagttagccactaaagagatagatcaggtagtgtaaagagcatcttggctcatctctctaccgccacaatgtccgagattcggatggcagctcagctgatgagaccgaggagaaagaaatgatagctgtcattgtctcttgggataaatctgagggctcttattggaggagatgaaaaaaacagactcttaaaaataggaggggctctcaaaagaaaaatagagagctatatttcgagggctgttgctagactggagatgctctaaggtgtatttgttttttggcttttgttctaagactgtctccaacaacgttctttatattcatcctctatatctgtcttttacagtcttctaaaagattcttttctct

SEQ ID NO: 9045 - DNA, 1663 bp, Zea Mays
cttcctgccagaaccgagcggagatcatctggagccgggtcccggcgattaccctgcgcggcgccaatggagcccgaggcggcggtgttggcacagctgcagctgcagctcctcgtcctcgtctctgagttccgccatctccgcgagcgggagcgcggcgcccgcgaggagctccgagacgccggccagaggtgggaggcggcggcggcggaacaacgtagggaggcccgggagctgcgcgtggaggtggcctcgcgggacgactcgctacggaggctcgaggccagggcaggactctacttgttctatgcagtggacaatccagctgaaggataaacagattgctgtaatgtcagagaaattgaattcacatcttgttttgtttagttcggtagaaaaggaagttgctgctgtgaaacaagtactaggtgatgtgcattgtctagttggtgagaaggaaaatttgctgacttgaaggataaagtccaaaggatttctgtgcttgagaaagattttgtagagaatcttaatttcttggaaagcaaaatcagtgcataccagcttgaactccgtagtagggcgaggatcatatatgagttaaaaaatcgccttcaggatgagaagcttaacagcagttttcagccccatctggaagaacttaataaaactttgttggtgaaggattacgctattgatagattaacttcagagaatcaggcaatgcgtttggaacttcataacatggaaattgctttacagaaatttcaagatttattcagtagtattgggcatgagggaatgaatagtttttcagcaatttctgaaaatcaggacgtacaggatgtgaataatgaacaacatgaaagggttccaggtacacaatgtggtctagcaaatgagcataccttggtaactgcagttgtcaaagaagccaccacacaaaatgtagatcaccagttggaaactgatccaggcagcatgcaagtacaaagcccagtgcacttcaagtctggtgcaatgccatctccggagctagtagctgcaaatacagaaaaagctgacagccttcttgaacccaatgtagacattggcatgggcagtttatctcctgcacgaccaacagattgtttgaatatggatcttgacacggagagtcagtcctgacaatgcaatttatatcccttcacacctggtattcggatacgtatatttaacaatctcgtagttggttgtggagcatattttattattttcttgtagttgatcaactgtcttgtgtgcgtagcctgtttagttagccactaaagagatagatcaggtagtgtaaagagcatcttggctcatctctctaccgccacaatgtccgagattcggatggcagctcagctgatgagaccgaggagaaagaaatgatagctgtcattgtctcttgggataaatctgagggctcttattggaggagatgaaaaaaacagactcttaaaaataggaggggctctcaaaagaaaaatagagagctatatttcgagggctgttgctagactggagatgctctaaggtgtatttgttttttggcttttgttctaagactgtctccaacaacgttctttatattcatcctctatatctgtcttttacagtcttctaaaagattcttttctct

SEQ ID NO: 9046 - DNA, 1778 bp, Zea Mays
cttcctgccagaaccgagcggagatcatctggagccgggtcccggcgattaccctgcgcggcgccaatggagcccgaggcggcggtgttggcacagctgcagctgcagctcctcgtcctcgtctctgagttccgccatctccgcgagcgggagcgcggcgcccgcgaggagctccgagacgccggccagaggtgggaggcggcggcggcggaacaacgtagggaggcccgggagctgcgcgtggaggtggcctcgcgggacgactcgctacggaggctcgaggccaggataaaatgccttgagaatgagaatgagcagctggagaaaaacgaaaacaacttgaaagaaagcatggatgtgctgcttcaatccagggaggctttcataaaacactatgaggcaggcaggactctacttgttctatgcagtggacaatccagctgaaggataaacagattgctgtaatgtcagagaaattgaattcacatcttgttttgtttagttcggtagaaaaggaagttgctgctgtgaaacaagtactaggtgatgtgcattgtctagttggtgagaaggaaaatgtagttgctgacttgaaggataaagtccaaaggatttctgtgcttgagaaagattttagaatcttaatttcttggaaagcaaaatcagtgcataccagcttgaactccgtagtagggcgaggatcatatatgagttaaaaaatcgccttcaggatgagaagcttaacagcagttttcagccccatctggaagaacttaataaaactttgttggtgaaggattacgctattgatagattaacttcagagaatcaggcaatgcgtttggaacttcataacatggaaattgctttacagaaatttcaagatttattcagtagtattgggcatgagggaatgaatagtttttcagcaatttctgaaaatcaggacgtacaggatgtgaataatgaacaacatgaaagggttccaggtacacaatgtggtctagcaaatgagcataccttggtaactgcagttgtcaaagaagccaccacacaaaatgtagatcaccagttggaaactgatccaggcagcatgcaagtacaaagcccagtgcacttcaagtctggtgcaatgccatctccggagctagtagctgcaaatacagaaaaagctgacagccttcttgaacccaatgtagacattggcatgggcagtttatctcctgcacgaccaacagattgtttgaatatggatcttgacacggagagtcagtcctgacaatgcaatttatatcccttcacacctggtattcggatacgtatatttaacaatctcgtagttggttgtggagcatattttattattttcttgtagttgatcaactgtcttgtgtgcgtagcctgtttagttagccactaaagagatagatcaggtagtgtaaagagcatcttggctcatctctctaccgccacaatgtccgagattcggatggcagctcagctgatgagaccgaggagaaagaaatgatagctgtcattgtctcttgggataaatctgagggctcttattggaggagatgaaaaaaacagactcttaaaaataggaggggctctcaaaagaaaaatagagagctatatttcgagggctgttgctagactggagatgctctaaggtgtatttgttttttggcttttgttctaagactgtctccaacaacgttctttatattcatcctctatatctgtcttttacagtcttctaaaagattcttttctct

SEQ ID NO: 9047 - DNA, 1007 bp, Zea Mays
atgcacaatctacggtccgtttcaaagcccaacgcgaagctctatttgggccttccgtttacgcccaaccgacaatgcgaagccttatttggcccaaccgaaggcccaacgcggtcagctgatgtctctttgactctttccaccacacgaccacactgctcgtgctctctcgatgcggtcaccagtcgaatggacggcgcggatatcccctcccactccgccgccgatggcgaccggcctccggagaacgcggacgacggcggcgtggaggacgagcgtgccgccgcgccccctccggagcggtgcggggcgttggcttccgcaatcgcaggggtgctggccggcgcgctgcgggagcacgaggagcgggcggccgccaccgcccggagccaggacgaggtcgccgctgccatcgaccgcctcaacggaggctattagagaatgcacccacaatggtaataatgcatcattcagcaaggatttccagcatccgcaagaggatttcagcaatgaacatgctgctcaagtccatacaacgacgcatagatagcatggatagaattatttctactgaccattcatctcctgtacagaaagccggtaatgaagttggaacaaggttctagcagaattctggtggtgtcccatcaattgcgcaccatttctgttttggtagagctgccatccaacaatcacacggtgctgtgcatagaagtgagacgtcataatgtcgattttttccccagagatgtgtcatcaaaatatttcaatcctttttgtagcatattggagtggggaaagtcttttgtactggatggtcaatgttgcagacaacgaatcgtgctttcagctttggcgtttacccttgtattcaaacatgaaattgtcttcagaaatattatcatattgtcactgttgagcggttttgatgtatacttgcttgttgaagatggcaacatctggaattcgtgttgttatattttatcataaatgcttctagatacgaa

SEQ ID NO: 9048 - DNA, 516 bp, Zea Mays
aataaggctacggcgtacggggatggctaagctgctagcctcacttctaaagtcacggacgccgccgaagcgcatcgattcgccgaccgcctgtttgttcccctcgtcgccgcagcacgccgccggccgacggtctggctgctccgatgggctctcccacacggccgcggaggactaccggtgtcactctcctgaatcctgatgctgctgttcctgttgcctataacaggtttggaaaggagctgttggatgagctatgatcgtatcgagtgaaagctcttttgtatatgctgtatcaagttaagttgtactgtgtcagtttttgcttaccttactgtcatatagctggttccagacgctactcccggttgttagtatgactgatgagcaatgcaggacatattggttgtatatatctatacttctatactaagactgtaagggttagtctaccgctctttgttctgccttctgttaatctggatcatccgtcctatggctgctacctgaaccgtg

SEQ ID NO: 9049 - DNA, 3109 bp, Zea Mays
ctagcgctggcactttgggtgtgcaactgaaaagtaacaataagcaatttacaattaattaagccactaagcagagtaggcagaggtatccccttcagatgcagagctgtttgcttgactgccctttctctcttcctctctctctctctatttattagttgttttgctgcccccatgtcagctgaggtctgctcacctgtgtgagagagagtgtgtgagtgtgaccgtgggtggggtggggaggaagacgagcccgtcgagctgtgccgattttgcccccgaatccgtcgttacccctgctttggagggatctgaaggtgctggtggcctgctgctgcctgcctgtctgccaggagcccagaggccagagcagagactgtggtggtggtgatggcggctgtgcagcggaaaggcttctcgtcgtggtactagtggaggaggcgtgaaatttcatccataaaggctgtcgcggtggccggtgggtggagatcgcgctcaattcccgccgaaaccgcctccggggtagcgtggccgcgggaagtgggagtgggagatgattactttcgtggactcggcggccatggagctggagagggagagcggcaggtgcctggtggacccgcagctgtggcacgcctgcgccggcggcatggtccagatgccgccggtgcactccagggtgtactacttcccgcagggccacgccgagcacgcgcagggccacgcccacgccgacctccccgccggccgggtcccggccctcgtcctctgccgcgtcgacgccgtccggttcctggccgatccggacaccgacgaggtgctcgccagggtccgcctcgcccccgtccggcccaacgagccggaccacgccgacgccgcggcgccgggcgcgcgggaggacaagcccgcgtccttcgccaagacgctcacgcagtccgacgccaacaacggcgggggcttctccgtgccgcggtactgcgccgagaccatcttcccgcggctggactactccgccgacccgcccgtccagaccgtgctcgccaaggacgtgcacggcgtcgtctggaagttccgccacatctaccgcggcacgccccggcgccacctgctcaccaccgggtggagcgccttcgtgaaccagaagaggctcgtcgcgggggactccatcgtgttcatgaggacggggaacggggacctctgcgtcggcatccggcgcgccaaaaagggcggcatcggaggagggccggagttcccgcaccaccagccgccagacggcggcgggtacgggtacgggtacgccggcttctccacgttcctgagaggagaagaggacgacgcggccgcgaggggcaaggtcagggtgctggtgcggccggaggaggtcgtcgaggccgccaacctcgcggcgagcgggcagccgttcgaggtggtctactacccgagggcgagcacgccggagttctgcgtcaaggcgggggcggtccgcgcggccatgcgcacccagtggtgcgccgggatgaggttcaagatggccttcgagacggaggactcgtccaggatcagctggttcatgggcactgtcgccgccgtgcaggtcgctgaccccatccgatggcccaattcaccctggaggcttcttcaggtcgcttgggatgaaccggacttgttacagaacgtgaagagagtgagcccatggctggtcgagcttgtctcaagcacgccggccatccaccacctcacgccgttctcgccgccaagcaggaagaagctgtgtatcccattgtacccggagggccaccagctcccggcgccgatgttccacggaagccctctggtgggccgtggtgttggcccgatgcgctacttcccggacggcggcactcctcctgcaggcatacagggagccaggcatgcgcaattcggcatatctttaccagatctccaccacctcaccaggctgcagtcgagtctatcgccgcacgcgcacgggcttcgccaccagctcgaccacggcgcgcggccgaggatcgccggcggcctcatcgtcggccacccggcagctcgggacgacatctcgtgcttgctcaccattggcaccgccccgcacaagaaaccatcagacgtcaagtcggccgcggcggcgccggcgccgcagctgatgctgtttgggaaaccgattctcaccgagcagcagatatctctaggctttcggccgctgccggcgccgaagaagagcccgtccgacgacgctgctgagactgagaggacggtgagcaacaactcggatgcctcgagcccagctgggactgcgagtgggagcacgccgtccatcagtggaggcgccccgtcgtcgtgccaggacaacaaggcggcggcgacggcgacggcgactgatgacgacgatctcctcgggcactgcaaggtgttcatgcagtcggaggacgtcgggcgcacgctcgacctctcggctgtcgcgtcgtacgaggagctctaccagaggctggccgacatgttcggcgtcgacagggccgagctgacgagccatgtcttctaccgcgacggcgcttctggagcgctcaagcacgccggcgacgagcctttcagtgagttcaccaagaccgctcggaggctgaccatacaaacggacgcgaggtagaagaaggcggcagacaatgaagctctcgtcgcctgtacaaccggggggagctagcgagccgcggcggcgatctcgaaggacgatcgccacttgcagagtgctggtgcagactgcagagagggcggtgctgctgtcgtgtcggtcgtttcttatcagctcttttgttgcctgcaaaatgaatttaaagaatgtgctctgtcacgctgccacgtcagtcagtcagcacgcagtcgacaccgcccaccggtactgttccactgctatgtggccgtgttgcgtccatgccctgtcgttgttcctgttgccgggtataagtgtacattcgggccgcccggctcggcccggcccaagcctgaaaaggctcgtattgtttgaatttcgggccggtccggtccgtttgaatttcgggccgtgccgggccggcccatgggcctagctctcggcccacggccc

SEQ ID NO: 9050 - DNA, 3264 bp, Zea Mays
ttattagttgttttgctgcccccatgtcagctgaggtctgctcacctgtgtgagagagagtgtgtgagtgtgaccgtgggtggggtggggaggaagacgagcccgtcgagctgtgccgattttgcccccgaatccgtcgttacccctgctttggagggatctgaaggtgctggtggcctgctgctgcctgcctgtctgccaggagcccagaggccagaggtgagtgactggcccgatgaattccgcaatcttgtggagctgtggtgctggcgtggcgctgccgtgctgctgggttggttgggttccctttccctccctgcaaaattttctgaggcggagaaaaaagtaatatctccattgcttccccctgcttccttttttcagcagagactgtggtggtggtgatggcggctgtgcagcggaaaggcttctcgtcgtggtactagtggaggaggcgtgaaatttcatccataaaggctgtcgcggtggccggtgggtggagatcgcgctcaattcccgccgaaaccgcctccggggtagcgtggccgcgggaagtgggagtgggagatgattactttcgtggactcggcggccatggagctggagagggagagcggcaggtgcctggtggacccgcagctgtggcacgcctgcgccggcggcatggtccagatgccgccggtgcactccagggtgtactacttcccgcagggccacgccgagcacgcgcagggccacgcccacgccgacctccccgccggccgggtcccggccctcgtcctctgccgcgtcgacgccgtccggttcctggccgatccggacaccgacgaggtgctcgccagggtccgcctcgcccccgtccggcccaacgagccggaccacgccgacgccgcggcgccgggcgcgcgggaggacaagcccgcgtccttcgccaagacgctcacgcagtccgacgccaacaacggcgggggcttctccgtgccgcggtactgcgccgagaccatcttcccgcggctggactactccgccgacccgcccgtccagaccgtgctcgccaaggacgtgcacggcgtcgtctggaagttccgccacatctaccgcggcacgccccggcgccacctgctcaccaccgggtggagcgccttcgtgaaccagaagaggctcgtcgcgggggactccatcgtgttcatgaggacggggaacggggacctctgcgtcggcatccggcgcgccaaaaagggcggcatcggaggagggccggagttcccgcaccaccagccgccagacggcggcgggtacgggtacgggtacgccggcttctccacgttcctgagaggagaagaggacgacgcggccgcgaggggcaaggtcagggtgctggtgcggccggaggaggtcgtcgaggccgccaacctcgcggcgagcgggcagccgttcgaggtggtctactacccgagggcgagcacgccggagttctgcgtcaaggcgggggcggtccgcgcggccatgcgcacccagtggtgcgccgggatgaggttcaagatggccttcgagacggaggactcgtccaggatcagctggttcatgggcactgtcgccgccgtgcaggtcgctgaccccatccgatggcccaattcaccctggaggcttcttcagaacgtgaagagagtgagcccatggctggtcgagcttgtctcaagcacgccggccatccaccacctcacgccgttctcgccgccaagcaggaagaagctgtgtatcccattgtacccggagggccaccagctcccggcgccgatgttccacggaagccctctggtgggccgtggtgttggcccgatgcgctacttcccggacggcggcactcctcctgcaggcatacagggagccaggcatgcgcaattcggcatatctttaccagatctccaccacctcaccaggctgcagtcgagtctatcgccgcacgcgcacgggcttcgccaccagctcgaccacggcgcgcggccgaggatcgccggcggcctcatcgtcggccacccggcagctcgggacgacatctcgtgcttgctcaccattggcaccgccccgcacaagaaaccatcagacgtcaagtcggccgcggcggcgccggcgccgcagctgatgctgtttgggaaaccgattctcaccgagcagcagatatctctaggctttcggccgctgccggcgccgaagaagagcccgtccgacgacgctgctgagactgagaggacggtgagcaacaactcggatgcctcgagcccagctgggactgcgagtgggagcacgccgtccatcagtggaggcgccccgtcgtcgtgccaggacaacaaggcggcggcgacggcgacggcgactgatgacgacgatctcctcgggcactgcaaggtgttcatgcagtcggaggacgtcgggcgcacgctcgacctctcggctgtcgcgtcgtacgaggagctctaccagaggctggccgacatgttcggcgtcgacagggccgagctgacgagccatgtcttctaccgcgacggcgcttctggagcgctcaagcacgccggcgacgagcctttcaggtccgtacggtggttttcgtcagtctgaagcggcgttcggttcctgtgtcgcttacttgctagtgttcctggccgtggtgctaagcattccaacctaactactagacacggttatcttcaagcatcaaactcatctaggtgttctttccttggaagcatccgatcctcatgtgagttcaccaagaccgctcggaggctgaccatacaaacggacgcgaggtagaagaaggcggcagacaatgaagctctcgtcgcctgtacaaccggggggagctagcgagccgcggcggcgatctcgaaggacgatcgccacttgcagagtgctggtgcagactgcagagagggcggtgctgctgtcgtgtcggtcgtttcttatcagctcttttgttgcctgcaaaatgaatttaaagaatgtgctctgtcacgctgccacgtcagtcagtcagcacgcagtcgacaccgcccaccggtactgttccactgctatgtggccgtgttgcgtccatgccctgtcgttgttcctgttgccgggtataagtgtacattcgggccgcccggctcggcccggcccaagcctgaaaaggctcgtattgtttgaatttcgggccggtccggtccgtttgaatttcgggccgtgccgggccggcccatgggcctagctctcggcccacggccc

SEQ ID NO: 9051 - DNA, 3963 bp, Zea Mays
ccagaatccaaacacaaaaggcacaaacgcgaaacgcccctcgccggtaaccttctacactcttgctgtgcggcagccgtcccataaccggagttcggaggcggtgtcgtgggttcgcggcgcctgggttcagggttttggccggcgcctctctcgccagcgagcacgggtcgggatggagtccttgtcgtcgggcggcgagctggcgcggcgccagagtagcggcggcggcagcagcggatggggtagcttcagtggcgacgccgacccgttcgatatccccgcgaagggtgcccctctcgagcggctcaggaagtggcggcaagcagcacttgtgctgaatgcatcaaggcgctttaggtacactcttgatttgaaaaaggaggaacaaaaggaggagatcaggagaaaaatccgtgcacaggcacatgttataagggccgcttttcgtttcaaagaggctggccgaatccatgtacagtccgaagaaacaaaagtaccatgtgctgatggtgcacttggcttcggaatcaaagaagaccagattacagcactgacaagggatcacaactactctggtctgcagcaatatggaggggtttctggtgtagcacatatgctaaaaaccgatacacagaaggggattagtggagatgactcagatttgctggcaaggaaaaatgcatttggatcaaacacatatcctcgtaagaaaggaagaagctttttggctttcgtatgggatgcttgtaaagacttgacgctaatcatcctcatggttgctgctgctgtttcactggccttgggcataacaacagagggcataaaagaaggctggtatgatggagcgagcattgcctttgctgttcttctagttgtatttgttacagctatcagtgactacaagcaatcactgcaattccaaaatcttaatgaagaaaaacagaacattcgtttggaggttgttagaggcggaaggcgaatcacggtatcaatatatgatttggttgtcggtgatgttgtccctctcaaaattggtgaccaggtccccacagatggtatccttatcagtggtcactccctttccatagatgaatcaagcatgactggagaaagtaaaattgtacacaaagatcagaaatcaccatttctaatgtcaggttgcaaagttgccgatggatatggaacaatgctgtccaggtaactgctgttggaattaacactgaatgggggttgctaatggcaagcatatctgaagattcgggtgaagagacaccacttcaggttcgtttgaatggtgtcgctacttttattggaatggttggactttctgttgcccttgcagttcttgttgtacttttggccaggtacttcactgggcatacttataatcctgatggatctgtgcaatatgtgaaagggaatatgggtgtaggccagacgattcgtggaatagttaaaatattcacagtggctgtcaccattgtggtcgtggctgttccagaaggacttccattagctgtcacacttacgcttgctttctcaatgcgcaaaatgatgaaagacaaggctctggtgaggaggctttctgcatgcgaaacgatgggttctgccacaacaatctgcagtgacaagactggcaccttgacgttaaatcagatgactgttgttgaggcatattttggtggaaagaagatggactcacctgataatgctcagatgttatctgctgatgtcacatcgctgattgttgaaggaattgcacagaacacttctggaagcatatttgagcccgagcagggtggtcaagaaccagaggtgactggatcacctacagaaaaggctatcctgtcttggggactaaagctgggtatgaaattcagtgaaacaagatcgaagtcatctattcttcatgtatttcctttcaactcagagaaaaagcgaggcggggttgcggtgtacctggctggctctgaggtccatatacactggaaaggagcagctgaaattattttggattcatgcacaagctgggttgacactggtggttcgaagcattcaatgactcctgaaaaagttgccgaattcaagaaattcattgaagatatggctgctgctagcctccgctgtgttgcgtttgcctatagaactcatgagatggatgatgttccagacgaagatcggagagaagagtggcaacttcctgaagataacctgattatgcttggaattgtgggaataaaggatccctgccgtccaggagttcgagattctgttcgtttatgtcaggcagctggcattaaggtgcgcatggttactggtgataatcttcaaactgcaagagccattgccctggagtgcgggatacttgatgatcccaatgtgtcagagcctgtcatcattgaagggaaaacattccgggcgctgtcagacttggaaagggaggatgctgctgaaaaaatctcagtgatggggaggtcttcaccaaatgataaacttttacttgttaaggcactgagggcaagaggtcacgttgttgctgttactggagatggcacaaatgatgccccagcactgcatgaggcagatattggtctatcaatggggattcagggaactgaagttgctaaggagagttctgatattattatcttggatgacaattttgcctcggtcgtgagggttgtcaggtggggccgatcggtgtatgcaaacatacaaaagtttatacagttccaactaacagtcaacgtcgcagctctgataatcaatgtagttgctgccgtcagttccggaaacgtgccattgaatgctgttcagttgttgtgggttaacctaattatggacactttgggtgcccttgcattggcgacagaaccacctacaaaccatcttatggagagacccccagtagggagaagggagccattggtaacaaatatcatgtggagaaacttgattatcatggctacgtttcaagtttcagtcctccttagtctcaacttcaaggggataagcctcctgcagttgaaaaatgatgatccagcacatgcagataaagtgaaaaataccttcatattcaacacatttgttctctgccaggtgttcaacgaattcaattcacgtaaaccagatgagctgaatatattcaagggcatttcagggaaccatctttttattggcatcatagtaataacagttatactccaggcgcttatcgttgagttcctcggcaagtttgcctcaacagttaggctaagttggcagctgtggttggtatcgataggtcttgctttcttcagctggccactggcattcgtgggaaagcttattcctattcctaaacgtccattaggagaattctttgcgtgctgctgtaactgtaaggggagcaaacaaggccctgatgacgcaacctctaatggtaaggaagacaacaagcttgagccatgagatatcgcaaggtttggtggctggcaacgatggccttctgctgtttcttgccagggtttgacgtgttggatttgtaattgcccctgattgcgattgtatatatatatacacacacgggttgctcctaggatctgttatacgggcaacatcaatttcataatcatagagattttcctcttagtcttcatttaccgagttcattgcgaatatgattaaacttgtcttgtctgaatctgaatctataacgagagttgggctatggtacccttctggagctgaccatgagtaggatgtcctgagatcttggacatcctgtgatgaaagtctgggaagattttagggccggttttaggttggcttcaaagcttgagctgacctcaattgtctattaaggagagtagcatttacgagtctagtgatgaatttatttggtctataaactggttagaagacaatctgtaatttgtagtctcctgacatccaatagaattcaggagtggtgtaccgact

SEQ ID NO: 9052 - DNA, 3146 bp, Zea Mays
cccctctgacgtgcttgccggcgagttgcgtactggcctcatttgccacaccaaagctcaaccaggatgttcccgtgggagatggacattgatggagagtcgagcaaaactctgggacagatggaagacctgactcagagctctgccacttatacgtcacagatgttgctttccaaccttgcttcttctgggatcaaagaaaaaattccattggagaatgagagttgtggcatttgtagagacatcgtcatcgacagaggagttttggattgttgctcacactggttttgctatacatgtattgacaactgggccgccatcacaaatcggtgccccctttgcaaaagtgaattccaacacataacatgcactccagtatatggtacgattggagctactgacgaagatgaatactctttaaccagctgtgatgatgattggtatgggcaagaggaaagcagcacactttccttcccgtcatactatattgatgcagaagccgtagtttgtttggatgatggtgattgcaagattcggaatggacttgtggcagctgaggatgattcaactttagatacatctattgcttgtgattcctgtgataaatggtaccatgctatttgtgtggcgttcaatgcaacaatggcatctgacagttcatggctctgcccaagatgcaagtttaacgaagtggaatatgaggcaaatgtaatcttgaagcaaaaccttggtgaggactgtgtgattggttctgataggacatgtaccaacgcatcattttctgggagggtgtcagtatctgttgctgatgagggagaaactgcccttgttgtatcaatggtgggtgcacattctgaaactaggggtggtctatcagaagcttcactaggacttgagacagcacatgaaacatttaactgcagtccatacccaagccattcaaaagatgtccttgttgcagatgctagttccttgaggaacacagatattgtcagtagatcccagaataaaccttctgaaataaatgttgtccacactctttgttctgagcctacagaaacatcactacaattttcaccaatacgtgagccagcaacaaccatatttagctcagagcaggataacatgtcaactgaacggttggaagtgccaaagcttgtgtcatcttgtccagtagtagataacagcaaggaggctaaaagtactggagaggagaatgcagcgcagcaaagcaataatgaattatcttctgtaatcaaatctccacaacctgcctcatcagatgcagttcatcagatgaaaactgcacaaaacctacagttgccacttaggcatgatgagcatagtagcgatgacaggaaagaagaacacattgaatctggaaatgaaatgatccatcctgcgaagaaagcaaaactggaagtgcaagaggacattaatgtaatcggaaactttgatttttcttcaatacatagtcatactactagtcctgcaaaagctattaccgacgacattatgtcagagtctgttgcacaacagaaatccattcctgatataatgagcattgttgacggtgaggtttacagaagggatcctggtagagagctggctaaacctgtaggaagaagagcaggagataagcctggtcctagagtgaaaaagatcttccgaaaggaagaaggaaaagaatcatctgccttggttcaaaagctacagaaagagattaaggaagtagttagagatacaggcacaaatatacttgagaaggatgaatcttttgatgaaaaactgttgactgcgttccgggcagctatagggaaatcagtggatggaccagccaaaagtactaacaccaatcaattaataagaacaaggaggtcattgcttcagaagggcaagaaacgtgagaatttgaccaaaaagttgtatggaacatctacaggaagaagaagaagcgattggcatcgtgattgggaagttgaattctggaaataccgttgctccccaggaataaatcctgaaaagattgagacattgcaatcagtacttcagctactaaagaaatcctctgaaatggacaaggaaagtgctaaggggaaaagggaagagaacaacaacagttccattttgtctaggttgtatttagctgatgcatcagttgttcccaggaaggatgatattaggcctctctctgcccttgcaggatgtgcgccattagaaaaaagtagccaaattaaagctagttgtaacaaatcgtctagcatacctgcaggaggcaacgagacaatgaaaatcagttcacccagcagcactgggaaagcatcaagctattcaattctgaataaagaggcacctagcagaagagaaaatagaaatagccagccctcccaggacaagagaaaccaatcctctggtgatatcaagcaggacaaaagaaaatgggctcttgagatcctggcaagaaaaaatgccagttctattacaaataaagatcaaactggaggcaatgatgctcttaagggaaacttccctctactggcacaacttccggttgatatgaggccgcagctggcagctggcagcaacaaaaaggttccggtatcagttagacaggcacaatttcaccgaattgctgagcattatttgcagaaagcaaatttggatgtcattcgcagatgtgcagatactgaattggccattgctgatgctgtcaatgtagaaaagggtatttatgaaaggtcaaatagcaaatcaatttatgtgaatctttgctctcaggctactcgccagcatgccaaggcaaaatctgataatgacacttcaactctaaccaaaaggactgaatcaggcagtgatcagatatcacaggaagctacatctgagggtaccaatgttagtggcagtgatatggaagaggatctaaacagagcagctatctccaatcaaaagaatgaactagaggatgatactgccccagaacatattgtgcacaaggatactgttagcttcaacagtgcagaagacgcactaaggaaagcgggcctttttgattcccctcctaacagtcctgagagagggaacacggcggttgaaggtaactctgaatccacggcagtttctaattgtcctaagttttcacaaaagaa

SEQ ID NO: 9053 - DNA, 3902 bp, Zea Mays
atggcccacagaggcacaaccccaattatgggtcatgtcgtgccagcacatgggacgagccagcggcccacgacacgacacacaattacttatagttgctcgaagtcattccacacatcagaggtggttttcctacctcgcttgttacctgtgcccgagctgctgcctacaacagttgggcttgcactcggcgttggcgtgaatgaagaactgccacaggcgccacctccatttccttgcgccattgctgacaccgaggaagctcgcgggctcgcgaccgaacaggaggtggactgtccgtccgcgccgtggctgactagccgagaaggaaatggaacgtggccgactaaccgaaaatgcgtcgtggccgcccgcaccgggaagagccgtcgccgcaccgggaacgggagaggaaagccgactagggaggggactggacgcggggaactggaatgtgagaacgggaggggaggggaggagattactggccgcctgggaggtagaaggaccgatggacgatggcgtgggctaagcatcaagcgacccgacgctcgccgaatcaacagcagcgccagcgaaaatcggaccctagcgacgctctccgaccaaaccaagcagcggcgcggccacttcagcgctcaggcagtggctcggccacatccaggagagggccagtggggaaggcgcggcgccaaatcgaggaggggtcgccgccagggcggctggacggcgccggctcgccggctccccgtggccaggcggccagccgcctccgtagccgctcctgacatctctgcgttgctgcaacagcatacggctgcatggcgcacagcggcacaagtacagccgcacaggcacacgaaacctcatttgccacaccaaagctcaaccaggatgttcccgtgggagatggacattgatggagagtcgagcaaaactctgggacagatggaagacctggaaaaaattccattggagaatgagagttgtggcatttgtagagacatcgtcatcgacagaggagttttggattgttgctcacactggttttgctatacatgtattgacaactgggccgccatcacaaatcggtgccccctttgcaaaagtgaattccaacacataacatgcactccagtatatggtacgattggagctactgacgaagatgaatactctttaaccagctgtgatgatgattggtatgggcaagaggaaagcagcacactttccttcccgtcatactatattgatgcagaagccgtagtttgtttggatgatggtgattgcaagattcggaatggacttgtggcagctgaggatgattcaactttagatacatctattgcttgtgattcctgtgataaatggtaccatgctatttgtgtggcgttcaatgcaacaatggcatctgacagttcatggctctgcccaagatgcaagtttaacgaagtggaatatgaggcaaatgtaatcttgaagcaaaaccttggtgaggactgtgtgattggttctgataggacatgtaccaacgcatcattttctgggagggtgtcagtatctgttgctgatgagggagaaactgcccttgttgtatcaatggtgggtgcacattctgaaactaggggtggtctatcagaagcttcactaggacttgagacagcacatgaaacatttaactgcagtccatacccaagccattcaaaagatgtccttgttgcagatgctagttccttgaggaacacagatattgtcagtagatcccagaataaaccttctgaaataaatgttgtccacactctttgttctgagcctacagaaacatcactacaattttcaccaatacgtgagccagcaacaaccatatttagctcagagcaggataacatgtcaactgaacggttggaagtgccaaagcttgtgtcatcttgtccagtagtagataacagcaaggaggctaaaagtactggagaggagaatgcagcgcagcaaagcaataatgaattatcttctgtaatcaaatctccacaacctgcctcatcagttcatcagatgaaaactgcacaaaacctacagttgccacttaggcatgatgagcatagtagcgatgacaggaaagaagaacacattgaatctggaaatgaaatgatccatcctgcgaagaaagcaaaactggaagtgcaagaggacattaatgtaatcggaaactttgatttttcttcaatacatagtcatactactagtcctgcaaaagctattaccgacgacattatgtcagagtctgttgcacaacagaaatccattcctgatataatgagcattgttgacggtgaggtttacagaagggatcctggtagagagctggctaaacctgtaggaagaagagcaggagataagcctggtcctagagtgaaaaagatcttccgaaaggaagaaggaaaagaatcatctgccttggttcaaaagctacagaaagagattaaggaagtagttagagatacaggcacaaatatacttgagaaggatgaatcttttgatgaaaaactgttgactgcgttccgggcagctatagggaaatcagtggatggaccagccaaaagtactaacaccaatcaattaataagaacaaggaggtcattgcttcagaagggcaagaaacgtgagaatttgaccaaaaagttgtatggaacatctacaggaagaagaagaagcgattggcatcgtgattgggaagttgaattctggaaataccgttgctccccaggaataaatcctgaaaagattgagacattgcaatcagtacttcagctactaaagaaatcctctgaaatggacaaggaaagtgctaaggggaaaagggaagagaacaacaacagttccattttgtctaggttgtatttagctgatgcatcagttgttcccaggaaggatgatattaggcctctctctgcccttgcaggatgtgcgccattagaaaaaagtagccaaattaaagctagttgtaacaaatcgtctagcatacctgcaggaggcaacgagacaatgaaaatcagttcacccagcagcactgggaaagcatcaagctattcaattctgaataaagaggcacctagcagaagagaaaatagaaatagccagccctcccaggacaagagaaaccaatcctctggtgatatcaagcaggacaaaagaaaatgggctcttgagatcctggcaagaaaaaatgccagttctattacaaataaagatcaaactggaggcaatgatgctcttaagggaaacttccctctactggcacaacttccggttgatatgaggccgcagctggcagctggcagcaacaaaaaggttccggtatcagttagacaggcacaatttcaccgaattgctgagcattatttgcagaaagcaaatttggatgtcattcgcagatgtgcagatactgaattggccattgctgatgctgtcaatgtagaaaagggtatttatgaaaggtcaaatagcaaatcaatttatgtgaatctttgctctcaggctactcgccagcatgccaaggcaaaatctgataatgacacttcaactctaaccaaaaggactgaatcaggcagtgatcagatatcacaggaagctacatctgagggtaccaatgttagtggcagtgatatggaagaggatctaaacagagcagctatctccaatcaaaagaatgaactagaggatgatactgccccagaacatattgtgcacaaggatactgttagcttcaacagtgcagaagacgcactaaggaaagcgggcctttttgattcccctcctaacagtcctgagagagggaacacggcggttgaaggtaactctgaatccacggcagtttctaattgtcctaagttttcacaaaagaa

SEQ ID NO: 9054 - DNA, 3908 bp, Zea Mays
atggcccacagaggcacaaccccaattatgggtcatgtcgtgccagcacatgggacgagccagcggcccacgacacgacacacaattacttatagttgctcgaagtcattccacacatcagaggtggttttcctacctcgcttgttacctgtgcccgagctgctgcctacaacagttgggcttgcactcggcgttggcgtgaatgaagaactgccacaggcgccacctccatttccttgcgccattgctgacaccgaggaagctcgcgggctcgcgaccgaacaggaggtggactgtccgtccgcgccgtggctgactagccgagaaggaaatggaacgtggccgactaaccgaaaatgcgtcgtggccgcccgcaccgggaagagccgtcgccgcaccgggaacgggagaggaaagccgactagggaggggactggacgcggggaactggaatgtgagaacgggaggggaggggaggagattactggccgcctgggaggtagaaggaccgatggacgatggcgtgggctaagcatcaagcgacccgacgctcgccgaatcaacagcagcgccagcgaaaatcggaccctagcgacgctctccgaccaaaccaagcagcggcgcggccacttcagcgctcaggcagtggctcggccacatccaggagagggccagtggggaaggcgcggcgccaaatcgaggaggggtcgccgccagggcggctggacggcgccggctcgccggctccccgtggccaggcggccagccgcctccgtagccgctcctgacatctctgcgttgctgcaacagcatacggctgcatggcgcacagcggcacaagtacagccgcacaggcacacgaaacctcatttgccacaccaaagctcaaccaggatgttcccgtgggagatggacattgatggagagtcgagcaaaactctgggacagatggaagacctggaaaaaattccattggagaatgagagttgtggcatttgtagagacatcgtcatcgacagaggagttttggattgttgctcacactggttttgctatacatgtattgacaactgggccgccatcacaaatcggtgccccctttgcaaaagtgaattccaacacataacatgcactccagtatatggtacgattggagctactgacgaagatgaatactctttaaccagctgtgatgatgattggtatgggcaagaggaaagcagcacactttccttcccgtcatactatattgatgcagaagccgtagtttgtttggatgatggtgattgcaagattcggaatggacttgtggcagctgaggatgattcaactttagatacatctattgcttgtgattcctgtgataaatggtaccatgctatttgtgtggcgttcaatgcaacaatggcatctgacagttcatggctctgcccaagatgcaagtttaacgaagtggaatatgaggcaaatgtaatcttgaagcaaaaccttggtgaggactgtgtgattggttctgataggacatgtaccaacgcatcattttctgggagggtgtcagtatctgttgctgatgagggagaaactgcccttgttgtatcaatggtgggtgcacattctgaaactaggggtggtctatcagaagcttcactaggacttgagacagcacatgaaacatttaactgcagtccatacccaagccattcaaaagatgtccttgttgcagatgctagttccttgaggaacacagatattgtcagtagatcccagaataaaccttctgaaataaatgttgtccacactctttgttctgagcctacagaaacatcactacaattttcaccaatacgtgagccagcaacaaccatatttagctcagagcaggataacatgtcaactgaacggttggaagtgccaaagcttgtgtcatcttgtccagtagtagataacagcaaggaggctaaaagtactggagaggagaatgcagcgcagcaaagcaataatgaattatcttctgtaatcaaatctccacaacctgcctcatcagatgcagttcatcagatgaaaactgcacaaaacctacagttgccacttaggcatgatgagcatagtagcgatgacaggaaagaagaacacattgaatctggaaatgaaatgatccatcctgcgaagaaagcaaaactggaagtgcaagaggacattaatgtaatcggaaactttgatttttcttcaatacatagtcatactactagtcctgcaaaagctattaccgacgacattatgtcagagtctgttgcacaacagaaatccattcctgatataatgagcattgttgacggtgaggtttacagaagggatcctggtagagagctggctaaacctgtaggaagaagagcaggagataagcctggtcctagagtgaaaaagatcttccgaaaggaagaaggaaaagaatcatctgccttggttcaaaagctacagaaagagattaaggaagtagttagagatacaggcacaaatatacttgagaaggatgaatcttttgatgaaaaactgttgactgcgttccgggcagctatagggaaatcagtggatggaccagccaaaagtactaacaccaatcaattaataagaacaaggaggtcattgcttcagaagggcaagaaacgtgagaatttgaccaaaaagttgtatggaacatctacaggaagaagaagaagcgattggcatcgtgattgggaagttgaattctggaaataccgttgctccccaggaataaatcctgaaaagattgagacattgcaatcagtacttcagctactaaagaaatcctctgaaatggacaaggaaagtgctaaggggaaaagggaagagaacaacaacagttccattttgtctaggttgtatttagctgatgcatcagttgttcccaggaaggatgatattaggcctctctctgcccttgcaggatgtgcgccattagaaaaaagtagccaaattaaagctagttgtaacaaatcgtctagcatacctgcaggaggcaacgagacaatgaaaatcagttcacccagcagcactgggaaagcatcaagctattcaattctgaataaagaggcacctagcagaagagaaaatagaaatagccagccctcccaggacaagagaaaccaatcctctggtgatatcaagcaggacaaaagaaaatgggctcttgagatcctggcaagaaaaaatgccagttctattacaaataaagatcaaactggaggcaatgatgctcttaagggaaacttccctctactggcacaacttccggttgatatgaggccgcagctggcagctggcagcaacaaaaaggttccggtatcagttagacaggcacaatttcaccgaattgctgagcattatttgcagaaagcaaatttggatgtcattcgcagatgtgcagatactgaattggccattgctgatgctgtcaatgtagaaaagggtatttatgaaaggtcaaatagcaaatcaatttatgtgaatctttgctctcaggctactcgccagcatgccaaggcaaaatctgataatgacacttcaactctaaccaaaaggactgaatcaggcagtgatcagatatcacaggaagctacatctgagggtaccaatgttagtggcagtgatatggaagaggatctaaacagagcagctatctccaatcaaaagaatgaactagaggatgatactgccccagaacatattgtgcacaaggatactgttagcttcaacagtgcagaagacgcactaaggaaagcgggcctttttgattcccctcctaacagtcctgagagagggaacacggcggttgaaggtaactctgaatccacggcagtttctaattgtcctaagttttcacaaaagaa

SEQ ID NO: 9055 - DNA, 1622 bp, Zea Mays
tatccttcctgctatgaacgaatgaaagtttatgcagatgcatttactttcatcgttggagagcattatatctgtatactgtaatttcattggtcaaacaaaaccttcgttcttcactgcattggttactagcccactgttgtttcatgattctagagccttgatgagataccaaacaaggccctcaggaacaaagatggctcaagagtttgcgaggattttgttagtttagtgcaagagtggcttcaaaagtttcaggcagcagattcattaggtggtgtatttggtgatacaaataaaagtgagctggctgcatttgcatcctacgcattggcttttccaagcaactttcttgctcttgtggacacatatgacgttatacgaagtggtattccgaatttctgtgcagtggctctagcacttcatgacttagggtacaaggcatctggtattagattagattctggtgatctggcctatttgtccattgaagcacgaaaagtgtttcgtgcagtagagaaggaattcaatctacctggttttgcaaagatggtcattactgctagcaacgatctgaacgaggaaacaattgatgccctcaacaaacagggtcatgaggttgatgcctttggaattggaacttaccttgtgacgtgttattcccaggctgctcttggttgtgtctttaagctagttgaaataaataatagacctcgtattaagctgtctgaggacgtggcaaaagtttccattccatgcaaaaagcgatgctttagactgtatgggaaagaaggctacccactggtagatatcatgattcgtgaaagtgaaccatcacctaaggcaggagaaagaatcctctgccgccatccattcattgaatcaaagagagcatatgttgtcccccagcatgttgaggagcttctacagtactattggccggggacatcagataaacctagagcagagctgccctccttggagaagatcagaagccgctgcatgcagcagcttgaaaagctgcgtccggatcacatccggcggctaaatccaacaccgtacaaggtgagcgtgagtgcgaagctgtacgacttcatccactgcctatggctgaacgaggcaccagttggtgaactgcagtagatgatggccacatgaaagaagttttgggtcatctttgacacagcagcaaaccatacaagaggatcagagcttttctgcgcaatatcagcagttgagcccatggcccatggcaggattttgctcttcagatttccatctctaatccccggtatagaggcaggttaatcaagtcgtctagtttatacatcctttgattggtgggatactatacacatcatcatcatgaaaagaacagaaatcatttggagtcaatgggaagattaatagccaaaaatgtcactatatatcctgcgtgtttgtcacatttgcaggtgttagatccaacagaccagcaggcttgaattgctcctgtcaccgttccctgttctcggctgttgtattacgcaaggactgccgtggggacgtggggtgggacgagtccaaacgttggagtcactagagtaaattggtgatgcgttctcaactgccgtgccgccgtg

SEQ ID NO: 9056 - DNA, 2164 bp, Zea Mays
cacaccctcagctgccaggtaggcttgcatgtttttgttcagcaccgaccggaggtattctcgccgtatctcagctgtggcgagcgccagacctcactcaccactgcatggatccgccactgatttcaaacatatcttcgtctcgacatctacagttgatgtttgacctgtactttaggaaaaatccatttggtggggagttcactgtttttgctggccttgaggagtgcatcaaatttatggcgaattttaagttcacagaacatgacatttctttcctgcaatcagtcatgccaacatgtgcgggtgctttcttcgattatctcggggaagttgactgctctgatgtagaggtgtactctattcctgagggatcagtagtttttccaaaagtgcccttgatgagagttgaaggtccggttgctgtagttcaacttcttgagaccccatttgtaaatcttatcaattatgcttctttggtaactactaatgctgcacgtcatcgtcatgttgctggaaagtcaaaagttctgttagaatttggtttaagacgagcacagggacctgatggagcaataagtgcctcaaaatattgttttatgggaggttttgacgcaactagcaatgttttggctggaaatttgtttggcataccacttcgtggaacacattctcatgcttttgttagctcatatatgagccttgatgagataccaaacaaggccctcaggaacaaagatggctcaagagtttgcgaggattttgttagtttagtgcaagagtggcttcaaaagtttcaggcagcagattcattaggtggtgtatttggtgatacaaataaaagtgagctggctgcatttgcatcctacgcattggcttttccaagcaactttcttgctcttgtggacacatatgacgttatacgaagtggtattccgaatttctgtgcagtggctctagcacttcatgacttagggtacaaggcatctggtattagattagattctggtgatctggcctatttgtccattgaagcacgaaaagtgtttcgtgcagtagagaaggaattcaatctacctggttttgcaaagatggtcattactgctagcaacgatctgaacgaggaaacaattgatgccctcaacaaacagggtcatgaggttgatgcctttggaattggaacttaccttgtgacgtgttattcccaggctgctcttggttgtgtctttaagctagttgaaataaataatagacctcgtattaagctgtctgaggacgtggcaaaagtttccattccatgcaaaaagcgatgctttagactgtatgggaaagaaggctacccactggtagatatcatgattcgtgaaagtgaaccatcacctaaggcaggagaaagaatcctctgccgccatccattcattgaatcaaagagagcatatgttgtcccccagcatgttgaggagcttctacagtactattggccggggacatcagataaacctagagcagagctgccctccttggagaagatcagaagccgctgcatgcagcagcttgaaaagctgcgtccggatcacatccggcggctaaatccaacaccgtacaaggtgagcgtgagtgcgaagctgtacgacttcatccactgcctatggctgaacgaggcaccagttggtgaactgcagtagatgatggccacatgaaagaagttttgggtcatctttgacacagcagcaaaccatacaagaggatcagagcttttctgcgcaatatcagcagttgagcccatggcccatggcaggattttgctcttcagatttccatctctaatccccggtatagaggcaggttaatcaagtcgtctagtttatacatcctttgattggtgggatactatacacatcatcatcatgaaaagaacagaaatcatttggagtcaatgggaagattaatagccaaaaatgtcactatatatcctgcgtgtttgtcacatttgcaggtgttagatccaacagaccagcaggcttgaattgctcctgtcaccgttccctgttctcggctgttgtattacgcaaggactgccgtggggacgtggggtgggacgagtccaaacgttggagtcactagagtaaattggtgatgcgttctcaactgccgtgccgccgtg

SEQ ID NO: 9057 - DNA, 1623 bp, Zea Mays
  misc_feature (1623)..(1623): n is a, c, g, or t
ctcccggttcccccactcgcgcaagtcgcaagctctcctctgcggctctgcctgtctttcgtttgctttgccattgcctgactagtgcttactgcctagccgcctagggacgcgatggtgttcaaggggcgcttcttctcgtcgcgacacaagtcatcggaatcctcgtcaagcccagacggcagcaacagcccgcgcacgcctacctcggcgccggcctcggtatccgcggcgtcgccggcgtcgtcatcgtcttctaaatccgacaagaagaagactaaattggagactcccaaaaagcgcgacaagctctttggttccgcggctaccgcccccaagagcgccgcgtcgtcggccccgtcaagcctggcgggtgacgggaggaaggggcccgtgctgcatcatagggacgcgggcggcggaggcgggggtggcgcatcggcggccgcgctgtcgccgatcctggcgtcctcactggggctcaaccggatcaagacgagatcccggccgctgccgcaggagggccaacgcatggctgccgcgctcgccagcagcaacctctcgcacgggcagggccaagcggaaccgtcggctggctcagccggagacggcgggagaaagggcgtcagctcctcggcggacacgagtagtagcagccgcgggatagtgaaaacgaccgagctggcgatgcgaagtgcacctgggacgaacttcggagcaggagggaagaacgctgtaaaaggaggtaataaaagttatccagatgagatttgagaaggcaaaggaagaggtaaattcagatttggcagtttttgcaggagacttggttagcgtaatggaaaagtatgcagactctcatcctgagtggaaagaaaccttggaggacatgctaatacttgcacgtacctgctgtgtgatgacacctggggaattctggcttcagtgtgaagttatagtgcaagatttggatgaccatcgtcaggagctctcaatgggtgttctgaagaaactatatactcggatgctttttatccttacaagatgcacaaggttgcttcagttccacaaagaaagtgggtttgctgaggatgaagttgttatccatcagcgtgataagattatacagtctgcagataggcaggttttaactcaaccaggtgcagatggtacaatatccagagccagtaaaagtgaggcaagaaaatcatacagtcaggagcagcataatttgaaatggaagcgcagccaggagataaagcctgttaagcttcttccaccacttgacacagatgttaagaaagatgctgtttctccaagcaaagaacggatatcttcttggaaaccttttccatcgcctaatacaaaggtcccaaaggaatctattcctactaaatcggaatcacctaataagaaaactgatgcacactctacagttagtagccatgttgaattaagcagtcaagttgaatctttaccacaacaacagcttcctgacaagcatcaacataaaacttcatggggacactggtctgaccagccaaatatttctgaagagggttcaataatgtgccgcatatgtgaagaatatgttccgacacactatgtagaagaccattcaaaggn

SEQ ID NO: 9058 - DNA, 1709 bp, Zea Mays
gccgaagccctgggtgcggtgggcccgcggactgccatgagaggcacgggagcttcaaaaagaagccaacagcgggcgagaacggcaggcggaggcgacgtgtggacgtcaggcctcgcgccggatagcgtaccgactggcgagccagtgaaagaagaccccgtccccctccgcccacagactccacgcctaccccgcactcactgacagccccgccgcactccgtgtagagtccacatctcagtgaagcgaacccgtgggtttgtgtagctgagagctttttacgcgtcgctgcctttgtcttcccttcttccgctgatccgtctccatgcggctgccaagcgctgctggaaagtttaaaaacgcacggggagcttggagacttcacgacaaatcgacgatcgccgcttctcttggccattgtagagggagagagagagcgcgagcgacctaggtcagtcggtttcggttttgggcgtcagcttcagctatccgcgaccgcgacgatgggtctgcgcgtggccgccaccgcgccagctccggccggcgtgcgcgtgctcggcagagtcatcggcaaagaggtgcaggcatcagcatctgttgtttgccaattgatggcagccgggcatctgattttggcctaatgaagatagacgacactggaagggtaatttcattcagtgagaaaccaaaaggagacgaattaaaggcaatgcaagttgacaccacagtgcttggcttatcaaaggaggaagcagaaaacaaaccttatatagcttcaatggggatctatatttttaagaaagacatactcctaaaccttctaagatggcgttttcccactgcaaatgattttggttctgaaataattcctgcttcagcaaaagaaatcgatgtaaaggcttatcttttcaatgattactgggaagatattggaactattaagtccttctttgaggcaaaccttgctcttgctgaacagcctccaaggttcagtttctacgatgctgacaaaccaatgtatacatcacggagaaacctaccaccatctatggtcaacaataatcactgattcaatcatttcccacggatgtttcttggataactgcaggatagaacatagtgttgttggagttcgttctcggataggctccaatgtgcacctcaaggatactgtaatgcttggcgctgattattatgaaactgccgtggaaagaggagagctgcttgcagaaggaaaagttcctattgggattggagagaatacaacgattcaaaagtgtatcatagacaagaatgcgaggatagggaagaaagtggtaatctccaactctgaaggtgtagatgaagctgatagaacttccgaaggcttctacattcgatctggcatcactgtcgtactgaagaacgcgataattgctgatggattggtcatatgagctgaaaaggtctcacaggacgggtatttgccgcacaaaatatcaataggagttctttgttagttttacaataagatgctgtatagcagtcaacaggttattcttgtctatacaagatacctttgtctacaaatcttgtctcaccatgttgtattcgactcaaacaatgttgcagtcatggacattgtccgtttcaaattttcttccttgcacatttacacaaaccttttcaatttttatttcttgctaaacaataaaagctgttgttct

SEQ ID NO: 9059 - DNA, 1772 bp, Zea Mays
gccgaagccctgggtgcgctatccgcgaccgcgacgatgggtctgcgcgtggccgccaccgcgccagctccggccggcgtgcgcgtgctcggcaggggcgccgcgcgcgtgacgccgcgaccgtgggcggctgtcggcggcaggagacgcttctccgtgcggatgtccgtcgcgaccaccgaggccaccaccaccatcgccgtgggcgcctcggaggaccaggcgctggaggctaggaactccaagacggtggtggcggtcatcctcggcggtggcgccgggaccaggctcttcccgcttaccagacgcagggccaagcccgcggtgccaattggcggcgcgtacaggctcatcgacgtgccgatgagcaactgcataaacagcgggatcaacaaggtctacatcctcacgcagttcaactcgcaatccctcaatcgccacctctccagagcctacgatttcagcaatggcgtggccatcggagacggattcgtcgaggttctagcagcaacccagaggcctggaacggaggggaaaaggtggtttcagggtactgctgatgcagttcggcagttcgactggcttttcgatgatgcaaaatctaaagacattgaagatgtgctgattctttctggtgaccatctctaccgtatggactacatggactttgttcagagtcatcggcaaagaggtgcaggcatcagcatctgttgtttgccaattgatggcagccgggcatctgattttggcctaatgaagatagacgacactggaagggtaatttcattcagtgagaaaccaaaaggagacgaattaaaggcaatgcaagttgacaccacagtgcttggcttatcaaaggaggaagcagaaaacaaaccttatatagcttcaatggggatctatatttttaagaaagacatactcctaaaccttctaagatggcgttttcccactgcaaatgattttggttctgaaataattcctgcttcagcaaaagaaatcgatgtaaaggcttatcttttcaatgattactgggaagatattggaactattaagtccttctttgaggcaaaccttgctcttgctgaacagcctccaaggttcagtttctacgatgctgacaaaccaatgtatacatcacggagaaacctaccaccatctatggtcaacaatagatagaacatagtgttgttggagttcgttctcggataggctccaatgtgcacctcaaggatactgtaatgcttggcgctgattattatgaaactgccgtggaaagaggagagctgcttgcagaaggaaaagttcctattgggattggagagaatacaacgattcaaaagtgtatcatagacaagaatgcgaggatagggaagaaagtggtaatctccaactctgaaggtgtagatgaagctgatagaacttccgaaggcttctacattcgatctggcatcactgtcgtactgaagaacgcgataattgctgatggattggtcatatgagctgaaaaggtctcacaggacgggtatttgccgcacaaaatatcaataggagttctttgttagttttacaataagatgctgtatagcagtcaacaggttattcttgtctatacaagatacctttgtctacaaatcttgtctcaccatgttgtattcgactcaaacaatgttgcagtcatggacattgtccgtttcaaattttcttccttgcacatttacacaaaccttttcaatttttatttcttgctaaacaataaaagctgttgttct

SEQ ID NO: 9060 - DNA, 3044 bp, Zea Mays
atggcctcggatccaaccagggaaggaaggaatccaagccaccccagtccgctgcttccattccatctcccttctctcgccttctgcggcactgcagtgctctgctgcctcggcgtctccacctcctcccggcgacggcagggcatccgatacgacgccgcgcttccttccgaatcccaagccgcaccccgcaccctcccggtcgccattcccgatgctggtgttctcgagcgacgacgactgctgcggctcctcgtactaggggggcaggatcgatcggcaggtgacgtttcgttcgttctgctgttcggttcgaacgggagagtttgcttgggggttggtgcatcggtttcagaacgaccagttcattagttttggggattggggctatttcttgttttttttaaggcaggagagttgcttttcattctacgtattcgagagatgaaaaaaaagtgttttttgggctagttttgttccaatgatttggtagcaattaccatggcagttgcacgaaagggattcatgtactgggtctgaacggtttcatggcgatgcagtttccatcaccaaattcaccgtgagatgtctggtactcgttgtgactaactcagtaggcagtctgtcagttaagccagattgtcccacagactcgcagaactataggatatcacagaacagttcttgaggtacttattgcagcctaatagtacatggagcgatattcagatatgagaccaaaggcagaagtttcatatctcggaaggggttccagattctcttctagaaatcaaagttcagaagagaggactaaccatagcagcgataaaccgggaagcagcacaagattcaatcctacgaaagcgagaattggcggtaatcaagggaggccaagatatgtatgcgattcatttaaatctccaagctcaaaggtgtcgcctgcaggctcttccaaatttccacttagcaagtttgaggagaggcgaagacagccttttgtgccagggtttgacattgctgaaagtagtagaagaaaggctgatgccaagcagctacagggtagtaagaaaattgctgcagagaacgacagttcagacaatctgcgaggtgaatcagaaggttttactactgaacaagtagtaaaaccagaaggctctcatgttgtcggtcattcaggtgtttctgcgtatacagtcgggtccctggtccaaactgcttcactaggttctaggacacacagacagaaacacaaagaagtgaatttgggtactccaggagcatcgtcttcaactctgactaacaggtctactatacctggaaattctaccatgggtgtgaggccagcttatggtcatgttaatggagggcagatacatggtcttaaaaaccttggttgttcttcggtacctgatgctcagccatcaggttgcccatctgagtctgttattagtaggaggaggtttgagttcatgagaaagagggcctttgaccaggaaagctcttccagatcagtgaacttaagcttaggtcattcaactcctacagatattcgcagaatcagaatgaatgaacaatcactttgtcaacaaataccacgaagcagcagcagaagccatcaggaatcggcaggttcagttaggacaagacgaccttctcctcatgccactaggatgagtgttcctgatggaagagcagatggcgtgctttctctgcacgagtcatccacaaaggatgtacagccagctcaggaacatctttcattggaagaagtctccactgagagttcaataaggccattctttgtggaatttgataataacattttctcgtctagtcatcttcgtcgctcgagtactcgagctgaaaggggaagaccaagctccctttttgaagaaagtcctcgacaaatgttccatagtctcatgggggagagggacagacatagacacataaccatggaaggaattacagaggttttggctgcattggagaggattgaacagcaagcagagctgacctatgatcaattgctaatgctggaggctaatctattttttggcgcctttgcctcctatgatcggcatagagacatgcggatggatattgatgatatgtcctatgaggaattattggccctggaggagagaataggctctgtgagcacagctctttcagaggagcagttcacaaaatgcctcaaaagaagcatatatagtcaggtcgctctagaagtgaacaaatcaaccgttgatgacatgaaatgcatcatctgtcaggaagagtacgcggagggcgaagaggttgggaggctgccatgcgagcaccggtaccatgtgtgctgcataggccagtggcttgggcagaagaactggtgtccagtatgcaaagcgtctgccgtgccttccaagggctgaagcattggggatgctggaaaccccgttccggattacaaaccatccttgcttttgtctacgtacattgttcttttccctatatgcattagatatagatcatgtctagatgtatgacgctagaacagcttgcgatttgggaggaagctaagagagtaatagttagctggttaataatagttcatagctaatatttgctagataactattacttggctacctattagctgtgcctttcacattgtggtacaggacaaatgcttgtcagatcgtgaacaaccttataacttgatgaatggcctaagtcaaagaggaatatgttgtgccaatctcaaccctatgctctcttcgtgtagtctgggtgtgtttggttgcgggacagtcaagaaagggacgttccctgacgttctctctcgtctttctgattttgagggataactggggataacactgtaatagttctgtttcaacccttgatcttgaactaaacaaccttatttgagggatcatctcatcttatctcgtcctgtcattacaaccaatcttgttagaaaataaaaaatgcggtagagatggtatcatagtagttgtacataagacagttcaatctattgtatagatttttgattaggc

SEQ ID NO: 9061 - DNA, 3271 bp, Zea Mays
cacgccctctcccctcttcccgcaccgcagcgcggcaccggcacctgccaccagcggccatggatctgctcccgccgccgacggacgcgccggatgccggcggccccagcgccggcgggtcaggccgggggctgcgccgcgggatcgggttccggtcgctgaagctggtcagcgttgccatggacgagaccctgcccgtcgaccccgtcggcgccacctacggccgcctcgccaacggcctcacctactacgtccgctcaaacccaaagccacgcatgcgcgccgcgctctcgcttgccgtcaaggtcgggtcggtggtagaggaggaggacgagcgcggtgtggcgcacatcgttgagcacctcgccttcagcgccaccgcgcgatataccaaccacgacatcgtcaagttcctcgagagcataggggccgagttcggtgcctgccagaacgcgctcacctcatcggatgagactatttacgagctgctcgtacccgtcgacaagccaggcctgctctcccaggctatatctgtcctcgcagagttcagctcagaggttagggtgtcagcagaggatctggagaaagagaggggtgctgtgctggaggagtacaggggtggacgcaatgcagcaggccggatgcaggactcccactgggcactgttgtttgatggttctaagtatgcagagcgcctgccaattggtactgagaaggtgatacgaactgttacacatgagaccgtgaagcggttttatcagaagtggtaccatctaagcaatatggcggtatttgcagtgggtgatttcccagatacacaggctgtcgtggagttgataaatgagcattttgggcacaaagctccagctccccaccctcctccagttataccagaattttcagttccatcgcatgaggaaccacgcttttcatgttttgtggaatctgaagctgcagggtcggctgttgttatcagctgcaagatgcctgctggtggaattaaaacagtaaaggactacaaagattcactggcagagtccatgtttcattgtgcgctaaaccagaggctcttcaaaatatctcgtagaaaggatcctccttatttttcttgctcctcagctgcagatgctctcgtctgtccagttaaggcttacattatgacatctagttgtcgggaaaggggaacagttgaagctctcgagtccatgcttcttgaggttgctagggtacggcttcatggattttctgaccgtgagatatccattgtacgcgccctaatgatgtcagagatggaatctgcatatttggagcgtgatcaaatgcaatctaccagcttacgggatgagtttttgcagcattttcttcgtgaggaacctgttgttgggattgaatatgaagcacagttacaaaagactcttcttccccatatttcttctgcggaagtggcaaaatttgcagaaaacttttcaacggccagcagctgtgttatcaagatagttgaacctcgagctcatgcttctttggaggatctgaaagcagttgtgctgaaagtcaacagtatggaagaagataaatctatttttccatgggatgaagaacaaattccagaagaaattgttgcccaagctccagagccagggactataattgctaaagtggagcacccaggcataggtgctactgagatgatactttcaaatggcatgcggatttgttacaagtatactgattttcttgatgaccaggttgtttttactggctttgcctatggtggtctgtcagaattatctgaagctgagtatacttcatgctcaatgggttcgaccatagcaggagaaattggcacttttggctacagaccttctgtcttgatggacatgcttgctggcaagagagccgaagttggtacaaaagtgggggcctacatgagaacattttctggcgattgctcaccttcagatcttgagacagctttgcagcttgtttatcaactatttacaacaaatgtggagccaagggaggaagaagtaaaaatagtgatgcaaatggcagaggaagcaatctatgctcaagagcgcgatccatacacagcatttgcgaatcgtgttcgtgaaataaattatgggaactcatacttttttaagccaattagaataagtgacttgaagaaagtggatccaatcagagcgtgtgaatatttcaacaattgtttcaaggatccatcagcttttacggtggtaatagttggaaaaatagacccagccatctcacttccactggttctgcagtacttgggtggaatacctagggtacaggatgctactcaaccacttagtcgtgatgatctaagaggattgccatttaagtttcctgcaaccatcattagagaagttgtccgcagccctatggttgaagcacagtgctttgtacaactagcatttcctgttgttcttaagaacacaatgatgactgaagatattcactatgttgggtttcttagtaaacttctggaaacaaaaatcatgcaagtacttcgcttcaaatatgggcagatctattcagttaatgtagctgtcttcttggggggcaacaaaccctcaagaactggagatgttcgtggagatataagcgtgaatttctcatgtgatccagacatatcatctaaactggttgattttgttctggaggagatatcatgcctacaaacagaaggtccttctgaagaagatgtattgtccatcctcgaaattgaacaaagagctcatgaaaatggattacaggagaattacttctggttggatcgtattctacggagctatcaatcaaggcttttttctggagatattggatccacctttgcgttccaagaggaggggcgtataaaggttagggatgctttgacaccacagagcatgcaatcagccttgcaacgagttatacctttcccttgcagaaagcagtacactgtggttattcttatgccaaagtcatcctgttgggcgtcagtgaagtcaatgcttagctggagttctaatggggtcagcagagatgctaagatcctcgctggcatggctggtgcactggtgttggcaaacgaggaaaaatctataatgagcaggaaatgtgatattcctttatgctgctccgttggttttcatatattggctaggacagcgtccaagggtagcgttgggaaccgcgacgtccaagaaaggatagtgttgaaacttgtgacgtttaaggaggtgtttgtttgagattataatccggc

SEQ ID NO: 9062 - DNA, 1085 bp, Zea Mays
cgccgctgtaggctgtagcgtcggttggacgtcgtgagcgtgcagagcaattaagcaaagcagatgcaagttgatgctacacccaatcacacactgaatctgccccacagcacaccgaacttcagcactggggatttccctgcacttccaacagctgaggaccaaaatggtttcaatcaggccgttcgcaaacttgcatcgcagaactctggccagtggaagtttaaaaaaggtcctgagtatggtaatggcatttcagctctttctgtacccaagcagtacagttctagcactaaacaatcgtctgggaacaagtttcaaagcatcagcagtggaagagttgccccatggcttgagactggtgatgcagtggcaagtatgtactcagaatcaaggggagaggctcgtgattttgctagggtccggaatacctgctttgagcaggctagacaggcttacttggttggcaacaaggctcttgcgaaggagctcagcatgaaggggcaggcctacaatgtgcaaatgaaagcggctcatgagaaagctagagaagctatttaccgacaaaggaatcctgtttcttcccaacgtgggggtggtgaccacctgattgatttacatggcctgcatgtgaacgaagcaatccacatcctgaagggtgagctcaccgccttgaagagcgcggcgagggcagcaggggagaggatgcaagtcatggtttgcgttggaacaggccaccacaccaagggctctcgcactgcgaggttgcccatcgctgtggagcagttcctgctggatgaaggcctccagtacacgcagcctcaggcgggtctgctccgagtgatggtgtactaacatctcttaggtgagacatcacggtgaggaaaaaaactccaaaaaaagagaaaagagatgtacgaaaacgcaggaaaaaaaagcgtcgttggagcacgcactgttattccgtgtagctgtatattaaaagaggcagcaggagaatagcctgacaacaggatacagtgtaaaattatacgtagcttccttcattcaattcacattccttttccatccatccgctgctgtgc

SEQ ID NO: 9063 - DNA, 2918 bp, Zea Mays
ccagagtccggacactcacactcccctgctgcgcctgccgcctgcgtttcggccaccgcactacttccccaatccccttgatatcgcccacccgcgctcgccgccgccgctgggcggcgatggaaaccctaatggtagaccgcgtccacagtagcctccgcctcttcatgtaccgcaacgccatattcctctgcgagcgcctctgcgcacagttcccctccgagaccaatgtgcaattgctagcaacctgctacctacacaacaatcagccatatgctgcatatcacgttttgaaagggaagaagctgccggagtcccggtacttgtttgctacatcatgctttcgaatgaacctcttgcgtgaagcagaagaaattctatgtccagtcaatgagccaaacatggaggttccaagtggagcaacaggacactacctccttggagtgatctacaggtgcacaggcagaatttcagctgcagctgaacaatttacacaagcgttgactctagatcctcttttatgggcggcatatgaggaattgtgtatattaggtattgccgaagataccgatgagtgttttagtgaatcgactgctctacgtctccagcaggaacacacatccacgtccactttggtgaagtcgaactttgccaatgaaaatcgagttctatcatccagtgtctctgcaagttttggggatattattcctaagcaaatcaaacagcttcatgctaacaacataacagaagtatctggttatcctcatgtaagaccaaccgcattgcatgtgcagaacagttcaacttctaatgtatcacagtttgacaccccatcaccagctgcagcacagacttctatcatgccaccaccactatttaggaatgtacatgcttaccagaatacaataagtggcgatgctcccactaagcagaaagctaatggagtaagccagccactcagaaggaaatacatggatgaagcaaggctaaagaaggtttctggaaggttgtttaatagcgatgcaatgcctcgaagaagtcaaagacttaaagatacaacaacaaattcaaatacatctcaaattggaggaaatggaacagatcatttgtcagacaatatgtcaggaacttcatcttctgtaagtacagctgatggaagatcctttgagcaagatagagctgaacgaattctgttgcaagactccaaagtggcacttggtattagggagctattgggacttttccgaacactgggggaaggttttaggctttcttgcttgtttaagtgccaggaagcactggaagtctacagaaaactccctgagtcgcagtttaacactggatgggttctatgccaggttggtaaggcatattttgaattagttgattatttggaagctgatcattattttgagctggcacaccgactatcgccttgtacgcttgatggaatggacatctattctactgttctttatcatctgaatgaggaaatgagactaagctaccttgctcaagagcttatttccattgatcgactatctcctcaagcatggtgtgcagtgggcaattgctttgccttgagaaaagatcatgagactgctttgaagaattttcaacgttcggtacagcttgactcaagatttgcatatgctcacactctatgtggtcatgagtattctgcactggaggattatgagaatagtatcaaattctacagatgtgcactgcaggtagatgaaaggcactacaatgcttggtatggccttggggtggtgtatcttcgccaggaaaagtttgagtttgctgagcatcatttcagaagggcatttcagataaatcctcgctcttctgttctcatgtgctatcttgggatggccttgcattctcttaagaggaatgaagaggcactggaaatgatggagaaagctatagcagctgataagaagaatccactgcccaagtatcagaagtccttaatccttctaggactaatgaagtatgaagaagctctggatgagttggagcggctaaaggagattgcaccccatgagagtagtatgtatgcactgatgggaaagatttacaagcaactcaatattcttgacaaagctgttttctgcttcggcattgccctggatttgaaaccacctgctgctgatcttgctataattaagtccgcaatggagaaagtacatctccctgatgaactgatggaggatgacctataagttcactcaagcatcgtgagaaatgaacatttacttcgggttcatgatgacccgcctgtgcttcgtgttcctggcctagtggcctgcttgggcttctcaagtggaactcggaagtcggagctgtaccattagccatccagtttggaatgaaaagaaaaaaaaattaaccatccagttttgtagatttagttttagcctgtaatcagagaacacatgcgcagaagctgcggtagtttaggactctgtacaagtgttggcgaaatgacgcctgtaccattatcaaataacggaaataattaaaggatgaggatccagctgattcaagcagattgtttgtcgcatctacaaaccttttaaaggtgtcacattcaaaggttgaaaacatttcagcccaagtaaatcgatttgaagaagagcggaggaaaagaggatgcttccgcgagtcagcctcctactaactactggcttggaggtgggggataaagctaggctcttcatgcaagcaaagtgtaaccatccgttttcttgctagtagcctgtatcattgctgcatatcctggcatcattaagaaaccatccaaaggagagtgtcagtgatgagcaatttctggaaaagttttactttgcattatgcgatgtgatatatatattttatttacatggtatgttgcatgggcttgagataat

SEQ ID NO: 9064 - DNA, 2938 bp, Zea Mays
gcctgctggattcaaacggctgattcaaacgaccagagtccggacactcacactcccctgctgcgcctgccgcctgcgtttcggccaccgcactacttccccaatccccttgatatcgcccacccgcgctcgccgccgccgctgggcggcgatggaaaccctaatggtagaccgcgtccacagtagcctccgcctcttcatgtaccgcaacgccatattcctctgcgagcgcctctgcgcacagttcccctccgagaccaatgtgcaattgctagcaacctgctacctacacaacaatcagccatatgctgcatatcacgttttgaaagggaagaagctgccggagtcccggtacttgtttgctacatcatgctttcgaatgaacctcttgcgtgaagcagaagaaattctatgtccagtcaatgagccaaacatggaggttccaagtggagcaacaggacactacctccttggagtgatctacaggtgcacaggcagaatttcagctgcagctgaacaatttacacaagcgttgactctagatcctcttttatgggcggcatatgaggaattgtgtatattaggtattgccgaagataccgatgagtgttttagtgaatcgactgctctacgtctccagcaggaacacacatccacgtccactttggtgaagtcgaactttgccaatgaaaatcgagttctatcatccagtgtctctgcaagttttggggatattattcctaagcaaatcaaacagcttcatgctaacaacataacagaagtatctggttatcctcatacttctatcatgccaccaccactatttaggaatgtacatgcttaccagaatacaataagtggcgatgctcccactaagcagaaagctaatggagtaagccagccactcagaaggaaatacatggatgaagcaaggctaaagaaggtttctggaaggttgtttaatagcgatgcaatgcctcgaagaagtcaaagacttaaagatacaacaacaaattcaaatacatctcaaattggaggaaatggaacagatcatttgtcaggtaaattgcgagtaaactcgtccacacaatcaaaattgtgttcaacagccatacgttctgtgcaagttaggaaaggaaaaccacgggctacagaaaattttgatgaagctgatggaagatcctttgagcaagatagagctgaacgaattctgttgcaagactccaaagtggcacttggtattagggagctattgggacttttccgaacactgggggaaggttttaggctttcttgcttgtttaagtgccaggaagcactggaagtctacagaaaactccctgagtcgcagtttaacactggatgggttctatgccaggttggtaaggcatattttgaattagttgattatttggaagctgatcattattttgagctggcacaccgactatcgccttgtacgcttgatggaatggacatctattctactgttctttatcatctgaatgaggaaatgagactaagctaccttgctcaagagcttatttccattgatcgactatctcctcaagcatggtgtgcagtgggcaattgctttgccttgagaaaagatcatgagactgctttgaagaattttcaacgttcggtacagcttgactcaagatttgcatatgctcacactctatgtggtcatgagtattctgcactggaggattatgagaatagtatcaaattctacagatgtgcactgcaggtagatgaaaggcactacaatgcttggtatggccttggggtggtgtatcttcgccaggaaaagtttgagtttgctgagcatcatttcagaagggcatttcagataaatcctcgctcttctgttctcatgtgctatcttgggatggccttgcattctcttaagaggaatgaagaggcactggaaatgatggagaaagctatagcagctgataagaagaatccactgcccaagtatcagaagtccttaatccttctaggactaatgaagtatgaagaagctctggatgagttggagcggctaaaggagattgcaccccatgagagtagtatgtatgcactgatgggaaagatttacaagcaactcaatattcttgacaaagctgttttctgcttcggcattgccctggatttgaaaccacctgctgctgatcttgctataattaagtccgcaatggagaaagtacatctccctgatgaactgatggaggatgacctataagttcactcaagcatcgtgagaaatgaacatttacttcgggttcatgatgacccgcctgtgcttcgtgttcctggcctagtggcctgcttgggcttctcaagtggaactcggaagtcggagctgtaccattagccatccagtttggaatgaaaagaaaaaaaaattaaccatccagttttgtagatttagttttagcctgtaatcagagaacacatgcgcagaagctgcggtagtttaggactctgtacaagtgttggcgaaatgacgcctgtaccattatcaaataacggaaataattaaaggatgaggatccagctgattcaagcagattgtttgtcgcatctacaaaccttttaaaggtgtcacattcaaaggttgaaaacatttcagcccaagtaaatcgatttgaagaagagcggaggaaaagaggatgcttccgcgagtcagcctcctactaactactggcttggaggtgggggataaagctaggctcttcatgcaagcaaagtgtaaccatccgttttcttgctagtagcctgtatcattgctgcatatcctggcatcattaagaaaccatccaaaggagagtgtcagtgatgagcaatttctggaaaagttttactttgcattatgcgatgtgatatatatattttatttacatggtatgttgcatgggcttgagataat

SEQ ID NO: 9065 - DNA, 1765 bp, Zea Mays
caaatttctcaacgtggatagtgagcacatttgactgaccgccatagcaaccagaggaacacaaagcggcgaccgacgagccaagcaagcagcagagcatggacgcgggagaggtgcggcactggaacgcggacgtcaacggcgtctccatccacgtcgccgagcggggccccgaggatgggcccgcggtgctcctaatccacggcttcccggagctctggctctcgtggcgccaccagatggccgcgctcgccgcccgcgggttccgcgcgctggctcccgatctccgcggctacggcgactcctccgtgccgtccgaccccgccgcctacaccatcttccacatcgttggcgacatcgtcgcgctccttgaccacctccaagttccaactcacaaaggtgttcgtggttgggcacgactggggcgcgatggtggcgtggcacctctgcctgttccggccggaccgggtgcgcgccgctgttgtcctggggatcccctacttcccccgcggccctcgcccgatgacggactcatttgccaagctcggcgatggattctacatcaatcagttccaggagccaggaagagccgagagggcatttgctcgctacgatgttgcgacggtcctaaagaagttctacgccttgaaaatcgacgagatgattgctcctcctggagtggagatcatagactttctccaggcaccttcttcgccgattccctggatgacagacgaagaactgggacggtacgccgagaagttcgagaagactggcttcacaggacccctcaactactaccgcatgcttgaaacaaactggagactgactgcaccttggagtggatcgaaaatcacagtgcctgcgaaattcatactcagcaagaacgacgtcggcctgcagtccttcggaaccgagaagtacgtcaagagtggcgctctgaaggagaacgttccagaccttgagatttcgatcatcgaggggcaccatttcgtccagcaggaagaggccgggacagtgaattcggaaatactctccttccttggcaagtttcccagcgagggaggatcagcgtgattgttatttattgtttgcagccagtcccggactcctgagaggaagatggcctccgaatgatccgagggtttatgattgaataaagtgagagctcagatcgatagccgtctgttggcttgcattaaaaaaataaagagcttgcatgtaaaactatttatgaacgaataaacttctgtcatatactcgcaagtctcaacattgtttacatgccagccaacgaacaactaagcagaagtgcagaacacatcatctgcagcgcacaaaagttttcttttacacaaccggggaaaacgcacagagaaaaaaaaaactgcacaagatgagccaattcatttacacagtccataaaaaggcgaacgggaacagttcagcctcgtcagcatacaggtgaagcgcacttctccgccgacggcgacgcacgcttgggcttgatggaccggaccttcacgtagcggcgcaccattccgatcaccctccgtcccgccggcacctgtccagcccgccgcgttgcctcgcctgctgcagctccttgtagttgtgcaaattcacgaacaccagcagcaggagtgttcccttccgtggtgcctccggtggcggcgccgtcgacggcctcgtcctcgatcagctcctgcagcgagaaacgacggtcctgacactcttcctccgtcgagggttctgacgcctcgtg

SEQ ID NO: 9066 - DNA, 1772 bp, Zea Mays
cgccaccgccgcctcccgtttgttctcaagattctctcccgccaccgctccgagtcccaacctccatcgacggggaggcgtcctccatccgggccggttagattcatcgctttgtagctggtcctcgtcgtttccctctgctgtggtgggagaagcgactcgcgcgcgcgatcggccaacaaattaagcacggggcagggccgtacgcaggaggcgagctctagggctctccggggagaaggttgccaggcacgccaggtgaacgccgtactgagtttgcagtccgggacgtagcgcgttctctggtcgggaggtggggaagcggagagcgatggctgcgccgaggaaggggacggcgacgccactgggcgccgtattctcgccagaggagacgaagagggccgtggcgagggtggccgagtccatcgctggccgccgcgccgagctcgggcacctactgggcttcgtcgccgacaacgcggccctcgtctccctcgtcaacaggctcccagtcgaactctcccacgaaatcatggtcccctttggtggtgctgcatttttcccagggcgtttaatacacacaaatgaactcttggtgcttctgggtgaggggtactatgccgagaggtctgctaagcagacgactgatatattgcacaggagggggcaggaattggaagctcaggtcgaagcaatgaaggcaactatcactgatcttgaagctgaggcgaatttttttgagtccactgccaccgaggcttcagagggtcttgttgaaatcagggaagagtatgatgaggatacagagacaaagacaacaagatcaggaaagattaatcaaagaaagagattgagtcttgcctccctgctgttctcaaccccattgctgcgcctgaaccctaggtcaggcgtcaccacggcaatctctcacacctcttcctccaaccctctaaccattagccactcatataacctccgcagccggagtaattctaacaacctggtatcggatatgccaggatctgctgaagctgaaactgcagcttcagcccagccgtcggagttggcagcaatcaccaccgcccttgctgaagtccagcgccaactggggctcttcgccacgcagatggcctccatgtcctcccgcattgccgcggtggaatccacctcaggaacatcggccatggcgccaccaccagactgcccctacgacatgcctggatatgatgggctgtggctagcctacagttccaaccaaggtttccaggccacagtagcaaatggtgacaagattcactgccgacagattgctaacagtattgaggcttcaattgctactggggttatgtttgataatgatagggaacatgctcaaatcatggcaaggttagttgaactcgaaagggaagaaaaggaagctggaaatacttgtgaagatgatgatgatgatggcgacgatgatggagatgctggtacaagtgaggatggtgaggaaaataaggaacccggaaatgctttaagtgatggcaatgaggaccacagttctggttctggtgctttattttttggaaatggtggcaatgataggagtaatgggaatatcaagctgaagagtgcactgaagaagcctggaggagatgaaatgctgaaagacatttctcatacaccatcagccgatacatctcatccagtatttggtggccaaacttctataacaaatcctgatgtccgagttcacactaaagaatcatgtaccatattgctgatttatg

SEQ ID NO: 9067 - DNA, 2135 bp, Zea Mays
cgccaccgccgcctcccgtttgttctcaagattctctcccgccaccgctccgagtcccaacctccatcgacggggaggcgtcctccatccgggccggttagattcatcgctttgtagctggtcctcgtcgtttccctctgctgtggtgggagaagcgactcgcgcgcgcgatcggccaacaaattaagcacggggcagggccgtacgcaggaggcgagctctagggctctccggggagaaggttgccaggcacgccaggtgaacgccgtactgagtttgcagtccgggacgtagcgcgttctctggtcgggaggtggggaagcggagagcgatggctgcgccgaggaaggggacggcgacgccactgggcgccgtattctcgccagaggagacgaagagggccgtggcgagggtggccgagtccatcgctggccgccgcgccgagctcgggcacctactgggcttcgtcgccgacaacgcggccctcgtctccctcgtcaacaggctcccagtcgaactctcccacgaaatcatggtgcttctgggtgaggggtactatgccgagaggtctgctaagcagacgactgatatattgcacaggagggggcaggaattggaagctcaggtcgaagcaatgaaggcaactatcactgatcttgaagctgaggcgaatttttttgagtccactgccaccgaggcttcagagggtcttgttgaaatcagggaagagtatgatgaggatacagagacaaagacaacaagatcagaggcttcaattgctactggggttatgtttgataatgatagggaacatgctcaaatcatggcaaggttagttgaactcgaaagggaagaaaaggaagctggaaatacttgtgaagatgatgatgatgatggcgacgatgatggagatgctggtacaagtgaggatggtgaggaaaataaggaacccggaaatgctttaagtgatggcaatgaggaccacagttctggttctggtgctttattttttggaaatggtggcaatgataggagtaatgggaatatcaagctgaagagtgcactgaagaagcctggaggagatgaaatgctgaaagacatttctcatacaccatcagccgatacatctcatccagtatttggtggccaaacttctataacaaatcctgatgtccgagttcacactaaagctgtttcttttgaagacgacaaatttgtggttagttcgtcaaagtctcctaccttgctagtgggttcaatacagtctgatcctgggctcaagagttcttcagaccccactccatcatgtgaccgaaagataatatcgagtgggcgaaaggccttcacaggatctatcgtcgagcacgacgatgacgatctttcaaccattcaaccttctgcgggcaattcgttggcaaaacctggtacttctgcgtcttcaaggcccatgtcaaaattcaagatgcagaaaggagggcgtgcaccttcaccagtgagactgtttggcggggatacatgggatgttcagttagattcagtttaattagtggctggtggtgcagtatctctttcagaaacctatatatatatgccgccatgccgtttgtaaatctttcggcaacaaaagaaagaaagaaagtgtcgaaagattatattctctggatttaattggaaaaccatgctgcttaagactgatgacaacacaatctacggagactaaatagtgacgagggaacccatgggaaatggagcaaagaaggaaatcgtgagggtgatttggttggttggtccaacgtccaagcatcgcatcatcggttagccagccatcagtgatcggagttggtaaaacccccccaaagaacatgtcggccaataagtggagttaattacagatctagtggtgctagctagcttgcaatgctgttcctacttgtgctgtaacacagtgtcatgacatggtcagtagcagctgacgagcgccgccgcgcagtcaggtggtcgtcggctggtgtctcttcttctactccttccctaggcgccgccgccgccgccgtggagcaccagattgtctcccacacgtctctcaccagcagaaagggaggaaggacctgccctctgcatgtcagctccacctg

SEQ ID NO: 9068 - DNA, 3735 bp, Zea Mays
ggttaaaggaactgataactcgaaggggacgattgagaaatttgtccgctcaccatctcggtcggcgacagcgggaaaccactgggcctcctgcacctgcagccagcagccccgccgcgacacgctcccccgagatctccagcgcccgacttggcagatccagcaagctgcacccaccgcaggcgtgatctcctctcttggatcccgaagatggcggcgggaacggaggcctttgaggcatacttccgccgcgcggatttggaccaggacggccgcatcagcggccaggaagctgtcgccttcttccagggcgccaacctgccgcagccagtcctcgcccaggtatggatgcacgccgatcagaacaagactggtttcctcggccgcccggaattcttcaacgcgctgcgcctggtcaccgtagcgcagagcgggcgtcagctcacgcccgacatagtgcagtcggcactgtatggtcccgccgcggctcgaattccagctcccaagatagccgcgggggcggctcgttcacagatgggtgctgcgggggcgcctaggcctcaggggagcgctgcgatgacgcccgggcaggttggagcagctcagatgaatccggctggcacaccaaggccccagggaagcggtatgatgccgacatctacccaagttagtatgctgcaggtgaaccctggtgctgctccaaggccccaagggatcagttctatgatgccagctgcgagtcagggtggtgctctacaagcaactcaatttgctgcaccaagggcaatgcagccacagcctcctaacctgggaattactcaacagcaaccttctagtaccggtttcatgcggccaccacaggttggaactccagcagcttcatttcaagctcaagcgcctggaatcaatcaaggtttggtccatggaggcagcatggaaggatctatcagttggcaaggcggtaatgctgcctcagttggaggcatcccacgagctataccaggagctgctccttctcagacaacacgtggatttggtccaggtttacctagcacaatgggcatggtgcctggacaacaggtacaagcaatgtcttcatcgccattgcctccacagagcaacagtgctgttttgcctcagaattcaaaagctttggtactgtctggaaatggccctgccagcagctctggatcaagcacagacatcttctctgcacttacacagccaaagccaagcttatctgcacctcagacaagctcgattccgagttcatccagttttatggccacgcctactggctcccagaacctgactaatctcactcagtttggttctttgcaaggtagcagccaacctcaacagactcagcctatcgtaaagtccattcctgctccagctacacctgttgtctctgctgggatttctaattcagcttctcaatggcccaaaattactcaaccggacatccagaagtacatgaaagtctttggggatgttgatagggacagagatggcaaaataactggtgcagaagctcgcactctgttcctcagttggaggcttccaagggaggtcctgaagcaagtgtgggatttgtctgaccaagacaatgatggcatgctttctttgagagagttttgcatcgctctttatttaatggagaggcaccgagctggaattcctcttcccccagcccttcctgactctcttaggcatgatgagacactgttacgagctacaggcttgccttcaacagcatacaatagtccatcatggcaacacaatcaaggaggataccacaaagaggccctggagcacctggggtgcctgctggtggtgtgcggccacccttgccatcacatttgcattcacaaactgatggagctagcagacaagggcaaccaagatctcacatgcctgggatggataatcatgtggtaattcaaggaaacaaagatgacaaaagtgcgctgaaccaggctgcacaggaggtggtggatgctcctaagaaggttgaggtggagaagcaggtcctggattccagagagaaattggagtattaccgcacaaagatgcaagatcttgtcctgtataaaagtcggtgcgagaataggctgaatgagattacagaaagggcgtcctctgataaacgcgaggtggaatcattggctaagaaatatgaagagaagtacaagcaagtagctgagttagcttccaaactagcagttgaagaagctgcatatcgtgatgttcaggagagaaaagttgagctgcatgatgcactgattaaaatggtacaaggtggaagtgttgatggtttacttcaggttcgagctgatcgaatccaatatcaattagaagagatggaaaaagctcttagtgaacggtgcaaacactttgaacttaaattcaaaccatctgcatcagttgggaacctgggccacaagagggactcattgagtgggatgaagactgggataaatttgaagatgaagggtttagtattgttaaggataatggtacaatacaggaaaacccagtttctgctgaaaatggaaaagtgccatctctttgggatgatggtgatatgtctcctgttgcatcctctaatggtcatatcaaggaagaaaggcgttacagtggaggtgatcaagtggctgagagtgaaatagcatatgattttggtgatgaatctgtgaggagtcctggcagtgctggaagaagtgcctcagggagtccatttaaatcttccggctttggcatgcatgactcatctcccagcaaaagagaaagttacagtgaccatggtggttctgaatccgtttttggtgacaagtttgctgatgaaacttcctggaactttgatgatcaagatactgactctgtttggggttctactgtactgaacactgaggccgaccaacgcggtggcacgcataactctttctttgggtcggaggcaggctcaccaagtggcgctagtgtatttggaaagaagaggaattcattcttcgacgattctgttccaagttctcctgcatacacatctgggttctctccaaaatttggcgaaagccgtgacgatagctcctcttataacttcgggaggtttgattccttcagatcccaagacactggatccttccctcaggaaagccgtttctccaggttcgactccattagcagctccaagggcgagaatgtatcaggatttgacacagggaatagctcacgaaattttggccggtttgactcttttgatgacgccgacccattcggttcaagtggaccttttaaagcatcgggaagccggtctccacccaagttctgatatgctctctgctctgattagggttttgtgtcttgcgtcttgatttgtcaatacaaggtttagattctttgagcgaactctggcgtaacatggatttttttacctgacatttcttccattttccttatgtgcaattttcgagtccatctcacgcacaaagtggacaggtttgggtttatatctttgtttttgtaaacattttttctgtatcttgtaaattacgccaagtctgtctttgtttatatagtttacatgtatgaaacaacttctcgccatataacctattatttccttcactatattaacgttgatatggtatagcagcaggaaatgctgtacttacgttgctatggtcaaagatattagggcagttgccccagcaaaactccacaagctagcctcct

SEQ ID NO: 9069 - DNA, 3938 bp, Zea Mays
atggctgccgatcgtgcatggatgtacaatggttggagtaggaatggacgtcattctgatgattgggtagccaagaccaaagaatttgtggaccacgtattcgccttgtccttaaccggcactgtcagatgcccttgtaggcatcacgaaaacagtatatttcttaataaggaaagagttagcctagatctttgtcagtttggatttatgcccggatatgaggtgtgggaacatcatggtgaggtagtacccaaccgtaatgtagaagaggaggagaacaatgattgggctggcgatgatgcgatgcatgagatgctagattcgctacgtccagaattcaacctaagctccgaggatcctgccacaccagaggaagaggaggacgacgaggaggaggtgcaacaccatgaggaggaggacgagcaggcccatgaggaggatgacgaggaggaggtgcaacaccatgaggaggaggacgagcaggcccatgagggcatagatgctgaggcggatgacgataccactgaggctcctgtcgttcgacgaaggggcactcggaagggccactttgtcctacctccgtcagcgcctgcacaatctgaagctcgagtactgatcatcccggttggtgatagccaatgggaagacacgtcatttgacggtcgaggtcaccatagacaggttaatcaagtcttaggaaagagacgctatcgtgtggaacctgaggctcaagagcatgcagaccgagtattagagaaaaatgcgaagaaggtgtgcagggatgcattttccaatgctcgtctacaggttgggaacgcgtacatgaaacgccgaggtcattctatcaacaactttcgacaatattcagatgtctacttgactgtagacgagtacatggaggtaactcttccatggatggaacaccggccgcaggcttacaaggctttgtgtgagatatgggcttcgcccgagtggattgagaagtcaaacagaaatcgacataggcagcgccatcagcaggacgaggacgatgatgaggtcgtagtcaaccatacctatggggctgatggacacattcggttggctaagcgaatggaggctcaaactggagttgtcccgagcccaatcgatgtttataggagagggcatcgagcgaaaaacaatgaaatctccgatgagctgtgtagtcaagcggtcgttgagcgtatggaaacatacgggcaggagatggttaagaagtatggagaagactacgattggcgaggagcgcctaccatcgacgctgaagttgtgcattcacttggaggcaaggcgcatggacgatattctatgtttaccggtgttatcgattcgacggagttgcgttctcgtggcggctcttcgtcgcaggcgggctgtggtagtagcagacatagtcgtcgctctgtatctagcatggaggaagctatgagggagcagcaagaaaagtttcgtgaagagctgcggcaacaacaaatggcatttctccaacagcaatcagagtacatggttgcttacaacgcacaggcgcaacaagcaatgaactcttggtttccacagcaggcacagcagcaaccatttgttttccctcaatttcagctgtcgatgcctcagtggggattacatgctccgacacctccacctccacatcagggatccagggtcataggccacaacacgccatcactggtcatatcagcaccaggaggagcttatgcaggggagggagcttatgcaggagaggatccaaacccgtcacacggcttcgtcaaccagtttttggcttctgaagccagcaaatgtctaggaggagcgtcaggtctgaattcaacccagatggtaaccctcaaggttgatgcctcgccaaagcttgctcgaaagatccccgatacattccttggggtgttctttgaggagatgggccacggaggagctggtgggatatgggcagaactggtcagcaacagaggtttcgaagcaggaggccccaatactccgtcgaacattgacccctggctcatcgttggggacgactcctccgtctatgtggagactgatcgttcctcatgtttcagtcgaaacattgttgctctaaggatggaggtcctctgcaatgactgcccggctggcggtgttggcatttacaaccctggattctggggcatgaacatagaagatggaaagacatatcatctagttatgtatgttaagtcgccaaaaactacatgcttgacagtttcgctgacaagctctgatgggttgcagaatctggcttcagttaccataatagttgcaggggattccaagtggataaaggtggagaagaagttggttgctaaaggaactaacagaacctcgaggcttcaaataacatccaagaagaaaggaactgtttggttggaccaagtgtcactcatgcctgcagatacatacaagggacatggttttcgtaaaggacttgtgtccatgctgatggatctaaaaccacgattcctaagatttcctgggggttgctttgtggaaggtggttggctaagaaacgcattcagatggagacaatccattggtccatgggaagagaggccaggacacttcggagattgttggcagtactggaccgacgatggtcttggatattatgaatttcttctgctttctgaggacataggtgctgccccaatctgggtattcaacaatggaatcagctacaacgatgaagttaatactgctactattgccccctttgtgaaggatatattggacagcctagaatttgctagaggcagtgcgaattcgacatggggctctgttagagccaaaatggggcatccctaaaccatttccagtcaagtatgttgcaattggaaatgaagattgtgagagaaagttttatagaggtaattacctcaagttttacaacgctataagagaggtctatccagacattcaactgatttcgaactgtgatggctcgtccggaccacttgatcatcctgctgacatatacgatttccacgtctatgccgatgctaagactctgttttccatgaagagcacgtttgacaagtcaccccgcagtggacccaaggcttttgtcagcgagtatgcagtttggaaaactgacgccggtagaggaactctcctggctgcattggcagaagcggctttccttactggactggagaagaacagtgatgctgttgagatggcttgccatgctccactattcgtaaacgatgatatcgagaaaaagtggaacccagacgtcatcgtcttcaacacctggcagcattacgggactcctagctactggatgcagaagcttttccgcgagtccagtggcgccatggttcatccgacgacgacgatcagttctggcagctctgctgattctctagcagcgtctgcaattacctggaaggattcagagaataatgactcgttcctaagagtaaagattgtaaactttggatctgatgctattagagttgcaatctccacagctggacttcaagctaccatcgatgtgctgcgatcgaccgctactgttctcacatcaaccgctgtgatggacgaaaactctttcagtaacccaaacaaggtcatgccggtcaagagccagctattcgacgcaggagcgcagatgcaagtcacgctgtctcctcactcattaacatctttcgatcttgctctggctacgtcgaaacttgtcacgttgtctgatgcctgaactgtgatgcacatttgtctgtatttgaggagatgtcagtgtagtgtaaagagttgtgtgctgatgatgaactgaacaaaaatgacactgcgatccacgtttttatctgtttggaggtgtccctttcaaagaaaaatttgtggagatgccactgcaattcctatttttcattctttgaagatgccactag

SEQ ID NO: 9070 - DNA, 7040 bp, Zea Mays
atggaggccgccgcgcccgacggggccggcaaggcatccccggcccccgaggagcccgactggccgcccgagctccgcctcctcgcgccgccgccagctgcggggacggacgatccgcagttcctcagctcgatcatcggggacgcggccgcccctcccccgccgatgccgccgctcgcgcagaagcggaaacgggggaggccgcccaagaggaaagacggcgcgggcgcggtggtaccggcccggcccgccaggcggagggaggacgaggaggaggtcgtctgcttcatctgtttcgacgggggcaacctcgtcgtctgcgatcggaggggttgccccaaggtctaccatccggcgtgcatcaagcgtgacgaggcattcttccagtcgcggagcaagtggaactgcggctggcacatatgcagcagctgtgaaaaggcagtgcactacatgtgctacacttgtacatactccctctgcaaagtgtgcatcaagcagggtaaattcttcagtgtcagggggacaaagggcttctgcgacacatgttatgggactatacttctcatagaatccaaagatgaaagtgcaataaaggttgattttgatgacatactcagctgggagtacctgttcaagctatattggttagatctgaaagggaagctttcattaacattggaagaacttactattgccaagactagatggaatgttcctagcacttctgctaggaaagaaaaagatgagtcgtctgatgacctgtatgacgctaataatgatgatgatgctggtactgactgctcctcaggaaaacgaaggcgaactaattcaaggaaaaagggtcaaaaatgccggaaggtaaataaagattgtagtgttcctgcaaaaaaggtcgagcttccaattacaaatactgagagcgttcccacagaagtgacaaatgaacgagtgccattgccagtagacacaaaagtaccaaatggatgggtacccttgccagtagacacaaaagtaccaaatgaatcagtgcccttgccagcaaacacaaaatgggcatcaccagagctactggagtttgtaggacatatgagagatggcgatcaatctttcatttctcagtttgatgttcagactcttctgcttgattatatcaagaagaataaccttcgcgatcctcagaggaaaagccaaattatttgtgacttgagacttcatcgcttgttcaggaaagcacgggttgctcactttgagatgttaaagcttttggaaatgcattttcttatgaatgagacttcaacagtaactgatagtagacaagtgactatcgatctcaattcagcttatgtagataccaatggatacaatgacatggctgcaaaattttctcctgataagaggagaaagatccatagaaagatggaaagagatacccaagttaatcttgaggactatgcagcaattgacatgcataatataaatttgatttttatgaggcgcagcctgatggaggatttagttgatgatgccaaattctcagacaaaattcatggtggttttgtgaggattaaaatttctgatgtgtatcagaaacaagacatataccgtctagtaaaagttactggaacgcacaaggttccagaaaagtatagcattggaaagaagatgacaaattttgcactcgagatattgaatttaaacaaaaaggagattattacaatggatacaatatctaatcatgattttacagaggaagagtgcaaacgtttaaggcagagcatgaagtgtggcgtgattagcagactaaaagtgggggatatcctagagaaagcaaagatattgcaatctgtaaaagtgaatgataggcttgggcatcttcgtgaccgtgcaagtgaaactggacgcagaaaggaatatcctattagaccatactatgatgtgcttctcaacgattctgaggaaagaacccgcaggattaatgaagttctggaagtgcatgttgactcacatatggatcctaattatgagtctgctgaagaaacagatgagaaaagaactgttggaaagtcggtagatcggacaagaccagatacaaccatatcacgacgaatatcaagatatcttagcactatgcagaaccatcctcaaaaagtttctgattgtagccaccatccaaaaaacttgtcaacagaaagtacaatatgtggatcaggagcaagaagtttggagaacagcacagcaaacagaactatgtatgaagctggatcattttcatcttctggagtaacaatgtcaaatgacacggagccggagaaagtctggcactacaaggatccttctgggaatgttcagggtccatttactcttttgcaactatcaaagtggacaagttacttcccacgtgatctgagagtatggcttacatttgagagtgaggagagatctttgctgttgactgaagtgctttcaaaacagcagaaagatttcactcaggctgcatcacatacaagcagcaaggcaacgctggttggcactggacatacaaggaacaaccctagtgtggatcagaccaatgctttctcccctgctggtcatagtgtggttagttcttcaggaataactgttcagtataataagtattctgttccagaaagggaaagtgtgtactctccagatgatagcttgtcgctgtcaactagttcggttccgccgaaggatgcttgtactgtgaatagccaaacacactgccagaataagcattctgttttcattcaatctcctggaagtgcatatgggcacacagacttgaaccatgatggaatacagggaggatgctctggtgaatcaaaccaccatcacagcagcggagccctatggagtcctaccgtggtacaggtgagttgtggacatggtaatgtggaatctcatcagagccagcatgtttcctggtcacaaagtcaacatgaatctaaaaatagttcacaacgacctgttaaagatctgaattcaaggcgggatctatcgaaaaacctacctactcaacgtatagggaaagatgtctccagtcctttgtttgcttgtgcttggagtccggccgagtcgaggacagcttcaagtcaacatgacggctcttgcttaagttcaacaactaatccaaactttctcgatgaacttcattattctattgcttccgcaaagcctaagagctgcgctccagcaacccctattgaagacagaggttctagttcaccatcaggcatgctgagtcatgcagaaagagttccaatctgcagtccacaatcaacccctttggcatctgctttcgatatgtgcaagatggaggagatcatgaatcagcaaagaacactggagccggatacatcaaatgcttcaattaaccagtctcccgaatcaaagattttccctgtatcctctcctgataaccatgatattgaccgtgagtttcctagtccagttccaagatctgagaataaggacattgcggttgacagctcaggattaacaccagcatcacctgaaaatattactacgaatttgcctggttcagatacatgcaagatggaggtcatgagtcagcaacaagtaactgaggctgtcgtatcgaattcttcagataatcattcccctcaatctaaggtttcccctgtatcatctcctaataacgaagatatgaaacatcagtaccccagttcaacccgaaggtctgagaataagattcctgctgtggacaatttactttcaacatcagctgctcgtgaaaatctaacgacaacttctgcccatgattctgatacatgcaaaatggtggagttagtgaatcagccaaaaacacctgaagtggatgcatcaaatgctccactttgtcaatctcctcattctcacacttcccaggtaccttctgacaatcaagatattgaacgtgaatgtccaggtccaactccaagatctgacagtaaagaacctcttgtaaacaactcagcgacaacttctgcatcagcctctgatacaatcaaaatggaggagtttgtgaatcagcaaaaaacagttgaagcagatgcatcaaatgctccacttaatcaatctcattctcacatttttccagtaccttctgacagtcaagatattgagcatgaatgtccaggtccaactccaagatctgacactaaggaacctcttctgaacaactcagtgttaacattagcagcgtctgaaattctaacaacaacctctgcggcctctgatacatgcaaaatggaggactcagtgaatcagcaaaaaacgcttgaagcagatgcattgaatgctccacttaatcatcatcctcattctcacgttcttcctgtatcatttgataatcaagacattcagcatgaatatcctagcccaactccaaaatctgacagtaaggaacctcttgtggacaactcagtattaacatcagtagggcctgaaatgctagcgacaacttctgtctctgatacatgcaaaacggaggagtttgtgaatcagcaaaaagcagttgaagcagatgcatcaaacgcttcacttaatcagcctcacatttccgctgtaccttccgataaacaagatattgaatgtgaatgttctagcccaactccaaggtctgactgtaaggaacctcttatggacaactcagtattaacatcagcggtgcctgaaattctagcaacatcttctgcttctgataaatgcaaaatggaggagtttgtgaatcagcaaagaccaattgaagtggatgcatcaaatgcttcacttaatcagtattctcgttgtcacattttcaatgtatcttctgataatcaatatgttgagcgtgaatgttctagcacaactccaagatctgactgtgaggaacctcttatggacaactcaatattaacatcagcggtgcctgaaatactagcaacatcttctgcttctgcttctgataaatgcaaaatggaggagtttgtgaatcagcaaagaccaattgaagcggatgcatcaaatgcttcgcttaatcagcctcatcgttgtcacattttcactgtatcttctgataatcaagatattgagtgtgaatgtcctagcccaacttcaagatctgacagtaaggaatcccttgtggacaacttagtgttaacatcagcagtgcctgaaaatctaccgacaagttttgcagttgcctctgattcatgcaagatggagatcttgaataagaaaagaacacttgaagcagatgcatcaaatgcttcacttgatcagccttctcactctagcgttttcacttcatcttctaatgataatcaaggaaatgcgtgtgaacgtcctagtccaaatccaagacctgagggtgagcagcctctcatggataactcagggttaacatcaccagtgcctcaaaatctaacttctgcttccgacatatgcaagatgggggagatcttgaatgagaacaggacacttgaagcaaacccatcaaatggttcaattactcaatctcatcaatccaaggttttccttgtaccatctattgatatcctagagcgtgaatgttccagtgaaacgcctaggcctcagtttaaggaacctgttgtggacagctctgggttaacatcagcagcacctgaaagtttaacagctaagcaacatgtccactcaccagatgcctttataccaccaaagcatggtgctccaactggggaattaggtgatgcaaaatcagattttaaaggtgaagaaattattcaaaaagaacaatattgtgaaagagaacctattgttgctacaagagagaatttgctaattgatctttcctgtggtgccgagtcgatagatgtgtcagatgtattggaatctttaatggaagaaaggagtgtaacttcgtacgtgccagtatcaatagaggacttcctagccgcttcagcagtggaagaaccacaatactctagccctatagcgttatctccttggggtgaacctagttactaccaaggtgatgctggtgattctgcgctatggggtattcaagattcgatcaatgatatgtggtcattgctttcaccaagacctatgctccaagcttcatctggtattggaactgaggggaaggaaacttttgatatcaacgaggtggctgtgacccatgttaatagtgattttttccaaagaggatcgatgcttggggaggaaaatatgaatcaggcaaacttgagtgttgctgcagataggatgctgctgcctgagcaggtcccatcaataccaaatggtatgtcaacatcatcagtagacgagggcaccagagttataggttctcaagcatcaatcaatcagagcttagactggggtactacatggaggactagtcagaatctcagcgtgtatagcaatgaaatagcagggccctcgagtaaaagctattgggaagaatcaaggaagcaggaagccaccaattcgggcgtttctatttcaggggaagccattagaaacaagcgcttgaaccctcctgataatgctattcggggcagccatcatcaccgtggcaggtactcccaaatcagtgaatcttggctactcagttcaaatcactctaggagtagttctgctaaatttggcagcggtgggtcatcaagatcaacttcaaagggtcaaactaggggctaatgtaaattctcgggtgcaggagaaaggatgcatcttgtagctacctgcatccttgatctctgcagcaggaataggttttaaaattctctgttatatctttgcagtttgtataggctaattaaaattaagtcaacagagcgtaaatgaccatctctgctccactcaactcaactgtagcaaggagcatatgtttagcatagaggtttgactgaatggccctgcccaagaagcagattcagctcttgggcatggtctgtatcatcctgacattctgttggatggaactgcaattgtgcaaccggcatctcttgacaccgaaacgcccctgatgtgttggaatatctgatcgattggtttag

SEQ ID NO: 9071 - DNA, 7233 bp, Zea Mays
cagcaggctctcgtcacgggtcgggtagtcatcgcacgcgtctccgcgagccgacggcccacagcacccgggattaccaccgccgcggcggacgacgacgaagacctcgccctcgctcccctcccctcccctccccccccctcgtgctcgaccacgacgaccgctccctgcccgctagccctaaacccctgccgatccatggaggccgccgcgcccgacggggccggcaaggcatccccggcccccgaggagcccgactggccgcccgagctccgcctcctcgcgccgccgccagctgcggggacggacgatccgcagttcctcagctcgatcatcggggacgcggccgcccctcccccgccgatgccgccgctcgcgcagaagcggaaacgggggaggccgcccaagaggaaagacggcgcgggcgcggtggtaccggcccggcccgccaggcggagggaggacgaggaggaggtcgtctgcttcatctgtttcgacgggggcaacctcgtcgtctgcgatcggaggggttgccccaaggtctaccatccggcgtgcatcaagcgtgacgaggcattcttccagtcgcggagcaagtggaactgcggctggcacatatgcagcagctgtgaaaaggcagtgcactacatgtgctacacttgtacatactccctctgcaaagtgtgcatcaagcagggtaaattcttcagtgtcagggggacaaagggcttctgcgacacatgttatgggactatacttctcatagaatccaaagatgaaagtgcaataaaggttgattttgatgacatactcagctgggagtacctgttcaagctatattggttagatctgaaagggaagctttcattaacattggaagaacttactattgccaagactagatggaatgttcctagcacttctgctaggaaagaaaaagatgagtcgtctgatgacctgtatgacgctaataatgatgatgatgctggtactgactgctcctcaggaaaacgaaggcgaactaattcaaggaaaaagggtcaaaaatgccggaaggtaaataaagattgtagtgttcctgcaaaaaaggtcgagcttccaattacaaatactgagagcgttcccacagaagtgacaaatgaacgagtgccattgccagtagacacaaaagtaccaaatggatgggtacccttgccagtagacacaaaagtaccaaatgaatcagtgcccttgccagcaaacacaaaatgggcatcaccagagctactggagtttgtaggacatatgagagatggcgatcaatctttcatttctcagtttgatgttcagactcttctgcttgattatatcaagaagaataaccttcgcgatcctcagaggaaaagccaaattatttgtgacttgagacttcatcgcttgttcaggaaagcacgggttgctcactttgagatgttaaagcttttggaaatgcattttcttatgaatgagacttcaacagtaactgatagtagacaagtgactatcgatctcaattcagcttatgtagataccaatggatacaatgacatggctgcaaaattttctcctgataagaggagaaagatccatagaaagatggaaagagatacccaagttaatcttgaggactatgcagcaattgacatgcataatataaatttgatttttatgaggcgcagcctgatggaggatttagttgatgatgccaaattctcagacaaaattcatggtggttttgtgaggattaaaatttctgatgtgtatcagaaacaagacatataccgtctagtaaaagttactggaacgcacaaggttccagaaaagtatagcattggaaagaagatgacaaattttgcactcgagatattgaatttaaacaaaaaggagattattacaatggatacaatatctaatcatgattttacagaggaagagtgcaaacgtttaaggcagagcatgaagtgtggcgtgattagcagactaaaagtgggggatatcctagagaaagcaaagatattgcaatctgtaaaagtgaatgattggtttgaaaatgaaaagcagaggcttgggcatcttcgtgaccgtgcaagtgaaactggacgcagaaaggaatatcctattagaccatactatgatgtgcttctcaacgattctgaggaaagaacccgcaggattaatgaagttctggaagtgcatgttgactcacatatggatcctaattatgagtctgctgaagaaacagatgagaaaagaactgttggaaagtcggtagatcggacaagaccagatacaaccatatcacgacgaatatcaagatatcttagcactatgcagaaccatcctcaaaaagtttctgattgtagccaccatccaaaaaacttgtcaacagaaagtacaatatgtggatcaggagcaagaagtttggagaacagcacagcaaacagaactatgtatgaagctggatcattttcatcttctggagtaacaatgtcaaatgacacggagccggagaaagtctggcactacaaggatccttctgggaatgttcagggtccatttactcttttgcaactatcaaagtggacaagttacttcccacgtgatctgagagtatggcttacatttgagagtgaggagagatctttgctgttgactgaagtgctttcaaaacagcagaaagatttcactcaggctgcatcacatacaagcagcaaggcaacgctggttggcactggacatacaaggaacaaccctagtgtggatcagaccaatgctttctcccctgctggtcatagtgtggttagttcttcaggaataactgttcagtataataagtattctgttccagaaagggaaagtgtgtactctccagatgatagcttgtcgctgtcaactagttcggttccgccgaaggatgcttgtactgtgaatagccaaacacactgccagaataagcattctgttttcattcaatctcctggaagtgcatatgggcacacagacttgaaccatgatggaatacagggaggatgctctggtgaatcaaaccaccatcacagcagcggagccctatggagtcctaccgtggtacaggtgagttgtggacatggtaatgtggaatctcatcagagccagcatgtttcctggtcacaaagtcaacatgaatctaaaaatagttcacaacgacctgttaaagatctgaattcaaggcgggatctatcgaaaaacctacctactcaacgtatagggaaagatgtctccagtcctttgtttgcttgtgcttggagtccggccgagtcgaggacagcttcaagtcaacatgacggctcttgcttaagttcaacaactaatccaaactttctcgatgaacttcattattctattgcttccgcaaagcctaagagctgcgctccagcaacccctattgaagacagaggttctagttcaccatcaggcatgctgagtcatgcagaaagagttccaatctgcagtccacaatcaacccctttggcatctgctttcgatatgtgcaagatggaggagatcatgaatcagcaaagaacactggagccggatacatcaaatgcttcaattaaccagtctcccgaatcaaagattttccctgtatcctctcctgataaccatgatattgaccgtgagtttcctagtccagttccaagatctgagaataaggacattgcggttgacagctcaggattaacaccagcatcacctgaaaatattactacgaatttgcctggttcagatacatgcaagatggaggtcatgagtcagcaacaagtaactgaggctgtcgtatcgaattcttcagataatcattcccctcaatctaaggtttcccctgtatcatctcctaataacgaagatatgaaacatcagtaccccagttcaacccgaaggtctgagaataagattcctgctgtggacaatttactttcaacatcagctgctcgtgaaaatctaacgacaacttctgcccatgattctgatacatgcaaaatggtggagttagtgaatcagccaaaaacacctgaagtggatgcatcaaatgctccactttgtcaatctcctcattctcacacttcccaggtaccttctgacaatcaagatattgaacgtgaatgtccaggtccaactccaagatctgacagtaaagaacctcttgtaaacaactcagcgacaacttctgcatcagcctctgatacaatcaaaatggaggagtttgtgaatcagcaaaaaacagttgaagcagatgcatcaaatgctccacttaatcaatctcattctcacatttttccagtaccttctgacagtcaagatattgagcatgaatgtccaggtccaactccaagatctgacactaaggaacctcttctgaacaactcagtgttaacattagcagcgtctgaaattctaacaacaacctctgcggcctctgatacatgcaaaatggaggactcagtgaatcagcaaaaaacgcttgaagcagatgcattgaatgctccacttaatcatcatcctcattctcacgttcttcctgtatcatttgataatcaagacattcagcatgaatatcctagcccaactccaaaatctgacagtaaggaacctcttgtggacaactcagtattaacatcagtagggcctgaaatgctagcgacaacttctgtctctgatacatgcaaaacggaggagtttgtgaatcagcaaaaagcagttgaagcagatgcatcaaacgcttcacttaatcagcctcacatttccgctgtaccttccgataaacaagatattgaatgtgaatgttctagcccaactccaaggtctgactgtaaggaacctcttatggacaactcagtattaacatcagcggtgcctgaaattctagcaacatcttctgcttctgataaatgcaaaatggaggagtttgtgaatcagcaaagaccaattgaagtggatgcatcaaatgcttcacttaatcagtattctcgttgtcacattttcaatgtatcttctgataatcaatatgttgagcgtgaatgttctagcacaactccaagatctgactgtgaggaacctcttatggacaactcaatattaacatcagcggtgcctgaaatactagcaacatcttctgcttctgcttctgataaatgcaaaatggaggagtttgtgaatcagcaaagaccaattgaagcggatgcatcaaatgcttcgcttaatcagcctcatcgttgtcacattttcactgtatcttctgataatcaagatattgagtgtgaatgtcctagcccaacttcaagatctgacagtaaggaatcccttgtggacaacttagtgttaacatcagcagtgcctgaaaatctaccgacaagttttgcagttgcctctgattcatgcaagatggagatcttgaataagaaaagaacacttgaagcagatgcatcaaatgcttcacttgatcagccttctcactctagcgttttcacttcatcttctaatgataatcaaggaaatgcgtgtgaacgtcctagtccaaatccaagacctgagggtgagcagcctctcatggataactcagggttaacatcaccagtgcctcaaaatctaacttctgcttccgacatatgcaagatgggggagatcttgaatgagaacaggacacttgaagcaaacccatcaaatggttcaattactcaatctcatcaatccaaggttttccttgtaccatctattgatatcctagagcgtgaatgttccagtgaaacgcctaggcctcagtttaaggaacctgttgtggacagctctgggttaacatcagcagcacctgaaagtttaacagctaagcaacatgtccactcaccagatgcctttataccaccaaagcatggtgctccaactggggaattaggtgatgcaaaatcagattttaaaggtgaagaaattattcaaaaagaacaatattgtgaaagagaacctattgttgctacaagagagaatttgctaattgatctttcctgtggtgccgagtcgatagatgtgtcagatgtattggaatctttaatggaagaaaggagtgtaacttcgtacgtgccagtatcaatagaggacttcctagccgcttcagcagtggaagaaccacaatactctagccctatagcgttatctccttggggtgaacctagttactaccaaggtgatgctggtgattctgcgctatggggtattcaagattcgatcaatgatatgtggtcattgctttcaccaagacctatgctccaagcttcatctggtattggaactgaggggaaggaaacttttgatatcaacgaggtggctgtgacccatgttaatagtgattttttccaaagaggatcgatgcttggggaggaaaatatgaatcaggcaaacttgagtgttgctgcagataggatgctgctgcctgagcagacgagggcaccagagttataggttctcaagcatcaatcaatcagagcttagactggggtactacatggaggactagtcagaatctcagcgtgtatagcaatgaaatagcagggccctcgagtaaaagctattgggaagaatcaaggaagcaggaagccaccaattcgggcgtttctatttcaggggaagccattagaaacaagcgcttgaaccctcctgataatgctattcggggcagccatcatcaccgtggcaggtactcccaaatcagtgaatcttggctactcagttcaaatcactctaggagtagttctgctaaatttggcagcggtgggtcatcaagatcaacttcaaagggtcaaactaggggctaatgtaaattctcgggtgcaggagaaaggatgcatcttgtagctacctgcatccttgatctctgcagcaggaataggttttaaaattctctgttatatctttgcagtttgtataggctaattaaaattaagtcaacagagcgtaaatgaccatctctgctccactcaactcaactgtagcaaggagcatatgtttagcatagaggtttgactgaatggccctgcccaagaagcagattcagctcttgggcatggtctgtatcatcctgacattctgttggatggaactgcaattgtgcaaccggcatctcttgacaccgaaacgcccctgatgtgttggaatatctgatcgattggtttagcttttgaaaaaaaa
